United States Patent Application Publication US 2011/0183924 A1 - sequence listing, part 122

SEQ ID NO: 347521 - DNA, 1011 bp, Homo sapiens
tcttgttaaaccaagagcaatgtttcgtttgctcaatatcacatttacaaaggaaactacaaaaaaaaaaggcatcacaaaatcatcttgaacgttcacctcttcccaccaatacatcaactcttaggctttagacagggcctgggaatacttcagcggtcttaaaataggaaaatagacactatggctacaaaaaataaaaaataaatgaggtagataaattaaagctttcacacccaggacgtgcctgttctaacttcgtagccttcatgaaatattcagcaaggaaacaaaacaaaacaaaaaatcgtcataattacttggcataagtcgcaccaaggaaattcaacaaaagcaatcagtatgtgaacctgtgatgggaaacacgcccttccacgagtttcttctcgagcatgaaaacccagttcttcaatagagtaggcactggcaaactaagtcacctgagattccccgctcaggtgcccacctcttctgggatttgggaagaggaaggcatccaagaggtgtggggaaaacattggcactctcggggctccaactgaactgtatttaaataagcagcaacacacacattgactccctaaggactaacgtaagtccatttgagggcctcctacttaaggttctaaggttgaagcagttttataattctacaaccctagttttttgttgttccttttttaagtacattcaaaaaaaaacaataagatggggacagggttggggcatataaaacaggtccctaaagagatgacagaccttgtccttttacccgtgtccagttaccagtaagtatacagtacccatctcccctcaatgaggctgtgtagttgtcttttccactgttgttcagtaagttccaacgattctaccttgaaataggtaacagtctttggaaaaagtcactctaggttgtacaaaggttctatgtatacgtctgttacaagtaacaaagctactttgcaagacccgcttctttccaaaattaga

SEQ ID NO: 347522 - DNA, 2892 bp, Homo sapiens
agcggatgcggagcggctaggtggtgcacgggaaacgcgggcgtaggtgaccggcggctttctcagttttggtggagacgggcgcatgtgggcgctttgctcgctgctgcggtccgcggccggacgcaccatgtcgcagggacgcaccatatcgcaggcacccgcccgccgcgagcggccgcgcaaggacccgctgcggcacctgcgcacgcgagagaagcgcggaccgtcggggtgctccggcggcccaaacaccgtgtacctgcaggtggtggcagcgggtagccgggactcgggcgccgcgctctacgtcttctccgagttcaaccggtatctcttcaactgtggagaaggcgttcagagactcatgcaggagcacaagttaaaggttgctcgcctggacaacatattcctgacacgaatgcactggtctaatgttgggggcttaagtggaatgattcttactttaaaggaaaccgggcttccaaagtgtgtactttctggacctccacaactggaaaaatacctcgaagcaatcaaaatattttctggtccattgaaaggaatagaactggctgtgcggccccactctgccccagaatacgaggatgaaaccatgacagtttaccagatccccatacacagtgaacagaggaggggaaagcaccaaccatggcagagtccagaaaggcctctcagcaggctcagtccagagcgatcttcagactccgagtcgaatgaaaatgagccacaccttccacatggtgttagccagagaagaggggtcagggactcttccctggtcgtagctttcatctgtaagcttcacttaaagagaggaaacttcttggtgctcaaagcaaaggagatgggcctcccagttgggacagctgccatcgctcccatcattgctgctgtcaaggacgggaaaagcatcactcatgaaggaagagagattttggctgaagagctgtgtactcctccagatcctggtgctgcttttgtggtggtagaatgtccagatgaaagcttcattcaacccatctgtgagaatgccacctttcagaggtttgggcctgacacccagcacttggtcctgaatgagaactgtgcctcagttcacaaccttcgcagccacaagattcaaacccagctcaacctcatccacccggacatcttccccctgctcaccagtttccgctgtaagaaggagggccccaccctcagtgtgcccatggttcagggtgaatgcctcctcaagtaccagctccgtcccaggagggagtggcagagggatgccattattacttgcaatcctgaggaattcatagttgaggcgctgcagcttcccaacttccagcagagcgtgcaggagtacaggaggagtgcgcaggacggcccagccccagcagagaaaagaagtcagtacccagaaatcatcttccttggaacagggtctgccatcccgatgaagattcgaaatgtcagtgccacacttgtcaacataagccccgacacgtctctgctactggactgtggtgagggcacatttgggcagctgtgccgtcattacggagaccaggtggacagggtcctgggcaccctggctgctgtgtttgtgtcccacctgcacgcagatcaccacacgggcttgccaagtatcttgctgcagagagaacgcgccttggcatctttgggaaagccgcttcaccctttgctggtggttgcccccaaccagctcaaagcctggctccagcagtaccacaaccagtgccaggaggtcctgcaccacatcagtatgattcctgccaaatgccttcaggaaggggctgagatctccagtcctgcagtggaaagattgatcagttcgctgttgcgaacatgtgatttggaagagtttcagacctgtctggtgcggcactgcaagcatgcgtttggctgtgcgctggtgcacacctctggctggaaagtggtctattccggggacaccatgccctgcgaggctctggtccggatggggaaagatgccaccctcctgatacatgaagccaccctggaagatggtttggaagaggaagcagtggaaaagacacacagcacaacgtcccaagccatcagcgtggggatgcggatgaacgcggagttcattatgctgaaccacttcagccagcgctatgccaaggtccccctcttcagccccaacttcagcgagaaagtgggagttgcctttgaccacatgaaggtctgctttggagactttccaacaatgcccaagctgattcccccactgaaagccctgtttgctggcgacatcgaggagatggaggagcgcagggagaagcgggagctgcggcaggtgcgggcggccctcctgtccagggagctggcaggcggcctggaggatggggagcctcagcagaagcgggcccacacagaggagccacaggccaagaaggtcagagcccagtgaagatctgggagaccctgaactcagaaggctgtgtgtcttctgccccacgcacgcacccgtatctgccctccttgctggtagaagctgaagagcacggtcccccaggaggcagctcaggataggtggtatggagctgtgccgaggcttggggtcccacataagcactagtctatagatgcctcttaggactggtgcctggcacagctgcgggccaggaggctgccacacggaagcaagcagatgaactaatttcatttcaaggcagtttttaaagaagtcatggaaacagacggcggcacctttcctctaatccagcaaaatgattccctgcacaccagagacaagcagagtaacaggatcagtgggtctaagtgtccgagacttaacgaaaatagtatttcagctgcaataaagattgagtt

SEQ ID NO: 347523 - DNA, 2868 bp, Homo sapiens
agcggatgcggagcggctaggtggtgcacgggaaacgcgggcgtaggtgaccggcggctttctcagttttggtggagacgggcgcatgtgggcgctttgctcgctgctgcggtccgcggccggacgcaccatgtcgcagggacgcaccatatcgcaggcacccgcccgccgcgagcggccgcgcaaggacccgctgcggcacctgcgcacgcgagagaagcgcggaccgtcggggtgctccggcggcccaaacaccgtgtacctgcaggtggtggcagcgggtagccgggactcgggcgccgcgctctacgtcttctccgagttcaaccggtatctcttcaactgtggagaaggcgttcagagactcatgcaggagcacaagttaaaggttgctcgcctggacaacatattcctgacacgaatgcactggtctaatgttgggggcttaagtggaatgattcttactttaaaggaaaccgggcttccaaagtgtgtactttctggacctccacaactggaaaaatacctcgaagcaatcaaaatattttctggtccattgaaaggaatagaactggctgtgcggccccactctgccccagaatacgaggatgaaaccatgacagtttaccagatccccatacacagtgttagccagagaagaggggtcagggactcttccctggtcgtagctttcatctgtaagcttcacttaaagagaggaaacttcttggtgctcaaagcaaaggagatgggcctcccagttgggacagctgccatcgctcccatcattgctgctgtcaaggacgggaaaagcatcactcatgaaggaagagagattttggctgaagagctgtgtactcctccagatcctggtgctgcttttgtggtggtagaatgtccagatgaaagcttcattcaacccatctgtgagaatgccacctttcagaggtaccaaggaaaggcagatgcccccgtggccttggtggttcacatggccccagcatctgtgcttgtggacagcaggtaccagcagtggatggagaggtttgggcctgacacccagcacttggtcctgaatgagaactgtgcctcagttcacaaccttcgcagccacaagattcaaacccagctcaacctcatccacccggacatcttccccctgctcaccagtttccgctgtaagaaggagggccccaccctcagtgtgcccatggttcagggtgaatgcctcctcaagtaccagctccgtcccaggagggagtggcagagggatgccattattacttgcaatcctgaggaattcatagttgaggcgctgcagcttcccaacttccagcagagcgtgcaggagtacaggaggagtgcgcaggacggcccagccccagcagagaaaagaagtcagtacccagaaatcatcttccttggaacagggtctgccatcccgatgaagattcgaaatgtcagtgccacacttgtcaacataagccccgacacgtctctgctactggactgtggtgagggcacatttgggcagctgtgccgtcattacggagaccaggtggacagggtcctgggcaccctggctgctgtgtttgtgtcccacctgcacgcagatcaccacacgggcttgccaagtatcttgctgcagagagaacgcgccttggcatctttgggaaagccgcttcaccctttgctggtggttgcccccaaccagctcaaagcctggctccagcagtaccacaaccagtgccaggaggtcctgcaccacatcagtatgattcctgccaaatgccttcaggaaggggctgagatctccagtcctgcagtggaaagattgatcagttcgctgttgcgaacatgtgatttggaagagtttcagacctgtctggtgcggcactgcaagcatgcgtttggctgtgcgctggtgcacacctctggctggaaagtggtctattccggggacaccatgccctgcgaggctctggtccggatggggaaagatgccaccctcctgatacatgaagccaccctggaagatggtttggaagaggaagcagtggaaaagacacacagcacaacgtcccaagccatcagcgtggggatgcggatgaacgcggagttcattatgctgaaccacttcagccagcgctatgccaaggtccccctcttcagccccaacttcagcgagaaagtgggagttgcctttgaccacatgaaggtctgctttggagactttccaacaatgcccaagctgattcccccactgaaagccctgtttgctggcgacatcgaggagatggaggagcgcagggagaagcgggagctgcggcaggtgcgggcggccctcctgtccagggagctggcaggcggcctggaggatggggagcctcagcagaagcgggcccacacagaggagccacaggccaagaaggtcagagcccagtgaagatctgggagaccctgaactcagaaggctgtgtgtcttctgccccacgcacgcacccgtatctgccctccttgctggtagaagctgaagagcacggtcccccaggaggcagctcaggataggtggtatggagctgtgccgaggcttggggtcccacataagcactagtctatagatgcctcttaggactggtgcctggcacagctgcgggccaggaggctgccacacggaagcaagcagatgaactaatttcatttcaaggcagtttttaaagaagtcatggaaacagacggcggcacctttcctctaatccagcaaaatgattccctgcacaccagagacaagcagagtaacaggatcagtgggtctaagtgtccgagacttaacgaaaatagtatttcagctgcaataaagattgagtt

SEQ ID NO: 347524 - DNA, 2398 bp, Homo sapiens
gcctgcatgtgactctgtaggatctccggtccatcacagttagcagatggacgtgtgaacagaggaggggaaagcaccaaccatggcagagtccagaaaggcctctcagcaggctcagtccagagcgatcttcagactccgagtcgaatgaaaatgagccacaccttccacatggtgttagccagagaagaggggtcagggactcttccctggtcgtagctttcatctgtaagcttcacttaaagagaggaaacttcttggtgctcaaagcaaaggagatgggcctcccagttgggacagctgccatcgctcccatcattgctgctgtcaaggacgggaaaagcatcactcatgaaggaagagagattttggctgaagagctgtgtactcctccagatcctggtgctgcttttgtggtggtagaatgtccagatgaaagcttcattcaacccatctgtgagaatgccacctttcagaggtaccaaggaaaggcagatgcccccgtggccttggtggttcacatggccccagcatctgtgcttgtggacagcaggtaccagcagtggatggagaggtttgggcctgacacccagcacttggtcctgaatgagaactgtgcctcagttcacaaccttcgcagccacaagattcaaacccagctcaacctcatccacccggacatcttccccctgctcaccagtttccgctgtaagaaggagggccccaccctcagtgtgcccatggttcagggtgaatgcctcctcaagtaccagctccgtcccaggagggagtggcagagggatgccattattacttgcaatcctgaggaattcatagttgaggcgctgcagcttcccaacttccagcagagcgtgcaggagtacaggaggagtgcgcaggacggcccagccccagcagagaaaagaagtcagtacccagaaatcatcttccttggaacagggtctgccatcccgatgaagattcgaaatgtcagtgccacacttgtcaacataagccccgacacgtctctgctactggactgtggtgagggcacatttgggcagctgtgccgtcattacggagaccaggtggacagggtcctgggcaccctggctgctgtgtttgtgtcccacctgcacgcagatcaccacacgggcttgccaagtatcttgctgcagagagaacgcgccttggcatctttgggaaagccgcttcaccctttgctggtggttgcccccaaccagctcaaagcctggctccagcagtaccacaaccagtgccaggaggtcctgcaccacatcagtatgattcctgccaaatgccttcaggaaggggctgagatctccagtcctgcagtggaaagattgatcagttcgctgttgcgaacatgtgatttggaagagtttcagacctgtctggtgcggcactgcaagcatgcgtttggctgtgcgctggtgcacacctctggctggaaagtggtctattccggggacaccatgccctgcgaggctctggtccggatggggaaagatgccaccctcctgatacatgaagccaccctggaagatggtttggaagaggaagcagtggaaaagacacacagcacaacgtcccaagccatcagcgtggggatgcggatgaacgcggagttcattatgctgaaccacttcagccagcgctatgccaaggtccccctcttcagccccaacttcagcgagaaagtgggagttgcctttgaccacatgaaggtctgctttggagactttccaacaatgcccaagctgattcccccactgaaagccctgtttgctggcgacatcgaggagatggaggagcgcagggagaagcgggagctgcggcaggtgcgggcggccctcctgtccagggagctggcaggcggcctggaggatggggagcctcagcagaagcgggcccacacagaggagccacaggccaagaaggtcagagcccagtgaagatctgggagaccctgaactcagaaggctgtgtgtcttctgccccacgcacgcacccgtatctgccctccttgctggtagaagctgaagagcacggtcccccaggaggcagctcaggataggtggtatggagctgtgccgaggcttggggtcccacataagcactagtctatagatgcctcttaggactggtgcctggcacagctgcgggccaggaggctgccacacggaagcaagcagatgaactaatttcatttcaaggcagtttttaaagaagtcatggaaacagacggcggcacctttcctctaatccagcaaaatgattccctgcacaccagagacaagcagagtaacaggatcagtgggtctaagtgtccgagacttaacgaaaatagtatttcagctgcaataaagattgagtt

SEQ ID NO: 347525 - DNA, 2161 bp, Homo sapiens
  misc_feature (55)..(55): n is a, c, g, or t
atgctggtgctagggaatcgtgcgggggttcaagcaaaggagatgggctcccagntgggacagctgccatcgctcccatcattgctgctgtcaaggacgggaaaagcatcactcatgaaggaagagagattttggctgaagagctgtgtactcctccagatcctggtgctgcttttgtggtggtagaatgtccagatgaaagcttcattcaacccatctgtgagaatgccacctttcagaggtaccaaggaaaggcagatgcccccgtggccttggtggttcacatggccccagcatctgtgcttgtggacagcaggtaccagcagtggatggagaggtttgggcctgacacccagcacttggtcctgaatgagaactgtgcctcagttcacaaccttcgcagccacaagattcaaacccagctcaacctcatccacccggacatcttccccctgctcaccagtttccgctgtaagaaggagggccccaccctcagtgtgcccatggttcagggtgaatgcctcctcaagtaccagctccgtcccaggagggagtggcagagggatgccattattacttgcaatcctgaggaattcatagttgaggcgctgcagcttcccaacttccagcagagcgtgcaggagtacaggaggagtgcgcaggacggcccagccccagcagagaaaagaagtcagtacccagaaatcatcttccttggaacagggtctgccatcccgatgaagattcgaaatgtcagtgccacacttgtcaacataagccccgacacgtctctgctactggactgtggtgagggcacatttgggcagctgtgccgtcattacggagaccaggtggacagggtcctgggcaccctggctgctgtgtttgtgtcccacctgcacgcagatcaccacacgggcttgccaagtatcttgctgcagagagaacgcgccttggcatctttgggaaagccgcttcaccctttgctggtggttgcccccaaccagctcaaagcctggctccagcagtaccacaaccagtgccaggaggtcctgcaccacatcagtatgattcctgccaaatgccttcaggaaggggctgagatctccagtcctgcagtggaaagattgatcagttcgctgttgcgaacatgtgatttggaagagtttcagacctgtctggtgcggcactgcaagcatgcgtttggctgtgcgctggtgcacacctctggctggaaagtggtctattccggggacaccatgccctgcgaggctctggtccggatggggaaagatgccaccctcctgatacatgaagccaccctggaagatggtttggaagaggaagcagtggaaaagacacacagcacaacgtcccaagccatcagcgtggggatgcggatgaacgcggagttcattatgctgaaccacttcagccagcgctatgccaaggtccccctcttcagccccaacttcagcgagaaagtgggagttgcctttgaccacatgaaggtctgctttggagactttccaacaatgcccaagctgattcccccactgaaagccctgtttgctggcgacatcgaggagatggaggagcgcagggagaagcgggagctgcggcaggtgcgggcggccctcctgtccagggagctggcaggcggcctggaggatggggagcctcagcagaagcgggcccacacagaggagccacaggccaagaaggtcagagcccagtgaagatctgggagaccctgaactcagaaggctgtgtgtcttctgccccacgcacgcacccgtatctgccctccttgctggtagaagctgaagagcacggtcccccaggaggcagctcaggataggtggtatggagctgtgccgaggcttggggtcccacataagcactagtctatagatgcctcttaggactggtgcctggcacagctgcgggccaggaggctgccacacggaagcaagcagatgaactaatttcatttcaaggcagtttttaaagaagtcatggaaacagacggcggcacctttcctctaatccagcaaaatgattccctgcacaccagagacaagcagagtaacaggatcagtgggtctaagtgtccgagacttaacgaaaatagtatttcagctgcaataaagattgagtt

SEQ ID NO: 347526 - DNA, 1924 bp, Homo sapiens
agcggatgcggagcggctaggtggtgcacgggaaacgcgggcgtaggtgaccggcggctttctcagttttggtggagacgggcgcatgtgggcgctttgctcgctgctgcggtccgcggccggacgcaccatgtcgcagggacgcaccatatcgcaggcacccgcccgccgcgagcggccgcgcaaggacccgctgcggcacctgcgcacgcgagagaagcgcggaccgtcggggtgctccggcggcccaaacaccgtgtacctgcaggtggtggcagcgggtagccgggactcgggcgccgcgctctacgtcttctccgagttcaaccggtatctcttcaactgtggagaaggcgttcagagactcatgcaggagcacaagttaaaggttgctcgcctggacaacatattcctgacacgaatgcactggtctaatgttgggggcttaagtggaatgattcttactttaaaggaaaccgggcttccaaagtgtgtactttctggacctccacaactggaaaaatacctcgaagcaatcaaaatattttctggtccattgaaaggaatagaactggctgtgcggccccactctgccccagaatacgaggatgaaaccatgacagtttaccagatccccatacacagtgaacagaggaggggaaagcaccaaccatggcagagtccagaaaggcctctcagcaggctcagtccagagcgatcttcagactccgagtcgaatgaaaatgagccacaccttccacatggtgttagccagagaagaggggtcagggactcttccctggtcgtagctttcatctgtaagcttcacttaaagagaggaaacttcttggtgctcaaagcaaaggagatgggcctcccagttgggacagctgccatcgctcccatcattgctgctgtcaaggacgggaaaagcatcactcatgaaggaagagagattttggctgaagagctgtgtactcctccagatcctggtgctgcttttgtggtggtagaatgtccagatgaaagcttcattcaacccatctgtgagaatgccacctttcagaggtaccaaggaaaggcagatgcccccgtggccttggtggttcacatggccccagcatctgtgcttgtggacagcaggtaccagcagtggatggagaggtttgggcctgacacccagcacttggtcctgaatgagaactgtgcctcagttcacaaccttcgcagccacaagattcaaacccagctcaacctcatccacccggacatcttccccctgctcaccagtttccgctgtaagaaggagggccccaccctcagtgtgcccatggttcagggtgaatgcctcctcaagtaccagctccgtcccaggagggagtggcagagggatgccattattacttgcaatcctgaggaattcatagttgaggcgctgcagcttcccaacttccacagtaccacaaccagtgccaggaggtcctgcaccacatcagtatgattcctgccaaatgccttcaggaaggggctgagatctccagtcctgcagtggaaagattgatcagttcgctgttgcgaacatgtgatttggaagagtttcagacctgtctggtgcggcactgcaagcatgcgtttggctgtgcgctggtgcacacctctggctggaaagtggtctattccggggacaccatgccctgcgaggctctggtccggatgggaggctgccacacggaagcaagcagatgaactaatttcatttcaaggcagtttttaaagaagtcatggaaacagacggcggcacctttcctctaatccagcaaaatgattccctgcacaccagagacaagcagagtaacaggatcagtgggtctaagtgtccgagacttaacgaaaatagtatttcagctgcaataaagattgagtt

SEQ ID NO: 347527 - DNA, 2128 bp, Homo sapiens
agcggatgcggagcggctaggtggtgcacgggaaacgcgggcgtaggtgaccggcggctttctcagttttggtggagacgggcgcatgtgggcgctttgctcgctgctgcggtccgcggccggacgcaccatgtcgcagggacgcaccatatcgcaggcacccgcccgccgcgagcggccgcgcaaggacccgctgcggcacctgcgcacgcgagagaagcgcggaccgtcggggtgctccggcggcccaaacaccgtgtacctgcaggtggtggcagcgggtagccgggactcgggcgccgcgctctacgtcttctccgagttcaaccggtatctcttcaactgtggagaaggcgttcagagactcatgcaggagcacaagttaaaggttgctcgcctggacaacatattcctgacacgaatgcactggtctaatgttgggggcttaagtggaatgattcttactttaaaggaaaccgggcttccaaagtgtgtactttctggacctccacaactggaaaaatacctcgaagcaatcaaaatattttctggtccattgaaaggaatagaactggctgtgcggccccactctgccccagaatacgaggatgaaaccatgacagtttaccagatccccatacacagtgaacagaggaggggaaagcaccaaccatggcagagtccagaaaggcctctcagcaggctcagtccagagcgatcttcagactccgagtcgaatgaaaatgagccacaccttccacatggtgttagccagagaagaggggtcagggactcttccctggtcgtagctttcatctgtaagcttcacttaaagagaggaaacttcttggtgctcaaagcaaaggagatgggcctcccagttgggacagctgccatcgctcccatcattgctgctgtcaaggacgggaaaagcatcactcatgaaggaagagagattttggctgaagagctgtgtactcctccagatcctggtgctgcttttgtggtggtagaatgtccagatgaaagcttcattcaacccatctgtgagaatgccacctttcagaggtaccaaggaaaggcagatgcccccgtggccttggtggttcacatggccccagcatctgtgcttgtggacagcaggtaccagcagtggatggagaggtttgggcctgacacccagcacttggtcctgaatgagaactgtgcctcagttcacaaccttcgcagccacaagattcaaacccagctcaacctcatccacccggacatcttccccctgctcaccagtttccgctgtaagaaggagggccccaccctcagtgtgcccatggttcagggtgaatgcctcctcaagtaccagctccgtcccaggagggagtggcagagggatgccattattacttgcaatcctgaggaattcatagttgaggcgctgcagcttcccaacttccacagtaccacaaccagtgccaggaggtcctgcaccacatcagtatgattcctgccaaatgccttcaggaaggggctgagatctccagtcctgcagtggaaagattgatcagttcgctgttgcgaacatgtgatttggaagagtttcagacctgtctggtgcggcactgcaagcatgcgtttggctgtgcgctggtgcacacctctggctggaaagtggtctattccggggacaccatgccctgcgaggctctggtccggatgggaggctgccacacggaagcaagcagatgaactaatttcatttcaaggcagtttttaaagaagtcatggaaacagacggcggcacctttcctctaatccagcaaaatgattccctgcacaccagagacaagcagagtaacaggatcagtgggtctaagtgtccgagacttaacgaaaatagtatttcagctgcaataaagattgagtttgcaattgtgagttcttttgcttcctcctgctgctgctacagagcagggtctgctgtgcaccaccttggagaaggctctctgtgctgtagtgtggcagctgcctggtacccgggtggcttggaagaagtcagctcccgtcgtagtgagcacctctggaacctgtcctcagagagccacccttattcgccaagtctttttgacaa

SEQ ID NO: 347528 - DNA, 1292 bp, Homo sapiens
agcggatgcggagcggctaggtggtgcacgggaaacgcgggcgtaggtgaccggcggctttctcagttttggtggagacgggcgcatgcatctttgggaaagccgcttcaccctttgctggtggttgcccccaaccagctcaaagcctggctccagcagtaccacaaccagtgccaggaggtcctgcaccacatcagtatgattcctgccaaatgccttcaggaaggggctgagatctccagtcctgcagtggaaagattgatcagttcgctgttgcgaacatgtgatttggaagagtttcagacctgtctggtgcggcactgcaagcatgcgtttggctgtgcgctggtgcacacctctggctggaaagtggtctattccggggacaccatgccctgcgaggctctggtccggatggggaaagatgccaccctcctgatacatgaagccaccctggaagatggtttggaagaggaagcagtggaaaagacacacagcacaacgtcccaagccatcagcgtggggatgcggatgaacgcggagttcattatgctgaaccacttcagccagcgctatgccaaggtccccctcttcagccccaacttcagcgagaaagtgggagttgcctttgaccacatgaaggtctgctttggagactttccaacaatgcccaagctgattcccccactgaaagccctgtttgctggcgacatcgaggagatggaggagcgcagggagaagcgggagctgcggcaggtgcgggcggccctcctgtccagggagctggcaggcggcctggaggatggggagcctcagcagaagcgggcccacacagaggagccacaggccaagaaggtcagagcccagtgaagatctgggagaccctgaactcagaaggctgtgtgtcttctgccccacgcacgcacccgtatctgccctccttgctggtagaagctgaagagcacggtcccccaggaggcagctcaggataggtggtatggagctgtgccgaggcttggggtcccacataagcactagtctatagatgcctcttaggactggtgcctggcacagctgcgggccaggaggctgccacacggaagcaagcagatgaactaatttcatttcaaggcagtttttaaagaagtcatggaaacagacggcggcacctttcctctaatccagcaaaatgattccctgcacaccagagacaagcagagtaacaggatcagtgggtctaagtgtccgagacttaacgaaaatagtatttcagctgcaataaagattgagtt

SEQ ID NO: 347529 - DNA, 1423 bp, Homo sapiens
agcggatgcggagcggctaggtggtgcacgggaaacgcgggcgtaggtgaccggcggctttctcagttttggtggagacgggcgcatgtgggcgctttgctcgctgctgcggtccgcggccggacgcaccatgtcgcagggacgcaccatatcgcaggcacccgcccgccgcgagcggccgcgcaaggacccgctgcggcacctgcgcacgcgagagaagcgcggaccgtcggggtgctccggcggcccaaacaccgtgtacctgcaggtggtggcagcgggtagccgggactcgggcgccgcgctctacgtcttctccgagttcaaccggtatctcttcaactgtggagaaggcgttcagagactcatgcaggagcacaagttaaaggttgctcgcctggacaacatattcctgacacgaatgcactggtctaatgttgggggcttaagtggaatgattcttactttaaaggaaaccgggcttccaaagtgtgtactttctggacctccacaactggaaaaatacctcgaagcaatcaaaatattttctggtccattgaaaggaatagaactggctgtgcggccccactctgccccagaatacgaggatgaaaccatgacagtttaccagatccccatacacagtgaacagaggaggggaaagcaccaaccatggcagagtccagaaaggcctctcagcaggctcagtccagagcgatcttcagactccgagtcgaatgaaaatgagccacaccttccacatggtgttagccagagaagaggggtcagggactcttccctggtcgtagctttcatctgtaagcttcacttaaagagaggaaacttcttggtgctcaaagcaaaggagatgggcctcccagttgggacagctgccatcgctcccatcattgctgctgtcaaggacgggaaaagcatcactcatgaaggaagagagattttggctgaagagctgtgtactcctccagatcctggtgctgcttttgtggtggtagaatgtccagatgaaagcttcattcaacccatctgtgagaatgccacctttcagaggtaccaaggaaaggcagatgcccccgtggccttggtggttcacatggccccagcatctgtgcttgtggacagcaggtaccagcagtggatggagaggtttgggcctgacacccagcacttggtcctgaatgagaactgtgcctcagttcacaaccttcgcagccacaagattcaaacccagctcaacctcatccacccggacatcttccccctgctcaccagtttccgctgtaagaaggagggccccaccctcagtgtgcccatggttcagggtgaatgcctcctcaagctgcccgcggcgtttccacacaggagatctagctaggtcacccgccagggatctccctactcgctg

SEQ ID NO: 347530 - DNA, 414 bp, Homo sapiens
ctcctgatacatgaagccaccctggaagatggtttggaagaggaagcagtggaaaagacacacaggtagcaaaggccggtcagtccttgtcgcccacatcctctccctcccccactacgtgacactgagcagccgtcgtttgtctccactgatgtggggctgccctgcttcctatcaagggctatgggggcttccttgacctgtggcagtgctcacaggctcttggcctttatttttgcagaattttctaagcaagattctagagtgaggcacagttttttgaaagcatctagaaatcggctgaataaactataagccatgtcagggaattgccaggggaaggcgggggctgggggactgaatttttggctgctaatttcaacgaaagagtgcattaccccaggtgggccctgt

SEQ ID NO: 347531 - DNA, 356 bp, Homo sapiens
tgatgcccagcctttgtgtaagtctacttgaaagggtttcagggttccatggatacttctttgctataaagaggatgacacatgtaaaatcacctttatggttaaattaattggcttttatattagctcctcaaagcaaagcaggagagacagaaatttctgcagttgcttcttggtcctgtccaaagcagacatcagcctctgaaccatcagcagtcttcctagtggcagtgactctcttcctcttctcttctgcagccccgacacgtctctgctactggactgtggtgagggcacatttgggcagctgtgccgtcattacggagaccaggtggacagggtcctgggcaccctgg

SEQ ID NO: 347532 - DNA, 2988 bp, Homo sapiens
agcggatgcggagcggctaggtggtgcacgggaaacgcgggcgtaggtgaccggcggctttctcagttttggtggagacgggcgcatgtgggcgctttgctcgctgctgcggtccgcggccggacgcaccatgtcgcagggacgcaccatatcgcaggcacccgcccgccgcgagcggccgcgcaaggacccgctgcggcacctgcgcacgcgagagaagcgcggaccgtcggggtgctccggcggcccaaacaccgtgtacctgcaggtggtggcagcgggtagccgggactcgggcgccgcgctctacgtcttctccgagttcaaccggtatctcttcaactgtggagaaggcgttcagagactcatgcaggagcacaagttaaaggttgctcgcctggacaacatattcctgacacgaatgcactggtctaatgttgggggcttaagtggaatgattcttactttaaaggaaaccgggcttccaaagtgtgtactttctggacctccacaactggaaaaatacctcgaagcaatcaaaatattttctggtccattgaaaggaatagaactggctgtgcggccccactctgccccagaatacgaggatgaaaccatgacagtttaccagatccccatacacagtgaacagaggaggggaaagcaccaaccatggcagagtccagaaaggcctctcagcaggctcagtccagagcgatcttcagactccgagtcgaatgaaaatgagccacaccttccacatggtgttagccagagaagaggggtcagggactcttccctggtcgtagctttcatctgtaagcttcacttaaagagaggaaacttcttggtgctcaaagcaaaggagatgggcctcccagttgggacagctgccatcgctcccatcattgctgctgtcaaggacgggaaaagcatcactcatgaaggaagagagattttggctgaagagctgtgtactcctccagatcctggtgctgcttttgtggtggtagaatgtccagatgaaagcttcattcaacccatctgtgagaatgccacctttcagaggtaccaaggaaaggcagatgcccccgtggccttggtggttcacatggccccagcatctgtgcttgtggacagcaggtaccagcagtggatggagaggtttgggcctgacacccagcacttggtcctgaatgagaactgtgcctcagttcacaaccttcgcagccacaagattcaaacccagctcaacctcatccacccggacatcttccccctgctcaccagtttccgctgtaagaaggagggccccaccctcagtgtgcccatggttcagggtgaatgcctcctcaagtaccagctccgtcccaggagggagtggcagagggatgccattattacttgcaatcctgaggaattcatagttgaggcgctgcagcttcccaacttccagcagagcgtgcaggagtacaggaggagtgcgcaggacggcccagccccagcagagaaaagaagtcagtacccagaaatcatcttccttggaacagggtctgccatcccgatgaagattcgaaatgtcagtgccacacttgtcaacataagccccgacacgtctctgctactggactgtggtgagggcacatttgggcagctgtgccgtcattacggagaccaggtggacagggtcctgggcaccctggctgctgtgtttgtgtcccacctgcacgcagatcaccacacgggcttgccaagtatcttgctgcagagagaacgcgccttggcatctttgggaaagccgcttcaccctttgctggtggttgcccccaaccagctcaaagcctggctccagcagtaccacaaccagtgccaggaggtcctgcaccacatcagtatgattcctgccaaatgccttcaggaaggggctgagatctccagtcctgcagtggaaagattgatcagttcgctgttgcgaacatgtgatttggaagagtttcagacctgtctggtgcggcactgcaagcatgcgtttggctgtgcgctggtgcacacctctggctggaaagtggtctattccggggacaccatgccctgcgaggctctggtccggatggggaaagatgccaccctcctgatacatgaagccaccctggaagatggtttggaagaggaagcagtggaaaagacacacagcacaacgtcccaagccatcagcgtggggatgcggatgaacgcggagttcattatgctgaaccacttcagccagcgctatgccaaggtccccctcttcagccccaacttcagcgagaaagtgggagttgcctttgaccacatgaaggtctgctttggagactttccaacaatgcccaagctgattcccccactgaaagccctgtttgctggcgacatcgaggagatggaggagcgcagggagaagcgggagctgcggcaggtgcgggcggccctcctgtccagggagctggcaggcggcctggaggatggggagcctcagcagaagcgggcccacacagaggagccacaggccaagaaggtcagagcccagtgaagatctgggagaccctgaactcagaaggctgtgtgtcttctgccccacgcacgcacccgtatctgccctccttgctggtagaagctgaagagcacggtcccccaggaggcagctcaggataggtggtatggagctgtgccgaggcttggggtcccacataagcactagtctatagatgcctcttaggactggtgcctggcacagctgcgggccaggaggctgccacacggaagcaagcagatgaactaatttcatttcaaggcagtttttaaagaagtcatggaaacagacggcggcacctttcctctaatccagcaaaatgattccctgcacaccagagacaagcagagtaacaggatcagtgggtctaagtgtccgagacttaacgaaaatagtatttcagctgcaataaagattgagtt

SEQ ID NO: 347533 - DNA, 3066 bp, Homo sapiens
agcggatgcggagcggctaggtggtgcacgggaaacgcgggcgtaggtgaccggcggctttctcagttttggtggagacgggcgcatgtgggcgctttgctcgctgctgcggtccgcggccggacgcaccatgtcgcagggacgcaccatatcgcaggcacccgcccgccgcgagcggccgcgcaaggacccgctgcggcacctgcgcacgcgagagaagcgcggaccgtcggggtgctccggcggcccaaacaccgtgtacctgcaggtggtggcagcgggtagccgggactcgggcgccgcgctctacgtcttctccgagttcaaccggtatctcttcaactgtggagaaggcgttcagagactcatgcaggagcacaagttaaaggttgctcgcctggacaacatattcctgacacgaatgcactggtctaatgttgggggcttaagtggaatgattcttactttaaaggaaaccgggcttccaaagtgtgtactttctggacctccacaactggaaaaatacctcgaagcaatcaaaatattttctggtccattgaaaggaatagaactggctgtgcggccccactctgccccagaatacgaggatgaaaccatgacagtttaccagatccccatacacagtgaacagaggaggggaaagcaccaaccatggcagagtccagaaaggcctctcagcaggctcagtccagagcgatcttcagactccgagtcgaatgaaaatgagccacaccttccacatggtgttagccagagaagaggggtcagggactcttccctggtcgtagctttcatctgtaagcttcacttaaagagaggaaacttcttggtgctcaaagcaaaggagatgggcctcccagttgggacagctgccatcgctcccatcattgctgctgtcaaggacgggaaaagcatcactcatgaaggaagagagattttggctgaagagctgtgtactcctccagatcctggtgctgcttttgtggtggtagaatgtccagatgaaagcttcattcaacccatctgtgagaatgccacctttcagaggtaccaaggaaaggcagatgcccccgtggccttggtggttcacatggccccagcatctgtgcttgtggacagcaggtaccagcagtggatggagaggtttgggcctgacacccagcacttggtcctgaatgagaactgtgcctcagttcacaaccttcgcagccacaagattcaaacccagctcaacctcatccacccggacatcttccccctgctcaccagtttccgctgtaagaaggagggccccaccctcagtgtgcccatggttcagggtgaatgcctcctcaagtaccagctccgtcccaggagggagtggcagagggatgccattattacttgcaatcctgaggaattcatagttgaggcgctgcagcttcccaacttccagcagagcgtgcaggagtacaggaggagtgcgcaggacggcccagccccagcagagaaaagaagtcagtacccagaaatcatcttccttggaacagggtctgccatcccgatgaagattcgaaatgtcagtgccacacttgtcaacataagccccgacacgtctctgctactggactgtggtgagggcacatttgggcagctgtgccgtcattacggagaccaggtggacagggtcctgggcaccctggctgctgtgtttgtgtcccacctgcacgcagatcaccacacgggcttgccaagtatcttgctgcagagagaacgcgccttggcatctttgggaaagccgcttcaccctttgctggtggttgcccccaaccagctcaaagcctggctccagcagtaccacaaccagtgccaggaggtcctgcaccacatcagtatgattcctgccaaatgccttcaggaaggggctgagatctccagtcctgcagtggaaagattgatcagttcgctgttgcgaacatgtgatttggaagaggtaaggggcacagccgcaggcatcatgggggcgaggtggggagcagagctgcagagccctccagccccaccctttcagtttcagacctgtctggtgcggcactgcaagcatgcgtttggctgtgcgctggtgcacacctctggctggaaagtggtctattccggggacaccatgccctgcgaggctctggtccggatggggaaagatgccaccctcctgatacatgaagccaccctggaagatggtttggaagaggaagcagtggaaaagacacacagcacaacgtcccaagccatcagcgtggggatgcggatgaacgcggagttcattatgctgaaccacttcagccagcgctatgccaaggtccccctcttcagccccaacttcagcgagaaagtgggagttgcctttgaccacatgaaggtctgctttggagactttccaacaatgcccaagctgattcccccactgaaagccctgtttgctggcgacatcgaggagatggaggagcgcagggagaagcgggagctgcggcaggtgcgggcggccctcctgtccagggagctggcaggcggcctggaggatggggagcctcagcagaagcgggcccacacagaggagccacaggccaagaaggtcagagcccagtgaagatctgggagaccctgaactcagaaggctgtgtgtcttctgccccacgcacgcacccgtatctgccctccttgctggtagaagctgaagagcacggtcccccaggaggcagctcaggataggtggtatggagctgtgccgaggcttggggtcccacataagcactagtctatagatgcctcttaggactggtgcctggcacagctgcgggccaggaggctgccacacggaagcaagcagatgaactaatttcatttcaaggcagtttttaaagaagtcatggaaacagacggcggcacctttcctctaatccagcaaaatgattccctgcacaccagagacaagcagagtaacaggatcagtgggtctaagtgtccgagacttaacgaaaatagtatttcagctgcaataaagattgagtt

SEQ ID NO: 347534 - DNA, 3192 bp, Homo sapiens
agcggatgcggagcggctaggtggtgcacgggaaacgcgggcgtaggtgaccggcggctttctcagttttggtggagacgggcgcatgtgggcgctttgctcgctgctgcggtccgcggccggacgcaccatgtcgcagggacgcaccatatcgcaggcacccgcccgccgcgagcggccgcgcaaggacccgctgcggcacctgcgcacgcgagagaagcgcggaccgtcggggtgctccggcggcccaaacaccgtgtacctgcaggtggtggcagcgggtagccgggactcgggcgccgcgctctacgtcttctccgagttcaaccggtatctcttcaactgtggagaaggcgttcagagactcatgcaggagcacaagttaaaggttgctcgcctggacaacatattcctgacacgaatgcactggtctaatgttgggggcttaagtggaatgattcttactttaaaggaaaccgggcttccaaagtgtgtactttctggacctccacaactggaaaaatacctcgaagcaatcaaaatattttctggtccattgaaaggaatagaactggctgtgcggccccactctgccccagaatacgaggatgaaaccatgacagtttaccagatccccatacacagtgaacagaggaggggaaagcaccaaccatggcagagtccagaaaggcctctcagcaggctcagtccagagcgatcttcagactccgagtcgaatgaaaatgagccacaccttccacatggtgttagccagagaagaggggtcagggactcttccctggtcgtagctttcatctgtaagcttcacttaaagagaggaaacttcttggtgctcaaagcaaaggagatgggcctcccagttgggacagctgccatcgctcccatcattgctgctgtcaaggacgggaaaagcatcactcatgaaggaagagagattttggctgaagagctgtgtactcctccagatcctggtgctgcttttgtggtggtagaatgtccagatgaaagcttcattcaacccatctgtgagaatgccacctttcagaggtaccaaggaaaggcagatgcccccgtggccttggtggttcacatggccccagcatctgtgcttgtggacagcaggtaccagcagtggatggagaggtttgggcctgacacccagcacttggtcctgaatgagaactgtgcctcagttcacaaccttcgcagccacaagattcaaacccagctcaacctcatccacccggacatcttccccctgctcaccagtttccgctgtaagaaggagggccccaccctcagtgtgcccatggttcagggtgaatgcctcctcaagtaccagctccgtcccaggagggagtggcagagggatgccattattacttgcaatcctgaggaattcatagttgaggcgctgcagcttcccaacttccagcagagcgtgcaggagtacaggaggagtgcgcaggacggcccagccccagcagagaaaagaagtcagtacccagaaatcatcttccttggaacagggtctgccatcccgatgaagattcgaaatgtcagtgccacacttgtcaacataagccccgacacgtctctgctactggactgtggtgagggcacatttgggcagctgtgccgtcattacggagaccaggtggacagggtcctgggcaccctggctgctgtgtttgtgtcccacctgcacgcagatcaccacacgggcttgccaagtatcttgctgcagagagaacgcgccttggcatctttgggaaagccgcttcaccctttgctggtggttgcccccaaccagctcaaagcctggctccagcagtaccacaaccagtgccaggaggtcctgcaccacatcagtatgattcctgccaaatgccttcaggaaggggctgagatctccagtcctgcagtggaaagattgatcagttcgctgttgcgaacatgtgatttggaagagtttcagacctgtctggtgcggcactgcaagcatgcgtttggctgtgcgctggtgcacacctctggctggaaagtggtctattccggggacaccatgccctgcgaggctctggtccggatggggaaagatgccaccctcctgatacatgaagccaccctggaagatggtttggaagaggaagcagtggaaaagacacacagcacaacgtcccaagccatcagcgtggggatgcggatgaacgcggagttcattatgctgaaccacttcagccagcgctatgccaaggtccccctcttcagccccaacttcagcgagaaagtgggagttgcctttgaccacatgaaggtctgctttggagactttccaacaatgcccaagctgattcccccactgaaagccctgtttgctggcgacatcgaggagatggaggagcgcagggagaagcgggagctgcggcaggtgcgggcggccctcctgtccagggagctggcaggcggcctggaggatggggagcctcagcagaagcgggcccacacagaggagccacaggccaagaaggtcagagcccagtgaagatctgggagaccctgaactcagaaggctgtgtgtcttctgccccacgcacgcacccgtatctgccctccttgctggtagaagctgaagagcacggtcccccaggaggcagctcaggataggtggtatggagctgtgccgaggcttggggtcccacataagcactagtctatagatgcctcttaggactggtgcctggcacagctgcgggccaggaggctgccacacggaagcaagcagatgaactaatttcatttcaaggcagtttttaaagaagtcatggaaacagacggcggcacctttcctctaatccagcaaaatgattccctgcacaccagagacaagcagagtaacaggatcagtgggtctaagtgtccgagacttaacgaaaatagtatttcagctgcaataaagattgagtttgcaattgtgagttcttttgcttcctcctgctgctgctacagagcagggtctgctgtgcaccaccttggagaaggctctctgtgctgtagtgtggcagctgcctggtacccgggtggcttggaagaagtcagctcccgtcgtagtgagcacctctggaacctgtcctcagagagccacccttattcgccaagtctttttgacaa

SEQ ID NO: 347535 - DNA, 3124 bp, Homo sapiens
agcggatgcggagcggctaggtggtgcacgggaaacgcgggcgtaggtgaccggcggctttctcagttttggtggagacgggcgcatgtgggcgctttgctcgctgctgcggtccgcggccggacgcaccatgtcgcagggacgcaccatatcgcaggcacccgcccgccgcgagcggccgcgcaaggacccgctgcggcacctgcgcacgcgagagaagcgcggaccgtcggggtgctccggcggcccaaacaccgtgtacctgcaggtggtggcagcgggtagccgggactcgggcgccgcgctctacgtcttctccgagttcaaccggtcagtcaacgagccacgccccgtcccgctgggccctcagtgcggcgcagcctctgagcatcggggcacctcccagggcttcggcttccctgcttcacacatgtggttcactgttgcgggggttcgtggagttatggtatctcttcaactgtggagaaggcgttcagagactcatgcaggagcacaagttaaaggttgctcgcctggacaacatattcctgacacgaatgcactggtctaatgttgggggcttaagtggaatgattcttactttaaaggaaaccgggcttccaaagtgtgtactttctggacctccacaactggaaaaatacctcgaagcaatcaaaatattttctggtccattgaaaggaatagaactggctgtgcggccccactctgccccagaatacgaggatgaaaccatgacagtttaccagatccccatacacagtgaacagaggaggggaaagcaccaaccatggcagagtccagaaaggcctctcagcaggctcagtccagagcgatcttcagactccgagtcgaatgaaaatgagccacaccttccacatggtgttagccagagaagaggggtcagggactcttccctggtcgtagctttcatctgtaagcttcacttaaagagaggaaacttcttggtgctcaaagcaaaggagatgggcctcccagttgggacagctgccatcgctcccatcattgctgctgtcaaggacgggaaaagcatcactcatgaaggaagagagattttggctgaagagctgtgtactcctccagatcctggtgctgcttttgtggtggtagaatgtccagatgaaagcttcattcaacccatctgtgagaatgccacctttcagaggtaccaaggaaaggcagatgcccccgtggccttggtggttcacatggccccagcatctgtgcttgtggacagcaggtaccagcagtggatggagaggtttgggcctgacacccagcacttggtcctgaatgagaactgtgcctcagttcacaaccttcgcagccacaagattcaaacccagctcaacctcatccacccggacatcttccccctgctcaccagtttccgctgtaagaaggagggccccaccctcagtgtgcccatggttcagggtgaatgcctcctcaagtaccagctccgtcccaggagggagtggcagagggatgccattattacttgcaatcctgaggaattcatagttgaggcgctgcagcttcccaacttccagcagagcgtgcaggagtacaggaggagtgcgcaggacggcccagccccagcagagaaaagaagtcagtacccagaaatcatcttccttggaacagggtctgccatcccgatgaagattcgaaatgtcagtgccacacttgtcaacataagccccgacacgtctctgctactggactgtggtgagggcacatttgggcagctgtgccgtcattacggagaccaggtggacagggtcctgggcaccctggctgctgtgtttgtgtcccacctgcacgcagatcaccacacgggcttgccaagtatcttgctgcagagagaacgcgccttggcatctttgggaaagccgcttcaccctttgctggtggttgcccccaaccagctcaaagcctggctccagcagtaccacaaccagtgccaggaggtcctgcaccacatcagtatgattcctgccaaatgccttcaggaaggggctgagatctccagtcctgcagtggaaagattgatcagttcgctgttgcgaacatgtgatttggaagagtttcagacctgtctggtgcggcactgcaagcatgcgtttggctgtgcgctggtgcacacctctggctggaaagtggtctattccggggacaccatgccctgcgaggctctggtccggatggggaaagatgccaccctcctgatacatgaagccaccctggaagatggtttggaagaggaagcagtggaaaagacacacagcacaacgtcccaagccatcagcgtggggatgcggatgaacgcggagttcattatgctgaaccacttcagccagcgctatgccaaggtccccctcttcagccccaacttcagcgagaaagtgggagttgcctttgaccacatgaaggtctgctttggagactttccaacaatgcccaagctgattcccccactgaaagccctgtttgctggcgacatcgaggagatggaggagcgcagggagaagcgggagctgcggcaggtgcgggcggccctcctgtccagggagctggcaggcggcctggaggatggggagcctcagcagaagcgggcccacacagaggagccacaggccaagaaggtcagagcccagtgaagatctgggagaccctgaactcagaaggctgtgtgtcttctgccccacgcacgcacccgtatctgccctccttgctggtagaagctgaagagcacggtcccccaggaggcagctcaggataggtggtatggagctgtgccgaggcttggggtcccacataagcactagtctatagatgcctcttaggactggtgcctggcacagctgcgggccaggaggctgccacacggaagcaagcagatgaactaatttcatttcaaggcagtttttaaagaagtcatggaaacagacggcggcacctttcctctaatccagcaaaatgattccctgcacaccagagacaagcagagtaacaggatcagtgggtctaagtgtccgagacttaacgaaaatagtatttcagctgcaataaagattgagtt

SEQ ID NO: 347536 - DNA, 2591 bp, Homo sapiens
agcggatgcggagcggctaggtggtgcacgggaaacgcgggcgtaggtgaccggcggctttctcagttttggtggagacgggcgcatgtgggcgctttgctcgctgctgcggtccgcggccggacgcaccatgtcgcagggacgcaccatatcgcaggcacccgcccgccgcgagcggccgcgcaaggacccgctgcggcacctgcgcacgcgagagaagcgcggaccgtcggggtgctccggcggcccaaacaccgtgtacctgcaggtggtggcagcgggtagccgggactcgggcgccgcgctctacgtcttctccgagttcaaccggtatctcttcaactgtggagaaggcgttcagagactcatgcaggagcacaagttaaaggttgctcgcctggacaacatattcctgacacgaatgcactggtctaatgttgggggcttaagtggaatgattcttactttaaaggaaaccgggcttccaaagtgtgtactttctggacctccacaactggaaaaatacctcgaagcaatcaaaatattttctggtccattgaaaggaatagaactggctgtgcggccccactctgccccagaatacgaggatgaaaccatgacagtttaccagatccccatacacagtgaacagaggaggggaaagcaccaaccatggcagagtccagaaaggcctctcagcaggctcagtccagagcgatcttcagactccgagtcgaatgaaaatgagccacaccttccacatggtgttagccagagaagaggggtcagggactcttccctggtcgtagctttcatctgtaagcttcacttaaagagaggaaacttcttggtgctcaaagcaaaggagatgggcctcccagttgggacagctgccatcgctcccatcattgctgctgtcaaggacgggaaaagcatcactcatgaaggaagagagattttggctgaagagctgtgtactcctccagatcctggtgctgcttttgtggtggtagaatgtccagatgaaagcttcattcaacccatctgtgagaatgccacctttcagaggtaccaaggaaaggcagatgcccccgtggccttggtggttcacatggccccagcatctgtgcttgtggacagcaggtaccagcagtggatggagaggtttgggcctgacacccagcacttggtcctgaatgagaactgtgcctcagttcacaaccttcgcagccacaagattcaaacccagctcaacctcatccacccggacatcttccccctgctcaccagtttccgctgtaagaaggagggccccaccctcagtgtgcccatggttcagggtgaatgcctcctcaagtaccagctccgtcccaggagggagtggcagagggatgccattattacttgcaatcctgaggaattcatagttgaggcgctgcagcttcccaacttccacagtaccacaaccagtgccaggaggtcctgcaccacatcagtatgattcctgccaaatgccttcaggaaggggctgagatctccagtcctgcagtggaaagattgatcagttcgctgttgcgaacatgtgatttggaagagtttcagacctgtctggtgcggcactgcaagcatgcgtttggctgtgcgctggtgcacacctctggctggaaagtggtctattccggggacaccatgccctgcgaggctctggtccggatggggaaagatgccaccctcctgatacatgaagccaccctggaagatggtttggaagaggaagcagtggaaaagacacacagcacaacgtcccaagccatcagcgtggggatgcggatgaacgcggagttcattatgctgaaccacttcagccagcgctatgccaaggtccccctcttcagccccaacttcagcgagaaagtgggagttgcctttgaccacatgaaggtctgctttggagactttccaacaatgcccaagctgattcccccactgaaagccctgtttgctggcgacatcgaggagatggaggagcgcagggagaagcgggagctgcggcaggtgcgggcggccctcctgtccagggagctggcaggcggcctggaggatggggagcctcagcagaagcgggcccacacagaggagccacaggccaagaaggtcagagcccagtgaagatctgggagaccctgaactcagaaggctgtgtgtcttctgccccacgcacgcacccgtatctgccctccttgctggtagaagctgaagagcacggtcccccaggaggcagctcaggataggtggtatggagctgtgccgaggcttggggtcccacataagcactagtctatagatgcctcttaggactggtgcctggcacagctgcgggccaggaggctgccacacggaagcaagcagatgaactaatttcatttcaaggcagtttttaaagaagtcatggaaacagacggcggcacctttcctctaatccagcaaaatgattccctgcacaccagagacaagcagagtaacaggatcagtgggtctaagtgtccgagacttaacgaaaatagtatttcagctgcaataaagattgagtt

SEQ ID NO: 347537 - DNA, 2123 bp, Homo sapiens
gagatgcttttcccgtccttgacagcagcaatgatgggagcgatggcagctgtcccaactgggagaagcatcactcatgaaggaagagagattttggctgaagagctgtgtactcctccagatcctggtgctgcttttgtggtggtagaatgtccagatgaaagcttcattcaacccatctgtgagaatgccacctttcagaggtaccaaggaaaggcagatgcccccgtggccttggtggttcacatggccccagcatctgtgcttgtggacagcaggtaccagcagtggatggagaggtttgggcctgacacccagcacttggtcctgaatgagaactgtgcctcagttcacaaccttcgcagccacaagattcaaacccagctcaacctcatccacccggacatcttccccctgctcaccagtttccgctgtaagaaggagggccccaccctcagtgtgcccatggttcagggtgaatgcctcctcaagtaccagctccgtcccaggagggagtggcagagggatgccattattacttgcaatcctgaggaattcatagttgaggcgctgcagcttcccaacttccagcagagcgtgcaggagtacaggaggagtgcgcaggacggcccagccccagcagagaaaagaagtcagtacccagaaatcatcttccttggaacagggtctgccatcccgatgaagattcgaaatgtcagtgccacacttgtcaacataagccccgacacgtctctgctactggactgtggtgagggcacatttgggcagctgtgccgtcattacggagaccaggtggacagggtcctgggcaccctggctgctgtgtttgtgtcccacctgcacgcagatcaccacacgggcttgccaagtatcttgctgcagagagaacgcgccttggcatctttgggaaagccgcttcaccctttgctggtggttgcccccaaccagctcaaagcctggctccagcagtaccacaaccagtgccaggaggtcctgcaccacatcagtatgattcctgccaaatgccttcaggaaggggctgagatctccagtcctgcagtggaaagattgatcagttcgctgttgcgaacatgtgatttggaagagtttcagacctgtctggtgcggcactgcaagcatgcgtttggctgtgcgctggtgcacacctctggctggaaagtggtctattccggggacaccatgccctgcgaggctctggtccggatggggaaagatgccaccctcctgatacatgaagccaccctggaagatggtttggaagaggaagcagtggaaaagacacacagcacaacgtcccaagccatcagcgtggggatgcggatgaacgcggagttcattatgctgaaccacttcagccagcgctatgccaaggtccccctcttcagccccaacttcagcgagaaagtgggagttgcctttgaccacatgaaggtctgctttggagactttccaacaatgcccaagctgattcccccactgaaagccctgtttgctggcgacatcgaggagatggaggagcgcagggagaagcgggagctgcggcaggtgcgggcggccctcctgtccagggagctggcaggcggcctggaggatggggagcctcagcagaagcgggcccacacagaggagccacaggccaagaaggtcagagcccagtgaagatctgggagaccctgaactcagaaggctgtgtgtcttctgccccacgcacgcacccgtatctgccctccttgctggtagaagctgaagagcacggtcccccaggaggcagctcaggataggtggtatggagctgtgccgaggcttggggtcccacataagcactagtctatagatgcctcttaggactggtgcctggcacagctgcgggccaggaggctgccacacggaagcaagcagatgaactaatttcatttcaaggcagtttttaaagaagtcatggaaacagacggcggcacctttcctctaatccagcaaaatgattccctgcacaccagagacaagcagagtaacaggatcagtgggtctaagtgtccgagacttaacgaaaatagtatttcagctgcaataaagattgagtt

SEQ ID NO: 347538 - DNA, 2291 bp, Homo sapiens
agactgaagaaaaccttaatgccaagcctcctttcctggccagtgtaggcctgaagtgcctcaacctgacagttacctgtttaggtatccacaaagagaccagaagggtgttgatggtgatgtgtaaagttggttttgtgctttgtttacctctcagctcactggataggatatgtcatgttagcagttgccttgaaggcagttcagtttggtggctgagctgtgacccccagtgggcgggcttatttggttttgcagattttggctgaagagctgtgtactcctccagatcctggtgctgcttttgtggtggtagaatgtccagatgaaagcttcattcaacccatctgtgagaatgccacctttcagaggtaccaaggaaaggcagatgcccccgtggccttggtggttcacatggccccagcatctgtgcttgtggacagcaggtaccagcagtggatggagaggtttgggcctgacacccagcacttggtcctgaatgagaactgtgcctcagttcacaaccttcgcagccacaagattcaaacccagctcaacctcatccacccggacatcttccccctgctcaccagtttccgctgtaagaaggagggccccaccctcagtgtgcccatggttcagggtgaatgcctcctcaagtaccagctccgtcccaggagggagtggcagagggatgccattattacttgcaatcctgaggaattcatagttgaggcgctgcagcttcccaacttccagcagagcgtgcaggagtacaggaggagtgcgcaggacggcccagccccagcagagaaaagaagtcagtacccagaaatcatcttccttggaacagggtctgccatcccgatgaagattcgaaatgtcagtgccacacttgtcaacataagccccgacacgtctctgctactggactgtggtgagggcacatttgggcagctgtgccgtcattacggagaccaggtggacagggtcctgggcaccctggctgctgtgtttgtgtcccacctgcacgcagatcaccacacgggcttgccaagtatcttgctgcagagagaacgcgccttggcatctttgggaaagccgcttcaccctttgctggtggttgcccccaaccagctcaaagcctggctccagcagtaccacaaccagtgccaggaggtcctgcaccacatcagtatgattcctgccaaatgccttcaggaaggggctgagatctccagtcctgcagtggaaagattgatcagttcgctgttgcgaacatgtgatttggaagagtttcagacctgtctggtgcggcactgcaagcatgcgtttggctgtgcgctggtgcacacctctggctggaaagtggtctattccggggacaccatgccctgcgaggctctggtccggatggggaaagatgccaccctcctgatacatgaagccaccctggaagatggtttggaagaggaagcagtggaaaagacacacagcacaacgtcccaagccatcagcgtggggatgcggatgaacgcggagttcattatgctgaaccacttcagccagcgctatgccaaggtccccctcttcagccccaacttcagcgagaaagtgggagttgcctttgaccacatgaaggtctgctttggagactttccaacaatgcccaagctgattcccccactgaaagccctgtttgctggcgacatcgaggagatggaggagcgcagggagaagcgggagctgcggcaggtgcgggcggccctcctgtccagggagctggcaggcggcctggaggatggggagcctcagcagaagcgggcccacacagaggagccacaggccaagaaggtcagagcccagtgaagatctgggagaccctgaactcagaaggctgtgtgtcttctgccccacgcacgcacccgtatctgccctccttgctggtagaagctgaagagcacggtcccccaggaggcagctcaggataggtggtatggagctgtgccgaggcttggggtcccacataagcactagtctatagatgcctcttaggactggtgcctggcacagctgcgggccaggaggctgccacacggaagcaagcagatgaactaatttcatttcaaggcagtttttaaagaagtcatggaaacagacggcggcacctttcctctaatccagcaaaatgattccctgcacaccagagacaagcagagtaacaggatcagtgggtctaagtgtccgagacttaacgaaaatagtatttcagctgcaataaagattgagtt

SEQ ID NO: 347539 - DNA, 715 bp, Homo sapiens
agcggatgcggagcggctaggtggtgcacgggaaacgcgggcgtaggtgaccggcggctttctcagttttggtggagacgggcgcatgtgggcgctttgctcgctgctgcggtccgcggccggacgcaccatgtcgcagggacgcaccatatcgcaggcacccgcccgccgcgagcggccgcgcaaggacccgctgcggcacctgcgcacgcgagagaagcgcggaccgtcggggtgctccggcggcccaaacaccgtgtacctgcaggtggtggcagcgggtagccgggactcgggcgccgcgctctacgtcttctccgagttcaaccggtcagtcaacgagccacgccccgtcccgctgggccctcagtgcggcgcagcctctgagcatcggggcacctcccagggcttcggcttccctgcttcacacatgtggttcactgttgcgggggttcgtggagttatggtgggtgggaaatccgagattctttgcatccatgtgatttctgcggatctgtgaagaacttcaggcctgggtctgagcgtccttttcccaacccttgggccccggcctggctgtcagcactttcggagctccaccctcttccgtgcaccccaaggccagtgtgtcgttgttagcgtgtggggtggacagatctggtgtgtagccggtggtggagaaaggactcattttgtcctagcacccacacacaca

SEQ ID NO: 347540 - DNA, 912 bp, Homo sapiens
gaaatgtctagtactgaagacatctaagattttcaaagtctgagtgtatttttctgccagataccacaatagaacaaatgagagtaatctctgaccttgccgtgtgctgacttttaggaataccacattgtgaagaagtctacccgctccttaagcacgactcaggtggaatctccttggaggctcattcggccatccgtcatctcgatcattgggttgtacaaagaaaaaggcaagggccttggctttagtattgctggaggtcgagactgcattcgtggacagatggggatttttgtcaagaccatcttcccaaatggatcagctgcagaggacggaagacttaaagaaggggatgaaatcctagatgtaaatggaataccaataaagggcttgacatttcaagaagccattcatacctttaagcaaatccggagtggattatttgttttaacggtacgcacaaagttggtgagccccagcctcacaccctgctcgacacccacacacatgagcagatccgcctccccgaacttcaataccagtgggggagcctcggcgggaggttccgatgaaggcagttcttcatccctgggtcggaagacccctgggcccaaggacaggatcgtcatggaagtaacactcaacaaaggtgatagcagctattccttacctttgtctcatttcttgaataacattttggaatctgttgttagcttaattcttccttgttgttctatgaattattcctttggtacaatcttctatcaacaacacgtggtctctgcatgggacagtgaggtcaggtagagagatgttagtcactttagtcaaagtgaagggaagttaccagtagcatggagctctctaagctctccccatgaatcactgtgggtcagaggcttgtgttta

SEQ ID NO: 347541 - DNA, 2752 bp, Homo sapiens
  misc_feature (979)..(979): n is a, c, g, or t
  misc_feature (1811)..(1811): n is a, c, g, or t
  misc_feature (1935)..(1935): n is a, c, g, or t
ttagttatcttcaaaaatgctgtgactgttcagttcaattgacctaaacttcaggtgcttttgtgttatacgggttctttttttggaactgatgagaatgaattggaatctcctattttttaggcagagcaaccatcgaaccctgtatgctaacaataagacatgaccaggcttcattctcccacggcagaatatttatttctgtctcttagaggaagggttaactcccaggtggtgtttgtgttgagttttagaacaatataaaattctaacagagcatttttataatggatgtgccatgtgttcacttaattgaaactcattctgcaaggctggtaaaatggagcaaaacggggaaaaaaaatcaatagttaagaaaggttaatagcacttgattctcctaaatagcgtttttttcatatgtgttcatttacaagaaacgtaagtcattggaatggatttcaacctgttgagtgatacttctttaaaaaactttgcatacattttaagagtgcgagtaatcattttaatatttgctccttttcccctatggaaacaacctgaaaacatccacctcctcacctaattgagtaattggttatgccagatttttaaacagagattacttcacttattttatagcttctgtaattgcattaaggggaagccacataacaaatgcatggggcacagctacatttttgtaactcatctacaggattccttgaattgtgcacagtgtgctcctgggattggctgtctgcgagaggtgacaatgtgtgttcttatgctgctttgcactttcttataggcgtacagagtccctcttctctacagcaatgctgtgcaaagttcatctgttttctctctggggcatctttgtagtgtttttgatgaactgttattccaaaaaagcaggccatgtacaagagtgcaaaccagaaacgagctctgataagtcaacaggatgtccaagttnttttatattcctagcagacgctatcaacagctgaaaaacgacctgactgtgccgccttagagttaaaaataataggagagctggggcagggggccatgtgcgagcatattcctgcacatgcctggcaaattaacatgaccctgcagtcatctctgagatagaagcttatagtaaacttgccagcttactgacagagaacctggaactgcatcagcaagattatttttgggccgggagcagtagctcacacctgtaatccccgcactttgggaagccgaggcgggcagatcactcaaggccaggagttcaagaccagcctggccaacatggtgaaaccctgtctctactaaagatacaaaaaaaaattagccatatatggtggcgtgcacctgtattcccagctattcaggaggctgaggcatgagaatagtttgaacctgggaggcagaggttgtagtgagctgaggtcacgccaccgcactctagcctgggtgactgagccagagcaatactctgtttcaaaaaaaaatttttttttagtaaaaaaaagactgtttctgggctgccattgctcagtaatattttagcaagtttttgttatcattaaagccattttccatacaccatgctgattctctgtgcttggggaacttgtctttctacaaatataggagtgacttctcaaatgttgtatgtgttcatgcctcattgccagtgggtttaagtttttaaacaatgactactttgaactagatttctgcagtttgatttcgaaacataggacatctgttgtcaaacttggcaatggctaaaaaaataagattttcatgcntcccatagttattttaattgaagattgaaatacagaattactgcaaaagaatatgtgttgtcattaattgtcccattttgtgacattcctgggagctaagctaaacaataaaagttattttatntggtagtaaatcagggaccatatggtatcccaaaataagtctgactgagcagttaaattccaggaaattaaaggctaatgttaatgtaattctcacatttgatcactaggggatgaaatcctagatgtaaatggaataccaataaagggcttgacatttcaagaagccattcatacctttaaggtaacaacattcttattgatctcctttatcctattttcctttcttatttccttctggcttgggtttggtgagttgttttttttttttaaccctttgatataaggacattccaaatgtttcagcccacctttcctcactgttttctcagcaaatccggagtggattatttgttttaacggtacgcacaaagttggtgagccccagcctcacaccctgctcgacacccacacacatgagcagatccgcctccccgaacttcaataccagtgggggagcctcggcgggaggttccgatgaaggcagttcttcatccctgggtcggaagacccctgggcccaaggacaggatcgtcatggaagtaacactcaacaaaggtgatagcagctattccttacctttgtctcatttcttgaataacattttggaatctgttgttagcttaattcttccttgttgttctatgaattattcctttggtacaatcttctatcaacaacacgtggtctctgcatgggacagtgaggtcaggtagagagatgttagtcactttagtcaaagtgaagggaagttaccagtagcatggagctctctaagctctccccatgaatcactgtgggtcagaggcttgtgttta

SEQ ID NO: 347542 - DNA, 898 bp, Homo sapiens
ctaagaatcatacattctctgtggggaaaaaatggatttgggtttaaattgggtccacacccctggcctttgaggtaaccttgcagacacagaacatttactccatgtagtctttggtttgggagcatgtagcttgactgtgccaggttgccttcaagaactgcttggttctggggagtaattcatggatgggcctttaattgtgtccccataggaaaactccgcagaggacctcctcaggttaacatctaagagcttgccagatctgaccagctcggtagaagatgtgtcctcctggactgataacgaagaccaggaggcagacggggaagaggacgaaggaaccagctcttctgtccagagagcagtaagtggctctgtgctcctggctttctgttggaattacttttttctgaagtcctgggcgccaggattaggggataaatgcttgagatagtatgatagagaccatgatgggaaaagacaccagtgcattctttctatgtttttctcggaatctctgagaaaaatctgtgagggtgatatttttcctttaaggaaaaaaaatgaaatggtaaacaagataagcaacccagggggctgggcacagtggcttacacctgtaatgccagcacttttggaggctgaggcaggtggatcacctgaggtcaggagttcaagaccagcctggccaacatgatgaaacctagtctctactaaaaatacaaaaattagccaggcatggtggtgcatgcctgtaattccagctactcaggaggctgaggcaagagaatcgtcttgagcccaggaggcagaggttgcagtgagctgagatctcgccactgcactcaagcctgggctacagagcgagactccctctccaaaaacctctcaaaaa

SEQ ID NO: 347543 - DNA, 11518 bp, Homo sapiens
  misc_feature (979)..(979): n is a, c, g, or t
  misc_feature (1811)..(1811): n is a, c, g, or t
  misc_feature (1935)..(1935): n is a, c, g, or t
ttagttatcttcaaaaatgctgtgactgttcagttcaattgacctaaacttcaggtgcttttgtgttatacgggttctttttttggaactgatgagaatgaattggaatctcctattttttaggcagagcaaccatcgaaccctgtatgctaacaataagacatgaccaggcttcattctcccacggcagaatatttatttctgtctcttagaggaagggttaactcccaggtggtgtttgtgttgagttttagaacaatataaaattctaacagagcatttttataatggatgtgccatgtgttcacttaattgaaactcattctgcaaggctggtaaaatggagcaaaacggggaaaaaaaatcaatagttaagaaaggttaatagcacttgattctcctaaatagcgtttttttcatatgtgttcatttacaagaaacgtaagtcattggaatggatttcaacctgttgagtgatacttctttaaaaaactttgcatacattttaagagtgcgagtaatcattttaatatttgctccttttcccctatggaaacaacctgaaaacatccacctcctcacctaattgagtaattggttatgccagatttttaaacagagattacttcacttattttatagcttctgtaattgcattaaggggaagccacataacaaatgcatggggcacagctacatttttgtaactcatctacaggattccttgaattgtgcacagtgtgctcctgggattggctgtctgcgagaggtgacaatgtgtgttcttatgctgctttgcactttcttataggcgtacagagtccctcttctctacagcaatgctgtgcaaagttcatctgttttctctctggggcatctttgtagtgtttttgatgaactgttattccaaaaaagcaggccatgtacaagagtgcaaaccagaaacgagctctgataagtcaacaggatgtccaagttnttttatattcctagcagacgctatcaacagctgaaaaacgacctgactgtgccgccttagagttaaaaataataggagagctggggcagggggccatgtgcgagcatattcctgcacatgcctggcaaattaacatgaccctgcagtcatctctgagatagaagcttatagtaaacttgccagcttactgacagagaacctggaactgcatcagcaagattatttttgggccgggagcagtagctcacacctgtaatccccgcactttgggaagccgaggcgggcagatcactcaaggccaggagttcaagaccagcctggccaacatggtgaaaccctgtctctactaaagatacaaaaaaaaattagccatatatggtggcgtgcacctgtattcccagctattcaggaggctgaggcatgagaatagtttgaacctgggaggcagaggttgtagtgagctgaggtcacgccaccgcactctagcctgggtgactgagccagagcaatactctgtttcaaaaaaaaatttttttttagtaaaaaaaagactgtttctgggctgccattgctcagtaatattttagcaagtttttgttatcattaaagccattttccatacaccatgctgattctctgtgcttggggaacttgtctttctacaaatataggagtgacttctcaaatgttgtatgtgttcatgcctcattgccagtgggtttaagtttttaaacaatgactactttgaactagatttctgcagtttgatttcgaaacataggacatctgttgtcaaacttggcaatggctaaaaaaataagattttcatgcntcccatagttattttaattgaagattgaaatacagaattactgcaaaagaatatgtgttgtcattaattgtcccattttgtgacattcctgggagctaagctaaacaataaaagttattttatntggtagtaaatcagggaccatatggtatcccaaaataagtctgactgagcagttaaattccaggaaattaaaggctaatgttaatgtaattctcacatttgatcactaggggatgaaatcctagatgtaaatggaataccaataaagggcttgacatttcaagaagccattcatacctttaaggtaacaacattcttattgatctcctttatcctattttcctttcttatttccttctggcttgggtttggtgagttgttttttttttttaaccctttgatataaggacattccaaatgtttcagcccacctttcctcactgttttctcagcaaatccggagtggattatttgttttaacggtacgcacaaagttggtgagccccagcctcacaccctgctcgacacccacacacatgagcagatccgcctccccgaacttcaataccagtgggggagcctcggcgggaggttccgatgaaggcagttcttcatccctgggtcggaagacccctgggcccaaggacaggatcgtcatggaagtaacactcaacaaagagccaagagttggattaggcattggtgcctgctgcttggctctggaaaacagtcctcctggcatctacattcacagccttgctccaggatcagtggccaagatggagagcaacctgagccgcggggatcaaatcctggaagtgaactccgtcaacgtccgccatgctgctttaagcaaagtccacgccatcttgagtaaatgccctccaggacccgttcgccttgtcatcggccggcaccctaatccaaaggtacccccttgaagagtccctctcttgcaaaaaaggactcccttatttctgaatctgaactctcccagtactttgcccacgatgtccctggccccttgtcagacttcatggtggccggttctgaggacgaggatcacccgggaagtggctgcagcacgtcggaggagggcagcctgcctcccagcacctccactcacaaggagcctggaaaacccagagccaacagcctcgtgactcttgggagccatcgggcttctgggctcttccacaagcaggtgacagttgccagacaagccagtctccccggaagcccacaggccctccgaaaccctctcctccgccagaggaaggtaggctgctacgatgccaacgatgccagtgatgaggaagagtttgacagagaaggggactgcatttcactcccaggggccctcccgggtcccatcaggcctctgtcagaggatgacccgaggcgtgtctcaatttcctcttccaagggcatggacgtccacaaccaagaggaacgaccccggaaaacactggtgagcaaggccatctcggcacctcttcttggtagctcagtggacttagaggagagtatcccagagggcatggtggatgctgcgtcctatgcagccaacctcacggactctgcagaggcccccaaggggagccctggaagctggtggaagaaggaactgtcaggatcaagtagcgcacccaaattggaatacacagtccgtacagacacccagagtccgacgaacactgggagccccagttccccccagcagaaaagtgaaggcctgggctccaggcacagaccagtggccagggtaagcccccactgcaagagatccgaggctgaggccaagcccagtggctcacagacagtgaacctgactggcagagccaatgatccatgcgatctggactcgagagtccaggccacttctgtcaaagtgactgtcgctggctttcagccaggtggagctgtggagaagttgtgccaggaatctctgggaaagctgaccactggagatgcttgtgtctctaccagctgtgaactagccagtgctctgtcccatctggatgccagccacctcacagagaacctgcccaaagctgcatcagagctggggcaacaacccatgactgctcctcggacctcatctcttccccagggaagaagggggccgctcatcctgaccccagcaagacctctgtagacacagggcaagtcagtcggccagagaatcccagccagcctgcatcgcccagggtcgccaagtgcaaggccaggtctccagtcaggctcccccatgagggcagcccctccccgggggagaaagcagcggctccccctgactacagcaagactcgatcagcatcggaaaccagcacaccccacaataccaggagggtggctgccctcaggggagcgggacctggagcagagggaatgacaccagctggtgctgtcctgccaggagaccccctcacatcccaggagcagagacagggagctccaggtaaccacagtaaggctctggaaatgacaggaatccatgcacctgaaagctcccaggagccttccctgctggagggagcagattctgtgtcctcaagggcaccgcaggccagcctctccatgctgccatccactgacaacaccaaagaagcatgtggccatgtctcggggcactgctgcccgggggggagtagagagagccctgtgacggacattgacagcttcatcaaggagctggatgcttctgcagcaaggtctccgtcttcccagacgggggacagtggctctcaggagggcagtgctcagggccacccaccagccggggctggaggtgggagctcctgccgtgccgaaccagtcccggggggccagacctcctccccgaggagggcctgggctgctggtgcccccgcctacccacaatgggcctcccagccttcggttttagattcaattaatcccgacaaacattttactgtgaacaaaaactttctgagcaactactctagaaattttagcagttttcatgaagacagcacctccctatcaggcctgggtgacagcacggagccgtctctgtcatccatgtatggcgatgctgaggattcttcttctgaccctgagtcactcactgaagccccacgagcttctgccagggacggctggtcccctcctcgttcccgtgtgtctttgcacaaggaagatccttcggagtcagaagaggaacagattgagatttgttccacacgtggctgccccaatccaccctcgagtcctgctcatcttcccacccaggctgccatctgtcctgcctcagccaaagttctgtcattaaaatacagcactccgagagagtcggtggccagtccccgtgagaaggccgcctgcttgccaggctcatacacttcaggcccagactcttcccagccatcatcactcttggagatgagctctcaggagcatgaaactcatgcggacataagcacttcacagaaccacaggccctcgtgtgcagaagaaaccacagaagtcaccagcgctagctcagccatggaaaacagtccgctgtctaaagtagccaggcattttcacagtccgcccatcattctcagctcccccaacatggtaaatggcttggaacatgacctgctagatgacgaaaccctgaatcaatacgaaacaagcattaatgcagctgccagtctgtcctccttcagtgtggatgtccctaagaatggagaatctgttttggaaaacctccacatctctgaaagtcaagacctggatgacttgctacagaaaccaaaaatgatcgctaggaggcccatcatggcctggtttaaagaaataaataaacataaccaaggcacacatttgaggagcaaaaccgagaaggaacaacctctaatgcctgccagaagtcccgactccaagattcagatggtgagttcaagccaaaaaaagggcgttactgtgcctcatagccctcctcagccgaaaacaaacctggaaaataaggacctgtctaagaagagtccggcagaaatgcttctgactaatggtcagaaggcaaagtgtggtccgaagctgaagaggctcagcctcaagggcaaggccaaagtcaactctgaggcccctgctgcgaatgctgtgaaggctggggggacggaccacaggaaacccttgatctcaccccagacctcccacaaaacactttctaaggcagtgtcacagcggctccatgtagccgaccacgaggaccctgacagaaacaccacagctgcccccaggtccccccagtgtgtgctggaaagcaagccacctcttgccacctctgggccactgaaaccctcagtgtctgacacgagcatcaggacatttgtctcgcccctgacctctcccaagcctgttcctgagcaaggcatgtggagcaggttccacatggctgtcctctctgaacccgacagaggttgcccaaccacccctaaatctcctaagtgtagagcagagggcagggcgccccgtgctgactccgggccggtgagtccggcagcgtctaggaacggcatgtccgtggcagggaacagacagagtgagccgcgcctggccagccatgtggcagcagacacagcccaacccaggccgactggcgaaaaaggaggcaacataatggccagcgatcgcctcgaaagaacaaaccagctgaaaatcgtggagatttctgctgaagcagtgtcagagactgtatgtggtaacaagccagctgaaagcgacagacggggagggtgcttggcccagggcaactgtcaggagaagagtgaaatcaggctctatcgccaggtcgcagaatcatccacaagtcatccatcctcactcccatctcatgcctcccaggcagagcaggaaatgtcacgatcattcagcatggcaaaactggcgtcctcctcctcctcccttcaaacagccattagaaaggcagaatactcccagggaaaatcaagcctgatgtcagactcccgaggggtgcccagaaacagcattccagggggcccctcgggggaggaccatctctacttcaccccaaggccagcgaccaggacctactccatgccagcccagttctcaagccattttggacgggagggtcaccccccacacagcctgggtcgctctcgggacagccaggtccctgtgacaagcagtgttgtccccgaggcaaaggcatccagaggtggtcttcccagcctggctaatggacagggcatatatagtgtaaagccgctgctggacacatcgaggaatcttccagccacagatgaaggggatatcatttcagtccaggagacgagctgcctagtcacagacaaaatcaaagtcaccagacgacactactgctatgagcagaactggccccatgaatctacctcatttttctctgtgaagcagcggatcaagtcttttgagaacctggccaatgctgaccggcctgtagccaagtccggggcttccccatttttgtcggtgagctccaagcctcccattgggaggcggtcttccggcagcattgtttccgggagcctgggccacccaggtgacgcagcagcaaggttgttgagacgcagcttgagttcctgcagcgaaaaccaaagcgaagccggcaccctcctgccccagatggccaagtctccctcaatcatgacactgaccatctctcggcagaacccaccagagaccagtagcaagggctctgattcggaactaaagaaatcacttggtcctttgggaattcccaccccaacgatgaccctggcttctcctgttaagaggaacaagtcctcggtacgccacacgcagccctcgcccgtgtcccgctccaagctccaggagctgagagccttgagcatgcctgaccttgacaagctctgcagcgaggattactcagcagggccgagcgccgtgctcttcaaaactgagctggagatcacccccaggaggtcacctggccctcctgctggaggcgtttcgtgtcccgagaagggcgggaacagggcctgtccaggaggaagtggccctaaaaccagtgctgctgagacacccagttcagccagtgatacgggtgaagctgcccaggatctgccttttagaagaagctggtcagttaatttggatcaacttctagtctcagcgggggaccagcaaagattacagtctgttttatcgtcagtgggatcgaaatctaccatcctaactctcattcaggaagcgaaagcacaatcagagaatgaagcagatgtttgcttcatagtcttgaatagaaaagaaggctcaggtctgggattcagtgtggcaggagggacagatgtggagccaaaatcaatcacggtccacagggtgttttctcagggggcggcttctcaggaagggactatgaaccgaggggatttccttctgtcagtcaacggcgcctcactggctggcttagcccacgggaatgtcctgaaggttctgcaccaggcacagctgcacaaagatgccctcgtggtcatcaagaaagggatggatcagcccaggccctctgcccggcaggagcctcccacagccaatgggaagggtttgctgtccagaaagaccatccccctggagcctggcattgggagaagtgtggctgtacacgatgctctgtgtgttgaagtgctgaagacctcggctgggctgggactgagtctggatgggggaaaatcatcggtgacgggagatgggcccttggtcattaaaagagtgtacaaaggtggtgcggctgaacaagctggaataatagaagctggagatgaaattcttgctattaatgggaaacctctggttgggctcatgcactttgatgcctggaatattatgaagtctgtcccagaaggacctgtgcagttattaattagaaagcataggaattcttcatgaattttaacaagaatcattttctcagttctcttctttctttagcaaatcagagtgacttctttaaaccacaggttgttgaaatggccaacactggtacagacacggactataaaaatctccaagcttgtgcttacacatgaagcctgacttaactgtatgtgcaacagcaatgaaattaactccagaagccttccacctgcgtcacccaggccgggagggttccttcgttccagtgcctgtcccctacctttatgttatgtttactgatggggatacaagatgtgacacacccttctttatttgaaacaaacaaacatttagctagacctttgcttccttcttgccagctctcccaacatacccaatcctggtgatcagggaactaaaagtctgagggggacacaaatgtcacacctaagaggacaatcaatcattttgtatgattttgtaagtaagtaaatgacagaatgcttttaggcacattcaatggaaggaggagatgtaggtctgtatatgttaccctgaaaagagaataagacttacttaaaaaaatgaattatgacctgttaggctgagctcaggaattgtccaaaaaggaaaaagcaaaataattaattgagagtattttttagtgagtgtaatgtataatgtacgtatgcaaagttcaactcaataggttattgatcaccatgaagtattgatcattttctatctcaaaagtgtaagccataaggctgttttacagaatagcacttctgataagctgtattaaatagccatgagcttcactgcttagagggagcagaaaggtcaacatctaaaagcaccttacaactagtttttgaacctgtcttgataagtgcttgaattcaagactggtcagtacaagagcagacaaaaatatcacaagtcagtcactgggtttccatttctgaattttatgcactccaaccatgaatttaaactaaatttttagaaatcaagtatctttctaagtgtccttggatttatagacaatgtatgtacaatccaaatagaggagcttaatggaatccttttaggagactggttggtttttttccctctttcccaacatgtttaagaaatgtaacattctaagtattggatctcttttcttgacctagtataatgacaactgcagtgacttaagtttttgctgttttcgttttcccgctttgcaatttcctccttttgccaaaaatgttttcctacagaagactgtcgtgactcacgctacttgggaaactcactctggccactcctcctctggtggcatgagctgcttcccagtagctattccgattggatattccgttcgtcgtcacatagctggcttttctctcctcatgatgtaccttattttcttaggtaaataattccaaactctcatcgggtcataaagaggaggagaaacagggtgagtcaaggtaaaggagcagaaatgtagttacaagccaggtcgtcttcagtggcacaaaccaacccgttgagccctgacaacatgagtggagagtgcatttgccatacctgtgtgcatgacactaagattttatgttggagatacttctttaaataacctacagcttgggtctatggctgtgacccccagattcatggaggggctttagccatcagctttgtacatcatcatttttctgaatgaccaatcccactaaacatctttgaagtcggcctagagaggtccttcagatgagagagaaatagctggcttgtctgagtccagatttctcatcaactggcaatacaaaggaaaatatggtacaggagttagttagaaaggtcttattgattttacttctacttttcactacagttacaggtagaatactgtaggaagtcagtgcaaggtgcatgcttgattgatagatattgattgtttttcagtctctggggtcagttttgtggtttctgctttcttgcctaaatcaaagactatttcaagtcaacaacactgaaaactgcttttcgcctccactcttacagctgtgcctaataataattaattaataaacgcacagccctatgtgaacagacaggaatttcttgtgcaatgtggagcaaatggaatggtctccttccgcaagtctttttaatcctcatatctggagtacaagggtagacctctggcttaccacatacactatgctaaagtcatcagccactgctactacatcttgccagaaggtttccctcgccaacaaacagttgaaatttaagggaagaagcaaaagctaaactgtctttgaccctaagatagatagaaagctatttatttgtcttcagtgttcaaggcatgactagtatttctaattagcctaataaattcccacactttctgaagtgaacactaatggtattgtcctactaaaactgtcattgtttctttttttttaactggtcagtcattcacaataagctatgagggtaaataaatatgtgttataacaagtaaaccgtagttgcaagaatataccatgaagattaaagtaggctgggtttcatttccatcttcccacacatctcattgaatttgatggttgacttaattggcaccataactttgtatgatattatacattaacctttatttatgtaaagtaaaatgccttatatattaaagagtaagtgcaataatatgaaatagcctgtacattttaaaaatgttgtcaccaagttatataaatccacatctctgtaaacaaccttttttaagtaattttaaaaaaaataaacactctgcttactac

SEQ ID NO: 347544 - DNA, 10425 bp, Homo sapiens
  misc_feature (352)..(352): n is a, c, g, or t
agtctgtcccattccagaggctgctgaagcacagcagagcacgctcacctgaccagctcataaagcagttacctggctgagcagtgctggaatggcggctttatctacctgatcatgctgcgtcgctttaagcacaaagcccactccacttataatggcaacagtagcaacagctctgaaccaggagaaacacctaccttggagctgggtgaccgaactgcgaaaaaggggaaacgaaccagaaagtttggggtcatctccaggcctcctgccaacaaggcccctgaagaatccaagggcagcgctggctgtgaggtgtccagtgaccccagcactgagctggagaacggcnctgaccctgaacttggaaacggccatgtctttcagctagaaaatggcccagattctctcaaggaggtggctggaccccatctagagaggtcagaagtggacagagggacagagcatagaattccaaagacagatgctcctctgaccacaagcaatgacaaacgccgcttctcaaaaggtgggaagacggacttccaatcgagtgactgcctggcacggcaggaggaagttggccgaatatggaagatggagctgctcaaagaatcggatgggctgggaattcaggttagtggaggccgaggatcaaagcgctcacctcacgctatcgttgtcactcaagtgaaggaaggaggtgccgctcacaggaataccacattgtgaagaagtctacccgctccttaagcacgactcaggtggaatctccttggaggctcattcggccatccgtcatctcgatcattgggttgtacaaagaaaaaggcaagggccttggctttagtattgctggaggtcgagactgcattcgtggacagatggggatttttgtcaagaccatcttcccaaatggatcagctgcagaggacggaagacttaaagaaggggatgaaatcctagatgtaaatggaataccaataaagggcttgacatttcaagaagccattcatacctttaaggtaacaacattcttattgatctcctttatcctattttcctttcttatttccttctggcttgggtttggtgagttgttttttttttttaaccctttgatataaggacattccaaatgtttcagcccacctttcctcactgttttctcagcaaatccggagtggattatttgttttaacggtacgcacaaagttggtgagccccagcctcacaccctgctcgacacccacacacatgagcagatccgcctccccgaacttcaataccagtgggggagcctcggcgggaggttccgatgaaggcagttcttcatccctgggtcggaagacccctgggcccaaggacaggatcgtcatggaagtaacactcaacaaagagccaagagttggattaggcattggtgcctgctgcttggctctggaaaacagtcctcctggcatctacattcacagccttgctccaggatcagtggccaagatggagagcaacctgagccgcggggatcaaatcctggaagtgaactccgtcaacgtccgccatgctgctttaagcaaagtccacgccatcttgagtaaatgccctccaggacccgttcgccttgtcatcggccggcaccctaatccaaaggtacccccttgaagagtccctctcttgcaaaaaaggactcccttatttctgaatctgaactctcccagtactttgcccacgatgtccctggccccttgtcagacttcatggtggccggttctgaggacgaggatcacccgggaagtggctgcagcacgtcggaggagggcagcctgcctcccagcacctccactcacaaggagcctggaaaacccagagccaacagcctcgtgactcttgggagccatcgggcttctgggctcttccacaagcaggtgacagttgccagacaagccagtctccccggaagcccacaggccctccgaaaccctctcctccgccagaggaaggtaggctgctacgatgccaacgatgccagtgatgaggaagagtttgacagagaaggggactgcatttcactcccaggggccctcccgggtcccatcaggcctctgtcagaggatgacccgaggcgtgtctcaatttcctcttccaagggcatggacgtccacaaccaagaggaacgaccccggaaaacactggtgagcaaggccatctcggcacctcttcttggtagctcagtggacttagaggagagtatcccagagggcatggtggatgctgcgtcctatgcagccaacctcacggactctgcagaggcccccaaggggagccctggaagctggtggaagaaggaactgtcaggatcaagtagcgcacccaaattggaatacacagtccgtacagacacccagagtccgacgaacactgggagccccagttccccccagcagaaaagtgaaggcctgggctccaggcacagaccagtggccagggtaagcccccactgcaagagatccgaggctgaggccaagcccagtggctcacagacagtgaacctgactggcagagccaatgatccatgcgatctggactcgagagtccaggccacttctgtcaaagtgactgtcgctggctttcagccaggtggagctgtggagaagttgtgccaggaatctctgggaaagctgaccactggagatgcttgtgtctctaccagctgtgaactagccagtgctctgtcccatctggatgccagccacctcacagagaacctgcccaaagctgcatcagagctggggcaacaacccatgactgctcctcggacctcatctcttccccagggaagaagggggccgctcatcctgaccccagcaagacctctgtagacacagggcaagtcagtcggccagagaatcccagccagcctgcatcgcccagggtcgccaagtgcaaggccaggtctccagtcaggctcccccatgagggcagcccctccccgggggagaaagcagcggctccccctgactacagcaagactcgatcagcatcggaaaccagcacaccccacaataccaggagggtggctgccctcaggggagcgggacctggagcagagggaatgacaccagctggtgctgtcctgccaggagaccccctcacatcccaggagcagagacagggagctccaggtaaccacagtaaggctctggaaatgacaggaatccatgcacctgaaagctcccaggagccttccctgctggagggagcagattctgtgtcctcaagggcaccgcaggccagcctctccatgctgccatccactgacaacaccaaagaagcatgtggccatgtctcggggcactgctgcccgggggggagtagagagagccctgtgacggacattgacagcttcatcaaggagctggatgcttctgcagcaaggtctccgtcttcccagacgggggacagtggctctcaggagggcagtgctcagggccacccaccagccggggctggaggtgggagctcctgccgtgccgaaccagtcccggggggccagacctcctccccgaggagggcctgggctgctggtgcccccgcctacccacaatgggcctcccagccttcggttttagattcaattaatcccgacaaacattttactgtgaacaaaaactttctgagcaactactctagaaattttagcagttttcatgaagacagcacctccctatcaggcctgggtgacagcacggagccgtctctgtcatccatgtatggcgatgctgaggattcttcttctgaccctgagtcactcactgaagccccacgagcttctgccagggacggctggtcccctcctcgttcccgtgtgtctttgcacaaggaagatccttcggagtcagaagaggaacagattgagatttgttccacacgtggctgccccaatccaccctcgagtcctgctcatcttcccacccaggctgccatctgtcctgcctcagccaaagttctgtcattaaaatacagcactccgagagagtcggtggccagtccccgtgagaaggccgcctgcttgccaggctcatacacttcaggcccagactcttcccagccatcatcactcttggagatgagctctcaggagcatgaaactcatgcggacataagcacttcacagaaccacaggccctcgtgtgcagaagaaaccacagaagtcaccagcgctagctcagccatggaaaacagtccgctgtctaaagtagccaggcattttcacagtccgcccatcattctcagctcccccaacatggtaaatggcttggaacatgacctgctagatgacgaaaccctgaatcaatacgaaacaagcattaatgcagctgccagtctgtcctccttcagtgtggatgtccctaagaatggagaatctgttttggaaaacctccacatctctgaaagtcaagacctggatgacttgctacagaaaccaaaaatgatcgctaggaggcccatcatggcctggtttaaagaaataaataaacataaccaaggcacacatttgaggagcaaaaccgagaaggaacaacctctaatgcctgccagaagtcccgactccaagattcagatggtgagttcaagccaaaaaaagggcgttactgtgcctcatagccctcctcagccgaaaacaaacctggaaaataaggacctgtctaagaagagtccggcagaaatgcttctgactaatggtcagaaggcaaagtgtggtccgaagctgaagaggctcagcctcaagggcaaggccaaagtcaactctgaggcccctgctgcgaatgctgtgaaggctggggggacggaccacaggaaacccttgatctcaccccagacctcccacaaaacactttctaaggcagtgtcacagcggctccatgtagccgaccacgaggaccctgacagaaacaccacagctgcccccaggtccccccagtgtgtgctggaaagcaagccacctcttgccacctctgggccactgaaaccctcagtgtctgacacgagcatcaggacatttgtctcgcccctgacctctcccaagcctgttcctgagcaaggcatgtggagcaggttccacatggctgtcctctctgaacccgacagaggttgcccaaccacccctaaatctcctaagtgtagagcagagggcagggcgccccgtgctgactccgggccggtgagtccggcagcgtctaggaacggcatgtccgtggcagggaacagacagagtgagccgcgcctggccagccatgtggcagcagacacagcccaacccaggccgactggcgaaaaaggaggcaacataatggccagcgatcgcctcgaaagaacaaaccagctgaaaatcgtggagatttctgctgaagcagtgtcagagactgtatgtggtaacaagccagctgaaagcgacagacggggagggtgcttggcccagggcaactgtcaggagaagagtgaaatcaggctctatcgccaggtcgcagaatcatccacaagtcatccatcctcactcccatctcatgcctcccaggcagagcaggaaatgtcacgatcattcagcatggcaaaactggcgtcctcctcctcctcccttcaaacagccattagaaaggcagaatactcccagggaaaatcaagcctgatgtcagactcccgaggggtgcccagaaacagcattccagggggcccctcgggggaggaccatctctacttcaccccaaggccagcgaccaggacctactccatgccagcccagttctcaagccattttggacgggagggtcaccccccacacagcctgggtcgctctcgggacagccaggtccctgtgacaagcagtgttgtccccgaggcaaaggcatccagaggtggtcttcccagcctggctaatggacagggcatatatagtgtaaagccgctgctggacacatcgaggaatcttccagccacagatgaaggggatatcatttcagtccaggagacgagctgcctagtcacagacaaaatcaaagtcaccagacgacactactgctatgagcagaactggccccatgaatctacctcatttttctctgtgaagcagcggatcaagtcttttgagaacctggccaatgctgaccggcctgtagccaagtccggggcttccccatttttgtcggtgagctccaagcctcccattgggaggcggtcttccggcagcattgtttccgggagcctgggccacccaggtgacgcagcagcaaggttgttgagacgcagcttgagttcctgcagcgaaaaccaaagcgaagccggcaccctcctgccccagatggccaagtctccctcaatcatgacactgaccatctctcggcagaacccaccagagaccagtagcaagggctctgattcggaactaaagaaatcacttggtcctttgggaattcccaccccaacgatgaccctggcttctcctgttaagaggaacaagtcctcggtacgccacacgcagccctcgcccgtgtcccgctccaagctccaggagctgagagccttgagcatgcctgaccttgacaagctctgcagcgaggattactcagcagggccgagcgccgtgctcttcaaaactgagctggagatcacccccaggaggtcacctggccctcctgctggaggcgtttcgtgtcccgagaagggcgggaacagggcctgtccaggaggaagtggccctaaaaccagtgctgctgagacacccagttcagccagtgatacgggtgaagctgcccaggatctgccttttagaagaagctggtcagttaatttggatcaacttctagtctcagcgggggaccagcaaagattacagtctgttttatcgtcagtgggatcgaaatctaccatcctaactctcattcaggaagcgaaagcacaatcagagaatgaagcagatgtttgcttcatagtcttgaatagaaaagaaggctcaggtctgggattcagtgtggcaggagggacagatgtggagccaaaatcaatcacggtccacagggtgttttctcagggggcggcttctcaggaagggactatgaaccgaggggatttccttctgtcagtcaacggcgcctcactggctggcttagcccacgggaatgtcctgaaggttctgcaccaggcacagctgcacaaagatgccctcgtggtcatcaagaaagggatggatcagcccaggccctctgcccggcaggagcctcccacagccaatgggaagggtttgctgtccagaaagaccatccccctggagcctggcattgggagaagtgtggctgtacacgatgctctgtgtgttgaagtgctgaagacctcggctgggctgggactgagtctggatgggggaaaatcatcggtgacgggagatgggcccttggtcattaaaagagtgtacaaaggtggtgcggctgaacaagctggaataatagaagctggagatgaaattcttgctattaatgggaaacctctggttgggctcatgcactttgatgcctggaatattatgaagtctgtcccagaaggacctgtgcagttattaattagaaagcataggaattcttcatgaattttaacaagaatcattttctcagttctcttctttctttagcaaatcagagtgacttctttaaaccacaggttgttgaaatggccaacactggtacagacacggactataaaaatctccaagcttgtgcttacacatgaagcctgacttaactgtatgtgcaacagcaatgaaattaactccagaagccttccacctgcgtcacccaggccgggagggttccttcgttccagtgcctgtcccctacctttatgttatgtttactgatggggatacaagatgtgacacacccttctttatttgaaacaaacaaacatttagctagacctttgcttccttcttgccagctctcccaacatacccaatcctggtgatcagggaactaaaagtctgagggggacacaaatgtcacacctaagaggacaatcaatcattttgtatgattttgtaagtaagtaaatgacagaatgcttttaggcacattcaatggaaggaggagatgtaggtctgtatatgttaccctgaaaagagaataagacttacttaaaaaaatgaattatgacctgttaggctgagctcaggaattgtccaaaaaggaaaaagcaaaataattaattgagagtattttttagtgagtgtaatgtataatgtacgtatgcaaagttcaactcaataggttattgatcaccatgaagtattgatcattttctatctcaaaagtgtaagccataaggctgttttacagaatagcacttctgataagctgtattaaatagccatgagcttcactgcttagagggagcagaaaggtcaacatctaaaagcaccttacaactagtttttgaacctgtcttgataagtgcttgaattcaagactggtcagtacaagagcagacaaaaatatcacaagtcagtcactgggtttccatttctgaattttatgcactccaaccatgaatttaaactaaatttttagaaatcaagtatctttctaagtgtccttggatttatagacaatgtatgtacaatccaaatagaggagcttaatggaatccttttaggagactggttggtttttttccctctttcccaacatgtttaagaaatgtaacattctaagtattggatctcttttcttgacctagtataatgacaactgcagtgacttaagtttttgctgttttcgttttcccgctttgcaatttcctccttttgccaaaaatgttttcctacagaagactgtcgtgactcacgctacttgggaaactcactctggccactcctcctctggtggcatgagctgcttcccagtagctattccgattggatattccgttcgtcgtcacatagctggcttttctctcctcatgatgtaccttattttcttaggtaaataattccaaactctcatcgggtcataaagaggaggagaaacagggtgagtcaaggtaaaggagcagaaatgtagttacaagccaggtcgtcttcagtggcacaaaccaacccgttgagccctgacaacatgagtggagagtgcatttgccatacctgtgtgcatgacactaagattttatgttggagatacttctttaaataacctacagcttgggtctatggctgtgacccccagattcatggaggggctttagccatcagctttgtacatcatcatttttctgaatgaccaatcccactaaacatctttgaagtcggcctagagaggtccttcagatgagagagaaatagctggcttgtctgagtccagatttctcatcaactggcaatacaaaggaaaatatggtacaggagttagttagaaaggtcttattgattttacttctacttttcactacagttacaggtagaatactgtaggaagtcagtgcaaggtgcatgcttgattgatagatattgattgtttttcagtctctggggtcagttttgtggtttctgctttcttgcctaaatcaaagactatttcaagtcaacaacactgaaaactgcttttcgcctccactcttacagctgtgcctaataataattaattaataaacgcacagccctatgtgaacagacaggaatttcttgtgcaatgtggagcaaatggaatggtctccttccgcaagtctttttaatcctcatatctggagtacaagggtagacctctggcttaccacatacactatgctaaagtcatcagccactgctactacatcttgccagaaggtttccctcgccaacaaacagttgaaatttaagggaagaagcaaaagctaaactgtctttgaccctaagatagatagaaagctatttatttgtcttcagtgttcaaggcatgactagtatttctaattagcctaataaattcccacactttctgaagtgaacactaatggtattgtcctactaaaactgtcattgtttctttttttttaactggtcagtcattcacaataagctatgagggtaaataaatatgtgttataacaagtaaaccgtagttgcaagaatataccatgaagattaaagtaggctgggtttcatttccatcttcccacacatctcattgaatttgatggttgacttaattggcaccataactttgtatgatattatacattaacctttatttatgtaaagtaaaatgccttatatattaaagagtaagtgcaataatatgaaatagcctgtacattttaaaaatgttgtcaccaagttatataaatccacatctctgtaaacaaccttttttaagtaattttaaaaaaaataaacactctgcttactac

SEQ ID NO: 347545 - DNA, 7954 bp, Homo sapiens
agcctcccaagtagctgggattacaggcacctgccactgcgcctggctaatttttttgtatttttagtagagacggggtttcaccatgttggccaggctggtctcgaactcctgacctcaggtgatccacccgcctcagcctcccaaagtgctgggattacaagcatgcgccaccacgcccagctttctgaaaaagaaaaaaatatttgaggttgtttataattttctagtttttaataattgaggggctgctttcttatattatcccttttatctcccctacaacctctcctgtgtatgtaccttctgtttacgttctccacgtagaactggacagctcctcggacctcatctcttccccagggaagaagggggccgctcatcctgaccccagcaagacctctgtagacacagggcaagtcagtcggccagagaatcccagccagcctgcatcgcccagggtcgccaagtgcaaggccaggtctccagtcaggctcccccatgagggcagcccctccccgggggagaaagcagcggctccccctgactacagcaagactcgatcagcatcggaaaccagcacaccccacaataccaggagggtggctgccctcaggggagcgggacctggagcagagggaatgacaccagctggtgctgtcctgccaggagaccccctcacatcccaggagcagagacagggagctccaggtaaccacagtaaggctctggaaatgacaggaatccatgcacctgaaagctcccaggagccttccctgctggagggagcagattctgtgtcctcaagggcaccgcaggccagcctctccatgctgccatccactgacaacaccaaagaagcatgtggccatgtctcggggcactgctgcccgggggggagtagagagagccctgtgacggacattgacagcttcatcaaggagctggatgcttctgcagcaaggtctccgtcttcccagacgggggacagtggctctcaggagggcagtgctcagggccacccaccagccggggctggaggtgggagctcctgccgtgccgaaccagtcccggggggccagacctcctccccgaggagggcctgggctgctggtgcccccgcctacccacaatgggcctcccagccttcggttttagattcaattaatcccgacaaacattttactgtgaacaaaaactttctgagcaactactctagaaattttagcagttttcatgaagacagcacctccctatcaggcctgggtgacagcacggagccgtctctgtcatccatgtatggcgatgctgaggattcttcttctgaccctgagtcactcactgaagccccacgagcttctgccagggacggctggtcccctcctcgttcccgtgtgtctttgcacaaggaagatccttcggagtcagaagaggaacagattgagatttgttccacacgtggctgccccaatccaccctcgagtcctgctcatcttcccacccaggctgccatctgtcctgcctcagccaaagttctgtcattaaaatacagcactccgagagagtcggtggccagtccccgtgagaaggccgcctgcttgccaggctcatacacttcaggcccagactcttcccagccatcatcactcttggagatgagctctcaggagcatgaaactcatgcggacataagcacttcacagaaccacaggccctcgtgtgcagaagaaaccacagaagtcaccagcgctagctcagccatggaaaacagtccgctgtctaaagtagccaggcattttcacagtccgcccatcattctcagctcccccaacatggtaaatggcttggaacatgacctgctagatgacgaaaccctgaatcaatacgaaacaagcattaatgcagctgccagtctgtcctccttcagtgtggatgtccctaagaatggagaatctgttttggaaaacctccacatctctgaaagtcaagacctggatgacttgctacagaaaccaaaaatgatcgctaggaggcccatcatggcctggtttaaagaaataaataaacataaccaaggcacacatttgaggagcaaaaccgagaaggaacaacctctaatgcctgccagaagtcccgactccaagattcagatggtgagttcaagccaaaaaaagggcgttactgtgcctcatagccctcctcagccgaaaacaaacctggaaaataaggacctgtctaagaagagtccggcagaaatgcttctgactaatggtcagaaggcaaagtgtggtccgaagctgaagaggctcagcctcaagggcaaggccaaagtcaactctgaggcccctgctgcgaatgctgtgaaggctggggggacggaccacaggaaacccttgatctcaccccagacctcccacaaaacactttctaaggcagtgtcacagcggctccatgtagccgaccacgaggaccctgacagaaacaccacagctgcccccaggtccccccagtgtgtgctggaaagcaagccacctcttgccacctctgggccactgaaaccctcagtgtctgacacgagcatcaggacatttgtctcgcccctgacctctcccaagcctgttcctgagcaaggcatgtggagcaggttccacatggctgtcctctctgaacccgacagaggttgcccaaccacccctaaatctcctaagtgtagagcagagggcagggcgccccgtgctgactccgggccggtgagtccggcagcgtctaggaacggcatgtccgtggcagggaacagacagagtgagccgcgcctggccagccatgtggcagcagacacagcccaacccaggccgactggcgaaaaaggaggcaacataatggccagcgatcgcctcgaaagaacaaaccagctgaaaatcgtggagatttctgctgaagcagtgtcagagactgtatgtggtaacaagccagctgaaagcgacagacggggagggtgcttggcccagggcaactgtcaggagaagagtgaaatcaggctctatcgccaggtcgcagaatcatccacaagtcatccatcctcactcccatctcatgcctcccaggcagagcaggaaatgtcacgatcattcagcatggcaaaactggcgtcctcctcctcctcccttcaaacagccattagaaaggcagaatactcccagggaaaatcaagcctgatgtcagactcccgaggggtgcccagaaacagcattccagggggcccctcgggggaggaccatctctacttcaccccaaggccagcgaccaggacctactccatgccagcccagttctcaagccattttggacgggagggtcaccccccacacagcctgggtcgctctcgggacagccaggtccctgtgacaagcagtgttgtccccgaggcaaaggcatccagaggtggtcttcccagcctggctaatggacagggcatatatagtgtaaagccgctgctggacacatcgaggaatcttccagccacagatgaaggggatatcatttcagtccaggagacgagctgcctagtcacagacaaaatcaaagtcaccagacgacactactgctatgagcagaactggccccatgaatctacctcatttttctctgtgaagcagcggatcaagtcttttgagaacctggccaatgctgaccggcctgtagccaagtccggggcttccccatttttgtcggtgagctccaagcctcccattgggaggcggtcttccggcagcattgtttccgggagcctgggccacccaggtgacgcagcagcaaggttgttgagacgcagcttgagttcctgcagcgaaaaccaaagcgaagccggcaccctcctgccccagatggccaagtctccctcaatcatgacactgaccatctctcggcagaacccaccagagaccagtagcaagggctctgattcggaactaaagaaatcacttggtcctttgggaattcccaccccaacgatgaccctggcttctcctgttaagaggaacaagtcctcggtacgccacacgcagccctcgcccgtgtcccgctccaagctccaggagctgagagccttgagcatgcctgaccttgacaagctctgcagcgaggattactcagcagggccgagcgccgtgctcttcaaaactgagctggagatcacccccaggaggtcacctggccctcctgctggaggcgtttcgtgtcccgagaagggcgggaacagggcctgtccaggaggaagtggccctaaaaccagtgctgctgagacacccagttcagccagtgatacgggtgaagctgcccaggatctgccttttagaagaagctggtcagttaatttggatcaacttctagtctcagcgggggaccagcaaagattacagtctgttttatcgtcagtgggatcgaaatctaccatcctaactctcattcaggaagcgaaagcacaatcagagaatgaagcagatgtttgcttcatagtcttgaatagaaaagaaggctcaggtctgggattcagtgtggcaggagggacagatgtggagccaaaatcaatcacggtccacagggtgttttctcagggggcggcttctcaggaagggactatgaaccgaggggatttccttctgtcagtcaacggcgcctcactggctggcttagcccacgggaatgtcctgaaggttctgcaccaggcacagctgcacaaagatgccctcgtggtcatcaagaaagggatggatcagcccaggccctctgcccggcaggagcctcccacagccaatgggaagggtttgctgtccagaaagaccatccccctggagcctggcattgggagaagtgtggctgtacacgatgctctgtgtgttgaagtgctgaagacctcggctgggctgggactgagtctggatgggggaaaatcatcggtgacgggagatgggcccttggtcattaaaagagtgtacaaaggtggtgcggctgaacaagctggaataatagaagctggagatgaaattcttgctattaatgggaaacctctggttgggctcatgcactttgatgcctggaatattatgaagtctgtcccagaaggacctgtgcagttattaattagaaagcataggaattcttcatgaattttaacaagaatcattttctcagttctcttctttctttagcaaatcagagtgacttctttaaaccacaggttgttgaaatggccaacactggtacagacacggactataaaaatctccaagcttgtgcttacacatgaagcctgacttaactgtatgtgcaacagcaatgaaattaactccagaagccttccacctgcgtcacccaggccgggagggttccttcgttccagtgcctgtcccctacctttatgttatgtttactgatggggatacaagatgtgacacacccttctttatttgaaacaaacaaacatttagctagacctttgcttccttcttgccagctctcccaacatacccaatcctggtgatcagggaactaaaagtctgagggggacacaaatgtcacacctaagaggacaatcaatcattttgtatgattttgtaagtaagtaaatgacagaatgcttttaggcacattcaatggaaggaggagatgtaggtctgtatatgttaccctgaaaagagaataagacttacttaaaaaaatgaattatgacctgttaggctgagctcaggaattgtccaaaaaggaaaaagcaaaataattaattgagagtattttttagtgagtgtaatgtataatgtacgtatgcaaagttcaactcaataggttattgatcaccatgaagtattgatcattttctatctcaaaagtgtaagccataaggctgttttacagaatagcacttctgataagctgtattaaatagccatgagcttcactgcttagagggagcagaaaggtcaacatctaaaagcaccttacaactagtttttgaacctgtcttgataagtgcttgaattcaagactggtcagtacaagagcagacaaaaatatcacaagtcagtcactgggtttccatttctgaattttatgcactccaaccatgaatttaaactaaatttttagaaatcaagtatctttctaagtgtccttggatttatagacaatgtatgtacaatccaaatagaggagcttaatggaatccttttaggagactggttggtttttttccctctttcccaacatgtttaagaaatgtaacattctaagtattggatctcttttcttgacctagtataatgacaactgcagtgacttaagtttttgctgttttcgttttcccgctttgcaatttcctccttttgccaaaaatgttttcctacagaagactgtcgtgactcacgctacttgggaaactcactctggccactcctcctctggtggcatgagctgcttcccagtagctattccgattggatattccgttcgtcgtcacatagctggcttttctctcctcatgatgtaccttattttcttaggtaaataattccaaactctcatcgggtcataaagaggaggagaaacagggtgagtcaaggtaaaggagcagaaatgtagttacaagccaggtcgtcttcagtggcacaaaccaacccgttgagccctgacaacatgagtggagagtgcatttgccatacctgtgtgcatgacactaagattttatgttggagatacttctttaaataacctacagcttgggtctatggctgtgacccccagattcatggaggggctttagccatcagctttgtacatcatcatttttctgaatgaccaatcccactaaacatctttgaagtcggcctagagaggtccttcagatgagagagaaatagctggcttgtctgagtccagatttctcatcaactggcaatacaaaggaaaatatggtacaggagttagttagaaaggtcttattgattttacttctacttttcactacagttacaggtagaatactgtaggaagtcagtgcaaggtgcatgcttgattgatagatattgattgtttttcagtctctggggtcagttttgtggtttctgctttcttgcctaaatcaaagactatttcaagtcaacaacactgaaaactgcttttcgcctccactcttacagctgtgcctaataataattaattaataaacgcacagccctatgtgaacagacaggaatttcttgtgcaatgtggagcaaatggaatggtctccttccgcaagtctttttaatcctcatatctggagtacaagggtagacctctggcttaccacatacactatgctaaagtcatcagccactgctactacatcttgccagaaggtttccctcgccaacaaacagttgaaatttaagggaagaagcaaaagctaaactgtctttgaccctaagatagatagaaagctatttatttgtcttcagtgttcaaggcatgactagtatttctaattagcctaataaattcccacactttctgaagtgaacactaatggtattgtcctactaaaactgtcattgtttctttttttttaactggtcagtcattcacaataagctatgagggtaaataaatatgtgttataacaagtaaaccgtagttgcaagaatataccatgaagattaaagtaggctgggtttcatttccatcttcccacacatctcattgaatttgatggttgacttaattggcaccataactttgtatgatattatacattaacctttatttatgtaaagtaaaatgccttatatattaaagagtaagtgcaataatatgaaatagcctgtacattttaaaaatgttgtcaccaagttatataaatccacatctctgtaaacaaccttttttaagtaattttaaaaaaaataaacactctgcttactac

SEQ ID NO: 347546 - DNA, 11620 bp, Homo sapiens
  misc_feature (979)..(979): n is a, c, g, or t
  misc_feature (1811)..(1811): n is a, c, g, or t
  misc_feature (1935)..(1935): n is a, c, g, or t
ttagttatcttcaaaaatgctgtgactgttcagttcaattgacctaaacttcaggtgcttttgtgttatacgggttctttttttggaactgatgagaatgaattggaatctcctattttttaggcagagcaaccatcgaaccctgtatgctaacaataagacatgaccaggcttcattctcccacggcagaatatttatttctgtctcttagaggaagggttaactcccaggtggtgtttgtgttgagttttagaacaatataaaattctaacagagcatttttataatggatgtgccatgtgttcacttaattgaaactcattctgcaaggctggtaaaatggagcaaaacggggaaaaaaaatcaatagttaagaaaggttaatagcacttgattctcctaaatagcgtttttttcatatgtgttcatttacaagaaacgtaagtcattggaatggatttcaacctgttgagtgatacttctttaaaaaactttgcatacattttaagagtgcgagtaatcattttaatatttgctccttttcccctatggaaacaacctgaaaacatccacctcctcacctaattgagtaattggttatgccagatttttaaacagagattacttcacttattttatagcttctgtaattgcattaaggggaagccacataacaaatgcatggggcacagctacatttttgtaactcatctacaggattccttgaattgtgcacagtgtgctcctgggattggctgtctgcgagaggtgacaatgtgtgttcttatgctgctttgcactttcttataggcgtacagagtccctcttctctacagcaatgctgtgcaaagttcatctgttttctctctggggcatctttgtagtgtttttgatgaactgttattccaaaaaagcaggccatgtacaagagtgcaaaccagaaacgagctctgataagtcaacaggatgtccaagttnttttatattcctagcagacgctatcaacagctgaaaaacgacctgactgtgccgccttagagttaaaaataataggagagctggggcagggggccatgtgcgagcatattcctgcacatgcctggcaaattaacatgaccctgcagtcatctctgagatagaagcttatagtaaacttgccagcttactgacagagaacctggaactgcatcagcaagattatttttgggccgggagcagtagctcacacctgtaatccccgcactttgggaagccgaggcgggcagatcactcaaggccaggagttcaagaccagcctggccaacatggtgaaaccctgtctctactaaagatacaaaaaaaaattagccatatatggtggcgtgcacctgtattcccagctattcaggaggctgaggcatgagaatagtttgaacctgggaggcagaggttgtagtgagctgaggtcacgccaccgcactctagcctgggtgactgagccagagcaatactctgtttcaaaaaaaaatttttttttagtaaaaaaaagactgtttctgggctgccattgctcagtaatattttagcaagtttttgttatcattaaagccattttccatacaccatgctgattctctgtgcttggggaacttgtctttctacaaatataggagtgacttctcaaatgttgtatgtgttcatgcctcattgccagtgggtttaagtttttaaacaatgactactttgaactagatttctgcagtttgatttcgaaacataggacatctgttgtcaaacttggcaatggctaaaaaaataagattttcatgcntcccatagttattttaattgaagattgaaatacagaattactgcaaaagaatatgtgttgtcattaattgtcccattttgtgacattcctgggagctaagctaaacaataaaagttattttatntggtagtaaatcagggaccatatggtatcccaaaataagtctgactgagcagttaaattccaggaaattaaaggctaatgttaatgtaattctcacatttgatcactaggggatgaaatcctagatgtaaatggaataccaataaagggcttgacatttcaagaagccattcatacctttaaggtaacaacattcttattgatctcctttatcctattttcctttcttatttccttctggcttgggtttggtgagttgttttttttttttaaccctttgatataaggacattccaaatgtttcagcccacctttcctcactgttttctcagcaaatccggagtggattatttgttttaacggtacgcacaaagttggtgagccccagcctcacaccctgctcgacacccacacacatgagcagatccgcctccccgaacttcaataccagtgggggagcctcggcgggaggttccgatgaaggcagttcttcatccctgggtcggaagacccctgggcccaaggacaggatcgtcatggaagtaacactcaacaaagagccaagagttggattaggcattggtgcctgctgcttggctctggaaaacagtcctcctggcatctacattcacagccttgctccaggatcagtggccaagatggagagcaacctgagccgcggggatcaaatcctggaagtgaactccgtcaacgtccgccatgctgctttaagcaaagtccacgccatcttgagtaaatgccctccaggacccgttcgccttgtcatcggccggcaccctaatccaaaggtacccccttgaagagtccctctcttgcaaaaaaggactcccttatttctgaatctgaactctcccagtactttgcccacgatgtccctggccccttgtcagacttcatggtggccggttctgaggacgaggatcacccgggaagtggctgcagcacgtcggaggagggcagcctgcctcccagcacctccactcacaaggagcctggaaaacccagagccaacagcctcgtgactcttgggagccatcgggcttctgggctcttccacaagcaggtgacagttgccagacaagccagtctccccggaagcccacaggccctccgaaaccctctcctccgccagaggaaggtaggctgctacgatgccaacgatgccagtgatgaggaagagtttgacagagaaggggactgcatttcactcccaggggccctcccgggtcccatcaggcctctgtcagaggatgacccgaggcgtgtctcaatttcctcttccaagggcatggacgtccacaaccaagaggaacgaccccggaaaacactggtgagcaaggccatctcggcacctcttcttggtagctcagtggacttagaggagagtatcccagagggcatggtggatgctgcgtcctatgcagccaacctcacggactctgcagaggcccccaaggggagccctggaagctggtggaagaaggaactgtcaggatcaagtagcgcacccaaattggaatacacagtccgtacagacacccagagtccgacgaacactgggagccccagttccccccagcagaaaagtgaaggcctgggctccaggcacagaccagtggccagggtaagcccccactgcaagagatccgaggctgaggccaagcccagtggctcacagacagtgaacctgactggcagagccaatgatccatgcgatctggactcgagagtccaggccacttctgtcaaagtgactgtcgctggctttcagccaggtggagctgtggagaagttgtgccaggaatctctgggaaagctgaccactggagatgcttgtgtctctaccagctgtgaactagccagtgctctgtcccatctggatgccagccacctcacagagaacctgcccaaagctgcatcagagctggggcaacaacccatgactgctcctcggacctcatctcttccccagggaagaagggggccgctcatcctgaccccagcaagacctctgtagacacagggcaagtcagtcggccagagaatcccagccagcctgcatcgcccagggtcgccaagtgcaaggccaggtctccagtcaggctcccccatgagggcagcccctccccgggggagaaagcagcggctccccctgactacagcaagactcgatcagcatcggaaaccagcacaccccacaataccaggagggtggctgccctcaggggagcgggacctggagcagagggaatgacaccagctggtgctgtcctgccaggagaccccctcacatcccaggagcagagacagggagctccaggtaaccacagtaaggctctggaaatgacaggaatccatgcacctgaaagctcccaggagccttccctgctggagggagcagattctgtgtcctcaagggcaccgcaggccagcctctccatgctgccatccactgacaacaccaaagaagcatgtggccatgtctcggggcactgctgcccgggggggagtagagagagccctgtgacggacattgacagcttcatcaaggagctggatgcttctgcagcaaggtctccgtcttcccagacgggggacagtggctctcaggagggcagtgctcagggccacccaccagccggggctggaggtgggagctcctgccgtgccgaaccagtcccggggggccagacctcctccccgaggagggcctgggctgctggtgcccccgcctacccacaatgggcctcccagccttcggttttagattcaattaatcccgacaaacattttactgtgaacaaaaactttctgagcaactactctagaaattttagcagttttcatgaagacagcacctccctatcaggcctgggtgacagcacggagccgtctctgtcatccatgtatggcgatgctgaggattcttcttctgaccctgagtcactcactgaagccccacgagcttctgccagggacggctggtcccctcctcgttcccgtgtgtctttgcacaaggaagatccttcggagtcagaagaggaacagattgagatttgttccacacgtggctgccccaatccaccctcgagtcctgctcatcttcccacccaggctgccatctgtcctgcctcagccaaagttctgtcattaaaatacagcactccgagagagtcggtggccagtccccgtgagaaggccgcctgcttgccaggctcatacacttcaggcccagactcttcccagccatcatcactcttggagatgagctctcaggagcatgaaactcatgcggacataagcacttcacagaaccacaggccctcgtgtgcagaagaaaccacagaagtcaccagcgctagctcagccatggaaaacagtccgctgtctaaagtagccaggcattttcacagtccgcccatcattctcagctcccccaacatggtaaatggcttggaacatgacctgctagatgacgaaaccctgaatcaatacgaaacaagcattaatgcagctgccagtctgtcctccttcagtgtggatgtccctaagaatggagaatctgttttggaaaacctccacatctctgaaagtcaagacctggatgacttgctacagaaaccaaaaatgatcgctaggaggcccatcatggcctggtttaaagaaataaataaacataaccaaggcacacatttgaggagcaaaaccgagaaggaacaacctctaatgcctgccagaagtcccgactccaagattcagatggtgagttcaagccaaaaaaagggcgttactgtgcctcatagccctcctcagccgaaaacaaacctggaaaataaggacctgtctaagaagagtccggcagaaatgcttctgactaatggtcagaaggcaaagtgtggtccgaagctgaagaggctcagcctcaagggcaaggccaaagtcaactctgaggcccctgctgcgaatgctgtgaaggctggggggacggaccacaggaaacccttgatctcaccccagacctcccacaaaacactttctaaggcagtgtcacagcggctccatgtagccgaccacgaggaccctgacagaaacaccacagctgcccccaggtccccccagtgtgtgctggaaagcaagccacctcttgccacctctgggccactgaaaccctcagtgtctgacacgagcatcaggacatttgtctcgcccctgacctctcccaagcctgttcctgagcaaggcatgtggagcaggttccacatggctgtcctctctgaacccgacagaggttgcccaaccacccctaaatctcctaagtgtagagcagagggcagggcgccccgtgctgactccgggccggtgagtccggcagcgtctaggaacggcatgtccgtggcagggaacagacagagtgagccgcgcctggccagccatgtggcagcagacacagcccaacccaggccgactggcgaaaaaggaggcaacataatggccagcgatcgcctcgaaagaacaaaccagctgaaaatcgtggagatttctgctgaagcagtgtcagagactgtatgtggtaacaagccagctgaaagcgacagacggggagggtgcttggcccagggcaactgtcaggagaagagtgaaatcaggctctatcgccaggtcgcagaatcatccacaagtcatccatcctcactcccatctcatgcctcccaggcagagcaggaaatgtcacgatcattcagcatggcaaaactggcgtcctcctcctcctcccttcaaacagccattagaaaggcagaatactcccagggaaaatcaagcctgatgtcagactcccgaggggtgcccagaaacagcattccagggggcccctcgggggaggaccatctctacttcaccccaaggccagcgaccaggacctactccatgccagcccagttctcaagccattttggacgggagggtcaccccccacacagcctgggtcgctctcgggacagccaggtccctgtgacaagcagtgttgtccccgaggcaaaggcatccagaggtggtcttcccagcctggctaatggacagggcatatatagtgtaaagccgctgctggacacatcgaggaatcttccagccacagatgaaggggatatcatttcagtccaggagacgagctgcctagtcacagacaaaatcaaagtcaccagacgacactactgctatgagcagaactggccccatgaatctacctcatttttctctgtgaagcagcggatcaagtcttttgagaacctggccaatgctgaccggcctgtagccaagtccggggcttccccatttttgtcggtgagctccaagcctcccattgggaggcggtcttccggcagcattgtttccgggagcctgggccacccaggtgacgcagcagcaaggttgttgagacgcagcttgagttcctgcagcgaaaaccaaagcgaagccggcaccctcctgccccagatggccaagtctccctcaatcatgacactgaccatctctcggcagaacccaccagagaccagtagcaagggctctgattcggaactaaagaaatcacttggtcctttgggaattcccaccccaacgatgaccctggcttctcctgttaagaggaacaagtcctcggtacgccacacgcagccctcgcccgtgtcccgctccaagctccaggagctgagagccttgagcatgcctgaccttgacaagctctgcagcgaggattactcagcagggccgagcgccgtgctcttcaaaactgagctggagatcacccccaggaggtcacctggccctcctgctggaggcgtttcgtgtcccgagaagggcgggaacagggcctgtccaggaggaagtggccctaaaaccagtgctgctgagacacccagttcagccagtgatacgggtgaagctgcccaggatctgccttttagaagaagctggtcagttaatttggatcaacttctagtctcagcgggggaccagcaaagattacagtctgttttatcgtcagtgggatcgaaatctaccatcctaactctcattcaggaagcgaaagcacaatcagagaatgaagcagatgtttgcttcatagtcttgaatagaaaagaaggctcaggtctgggattcagtgtggcaggagggacagatgtggagccaaaatcaatcacggtccacagggtgttttctcagggggcggcttctcaggaagggactatgaaccgaggggatttccttctgtcagtcaacggcgcctcactggctggcttagcccacgggaatgtcctgaaggttctgcaccaggcacagctgcacaaagatgccctcgtggtcatcaagaaagggatggatcagcccaggccctctgcccggcaggagcctcccacagccaatgggaagggtttgctgtccagaaagaccatccccctggagcctggcattgaaaacacagaacaaaggatgcaagtacagcagcaacacagccaggagggcagccccagaattgggaggccaacagtgctactgggctcaagtgctgttataaggagaagtgtggctgtacacgatgctctgtgtgttgaagtgctgaagacctcggctgggctgggactgagtctggatgggggaaaatcatcggtgacgggagatgggcccttggtcattaaaagagtgtacaaaggtggtgcggctgaacaagctggaataatagaagctggagatgaaattcttgctattaatgggaaacctctggttgggctcatgcactttgatgcctggaatattatgaagtctgtcccagaaggacctgtgcagttattaattagaaagcataggaattcttcatgaattttaacaagaatcattttctcagttctcttctttctttagcaaatcagagtgacttctttaaaccacaggttgttgaaatggccaacactggtacagacacggactataaaaatctccaagcttgtgcttacacatgaagcctgacttaactgtatgtgcaacagcaatgaaattaactccagaagccttccacctgcgtcacccaggccgggagggttccttcgttccagtgcctgtcccctacctttatgttatgtttactgatggggatacaagatgtgacacacccttctttatttgaaacaaacaaacatttagctagacctttgcttccttcttgccagctctcccaacatacccaatcctggtgatcagggaactaaaagtctgagggggacacaaatgtcacacctaagaggacaatcaatcattttgtatgattttgtaagtaagtaaatgacagaatgcttttaggcacattcaatggaaggaggagatgtaggtctgtatatgttaccctgaaaagagaataagacttacttaaaaaaatgaattatgacctgttaggctgagctcaggaattgtccaaaaaggaaaaagcaaaataattaattgagagtattttttagtgagtgtaatgtataatgtacgtatgcaaagttcaactcaataggttattgatcaccatgaagtattgatcattttctatctcaaaagtgtaagccataaggctgttttacagaatagcacttctgataagctgtattaaatagccatgagcttcactgcttagagggagcagaaaggtcaacatctaaaagcaccttacaactagtttttgaacctgtcttgataagtgcttgaattcaagactggtcagtacaagagcagacaaaaatatcacaagtcagtcactgggtttccatttctgaattttatgcactccaaccatgaatttaaactaaatttttagaaatcaagtatctttctaagtgtccttggatttatagacaatgtatgtacaatccaaatagaggagcttaatggaatccttttaggagactggttggtttttttccctctttcccaacatgtttaagaaatgtaacattctaagtattggatctcttttcttgacctagtataatgacaactgcagtgacttaagtttttgctgttttcgttttcccgctttgcaatttcctccttttgccaaaaatgttttcctacagaagactgtcgtgactcacgctacttgggaaactcactctggccactcctcctctggtggcatgagctgcttcccagtagctattccgattggatattccgttcgtcgtcacatagctggcttttctctcctcatgatgtaccttattttcttaggtaaataattccaaactctcatcgggtcataaagaggaggagaaacagggtgagtcaaggtaaaggagcagaaatgtagttacaagccaggtcgtcttcagtggcacaaaccaacccgttgagccctgacaacatgagtggagagtgcatttgccatacctgtgtgcatgacactaagattttatgttggagatacttctttaaataacctacagcttgggtctatggctgtgacccccagattcatggaggggctttagccatcagctttgtacatcatcatttttctgaatgaccaatcccactaaacatctttgaagtcggcctagagaggtccttcagatgagagagaaatagctggcttgtctgagtccagatttctcatcaactggcaatacaaaggaaaatatggtacaggagttagttagaaaggtcttattgattttacttctacttttcactacagttacaggtagaatactgtaggaagtcagtgcaaggtgcatgcttgattgatagatattgattgtttttcagtctctggggtcagttttgtggtttctgctttcttgcctaaatcaaagactatttcaagtcaacaacactgaaaactgcttttcgcctccactcttacagctgtgcctaataataattaattaataaacgcacagccctatgtgaacagacaggaatttcttgtgcaatgtggagcaaatggaatggtctccttccgcaagtctttttaatcctcatatctggagtacaagggtagacctctggcttaccacatacactatgctaaagtcatcagccactgctactacatcttgccagaaggtttccctcgccaacaaacagttgaaatttaagggaagaagcaaaagctaaactgtctttgaccctaagatagatagaaagctatttatttgtcttcagtgttcaaggcatgactagtatttctaattagcctaataaattcccacactttctgaagtgaacactaatggtattgtcctactaaaactgtcattgtttctttttttttaactggtcagtcattcacaataagctatgagggtaaataaatatgtgttataacaagtaaaccgtagttgcaagaatataccatgaagattaaagtaggctgggtttcatttccatcttcccacacatctcattgaatttgatggttgacttaattggcaccataactttgtatgatattatacattaacctttatttatgtaaagtaaaatgccttatatattaaagagtaagtgcaataatatgaaatagcctgtacattttaaaaatgttgtcaccaagttatataaatccacatctctgtaaacaaccttttttaagtaattttaaaaaaaataaacactctgcttactac

SEQ ID NO: 347547 - DNA, 3082 bp, Homo sapiens
atctgttaacaattagaagctgacagcctgggcaacatggcaagaccccatctctaccaaaaatataaaaaaaaaagctgtgcatggtggtgtatgcctgtggtagcagctactctgaaggctgaggtggtgcggctgaacaagctggaataatagaagctggagatgaaattcttgctattaatgggaaacctctggttgggctcatgcactttgatgcctggaatattatgaagtctgtcccagaaggacctgtgcagttattaattagaaagcataggaattcttcatgaattttaacaagaatcattttctcagttctcttctttctttagcaaatcagagtgacttctttaaaccacaggttgttgaaatggccaacactggtacagacacggactataaaaatctccaagcttgtgcttacacatgaagcctgacttaactgtatgtgcaacagcaatgaaattaactccagaagccttccacctgcgtcacccaggccgggagggttccttcgttccagtgcctgtcccctacctttatgttatgtttactgatggggatacaagatgtgacacacccttctttatttgaaacaaacaaacatttagctagacctttgcttccttcttgccagctctcccaacatacccaatcctggtgatcagggaactaaaagtctgagggggacacaaatgtcacacctaagaggacaatcaatcattttgtatgattttgtaagtaagtaaatgacagaatgcttttaggcacattcaatggaaggaggagatgtaggtctgtatatgttaccctgaaaagagaataagacttacttaaaaaaatgaattatgacctgttaggctgagctcaggaattgtccaaaaaggaaaaagcaaaataattaattgagagtattttttagtgagtgtaatgtataatgtacgtatgcaaagttcaactcaataggttattgatcaccatgaagtattgatcattttctatctcaaaagtgtaagccataaggctgttttacagaatagcacttctgataagctgtattaaatagccatgagcttcactgcttagagggagcagaaaggtcaacatctaaaagcaccttacaactagtttttgaacctgtcttgataagtgcttgaattcaagactggtcagtacaagagcagacaaaaatatcacaagtcagtcactgggtttccatttctgaattttatgcactccaaccatgaatttaaactaaatttttagaaatcaagtatctttctaagtgtccttggatttatagacaatgtatgtacaatccaaatagaggagcttaatggaatccttttaggagactggttggtttttttccctctttcccaacatgtttaagaaatgtaacattctaagtattggatctcttttcttgacctagtataatgacaactgcagtgacttaagtttttgctgttttcgttttcccgctttgcaatttcctccttttgccaaaaatgttttcctacagaagactgtcgtgactcacgctacttgggaaactcactctggccactcctcctctggtggcatgagctgcttcccagtagctattccgattggatattccgttcgtcgtcacatagctggcttttctctcctcatgatgtaccttattttcttaggtaaataattccaaactctcatcgggtcataaagaggaggagaaacagggtgagtcaaggtaaaggagcagaaatgtagttacaagccaggtcgtcttcagtggcacaaaccaacccgttgagccctgacaacatgagtggagagtgcatttgccatacctgtgtgcatgacactaagattttatgttggagatacttctttaaataacctacagcttgggtctatggctgtgacccccagattcatggaggggctttagccatcagctttgtacatcatcatttttctgaatgaccaatcccactaaacatctttgaagtcggcctagagaggtccttcagatgagagagaaatagctggcttgtctgagtccagatttctcatcaactggcaatacaaaggaaaatatggtacaggagttagttagaaaggtcttattgattttacttctacttttcactacagttacaggtagaatactgtaggaagtcagtgcaaggtgcatgcttgattgatagatattgattgtttttcagtctctggggtcagttttgtggtttctgctttcttgcctaaatcaaagactatttcaagtcaacaacactgaaaactgcttttcgcctccactcttacagctgtgcctaataataattaattaataaacgcacagccctatgtgaacagacaggaatttcttgtgcaatgtggagcaaatggaatggtctccttccgcaagtctttttaatcctcatatctggagtacaagggtagacctctggcttaccacatacactatgctaaagtcatcagccactgctactacatcttgccagaaggtttccctcgccaacaaacagttgaaatttaagggaagaagcaaaagctaaactgtctttgaccctaagatagatagaaagctatttatttgtcttcagtgttcaaggcatgactagtatttctaattagcctaataaattcccacactttctgaagtgaacactaatggtattgtcctactaaaactgtcattgtttctttttttttaactggtcagtcattcacaataagctatgagggtaaataaatatgtgttataacaagtaaaccgtagttgcaagaatataccatgaagattaaagtaggctgggtttcatttccatcttcccacacatctcattgaatttgatggttgacttaattggcaccataactttgtatgatattatacattaacctttatttatgtaaagtaaaatgccttatatattaaagagtaagtgcaataatatgaaatagcctgtacattttaaaaatgttgtcaccaagttatataaatccacatctctgtaaacaaccttttttaagtaattttaaaaaaaataaacactctgcttactac

SEQ ID NO: 347548 - DNA, 3755 bp, Homo sapiens
gtgaaaccctgtccgtctctcctaacaatacaaaaattaacttggcatagtggtgtgtgcctataatcccagctactcaggaggctgaggcaggagaatcgcttgaacccgggaggctgagattgcaccactgtactccagcctgggtgacacagcgagactccctctcaaaaaataaaaataaaaaaggaaggttcctttactacagatacgcagttagttactatctcccttttaccggaaatcgtaagtggatctggtttttgttcccttttcctttcctcatcccaggtccacagggtgttttctcagggggcggcttctcaggaagggactatgaaccgaggggatttccttctgtcagtcaacggcgcctcactggctggcttagcccacgggaatgtcctgaaggttctgcaccaggcacagctgcacaaagatgccctcgtggtcatcaagaaagggatggatcagcccaggccctctgcccggcaggagcctcccacagccaatgggaagggtttgctgtccagaaagaccatccccctggagcctggcattgaaaacacagaacaaaggatgcaagtacagcagcaacacagccaggagggcagccccagaattgggaggccaacagtgctactgggctcaagtgctgttataaggagaagtgtggctgtacacgatgctctgtgtgttgaagtgctgaagacctcggctgggctgggactgagtctggatgggggaaaatcatcggtgacgggagatgggcccttggtcattaaaagagtgtacaaaggtggtgcggctgaacaagctggaataatagaagctggagatgaaattcttgctattaatgggaaacctctggttgggctcatgcactttgatgcctggaatattatgaagtctgtcccagaaggacctgtgcagttattaattagaaagcataggaattcttcatgaattttaacaagaatcattttctcagttctcttctttctttagcaaatcagagtgacttctttaaaccacaggttgttgaaatggccaacactggtacagacacggactataaaaatctccaagcttgtgcttacacatgaagcctgacttaactgtatgtgcaacagcaatgaaattaactccagaagccttccacctgcgtcacccaggccgggagggttccttcgttccagtgcctgtcccctacctttatgttatgtttactgatggggatacaagatgtgacacacccttctttatttgaaacaaacaaacatttagctagacctttgcttccttcttgccagctctcccaacatacccaatcctggtgatcagggaactaaaagtctgagggggacacaaatgtcacacctaagaggacaatcaatcattttgtatgattttgtaagtaagtaaatgacagaatgcttttaggcacattcaatggaaggaggagatgtaggtctgtatatgttaccctgaaaagagaataagacttacttaaaaaaatgaattatgacctgttaggctgagctcaggaattgtccaaaaaggaaaaagcaaaataattaattgagagtattttttagtgagtgtaatgtataatgtacgtatgcaaagttcaactcaataggttattgatcaccatgaagtattgatcattttctatctcaaaagtgtaagccataaggctgttttacagaatagcacttctgataagctgtattaaatagccatgagcttcactgcttagagggagcagaaaggtcaacatctaaaagcaccttacaactagtttttgaacctgtcttgataagtgcttgaattcaagactggtcagtacaagagcagacaaaaatatcacaagtcagtcactgggtttccatttctgaattttatgcactccaaccatgaatttaaactaaatttttagaaatcaagtatctttctaagtgtccttggatttatagacaatgtatgtacaatccaaatagaggagcttaatggaatccttttaggagactggttggtttttttccctctttcccaacatgtttaagaaatgtaacattctaagtattggatctcttttcttgacctagtataatgacaactgcagtgacttaagtttttgctgttttcgttttcccgctttgcaatttcctccttttgccaaaaatgttttcctacagaagactgtcgtgactcacgctacttgggaaactcactctggccactcctcctctggtggcatgagctgcttcccagtagctattccgattggatattccgttcgtcgtcacatagctggcttttctctcctcatgatgtaccttattttcttaggtaaataattccaaactctcatcgggtcataaagaggaggagaaacagggtgagtcaaggtaaaggagcagaaatgtagttacaagccaggtcgtcttcagtggcacaaaccaacccgttgagccctgacaacatgagtggagagtgcatttgccatacctgtgtgcatgacactaagattttatgttggagatacttctttaaataacctacagcttgggtctatggctgtgacccccagattcatggaggggctttagccatcagctttgtacatcatcatttttctgaatgaccaatcccactaaacatctttgaagtcggcctagagaggtccttcagatgagagagaaatagctggcttgtctgagtccagatttctcatcaactggcaatacaaaggaaaatatggtacaggagttagttagaaaggtcttattgattttacttctacttttcactacagttacaggtagaatactgtaggaagtcagtgcaaggtgcatgcttgattgatagatattgattgtttttcagtctctggggtcagttttgtggtttctgctttcttgcctaaatcaaagactatttcaagtcaacaacactgaaaactgcttttcgcctccactcttacagctgtgcctaataataattaattaataaacgcacagccctatgtgaacagacaggaatttcttgtgcaatgtggagcaaatggaatggtctccttccgcaagtctttttaatcctcatatctggagtacaagggtagacctctggcttaccacatacactatgctaaagtcatcagccactgctactacatcttgccagaaggtttccctcgccaacaaacagttgaaatttaagggaagaagcaaaagctaaactgtctttgaccctaagatagatagaaagctatttatttgtcttcagtgttcaaggcatgactagtatttctaattagcctaataaattcccacactttctgaagtgaacactaatggtattgtcctactaaaactgtcattgtttctttttttttaactggtcagtcattcacaataagctatgagggtaaataaatatgtgttataacaagtaaaccgtagttgcaagaatataccatgaagattaaagtaggctgggtttcatttccatcttcccacacatctcattgaatttgatggttgacttaattggcaccataactttgtatgatattatacattaacctttatttatgtaaagtaaaatgccttatatattaaagagtaagtgcaataatatgaaatagcctgtacattttaaaaatgttgtcaccaagttatataaatccacatctctgtaaacaaccttttttaagtaattttaaaaaaaataaacactctgcttactac

SEQ ID NO: 347549 - DNA, 11533 bp, Homo sapiens
  misc_feature (979)..(979): n is a, c, g, or t
  misc_feature (1811)..(1811): n is a, c, g, or t
  misc_feature (1935)..(1935): n is a, c, g, or t
ttagttatcttcaaaaatgctgtgactgttcagttcaattgacctaaacttcaggtgcttttgtgttatacgggttctttttttggaactgatgagaatgaattggaatctcctattttttaggcagagcaaccatcgaaccctgtatgctaacaataagacatgaccaggcttcattctcccacggcagaatatttatttctgtctcttagaggaagggttaactcccaggtggtgtttgtgttgagttttagaacaatataaaattctaacagagcatttttataatggatgtgccatgtgttcacttaattgaaactcattctgcaaggctggtaaaatggagcaaaacggggaaaaaaaatcaatagttaagaaaggttaatagcacttgattctcctaaatagcgtttttttcatatgtgttcatttacaagaaacgtaagtcattggaatggatttcaacctgttgagtgatacttctttaaaaaactttgcatacattttaagagtgcgagtaatcattttaatatttgctccttttcccctatggaaacaacctgaaaacatccacctcctcacctaattgagtaattggttatgccagatttttaaacagagattacttcacttattttatagcttctgtaattgcattaaggggaagccacataacaaatgcatggggcacagctacatttttgtaactcatctacaggattccttgaattgtgcacagtgtgctcctgggattggctgtctgcgagaggtgacaatgtgtgttcttatgctgctttgcactttcttataggcgtacagagtccctcttctctacagcaatgctgtgcaaagttcatctgttttctctctggggcatctttgtagtgtttttgatgaactgttattccaaaaaagcaggccatgtacaagagtgcaaaccagaaacgagctctgataagtcaacaggatgtccaagttnttttatattcctagcagacgctatcaacagctgaaaaacgacctgactgtgccgccttagagttaaaaataataggagagctggggcagggggccatgtgcgagcatattcctgcacatgcctggcaaattaacatgaccctgcagtcatctctgagatagaagcttatagtaaacttgccagcttactgacagagaacctggaactgcatcagcaagattatttttgggccgggagcagtagctcacacctgtaatccccgcactttgggaagccgaggcgggcagatcactcaaggccaggagttcaagaccagcctggccaacatggtgaaaccctgtctctactaaagatacaaaaaaaaattagccatatatggtggcgtgcacctgtattcccagctattcaggaggctgaggcatgagaatagtttgaacctgggaggcagaggttgtagtgagctgaggtcacgccaccgcactctagcctgggtgactgagccagagcaatactctgtttcaaaaaaaaatttttttttagtaaaaaaaagactgtttctgggctgccattgctcagtaatattttagcaagtttttgttatcattaaagccattttccatacaccatgctgattctctgtgcttggggaacttgtctttctacaaatataggagtgacttctcaaatgttgtatgtgttcatgcctcattgccagtgggtttaagtttttaaacaatgactactttgaactagatttctgcagtttgatttcgaaacataggacatctgttgtcaaacttggcaatggctaaaaaaataagattttcatgcntcccatagttattttaattgaagattgaaatacagaattactgcaaaagaatatgtgttgtcattaattgtcccattttgtgacattcctgggagctaagctaaacaataaaagttattttatntggtagtaaatcagggaccatatggtatcccaaaataagtctgactgagcagttaaattccaggaaattaaaggctaatgttaatgtaattctcacatttgatcactaggggatgaaatcctagatgtaaatggaataccaataaagggcttgacatttcaagaagccattcatacctttaaggtaacaacattcttattgatctcctttatcctattttcctttcttatttccttctggcttgggtttggtgagttgttttttttttttaaccctttgatataaggacattccaaatgtttcagcccacctttcctcactgttttctcagcaaatccggagtggattatttgttttaacggtacgcacaaagttggtgagccccagcctcacaccctgctcgacacccacacacatgagcagatccgcctccccgaacttcaataccagtgggggagcctcggcgggaggttccgatgaaggcagttcttcatccctgggtcggaagacccctgggcccaaggacaggatcgtcatggaagtaacactcaacaaagagccaagagttggattaggcattggtgcctgctgcttggctctggaaaacagtcctcctggcatctacattcacagccttgctccaggatcagtggccaagatggagagcaacctgagccgcggggatcaaatcctggaagtgaactccgtcaacgtccgccatgctgctttaagcaaagtccacgccatcttgagtaaatgccctccaggacccgttcgccttgtcatcggccggcaccctaatccaaaggtacccccttgaagagtccctctcttgcaaaaaaggactcccttatttctgaatctgaactctcccagtactttgcccacgatgtccctggccccttgtcagacttcatggtggccggttctgaggacgaggatcacccgggaagtggctgcagcacgtcggaggagggcagcctgcctcccagcacctccactcacaaggagcctggaaaacccagagccaacagcctcgtgactcttgggagccatcgggcttctgggctcttccacaagcaggtgacagttgccagacaagccagtctccccggaagcccacaggccctccgaaaccctctcctccgccagaggaaggtaggctgctacgatgccaacgatgccagtgatgaggaagagtttgacagagaaggggactgcatttcactcccaggggccctcccgggtcccatcaggcctctgtcagaggatgacccgaggcgtgtctcaatttcctcttccaagggcatggacgtccacaaccaagaggaacgaccccggaaaacactggtgagcaaggccatctcggcacctcttcttggtagctcagtggacttagaggagagtatcccagagggcatggtggatgctgcgtcctatgcagccaacctcacggactctgcagaggcccccaaggggagccctggaagctggtggaagaaggaactgtcaggatcaagtagcgcacccaaattggaatacacagtccgtacagacacccagagtccgacgaacactgggagccccagttccccccagcagaaaagtgaaggcctgggctccaggcacagaccagtggccagggtaagcccccactgcaagagatccgaggctgaggccaagcccagtggctcacagacagtgaacctgactggcagagccaatgatccatgcgatctggactcgagagtccaggccacttctgtcaaagtgactgtcgctggctttcagccaggtggagctgtggagaagttgtgccaggaatctctgggaaagctgaccactggagatgcttgtgtctctaccagctgtgaactagccagtgctctgtcccatctggatgccagccacctcacagagaacctgcccaaagctgcatcagagctggggcaacaacccatgactgctcctcggacctcatctcttccccagggaagaagggggccgctcatcctgaccccagcaagacctctgtagacacagggcaagtcagtcggccagagaatcccagccagcctgcatcgcccagggtcgccaagtgcaaggccaggtctccagtcaggctcccccatgagggcagcccctccccgggggagaaagcagcggctccccctgactacagcaagactcgatcagcatcggaaaccagcacaccccacaataccaggagggtggctgccctcaggggagcgggacctggagcagagggaatgacaccagctggtgctgtcctgccaggagaccccctcacatcccaggagcagagacagggagctccaggtaaccacagtaaggctctggaaatgacaggaatccatgcacctgaaagctcccaggagccttccctgctggagggagcagattctgtgtcctcaagggcaccgcaggccagcctctccatgctgccatccactgacaacaccaaagaagcatgtggccatgtctcggggcactgctgcccgggggggagtagagagagccctgtgacggacattgacagcttcatcaaggagctggatgcttctgcagcaaggtctccgtcttcccagacgggggacagtggctctcaggagggcagtgctcagggccacccaccagccggggctggaggtgggagctcctgccgtgccgaaccagtcccggggggccagacctcctccccgaggagggcctgggctgctggtgcccccgcctacccacaatgggcctcccagccttcggttttagattcaattaatcccgacaaacattttactgtgaacaaaaactttctgagcaactactctagaaattttagcagttttcatgaagacagcacctccctatcaggcctgggtgacagcacggagccgtctctgtcatccatgtatggcgatgctgaggattcttcttctgaccctgagtcactcactgaagccccacgagcttctgccagggacggctggtcccctcctcgttcccgtgtgtctttgcacaaggaagatccttcggagtcagaagaggaacagattgagatttgttccacacgtggctgccccaatccaccctcgagtcctgctcatcttcccacccaggctgccatctgtcctgcctcagccaaagttctgtcattaaaatacagcactccgagagagtcggtggccagtccccgtgagaaggccgcctgcttgccaggctcatacacttcaggcccagactcttcccagccatcatcactcttggagatgagctctcaggagcatgaaactcatgcggacataagcacttcacagaaccacaggccctcgtgtgcagaagaaaccacagaagtcaccagcgctagctcagccatggaaaacagtccgctgtctaaagtagccaggcattttcacagtccgcccatcattctcagctcccccaacatggtaaatggcttggaacatgacctgctagatgacgaaaccctgaatcaatacgaaacaagcattaatgcagctgccagtctgtcctccttcagtgtggatgtccctaagaatggagaatctgttttggaaaacctccacatctctgaaagtcaagacctggatgacttgctacagaaaccaaaaatgatcgctaggaggcccatcatggcctggtttaaagaaataaataaacataaccaaggcacacatttgaggagcaaaaccgagaaggaacaacctctaatgcctgccagaagtcccgactccaagattcagatggtgagttcaagccaaaaaaagggcgttactgtgcctcatagccctcctcagccgaaaacaaacctggaaaataaggacctgtctaagaagagtccggcagaaatgcttctgactaatggtcagaaggcaaagtgtggtccgaagctgaagaggctcagcctcaagggcaaggccaaagtcaactctgaggcccctgctgcgaatgctgtgaaggctggggggacggaccacaggaaacccttgatctcaccccagacctcccacaaaacactttctaaggcagtgtcacagcggctccatgtagccgaccacgaggaccctgacagaaacaccacagctgcccccaggtccccccagtgtgtgctggaaagcaagccacctcttgccacctctgggccactgaaaccctcagtgtctgacacgagcatcaggacatttgtctcgcccctgacctctcccaagcctgttcctgagcaaggcatgtggagcaggttccacatggctgtcctctctgaacccgacagaggttgcccaaccacccctaaatctcctaagtgtagagcagagggcagggcgccccgtgctgactccgggccggtgagtccggcagcgtctaggaacggcatgtccgtggcagggaacagacagagtgagccgcgcctggccagccatgtggcagcagacacagcccaacccaggccgactggcgaaaaaggaggcaacataatggccagcgatcgcctcgaaagaacaaaccagctgaaaatcgtggagatttctgctgaagcagtgtcagagactgtatgtggtaacaagccagctgaaagcgacagacggggagggtgcttggcccagggcaactgtcaggagaagagtgaaatcaggctctatcgccaggtcgcagaatcatccacaagtcatccatcctcactcccatctcatgcctcccaggcagagcaggaaatgtcacgatcattcagcatggcaaaactggcgtcctcctcctcctcccttcaaacagccattagaaaggcagaatactcccagggaaaatcaagcctgatgtcagactcccgaggggtgcccagaaacagcattccagggggcccctcgggggaggaccatctctacttcaccccaaggccagcgaccaggacctactccatgccagcccagttctcaagccattttggacgggagggtcaccccccacacagcctgggtcgctctcgggacagccaggtccctgtgacaagcagtgttgtccccgaggcaaaggcatccagaggtggtcttcccagcctggctaatggacagggcatatatagtgtaaagccgctgctggacacatcgaggaatcttccagccacagatgaaggggatatcatttcagtccaggagacgagctgcctagtcacagacaaaatcaaagtcaccagacgacactactgctatgagcagaactggccccatgaatctacctcatttttctctgtgaagcagcggatcaagtcttttgagaacctggccaatgctgaccggcctgtagccaagtccggggcttccccatttttgtcggtgagctccaagcctcccattgggaggcggtcttccggcagcattgtttccgggagcctgggccacccaggtgacgcagcagcaaggttgttgagacgcagcttgagttcctgcagcgaaaaccaaagcgaagccggcaccctcctgccccagatggccaagtctccctcaatcatgacactgaccatctctcggcagaacccaccagagaccagtagcaagggctctgattcggaactaaagaaatcacttggtcctttgggaattcccaccccaacgatgaccctggcttctcctgttaagaggaacaagtcctcggtacgccacacgcagccctcgcccgtgtcccgctccaagctccaggagctgagagccttgagcatgcctgaccttgacaagctctgcagcgaggattactcagcagggccgagcgccgtgctcttcaaaactgagctggagatcacccccaggaggtcacctggccctcctgctggaggcgtttcgtgtcccgagaagggcgggaacagggcctgtccaggaggaagtggccctaaaaccagtgctgctgagacacccagttcagccagtgatacgggtgaagctgcccaggatctgccttttagaagaagctggtcagttaatttggatcaacttctagtctcagcgggggaccagcaaagattacagtctgttttatcgtcagtgggatcgaaatctaccatcctaactctcattcaggaagcgaaagcacaatcagagaatgaagcagatgtttgcttcatagtcttgaatagaaaagaaggctcaggtctgggattcagtgtggcaggagggacagatgtggagccaaaatcaatcacggtccacagggtgttttctcagggggcggcttctcaggaagggactatgaaccgaggggatttccttctgtcagtcaacggcgcctcactggctggcttagcccacgggaatgtcctgaaggttctgcaccaggcacagctgcacaaagatgccctcgtggtcatcaagaaagggatggatcagcccaggccctctgcccggcaggagcctcccacagccaatgggaagggtttgctgtccagaaagaccatccccctggagcctggcattgaaaacacagaacaaaggatgcaagtacagcagcaacacagccaggagggcagccccagaattgggaggccaacagtgctactgggctcaagtgctgttataaggagaagtgtggctgtacacgatgctctgtgtgttgaagtgctgaagacctcggctgggctgggactgagtctggatgggggaaaatcatcggtgacgggagatgggcccttggtcattaaaagagtgtacaaaggtggtgcggctgaacaagctggaataatagaagctggagatgaaattcttgctattaatgggaaacctctggttgggctcatgcactttgatgcctggaatattatgaagtctgtcccagaaggacctgtgcagttattaattagaaagcataggaattcttcatgaattttaacaagaatcattttctcagttctcttctttctttagcaaatcagagtgacttctttaaaccacaggttgttgaaatggccaacactggtacagacacggactataaaaatctccaagcttgtgcttacacatgaagcctgacttaactgtatgtgcaacagcaatgaaattaactccagaagccttccacctgcgtcacccaggccgggagggttccttcgttccagtgcctgtcccctacctttatgttatgtttactgatggggatacaagatgtgacacacccttctttatttgaaacaaacaaacatttagctagacctttgcttccttcttgccagctctcccaacatacccaatcctggtgatcagggaactaaaagtctgagggggacacaaatgtcacacctaagaggacaatcaatcattttgtatgattttgtaagtaagtaaatgacagaatgcttttaggcacattcaatggaaggaggagatgtaggtctgtatatgttaccctgaaaagagaataagacttacttaaaaaaatgaattatgacctgttaggctgagctcaggaattgtccaaaaaggaaaaagcaaaataattaattgagagtattttttagtgagtgtaatgtataatgtacgtatgcaaagttcaactcaataggttattgatcaccatgaagtattgatcattttctatctcaaaagtgtaagccataaggctgttttacagaatagcacttctgataagctgtattaaatagccatgagcttcactgcttagagggagcagaaaggtcaacatctaaaagcaccttacaactagtttttgaacctgtcttgataagtgcttgaattcaagactggtcagtacaagagcagacaaaaatatcacaagtcagtcactgggtttccatttctgaattttatgcactccaaccatgaatttaaactaaatttttagaaatcaagtatctttctaagtgtccttggatttatagacaatgtatgtacaatccaaatagaggagcttaatggaatccttttaggagactggttggtttttttccctctttcccaacatgtttaagaaatgtaacattctaagtattggatctcttttcttgacctagtataatgacaactgcagtgacttaagtttttgctgttttcgttttcccgctttgcaatttcctccttttgccaaaaatgttttcctacagaagactgtcgtgactcacgctacttgggaaactcactctggccactcctcctctggtggcatgagctgcttcccagtagctattccgattggatattccgttcgtcgtcacatagctggcttttctctcctcatgatgtaccttattttcttaggtaaataattccaaactctcatcgggtcataaagaggaggagaaacagggtgagtcaaggtaaaggagcagaaatgtagttacaagccaggtcgtcttcagtggcacaaaccaacccgttgagccctgacaacatgagtggagagtgcatttgccatacctgtgtgcatgacactaagattttatgttggagatacttctttaaataacctacagcttgggtctatggctgtgacccccagattcatggaggggctttagccatcagctttgtacatcatcatttttctgaatgaccaatcccactaaacatctttgaagtcggcctagagaggtccttcagatgagagagaaatagctggcttgtctgagtccagatttctcatcaactggcaatacaaaggaaaatatggtacaggagttagttagaaaggtcttattgattttacttctacttttcactacagttacaggtagaatactgtaggaagtcagtgcaaggtgcatgcttgattgatagatattgattgtttttcagtctctggggtcagttttgtggtttctgctttcttgcctaaatcaaagactatttcaagtcaacaacactgaaaactgcttttcgcctccactcttacagctgtgcctaataataattaattaataaacgcacagccctatgtgaacagacaggaatttcttgtgcaatgtggagcaaatggaatggtctccttccgcaagtctttttaatcctcatatctggagtacaagggtagacctctggcttaccacatacactatgctaaagtcatcagccactgctactacatcttgccagaaggtttccctcgccaacaaacagttgaaatttaagggaagaagcaaaagctaaactgtctttgaccctaagatagatagaaagctatttatttgtcttcagtgttcaaggcatgactagtatttctaattagcctaataaattcccacactttctgaagtgaacactaatggtattgtcctactaaaactgtcattgtttctttttttttaactggtcagtcattcacaataagctatgagggtaaataaatatgtgttataacaagtaaaccgtagttgcaagaatataccatgaagattaaagtaggctgggtttcatttccatcttcccacacatctcattgaatttgatggttgacttaattggcaccataactttgtatgatattatacattaacctttatttatgtaaagtaaaatgcctgagtgatatctacagcgctatcgctgcttatcaatatcgtagtcgtcgcgat

SEQ ID NO: 347550 - DNA, 1517 bp, Homo sapiens
agctgttccagagtatccctggtaaacctggatcgccacgtactacgagagttggatattccgttcgtcgtcacatagctggcttttctctcctcatgatgtaccttattttcttaggtaaataattccaaactctcatcgggtcataaagaggaggagaaacagggtgagtcaaggtaaaggagcagaaatgtagttacaagccaggtcgtcttcagtggcacaaaccaacccgttgagccctgacaacatgagtggagagtgcatttgccatacctgtgtgcatgacactaagattttatgttggagatacttctttaaataacctacagcttgggtctatggctgtgacccccagattcatggaggggctttagccatcagctttgtacatcatcatttttctgaatgaccaatcccactaaacatctttgaagtcggcctagagaggtccttcagatgagagagaaatagctggcttgtctgagtccagatttctcatcaactggcaatacaaaggaaaatatggtacaggagttagttagaaaggtcttattgattttacttctacttttcactacagttacaggtagaatactgtaggaagtcagtgcaaggtgcatgcttgattgatagatattgattgtttttcagtctctggggtcagttttgtggtttctgctttcttgcctaaatcaaagactatttcaagtcaacaacactgaaaactgcttttcgcctccactcttacagctgtgcctaataataattaattaataaacgcacagccctatgtgaacagacaggaatttcttgtgcaatgtggagcaaatggaatggtctccttccgcaagtctttttaatcctcatatctggagtacaagggtagacctctggcttaccacatacactatgctaaagtcatcagccactgctactacatcttgccagaaggtttccctcgccaacaaacagttgaaatttaagggaagaagcaaaagctaaactgtctttgaccctaagatagatagaaagctatttatttgtcttcagtgttcaaggcatgactagtatttctaattagcctaataaattcccacactttctgaagtgaacactaatggtattgtcctactaaaactgtcattgtttctttttttttaactggtcagtcattcacaataagctatgagggtaaataaatatgtgttataacaagtaaaccgtagttgcaagaatataccatgaagattaaagtaggctgggtttcatttccatcttcccacacatctcattgaatttgatggttgacttaattggcaccataactttgtatgatattatacattaacctttatttatgtaaagtaaaatgccttatatattaaagagtaagtgcaataatatgaaatagcctgtacattttaaaaatgttgtcaccaagttatataaatccacatctctgtaaacaaccttttttaagtaattttaaaaaaaataaacactctgcttactac

SEQ ID NO: 347551 - DNA, 1367 bp, Homo sapiens
atgcatgctgttccttgttactttgatatccgcaaggtaaatgtagttacaagccaggtcgtcttcagtggcacaaaccaacccgttgagccctgacaacatgagtggagagtgcatttgccatacctgtgtgcatgacactaagattttatgttggagatacttctttaaataacctacagcttgggtctatggctgtgacccccagattcatggaggggctttagccatcagctttgtacatcatcatttttctgaatgaccaatcccactaaacatctttgaagtcggcctagagaggtccttcagatgagagagaaatagctggcttgtctgagtccagatttctcatcaactggcaatacaaaggaaaatatggtacaggagttagttagaaaggtcttattgattttacttctacttttcactacagttacaggtagaatactgtaggaagtcagtgcaaggtgcatgcttgattgatagatattgattgtttttcagtctctggggtcagttttgtggtttctgctttcttgcctaaatcaaagactatttcaagtcaacaacactgaaaactgcttttcgcctccactcttacagctgtgcctaataataattaattaataaacgcacagccctatgtgaacagacaggaatttcttgtgcaatgtggagcaaatggaatggtctccttccgcaagtctttttaatcctcatatctggagtacaagggtagacctctggcttaccacatacactatgctaaagtcatcagccactgctactacatcttgccagaaggtttccctcgccaacaaacagttgaaatttaagggaagaagcaaaagctaaactgtctttgaccctaagatagatagaaagctatttatttgtcttcagtgttcaaggcatgactagtatttctaattagcctaataaattcccacactttctgaagtgaacactaatggtattgtcctactaaaactgtcattgtttctttttttttaactggtcagtcattcacaataagctatgagggtaaataaatatgtgttataacaagtaaaccgtagttgcaagaatataccatgaagattaaagtaggctgggtttcatttccatcttcccacacatctcattgaatttgatggttgacttaattggcaccataactttgtatgatattatacattaacctttatttatgtaaagtaaaatgccttatatattaaagagtaagtgcaataatatgaaatagcctgtacattttaaaaatgttgtcaccaagttatataaatccacatctctgtaaacaaccttttttaagtaattttaaaaaaaataaacactctgcttactac

SEQ ID NO: 347552 - DNA, 8330 bp, Homo sapiens
  misc_feature (979)..(979): n is a, c, g, or t
  misc_feature (1811)..(1811): n is a, c, g, or t
  misc_feature (1935)..(1935): n is a, c, g, or t
ttagttatcttcaaaaatgctgtgactgttcagttcaattgacctaaacttcaggtgcttttgtgttatacgggttctttttttggaactgatgagaatgaattggaatctcctattttttaggcagagcaaccatcgaaccctgtatgctaacaataagacatgaccaggcttcattctcccacggcagaatatttatttctgtctcttagaggaagggttaactcccaggtggtgtttgtgttgagttttagaacaatataaaattctaacagagcatttttataatggatgtgccatgtgttcacttaattgaaactcattctgcaaggctggtaaaatggagcaaaacggggaaaaaaaatcaatagttaagaaaggttaatagcacttgattctcctaaatagcgtttttttcatatgtgttcatttacaagaaacgtaagtcattggaatggatttcaacctgttgagtgatacttctttaaaaaactttgcatacattttaagagtgcgagtaatcattttaatatttgctccttttcccctatggaaacaacctgaaaacatccacctcctcacctaattgagtaattggttatgccagatttttaaacagagattacttcacttattttatagcttctgtaattgcattaaggggaagccacataacaaatgcatggggcacagctacatttttgtaactcatctacaggattccttgaattgtgcacagtgtgctcctgggattggctgtctgcgagaggtgacaatgtgtgttcttatgctgctttgcactttcttataggcgtacagagtccctcttctctacagcaatgctgtgcaaagttcatctgttttctctctggggcatctttgtagtgtttttgatgaactgttattccaaaaaagcaggccatgtacaagagtgcaaaccagaaacgagctctgataagtcaacaggatgtccaagttnttttatattcctagcagacgctatcaacagctgaaaaacgacctgactgtgccgccttagagttaaaaataataggagagctggggcagggggccatgtgcgagcatattcctgcacatgcctggcaaattaacatgaccctgcagtcatctctgagatagaagcttatagtaaacttgccagcttactgacagagaacctggaactgcatcagcaagattatttttgggccgggagcagtagctcacacctgtaatccccgcactttgggaagccgaggcgggcagatcactcaaggccaggagttcaagaccagcctggccaacatggtgaaaccctgtctctactaaagatacaaaaaaaaattagccatatatggtggcgtgcacctgtattcccagctattcaggaggctgaggcatgagaatagtttgaacctgggaggcagaggttgtagtgagctgaggtcacgccaccgcactctagcctgggtgactgagccagagcaatactctgtttcaaaaaaaaatttttttttagtaaaaaaaagactgtttctgggctgccattgctcagtaatattttagcaagtttttgttatcattaaagccattttccatacaccatgctgattctctgtgcttggggaacttgtctttctacaaatataggagtgacttctcaaatgttgtatgtgttcatgcctcattgccagtgggtttaagtttttaaacaatgactactttgaactagatttctgcagtttgatttcgaaacataggacatctgttgtcaaacttggcaatggctaaaaaaataagattttcatgcntcccatagttattttaattgaagattgaaatacagaattactgcaaaagaatatgtgttgtcattaattgtcccattttgtgacattcctgggagctaagctaaacaataaaagttattttatntggtagtaaatcagggaccatatggtatcccaaaataagtctgactgagcagttaaattccaggaaattaaaggctaatgttaatgtaattctcacatttgatcactaggggatgaaatcctagatgtaaatggaataccaataaagggcttgacatttcaagaagccattcatacctttaaggtaacaacattcttattgatctcctttatcctattttcctttcttatttccttctggcttgggtttggtgagttgttttttttttttaaccctttgatataaggacattccaaatgtttcagcccacctttcctcactgttttctcagcaaatccggagtggattatttgttttaacggtacgcacaaagttggtgagccccagcctcacaccctgctcgacacccacacacatgagcagatccgcctccccgaacttcaataccagtgggggagcctcggcgggaggttccgatgaaggcagttcttcatccctgggtcggaagacccctgggcccaaggacaggatcgtcatggaagtaacactcaacaaagagccaagagttggattaggcattggtgcctgctgcttggctctggaaaacagtcctcctggcatctacattcacagccttgctccaggatcagtggccaagatggagagcaacctgagccgcggggatcaaatcctggaagtgaactccgtcaacgtccgccatgctgctttaagcaaagtccacgccatcttgagtaaatgccctccaggacccgttcgccttgtcatcggccggcaccctaatccaaaggtacccccttgaagagtccctctcttgcaaaaaaggactcccttatttctgaatctgaactctcccagtactttgcccacgatgtccctggccccttgtcagacttcatggtggccggttctgaggacgaggatcacccgggaagtggctgcagcacgtcggaggagggcagcctgcctcccagcacctccactcacaaggagcctggaaaacccagagccaacagcctcgtgactcttgggagccatcgggcttctgggctcttccacaagcaggtgacagttgccagacaagccagtctccccggaagcccacaggccctccgaaaccctctcctccgccagaggaaggtaggctgctacgatgccaacgatgccagtgatgaggaagagtttgacagagaaggggactgcatttcactcccaggggccctcccgggtcccatcaggcctctgtcagaggatgacccgaggcgtgtctcaatttcctcttccaagggcatggacgtccacaaccaagaggaacgaccccggaaaacactggtgagcaaggccatctcggcacctcttcttggtagctcagtggacttagaggagagtatcccagagggcatggtggatgctgcgtcctatgcagccaacctcacggactctgcagaggcccccaaggggagccctggaagctggtggaagaaggaactgtcaggatcaagtagcgcacccaaattggaatacacagtccgtacagacacccagagtccgacgaacactgggagccccagttccccccagcagaaaagtgaaggcctgggctccaggcacagaccagtggccagggtaagcccccactgcaagagatccgaggctgaggccaagcccagtggctcacagacagtgaacctgactggcagagccaatgatccatgcgatctggactcgagagtccaggccacttctgtcaaagtgactgtcgctggctttcagccaggtggagctgtggagaagttgtgccaggaatctctgggaaagctgaccactggagatgcttgtgtctctaccagctgtgaactagccagtgctctgtcccatctggatgccagccacctcacagagaacctgcccaaagctgcatcagagctggggcaacaacccatgactgctcctcggacctcatctcttccccagggaagaagggggccgctcatcctgaccccagcaagacctctgtagacacagggcaagtcagtcggccagagaatcccagccagcctgcatcgcccagggtcgccaagtgcaaggccaggtctccagtcaggctcccccatgagggcagcccctccccgggggagaaagcagcggctccccctgactacagcaagactcgatcagcatcggaaaccagcacaccccacaataccaggagggtggctgccctcaggggagcgggacctggagcagagggaatgacaccagctggtgctgtcctgccaggagaccccctcacatcccaggagcagagacagggagctccaggtaaccacagtaaggctctggaaatgacaggaatccatgcacctgaaagctcccaggagccttccctgctggagggagcagattctgtgtcctcaagggcaccgcaggccagcctctccatgctgccatccactgacaacaccaaagaagcatgtggccatgtctcggggcactgctgcccgggggggagtagagagagccctgtgacggacattgacagcttcatcaaggagctggatgcttctgcagcaaggtctccgtcttcccagacgggggacagtggctctcaggagggcagtgctcagggccacccaccagccggggctggaggtgggagctcctgccgtgccgaaccagtcccggggggccagacctcctccccgaggagggcctgggctgctggtgcccccgcctacccacaatgggcctcccagccttcggttttagattcaattaatcccgacaaacattttactgtgaacaaaaactttctgagcaactactctagaaattttagcagttttcatgaagacagcacctccctatcaggcctgggtgacagcacggagccgtctctgtcatccatgtatggcgatgctgaggattcttcttctgaccctgagtcactcactgaagccccacgagcttctgccagggacggctggtcccctcctcgttcccgtgtgtctttgcacaaggaagatccttcggagtcagaagaggaacagattgagatttgttccacacgtggctgccccaatccaccctcgagtcctgctcatcttcccacccaggctgccatctgtcctgcctcagccaaagttctgtcattaaaatacagcactccgagagagtcggtggccagtccccgtgagaaggccgcctgcttgccaggctcatacacttcaggcccagactcttcccagccatcatcactcttggagatgagctctcaggagcatgaaactcatgcggacataagcacttcacagaaccacaggccctcgtgtgcagaagaaaccacagaagtcaccagcgctagctcagccatggaaaacagtccgctgtctaaagtagccaggcattttcacagtccgcccatcattctcagctcccccaacatggtaaatggcttggaacatgacctgctagatgacgaaaccctgaatcaatacgaaacaagcattaatgcagctgccagtctgtcctccttcagtgtggatgtccctaagaatggagaatctgttttggaaaacctccacatctctgaaagtcaagacctggatgacttgctacagaaaccaaaaatgatcgctaggaggcccatcatggcctggtttaaagaaataaataaacataaccaaggcacacatttgaggagcaaaaccgagaaggaacaacctctaatgcctgccagaagtcccgactccaagattcagatggtgagttcaagccaaaaaaagggcgttactgtgcctcatagccctcctcagccgaaaacaaacctggaaaataaggacctgtctaagaagagtccggcagaaatgcttctgactaatggtcagaaggcaaagtgtggtccgaagctgaagaggctcagcctcaagggcaaggccaaagtcaactctgaggcccctgctgcgaatgctgtgaaggctggggggacggaccacaggaaacccttgatctcaccccagacctcccacaaaacactttctaaggcagtgtcacagcggctccatgtagccgaccacgaggaccctgacagaaacaccacagctgcccccaggtccccccagtgtgtgctggaaagcaagccacctcttgccacctctgggccactgaaaccctcagtgtctgacacgagcatcaggacatttgtctcgcccctgacctctcccaagcctgttcctgagcaaggcatgtggagcaggttccacatggctgtcctctctgaacccgacagaggttgcccaaccacccctaaatctcctaagtgtagagcagagggcagggcgccccgtgctgactccgggccggtgagtccggcagcgtctaggaacggcatgtccgtggcagggaacagacagagtgagccgcgcctggccagccatgtggcagcagacacagcccaacccaggccgactggcgaaaaaggaggcaacataatggccagcgatcgcctcgaaagaacaaaccagctgaaaatcgtggagatttctgctgaagcagtgtcagagactgtatgtggtaacaagccagctgaaagcgacagacggggagggtgcttggcccagggcaactgtcaggagaagagtgaaatcaggctctatcgccaggtcgcagaatcatccacaagtcatccatcctcactcccatctcatgcctcccaggcagagcaggaaatgtcacgatcattcagcatggcaaaactggcgtcctcctcctcctcccttcaaacagccattagaaaggcagaatactcccagggaaaatcaagcctgatgtcagactcccgaggggtgcccagaaacagcattccagggggcccctcgggggaggaccatctctacttcaccccaaggccagcgaccaggacctactccatgccagcccagttctcaagccattttggacgggagggtcaccccccacacagcctgggtcgctctcgggacagccaggtccctgtgacaagcagtgttgtccccgaggcaaaggcatccagaggtggtcttcccagcctggctaatggacagggcatatatagtgtaaagccgctgctggacacatcgaggaatcttccagccacagatgaaggggatatcatttcagtccaggagacgagctgcctagtcacagacaaaatcaaagtcaccagacgacactactgctatgagcagaactggccccatgaatctacctcatttttctctgtgaagcagcggatcaagtcttttgagaacctggccaatgctgaccggcctgtagccaagtccggggcttccccatttttgtcggtgagctccaagcctcccattgggaggcggtcttccggcagcattgtttccgggagcctgggccacccaggtgacgcagcagcaaggttgttgagacgcagcttgagttcctgcagcgaaaaccaaagcgaagccggcaccctcctgccccagatggccaagtctccctcaatcatgacactgaccatctctcggcagaacccaccagagaccagtagcaagggctctgattcggaactaaagaaatcacttggtcctttgggaattcccaccccaacgatgaccctggcttctcctgttaagaggaacaagtcctcggtacgccacacgcagccctcgcccgtgtcccgctccaagctccaggagctgagagccttgagcatgcctgaccttgacaagctctgcagcgaggattactcagcagggccgagcgccgtgctcttcaaaactgagctggagatcacccccaggaggtcacctggccctcctgctggaggcgtttcgtgtcccgagaagggcgggaacagggcctgtccaggaggaagtggccctaaaaccagtgctgctgagacacccagttcagccagtgatacgggtgaagctgcccaggatctgccttttagaagaagctggtcagttaatttggatcaacttctagtctcagcgggggaccagcaaagattacagtctgttttatcgtcagtgggatcgaaatctaccatcctaactctcattcaggaagcgaaagcacaatcagagaatgaagcagatgtttgcttcatagtcttgaatagaaaagaaggctcaggtctgggattcagtgtggcaggagggacagatgtggagccaaaatcaatcacggtccacagggtgttttctcagggggcggcttctcaggaagggactatgaaccgaggggatttccttctgtcagtcaacggcgcctcactggctggcttagcccacgggaatgtcctgaaggttctgcaccaggcacagctgcaagggctctgattcggaactcggtcagaggtg

SEQ ID NO: 347553 - DNA, 1058 bp, Homo sapiens
gagaagtgtggcgtctcggtccaggatgcaggtccctgattcgggttggacgtggtcatcaaacccagaaattgaaggatcttgggcctgccttgatgttcatttctctcatctataaaattgaaggctggaggaggtgtgaatgagcccagggaaggacacacggccactgctggagggatcctccattcctgtgtcatttgcatgggtcctgctgtgaaatgaacctggcagggacttgttagacacttccttccttccctcattgagcactccagtgccattgttccacagttgttctaattgggtcctagcttcctcctgccaaggcaaacagcatagtctcgagtaggtgtccctaggctcatctgccagcctgaacatgaacacaggcaaagctgatgatggccagggaccccaggggacgtggggccctgtggggtctggcccccaggagcaagacctctgatgatgctggtgtctgggagtgagcaccatgcccatcacccaggacaatgccgtgctgcacctgcccctcctctaccagtggctgcagaacagcctgcaggaaggtggggatgggccggagcagcggctctgccaggcggccatccagaagctgcaggagtacatccagctgaactttgctgtggatgagagtacggtcccacctgatcacagcccccccgaaatggagatctgtactgtgtacctcaccaaggagctgggggacacagagactgtgggcctgagttttgggaacatccctgttttcggggactatggtgaaaagcgcagggggggcaagaagaggaaaacccaccagggtcctgtgctggatgtgggctgcatctgggtgacagagctgaggaagaacagcccagcagggaagagtgggaaggtccgactgcgggatgagatcctctcactgaatgggcagctgatggttggagttgatgtcagtggggccaggtaagtagggggaatgcctgctggcacaggggctggacacgggaacctggtggttcccagatctgcagctgcagaggtttatgaat

SEQ ID NO: 347554 - DNA, 11218 bp, Homo sapiens
  misc_feature (1256)..(1256): n is a, c, g, or t
gagaagtgtggcgtctcggtccaggatgcaggtccctgattcgggttggacgtggtcatcaaacccagaaattgaaggatcttgggcctgccttgatgttcatttctctcatctataaaattgaaggctggaggaggtgtgaatgagcccagggaaggacacacggccactgctggagggatcctccattcctgtgtcatttgcatgggtcctgctgtgaaatgaacctggcagggacttgttagacacttccttccttccctcattgagcactccagtgccattgttccacagttgttctaattgggtcctagcttcctcctgccaaggcaaacagcatagtctcgagtaggtgtccctaggctcatctgccagcctgaacatgaacacaggcaaagctgatgatggccagggaccccaggggacgtggggccctgtggggtctggcccccaggagcaagacctctgatgatgctggtgtctgggagtgagcaccatgcccatcacccaggacaatgccgtgctgcacctgcccctcctctaccagtggctgcagaacagcctgcaggaaggtggggatgggccggagcagcggctctgccaggcggccatccagaagctgcaggagtacatccagctgaactttgctgtggatgagagtacggtcccacctgatcacagcccccccgaaatggagatctgtactgtgtacctcaccaaggagctgggggacacagagactgtgggcctgagttttgggaacatccctgttttcggggactatggtgaaaagcgcagggggggcaagaagaggaaaacccaccagggtcctgtgctggatgtgggctgcatctgggtgacagagctgaggaagaacagcccagcagggaagagtgggaaggtccgactgcgggatgagatcctctcactgaatgggcagctgatggttggagttgatgtcagtggggccagttacctggctgagcagtgctggaatggcggctttatctacctgatcatgctgcgtcgctttaagcacaaagcccactccacttataatggcaacagtagcaacagctctgaaccaggagaaacacctaccttggagctgggtgaccgaactgcgaaaaaggggaaacgaaccagaaagtttggggtcatctccaggcctcctgccaacaaggcccctgaagaatccaagggcagcgctggctgtgaggtgtccagtgaccccagcactgagctggagaacggcnctgaccctgaacttggaaacggccatgtctttcagctagaaaatggcccagattctctcaaggaggtggctggaccccatctagagaggtcagaagtggacagagggacagagcatagaattccaaagacagatgctcctctgaccacaagcaatgacaaacgccgcttctcaaaaggtgggaagacggacttccaatcgagtgactgcctggcacggcaggaggaagttggccgaatatggaagatggagctgctcaaagaatcggatgggctgggaattcaggttagtggaggccgaggatcaaagcgctcacctcacgctatcgttgtcactcaagtgaaggaaggaggtgccgctcacaggaataccacattgtgaagaagtctacccgctccttaagcacgactcaggtggaatctccttggaggctcattcggccatccgtcatctcgatcattgggttgtacaaagaaaaaggcaagggccttggctttagtattgctggaggtcgagactgcattcgtggacagatggggatttttgtcaagaccatcttcccaaatggatcagctgcagaggacggaagacttaaagaaggggatgaaatcctagatgtaaatggaataccaataaagggcttgacatttcaagaagccattcatacctttaagcaaatccggagtggattatttgttttaacggtacgcacaaagttggtgagccccagcctcacaccctgctcgacacccacacacatgagcagatccgcctccccgaacttcaataccagtgggggagcctcggcgggaggttccgatgaaggcagttcttcatccctgggtcggaagacccctgggcccaaggacaggatcgtcatggaagtaacactcaacaaagagccaagagttggattaggcattggtgcctgctgcttggctctggaaaacagtcctcctggcatctacattcacagccttgctccaggatcagtggccaagatggagagcaacctgagccgcggggatcaaatcctggaagtgaactccgtcaacgtccgccatgctgctttaagcaaagtccacgccatcttgagtaaatgccctgtttccgagcaggaaatggatgaagtcatagcacgcagcacttatcaggagagcaaagaggccaattcctctcctggcttaggtacccccttgaagagtccctctcttgcaaaaaaggactcccttatttctgaatctgaactctcccagtactttgcccacgatgtccctggccccttgtcagacttcatggtggccggttctgaggacgaggatcacccgggaagtggctgcagcacgtcggaggagggcagcctgcctcccagcacctccactcacaaggagcctggaaaacccagagccaacagcctcgtgactcttgggagccatcgggcttctgggctcttccacaagcaggtgacagttgccagacaagccagtctccccggaagcccacaggccctccgaaaccctctcctccgccagaggaaggtaggctgctacgatgccaacgatgccagtgatgaggaagagtttgacagagaaggggactgcatttcactcccaggggccctcccgggtcccatcaggcctctgtcagaggatgacccgaggcgtgtctcaatttcctcttccaagggcatggacgtccacaaccaagaggaacgaccccggaaaacactggtgagcaaggccatctcggcacctcttcttggtagctcagtggacttagaggagagtatcccagagggcatggtggatgctgcgtcctatgcagccaacctcacggactctgcagaggcccccaaggggagccctggaagctggtggaagaaggaactgtcaggatcaagtagcgcacccaaattggaatacacagtccgtacagacacccagagtccgacgaacactgggagccccagttccccccagcagaaaagtgaaggcctgggctccaggcacagaccagtggccagggtaagcccccactgcaagagatccgaggctgaggccaagcccagtggctcacagacagtgaacctgactggcagagccaatgatccatgcgatctggactcgagagtccaggccacttctgtcaaagtgactgtcgctggctttcagccaggtggagctgtggagaagttgtgccaggaatctctgggaaagctgaccactggagatgcttgtgtctctaccagctgtgaactagccagtgctctgtcccatctggatgccagccacctcacagagaacctgcccaaagctgcatcagagctggggcaacaacccatgactgctcctcggacctcatctcttccccagggaagaagggggccgctcatcctgaccccagcaagacctctgtagacacagggcaagtcagtcggccagagaatcccagccagcctgcatcgcccagggtcgccaagtgcaaggccaggtctccagtcaggctcccccatgagggcagcccctccccgggggagaaagcagcggctccccctgactacagcaagactcgatcagcatcggaaaccagcacaccccacaataccaggagggtggctgccctcaggggagcgggacctggagcagagggaatgacaccagctggtgctgtcctgccaggagaccccctcacatcccaggagcagagacagggagctccaggtaaccacagtaaggctctggaaatgacaggaatccatgcacctgaaagctcccaggagccttccctgctggagggagcagattctgtgtcctcaagggcaccgcaggccagcctctccatgctgccatccactgacaacaccaaagaagcatgtggccatgtctcggggcactgctgcccgggggggagtagagagagccctgtgacggacattgacagcttcatcaaggagctggatgcttctgcagcaaggtctccgtcttcccagacgggggacagtggctctcaggagggcagtgctcagggccacccaccagccggggctggaggtgggagctcctgccgtgccgaaccagtcccggggggccagacctcctccccgaggagggcctgggctgctggtgcccccgcctacccacaatgggcctcccagccttcggttttagattcaattaatcccgacaaacattttactgtgaacaaaaactttctgagcaactactctagaaattttagcagttttcatgaagacagcacctccctatcaggcctgggtgacagcacggagccgtctctgtcatccatgtatggcgatgctgaggattcttcttctgaccctgagtcactcactgaagccccacgagcttctgccagggacggctggtcccctcctcgttcccgtgtgtctttgcacaaggaagatccttcggagtcagaagaggaacagattgagatttgttccacacgtggctgccccaatccaccctcgagtcctgctcatcttcccacccaggctgccatctgtcctgcctcagccaaagttctgtcattaaaatacagcactccgagagagtcggtggccagtccccgtgagaaggccgcctgcttgccaggctcatacacttcaggcccagactcttcccagccatcatcactcttggagatgagctctcaggagcatgaaactcatgcggacataagcacttcacagaaccacaggccctcgtgtgcagaagaaaccacagaagtcaccagcgctagctcagccatggaaaacagtccgctgtctaaagtagccaggcattttcacagtccgcccatcattctcagctcccccaacatggtaaatggcttggaacatgacctgctagatgacgaaaccctgaatcaatacgaaacaagcattaatgcagctgccagtctgtcctccttcagtgtggatgtccctaagaatggagaatctgttttggaaaacctccacatctctgaaagtcaagacctggatgacttgctacagaaaccaaaaatgatcgctaggaggcccatcatggcctggtttaaagaaataaataaacataaccaaggcacacatttgaggagcaaaaccgagaaggaacaacctctaatgcctgccagaagtcccgactccaagattcagatggtgagttcaagccaaaaaaagggcgttactgtgcctcatagccctcctcagccgaaaacaaacctggaaaataaggacctgtctaagaagagtccggcagaaatgcttctgactaatggtcagaaggcaaagtgtggtccgaagctgaagaggctcagcctcaagggcaaggccaaagtcaactctgaggcccctgctgcgaatgctgtgaaggctggggggacggaccacaggaaacccttgatctcaccccagacctcccacaaaacactttctaaggcagtgtcacagcggctccatgtagccgaccacgaggaccctgacagaaacaccacagctgcccccaggtccccccagtgtgtgctggaaagcaagccacctcttgccacctctgggccactgaaaccctcagtgtctgacacgagcatcaggacatttgtctcgcccctgacctctcccaagcctgttcctgagcaaggcatgtggagcaggttccacatggctgtcctctctgaacccgacagaggttgcccaaccacccctaaatctcctaagtgtagagcagagggcagggcgccccgtgctgactccgggccggtgagtccggcagcgtctaggaacggcatgtccgtggcagggaacagacagagtgagccgcgcctggccagccatgtggcagcagacacagcccaacccaggccgactggcgaaaaaggaggcaacataatggccagcgatcgcctcgaaagaacaaaccagctgaaaatcgtggagatttctgctgaagcagtgtcagagactgtatgtggtaacaagccagctgaaagcgacagacggggagggtgcttggcccagggcaactgtcaggagaagagtgaaatcaggctctatcgccaggtcgcagaatcatccacaagtcatccatcctcactcccatctcatgcctcccaggcagagcaggaaatgtcacgatcattcagcatggcaaaactggcgtcctcctcctcctcccttcaaacagccattagaaaggcagaatactcccagggaaaatcaagcctgatgtcagactcccgaggggtgcccagaaacagcattccagggggcccctcgggggaggaccatctctacttcaccccaaggccagcgaccaggacctactccatgccagcccagttctcaagccattttggacgggagggtcaccccccacacagcctgggtcgctctcgggacagccaggtccctgtgacaagcagtgttgtccccgaggcaaaggcatccagaggtggtcttcccagcctggctaatggacagggcatatatagtgtaaagccgctgctggacacatcgaggaatcttccagccacagatgaaggggatatcatttcagtccaggagacgagctgcctagtcacagacaaaatcaaagtcaccagacgacactactgctatgagcagaactggccccatgaatctacctcatttttctctgtgaagcagcggatcaagtcttttgagaacctggccaatgctgaccggcctgtagccaagtccggggcttccccatttttgtcggtgagctccaagcctcccattgggaggcggtcttccggcagcattgtttccgggagcctgggccacccaggtgacgcagcagcaaggttgttgagacgcagcttgagttcctgcagcgaaaaccaaagcgaagccggcaccctcctgccccagatggccaagtctccctcaatcatgacactgaccatctctcggcagaacccaccagagaccagtagcaagggctctgattcggaactaaagaaatcacttggtcctttgggaattcccaccccaacgatgaccctggcttctcctgttaagaggaacaagtcctcggtacgccacacgcagccctcgcccgtgtcccgctccaagctccaggagctgagagccttgagcatgcctgaccttgacaagctctgcagcgaggattactcagcagggccgagcgccgtgctcttcaaaactgagctggagatcacccccaggaggtcacctggccctcctgctggaggcgtttcgtgtcccgagaagggcgggaacagggcctgtccaggaggaagtggccctaaaaccagtgctgctgagacacccagttcagccagtgatacgggtgaagctgcccaggatctgccttttagaagaagctggtcagttaatttggatcaacttctagtctcagcgggggaccagcaaagattacagtctgttttatcgtcagtgggatcgaaatctaccatcctaactctcattcaggaagcgaaagcacaatcagagaatgaagcagatgtttgcttcatagtcttgaatagaaaagaaggctcaggtctgggattcagtgtggcaggagggacagatgtggagccaaaatcaatcacggtccacagggtgttttctcagggggcggcttctcaggaagggactatgaaccgaggggatttccttctgtcagtcaacggcgcctcactggctggcttagcccacgggaatgtcctgaaggttctgcaccaggcacagctgcacaaagatgccctcgtggtcatcaagaaagggatggatcagcccaggccctctgcccggcaggagcctcccacagccaatgggaagggtttgctgtccagaaagaccatccccctggagcctggcattgggagaagtgtggctgtacacgatgctctgtgtgttgaagtgctgaagacctcggctgggctgggactgagtctggatgggggaaaatcatcggtgacgggagatgggcccttggtcattaaaagagtgtacaaaggtggtgcggctgaacaagctggaataatagaagctggagatgaaattcttgctattaatgggaaacctctggttgggctcatgcactttgatgcctggaatattatgaagtctgtcccagaaggacctgtgcagttattaattagaaagcataggaattcttcatgaattttaacaagaatcattttctcagttctcttctttctttagcaaatcagagtgacttctttaaaccacaggttgttgaaatggccaacactggtacagacacggactataaaaatctccaagcttgtgcttacacatgaagcctgacttaactgtatgtgcaacagcaatgaaattaactccagaagccttccacctgcgtcacccaggccgggagggttccttcgttccagtgcctgtcccctacctttatgttatgtttactgatggggatacaagatgtgacacacccttctttatttgaaacaaacaaacatttagctagacctttgcttccttcttgccagctctcccaacatacccaatcctggtgatcagggaactaaaagtctgagggggacacaaatgtcacacctaagaggacaatcaatcattttgtatgattttgtaagtaagtaaatgacagaatgcttttaggcacattcaatggaaggaggagatgtaggtctgtatatgttaccctgaaaagagaataagacttacttaaaaaaatgaattatgacctgttaggctgagctcaggaattgtccaaaaaggaaaaagcaaaataattaattgagagtattttttagtgagtgtaatgtataatgtacgtatgcaaagttcaactcaataggttattgatcaccatgaagtattgatcattttctatctcaaaagtgtaagccataaggctgttttacagaatagcacttctgataagctgtattaaatagccatgagcttcactgcttagagggagcagaaaggtcaacatctaaaagcaccttacaactagtttttgaacctgtcttgataagtgcttgaattcaagactggtcagtacaagagcagacaaaaatatcacaagtcagtcactgggtttccatttctgaattttatgcactccaaccatgaatttaaactaaatttttagaaatcaagtatctttctaagtgtccttggatttatagacaatgtatgtacaatccaaatagaggagcttaatggaatccttttaggagactggttggtttttttccctctttcccaacatgtttaagaaatgtaacattctaagtattggatctcttttcttgacctagtataatgacaactgcagtgacttaagtttttgctgttttcgttttcccgctttgcaatttcctccttttgccaaaaatgttttcctacagaagactgtcgtgactcacgctacttgggaaactcactctggccactcctcctctggtggcatgagctgcttcccagtagctattccgattggatattccgttcgtcgtcacatagctggcttttctctcctcatgatgtaccttattttcttaggtaaataattccaaactctcatcgggtcataaagaggaggagaaacagggtgagtcaaggtaaaggagcagaaatgtagttacaagccaggtcgtcttcagtggcacaaaccaacccgttgagccctgacaacatgagtggagagtgcatttgccatacctgtgtgcatgacactaagattttatgttggagatacttctttaaataacctacagcttgggtctatggctgtgacccccagattcatggaggggctttagccatcagctttgtacatcatcatttttctgaatgaccaatcccactaaacatctttgaagtcggcctagagaggtccttcagatgagagagaaatagctggcttgtctgagtccagatttctcatcaactggcaatacaaaggaaaatatggtacaggagttagttagaaaggtcttattgattttacttctacttttcactacagttacaggtagaatactgtaggaagtcagtgcaaggtgcatgcttgattgatagatattgattgtttttcagtctctggggtcagttttgtggtttctgctttcttgcctaaatcaaagactatttcaagtcaacaacactgaaaactgcttttcgcctccactcttacagctgtgcctaataataattaattaataaacgcacagccctatgtgaacagacaggaatttcttgtgcaatgtggagcaaatggaatggtctccttccgcaagtctttttaatcctcatatctggagtacaagggtagacctctggcttaccacatacactatgctaaagtcatcagccactgctactacatcttgccagaaggtttccctcgccaacaaacagttgaaatttaagggaagaagcaaaagctaaactgtctttgaccctaagatagatagaaagctatttatttgtcttcagtgttcaaggcatgactagtatttctaattagcctaataaattcccacactttctgaagtgaacactaatggtattgtcctactaaaactgtcattgtttctttttttttaactggtcagtcattcacaataagctatgagggtaaataaatatgtgttataacaagtaaaccgtagttgcaagaatataccatgaagattaaagtaggctgggtttcatttccatcttcccacacatctcattgaatttgatggttgacttaattggcaccataactttgtatgatattatacattaacctttatttatgtaaagtaaaatgccttatatattaaagagtaagtgcaataatatgaaatagcctgtacattttaaaaatgttgtcaccaagttatataaatccacatctctgtaaacaaccttttttaagtaattttaaaaaaaataaacactctgcttactac

SEQ ID NO: 347555 - DNA, 9678 bp, Homo sapiens
gaaatgtctagtactgaagacatctaagattttcaaagtctgagtgtatttttctgccagataccacaatagaacaaatgagagtaatctctgaccttgccgtgtgctgacttttaggaataccacattgtgaagaagtctacccgctccttaagcacgactcaggtggaatctccttggaggctcattcggccatccgtcatctcgatcattgggttgtacaaagaaaaaggcaagggccttggctttagtattgctggaggtcgagactgcattcgtggacagatggggatttttgtcaagaccatcttcccaaatggatcagctgcagaggacggaagacttaaagaaggggatgaaatcctagatgtaaatggaataccaataaagggcttgacatttcaagaagccattcatacctttaagcaaatccggagtggattatttgttttaacggtacgcacaaagttggtgagccccagcctcacaccctgctcgacacccacacacatgagcagatccgcctccccgaacttcaataccagtgggggagcctcggcgggaggttccgatgaaggcagttcttcatccctgggtcggaagacccctgggcccaaggacaggatcgtcatggaagtaacactcaacaaagagccaagagttggattaggcattggtgcctgctgcttggctctggaaaacagtcctcctggcatctacattcacagccttgctccaggatcagtggccaagatggagagcaacctgagccgcggggatcaaatcctggaagtgaactccgtcaacgtccgccatgctgctttaagcaaagtccacgccatcttgagtaaatgccctccaggacccgttcgccttgtcatcggccggcaccctaatccaaaggtacccccttgaagagtccctctcttgcaaaaaaggactcccttatttctgaatctgaactctcccagtactttgcccacgatgtccctggccccttgtcagacttcatggtggccggttctgaggacgaggatcacccgggaagtggctgcagcacgtcggaggagggcagcctgcctcccagcacctccactcacaaggagcctggaaaacccagagccaacagcctcgtgactcttgggagccatcgggcttctgggctcttccacaagcaggtgacagttgccagacaagccagtctccccggaagcccacaggccctccgaaaccctctcctccgccagaggaaggtaggctgctacgatgccaacgatgccagtgatgaggaagagtttgacagagaaggggactgcatttcactcccaggggccctcccgggtcccatcaggcctctgtcagaggatgacccgaggcgtgtctcaatttcctcttccaagggcatggacgtccacaaccaagaggaacgaccccggaaaacactggtgagcaaggccatctcggcacctcttcttggtagctcagtggacttagaggagagtatcccagagggcatggtggatgctgcgtcctatgcagccaacctcacggactctgcagaggcccccaaggggagccctggaagctggtggaagaaggaactgtcaggatcaagtagcgcacccaaattggaatacacagtccgtacagacacccagagtccgacgaacactgggagccccagttccccccagcagaaaagtgaaggcctgggctccaggcacagaccagtggccagggtaagcccccactgcaagagatccgaggctgaggccaagcccagtggctcacagacagtgaacctgactggcagagccaatgatccatgcgatctggactcgagagtccaggccacttctgtcaaagtgactgtcgctggctttcagccaggtggagctgtggagaagttgtgccaggaatctctgggaaagctgaccactggagatgcttgtgtctctaccagctgtgaactagccagtgctctgtcccatctggatgccagccacctcacagagaacctgcccaaagctgcatcagagctggggcaacaacccatgactgctcctcggacctcatctcttccccagggaagaagggggccgctcatcctgaccccagcaagacctctgtagacacagggcaagtcagtcggccagagaatcccagccagcctgcatcgcccagggtcgccaagtgcaaggccaggtctccagtcaggctcccccatgagggcagcccctccccgggggagaaagcagcggctccccctgactacagcaagactcgatcagcatcggaaaccagcacaccccacaataccaggagggtggctgccctcaggggagcgggacctggagcagagggaatgacaccagctggtgctgtcctgccaggagaccccctcacatcccaggagcagagacagggagctccaggtaaccacagtaaggctctggaaatgacaggaatccatgcacctgaaagctcccaggagccttccctgctggagggagcagattctgtgtcctcaagggcaccgcaggccagcctctccatgctgccatccactgacaacaccaaagaagcatgtggccatgtctcggggcactgctgcccgggggggagtagagagagccctgtgacggacattgacagcttcatcaaggagctggatgcttctgcagcaaggtctccgtcttcccagacgggggacagtggctctcaggagggcagtgctcagggccacccaccagccggggctggaggtgggagctcctgccgtgccgaaccagtcccggggggccagacctcctccccgaggagggcctgggctgctggtgcccccgcctacccacaatgggcctcccagccttcggttttagattcaattaatcccgacaaacattttactgtgaacaaaaactttctgagcaactactctagaaattttagcagttttcatgaagacagcacctccctatcaggcctgggtgacagcacggagccgtctctgtcatccatgtatggcgatgctgaggattcttcttctgaccctgagtcactcactgaagccccacgagcttctgccagggacggctggtcccctcctcgttcccgtgtgtctttgcacaaggaagatccttcggagtcagaagaggaacagattgagatttgttccacacgtggctgccccaatccaccctcgagtcctgctcatcttcccacccaggctgccatctgtcctgcctcagccaaagttctgtcattaaaatacagcactccgagagagtcggtggccagtccccgtgagaaggccgcctgcttgccaggctcatacacttcaggcccagactcttcccagccatcatcactcttggagatgagctctcaggagcatgaaactcatgcggacataagcacttcacagaaccacaggccctcgtgtgcagaagaaaccacagaagtcaccagcgctagctcagccatggaaaacagtccgctgtctaaagtagccaggcattttcacagtccgcccatcattctcagctcccccaacatggtaaatggcttggaacatgacctgctagatgacgaaaccctgaatcaatacgaaacaagcattaatgcagctgccagtctgtcctccttcagtgtggatgtccctaagaatggagaatctgttttggaaaacctccacatctctgaaagtcaagacctggatgacttgctacagaaaccaaaaatgatcgctaggaggcccatcatggcctggtttaaagaaataaataaacataaccaaggcacacatttgaggagcaaaaccgagaaggaacaacctctaatgcctgccagaagtcccgactccaagattcagatggtgagttcaagccaaaaaaagggcgttactgtgcctcatagccctcctcagccgaaaacaaacctggaaaataaggacctgtctaagaagagtccggcagaaatgcttctgactaatggtcagaaggcaaagtgtggtccgaagctgaagaggctcagcctcaagggcaaggccaaagtcaactctgaggcccctgctgcgaatgctgtgaaggctggggggacggaccacaggaaacccttgatctcaccccagacctcccacaaaacactttctaaggcagtgtcacagcggctccatgtagccgaccacgaggaccctgacagaaacaccacagctgcccccaggtccccccagtgtgtgctggaaagcaagccacctcttgccacctctgggccactgaaaccctcagtgtctgacacgagcatcaggacatttgtctcgcccctgacctctcccaagcctgttcctgagcaaggcatgtggagcaggttccacatggctgtcctctctgaacccgacagaggttgcccaaccacccctaaatctcctaagtgtagagcagagggcagggcgccccgtgctgactccgggccggtgagtccggcagcgtctaggaacggcatgtccgtggcagggaacagacagagtgagccgcgcctggccagccatgtggcagcagacacagcccaacccaggccgactggcgaaaaaggaggcaacataatggccagcgatcgcctcgaaagaacaaaccagctgaaaatcgtggagatttctgctgaagcagtgtcagagactgtatgtggtaacaagccagctgaaagcgacagacggggagggtgcttggcccagggcaactgtcaggagaagagtgaaatcaggctctatcgccaggtcgcagaatcatccacaagtcatccatcctcactcccatctcatgcctcccaggcagagcaggaaatgtcacgatcattcagcatggcaaaactggcgtcctcctcctcctcccttcaaacagccattagaaaggcagaatactcccagggaaaatcaagcctgatgtcagactcccgaggggtgcccagaaacagcattccagggggcccctcgggggaggaccatctctacttcaccccaaggccagcgaccaggacctactccatgccagcccagttctcaagccattttggacgggagggtcaccccccacacagcctgggtcgctctcgggacagccaggtccctgtgacaagcagtgttgtccccgaggcaaaggcatccagaggtggtcttcccagcctggctaatggacagggcatatatagtgtaaagccgctgctggacacatcgaggaatcttccagccacagatgaaggggatatcatttcagtccaggagacgagctgcctagtcacagacaaaatcaaagtcaccagacgacactactgctatgagcagaactggccccatgaatctacctcatttttctctgtgaagcagcggatcaagtcttttgagaacctggccaatgctgaccggcctgtagccaagtccggggcttccccatttttgtcggtgagctccaagcctcccattgggaggcggtcttccggcagcattgtttccgggagcctgggccacccaggtgacgcagcagcaaggttgttgagacgcagcttgagttcctgcagcgaaaaccaaagcgaagccggcaccctcctgccccagatggccaagtctccctcaatcatgacactgaccatctctcggcagaacccaccagagaccagtagcaagggctctgattcggaactaaagaaatcacttggtcctttgggaattcccaccccaacgatgaccctggcttctcctgttaagaggaacaagtcctcggtacgccacacgcagccctcgcccgtgtcccgctccaagctccaggagctgagagccttgagcatgcctgaccttgacaagctctgcagcgaggattactcagcagggccgagcgccgtgctcttcaaaactgagctggagatcacccccaggaggtcacctggccctcctgctggaggcgtttcgtgtcccgagaagggcgggaacagggcctgtccaggaggaagtggccctaaaaccagtgctgctgagacacccagttcagccagtgatacgggtgaagctgcccaggatctgccttttagaagaagctggtcagttaatttggatcaacttctagtctcagcgggggaccagcaaagattacagtctgttttatcgtcagtgggatcgaaatctaccatcctaactctcattcaggaagcgaaagcacaatcagagaatgaagcagatgtttgcttcatagtcttgaatagaaaagaaggctcaggtctgggattcagtgtggcaggagggacagatgtggagccaaaatcaatcacggtccacagggtgttttctcagggggcggcttctcaggaagggactatgaaccgaggggatttccttctgtcagtcaacggcgcctcactggctggcttagcccacgggaatgtcctgaaggttctgcaccaggcacagctgcacaaagatgccctcgtggtcatcaagaaagggatggatcagcccaggccctctgcccggcaggagcctcccacagccaatgggaagggtttgctgtccagaaagaccatccccctggagcctggcattgggagaagtgtggctgtacacgatgctctgtgtgttgaagtgctgaagacctcggctgggctgggactgagtctggatgggggaaaatcatcggtgacgggagatgggcccttggtcattaaaagagtgtacaaaggtggtgcggctgaacaagctggaataatagaagctggagatgaaattcttgctattaatgggaaacctctggttgggctcatgcactttgatgcctggaatattatgaagtctgtcccagaaggacctgtgcagttattaattagaaagcataggaattcttcatgaattttaacaagaatcattttctcagttctcttctttctttagcaaatcagagtgacttctttaaaccacaggttgttgaaatggccaacactggtacagacacggactataaaaatctccaagcttgtgcttacacatgaagcctgacttaactgtatgtgcaacagcaatgaaattaactccagaagccttccacctgcgtcacccaggccgggagggttccttcgttccagtgcctgtcccctacctttatgttatgtttactgatggggatacaagatgtgacacacccttctttatttgaaacaaacaaacatttagctagacctttgcttccttcttgccagctctcccaacatacccaatcctggtgatcagggaactaaaagtctgagggggacacaaatgtcacacctaagaggacaatcaatcattttgtatgattttgtaagtaagtaaatgacagaatgcttttaggcacattcaatggaaggaggagatgtaggtctgtatatgttaccctgaaaagagaataagacttacttaaaaaaatgaattatgacctgttaggctgagctcaggaattgtccaaaaaggaaaaagcaaaataattaattgagagtattttttagtgagtgtaatgtataatgtacgtatgcaaagttcaactcaataggttattgatcaccatgaagtattgatcattttctatctcaaaagtgtaagccataaggctgttttacagaatagcacttctgataagctgtattaaatagccatgagcttcactgcttagagggagcagaaaggtcaacatctaaaagcaccttacaactagtttttgaacctgtcttgataagtgcttgaattcaagactggtcagtacaagagcagacaaaaatatcacaagtcagtcactgggtttccatttctgaattttatgcactccaaccatgaatttaaactaaatttttagaaatcaagtatctttctaagtgtccttggatttatagacaatgtatgtacaatccaaatagaggagcttaatggaatccttttaggagactggttggtttttttccctctttcccaacatgtttaagaaatgtaacattctaagtattggatctcttttcttgacctagtataatgacaactgcagtgacttaagtttttgctgttttcgttttcccgctttgcaatttcctccttttgccaaaaatgttttcctacagaagactgtcgtgactcacgctacttgggaaactcactctggccactcctcctctggtggcatgagctgcttcccagtagctattccgattggatattccgttcgtcgtcacatagctggcttttctctcctcatgatgtaccttattttcttaggtaaataattccaaactctcatcgggtcataaagaggaggagaaacagggtgagtcaaggtaaaggagcagaaatgtagttacaagccaggtcgtcttcagtggcacaaaccaacccgttgagccctgacaacatgagtggagagtgcatttgccatacctgtgtgcatgacactaagattttatgttggagatacttctttaaataacctacagcttgggtctatggctgtgacccccagattcatggaggggctttagccatcagctttgtacatcatcatttttctgaatgaccaatcccactaaacatctttgaagtcggcctagagaggtccttcagatgagagagaaatagctggcttgtctgagtccagatttctcatcaactggcaatacaaaggaaaatatggtacaggagttagttagaaaggtcttattgattttacttctacttttcactacagttacaggtagaatactgtaggaagtcagtgcaaggtgcatgcttgattgatagatattgattgtttttcagtctctggggtcagttttgtggtttctgctttcttgcctaaatcaaagactatttcaagtcaacaacactgaaaactgcttttcgcctccactcttacagctgtgcctaataataattaattaataaacgcacagccctatgtgaacagacaggaatttcttgtgcaatgtggagcaaatggaatggtctccttccgcaagtctttttaatcctcatatctggagtacaagggtagacctctggcttaccacatacactatgctaaagtcatcagccactgctactacatcttgccagaaggtttccctcgccaacaaacagttgaaatttaagggaagaagcaaaagctaaactgtctttgaccctaagatagatagaaagctatttatttgtcttcagtgttcaaggcatgactagtatttctaattagcctaataaattcccacactttctgaagtgaacactaatggtattgtcctactaaaactgtcattgtttctttttttttaactggtcagtcattcacaataagctatgagggtaaataaatatgtgttataacaagtaaaccgtagttgcaagaatataccatgaagattaaagtaggctgggtttcatttccatcttcccacacatctcattgaatttgatggttgacttaattggcaccataactttgtatgatattatacattaacctttatttatgtaaagtaaaatgccttatatattaaagagtaagtgcaataatatgaaatagcctgtacattttaaaaatgttgtcaccaagttatataaatccacatctctgtaaacaaccttttttaagtaattttaaaaaaaataaacactctgcttactac

SEQ ID NO: 347556 - DNA, 11820 bp, Homo sapiens
  misc_feature (979)..(979): n is a, c, g, or t
  misc_feature (1811)..(1811): n is a, c, g, or t
  misc_feature (1935)..(1935): n is a, c, g, or t
ttagttatcttcaaaaatgctgtgactgttcagttcaattgacctaaacttcaggtgcttttgtgttatacgggttctttttttggaactgatgagaatgaattggaatctcctattttttaggcagagcaaccatcgaaccctgtatgctaacaataagacatgaccaggcttcattctcccacggcagaatatttatttctgtctcttagaggaagggttaactcccaggtggtgtttgtgttgagttttagaacaatataaaattctaacagagcatttttataatggatgtgccatgtgttcacttaattgaaactcattctgcaaggctggtaaaatggagcaaaacggggaaaaaaaatcaatagttaagaaaggttaatagcacttgattctcctaaatagcgtttttttcatatgtgttcatttacaagaaacgtaagtcattggaatggatttcaacctgttgagtgatacttctttaaaaaactttgcatacattttaagagtgcgagtaatcattttaatatttgctccttttcccctatggaaacaacctgaaaacatccacctcctcacctaattgagtaattggttatgccagatttttaaacagagattacttcacttattttatagcttctgtaattgcattaaggggaagccacataacaaatgcatggggcacagctacatttttgtaactcatctacaggattccttgaattgtgcacagtgtgctcctgggattggctgtctgcgagaggtgacaatgtgtgttcttatgctgctttgcactttcttataggcgtacagagtccctcttctctacagcaatgctgtgcaaagttcatctgttttctctctggggcatctttgtagtgtttttgatgaactgttattccaaaaaagcaggccatgtacaagagtgcaaaccagaaacgagctctgataagtcaacaggatgtccaagttnttttatattcctagcagacgctatcaacagctgaaaaacgacctgactgtgccgccttagagttaaaaataataggagagctggggcagggggccatgtgcgagcatattcctgcacatgcctggcaaattaacatgaccctgcagtcatctctgagatagaagcttatagtaaacttgccagcttactgacagagaacctggaactgcatcagcaagattatttttgggccgggagcagtagctcacacctgtaatccccgcactttgggaagccgaggcgggcagatcactcaaggccaggagttcaagaccagcctggccaacatggtgaaaccctgtctctactaaagatacaaaaaaaaattagccatatatggtggcgtgcacctgtattcccagctattcaggaggctgaggcatgagaatagtttgaacctgggaggcagaggttgtagtgagctgaggtcacgccaccgcactctagcctgggtgactgagccagagcaatactctgtttcaaaaaaaaatttttttttagtaaaaaaaagactgtttctgggctgccattgctcagtaatattttagcaagtttttgttatcattaaagccattttccatacaccatgctgattctctgtgcttggggaacttgtctttctacaaatataggagtgacttctcaaatgttgtatgtgttcatgcctcattgccagtgggtttaagtttttaaacaatgactactttgaactagatttctgcagtttgatttcgaaacataggacatctgttgtcaaacttggcaatggctaaaaaaataagattttcatgcntcccatagttattttaattgaagattgaaatacagaattactgcaaaagaatatgtgttgtcattaattgtcccattttgtgacattcctgggagctaagctaaacaataaaagttattttatntggtagtaaatcagggaccatatggtatcccaaaataagtctgactgagcagttaaattccaggaaattaaaggctaatgttaatgtaattctcacatttgatcactaggggatgaaatcctagatgtaaatggaataccaataaagggcttgacatttcaagaagccattcatacctttaaggtaacaacattcttattgatctcctttatcctattttcctttcttatttccttctggcttgggtttggtgagttgttttttttttttaaccctttgatataaggacattccaaatgtttcagcccacctttcctcactgttttctcagcaaatccggagtggattatttgttttaacggtacgcacaaagttggtgagccccagcctcacaccctgctcgacacccacacacatgagcagatccgcctccccgaacttcaataccagtgggggagcctcggcgggaggttccgatgaaggcagttcttcatccctgggtcggaagacccctgggcccaaggacaggatcgtcatggaagtaacactcaacaaagagccaagagttggattaggcattggtgcctgctgcttggctctggaaaacagtcctcctggcatctacattcacagccttgctccaggatcagtggccaagatggagagcaacctgagccgcggggatcaaatcctggaagtgaactccgtcaacgtccgccatgctgctttaagcaaagtccacgccatcttgagtaaatgccctccaggacccgttcgccttgtcatcggccggcaccctaatccaaaggtacccccttgaagagtccctctcttgcaaaaaaggactcccttatttctgaatctgaactctcccagtactttgcccacgatgtccctggccccttgtcagacttcatggtggccggttctgaggacgaggatcacccgggaagtggctgcagcacgtcggaggagggcagcctgcctcccagcacctccactcacaaggagcctggaaaacccagagccaacagcctcgtgactcttgggagccatcgggcttctgggctcttccacaagcaggtgacagttgccagacaagccagtctccccggaagcccacaggccctccgaaaccctctcctccgccagaggaaggtaggctgctacgatgccaacgatgccagtgatgaggaagagtttgacagagaaggggactgcatttcactcccaggggccctcccgggtcccatcaggcctctgtcagaggatgacccgaggcgtgtctcaatttcctcttccaagggcatggacgtccacaaccaagaggaacgaccccggaaaacactggtgagcaaggccatctcggcacctcttcttggtagctcagtggacttagaggagagtatcccagagggcatggtggatgctgcgtcctatgcagccaacctcacggactctgcagaggcccccaaggggagccctggaagctggtggaagaaggaactgtcaggatcaagtagcgcacccaaattggaatacacagtccgtacagacacccagagtccgacgaacactgggagccccagttccccccagcagaaaagtgaaggcctgggctccaggcacagaccagtggccagggtaagcccccactgcaagagatccgaggctgaggccaagcccagtggctcacagacagtgaacctgactggcagagccaatgatccatgcgatctggactcgagagtccaggccacttctgtcaaagtgactgtcgctggctttcagccaggtggagctgtggagaagttgtgccaggaatctctgggaaagctgaccactggagatgcttgtgtctctaccagctgtgaactagccagtgctctgtcccatctggatgccagccacctcacagagaacctgcccaaagctgcatcagagctggggcaacaacccatgactgctcctcggacctcatctcttccccagggaagaagggggccgctcatcctgaccccagcaagacctctgtagacacagggcaagtcagtcggccagagaatcccagccagcctgcatcgcccagggtcgccaagtgcaaggccaggtctccagtcaggctcccccatgagggcagcccctccccgggggagaaagcagcggctccccctgactacagcaagactcgatcagcatcggaaaccagcacaccccacaataccaggagggtggctgccctcaggggagcgggacctggagcagagggaatgacaccagctggtgctgtcctgccaggagaccccctcacatcccaggagcagagacagggagctccaggtaaccacagtaaggctctggaaatgacaggaatccatgcacctgaaagctcccaggagccttccctgctggagggagcagattctgtgtcctcaagggcaccgcaggccagcctctccatgctgccatccactgacaacaccaaagaagcatgtggccatgtctcggggcactgctgcccgggggggagtagagagagccctgtgacggacattgacagcttcatcaaggagctggatgcttctgcagcaaggtctccgtcttcccagacgggggacagtggctctcaggagggcagtgctcagggccacccaccagccggggctggaggtgggagctcctgccgtgccgaaccagtcccggggggccagacctcctccccgaggagggcctgggctgctggtgcccccgcctacccacaatgggcctcccagccttcggttttagattcaattaatcccgacaaacattttactgtgaacaaaaactttctgagcaactactctagaaattttagcagttttcatgaagacagcacctccctatcaggcctgggtgacagcacggagccgtctctgtcatccatgtatggcgatgctgaggattcttcttctgaccctgagtcactcactgaagccccacgagcttctgccagggacggctggtcccctcctcgttcccgtgtgtctttgcacaaggaagatccttcggagtcagaagaggaacagattgagatttgttccacacgtggctgccccaatccaccctcgagtcctgctcatcttcccacccaggctgccatctgtcctgcctcagccaaagttctgtcattaaaatacagcactccgagagagtcggtggccagtccccgtgagaaggccgcctgcttgccaggctcatacacttcaggcccagactcttcccagccatcatcactcttggagatgagctctcaggagcatgaaactcatgcggacataagcacttcacagaaccacaggccctcgtgtgcagaagaaaccacagaagtcaccagcgctagctcagccatggaaaacagtccgctgtctaaagtagccaggcattttcacagtccgcccatcattctcagctcccccaacatggtaaatggcttggaacatgacctgctagatgacgaaaccctgaatcaatacgaaacaagcattaatgcagctgccagtctgtcctccttcagtgtggatgtccctaagaatggagaatctgttttggaaaacctccacatctctgaaagtcaagacctggatgacttgctacagaaaccaaaaatgatcgctaggaggcccatcatggcctggtttaaagaaataaataaacataaccaaggcacacatttgaggagcaaaaccgagaaggaacaacctctaatgcctgccagaagtcccgactccaagattcagatggtgagttcaagccaaaaaaagggcgttactgtgcctcatagccctcctcagccgaaaacaaacctggaaaataaggacctgtctaagaagagtccggcagaaatgcttctgactaatggtcagaaggcaaagtgtggtccgaagctgaagaggctcagcctcaagggcaaggccaaagtcaactctgaggcccctgctgcgaatgctgtgaaggctggggggacggaccacaggaaacccttgatctcaccccagacctcccacaaaacactttctaaggcagtgtcacagcggctccatgtagccgaccacgaggaccctgacagaaacaccacagctgcccccaggtccccccagtgtgtgctggaaagcaagccacctcttgccacctctgggccactgaaaccctcagtgtctgacacgagcatcaggacatttgtctcgcccctgacctctcccaagcctgttcctgagcaaggcatgtggagcaggttccacatggctgtcctctctgaacccgacagaggttgcccaaccacccctaaatctcctaagtgtagagcagagggcagggcgccccgtgctgactccgggccggtgagtccggcagcgtctaggaacggcatgtccgtggcagggaacagacagagtgagccgcgcctggccagccatgtggcagcagacacagcccaacccaggccgactggcgaaaaaggaggcaacataatggccagcgatcgcctcgaaagaacaaaccagctgaaaatcgtggagatttctgctgaagcagtgtcagagactgtatgtggtaacaagccagctgaaagcgacagacggggagggtgcttggcccagggcaactgtcaggagaagagtgaaatcaggctctatcgccaggtcgcagaatcatccacaagtcatccatcctcactcccatctcatgcctcccaggcagagcaggaaatgtcacgatcattcagcatggcaaaactggcgtcctcctcctcctcccttcaaacagccattagaaaggcagaatactcccagggaaaatcaagcctgatgtcagactcccgaggggtgcccagaaacagcattccagggggcccctcgggggaggaccatctctacttcaccccaaggccagcgaccaggacctactccatgccagcccagttctcaagccattttggacgggagggtcaccccccacacagcctgggtcgctctcgggacagccaggtccctgtgacaagcagtgttgtccccgaggcaaaggcatccagaggtggtcttcccagcctggctaatggacagggcatatatagtgtaaagccgctgctggacacatcgaggaatcttccagccacagatgaaggggatatcatttcagtccaggagacgagctgcctagtcacagacaaaatcaaagtcaccagacgacactactgctatgagcagaactggccccatgaatctacctcatttttctctgtgaagcagcggatcaagtcttttgagaacctggccaatgctgaccggcctgtagccaagtccggggcttccccatttttgtcggtgagctccaagcctcccattgggaggcggtcttccggcagcattgtttccgggagcctgggccacccaggtgacgcagcagcaaggttgttgagacgcagcttgagttcctgcagcgaaaaccaaagcgaagccggcaccctcctgccccagatggccaagtctccctcaatcatgacactgaccatctctcggcagaacccaccagagaccagtagcaagggctctgattcggaactaaagaaatcacttggtcctttgggaattcccaccccaacgatgaccctggcttctcctgttaagaggaacaagtcctcggtacgccacacgcagccctcgcccgtgtcccgctccaagctccaggagctgagagccttgagcatgcctgaccttgacaagctctgcagcgaggattactcagcagggccgagcgccgtgctcttcaaaactgagctggagatcacccccaggaggtcacctggccctcctgctggaggcgtttcgtgtcccgagaagggcgggaacagggcctgtccaggaggaagtggccctaaaaccagtgctgctgagacacccagttcagccagtgatacgggtgaagctgcccaggatctgccttttagaagaagctggtcagttaatttggatcaacttctagtctcagcgggggaccagcaaagattacagtctgttttatcgtcagtgggatcgaaatctaccatcctaactctcattcaggaagcgaaagcacaatcagagaatgaagcagatgtttgcttcatagtcttgaatagaaaagaaggctcaggtctgggattcagtgtggcaggagggacagatgtggagccaaaatcaatcacggtccacagggtgttttctcagggggcggcttctcaggaagggactatgaaccgaggggatttccttctgtcagtcaacggcgcctcactggctggcttagcccacgggaatgtcctgaaggttctgcaccaggcacagctgcacaaagatgccctcgtggtcatcaagaaagggatggatcagcccaggccctctgcccggcaggagcctcccacagccaatgggaagggtttgctgtccagaaagaccatccccctggagcctggcattgaaaacacagaacaaaggatgcaagtacagcagcaacacagccaggagggcagccccagaattgggaggccaacagtgctactgggctcaagtgctgttataaggagaagtgtggctgtacacgatgctctgtgtgttgaagtgctgaagacctcggctgggctgggactgagtctggatgggggaaaatcatcggtgacgggagatgggcccttggtcattaaaagagtgtacaaaggtggtgcggctgaacaagctggaataatagaagctggagatgaaattcttgctattaatgggaaacctctggttgggctcatgcactttgatgcctggaatattatgaagtctgtcccagaaggacctgtgcagttattaattagaaagcataggaattcttcatgaattttaacaagaatcattttctcagttctcttctttctttagcaaatcagagtgacttctttaaaccacaggttgttgaaatggccaacactggtacagacacggactataaaaatctccaagcttgtgcttacacatgaagcctgacttaactgtatgtgcaacagcaatgaaattaactccagaagccttccacctgcgtcacccaggccgggagggttccttcgttccagtgcctgtcccctacctttatgttatgtttactgatggggatacaagatgtgacacacccttctttatttgaaacaaacaaacatttagctagacctttgcttccttcttgccagctctcccaacatacccaatcctggtgatcagggaactaaaagtctgagggggacacaaatgtcacacctaagaggacaatcaatcattttgtatgattttgtaagtaagtaaatgacagaatgcttttaggcacattcaatggaaggaggagatgtaggtctgtatatgttaccctgaaaagagaataagacttacttaaaaaaatgaattatgacctgttaggctgagctcaggaattgtccaaaaaggaaaaagcaaaataattaattgagagtattttttagtgagtgtaatgtataatgtacgtatgcaaagttcaactcaataggttattgatcaccatgaagtattgatcattttctatctcaaaagtgtaagccataaggctgttttacagaatagcacttctgataagctgtattaaatagccatgagcttcactgcttagagggagcagaaaggtcaacatctaaaagcaccttacaactagtttttgaacctgtcttgataagtgcttgaattcaagactggtcagtacaagagcagacaaaaatatcacaagtcagtcactgggtttccatttctgaattttatgcactccaaccatgaatttaaactaaatttttagaaatcaagtatctttctaagtgtccttggatttatagacaatgtatgtacaatccaaatagaggagcttaatggaatccttttaggagactggttggtttttttccctctttcccaacatgtttaagaaatgtaacattctaagtattggatctcttttcttgacctagtataatgacaactgcagtgacttaagtttttgctgttttcgttttcccgctttgcaatttcctccttttgccaaaaatgttttcctacagaagactgtcgtgactcacgctacttgggaaactcactctggccactcctcctctggtggcatgagctgcttcccagtagctattccgattggatattccgttcgtcgtcacatagctggcttttctctcctcatgatgtaccttattttcttaggtaaataattccaaactctcatcgggtcataaagaggaggagaaacagggtgagtcaaggtaaaggagcagaaatgtagttacaagccaggtcgtcttcagtggcacaaaccaacccgttgagccctgacaacatgagtggagagtgcatttgccatacctgtgtgcatgacactaagattttatgttggagatacttctttaaataacctacagcttgggtctatggctgtgacccccagattcatggaggggctttagccatcagctttgtacatcatcatttttctgaatgaccaatcccactaaacatctttgaagtcggcctagagaggtccttcagatgagagagaaatagctggcttgtctgagtccagatttctcatcaactggcaatacaaaggaaaatatggtacaggagttagttagaaaggtcttattgattttacttctacttttcactacagttacaggtagaatactgtaggaagtcagtgcaaggtgcatgcttgattgatagatattgattgtttttcagtctctggggtcagttttgtggtttctgctttcttgcctaaatcaaagactatttcaagtcaacaacactgaaaactgcttttcgcctccactcttacagctgtgcctaataataattaattaataaacgcacagccctatgtgaacagacaggaatttcttgtgcaatgtggagcaaatggaatggtctccttccgcaagtctttttaatcctcatatctggagtacaagggtagacctctggcttaccacatacactatgctaaagtcatcagccactgctactacatcttgccagaaggtttccctcgccaacaaacagttgaaatttaagggaagaagcaaaagctaaactgtctttgaccctaagatagatagaaagctatttatttgtcttcagtgttcaaggcatgactagtatttctaattagcctaataaattcccacactttctgaagtgaacactaatggtattgtcctactaaaactgtcattgtttctttttttttaactggtcagtcattcacaataagctatgagggtaaataaatatgtgttataacaagtaaaccgtagttgcaagaatataccatgaagattaaagtaggctgggtttcatttccatcttcccacacatctcattgaatttgatggttgacttaattggcaccataactttgtatgatattatacattaacctttatttatgtaaagtaaaatgccttatatattaaagagtaagtgcaataatatgaaatagcctgtacattttaaaaatgttgtcaccaagttatataaatccacatctctgtaaacaaccttttttaagtaattttaaaaaaaataaacactctgcttactacttgattttttttttctcttttggctgtttgtttgttaataatagagtaatattgagatgagaaatgtttattgtcacctaaatgcatcagaggtacaaaggcaatagaactcaaattagccacccttttccaggccacactcacaatcttgacacaatccaaaacttttccacctctaaatctttcttacaattgaacat

SEQ ID NO: 347557 - DNA, 8736 bp, Homo sapiens
  misc_feature (979)..(979): n is a, c, g, or t
  misc_feature (1811)..(1811): n is a, c, g, or t
  misc_feature (1935)..(1935): n is a, c, g, or t
ttagttatcttcaaaaatgctgtgactgttcagttcaattgacctaaacttcaggtgcttttgtgttatacgggttctttttttggaactgatgagaatgaattggaatctcctattttttaggcagagcaaccatcgaaccctgtatgctaacaataagacatgaccaggcttcattctcccacggcagaatatttatttctgtctcttagaggaagggttaactcccaggtggtgtttgtgttgagttttagaacaatataaaattctaacagagcatttttataatggatgtgccatgtgttcacttaattgaaactcattctgcaaggctggtaaaatggagcaaaacggggaaaaaaaatcaatagttaagaaaggttaatagcacttgattctcctaaatagcgtttttttcatatgtgttcatttacaagaaacgtaagtcattggaatggatttcaacctgttgagtgatacttctttaaaaaactttgcatacattttaagagtgcgagtaatcattttaatatttgctccttttcccctatggaaacaacctgaaaacatccacctcctcacctaattgagtaattggttatgccagatttttaaacagagattacttcacttattttatagcttctgtaattgcattaaggggaagccacataacaaatgcatggggcacagctacatttttgtaactcatctacaggattccttgaattgtgcacagtgtgctcctgggattggctgtctgcgagaggtgacaatgtgtgttcttatgctgctttgcactttcttataggcgtacagagtccctcttctctacagcaatgctgtgcaaagttcatctgttttctctctggggcatctttgtagtgtttttgatgaactgttattccaaaaaagcaggccatgtacaagagtgcaaaccagaaacgagctctgataagtcaacaggatgtccaagttnttttatattcctagcagacgctatcaacagctgaaaaacgacctgactgtgccgccttagagttaaaaataataggagagctggggcagggggccatgtgcgagcatattcctgcacatgcctggcaaattaacatgaccctgcagtcatctctgagatagaagcttatagtaaacttgccagcttactgacagagaacctggaactgcatcagcaagattatttttgggccgggagcagtagctcacacctgtaatccccgcactttgggaagccgaggcgggcagatcactcaaggccaggagttcaagaccagcctggccaacatggtgaaaccctgtctctactaaagatacaaaaaaaaattagccatatatggtggcgtgcacctgtattcccagctattcaggaggctgaggcatgagaatagtttgaacctgggaggcagaggttgtagtgagctgaggtcacgccaccgcactctagcctgggtgactgagccagagcaatactctgtttcaaaaaaaaatttttttttagtaaaaaaaagactgtttctgggctgccattgctcagtaatattttagcaagtttttgttatcattaaagccattttccatacaccatgctgattctctgtgcttggggaacttgtctttctacaaatataggagtgacttctcaaatgttgtatgtgttcatgcctcattgccagtgggtttaagtttttaaacaatgactactttgaactagatttctgcagtttgatttcgaaacataggacatctgttgtcaaacttggcaatggctaaaaaaataagattttcatgcntcccatagttattttaattgaagattgaaatacagaattactgcaaaagaatatgtgttgtcattaattgtcccattttgtgacattcctgggagctaagctaaacaataaaagttattttatntggtagtaaatcagggaccatatggtatcccaaaataagtctgactgagcagttaaattccaggaaattaaaggctaatgttaatgtaattctcacatttgatcactaggggatgaaatcctagatgtaaatggaataccaataaagggcttgacatttcaagaagccattcatacctttaaggtaacaacattcttattgatctcctttatcctattttcctttcttatttccttctggcttgggtttggtgagttgttttttttttttaaccctttgatataaggacattccaaatgtttcagcccacctttcctcactgttttctcagcaaatccggagtggattatttgttttaacggtacgcacaaagttggtgagccccagcctcacaccctgctcgacacccacacacatgagcagatccgcctccccgaacttcaataccagtgggggagcctcggcgggaggttccgatgaaggcagttcttcatccctgggtcggaagacccctgggcccaaggacaggatcgtcatggaagtaacactcaacaaagagccaagagttggattaggcattggtgcctgctgcttggctctggaaaacagtcctcctggcatctacattcacagccttgctccaggatcagtggccaagatggagagcaacctgagccgcggggatcaaatcctggaagtgaactccgtcaacgtccgccatgctgctttaagcaaagtccacgccatcttgagtaaatgccctccaggacccgttcgccttgtcatcggccggcaccctaatccaaaggtacccccttgaagagtccctctcttgcaaaaaaggactcccttatttctgaatctgaactctcccagtactttgcccacgatgtccctggccccttgtcagacttcatggtggccggttctgaggacgaggatcacccgggaagtggctgcagcacgtcggaggagggcagcctgcctcccagcacctccactcacaaggagcctggaaaacccagagccaacagcctcgtgactcttgggagccatcgggcttctgggctcttccacaagcaggtgacagttgccagacaagccagtctccccggaagcccacaggccctccgaaaccctctcctccgccagaggaaggtaggctgctacgatgccaacgatgccagtgatgaggaagagtttgacagagaaggggactgcatttcactcccaggggccctcccgggtcccatcaggcctctgtcagaggatgacccgaggcgtgtctcaatttcctcttccaagggcatggacgtccacaaccaagaggaacgaccccggaaaacactggtgagcaaggccatctcggcacctcttcttggtagctcagtggacttagaggagagtatcccagagggcatggtggatgctgcgtcctatgcagccaacctcacggactctgcagaggcccccaaggggagccctggaagctggtggaagaaggaactgtcaggatcaagtagcgcacccaaattggaatacacagtccgtacagacacccagagtccgacgaacactgggagccccagttccccccagcagaaaagtgaaggcctgggctccaggcacagaccagtggccagggtaagcccccactgcaagagatccgaggctgaggccaagcccagtggctcacagacagtgaacctgactggcagagccaatgatccatgcgatctggactcgagagtccaggccacttctgtcaaagtgactgtcgctggctttcagccaggtggagctgtggagaagttgtgccaggaatctctgggaaagctgaccactggagatgcttgtgtctctaccagctgtgaactagccagtgctctgtcccatctggatgccagccacctcacagagaacctgcccaaagctgcatcagagctggggcaacaacccatgactgctcctcggacctcatctcttccccagggaagaagggggccgctcatcctgaccccagcaagacctctgtagacacagggcaagtcagtcggccagagaatcccagccagcctgcatcgcccagggtcgccaagtgcaaggccaggtctccagtcaggctcccccatgagggcagcccctccccgggggagaaagcagcggctccccctgactacagcaagactcgatcagcatcggaaaccagcacaccccacaataccaggagggtggctgccctcaggggagcgggacctggagcagagggaatgacaccagctggtgctgtcctgccaggagaccccctcacatcccaggagcagagacagggagctccaggtaaccacagtaaggctctggaaatgacaggaatccatgcacctgaaagctcccaggagccttccctgctggagggagcagattctgtgtcctcaagggcaccgcaggccagcctctccatgctgccatccactgacaacaccaaagaagcatgtggccatgtctcggggcactgctgcccgggggggagtagagagagccctgtgacggacattgacagcttcatcaaggagctggatgcttctgcagcaaggtctccgtcttcccagacgggggacagtggctctcaggagggcagtgctcagggccacccaccagccggggctggaggtgggagctcctgccgtgccgaaccagtcccggggggccagacctcctccccgaggagggcctgggctgctggtgcccccgcctacccacaatgggcctcccagccttcggttttagattcaattaatcccgacaaacattttactgtgaacaaaaactttctgagcaactactctagaaattttagcagttttcatgaagacagcacctccctatcaggcctgggtgacagcacggagccgtctctgtcatccatgtatggcgatgctgaggattcttcttctgaccctgagtcactcactgaagccccacgagcttctgccagggacggctggtcccctcctcgttcccgtgtgtctttgcacaaggaagatccttcggagtcagaagaggaacagattgagatttgttccacacgtggctgccccaatccaccctcgagtcctgctcatcttcccacccaggctgccatctgtcctgcctcagccaaagttctgtcattaaaatacagcactccgagagagtcggtggccagtccccgtgagaaggccgcctgcttgccaggctcatacacttcaggcccagactcttcccagccatcatcactcttggagatgagctctcaggagcatgaaactcatgcggacataagcacttcacagaaccacaggccctcgtgtgcagaagaaaccacagaagtcaccagcgctagctcagccatggaaaacagtccgctgtctaaagtagccaggcattttcacagtccgcccatcattctcagctcccccaacatggtaaatggcttggaacatgacctgctagatgacgaaaccctgaatcaatacgaaacaagcattaatgcagctgccagtctgtcctccttcagtgtggatgtccctaagaatggagaatctgttttggaaaacctccacatctctgaaagtcaagacctggatgacttgctacagaaaccaaaaatgatcgctaggaggcccatcatggcctggtttaaagaaataaataaacataaccaaggcacacatttgaggagcaaaaccgagaaggaacaacctctaatgcctgccagaagtcccgactccaagattcagatggtgagttcaagccaaaaaaagggcgttactgtgcctcatagccctcctcagccgaaaacaaacctggaaaataaggacctgtctaagaagagtccggcagaaatgcttctgactaatggtcagaaggcaaagtgtggtccgaagctgaagaggctcagcctcaagggcaaggccaaagtcaactctgaggcccctgctgcgaatgctgtgaaggctggggggacggaccacaggaaacccttgatctcaccccagacctcccacaaaacactttctaaggcagtgtcacagcggctccatgtagccgaccacgaggaccctgacagaaacaccacagctgcccccaggtccccccagtgtgtgctggaaagcaagccacctcttgccacctctgggccactgaaaccctcagtgtctgacacgagcatcaggacatttgtctcgcccctgacctctcccaagcctgttcctgagcaaggcatgtggagcaggttccacatggctgtcctctctgaacccgacagaggttgcccaaccacccctaaatctcctaagtgtagagcagagggcagggcgccccgtgctgactccgggccggtgagtccggcagcgtctaggaacggcatgtccgtggcagggaacagacagagtgagccgcgcctggccagccatgtggcagcagacacagcccaacccaggccgactggcgaaaaaggaggcaacataatggccagcgatcgcctcgaaagaacaaaccagctgaaaatcgtggagatttctgctgaagcagtgtcagagactgtatgtggtaacaagccagctgaaagcgacagacggggagggtgcttggcccagggcaactgtcaggagaagagtgaaatcaggctctatcgccaggtcgcagaatcatccacaagtcatccatcctcactcccatctcatgcctcccaggcagagcaggaaatgtcacgatcattcagcatggcaaaactggcgtcctcctcctcctcccttcaaacagccattagaaaggcagaatactcccagggaaaatcaagcctgatgtcagactcccgaggggtgcccagaaacagcattccagggggcccctcgggggaggaccatctctacttcaccccaaggccagcgaccaggacctactccatgccagcccagttctcaagccattttggacgggagggtcaccccccacacagcctgggtcgctctcgggacagccaggtccctgtgacaagcagtgttgtccccgaggcaaaggcatccagaggtggtcttcccagcctggctaatggacagggcatatatagtgtaaagccgctgctggacacatcgaggaatcttccagccacagatgaaggggatatcatttcagtccaggagacgagctgcctagtcacagacaaaatcaaagtcaccagacgacactactgctatgagcagaactggccccatgaatctacctcatttttctctgtgaagcagcggatcaagtcttttgagaacctggccaatgctgaccggcctgtagccaagtccggggcttccccatttttgtcggtgagctccaagcctcccattgggaggcggtcttccggcagcattgtttccgggagcctgggccacccaggtgacgcagcagcaaggttgttgagacgcagcttgagttcctgcagcgaaaaccaaagcgaagccggcaccctcctgccccagatggccaagtctccctcaatcatgacactgaccatctctcggcagaacccaccagagaccagtagcaagggctctgattcggaactaaagaaatcacttggtcctttgggaattcccaccccaacgatgaccctggcttctcctgttaagaggaacaagtcctcggtacgccacacgcagccctcgcccgtgtcccgctccaagctccaggagctgagagccttgagcatgcctgaccttgacaagctctgcagcgaggattactcagcagggccgagcgccgtgctcttcaaaactgagctggagatcacccccaggaggtcacctggccctcctgctggaggcgtttcgtgtcccgagaagggcgggaacagggcctgtccaggaggaagtggccctaaaaccagtgctgctgagacacccagttcagccagtgatacgggtgaagctgcccaggatctgccttttagaagaagctggtcagttaatttggatcaacttctagtctcagcgggggaccagcaaagattacagtctgttttatcgtcagtgggatcgaaatctaccatcctaactctcattcaggaagcgaaagcacaatcagagaatgaagcagatgtttgcttcatagtcttgaatagaaaagaaggctcaggtctgggattcagtgtggcaggagggacagatgtggagccaaaatcaatcacggtaagtgacagagtcattaggctctcaggaaaatcccccctcaagcagcctcagaatgtgatcagggcacaaattccaatcagcgggttcagagattgctggatttcattcccagctaccaacataaaaagggagaagtgggagaagtagtacgtaaggttttcgttgacaaaagacaagcatttttaacacagagctgacatgtataggccatttccaatccctataaacacaattcgctatagccttataatttacctccatattttaagcagtagaaaacattagaatcaactggccaaacttgtgtttatacaattactcccgtctcaaaaagtcactcaaaattttacatcattcaaaagccttcaggaccatccagagggtcaccttcactgcacgagcccaggcctcattcatcttcgtattcccattgcctcctggatgccaggcccatgtcagacactaaaaaggagttaaaaaaaaatgtgtggagacactggcattgacatttgtgttccatcccccgcactgaatgtatgtttttttttataaagcaagtgtctaccttagaaagttc

SEQ ID NO: 347558 - DNA, 4126 bp, Homo sapiens
  misc_feature (979)..(979): n is a, c, g, or t
  misc_feature (1811)..(1811): n is a, c, g, or t
  misc_feature (1935)..(1935): n is a, c, g, or t
ttagttatcttcaaaaatgctgtgactgttcagttcaattgacctaaacttcaggtgcttttgtgttatacgggttctttttttggaactgatgagaatgaattggaatctcctattttttaggcagagcaaccatcgaaccctgtatgctaacaataagacatgaccaggcttcattctcccacggcagaatatttatttctgtctcttagaggaagggttaactcccaggtggtgtttgtgttgagttttagaacaatataaaattctaacagagcatttttataatggatgtgccatgtgttcacttaattgaaactcattctgcaaggctggtaaaatggagcaaaacggggaaaaaaaatcaatagttaagaaaggttaatagcacttgattctcctaaatagcgtttttttcatatgtgttcatttacaagaaacgtaagtcattggaatggatttcaacctgttgagtgatacttctttaaaaaactttgcatacattttaagagtgcgagtaatcattttaatatttgctccttttcccctatggaaacaacctgaaaacatccacctcctcacctaattgagtaattggttatgccagatttttaaacagagattacttcacttattttatagcttctgtaattgcattaaggggaagccacataacaaatgcatggggcacagctacatttttgtaactcatctacaggattccttgaattgtgcacagtgtgctcctgggattggctgtctgcgagaggtgacaatgtgtgttcttatgctgctttgcactttcttataggcgtacagagtccctcttctctacagcaatgctgtgcaaagttcatctgttttctctctggggcatctttgtagtgtttttgatgaactgttattccaaaaaagcaggccatgtacaagagtgcaaaccagaaacgagctctgataagtcaacaggatgtccaagttnttttatattcctagcagacgctatcaacagctgaaaaacgacctgactgtgccgccttagagttaaaaataataggagagctggggcagggggccatgtgcgagcatattcctgcacatgcctggcaaattaacatgaccctgcagtcatctctgagatagaagcttatagtaaacttgccagcttactgacagagaacctggaactgcatcagcaagattatttttgggccgggagcagtagctcacacctgtaatccccgcactttgggaagccgaggcgggcagatcactcaaggccaggagttcaagaccagcctggccaacatggtgaaaccctgtctctactaaagatacaaaaaaaaattagccatatatggtggcgtgcacctgtattcccagctattcaggaggctgaggcatgagaatagtttgaacctgggaggcagaggttgtagtgagctgaggtcacgccaccgcactctagcctgggtgactgagccagagcaatactctgtttcaaaaaaaaatttttttttagtaaaaaaaagactgtttctgggctgccattgctcagtaatattttagcaagtttttgttatcattaaagccattttccatacaccatgctgattctctgtgcttggggaacttgtctttctacaaatataggagtgacttctcaaatgttgtatgtgttcatgcctcattgccagtgggtttaagtttttaaacaatgactactttgaactagatttctgcagtttgatttcgaaacataggacatctgttgtcaaacttggcaatggctaaaaaaataagattttcatgcntcccatagttattttaattgaagattgaaatacagaattactgcaaaagaatatgtgttgtcattaattgtcccattttgtgacattcctgggagctaagctaaacaataaaagttattttatntggtagtaaatcagggaccatatggtatcccaaaataagtctgactgagcagttaaattccaggaaattaaaggctaatgttaatgtaattctcacatttgatcactaggggatgaaatcctagatgtaaatggaataccaataaagggcttgacatttcaagaagccattcatacctttaaggtaacaacattcttattgatctcctttatcctattttcctttcttatttccttctggcttgggtttggtgagttgttttttttttttaaccctttgatataaggacattccaaatgtttcagcccacctttcctcactgttttctcagcaaatccggagtggattatttgttttaacggtacgcacaaagttggtgagccccagcctcacaccctgctcgacacccacacacatgagcagatccgcctccccgaacttcaataccagtgggggagcctcggcgggaggttccgatgaaggcagttcttcatccctgggtcggaagacccctgggcccaaggacaggatcgtcatggaagtaacactcaacaaagagccaagagttggattaggcattggtgcctgctgcttggctctggaaaacagtcctcctggcatctacattcacagccttgctccaggatcagtggccaagatggagagcaacctgagccgcggggatcaaatcctggaagtgaactccgtcaacgtccgccatgctgctttaagcaaagtccacgccatcttgagtaaatgccctccaggacccgttcgccttgtcatcggccggcaccctaatccaaaggtacccccttgaagagtccctctcttgcaaaaaaggactcccttatttctgaatctgaactctcccagtactttgcccacgatgtccctggccccttgtcagacttcatggtggccggttctgaggacgaggatcacccgggaagtggctgcagcacgtcggaggagggcagcctgcctcccagcacctccactcacaaggagcctggaaaacccagagccaacagcctcgtgactcttgggagccatcgggcttctgggctcttccacaagcaggtgacagttgccagacaagccagtctccccggaagcccacaggccctccgaaaccctctcctccgccagaggaaggtaggctgctacgatgccaacgatgccagtgatgaggaagagtttgacagagaaggggactgcatttcactcccaggggccctcccgggtcccatcaggcctctgtcagaggatgacccgaggcgtgtctcaatttcctcttccaagggcatggacgtccacaaccaagaggaacgaccccggaaaacactggtgagcaaggccatctcggcacctcttcttggtagctcagtggacttagaggagagtatcccagagggcatggtggatgctgcgtcctatgcagccaacctcacggactctgcagaggcccccaaggggagccctggaagctggtggaagaaggaactgtcaggatcaagtagcgcacccaaattggaatacacagtccgtacagacacccagagtccgacgaacactgggagccccagttccccccagcagaaaagtgaaggcctgggctccaggcacagaccagtggccagggtaagcccccactgcaagagatccgaggctgaggccaagcccagtggctcacagacagtgaacctgactggcagagccaatgatccatgcgatctggactcgagagtccaggccacttctgtcaaagtgactgtcgctggctttcagccaggtggagctgtggagaagttgtgccaggaatctctgggaaagctgaccactggagatgcttgtgtctctaccagctgtgaactagccagtgctctgtcccatctggatgccagccacctcacagagaacctgcccaaagctgcatcagagctggggcaacaacccatgactggctcttctacacccgacatcacctggagaggctgctgggccttccaccccacggatgtgctgtaacgagtcaaccttcctcccatgattgggcatttcgaacgtttccagagaaaaggttgtcttgaaaggtgacaaccaaaggctgcctcagtgtaacctcgtctccctcagatgaagaccttttaagttacagactttgcaataaagtcaaattgctaacatg

SEQ ID NO: 347559 - DNA, 1981 bp, Homo sapiens
  misc_feature (1256)..(1256): n is a, c, g, or t
gagaagtgtggcgtctcggtccaggatgcaggtccctgattcgggttggacgtggtcatcaaacccagaaattgaaggatcttgggcctgccttgatgttcatttctctcatctataaaattgaaggctggaggaggtgtgaatgagcccagggaaggacacacggccactgctggagggatcctccattcctgtgtcatttgcatgggtcctgctgtgaaatgaacctggcagggacttgttagacacttccttccttccctcattgagcactccagtgccattgttccacagttgttctaattgggtcctagcttcctcctgccaaggcaaacagcatagtctcgagtaggtgtccctaggctcatctgccagcctgaacatgaacacaggcaaagctgatgatggccagggaccccaggggacgtggggccctgtggggtctggcccccaggagcaagacctctgatgatgctggtgtctgggagtgagcaccatgcccatcacccaggacaatgccgtgctgcacctgcccctcctctaccagtggctgcagaacagcctgcaggaaggtggggatgggccggagcagcggctctgccaggcggccatccagaagctgcaggagtacatccagctgaactttgctgtggatgagagtacggtcccacctgatcacagcccccccgaaatggagatctgtactgtgtacctcaccaaggagctgggggacacagagactgtgggcctgagttttgggaacatccctgttttcggggactatggtgaaaagcgcagggggggcaagaagaggaaaacccaccagggtcctgtgctggatgtgggctgcatctgggtgacagagctgaggaagaacagcccagcagggaagagtgggaaggtccgactgcgggatgagatcctctcactgaatgggcagctgatggttggagttgatgtcagtggggccagttacctggctgagcagtgctggaatggcggctttatctacctgatcatgctgcgtcgctttaagcacaaagcccactccacttataatggcaacagtagcaacagctctgaaccaggagaaacacctaccttggagctgggtgaccgaactgcgaaaaaggggaaacgaaccagaaagtttggggtcatctccaggcctcctgccaacaaggcccctgaagaatccaagggcagcgctggctgtgaggtgtccagtgaccccagcactgagctggagaacggcnctgaccctgaacttggaaacggccatgtctttcagctagaaaatggcccagattctctcaaggaggtggctggaccccatctagagaggtcagaagtggacagagggacagagcatagaattccaaagacagatgctcctctgaccacaagcaatgacaaacgccgcttctcaaaaggtgggaagacggacttccaatcgagtgactgcctggcacggcaggaggaagttggccgaatatggaagatggagctgctcaaagaatcggatgggctgggaattcaggttagtggaggccgaggatcaaagcgctcacctcacgctatcgttgtcactcaagtgaaggaaggaggtgccgctcacagggatggcaggctgtccttaggagatgagctgctggtaatcaatggtcatttactggtcgggctctcccacgaggaagcagtggccattcttcgctccgccacgggaatggtgcagcttgtggtggccagcaaggaaaactccgcagaggacctcctcaggttaacatctaagagcttgccagatctgaccagctcggtagaagatgtgtcctcctggactgataacgaagaccaggaggcagacggggaagaggacgaaggaaccagctcttctgtccagagagcaatgcctgggacagatgaaccccaagatgtgtgcggtgctgaggaatccaaggggaacttggaaagtcccaaacag

SEQ ID NO: 347560 - DNA, 426 bp, Homo sapiens
tattaaacctaaatttttagggacatatggctacagagagagctttttttttttgtacaaggaatataaggagcagagaggggagtgcagtggcctcaagaaggtaaagcacatgttaggaaatatggtcagttctaattatgtggccatatatcaaaatttctaatatgatggagttgctgaaccaggacacaggctgtcagaggtatttcattagcagtcaatttggctgagatctgtatagtcaccagacatcaaaccatcacctaccatcagcgaagtcatgtgttcagacacactaaattattacaatatttcttgttactgaatggtgtgtatttcttttctctttcccctaggattcttttttcttccttcttttcttctagtgtaagtagagaataaggaaagctcttgttgacttgg

SEQ ID NO: 347561 - DNA, 1135 bp, Homo sapiens
ctactagggtcaaataataattttaacacaaggcagataaaagcaataaaacctgggaacataaacatcggggttgggtgacttttcccaaccaaaattaagatttatagtttaaacttagaactaacatagaaaaccagtattattttcattcatattggatatcttttggctgagttgtcatttggttgagttgaatttggagttaacatggattctccactgtcaaggatataaccactgtgattctgtttcttctacccacgagtacaggggtactacccctgtttttttctcaaacaggtcaataccatctaattgctatacagttagattgatatctctgaaagttttttgaacagtagttaataatttctatagttctgccttaatagtttgcctcctaaagtccataaattaatagaaatacaggaatttttattctacaggaaagcccctttcaccaaccactcccattcctcacagttcacattttcaaaccagaaaccaggagatggtaatttttgttttatggaacctttctgcaaggcccattgaaatagtttgtttcattaatacattaaatattacctatagaacataaactccttaacaaattaagtacaatcagaaattaagataaagcatctcttaaattttaaattcaaatttactgtaactttttgtgaatacatatgtggtgcaaagaggcctatttgtaaagcctgttaggtatgaatttaatagccatatgttttaattaatttgaaaactgtcattggcagctggtccagacaggaactggcaaaagtactcattcactaggtagtatctaggggctatttgacagcttccgtttcctattgtgaaagcttttatctgattacatggtgtgtgcatgtggaagggctgagtgctgtgtttactgtcagctgtttgaaattattcagtagaaaccgtagctttcacaaccagaatatttccattcttatttctgtagtggatgaggacagaagcagctaagattaaaattcaaaacatattgaggtagttcatctttaaataatcctgaatgaggtctgtacatttgtgatgtgatctgtcctttttattttgttaatgaactcttcttaga

SEQ ID NO: 347562 - DNA, 459 bp, Homo sapiens
gacgtgctaaaactgttcatattatgactcttcatattagcacaaaactggaaacaacccaggtatccataagtactaaaaatgtggtgtaatcaaacaggggaatagtaactaacagttagaatatgaatcacagcactttcaagcaacttggatgaatttcattagcatcatgtcgagtcaaagaaacaaaataaggcaaactgaagactcagagtgtgcgattgggtaggtcatgaggaggactcttgaatgattgttaatatatatctggactggaacggttacattagttctcaaggtgtaaaaatgtgttaagttggctatttacattataggcacttttggaatgtgttttttctttttttacgagaacgagatttaagtttaaaaaagtaatttcagtgtgctcaatattgttcatctataccattatttaataaatatttaaagctgagt

SEQ ID NO: 347563 - DNA, 583 bp, Homo sapiens
ccagatctctcttaccgggggatgcaccaaagcccagctgttcagtgtcaatggctgccagctcccaactacatcccacacagacgggagccacctcaatgtctgcgagatttcctgtccctccttttcaatcccatcaaggcaccctctaccaatgactgatggatacagggatacaaaagcccagacacctatcttccaagaggaaaaaactctgtggtggtgccatttatgttccagagcaactgcgggatcaagctgagggtggactccagctgaaaccacatgcaacagactgaatgcttgtgccctcccaaaattaatatgttgaagctctaatcccaatgtgatgatggtattagggaggtaattgggtcataaaggtggatcccctgttaatgggattagtgcccttataggaagaggccagagaactagcttgctcccttttctccatgtaaggacacagcaagaaggtggcagtctgcaagccaggaagagagccctcaccagagcctgcctatgctggcactctgatcttgaacttccagcttccaacactgtgagaaataaatgtgtattg

SEQ ID NO: 347564 - DNA, 4397 bp, Homo sapiens
  misc_feature (1)..(1): n is a, c, g, or t
nagaagaagaggaagtgaaggctacagggtatccacgtgggttctgagcgtgtttctacgtccctggaagccggtcatttaagctcattcctcgccacggcttagtcaacatgggtcgctcgggaaagttgccctctggtgtctcagctaagttgaagcgctggaagaaaggccacagcagcgacagcaaccccgccatctgccgccaccgtcaggccgcccgcagccgcttcttcagccggccgtcaggaaggagtgacctgacagtcgatgctgtgaagttacataatgagctgcagtcagggtccttgcgcttgggcaaaagcgaagccccggagacgcccatggaagaagaggcggagctggttctcaccgagaagtcctcgggtaccttcctgagtggcctttccgactgcacaaacgtcaccttcagcaaagtacagcgcttctgggagtccaactcggctgcccacaaggagatctgtgctgttctggctgctgtcactgaggtgattcgctcccagggagggaaggagacggagactgagtacttcgctgctctgatgacaacaatggaagcagtggagtccccggagtccctggccgccgttgcttacctgctgaaccttgtcctgaagcgtgttcccagccctgtgcttattaagaagttctctgatacctccaaagccttcatggatatcatgtcagctcaggccagcagcggctccacctctgtcctccgatgggtcctttcctgcctggccacccttctgcggaagcaagacctggaggcctggggctaccccgtgacccttcaggtgtaccatgggctgctgagcttcacggtgcatcccaagcccaagatccggaaggctgcccagcatggagtatgctcagtcctcaagggcagtgaattcatgtttgaaaaggcccctgcccatcatcctgctgccatttccactgccaagttctgcatccaggagattgagaagtctggaggctccaaggaggccaccaccacgctgcacatgctgacgctgctgaaggacctgctgccctgcttcccggaaggcctggtgaagagctgcagtgagactctcctcagggtcatgaccttgagccatgtgctggtgacagcctgtgccatgcaggcctttcacagcctcttccacgccaggcctggcctgagcaccctgtcagcagagctcaacgcccagatcatcacggccctgtacgactatgttcccagtgagaatgatttacaacccctgctagcctggcttaaggtcatggagaaagcccacatcaacctggtgaggttgcagtgggacctggggctaggccacctccctcgcttttttggaactgcggtgacctgcctcctttccccacactcgcaagtgctgactgctgctacgcagagcctcaaggagatcctgaaggaatgcgtggctccccacatggctgacattggctccgtgacctcctcggcctcaggccctgcccaatctgttgccaagatgttcagggcagtggaggagggcctgacgtacaaattccatgcggcctggagctccgtgttgcagctgctgtgtgtcttcttcgaggcgtgtgggagacaggcccaccctgtgatgaggaagtgcctccagtccctgtgtgacctgcgcctctcccctcatttcccccacacggcggctcttgaccaggcagtgggggctgcggtgaccagtatgggacctgaggtggtgctgcaggctgtgcctttggaaattgatggctctgaggagactctggatttcccacggagctggctgctgcctgtcatccgagaccatgttcaggaaacgcgacttggttttttcaccacctacttcttgcccctggctaacaccctgaagagcaaagccatggacctggctcaggcaggcagcacagtggaatctaagatctacgacacactccagtggcagatgtggacactcctgcctgggttctgcacaaggcctacagatgtggccatctccttcaaagggctggcacggacgctgggcatggccatcagcgagcgtccagacctgagggtcaccgtgtgccaggccctgcgcaccctcatcaccaagggctgccaggcagaggctgaccgtgctgaagtgagtcgctttgccaagaactttctgccgatcctcttcaacctgtatgggcagcccgtggcagccggggacactccagcccctcgccgggctgtgctggaaaccatcagaacttacctcaccatcactgacactcagttggtgaacagtctcctggaaaaagccagtgagaaggtgctcgaccctgccagctctgactttaccagattgtctgtcctggacctggtcgtggccttggctccgtgtgctgacgaagctgccatcagtaagctatactccaccatccggccctacctagagagcaaggcccacggggtgcagaagaaggcctaccgagtgctggaggaggtgtgtgccagtcctcagggccccggggccctcttcgtgcagagccacctggaggacctgaagaagacactgctggactcgctgcggagcacctcctcacccgccaagaggccccgtttgaagtgcctcctacacatcgtgaggaagctctcagctgaacacaaggagttcatcactgccctcatcccagaggtgatcctgtgcaccaaggaggtgtcggtgggcgcacggaagaacgcttttgcactgctcgtggagatgggccatgctttcctaaggtttggctcgaaccaggaagaggccctgcagtgctacctcgtcctgatctaccctggcctggtgggcgcggtgaccatggtcagctgcagcatcctggccctgacccacctccttttcgagtttaaaggtctgatggggaccagtacagtggagcagctgctggagaatgtgtgcctgcttctggcctcccgcacccgtgacgtggtcaagtctgcactgggcttcatcaaggtggcagtgactgtcatggacgtggcgcacctggccaaacatgtgcagctggtgatggaagccattgggaagctttcagatgacatgcggcggcacttccgcatgaagcttcggaacctgttcaccaagttcatccgcaagtttggatttgagctggtgaaaaggctgttgcccgaggagtaccacagagtcctggtcaacatccggaaagctgaggcccgggccaagaggcaccgagccctgagccaggctgccgtggaggaggaagaagaggaggaggaggaggaggagcccgcccagggcaaaggtgacagcattgaggagattttagctgactcagaggacgaggaggacaatgaggaggaggaaagaagccgaggcaaggagcagcggaagctggcacgacagaggagccgggcatggctgaaagagggcggtggggacgagcccctcaacttcctggatcccaaggtggcccaacgagtcctggccacgcagccagggccaggccggggcaggaagaaggaccacggcttcaaggtgagcgccgatggccggctgatcataagggaggaggcagacggcaacaagatggaggaagaggaaggtgccaaaggcgaagatgaagagatggctgacccaatggaagatgtgatcatcaggaataaaaagcaccagaagctcaagcaccagaaagaggctgaggaggaggagctggagataccccctcagtaccaagctggaggctctggcattcatcgccctgtggccaagaaggctatgcctggggctgaatacaaggccaagaaagcaaaaggtgatgtgaagaagaaaggccggccggatccctatgcctacatccccctcaacagaagcaagctcaaccgcaggaagaagatgaagctgcagggacagttcaaaggcctggtgaaggctgcccggcgaggttcccaggtgggacacaaaaaccgcagaaaggatcgtcgaccctgaggcccagggcccctgggctgccctgtggtccagtctgaggccctttcagcccccaggctgccttgccaccagctccaggtgctcaagattctggcagagcctggactcaggatgacttggaactagggcttggctctcagaagtcctggattttggaaactccaaatggaatcacccttcagagacatccctggtgcctggagatgggaatgtggcctcagtgcctctgagtaggtgccatgaggcacctttgctttctgcccagagtggccatgagcaccagaacagatgatctccatttccgccagctgcctgtagccacgtggcatcctgcctgtggtctgggtgagatttactgtgaccagatgtagaataaatgtgtctcatcctgca

SEQ ID NO: 347565 - DNA, 520 bp, Homo sapiens
  misc_feature (20)..(20): n is a, c, g, or t
  misc_feature (56)..(56): n is a, c, g, or t
  misc_feature (63)..(64): n is a, c, g, or t
taggcccgggccaaaaggcnccaagccttaaccaggttccccgtgaagaaatctgncctgttnngcttcctgtcattaaggttcccaggtgggacacaaaaaccgcagaaaggatcgtcgaccctgaggcccagggcccctgggctgccctgtggtccagtctgaggccctttcagcccccaggctgccttgccaccagctccaggtgctcaagattctggcagagcctggactcaggatgacttggaactagggcttggctctcagaagtcctggattttggaaactccaaatggaatcacccttcagagacatccctggtgcctggagatgggaatgtggcctcagtgcctctgagtaggtgccatgaggcacctttgctttctgcccagagtggccatgagcaccagaacagatgatctccatttccgccagctgcctgtagccacgtggcatcctgcctgtggtctgggtgagatttactgtgaccagatgtagaataaatgtgtctcatcctgca

SEQ ID NO: 347566 - DNA, 4174 bp, Homo sapiens
  misc_feature (1)..(1): n is a, c, g, or t
nagaagaagaggaagtgaaggctacagggtatccacgtgggttctgagcgtgtttctacgtccctggaagccggtcatttaagctcattcctcgccacggcttagtcaacatgggtcgctcgggaaagttgccctctggtgtctcagctaagttgaagcgctggaagaaaggccacagcagcgacagcaaccccgccatctgccgccaccgtcaggccgcccgcagccgcttcttcagccggccgtcaggaaggagtgacctgacagtcgatgctgtgaagttacataatgagctgcagtcagggtccttgcgcttgggcaaaagcgaagccccggagacgcccatggaagaagaggcggagctggttctcaccgagaagtcctcgggtaccttcctgagtggcctttccgactgcacaaacgtcaccttcagcaaagtacagcgcttctgggagtccaactcggctgcccacaaggagatctgtgctgttctggctgctgtcactgaggtgattcgctcccagggagggaaggagacggagactgagtacttcgctgctctgatgacaacaatggaagcagtggagtccccggagtccctggccgccgttgcttacctgctgaaccttgtcctgaagcgatccggaaggctgcccagcatggagtatgctcagtcctcaagggcagtgaattcatgtttgaaaaggcccctgcccatcatcctgctgccatttccactgccaagttctgcatccaggagattgagaagtctggaggctccaaggaggccaccaccacgctgcacatgctgacgctgctgaaggacctgctgccctgcttcccggaaggcctggtgaagagctgcagtgagactctcctcagggtcatgaccttgagccatgtgctggtgacagcctgtgccatgcaggcctttcacagcctcttccacgccaggcctggcctgagcaccctgtcagcagagctcaacgcccagatcatcacggccctgtacgactatgttcccagtgagaatgatttacaacccctgctagcctggcttaaggtcatggagaaagcccacatcaacctggtgaggttgcagtgggacctggggctaggccacctccctcgcttttttggaactgcggtgacctgcctcctttccccacactcgcaagtgctgactgctgctacgcagagcctcaaggagatcctgaaggaatgcgtggctccccacatggctgacattggctccgtgacctcctcggcctcaggccctgcccaatctgttgccaagatgttcagggcagtggaggagggcctgacgtacaaattccatgcggcctggagctccgtgttgcagctgctgtgtgtcttcttcgaggcgtgtgggagacaggcccaccctgtgatgaggaagtgcctccagtccctgtgtgacctgcgcctctcccctcatttcccccacacggcggctcttgaccaggcagtgggggctgcggtgaccagtatgggacctgaggtggtgctgcaggctgtgcctttggaaattgatggctctgaggagactctggatttcccacggagctggctgctgcctgtcatccgagaccatgttcaggaaacgcgacttggttttttcaccacctacttcttgcccctggctaacaccctgaagagcaaagccatggacctggctcaggcaggcagcacagtggaatctaagatctacgacacactccagtggcagatgtggacactcctgcctgggttctgcacaaggcctacagatgtggccatctccttcaaagggctggcacggacgctgggcatggccatcagcgagcgtccagacctgagggtcaccgtgtgccaggccctgcgcaccctcatcaccaagggctgccaggcagaggctgaccgtgctgaagtgagtcgctttgccaagaactttctgccgatcctcttcaacctgtatgggcagcccgtggcagccggggacactccagcccctcgccgggctgtgctggaaaccatcagaacttacctcaccatcactgacactcagttggtgaacagtctcctggaaaaagccagtgagaaggtgctcgaccctgccagctctgactttaccagattgtctgtcctggacctggtcgtggccttggctccgtgtgctgacgaagctgccatcagtaagctatactccaccatccggccctacctagagagcaaggcccacggggtgcagaagaaggcctaccgagtgctggaggaggtgtgtgccagtcctcagggccccggggccctcttcgtgcagagccacctggaggacctgaagaagacactgctggactcgctgcggagcacctcctcacccgccaagaggccccgtttgaagtgcctcctacacatcgtgaggaagctctcagctgaacacaaggagttcatcactgccctcatcccagaggtgatcctgtgcaccaaggaggtgtcggtgggcgcacggaagaacgcttttgcactgctcgtggagatgggccatgctttcctaaggtttggctcgaaccaggaagaggccctgcagtgctacctcgtcctgatctaccctggcctggtgggcgcggtgaccatggtcagctgcagcatcctggccctgacccacctccttttcgagtttaaaggtctgatggggaccagtacagtggagcagctgctggagaatgtgtgcctgcttctggcctcccgcacccgtgacgtggtcaagtctgcactgggcttcatcaaggtggcagtgactgtcatggacgtggcgcacctggccaaacatgtgcagctggtgatggaagccattgggaagctttcagatgacatgcggcggcacttccgcatgaagcttcggaacctgttcaccaagttcatccgcaagtttggatttgagctggtgaaaaggctgttgcccgaggagtaccacagagtcctggtcaacatccggaaagctgaggcccgggccaagaggcaccgagccctgagccaggctgccgtggaggaggaagaagaggaggaggaggaggaggagcccgcccagggcaaaggtgacagcattgaggagattttagctgactcagaggacgaggaggacaatgaggaggaggaaagaagccgaggcaaggagcagcggaagctggcacgacagaggagccgggcatggctgaaagagggcggtggggacgagcccctcaacttcctggatcccaaggtggcccaacgagtcctggccacgcagccagggccaggccggggcaggaagaaggaccacggcttcaaggtgagcgccgatggccggctgatcataagggaggaggcagacggcaacaagatggaggaagaggaaggtgccaaaggcgaagatgaagagatggctgacccaatggaagatgtgatcatcaggaataaaaagcaccagaagctcaagcaccagaaagaggctgaggaggaggagctggagataccccctcagtaccaagctggaggctctggcattcatcgccctgtggccaagaaggctatgcctggggctgaatacaaggccaagaaagcaaaaggtgatgtgaagaagaaaggccggccggatccctatgcctacatccccctcaacagaagcaagctcaaccgcaggaagaagatgaagctgcagggacagttcaaaggcctggtgaaggctgcccggcgaggttcccaggtgggacacaaaaaccgcagaaaggatcgtcgaccctgaggcccagggcccctgggctgccctgtggtccagtctgaggccctttcagcccccaggctgccttgccaccagctccaggtgctcaagattctggcagagcctggactcaggatgacttggaactagggcttggctctcagaagtcctggattttggaaactccaaatggaatcacccttcagagacatccctggtgcctggagatgggaatgtggcctcagtgcctctgagtaggtgccatgaggcacctttgctttctgcccagagtggccatgagcaccagaacagatgatctccatttccgccagctgcctgtagccacgtggcatcctgcctgtggtctgggtgagatttactgtgaccagatgtagaataaatgtgtctcatcctgca

SEQ ID NO: 347567 - DNA, 3704 bp, Homo sapiens
cgtttgattcatgtggctcagctgcggcggtttcacctctgtcctccgatgtggtcctttcctgcctggccacccttctgcggaagcaagacctggaggcctggggctaccccgtgacccttcaggtgtaccatgggctgctgagcttcacggtgcatcccaagcccaagatccggaaggctgcccagcatggagtatgctcagtcctcaagggcagtgaattcatgtttgaaaaggcccctgcccatcatcctgctgccatttccactgccaagttctgcatccaggagattgagaagtctggaggctccaaggaggccaccaccacgctgcacatgctgacgctgctgaaggacctgctgccctgcttcccggaaggcctggtgaagagctgcagtgagactctcctcagggtcatgaccttgagccatgtgctggtgacagcctgtgccatgcaggcctttcacagcctcttccacgccaggcctggcctgagcaccctgtcagcagagctcaacgcccagatcatcacggccctgtacgactatgttcccagtgagaatgatttacaacccctgctagcctggcttaaggtcatggagaaagcccacatcaacctggtgaggttgcagtgggacctggggctaggccacctccctcgcttttttggaactgcggtgacctgcctcctttccccacactcgcaagtgctgactgctgctacgcagagcctcaaggagatcctgaaggaatgcgtggctccccacatggctgacattggctccgtgacctcctcggcctcaggccctgcccaatctgttgccaagatgttcagggcagtggaggagggcctgacgtacaaattccatgcggcctggagctccgtgttgcagctgctgtgtgtcttcttcgaggcgtgtgggagacaggcccaccctgtgatgaggaagtgcctccagtccctgtgtgacctgcgcctctcccctcatttcccccacacggcggctcttgaccaggcagtgggggctgcggtgaccagtatgggacctgaggtggtgctgcaggctgtgcctttggaaattgatggctctgaggagactctggatttcccacggagctggctgctgcctgtcatccgagaccatgttcaggaaacgcgacttggttttttcaccacctacttcttgcccctggctaacaccctgaagagcaaagccatggacctggctcaggcaggcagcacagtggaatctaagatctacgacacactccagtggcagatgtggacactcctgcctgggttctgcacaaggcctacagatgtggccatctccttcaaagggctggcacggacgctgggcatggccatcagcgagcgtccagacctgagggtcaccgtgtgccaggccctgcgcaccctcatcaccaagggctgccaggcagaggctgaccgtgctgaagtgagtcgctttgccaagaactttctgccgatcctcttcaacctgtatgggcagcccgtggcagccggggacactccagcccctcgccgggctgtgctggaaaccatcagaacttacctcaccatcactgacactcagttggtgaacagtctcctggaaaaagccagtgagaaggtgctcgaccctgccagctctgactttaccagattgtctgtcctggacctggtcgtggccttggctccgtgtgctgacgaagctgccatcagtaagctatactccaccatccggccctacctagagagcaaggcccacggggtgcagaagaaggcctaccgagtgctggaggaggtgtgtgccagtcctcagggccccggggccctcttcgtgcagagccacctggaggacctgaagaagacactgctggactcgctgcggagcacctcctcacccgccaagaggccccgtttgaagtgcctcctacacatcgtgaggaagctctcagctgaacacaaggagttcatcactgccctcatcccagaggtgatcctgtgcaccaaggaggtgtcggtgggcgcacggaagaacgcttttgcactgctcgtggagatgggccatgctttcctaaggtttggctcgaaccaggaagaggccctgcagtgctacctcgtcctgatctaccctggcctggtgggcgcggtgaccatggtcagctgcagcatcctggccctgacccacctccttttcgagtttaaaggtctgatggggaccagtacagtggagcagctgctggagaatgtgtgcctgcttctggcctcccgcacccgtgacgtggtcaagtctgcactgggcttcatcaaggtggcagtgactgtcatggacgtggcgcacctggccaaacatgtgcagctggtgatggaagccattgggaagctttcagatgacatgcggcggcacttccgcatgaagcttcggaacctgttcaccaagttcatccgcaagtttggatttgagctggtgaaaaggctgttgcccgaggagtaccacagagtcctggtcaacatccggaaagctgaggcccgggccaagaggcaccgagccctgagccaggctgccgtggaggaggaagaagaggaggaggaggaggaggagcccgcccagggcaaaggtgacagcattgaggagattttagctgactcagaggacgaggaggacaatgaggaggaggaaagaagccgaggcaaggagcagcggaagctggcacgacagaggagccgggcatggctgaaagagggcggtggggacgagcccctcaacttcctggatcccaaggtggcccaacgagtcctggccacgcagccagggccaggccggggcaggaagaaggaccacggcttcaaggtgagcgccgatggccggctgatcataagggaggaggcagacggcaacaagatggaggaagaggaaggtgccaaaggcgaagatgaagagatggctgacccaatggaagatgtgatcatcaggaataaaaagcaccagaagctcaagcaccagaaagaggctgaggaggaggagctggagataccccctcagtaccaagctggaggctctggcattcatcgccctgtggccaagaaggctatgcctggggctgaatacaaggccaagaaagcaaaaggtgatgtgaagaagaaaggccggccggatccctatgcctacatccccctcaacagaagcaagctcaaccgcaggaagaagatgaagctgcagggacagttcaaaggcctggtgaaggctgcccggcgaggttcccaggtgggacacaaaaaccgcagaaaggatcgtcgaccctgaggcccagggcccctgggctgccctgtggtccagtctgaggccctttcagcccccaggctgccttgccaccagctccaggtgctcaagattctggcagagcctggactcaggatgacttggaactagggcttggctctcagaagtcctggattttggaaactccaaatggaatcacccttcagagacatccctggtgcctggagatgggaatgtggcctcagtgcctctgagtaggtgccatgaggcacctttgctttctgcccagagtggccatgagcaccagaacagatgatctccatttccgccagctgcctgtagccacgtggcatcctgcctgtggtctgggtgagatttactgtgaccagatgtagaataaatgtgtctcatcctgca

SEQ ID NO: 347568 - DNA, 4720 bp, Homo sapiens
  misc_feature (1)..(1): n is a, c, g, or t
nagaagaagaggaagtgaaggctacagggtatccacgtgggttctgagcgtgtttctacgtccctggaagccggtcatttaagctcattcctcgccacggcttagtcaacatgggtcgctcgggaaagttgccctctggtgtctcagctaagttgaagcgctggaagaaaggccacagcagcgacagcaaccccgccatctgccgccaccgtcaggccgcccgcagccgcttcttcagccggccgtcaggaaggagtgacctgacagtcgatgctgtgaagttacataatgagctgcagtcagggtccttgcgcttgggcaaaagcgaagccccggagacgcccatggaagaagaggcggagctggttctcaccgagaagtcctcgggtaccttcctgagtggcctttccgactgcacaaacgtcaccttcagcaaagtacagcgcttctgggagtccaactcggctgcccacaaggagatctgtgctgttctggctgctgtcactgaggtgattcgctcccagggagggaaggagacggagactgagtacttcgctgctctgatgacaacaatggaagcagtggagtccccggagtccctggccgccgttgcttacctgctgaaccttgtcctgaagcgtgttcccagccctgtgcttattaagaagttctctgatacctccaaagccttcatggatatcatgtcagctcaggccagcagcggctccacctctgtcctccgatgggtcctttcctgcctggccacccttctgcggaagcaagacctggaggcctggggctaccccgtgacccttcaggtgtaccatgggctgctgagcttcacggtgcatcccaagcccaagatccggaaggctgcccagcatggagtatgctcagtcctcaagggcagtgaattcatgtttgaaaaggcccctgcccatcatcctgctgccatttccactgccaagttctgcatccaggagattgagaagtctggaggctccaaggaggccaccaccacgctgcacatgctgacgctgctgaaggacctgctgccctgcttcccggaaggcctggtgaagagctgcagtgagactctcctcagggtcatgaccttgagccatgtgctggtgacagcctgtgccatgcaggcctttcacagcctcttccacgccaggcctggcctgagcaccctgtcagcagagctcaacgcccagatcatcacggccctgtacgactatgttcccagtgagaatgatttacaacccctgctagcctggcttaaggtcatggagaaagcccacatcaacctggtgaggttgcagtgggacctggggctaggccacctccctcgcttttttggaactgcggtgacctgcctcctttccccacactcgcaagtgctgactgctgctacgcagagcctcaaggagatcctgaaggaatgcgtggctccccacatggctgacattggctccgtgacctcctcggcctcaggccctgcccaatctgttgccaagatgttcagggcagtggaggagggcctgacgtacaaattccatgcggcctggagctccgtgttgcagctgctgtgtgtcttcttcgaggcgtgtgggagacaggcccaccctgtgatgaggaagtgcctccagtccctgtgtgacctgcgcctctcccctcatttcccccacacggcggctcttgaccaggcagtgggggctgcggtgaccagtatgggacctgaggtggtgctgcaggctgtgcctttggaaattgatggctctgaggagactctggatttcccacggagctggctgctgcctgtcatccgagaccatgttcaggaaacgcgacttggttttttcaccacctacttcttgcccctggctaacaccctgaagagcaaagccatggacctggctcaggcaggcagcacagtggaatctaagatctacgacacactccagtggcagatgtggacactcctgcctgggttctgcacaaggcctacagatgtggccatctccttcaaagggctggcacggacgctgggcatggccatcagcgagcgtccagacctgagggtcaccgtgtgccaggccctgcgcaccctcatcaccaagggctgccaggcagaggctgaccgtgctgaagtgagtcgctttgccaagaactttctgccgatcctcttcaacctgtatgggcagcccgtggcagccggggacactccagcccctcgccgggctgtgctggaaaccatcagaacttacctcaccatcactgacactcagttggtgaacagtctcctggaaaaagccagtgagaaggtgctcgaccctgccagctctgactttaccagattgtctgtcctggacctggtcgtggccttggctccgtgtgctgacgaagctgccatcagtaagctatactccaccatccggccctacctagagagcaaggcccacggggtgcagaagaaggcctaccgagtgctggaggaggtgtgtgccagtcctcagggccccggggccctcttcgtgcagagccacctggaggacctgaagaagacactgctggactcgctgcggagcacctcctcacccgccaagaggccccgtttgaagtgcctcctacacatcgtgaggaagctctcagctgaacacaaggagttcatcactgccctcatcccagaggtgatcctgtgcaccaaggaggtgtcggtgggcgcacggaagaacgcttttgcactgctcgtggagatgggccatgctttcctaaggtttggctcgaaccaggaagaggccctgcagtgctacctcgtcctgatctaccctggcctggtgggcgcggtgaccatggtcagctgcagcatcctggccctgacccacctccttttcgagtttaaaggtctgatggggaccagtacagtggagcagctgctggagaatgtgtgcctgcttctggcctcccgcacccgtgacgtggtcaagtctgcactgggcttcatcaaggtggcagtgactgtcatggacgtggcgcacctggccaaacatgtgcagctggtgatggaagccattgggaagctttcagatgacatgcggcggcacttccgcatgaagcttcggaacctgttcaccaagttcatccgcaagtttggatttgagctggtgaaaaggctgttgcccgaggagtaccacagagtcctggtcaacatccggaaagctgaggcccgggccaagaggcaccgagccctgagccaggctgccgtggaggaggaagaagaggaggaggaggaggaggagcccgcccagggcaaaggtgacagcattgaggagattttagctgactcagaggacgaggaggacaatgaggaggaggaaagaagccgaggcaaggagcagcggaagctggcacgacagaggagccgggcatggctgaaagagggcggtggggacgagcccctcaacttcctggatcccaaggtggcccaacgagtcctggccacgcagccagggccaggccggggcaggaagaaggaccacggcttcaaggtgagcgccgatggccggctgatcataagggaggaggcagacggcaacaagatggaggaagaggaaggtgccaaaggcgaagatgaagagatggctgacccaatggaagatgtgatcatcaggaataaaaagcaccagaagctcaagcaccagaaagaggctgaggaggaggagctggagataccccctcagtaccaagctggaggctctggcattcatcgccctgtggccaagaaggctatgcctggggctgaatacaaggccaaggtaagtgctgcatgtagggcatggggtctcctggcactggacaggtgccagggaggggcaaggaggagctgtgcccatcactgtcctgagaggcaccttcctggaactcaactgaggccaggaaagaagaaggggttcagatgctaagaccttgtggcatctgaaatgggggaccttattgaatggccttccaaggatacaggagctctttggcaccacctaaggcagaggatgaagggaggttatggggcctgtcaagtctagggcagggacagaaggggaaccccaccctcctagctgactctgtttctctgggcaagcagaaagcaaaaggtgatgtgaagaagaaaggccggccggatccctatgcctacatccccctcaacagaagcaagctcaaccgcaggaagaagatgaagctgcagggacagttcaaaggcctggtgaaggctgcccggcgaggttcccaggtgggacacaaaaaccgcagaaaggatcgtcgaccctgaggcccagggcccctgggctgccctgtggtccagtctgaggccctttcagcccccaggctgccttgccaccagctccaggtgctcaagattctggcagagcctggactcaggatgacttggaactagggcttggctctcagaagtcctggattttggaaactccaaatggaatcacccttcagagacatccctggtgcctggagatgggaatgtggcctcagtgcctctgagtaggtgccatgaggcacctttgctttctgcccagagtggccatgagcaccagaacagatgatctccatttccgccagctgcctgtagccacgtggcatcctgcctgtggtctgggtgagatttactgtgaccagatgtagaataaatgtgtctcatcctgca

SEQ ID NO: 347569 - DNA, 4043 bp, Homo sapiens
  misc_feature (1)..(1): n is a, c, g, or t
nagaagaagaggaagtgaaggctacagggtatccacgtgggttctgagcgtgtttctacgtccctggaagccggtcatttaagctcattcctcgccacggcttagtcaacatgggtcgctcgggaaagttgccctctggtgtctcagctaagttgaagcgctggaagaaaggccacagcagcgacagcaaccccgccatctgccgccaccgtcaggccgcccgcagccgcttcttcagccggccgtcaggaaggagtgacctgacagtcgatgctgtgaagttacataatgagctgcagtcagggtccttgcgcttgggcaaaagcgaagccccggagacgcccatggaagaagaggcggagctggttctcaccgagaagtcctcgggtaccttcctgagtggcctttccgactgcacaaacgtcaccttcagcaaagtacagcgcttctgggagtccaactcggctgcccacaaggagatctgtgctgttctggctgctgtcactgaggtgattcgctcccagggagggaaggagacggagactgagtacttcgctgctctgatgacaacaatggaagcagtggagtccccggagtccctggccgccgttgcttacctgctgaaccttgtcctgaagcgtgttcccagccctgtgcttattaagaagttctctgatacctccaaagccttcatggatatcatgtcagctcaggccagcagcggctccacctctgtcctccgatgggtcctttcctgcctggccacccttctgcggaagcaagacctggaggcctggggctaccccgtgacccttcaggtgtaccatgggctgctgagcttcacggtgcatcccaagcccaagatccggaaggctgcccagcatggagtatgctcagtcctcaagggcagtgaattcatgtttgaaaaggcccctgcccatcatcctgctgccatttccactgccaagttctgcatccaggagattgagaagtctggaggctccaaggaggccaccaccacgctgcacatgctgacgctgctgaaggacctgctgccctgcttcccggaaggcctggtgaagagctgcagtgagactctcctcagggtcatgaccttgagccatgtgctggtgacagcctgtgccatgcaggcctttcacagcctcttccacgccaggcctggcctgagcaccctgtcagcagagctcaacgcccagatcatcacggccctgtacgactatgttcccagtgagaatgatttacaacccctgctagcctggcttaaggtcatggagaaagcccacatcaacctggtgaggttgcagtgggacctggggctaggccacctccctcgcttttttggaactgcggtgacctgcctcctttccccacactcgcaagtgctgactgctgctacgcagagcctcaaggagatcctgaaggaatgcgtggctccccacatggctgacattggctccgtgacctcctcggcctcaggccctgcccaatctgttgccaagatgttcagggcagtggaggagggcctgacgtacaaattccatgcggcctggagctccgtgttgcagctgctgtgtgtcttcttcgaggcgtgtgggagacaggcccaccctgtgatgaggaagtgcctccagtccctgtgtgacctgcgcctctcccctcatttcccccacacggcggctcttgaccaggcagtgggggctgcggtgaccagtatgggacctgaggtggtgctgcaggctgtgcctttggaaattgatggctctgaggagactctggatttcccacggagctggctgctgcctgtcatccgagaccatgttcaggaaacgcgacttggttttttcaccacctacttcttgcccctggctaacaccctgaagagcaaagccatggacctggctcaggcaggcagcacagtggaatctaagatctacgacacactccagtggcagatgtggacactcctgcctgggttctgcacaaggcctacagatgtggccatctccttcaaagggctggcacggacgctgggcatggccatcagcgagcgtccagacctgagggtcaccgtgtgccaggccctgcgcaccctcatcaccaagggctgccaggcagaggctgaccgtgctgaagtgagtcgctttgccaagaactttctgccgatcctcttcaacctgtatgggcagcccgtggcagccggggacactccagcccctcgccgggctgtgctggaaaccatcagaacttacctcaccatcactgacactcagttggtgaacagtctcctggaaaaagccagtgagaaggtgctcgaccctgccagctctgactttaccagattgtctgtcctggacctggtcgtggccttggctccgtgtgctgacgaagctgccatcagtaagctatactccaccatccggccctacctagagagcaaggcccacggggtgcagaagaaggcctaccgagtgctggaggaggtgtgtgccagtcctcagggccccggggccctcttcgtgcagagccacctggaggacctgaagaagacactgctggactcgctgcggagcacctcctcacccgccaagaggccccgtttgaagtgcctcctacacatcgtgaggaagctctcagctgaacacaaggagttcatcactgccctcatcccagaggtgatcctgtgcaccaaggaggtgtcggtgggcgcacggaagaacgcttttgcactgctcgtggagatgggccatgctttcctaaggtttggctcgaaccaggaagaggccctgcagtgctacctcgtcctgatctaccctggcctggtgggcgcggtgaccatggtcagctgcagcatcctggccctgacccacctccttttcgagtttaaaggtctgatggggaccagtacagtggagcagctgctggagaatgtgtgcctgcttctggcctcccgcacccgtgacgtggtcaagtctgcactgggcttcatcaaggtggcagtgactgtcatggacgtggcgcacctggccaaacatgtgcagctggtgatggaagccattgggaagctttcagatgacatgcggcggcacttccgcatgaagcttcggaacctgttcaccaagttcatccgcaagtttggatttgagctggtgaaaaggctgttgcccgaggagtaccacagagtcctggtcaacatccggaaagctgaggcccgggccaagaggcaccgagccctgagccaggctgccgtggaggaggaagaagaggaggaggaggaggaggagcccgcccagggcaaaggtgacagcattgaggagattttagctgactcagaggacgaggaggacaatgaggaggaggaaagaagccgaggcaaggagcagcggaagctggcacgacagaggagccgggcatggctgaaagagggcggtggggacgagcccctcaacttcctggatcccaaggtggcccaacgagtcctggccacgcagccagggccaggccggggcaggaagaaggaccacggcttcaaggtgagcgccgatggccggctgatcataagggaggaggcagacggcaacaagatggaggaagaggaaggtgccaaaggcgaagatgaagagatggctgacccaatggaagatgtgatcatcaggaataaaaagcaccagaagctcaagcaccagaaagaggctgaggaggaggagctggagataccccctcagtaccaagctggactcaggatgacttggaactagggcttggctctcagaagtcctggattttggaaactccaaatggaatcacccttcagagacatccctggtgcctggagatgggaatgtggcctcagtgcctctgagtaggtgccatgaggcacctttgctttctgcccagagtggccatgagcaccagaacagatgatctccatttccgccagctgcctgtagccacgtggcatcctgcctgtggtctgggtgagatttactgtgaccagatgtagaataaatgtgtctcatcctgca

SEQ ID NO: 347570 - DNA, 3998 bp, Homo sapiens
  misc_feature (1)..(1): n is a, c, g, or t
  misc_feature (3869)..(3869): n is a, c, g, or t
nagaagaagaggaagtgaaggctacagggtatccacgtgggttctgagcgtgtttctacgtccctggaagccggtcatttaagctcattcctcgccacggcttagtcaacatgggtcgctcgggaaagttgccctctggtgtctcagctaagttgaagcgctggaagaaaggccacagcagcgacagcaaccccgccatctgccgccaccgtcaggccgcccgcagccgcttcttcagccggccgtcaggaaggagtgacctgacagtcgatgctgtgaagttacataatgagctgcagtcagggtccttgcgcttgggcaaaagcgaagccccggagacgcccatggaagaagaggcggagctggttctcaccgagaagtcctcgggtaccttcctgagtggcctttccgactgcacaaacgtcaccttcagcaaagtacagcgcttctgggagtccaactcggctgcccacaaggagatctgtgctgttctggctgctgtcactgaggtgattcgctcccagggagggaaggagacggagactgagtacttcgctgctctgatgacaacaatggaagcagtggagtccccggagtccctggccgccgttgcttacctgctgaaccttgtcctgaagcgtgttcccagccctgtgcttattaagaagttctctgatacctccaaagccttcatggatatcatgtcagctcaggccagcagcggctccacctctgtcctccgatgggtcctttcctgcctggccacccttctgcggaagcaagacctggaggcctggggctaccccgtgacccttcaggtgtaccatgggctgctgagcttcacggtgcatcccaagcccaagatccggaaggctgcccagcatggagtatgctcagtcctcaagggcagtgaattcatgtttgaaaaggcccctgcccatcatcctgctgccatttccactgccaagttctgcatccaggagattgagaagtctggaggctccaaggaggccaccaccacgctgcacatgctgacgctgctgaaggacctgctgccctgcttcccggaaggcctggtgaagagctgcagtgagactctcctcagggtcatgaccttgagccatgtgctggtgacagcctgtgccatgcaggcctttcacagcctcttccacgccaggcctggcctgagcaccctgtcagcagagctcaacgcccagatcatcacggccctgtacgactatgttcccagtgagaatgatttacaacccctgctagcctggcttaaggtcatggagaaagcccacatcaacctggtgaggttgcagtgggacctggggctaggccacctccctcgcttttttggaactgcggtgacctgcctcctttccccacactcgcaagtgctgactgctgctacgcagagcctcaaggagatcctgaaggaatgcgtggctccccacatggctgacattggctccgtgacctcctcggcctcaggccctgcccaatctgttgccaagatgttcagggcagtggaggagggcctgacgtacaaattccatgcggcctggagctccgtgttgcagctgctgtgtgtcttcttcgaggcgtgtgggagacaggcccaccctgtgatgaggaagtgcctccagtccctgtgtgacctgcgcctctcccctcatttcccccacacggcggctcttgaccaggcagtgggggctgcggtgaccagtatgggacctgaggtggtgctgcaggctgtgcctttggaaattgatggctctgaggagactctggatttcccacggagctggctgctgcctgtcatccgagaccatgttcaggaaacgcgacttggttttttcaccacctacttcttgcccctggctaacaccctgaagagcaaagccatggacctggctcaggcaggcagcacagtggaatctaagatctacgacacactccagtggcagatgtggacactcctgcctgggttctgcacaaggcctacagatgtggccatctccttcaaagggctggcacggacgctgggcatggccatcagcgagcgtccagacctgagggtcaccgtgtgccaggccctgcgcaccctcatcaccaagggctgccaggcagaggctgaccgtgctgaagtgagtcgctttgccaagaactttctgccgatcctcttcaacctgtatgggcagcccgtggcagccggggacactccagcccctcgccgggctgtgctggaaaccatcagaacttacctcaccatcactgacactcagttggtgaacagtctcctggaaaaagccagtgagaaggtgctcgaccctgccagctctgactttaccagattgtctgtcctggacctggtcgtggccttggctccgtgtgctgacgaagctgccatcagtaagctatactccaccatccggccctacctagagagcaaggcccacggggtgcagaagaaggcctaccgagtgctggaggaggtgtgtgccagtcctcagggccccggggccctcttcgtgcagagccacctggaggacctgaagaagacactgctggactcgctgcggagcacctcctcacccgccaagaggccccgtttgaagtgcctcctacacatcgtgaggaagctctcagctgaacacaaggagttcatcactgccctcatcccagaggtgatcctgtgcaccaaggaggtgtcggtgggcgcacggaagaacgcttttgcactgctcgtggagatgggccatgctttcctaaggtttggctcgaaccaggaagaggccctgcagtgctacctcgtcctgatctaccctggcctggtgggcgcggtgaccatggtcagctgcagcatcctggccctgacccacctccttttcgagtttaaaggtctgatggggaccagtacagtggagcagctgctggagaatgtgtgcctgcttctggcctcccgcacccgtgacgtggtcaagtctgcactgggcttcatcaaggtggcagtgactgtcatggacgtggcgcacctggccaaacatgtgcagctggtgatggaagccattgggaagctttcagatgacatgcggcggcacttccgcatgaagcttcggaacctgttcaccaagttcatccgcaagtttggatttgagctggtgaaaaggctgttgcccgaggagtaccacagagtcctggtcaacatccggaaagctgaggcccgggccaagaggcaccgagccctgagccaggctgccgtggaggaggaagaagaggaggaggaggaggaggagcccgcccagggcaaaggtgacagcattgaggagattttagctgactcagaggacgaggaggacaatgaggaggaggaaagaagccgaggcaaggagcagcggaagctggcacgacagaggagccgggcatggctgaaagagggcggtggggacgagcccctcaacttcctggatcccaaggtggcccaacgagtcctggccacgcagccagggccaggccggggcaggaagaaggaccacggcttcaaggtgagcgccgatggccggctgatcataagggaggaggcagacggcaacaagatggaggaagaggaaggtgccaaaggcgaagatgaagagatggctgacccaatggaagatgtgatcatcaggaataaaaagcaccagaagctcaagcaccagaaagaggctgaggaggaggagctggagataccccctcagtaccaagctggaggctctggcattcatcgccctgtggccaagaaggctatgcctggggctgaatacaaggccaagaaagcaccgaagcaagctaaaccgcagaagaaaataagctgcaaggacagntcttgcagaagctggactcacgatgacttggcacttaggccttggtcttagaaatccctggattttgaaaacctccaatggaattaccctttagacatccttggggcctgatgggatgtggccctgccc

SEQ ID NO: 347571 - DNA, 2506 bp, Homo sapiens
  misc_feature (1)..(1): n is a, c, g, or t
nagaagaagaggaagtgaaggctacagggtatccacgtgggttctgagcgtgtttctacgtccctggaagccggtcatttaagctcattcctcgccacggcttagtcaacatgggtcgctcgggaaagttgccctctggtgtctcagctaagttgaagcgctggaagaaaggccacagcagcgacagcaaccccgccatctgccgccaccgtcaggccgcccgcagccgcttcttcagccggccgtcaggaaggagtgacctgacagtcgatgctgtgaagttacataatgagctgcagtcagggtccttgcgcttgggcaaaagcgaagccccggagacgcccatggaagaagaggcggagctggttctcaccgagaagtcctcgggtaccttcctgagtggcctttccgactgcacaaacgtcaccttcagcaaagtacagcgcttctgggagtccaactcggctgcccacaaggagatctgtgctgttctggctgctgtcactgaggtgattcgctcccagggagggaaggagacggagactgagtacttcgctgctctgatgacaacaatggaagcagtggagtccccggagtccctggccgccgttgcttacctgctgaaccttgtcctgaagcgtgttcccagccctgtgcttattaagaagttctctgatacctccaaagccttcatggatatcatgtcagctcaggccagcagcggctccacctctgtcctccgatgggtcctttcctgcctggccacccttctgcggaagcaagacctggaggcctggggctaccccgtgacccttcaggtgtaccatgggctgctgagcttcacggtgcatcccaagcccaagatccggaaggctgcccagcatggagtatgctcagtcctcaagggcagtgaattcatgtttgaaaaggcccctgcccatcatcctgctgccatttccactgccaagttctgcatccaggagattgagaagtctggaggctccaaggaggccaccaccacgctgcacatgctgacgctgctgaaggacctgctgccctgcttcccggaaggcctggtgaagagctgcagtgagactctcctcagggtcatgaccttgagccatgtgctggtgacagcctgtgccatgcaggcctttcacagcctcttccacgccaggcctggcctgagcaccctgtcagcagagctcaacgcccagatcatcacggccctgtacgactatgttcccagtgagaatgatttacaacccctgctagcctggcttaaggtcatggagaaagcccacatcaacctggtgaggttgcagtgggacctggggctaggccacctccctcgcttttttggaactgcggtgacctgcctcctttccccacactcgcaagtgctgactgctgctacgcagagcctcaaggagatcctgaaggaatgcgtggctccccacatggctgacattggctccgtgacctcctcggcctcaggccctgcccaatctgttgccaagatgttcagggcagtggaggagggcctgacgtacaaattccatgcggcctggagctccgtgttgcagctgctgtgtgtcttcttcgaggcgtgtgggagacaggcccaccctgtgatgaggaagtgcctccagtccctgtgtgacctgcgcctctcccctcatttcccccacacggcggctcttgaccaggcagtgggggctgcggtgaccagtatgggacctgaggtggtgctgcaggctgtgcctttggaaattgatggctctgaggagactctggatttcccacggagctggctgctgcctgtcatccgagaccatgttcaggaaacgcgacttggttttttcaccacctacttcttgcccctggctaacaccctgaagagcaaagccatggacctggctcaggcaggcagcacagtggaatctaagatctacgacacactccagtggcagatgtggacactcctgcctgggttctgcacaaggcctacagatgtggccatctccttcaaagggctggcacggacgctgggcatggccatcagcgagcgtccagacctgagggtcaccgtgtgccaggccctgcgcaccctcatcaccaagggctgccaggcagaggctgaccgtgctgaagtgagtcgctttgccaagaactttctgccgatcctcttcaacctgtatgggcagcccgtggcagccggggacactccagcccctcgccgggctgtgctggaaaccatcagaacttacctcaccatcactgacactcagttggtgaacagtctcctggaaaaagccagtgagaaggtgctcgaccctgccagctctgactttaccagattgtctgtcctggacctggtcgtggccttggctccgtgtgctgacgaagctgccatcagtaagctatactccaccatccggccctacctagagtgctaacaaatcagaaatatgacaattaatgattaaagactgtgattgccacc

SEQ ID NO: 347572 - DNA, 3254 bp, Homo sapiens
  misc_feature (1)..(1): n is a, c, g, or t
  misc_feature (3208)..(3208): n is a, c, g, or t
  misc_feature (3216)..(3216): n is a, c, g, or t
  misc_feature (3239)..(3239): n is a, c, g, or t
  misc_feature (3244)..(3244): n is a, c, g, or t
nagaagaagaggaagtgaaggctacagggtatccacgtgggttctgagcgtgtttctacgtccctggaagccggtcatttaagctcattcctcgccacggcttagtcaacatgggtcgctcgggaaagttgccctctggtgtctcagctaagttgaagcgctggaagaaaggccacagcagcgacagcaaccccgccatctgccgccaccgtcaggccgcccgcagccgcttcttcagccggccgtcaggaaggagtgacctgacagtcgatgctgtgaagttacataatgagctgcagtcagggtccttgcgcttgggcaaaagcgaagccccggagacgcccatggaagaagaggcggagctggttctcaccgagaagtcctcgggtaccttcctgagtggcctttccgactgcacaaacgtcaccttcagcaaagtacagcgcttctgggagtccaactcggctgcccacaaggagatctgtgctgttctggctgctgtcactgaggtgattcgctcccagggagggaaggagacggagactgagtacttcgctgctctgatgacaacaatggaagcagtggagtccccggagtccctggccgccgttgcttacctgctgaaccttgtcctgaagcgtgttcccagccctgtgcttattaagaagttctctgatacctccaaagccttcatggatatcatgtcagctcaggccagcagcggctccacctctgtcctccgatgggtcctttcctgcctggccacccttctgcggaagcaagacctggaggcctggggctaccccgtgacccttcaggtgtaccatgggctgctgagcttcacggtgcatcccaagcccaagatccggaaggctgcccagcatggagtatgctcagtcctcaagggcagtgaattcatgtttgaaaaggcccctgcccatcatcctgctgccatttccactgccaagttctgcatccaggagattgagaagtctggaggctccaaggaggccaccaccacgctgcacatgctgacgctgctgaaggacctgctgccctgcttcccggaaggcctggtgaagagctgcagtgagactctcctcagggtcatgaccttgagccatgtgctggtgacagcctgtgccatgcaggcctttcacagcctcttccacgccaggcctggcctgagcaccctgtcagcagagctcaacgcccagatcatcacggccctgtacgactatgttcccagtgagaatgatttacaacccctgctagcctggcttaaggtcatggagaaagcccacatcaacctggtgaggttgcagtgggacctggggctaggccacctccctcgcttttttggaactgcggtgacctgcctcctttccccacactcgcaagtgctgactgctgctacgcagagcctcaaggagatcctgaaggaatgcgtggctccccacatggctgacattggctccgtgacctcctcggcctcaggccctgcccaatctgttgccaagatgttcagggcagtggaggagggcctgacgtacaaattccatgcggcctggagctccgtgttgcagctgctgtgtgtcttcttcgaggcgtgtgggagacaggcccaccctgtgatgaggaagtgcctccagtccctgtgtgacctgcgcctctcccctcatttcccccacacggcggctcttgaccaggcagtgggggctgcggtgaccagtatgggacctgaggtggtgctgcaggctgtgcctttggaaattgatggctctgaggagactctggatttcccacggagctggctgctgcctgtcatccgagaccatgttcaggaaacgcgacttggttttttcaccacctacttcttgcccctggctaacaccctgaagagcaaagccatggacctggctcaggcaggcagcacagtggaatctaagatctacgacacactccagtggcagatgtggacactcctgcctgggttctgcacaaggcctacagatgtggccatctccttcaaagggctggcacggacgctgggcatggccatcagcgagcgtccagacctgagggtcaccgtgtgccaggccctgcgcaccctcatcaccaagggctgccaggcagaggctgaccgtgctgaagtgagtcgctttgccaagaactttctgccgatcctcttcaacctgtatgggcagcccgtggcagccggggacactccagcccctcgccgggctgtgctggaaaccatcagaacttacctcaccatcactgacactcagttggtgaacagtctcctggaaaaagccagtgagaaggtgctcgaccctgccagctctgactttaccagattgtctgtcctggacctggtcgtggccttggctccgtgtgctgacgaagctgccatcagtaagctatactccaccatccggccctacctagagagcaaggcccacggggtgcagaagaaggcctaccgagtgctggaggaggtgtgtgccagtcctcagggccccggggccctcttcgtgcagagccacctggaggacctgaagaagacactgctggactcgctgcggagcacctcctcacccgccaagaggccccgtttgaagtgcctcctacacatcgtgaggaagctctcagctgaacacaaggagttcatcactgccctcatcccagaggtgatcctgtgcaccaaggaggtgtcggtgggcgcacggaagaacgcttttgcactgctcgtggagatgggccatgctttcctaaggtttggctcgaaccaggaagaggccctgcagtgctacctcgtcctgatctaccctggcctggtgggcgcggtgaccatggtcagctgcagcatcctggccctgacccacctccttttcgagtttaaaggtctgatggggaccagtacagtggagcagctgctggagaatgtgtgcctgcttctggcctcccgcacccgtgacgtggtcaagtctgcactgggcttcatcaaggtggcagtgactgtcatggacgtggcgcacctggccaaacatgtgcagctggtgatggaagccattgggaagctttcagatgacatgcggcggcacttccgcatgaagcttcggaacctgttcaccaagttcatccgcaagtttggaattttaacctgggggaaaaaggctgttggccccaaggagtaccccaaaanttccttgnttcaaaatttccggaaaaatttnagggnccccggccct

SEQ ID NO: 347573 - DNA, 506 bp, Homo sapiens
agactctggatttcccacggagctggctgctgcctgtcatccgagaccatgttcaggaaacgcgacttggttttttcaccacctacttcttgcccctggctaacaccctgaagagcaaaggtaggagagacccttgcctgtgtgtgacctgaggctccccacagtcctggaacctccacagaagggattgggaagggtgctgagtcccacacacccagccttcaagacgtttggcaacatccctctgccgagcaggtggccagccagtgctggagtgcctgtctccctccctgctgctccaaggcgaggccaggtggccctccctgtggcagagcttgccctgtgagacaggagctgcctccacatggagctgccccaactgggccttgttcttcccctttggatcacagagaacagctgtgccccttcttcctcatgcaagcccttgagattgattttgtaaaaatttgtgatatgtttgtttatatgtatatatacttttatat

SEQ ID NO: 347574 - DNA, 469 bp, Homo sapiens
actttctctggtggggggcacagggtggtgtgaccgtggccctgactgtgccgcccccttggcagggcagtggaggagggcctgacgtacaaattccatgcggcctggagctccgtgttgcagctgctgtgtgtcttcttcgaggcgtgtgggagacaggcccaccctgtgatgaggaaggtgagtggggagcggctggggccagggcaggaagtggtgctggctcttggactatgggctcctggagggcacgtgtctctgttatctctgcaccctgctccgcaccccaccctgacagggccatagcaggtgccccatgcagtatcccctggaaggtgactgggccaacaagggaggggcaggaaaaagggtggcagtccccccacctgctcactagtctttgctggagttactggttttgaaacttagggagtctatttgctttcccttatccccaccccttatcttt

SEQ ID NO: 347575 - DNA, 423 bp, Homo sapiens
gggaaggagaaaggggcagtgctcaggggtctcatctcttctagcagaaggatgatattggtctgaggaaggcaattttctggggccggagttggtggccccgcagcctggtgagccaggagggggcagaaggaaagggtaggttttgaggagctcccacagcgctcatgggcctctcttttttggctccaggcgaagatgaagagatggctgacccaatggaagatgtgatcatcaggaatgtgagtagttcctgcagatggggggctagggcttcagacctaagcctgggctccacagcttctcacccccaccacacgtagacattggaactgccctgtttctggaatgctcggtgcatcctcacaggtgtgcatagcaggcggtccagaaggttgtgggtgccaggcaggacagggtgat

SEQ ID NO: 347576 - DNA, 4097 bp, Homo sapiens
  misc_feature (1)..(1): n is a, c, g, or t
nagaagaagaggaagtgaaggctacagggtatccacgtgggttctgagcgtgtttctacgtccctggaagccggtcatttaagctcattcctcgccacggcttagtcaacatgggtcgctcgggaaagttgccctctggtgtctcagctaagttgaagcgctggaagaaaggccacagcagcgacagcaaccccgccatctgccgccaccgtcaggccgcccgcagccgcttcttcagccggccgtcaggaaggagtgacctgacagtcgatgctgtgaagttacataatgagctgcagtcagggtccttgcgcttgggcaaaagcgaagccccggagacgcccatggaagaagaggcggagctggttctcaccgagaagtcctcgggtaccttcctgagtggcctttccgactgcacaaacgtcaccttcagcaaagtacagcgcttctgggagtccaactcggctgcccacaaggagatctgtgctgttctggctgctgtcactgaggtgattcgctcccagggagggaaggagacggagactgagtacttcgctgctctgatccggaaggctgcccagcatggagtatgctcagtcctcaagggcagtgaattcatgtttgaaaaggcccctgcccatcatcctgctgccatttccactgccaagttctgcatccaggagattgagaagtctggaggctccaaggaggccaccaccacgctgcacatgctgacgctgctgaaggacctgctgccctgcttcccggaaggcctggtgaagagctgcagtgagactctcctcagggtcatgaccttgagccatgtgctggtgacagcctgtgccatgcaggcctttcacagcctcttccacgccaggcctggcctgagcaccctgtcagcagagctcaacgcccagatcatcacggccctgtacgactatgttcccagtgagaatgatttacaacccctgctagcctggcttaaggtcatggagaaagcccacatcaacctggtgaggttgcagtgggacctggggctaggccacctccctcgcttttttggaactgcggtgacctgcctcctttccccacactcgcaagtgctgactgctgctacgcagagcctcaaggagatcctgaaggaatgcgtggctccccacatggctgacattggctccgtgacctcctcggcctcaggccctgcccaatctgttgccaagatgttcagggcagtggaggagggcctgacgtacaaattccatgcggcctggagctccgtgttgcagctgctgtgtgtcttcttcgaggcgtgtgggagacaggcccaccctgtgatgaggaagtgcctccagtccctgtgtgacctgcgcctctcccctcatttcccccacacggcggctcttgaccaggcagtgggggctgcggtgaccagtatgggacctgaggtggtgctgcaggctgtgcctttggaaattgatggctctgaggagactctggatttcccacggagctggctgctgcctgtcatccgagaccatgttcaggaaacgcgacttggttttttcaccacctacttcttgcccctggctaacaccctgaagagcaaagccatggacctggctcaggcaggcagcacagtggaatctaagatctacgacacactccagtggcagatgtggacactcctgcctgggttctgcacaaggcctacagatgtggccatctccttcaaagggctggcacggacgctgggcatggccatcagcgagcgtccagacctgagggtcaccgtgtgccaggccctgcgcaccctcatcaccaagggctgccaggcagaggctgaccgtgctgaagtgagtcgctttgccaagaactttctgccgatcctcttcaacctgtatgggcagcccgtggcagccggggacactccagcccctcgccgggctgtgctggaaaccatcagaacttacctcaccatcactgacactcagttggtgaacagtctcctggaaaaagccagtgagaaggtgctcgaccctgccagctctgactttaccagattgtctgtcctggacctggtcgtggccttggctccgtgtgctgacgaagctgccatcagtaagctatactccaccatccggccctacctagagagcaaggcccacggggtgcagaagaaggcctaccgagtgctggaggaggtgtgtgccagtcctcagggccccggggccctcttcgtgcagagccacctggaggacctgaagaagacactgctggactcgctgcggagcacctcctcacccgccaagaggccccgtttgaagtgcctcctacacatcgtgaggaagctctcagctgaacacaaggagttcatcactgccctcatcccagaggtgatcctgtgcaccaaggaggtgtcggtgggcgcacggaagaacgcttttgcactgctcgtggagatgggccatgctttcctaaggtttggctcgaaccaggaagaggccctgcagtgctacctcgtcctgatctaccctggcctggtgggcgcggtgaccatggtcagctgcagcatcctggccctgacccacctccttttcgagtttaaaggtctgatggggaccagtacagtggagcagctgctggagaatgtgtgcctgcttctggcctcccgcacccgtgacgtggtcaagtctgcactgggcttcatcaaggtggcagtgactgtcatggacgtggcgcacctggccaaacatgtgcagctggtgatggaagccattgggaagctttcagatgacatgcggcggcacttccgcatgaagcttcggaacctgttcaccaagttcatccgcaagtttggatttgagctggtgaaaaggctgttgcccgaggagtaccacagagtcctggtcaacatccggaaagctgaggcccgggccaagaggcaccgagccctgagccaggctgccgtggaggaggaagaagaggaggaggaggaggaggagcccgcccagggcaaaggtgacagcattgaggagattttagctgactcagaggacgaggaggacaatgaggaggaggaaagaagccgaggcaaggagcagcggaagctggcacgacagaggagccgggcatggctgaaagagggcggtggggacgagcccctcaacttcctggatcccaaggtggcccaacgagtcctggccacgcagccagggccaggccggggcaggaagaaggaccacggcttcaaggtgagcgccgatggccggctgatcataagggaggaggcagacggcaacaagatggaggaagaggaaggtgccaaaggcgaagatgaagagatggctgacccaatggaagatgtgatcatcaggaataaaaagcaccagaagctcaagcaccagaaagaggctgaggaggaggagctggagataccccctcagtaccaagctggaggctctggcattcatcgccctgtggccaagaaggctatgcctggggctgaatacaaggccaagaaagcaaaaggtgatgtgaagaagaaaggccggccggatccctatgcctacatccccctcaacagaagcaagctcaaccgcaggaagaagatgaagctgcagggacagttcaaaggcctggtgaaggctgcccggcgaggttcccaggtgggacacaaaaaccgcagaaaggatcgtcgaccctgaggcccagggcccctgggctgccctgtggtccagtctgaggccctttcagcccccaggctgccttgccaccagctccaggtgctcaagattctggcagagcctggactcaggatgacttggaactagggcttggctctcagaagtcctggattttggaaactccaaatggaatcacccttcagagacatccctggtgcctggagatgggaatgtggcctcagtgcctctgagtaggtgccatgaggcacctttgctttctgcccagagtggccatgagcaccagaacagatgatctccatttccgccagctgcctgtagccacgtggcatcctgcctgtggtctgggtgagatttactgtgaccagatgtagaataaatgtgtctcatcctgca

SEQ ID NO: 347577 - DNA, 3788 bp, Homo sapiens
cccgccgtaccagttgcgtcggcccaacacggtgcgttggcccaacacggtgcgtttgcccaacgttgggccaacgcaccttcatggatatcatgtcagctcaggccagcagcggctccacctctgtcctccgatgggtcctttcctgcctggccacccttctgcggaagcaagacctggaggcctggggctaccccgtgacccttcaggtgtaccatgggctgctgagcttcacggtgcatcccaagcccaagatccggaaggctgcccagcatggagtatgctcagtcctcaagggcagtgaattcatgtttgaaaaggcccctgcccatcatcctgctgccatttccactgccaagttctgcatccaggagattgagaagtctggaggctccaaggaggccaccaccacgctgcacatgctgacgctgctgaaggacctgctgccctgcttcccggaaggcctggtgaagagctgcagtgagactctcctcagggtcatgaccttgagccatgtgctggtgacagcctgtgccatgcaggcctttcacagcctcttccacgccaggcctggcctgagcaccctgtcagcagagctcaacgcccagatcatcacggccctgtacgactatgttcccagtgagaatgatttacaacccctgctagcctggcttaaggtcatggagaaagcccacatcaacctggtgaggttgcagtgggacctggggctaggccacctccctcgcttttttggaactgcggtgacctgcctcctttccccacactcgcaagtgctgactgctgctacgcagagcctcaaggagatcctgaaggaatgcgtggctccccacatggctgacattggctccgtgacctcctcggcctcaggccctgcccaatctgttgccaagatgttcagggcagtggaggagggcctgacgtacaaattccatgcggcctggagctccgtgttgcagctgctgtgtgtcttcttcgaggcgtgtgggagacaggcccaccctgtgatgaggaagtgcctccagtccctgtgtgacctgcgcctctcccctcatttcccccacacggcggctcttgaccaggcagtgggggctgcggtgaccagtatgggacctgaggtggtgctgcaggctgtgcctttggaaattgatggctctgaggagactctggatttcccacggagctggctgctgcctgtcatccgagaccatgttcaggaaacgcgacttggttttttcaccacctacttcttgcccctggctaacaccctgaagagcaaagccatggacctggctcaggcaggcagcacagtggaatctaagatctacgacacactccagtggcagatgtggacactcctgcctgggttctgcacaaggcctacagatgtggccatctccttcaaagggctggcacggacgctgggcatggccatcagcgagcgtccagacctgagggtcaccgtgtgccaggccctgcgcaccctcatcaccaagggctgccaggcagaggctgaccgtgctgaagtgagtcgctttgccaagaactttctgccgatcctcttcaacctgtatgggcagcccgtggcagccggggacactccagcccctcgccgggctgtgctggaaaccatcagaacttacctcaccatcactgacactcagttggtgaacagtctcctggaaaaagccagtgagaaggtgctcgaccctgccagctctgactttaccagattgtctgtcctggacctggtcgtggccttggctccgtgtgctgacgaagctgccatcagtaagctatactccaccatccggccctacctagagagcaaggcccacggggtgcagaagaaggcctaccgagtgctggaggaggtgtgtgccagtcctcagggccccggggccctcttcgtgcagagccacctggaggacctgaagaagacactgctggactcgctgcggagcacctcctcacccgccaagaggccccgtttgaagtgcctcctacacatcgtgaggaagctctcagctgaacacaaggagttcatcactgccctcatcccagaggtgatcctgtgcaccaaggaggtgtcggtgggcgcacggaagaacgcttttgcactgctcgtggagatgggccatgctttcctaaggtttggctcgaaccaggaagaggccctgcagtgctacctcgtcctgatctaccctggcctggtgggcgcggtgaccatggtcagctgcagcatcctggccctgacccacctccttttcgagtttaaaggtctgatggggaccagtacagtggagcagctgctggagaatgtgtgcctgcttctggcctcccgcacccgtgacgtggtcaagtctgcactgggcttcatcaaggtggcagtgactgtcatggacgtggcgcacctggccaaacatgtgcagctggtgatggaagccattgggaagctttcagatgacatgcggcggcacttccgcatgaagcttcggaacctgttcaccaagttcatccgcaagtttggatttgagctggtgaaaaggctgttgcccgaggagtaccacagagtcctggtcaacatccggaaagctgaggcccgggccaagaggcaccgagccctgagccaggctgccgtggaggaggaagaagaggaggaggaggaggaggagcccgcccagggcaaaggtgacagcattgaggagattttagctgactcagaggacgaggaggacaatgaggaggaggaaagaagccgaggcaaggagcagcggaagctggcacgacagaggagccgggcatggctgaaagagggcggtggggacgagcccctcaacttcctggatcccaaggtggcccaacgagtcctggccacgcagccagggccaggccggggcaggaagaaggaccacggcttcaaggtgagcgccgatggccggctgatcataagggaggaggcagacggcaacaagatggaggaagaggaaggtgccaaaggcgaagatgaagagatggctgacccaatggaagatgtgatcatcaggaataaaaagcaccagaagctcaagcaccagaaagaggctgaggaggaggagctggagataccccctcagtaccaagctggaggctctggcattcatcgccctgtggccaagaaggctatgcctggggctgaatacaaggccaagaaagcaaaaggtgatgtgaagaagaaaggccggccggatccctatgcctacatccccctcaacagaagcaagctcaaccgcaggaagaagatgaagctgcagggacagttcaaaggcctggtgaaggctgcccggcgaggttcccaggtgggacacaaaaaccgcagaaaggatcgtcgaccctgaggcccagggcccctgggctgccctgtggtccagtctgaggccctttcagcccccaggctgccttgccaccagctccaggtgctcaagattctggcagagcctggactcaggatgacttggaactagggcttggctctcagaagtcctggattttggaaactccaaatggaatcacccttcagagacatccctggtgcctggagatgggaatgtggcctcagtgcctctgagtaggtgccatgaggcacctttgctttctgcccagagtggccatgagcaccagaacagatgatctccatttccgccagctgcctgtagccacgtggcatcctgcctgtggtctgggtgagatttactgtgaccagatgtagaataaatgtgtctcatcctgca

SEQ ID NO: 347578 - DNA, 1672 bp, Homo sapiens
caggaccgctagttgctacagcgcggggcgatggactcactgcgggcgctaaggttaggcgcgaaccaggaaagaggccctgcagtgctacctcgtcctgatctaccctggcctggtgggcgcggtgaccatggtcagctgcagcatcctggccctgacccacctccttttcgagtttaaaggtctgatggggaccagtacagtggagcagctgctggagaatgtgtgcctgcttctggcctcccgcacccgtgacgtggtcaagtctgcactgggcttcatcaaggtggcagtgactgtcatggacgtggcgcacctggccaaacatgtgcagctggtgatggaagccattgggaagctttcagatgacatgcggcggcacttccgcatgaagcttcggaacctgttcaccaagttcatccgcaagtttggatttgagctggtgaaaaggctgttgcccgaggagtaccacagagtcctggtcaacatccggaaagctgaggcccgggccaagaggcaccgagccctgagccaggctgccgtggaggaggaagaagaggaggaggaggaggaggagcccgcccagggcaaaggtgacagcattgaggagattttagctgactcagaggacgaggaggacaatgaggaggaggaaagaagccgaggcaaggagcagcggaagctggcacgacagaggagccgggcatggctgaaagagggcggtggggacgagcccctcaacttcctggatcccaaggtggcccaacgagtcctggccacgcagccagggccaggccggggcaggaagaaggaccacggcttcaaggtgagcgccgatggccggctgatcataagggaggaggcagacggcaacaagatggaggaagaggaaggtgccaaaggcgaagatgaagagatggctgacccaatggaagatgtgatcatcaggaataaaaagcaccagaagctcaagcaccagaaagaggctgaggaggaggagctggagataccccctcagtaccaagctggaggctctggcattcatcgccctgtggccaagaaggctatgcctggggctgaatacaaggccaagaaagcaaaaggtgatgtgaagaagaaaggccggccggatccctatgcctacatccccctcaacagaagcaagctcaaccgcaggaagaagatgaagctgcagggacagttcaaaggcctggtgaaggctgcccggcgaggttcccaggtgggacacaaaaaccgcagaaaggatcgtcgaccctgaggcccagggcccctgggctgccctgtggtccagtctgaggccctttcagcccccaggctgccttgccaccagctccaggtgctcaagattctggcagagcctggactcaggatgacttggaactagggcttggctctcagaagtcctggattttggaaactccaaatggaatcacccttcagagacatccctggtgcctggagatgggaatgtggcctcagtgcctctgagtaggtgccatgaggcacctttgctttctgcccagagtggccatgagcaccagaacagatgatctccatttccgccagctgcctgtagccacgtggcatcctgcctgtggtctgggtgagatttactgtgaccagatgtagaataaatgtgtctcatcctgca

SEQ ID NO: 347579 - DNA, 3868 bp, Homo sapiens
  misc_feature (1)..(1): n is a, c, g, or t
  misc_feature (3851)..(3851): n is a, c, g, or t
  misc_feature (3859)..(3860): n is a, c, g, or t
  misc_feature (3863)..(3863): n is a, c, g, or t
nagaagaagaggaagtgaaggctacagggtatccacgtgggttctgagcgtgtttctacgtccctggaagccggtcatttaagctcattcctcgccacggcttagtcaacatgggtcgctcgggaaagttgccctctggtgtctcagctaagttgaagcgctggaagaaaggccacagcagcgacagcaaccccgccatctgccgccaccgtcaggccgcccgcagccgcttcttcagccggccgtcaggaaggagtgacctgacagtcgatgctgtgaagttacataatgagctgcagtcagggtccttgcgcttgggcaaaagcgaagccccggagacgcccatggaagaagaggcggagctggttctcaccgagaagtcctcgggtaccttcctgagtggcctttccgactgcacaaacgtcaccttcagcaaagtacagcgcttctgggagtccaactcggctgcccacaaggagatctgtgctgttctggctgctgtcactgaggtgattcgctcccagggagggaaggagacggagactgagtacttcgctgctctgatgacaacaatggaagcagtggagtccccggagtccctggccgccgttgcttacctgctgaaccttgtcctgaagcgtgttcccagccctgtgcttattaagaagttctctgatacctccaaagccttcatggatatcatgtcagctcaggccagcagcggctccacctctgtcctccgatgggtcctttcctgcctggccacccttctgcggaagcaagacctggaggcctggggctaccccgtgacccttcaggtgtaccatgggctgctgagcttcacggtgcatcccaagcccaagatccggaaggctgcccagcatggagtatgctcagtcctcaagggcagtgaattcatgtttgaaaaggcccctgcccatcatcctgctgccatttccactgccaagttctgcatccaggagattgagaagtctggaggctccaaggaggccaccaccacgctgcacatgctgacgctgctgaaggacctgctgccctgcttcccggaaggcctggtgaagagctgcagtgagactctcctcagggtcatgaccttgagccatgtgctggtgacagcctgtgccatgcaggcctttcacagcctcttccacgccaggcctggcctgagcaccctgtcagcagagctcaacgcccagatcatcacggccctgtacgactatgttcccagtgagaatgatttacaacccctgctagcctggcttaaggtcatggagaaagcccacatcaacctggtgaggttgcagtgggacctggggctaggccacctccctcgcttttttggaactgcggtgacctgcctcctttccccacactcgcaagtgctgactgctgctacgcagagcctcaaggagatcctgaaggaatgcgtggctccccacatggctgacattggctccgtgacctcctcggcctcaggccctgcccaatctgttgccaagatgttcagggcagtggaggagggcctgacgtacaaattccatgcggcctggagctccgtgttgcagctgctgtgtgtcttcttcgaggcgtgtgggagacaggcccaccctgtgatgaggaagtgcctccagtccctgtgtgacctgcgcctctcccctcatttcccccacacggcggctcttgaccaggcagtgggggctgcggtgaccagtatgggacctgaggtggtgctgcaggctgtgcctttggaaattgatggctctgaggagactctggatttcccacggagctggctgctgcctgtcatccgagaccatgttcaggaaacgcgacttggttttttcaccacctacttcttgcccctggctaacaccctgaagagcaaagccatggacctggctcaggcaggcagcacagtggaatctaagatctacgacacactccagtggcagatgtggacactcctgcctgggttctgcacaaggcctacagatgtggccatctccttcaaagggctggcacggacgctgggcatggccatcagcgagcgtccagacctgagggtcaccgtgtgccaggccctgcgcaccctcatcaccaagggctgccaggcagaggctgaccgtgctgaagtgagtcgctttgccaagaactttctgccgatcctcttcaacctgtatgggcagcccgtggcagccggggacactccagcccctcgccgggctgtgctggaaaccatcagaacttacctcaccatcactgacactcagttggtgaacagtctcctggaaaaagccagtgagaaggtgctcgaccctgccagctctgactttaccagattgtctgtcctggacctggtcgtggccttggctccgtgtgctgacgaagctgccatcagtaagctatactccaccatccggccctacctagagagcaaggcccacggggtgcagaagaaggcctaccgagtgctggaggaggtgtgtgccagtcctcagggccccggggccctcttcgtgcagagccacctggaggacctgaagaagacactgctggactcgctgcggagcacctcctcacccgccaagaggccccgtttgaagtgcctcctacacatcgtgaggaagctctcagctgaacacaaggagttcatcactgccctcatcccagaggtgatcctgtgcaccaaggaggtgtcggtgggcgcacggaagaacgcttttgcactgctcgtggagatgggccatgctttcctaaggtttggctcgaaccaggaagaggccctgcagtgctacctcgtcctgatctaccctggcctggtgggcgcggtgaccatggtcagctgcagcatcctggccctgacccacctccttttcgagtttaaaggtctgatggggaccagtacagtggagcagctgctggagaatgtgtgcctgcttctggcctcccgcacccgtgacgtggtcaagtctgcactgggcttcatcaaggtggcagtgactgtcatggacgtggcgcacctggccaaacatgtgcagctggtgatggaagccattgggaagctttcagatgacatgcggcggcacttccgcatgaagcttcggaacctgttcaccaagttcatccgcaagtttggatttgagctggtgaaaaggctgttgcccgaggagtaccacagagtcctggtcaacatccggaaagctgaggcccgggccaagaggcaccgagccctgagccaggctgccgtggaggaggaagaagaggaggaggaggaggaggagcccgcccagggcaaaggtgacagcattgaggagattttagctgactcagaggacgaggaggacaatgaggaggaggaaagaagccgaggcaaggagcagcggaagctggcacgacagaggagccgggcatggctgaaagagggcggtggggacgagcccctcaacttcctggatcccaaggtggcccaacgagtcctggccacgcagccagggccaggccggggcaggaagaaggaccacggcttcaaggtgagcgccgatggccggctgatcataagggaggaggcagacggcaacaagatggaggaagaggaaggtgccaaaggcgaagatgaagagatggctgacccaatggaagatgtgatcatcaggaataaaaagcaccagaagctcaagcaccagaaagaggctgaggaggaggagctggagataccccctcagtaccaagctggaggctctggcattcatcgccctgtggccaagaaggctatgcctggggctgaatacaaggccaagaaagcaaaaggtgatgtgaagaagaagccgccncccggccnnccnactgt

SEQ ID NO: 347580 - DNA, 4373 bp, Homo sapiens
  misc_feature (1)..(1): n is a, c, g, or t
nagaagaagaggaagtgaaggctacagggtatccacgtgggttctgagcgtgtttctacgtccctggaagccggtcatttaagctcattcctcgccacggcttagtcaacatgggtcgctcgggaaagttgccctctggtgtctcagctaagttgaagcgctggaagaaaggccacagcagcgacagcaaccccgccatctgccgccaccgtcaggccgcccgcagccgcttcttcagccggccgtcaggaaggagtgacctgacagtcgatgctgtgaagttacataatgagctgcagtcagggtccttgcgcttgggcaaaagcgaagccccggagacgcccatggaagaagaggcggagctggttctcaccgagaagtcctcgggtaccttcctgagtggcctttccgactgcacaaacgtcaccttcagcaaagtacagcgcttctgggagtccaactcggctgcccacaaggagatctgtgctgttctggctgctgtcactgaggtgattcgctcccagggagggaaggagacggagactgagtacttcgctgctctgatgacaacaatggaagcagtggagtccccggagtccctggccgccgttgcttacctgctgaaccttgtcctgaagcgtgttcccagccctgtgcttattaagaagttctctgatacctccaaagccttcatggatatcatgtcagctcaggccagcagcggctccacctctgtcctccgatgggtcctttcctgcctggccacccttctgcggaagcaagacctggaggcctggggctaccccgtgacccttcaggtgtaccatgggctgctgagcttcacggtgcatcccaagcccaagatccggaaggctgcccagcatggagtatgctcagtcctcaagggcagtgaattcatgtttgaaaaggcccctgcccatcatcctgctgccatttccactgccaagttctgcatccaggagattgagaagtctggaggctccaaggaggccaccaccacgctgcacatgctgacgctgctgaaggacctgctgccctgcttcccggaaggcctggtgaagagctgcagtgagactctcctcagggtcatgaccttgagccatgtgctggtgacagcctgtgccatgcaggcctttcacagcctcttccacgccaggcctggcctgagcaccctgtcagcagagctcaacgcccagatcatcacggccctgtacgactatgttcccagtgagaatgatttacaacccctgctagcctggcttaaggtcatggagaaagcccacatcaacctggtgaggttgcagtgggacctggggctaggccacctccctcgcttttttggaactgcggtgacctgcctcctttccccacactcgcaagtgctgactgctgctacgcagagcctcaaggagatcctgaaggaatgcgtggctccccacatggctgacattggctccgtgacctcctcggcctcaggccctgcccaatctgttgccaagatgttcagggcagtggaggagggcctgacgtacaaattccatgcggcctggagctccgtgttgcagctgctgtgtgtcttcttcgaggcgtgtgggagacaggcccaccctgtgatgaggaagtgcctccagtccctgtgtgacctgcgcctctcccctcatttcccccacacggcggctcttgaccaggcagtgggggctgcggtgaccagtatgggacctgaggtggtgctgcaggctgtgcctttggaaattgatggctctgaggagactctggatttcccacggagctggctgctgcctgtcatccgagaccatgttcaggaaacgcgacttggttttttcaccacctacttcttgcccctggctaacaccctgaagagcaaagccatggacctggctcaggcaggcagcacagtggaatctaagatctacgacacactccagtggcagatgtggacactcctgcctgggttctgcacaaggcctacagatgtggccatctccttcaaagggctggcacggacgctgggcatggccatcagcgagcgtccagacctgagggtcaccgtgtgccaggccctgcgcaccctcatcaccaagggctgccaggcagaggctgaccgtgctgaagtgagtcgctttgccaagaactttctgccgatcctcttcaacctgtatgggcagcccgtggcagccggggacactccagcccctcgccgggctgtgctggaaaccatcagaacttacctcaccatcactgacactcagttggtgaacagtctcctggaaaaagccagtgagaaggtgctcgaccctgccagctctgactttaccagattgtctgtcctggacctggtcgtggccttggctccgtgtgctgacgaagctgccatcagtaagctatactccaccatccggccctacctagagagcaaggcccacggggtgcagaagaaggcctaccgagtgctggaggaggtgtgtgccagtcctcagggccccggggccctcttcgtgcagagccacctggaggacctgaagaagacactgctggactcgctgcggagcacctcctcacccgccaagaggccccgtttgaagtgcctcctacacatcgtgaggaagctctcagctgaacacaaggagttcatcactgccctcatcccagaggtgatcctgtgcaccaaggaggtgtcggtgggcgcacggaagaacgcttttgcactgctcgtggagatgggccatgctttcctaaggtttggctcgaaccaggaagaggccctgcagtgctacctcgtcctgatctaccctggcctggtgggcgcggtgaccatggtcagctgcagcatcctggccctgacccacctccttttcgagtttaaaggtctgatggggaccagtacagtggagcagctgctggagaatgtgtgcctgcttctggcctcccgcacccgtgacgtggtcaagtctgcactgggcttcatcaaggtggcagtgactgtcatggacgtggcgcacctggccaaacatgtgcagctggtgatggaagccattgggaagctttcagatgacatgcggcggcacttccgcatgaagcttcggaacctgttcaccaagttcatccgcaagtttggatttgagctggtgaaaaggctgttgcccgaggagtaccacagagtcctggtcaacatccggaaagctgaggcccgggccaagaggcaccgagccctgagccaggctgccgtggaggaggaagaagaggaggaggaggaggaggagcccgcccagggcaaaggtgacagcattgaggagattttagctgactcagaggacgaggaggacaatgaggaggaggaaagaagccgaggcaaggagcagcggaagctggcacgacagaggagccgggcatggctgaaagagggcggtggggacgagcccctcaacttcctggatcccaaggtggcccaacgagtcctggccacgcagccagggccaggccggggcaggaagaaggaccacggcttcaaggtgagcgccgatggccggctgatcataagggaggaggcagacggcaacaagatggaggaagaggaaggtgccaaaggtgggcccaacgcgcttgtccattcattcaccgtgttcacttattccttcggtgatcacttgctgaggaagcgtggctaaaaacagaccagagaaactcttctctcggcagcttcctcaaactttttgagtttctcaaactttttttgagaaacattaagaaatctttttatgttgtaaccgagccatttatacaatacatatttaacttaaaggaaactatcggaaatggtacttccccttactgtgtgtgatacgctgttagtctcttctgtttttctcctcctcctccccctcctcttcctttctccttttcttccttcctctttttttttttttttaatgcaaacttggctaaggccctgaagatgatttagaggcagaaagagccagaggctgaaaccctcccaacttcccaatcccaatgtctcacattgcccgggagtccctccggtgtggcatctcggagctctctttagtctttcctggcccctctccacatatccagccattagctaagaaacacttaggtcttcgccaggcgtggtggctcacgcctgtaatcctagcactttgggaggccaaggcgcgcagatcaggaggtcaggagatcaagaccattctggctaacacggttaaaacccatctctactgaaaacacaaaaaattagctgggcgtggtcgcgggcgcctgtagtcccagctactcgggaggctgaggcaggagaatggcgtggacccaggagg

SEQ ID NO: 347581 - DNA, 314 bp, Homo sapiens
tggctgtgttcagaattcagcctctcgggttggagatttggcctgggctggtttgtttcccaggggttgttctgttctcttgaccaaaaggaggcttggaccttatcttgtgcctctggctctcaggaaggagtgacctgacagtcgatgctgtgaagttacataatgagctgcagtcagggtccttgcgcttgggcaaaagcgaagccccggagacgcccatggaagaagaggcggagctggttctcaccgagaagtcctcgggtaccttcctgagtggcctttccgactgcacaaacgtcaccttcagcaaa

SEQ ID NO: 347582 - DNA, 511 bp, Homo sapiens
gctgctcttcagggaccctctggggtgaccatctctgttctttcccacagtgttcccagccctgtgcttattaagaagttctctgatacctccaaagccttcatggatatcatgtcagctcaggccagcagcggctccacctctgtcctccgatgggttagtgtctggggtttagtttctcatctggcgactcccagagcctgtctgatttggtgatgcttagatgttccctgagaggggtttaggcaccctggggacctcagacagatgcgattttctggagtcagtgagaacctgggctcttttccctcctggccgaggctggtggcactgagggactctgactttcttccaggtcctttcctgcctggccacccttctgcggaagcaagacctggaggcctggggctaccccgtgacccttcaggtgtaccatgggctgctgagcttcacggtgcatcccaagcccaaggtgagactactagctccctagaaaatggggcaaggggac

SEQ ID NO: 347583 - DNA, 583 bp, Homo sapiens
ggctggagtgcagtggcttgatcgtagctcactgcagcttccaactcctggactgaagtgatgctgtcacttcagcctccccagtagctggaagtacaggtgcacactagcatgtctggctaatttgtaaaaatttttctagatatagggtctcactatattgcccaggattgaactcctggtctcaaggactcctcccaccttgcccttccaaagcactaggattatgggcatgagccgttgtgcctggctgggggtgaatattttgtgaaatacattgctatgtaatgatacagctttgccctctatatgaaacttgcaaatatgaactgattatgttttgagagagctgccaaaaatcatggctgttgttttagaagtgttgtcaagccattctctgggataatcttgagcagggctcttgtctgctttgattagagtgaggctgtgttatctgcctcttgaaggttctctgtcctttgcaggggagggctaggggatgagatatgccattttcttttcttttcttttcttttcttttctttgagacagagtgttgctctgttgccctggctggagtgca

SEQ ID NO: 347584 - DNA, 450 bp, Homo sapiens
ttttgggaagctactctccttttggtgatgggctgtccagtgcccgttcttccagggatttttttccaggggtgttaaatgctgataagagacaaggaatattgctgctggactgagctgggtgcagttactatctctagaagcatccatctgacttcctgttttgctggagtaggttttttggggtgggctacaattctagtaatggtagatagtttagtttgcagctgtactcaagttacttttcttttctgatttttttttcttggtatcaaaaaatcaggaaagtaaatgcccacttaatggttgggcatcttgtgctctcagccctagttcagtctccctgagggaacagtctgtacccaggtgtggcagtatccataaattgtgtactcctgctccatattgtccttgtgtgctctttttgttggctgtgtaaatcatgtgttg

SEQ ID NO: 347585 - DNA, 761 bp, Homo sapiens
gatctctaaattttgttgttgttgttttgttttgttttgtttttttgagacagggtctcgctctgtcacctaggctggagtacagtggcacaatctcggctcactgcaacctctgcctcctgggttaaagcgattctcctacctcagcttcccgagtagctgggattaatttttgttttttcagtagagatggggtttcaccagttggccaggctgctcttgaactcctgacctcaagtgatccacctgcctcagcctcccaaagtgctggtattacaggcgtgagccatggcacctggccaggatccctattttaatgttaatgctgatcagttgtgcctaaactccaaaagggagggagtacagcaaagcgtgggcaacctcccttccaatcttgaatgggaattcagttttcaggtttcctgtggcccaggagggctcagttcagttggttgcggggcttgggattttatttttggttttcaagactgattattctaaaatcataaaattttagaatgcttccccccacctcagcactttaccaccacaccccagggctcaatataatagtggagcattgtaagcaaacaaactgcaagagcagacgataaggaaaattagagtatcagaaggagaagagagaacagagcaaaagaaataggtgaagtaattaatagccaagaatcttctaaaagtaatgacacaccaaaccacaggttcgggttgctcagaccacaccatgcaggataaataccaaa

SEQ ID NO: 347586 - DNA, 647 bp, Homo sapiens
agagatgaatgaaatgataggatagaagcctggcggacatctggacagaactatgcaagagccttcctgagaatggaagccacaggagggaaaacggaacttgggaaaggaaagagtaaagtggaatttcaatgacatcatttaaatgcctggatccaaaagtgtctggacattcaatatcaaaatatttgcttctcacatcatatttcagtgatgtgagccaaatgttaccttccaccacccttttaagagtccacttgatttcagtgttccttcacttgcaaccagagttctcactgataagtgtctatatggtggttcattcctccctcagtggtatatgacaatgaaacaagaaggtatggcaggttaaaagtcatagggtaccacaacattacacactgagtcacaaaagcagctcaaagccatggtttgtggggctccacctcttgctctctggaaggcattaatacatggtgggagaaaattataagatctatattgtcacagaacttttcacataattatattgttattttatattcatttgctcctgggcttcatcaaatggagaatttcttatctctgtatcctcaaggttcaacacactacctggcacaagctaggtacataataaatgttcaagt

SEQ ID NO: 347587 - DNA, 426 bp, Homo sapiens
atttttgttgtgagagacagggccttgcagtgttgcctaggctttatttaaaaccattttccctgttaacccagtcttggtacaatggtaataaagcaaaatcaaagttcaccactctagaagaattaggcaagtgactttttctaaaacaggtatagtatcattattaaagtgaggtaacagtttttcttttgacttttttttttttttagacagagttttgctctgtcgcccaggctggagcgcaatggcgtgatcctggctcactgcaactgctgcctcccaggttcaagtgattctctcctgcctcagcctcccaagtggcaggtgcctataatcccagctacttgggaggctgaggcgggagaatcgcttgtccccaagaggcggaggttgcagtgagccaagattgcgccactgcacttc

SEQ ID NO: 347588 - DNA, 665 bp, Homo sapiens
cctttacattcaaatttcctcttattcatgaccacaggctcaccacacacatactccttggtttgttactttaagccacatggagattaagtgccattagtaaagactagtttaggaacagttttaggtgaaataaatggcactttcaaagagaaggtggatttatggagtttgtgtgtacatgcgcgtgcatgctcacgtgtgtgtggggataaatcagtaaggaagaaatcaggtggtgatagttggatgccattagtgactgggacatgttttattttacagtgttatttctcacagtttaaaagaaacattagaatcatctaatctggccccctatattacagctgagggaggcccaaagagatgaagaatcttggctactaggcagcgtaactagaacttggatatacttattacttgtgcatccatggtgttcccccatcatcactctcttctctacctaaccacttaagaagtaaatggaggaattgagataatgcagtgtgaaggatgataaaaataggttaagagtgggtccaatcaggcattaaaaaaaatagttatgaaaggtaaattaggatcagttgcaagagtttggggacctaaaacaagcaaaaattagttgatttattaaaatatccactgtttgctcttagcatcca

SEQ ID NO: 347589 - DNA, 954 bp, Homo sapiens
agaaatattgaaatcaaagagtcgagaaagcaaaatgtaaaggtggaaacctatgcacttaaacccaactcttggcaaggtaaagcatccgcggaaacagcaggctctcgaagtgaggaggctgcagccggcgctagggcgcaggcgcagaagctcagcgtctcgctccctgctcccggccccagagggttatcgcgagtcttggaataaacttgctcgtgcgatggccaaaaagaccaaagaaaacagagggacttttcccagttggtgatatggagcaagtgccatcagcaggcagactcgtgcagatcaccgtgacagagggatatgatttgaaaggttttaaaggagatactccagttacctttattcgagcagaattcaatcaagtggttctgggagactctgcaaaaattactgtttctccagaaggaagtgcaaaatacaacttcactagcagttttgagtttaatcctgaaggaggaatcacttcagatgacctcgctcacaaacctgtgttcttaactgtgactgaagttttaccaaaggaaaagaaacagaaagaagagaagaccttaattcttggtcaggctgtggtggaccttcttcccttactggaaggacagagttcatttcaaacaacagttccattgcaccctgtgcaaggctcacccttagaaactcctagatcaagtgctaagcagtgcagtcttgaagttaaagtattagtggcagagcctttactgaccacagcccagatctcagggggcaatctactgaaggtcacgttggaggctgcttactctgtgcctgaatccttcattccaacaggtcctgggcagaactacatggtcggtctgcaagttccatcacttggagagaaggactatcccattttatttaagaatggaactctgaagcttggaggggaaagggaacctgttccccggccca

SEQ ID NO: 347590 - DNA, 690 bp, Homo sapiens
agaaatattgaaatcaaagagtcgagaaagcaaaatgtaaaggtggaaacctatgcacttaaacccaactcttggcaaggtaaagcatccgcggaaacagcaggctctcgaagtgaggaggctgcagccggcgctagggcgcaggcgcagaagctcagcgtctcgctccctgctcccggccccagagggttatcgcgagtcttggaataaacttgctcgtgcgatggccaaaaagaccaaagaaaacagagggacttttcccagttggtgatatggagcaagtgccatcagcaggcagactcgtgcagatcaccgtgacagagggatatgatttgaaaggttttaaaggagatactccagttacctttattcgagcagaattcaatcaagtggttctgggagactctgcaaaaattactgtttctccagaaggaagtgcaaaatacaacttcactagcagttttgagtttaatcctgaaggaggaatcacttcagatgacctcgctcacaaacctgtgttcttaactgtgactgaagttttaccaaaggaaaagaaacagaaagaagagaagaccttaattcttggtcaggctgtggtggaccttcttcccttactggaaggtcagatgtgtgctttgcccaaaagcagaaatggaaaagctcataaaacttagccccagagagatatag

SEQ ID NO: 347591 - DNA, 587 bp, Homo sapiens
ccaggcggcacatacatgatcccagacaccgaagtaacctctgtctcactcctccacttccagcaagggatggaaaacaaactgaatctggctcaagtgaatgctcactggaaggcttactggaaaacttactggaaggatgtgaggacatgttcgggaatctatttgcagaaaacatattcagccctgtccaccacagccagctggctgaagagctcaaaaggcaagaaatcagcaagagagagagatgaagcatgagaaatgagcaaaaaacacccagcacatcataatcttggacagtttagcagtacatgaaaatagatggtcctcgccccaagggactgcagtaaccctgaataaacaggatgtctctcacttttagcagttctttctgtgctagtattggggaaatatatttttggctgcatgcaaaatggtaaaagacatctattaagaaaatgaaaacaatgcttctgttttagacgaagcttttgaaggtttaaggatcacctatttattgacaaaattgtttccgtggcttaaaaataaaatacaaacaaataaaaaagtggcctcgttggcctcat

SEQ ID NO: 347592 - DNA, 410 bp, Homo sapiens
tcagacaacagtgtccatgtgcagggcattcaatcatgcaacctttattgaccgagcaaatcttatgcaccagacaatagagtagatgctagagacatacgataaataaaacatatgtcatttgtattaaaatacataacttaaattctgcctagcacatatctttaaagagtctactgtatgggtgtgtattacacagtattctgtgtaataccatgggagtacatattaataatacagatgtttaatatatagtattaagcccctaaaaggaaacataaattaaacctaatcatttgcaagccaatggcatgagtctaataaatgaaatattataattaattcacatctacgtacctaaggttggagaaagagtcatagagaagacaaaaaaactactatcaattgat

SEQ ID NO: 347593 - DNA, 1501 bp, Homo sapiens
ggcgccgcggggccgcgcgtccaggcggcgagcggaagtgggtgtgagagcggaagtggccggctagagccgggggctgggcggggaccgggcttgtcggtgaagcggcagtggcggcggcggcggcggctcggcaggcgggttcaggcttcgggggccagccgccgccatgatcctgctggaggtgaacaaccgcatcatcgaggagacgctcgcgctcaagttcgagaacgcggccgccggaaacaaaccggaagcagtagaagtaacatttgcagatttcgatggggtcctctatcatatttcaaatcctaatggagacaaaacaaaagtgatggtcagtatttctttgaaattctacaaggaacttcaggcacatggtgctgatgagttattaaagagggtgtacgggagtttcttggtaaatccagaatcaggatacaatgtctctttgctatatgaccttgaaaatcttccggcatccaaggattccattgtgcatcaagctggcatgttgaagcgaaattgttttgcctctgtctttgaaaaatacttccaattccaagaagagggcaaggaaggagagaacagggcagttatccattatagggatgatgagaccatgtatgttgagtctaaaaaggacagagtcacagtagtcttcagcacagtgtttaaggatgacgacgatgtggtcattggaaaggtgttcatgcaggagttcaaagaaggacgcagagccagccacacagccccacaggtcctctttagccacagggaacctcctctggagctgaaagacacagacgccgctgtgggtgacaacattggctacattacctttgtgctgttccctcgtcacaccaatgccagtgctcgagacaacaccatcaacctgatccacacgttccgggactacctgcactaccacatcaagtgctctaaggcctatattcacacacgtatgcgggcgaaaacgtctgacttcctcaaggtgctgaaccgcgcacgcccagatgccgagaaaaaagaaatgaaaacaatcacggggaagacgttttcatcccgctaatcttgggaataagaggaggaagcggctggcaactgaaggctggaacacttgctactggataatcgtagcttttaatgttgcgcctcttcaggttcttaagggattctccgttttggttccattttgtacacgtttggaaaataatctgcagaaacgagctgtgcttgcaaagacttcatagttcccaagaattaaaaaaaaaaaagaattccacttgatcaacttaattccttttctttatcttccctccctcacttcccttttctcccaccctcttttccaagctgtttcgctttgcaatatattactggtaatgagttgcaggataatgcagtcataacttgttttctcctaagtatttgagttcaaaactcctgtatctaaagaaatacggttggggtcattaataaagaaaatctttctatctta

SEQ ID NO: 347594 - DNA, 1377 bp, Homo sapiens
ggcggctcaggtctcgggggcagaaacaaaccggaagcagtagaagtaacatttgcagatttcgatggggtcctctatcatatttcaaatcctaatggagacaaaacaaaagtgatggtcagtatttctttgaaattctacaaggaacttcaggcacatggtgctgatgagttattaaagagggtgtacgggagtttcttggtaaatccagaatcaggatacaatgtctctttgctatatgaccttgaaaatcttccggcatccaaggattccattgtgcatcaagctggcatgttgaagcgaaattgttttgcctctgtctttgaaaaatacttccaattccaagaagagggcaaggaaggagagaacagggcagttatccattatagggatgatgagaccatgtatgttgagtctaaaaaggacagagtcacagtagtcttcagcacagtgtttaaggatgacgacgatgtggtcattggaaaggtgttcatgcaggagttcaaagaaggacgcagagccagccacacagccccacaggtcctctttagccacagggaacctcctctggagctgaaagacacagacgccgctgtgggtgacaacattggctacattacctttgtgctgttccctcgtcacaccaatgccagtgctcgagacaacaccatcaacctgatccacacgttccgggactacctgcactaccacatcaagtgctctaaggcctatattcacacacgtatgcgggcgaaaacgtctgacttcctcaaggtgctgaaccgcgcacgcccagatgccgagaaaaaagaaataaatttaaaaaattttaaaaatataacgagggataaatttttggtggtgatagtgtcccagtacaaaaaggctgtaagatagtcaaccacagtagtcacctatgtctgtgcctcccttctttattggggacatgtgggctggaacagcagatttcagctacatatatgaacaaatcctttattattattataattatttttttgcgtgaaagtgttacatattctttcacttgtatgtacagagaggtttttctgaatatttattttaagggttaaatcacttttgcttgtgtttattactgcttgaggttgagccttttgagtatttaaaaaatatataccaacagaactactctcccaaggaaaatattgccaccatttgtagaccacgtaaccttcaagtatgtgctacttttttgtccctgtatctaactcaaatcaggaactgtattttttttaatgatttgcttttgaaacttgaagtcttgaaaacagtgtgatgcaattactgctgttctagcccccaagtttcaaaagcaaatccaggttggcgatgaatatc

SEQ ID NO: 347595 - DNA, 1004 bp, Homo sapiens
  misc_feature (91)..(91): n is a, c, g, or t
  misc_feature (101)..(101): n is a, c, g, or t
  misc_feature (111)..(111): n is a, c, g, or t
  misc_feature (114)..(114): n is a, c, g, or t
  misc_feature (124)..(124): n is a, c, g, or t
  misc_feature (126)..(126): n is a, c, g, or t
  misc_feature (129)..(130): n is a, c, g, or t
  misc_feature (133)..(133): n is a, c, g, or t
  misc_feature (142)..(142): n is a, c, g, or t
  misc_feature (144)..(145): n is a, c, g, or t
  misc_feature (148)..(148): n is a, c, g, or t
  misc_feature (151)..(151): n is a, c, g, or t
  misc_feature (153)..(153): n is a, c, g, or t
  misc_feature (155)..(155): n is a, c, g, or t
  misc_feature (159)..(159): n is a, c, g, or t
  misc_feature (168)..(168): n is a, c, g, or t
  misc_feature (173)..(173): n is a, c, g, or t
  misc_feature (191)..(191): n is a, c, g, or t
  misc_feature (969)..(969): n is a, c, g, or t
  misc_feature (972)..(972): n is a, c, g, or t
  misc_feature (983)..(983): n is a, c, g, or t
  misc_feature (991)..(991): n is a, c, g, or t
cccgccaccccccccgtgttttgggcccccttctttccgccgccgttcttgcgggctttcttttcggcgtccctctgcccctccttttccntgcggtactncccggtgttnttnttttccgctngncgnncgntccccctgngnnccnacntntncccncatcgtggngattngccttagggcactgatgnggtaggcagtattccggacgggtggatcagttgatgtgtttctcgagcactggcattggtgtgacgagggacagcacaaaggtaatgtaccaatgttgtcacccacagcggcgtctgtgtctttcagctccagaggaggttccctgtggctaaagaggacctgtggggctgtgtggctggctctgcgtccttctttgaactcctgcatgaacacctttccaatgaccacatcgtcgtcatccttaaacactgtgctgaagactactgtgactctgtcctttttagactcaacatacatggtctcatcatccctataatggataactgccctgttctctccttccttgccctcttcttggaattggaagtatttttcaaagacagaggcaaaacaatttcgcttcaacatgccagcttgatgcacaatggaatccttggatgccggaagattttcaaggtcatatagcaaagagacattgtatcctgattctggatttaccaagaaactcccgtacaccctctttaataactcatcagcaccatgtgcctgaagttccttgtagaatttcaaagaaatactgaccatcacttttgttttgtctccattaggatttgaaatatgatagaggaccccatcgaaatctgcaaatgttacttctactgcttccggtttgtttccggcggccgcgttctcgaacttgagcgcgagcgtctcctcgatgatgcggttgttcacctccagcaggatcatggcggcggctggcccccgaagcctganccncctccgacccnccccgccnccactgccgcttc

SEQ ID NO: 347596 - DNA, 854 bp, Homo sapiens
  misc_feature (62)..(62): n is a, c, g, or t
gctttaagtgtaaaactcaaagcgtttatgcaaaaaagaaacactaggagcaaacggagcancttgtaacgatttacagatttcgatggggtcctctatcatatttcaaatcctaatggagacaaaacaaaagtgatggtcagtatttctttgaaattctacaaggaacttcaggcacatggtgctgatgagttattaaagagggtgtacgggagtttcttggtaaatccagaatcaggatacaatgtctctttgctatatgaccttgaaaatcttccggcatccaaggattccattgtgcatcaagctggcatgttgaagcgaaattgttttgcctctgtctttgaaaaatacttccaattccaagaagagggcaaggaaggagagaacagggcagttatccattatagggatgatgagaccatgtatgtttagcctacaagggacagatttatagtgttcttcagcacatgtctaaaggctacaataacttggttattacgaaatgtattaaaccaacagcctcacgtatagaccccttacctttcctaatcgattcaattattattttattctcaataggcaatattcttttatatgctcataaatatataaaacaatttgtcaaggtcaattgattttcactttaaagcgtccgttgttttcttctataaacgatccttgcatatcgctgttcgtcgaccaccactgcgtttgattcatctgtttattgtcgcattcattaatacggtagtcttgataccgtcgagtttttttgcttttccatctcacatattatatacacaatttgttttagcggttagaatgcgcgtcgaccattgtatccagcgaat

SEQ ID NO: 347597 - DNA, 266 bp, Homo sapiens
caagtaataaaaatcagaccctttcttaatccagtcttctaataggttgtctcaacattcatggccagaggaattgaaaggcaccgtgtcatccttgaatagaacagctatgttatactgctttaaaaaggaggtttaaagtggaaaaactgaacagcctttttaccctgtgattcagtggcatgtctcaaattctgaggcatttagcaggaccccaaagtgagaaccaggtagtagacattggacatatatttttattcaccatt

SEQ ID NO: 347598 - DNA, 251 bp, Homo sapiens
gactcttaggtaaataattctagaggcttcaagaaaccatggtctttcttcatcaagccactgtcccccatccctccctatagcagagatgaatatttgtttccagaattgctcaccttcctgcttccctgcagggcctgggtcaatcccagggtgtatgttcccaaccgcccttgatgacctctctgatgaaagacagcaaagctgtctttctagaccatgacgagtgccagcaaagatcctgtagagta

SEQ ID NO: 347599 - DNA, 1559 bp, Homo sapiens
  misc_feature (1507)..(1507): n is a, c, g, or t
  misc_feature (1520)..(1520): n is a, c, g, or t
  misc_feature (1525)..(1525): n is a, c, g, or t
  misc_feature (1528)..(1529): n is a, c, g, or t
  misc_feature (1531)..(1531): n is a, c, g, or t
  misc_feature (1535)..(1535): n is a, c, g, or t
  misc_feature (1538)..(1538): n is a, c, g, or t
  misc_feature (1540)..(1540): n is a, c, g, or t
  misc_feature (1544)..(1544): n is a, c, g, or t
ggcgccgcggggccgcgcgtccaggcggcgagcggaagtgggtgtgagagcggaagtggccggctagagccgggggctgggcggggaccgggcttgtcggtgaagcggcagtggcggcggcggcggcggctcggcaggcgggttcaggcttcgggggccagccgccgccatgatcctgctggaggtgaacaaccgcatcatcgaggagacgctcgcgctcaagttcgagaacgcggccgccggaaacaaaccggaagcagtagaagtaacatttgcagatttcgatggggtcctctatcatatttcaaatcctaatggagacaaaacaaaagtgatggtcagtatttctttgaaattctacaaggaacttcaggcacatggtgctgatgagttattaaagagggtgtacgggagtttcttggtaaatccagaatcaggatacaatgtctctttgctatatgaccttgaaaatcttccggcatccaaggattccattgtgcatcaagctggcatgttgaagcgaaattgttttgcctctgtctttgaaaaatacttccaattccaagaagagggcaaggaaggagagaacagggcagttatccattatagggatgatgagaccatgtatgttgagtctaaaaaggacagagtcacagtagtcttcagcacagtgtttaaggatgacgacgatgtggtcattggaaaggtgttcatgcaggagttcaaagaaggacgcagagccagccacacagccccacaggtcctctttagccacagggaacctcctctggagctgaaagacacagacgccgctgtgggtgacaacattggctacattacctttgtgctgttccctcgtcacaccaatgccagtgctcgagacaacaccatcaacctgatccacacgttccgggactacctgcactaccacatcaagtgctctaaggcctatattcacacacgtatgcgggcgaaaacgtctgacttcctcaaggtgctgaaccgcgcacgcccagatgccgagaaaaaagaaatgaaaacaatcacggggaagacgttttcatcccgctaatcttgggaataagaggaggaagcggctggcaactgaaggctggaacacttgctactggataatcgtagcttttaatgttgcgcctcttcaggttcttaagggattctccgttttggttccattttgtacacgtttggaaaataatctgcagaaacgagctgtgcttgcaaagacttcatagttcccaagaattaaaaaaaaaaaagaattccacttgatcaacttaattccttttctttatcttccctccctcacttcccttttctcccaccctcttttccaagctgtttcgctttgcaatatattactggtaatgagttgcaggataatgcagtcataacttgttttctcctaagtatttgagttcaaaactcctgtatctaaagaaatacggttggggtcattaataaagaaaatctttctatcttaaaaaanaacacacaaaacncaaanaannanaacnaananacanacacaacacacaaca

SEQ ID NO: 347600 - DNA, 1418 bp, Homo sapiens
ggcgccgcggggccgcgcgtccaggcggcgagcggaagtgggtgtgagagcggaagtggccggctagagccgggggctgggcggggaccgggcttgtcggtgaagcggcagtggcggcggcggcggcggctcggcaggcgggttcaggcttcgggggccagccgccgccatgatcctgctggaggtgaacaaccgcatcatcgaggagacgctcgcgctcaagttcgagaacgcggccgccggaaacaaaccggaagcagtagaagtaacatttgcagatttcgatggggtcctctatcatatttcaaatcctaatggagacaaaacaaaagtgatggtcagtatttctttgaaattctacaaggaacttcaggcacatggtgctgatgagttattaaagagggtgtacgggagtttcttggtaaatccagaatcaggatacaatgtctctttgctatatgaccttgaaaatcttccggcatccaaggattccattgtgcatcaagctggcatgttgaagcgaaattgttttgcctctgtctttgaaaaatacttccaattccaagaagagggcaaggaaggagagaacagggcagttatccattatagggatgatgagaccatgtatgttgagtctaaaaaggacagagtcacagtagtcttcagcacagtgtttaaggatgacgacgatgtggtcattggaaaggtgttcatgcaggagttcaaagaaggacgcagagccagccacacagccccacaggtcctctttagccacagggaacctcctctggagctgaaagacacagacgccgctgtgggtgacaacattggctacattacctttgtgctgttccctcgtcacaccaatgccagtgctcgagacaacaccatcaacctgatccacacgttccgggactacctgcactaccacatcaagtgctctaaggcctatattcacacacgtatgcgggcgaaaacgtctgacttcctcaaggtgctgaaccgcgcacgcccagatgccgagaaaaaagaaatgaaaacaatcacggggaagacgttttcatcccgctaatcttgggaataagaggaggaagcggctggcaactgaaggctggaacacttgctactggataatcgtagcttttaatgttgcgcctcttcaggttcttaagggattctccgttttggttccattttgtacacgtttggaaaataatctgcagaaacgagctgtgcttgcaaagacttcatagttcccaagaattaaaaaaaaaaaagaattccacttgatcaacttaattccttttctttatcttccctccctcacttcccttttctcccaccctcttttccaagctgtttcgctttgcaatatattactggtaatgagttgcaaagcgaaccagcttaaaaaaaaa

SEQ ID NO: 347601 - DNA, 1607 bp, Homo sapiens
ggcgccgcggggccgcgcgtccaggcggcgagcggaagtgggtgtgagagcggaagtggccggctagagccgggggctgggcggggaccgggcttgtcggtgaagcggcagtggcggcggcggcggcggctcggcaggcgggttcaggcttcgggggccagccgccgccatgatcctgctggaggtgaacaaccgcatcatcgaggagacgctcgcgctcaagttcgagaacgcggccgccggaaacaaaccggaagcagtagaagtaacatttgcagatttcgatggggtcctctatcatatttcaaatcctaatggagacaaaacaaaagtgatggtcagtatttctttgaaattctacaaggaacttcaggcacatggtgctgatgagttattaaagagggtgtacgggagtttcttggtaaatccagaatcaggatacaatgtctctttgctatatgaccttgaaaatcttccggcatccaaggattccattgtgcatcaagctggcatgttgaagcgaaattgttttgcctctgtctttgaaaaatacttccaattccaagaagagggcaaggaaggagagaacagggcagttatccattatagggatgatgagaccatgtatgttgagtctaaaaaggacagagtcacagtagtcttcagcacagtgtttaaggatgacgacgatgtggtcattggaaaggtgttcatgcaggagttcaaagaaggacgcagagccagccacacagccccacaggtcctctttagccacagggaacctcctctggagctgaaagacacagacgccgctgtgggtgacaacattggctacattacctttgtgctgttccctcgtcacaccaatgccagtgctcgagacaacaccatcaacctgatccacacgttccgggactacctgcactaccacatcaagtgctctaaggcctatattcacacacgtatgcgggcgaaaacgtctgacttcctcaaggtgctgaaccgcgcacgcccagatgccgagaaaaaagaaatgaaaacaatcacggggaagacgttttcatcccgctaatcttgggaataagaggaggaagcggctggcaactgaaggctggaacacttgctactggataatcgtagcttttaatgttgcgcctcttcaggttcttaagggattctccgttttggttccattttgtacacgtttggaaaataatctgcagaaacgagctgtgcttgcaaagacttcatagttcccaagaattaaaaaaaaaaaactaatacaaaatttgtggggggctgggccaaaaagtttctaaccctccgtggggggcgggcccttgtgcttgacatgcgcaaaggtgcaaaaaacgcggaaaagtggggggtctccccaaaaaaagggggggggaacaggtgcgcgaaaaacccgggtggcgcgggcccgggggccaccgaggccagtgcaccacaccgcccgcgccggcgcgacacacacagcgagacagaacgacaaaacaggcagagaaacaaaccaccgacgaaacaaagacaacaacaaaaaaaagagacacacaaacgaagaagaaacaaaaccaaaaaaagac

SEQ ID NO: 347602 - DNA, 1446 bp, Homo sapiens
  misc_feature (1)..(1): n is a, c, g, or t
  misc_feature (61)..(61): n is a, c, g, or t
ngccacccccccccccccaccacgacccaaaaaccttacggctaggtacgaggctgggtgntgggcggcggcggctcggcaggcgggttcaggcttcgggggccagccgccgccatgatcctgctggaggtgaacaaccgcatcatcgaggagacgctcgcgctcaagttcgagaacgcggccgccggaaacaaaccggaagcagtagaagtaacatttgcagatttcgatggggtcctctatcatatttcaaatcctaatggagacaaaacaaaagtgatggtcagtatttctttgaaattctacaaggaacttcaggcacatggtgctgatgagttattaaagagggtgtacgggagtttcttggtaaatccagaatcaggatacaatgtctctttgctatatgaccttgaaaatcttccggcatccaaggattccattgtgcatcaagctggcatgttgaagcgaaattgttttgcctctgtctttgaaaaatacttccaattccaagaagagggcaaggaaggagagaacagggcagttatccattatagggatgatgagaccatgtatgttgagtctaaaaaggacagagtcacagtagtcttcagcacagtgtttaaggatgacgacgatgtggtcattggaaaggtgttcatgcaggagttcaaagaaggacgcagagccagccacacagccccacaggtcctctttagccacagggaacctcctctggagctgaaagacacagacgccgctgtgggtgacaacattggctacattacctttgtgctgttccctcgtcacaccaatgccagtgctcgagacaacaccatcaacctgatccacacgttccgggactacctgcactaccacatcaagtgctctaaggcctatattcacacacgtatgcgggcgaaaacgtctgacttcctcaaggtgctgaaccgcgcacgcccagatgccgagaaaaaagaaatgaaaacaatcacggggaagacgttttcatcccgctaatcttgggaataagaggaggaagcggctggcaactgaaggctggaacacttgctactggataatcgtagcttttaatgttgcgcctcttcaggttcttaagggattctccgttttggttccattttgtacacgtttggaaaataatctgcagaaacgagctgtgcttgcaaagacttcatagttcccaagaattaaaaaaaaaaaagaattccacttgatcaacttaattccttttctttatcttccctccctcacttcccttttctcccaccctcttttccaagctgtttcgctttgcaatatattactggtaatgagttgcaggataatgcagtcataacttgttttctcctaagtatttgagttcaaaactcctgtatctaaagaaatacggttggggtcattaataaagaaaatctttctatctta

SEQ ID NO: 347603 - DNA, 1275 bp, Homo sapiens
  misc_feature (7)..(7): n is a, c, g, or t
cggtccnttcggcgccgagcacaaccggaagcagtagaagtaacatttgcagatttcgatggggtcctctatcatatttcaaatcctaatggagacaaaacaaaagtgatggtcagtatttctttgaaattctacaaggaacttcaggcacatggtgctgatgagttattaaagagggtgtacgggagtttcttggtaaatccagaatcaggatacaatgtctctttgctatatgaccttgaaaatcttccggcatccaaggattccattgtgcatcaagctggcatgttgaagcgaaattgttttgcctctgtctttgaaaaatacttccaattccaagaagagggcaaggaaggagagaacagggcagttatccattatagggatgatgagaccatgtatgttgagtctaaaaaggacagagtcacagtagtcttcagcacagtgtttaaggatgacgacgatgtggtcattggaaaggtgttcatgcaggagttcaaagaaggacgcagagccagccacacagccccacaggtcctctttagccacagggaacctcctctggagctgaaagacacagacgccgctgtgggtgacaacattggctacattacctttgtgctgttccctcgtcacaccaatgccagtgctcgagacaacaccatcaacctgatccacacgttccgggactacctgcactaccacatcaagtgctctaaggcctatattcacacacgtatgcgggcgaaaacgtctgacttcctcaaggtgctgaaccgcgcacgcccagatgccgagaaaaaagaaatgaaaacaatcacggggaagacgttttcatcccgctaatcttgggaataagaggaggaagcggctggcaactgaaggctggaacacttgctactggataatcgtagcttttaatgttgcgcctcttcaggttcttaagggattctccgttttggttccattttgtacacgtttggaaaataatctgcagaaacgagctgtgcttgcaaagacttcatagttcccaagaattaaaaaaaaaaaagaattccacttgatcaacttaattccttttctttatcttccctccctcacttcccttttctcccaccctcttttccaagctgtttcgctttgcaatatattactggtaatgagttgcaggataatgcagtcataacttgttttctcctaagtatttgagttcaaaactcctgtatctaaagaaatacggttggggtcattaataaagaaaatctttctatctta

SEQ ID NO: 347604 - DNA, 1281 bp, Homo sapiens
ggcggctcaggtctcgggggcagaaacaaaccggaagcagtagaagtaacatttgcagatttcgatggggtcctctatcatatttcaaatcctaatggagacaaaacaaaagtgatggtcagtatttctttgaaattctacaaggaacttcaggcacatggtgctgatgagttattaaagagggtgtacgggagtttcttggtaaatccagaatcaggatacaatgtctctttgctatatgaccttgaaaatcttccggcatccaaggattccattgtgcatcaagctggcatgttgaagcgaaattgttttgcctctgtctttgaaaaatacttccaattccaagaagagggcaaggaaggagagaacagggcagttatccattatagggatgatgagaccatgtatgttgagtctaaaaaggacagagtcacagtagtcttcagcacagtgtttaaggatgacgacgatgtggtcattggaaaggtgttcatgcaggagttcaaagaaggacgcagagccagccacacagccccacaggtcctctttagccacagggaacctcctctggagctgaaagacacagacgccgctgtgggtgacaacattggctacattacctttgtgctgttccctcgtcacaccaatgccagtgctcgagacaacaccatcaacctgatccacacgttccgggactacctgcactaccacatcaagtgctctaaggcctatattcacacacgtatgcgggcgaaaacgtctgacttcctcaaggtgctgaaccgcgcacgcccagatgccgagaaaaaagaaatgaaaacaatcacggggaagacgttttcatcccgctaatcttgggaataagaggaggaagcggctggcaactgaaggctggaacacttgctactggataatcgtagcttttaatgttgcgcctcttcaggttcttaagggattctccgttttggttccattttgtacacgtttggaaaataatctgcagaaacgagctgtgcttgcaaagacttcatagttcccaagaattaaaaaaaaaaaagaattccacttgatcaacttaattccttttctttatcttccctccctcacttcccttttctcccaccctcttttccaagctgtttcgctttgcaatatattactggtaatgagttgcaggataatgcagtcataacttgttttctcctaagtatttgagttcaaaactcctgtatctaaagaaatacggttggggtcattaataaagaaaatctttctatctta

SEQ ID NO: 347605 - DNA, 1144 bp, Homo sapiens
ggcgccgcggggccgcgcgtccaggcggcgagcggaagtgggtgtgagagcggaagtggccggctagagccgggggctgggcggggaccgggcttgtcggtgaagcggcagtggcggcggcggcggcggctcggcaggcgggttcaggcttcgggggccagccgccgccatgatcctgctggaggtgaacaaccgcatcatcgaggagacgctcgcgctcaagttcgagaacgcggccgccggaaacaaaccggaagcagtagaagtaacatttgcagatttcgatggggtcctctatcatatttcaaatcctaatggagacaaaacaaaagtgatggtcagtatttctttgaaattctacaaggaacttcaggcacatggtgctgatgagttattaaagagggtgtacgggagtttcttggtaaatccagaatcaggatacaatgtctctttgctatatgaccttgaaaatcttccggcatccaaggattccattgtgcatcaagctggcatgttgaagcgaaattgttttgcctctgtctttgaaaaatacttccaattccaagaagagggcaaggaaggagagaacagggcagttatccattatagggatgatgagaccatgtatgttgagtctaaaaaggacagagtcacagtagtcttcagcacagtgtttaaggatgacgacgatgtggtcattggaaaggtgttcatgcaggagttcaaagaaggacgcagagccagccacacagccccacaggtcctctttagccacagggaacctcctctggagctgaaagacacagacgccgctgtgggtgacaacattggctacattacctttgtgctgttccctcgtcacaccaatgccagtgctcgagacaacaccatcaacctgatccacacgttccgggactacctgcactaccacatcaagtgctctaaggcctatattcacacacgtatgcgggcgaaaacgtctgacttcctcaaggtgctgaaccgcgcacgcccagatgccgagaaaaaagaaatgaaaacaatcaccttctgtttggcagagttgggccccagaaaggagaagcaggagacaaacagctgcatccaccctgaaaaccagattatgttactaatgggggaagac

SEQ ID NO: 347606 - DNA, 1368 bp, Homo sapiens
ggcgccgcggggccgcgcgtccaggcggcgagcggaagtgggtgtgagagcggaagtggccggctagagccgggggctgggcggggaccgggcttgtcggtgaagcggcagtggcggcggcggcggcggctcggcaggcgggttcaggcttcgggggccagccgccgccatgatcctgctggaggtgaacaaccgcatcatcgaggagacgctcgcgctcaagttcgagaacgcggccgccggaaacaaaccggaagcagtagaagtaacatttgcagatttcgatggggtcctctatcatatttcaaatcctaatggagacaaaacaaaagtgatggtcagtatttctttgaaattctacaaggaacttcaggcacatggtgctgatgagttattaaagagggtgtacgggagtttcttggtaaatccagaatcaggatacaatgtctctttgctatatgaccttgaaaatcttccggcatccaaggattccattgtgcatcaagctggcatgttgaagcgaaattgttttgcctctgtctttgaaaaatacttccaattccaagaagagggcaaggaaggagagaacagggcagttatccattatagggatgatgagaccatgtatgttgagtctaaaaaggacagagtcacagtagtcttcagcacagtgtttaaggatgacgacgatgtggtcattggaaaggtgttcatgcaggagttcaaagaaggacgcagagccagccacacagccccacaggtcctctttagccacagggaacctcctctggagctgaaagacacagacgccgctgtgggtgacaacattggctacattacctttgtgctgttccctcgtcacaccaatgccagtgctcgagacaacaccatcaacctgatccacacgttccgggactacctgcactaccacatcaagtgctctaaggcctatattcacacacgtatgcgggcgaaaacgtctgacttcctcaaggtgctgaaccgcgcacgcccagatgccgagaaaaaagaaataaaaaaggggaaaaaaaattgttgtggggccggccatcggggccttgaggagagaaggtttcaaagagcccatcccggtggggtcgcggggggcccaagggaaacgtgcacagtgggaccattgggcacaaacagcgtgggctcataagggggagactcgtgggcaagggacaaacggggtcggggttttcctcaacaaataaaaaaccgcgcgggcgggcaacccccgagcggtcctggaccaaatccaaagagggagcgtcaggagggccaatacgggacctatccaacggggggccaacggagggtcgataacaaattagcgcgccgggg

SEQ ID NO: 347607 - DNA, 3389 bp, Homo sapiens
ggcgccgcggggccgcgcgtccaggcggcgagcggaagtgggtgtgagagcggaagtggccggctagagccgggggctgggcggggaccgggcttgtcggtgaagcggcagtggcggcggcggcggcggctcggcaggcgggttcaggcttcgggggccagccgccgccatgatcctgctggaggtgaacaaccgcatcatcgaggagacgctcgcgctcaagttcgagaacgcggccgccggaaacaaaccggaagcagtagaagtaacatttgcagatttcgatggggtcctctatcatatttcaaatcctaatggagacaaaacaaaagtgatggtcagtatttctttgaaattctacaaggaacttcaggcacatggtgctgatgagttattaaagagggtgtacgggagtttcttggtaaatccagaatcaggcagtcttctaataggttgtctcaacattcatggccagaggaattgaaaggcaccgtgtcatccttgaatagaacagctatgttatactgctttaaaaaggaggtttaaagtggaaaaactgaacagcctttttaccctgtgattcagtggcatgtctcaaattctgaggcatttagcaggaccccaaagtgagaaccaggtagtaagaccattggaacataatattttttactcaactattacaactttggtaccttgattagaaaagtcttctaagaaggaagttctctgtcactcttaacagcagttacttgtgctagcttatttcatcacctcacctattttttcagacagtctcattctgttgcccaggctggagtgcagtggtacagtcatagctcactgcagcctcctccaaatcttgggctcaagcaatcctcccgctttagcctctccggtagctgggaactacaggcacatgccaccatacccaattaatttttttaatattttgtagaaacagagtctcactgtctgctgcccatactgccaaaacagagtaaggaggtctcaaactcctagccttgagcaatctacccacctcagcctccgcctcccagagagttgggatcacaggcatgagccaccatacccagcaccttttttttttttaatctccaaattggcgggatgaatgtgtcacagaaataaaagccaagataacactgtaggcttttggcaaaatcaaggtattaaaagaaagaaacaaacagatctagaacagaaaaatcatgtccaaagtcttgggcatgcttgtcacagccaacatcctgacatggaaagtttatgtttctgtccctgggcctccttctacctcccactaaatcatagacattgccagattgcagaccctgtcttcatagaagtgtgaaatgtaaaagtgtgtgaaagtagtgtctcaaccaggtgcagtggctcacacctgtaatcccagcactttggggaggccaaggtgagtgaattgcttgagctcagaagttcaggaccagcctgggcagcataatgagatacctgtctctataaaaaatacagaaattagccaggcatggtggcagccacctgtaataccaggtactcaggtggctgaagcacgagaatcgcttgaacccaggaggcagaggttgcagtgagctgagattgcgccactgccctctagcctaggcgacagagcaagattcagtctcgagaaaaaaaaaaaaagaccgtagagtctctcctcctcttttttaatgggtttatctaggcacgtttggaaaactcagcaagttatactagatttttacttctcttcatcctcagtatattctgttcatcatgttagaagccttacttaaagacagactttaccttagctatagttttatttgctcttatttggcttcctaaaactagcaaacctcagctctaaatcttttcttttttaatctaaccttgtaatctgtgtgcttatttggttttcaagtacccaaaatagaatgatgattgatattatttaatactggagtgcctctccagtattaaataaaatgtgctaagcattatctagagcaaagatttagcccatcctcccgaagagcccatgctcaacaaaaaacacagacctcagccgggcgcggtggcttatgcctgtaatcccagcactatcggaggccagggcgggcggatcacctgcattcaggagttcaagaccagcatgaccaacatggagaaaccccgtctctgctaaaagtacaaaattagccaggcctggtggcgcatgcctgtaatcccagctgcttgggaggctgaggcaggagaatcgcttgaacctgggaggcggatgttgtggatacaatgtctctttgctatatgaccttgaaaatcttccggcatccaaggattccattgtgcatcaagctggcatgttgaagcgaaattgttttgcctctgtctttgaaaaatacttccaattccaagaagagggcaaggaaggagagaacagggcagttatccattatagggatgatgagaccatgtatgttgagtctaaaaaggacagagtcacagtagtcttcagcacagtgtttaaggatgacgacgatgtggtcattggaaaggtgttcatgcaggagttcaaagaaggacgcagagccagccacacagccccacaggtcctctttagccacagggaacctcctctggagctgaaagacacagacgccgctgtgggtgacaacattggctacattacctttgtgctgttccctcgtcacaccaatgccagtgctcgagacaacaccatcaacctgatccacacgttccgggactacctgcactaccacatcaagtgctctaaggcctatattcacacacgtatgcgggcgaaaacgtctgacttcctcaaggtgctgaaccgcgcacgcccagatgccgagaaaaaagaaatgaaaacaatcacggggaagacgttttcatcccgctaatcttgggaataagaggaggaagcggctggcaactgaaggctggaacacttgctactggataatcgtagcttttaatgttgcgcctcttcaggttcttaagggattctccgttttggttccattttgtacacgtttggaaaataatctgcagaaacgagctgtgcttgcaaagacttcatagttcccaagaattaaaaaaaaaaaagaattccacttgatcaacttaattccttttctttatcttccctccctcacttcccttttctcccaccctcttttccaagctgtttcgctttgcaatatattactggtaatgagttgcaggataatgcagtcataacttgttttctcctaagtatttgagttcaaaactcctgtatctaaagaaatacggttggggtcattaataaagaaaatctttctatctta

SEQ ID NO: 347608 - DNA, 3247 bp, Homo sapiens
  misc_feature (34)..(34): n is a, c, g, or t
ccggtacgggcaagattctgtccctcttcaccgntggtcagatccaagcaagaaaactttattagattattaagatacgatcctaactattgtttgacctgatagaggctggaaattttgtctccacattgtttgagtggctccttaccactgaggtcctaaaattttttttttttttcctgatagtttcgctcttgttgcccaaacgggagtgcagtggtgcgatcttggctcaccgcaacctccgcctttcctgggttcaagtgattctcctgcctaagcctcccggaagccagcagtcttctaataggttgtctcaacattcatggccagaggaattgaaaggcaccgtgtcatccttgaatagaacagctatgttatactgctttaaaaaggaggtttaaagtggaaaaactgaacagcctttttaccctgtgattcagtggcatgtctcaaattctgaggcatttagcaggaccccaaagtgagaaccaggtagtaagaccattggaacataatattttttactcaactattacaactttggtaccttgattagaaaagtcttctaagaaggaagttctctgtcactcttaacagcagttacttgtgctagcttatttcatcacctcacctattttttcagacagtctcattctgttgcccaggctggagtgcagtggtacagtcatagctcactgcagcctcctccaaatcttgggctcaagcaatcctcccgctttagcctctccggtagctgggaactacaggcacatgccaccatacccaattaatttttttaatattttgtagaaacagagtctcactgtctgctgcccatactgccaaaacagagtaaggaggtctcaaactcctagccttgagcaatctacccacctcagcctccgcctcccagagagttgggatcacaggcatgagccaccatacccagcaccttttttttttttaatctccaaattggcgggatgaatgtgtcacagaaataaaagccaagataacactgtaggcttttggcaaaatcaaggtattaaaagaaagaaacaaacagatctagaacagaaaaatcatgtccaaagtcttgggcatgcttgtcacagccaacatcctgacatggaaagtttatgtttctgtccctgggcctccttctacctcccactaaatcatagacattgccagattgcagaccctgtcttcatagaagtgtgaaatgtaaaagtgtgtgaaagtagtgtctcaaccaggtgcagtggctcacacctgtaatcccagcactttggggaggccaaggtgagtgaattgcttgagctcagaagttcaggaccagcctgggcagcataatgagatacctgtctctataaaaaatacagaaattagccaggcatggtggcagccacctgtaataccaggtactcaggtggctgaagcacgagaatcgcttgaacccaggaggcagaggttgcagtgagctgagattgcgccactgccctctagcctaggcgacagagcaagattcagtctcgagaaaaaaaaaaaaagaccgtagagtctctcctcctcttttttaatgggtttatctaggcacgtttggaaaactcagcaagttatactagatttttacttctcttcatcctcagtatattctgttcatcatgttagaagccttacttaaagacagactttaccttagctatagttttatttgctcttatttggcttcctaaaactagcaaacctcagctctaaatcttttcttttttaatctaaccttgtaatctgtgtgcttatttggttttcaagtacccaaaatagaatgatgattgatattatttaatactggagtgcctctccagtattaaataaaatgtgctaagcattatctagagcaaagatttagcccatcctcccgaagagcccatgctcaacaaaaaacacagacctcagccgggcgcggtggcttatgcctgtaatcccagcactatcggaggccagggcgggcggatcacctgcattcaggagttcaagaccagcatgaccaacatggagaaaccccgtctctgctaaaagtacaaaattagccaggcctggtggcgcatgcctgtaatcccagctgcttgggaggctgaggcaggagaatcgcttgaacctgggaggcggatgttgtggatacaatgtctctttgctatatgaccttgaaaatcttccggcatccaaggattccattgtgcatcaagctggcatgttgaagcgaaattgttttgcctctgtctttgaaaaatacttccaattccaagaagagggcaaggaaggagagaacagggcagttatccattatagggatgatgagaccatgtatgttgagtctaaaaaggacagagtcacagtagtcttcagcacagtgtttaaggatgacgacgatgtggtcattggaaaggtgttcatgcaggagttcaaagaaggacgcagagccagccacacagccccacaggtcctctttagccacagggaacctcctctggagctgaaagacacagacgccgctgtgggtgacaacattggctacattacctttgtgctgttccctcgtcacaccaatgccagtgctcgagacaacaccatcaacctgatccacacgttccgggactacctgcactaccacatcaagtgctctaaggcctatattcacacacgtatgcgggcgaaaacgtctgacttcctcaaggtgctgaaccgcgcacgcccagatgccgagaaaaaagaaatgaaaacaatcacggggaagacgttttcatcccgctaatcttgggaataagaggaggaagcggctggcaactgaaggctggaacacttgctactggataatcgtagcttttaatgttgcgcctcttcaggttcttaagggattctccgttttggttccattttgtacacgtttggaaaataatctgcagaaacgagctgtgcttgcaaagacttcatagttcccaagaattaaaaaaaaaaaagaattccacttgatcaacttaattccttttctttatcttccctccctcacttcccttttctcccaccctcttttccaagctgtttcgctttgcaatatattactggtaatgagttgcaggataatgcagtcataacttgttttctcctaagtatttgagttcaaaactcctgtatctaaagaaatacggttggggtcattaataaagaaaatctttctatctta

SEQ ID NO: 347609 - DNA, 1413 bp, Homo sapiens
gggacgacataggctaggtacagctggtgtgagtcaccgcgactgtcggtgaagcggcagtggcggcggccagccgccgccatgatcctgctggaggtgaacaaccgcatcatcgaggagacgctcgcgctcaagttcgagaacgcggccgccggaaacaaaccggaagcagtagaagtaacatttgcagatttcgatggggtcctctatcatatttcaaatcctaatggagacaaaacaaaagtgatggtcagtatttctttgaaattctacaaggaacttcaggcacatggtgctgatgagttattaaagagggtgtacgggagtttcttggtaaatccagaatcaggatacaatgtctctttgctatatgaccttgaaaatcttccggcatccaaggattccattgtgcatcaagctggcatgttgaagcgaaattgttttgcctctgtctttgaaaaatacttccaattccaagaagagggcaaggaaggagagaacagggcagttatccattatagggatgatgagaccatgtatgttgagtctaaaaaggacagagtcacagtagtcttcagcacagtgtttaaggatgacgacgatgtggtcattggaaaggtgttcatgcaggagttcaaagaaggacgcagagccagccacacagccccacaggtcctctttagccacagggaacctcctctggagctgaaagacacagacgccgctgtgggtgacaacattggctacattacctttgtgctgttccctcgtcacaccaatgccagtgctcgagacaacaccatcaacctgatccacacgttccgggactacctgcactaccacatcaagtgctctaaggcctatattcacacacgtatgcgggcgaaaacgtctgacttcctcaaggtgctgaaccgcgcacgcccagatgccgagaaaaaagaaatgaaaacaatcacggggaagacgttttcatcccgctaatcttgggaataagaggaggaagcggctggcaactgaaggctggaacacttgctactggataatcgtagcttttaatgttgcgcctcttcaggttcttaagggattctccgttttggttccattttgtacacgtttggaaaataatctgcagaaacgagctgtgcttgcaaagacttcatagttcccaagaattaaaaaaaaaaaagaattccacttgatcaacttaattccttttctttatcttccctccctcacttcccttttctcccaccctcttttccaagctgtttcgctttgcaatatattactggtaatgagttgcaggataatgcagtcataacttgttttctcctaagtatttgagttcaaaactcctgtatctaaagaaatacggttggggtcattaataaagaaaatctttctatctta

SEQ ID NO: 347610 - DNA, 1356 bp, Homo sapiens
tcggggaggagtagcttacggctaggtacgaggcctgggtgttacaaccgcatcatcgaggagacgctcgcgctcaagttcgagaacgcggccgccggaaacaaaccggaagcagtagaagtaacatttgcagatttcgatggggtcctctatcatatttcaaatcctaatggagacaaaacaaaagtgatggtcagtatttctttgaaattctacaaggaacttcaggcacatggtgctgatgagttattaaagagggtgtacgggagtttcttggtaaatccagaatcaggatacaatgtctctttgctatatgaccttgaaaatcttccggcatccaaggattccattgtgcatcaagctggcatgttgaagcgaaattgttttgcctctgtctttgaaaaatacttccaattccaagaagagggcaaggaaggagagaacagggcagttatccattatagggatgatgagaccatgtatgttgagtctaaaaaggacagagtcacagtagtcttcagcacagtgtttaaggatgacgacgatgtggtcattggaaaggtgttcatgcaggagttcaaagaaggacgcagagccagccacacagccccacaggtcctctttagccacagggaacctcctctggagctgaaagacacagacgccgctgtgggtgacaacattggctacattacctttgtgctgttccctcgtcacaccaatgccagtgctcgagacaacaccatcaacctgatccacacgttccgggactacctgcactaccacatcaagtgctctaaggcctatattcacacacgtatgcgggcgaaaacgtctgacttcctcaaggtgctgaaccgcgcacgcccagatgccgagaaaaaagaaatgaaaacaatcacggggaagacgttttcatcccgctaatcttgggaataagaggaggaagcggctggcaactgaaggctggaacacttgctactggataatcgtagcttttaatgttgcgcctcttcaggttcttaagggattctccgttttggttccattttgtacacgtttggaaaataatctgcagaaacgagctgtgcttgcaaagacttcatagttcccaagaattaaaaaaaaaaaagaattccacttgatcaacttaattccttttctttatcttccctccctcacttcccttttctcccaccctcttttccaagctgtttcgctttgcaatatattactggtaatgagttgcaggataatgcagtcataacttgttttctcctaagtatttgagttcaaaactcctgtatctaaagaaatacggttggggtcattaataaagaaaatctttctatctta

SEQ ID NO: 347611 - DNA, 1271 bp, Homo sapiens
taggctaggtacgaggccggtgttaatcggccgagggtacatttgcagatttcgatggggtcctctatcatatttcaaatcctaatggagacaaaacaaaagtgatggtcagtatttctttgaaattctacaaggaacttcaggcacatggtgctgatgagttattaaagagggtgtacgggagtttcttggtaaatccagaatcaggatacaatgtctctttgctatatgaccttgaaaatcttccggcatccaaggattccattgtgcatcaagctggcatgttgaagcgaaattgttttgcctctgtctttgaaaaatacttccaattccaagaagagggcaaggaaggagagaacagggcagttatccattatagggatgatgagaccatgtatgttgagtctaaaaaggacagagtcacagtagtcttcagcacagtgtttaaggatgacgacgatgtggtcattggaaaggtgttcatgcaggagttcaaagaaggacgcagagccagccacacagccccacaggtcctctttagccacagggaacctcctctggagctgaaagacacagacgccgctgtgggtgacaacattggctacattacctttgtgctgttccctcgtcacaccaatgccagtgctcgagacaacaccatcaacctgatccacacgttccgggactacctgcactaccacatcaagtgctctaaggcctatattcacacacgtatgcgggcgaaaacgtctgacttcctcaaggtgctgaaccgcgcacgcccagatgccgagaaaaaagaaatgaaaacaatcacggggaagacgttttcatcccgctaatcttgggaataagaggaggaagcggctggcaactgaaggctggaacacttgctactggataatcgtagcttttaatgttgcgcctcttcaggttcttaagggattctccgttttggttccattttgtacacgtttggaaaataatctgcagaaacgagctgtgcttgcaaagacttcatagttcccaagaattaaaaaaaaaaaagaattccacttgatcaacttaattccttttctttatcttccctccctcacttcccttttctcccaccctcttttccaagctgtttcgctttgcaatatattactggtaatgagttgcaggataatgcagtcataacttgttttctcctaagtatttgagttcaaaactcctgtatctaaagaaatacggttggggtcattaataaagaaaatctttctatctta

SEQ ID NO: 347612 - DNA, 2015 bp, Homo sapiens
gggacgacataggctaggtacagctggtgtgagtcaccgcgactgtcggtgaagcggcagtggcggcggcggcggcggctcggcaggcgggttcaggcttcgggggccagccgccgccatgatcctgctggaggtgaacaaccgcatcatcgaggagacgctcgcgctcaagttcgagaacgcggccgccggaaacaaaccggaagcagtagaagtaacatttgcagatttcgatggggtcctctatcatatttcaaatcctaatggagacaaaacaaaagtgatggtcagtatttctttgaaattctacaaggaacttcaggcacatggtgctgatgagttattaaagagggtgtacgggagtttcttggtaaatccagaatcaggcagtcttctaataggttgtctcaacattcatggccagaggaattgaaaggcaccgtgtcatccttgaatagaacagctatgttatactgctttaaaaaggaggtttaaagtggaaaaactgaacagcctttttaccctgtgattcagtggcatgtctcaaattctgaggcatttagcaggaccccaaagtgagaaccagtacccaaaatagaatgatgattgatattatttaatactggagtgcctctccagtattaaataaaatgtgctaagcattatctagagcaaagatttagcccatcctcccgaagagcccatgctcaacaaaaaacacagacctcagccgggcgcggtggcttatgcctgtaatcccagcactatcggaggccagggcgggcggatcacctgcattcaggagttcaagaccagcatgaccaacatggagaaaccccgtctctgctaaaagtacaaaattagccaggcctggtggcgcatgcctgtaatcccagctgcttgggaggctgaggcaggagaatcgcttgaacctgggaggcggatgttgtggatacaatgtctctttgctatatgaccttgaaaatcttccggcatccaaggattccattgtgcatcaagctggcatgttgaagcgaaattgttttgcctctgtctttgaaaaatacttccaattccaagaagagggcaaggaaggagagaacagggcagttatccattatagggatgatgagaccatgtatgttgagtctaaaaaggacagagtcacagtagtcttcagcacagtgtttaaggatgacgacgatgtggtcattggaaaggtgttcatgcaggagttcaaagaaggacgcagagccagccacacagccccacaggtcctctttagccacagggaacctcctctggagctgaaagacacagacgccgctgtgggtgacaacattggctacattacctttgtgctgttccctcgtcacaccaatgccagtgctcgagacaacaccatcaacctgatccacacgttccgggactacctgcactaccacatcaagtgctctaaggcctatattcacacacgtatgcgggcgaaaacgtctgacttcctcaaggtgctgaaccgcgcacgcccagatgccgagaaaaaagaaatgaaaacaatcacggggaagacgttttcatcccgctaatcttgggaataagaggaggaagcggctggcaactgaaggctggaacacttgctactggataatcgtagcttttaatgttgcgcctcttcaggttcttaagggattctccgttttggttccattttgtacacgtttggaaaataatctgcagaaacgagctgtgcttgcaaagacttcatagttcccaagaattaaaaaaaaaaaagaattccacttgatcaacttaattccttttctttatcttccctccctcacttcccttttctcccaccctcttttccaagctgtttcgctttgcaatatattactggtaatgagttgcaggataatgcagtcataacttgttttctcctaagtatttgagttcaaaactcctgtatctaaagaaatacggttggggtcattaataaagaaaatctttctatctta

SEQ ID NO: 347613 - DNA, 1647 bp, Homo sapiens
gggacgacataggctaggtacagctggtgtgagtcaccgcgactgtcggtgaagcggcagtggcggcggcggcggcggctcggcaggcgggttcaggcttcgggggccagccgccgccatgatcctgctggaggtgaacaaccgcatcatcgaggagacgctcgcgctcaagttcgagaacgcggccgccggaaacaaaccggaagcagtagaagtaacatttgcagatttcgatggggtcctctatcatatttcaaatcctaatggagacaaaacaaaagtgatggtcagtatttctttgaaattctacaaggaacttcaggcacatggtgctgatgagttattaaagagggtgtacgggagtttcttggtaaatccagaatcaggcagtcttctaataggttgtctcaacattcatggccagaggaattgaaaggcaccgtgtcatccttgaatagaacagctatgttatactgctttaaaaaggaggtttaaagtggaaaaactgaacagcctttttaccctgtgattcagtggcatgtctcaaattctgaggcatttagcaggaccccaaagtgagaaccatacaatgtctctttgctatatgaccttgaaaatcttccggcatccaaggattccattgtgcatcaagctggcatgttgaagcgaaattgttttgcctctgtctttgaaaaatacttccaattccaagaagagggcaaggaaggagagaacagggcagttatccattatagggatgatgagaccatgtatgttgagtctaaaaaggacagagtcacagtagtcttcagcacagtgtttaaggatgacgacgatgtggtcattggaaaggtgttcatgcaggagttcaaagaaggacgcagagccagccacacagccccacaggtcctctttagccacagggaacctcctctggagctgaaagacacagacgccgctgtgggtgacaacattggctacattacctttgtgctgttccctcgtcacaccaatgccagtgctcgagacaacaccatcaacctgatccacacgttccgggactacctgcactaccacatcaagtgctctaaggcctatattcacacacgtatgcgggcgaaaacgtctgacttcctcaaggtgctgaaccgcgcacgcccagatgccgagaaaaaagaaatgaaaacaatcacggggaagacgttttcatcccgctaatcttgggaataagaggaggaagcggctggcaactgaaggctggaacacttgctactggataatcgtagcttttaatgttgcgcctcttcaggttcttaagggattctccgttttggttccattttgtacacgtttggaaaataatctgcagaaacgagctgtgcttgcaaagacttcatagttcccaagaattaaaaaaaaaaaagaattccacttgatcaacttaattccttttctttatcttccctccctcacttcccttttctcccaccctcttttccaagctgtttcgctttgcaatatattactggtaatgagttgcaggataatgcagtcataacttgttttctcctaagtatttgagttcaaaactcctgtatctaaagaaatacggttggggtcattaataaagaaaatctttctatctta

SEQ ID NO: 347614 - DNA, 1029 bp, Homo sapiens
atagctgttcctagaggtaccccgtgctgcagctatggcatgttgaagcgaaattgttttgcctctgtctttgaaaaatacttccaattccaagaagagggcaaggaaggagagaacagggcagttatccattatagggatgatgagaccatgtatgttgagtctaaaaaggacagagtcacagtagtcttcagcacagtgtttaaggatgacgacgatgtggtcattggaaaggtgttcatgcaggagttcaaagaaggacgcagagccagccacacagccccacaggtcctctttagccacagggaacctcctctggagctgaaagacacagacgccgctgtgggtgacaacattggctacattacctttgtgctgttccctcgtcacaccaatgccagtgctcgagacaacaccatcaacctgatccacacgttccgggactacctgcactaccacatcaagtgctctaaggcctatattcacacacgtatgcgggcgaaaacgtctgacttcctcaaggtgctgaaccgcgcacgcccagatgccgagaaaaaagaaatgaaaacaatcacggggaagacgttttcatcccgctaatcttgggaataagaggaggaagcggctggcaactgaaggctggaacacttgctactggataatcgtagcttttaatgttgcgcctcttcaggttcttaagggattctccgttttggttccattttgtacacgtttggaaaataatctgcagaaacgagctgtgcttgcaaagacttcatagttcccaagaattaaaaaaaaaaaagaattccacttgatcaacttaattccttttctttatcttccctccctcacttcccttttctcccaccctcttttccaagctgtttcgctttgcaatatattactggtaatgagttgcaggataatgcagtcataacttgttttctcctaagtatttgagttcaaaactcctgtatctaaagaaatacggttggggtcattaataaagaaaatctttctatctta

SEQ ID NO: 347615 - DNA, 1835 bp, Homo sapiens
  misc_feature (957)..(957): n is a, c, g, or t
caaggaatcttaacttaaggcgacttaaggtgattacggagagtgtcactcagtaggatatgggtgcggttagcccataggagtaacgttttgccgataagtgtataaatagctttagagacttatgtgtagtcaggtagtccggacgtgtgatcagttaatggtgtgtcgagcactggcattggtgtgacgagggacagcacaaaggtaatgtaccaatgttgtcacccacagcggcgtctgtgtctttcagctccagaggaggttccctgtggctaaagaggacctgtggggctgtgtggctggctctgcgtccttctttgaactcctgcatgaacacctttccaatgaccacatcgtcgtcatccttaaacactgtgctgaagactactgtgactctgtcctttttagactcaacatacatggtctcatcatccctataatggataactgccctgttctctccttccttgccctcttcttggaattggaagtatttttcaaagacagaggcaaaacaatttcgcttcaacatgccagcttgatgcacaatggaatccttggatgccggaagattttcaaggtcatatagcaaagagacattgtatcctgattctggatttaccaagaaactcccgtacaccctctttaataactcatcagcaccatgtgcctgaagttccttgtagaatttcaaagaaatactgaccatcacttttgttttgtctccattaggatttgaaatatgatagaggaccccatcgaaatctgcaaatgttacttctactgcttccggtttgtttccggcggccgcgttctcgaacttgagcgcgagcgtctcctcgatgatgcggttgttcacctccagcaggatcatggcggcggctggccccaggggaaggagaaacaagggccggtgagggtgggtaagggaggcaaggacggagggagaggccntgtatgttgagtctaaaaaggacagagtcacagtagtcttcagcacagtgtttaaggatgacgacgatgtggtcattggaaaggtgttcatgcaggagttcaaagaaggacgcagagccagccacacagccccacaggtcctctttagccacagggaacctcctctggagctgaaagacacagacgccgctgtgggtgacaacattggctacattacctttgtgctgttccctcgtcacaccaatgccagtgctcgagacaacaccatcaacctgatccacacgttccgggactacctgcactaccacatcaagtgctctaaggcctatattcacacacgtatgcgggcgaaaacgtctgacttcctcaaggtgctgaaccgcgcacgcccagatgccgagaaaaaagaaatgaaaacaatcacggggaagacgttttcatcccgctaatcttgggaataagaggaggaagcggctggcaactgaaggctggaacacttgctactggataatcgtagcttttaatgttgcgcctcttcaggttcttaagggattctccgttttggttccattttgtacacgtttggaaaataatctgcagaaacgagctgtgcttgcaaagacttcatagttcccaagaattaaaaaaaaaaaagaattccacttgatcaacttaattccttttctttatcttccctccctcacttcccttttctcccaccctcttttccaagctgtttcgctttgcaatatattactggtaatgagttgcaggataatgcagtcataacttgttttctcctaagtatttgagttcaaaactcctgtatctaaagaaatacggttggggtcattaataaagaaaatctttctatctta

SEQ ID NO: 347616 - DNA, 1727 bp, Homo sapiens
  misc_feature (1)..(1): n is a, c, g, or t
  misc_feature (50)..(50): n is a, c, g, or t
  misc_feature (54)..(54): n is a, c, g, or t
  misc_feature (849)..(849): n is a, c, g, or t
ngtggaaaggccgagccactgagggaggcaggagccggacggtggacagntganggtttttcgagcactggcattggtgtgacgagggacagcacaaaggtaatgtaccaatgttgtcacccacagcggcgtctgtgtctttcagctccagaggaggttccctgtggctaaagaggacctgtggggctgtgtggctggctctgcgtccttctttgaactcctgcatgaacacctttccaatgaccacatcgtcgtcatccttaaacactgtgctgaagactactgtgactctgtcctttttagactcaacatacatggtctcatcatccctataatggataactgccctgttctctccttccttgccctcttcttggaattggaagtatttttcaaagacagaggcaaaacaatttcgcttcaacatgccagcttgatgcacaatggaatccttggatgccggaagattttcaaggtcatatagcaaagagacattgtatcctgattctggatttaccaagaaactcccgtacaccctctttaataactcatcagcaccatgtgcctgaagttccttgtagaatttcaaagaaatactgaccatcacttttgttttgtctccattaggatttgaaatatgatagaggaccccatcgaaatctgcaaatgttacttctactgcttccggtttgtttccggcggccgcgttctcgaacttgagcgcgagcgtctcctcgatgatgcggttgttcacctccagcaggatcatggcggcggctggccccaggggaaggagaaacaagggccggtgagggtgggtaagggaggcaaggacggagggagaggccntgtatgttgagtctaaaaaggacagagtcacagtagtcttcagcacagtgtttaaggatgacgacgatgtggtcattggaaaggtgttcatgcaggagttcaaagaaggacgcagagccagccacacagccccacaggtcctctttagccacagggaacctcctctggagctgaaagacacagacgccgctgtgggtgacaacattggctacattacctttgtgctgttccctcgtcacaccaatgccagtgctcgagacaacaccatcaacctgatccacacgttccgggactacctgcactaccacatcaagtgctctaaggcctatattcacacacgtatgcgggcgaaaacgtctgacttcctcaaggtgctgaaccgcgcacgcccagatgccgagaaaaaagaaatgaaaacaatcacggggaagacgttttcatcccgctaatcttgggaataagaggaggaagcggctggcaactgaaggctggaacacttgctactggataatcgtagcttttaatgttgcgcctcttcaggttcttaagggattctccgttttggttccattttgtacacgtttggaaaataatctgcagaaacgagctgtgcttgcaaagacttcatagttcccaagaattaaaaaaaaaaaagaattccacttgatcaacttaattccttttctttatcttccctccctcacttcccttttctcccaccctcttttccaagctgtttcgctttgcaatatattactggtaatgagttgcaggataatgcagtcataacttgttttctcctaagtatttgagttcaaaactcctgtatctaaagaaatacggttggggtcattaataaagaaaatctttctatctta

SEQ ID NO: 347617 - DNA, 1386 bp, Homo sapiens
ggcgccgcggggccgcgcgtccaggcggcgagcggaagtgggtgtgagagcggaagtggccggctagagccgggggctgggcggggaccgggcttgtcggtgaagcggcagtggcggcggcggcggcggctcggcaggcgggttcaggcttcgggggccagccgccgccatgatcctgctggaggtgaacaaccgcatcatcgaggagacgctcgcgctcaagttcgagaacgcggccgccggaaacaaaccggaagcagtagaagtaacatttgcagatttcgatggggtcctctatcatatttcaaatcctaatggagacaaaacaaaagtgatggtcagtatttctttgaaattctacaaggaacttcaggcacatggtgctgatgagttattaaagagggtgtacgggagtttcttggtaaatccagaatcaggatacaatgtctctttgctatatgaccttgaaaatcttccggcatccaaggattccattgtgcatcaagctggtatgttgagtctaaaaaggacagagtcacagtagtcttcagcacagtgtttaaggatgacgacgatgtggtcattggaaaggtgttcatgcaggagttcaaagaaggacgcagagccagccacacagccccacaggtcctctttagccacagggaacctcctctggagctgaaagacacagacgccgctgtgggtgacaacattggctacattacctttgtgctgttccctcgtcacaccaatgccagtgctcgagacaacaccatcaacctgatccacacgttccgggactacctgcactaccacatcaagtgctctaaggcctatattcacacacgtatgcgggcgaaaacgtctgacttcctcaaggtgctgaaccgcgcacgcccagatgccgagaaaaaagaaatgaaaacaatcacggggaagacgttttcatcccgctaatcttgggaataagaggaggaagcggctggcaactgaaggctggaacacttgctactggataatcgtagcttttaatgttgcgcctcttcaggttcttaagggattctccgttttggttccattttgtacacgtttggaaaataatctgcagaaacgagctgtgcttgcaaagacttcatagttcccaagaattaaaaaaaaaaaagaattccacttgatcaacttaattccttttctttatcttccctccctcacttcccttttctcccaccctcttttccaagctgtttcgctttgcaatatattactggtaatgagttgcaggataatgcagtcataacttgttttctcctaagtatttgagttcaaaactcctgtatctaaagaaatacggttggggtcattaataaagaaaatctttctatctta

SEQ ID NO: 347618 - DNA, 1640 bp, Homo sapiens
  misc_feature (762)..(762): n is a, c, g, or t
ggaaagcactggattctctttccaccatctgtcagctctcagtatctggagagtaggaggagtggctgatttctgccctatcatctacttcctggcttaagacattttatgagaaaaacattttcacgcaatacagctgaaagtttgaccaagccatatttctttcagtaagtgccatggtggtgtagcagccatatccaggcttcaggaccaaattctacactcacatggtctcatcatccctataatggataactgccctgttctctccttccttgccctcttcttggaattggaagtatttttcaaagacagaggcaaaacaatttcgcttcaacatgccagcttgatgcacaatggaatccttggatgccggaagattttcaaggtcatatagcaaagagacattgtatcctgattctggatttaccaagaaactcccgtacaccctctttaataactcatcagcaccatgtgcctgaagttccttgtagaatttcaaagaaatactgaccatcacttttgttttgtctccattaggatttgaaatatgatagaggaccccatcgaaatctgcaaatgttacttctactgcttccggtttgtttccggcggccgcgttctcgaacttgagcgcgagcgtctcctcgatgatgcggttgttcacctccagcaggatcatggcggcggctggccccaggggaaggagaaacaagggccggtgagggtgggtaagggaggcaaggacggagggagaggccntgtatgttgagtctaaaaaggacagagtcacagtagtcttcagcacagtgtttaaggatgacgacgatgtggtcattggaaaggtgttcatgcaggagttcaaagaaggacgcagagccagccacacagccccacaggtcctctttagccacagggaacctcctctggagctgaaagacacagacgccgctgtgggtgacaacattggctacattacctttgtgctgttccctcgtcacaccaatgccagtgctcgagacaacaccatcaacctgatccacacgttccgggactacctgcactaccacatcaagtgctctaaggcctatattcacacacgtatgcgggcgaaaacgtctgacttcctcaaggtgctgaaccgcgcacgcccagatgccgagaaaaaagaaatgaaaacaatcacggggaagacgttttcatcccgctaatcttgggaataagaggaggaagcggctggcaactgaaggctggaacacttgctactggataatcgtagcttttaatgttgcgcctcttcaggttcttaagggattctccgttttggttccattttgtacacgtttggaaaataatctgcagaaacgagctgtgcttgcaaagacttcatagttcccaagaattaaaaaaaaaaaagaattccacttgatcaacttaattccttttctttatcttccctccctcacttcccttttctcccaccctcttttccaagctgtttcgctttgcaatatattactggtaatgagttgcaggataatgcagtcataacttgttttctcctaagtatttgagttcaaaactcctgtatctaaagaaatacggttggggtcattaataaagaaaatctttctatctta

SEQ ID NO: 347619 - DNA, 907 bp, Homo sapiens
gcttatcctcatggattttgttcctctcaggtatgttgagtctaaaaaggacagagtcacagtagtcttcagcacagtgtttaaggatgacgacgatgtggtcattggaaaggtgttcatgcaggagttcaaagaaggacgcagagccagccacacagccccacaggtcctctttagccacagggaacctcctctggagctgaaagacacagacgccgctgtgggtgacaacattggctacattacctttgtgctgttccctcgtcacaccaatgccagtgctcgagacaacaccatcaacctgatccacacgttccgggactacctgcactaccacatcaagtgctctaaggcctatattcacacacgtatgcgggcgaaaacgtctgacttcctcaaggtgctgaaccgcgcacgcccagatgccgagaaaaaagaaatgaaaacaatcacggggaagacgttttcatcccgctaatcttgggaataagaggaggaagcggctggcaactgaaggctggaacacttgctactggataatcgtagcttttaatgttgcgcctcttcaggttcttaagggattctccgttttggttccattttgtacacgtttggaaaataatctgcagaaacgagctgtgcttgcaaagacttcatagttcccaagaattaaaaaaaaaaaagaattccacttgatcaacttaattccttttctttatcttccctccctcacttcccttttctcccaccctcttttccaagctgtttcgctttgcaatatattactggtaatgagttgcaggataatgcagtcataacttgttttctcctaagtatttgagttcaaaactcctgtatctaaagaaatacggttggggtcattaataaagaaaatctttctatctta

SEQ ID NO: 347620 - DNA, 975 bp, Homo sapiens
  misc_feature (951)..(951): n is a, c, g, or t
ggcgccgcggggccgcgcgtccaggcggcgagcggaagtgggtgtgagagcggaagtggccggctagagccgggggctgggcggggaccgggcttgtcggtgaagcggcagtggcggcggcggcggcggctcggcaggcgggttcaggcttcgggggccagccgccgccatgatcctgctggaggtgaacaaccgcatcatcgaggagacgctcgcgctcaagttcgagaacgcggccgccggaaacaaaccggaagcagtagaagtaacatttgcagatttcgatggggtcctctatcatatttcaaatcctaatggagacaaaacaaaagtgatggtcagtatttctttgaaattctacaaggaacttcaggcacatggtgctgatgagttattaaagagggtgtacgggagtttcttggtaaatccagaatcaggatacaatgtctctttgctatatgaccttgaaaatcttccggcatccaaggattccattgtgcatcaagctggcatgttgaagcgaaattgttttgcctctgtctttgaaaaatacttccaattccaagaagagggcaaggaaggagagaacagggcagttatccattatagggatgatgagaccatgtatgttgagtctaaaaaggacagagtcacagtagtcttcagcacagtgtttaaggatgacgacgatgtggtcattggaaaggtgttcatgcaggagttcaaagaaggacgcagagccagccacacagccccacaggtcctctttagccacagggaacctcctctggagctgaaagacacagacgccgctgtgggtgacaacattggctacattacctttgtgctgttccctcgtcacaccaatgccagtgctcgagacaacaccatcaacctgatccacacgttccgggactacctgcactaccacatcaagtgctctaagcctantaccacagcacggtgcatgacaca

SEQ ID NO: 347621 - DNA, 850 bp, Homo sapiens
cgtgggtgacttaccaggatccttaggaaattcgctcgtcgtggtcattggaaaggtgttcatgcaggagttcaaagaaggacgcagagccagccacacagccccacaggtcctctttagccacagggaacctcctctggagctgaaagacacagacgccgctgtgggtgacaacattggctacattacctttgtgctgttccctcgtcacaccaatgccagtgctcgagacaacaccatcaacctgatccacacgttccgggactacctgcactaccacatcaagtgctctaaggcctatattcacacacgtatgcgggcgaaaacgtctgacttcctcaaggtgctgaaccgcgcacgcccagatgccgagaaaaaagaaatgaaaacaatcacggggaagacgttttcatcccgctaatcttgggaataagaggaggaagcggctggcaactgaaggctggaacacttgctactggataatcgtagcttttaatgttgcgcctcttcaggttcttaagggattctccgttttggttccattttgtacacgtttggaaaataatctgcagaaacgagctgtgcttgcaaagacttcatagttcccaagaattaaaaaaaaaaaagaattccacttgatcaacttaattccttttctttatcttccctccctcacttcccttttctcccaccctcttttccaagctgtttcgctttgcaatatattactggtaatgagttgcaggataatgcagtcataacttgttttctcctaagtatttgagttcaaaactcctgtatctaaagaaatacggttggggtcattaataaagaaaatctttctatctta

SEQ ID NO: 347622 - DNA, 1188 bp, Homo sapiens
ggcgccgcggggccgcgcgtccaggcggcgagcggaagtgggtgtgagagcggaagtggccggctagagccgggggctgggcggggaccgggcttgtcggtgaagcggcagtggcggcggcggcggcggctcggcaggcgggttcaggcttcgggggccagccgccgccatgatcctgctggaggtgaacaaccgcatcatcgaggagacgctcgcgctcaagttcgagaacgcggccgccggaaacaaaccggaagcagtagaagtaacatttgcagatttcgatggggtcctctatcatatttcaaatcctaatggagacaaaacaaaagtgatggtcagtatttctttgaaattctacaaggaacttcaggcacatggtgctgatgagttattaaagagggtgtacgggagtttcttggtaaatccagaatcaggatacaatgtctctttgctatatgaccttgaaaatcttccggcatccaaggattccattgtgcatcaagctggcatgttgaagcgaaattgttttgcctctgtctttgaaaaatacttccaattccaagaagagggcaaggaaggagagaacagggcagttatccattatagggatgatgagaccatgtatgttgagtctaaaaaggacagagtcacagtagtcttcagcacagtgtttaaggatgacgacgatgtggtcattggaaaggtgttcatgcaggagttcaaagaaggacgcagagccagccacacagccccacaggtcctctttagccacagggaacctcctctggagctgaaagacacagacgccgctgtgggtgacaacattggctacattacctttgtgctgttccctcgtcacaccaatgccagtgctcgagacaacaccatcaacctgatccacatgcaccactcacgtgtgacctactgttaacctcagaataatccatgaagtaggagctatacgctcattcgctttacaggggaggaaactgagggctggaatgattaaacagtttgtcccaacttccacccactggaaatgattaagccgggaatagaacagagctgtgaactctgctgggcacgggattggcttctcaggacctgtctaagtttgaccattggtctgtcttccatatcagattcctttcaggctacacacaacttacctggtctctattttca

SEQ ID NO: 347623 - DNA, 829 bp, Homo sapiens
taaaactatttattaatttaaaatatccacacaaaaaccacgacgtcagagtaacaagaggacacttaccagccacacagccccacaggtcctctttagccacagggaacctcctctggagctgaaagacacagacgccgctgtgggtgacaacattggctacattacctttgtgctgttccctcgtcacaccaatgccagtgctcgagacaacaccatcaacctgatccacacgttccgggactacctgcactaccacatcaagtgctctaaggcctatattcacacacgtatgcgggcgaaaacgtctgacttcctcaaggtgctgaaccgcgcacgcccagatgccgagaaaaaagaaatgaaaacaatcacggggaagacgttttcatcccgctaatcttgggaataagaggaggaagcggctggcaactgaaggctggaacacttgctactggataatcgtagcttttaatgttgcgcctcttcaggttcttaagggattctccgttttggttccattttgtacacgtttggaaaataatctgcagaaacgagctgtgcttgcaaagacttcatagttcccaagaattaaaaaaaaaaaagaattccacttgatcaacttaattccttttctttatcttccctccctcacttcccttttctcccaccctcttttccaagctgtttcgctttgcaatatattactggtaatgagttgcaggataatgcagtcataacttgttttctcctaagtatttgagttcaaaactcctgtatctaaagaaatacggttggggtcattaataaagaaaatctttctatctta

SEQ ID NO: 347624 - DNA, 833 bp, Homo sapiens
  misc_feature (38)..(39): n is a, c, g, or t
  misc_feature (41)..(42): n is a, c, g, or t
gggcggccagccctggacagcagagttggttttttaanngnngcttgggtggataaaaccagtttttcaggaccagccacacagccccacaggtcctctttagccacagggaacctcctctggagctgaaagacacagacgccgctgtgggtgacaacattggctacattacctttgtgctgttccctcgtcacaccaatgccagtgctcgagacaacaccatcaacctgatccacacgttccgggactacctgcactaccacatcaagtgctctaaggcctatattcacacacgtatgcgggcgaaaacgtctgacttcctcaaggtgctgaaccgcgcacgcccagatgccgagaaaaaagaaatgaaaacaatcacggggaagacgttttcatcccgctaatcttgggaataagaggaggaagcggctggcaactgaaggctggaacacttgctactggataatcgtagcttttaatgttgcgcctcttcaggttcttaagggattctccgttttggttccattttgtacacgtttggaaaataatctgcagaaacgagctgtgcttgcaaagacttcatagttcccaagaattaaaaaaaaaaaagaattccacttgatcaacttaattccttttctttatcttccctccctcacttcccttttctcccaccctcttttccaagctgtttcgctttgcaatatattactggtaatgagttgcaggataatgcagtcataacttgttttctcctaagtatttgagttcaaaactcctgtatctaaagaaatacggttggggtcattaataaagaaaatctttctatctta

SEQ ID NO: 347625 - DNA, 839 bp, Homo sapiens
agcgaatgtcggagcctccggttaccccccgttggttgtgtttcatgccagcgagtgtcagaagaaaggaccgcagagccagccacacagccccacaggtcctctttagccacagggaacctcctctggagctgaaagacacagacgccgctgtgggtgacaacattggctacattacctttgtgctgttccctcgtcacaccaatgccagtgctcgagacaacaccatcaacctgatccacacgttccgggactacctgcactaccacatcaagtgctctaaggcctatattcacacacgtatgcgggcgaaaacgtctgacttcctcaaggtgctgaaccgcgcacgcccagatgccgagaaaaaagaaatgaaaacaatcacggggaagacgttttcatcccgctaatcttgggaataagaggaggaagcggctggcaactgaaggctggaacacttgctactggataatcgtagcttttaatgttgcgcctcttcaggttcttaagggattctccgttttggttccattttgtacacgtttggaaaataatctgcagaaacgagctgtgcttgcaaagacttcatagttcccaagaattaaaaaaaaaaaagaattccacttgatcaacttaattccttttctttatcttccctccctcacttcccttttctcccaccctcttttccaagctgtttcgctttgcaatatattactggtaatgagttgcaggataatgcagtcataacttgttttctcctaagtatttgagttcaaaactcctgtatctaaagaaatacggttggggtcattaataaagaaaatctttctatctta

SEQ ID NO: 347626 - DNA, 1110 bp, Homo sapiens
gggacgacataggctaggtacagctggtgtgagtcaccgcgactgtcggtgaagcggcagtggcggcggcggcggcggctcggcaggcgggttcaggcttcgggggccagccgccgccatgatcctgctggaggtgaacaaccgcatcatcgaggagacgctcgcgctcaagttcgagaacgcggccgccggaaacaaaccggaagcagtagaagtaacatttgcagatttcgatggggtcctctatcatatttcaaatcctaatggagacaaaacaaaagtgatggtcagtatttctttgaaattctacaaggaacttcaggcacatggtgctgatgagttattaaagagggtgtacgggagtttcttggtaaatccagaatcaggatacaatgtctctttgctatatgaccttgaaaatcttccggcatccaaggattccattgtgcatcaagctggcatgttgaagcgaaattgttttgcctctgtctttgaaaaatacttccaattccaagaagagggcaaggaaggagagaacagggcagttatccattatagggatgatgagaccatgtatgttgagtctaaaaaggacagagtcacagtagtcttcagcacagtgtttaaggatgacgacgatgtggtcattggaaaggtgttcatgcaggagttcaaagaaggacgcagagccagccacacagccccacaggtcctctttagccacagggaacctcctctggagctgaaagacacagacgccgctgtgggtgacaacattggctacattacctttgtgctgttccctcgtcacaccaatgccagtgctcgagacaacaccatcaacctgatccacacgttccgggactacctgcactaccacatcaagtgctctaaggcctatattcacacacgtatgcgggcgaaaacgtctgacttcctcaaggtgctgaaccgcgcacgcccagatgccgagaaaaaagaaatgaaaacatccgggggaagaaggtttcatccgtaattttggataaaaagaggaaggggttggacctgtaggtggacctggtctgggaatctctatttatgttggcgcctcaggttaggatcccctgg

SEQ ID NO: 347627 - DNA, 751 bp, Homo sapiens
caagaaggtacttaggaaaagataccccaccccatgttcccagctgaaagacacagacgccgctgtgggtgacaacattggctacattacctttgtgctgttccctcgtcacaccaatgccagtgctcgagacaacaccatcaacctgatccacacgttccgggactacctgcactaccacatcaagtgctctaaggcctatattcacacacgtatgcgggcgaaaacgtctgacttcctcaaggtgctgaaccgcgcacgcccagatgccgagaaaaaagaaatgaaaacaatcacggggaagacgttttcatcccgctaatcttgggaataagaggaggaagcggctggcaactgaaggctggaacacttgctactggataatcgtagcttttaatgttgcgcctcttcaggttcttaagggattctccgttttggttccattttgtacacgtttggaaaataatctgcagaaacgagctgtgcttgcaaagacttcatagttcccaagaattaaaaaaaaaaaagaattccacttgatcaacttaattccttttctttatcttccctccctcacttcccttttctcccaccctcttttccaagctgtttcgctttgcaatatattactggtaatgagttgcaggataatgcagtcataacttgttttctcctaagtatttgagttcaaaactcctgtatctaaagaaatacggttggggtcattaataaagaaaatctttctatctta

SEQ ID NO: 347628 - DNA, 706 bp, Homo sapiens
agacggtattaacaaacatcgagtcactttgcctggacaggaggaacccgtgctgttccctcgtcacaccaatgccagtgctcgagacaacaccatcaacctgatccacacgttccgggactacctgcactaccacatcaagtgctctaaggcctatattcacacacgtatgcgggcgaaaacgtctgacttcctcaaggtgctgaaccgcgcacgcccagatgccgagaaaaaagaaatgaaaacaatcacggggaagacgttttcatcccgctaatcttgggaataagaggaggaagcggctggcaactgaaggctggaacacttgctactggataatcgtagcttttaatgttgcgcctcttcaggttcttaagggattctccgttttggttccattttgtacacgtttggaaaataatctgcagaaacgagctgtgcttgcaaagacttcatagttcccaagaattaaaaaaaaaaaagaattccacttgatcaacttaattccttttctttatcttccctccctcacttcccttttctcccaccctcttttccaagctgtttcgctttgcaatatattactggtaatgagttgcaggataatgcagtcataacttgttttctcctaagtatttgagttcaaaactcctgtatctaaagaaatacggttggggtcattaataaagaaaatctttctatctta

SEQ ID NO: 347629 - DNA, 852 bp, Homo sapiens
  misc_feature (1)..(1): n is a, c, g, or t
  misc_feature (50)..(50): n is a, c, g, or t
  misc_feature (54)..(54): n is a, c, g, or t
ngtggaaaggccgagccactgagggaggcaggagccggacggtggacagntganggtttttcgagcactggcattggtgtgacgagggacagcacaaaggtaatgtaccaatgttgtcacccacagcggcgtctgtgtctttcagctccagaggaggttccctgtggctaaagaggacctgtggggctgtgtggctggctctgcgtccttctttgaactcctgcatgaacacctttccaatgaccacatcgtcgtcatccttaaacactgtgctgaagactactgtgactctgtcctttttagactcaacatacatggtctcatcatccctataatggataactgccctgttctctccttccttgccctcttcttggaattggaagtatttttcaaagacagaggcaaaacaatttcgcttcaacatgccagcttgatgcacaatggaatccttggatgccggaagattttcaaggtcatatagcaaagagacattgtatcctgattctggatttaccaagaaactcccgtacaccctctttaataactcatcagcaccatgtgcctgaagttccttgtagaatttcaaagaaatactgaccatcacttttgttttgtctccattaggatttgaaatatgatagaggaccccatcgaaatctgcaaatgttacttctactgcttccggtttgtttccggcggccgcgttctcgaacttgagcgcgagcgtctcctcgatgatgcggttgttcacctccagcaggatcatggcggcggctggcccccgaagcctgaacccgcctgccgagccgccgcccgctaccttaggtagcgaagcttcgctaccttagg

SEQ ID NO: 347630 - DNA, 971 bp, Homo sapiens
caaggaatcttaacttaaggcgacttaaggtgattacggagagtgtcactcagtaggatatgggtgcggttagcccataggagtaacgttttgccgataagtgtataaatagctttagagacttatgtgtagtcaggtagtccggacgtgtgatcagttaatggtgtgtcgagcactggcattggtgtgacgagggacagcacaaaggtaatgtaccaatgttgtcacccacagcggcgtctgtgtctttcagctccagaggaggttccctgtggctaaagaggacctgtggggctgtgtggctggctctgcgtccttctttgaactcctgcatgaacacctttccaatgaccacatcgtcgtcatccttaaacactgtgctgaagactactgtgactctgtcctttttagactcaacatacatggtctcatcatccctataatggataactgccctgttctctccttccttgccctcttcttggaattggaagtatttttcaaagacagaggcaaaacaatttcgcttcaacatgccagcttgatgcacaatggaatccttggatgccggaagattttcaaggtcatatagcaaagagacattgtatcctgattctggatttaccaagaaactcccgtacaccctctttaataactcatcagcaccatgtgcctgaagttccttgtagaatttcaaagaaatactgaccatcacttttgttttgtctccattaggatttgaaatatgatagaggaccccatcgaaatctgcaaatgttacttctactgcttccggtttgtttccggcggccgcgttctcgaacttgagcgcgagcgtctcctcgatgatgcggttgttcacctccagcaggatcatggcggcggctggcccccgaagcctgaacgcctggcccttgtcaccgtaggtcctagcacggcccggctcagccaggcacaatctaggcacggca

SEQ ID NO: 347631 - DNA, 955 bp, Homo sapiens
caaggaatcttaacttaaggcgacttaaggtgattacggagagtgtcactcagtaggatatgggtgcggttagcccataggagtaacgttttgccgataagtgtataaatagctttagagacttatgtgtagtcaggtagtccggacgtgtgatcagttaatggtgtgtcgagcactggcattggtgtgacgagggacagcacaaaggtaatgtaccaatgttgtcacccacagcggcgtctgtgtctttcagctccagaggaggttccctgtggctaaagaggacctgtggggctgtgtggctggctctgcgtccttctttgaactcctgcatgaacacctttccaatgaccacatcgtcgtcatccttaaacactgtgctgaagactactgtgactctgtcctttttagactcaacatacatggtctcatcatccctataatggataactgccctgttctctccttccttgccctcttcttggaattggaagtatttttcaaagacagaggcaaaacaatttcgcttcaacatgccagcttgatgcacaatggaatccttggatgccggaagattttcaaggtcatatagcaaagagacattgtatcctgattctggatttaccaagaaactcccgtacaccctctttaataactcatcagcaccatgtgcctgaagttccttgtagaatttcaaagaaatactgaccatcacttttgttttgtctccattaggatttgaaatatgatagaggaccccatcgaaatctgcaaatgttacttctactgcttccggtttgtttccggcggccgcgttctcgaacttgagcgcgagcgtctcctcgatgatgcggttgttcacctccagcaggatcatggcggcggctggcccccgaagccatgaacccagcctccgaccgccgccgcctaccccagcctcgtacctatgcagtat

SEQ ID NO: 347632 - DNA, 1052 bp, Homo sapiens
  misc_feature (957)..(957): n is a, c, g, or t
caaggaatcttaacttaaggcgacttaaggtgattacggagagtgtcactcagtaggatatgggtgcggttagcccataggagtaacgttttgccgataagtgtataaatagctttagagacttatgtgtagtcaggtagtccggacgtgtgatcagttaatggtgtgtcgagcactggcattggtgtgacgagggacagcacaaaggtaatgtaccaatgttgtcacccacagcggcgtctgtgtctttcagctccagaggaggttccctgtggctaaagaggacctgtggggctgtgtggctggctctgcgtccttctttgaactcctgcatgaacacctttccaatgaccacatcgtcgtcatccttaaacactgtgctgaagactactgtgactctgtcctttttagactcaacatacatggtctcatcatccctataatggataactgccctgttctctccttccttgccctcttcttggaattggaagtatttttcaaagacagaggcaaaacaatttcgcttcaacatgccagcttgatgcacaatggaatccttggatgccggaagattttcaaggtcatatagcaaagagacattgtatcctgattctggatttaccaagaaactcccgtacaccctctttaataactcatcagcaccatgtgcctgaagttccttgtagaatttcaaagaaatactgaccatcacttttgttttgtctccattaggatttgaaatatgatagaggaccccatcgaaatctgcaaatgttacttctactgcttccggtttgtttccggcggccgcgttctcgaacttgagcgcgagcgtctcctcgatgatgcggttgttcacctccagcaggatcatggcggcggctggccccaggggaaggagaaacaagggccggtgagggtgggtaagggaggcaaggacggagggagaggccntgtctgccccctgagtggggctgggtggggtaggaggttaggggagaaggggagaggggaccggggtggagtgaagggtaagacgaacgcccgct

SEQ ID NO: 347633 - DNA, 786 bp, Homo sapiens
gggacgacataggctaggtacagctggtgtgagtcaccgcgactgtcggtgaagcggcagtggcggcggcggcggcggctcggcaggcgggttcaggcttcgggggccagccgccgccatgatcctgctggaggtgaacaaccgcatcatcgaggagacgctcgcgctcaagttcgagaacgcggccgccggaaacaaaccggaagcagtagaagtaacatttgcagatttcgatggggtcctctatcatatttcaaatcctaatggagacaaaacaaaagtgatggtcagtatttctttgaaattctacaaggaacttcaggcacatggtgctgatgaggtaagatccacatcattttccttgggactcttgtttcctcacctttcattggcagtttgccattcatggaagatccatggcactaaatcacccccacatgactacttgctcacctaactaggggctcttgacttgattcctataatgaattgtgtttcctagaaaaggttttgactcttgcttgcttgctttaaaacaatggaaacaaaaatagctttagttctccaaaaacatagcaaagaatacttttccttgatcagtacaaaaatagctgttgcaagaattaggttctgttctatttttgtaatattatcaaggcagatagataacttctagcttgtttaaattttatagtctcaggttctcattctggaggcttaggcacaaatagctgtcttttgaaatttttaattaaagctctttaaagctaccgtctttaaatatct

SEQ ID NO: 347634 - DNA, 2041 bp, Homo sapiens
gggacgacataggctaggtacagctggtgtgagtcaccgcgactgtcggtgaagcggcagtggcggcggcggcggcggctcggcaggcgggttcaggcttcgggggccagccgccgccatgatcctgctggaggtgaacaaccgcatcatcgaggagacgctcgcgctcaagttcgagaacgcggccgccggaaacaaaccggaagcagtagaagtaacatttgcagatttcgatggggtcctctatcatatttcaaatcctaatggagacaaaacaaaagtgatggtcagtatttctttgaaattctacaaggaacttcaggcacatggtgctgatgagttattaaagagggtgtacgggagtttcttggtaaatccagaatcaggcagtcttctaataggttgtctcaacattcatggccagaggaattgaaaggcaccgtgtcatccttgaatagaacagctatgttatactgctttaaaaaggaggtttaaagtggaaaaactgaacagcctttttaccctgtgattcagtggcatgtctcaaattctgaggcatttagcaggaccccaaagtgagaaccaggtagtaagaccattggaacataatattttttactcaactattacaactttggtaccttgattagaaaagtcttctaagaaggaagttctctgtcactcttaacagcagttacttgtgctagcttatttcatcacctcacctattttttcagacagtctcattctgttgcccaggctggagtgcagtggtacagtcatagctcactgcagcctcctccaaatcttgggctcaagcaatcctcccgctttagcctctccggtagctgggaactacaggcacatgccaccatacccaattaatttttttaatattttgtagaaacagagtctcactgtctgctgcccatactgccaaaacagagtaaggaggtctcaaactcctagccttgagcaatctacccacctcagcctccgcctcccagagagttgggatcacaggcatgagccaccatacccagcaccttttttttttttaatctccaaattggcgggatgaatgtgtcacagaaataaaagccaagataacactgtaggcttttggcaaaatcaaggtattaaaagaaagaaacaaacagatctagaacagaaaaatcatgtccaaagtcttgggcatgcttgtcacagccaacatcctgacatggaaagtttatgtttctgtccctgggcctccttctacctcccactaaatcatagacattgccagattgcagaccctgtcttcatagaagtgtgaaatgtaaaagtgtgtgaaagtagtgtctcaaccaggtgcagtggctcacacctgtaatcccagcactttggggaggccaaggtgagtgaattgcttgagctcagaagttcaggaccagcctgggcagcataatgagatacctgtctctataaaaaatacagaaattagccaggcatggtggcagccacctgtaataccaggtactcaggtggctgaagcacgagaatcgcttgaacccaggaggcagaggttgcagtgagctgagattgcgccactgccctctgtcccaggcataaaaagatactcatctcagttttgtgacttgtttgatgactaaatccacttcccctctgtcttatttcccatccagcaaatgaaagttaggaagaatgccaacttagtaagagcttggcaagtgcagtactttaataataatgtaattatcatggcctttggattaacgaatttggttttgtttcgtttttattttattattaaagagggtgtacgggagtttcttggtaaatccagaatcaggtatgtagtcatgtgagcaattatggaatgacatgggaagagaggtgtcctttttatattatgctttttttacccaaaggatttcgtttaaatattattacaaatatttgtgcatgagcccattcctaatttcaactccctccataaaaatagcttttaaggggctccgctgttgtccaatatgga

SEQ ID NO: 347635 - DNA, 682 bp, Homo sapiens
ggcgccgcggggccgcgcgtccaggcggcgagcggaagtgggtgtgagagcggaagtggccggctagagccgggggctgggcggggaccgggcttgtcggtgaagcggcagtggcggcggcggcggcggctcggcaggcgggttcaggcttcgggggccagccgccgccatgatcctgctggaggtgaacaaccgcatcatcgaggagacgctcgcgctcaagttcgagaacgcggccgccggaaacaaaccggaagcagtagaagtaacatttgcagatttcgatggggtcctctatcatatttcaaatcctaatggagacaaaacaaaagtgatggtcagtatttctttgaaattctacaaggaacttcaggcacatggtgctgatgagttattaaagagggtgtacgggagtttcttggtaaatccagaatcaggtatgtagtcatgtgagcaactatggaatgacatgggaagagaggtgtcctttttatattatgctttttttacccaaaggatttcgtttaaatattattacaaatatttctgcatgagcccattcctaatttcaactccgtccataaaaatagcttttaaggggctttgctttgtccaatatggaacacagtagaggtacaaaattgatgtgtgacatttttaacatttacttgatggggccaca

SEQ ID NO: 347636 - DNA, 622 bp, Homo sapiens
gggacgacataggctaggtacagctggtgtgagtcaccgcgactgtcggtgaagcggcagtggcggcggcggcggcggctcggcaggcgggttcaggcttcgggggccagccgccgccatgatcctgctggaggtgaacaaccgcatcatcgaggagacgctcgcgctcaagttcgagaacgcggccgccggaaacaaaccggaagcagtagaagtaacatttgcagatttcgatggggtcctctatcatatttcaaatcctaatggagacaaaacaaaagtgatggtcagtatttctttgaaattctacaaggaacttcaggcacatggtgctgatgagttattaaagagggtgtacgggagtttcttggtaaatccagaatcaggcagtcttctaataggttgtctcaacattcatggccagaggaattgaaaggcaccgtgtcatccttgaatagaacagctatgttatactgctttaaaaaggaggtttaaagtggaaaaactgaacagcctttttaccctgtgattcagtggcatgtctcaaattctgaggcatttagcaggaccccaaagtgagaaccaggtagtagacattggacatatatttttattcaccatt

SEQ ID NO: 347637 - DNA, 759 bp, Homo sapiens
gggacgacataggctaggtacagctggtgtgagtcaccgcgactgtcggtgaagcggcagtggcggcggcggcggcggctcggcaggcgggttcaggcttcgggggccagccgccgccatgatcctgctggaggtgaacaaccgcatcatcgaggagacgctcgcgctcaagttcgagaacgcggccgccggaaacaaaccggaagcagtagaagtaacatttgcagatttcgatggggtcctctatcatatttcaaatcctaatggagacaaaacaaaagtgatggtcagtatttctttgaaattctacaaggaacttcaggcacatggtgctgatgagcccccccctcttttttttttttttttttttttttttttttttttttgacatctaaaagcatttattttatgcaaaaaacttaaatatgattatggtgtcacataaagtgcacacattacctatgctgaacaatgccaagaaacataatatattgatgcaacagttttctaaaataaacataaaaatgagcccagaccatcagacaaaagcaaaacacttatttccaaatagcacaatgctgaaaattgatagcaatcctaaaacacctccaactttccttaaaagctgccaaagtccaactattttttaaaaattgattttttttacattaataaaaatctggtgacaaacattataaaaccaaatgctggacagtctttactcctttaaaattccaaatattccaacataatcacagg

SEQ ID NO: 347638 - DNA, 340 bp, Homo sapiens
  misc_feature (74)..(74): n is a, c, g, or t
  misc_feature (288)..(288): n is a, c, g, or t
  misc_feature (301)..(301): n is a, c, g, or t
  misc_feature (306)..(306): n is a, c, g, or t
  misc_feature (309)..(310): n is a, c, g, or t
  misc_feature (312)..(312): n is a, c, g, or t
  misc_feature (316)..(316): n is a, c, g, or t
  misc_feature (319)..(319): n is a, c, g, or t
  misc_feature (321)..(321): n is a, c, g, or t
  misc_feature (325)..(325): n is a, c, g, or t
ctcccctgccccagcgttgtaccccaggaattaaaaaaaaaaataataaagaattccacttgatcaacttaatnccttttctttatcttccctccctcacttcccttttctccaccctcttttccaagctgtccaagctgtttcgctttgcaatatattactggtaatgagttgcaggataatgcagtcataacttgttttctcctaagtatttgagttcaaaactcctgtatctaaagaaatacggttggggtcattaataaagaaaatctttctatcttaaaaaanaacacacaaaacncaaanaannanaacnaananacanacacaacacacaaca

SEQ ID NO: 347639 - DNA, 1221 bp, Homo sapiens
  misc_feature (372)..(372): n is a, c, g, or t
  misc_feature (388)..(388): n is a, c, g, or t
atgtctgtgtagtcttgttgcgctcgtcgtggtatgactgcgtgttctctctcgctcctatctatgcctgtgtgctgtctagggctcccttctctcccccaagctgtttttttgagcgatgtcgcgctgttgtgcaggtttccactgttcgttgttcctcgggcttcttatgcttgatggctcccttatctctgctgcttccgtccgagtgtcccgctttgtgccagcggttctcgtttgtgtcccgagattcgggggttaaacgttttccccgggatggttccatctctttttccggatttggcttcccgttcagcccctgaggaatcaaacttttctcccgcatacgtgtgtgaatataggccttagccncttgatgtgttatgcnaggtagtcccggaacgttgtgatcaggtttatggttttgtctcgagcactggcattggtgtgacgagggacagcacaaaggtaatgtaccaatgttgtcacccacagcggcgtctgtgtctttcagctccagaggaggttccctgtggctaaagaggacctgtggggctgtgtggctggctctgcgtccttctttgaactcctgcatgaacacctttccaatgaccacatcgtcgtcatccttaaacactgtgctgaagactactgtgactctgtcctttttagactcaacatacatggtctcatcatccctataatggataactgccctgttctctccttccttgccctcttcttggaattggaagtatttttcaaagacagaggcaaaacaatttcgcttcaacatgccagcttgatgcacaatggaatccttggatgccggaagattttcaaggtcatatagcaaagagacattgtatcctgattctggatttaccaagaaactcccgtacaccctctttaataactcatcagcaccatgtgcctgaagttccttgtagaatttcaaagaaatactgaccatcacttttgttttgtctccattaggatttgaaatatgatagaggaccccatcgaaatctgcaaatgttacttctactgcttccggtttgtttccggcggccgcgttctcgaacttgagcgcgagcgtctcctcgatgatgcggttgttcacctccagcaggatcatggcggcggctggcccccgaagcctgaacccgcctgccgagccgccgcccgctaccttaggtagcgaagcttcgctaccttagg

SEQ ID NO: 347640 - DNA, 781 bp, Homo sapiens
  misc_feature (652)..(652): n is a, c, g, or t
  misc_feature (722)..(722): n is a, c, g, or t
  misc_feature (738)..(738): n is a, c, g, or t
  misc_feature (781)..(781): n is a, c, g, or t
ggcgccgcggggccgcgcgtccaggcggcgagcggaagtgggtgtgagagcggaagtggccggctagagccgggggctgggcggggaccgggcttgtcggtgaagcggcagtggcggcggcggcggcggctcggcaggcgggttcaggcttcgggggccagccgccgccatgatcctgctggaggtgaacaaccgcatcatcgaggagacgctcgcgctcaagttcgagaacgcggccgccggaaacaaaccggaagcagtagaagtaacatttgcagatttcgatggggtcctctatcatatttcaaatcctaatggagacaaaacaaaagtgatggtcagtatttctttgaaattctacaaggaacttcaggcacatggtgctgatgagttattaaagagggtgtacgggagtttcttggtaaatccagaatcaggatacaatgtctctttgctatatgaccttgaaaatcttccggcatccaaggattccattgtgcatcaagctggcatgttgaagcgaaattgttttgcctctgtctttgaaaaatacttccaattccaagaagagggcaaggaaggagagaacagggcagttatccattatagggatgatgagaccatggtggtcattggaaaggtgttcatgcangaattcaaagagggctcatagccaaccacacatccccacatgttcctcttaagcacaaggaaccctctcntgagctgaaagaacanaccccgttgtggtgacacaattgctacatacctttggctgtcn

SEQ ID NO: 347641 - DNA, 1388 bp, Homo sapiens
ggcgccgcggggccgcgcgtccaggcggcgagcggaagtgggtgtgagagcggaagtggccggctagagccgggggctgggcggggaccgggcttgtcggtgaagcggcagtggcggcggcggcggcggctcggcaggcgggttcaggcttcgggggccagccgccgccatgatcctgctggaggtgaacaaccgcatcatcgaggagacgctcgcgctcaagttcgagaacgcggccgccggaaacaaaccggaagcagtagaagtaacatttgcagatttcgatggggtcctctatcatatttcaaatcctaatggagacaaaacaaaagtgatggtcagtatttctttgaaattctacaaggaacttcaggcacatggtgctgatgagttattaaagagggtgtacgggagtttcttggtaaatccagaatcaggatacaatgtctctttgctatatgaccttgaaaatcttccggcatccaaggattccattgtgcatcaagctggcatgttgaagcgaaattgttttgcctctgtctttgaaaaatacttccaattccaagaagagggcaaggaaggagagaacagggcagttatccattatagggatgatgagaccatgtatgttgagtctaaaaaggacagagtcacagtagtcttcagcacagtgtttaaggatgacgacgatgtggtcattggaaaggtgttcatgcaggagttcaaagaaggacgcagagccagccacacagccccacaggtcctctttagccacagggaacctcctctggagctgaaagacacagacgccgctgtgggtgacaacattggctacattacctttgtgctgttccctcgtcacaccaatgccagtgctcgagacaacaccatcaacctgatccacacgttccgggactacctgcactaccacatcaagtgctctaaggcctatattcacacacgtatgcgggcgaaaacgtctgacttcctcaaggtgctgaaccgcgcacgcccagatgccgagaaaaaagaaatgaaaacaatcacggggaagacgttttcatcccgctaatcttgggaataagaggaggaagcggctggcaactgaaggctggaacacttgctactggataatcgtagcttttaatgttgcgcctcttcaggttcttaagggattctccgttttggttccattttgtacacgtttggaaaataatctgcagaaacgagctgtgcttgcaaagacttcatagttcccaagaattaaaaaaaaaaaagaattccacttgatcaacttaattccttttctttatcttccctccctcacttcccttttctcccaccctctttttccaggcttgagggaggggatcctatagcgtcagctg

SEQ ID NO: 347642 - DNA, 1489 bp, Homo sapiens
ggcgccgcggggccgcgcgtccaggcggcgagcggaagtgggtgtgagagcggaagtggccggctagagccgggggctgggcggggaccgggcttgtcggtgaagcggcagtggcggcggcggcggcggctcggcaggcgggttcaggcttcgggggccagccgccgccatgatcctgctggaggtgaacaaccgcatcatcgaggagacgctcgcgctcaagttcgagaacgcggccgccggaaacaaaccggaagcagtagaagtaacatttgcagatttcgatggggtcctctatcatatttcaaatcctaatggagacaaaacaaaagtgatggtcagtatttctttgaaattctacaaggaacttcaggcacatggtgctgatgagttattaaagagggtgtacgggagtttcttggtaaatccagaatcaggatacaatgtctctttgctatatgaccttgaaaatcttccggcatccaaggattccattgtgcatcaagctggcatgttgaagcgaaattgttttgcctctgtctttgaaaaatacttccaattccaagaagagggcaaggaaggagagaacagggcagttatccattatagggatgatgagaccatgtatgttgagtctaaaaaggacagagtcacagtagtcttcagcacagtgtttaaggatgacgacgatgtggtcattggaaaggtgttcatgcaggagttcaaagaaggacgcagagccagccacacagccccacaggtcctctttagccacagggaacctcctctggagctgaaagacacagacgccgctgtgggtgacaacattggctacattacctttgtgctgttccctcgtcacaccaatgccagtgctcgagacaacaccatcaacctgatccacacgttccgggactacctgcactaccacatcaagtgctctaaggcctatattcacacacgtatgcgggcgaaaacgtctgacttcctcaaggtgctgaaccgcgcacgcccagatgccgagaaaaaagaaatgaaaacaatcacggggaagacgttttcatcccgctaatcttgggaataagaggaggaagcggctggcaactgaaggctggaacacttgctactggataatcgtagcttttaatgttgcgcctcttcaggttcttaagggattctccgttttggttccattttgtacacgtttggaaaataatctgcagaaacgagctgtgcttgcaaagacttcatagttcccaagaattaaaacagcagaaaaaaaaaactcgagagcagagtcctcctctctcgaaaaagcagggagctgtcgggcaagatcaaaaagccaggtctgtggattgaccaaggggaaacttatctccaaaatgaggaaactggccatggtgtgccgggcccgggggcccggaaaccaggtgcaccgggaagccgtacacggtgtccaccgggaacatgactggggcaggaccag

SEQ ID NO: 347643 - DNA, 1684 bp, Homo sapiens
ggcgccgcggggccgcgcgtccaggcggcgagcggaagtgggtgtgagagcggaagtggccggctagagccgggggctgggcggggaccgggcttgtcggtgaagcggcagtggcggcggcggcggcggctcggcaggcgggttcaggcttcgggggccagccgccgccatgatcctgctggaggtgaacaaccgcatcatcgaggagacgctcgcgctcaagttcgagaacgcggccgccggaaacaaaccggaagcagtagaagtaacatttgcagatttcgatggggtcctctatcatatttcaaatcctaatggagacaaaacaaaagtgatggtcagtatttctttgaaattctacaaggaacttcaggcacatggtgctgatgagttattaaagagggtgtacgggagtttcttggtaaatccagaatcaggatacaatgtctctttgctatatgaccttgaaaatcttccggcatccaaggattccattgtgcatcaagctggcatgttgaagcgaaattgttttgcctctgtctttgaaaaatacttccaattccaagaagagggcaaggaaggagagaacagggcagttatccattatagggatgatgagaccatgtatgttgagtctaaaaaggacagagtcacagtagtcttcagcacagtgtttaaggatgacgacgatgtggtcattggaaaggtgttcatgcaggagttcaaagaaggacgcagagccagccacacagccccacaggtcctctttagccacagggaacctcctctggagctgaaagacacagacgccgctgtgggtgacaacattggctacattacctttgtgctgttccctcgtcacaccaatgccagtgctcgagacaacaccatcaacctgatccacacgttccgggactacctgcactaccacatcaagtgctctaaggcctatattcacacacgtatgcgggcgaaaacgtctgacttcctcaaggtgctgaaccgcgcacgcccagatgccgagaaaaaagaaatgaaaacaatcacggggaagacgttttcatcccgctaatcttgggaataagaggaggaagcggctggcaactgaaggctggaacacttgctactggataatcgtagcttttaatgttgcgcctcttcaggttcttaagggattctccgttttggttccattttgtacacgtttggaaaataatctgcagaaacgagctgtgcttgcaaagacttcatagttcccaagaattaaaaaaaaaaaaaaaaaaaaaaacttggggggcgcctggcccgaaaagttttaaacccttcggttggcgcccgggcccgggtgattgaacatcggccataacgtgggccaaggagaacccggcggcaaggcacatggcgtgggttttccacccaaaaaaaaaaagccgcggcgggaacccggttcgggccggacaccccagctgcgggccgggggcactgttggccaccaccgcggggccactcgggtccgcaagccccccccgtgcccgcgcggagagaaaagagcgacagcacaaacaacgaaacagacgaacaacgaaagaacgagcacacaaagagaacgaaacacagagaaacgacagagcgagacaagaagacgcacagagacacaggacacagacaacagacagggaaccag

SEQ ID NO: 347644 - DNA, 1447 bp, Homo sapiens
gaggtgagaacataggctagtacgagctggtgtaatcggcagaggcggctgtggtgagcggagtgcgggcggcggctcggcaggcgggttcaggcttcgggggccagccgccgccatgatcctgctggaggtgaacaaccgcatcatcgaggagacgctcgcgctcaagttcgagaacgcggccgccggaaacaaaccggaagcagtagaagtaacatttgcagatttcgatggggtcctctatcatatttcaaatcctaatggagacaaaacaaaagtgatggtcagtatttctttgaaattctacaaggaacttcaggcacatggtgctgatgagttattaaagagggtgtacgggagtttcttggtaaatccagaatcaggatacaatgtctctttgctatatgaccttgaaaatcttccggcatccaaggattccattgtgcatcaagctggcatgttgaagcgaaattgttttgcctctgtctttgaaaaatacttccaattccaagaagagggcaaggaaggagagaacagggcagttatccattatagggatgatgagaccatgtatgttgagtctaaaaaggacagagtcacagtagtcttcagcacagtgtttaaggatgacgacgatgtggtcattggaaaggtgttcatgcaggagttcaaagaaggacgcagagccagccacacagccccacaggtcctctttagccacagggaacctcctctggagctgaaagacacagacgccgctgtgggtgacaacattggctacattacctttgtgctgttccctcgtcacaccaatgccagtgctcgagacaacaccatcaacctgatccacacgttccgggactacctgcactaccacatcaagtgctctaaggcctatattcacacacgtatgcgggcgaaaacgtctgacttcctcaaggtgctgaaccgcgcacgcccagatgccgagaaaaaagaaatgaaaacaatcacggggaagacgttttcatcccgctaatcttgggaataagaggaggaagcggctggcaactgaaggctggaacacttgctactggataatcgtagcttttaatgttgcgcctcttcaggttcttaagggattctccgttttggttccattttgtacacgtttggaaaataatctgcagaaacgagctgtgcttgcaaagacttcatagttcccaagaattaaaaaaaaaaaagaattccacttgatcaacttaattccttttctttatcttccctccctcacttcccttttctcccaccctcttttccaagctgtttcgctttgcaatatattactggtaatgagttgcaggataatgcagtcataacttgttttctcctaagtatttgagttcaaaactcctgtatctaaagaaatacggttggggtcattaataaagaaaatctttctatctta

SEQ ID NO: 347645 - DNA, 1447 bp, Homo sapiens
ggcgccgcggggccgcgcgtccaggcggcgagcggaagtgggtgtgagagcggaagtggccggctagagccgggggctgggcggggaccgggcttgtcggtgaagcggcagtggcggcggcggcggcggctcggcaggcgggttcaggcttcgggggccagccgccgccatgatcctgctggaggtgaacaaccgcatcatcgaggagacgctcgcgctcaagttcgagaacgcggccgccggaaacaaaccggaagcagtagaagtaacatttgcagatttcgatggggtcctctatcatatttcaaatcctaatggagacaaaacaaaagtgatggtcagtatttctttgaaattctacaaggaacttcaggcacatggtgctgatgagttattaaagagggtgtacgggagtttcttggtaaatccagaatcaggatacaatgtctctttgctatatgaccttgaaaatcttccggcatccaaggattccattgtgcatcaagctggcatgttgaagcgaaattgttttgcctctgtctttgaaaaatacttccaattccaagaagagggcaaggaaggagagaacagggcagttatccattatagggatgatgagaccatgtatgttgagtctaaaaaggacagagtcacagtagtcttcagcacagtgtttaaggatgacgacgatgtggtcattggaaaggtgttcatgcaggagttcaaagaaggacgcagagccagccacacagccccacaggtcctctttagccacagggaacctcctctggagctgaaagacacagacgccgctgtgggtgacaacattggctacattacctttgtgctgttccctcgtcacaccaatgccagtgctcgagacaacaccatcaacctgatccacacgttccgggactacctgcactaccacatcaagtgctctaaggcctatattcacacacgtatgcgggcgaaaacgtctgacttcctcaaggtgctgaaccgcgcacgcccagatgccgagaaaaaagaaatggaagcggctggcaactgaaggctggaacacttgctactggataatcgtagcttttaatgttgcgcctcttcaggttcttaagggattctccgttttggttccattttgtacacgtttggaaaataatctgcagaaacgagctgtgcttgcaaagacttcatagttcccaagaattaaaaaaaaaaaagaattccacttgatcaacttaattccttttctttatcttccctccctcacttcccttttctcccaccctcttttccaagctgtttcgctttgcaatatattactggtaatgagttgcaggataatgcagtcataacttgttttctcctaagtatttgagttcaaaactcctgtatctaaagaaatacggttggggtcattaataaagaaaatctttctatctta

SEQ ID NO: 347646 - DNA, 1301 bp, Homo sapiens
  misc_feature (49)..(49): n is a, c, g, or t
tcatagaggatccccgtcgcggtttatcccccacttgatcaacttaatnccttttctttatcttccctccctcacttcccttttctccaccctcttttccaagctgtttcgcttgcaatatattactggtaatgagttgcagtatttctttgaaattctacaaggaacttcaggcacatggtgctgatgagttattaaagagggtgtacgggagtttcttggtaaatccagaatcaggatacaatgtctctttgctatatgaccttgaaaatcttccggcatccaaggattccattgtgcatcaagctggcatgttgaagcgaaattgttttgcctctgtctttgaaaaatacttccaattccaagaagagggcaaggaaggagagaacagggcagttatccattatagggatgatgagaccatgtatgttgagtctaaaaaggacagagtcacagtagtcttcagcacagtgtttaaggatgacgacgatgtggtcattggaaaggtgttcatgcaggagttcaaagaaggacgcagagccagccacacagccccacaggtcctctttagccacagggaacctcctctggagctgaaagacacagacgccgctgtgggtgacaacattggctacattacctttgtgctgttccctcgtcacaccaatgccagtgctcgagacaacaccatcaacctgatccacacgttccgggactacctgcactaccacatcaagtgctctaaggcctatattcacacacgtatgcgggcgaaaacgtctgacttcctcaaggtgctgaaccgcgcacgcccagatgccgagaaaaaagaaatgaaaacaatcacggggaagacgttttcatcccgctaatcttgggaataagaggaggaagcggctggcaactgaaggctggaacacttgctactggataatcgtagcttttaatgttgcgcctcttcaggttcttaagggattctccgttttggttccattttgtacacgtttggaaaataatctgcagaaacgagctgtgcttgcaaagacttcatagttcccaagaattaaaaaaaaaaaagaattccacttgatcaacttaattccttttctttatcttccctccctcacttcccttttctcccaccctcttttccaagctgtttcgctttgcaatatattactggtaatgagttgcaggataatgcagtcataacttgttttctcctaagtatttgagttcaaaactcctgtatctaaagaaatacggttggggtcattaataaagaaaatctttctatctta

SEQ ID NO: 347647 - DNA, 1307 bp, Homo sapiens
ggcgccgcggggccgcgcgtccaggcggcgagcggaagtgggtgtgagagcggaagtggccggctagagccgggggctgggcggggaccgggcttgtcggtgaagcggcagtggcggcggcggcggcggctcggcaggcgggttcaggcttcgggggccagccgccgccatgatcctgctggaggtgaacaaccgcatcatcgaggagacgctcgcgctcaagttcgagaacgcggccgccggaaacaaaccggaagcagtagaagtaacatttgcagatttcgatggggtcctctatcatatttcaaatcctaatggagacaaaacaaaagtgatggtcagtatttctttgaaattctacaaggaacttcaggcacatggtgctgatgagttattaaagagggtgtacgggagtttcttggtaaatccagaatcaggatacaatgtctctttgctatatgaccttgaaaatcttccggcatccaaggattccattgtgcatcaagctggcatgttgaagcgaaattgttttgcctctgtctttgaaaaatacttccaattccaagaagagggcaaggaaggagagaacagggcagttatccattatagggatgatgagaccatgtatgttgagtctaaaaaggacagagtcacagtagtcttcagcacagtgtttaaggatgacgacgatgtggtcattggaaaggtgttcatgcaggagttcaaagaaggacgcagagccagccacacagccccacaggtcctctttagccacagggaacctcctctggagctgaaagacacagacgccgctgtgggtgacaacattggctacattacctttgtgctgttccctcgtcacaccaatgccagtgctcgagacaacaccatcaacctgatccacacgttccgggactacctgcactaccacatcaagtgctctaaggcctatattcacacacgtatgcgggcgaaaacgtctgacttcctcaaggtgctgaaccgcgcacgcccagatgccgagaaaaaagaaataaaaaaagggaaaaaaactttgtgggcggcttgggccttggaaaagtttttagaaacaatcggttgggggcgggggcccggtagggctaagggcacatgggccatagcggtcccaaggagaaccgggccatgactagggctgggttttctcacaattaaaaaaaaggccggggggaaaccggagggttttgaaaaattccagagggagttcggaggacataacggggtctatcacgggggttcaagggaactcgatatcaaatttagccggg

SEQ ID NO: 347648 - DNA, 1450 bp, Homo sapiens
gggacgacataggctaggtacagctggtgtgagtcaccgcgactgtcggtgaagcggcagtggcggcggcggcggcggctcggcaggcgggttcaggcttcgggggccagccgccgccatgatcctgctggaggtgaacaaccgcatcatcgaggagacgctcgcgctcaagttcgagaacgcggccgccggaaacaaaccggaagcagtagaagtaacatttgcagatttcgatggggtcctctatcatatttcaaatcctaatggagacaaaacaaaagtgatggtcagtatttctttgaaattctacaaggaacttcaggcacatggtgctgatgagttattaaagagggtgtacgggagtttcttggtaaatccagaatcaggatacaatgtctctttgctatatgaccttgaaaatcttccggcatccaaggattccattgtgcatcaagctggcatgttgaagcgaaattgttttgcctctgtctttgaaaaatacttccaattccaagaagagggcaaggaaggagagaacagggcagttatccattatagggatgatgagaccatgtatgttgagtctaaaaaggacagagtcacagtagtcttcagcacagtgtttaaggatgacgacgatgtggtcattggaaaggtgttcatgcaggagttcaaagaaggacgcagagccagccacacagccccacaggtcctctttagccacagggaacctcctctggagctgaaagacacagacgccgctgtgggtgacaacattggctacattacctttgtgctgttccctcgtcacaccaatgccagtgctcgagacaacaccatcaacctgatccacacgttccgggactacctgcactaccacatcaagtgctctaaggcctatattcacacacgtatgcgggcgaaaacgtctgacttcctcaaggtgctgaaccgcgcacgcccagatgccgagaaaaaagaaatgaaaacaatcacggggaagacgttttcatcccgctaatcttgggaataagaggaggaagcggctggcaactgaaggctggaacacttgctactggataatcgtagcttttaatgttgcgcctcttcaggttcttaagggattctccgttttggttccattttgtacacgtttggaaaataatctgcagaaacgagctgtgcttgcaaagacttcatagttcccaagaattaaaaaaaaaaaagaattccacttgatcaacttaattccttttctttatcttccctccctcacttcccttttctcccaccctcttttccaagctgtttcgctttgcaatatattactggtaatgagttgcaggataatgcagtcataacttgttttctcctaagtatttgagttcaaaactcctgtatctaaagaaatacggttggggtcattaataaagaaaatctttctatctta

SEQ ID NO: 347649 - DNA, 2919 bp, Homo sapiens
gggacgacataggctaggtacagctggtgtgagtcaccgcgactgtcggtgaagcggcagtggcggcggcggcggcggctcggcaggcgggttcaggcttcgggggccagccgccgccatgatcctgctggaggtgaacaaccgcatcatcgaggagacgctcgcgctcaagttcgagaacgcggccgccggaaacaaaccggaagcagtagaagtaacatttgcagatttcgatggggtcctctatcatatttcaaatcctaatggagacaaaacaaaagtgatggtcagtatttctttgaaattctacaaggaacttcaggcacatggtgctgatgagttattaaagagggtgtacgggagtttcttggtaaatccagaatcaggcagtcttctaataggttgtctcaacattcatggccagaggaattgaaaggcaccgtgtcatccttgaatagaacagctatgttatactgctttaaaaaggaggtttaaagtggaaaaactgaacagcctttttaccctgtgattcagtggcatgtctcaaattctgaggcatttagcaggaccccaaagtgagaaccaggtagtaagaccattggaacataatattttttactcaactattacaactttggtaccttgattagaaaagtcttctaagaaggaagttctctgtcactcttaacagcagttacttgtgctagcttatttcatcacctcacctattttttcagacagtctcattctgttgcccaggctggagtgcagtggtacagtcatagctcactgcagcctcctccaaatcttgggctcaagcaatcctcccgctttagcctctccggtagctgggaactacaggcacatgccaccatacccaattaatttttttaatattttgtagaaacagagtctcactgtctgctgcccatactgccaaaacagagtaaggaggtctcaaactcctagccttgagcaatctacccacctcagcctccgcctcccagagagttgggatcacaggcatgagccaccatacccagcaccttttttttttttaatctccaaattggcgggatgaatgtgtcacagaaataaaagccaagataacactgtaggcttttggcaaaatcaaggtattaaaagaaagaaacaaacagatctagaacagaaaaatcatgtccaaagtcttgggcatgcttgtcacagccaacatcctgacatggaaagtttatgtttctgtccctgggcctccttctacctcccactaaatcatagacattgccagattgcagaccctgtcttcatagaagtgtgaaatgtaaaagtgtgtgaaagtagtgtctcaaccaggtgcagtggctcacacctgtaatcccagcactttggggaggccaaggtgagtgaattgcttgagctcagaagttcaggaccagcctgggcagcataatgagatacctgtctctataaaaaatacagaaattagccaggcatggtggcagccacctgtaataccaggtactcaggtggctgaagcacgagaatcgcttgaacccaggaggcagaggttgcagtgagctgagattgcgccactgccctctgtcccaggcataaaaagatactcatctcagttttgtgacttgtttgatgactaaatccacttcccctctgtcttatttcccatccagcaaatgaaagttaggaagaatgccaacttagtaagagcttggcaagtgcagtactttaataataatgtaattatcatggcctttggattaacgaatttggttttgtttcgtttttattttattattaaagagggtgtacgggagtttcttggtaaatccagaatcaggatacaatgtctctttgctatatgaccttgaaaatcttccggcatccaaggattccattgtgcatcaagctggcatgttgaagcgaaattgttttgcctctgtctttgaaaaatacttccaattccaagaagagggcaaggaaggagagaacagggcagttatccattatagggatgatgagaccatgtatgttgagtctaaaaaggacagagtcacagtagtcttcagcacagtgtttaaggatgacgacgatgtggtcattggaaaggtgttcatgcaggagttcaaagaaggacgcagagccagccacacagccccacaggtcctctttagccacagggaacctcctctggagctgaaagacacagacgccgctgtgggtgacaacattggctacattacctttgtgctgttccctcgtcacaccaatgccagtgctcgagacaacaccatcaacctgatccacacgttccgggactacctgcactaccacatcaagtgctctaaggcctatattcacacacgtatgcgggcgaaaacgtctgacttcctcaaggtgctgaaccgcgcacgcccagatgccgagaaaaaagaaatgaaaacaatcacggggaagacgttttcatcccgctaatcttgggaataagaggaggaagcggctggcaactgaaggctggaacacttgctactggataatcgtagcttttaatgttgcgcctcttcaggttcttaagggattctccgttttggttccattttgtacacgtttggaaaataatctgcagaaacgagctgtgcttgcaaagacttcatagttcccaagaattaaaaaaaaaaaagaattccacttgatcaacttaattccttttctttatcttccctccctcacttcccttttctcccaccctcttttccaagctgtttcgctttgcaatatattactggtaatgagttgcaggataatgcagtcataacttgttttctcctaagtatttgagttcaaaactcctgtatctaaagaaatacggttggggtcattaataaagaaaatctttctatctta

SEQ ID NO: 347650 - DNA, 1552 bp, Homo sapiens
gggacgacataggctaggtacagctggtgtgagtcaccgcgactgtcggtgaagcggcagtggcggcggcggcggcggctcggcaggcgggttcaggcttcgggggccagccgccgccatgatcctgctggaggtgaacaaccgcatcatcgaggagacgctcgcgctcaagttcgagaacgcggccgccggaaacaaaccggaagcagtagaagtaacatttgaggtgaatgaactcagaggaatacaaccaccctttctacaacaagagtcctcgacaagatgatcttggaagacttttgcagctctgaagtgctgttacctggcagatttcgatggggtcctctatcatatttcaaatcctaatggagacaaaacaaaagtgatggtcagtatttctttgaaattctacaaggaacttcaggcacatggtgctgatgagttattaaagagggtgtacgggagtttcttggtaaatccagaatcaggatacaatgtctctttgctatatgaccttgaaaatcttccggcatccaaggattccattgtgcatcaagctggcatgttgaagcgaaattgttttgcctctgtctttgaaaaatacttccaattccaagaagagggcaaggaaggagagaacagggcagttatccattatagggatgatgagaccatgtatgttgagtctaaaaaggacagagtcacagtagtcttcagcacagtgtttaaggatgacgacgatgtggtcattggaaaggtgttcatgcaggagttcaaagaaggacgcagagccagccacacagccccacaggtcctctttagccacagggaacctcctctggagctgaaagacacagacgccgctgtgggtgacaacattggctacattacctttgtgctgttccctcgtcacaccaatgccagtgctcgagacaacaccatcaacctgatccacacgttccgggactacctgcactaccacatcaagtgctctaaggcctatattcacacacgtatgcgggcgaaaacgtctgacttcctcaaggtgctgaaccgcgcacgcccagatgccgagaaaaaagaaatgaaaacaatcacggggaagacgttttcatcccgctaatcttgggaataagaggaggaagcggctggcaactgaaggctggaacacttgctactggataatcgtagcttttaatgttgcgcctcttcaggttcttaagggattctccgttttggttccattttgtacacgtttggaaaataatctgcagaaacgagctgtgcttgcaaagacttcatagttcccaagaattaaaaaaaaaaaagaattccacttgatcaacttaattccttttctttatcttccctccctcacttcccttttctcccaccctcttttccaagctgtttcgctttgcaatatattactggtaatgagttgcaggataatgcagtcataacttgttttctcctaagtatttgagttcaaaactcctgtatctaaagaaatacggttggggtcattaataaagaaaatctttctatctta

SEQ ID NO: 347651 - DNA, 1403 bp, Homo sapiens
gggacgacataggctaggtacagctggtgtgagtcaccgcgactgtcggtgaagcggcagtggcggcggcggcggcggctcggcaggcgggttcaggcttcgggggccagccgccgccatgatcctgctggaggtgaacaaccgcatcatcgaggagacgctcgcgctcaagttcgagaacgcggccgccggaaacaaaccggaagcagtagaagtaacatttgcagatttcgatggggtcctctatcatatttcaaatcctaatggagacaaaacaaaagtgatggtcagtatttctttgaaattctacaaggaacttcaggcacatggtgctgatgagatacaatgtctctttgctatatgaccttgaaaatcttccggcatccaaggattccattgtgcatcaagctggcatgttgaagcgaaattgttttgcctctgtctttgaaaaatacttccaattccaagaagagggcaaggaaggagagaacagggcagttatccattatagggatgatgagaccatgtatgttgagtctaaaaaggacagagtcacagtagtcttcagcacagtgtttaaggatgacgacgatgtggtcattggaaaggtgttcatgcaggagttcaaagaaggacgcagagccagccacacagccccacaggtcctctttagccacagggaacctcctctggagctgaaagacacagacgccgctgtgggtgacaacattggctacattacctttgtgctgttccctcgtcacaccaatgccagtgctcgagacaacaccatcaacctgatccacacgttccgggactacctgcactaccacatcaagtgctctaaggcctatattcacacacgtatgcgggcgaaaacgtctgacttcctcaaggtgctgaaccgcgcacgcccagatgccgagaaaaaagaaatgaaaacaatcacggggaagacgttttcatcccgctaatcttgggaataagaggaggaagcggctggcaactgaaggctggaacacttgctactggataatcgtagcttttaatgttgcgcctcttcaggttcttaagggattctccgttttggttccattttgtacacgtttggaaaataatctgcagaaacgagctgtgcttgcaaagacttcatagttcccaagaattaaaaaaaaaaaagaattccacttgatcaacttaattccttttctttatcttccctccctcacttcccttttctcccaccctcttttccaagctgtttcgctttgcaatatattactggtaatgagttgcaggataatgcagtcataacttgttttctcctaagtatttgagttcaaaactcctgtatctaaagaaatacggttggggtcattaataaagaaaatctttctatctta

SEQ ID NO: 347652 - DNA, 2096 bp, Homo sapiens
  misc_feature (372)..(372): n is a, c, g, or t
  misc_feature (388)..(388): n is a, c, g, or t
  misc_feature (1218)..(1218): n is a, c, g, or t
atgtctgtgtagtcttgttgcgctcgtcgtggtatgactgcgtgttctctctcgctcctatctatgcctgtgtgctgtctagggctcccttctctcccccaagctgtttttttgagcgatgtcgcgctgttgtgcaggtttccactgttcgttgttcctcgggcttcttatgcttgatggctcccttatctctgctgcttccgtccgagtgtcccgctttgtgccagcggttctcgtttgtgtcccgagattcgggggttaaacgttttccccgggatggttccatctctttttccggatttggcttcccgttcagcccctgaggaatcaaacttttctcccgcatacgtgtgtgaatataggccttagccncttgatgtgttatgcnaggtagtcccggaacgttgtgatcaggtttatggttttgtctcgagcactggcattggtgtgacgagggacagcacaaaggtaatgtaccaatgttgtcacccacagcggcgtctgtgtctttcagctccagaggaggttccctgtggctaaagaggacctgtggggctgtgtggctggctctgcgtccttctttgaactcctgcatgaacacctttccaatgaccacatcgtcgtcatccttaaacactgtgctgaagactactgtgactctgtcctttttagactcaacatacatggtctcatcatccctataatggataactgccctgttctctccttccttgccctcttcttggaattggaagtatttttcaaagacagaggcaaaacaatttcgcttcaacatgccagcttgatgcacaatggaatccttggatgccggaagattttcaaggtcatatagcaaagagacattgtatcctgattctggatttaccaagaaactcccgtacaccctctttaataactcatcagcaccatgtgcctgaagttccttgtagaatttcaaagaaatactgaccatcacttttgttttgtctccattaggatttgaaatatgatagaggaccccatcgaaatctgcaaatgttacttctactgcttccggtttgtttccggcggccgcgttctcgaacttgagcgcgagcgtctcctcgatgatgcggttgttcacctccagcaggatcatggcggcggctggccccaggggaaggagaaacaagggccggtgagggtgggtaagggaggcaaggacggagggagaggccntgtatgttgagtctaaaaaggacagagtcacagtagtcttcagcacagtgtttaaggatgacgacgatgtggtcattggaaaggtgttcatgcaggagttcaaagaaggacgcagagccagccacacagccccacaggtcctctttagccacagggaacctcctctggagctgaaagacacagacgccgctgtgggtgacaacattggctacattacctttgtgctgttccctcgtcacaccaatgccagtgctcgagacaacaccatcaacctgatccacacgttccgggactacctgcactaccacatcaagtgctctaaggcctatattcacacacgtatgcgggcgaaaacgtctgacttcctcaaggtgctgaaccgcgcacgcccagatgccgagaaaaaagaaatgaaaacaatcacggggaagacgttttcatcccgctaatcttgggaataagaggaggaagcggctggcaactgaaggctggaacacttgctactggataatcgtagcttttaatgttgcgcctcttcaggttcttaagggattctccgttttggttccattttgtacacgtttggaaaataatctgcagaaacgagctgtgcttgcaaagacttcatagttcccaagaattaaaaaaaaaaaagaattccacttgatcaacttaattccttttctttatcttccctccctcacttcccttttctcccaccctcttttccaagctgtttcgctttgcaatatattactggtaatgagttgcaggataatgcagtcataacttgttttctcctaagtatttgagttcaaaactcctgtatctaaagaaatacggttggggtcattaataaagaaaatctttctatctta

SEQ ID NO: 347653 - DNA, 3223 bp, Homo sapiens
gggacgacataggctaggtacagctggtgtgagtcaccgcgactgtcggtgaagcggcagtggcggcggcggcggcggctcggcaggcgggttcaggcttcgggggccagccgccgccatgatcctgctggaggtgaacaaccgcatcatcgaggagacgctcgcgctcaagttcgagaacgcggccgccggaaacaaaccggaagcagtagaagtaacatttgcagatttcgatggggtcctctatcatatttcaaatcctaatggagacaaaacaaaagtgatggtcagtatttctttgaaattctacaaggaacttcaggcacatggtgctgatgagttattaaagagggtgtacgggagtttcttggtaaatccagaatcaggcagtcttctaataggttgtctcaacattcatggccagaggaattgaaaggcaccgtgtcatccttgaatagaacagctatgttatactgctttaaaaaggaggtttaaagtggaaaaactgaacagcctttttaccctgtgattcagtggcatgtctcaaattctgaggcatttagcaggaccccaaagtgagaaccaggtagtaagaccattggaacataatattttttactcaactattacaactttggtaccttgattagaaaagtcttctaagaaggaagttctctgtcactcttaacagcagttacttgtgctagcttatttcatcacctcacctattttttcagacagtctcattctgttgcccaggctggagtgcagtggtacagtcatagctcactgcagcctcctccaaatcttgggctcaagcaatcctcccgctttagcctctccggtagctgggaactacaggcacatgccaccatacccaattaatttttttaatattttgtagaaacagagtctcactgtctgctgcccatactgccaaaacagagtaaggaggtctcaaactcctagccttgagcaatctacccacctcagcctccgcctcccagagagttgggatcacaggcatgagccaccatacccagcaccttttttttttttaatctccaaattggcgggatgaatgtgtcacagaaataaaagccaagataacactgtaggcttttggcaaaatcaaggtattaaaagaaagaaacaaacagatctagaacagaaaaatcatgtccaaagtcttgggcatgcttgtcacagccaacatcctgacatggaaagtttatgtttctgtccctgggcctccttctacctcccactaaatcatagacattgccagattgcagaccctgtcttcatagaagtgtgaaatgtaaaagtgtgtgaaagtagtgtctcaaccaggtgcagtggctcacacctgtaatcccagcactttggggaggccaaggtgagtgaattgcttgagctcagaagttcaggaccagcctgggcagcataatgagatacctgtctctataaaaaatacagaaattagccaggcatggtggcagccacctgtaataccaggtactcaggtggctgaagcacgagaatcgcttgaacccaggaggcagaggttgcagtgagctgagattgcgccactgccctctagcctaggcgacagagcaagattcagtctcgagaaaaaaaaaaaaagaccgtagagtctctcctcctcttttttaatgggtttatctaggcacgtttggaaaactcagcaagttatactagatttttacttctcttcatcctcagtatattctgttcatcatgttagaagccttacttaaagacagactttaccttagctatagttttatttgctcttatttggcttcctaaaactagcaaacctcagctctaaatcttttcttttttaatctaaccttgtaatctgtgtgcttatttggttttcaagtacccaaaatagaatgatgattgatattatttaatactggagtgcctctccagtattaaataaaatgtgctaagcattatctagagcaaagatttagcccatcctcccgaagagcccatgctcaacaaaaaacacagacctcagccgggcgcggtggcttatgcctgtaatcccagcactatcggaggccagggcgggcggatcacctgcattcaggagttcaagaccagcatgaccaacatggagaaaccccgtctctgctaaaagtacaaaattagccaggcctggtggcgcatgcctgtaatcccagctgcttgggaggctgaggcaggagaatcgcttgaacctgggaggcggatgttgtggatacaatgtctctttgctatatgaccttgaaaatcttccggcatccaaggattccattgtgcatcaagctggtatgttgagtctaaaaaggacagagtcacagtagtcttcagcacagtgtttaaggatgacgacgatgtggtcattggaaaggtgttcatgcaggagttcaaagaaggacgcagagccagccacacagccccacaggtcctctttagccacagggaacctcctctggagctgaaagacacagacgccgctgtgggtgacaacattggctacattacctttgtgctgttccctcgtcacaccaatgccagtgctcgagacaacaccatcaacctgatccacacgttccgggactacctgcactaccacatcaagtgctctaaggcctatattcacacacgtatgcgggcgaaaacgtctgacttcctcaaggtgctgaaccgcgcacgcccagatgccgagaaaaaagaaatgaaaacaatcacggggaagacgttttcatcccgctaatcttgggaataagaggaggaagcggctggcaactgaaggctggaacacttgctactggataatcgtagcttttaatgttgcgcctcttcaggttcttaagggattctccgttttggttccattttgtacacgtttggaaaataatctgcagaaacgagctgtgcttgcaaagacttcatagttcccaagaattaaaaaaaaaaaagaattccacttgatcaacttaattccttttctttatcttccctccctcacttcccttttctcccaccctcttttccaagctgtttcgctttgcaatatattactggtaatgagttgcaggataatgcagtcataacttgttttctcctaagtatttgagttcaaaactcctgtatctaaagaaatacggttggggtcattaataaagaaaatctttctatctta

SEQ ID NO: 347654 - DNA, 911 bp, Homo sapiens
  misc_feature (31)..(31): n is a, c, g, or t
tatcccgtggcattgcagcgggcatgatganaccatatgttgagtctaaaaaggacagagtcacagtagtcttcagcacagtgtttaaggatgacgacgatgtggtcattggaaaggtgttcatgcaggagttcaaagaaggacgcagagccagccacacagccccacaggtcctctttagccacagggaacctcctctggagctgaaagacacagacgccgctgtgggtgacaacattggctacattacctttgtgctgttccctcgtcacaccaatgccagtgctcgagacaacaccatcaacctgatccacacgttccgggactacctgcactaccacatcaagtgctctaaggcctatattcacacacgtatgcgggcgaaaacgtctgacttcctcaaggtgctgaaccgcgcacgcccagatgccgagaaaaaagaaatgaaaacaatcacggggaagacgttttcatcccgctaatcttgggaataagaggaggaagcggctggcaactgaaggctggaacacttgctactggataatcgtagcttttaatgttgcgcctcttcaggttcttaagggattctccgttttggttccattttgtacacgtttggaaaataatctgcagaaacgagctgtgcttgcaaagacttcatagttcccaagaattaaaaaaaaaaaagaattccacttgatcaacttaattccttttctttatcttccctccctcacttcccttttctcccaccctcttttccaagctgtttcgctttgcaatatattactggtaatgagttgcaggataatgcagtcataacttgttttctcctaagtatttgagttcaaaactcctgtatctaaagaaatacggttggggtcattaataaagaaaatctttctatctta

SEQ ID NO: 347655 - DNA, 872 bp, Homo sapiens
ggcgccgcggggccgcgcgtccaggcggcgagcggaagtgggtgtgagagcggaagtggccggctagagccgggggctgggcggggaccgggcttgtcggtgaagcggcagtggcggcggcggcggcggctcggcaggcgggttcaggcttcgggggccagccgccgccatgatcctgctggaggtgaacaaccgcatcatcgaggagacgctcgcgctcaagttcgagaacgcggccgccggaaacaaaccggaagcagtagaagtaacatttgcagatttcgatggggtcctctatcatatttcaaatcctaatggagacaaaacaaaagtgatggtcagtatttctttgaaattctacaaggaacttcaggcacatggtgctgatgagttattaaagagggtgtacgggagtttcttggtaaatccagaatcaggatacaatgtctctttgctatatgaccttgaaaatcttccggcatccaaggattccattgtgcatcaagctggcatgttgaagcgaaattgttttgcctctgtctttgaaaaatacttccaattccaagaagagggcaaggaaggagagaacagggcagttatccattatagggatgatgagaccatgtatgttgagtctaaaaaggacagagtcacagtagtcttcagcacagtgtttaaggatgacgacgatgtggtcattggaaaggtgttcatgcaggagttcaaagaaggacgcagagccagccacacagccccacaggtcctctttagccacagggaacctcctctggagctgaaagacacagacgccgctgtgggtgacaacattggctacattacctttggtactcaagctcgagttcgtatcatgt

SEQ ID NO: 347656 - DNA, 2335 bp, Homo sapiens
gggacgacataggctaggtacagctggtgtgagtcaccgcgactgtcggtgaagcggcagtggcggcggcggcggcggctcggcaggcgggttcaggcttcgggggccagccgccgccatgatcctgctggaggtgaacaaccgcatcatcgaggagacgctcgcgctcaagttcgagaacgcggccgccggaaacaaaccggaagcagtagaagtaacatttgcagatttcgatggggtcctctatcatatttcaaatcctaatggagacaaaacaaaagtgatggtcagtatttctttgaaattctacaaggaacttcaggcacatggtgctgatgagttattaaagagggtgtacgggagtttcttggtaaatccagaatcaggcagtcttctaataggttgtctcaacattcatggccagaggaattgaaaggcaccgtgtcatccttgaatagaacagctatgttatactgctttaaaaaggaggtttaaagtggaaaaactgaacagcctttttaccctgtgattcagtggcatgtctcaaattctgaggcatttagcaggaccccaaagtgagaaccaggtagtaagaccattggaacataatattttttactcaactattacaactttggtaccttgattagaaaagtcttctaagaaggaagttctctgtcactcttaacagcagttacttgtgctagcttatttcatcacctcacctattttttcagacagtctcattctgttgcccaggctggagtgcagtggtacagtcatagctcactgcagcctcctccaaatcttgggctcaagcaatcctcccgctttagcctctccggtagctgggaactacaggcacatgccaccatacccaattaatttttttaatattttgtagaaacagagtctcactgtctgctgcccatactgccaaaacagagtaaggaggtctcaaactcctagccttgagcaatctacccacctcagcctccgcctcccagagagttgggatcacaggcatgagccaccatacccagcaccttttttttttttaatctccaaattggcgggatgaatgtgtcacagaaataaaagccaagataacactgtaggcttttggcaaaatcaaggtattaaaagaaagaaacaaacagatctagaacagaaaaatcatgtccaaagtcttgggcatgcttgtcacagccaacatcctgacatggaaagtttatgtttctgtccctgggcctccttctacctcccactaaatcatagacattgccagattgcagaccctgtcttcatagaagtgtgaaatgtaaaagtgtgtgaaagtagtgtctcaaccaggtgcagtggctcacacctgtaatcccagcactttggggaggccaaggtgagtgaattgcttgagctcagaagttcaggaccagcctgggcagcataatgagatacctgtctctataaaaaatacagaaattagccaggcatggtggcagccacctgtaataccaggtactcaggtggctgaagcacgagaatcgcttgaacccaggaggcagaggttgcagtgagctgagattgcgccactgccctctagcctaggcgacagagcaagattcagtctcgagaaaaaaaaaaaaagaccgtagagtctctcctcctcttttttaatgggtttatctaggcacgtttggaaaactcagcaagttatactagatttttacttctcttcatcctcagtatattctgttcatcatgttagaagccttacttaaagacagactttaccttagctatagttttatttgctcttatttggcttcctaaaactagcaaacctcagctctaaatcttttcttttttaatctaaccttgtaatctgtgtgcttatttggttttcaagtacccaaaatagaatgatgattgatattatttaatactggagtgcctctccagtattaaataaaatgtgctaagcattatctagagcaaagatttagcccatcctcccgaagagcccatgctcaacaaaaaacacagacctcagccgggcgcggtggcttatgcctgtaatcccagcactatcggaggccagggcgggcggatcacctgcattcaggagttcaagaccagcatgaccaacatggagaaaccccgtctctgctaaaagtacaaaattagccaggcctggtggcgcatgcctgtaatcccagctgcttgggaggctgaggcaggagaatcgcttgaacctgggaggcggatgttgtgggtgagccaagatcatgccattgcactccagcctgggcaacaagagcgaaactccatctca

SEQ ID NO: 347657 - DNA, 624 bp, Homo sapiens
gggacgacataggctaggtacagctggtgtgagtcaccgcgactgtcggtgaagcggcagtggcggcggcggcggcggctcggcaggcgggttcaggcttcgggggccagccgccgccatgatcctgctggaggtgaacaaccgcatcatcgaggagacgctcgcgctcaagttcgagaacgcggccgccggaaacaaaccggaagcagtagaagtaacatttgcagatttcgatggggtcctctatcatatttcaaatcctaatggagacaaaacaaaagtgatggtcagtatttctttgaaattctacaaggaacttcaggcacatggtgctgatgagttattaaagagggtgtacgggagtttcttggtaaatccagaatcaggatacaatgtctctttgctatatgaccttgaaaatcttccggcatccaaggattccattgtgcatcaagctggcatgttgaagcacagctctcttctcctattttcatcctgcaagcaactcaaaatatttaaaataaagtttacattgtagttattttcaaatctttgcttgataagtattaagaaatattggacttgctgccgtaatttaaagctctgttgatgcgggggggatcc

SEQ ID NO: 347658 - DNA, 693 bp, Homo sapiens
gggacgacataggctaggtacagctggtgtgagtcaccgcgactgtcggtgaagcggcagtggcggcggcggcggcggctcggcaggcgggttcaggcttcgggggccagccgccgccatgatcctgctggaggtgaacaaccgcatcatcgaggagacgctcgcgctcaagttcgagaacgcggccgccggaaacaaaccggaagcagtagaagtaacatttgcagatttcgatggggtcctctatcatatttcaaatcctaatggagacaaaacaaaagtgatggtcagtatttctttgaaattctacaaggaacttcaggcacatggtgctgatgagatacaatgtctctttgctatatgaccttgaaaatcttccggcatccaaggattccattgtgcatcaagctggcatgttgaagcgaaattgttttgcctctgtctttgaaaaatacttccaattccaagaagagggcaaggaaggagagaacagggcagttatccattatagggatgatgagaccatgtgagtgtagaatttggtcctgaagcctggatatggctgctacaccaccatggcacttactgaaagaaatatggcttggtcaaactttcagctgtattgcgtgaaaatgtttttctcataaaatgtcttaagccaggaagtagatgatagggcagaaatcagccact

SEQ ID NO: 347659 - DNA, 2370 bp, Homo sapiens
ctcggagaaggggcgcaggtggccgccatcttggattgcgaactgggtcgctacgcttcacgccagggcggagtggcggcccttctgttacccgccacacacgtcgccgctggggactgggaaatcagggcatcggagagtgccacattaatggatgccatggctagtccagggaaagataactatagaatgaaaagttataagaataaagccctaaatcctcaagagatgcgtagacgaagagaagaagaaggaatacagcttagaaaacaaaaaagagaagaacagttgttcaaacgcagaaatgtctatttgcccagaaatgatgaatctatgcttgaaagtcctatacaggatccagatattagttccactgtacccattccagaggaagaagttgttactacagatatggttcagatgattttttctaataatgctgatcaacagctaacagcaacacagaaatttagaaagctgctttctaaagaacctaatccaccaatagatcaagttatacagaaaccaggagttgtacagagatttgtgaaatttcttgaaagaaatgaaaattgcactttacaatttgaagctgcatgggcattaacaaatatagcatctggaacttttctgcataccaaggtagtgattgaaactggggctgttccgatttttatcaaacttcttaattctgaacatgaagatgttcaggaacaggctgtttgggcacttggtaatattgctggtgacaatgcagaatgcagagattttgttttgaattgtgaaatacttccacctcttttagagttattaacaaattcaaacagactcacaacaacaagaaatgccgtgtgggccctctcaaatttatgtagaggcaaaaaccctcctccaaactttagtaaggtttcaccttgcttaaatgtcctgtcacgactgttgtttagcagtgacccagatgtgttagcagacgtgtgttgggccctttcttatctctccgatggacccaatgataaaattcaagcagtcattgattctggagtctgtcgaagattggtggaacttttgatgcacaatgattataaagttgtatcacctgcattaagggcagttggtaatattgtgactggtgatgatattcaaacacaggtaattttgaattgttctgcattaccctgtctcttacatttattgagtagcccaaaggagtcaattagaaaagaagcctgctggactgtttctaacatcactgctggaaatagagctcagattcaggctgttatagatgcaaatatttttcctgttttgattgagattcttcagaaagcagagtttcgtaccagaaaagaagcagcttgggctataactaatgcaacatcaggaggtactccagagcaaataaggtatttggtagctttaggctgcattaaaccactttgtgatcttttgactgttatggactccaaaatagtccaagtggctttaaatggacttgaaaatattttacgtcttggagaacaagaatctaagcagaatggaataggcattaatccatactgtgctctcattgaagaagcatatggtctggataaaattgagtttttgcaaagccatgaaaatcaggaaatttaccagaaggcatttgatctgattgaacattactttggtgtagaagaagatgaccccagcattgtacctcaggtggatgaaaaccaacaacagtttatatttcagcagcaggaagcaccaatggatggatttcaactttaacttactggaggaaaaaaaatttatggctaaaaagggtagcttcaggtaactcctctttgttgccaatgtaagaatgtttgtttttttacatagaacagtaaagagaatttgatgcacttttagaaagcaaaatgaaacaaaaatttccattcagatgcaacctttcattgtagtttgttgttgttttagttttgttgttgtgcctgtatttatatcttctattgtttggatttttgtatctatttgtgaataattgaatatgcaattatttagtaatttaagcttgaaaaggagaattttggtgaagcattacttagtaattctgaattttttcaagcattcttggaaactgcacattagcagtaaacctattgataattgcattttggcagtaagtcttacacatctaatctctactaaatctacctctatcttgaagcagaaataaaaacaaaaaagcttcagaagcatgaaataatgcaaatgctaaattagaatgtgaaaatatttattaccttaaattatacatatcactgtgctgtaggttatactttgcaaaaaattgcaacagaaaacctataaaatttatttataaaacag

SEQ ID NO: 347660 - DNA, 2184 bp, Homo sapiens
ctcggagaaggggcgcaggtggccgccatcttggattgcgaactgggtcgctacgcttcacgccagggcggagtggcggcccttctgttacccgccacacacgtcgccgctggggactgggaaatcagggcatcggagagtgccacattaatggatgccatggctagtccagggaaagataactatagaatgaaaagttataagaataaagccctaaatcctcaagagatgcgtagacgaagagaagaagaaggaatacagcttagaaaacaaaaaagagaagaacagttgttcaaacgcagaaatgtctatttgcccagaaatgatgaatctatgcttgaaagtcctatacaggatccagatattagttccactgtacccattccagaggaagaagttgttactacagatatggttcagatgattttttctaataatgctgatcaacagctaacagcaacacagaaatttagaaagctgctttctaaagaacctaatccaccaatagatcaagttatacagaaaccaggagttgtacagagatttgtgaaatttcttgaaagaaatgaaaattgcactttacaatttgaagctgcatgggcattaacaaatatagcatctggaacttttctgcataccaaggtagtgattgaaactggggctgttccgatttttatcaaacttcttaattctgaacatgaagatgttcaggaacaggctgtttgggcacttggtaatattgctggtgacaatgcagaatgcagagattttgttttgaattgtgaaatacttccacctcttttagagttattaacaaattcaaacagactcacaacaacaagaaatgccgtgtgggccctctcaaatttatgtagaggcaaaaaccctcctccaaactttagtaaggtttcaccttgcttaaatgtcctgtcacgactgttgtttagcagtgacccagatgtgttagcagacgtgtgttgggccctttcttatctctccgatggacccaatgataaaattcaagcagtcattgattctggagtctgtcgaagattggtggaacttttgatgcacaatgattataaagttgtatcacctgcattaagggcagttggtaatattgtgactggtgatgatattcaaacacaggtaattttgaattgttctgcattaccctgtctcttacatttattgagtagcccaaaggagtcaattagaaaagaagcctgctggactgtttctaacatcactgctggaaatagagctcagattcaggctgttatagatgcaaatatttttcctgttttgattgagattcttcagaaagcagagtttcgtaccagaaaagaagcagcttgggctataactaatgcaacatcaggaggtactccagagcaaataaggtatttggtagctttaggctgcattaaaccactttgtgatcttttgactgttatggactccaaaatagtccaagtggctttaaatggacttgaaaatattttacgtcttggagaacaagaatctaagcagaatggaataggcattaatccatactgtgctctcattgaagaagcatatggtctggataaaattgagtttttgcaaagccatgaaaatcaggaaatttaccagaaggcatttgatctgattgaacattactttggtgtagaagaagatgaccccagcattgtacctcaggtggatgaaaaccaacaacagtttatatttcagcagcaggaagcaccaatggatggatttcaactttaacttactggaggaaaaaaaatttatggctaaaaagggtagcttcagaaatgacagactttttcattgaatgatgaggacacagcagccatattatgccaagaggaaaaatatcatgatcatattgaaagatcaagcatgagcttccatggtgaagtcttctgtaccaatgcaccagagaatgcctaccatccaaaaaagcagtcagctgatggaaaagaagattattaaacctttgttctgggatttactgttaaaaaacaaacaaaaaacaacaaaaaagcggtgacaggaaacagttaaggaaatgatttaactgaagggaagcaagatttttttaaagcattgttcttaatccccatgactgtccttcagtcacaattccagaataaaagaatctactttgtgtaaaaatgt

SEQ ID NO: 347661 - DNA, 224 bp, Homo sapiens
catttattgagtagcccaaaggagtcaattagaaaagaagcctgctggactgtttctaacatcactgctggaaatagagctcagattcaggtaactacccttcagatctgagagtagaacagcaaggtctaagaagccagtttggacaaaagttaacacttttactaaaaaagattcctttttaaaaagataccgaaaaagtattttaaagaacatgggctttc

SEQ ID NO: 347662 - DNA, 2476 bp, Homo sapiens
ctcggagaaggggcgcaggtggccgccatcttggattgcgaactgggtcgctacgcttcacgccagggcggagtggcggcccttctgttacccgccacacacgtcgccgctggggactgggaaatcagggcatcggagagtgccacattaatgggtctctggaacctggcggtgccgggtgtttctcgtgttttccccagggcgacagcggtcgcgggggcgtggcagccggacctttcccttgcggacgcgaaggcgtgatgccatggctagtccagggaaagataactatagaatgaaaagttataagaataaagccctaaatcctcaagagatgcgtagacgaagagaagaagaaggaatacagcttagaaaacaaaaaagagaagaacagttgttcaaacgcagaaatgtctatttgcccagaaatgatgaatctatgcttgaaagtcctatacaggatccagatattagttccactgtacccattccagaggaagaagttgttactacagatatggttcagatgattttttctaataatgctgatcaacagctaacagcaacacagaaatttagaaagctgctttctaaagaacctaatccaccaatagatcaagttatacagaaaccaggagttgtacagagatttgtgaaatttcttgaaagaaatgaaaattgcactttacaatttgaagctgcatgggcattaacaaatatagcatctggaacttttctgcataccaaggtagtgattgaaactggggctgttccgatttttatcaaacttcttaattctgaacatgaagatgttcaggaacaggctgtttgggcacttggtaatattgctggtgacaatgcagaatgcagagattttgttttgaattgtgaaatacttccacctcttttagagttattaacaaattcaaacagactcacaacaacaagaaatgccgtgtgggccctctcaaatttatgtagaggcaaaaaccctcctccaaactttagtaaggtttcaccttgcttaaatgtcctgtcacgactgttgtttagcagtgacccagatgtgttagcagacgtgtgttgggccctttcttatctctccgatggacccaatgataaaattcaagcagtcattgattctggagtctgtcgaagattggtggaacttttgatgcacaatgattataaagttgtatcacctgcattaagggcagttggtaatattgtgactggtgatgatattcaaacacaggtaattttgaattgttctgcattaccctgtctcttacatttattgagtagcccaaaggagtcaattagaaaagaagcctgctggactgtttctaacatcactgctggaaatagagctcagattcaggctgttatagatgcaaatatttttcctgttttgattgagattcttcagaaagcagagtttcgtaccagaaaagaagcagcttgggctataactaatgcaacatcaggaggtactccagagcaaataaggtatttggtagctttaggctgcattaaaccactttgtgatcttttgactgttatggactccaaaatagtccaagtggctttaaatggacttgaaaatattttacgtcttggagaacaagaatctaagcagaatggaataggcattaatccatactgtgctctcattgaagaagcatatggtctggataaaattgagtttttgcaaagccatgaaaatcaggaaatttaccagaaggcatttgatctgattgaacattactttggtgtagaagaagatgaccccagcattgtacctcaggtggatgaaaaccaacaacagtttatatttcagcagcaggaagcaccaatggatggatttcaactttaacttactggaggaaaaaaaatttatggctaaaaagggtagcttcaggtaactcctctttgttgccaatgtaagaatgtttgtttttttacatagaacagtaaagagaatttgatgcacttttagaaagcaaaatgaaacaaaaatttccattcagatgcaacctttcattgtagtttgttgttgttttagttttgttgttgtgcctgtatttatatcttctattgtttggatttttgtatctatttgtgaataattgaatatgcaattatttagtaatttaagcttgaaaaggagaattttggtgaagcattacttagtaattctgaattttttcaagcattcttggaaactgcacattagcagtaaacctattgataattgcattttggcagtaagtcttacacatctaatctctactaaatctacctctatcttgaagcagaaataaaaacaaaaaagcttcagaagcatgaaataatgcaaatgctaaattagaatgtgaaaatatttattaccttaaattatacatatcactgtgctgtaggttatactttgcaaaaaattgcaacagaaaacctataaaatttatttataaaacag

SEQ ID NO: 347663 - DNA, 838 bp, Homo sapiens
  misc_feature (123)..(123): n is a, c, g, or t
tctcctagcacagtgcctaaaacaccataggtgagcactaaatgtgaggtatgattgttagtagtgacagtaataatattgatataacatgcacaaagctcagctattacagcaggaatttcncagaaggaatcagcaagaaagaagataatattaagaagaagctgcagatatggaagaatatgaagagagtggattgttggaaacagatgaggctaccctagatacaaggaaaatagtagaagcttgtaaagccaaaactgatgctggcggtgaagatgctattttgcaaaccagaacttatgacctttacatcacttatgataaatattaccagactccacgattatggttgtttggctatgatgagcaacggcagcctttaacagttgagcacatgtatgaagacatcagtcaggatcatgtgaagaaaacagtgaccattgaaaatcaccctcatctgccaccacctcccatgtgttcagttcacccatgcaggcatgctgaggtgatgaagaaaatcattgagactgttgcagaaggagggggagaacttggagttcatatgtatcttcttattttcttgaaatttgtacaagctgtcattccaacaatagaatatgactacacaagacacttcacaatgtaatgaagagagcataaaatctatcctaattattggttctgatttttaaagaattaacccatagatgtgaccattgaccatattcatcaatatatacagtttctctaataagggacttatatgtttatgcattaaataaaaatatgttccactaccagccttacttgtttaataaaaatcagtgcaaagaga

SEQ ID NO: 347664 - DNA, 471 bp, Homo sapiens
  misc_feature (1)..(1): n is a, c, g, or t
  misc_feature (9)..(9): n is a, c, g, or t
nattttggnacggaaacccttttttgttgacctgttgaagacatcagtcaggatcatgtgaagaaaacagtgaccattgaaaatcaccctcatctgccaccacctcccatgtgttcagttcacccatgcaggcatgctgaggtgatgaagaaaatcattgagactgttgcagaaggagggggagaacttggagttcatatgtatcttcttattttcttgaaatttgtacaagctgtcattccaacaatagaatatgactacacaagacacttcacaatgtaatgaagagagcataaaatctatcctaattattggttctgatttttaaagaattaacccatagatgtgaccattgaccatattcatcaatatatacagtttctctaataagggacttatatgtttatgcattaaataaaaatatgttccactaccagccttacttgtttaataaaaatcagtgcaaagaga

SEQ ID NO: 347665 - DNA, 467 bp, Homo sapiens
tgagatggagtctcgctctgtcgcccaggctggagtgcagtggcgcaatctcagctcattgcaagctctgcctcccgggtttacgccattctcctgcctcagcctcctgagtagctgggaccacaggcgcccaccaccctgcccggctaattttttatattcttagtagagacggtgtttcaccatgttagccaggatggtctcgatctcctgaccatgtgatccgcccacctcagtctcccacagtgctgggattacaggcgtgagccactgcacccggccttaaatagtaatttcaaagcattttttatgctttcagccaacggcagcctttaacagttgagcacatgtatgaagacatcagtcaggatcatgtgaagaaaacagtgaccattgaaaatcaccctcatctgccaccacctcccatggggtcgacgcggccgggaatttaataatagtagtcgacc

SEQ ID NO: 347666 - DNA, 201 bp, Homo sapiens
ccccagacactatcccaaccacccagccccacaattccctcaccacttcacaacggcagcctttaacagttgagcacatgtatgaagacatcagtcaggatcatgtgaagaaaacagtgaccattgaaaatcaccctcatctgccaccacctcccatgtgttcagttcacccatgcaggtctgtatatgtagagataaata

SEQ ID NO: 347667 - DNA, 1659 bp, Homo sapiens
acgttcagtgttacgcttccggaaggaggggagaagcggcttatcccgccccagcccggcccctttctcacgtcacgtgccgggagagtctagtgtcacgtgaggccccggtggcggcgcagctacggcaagagagtgagaaggaagggaagccggaaggggcgcgagtgaagcaaagcgaggacagacagctcccagagggcgaggggtgcgtgtgcgtccgcttctcacctcaggtctcccttcggccccgctgccctccctcgcggctgggtgacagctgggtccggtccgtcgcgggctgcctggggtgcgaggatcgcgcaccccgtcttcgcgcgctgtgcctgccgccccgccccctcgtcccgcccgtcccgtcgcgtcgcgtcccgtcccctcgggtgctgccagccgggtgctgatgcgagtcggtggcagcgaggacattttctgactccctggcccctgacacggctgcactttccatcccgtcgcggggccggccgctactccggccccaggatgcagaatgtgattaatactgtgaagggaaaggcactggaagtggctgagtacctgaccccggtcctcaaggaatcaaagtttaaggaaacaggtgtaattaccccagaagagtttgtggcagctggagatcacctagtccaccactgtccaacatggcaatgggctacaggggaagaattgaaagtgaaggcatacctaccaacaggcaaacaatttttggtaaccaaaaatgtgccgtgctataagcggtgcaaacagatggaatattcagatgaattggaagctatcattgaagaagatgatggtgatggcggatgggtagatacatatcacaacacaggtattacaggaataacggaagccgttaaagagatcacactggaaaataaggacaatataaggcttcaagattgctcagcactatgtgaagaggaagaagatgaagatgaaggagaagctgcagatatggaagaatatgaagagagtggattgttggaaacagatgaggctaccctagatacaaggaaaatagtagaagcttgtaaagccaaaactgatgctggcggtgaagatgctattttgcaaaccagaacttatgacctttacatcacttatgataaatattaccagactccacgattatggttgtttggctatgatgagcaacggcagcctttaacagttgagcacatgtatgaagacatcagtcaggatcatgtgaagaaaacagtgaccattgaaaatcaccctcatctgccaccacctcccatgtgttcagttcacccatgcaggcatgctgaggtgatgaagaaaatcattgagactgttgcagaaggagggggagaacttggagttcatatgtatcttcttattttcttgaaatttgtacaagctgtcattccaacaatagaatatgactacacaagacacttcacaatgtaatgaagagagcataaaatctatcctaattattggttctgatttttaaagaattaacccatagatgtgaccattgaccatattcatcaatatatacagtttctctaataagggacttatatgtttatgcattaaataaaaatatgttccactaccagccttacttgtttaataaaaatcagtgcaaagaga

SEQ ID NO: 347668 - DNA, 1828 bp, Homo sapiens
acgttcagtgttacgcttccggaaggaggggagaagcggcttatcccgccccagcccggcccctttctcacgtcacgtgccgggagagtctagtgtcacgtgaggccccggtggcggcgcagctacggcaagagagtgagaaggaagggaagccggaaggggcgcgagtgaagcaaagcgaggacagacagctcccagagggcgaggggtgcgtgtgcgtccgcttctcacctcaggtctcccttcggccccgctgccctccctcgcggctgggtgacagctgggtccggtccgtcgcgggctgcctggggtgcgaggatcgcgcaccccgtcttcgcgcgctgtgcctgccgccccgccccctcgtcccgcccgtcccgtcgcgtcgcgtcccgtcccctcgggtgctgccagccgggtgctgatgcgagtcggtggcagcgaggacattttctgactccctggcccctgacacggctgcactttccatcccgtcgcggggccggccgctactccggccccaggatgcagaatgtgattaatactgtgaagggaaaggcactggaagtggctgagtacctgaccccggtcctcaaggaatcaaagtttaaggaaacaggtgtaattaccccagaagagtttgtggcagctggagatcacctagtccaccactgtccaacatggcaatgggctacaggggaagaattgaaagtgaaggcatacctaccaacaggcaaacaatttttggtaaccaaaaatgtgccgtgctataagcggtgcaaacagatggaatattcagatgaattggaagctatcattgaagaagatgatggtgatggcggatgggtagatacatatcacaacacaggtattacaggaataacggaagccgttaaagagatcacactggaaaataaggacaatataaggcttcaagattgctcagcactatgtgaagaggaagaagatgaagatgaaggagaagctgcagatatggaagaatatgaagagagtggattgttggaaacagatgaggctaccctagatacaaggaaaatagtagaagcttgtaaagccaaaactgatgctggcggtgaagatgctattttgcaaaccagaacttatgacctttacatcacttatgataaatattaccagactccacgattatggttgtttggctatgatgagcaacggcagcctttaacagttgagcacatgtatgaagacatcagtcaggatcatgtgaagaaaacagtgaccattgaaaatcaccctcatctgccaccacctcccatgtgttcagttcacccatgcaggcatgctgaggtgatgaagaaaatcattgagactgttgcagaaggagggggagaacttggagttcatatgtatcttcttattttcttgaaatttgtacaagctgtcattccaacaatagaatatgactacacaagacacttcacaatgtaatgaagagagcataaaatctatcctaattattggttctgatttttaaagaattaacccatagatgtgaccattgaccatattcatcaatatatacagtttctctaataagggacttatatgtttatgcattaaataaaaatatgttccactaccagccttacttgtttaataaaaatcagtgcaaagagaaaaaacccacaggaggggtcttcccccgtcgtttgcagatggggaaaacaacacaatgggccccttgggctcagcggggactttggggccgttcccttagtggggttaattaaatcccggttatcacttctagcttggtgttggtggagacggattactacttaagcgg

SEQ ID NO: 347669 - DNA, 3147 bp, Homo sapiens
acgttcagtgttacgcttccggaaggaggggagaagcggcttatcccgccccagcccggcccctttctcacgtcacgtgccgggagagtctagtgtcacgtgaggccccggtggcggcgcagctacggcaagagagtgagaaggaagggaagccggaaggggcgcgagtgaagcaaagcgaggacagacagctcccagagggcgaggggtgcgtgtgcgtccgcttctcacctcaggtctcccttcggccccgctgccctccctcgcggctgggtgacagctgggtccggtccgtcgcgggctgcctggggtgcgaggatcgcgcaccccgtcttcgcgcgctgtgcctgccgccccgccccctcgtcccgcccgtcccgtcgcgtcgcgtcccgtcccctcgggtgctgccagccgggtgctgatgcgagtcggtggcagcgaggacattttctgactccctggcccctgacacggctgcactttccatcccgtcgcggggccggccgctactccggccccaggatgcagaatgtgattaatactgtgaagggaaaggcactggaagtggctgagtacctgaccccggtcctcaaggaatcaaagtttaaggaaacaggtgtaattaccccagaagagtttgtggcagctggagatcacctagtccaccactgtccaacatggcaatgggctacaggggaagaattgaaagtgaaggcatacctaccaacaggcaaacaatttttggtaaccaaaaatgtgccgtgctataagcggtgcaaacagatggaatattcagatgaattggaagctatcattgaagaagatgatggtgatggcggatgggtagatacatatcacaacacaggtattacaggaataacggaagccgttaaagagatcacactggaaaataaggacaatataaggcttcaagattgctcagcactatgtgaagaggaagaagatgaagatgaaggagaagctgcagatatggaagaatatgaagagagtggattgttggaaacagatgaggctaccctagatacaaggaaaatagtagaagcttgtaaagccaaaactgatgctggcggtgaagatgctattttgcaaaccagaacttatgacctttacatcacttatgataaatattaccagactccacgattatggttgtttggctatgatgagcaacggcagcctttaacagttgagcacatgtatgaagacatcagtcaggatcatgtgaagaaaacagtgaccattgaaaatcaccctcatctgccaccacctcccatgtgttcagttcacccatgcaggcatgctgaggtgatgaagaaaatcattgagactgttgcagaaggagggggagaacttggagttcatatgtatccttccctgtatgtaagattagtggcaaaatggctgttaacgattttttttttgagaaatttagtgtaaccttaatgatacagtagctataacttgttttaacttctcatctgaaaatcctagtagaagtctttcatttatttagaaaatgttatattgtgatagttatgccttgcttagttgattagaacatgtccccatgtgtagcagtagctcacccttgttacagaggtaactactaatttagaataataatatgagtatctttttcttatgtacatttccagtttaacatgttaccaaaaatgtactttcccatcaggtaaaagtaaaattaggttgtgtcaatctgaggtgtctctgaagcaaataattcagcttaaacaaatacgttaattaaaagtaatgtactacgtgaagtgctttagatattcttaaaatatagtacgttcatttttctcaagacagtagcacctttcttgtatcttactatagttttcctactcagttttcttggattgacaaaagtaatacattcaagttaatgcccaagcaaactgttggatcctaaagtacatgtactcatagcatagatttatcaaaaacagtcaaaatcaatgatttacatgccagatagcttgaattagtttgatgctaggttaatacttgacttggtggtggtttcggctactatgtgttagattagatgtggagactaagacgccacgtctaatcagactgtggggcattgctaataaagtgtgtccctaagaagaactttgaactgatttgatattgaaacaaaccaaaaacttccagtccaaaccatatttactcctgaagtcctattatgcctaactggcacatctctgctggatgctaggtagcaacttggaagactgtctatatataattcataatagtaattggtttcccccaatgaaaagtaagctcctaatgtttttaagtgcaatgaacataaaaaaatttcagaatttaattaaagacagtccagtagagctcagtctttggcaaatacatacactaacctagaatcagtctactatacaggatttttatttaatttttttctcttttgctatagtactttattatagtctattctgcctcattttctgacataactctagcaaacttaaaggagtctagtaaatgagtacattttgtactcatttaaacatgtatagctttgtcctttttatgtcaaagtaattgtgcttatatgaacacctactcattaagaagtttcaaattcaataatcgaatgagtggtcaggtagtcttaaagagcctcatgttaaatagacacaaatttgcatagttgaattctttaatagacttaatttaagattttgtggggtttttttgagaaattaatggcttaataaaatggataattacaacatgggcttaaaacatagaactatttacaaatcttattttccttagctaaaaacctttaggtatcttcttattttcttgaaatttgtacaagctgtcattccaacaatagaatatgactacacaagacacttcacaatgtaatgaagagagcataaaatctatcctaattattggttctgatttttaaagaattaacccatagatgtgaccattgaccatattcatcaatatatacagtttctctaataagggacttatatgtttatgcattaaataaaaatatgttccactaccagccttacttgtttaataaaaatcagtgcaaagaga

SEQ ID NO: 347670 - DNA, 1650 bp, Homo sapiens
acgttcagtgttacgcttccggaaggaggggagaagcggcttatcccgccccagcccggcccctttctcacgtcacgtgccgggagagtctagtgtcacgtgaggccccggtggcggcgcagctacggcaagagagtgagaaggaagggaagccggaaggggcgcgagtgaagcaaagcgaggacagacagctcccagagggcgaggggtgcgtgtgcgtccgcttctcacctcaggtctcccttcggccccgctgccctccctcgcggctgggtgacagctgggtccggtccgtcgcgggctgcctggggtgcgaggatcgcgcaccccgtcttcgcgcgctgtgcctgccgccccgccccctcgtcccgcccgtcccgtcgcgtcgcgtcccgtcccctcgggtgctgccctgatgcgagtcggtggcagcgaggacattttctgactccctggcccctgacacggctgcactttccatcccgtcgcggggccggccgctactccggccccaggatgcagaatgtgattaatactgtgaagggaaaggcactggaagtggctgagtacctgaccccggtcctcaaggaatcaaagtttaaggaaacaggtgtaattaccccagaagagtttgtggcagctggagatcacctagtccaccactgtccaacatggcaatgggctacaggggaagaattgaaagtgaaggcatacctaccaacaggcaaacaatttttggtaaccaaaaatgtgccgtgctataagcggtgcaaacagatggaatattcagatgaattggaagctatcattgaagaagatgatggtgatggcggatgggtagatacatatcacaacacaggtattacaggaataacggaagccgttaaagagatcacactggaaaataaggacaatataaggcttcaagattgctcagcactatgtgaagaggaagaagatgaagatgaaggagaagctgcagatatggaagaatatgaagagagtggattgttggaaacagatgaggctaccctagatacaaggaaaatagtagaagcttgtaaagccaaaactgatgctggcggtgaagatgctattttgcaaaccagaacttatgacctttacatcacttatgataaatattaccagactccacgattatggttgtttggctatgatgagcaacggcagcctttaacagttgagcacatgtatgaagacatcagtcaggatcatgtgaagaaaacagtgaccattgaaaatcaccctcatctgccaccacctcccatgtgttcagttcacccatgcaggcatgctgaggtgatgaagaaaatcattgagactgttgcagaaggagggggagaacttggagttcatatgtatcttcttattttcttgaaatttgtacaagctgtcattccaacaatagaatatgactacacaagacacttcacaatgtaatgaagagagcataaaatctatcctaattattggttctgatttttaaagaattaacccatagatgtgaccattgaccatattcatcaatatatacagtttctctaataagggacttatatgtttatgcattaaataaaaatatgttccactaccagccttacttgtttaataaaaatcagtgcaaagaga

SEQ ID NO: 347671 - DNA, 1443 bp, Homo sapiens
acgttcagtgttacgcttccggaaggaggggagaagcggcttatcccgccccagcccggcccctttctcacgtcacgtgccgggagagtctagtgtcacgtgaggccccggtggcggcgcagctacggcaagagagtgagaaggaagggaagccggaaggggcgcgagtgaagcaaagcgaggacagacagctcccagagggcgaggggtgcgtgtgcgtccgcttctcacctcaggtctcccttcggccccgctgccctccctcgcggctgggtgacagctgggtccggtccgtcgcgggctgcctggggtgcgaggatcgcgcaccccgtcttcgcgcgctgtgcctgccgccccgccccctcgtcccgcccgtcccgtcgcgtcgcgtcccgtcccctcgggtgctgccagccgggtgctgatgcgagtcggtggcagcgaggacattttctgactccctggcccctgacacggctgcactttccatcccgtcgcggggccggccgctactccggccccaggatgcagaatgtgattaatactgtgaagggaaaggcactggaagtggctgagtacctgaccccggtcctcaaggaatcaaagtttaaggaaacaggtgtaattaccccagaagagtttgtggcagctggagatcacctagtccaccactgtccaacatggcaatgggctacaggggaagaattgaaagtgaaggcatacctaccaacaggcaaacaatttttggtaaccaaaaatgtgccgtgctataagcggtgcaaacagatggaatattcagatgaattggaagctatcattgaagaagatgatggtgatggcggatgggtagatacatatcacaacacaggtattacaggaataacggaagccgttaaagagatcacactggaaaataaggacaatataaggcttcaagattgctcagcactatgtgaagaggaagaagatgaagatgaaggagaagctgcagatatggaagaatatgaagagagtggattgttggaaacagatgaggctaccctagatacaaggaaaatagtagaagcttgtaaagccaaaactgatgctggcggtgaagatgctattttgcaaaccagaacttatgacctttacatcacttatgataaatattaccagactccacgattatggttgtttggctatgatgagcaacggcagcctttaacagttgagcacatgtatgaagacatcagtcaggatcatgtgaagaaaacagtgaccattgaaaatcaccctcatctgccaccacctcccatgtgttcagttcacccatgcaggcatgctgaggtgatgaagaaaatcattgagactgttgcagaaggagggggagaacttggagttcatatgtatcttattttccttgaaatgttgtacaaactgtgcatgggaccggtaccgacc

SEQ ID NO: 347672 - DNA, 1021 bp, Homo sapiens
tcacctcggtccggatctcctttcacttcgtccactgtccaacatggcatgggctacaggggaagaattgaaagtgaaggcatacctaccaacaggcaaacaatttttggtaaccaaaaatgtgccgtgctataagcggtgcaaacagatggaatattcagatgaattggaagctatcattgaagaagatgatggtgatggcggatgggtagatacatatcacaacacaggtattacaggaataacggaagccgttaaagagatcacactggaaaataaggacaatataaggcttcaagattgctcagcactatgtgaagaggaagaagatgaagatgaaggagaagctgcagatatggaagaatatgaagagagtggattgttggaaacagatgaggctaccctagatacaaggaaaatagtagaagcttgtaaagccaaaactgatgctggcggtgaagatgctattttgcaaaccagaacttatgacctttacatcacttatgataaatattaccagactccacgattatggttgtttggctatgatgagcaacggcagcctttaacagttgagcacatgtatgaagacatcagtcaggatcatgtgaagaaaacagtgaccattgaaaatcaccctcatctgccaccacctcccatgtgttcagttcacccatgcaggcatgctgaggtgatgaagaaaatcattgagactgttgcagaaggagggggagaacttggagttcatatgtatcttcttattttcttgaaatttgtacaagctgtcattccaacaatagaatatgactacacaagacacttcacaatgtaatgaagagagcataaaatctatcctaattattggttctgatttttaaagaattaacccatagatgtgaccattgaccatattcatcaatatatacagtttctctaataagggacttatatgtttatgcattaaataaaaatatgttccactaccagccttacttgtttaataaaaatcagtgcaaagaga

SEQ ID NO: 347673 - DNA, 993 bp, Homo sapiens
  misc_feature (30)..(30): n is a, c, g, or t
gaacggactcgccacgaacgggcccaggcnccgccatctaacgcacaggaaaaggtagtcgtgcaaccactctctctatttttccccgctacactgccgtgctataagcggtgcaaacagatggaatattcagatgaattggaagctatcattgaagaagatgatggtgatggcggatgggtagatacatatcacaacacaggtattacaggaataacggaagccgttaaagagatcacactggaaaataaggacaatataaggcttcaagattgctcagcactatgtgaagaggaagaagatgaagatgaaggagaagctgcagatatggaagaatatgaagagagtggattgttggaaacagatgaggctaccctagatacaaggaaaatagtagaagcttgtaaagccaaaactgatgctggcggtgaagatgctattttgcaaaccagaacttatgacctttacatcacttatgataaatattaccagactccacgattatggttgtttggctatgatgagcaacggcagcctttaacagttgagcacatgtatgaagacatcagtcaggatcatgtgaagaaaacagtgaccattgaaaatcaccctcatctgccaccacctcccatgtgttcagttcacccatgcaggcatgctgaggtgatgaagaaaatcattgagactgttgcagaaggagggggagaacttggagttcatatgtatcttcttattttcttgaaatttgtacaagctgtcattccaacaatagaatatgactacacaagacacttcacaatgtaatgaagagagcataaaatctatcctaattattggttctgatttttaaagaattaacccatagatgtgaccattgaccatattcatcaatatatacagtttctctaataagggacttatatgtttatgcattaaataaaaatatgttccactaccagccttacttgtttaataaaaatcagtgcaaagaga

SEQ ID NO: 347674 - DNA, 815 bp, Homo sapiens
acgttcagtgttacgcttccggaaggaggggagaagcggcttatcccgccccagcccggcccctttctcacgtcacgtgccgggagagtctagtgtcacgtgaggccccggtggcggcgcagctacggcaagagagtgagaaggaagggaagccggaaggggcgcgagtgaagcaaagcgaggacagacagctcccagagggcgaggggtgcgtgtgcgtccgcttctcacctcaggtctcccttcggccccgctgccctccctcgcggctgggtgacagctgggtccggtccgtcgcgggctgcctggggtgcgaggatcgcgcaccccgtcttcgcgcgctgtgcctgccgccccgccccctcgtcccgcccgtcccgtcgcgtcgcgtcccgtcccctcgggtgctgccagccgggtgctgatgcgagtcggtggcagcgaggacattttctgactccctggcccctgacacggctgcactttccatcccgtcgcggggccggccgctactccggccccaggatgcagaatgtgattaatactgtgaagggaaaggcactggaagtggctgagtacctgaccccggtcctcaaggaatcaaagtttaaggaaacaggtgtaattaccccagaagaggtgagtgctgaagatatactgaagtctttttattttacaataatactaaactaggtggcttttctgcttcataagaaaacatcttgaactttaattttgatttgagtaaaattaggttttatgactgtgatttatgggaatttctacttcccatagaagaaaagatgtaacttccc

SEQ ID NO: 347675 - DNA, 580 bp, Homo sapiens
tttttattgcttactggatttcagtgttacctagtgccatcagtttggtattttgccaccttgcacattcagtgatgtttgatttttctttttcctttttttcatattacttttaaatcctgaatagtttgtggcagctggagatcacctagtccaccactgtccaacatggcaatggtaagtaatattgagtaaagaatagaaaattagtaaaatgcatggcttcagaattatagcaatttgcaaaataggttaatggatgaaaattagaatgaccagtttaactttccccccagcagattcttctgttaaacaatgccccttcaaaataaaggaagaacaagtgggtgttatacctatgttatttggctatgttagcacaatatgatggactaatttgagaaaaatgcatttacttcctttactattacttcttttctttatagtgtctaagtctgaccttctggttctttgaataataaatagtttaataaaatttgatcaggtttttggcagggcgcggtggctcacacctgtaatcccagcactttgggaggctgaggcgggcagatcacgaggt

SEQ ID NO: 347676 - DNA, 311 bp, Homo sapiens
tcgcgcaagtctattatcctgctgtatcctcataattccgcccttccaaaccttaataccaacggcagcctttaacagttgagcacatgtatgaagacatcagtcaggatcatgtgaagaaaacagtgaccattgaaaatcaccctcatctgccaccacctcccatgtgttcagttcacccatgcaggcatgctgaggtgatgaagaaaatcattgagactgttgcagaaggagggggagaacttggagttcatatgtatcttattttccttgaaatgttgtacaaactgtgcatgggaccggtaccgacc

SEQ ID NO: 347677 - DNA, 2120 bp, Homo sapiens
  misc_feature (1668)..(1668): n is a, c, g, or t
  misc_feature (1671)..(1671): n is a, c, g, or t
acgttcagtgttacgcttccggaaggaggggagaagcggcttatcccgccccagcccggcccctttctcacgtcacgtgccgggagagtctagtgtcacgtgaggccccggtggcggcgcagctacggcaagagagtgagaaggaagggaagccggaaggggcgcgagtgaagcaaagcgaggacagacagctcccagagggcgaggggtgcgtgtgcgtccgcttctcacctcaggtctcccttcggccccgctgccctccctcgcggctgggtgacagctgggtccggtccgtcgcgggctgcctggggtgcgaggatcgcgcaccccgtcttcgcgcgctgtgcctgccgccccgccccctcgtcccgcccgtcccgtcgcgtcgcgtcccgtcccctcgggtgctgccagccgggtgctgatgcgagtcggtggcagcgaggacattttctgactccctggcccctgacacggctgcactttccatcccgtcgcggggccggccgctactccggccccaggatgcagaatgtgattaatactgtgaagggaaaggcactggaagtggctgagtacctgaccccggtcctcaaggaatcaaagtttaaggaaacaggtgtaattaccccagaagagtttgtggcagctggagatcacctagtccaccactgtccaacatggcaatgggctacaggggaagaattgaaagtgaaggcatacctaccaacaggcaaacaatttttggtaaccaaaaatgtgccgtgctataagcggtgcaaacagatggaatattcagatgaattggaagctatcattgaagaagatgatggtgatggcggatgggtagatacatatcacaacacaggtattacaggaataacggaagccgttaaagagatcacactggaaaataaggacaatataaggcttcaagattgctcagcactatgtgaagaggaagaagatgaagatgaaggagaagctgcagatatggaagaatatgaagagagtggattgttggaaacagatgaggctaccctagatacaaggaaaatagtagaagcttgtaaagccaaaactgatgctggcggtgaagatgctattttgcaaaccagaacttatgacctttacatcacttatgataaatattaccagactccacgattatggttgtttggctatgatgagcaacggcagcctttaacagttgagcacatgtatgaagacatcagtcaggatcatgtgaagaaaacagtgaccattgaaaatcaccctcatctgccaccacctcccatgtgttcagttcacccatgcaggcatgctgaggtgatgaagaaaatcattgagactgttgcagaaggagggggagaacttggagttcatatgtatcttcttattttcttgaaatttgtacaagctgtcattccaacaatagaatatgactacacaagacacttcacaatgtaatgaagagagcataaaatctatcctaattattggttctgatttttaaagaattaacccatagatgtgaccattgaccatattcatcaatatatacagtttctctaataagggacttatatgtttatgcattaaataaaaatatgttccactaccagccttacttgtttaataaaaatcagtgcaaagagaaaaaaaaanaanaaaaaaaaaaaaaaaaaaaaaaaaaaaaaaaaaaaaaaaaaaaaaaaaaaaaaaagggggggggggacttcataaaagtcacccccggaggggggaccaaatttggatggccaacacaccatttctttgagtgaaaagggatggccccccacaaaggaaacggcacataataaacaacgacaacgaggaacagggagggcaggatataaaacaaacgctggtcgtaagtggaggaaaaatcagcacacgggaggcaaaccgtgggaagaaaaccacaccacatccgggatggggggcaccactgagggaaaccaccaccacacgagagatataacagagcgcgggacgaaaatactaaccaggcggcgagctacagttggtgaaacaaacgcggatattgcagccgcacagaaaactggccacggaaagtcaacgtgtcagaacaatag

SEQ ID NO: 347678 - DNA, 1712 bp, Homo sapiens
acgttcagtgttacgcttccggaaggaggggagaagcggcttatcccgccccagcccggcccctttctcacgtcacgtgccgggagagtctagtgtcacgtgaggccccggtggcggcgcagctacggcaagagagtgagaaggaagggaagccggaaggggcgcgagtgaagcaaagcgaggacagacagctcccagagggcgaggggtgcgtgtgcgtccgcttctcacctcaggtctcccttcggccccgctgccctccctcgcggctgggtgacagctgggtccggtccgtcgcgggctgcctggggtgcgaggatcgcgcaccccgtcttcgcgcgctgtgcctgccgccccgccccctcgtcccgcccgtcccgtcgcgtcgcgtcccgtcccctcgggtgctgccagccgggtgctgatgcgagtcggtggcagcgaggacattttctgactccctggcccctgacacggctgcactttccatcccgtcgcggggccggccgctactccggccccaggatgcagaatgtgattaatactgtgaagggaaaggcactggaagtggctgagtacctgaccccggtcctcaaggaatcaaagtttaaggaaacaggtgtaattaccccagaagagtttgtggcagctggagatcacctagtccaccactgtccaacatggcaatgggctacaggggaagaattgaaagtgaaggcatacctaccaacaggcaaacaatttttggtaaccaaaaatgtgccgtgctataagcggtgcaaacagatggaatattcagatgaattggaagctatcattgaagaagatgatggtgatggcggatgggtagatacatatcacaacacaggtattacaggaataacggaagccgttaaagagatcacactggaaaataaggacaatataaggcttcaagattgctcagcactatgtgaagaggaagaagatgaagatgaaggagaagctgcagatatggaagaatatgaagagagtggattgttggaaacagatgaggctaccctagatacaaggaaaatagtagaagcttgtaaagccaaaactgatgctggcggtgaagatgctattttgcaaaccagaacttatgacctttacatcacttatgataaatattaccagactccacgattatggttgtttggctatgatgagcaacggcagcctttaacagttgagcacatgtatgaagacatcagtcaggatcatgtgaagaaaacagtgaccattgaaaatcaccctcatctgccaccacctcccatgtgttcagttcacccatgcaggcatgctgaggtgatgaagaaaatcattgagactgttgcagaaggagggggagaacttggagttcatatgtatcttcttattttcttgaaatttgtacaagctgtcattccaacaatagaatatgactacacaagacacttcacaatgtaatgaagagagcataaaatctatcctaattattggttctgatttttaaagaattaacccatagatgtgaccattgaccatattcatcaatatatacagtttctctaataagggacttatatgtttatgcattaaataaaaatatgttccactaccagccttacttgtttaataaaaatcagtgcaaagagacacagatgcggccaccttttcttctgatacgttataatcaattctgggcatag

SEQ ID NO: 347679 - DNA, 1651 bp, Homo sapiens
  misc_feature (1446)..(1446): n is a, c, g, or t
  misc_feature (1498)..(1501): n is a, c, g, or t
  misc_feature (1533)..(1533): n is a, c, g, or t
  misc_feature (1540)..(1540): n is a, c, g, or t
acgttcagtgttacgcttccggaaggaggggagaagcggcttatcccgccccagcccggcccctttctcacgtcacgtgccgggagagtctagtgtcacgtgaggccccggtggcggcgcagctacggcaagagagtgagaaggaagggaagccggaaggggcgcgagtgaagcaaagcgaggacagacagctcccagagggcgaggggtgcgtgtgcgtccgcttctcacctcaggtctcccttcggccccgctgccctccctcgcggctgggtgacagctgggtccggtccgtcgcgggctgcctggggtgcgaggatcgcgcaccccgtcttcgcgcgctgtgcctgccgccccgccccctcgtcccgcccgtcccgtcgcgtcgcgtcccgtcccctcgggtgctgccagccgggtgctgatgcgagtcggtggcagcgaggacattttctgactccctggcccctgacacggctgcactttccatcccgtcgcggggccggccgctactccggccccaggatgcagaatgtgattaatactgtgaagggaaaggcactggaagtggctgagtacctgaccccggtcctcaaggaatcaaagtttaaggaaacaggtgtaattaccccagaagagtttgtggcagctggagatcacctagtccaccactgtccaacatggcaatgggctacaggggaagaattgaaagtgaaggcatacctaccaacaggcaaacaatttttggtaaccaaaaatgtgccgtgctataagcggtgcaaacagatggaatattcagatgaattggaagctatcattgaagaagatgatggtgatggcggatgggtagatacatatcacaacacaggtattacaggaataacggaagccgttaaagagatcacactggaaaataaggacaatataaggcttcaagattgctcagcactatgtgaagaggaagaagatgaagatgaaggagaagctgcagatatggaagaatatgaagagagtggattgttggaaacagatgaggctaccctagatacaaggaaaatagtagaagcttgtaaagccaaaactgatgctggcggtgaagatgctattttgcaaaccagaacttatgacctttacatcacttatgataaatattaccagactccacgattatggttgtttggctatgatgagcaacggcagcctttaacagttgagcacatgtatgaagacatcagtcaggatcatgtgaagaaaacagtgaccattgaaaatcaccctcatctgccaccacctcccatgtgttcagttcacccatgcaggcatgctgaggtgatgaagaaaatcattgagactgttgcagaaggagggggagaacttggagttcatatgtatcttcttattttctggaaattgggacaagctgtcatcccaacaaaaaaagacccncacccaacccgggggaaaggaaaaaaaaatataatatagtttttttttatannnncgggagggggaaaaaaacaaaccgaaaaaggngccgagncaccaaaaccacgaaaaaaaacattttttctaaaaaggacttatatgtttatgcattaaataaaaataaaatcccatcaaagccttacttgtttaataaaataaagtgcaa

SEQ ID NO: 347680 - DNA, 1270 bp, Homo sapiens
acgttcagtgttacgcttccggaaggaggggagaagcggcttatcccgccccagcccggcccctttctcacgtcacgtgccgggagagtctagtgtcacgtgaggccccggtggcggcgcagctacggcaagagagtgagaaggaagggaagccggaaggggcgcgagtgaagcaaagcgaggacagacagctcccagagggcgaggggaatcaaagtttaaggaaacaggtgtaattaccccagaagagtttgtggcagctggagatcacctagtccaccactgtccaacatggcaatgggctacaggggaagaattgaaagtgaaggcatacctaccaacaggcaaacaatttttggtaaccaaaaatgtgccgtgctataagcggtgcaaacagatggaatattcagatgaattggaagctatcattgaagaagatgatggtgatggcggatgggtagatacatatcacaacacaggtattacaggaataacggaagccgttaaagagatcacactggaaaataaggacaatataaggcttcaagattgctcagcactatgtgaagaggaagaagatgaagatgaaggagaagctgcagatatggaagaatatgaagagagtggattgttggaaacagatgaggctaccctagatacaaggaaaatagtagaagcttgtaaagccaaaactgatgctggcggtgaagatgctattttgcaaaccagaacttatgacctttacatcacttatgataaatattaccagactccacgattatggttgtttggctatgatgagcaacggcagcctttaacagttgagcacatgtatgaagacatcagtcaggatcatgtgaagaaaacagtgaccattgaaaatcaccctcatctgccaccacctcccatgtgttcagttcacccatgcaggcatgctgaggtgatgaagaaaatcattgagactgttgcagaaggagggggagaacttggagttcatatgtatcttcttattttcttgaaatttgtacaagctgtcattccaacaatagaatatgactacacaagacacttcacaatgtaatgaagagagcataaaatctatcctaattattggttctgatttttaaagaattaacccatagatgtgaccattgaccatattcatcaatatatacagtttctctaataagggacttatatgtttatgcattaaataaaaatatgttccactaccagccttacttgtttaataaaaatcagtgcaaagaga

SEQ ID NO: 347681 - DNA, 1597 bp, Homo sapiens
  misc_feature (1392)..(1392): n is a, c, g, or t
  misc_feature (1444)..(1447): n is a, c, g, or t
  misc_feature (1479)..(1479): n is a, c, g, or t
  misc_feature (1486)..(1486): n is a, c, g, or t
acgttcagtgttacgcttccggaaggaggggagaagcggcttatcccgccccagcccggcccctttctcacgtcacgtgccgggagagtctagtgtcacgtgaggccccggtggcggcgcagctacggcaagagagtgagaaggaagggaagccggaaggggcgcgagtgaagcaaagcgaggacagacagctcccagagggcgaggggtgcgtgtgcgtccgcttctcacctcaggtctcccttcggccccgctgccctccctcgcggctgggtgacagctgggtccggtccgtcgcgggctgcctggggtgcgaggatcgcgcaccccgtcttcgcgcgctgtgcctgccgccccgccccctcgtcccgcccgtcccgtcgcgtcgcgtcccgtcccctcgggtgctgccagccgggtgctgatgcgagtcggtggcagcgaggacattttctgactccctggcccctgacacggctgcactttccatcccgtcgcggggccggccgctactccggccccaggatgcagaatgtgattaatactgtgaagggaaaggcactggaagtggctgagtacctgaccccggtcctcaaggaatcaaagtttaaggaaacaggtgtaattaccccagaagagtttgtggcagctggagatcacctagtccaccactgtccaacatggcaatgggctacaggggaagaattgaaagtgaaggcatacctaccaacaggcaaacaatttttggtaaccaaaaatgtgccgtgctataagcggtgcaaacagatggaatattcagatgaattggaagctatcattgaagaagatgatggtgatggcggatgggtagatacatatcacaacacaggtattacaggaataacggaagccgttaaagagatcacactggaaaataaggacaatataaggcttcaagattgctcagcactatgtgaagaggaagaagatgaagatgaaggagaagctgcagatatggaagaatatgaagagagtggattgttggaaacagatgaggctaccctagatacaaggaaaatagtagaagcttgtaaagcctacatcacttatgataaatattaccagactccacgattatggttgtttggctatgatgagcaacggcagcctttaacagttgagcacatgtatgaagacatcagtcaggatcatgtgaagaaaacagtgaccattgaaaatcaccctcatctgccaccacctcccatgtgttcagttcacccatgcaggcatgctgaggtgatgaagaaaatcattgagactgttgcagaaggagggggagaacttggagttcatatgtatcttcttattttctggaaattgggacaagctgtcatcccaacaaaaaaagacccncacccaacccgggggaaaggaaaaaaaaatataatatagtttttttttatannnncgggagggggaaaaaaacaaaccgaaaaaggngccgagncaccaaaaccacgaaaaaaaacattttttctaaaaaggacttatatgtttatgcattaaataaaaataaaatcccatcaaagccttacttgtttaataaaataaagtgcaa

SEQ ID NO: 347682 - DNA, 863 bp, Homo sapiens
tataccacatccaaatggctcaagccggtggctagagataagaacttagcagcatttttctcacctagctgactggttcccctttctttaaacagacactccaggcacttgtttgtgaacttaaagtgccccacaccctatttccttatgcatactgctaactgccaaaatattctctctctgtccacctgaccctccattcctgcttcctgtgacctgggaatggagaattaccctctggactccttgtgccctccctgctcaggatatcagcacagagggacgaaggcaattgcctaccctgcttgagagatgcagaggcctggtgtggagttagcagtattatgagattggatcagcctggatcactgaatcactgcatgtaggacacactatggagagtttcttgtgccaagatcagacatggtatatgcaagaataaatgtgtgcgtgaatcaaaccagaggttgtgtttattttttaattactatattgtattcttgctaacctgactaatccagccagcaaccttacaattctaattatctgactgtagatcctcccaggttgtctatgtacataaacttgtcctcactttgcaaaagctaactatcttgtttcttttttttccaatcatgtcaacttaattttggcttatttgtttatttatgcactgaatgttgaattgaagagatatggtgaaaatattttacttgcttttgatttcgaaggaaaagctcttaaaatttactattaaatgggattattattggcaggtttttataaactaaggaaattacttgtgtcattctatttaagattctttcaatggatcatgcctggtattgaacataatctaataa

SEQ ID NO: 347683 - DNA, 804 bp, Homo sapiens
tataccacatccaaatggctcaagccggtggctagagataagaacttagcagcatttttctcacctagctgactggttcccctttctttaaacagacactccaggcacttgtttgtgaacttaaagtgccccacaccctatttccttatgcatactgctaactgccaaaatattctctctctgtccacctgaccctccattcctgcttcctgtgacctgggaatggagaattaccctctggactccttgtgccctccctgctcaggatatcagcacagagggacgaaggcaattgcctaccctgcttgagagatgcagaggcctggtgtggagttagcagtattatgagattggatcagcctggatcactgaatcactgcatgtaggacacactatggagagtttcttgtgccaagatcagacatggtatatgcaagaataaatgtgtgcgtgaatcaaaaaaaaaaaaaaaaaaaaaaaaaaaaaaatttggggggggcggggccgaaaaattttccaataacaattcgcgtggggggcgcggggccccaggtatgcgggaattgtgcacactgggtgacacaaggtgtggtacccacaaggagaggaccgggcgcatgagggacaagggggttgtggtgattcctccaacaatataaaaaaaacgcccgggggggaaacaacggaggtgcgctggaaccaaattccccaagaggaggagttccgggaggcgccacagcagggcctgcctaacaacagggggtgcccaaggggagccgaatatcaatttaacgccgcgctcgg

SEQ ID NO: 347684 - DNA, 268 bp, Homo sapiens
aaaatgcacattattcacttcacatagataatgtatataacctaaaattgaccaacgtatttaaagttttggtgtgtgtgatactggaatgtatattgctcctgacagaggaataaaccgggaccctactgaaaaacagtagaagactgataaaagactttgacttcgagaaagtatcttgacaaagaaagcctatacctttttttaacacttggataataaagcagttttgtttttttgtttttttttgttttgttttgttttgttt

SEQ ID NO: 347685 - DNA, 635 bp, Homo sapiens
gtggcaggaggactgcttgagcccaagagttttgagaccagcctgggcaacatagtgagaacccatctctaaaaaaaagttttaaaatattagctgggcatggtagtgtgaacctgtagtcccagctacttgggaggctgagatgggaggactgcttgagcctggtaggcggaggttgcagtgagccatgatcgcgccactgcactccagcctgggtaacagacccagaccctgtctcaaaaaaataataaaaatgaaaataaataaaagggtgccaaaataaatgaccccaaaataagttgttcctaaatgcacctttagtaatttaggaacgccatacaaaacatgtttttaacaaaaaatttttgaaaacaaaaataatcttttttagataagttctttctcaatgctaaattagattaaacaactttggtaacttattccaatgcctggagtccaagcaaaggtcacagattgataagcactcttctggctcacacacttgcttcttaatccaatgaatccgtaccatctctgtctttaagctatggataactaatgtaactttattaattctgcatattcacctaacattcattatactacacttaatatttactttgcattaaattatc

SEQ ID NO: 347686 - DNA, 661 bp, Homo sapiens
aaagtcagagctgtacactatgaacctccagaatttttttggtatttgttttatctaacatctaacaaaaataccttccatgttcaaggcactatgcagaatcagatagcatatatagggcccttatgtaatgcctttttattgcaatttagaccttggattttgtaacctgataagcaacaacatcatttctgttcagtatagctttctcaagtctctggtgatttagatcctctctcataaagtatattcttctcaggaaaggaatcttatattcagaatgatttataacaaatattatgagtgcatggcatgtgcatgtgtgttatgcataaattacatggttcccagactattttgtaggtcacggttgccgcttttctaagaagtgaaagtcagccattgtgctgtactacactgtcagggtctgttatctgaggtaaaatgattgcttctaagacatttttatgtgtccacatgagtggccacacattgagggatcattttcattttctgtcaagatagaaaccattaccaatttgttatgttttcttttacttggcaaattattctattcgcatttttggctgagctgctgtattggcatggtatacaacagacatttgggtaccattcagcagcattatactttttatgtaaa

SEQ ID NO: 347687 - DNA, 2364 bp, Homo sapiens
tccctcattcctatacttcagttttccttacctctagagcccctgaacagtagctcatatgttctccttttccttttagacaattcctcctcgcttcaagaagatgaagaagtagagatggaggccatcagctggcaggccagcagtccagccatgaatgggcaccctgcccctccagtgacctctgctcgttttcccagctgggtcacctttgatgacaatgaagtcagctgccctttaccaccagtcacctctcctctgaagccaaatacaccaccaagtgcatctgtgatcccagatgtaccttataattcaatgggatcatttaagaagagggaccgtcccaagagcactttgatgaacttctccaaagttcagaagctggatatttcctctttaaaccgcacgccttctgtaactgaggctccaccttggagggcaaccaaccctttcctgaatgagactctgcaggatgtacagccctcccctatcaaccctttcagtgctttctttgaggagcaggagaggcgctcccaaaacagttccatttccagtaccacgggcaaaagccaaagagattccctcattgtcatctaccaggatgccatcagttttgatgattcaagcaaaacccagtcacactctgatgctgttgaaaaactcaaacaactccaaattgatgaccctgatcactttggcagtgcaactctacctgatgatgacccagtagcctggattgaactagatgctcacccgcctggatcagcacggtcccagcctcgtgacgggtggccaatgatgttgaggatccctgagaagaaaaacatcatgtcctccaggcactggggaccgatcttcgtcaaactgacagacactggttacctgcagctgtattatgagcagggcctagaaaaaccattccgtgagttcaagctggagatctgtcatgagatttcagaaccccggcttcaaaactatgatgagaatggcagaatccacagcttgcggatagaccgtgtcacctataaagagaagaagaaataccagcccaaacctgctgtggcccacacagcagagagggaacaggtgattaagctgggcaccaccaattacgatgacttcctgagtttcatccatgcagttcaggaccgtctcatggatctgccagtgttgtcaatggacttgagcacagttggcctcaactaccttgaagaggagattacagtggatgtcagagatgaattctctggcattgtgagcaaaggagacaaccagattctccagcaccatgtcttgacacggatccacatcctgagtttcctgtctgggctcgcagagtgccgcctgggcctcaatgacatcctcgtcaaagggaatgaaatagttttgaggcaggacatcatgcccaccaccaccacaaagtggatcaagctccatgagtgccgtttccatgggtgtgtggatgaggatgttttccacaactcacgggtcattctgttcaaccctttggatgcgtgccggtttgagctaatgcggttcaggacagtgtttgctgagaagaccttgcctttcacactcaggacggccacaagtgtcaatggggcagaggtggaggtgcagagctggctgaggatgtcaactggcttctccgccaatcgtgaccccctcactcaggttccctgtgagaatgtgatgatccgttaccctgtgcccagtgagtgggtgaaaaacttccgcagggaaagtgtcctgggggaaaagtctttgaaagccaaagtgaaccggggggcaagttttggctccactagtgtttctggctctgagcctgtcatgagagtaactctgggaactgccaagtacgagcatgccttcaactccattgtgtggaggataaaccgactgccggacaaaaactcagcttccggtcacccacactgtttcttttgccaccttgaactcggctctgaccgggaagtgccttccagatttgccaatcacgtgaatgtcgagttcagcatgcccacaacttctgcctccaaagccagcgtgagatctatctctgtagaagacaagactgacgtcaggaagtgggtcaattattctgcacactacagctaccaggtagccttgggaagcatctggctaatgcttccaactccatttgttcaccccactaccctccccctcttattccttttagccatgcttactatgttcgcctggtaacctcttactgccttagaggaagttcaccatacatagctgtgggtgcgtctgctctgatttaaatgcataatctggctagtggatgagagaaaggttggaaaaaaataaagaggctcatcaaagagggggagaaattat

SEQ ID NO: 347688 - DNA, 2899 bp, Homo sapiens
ttcacctgaggtcagcagtgtgaagatgaccagtgcctttttagcatgacgactttggaccatgtgattgccacccaccagtcagaatgggtctccttcaatgaagagccaccctttcctgcccactcgcaggggggcacggaagagcacctcccaggactgtcatcttccccagaccagtccgagagctcctccggggagaaccatgtggtggatggaggctctcaagaccattcccactcggagcaggatgactcctctgaaaagatgggcctcatctctgaagcagcttccccacctgggagccctgagcagcccccacctgacctggcctcggccatcagcaactgggttcagtttgaagatgacacaccctgggccagcacatctccacctcatcagaaacagtgagacagccctaccattgaccatgccctgctggacatgcccttcctttgactccctggggagatgccctctgacttctgagagcagctggaccacccattctgaagacaccagcagtcctagctttggatgttcgtatacagatctgcagctcatcaatgctgaggagcagacgagtggccaggcttctggggctgactcaactgacaattcctcctcgcttcaagaagatgaagaagtagagatggaggccatcagctggcaggccagcagtccagccatgaatgggcaccctgcccctccagtgacctctgctcgttttcccagctgggtcacctttgatgacaatgaagtcagctgccctttaccaccagtcacctctcctctgaagccaaatacaccaccaagtgcatctgtgatcccagatgtaccttataattcaatgggatcatttaagaagagggaccgtcccaagagcactttgatgaacttctccaaagttcagaagctggatatttcctctttaaaccgcacgccttctgtaactgaggctccaccttggagggcaaccaaccctttcctgaatgagactctgcaggatgtacagccctcccctatcaaccctttcagtgctttctttgaggagcaggagaggcgctcccaaaacagttccatttccagtaccacgggcaaaagccaaagagattccctcattgtcatctaccaggatgccatcagttttgatgattcaagcaaaacccagtcacactctgatgctgttgaaaaactcaaacaactccaaattgatgaccctgatcactttggcagtgcaactctacctgatgatgacccagtagcctggattgaactagatgctcacccgcctggatcagcacggtcccagcctcgtgacgggtggccaatgatgttgaggatccctgagaagaaaaacatcatgtcctccaggcactggggaccgatcttcgtcaaactgacagacactggttacctgcagctgtattatgagcagggcctagaaaaaccattccgtgagttcaagctggagatctgtcatgagatttcagaaccccggcttcaaaactatgatgagaatggcagaatccacagcttgcggatagaccgtgtcacctataaagagaagaagaaataccagcccaaacctgctgtggcccacacagcagagagggaacaggtgattaagctgggcaccaccaattacgatgacttcctgagtttcatccatgcagttcaggaccgtctcatggatctgccagtgttgtcaatggacttgagcacagttggcctcaactaccttgaagaggagattacagtggatgtcagagatgaattctctggcattgtgagcaaaggagacaaccagattctccagcaccatgtcttgacacggatccacatcctgagtttcctgtctgggctcgcagagtgccgcctgggcctcaatgacatcctcgtcaaagggaatgaaatagttttgaggcaggacatcatgcccaccaccaccacaaagtggatcaagctccatgagtgccgtttccatgggtgtgtggatgaggatgttttccacaactcacgggtcattctgttcaaccctttggatgcgtgccggtttgagctaatgcggttcaggacagtgtttgctgagaagaccttgcctttcacactcaggacggccacaagtgtcaatggggcagaggtggaggtgcagagctggctgaggatgtcaactggcttctccgccaatcgtgaccccctcactcaggttccctgtgagaatgtgatgatccgttaccctgtgcccagtgagtgggtgaaaaacttccgcagggaaagtgtcctgggggaaaagtctttgaaagccaaagtgaaccggggggcaagttttggctccactagtgtttctggctctgagcctgtcatgagagtaactctgggaactgccaagtacgagcatgccttcaactccattgtgtggaggataaaccgactgccggacaaaaactcagcttccggtcacccacactgtttcttttgccaccttgaactcggctctgaccgggaagtgccttccagatttgccaatcacgtgaatgtcgagttcagcatgcccacaacttctgcctccaaagccagcgtgagatctatctctgtagaagacaagactgacgtcaggaagtgggtcaattattctgcacactacagctaccaggtagccttgggaagcatctggctaatgcttccaactccatttgttcaccccactaccctccccctcttattccttttagccatgcttactatgttcgcctggtaacctcttactgccttagaggaagttcaccatacatagctgtgggtgcgtctgctctgatttaaatgcataatctggctagtggatgagagaaaggttggaaaaaaataaagaggctcatcaaagagggggagaaattat

SEQ ID NO: 347689 - DNA, 3022 bp, Homo sapiens
ttcacctgaggtcagcagtgtgaagatgaccagtgcctttttagcatgacgactttggaccatgtgattgccacccaccagtcagaatgggtctccttcaatgaagagccaccctttcctgcccactcgcaggggggcacggaagagcacctcccaggactgtcatcttccccagaccagtccgagagctcctccggggagaaccatgtggtggatggaggctctcaagaccattcccactcggagcaggatgactcctctgaaaagatgggcctcatctctgaagcagcttccccacctgggagccctgagcagcccccacctgacctggcctcggccatcagcaactgggttcagtttgaagatgacacaccctgggccagcacatctccacctcatcagaaacagtgagacagccctaccattgaccatgccctgctggacatgcccttcctttgactccctggggagatgccctctgacttctgagagcagctggaccacccattctgaagacaccagcagtcctagctttggatgttcgtatacagatctgcagctcatcaatgctgaggagcagacgagtggccaggcttctggggctgactcaactgacaattcctcctcgcttcaagaagatgaagaagtagagatggaggccatcagctggcaggccagcagtccagccatgaatgggcaccctgcccctccagtgacctctgctcgttttcccagctgggtcacctttgatgacaatgaagtcagctgccctttaccaccagtcacctctcctctgaagccaaatacaccaccaagtgcatctgtgatcccagatgtaccttataattcaatgggatcatttaagaagagggaccgtcccaagagcactttgatgaacttctccaaagttcagaagctggatatttcctctttaaaccgcacgccttctgtaactgaggctccaccttggagggcaaccaaccctttcctgaatgagactctgcaggatgtacagccctcccctatcaaccctttcagtgctttctttgaggagcaggagaggcgctcccaaaacagttccatttccagtaccacgggcaaaagccaaagagattccctcattgtcatctaccaggatgccatcagttttgatgattcaagcaaaacccagtcacactctgatgctgttgaaaaactcaaacaactccaaattgatgaccctgatcactttggcagtgcaactctacctgatgatgacccagtagcctggattgaactagatgctcacccgcctggatcagcacggtcccagcctcgtgacgggtggccaatgatgttgaggatccctgagaagaaaaacatcatgtcctccaggcactggggaccgatcttcgtcaaactgacagacactggttacctgcagctgtattatgagcagggcctagaaaaaccattccgtgagttcaagctggagatctgtcatgagatttcagaaccccggcttcaaaactatgatgagaatggcagaatccacagcttgcggatagaccgtgtcacctataaagagaagaagaaataccagcccaaacctgctgtggcccacacagcagagagggaacaggtgattaagctgggcaccaccaattacgatgacttcctgagtttcatccatgcagttcaggaccgtctcatggatctgccagtgttgtcaatggacttgagcacagttggcctcaactaccttgaagaggagattacagtggatgtcagagatgaattctctggcattgtgagcaaaggagacaaccagattctccagcaccatgtcttgacacggatccacatcctgagtttcctgtctgggctcgcagagtgccgcctgggcctcaatgacatcctcgtcaaagggaatgaaatagttttgaggcaggacatcatgcccaccaccaccacaaagtggatcaagctccatgagtgccgtttccatgggtgtgtggatgaggatgttttccacaactcacgggtcattctgttcaaccctttggatgcgtgccggtttgagctaatgcggttcaggacagtgtttgctgagaagaccttgcctttcacactcaggacggccacaagtgtcaatggggcagaggtggaggtgcagagctggctgaggatgtcaactggcttctccgccaatcgtgaccccctcactcaggttccctgtgagaatgtgatgatccgttaccctgtgcccagtgagtgggtgaaaaacttccgcagggaaagtgtcctgggggaaaagtctttgaaagccaaagtgaaccggggggcaagttttggctccactagtgtttctggctctgagcctgtcatgagagtaactctgggaactgccaagtacgagcatgccttcaactccattgtgtggaggataaaccgactgccggacaaaaactcagcttccggtcacccacactgtttcttttgccaccttgaactcggctctgaccgggaagtgccttccagatttgccaatcacgtgaatgtcgagttcagcatgcccacaacttctgcctccaaagccagcgtgagatctatctctgtagaagacaagactgacgtcaggaagtgggtcaattattctgcacactacagctaccaggtggaaattgagcaaaaaaaagagtttgaagccggactttgaaggagatgaaatggaaaatcccaaggagtgtggagtgcagtgacaaagccttgcggcaaggaatcctgatcccagagtcatgatagggtgtcttcctgagtcatgatagggtgtcttcctgagtagctgaagttgcagtcaatacctgctgtggccactgcatgttgggaacagtataccagatcttcctgtttgcagttacttgtattttaccaggaaaccctgagaatggtggcttttggagaggctctttgattctggtcatgcctaaagcacgaggttcacctgactgttggagcttactgtataattaagcctccttgt

SEQ ID NO: 347690 - DNA, 402 bp, Homo sapiens
gtgtgcttccccttgaaggtccctgggcacctggactagtggaggcaggctcctggctggctccctcaccaggtagatagttcaggctggcccacgtggatcactctgccccttcccatggctgagggctgccccctctaaatatagcccagtgggctgagctcaggcctattttaggccaaggctgggaggcagccaggccttccctgggctcacaaaggagccactgctgcatttgtccagtcctgctactggatgccatcattggcccccgactgcccactgcttgccatgcctgaggagacccaagaaggtaggagagggtgaccatgagggagggcaaggcctcagtcctgtgaccttgtggaccatggagagacccaccctctgtcccactgacct

SEQ ID NO: 347691 - DNA, 885 bp, Homo sapiens
gctgcatttgtccagtcctgctactggatgccatcattggcccccgactgcccactgcttgccatgcctgaggagacccaagaagactccgtggcgccaatgatgcccagccagaggagcagggggccattggcccccaaccacgtgcatgaggtatgcctgcaccaggtggagtccatcagcgacctacatagtggagcaggcacactgcgcccctatctaactgaagaggcacgaccgtgggatgagctgctgggcgttttgccgccgtcactgtgtgcccaggctggctgcagccctgtgtacagacgaggagggttcctgctgctgctcgcgctgctggtgctcacttgcctagtgctcgcactcctggctgtctacctgagcgtgctgcagagtgaatccctgcgcatcctggcacacacgctccgcacgcaggaggagacactactcaaactccgcttggccagcctcagccagcttcggaggctcaactccagtgaggcccaagcacccagctgagatgccatttggatctggggcctgggggtgtgtgttggtgggggaataaagtggctatgggcaggtctctccttccctactgctggctgccacatctacactatttccttggtgagatttttgtacaagaacctgttgttaacttaatggctgcctccctctcctgatctcttcaagccaggcctagccaagcctctggtgccaaagcctcgctttgggtggcccaaggtcaggggaaggggcaccagcctcctggctcctcctgtggcctgtcaacactctctggccaccccagatggcaggttctgaagtctagaaatagctgcccccatagcaatcacccaaactctgccagggctccca

SEQ ID NO: 347692 - DNA, 228 bp, Homo sapiens
cactattctagatcatattcttaacactatgatcttagtgttaagaaatagaaaatccttgactcctgccatatgtcagtagtgaaaatagacccttccaagaccatttccaatccttacctctagaaattacatgctgtttctgattttcagcacatctcaaagagattcatatttcccttgagttacagttgttgtagtttgtaaaaatgttcctatttctccata

SEQ ID NO: 347693 - DNA, 323 bp, Homo sapiens
ttttggtatcagggtaatactggcctcagactgagttgaacatgtactctgggggaagctagctgccatggaaggagtgacactattctgtgaccaccatgattttcagccaaggcaccagacaccagactgctgaagacatcctgggtatcctgcctagttgagttttcaaatcaccgcagtcccagctgccatttgactccaactgtatgagaggccccaggtgagatctgcccagctgagccctgtcagctcatattcagtgaactctgaatgtgagaggtaatatgaaattgttgtcattagttaccacatttagggat

SEQ ID NO: 347694 - DNA, 684 bp, Homo sapiens
gacaggaataatatctattccactgcattaagcggaattaaaagaggttaagtatgcagaacacctaggtaaatattcacagctttataaatgttaattcttttcctttattctatcccctttctcttcactgtttcagcatctatagcatttacatgtttattaaaggcatcttttgaatgctcttcaaagaaaagggcagactcttaccttaaagtagcaataatataatcccatcagtttttgtcagtagcttttgaaatggtataatattttattctactggactataaggcccttcacgggaaggactgccattctttgaaaccatattgcctagtagaccagtagtacttataatatggaaaacagattatacaacattaaaaggtattaagcatactttgtatcaaaaaatataacaagcactttgggaggctgaggtgggcggatcatctgagatcaggagttcgagaccagcctggccaacatggtgaaaacccgctctactaaaaatacaagaattagccatgaattgtggcgcatgcctgtaatcccagctactcagaaggctgaggcatgagaatcacttgaacctgggaggcagtggttgcagtgagctgagatcgcaccgctgcacttcagcctgggtgataaagtgagactcagtatcaaaaaaaaaaa

SEQ ID NO: 347695 - DNA, 543 bp, Homo sapiens
cttgttggccaagagattgatgaacctagaaggaacctagatgggaagtggcttgcataggtgcccagaagctgggctctggcatttgatgaactcaagttcacatgtgattccttcactttctagatgagtgatgttgggcaaacaagctctcctctctgtgccttggtttcctcatctgccattttggttagaatcaggtaggattctgtgtctcccctgctggacttgcttccttctatctgttctcttggccaaggccaatgtgttctatgtggcatgtaatttctctcctagaaattccacccgagcccaggaggtcaaggctgcagtgagctgtgattgcaccactgcaaaccagcctgggtgacagaatgagaccctgtttcaaaaaaggaaaatttcaatgccttggcattgtcttcaggggagagtgtaactcagtgttccagctcaggccctgtcttagctggcctttgctcacgtccccagtccgcctgcacctgctgtgcctgctgcagcctcactccaacaccagctttg

SEQ ID NO: 347696 - DNA, 610 bp, Homo sapiens
catcaactagtatgtggacatgagttcttgtggagagtaagttgaagaggtcagtatttaggtctctcctgtgtgaaaaatgtatctattctgtgcctcagcctcttttagctacactgcgttagctctccttatttccacggccagatccacagagaattgcctaggttcacactctctccagttcttcacctcttccttattcctccatcatagtagtctgacctgtacccctgctgctcccctgacactggttttgccagagtcatgaatggcattctgctgctgtattcaacaaagacttttcagtatttctcaacatctgtacgtttgctgttgttttcactgcttgcttgtcacaaggtcctagaacccatattggcctaatattccttctccctcagtgatcatattagagttagggccccaatgcttttctcttctcactctgcaaactcccttgagtactcctataagtaaaattaccacttaatattaattcctcttacatgttctgtagccacttcaaacttggcatgtccaaaatcaagtttctcttttttcccccaaaaagcctcctttcccttgactctcttgactctctcacctc

SEQ ID NO: 347697 - DNA, 342 bp, Homo sapiens
tgtgtgttttttttaaattaaatgccaggtatgttgtatagaagaaaagtagacactgaagcaaatgttcaaagtgggaatatctatccttccatcaagctattagcatggggctattagtcaatttagtcagcatttgtggtgaattgggttttgttgtagccatggttattttcagtgtgcaacagacttgaaatccctccggtggtgggctaggctgctcctattttgtgcttaatgttaagacctggagtgctggagagtggttgttgttttttccctctttccctgctccatcctttccatgcttttgttctttctccaacagtagatggctgttgt

SEQ ID NO: 347698 - DNA, 408 bp, Homo sapiens
ggtaaattcaatattagaaaatctactaacactatatgtcatattaatagatgtaagaggaaaaataatcactccatcaatcttctgaaatgctttcaacaaaactccccactcacacctgataaaactctaagaggaagtcctaatcagagcaattaggcatacatggatgagtctggagaacattatgttaagtgaaataatccaggcacagaaagacaaatgctgcatcttctcactcatgtgtgagagctaaataagttgatctaatggaagaagagtagaatcatggttaccagaggctaggaaggagcaggggaaaagaagatagaaagaggctgcagagttagacaggaggaataagttctagtgttctacagcacagtagggtgactatagctaacacta

SEQ ID NO: 347699 - DNA, 968 bp, Homo sapiens
tgagatcacttcccttgcacagtttggaagggagagcactttattacagaccttggaagcaagaggattgcattcagcctagttcctggttgctggccaaagtgaccattgacggcaggaattacattgtcgatgctgggtctggaagctcctcccagatgtggcagcctctagaattaatttctgggaaggatcagcctcaggtgccttgcattttctgcttgacagaagagagaggaatctggtacctggaccaaatcaggagagagcagtatattacaaacaaagaatttcttaattctcatctcctgccaaagaagaaacaccaaaaaatatacttatttacgcttgaacctcgaacaattgaagattttgagtctatgaatacatacctgcagacgtctccaacatcttcatttataaccacatcattttgttccttgcagaccccagaaggggtttactgtttggtgggcttcatcctcacctatagaaaattcaattataaagacaatacagatctggtcgagtttaaaactctcactgaggaagaggttgaagaagtgctgaaaaatatatttaagatttccttggggagaaatctcgtgcccaaacctggtgatggatcccttactatttagaataaggaacaaaataaacccttgtgtatgtatcacccaactcactaattatcaacttatgtgctatcagatatcctctctaccctcacgttattttgaagaaaatcctaaacatcaaatactttcatccataaaaatgtcagcatttattaaaaaacaataactttttaaagaaacataaggacacattttcaaattaataaaaataaaggcattttaaggatggcctgtgattatcttgggaagcagagtgattcatgctagaaaacatttaatattgatttattgttgaattcatagtaaatttttactggtaaatgaataaag

SEQ ID NO: 347700 - DNA, 1307 bp, Homo sapiens
tgagatcacttcccttgcacagtttggaagggagagcactttattacagaccttggaagcaagaggattgcattcagcctagttcctggttgctggccaaagggatcatggacattgaagcatattttgaaagaattggctataagaactctaggaacaaattggacttggaaacattaactgacattcttgagcaccagatccgggctgttccctttgagaaccttaacatgcattgtgggcaagccatggagttgggcttagaggctatttttgatcacattgtaagaagaaaccggggtgggtggtgtctccaggtcaatcaacttctgtactgggctctgaccacaatcggttttcagaccacaatgttaggagggtatttttacatccctccagttaacaaatacagcactggcatggttcaccttctcctgcaggtgaccattgacggcaggaattacattgtcgatgctgggtctggaagctcctcccagatgtggcagcctctagaattaatttctgggaaggatcagcctcaggtgccttgcattttctgcttgacagaagagagaggaatctggtacctggaccaaatcaggagagagcagtatattacaaacaaagaatttcttaattctcatctcctgccaaagaagaaacaccaaaaaatatacttatttacgcttgaacctcgaacaattgaagattttgagtctatgaatacatacctgcagacgtctccaacatcttcatttataaccacatcattttgttccttgcagaccccagaaggggtttactgtttggtgggcttcatcctcacctatagaaaattcaattataaagacaatacagatctggtcgagtttaaaactctcactgaggaagaggttgaagaagtgctgaaaaatatatttaagatttccttggggagaaatctcgtgcccaaacctggtgatggatcccttactatttagaataaggaacaaaataaacccttgtgtatgtatcacccaactcactaattatcaacttatgtgctatcagatatcctctctaccctcacgttattttgaagaaaatcctaaacatcaaatactttcatccataaaaatgtcagcatttattaaaaaacaataactttttaaagaaacataaggacacattttcaaattaataaaaataaaggcattttaaggatggcctgtgattatcttgggaagcagagtgattcatgctagaaaacatttaatattgatttattgttgaattcatagtaaatttttactggtaaatgaataaag

SEQ ID NO: 347701 - DNA, 1026 bp, Homo sapiens
tgagatcacttcccttgcacagtttggaagggagagcactttattacagaccttggaagcaagaggattgcattcagcctagttcctggttgctggccaaagggatcatggacattgaagcatattttgaaagaattggctataagaactctaggaacaaattggacttggaaacattaactgacattcttgagcaccagatccgggctgttccctttgagaaccttaacatgcattgtgggcaagccatggagttgggcttagaggctatttttgatcacattgtaagaagaaaccggggtgggtggtgtctccaggtcaatcaacttctgtactgggctctgaccacaatcggttttcagaccacaatgttaggagggtatttttacatccctccagttaacaaatacagcactggcatggttcaccttctcctgcaggtgaccattgacggcaggaattacattgtcgatgctgggtctggaagctcctcccagatgtggcagcctctagaattaatttctgggaaggatcagcctcaggtgccttgcattttctgcttgacagaagagagaggaatctggtacctggaccaaatcaggagagagcagtatattacaaacaaagaatttcttaattctcatctcctgccaaagaagaaacaccaaaaaaaaaaaaaaaactggggggggggccggggccccgcgagaaagagctttctcaaaaccattgcgcggggggcggccgggggcccacagggggtcaggggaaccgggggccaaagcggggtcccaagagggaaaccgggggccgaggaacaagacggggccgggaatctctcttccaccaaattaaaaacaggccgcgcgggggaccacacgcgagagggtctcgcgtgaaaacaatatccccacaaggggagacttcagagagagagggaccaaaagaggggggcactcacaataaagagggggagcctcaaagcggaaactcgcgaatatcaaaatatgccccgcggcgggggcg

SEQ ID NO: 347702 - DNA, 1008 bp, Homo sapiens
actgaaatttgagtcttgagggctggtctgttctcgggagctgctctgttgaactctaaaaggaatcttgagccctgggcgagggagtggcctgacctggtggaaagactgcgggcctgcccgtggagtctatgtctggccctgcctagctcagtcaatctcagcagctcatgtctcctcttagaccctcagattcctcatctacagaaggagaaagaagaggagattgaatgatttttaaggtctttatcagcttctaaaagtttgatttgatggttgtaggagcaattgttctttcaaagcaccatcttctaacctcaggaaggaaagcccaggggcccctgggatgtcctgccaaactgggaagacaaagattgtgactgagaaggtgggggcagggcaggagaagggggaagaagggagaatggatcaaccccaggccggggaaagagatgaatgaaggtccacgccagagtgacatgctctaagtaggggaaatcttcctaactagagttcccatgactttggcaacatttgaaaaaaaaaaaaaaaaaagacatcctttaacccacaaagtactcaattgtccaagccccagttatggccaacttcccaaagctggctggtcagagaccttggtgttaattcctcagccaactaaaaaaagatggtgtaagttctgttgacttaattgttggagtgtttctgagtggggccgcctccctcctctgcctcctcacagtattatgggctattctgcattacctgccctacctatcttcataatctagccgcaaacagctttggttgaccacaccacttccctattgaaagttaatactgtttgactcattctgtgttactaacctgaagccaaagaaaacaaggcagagaataactggcttgtgtggagtttggaaagctcttggaggccctgctttcaaaatcctatacagtagctttactatatctctccgctgcagctgctgagaaaatgaaggaagcaga

SEQ ID NO: 347703 - DNA, 377 bp, Homo sapiens
ggaatgtggaaagaaacgaggttaatatcttttgggaaattaatttgtgccaaactatttggcttcttcgtcctagttgcattgtctccctgacctcatctcccctgagaatcagcctctgtttccctggtcaaggccacggcttttctctgatcctgaggagagtttcctaccagagtggaagcagggaggactgaaagcactaggaacagaggggagctatcggattgcatctagaacctgctgtgagcaacatcttcagaattaaccataatgtgttccctcctttcctgtgtccagatgaggaaggagaactttgattcttccttccaattacattctgcgagaggatcttatgtgttgggaggccattgggg

SEQ ID NO: 347704 - DNA, 751 bp, Homo sapiens
gggactgtgggagagatggagagagactggtacagaaatggtgagacaaggagagagccataaagaggaagacagagagaaagaagacaaatgcataaagaggttcagagacgtgtgactgtggagatcgaaggcctggttttagggctagcgaacaccttctccctttggttttggtccacagaagactggtgatacagactccttatcagtgtaattgtggggactggtcaccagctcttgcttgagcttttccagaagaaacttcactactgaaatattccaagaggacttgatgctgccacaaagagaagagaatgaataaagttgtcggctttgtaagagccagacaaacagagatacccagcactaatcaactttgtggcaaatccctccacagcctaagaaggatccctagcagcaatcctcaagagcctcagcagattggagagatgcctctttgattctgtcccagagctaaagattggaataactgtccctccccctctaaacccacagtctgccacaagaacattttaaaccttcctccatgatgggcagcagaactccctgactagtcctccagatccttctcaagcacagaatagagagagcatgatggtgagtgaggatactgtccttcctgcaggtcttcagttccaccacactctcctaagggaaggaagaagccaggcctcaatgctgtacctctctctggaggcagcaggcacaagtggaatggaagtgatgg

SEQ ID NO: 347705 - DNA, 848 bp, Homo sapiens
gggactgtgggagagatggagagagactggtacagaaatggtgagacaaggagagagccataaagaggaagacagagagaaagaagacaaatgcataaagaggttcagagacgtgtgactgtggagatcgaaggcctggttttagggctagcgaacaccttctccctttggttttggtccacagaagactggtgatacagattgcattgtctccctgacctcatctcccctgagaatcagcctctgtttccctggtcaaggccacggcttttctctgatcctgaggagagtttcctaccagagtggaagcagggaggactgaaagcactaggaacagaggggagctatcggattgcatctagaacctgctgtgagcaacatcttcagaattaaccataatgtgttccctcctttcctgtgtccagatgaggaaggagaactttgattcttccttccaattacatccaaaatatccacacaactactaatatttggaagctttgatcctttggggtgaggatgcgagaggaaatcttatgaaatgttgggaggccattaaaggaggcccatgcaagagttggtggtagcaatgggcacaactgggatgaacagcctgtgttttcaagggataactggaagcagagatgagtgaaggggaagaagtagaagacgcatatgctaatagggcatgctccaatagtgctcatgacctcaggtggcctctccacagtctaaactggagctgggatctccaaaggccctcttcgttcccaagactttaattataatctgtatatgcaggtgactccctaatccatatttccagcccagtctttcttggaattaaa

SEQ ID NO: 347706 - DNA, 349 bp, Homo sapiens
taggacctctgataattcagacaaaaaatggggggaaatttacagttttttgcgacagttgagtgcggatatttcttaaatgcggagtccacattaacttaattcttttccatagtcctgtaatggaggtgccttcgtgatctgtgtttttcctttgccaccctttctaatgtaagatttgaagtgtatgagacaatttatgtcatgtttgtaagttataaagcctaataaatagacttaaaaacctgagaagttgccatcccacccaggactggaacctcactgctaagtcgcatccacctgcgtgctcctccccacccatttttttttttgagatgaagtttcgctc

SEQ ID NO: 347707 - DNA, 806 bp, Homo sapiens
gacaggacctcccgtttggcatttcgttttcagatgtgcctagaagaaggagacaactgcctcttggactgttgaaacctggttctgcttgaattgtcaagatatcacctaaatcctatccatattttgtgcagcaggtttgtggacgcctaccaccattcattcattgcagtggctcagagaagatgaaaagaggactctgtggccaatgaagatcctcgacagagctcacatgaccagagtggactggcttctaccctaaatacacatcacgatatttctcactctgaccttgctccactttatacaacaccacacagctcgagagtggctgagctgccgtgggaacccgaatgccatctgactccaaagccttactctcaaccaccactctgatgcctcctattctttcctgaaatcttcagtatagtcattattatggagtaaaaaaagaaaaaggaaggaaggaaggtagagggagcccctctatctccattctttgtttccatgaagaacctccagtccattttcgggggcgtgctgttggtgtaacatactttctggccctctctctcccattcctgtcactcattgtcccccaggaagaagccatatgtggatgataagactggaagaagccactcttaagttcggtggtgtgctggtaaatgtttagcagctggctttggggcagcaagaaagtcctgagttgtagcacgtgccattctccatggtgtaaaaacacttccgccatagctgcttccaagtatgtaaattgtacctcaataaagccaatttaaaaagta

SEQ ID NO: 347708 - DNA, 431 bp, Homo sapiens
agtcagtaaacaaacaagctgtccttggagcaagcaagcgcttccctttcggcatctccccctctctgagcggcagccctgcaagtgaggccaatagccgtccctcagctgtgtacaggacaggcattcttggacctcagagtcctgcagtagcattttgaggacgccaagttattgatggggacaggtgctcataattcagcataacccacccaagccgtgtttcactttttctggaaacctcttgatttaggaatgaaagcccctggctccccctgggctgggctggccagtaaacatctcagtctgagtttgccgaggtgggttgctaaatttaattgccagtttccacaccatgtgatggtgtgtgacaggccagctcaccctgtgagttagccaaggggttttaaataaatgctttctgacggaaa

SEQ ID NO: 347709 - DNA, 551 bp, Homo sapiens
cacccacccaaccatgactccaccatggcactgtcaccatggcttctccagcctcagcttgtaggcctcgttggatggatgtcctttctgtctttggacagcccttagccacatactgcacttctggttgagctgaagtttgtcccaccccccagtgctgtttccttgtgacagcccttgtcctaggctgaacatccctagttccttcagccactcctctggggaccaagtccagaccctgaagtcagcccttcagtgggggtcccagcactgggatggtgggtccagccagtgatgaggtccagtgacccacacctcttcctgtgaccactggcgggagaagaggcaagtgggaatagaggaacggctgtgttggcctggccagcagcctgggttgagagagggaggtgccactgtcctgcctccttttgagcccccttgctcagtgtcagaaccctccgctggctgtccccgccgtgcgccacggctccaatccctatatgagtgagcagtagaatcacataggaataaaaagccatagagaacagcga

SEQ ID NO: 347710 - DNA, 549 bp, Homo sapiens
cttgagctcaggagttcaagaccagcctggccaacattgtgaaaccccatctctactaaaaatacaaaaattagctaggcatggtggcaggcacctgtaatcccagctactcgggaggctgaggcaggagaatcacttgaacctgggaggtggaggtcgcagtgagctgagatcatgccactgcactccagcctgggcaacagagcgagaccccatctcaaaaacaaaacaaaacaaagcaaaacaaaaacatgaggggaaagactgaatagataggtgacttagacatgcactcaggtgaccaaccaggaggtccgatctttgagtttatgctcaagccacagaacattattattcacttagtgtttaacttcaaataaattgatagttggaaacaaaacaaggacaataccttcataattttaattttttaaattattaaatattttttggtagagatagggtcttatgttgcccaggctggtctcaaactcctagcctcaagcaatcttcctgccttaacatccaaaagcattgggattacaggta

SEQ ID NO: 347711 - DNA, 1867 bp, Homo sapiens
gaagccgccggggccgcctagagaagaggctgtgcttcggcgctccggctcctcagagagcctcggctaggtgtggaaacaggaagagaactagaactggaagtaaagcattgaagatgtgactgaattgctgcaatctcatgatcaaatttgaatggatgaggagttgctttttagggatgagcaaagaaagtggtttctcgagatggaatctactggttgctccttgagggcaggacagttcttatggctttatccgttgcgtaagcacagagaggtctgcgaggtcaaaactattgtcatgatagcaagatgcctgtctttttcatttattctcacggtgtgcagaggctacatgatgtgtgatgacatcctcattgatgttaatgaatggtgctatacttgaattttctaaggtgtcattaggtaggtttaggtatgcatacttgtttttagaaattatttttttcctttttcccatttttagaaatcaactcattttttaggttatgccttcagtaatctttgcaacctcaatattgtgtaatggttactttaaaatactgtagttttctttgtgcctaagtataaacataagtacattttgttgttttgtttgcaatagtggtttaaatattttcccaaaatatccaaatttaaaaattctacaactttagaatttaataaatttattctaaaatatttatatattttttcatttaagaatggatcggcttaaaaagactgcttctcatttacttactggctataccatctgtatactaataaaaaacaagatttgatttggaaggactgactcaaactaacgaaaatatgaaacctgtctttctgctttggagatatttacctaatcatgttctgcagtagaataatttagttcttttgtctttttttggagatgaggtcttgctgtgttgcccaggctattcacagctgccatcatagtgaactacagcctgaaactcctgggttcaagagatccttctgcctcagcctcctgagtagctggaactataggcatgcgccaccaagcctgggcttttaaaaaaattttaaaaagaattttgagacaggatcttgccatgttgctcaggctagtcttcaactcctagccctgagtgatcttgctttgggcctctcaaaatgttgagttaataggcgtgagccaccatacccagccaaaaatttttttagagatgggaatggaatgatcttgaatagtgttggtgccacctatgttgtggcatcattttgaaaccaatcattcagagtgctttttttggtaaggcattattttttaatgcaggtatgccactactgggaaaaaaaaaaaaacaggttttaaagctagaaatgaaaagctacttaactatcttaaaggataagttactttattatacactagaaacatacacaatagctgaaaaacttaaaaaatctcacactgctgaatgtctctgctggctgaagtgtaagtaaaagatcatagtagtgccgctgttgagtgatacagcaacttgtcattaaagatgtgtgtgcagacatggattctgagttaatatctcatctgtagaagtatatatttgtcccttgctttgggattggtttctggacaccactcccccacccttgctggccatttgccaaggacaccaaaacccaaggatgttgaattcccttttataaaatggcgctgtatctgcatacaacttacacacatcctcccatatactttaaatcatttccagatttcttatacttcatacaatgtgaatgctatgtaaatagttgttacattgtgtacttatatttgtactattgtattaaatattctcaaatattttca

SEQ ID NO: 347712 - DNA, 1191 bp, Homo sapiens
cttatctgtgactctctcttcttgagatgggataatgtattggattattagagaagtgtgagtattgaatcagatagttttattttatctagagcagggttaaacctgatgaattgtttctgctctctcatggagtatatcttcttggtgacaaagacttttctgtctctgatttttatcttagtcgtggttacatttaataatcctgctttccagcttttcctagagatcagtcatcagtgaccttttgtcttgatactttgtcaccttttgttttctggttttgggttttttttttcttttttaaacatatgtaacattggcttttcctgctgacaacagtaacagagtttcagatcatgtttatagaatggttatttcatcacctaactaatctcacctctagtgtatggattctggtaaagtcagtcaacagtcttcacagccttttctatttttactgaccttgatttaaaatctaatcttagaccttgaggtattgcttacgaatagtgtaataatgaggtactacttataacaaataatggtaacatactctagtgcgtactataggcaaaagctaatggaaacataggtagaagaaatgaagtaatagttattgaatgctttttgtgtactgcaggtgtggaaacaggaagagaactagaactggaagtaaagcattgaagatgtgactgaattgctgcaatctcatgatcaaatttgaatggatgaggagttgctttttagggatgagcaaagaaagtggtttctcgagatggaatctactggtgaagttgctgtgaacattgttaaaatgccaataaaggatttaggaattacagaaacctggttgataaagcagtgccagggtgtgagagagttgacttcaattttgaaataagttccactggctgggtgtggtggctcacacctgcaatcccagtactttaggaggccgagactggtagatcatttgaggtcaggagttcaagaccagccttgccaacatggtgaaaccccacctctaccaaattagccaggtgtggtgcacacctgtagtcccagctacttgggaagctgaggcaggagaatctcttgaaccagggaggaggaggttgcagtaagccgagatggcgcccctgcactccagcctgggtgacagagtgagaccttgcgtttaaaaaaaaa

SEQ ID NO: 347713 - DNA, 645 bp, Homo sapiens
  misc_feature (602)..(602): n is a, c, g, or t
  misc_feature (633)..(633): n is a, c, g, or t
  misc_feature (637)..(637): n is a, c, g, or t
gaagccgccggggccgcctagagaagaggctgtgcttcggcgctccggctcctcagagagcctcggctaggtgtggaaacaggaagagaactagaactggaagtaaagcattgaagatgtgactgaattgctgcaatctcatgatcaaatttgaatggatgaggagttgctttttagggatgagcaaagttgctccttgagggcaggacagttcttatggctttatccgttgcgtaagcacagagaggtctgcgaggtcaaaactattgtcatgatagcaagatgcctgtctttttcatttattctcacggtgtgcagaggctacatgatgtgtgatgacatcctcattgatgttaatgaatggtgctatacttgaattttctaaggtgtcattaggtaggtttaggtatgcatacttgtttttagaaattatttttttcctttttcccatttttagaaatcaactcattttttaggttatgccttcagtaatctttgcaacctcaatattgtgtaatggttactttaaaatactgtagttttctttgtgcctaagtataaacataagtacattttaaaaaaaaaaaaaaaaaaaaaaaaanaaaaaaaaaaaacaaaaaaaaaaaaaaaaanaaanaaaaaaaa

SEQ ID NO: 347714 - DNA, 354 bp, Homo sapiens
caccctgatgagtcagtagccatcgttaacgttggcgtaagaccctccaccagcaaaaagattgttagcatttttttagcagtgatgtatttatcaattatacataatgctattgtacacttcttaatagactatggtatagtgtaaccataatttatgcactgggaaaccaacaaattcatgagattcgctttattgtagtgctctggaattgagcctgccgtgtttctgaggtatacctgtgaaagaaacggcgacagaaaaacaagtaataactggtcattccaccggtgtcccacaaccaagaaggtaagggcgttccataaccgtcctccgacaagcatcttggggctt

SEQ ID NO: 347715 - DNA, 2269 bp, Homo sapiens
caccctgatgagtcagtagccatcgttaacgttggcgtaagaccctccaccagcaaaaagattgttagcatttttttagcagtgatgtatttatcaattatacataatgctattgtacacttcttaatagactatggtatagtgtaaccataatttatgcactgggaaaccaacaaattcatgagattcgctttattgtagtgctctggaattgagcctgccgtgtttctgaggtatacctgtgtatttagtatgttccttgtatataaaaccccattttatagggtaggaaactaaggcttagagtttgagcaattttcccatagataacaccaataaattgagggctgcagagaccacttaagtggttctcttaacagtagtctagacatgacgtaatgagatttggcttaggagtgacaatggtaaggaagttaaaggattcaggaaccaaataccagttattgagaagaaagaatggcctcaaaacatcacttctcaaggaagccttgataccctcacccttactacactgtatcctccatttgaatgttgtcaagagctcttctcacaattgtaaataataattgtgtaattttgttttttttttcctactttaggttgctccttgagggcaggacagttcttatggctttatccgttgcgtaagcacagagaggtctgcgaggtcaaaactattgtcatgatagcaagatgcctgtctttttcatttattctcacggtgtgcagaggctacatgatgtgtgatgacatcctcattgatgttaatgaatggtgctatacttgaattttctaaggtgtcattaggtaggtttaggtatgcatacttgtttttagaaattatttttttcctttttcccatttttagaaatcaactcattttttaggttatgccttcagtaatctttgcaacctcaatattgtgtaatggttactttaaaatactgtagttttctttgtgcctaagtataaacataagtacattttgttgttttgtttgcaatagtggtttaaatattttcccaaaatatccaaatttaaaaattctacaactttagaatttaataaatttattctaaaatatttatatattttttcatttaagaatggatcggcttaaaaagactgcttctcatttacttactggctataccatctgtatactaataaaaaacaagatttgatttggaaggactgactcaaactaacgaaaatatgaaacctgtctttctgctttggagatatttacctaatcatgttctgcagtagaataatttagttcttttgtctttttttggagatgaggtcttgctgtgttgcccaggctattcacagctgccatcatagtgaactacagcctgaaactcctgggttcaagagatccttctgcctcagcctcctgagtagctggaactataggcatgcgccaccaagcctgggcttttaaaaaaattttaaaaagaattttgagacaggatcttgccatgttgctcaggctagtcttcaactcctagccctgagtgatcttgctttgggcctctcaaaatgttgagttaataggcgtgagccaccatacccagccaaaaatttttttagagatgggaatggaatgatcttgaatagtgttggtgccacctatgttgtggcatcattttgaaaccaatcattcagagtgctttttttggtaaggcattattttttaatgcaggtatgccactactgggaaaaaaaaaaaaacaggttttaaagctagaaatgaaaagctacttaactatcttaaaggataagttactttattatacactagaaacatacacaatagctgaaaaacttaaaaaatctcacactgctgaatgtctctgctggctgaagtgtaagtaaaagatcatagtagtgccgctgttgagtgatacagcaacttgtcattaaagatgtgtgtgcagacatggattctgagttaatatctcatctgtagaagtatatatttgtcccttgctttgggattggtttctggacaccactcccccacccttgctggccatttgccaaggacaccaaaacccaaggatgttgaattcccttttataaaatggcgctgtatctgcatacaacttacacacatcctcccatatactttaaatcatttccagatttcttatacttcatacaatgtgaatgctatgtaaatagttgttacattgtgtacttatatttgtactattgtattaaatattctcaaatattttca

SEQ ID NO: 347716 - DNA, 2440 bp, Homo sapiens
cttatctgtgactctctcttcttgagatgggataatgtattggattattagagaagtgtgagtattgaatcagatagttttattttatctagagcagggttaaacctgatgaattgtttctgctctctcatggagtatatcttcttggtgacaaagacttttctgtctctgatttttatcttagtcgtggttacatttaataatcctgctttccagcttttcctagagatcagtcatcagtgaccttttgtcttgatactttgtcaccttttgttttctggttttgggttttttttttcttttttaaacatatgtaacattggcttttcctgctgacaacagtaacagagtttcagatcatgtttatagaatggttatttcatcacctaactaatctcacctctagtgtatggattctggtaaagtcagtcaacagtcttcacagccttttctatttttactgaccttgatttaaaatctaatcttagaccttgaggtattgcttacgaatagtgtaataatgaggtactacttataacaaataatggtaacatactctagtgcgtactataggcaaaagctaatggaaacataggtagaagaaatgaagtaatagttattgaatgctttttgtgtactgcaggtgtggaaacaggaagagaactagaactggaagtaaagcattgaagatgtgactgaattgctgcaatctcatgatcaaatttgaatggatgaggagttgctttttagggatgagcaaagaaagtggtttctcgagatggaatctactggttgctccttgagggcaggacagttcttatggctttatccgttgcgtaagcacagagaggtctgcgaggtcaaaactattgtcatgatagcaagatgcctgtctttttcatttattctcacggtgtgcagaggctacatgatgtgtgatgacatcctcattgatgttaatgaatggtgctatacttgaattttctaaggtgtcattaggtaggtttaggtatgcatacttgtttttagaaattatttttttcctttttcccatttttagaaatcaactcattttttaggttatgccttcagtaatctttgcaacctcaatattgtgtaatggttactttaaaatactgtagttttctttgtgcctaagtataaacataagtacattttgttgttttgtttgcaatagtggtttaaatattttcccaaaatatccaaatttaaaaattctacaactttagaatttaataaatttattctaaaatatttatatattttttcatttaagaatggatcggcttaaaaagactgcttctcatttacttactggctataccatctgtatactaataaaaaacaagatttgatttggaaggactgactcaaactaacgaaaatatgaaacctgtctttctgctttggagatatttacctaatcatgttctgcagtagaataatttagttcttttgtctttttttggagatgaggtcttgctgtgttgcccaggctattcacagctgccatcatagtgaactacagcctgaaactcctgggttcaagagatccttctgcctcagcctcctgagtagctggaactataggcatgcgccaccaagcctgggcttttaaaaaaattttaaaaagaattttgagacaggatcttgccatgttgctcaggctagtcttcaactcctagccctgagtgatcttgctttgggcctctcaaaatgttgagttaataggcgtgagccaccatacccagccaaaaatttttttagagatgggaatggaatgatcttgaatagtgttggtgccacctatgttgtggcatcattttgaaaccaatcattcagagtgctttttttggtaaggcattattttttaatgcaggtatgccactactgggaaaaaaaaaaaaacaggttttaaagctagaaatgaaaagctacttaactatcttaaaggataagttactttattatacactagaaacatacacaatagctgaaaaacttaaaaaatctcacactgctgaatgtctctgctggctgaagtgtaagtaaaagatcatagtagtgccgctgttgagtgatacagcaacttgtcattaaagatgtgtgtgcagacatggattctgagttaatatctcatctgtagaagtatatatttgtcccttgctttgggattggtttctggacaccactcccccacccttgctggccatttgccaaggacaccaaaacccaaggatgttgaattcccttttataaaatggcgctgtatctgcatacaacttacacacatcctcccatatactttaaatcatttccagatttcttatacttcatacaatgtgaatgctatgtaaatagttgttacattgtgtacttatatttgtactattgtattaaatattctcaaatattttca

SEQ ID NO: 347717 - DNA, 2201 bp, Homo sapiens
gggaatatttttctgcctttgaagatattctcacaagatcgttctccacgcccaaggcaagtaaaacgacacaatctggctcaactccaggctcgaaccctacacattcaacgaggctatctcagacacgctgtggcacacgccacggggagccagagaacgtgtggtgggggtggcgaaggtaatgcctttgggaagcagccatctgaggtgggaagccagaaaacgagagggaaggcgtccaggaagattacggaggggagatcgcggcccccagagcgatcagagttgtctgtcacaaggccgcgagaacgggggtagggagtgggggatcggggagagaaaaaaagtatgcctgtgtatttcgagcggagggcagcaagaggcctctcctcaagggaaaggtgtggaaacaggaagagaactagaactggaagtaaagcattgaagatgtgactgaattgctgcaatctcatgatcaaatttgaatggatgaggagttgctttttagggatgagcaaagaaagtggtttctcgagatggaatctactggttgctccttgagggcaggacagttcttatggctttatccgttgcgtaagcacagagaggtctgcgaggtcaaaactattgtcatgatagcaagatgcctgtctttttcatttattctcacggtgtgcagaggctacatgatgtgtgatgacatcctcattgatgttaatgaatggtgctatacttgaattttctaaggtgtcattaggtaggtttaggtatgcatacttgtttttagaaattatttttttcctttttcccatttttagaaatcaactcattttttaggttatgccttcagtaatctttgcaacctcaatattgtgtaatggttactttaaaatactgtagttttctttgtgcctaagtataaacataagtacattttgttgttttgtttgcaatagtggtttaaatattttcccaaaatatccaaatttaaaaattctacaactttagaatttaataaatttattctaaaatatttatatattttttcatttaagaatggatcggcttaaaaagactgcttctcatttacttactggctataccatctgtatactaataaaaaacaagatttgatttggaaggactgactcaaactaacgaaaatatgaaacctgtctttctgctttggagatatttacctaatcatgttctgcagtagaataatttagttcttttgtctttttttggagatgaggtcttgctgtgttgcccaggctattcacagctgccatcatagtgaactacagcctgaaactcctgggttcaagagatccttctgcctcagcctcctgagtagctggaactataggcatgcgccaccaagcctgggcttttaaaaaaattttaaaaagaattttgagacaggatcttgccatgttgctcaggctagtcttcaactcctagccctgagtgatcttgctttgggcctctcaaaatgttgagttaataggcgtgagccaccatacccagccaaaaatttttttagagatgggaatggaatgatcttgaatagtgttggtgccacctatgttgtggcatcattttgaaaccaatcattcagagtgctttttttggtaaggcattattttttaatgcaggtatgccactactgggaaaaaaaaaaaaacaggttttaaagctagaaatgaaaagctacttaactatcttaaaggataagttactttattatacactagaaacatacacaatagctgaaaaacttaaaaaatctcacactgctgaatgtctctgctggctgaagtgtaagtaaaagatcatagtagtgccgctgttgagtgatacagcaacttgtcattaaagatgtgtgtgcagacatggattctgagttaatatctcatctgtagaagtatatatttgtcccttgctttgggattggtttctggacaccactcccccacccttgctggccatttgccaaggacaccaaaacccaaggatgttgaattcccttttataaaatggcgctgtatctgcatacaacttacacacatcctcccatatactttaaatcatttccagatttcttatacttcatacaatgtgaatgctatgtaaatagttgttacattgtgtacttatatttgtactattgtattaaatattctcaaatattttca

SEQ ID NO: 347718 - DNA, 1903 bp, Homo sapiens
aggcgggggcgggctgccggccgagacttctggatggcggcggccgcggctccgccccgggttcccaccgcctgaagggcgagacaagcccgacctgctacaggcagtgtggaaacaggaagagaactagaactggaagtaaagcattgaagatgtgactgaattgctgcaatctcatgatcaaatttgaatggatgaggagttgctttttagggatgagcaaagaaagtggtttctcgagatggaatctactggttgctccttgagggcaggacagttcttatggctttatccgttgcgtaagcacagagaggtctgcgaggtcaaaactattgtcatgatagcaagatgcctgtctttttcatttattctcacggtgtgcagaggctacatgatgtgtgatgacatcctcattgatgttaatgaatggtgctatacttgaattttctaaggtgtcattaggtaggtttaggtatgcatacttgtttttagaaattatttttttcctttttcccatttttagaaatcaactcattttttaggttatgccttcagtaatctttgcaacctcaatattgtgtaatggttactttaaaatactgtagttttctttgtgcctaagtataaacataagtacattttgttgttttgtttgcaatagtggtttaaatattttcccaaaatatccaaatttaaaaattctacaactttagaatttaataaatttattctaaaatatttatatattttttcatttaagaatggatcggcttaaaaagactgcttctcatttacttactggctataccatctgtatactaataaaaaacaagatttgatttggaaggactgactcaaactaacgaaaatatgaaacctgtctttctgctttggagatatttacctaatcatgttctgcagtagaataatttagttcttttgtctttttttggagatgaggtcttgctgtgttgcccaggctattcacagctgccatcatagtgaactacagcctgaaactcctgggttcaagagatccttctgcctcagcctcctgagtagctggaactataggcatgcgccaccaagcctgggcttttaaaaaaattttaaaaagaattttgagacaggatcttgccatgttgctcaggctagtcttcaactcctagccctgagtgatcttgctttgggcctctcaaaatgttgagttaataggcgtgagccaccatacccagccaaaaatttttttagagatgggaatggaatgatcttgaatagtgttggtgccacctatgttgtggcatcattttgaaaccaatcattcagagtgctttttttggtaaggcattattttttaatgcaggtatgccactactgggaaaaaaaaaaaaacaggttttaaagctagaaatgaaaagctacttaactatcttaaaggataagttactttattatacactagaaacatacacaatagctgaaaaacttaaaaaatctcacactgctgaatgtctctgctggctgaagtgtaagtaaaagatcatagtagtgccgctgttgagtgatacagcaacttgtcattaaagatgtgtgtgcagacatggattctgagttaatatctcatctgtagaagtatatatttgtcccttgctttgggattggtttctggacaccactcccccacccttgctggccatttgccaaggacaccaaaacccaaggatgttgaattcccttttataaaatggcgctgtatctgcatacaacttacacacatcctcccatatactttaaatcatttccagatttcttatacttcatacaatgtgaatgctatgtaaatagttgttacattgtgtacttatatttgtactattgtattaaatattctcaaatattttca

SEQ ID NO: 347719 - DNA, 1837 bp, Homo sapiens
gaagccgccggggccgcctagagaagaggctgtgcttcggcgctccggctcctcagagagcctcggctaggtgtggaaacaggaagagaactagaactggaagtaaagcattgaagatgtgactgaattgctgcaatctcatgatcaaatttgaatggatgaggagttgctttttagggatgagcaaagttgctccttgagggcaggacagttcttatggctttatccgttgcgtaagcacagagaggtctgcgaggtcaaaactattgtcatgatagcaagatgcctgtctttttcatttattctcacggtgtgcagaggctacatgatgtgtgatgacatcctcattgatgttaatgaatggtgctatacttgaattttctaaggtgtcattaggtaggtttaggtatgcatacttgtttttagaaattatttttttcctttttcccatttttagaaatcaactcattttttaggttatgccttcagtaatctttgcaacctcaatattgtgtaatggttactttaaaatactgtagttttctttgtgcctaagtataaacataagtacattttgttgttttgtttgcaatagtggtttaaatattttcccaaaatatccaaatttaaaaattctacaactttagaatttaataaatttattctaaaatatttatatattttttcatttaagaatggatcggcttaaaaagactgcttctcatttacttactggctataccatctgtatactaataaaaaacaagatttgatttggaaggactgactcaaactaacgaaaatatgaaacctgtctttctgctttggagatatttacctaatcatgttctgcagtagaataatttagttcttttgtctttttttggagatgaggtcttgctgtgttgcccaggctattcacagctgccatcatagtgaactacagcctgaaactcctgggttcaagagatccttctgcctcagcctcctgagtagctggaactataggcatgcgccaccaagcctgggcttttaaaaaaattttaaaaagaattttgagacaggatcttgccatgttgctcaggctagtcttcaactcctagccctgagtgatcttgctttgggcctctcaaaatgttgagttaataggcgtgagccaccatacccagccaaaaatttttttagagatgggaatggaatgatcttgaatagtgttggtgccacctatgttgtggcatcattttgaaaccaatcattcagagtgctttttttggtaaggcattattttttaatgcaggtatgccactactgggaaaaaaaaaaaaacaggttttaaagctagaaatgaaaagctacttaactatcttaaaggataagttactttattatacactagaaacatacacaatagctgaaaaacttaaaaaatctcacactgctgaatgtctctgctggctgaagtgtaagtaaaagatcatagtagtgccgctgttgagtgatacagcaacttgtcattaaagatgtgtgtgcagacatggattctgagttaatatctcatctgtagaagtatatatttgtcccttgctttgggattggtttctggacaccactcccccacccttgctggccatttgccaaggacaccaaaacccaaggatgttgaattcccttttataaaatggcgctgtatctgcatacaacttacacacatcctcccatatactttaaatcatttccagatttcttatacttcatacaatgtgaatgctatgtaaatagttgttacattgtgtacttatatttgtactattgtattaaatattctcaaatattttca

SEQ ID NO: 347720 - DNA, 1377 bp, Homo sapiens
gaagccgccggggccgcctagagaagaggctgtgcttcggcgctccggctcctcagagagcctcggctaggtgtggaaacaggaagagaactagaactggaagtaaagcattgaagatgtgactgaattgctgcaatctcatgatcaaatttgaatggatgaggagttgctttttagggatgagcaaagaaagtggtttctcgagatggaatctactggttgctccttgagggcaggacagttcttatggctttatccgttgcgtaagcacagagaggtctgcgaggtcaaaactattgtcatgatagcaagatgcctgtctttttcatttattctcacggtgtgcagaggctacatgatgtgtgatgacatcctcattgatgttaatgaatggtgctatacttgaattttctaaggtgtcattaggtaatgaggtcttgctgtgttgcccaggctattcacagctgccatcatagtgaactacagcctgaaactcctgggttcaagagatccttctgcctcagcctcctgagtagctggaactataggcatgcgccaccaagcctgggcttttaaaaaaattttaaaaagaattttgagacaggatcttgccatgttgctcaggctagtcttcaactcctagccctgagtgatcttgctttgggcctctcaaaatgttgagttaataggcgtgagccaccatacccagccaaaaatttttttagagatgggaatggaatgatcttgaatagtgttggtgccacctatgttgtggcatcattttgaaaccaatcattcagagtgctttttttggtaaggcattattttttaatgcaggtatgccactactgggaaaaaaaaaaaaacaggttttaaagctagaaatgaaaagctacttaactatcttaaaggataagttactttattatacactagaaacatacacaatagctgaaaaacttaaaaaatctcacactgctgaatgtctctgctggctgaagtgtaagtaaaagatcatagtagtgccgctgttgagtgatacagcaacttgtcattaaagatgtgtgtgcagacatggattctgagttaatatctcatctgtagaagtatatatttgtcccttgctttgggattggtttctggacaccactcccccacccttgctggccatttgccaaggacaccaaaacccaaggatgttgaattcccttttataaaatggcgctgtatctgcatacaacttacacacatcctcccatatactttaaatcatttccagatttcttatacttcatacaatgtgaatgctatgtaaatagttgttacattgtgtacttatatttgtactattgtattaaatattctcaaatattttca

SEQ ID NO: 347721 - DNA, 1413 bp, Homo sapiens
aggcgggggcgggctgccggccgagacttctggatggcggcggccgcggctccgccccgggttcccaccgcctgaagggcgagacaagcccgacctgctacaggcagtgtggaaacaggaagagaactagaactggaagtaaagcattgaagatgtgactgaattgctgcaatctcatgatcaaatttgaatggatgaggagttgctttttagggatgagcaaagaaagtggtttctcgagatggaatctactggttgctccttgagggcaggacagttcttatggctttatccgttgcgtaagcacagagaggtctgcgaggtcaaaactattgtcatgatagcaagatgcctgtctttttcatttattctcacggtgtgcagaggctacatgatgtgtgatgacatcctcattgatgttaatgaatggtgctatacttgaattttctaaggtgtcattaggtaatgaggtcttgctgtgttgcccaggctattcacagctgccatcatagtgaactacagcctgaaactcctgggttcaagagatccttctgcctcagcctcctgagtagctggaactataggcatgcgccaccaagcctgggcttttaaaaaaattttaaaaagaattttgagacaggatcttgccatgttgctcaggctagtcttcaactcctagccctgagtgatcttgctttgggcctctcaaaatgttgagttaataggcgtgagccaccatacccagccaaaaatttttttagagatgggaatggaatgatcttgaatagtgttggtgccacctatgttgtggcatcattttgaaaccaatcattcagagtgctttttttggtaaggcattattttttaatgcaggtatgccactactgggaaaaaaaaaaaaacaggttttaaagctagaaatgaaaagctacttaactatcttaaaggataagttactttattatacactagaaacatacacaatagctgaaaaacttaaaaaatctcacactgctgaatgtctctgctggctgaagtgtaagtaaaagatcatagtagtgccgctgttgagtgatacagcaacttgtcattaaagatgtgtgtgcagacatggattctgagttaatatctcatctgtagaagtatatatttgtcccttgctttgggattggtttctggacaccactcccccacccttgctggccatttgccaaggacaccaaaacccaaggatgttgaattcccttttataaaatggcgctgtatctgcatacaacttacacacatcctcccatatactttaaatcatttccagatttcttatacttcatacaatgtgaatgctatgtaaatagttgttacattgtgtacttatatttgtactattgtattaaatattctcaaatattttca

SEQ ID NO: 347722 - DNA, 1265 bp, Homo sapiens
aggcgggggcgggctgccggccgagacttctggatggcggcggccgcggctccgccccgggttcccaccgcctgaagggcgagacaagcccgacctgctacaggcagttgctccttgagggcaggacagttcttatggctttatccgttgcgtaagcacagagaggtctgcgaggtcaaaactattgtcatgatagcaagatgcctgtctttttcatttattctcacggtgtgcagaggctacatgatgtgtgatgacatcctcattgatgttaatgaatggtgctatacttgaattttctaaggtgtcattaggtaatgaggtcttgctgtgttgcccaggctattcacagctgccatcatagtgaactacagcctgaaactcctgggttcaagagatccttctgcctcagcctcctgagtagctggaactataggcatgcgccaccaagcctgggcttttaaaaaaattttaaaaagaattttgagacaggatcttgccatgttgctcaggctagtcttcaactcctagccctgagtgatcttgctttgggcctctcaaaatgttgagttaataggcgtgagccaccatacccagccaaaaatttttttagagatgggaatggaatgatcttgaatagtgttggtgccacctatgttgtggcatcattttgaaaccaatcattcagagtgctttttttggtaaggcattattttttaatgcaggtatgccactactgggaaaaaaaaaaaaacaggttttaaagctagaaatgaaaagctacttaactatcttaaaggataagttactttattatacactagaaacatacacaatagctgaaaaacttaaaaaatctcacactgctgaatgtctctgctggctgaagtgtaagtaaaagatcatagtagtgccgctgttgagtgatacagcaacttgtcattaaagatgtgtgtgcagacatggattctgagttaatatctcatctgtagaagtatatatttgtcccttgctttgggattggtttctggacaccactcccccacccttgctggccatttgccaaggacaccaaaacccaaggatgttgaattcccttttataaaatggcgctgtatctgcatacaacttacacacatcctcccatatactttaaatcatttccagatttcttatacttcatacaatgtgaatgctatgtaaatagttgttacattgtgtacttatatttgtactattgtattaaatattctcaaatattttca

SEQ ID NO: 347723 - DNA, 2103 bp, Homo sapiens
aggcgggggcgggctgccggccgagacttctggatggcggcggccgcggctccgccccgggttcccaccgcctgaagggcgagacaagcccgacctgctacaggcactcgtgggggtgggggaggagcgggggtcggtccggctggtttgtgggtgggaggcgcttgttctccaaaaaccggcgcgagctgcaatcctgagggagctgcggtggaggaggtggagagaaggccgcacccttctgggcagggggaggggagtgccgcaatacctttatgggagttctctgctgcctcccgtcttgtaaggaccgccctgggcctggaagaagccctccctcctttcctcctcgcgtgatctcgtcatcgcctccatgtcgagtcgcttctcgattatgggcgggattcttttgcctaggcttaaggggctaacttggtccctggggcgttgccctgcaggggagtgagcagctgtaagatttgaggggcgactccgattagtttatcttcccacggactagagttggtgtcgaggttattgtaataagggtggggtagggaaatggagcttagtcattcacctggggctgattttatgcaacgagactgcggattatcactacttatcatttttggagcatttttctagagacagacataaagcatgatcacctgagttttataccatttgagacccttgctgcaccaccaaagtgtagcatcaggttaaatcttaatagaaaaattttagcttttgctttgagaaaccagtgcttccctccctcaccctctctccccaggctctctacccctttgcatccctaccaggcatcttagcaactctcactcatacttgatcccattttccatttgttgtacttgctcctctagtattcagacatagcactagctttctccctctcttgatcttgggtagcctggtgtctcgcgaaaccagacagattggttccaccacaaattaaggcttgagctggggcttgactcttacccagcagtgcttttattcctccctagttcacgttcttaaatgtttatcttgattttcattttatcctttttccttagctgggattctgtccctgaccgtcttcacagtccaggtgatcttgactactgctttacagagaattggatctgaggtgtggaaacaggaagagaactagaactggaagtaaagcattgaagatgtgactgaattgctgcaatctcatgatcaaatttgaatggatgaggagttgctttttagggatgagcaaagaaagtggtttctcgagatggaatctactggtgaagttgctgtgaacattgttaaaatgccaataaaggatttaggaattacagaaacctggttgataaagcagtgccagggtgtgagagagttgacttcaattttgaaataagttccacatacccagccaaaaatttttttagagatgggaatggaatgatcttgaatagtgttggtgccacctatgttgtggcatcattttgaaaccaatcattcagagtgctttttttggtaaggcattattttttaatgcaggtatgccactactgggaaaaaaaaaaaaacaggttttaaagctagaaatgaaaagctacttaactatcttaaaggataagttactttattatacactagaaacatacacaatagctgaaaaacttaaaaaatctcacactgctgaatgtctctgctggctgaagtgtaagtaaaagatcatagtagtgccgctgttgagtgatacagcaacttgtcattaaagatgtgtgtgcagacatggattctgagttaatatctcatctgtagaagtatatatttgtcccttgctttgggattggtttctggacaccactcccccacccttgctggccatttgccaaggacaccaaaacccaaggatgttgaattcccttttataaaatggcgctgtatctgcatacaacttacacacatcctcccatatactttaaatcatttccagatttcttatacttcatacaatgtgaatgctatgtaaatagttgttacattgtgtacttatatttgtactattgtattaaatattctcaaatattttca

SEQ ID NO: 347724 - DNA, 1888 bp, Homo sapiens
aggcgggggcgggctgccggccgagacttctggatggcggcggccgcggctccgccccgggttcccaccgcctgaagggcgagacaagcccgacctgctacaggcactcgtgggggtgggggaggagcgggggtcggtccggctggtttgtgggtgggaggcgcttgttctccaaaaaccggcgcgagctgcaatcctgagggagctgcggtggaggaggtggagagaaggccgcacccttctgggcagggggaggggagtgccgcaatacctttatgggagttctctgctgcctcccgtcttgtaaggaccgccctgggcctggaagaagccctccctcctttcctcctcgcgtgatctcgtcatcgcctccatgtcgagtcgcttctcgattatgggcgggattcttttgcctaggcttaaggggctaacttggtccctggggcgttgccctgcaggggagtgagcagctgtaagatttgaggggcgactccgattagtttatcttcccacggactagagttggtgtcgaggttattgtaataagggtggggtagggaaatggagcttagtcattcacctggggctgattttatgcaacgagactgcggattatcactacttatcatttttggagcatttttctagagacagacataaagcatgatcacctgagttttataccatttgagacccttgctgcaccaccaaagtgtagcatcaggttaaatcttaatagaaaaattttagcttttgctttgagaaaccagtgcttccctccctcaccctctctccccaggctctctacccctttgcatccctaccaggcatcttagcaactctcactcatacttgatcccattttccatttgttgtacttgctcctctagtattcagacatagcactagctttctccctctcttgatcttgggtagcctggtgtctcgcgaaaccagacagattggttccaccacaaattaaggcttgagctggggcttgactcttacccagcagtgcttttattcctccctagttcacgttcttaaatgtttatcttgattttcattttatcctttttccttagctgggattctgtccctgaccgtcttcacagtccaggtgatcttgactactgctttacagagaattggatctgaggtgtggaaacaggaagagaactagaactggaagtaaagcattgaagatgtgactgaattgctgcaatctcatgatcaaatttgaatggatgaggagttgctttttagggatgagcaaagaaagtggtttctcgagatggaatctactggttgctccttgagggcaggacagttcttatggctttatccgttgcgtaagcacagagaggtctgcgaggtcaaaactattgtcatgatagcaagatgcctgtctttttcatttattctcacggtgtgcagaggctacatgatgtgtgatgacatcctcattgatgttaatgaatggtgctatacttgaattttctaaggtgtcattaggtacaattctcctgcctcagcctcctgcataactgggactacagggaagcaccattttccacaaaactctcaagaaggacttgttgcaactggaaaagcaattaaatgtgaatcgtgatccaggagaaagtaacaactcacataactcccaaattaaaagttttccaaagatatatcatttttttttttttggccttttaagaaactagccaacaaatactcttgacaggtttgtgtttggttttgaaaacacacaccttagtgtactgaaagaaaaacaatttcttttaatttggtttgttggtcccacaccccatctatcaatgtatgtgctatttacaaataagttctatacagtatttttgcagtacct

SEQ ID NO: 347725 - DNA, 1099 bp, Homo sapiens
caccctgatgagtcagtagccatcgttaacgttggcgtaagaccctccaccagcaaaaagattgttagcatttttttagcagtgatgtatttatcaattatacataatgctattgtacacttcttaatagactatggtatagtgtaaccataatttatgcactgggaaaccaacaaattcatgagattcgctttattgtagtgctctggaattgagcctgccgtgtttctgaggtatacctgtgtatttagtatgttccttgtatataaaaccccattttatagggtaggaaactaaggcttagagtttgagcaattttcccatagataacaccaataaattgagggctgcagagaccacttaagtggttctcttaacagtagtctagacatgacgtaatgagatttggcttaggagtgacaatggtaaggaagttaaaggattcaggaaccaaataccagttattgagaagaaagaatggcctcaaaacatcacttctcaaggaagccttgataccctcacccttactacactgtatcctccatttgaatgttgtcaagagctcttctcacaattgtaaataataattgtgtaattttgttttttttttcctactttaggttgctccttgagggcaggacagttcttatggctttatccgttgcgtaagcacagagaggtctgcgaggtcaaaactattgtcatgatagcaagatgcctgtctttttcatttattctcacggtgtgcagaggctacatgatgtgtgatgacatcctcattgatgttaatgaatggtgctatacttgaattttctaaggtgtcattaggtaggtttaggtatgcatacttgtttttagaaattatttttttcctttttcccatttttagaaatcaactcattttttaggttatgccttcagtaatctttgcaacctcaatattgtgtaatggttactttaaaatactgtagttttctttgtgcctaagtataaacataagtacattttgttgttttgtttgcaatagtggtttaaatattttcccaaaatatccaaatttaaaaattctacaactttagaatttaataaatttattcta

SEQ ID NO: 347726 - DNA, 2140 bp, Homo sapiens
aggcgggggcgggctgccggccgagacttctggatggcggcggccgcggctccgccccgggttcccaccgcctgaagggcgagacaagcccgacctgctacaggcactcgtgggggtgggggaggagcgggggtcggtccggctggtttgtgggtgggaggcgcttgttctccaaaaaccggcgcgagctgcaatcctgagggagctgcggtggaggaggtggagagaaggccgcacccttctgggcagggggaggggagtgccgcaatacctttatgggagttctctgctgcctcccgtcttgtaaggaccgccctgggcctggaagaagccctccctcctttcctcctcgcgtgatctcgtcatcgcctccatgtcgagtcgcttctcgattatgggcgggattcttttgcctaggcttaaggggctaacttggtccctggggcgttgccctgcaggggagtgagcagctgtaagatttgaggggcgactccgattagtttatcttcccacggactagagttggtgtcgaggttattgtaataagggtggggtagggaaatggagcttagtcattcacctggggctgattttatgcaacgagactgcggattatcactacttatcatttttggagcatttttctagagacagacataaagcatgatcacctgagttttataccatttgagacccttgctgcaccaccaaagtgtagcatcaggttaaatcttaatagaaaaattttagcttttgctttgagaaaccagtgcttccctccctcaccctctctccccaggctctctacccctttgcatccctaccaggcatcttagcaactctcactcatacttgatcccattttccatttgttgtacttgctcctctagtattcagacatagcactagctttctccctctcttgatcttgggtagcctggtgtctcgcgaaaccagacagattggttccaccacaaattaaggcttgagctggggcttgactcttacccagcagtgcttttattcctccctagttcacgttcttaaatgtttatcttgattttcattttatcctttttccttagctgggattctgtccctgaccgtcttcacagtccaggtgatcttgactactgctttacagagaattggatctgaggtgtggaaacaggaagagaactagaactggaagtaaagcattgaagatgtgactgaattgctgcaatctcatgatcaaatttgaatggatgaggagttgctttttagggatgagcaaagaaagtggtttctcgagatggaatctactggtgaagttgctgtgaacattgttaaaatgccaataaaggatttaggaattacagaaacctggttgataaagcagtgccagggtgtgagagagttgacttcaattttgaaataagttccactggctgggtgtggtggctcacacctgcaatcccagtactttaggaggccgagactggtagatcatttgaggtcaggagttcaagaccagccttgccaacatggtgaaaccccacctctaccaaattagccaggttgctccttgagggcaggacagttcttatggctttatccgttgcgtaagcacagagaggtctgcgaggtcaaaactattgtcatgatagcaagatgcctgtctttttcatttattctcacggtgtgcagaggctacatgatgtgtgatgacatcctcattgatgttaatgaatggtgctatacttgaattttctaaggtgtcattaggtacaattctcctgcctcagcctcctgcataactgggactacagggaagcaccattttccacaaaactctcaagaaggacttgttgcaactggaaaagcaattaaatgtgaatcgtgatccaggagaaagtaacaactcacataactcccaaattaaaagttttccaaagatatatcatttttttttttttggccttttaagaaactagccaacaaatactcttgacaggtttgtgtttggttttgaaaacacacaccttagtgtactgaaagaaaaacaatttcttttaatttggtttgttggtcccacaccccatctatcaatgtatgtgctatttacaaataagttctatacagtatttttgcagtacct

SEQ ID NO: 347727 - DNA, 1260 bp, Homo sapiens
tcccctcaaatatattgactttttcattcccagtaacaatatgtctggtctgtaactaagtcattccatgttcagattacagatttatttccccatcttttcacattcttttagtccaggagacccactttgaaggttaaaaccaaggtcacacaatgaataggtggcagtgtcacatataactcagctccaggccttatgaatcctgcttatagcccactgcctattctagtcaccagattgaaaaacaccatactagggaagaagatggcaaactattgcccactacatatttgtatcagtcttgtcaaatttttattgtagtatgtaatagaattaaagctatgatgaatcaagtaaaaaatgatttccttaaaaactaagctaataggcgaaaatactcgcttgttcaacaaatacccagtctggcagatacaataccctgcccttagtggggggtggagtggggggtgggggggtggggaaagacatcgtggtgaaaacagacatggtccttgaacttcctggttctgtgggttgcttaatttgaggtttaaatggtttctcccatcaggtgaaaagttttgtgttcggcccataaacaaagcagctgtgaattctgatagtggtaaaaaggccagtctaggatataaaaccttcataaacatcttatttcccattcattatgaagtgtggggtaggagatcagagaaaccagatgaggattgctggctgtgctgctaatgtgaactcttctttcaaaagtattgtgtccttttattctcaatggagacatcagaaagtattaagaggagtactattataatactaataggatactgaaaatctatactgattgcagccagaggctccaaaataaacaatactatgatgagttccacaaaaaaacctcaactactctttgttccagggaagcaccattttccacaaaactctcaagaaggacttgttgcaactggaaaagcaattaaatgtgaatcgtgatccaggagaaagtaacaactcacataactcccaaattaaaagttttccaaagatatatcatttttttttttttggccttttaagaaactagccaacaaatactcttgacaggtttgtgtttggttttgaaaacacacaccttagtgtactgaaagaaaaacaatttcttttaatttggtttgttggtcccacaccccatctatcaatgtatgtgctatttacaaataagttctatacagtatttttgcagtacct

SEQ ID NO: 347728 - DNA, 1805 bp, Homo sapiens
  misc_feature (1762)..(1762): n is a, c, g, or t
  misc_feature (1793)..(1793): n is a, c, g, or t
  misc_feature (1797)..(1797): n is a, c, g, or t
aggcgggggcgggctgccggccgagacttctggatggcggcggccgcggctccgccccgggttcccaccgcctgaagggcgagacaagcccgacctgctacaggcactcgtgggggtgggggaggagcgggggtcggtccggctggtttgtgggtgggaggcgcttgttctccaaaaaccggcgcgagctgcaatcctgagggagctgcggtggaggaggtggagagaaggccgcacccttctgggcagggggaggggagtgccgcaatacctttatgggagttctctgctgcctcccgtcttgtaaggaccgccctgggcctggaagaagccctccctcctttcctcctcgcgtgatctcgtcatcgcctccatgtcgagtcgcttctcgattatgggcgggattcttttgcctaggcttaaggggctaacttggtccctggggcgttgccctgcaggggagtgagcagctgtaagatttgaggggcgactccgattagtttatcttcccacggactagagttggtgtcgaggttattgtaataagggtggggtagggaaatggagcttagtcattcacctggggctgattttatgcaacgagactgcggattatcactacttatcatttttggagcatttttctagagacagacataaagcatgatcacctgagttttataccatttgagacccttgctgcaccaccaaagtgtagcatcaggttaaatcttaatagaaaaattttagcttttgctttgagaaaccagtgcttccctccctcaccctctctccccaggctctctacccctttgcatccctaccaggcatcttagcaactctcactcatacttgatcccattttccatttgttgtacttgctcctctagtattcagacatagcactagctttctccctctcttgatcttgggtagcctggtgtctcgcgaaaccagacagattggttccaccacaaattaaggcttgagctggggcttgactcttacccagcagtgcttttattcctccctagttcacgttcttaaatgtttatcttgattttcattttatcctttttccttagctgggattctgtccctgaccgtcttcacagtccaggtgatcttgactactgctttacagagaattggatctgaggtgtggaaacaggaagagaactagaactggaagtaaagcattgaagatgtgactgaattgctgcaatctcatgatcaaatttgaatggatgaggagttgctttttagggatgagcaaagaaagtggtttctcgagatggaatctactggttgctccttgagggcaggacagttcttatggctttatccgttgcgtaagcacagagaggtctgcgaggtcaaaactattgtcatgatagcaagatgcctgtctttttcatttattctcacggtgtgcagaggctacatgatgtgtgatgacatcctcattgatgttaatgaatggtgctatacttgaattttctaaggtgtcattaggtactgactgcaacctctgtctcctgggttcaagcaattctcctgcctcagcctcctgcataactgggactacagggaagcaccattttccacaaaactctcaagaaggacttgttgcaactggaaaagcaattaaatgtgaatcgtgatccaggagaaagtaacaactcacataactcccaaattaaaagttttccaaaggattaaaacaaaaaaaaaacaaaaaaaaaaaaaaaaaaaaaaaaanaaaaaaaaaaaacaaaaaaaaaaaaaaaaanaaanaaaaaaaa

SEQ ID NO: 347729 - DNA, 1215 bp, Homo sapiens
aggcgggggcgggctgccggccgagacttctggatggcggcggccgcggctccgccccgggttcccaccgcctgaagggcgagacaagcccgacctgctacaggcactcgtgggggtgggggaggagcgggggtcggtccggctggtttgtgggtgggaggcgcttgttctccaaaaaccggcgcgagctgcaatcctgagggagctgcggtggaggaggtggagagaaggccgcacccttctgggcagggggaggggagtgccgcaatacctttatgggagttctctgctgcctcccgtcttgtaaggaccgccctgggcctggaagaagccctccctcctttcctcctcgcgtgatctcgtcatcgcctccatgtcgagtcgcttctcgattatgggcgggattcttttgcctaggcttaaggggctaacttggtccctggggcgttgccctgcaggggagtgagcagctgtaagatttgaggggcgactccgattagtttatcttcccacggactagagttggtgtcgaggttattgtaataagggtggggtagggaaatggagcttagtcattcacctggggctgattttatgcaacgagactgcggattatcactacttatcatttttggagcatttttctagagacagacataaagcatgatcacctgagttttataccatttgagacccttgctgcaccaccaaagtgtagcatcaggttaaatcttaatagaaaaattttagcttttgctttgagaaaccagtgcttccctccctcaccctctctccccaggctctctacccctttgcatccctaccaggcatcttagcaactctcactcatacttgatcccattttccatttgttgtacttgctcctctagtattcagacatagcactagctttctccctctcttgatcttgggtagcctggtgtctcgcgaaaccagacagattggttccaccacaaattaaggcttgagctggggcttgactcttacccagcagtgcttttattcctccctagttcacgttcttaaatgtttatcttgattttcattttatcctttttccttagctgggattctgtccctgaccgtcttcacagtccaggtgatcttgactactgctttacagagaattggatctgaggttaggcaacatctccctttttcttcctctaaatacctctcatttctgttcttacc

SEQ ID NO: 347730 - DNA, 910 bp, Homo sapiens
gggaatatttttctgcctttgaagatattctcacaagatcgttctccacgcccaaggcaagtaaaacgacacaatctggctcaactccaggctcgaaccctacacattcaacgaggctatctcagacacgctgtggcacacgccacggggagccagagaacgtgtggtgggggtggcgaaggtgtggaaacaggaagagaactagaactggaagtaaagcattgaagatgtgactgaattgctgcaatctcatgatcaaatttgaatggatgaggagttgctttttagggatgagcaaagaaagtggtttctcgagatggaatctactggttgctccttgagggcaggacagttcttatggctttatccgttgcgtaagcacagagaggtctgcgaggtcaaaactattgtcatgatagcaagatgcctgtctttttcatttattctcacggtgtgcagaggctacatgatgtgtgatgacatcctcattgatgttaatgaatggtgctatacttgaattttctaaggtgtcattaggtacaattctcctgcctcagcctcctgcataactgggactacagggaagcaccattttccacaaaactctcaagaaggacttgttgcaactggaaaagcaattaaatgtgaatcgtgatccaggagaaagtaacaactcacataactcccaaattaaaagttttccaaagatatatcatttttttttttttggccttttaagaaactagccaacaaatactcttgacaggtttgtgtttggttttgaaaacacacaccttagtgtactgaaagaaaaacaatttcttttaatttggtttgttggtcccacaccccatctatcaatgtatgtgctatttacaaataagttctatacagtatttttgcagtacct

SEQ ID NO: 347731 - DNA, 687 bp, Homo sapiens
aggcgggggcgggctgccggccgagacttctggatggcggcggccgcggctccgccccgggttcccaccgcctgaagggcgagacaagcccgacctgctacaggcagttgctccttgagggcaggacagttcttatggctttatccgttgcgtaagcacagagaggtctgcgaggtcaaaactattgtcatgatagcaagatgcctgtctttttcatttattctcacggtgtgcagaggctacatgatgtgtgatgacatcctcattgatgttaatgaatggtgctatacttgaattttctaaggtgtcattaggtacaattctcctgcctcagcctcctgcataactgggactacagggaagcaccattttccacaaaactctcaagaaggacttgttgcaactggaaaagcaattaaatgtgaatcgtgatccaggagaaagtaacaactcacataactcccaaattaaaagttttccaaagatatatcatttttttttttttggccttttaagaaactagccaacaaatactcttgacaggtttgtgtttggttttgaaaacacacaccttagtgtactgaaagaaaaacaatttcttttaatttggtttgttggtcccacaccccatctatcaatgtatgtgctatttacaaataagttctatacagtatttttgcagtacct

SEQ ID NO: 347732 - DNA, 2956 bp, Homo sapiens
aggcgggggcgggctgccggccgagacttctggatggcggcggccgcggctccgccccgggttcccaccgcctgaagggcgagacaagcccgacctgctacaggcactcgtgggggtgggggaggagcgggggtcggtccggctggtttgtgggtgggaggcgcttgttctccaaaaaccggcgcgagctgcaatcctgagggagctgcggtggaggaggtggagagaaggccgcacccttctgggcagggggaggggagtgccgcaatacctttatgggagttctctgctgcctcccgtcttgtaaggaccgccctgggcctggaagaagccctccctcctttcctcctcgcgtgatctcgtcatcgcctccatgtcgagtcgcttctcgattatgggcgggattcttttgcctaggcttaaggggctaacttggtccctggggcgttgccctgcaggggagtgagcagctgtaagatttgaggggcgactccgattagtttatcttcccacggactagagttggtgtcgaggttattgtaataagggtggggtagggaaatggagcttagtcattcacctggggctgattttatgcaacgagactgcggattatcactacttatcatttttggagcatttttctagagacagacataaagcatgatcacctgagttttataccatttgagacccttgctgcaccaccaaagtgtagcatcaggttaaatcttaatagaaaaattttagcttttgctttgagaaaccagtgcttccctccctcaccctctctccccaggctctctacccctttgcatccctaccaggcatcttagcaactctcactcatacttgatcccattttccatttgttgtacttgctcctctagtattcagacatagcactagctttctccctctcttgatcttgggtagcctggtgtctcgcgaaaccagacagattggttccaccacaaattaaggcttgagctggggcttgactcttacccagcagtgcttttattcctccctagttcacgttcttaaatgtttatcttgattttcattttatcctttttccttagctgggattctgtccctgaccgtcttcacagtccaggtgatcttgactactgctttacagagaattggatctgaggtgtggaaacaggaagagaactagaactggaagtaaagcattgaagatgtgactgaattgctgcaatctcatgatcaaatttgaatggatgaggagttgctttttagggatgagcaaagaaagtggtttctcgagatggaatctactggttgctccttgagggcaggacagttcttatggctttatccgttgcgtaagcacagagaggtctgcgaggtcaaaactattgtcatgatagcaagatgcctgtctttttcatttattctcacggtgtgcagaggctacatgatgtgtgatgacatcctcattgatgttaatgaatggtgctatacttgaattttctaaggtgtcattaggtaggtttaggtatgcatacttgtttttagaaattatttttttcctttttcccatttttagaaatcaactcattttttaggttatgccttcagtaatctttgcaacctcaatattgtgtaatggttactttaaaatactgtagttttctttgtgcctaagtataaacataagtacattttgttgttttgtttgcaatagtggtttaaatattttcccaaaatatccaaatttaaaaattctacaactttagaatttaataaatttattctaaaatatttatatattttttcatttaagaatggatcggcttaaaaagactgcttctcatttacttactggctataccatctgtatactaataaaaaacaagatttgatttggaaggactgactcaaactaacgaaaatatgaaacctgtctttctgctttggagatatttacctaatcatgttctgcagtagaataatttagttcttttgtctttttttggagatgaggtcttgctgtgttgcccaggctattcacagctgccatcatagtgaactacagcctgaaactcctgggttcaagagatccttctgcctcagcctcctgagtagctggaactataggcatgcgccaccaagcctgggcttttaaaaaaattttaaaaagaattttgagacaggatcttgccatgttgctcaggctagtcttcaactcctagccctgagtgatcttgctttgggcctctcaaaatgttgagttaataggcgtgagccaccatacccagccaaaaatttttttagagatgggaatggaatgatcttgaatagtgttggtgccacctatgttgtggcatcattttgaaaccaatcattcagagtgctttttttggtaaggcattattttttaatgcaggtatgccactactgggaaaaaaaaaaaaacaggttttaaagctagaaatgaaaagctacttaactatcttaaaggataagttactttattatacactagaaacatacacaatagctgaaaaacttaaaaaatctcacactgctgaatgtctctgctggctgaagtgtaagtaaaagatcatagtagtgccgctgttgagtgatacagcaacttgtcattaaagatgtgtgtgcagacatggattctgagttaatatctcatctgtagaagtatatatttgtcccttgctttgggattggtttctggacaccactcccccacccttgctggccatttgccaaggacaccaaaacccaaggatgttgaattcccttttataaaatggcgctgtatctgcatacaacttacacacatcctcccatatactttaaatcatttccagatttcttatacttcatacaatgtgaatgctatgtaaatagttgttacattgtgtacttatatttgtactattgtattaaatattctcaaatattttca

SEQ ID NO: 347733 - DNA, 3433 bp, Homo sapiens
aggcgggggcgggctgccggccgagacttctggatggcggcggccgcggctccgccccgggttcccaccgcctgaagggcgagacaagcccgacctgctacaggcactcgtgggggtgggggaggagcgggggtcggtccggctggtttgtgggtgggaggcgcttgttctccaaaaaccggcgcgagctgcaatcctgagggagctgcggtggaggaggtggagagaaggccgcacccttctgggcagggggaggggagtgccgcaatacctttatgggagttctctgctgcctcccgtcttgtaaggaccgccctgggcctggaagaagccctccctcctttcctcctcgcgtgatctcgtcatcgcctccatgtcgagtcgcttctcgattatgggcgggattcttttgcctaggcttaaggggctaacttggtccctggggcgttgccctgcaggggagtgagcagctgtaagatttgaggggcgactccgattagtttatcttcccacggactagagttggtgtcgaggttattgtaataagggtggggtagggaaatggagcttagtcattcacctggggctgattttatgcaacgagactgcggattatcactacttatcatttttggagcatttttctagagacagacataaagcatgatcacctgagttttataccatttgagacccttgctgcaccaccaaagtgtagcatcaggttaaatcttaatagaaaaattttagcttttgctttgagaaaccagtgcttccctccctcaccctctctccccaggctctctacccctttgcatccctaccaggcatcttagcaactctcactcatacttgatcccattttccatttgttgtacttgctcctctagtattcagacatagcactagctttctccctctcttgatcttgggtagcctggtgtctcgcgaaaccagacagattggttccaccacaaattaaggcttgagctggggcttgactcttacccagcagtgcttttattcctccctagttcacgttcttaaatgtttatcttgattttcattttatcctttttccttagctgggattctgtccctgaccgtcttcacagtccaggtgatcttgactactgctttacagagaattggatctgaggtgtggaaacaggaagagaactagaactggaagtaaagcattgaagatgtgactgaattgctgcaatctcatgatcaaatttgaatggatgaggagttgctttttagggatgagcaaagaaagtggtttctcgagatggaatctactggttgctccttgagggcaggacagttcttatggctttatccgttgcgtaagcacagagaggtctgcgaggtcaaaactattgtcatgatagcaagatgcctgtctttttcatttattctcacggtgtgcagaggctacatgatgtgtgatgacatcctcattgatgttaatgaatggtgctatacttgaattttctaaggtgtcattaggtaggtttaggtatgcatacttgtttttagaaattatttttttcctttttcccatttttagaaatcaactcattttttaggttatgccttcagtaatctttgcaacctcaatattgtgtaatggttactttaaaatactgtagttttctttgtgcctaagtataaacataagtacattttgttgttttgtttgcaatagtggtttaaatattttcccaaaatatccaaatttaaaaattctacaactttagaatttaataaatttattctaaaatatttatatattttttcatttaagaatggatcggcttaaaaagactgcttctcatttacttactggctataccatctgtatactaataaaaaacaagatttgatttggaaggactgactcaaactaacgaaaatatgaaacctgtctttctgctttggagatatttacctaatcatgttctgcagtagaataatttagttcttttgtctttttttggagatgaggtcttgctgtgttgcccaggctattcacagctgccatcatagtgaactacagcctgaaactcctgggttcaagagatccttctgcctcagcctcctgagtagctggaactataggcatgcgccaccaagcctgggcttttaaaaaaattttaaaaagaattttgagacaggatcttgccatgttgctcaggctagtcttcaactcctagccctgagtgatcttgctttgggcctctcaaaatgttgagttaataggcgtgagccaccatacccagccaaaaatttttttagagatgggaatggaatgatcttgaatagtgttggtgccacctatgttgtggcatcattttgaaaccaatcattcagagtgctttttttggtaaggcattattttttaatgcaggtatgccactactgggaaaaaaaaaaaaacaggttttaaagctagaaatgaaaagctacttaactatcttaaaggataagttactttattatacactagaaacatacacaatagctgaaaaacttaaaaaatctcacactgctgaatgtctctgctggctgaagtgtaagtaaaagatcatagtagtgccgctgttgagtgatacagcaacttgtcattaaagatgtgtgtgcagacatggattctgagttaatatctcatctgtagaagtatatatttgtcccttgctttgggattggtttctggacaccactcccccacccttgctggccatttgccaaggacaccaaaacccaaggatgttgaattcccttttataaaatggcgctgtatctgcatacaacttacacacatcctcccatatactttaaatcatttccagatttcttatacttcatacaatgtgaatgctatgtaaatagttgttacattgtgtacttatatttgtactattgtattaaatattctcaaatattttcaagcacatttggttgaatctgcagatgcagaacctgaggatatggagggctgactgtgctaatacgttatcaatggatgcgtgcataaacatggctggacttgttacttggcttgtatttgccaggcatcagcaccaactagttaaagatactcttacgtgaaagcttggcaacaaacacatgtcctgaaataatgcaagtgtagaataactttttaaaatctcatggtttatgctaaactatatgttgacataagagtggtgataaggcaacagtaggtaaaagtaaaatttcaggcaccttggcacaaactgtggcagtggcatcaaactctaagttatttttcactgccatgcatttgtggtgtgaacccccacaaaagaaaaaaaccagtttcactcaagaatgtccttgtgaaagcagtgacattttgttaaatcttaaaccctacagtacataactttttgaaatggttgtc

SEQ ID NO: 347734 - DNA, 3047 bp, Homo sapiens
  misc_feature (2186)..(2187): n is a, c, g, or t
  misc_feature (2218)..(2218): n is a, c, g, or t
  misc_feature (2255)..(2255): n is a, c, g, or t
aggcgggggcgggctgccggccgagacttctggatggcggcggccgcggctccgccccgggttcccaccgcctgaagggcgagacaagcccgacctgctacaggcactcgtgggggtgggggaggagcgggggtcggtccggctggtttgtgggtgggaggcgcttgttctccaaaaaccggcgcgagctgcaatcctgagggagctgcggtggaggaggtggagagaaggccgcacccttctgggcagggggaggggagtgccgcaatacctttatgggagttctctgctgcctcccgtcttgtaaggaccgccctgggcctggaagaagccctccctcctttcctcctcgcgtgatctcgtcatcgcctccatgtcgagtcgcttctcgattatgggcgggattcttttgcctaggcttaaggggctaacttggtccctggggcgttgccctgcaggggagtgagcagctgtaagatttgaggggcgactccgattagtttatcttcccacggactagagttggtgtcgaggttattgtaataagggtggggtagggaaatggagcttagtcattcacctggggctgattttatgcaacgagactgcggattatcactacttatcatttttggagcatttttctagagacagacataaagcatgatcacctgagttttataccatttgagacccttgctgcaccaccaaagtgtagcatcaggttaaatcttaatagaaaaattttagcttttgctttgagaaaccagtgcttccctccctcaccctctctccccaggctctctacccctttgcatccctaccaggcatcttagcaactctcactcatacttgatcccattttccatttgttgtacttgctcctctagtattcagacatagcactagctttctccctctcttgatcttgggtagcctggtgtctcgcgaaaccagacagattggttccaccacaaattaaggcttgagctggggcttgactcttacccagcagtgcttttattcctccctagttcacgttcttaaatgtttatcttgattttcattttatcctttttccttagctgggattctgtccctgaccgtcttcacagtccaggtgatcttgactactgctttacagagaattggatctgaggtgtggaaacaggaagagaactagaactggaagtaaagcattgaagatgtgactgaattgctgcaatctcatgatcaaatttgaatggatgaggagttgctttttagggatgagcaaagaaagtggtttctcgagatggaatctactggttgctccttgagggcaggacagttcttatggctttatccgttgcgtaagcacagagaggtctgcgaggtcaaaactattgtcatgatagcaagatgcctgtctttttcatttattctcacggtgtgcagaggctacatgatgtgtgatgacatcctcattgatgttaatgaatggtgctatacttgaattttctaaggtgtcattaggtaggtttaggtatgcatacttgtttttagaaattatttttttcctttttcccatttttagaaatcaactcattttttaggttatgccttcagtaatctttgcaacctcaatattgtgtaatggttactttaaaatactgtagttttctttgtgcctaagtataaacataagtacattttgttgttttgtttgcaatagtggtttaaatattttcccaaaatatccaaatttaaaaattctacaactttagaatttaataaatttattctaaaatatttatatattttttcatttaagaatggatcggcttaaaaagactgcttctcatttacttactggctataccatctgtatactaataaaaaacaagatttgatttggaaggactgactcaaactaacgaaaatatgaaacctgtctttctgctttggagatatttacctaatcatgttctgcagtagaataatttagttcttttgtctttttttggagatgaggtcttgctgtgttgcccaggctattcacagctgccatcatagtgaactacagcctgaaactcctgggttcaagagatccttctgcctcagcctcctgagtagctggaactataggcatgcgccaccaagcctgggcttttaaaaaaattttaaaacaactcgccacacatagnnccactttaaccctaaccccctaacctcatanacccatccgacgcccccccctcagcgccgaaccttantcccaaggcggcggcccccctaaaagccttaccatttcttcaccaaaacccctcctagccctgagtgatcttgctttgggcctctcaaaatgttgagttaataggcgtgagccaccatacccagccaaaaatttttttagagatgggaatggaatgatcttgaatagtgttggtgccacctatgttgtggcatcattttgaaaccaatcattcagagtgctttttttggtaaggcattattttttaatgcaggtatgccactactgggaaaaaaaaaaaaacaggttttaaagctagaaatgaaaagctacttaactatcttaaaggataagttactttattatacactagaaacatacacaatagctgaaaaacttaaaaaatctcacactgctgaatgtctctgctggctgaagtgtaagtaaaagatcatagtagtgccgctgttgagtgatacagcaacttgtcattaaagatgtgtgtgcagacatggattctgagttaatatctcatctgtagaagtatatatttgtcccttgctttgggattggtttctggacaccactcccccacccttgctggccatttgccaaggacaccaaaacccaaggatgttgaattcccttttataaaatggcgctgtatctgcatacaacttacacacatcctcccatatactttaaatcatttccagatttcttatacttcatacaatgtgaatgctatgtaaatagttgttacattgtgtacttatatttgtactattgtattaaatattctcaaatattttca

SEQ ID NO: 347735 - DNA, 2916 bp, Homo sapiens
aggcgggggcgggctgccggccgagacttctggatggcggcggccgcggctccgccccgggttcccaccgcctgaagggcgagacaagcccgacctgctacaggcactcgtgggggtgggggaggagcgggggtcggtccggctggtttgtgggtgggaggcgcttgttctccaaaaaccggcgcgagctgcaatcctgagggagctgcggtggaggaggtggagagaaggccgcacccttctgggcagggggaggggagtgccgcaatacctttatgggagttctctgctgcctcccgtcttgtaaggaccgccctgggcctggaagaagccctccctcctttcctcctcgcgtgatctcgtcatcgcctccatgtcgagtcgcttctcgattatgggcgggattcttttgcctaggcttaaggggctaacttggtccctggggcgttgccctgcaggggagtgagcagctgtaagatttgaggggcgactccgattagtttatcttcccacggactagagttggtgtcgaggttattgtaataagggtggggtagggaaatggagcttagtcattcacctggggctgattttatgcaacgagactgcggattatcactacttatcatttttggagcatttttctagagacagacataaagcatgatcacctgagttttataccatttgagacccttgctgcaccaccaaagtgtagcatcaggttaaatcttaatagaaaaattttagcttttgctttgagaaaccagtgcttccctccctcaccctctctccccaggctctctacccctttgcatccctaccaggcatcttagcaactctcactcatacttgatcccattttccatttgttgtacttgctcctctagtattcagacatagcactagctttctccctctcttgatcttgggtagcctggtgtctcgcgaaaccagacagattggttccaccacaaattaaggcttgagctggggcttgactcttacccagcagtgcttttattcctccctagttcacgttcttaaatgtttatcttgattttcattttatcctttttccttagctgggattctgtccctgaccgtcttcacagtccaggtgatcttgactactgctttacagagaattggatctgaggtgtggaaacaggaagagaactagaactggaagtaaagcattgaagatgtgactgaattgctgcaatctcatgatcaaatttgaatggatgaggagttgctttttagggatgagcaaagaaagtggtttctcgagatggaatctactggttgctccttgagggcaggacagttcttatggctttatccgttgcgtaagcacagagaggtctgcgaggtcaaaactattgtcatgatagcaagatgcctgtctttttcatttattctcacggtgtgcagaggctacatgatgtgtgatgacatcctcattgatgttaatgaatggtgctatacttgaattttctaaggtgtcattaggtaggtttaggtatgcatacttgtttttagaaattatttttttcctttttcccatttttagaaatcaactcattttttaggttatgccttcagtaatctttgcaacctcaatattgtgtaatggttactttaaaatactgtagttttctttgtgcctaagtataaacataagtacattttgttgttttgtttgcaatagtggtttaaatattttcccaaaatatccaaatttaaaaattctacaactttagaatttaataaatttattctaaaatatttatatattttttcatttaagaatggatcggcttaaaaagactgcttctcatttacttactggctataccatctgtatactaataaaaaacaagatttgatttggaaggactgactcaaactaacgaaaatatgaaacctgtctttctgctttggagatatttacctaatcatgttctgcagtagaataatttagttcttttgtctttttttggagatgaggtcttgctgtgttgcccaggctattcacagctgccatcatagtgaactacagcctgaaactcctgggttcaagagatccttctgcctcagcctcctgagtagctggaactataggcatgcgccaccaagcctgggcttttaaaaaaattttaaaaagaattttgagacaggatcttgccatgttgctcaggctagtcttcaactcctagccctgagtgatcttgctttgggcctctcaaaatgttgagttaataggcgtgagccaccatacccagccaaaaatttttttagagatgggaatggaatgatcttgaatagtgttggtgccacctatgttgtggcatcattttgaaaccaatcattcagagtgctttttttggtaaggcattattttttaatgcaggtatgccactactgggaaaaaaaaaaaaacaggttttaaagctagaaatgaaaagctacttaactatcttaaaggataagttactttattatacactagaaacatacacaatagctgaaaaacttaaaaaatctcacactgctgaatgtctctgctggctgaagtgtaagtaaaagatcatagtagtgccgctgttgagtgatacagcaacttgtcattaaagatgtgtgtgcagacatggattctgagttaatatctcatctgtagaagtatatatttgtcccttgctttgggattggtttctggacaccactcccccacccttgctggccatttgccaaggacaccatacccagccaaaaatttttttagagatgggaatggaatgatcttgaatagtgttggtgccacctatgttgtggcatcattttgaaaccaatcattcagagtgctttttttggtaaggcattattttttaatgcaggtatgccactactggg

SEQ ID NO: 347736 - DNA, 1786 bp, Homo sapiens
aggcgggggcgggctgccggccgagacttctggatggcggcggccgcggctccgccccgggttcccaccgcctgaagggcgagacaagcccgacctgctacaggcactcgtgggggtgggggaggagcgggggtcggtccggctggtttgtgggtgggaggcgcttgttctccaaaaaccggcgcgagctgcaatcctgagggagctgcggtggaggaggtggagagaaggccgcacccttctgggcagggggaggggagtgccgcaatacctttatgggagttctctgctgcctcccgtcttgtaaggaccgccctgggcctggaagaagccctccctcctttcctcctcgcgtgatctcgtcatcgcctccatgtcgagtcgcttctcgattatgggcgggattcttttgcctaggcttaaggggctaacttggtccctggggcgttgccctgcaggggagtgagcagctgtaagatttgaggggcgactccgattagtttatcttcccacggactagagttggtgtcgaggttattgtaataagggtggggtagggaaatggagcttagtcattcacctggggctgattttatgcaacgagactgcggattatcactacttatcatttttggagcatttttctagagacagacataaagcatgatcacctgagttttataccatttgagacccttgctgcaccaccaaagtgtagcatcaggttaaatcttaatagaaaaattttagcttttgctttgagaaaccagtgcttccctccctcaccctctctccccaggctctctacccctttgcatccctaccaggcatcttagcaactctcactcatacttgatcccattttccatttgttgtacttgctcctctagtattcagacatagcactagctttctccctctcttgatcttgggtagcctggtgtctcgcgaaaccagacagattggttccaccacaaattaaggcttgagctggggcttgactcttacccagcagtgcttttattcctccctagttcacgttcttaaatgtttatcttgattttcattttatcctttttccttagctgggattctgtccctgaccgtcttcacagtccaggtgatcttgactactgctttacagagaattggatctgaggtgtggaaacaggaagagaactagaactggaagtaaagcattgaagatgtgactgaattgctgcaatctcatgatcaaatttgaatggatgaggagttgctttttagggatgagcaaagaaagtggtttctcgagatggaatctactggttgctccttgagggcaggacagttcttatggctttatccgttgcgtaagcacagagaggtctgcgaggtcaaaactattgtcatgatagcaagatgcctgtctttttcatttattctcacggtgtgcagaggctacatgatgtgtgatgacatcctcattgatgttaatgaatggtgctatacttgaattttctaaggtgtcattaggtaggtttaggtatgcatacttgtttttagaaattatttttttcctttttcccatttttagaaatcaactcattttttaggttatgccttcagtaatctttgcaacctcaatattgtgtaatggttactttaaaatactgtagttttctttgtgcctaagtataaacataagtacattttgttgttttgtttgcaatagtggtttaaatattttcccaaaatatccaaatttaaaaattctacaactttagaatttaataaatttattcta

SEQ ID NO: 347737 - DNA, 1858 bp, Homo sapiens
aggcgggggcgggctgccggccgagacttctggatggcggcggccgcggctccgccccgggttcccaccgcctgaagggcgagacaagcccgacctgctacaggcactcgtgggggtgggggaggagcgggggtcggtccggctggtttgtgggtgggaggcgcttgttctccaaaaaccggcgcgagctgcaatcctgagggagctgcggtggaggaggtggagagaaggccgcacccttctgggcagggggaggggagtgccgcaatacctttatgggagttctctgctgcctcccgtcttgtaaggaccgccctgggcctggaagaagccctccctcctttcctcctcgcgtgatctcgtcatcgcctccatgtcgagtcgcttctcgattatgggcgggattcttttgcctaggcttaaggggctaacttggtccctggggcgttgccctgcaggggagtgagcagctgtaagatttgaggggcgactccgattagtttatcttcccacggactagagttggtgtcgaggttattgtaataagggtggggtagggaaatggagcttagtcattcacctggggctgattttatgcaacgagactgcggattatcactacttatcatttttggagcatttttctagagacagacataaagcatgatcacctgagttttataccatttgagacccttgctgcaccaccaaagtgtagcatcaggttaaatcttaatagaaaaattttagcttttgctttgagaaaccagtgcttccctccctcaccctctctccccaggctctctacccctttgcatccctaccaggcatcttagcaactctcactcatacttgatcccattttccatttgttgtacttgctcctctagtattcagacatagcactagctttctccctctcttgatcttgggtagcctggtgtctcgcgaaaccagacagattggttccaccacaaattaaggcttgagctggggcttgactcttacccagcagtgcttttattcctccctagttcacgttcttaaatgtttatcttgattttcattttatcctttttccttagctgggattctgtccctgaccgtcttcacagtccaggtgatcttgactactgctttacagagaattggatctgaggtgtggaaacaggaagagaactagaactggaagtaaagcattgaagatgtgactgaattgctgcaatctcatgatcaaatttgaatggatgaggagttgctttttagggatgagcaaagttgctccttgagggcaggacagttcttatggctttatccgttgcgtaagcacagagaggtctgcgaggtcaaaactattgtcatgatagcaagatgcctgtctttttcatttattctcacggtgtgcagaggctacatgatgtgtgatgacatcctcattgatgttaatgaatggtgctatacttgaattttctaaggtgtcattaggtacaattctcctgcctcagcctcctgcataactgggactacagggaagcaccattttccacaaaactctcaagaaggacttgttgcaactggaaaagcaattaaatgtgaatcgtgatccaggagaaagtaacaactcacataactcccaaattaaaagttttccaaagatatatcatttttttttttttggccttttaagaaactagccaacaaatactcttgacaggtttgtgtttggttttgaaaacacacaccttagtgtactgaaagaaaaacaatttcttttaatttggtttgttggtcccacaccccatctatcaatgtatgtgctatttacaaataagttctatacagtatttttgcagtacct

SEQ ID NO: 347738 - DNA, 952 bp, Homo sapiens
gggaatatttttctgcctttgaagatattctcacaagatcgttctccacgcccaaggcaagtaaaacgacacaatctggctcaactccaggctcgaaccctacacattcaacgaggctatctcagacacgctgtggcacacgccacggggagccagagaacgtgtggtgggggtggcgaaggtaatgcctttgggaagcagccatctgaggtgggaagccagaaaacgagagggaaggcgtccaggaagattacggaggggagatcgcggcccccagagcgatcagagttgtctgtcacaaggccgcgagaacgggggtagggagtgggggatcggggagagaaaaaaagtatgcctgtgtatttcgagcggagggcagcaagaggcctctcctcaagggaaaggtgtggaaacaggaagagaactagaactggaagtaaagcattgaagatgtgactgaattgctgcaatctcatgatcaaatttgaatggatgaggagttgctttttagggatgagcaaagaaagtggtttctcgagatggaatctactggtgaagttgctgtgaacattgttaaaatgccaataaaggatttaggaattacagaaacctggttgataaagcagtgccagggtgtgagagagttgacttcaattttgaaataagttccactggctgggtgtggtggctcacacctgcaatcccagtactttaggaggccgagactggtagatcatttgaggtcaggagttcaagaccagccttgccaacatggtgaaaccccacctctaccaaattagccaggtgtggtgcacacctgtagtcccagctacttgggaagctgaggcaggagaatctcttgaaccagggaggaggaggttgcagtaagccgagatggcgcccctgcactccagcctgggtgacagagtgagaccttgcgtttaaaaaaaaa

SEQ ID NO: 347739 - DNA, 2950 bp, Homo sapiens
tcctcaaaagaaacaatttatttagaataaaacaaaagcagctcaactgtgagcgcacgtttgagagacagctactcttaagctgtgtgagccataaaaagggtttttctttacttttccagaaatcttgtgtacacagcacaaatcaaagaggtcattttttttccacttaaaacaccggcattggcatcacaatagcagatacacaactttaagctgccattttagtaaaatgcacaaatactaaacagattagctttcttccatcagaggcccatgtaaactccacataagccacaacttctcttcaaaaaggtccattagagctttgaattccatatcttcatccgctgttcaaccagttttgcttgcggagggggggaaaaaaaggttattcagtacaaatgtttacaatattaaaaatatatatatttcccctatgccattatagatgaacataacattaacaagaccttcctggatggttcacctcaacttcaaaaagcaccaataatacccactggcataaaccttgaaatgaatttactgtatgaatagacatataacaagtagaacaatagggtgggtttttttaaagactgcaattgaagataacaggactgaaaatatcctttaactcatgtaactgagtaaaacatgttgaaaaaattcagaaaaaagtttcacaatcaatttataatctatcaatatattctaaatataacttaaaaagtgaaactataaaaaggtaaagtttagtcaaacttttgccccatctattttcattctgtaatttatatggagcaacatagactactccattattgtagaaaggggtcgatacaaagccatttaaaaatccaccctcatctatgttaccaaagacagcagccgttattttaataaaacactcatacaaataattgttaaacagccaaagaacacttcaggaatctcacttttcaactctgtttaaaccatacatataaaactcttcattcagcttaacatttcactgtggttacctgaaatcatttcctccctttagggacaccactataaccactataacagggtcagcgccaagttttctctcttcttgttctcatacctaactcctatctgaaaaccaaaccctgtgagagagacagaaaaaaaaatgtccagaaattctctccaaaatttttttcacataaaaggtcattaaggccctcttctcaagaggatttcctaattctgttaccagagtttttggtgattggttcctatatggacccaaactatagttcaagctgtatatgcataatgaacaatctgccttaaaaaagtggatttacattttttatttttaaaaaagcattgtcagtgaaaacctgctaatagtttttaaataaacctaaacaatgtctgactctgaaagcaataaccaaacacctgactcttattactggacctaaaatgacctgtaactgagtcaagaagggccagagtatattttaccttcaaaaggtgacaaatgcttataaccagccaggcgatggacattttaagatgtaatcctcaaaagaaaaactctatccactctcagttgagagtcaaagtacaccagaaatttaaaactttgtgtgaaaaattatttataggaatcccaacaaaatacttaaccaaaaagttaagcagaactattggctaggtattgcttgcttaattttccataaaatttgaagctgtgatctaaaagtcttatcttcacgtttttaccaataatacttaatagtcattaaatgatatcctgaagttttctttccattcattttaactgagttccagaaaaatcaactacattaaaataattaaagaagaaagatagaaaaaaattggttgttacaaagaacattcaacgttgggattattaaatcctggctaatgagaagtagaaccggttttagacttttgctttcatttgaattcttaaggtttaactagatactttatggatattatgaacctgcacaaaagaatgggcagtacaaatatgaggttcatgtggactatggcactctgtaggtaatgaccaactaaacataattagttttttataatacatacatttagaaatggtatcaagccattgtttcaaaaacactgaagcacaaattgcccagacctaacaaaagcggcaatgtcaggtaaagattcaaacaaacatggagcaaaaacatagtactcttctgtacgctgtcacactaacaaaaaacaaaaaacaaacaaaaaaaaagaaagtaaaagaaaagaaataaaacacacattttggatgacagtaaaattagatgtcatggacttcactctccaaaagagcaaaatcatttgtccaactatctcaacaaaagatattcaaaaattaatggttagtgagtttatttaaactggaaaaatgtagctggccacaaattatactatgagcccacgtatgtagactccacacttgcattagtttctgaacaggtgtctactccaaaccaagcacagctttttgaaagcaagaagcatcaaaagtcttcattataggatttcaggtattttcccaagaggcacaaggaccttcatgctcatagcctagaaccttccttctctcaaaatggctagtttttccagtttaaaaacaaacaaacaaaaacccccacaaaacctgcaaacttaaaaaattatagatgcatagtgaaaaccaagagggatgacacagcagtgatgacactttcgtgctgacatgcattagacacctgtcataatggaaaataaaaattacatgacatttccctgggttattattggtgctatttcaaaactaccagctttgataacagaaagaaaacagttgggttctgccaggcttcaagttaagtcactttcatagaacagaaacatgaccatgatccagaaggtccaaaag

SEQ ID NO: 347740 - DNA, 503 bp, Homo sapiens
ctggggctgccccacgtgccatcactgcagcatgtaggcaggaacacaaacatggctgtctcctcgcagggactatcaggacccctagaatgctcacgttgagctggattatttcagggggagtcttggttacctgaaggcttccccaagatctgagctacctggtcagaggttcctaagtcagaggtttcaagctatgatcttgaaaccgctttggaggccactgccaggaaaggggacaccctcccaacacacacacccctgcctcaacccaaccaatcctgtttgaatttactggtcatctaagtgagagttctccatataattttctttggagaaagccttttgggattaaaaaataccgttttaaaacctcattcaaaattttgtcccatttcactgatacttgcgcactttatagctgacagagtgttttttacctgtatattttatcttacatattattaacttcatttttactcacaaggagactgaggcccaga

SEQ ID NO: 347741 - DNA, 580 bp, Homo sapiens
tgattgcacaagtctgttggtgtatgtttaatgctccacttgaggaatgtagaaggaaatgtttcgcgagtgaagtatataggtagtttatagtatagaatgccttgatatcgtatagaatgccttgaatcccatacaatagaatcatataattactcattttgtaagtaaacttctgagaattgtcttcgtaacagcataacataatctgagaggtcatcggtttattgggctacataagtcacatctaagtaatggattctcattactagccttgctaactcagaagataaatgggaaatcaagaaatggactaattttgttctgtatttcaataaaccacttccagaaataagggattaaggcaactggaatacatttttaaaccatacccttattaaacatctgtattttagataaaaattatattccttgaatataaaaaatcctcctatattgtttcaattaacaattctttggaaatactgattctatggttacttgcatcacacaaatctaatcttatttgaagccctgcattagctgaagtgaattcaaatctgttcagtaaatatttaat

SEQ ID NO: 347742 - DNA, 443 bp, Homo sapiens
tttgcagctattgtaaaaggggttgggttcttgatttctcagcttggttgctgttggcatatagcagggctactgatttatgtactttactttacttttgtatcctgaaactttgctgaattgatttaccagttctaggagctttttggatgagtctttaaggttttctaggtatacgatcatgtcatcagcaaacagcgacagttttacttcttctttactgatctggatgccctttctttctcttgtctgattgctctggctaggaccatgttcagcttttcacaaactatttaggattaattttgtgtcccactacataaaatattaaaaccttgcaaccatatatgctttatagttgtcatgttatttatgtatgttcagcctcacatacactgtgatattttttctttgaacaatcatatgtatttttttaaagttaa

SEQ ID NO: 347743 - DNA, 679 bp, Homo sapiens
cacctgtaagtattatactgcatttcttgaagactttgtcatatttgtacttgcagagttcttttaacagtttcacaatactccacaacatggaggttaagatggtccctgacttaacagtggttcaacatatgatttctcgactttacgatgatgtaaaaattatacacgttctgtacaaattgtacttcaagtacccatacatgcattctattttccactttcagtacaatattcaataaattacatgtgatattcaccattttattataaaacagactttgtgttagttgattttgcccaactgtaggctaacgtaagtgttctgagcacatttaaggtaggcaaggctaagctatgaagtttggtaggctaagtatattaaatgcattttagagttacagtattttcaacttatgatgggtttaccaggacatacccccatgtaagtcaaggagcatctgtactgtaatttattaaccatccaccatttgtggacattgctttttgtaattataataaataagacgtcaataaataacttaagtcactctgcactcatgtatatattatgggataaatatcttgaaataaaactgggaaatctaagttatatttatttcacatttcgatagatactgccaaattgtcttccaaaaacattcaatgtactctccca

SEQ ID NO: 347744 - DNA, 1027 bp, Homo sapiens
tttggtcaaatgaggtgaaggggaaaaaaaatgatgatcaaacttcacttttttccaaatagatgattttccaagtttctctactgaggatagaaatgttctctgcagttttgtaatgtttctttgagagagagaaggtgtgtgtgtgtgtgtgtgtgtgtgtgtgtgtgtgtgtgtgtaggaattatcagtatagcacagtagcttttatgcaagttctgaagtcacattggatttataactggctttaccacttactagtgcatcaccttgaacaaatgatctctgtatgcccacattttctaagtgtaaagcatggataacaataatgtcagcttcactatgatgtgaaaatggcataaactaagcacacaaggaacctagagagcactagctcacctgctgagttaatggacccaatcaagcaatcctggattctaatctctagatttggctgtgggaaaagggagctccttataacccacaactgaaattcagcatctctgccctgtggctttcaatttggggaggctcatatcgggtcttttcttaccctctgtcgacctcagctttaggattttgagtggattactgatctccttttaaggtgttcccttaggatagactgaactttgcataaatcataaaagacaacattttaagttcatcatcctgaacatcccttcaaatatggtgaaaattttagcagtatttatcctgtctcttgattcttggaccagtaacataatgttttaatttttgatcatataatttaaaaaataaatctaacaggttaaatatgtgctccctcccacacacactccccctattcattaatgtttaattagttattcttttcctgtgttttgacaggtgattacacataaagtagaaagataatgttagaaacatatcattttaaaccacagtccaaaaattcacttggtttatagacatttgtgtttcacacagcagtaatatttcttagttagagggttgcttttttcctttttttctcctctttctc

SEQ ID NO: 347745 - DNA, 973 bp, Homo sapiens
tttggtcaaatgaggtgaaggggaaaaaaaatgatgatcaaacttcacttttttccaaatagatgattttccaagtttctctactgaggatagaaatgttctctgcagttttgtaatgtttctttgagagagagaaggtgtgtgtgtgtgtgtgtgtgtgtgtgtgtgtgtgtgtgtgtaggaattatcagtatagcacagtagcttttatgcaagttctgaagtcacattggatttataactggctttaccacttactagtgcatcaccttgaacaaatgatctctgtatgcccacattttctaagtgtaaagcatggataacaataatgtcagcttcactatgatgtgaaaatggcataaactaagcacacaaggaacctagagagcactagctcacctgctgagttaatggacccaatcaagcaatcctggattctaatctctagatttggctgtgggaaaagggagctccttataacccacaactgaaatcttaccctctgtcgacctcagctttaggattttgagtggattactgatctccttttaaggtgttcccttaggatagactgaactttgcataaatcataaaagacaacattttaagttcatcatcctgaacatcccttcaaatatggtgaaaattttagcagtatttatcctgtctcttgattcttggaccagtaacataatgttttaatttttgatcatataatttaaaaaataaatctaacaggttaaatatgtgctccctcccacacacactccccctattcattaatgtttaattagttattcttttcctgtgttttgacaggtgattacacataaagtagaaagataatgttagaaacatatcattttaaaccacagtccaaaaattcacttggtttatagacatttgtgtttcacacagcagtaatatttcttagttagagggttgcttttttcctttttttctcctctttctc

SEQ ID NO: 347746 - DNA, 665 bp, Homo sapiens
cctctggggaaaatggttacaaccaagagtctatagaaaaggcctgtagtgttatagactgtgattagatcctaaagtcgttgttactcttgtccctccaaatcatggcaaagaccaaggataatggcttccatttattgcgtgcttattgtgagtaggtaagcacaattactgtataaggtatagtaatgattaaaataattattggaagctgattagaaaagtttaggtatcctgcccagagtcatgtggtcagtctagtgaaattggccaacttgaaatttgactgcagagtctgagctttgaactactgtacaacactgcttcccacataaaggagttccactgcccttaatataatcctgatcttacctagataaattacctctctaattcaaatagatctcagtgtgttgttaggattaaattgagataatatatgagaaatgtcccagctcagtgtctaatacatggtaatagtctctcaataggatgtttcccaaatatttatttctgaagtgcacccaaatctctgtagttttagtttttgcccttaagctttggttggaattaaattactttctgatatctcctcctgttatctaatggatgctgctagtctttttccaccagggatcagagcgataatttgcccttaaaaaaaa

SEQ ID NO: 347747 - DNA, 328 bp, Homo sapiens
aagatacaatgtgattcagtgcaatcccaaacataatcaaaactgtattttttggtagaaactgactggaaaatcaaaggacctattatatccaaagtaatccttaaaaggaacaaatttggaagacttcaactacctgatttacagacttaccaaagttacagtaatcatgatattgtggcactggcataaggctcaccaaataaatcaatgaattaggaacaagagatcagacattgagccacacttatatagtcatttgattttagacaaggatgctaaagtaatccatcagagaaaggaagttttttcaacaaatgatgatata

SEQ ID NO: 347748 - DNA, 315 bp, Homo sapiens
atgtggaggtctctcaaaatccaggaggggaaagattcctgaattatttaaatactaaccaagctaagggtgcttcacaagaggataagagcagcttgggggctttgcatcaatatggacacctgtgtacagccaggcagcccagtgcactgggttgagtcacagccttagaatctgggagcttgacaccatgctctctaaagcctttgacactgtttattgagaggctgggtctaggttgtctcctcttgaatatgggctttgtgatgcttgactaatagaagatgatagaaatgatgccatgctagttagtgg

SEQ ID NO: 347749 - DNA, 447 bp, Homo sapiens
ctaatagtctacagtctatataattaatttcctctctccaatctactcagatatttctacaattttaatttaaagatgaagttagaaggccgggtgcggtggctcatgcctgtaatcccagcactttggaaggctgaggtgagagaattgcttcagctcaggagtttgaaaccagcctgggcaaaaaagtgaaactgtctctaaaacaaataaggctaggagcacaaaagggctttgtattgatttctggccacggtaactaggccaagaaagaaattctatcctcctgcagaccagcaacaaccacagccaaggaatgctcctccggcatttgccatccacttgttaaaatgattaaactaggactgcatcatggtgggatgaccagcacacttcaaagggaaaaaaattttaaatcggaagatgaaacagttttaaaaatcactt

SEQ ID NO: 347750 - DNA, 770 bp, Homo sapiens
cacgtgacaggaccgagcgatgggaggattctggtgcaccccggaaggaggatttttaattcttctgttttcttgtctatcgcaaaacagagtttacatgtattttccttttttcttagcttaagaattgaagactttggccggattagacctggttgtgtggagaggagaattaataactacagtggagcgagccctcctgcgagagtcaggatactactatgctagtcccgactctgccccaaatgcctggagagactttggctaagtcactttttctttccgcgggctgtttaccgttggtaaaaggagagggtcacccactcactccacaaacatttgttgagtcattggttatagcgggaacaagacaggcaaagttcttcctgaattctggtcggagatggataacggaaacaactttgttgagggtctcgttctgtcgccctggccggagtgcagtgtcatgatcagggctcgacctcccgggctcaaacaatccccctacttcagccacccaagtagctaggaccacaggctaggagcacaaaagggctttgtattgatttctggccacggtaactaggccaagaaagaaattctatcctcctgcagaccagcaacaaccacagccaaggaatgctcctccggcatttgccatccacttgttaaaatgattaaactaggactgcatcatggtgggatgaccagcacacttcaaagggaaaaaaattttaaatcggaagatgaaacagttttaaaaatcactt

SEQ ID NO: 347751 - DNA, 716 bp, Homo sapiens
cacgtgacaggaccgagcgatgggaggattctggtgcaccccggaaggaggatttttaattcttctgttttcttgtctatcgcaaaacagagtttacatgtattttccttttttcttagcttaagaattgaagactttggccggattagacctggttgtgtggagaggagaattaataactacagtggagcgagccctcctgcgagagtcaggatactactatgctagtcccgactctgccccaaatgcctggagagactttggctaagtcactttttctttccgcgggctgtttaccgttgatagcgggaacaagacaggcaaagttcttcctgaattctggtcggagatggataacggaaacaactttgttgagggtctcgttctgtcgccctggccggagtgcagtgtcatgatcagggctcgacctcccgggctcaaacaatccccctacttcagccacccaagtagctaggaccacaggctaggagcacaaaagggctttgtattgatttctggccacggtaactaggccaagaaagaaattctatcctcctgcagaccagcaacaaccacagccaaggaatgctcctccggcatttgccatccacttgttaaaatgattaaactaggactgcatcatggtgggatgaccagcacacttcaaagggaaaaaaattttaaatcggaagatgaaacagttttaaaaatcactt

SEQ ID NO: 347752 - DNA, 631 bp, Homo sapiens
taacacaaatctgttacgtgaattaaagacacacaaaggcatttttaccagtgtttggaagtttgtgaatagtaaaggggaacaggccaaaatttcatgcgttgaggatataagtaaaacagaaagtgcaaaaatgtaaactacacaaactcaatctcttgtggaacaattagaaaactaataatacattttactcttgaatgttgatattccactcgaagtttggttggttgctaagcttaaggataaacactatgaaaaatgtgaagacagaagggctggccaaacacagctgattcggcagcaaatcacacattaaatcacagtggcatgtgagtcggtttattcaaattgctgttaaaagatattcttagagtaagtttaggaaaataagagtcatttggcgatgcagagaggattttgtctacagtggaatccagactccggtgaaagttctcattccttcaggacctgggagctaacagctccggactttcttgtgctccactgtgctgcctatgttgtgtgcttcccaaatggccattattcccaccagctcttcacagagtgagttctgcccattctgtagaagaaacagtagcggaaaaattaaacaatatctttgctcaac

SEQ ID NO: 347753 - DNA, 643 bp, Homo sapiens
taacacaaatctgttacgtgaattaaagacacacaaaggcatttttaccagtgtttggaagtttgtgaatagtaaaggggaacaggccaaaatttcatgcgttgaggatataagtaaaacagaaagtgcaaaaatgtaaactacacaaactcaatctcttgtggaacaattagaaaactaataatacattttactcttgaatgttgatattccactcgaagtttggttggttgctaagcttaaggataaacactatgaaaaatgtgaagacagaagggctggccaaacacagctgattcggcagcaaatcacacattaaatcacagtggcatgtgagtcggtttattcaaattgctgttaaaagatattcttagagtaagtttaggaaaataagagtcatttggcgatgcagagaggattttgtctacagtggaatccagactccggtgaaagttctcattccttcaggacctgggagctaacagctccggactttcttgtgctccactgtgctgcctatgttgtgtgcttcccaaatggccattattcccaccagctcttcacagagtgagttctgttccctcacaaggtccttttgtttatttctcaccgcgtagaagcacaaaagaatctaacatcaaat

SEQ ID NO: 347754 - DNA, 682 bp, Homo sapiens
cagtactccagcatgagcaacgcagtgataccctgtctctaaaaaaaaagccaaacgaaatttttttttttggggatagtgtctcactatgttgcccaggctggtaggtttctaactcctgtgctcaagcaatcctcctgccttggcctcccaaagtgctgggattacaagcatgagccactgtgcctggccaagaaaaaaataaaaatttaaaataaaagtaaagacaaaatattaaaaaatgttaaaaagtgattacataaagattaattggtgtttaataaaataaacattgctgaattaagaatcaggcttcaattctttgtacaagtatacatacatagggagtgaaagcaagaattcaggatttcactttacagcactgtctctcggactttaagatacaatctctgggaacaaaagggaccaaaatcaaaggtctacctgcacaatacctaaatatgaaagccccttaacttgacttagtgtccatactcctgcacatgcaatacttaaagcaacttaaaaaaaaaatcagatactgtgctatatatacttaacaaatacagactgctctacaagaacagtgatagaactttaagaaacactgcattatcgaaaatcacatataaaaataactggttccatataaaatgggaactgggggggacaagggagtttc

SEQ ID NO: 347755 - DNA, 1302 bp, Homo sapiens
gctggactgcaatggtgcgatctggtgtcactacaacgtctgcctcctgggttcaagtgattctcctgcctcagcctaccaagtagttgggattacaggtgccctccaccactcctggctaggtttttgcattgtcagtagagacaggctctcactgtgttggccaggctggtctcaaactactgacttctggtgatctgcccacctcgacctcccaaagtgctgggattacaggcgtgagccaccgtgcctgaccactcatgtattcttgattgaaacaatttgcttatgtcttagttgtacacctgaccttctttccctgtttccaaggtcaatagctatgtgttcacaactctgcattttataaatgttactgtgattttcttgtaaggaagaacaaactgtcaggagtcaatggcctcagaaccttgcaaaagaagtttgtttcttttttttcttttcttttttttttttggagacggagtttcgctcttgtcccccaggcttgagtgcagtggcacgatctcggctcactgcaacctccgtctcccgggttcaagtgattctccttccttagcctcccaagtacctgggattagaggcatgcactaccactcctagctaattttgtatttttatagagacggggtttctccgtgttggtcaggctggcctcaaactcctgacctcaggtgatccacccgcctcagcctcccaaagtgctgggattacaggcttgagccaccgtgcccggcaaaagaaatttctttagcccaggtttgtgaaagagccttctctaattttccaggatgggggtgataagatcaacccttcccattagtccctgcaggcccccatgtaagaattcaggcacacctcactcatctcagaccttctcagggcaacttggtgaaaatgtcttccaatctgagccccagtgagcctccttggaacttggcgatgaggggctacaccagaaaagctcaaccctagtgactttgacccctgaaatgattgacaaaatggagtgcgtgtgtgggtgtggcttttttttaaaatttttttgaggagaggagtgcccagttgtgattagaattttcaatgggatgcagtgccctaaaaatgaaaaacaaaagcagaagaatggaagaaacagaggtagactcagacacagagaccatcttcggggcctttctctgtatgaggacatcacaacaaaatctaaagcaggtcatgtcagtccctgacagggaaccctccaccagcttcccgtgttccccaggacaaaagcccaacccctca

SEQ ID NO: 347756 - DNA, 186 bp, Homo sapiens
tccagcctcctcctgggagcttgccctcatctcatgactctctccgccccagtcatatttgcttttctcttttcccaaacatcaaaacccttcctgtctcaggtcgttgtccgggcgtgcccggcaaaagaaatttcttagcccaggtttggaaagagccttctctattttccgggtaccaggctc

SEQ ID NO: 347757 - DNA, 698 bp, Homo sapiens
ggtgataagatcaacccttcccattagtccctgcaggcccccatgtaagaattcaggcacacctcactcatctcagaccttctcagggcaacttggtgaaaatgtcttccaatctgagccccagtgagcctccttggaacttggcgatgaggggctacaccagaaaagctcaaccctagtgactttgacccctgaaatgattgacaaaatggagtgcgtgtgtgggtgtggcttttttttaaaatttttttgaggagaggagtgcccagttgtgattagaattttcaatgggatgcagtgccctaaaaatgaaaaacaaaagcagaagaatggaagaaacagaggtagactcagacacagagaccatcttcggggcctttctctgtatgaggacatcacaacaaaatctaaagcaggtcatgtcagtccctgacagggaaccctccaccagcttcccgtgttccccaggacaaaagcccaacccctcactgtggctccacagccctgtgtccagggccccttccactgtccagcctcctcctgggagcttgccctcatctcatgactctctccgccccagtcatatttgcttttctcttttcccaaacatcaaaacccttcctgtctcaggtcgttgtccctggttttaccctacgtaccctgtcactttctcctccttcaggtctaggctcagagct

SEQ ID NO: 347758 - DNA, 619 bp, Homo sapiens
tcctgctctcactgtgggttcctgctcactctgtctccaggacagactgccttccgggcagccttccctcctcaagcctcttggcctttgcaatcctcttacctgggtcactggtgggatctcatttgtggatcaagtcgcccccagtggagacaaatgtctgatggagtctggccaaggccctcctgagccttcactgggccctgcatgagaagcctgccaaggctgaggggccagggaaacggagacgaagccctcagagcaggccaagagggtgggaggtggggggcatttagagggttagatacagagcacccctttacaaataccagctactggcttttcgtattacatgttcattttagatacaacatactgcacacgctcccttaacgtgtgtttacgcgtgggtggtgtatccttccagacgtcttcctcacatctatacataatatgcatagataaaacatttaccaccaaaacccatagtgttatgtacatatttgtctggctgtgtaactttaaataacatacaaatgtatagaacagaagcttgccctctttctgaaatatctaacgtgggatttcaggctttctgatgagacctctgtagaggtca

SEQ ID NO: 347759 - DNA, 3237 bp, Homo sapiens
  misc_feature (2568)..(2568): n is a, c, g, or t
  misc_feature (2634)..(2634): n is a, c, g, or t
ctagtcatcctcaggccatgcagtggaattccacagccttccaccaagctctgcaagatcccagagtcaggggcctgtattttcctgctggtggctccagttcaggaacagtaaaccctgctcagaatattgcctctcacatctcgtcaatctcctcgaggactggggaccctgcaccgaacatggagaacattacatcaggattcctaggacccctgctcgtgttacaggcggggtttttcttgttgacaagaatcctcacaataccacagagtctagactcgtggtggacttctctcaattttctagggggatcacccgtgtgtcttggccaaaattcgcagtccccaacctccaatcactcaccaacctcctgtcctccaatttgtcctggttatcgctggatgtgtctgcggcgttttatcatattcctcttcatcctgctgctatgcctcatcttcttattggttcttctggactatcaaggattcccaggagccatgttgtcagaagtcctactggtgtctgctccggggaaagtcatccttcatggagaacatgccgtggtacatggcaaggtagcactggctgtatccttgaacttgagaacattcctccggcttcaaccccacagcaatgggaaagtggacctcagcttacccaacattggtatcaagcgggcctgggatgtggccaggcttcagtcactggacacaagctttctggagcaaggtgatgtcacaacacccacctcagagcaagtggagaagctaaaggaggttgcaggcttgcctgacgactgtgctgtcaccgagcgcctggctgtgctggcctttctttacttatacctgtccatctgccggaagcagagggccctgccgagcctggatatcgtagtgtggtcggagctgccccccggggcgggcttgggctccagcgccgcctactcggtgtgtctggcagcagccctcctgactgtgtgcgaggagatcccaaacccgctgaaggacggggattgcgtcaacaggtggaccaaggaggatttggagctaattaacaagtgggccttccaaggggagagaatgattcacgggaacccctccggagtggacaatgctgtcagcacctggggaggagccctccgataccatcaagggaagatttcatccttaaagaggtcgccagctctccagatcctgctgaccaacaccaaagtccctcgcaataccagggcccttgtggctggcgtcagaaacaggctgctcaagttcccagagatcgtggcccccctcctgacctcaatagatgccatctccctggagtgtgagcgcgtgctgggagagatgggggaagccccagccccggagcagtacctcgtgctggaagagctcattgacatgaaccagcaccatctgaatgccctcggcgtgggccacgcctctctggaccagctctgccaggtgaccagggcccgcggacttcacagcaagctgactggcgcaggcggtggtggctgtggcatcacactcctcaagccagggctggagcagccagaagtggaggccacgaagcaggccctgaccagctgtggctttgactgcttggaaaccagcatcggtgcccccggcgtctccatccactcagccacctccctggacagccgagtccagcaagccctggatggcctctgagaggagcccacgacactgcagccccacccagatgcccctttctggattattctgggggctgcagttcgactctgtgctggccagcgagcgcccagctcctgacactgctggagaggccccagccgcttggcgatgccagccaagctctgcagtcccagcggtgggacctagggaggcatggtctgccctctgcatcctctggagccagccgagcaggaggcctaggagggtcctctgagactccagacctgaggcgagaagggctgcttccctgaagctcccacagtcccatctgcttcaggcccccgccttggcctgtgttcttcctggccgcctgggtccaatgctcaggtgctggggcctggttcccggagaagtgtgccttctctctcccttttcagggaccgccccctgtctctcagggccaggcctctccctcctccaggaagccttcccctaccccttgtcgcccctccctcccagagcacctgctgtctgggtggctcactcagcacttggtgtggccttcccttctacctagcgggatggggctcccccaggggctgtcccggaggcggtgggcctggttaaataaggcagggtttatatgcactttcttccgatctgtacctgagaggtttgtggaaaagatggcaaatggggaataaaaagattttgtgtcaacagtagagactccaggccaccagcacctccctctgtccctgtcccctctccagctgtttcctccatggagctcttcagcaatggaggaaatagggtttggggtcactttgttgtgcgtcttggggatgaggtggcttttcccagatggcccttgctggagagggactgggacacggctctcagtccatcagcncaactctaggctgctgctgcggagggagaagttgagcttcctagctccagaatcacaagcacccangagagcacagacctgtgtaagacaggaaagcagaacctgccatcgctcctggggcgcgccttcctttctgaaatgaactggctggatggagaaaacagactcaaatgttctggcccgggtgcctggcactccccacccccgccccccaccggccctatttgaactttatattgcagtcagcttggtgctttccgaaatgccattagccatcaggaaacccttgtagttggtgccttgccagccagaacctctgggacccacggacctgcaaagaggccgagtggaaaggtgggggccggcgcagggatttcaggatgaggtgaaagcgattcagtgcgcgtctgcccttggccactagggggcagctggcggccttccctgctgttgtcttcctgcagggtgagaggagcaggagccgagctccacccccacgccagccttgggcccggcctgggatcactgctgggaacgtgagagtgaagggaggacgcctaccccagcttaacttgtagaaatggccccagatcactgatggctgttccctgccccttcccttcaaaacacaacgcataaagcagtaatactaattaatactgaacgctc

SEQ ID NO: 347760 - DNA, 2208 bp, Homo sapiens
cgcggtgacctcacggcggtgtgacgtacccatggcgacgacaccacgattcacggcaggtgttcgagttgcccttcccgccagccactcacctgtccccgtcttccacgccctgagggccgcggctctggaaacggggatacaggagcctggcggcgccgaagcacccgcgcaggccaagacggctccccaggccaagacggctccccaggccgcacacagccatgagccaggctgcttgacgggacctgaccccgccaggttcccgtccagtccgcggggtgactccacccacagctggccgcgccaccgctcaggattcccaggagccatgttgtcagaagtcctactggtgtctgctccggggaaagtcatccttcatggagaacatgccgtggtacatggcaaggtagcactggctgtatccttgaacttgagaacattcctccggcttcaaccccacagcaatgggaaagtggacctcagcttacccaacattggtatcaagcgggcctgggatgtggccaggcttcagtcactggacacaagctttctggagcaaggtgatgtcacaacacccacctcagagcaagtggagaagctaaaggaggttgcaggcttgcctgacgactgtgctgtcaccgagcgcctggctgtgctggcctttctttacttatacctgtccatctgccggaagcagagggccctgccgagcctggatatcgtagtgtggtcggagctgccccccggggcgggcttgggctccagcgccgcctactcggtgtgtctggcagcagccctcctgactgtgtgcgaggagatcccaaacccgctgaaggacggggattgcgtcaacaggtggaccaaggaggatttggagctaattaacaagtgggccttccaaggggagagaatgattcacgggaacccctccggagtggacaatgctgtcagcacctggggaggagccctccgataccatcaagggaagatttcatccttaaagaggtcgccagctctccagatcctgctgaccaacaccaaagtccctcgcaataccagggcccttgtggctggcgtcagaaacaggctgctcaagttcccagagatcgtggcccccctcctgacctcaatagatgccatctccctggagtgtgagcgcgtgctgggagagatgggggaagccccagccccggagcagtacctcgtgctggaagagctcattgacatgaaccagcaccatctgaatgccctcggcgtgggccacgcctctctggaccagctctgccaggtgaccagggcccgcggacttcacagcaagctgactggcgcaggcggtggtggctgtggcatcacactcctcaagccagggctggagcagccagaagtggaggccacgaagcaggccctgaccagctgtggctttgactgcttggaaaccagcatcggtgcccccggcgtctccatccactcagccacctccctggacagccgagtccagcaagccctggatggcctctgagaggagcccacgacactgcagccccacccagatgcccctttctggattattctgggggctgcagttcgactctgtgctggccagcgagcgcccagctcctgacactgctggagaggccccagccgcttggcgatgccagccaagctctgcagtcccagcggtgggacctagggaggcatggtctgccctctgcatcctctggagccagccgagcaggaggcctaggagggtcctctgagactccagacctgaggcgagaagggctgcttccctgaagctcccacagtcccatctgcttcaggcccccgccttggcctgtgttcttcctggccgcctgggtccaatgctcaggtgctggggcctggttcccggagaagtgtgccttctctctcccttttcagggaccgccccctgtctctcagggccaggcctctccctcctccaggaagccttcccctaccccttgtcgcccctccctcccagagcacctgctgtctgggtggctcactcagcacttggtgtggccttcccttctacctagcgggatggggctcccccaggggctgtcccggaggcggtgggcctggttaaataaggcagggtttatatgcactttcttccgatctgtacctgagaggtttgtggaaaagatggcaaatggggaataaaaagattttgtgtcaaca

SEQ ID NO: 347761 - DNA, 2495 bp, Homo sapiens
ctagtcatcctcaggccatgcagtggaattccacagccttccaccaagctctgcaagatcccagagtcaggggcctgtattttcctgctggtggctccagttcaggaacagtaaaccctgctcagaatattgcctctcacatctcgtcaatctcctcgaggactggggaccctgcaccgaacatggagaacattacatcaggattcctaggacccctgctcgtgttacaggcggggtttttcttgttgacaagaatcctcacaataccacagagtctagactcgtggtggacttctctcaattttctagggggatcacccgtgtgtcttggccaaaattcgcagtccccaacctccaatcactcaccaacctcctgtcctccaatttgtcctggttatcgctggatgtgtctgcggcgttttatcatattcctcttcatcctgctgctatgcctcatcttcttattggttcttctggactatcaaggattcccaggagccatgttgtcagaagtcctactggtgtctgctccggggaaagtcatccttcatggagaacatgccgtggtacatggcaaggtagcactggctgtatccttgaacttgagaacattcctccggcttcaaccccacagcaatgggaaagtggacctcagcttacccaacattggtatcaagcgggcctgggatgtggccaggcttcagtcactggacacaagctttctggggtctcactctgttatgcagcctggagtacagtggtgcgaccacagctcactgtttcttcaacctcctgggctcaagcgatcctcctgcctcagccttctgagtagctgggaccacagagcaaggtgatgtcacaacacccacctcagagcaagtggagaagctaaaggaggttgcaggcttgcctgacgactgtgctgtcaccgagcgcctggctgtgctggcctttctttacttatacctgtccatctgccggaagcagagggccctgccgagcctggatatcgtagtgtggtcggagctgccccccggggcgggcttgggctccagcgccgcctactcggtgtgtctggcagcagccctcctgactgtgtgcgaggagatcccaaacccgctgaaggacggggattgcgtcaacaggtggaccaaggaggatttggagctaattaacaagtgggccttccaaggggagagaatgattcacgggaacccctccggagtggacaatgctgtcagcacctggggaggagccctccgataccatcaagggaagatttcatccttaaagaggtcgccagctctccagatcctgctgaccaacaccaaagtccctcgcaataccagggcccttgtggctggcgtcagaaacaggctgctcaagttcccagagatcgtggcccccctcctgacctcaatagatgccatctccctggagtgtgagcgcgtgctgggagagatgggggaagccccagccccggagcagtacctcgtgctggaagagctcattgacatgaaccagcaccatctgaatgccctcggcgtgggccacgcctctctggaccagctctgccaggtgaccagggcccgcggacttcacagcaagctgactggcgcaggcggtggtggctgtggcatcacactcctcaagccagggctggagcagccagaagtggaggccacgaagcaggccctgaccagctgtggctttgactgcttggaaaccagcatcggtgcccccggcgtctccatccactcagccacctccctggacagccgagtccagcaagccctggatggcctctgagaggagcccacgacactgcagccccacccagatgcccctttctggattattctgggggctgcagttcgactctgtgctggccagcgagcgcccagctcctgacactgctggagaggccccagccgcttggcgatgccagccaagctctgcagtcccagcggtgggacctagggaggcatggtctgccctctgcatcctctggagccagccgagcaggaggcctaggagggtcctctgagactccagacctgaggcgagaagggctgcttccctgaagctcccacagtcccatctgcttcaggcccccgccttggcctgtgttcttcctggccgcctgggtccaatgctcaggtgctggggcctggttcccggagaagtgtgccttctctctcccttttcagggaccgccccctgtctctcagggccaggcctctccctcctccaggaagccttcccctaccccttgtcgcccctccctcccagagcacctgctgtctgggtggctcactcagcacttggtgtggccttcccttctacctagcgggatggggctcccccaggggctgtcccggaggcggtgggcctggttaaataaggcagggtttatatgcactttcttccgatctgtacctgagaggtttgtggaaaagatggcaaatggggaataaaaagattttgtgtcaaca

SEQ ID NO: 347762 - DNA, 2404 bp, Homo sapiens
ctagtcatcctcaggccatgcagtggaattccacagccttccaccaagctctgcaagatcccagagtcaggggcctgtattttcctgctggtggctccagttcaggaacagtaaaccctgctcagaatattgcctctcacatctcgtcaatctcctcgaggactggggaccctgcaccgaacatggagaacattacatcaggattcctaggacccctgctcgtgttacaggcggggtttttcttgttgacaagaatcctcacaataccacagagtctagactcgtggtggacttctctcaattttctagggggatcacccgtgtgtcttggccaaaattcgcagtccccaacctccaatcactcaccaacctcctgtcctccaatttgtcctggttatcgctggatgtgtctgcggcgttttatcatattcctcttcatcctgctgctatgcctcatcttcttattggttcttctggactatcaaggattcccaggagccatgttgtcagaagtcctactggtgtctgctccggggaaagtcatccttcatggagaacatgccgtggtacatggcaaggtagcactggctgtatccttgaacttgagaacattcctccggcttcaaccccacagcaatgggaaagtggacctcagcttacccaacattggtatcaagcgggcctgggatgtggccaggcttcagtcactggacacaagctttctggggtctcactctgttatgcagcctggagtacagtggtgcgaccacagctcactgtttcttcaacctcctgggctcaagcgatcctcctgcctcagccttctgagtagctgggaccacagagcaaggtgatgtcacaacacccacctcagagcaagtggagaagctaaaggaggttgcaggcttgcctgacgactgtgctgtcaccgagcgcctggctgtgctggcctttctttacttatacctgtccatctgccggaagcagagggccctgccgagcctggatatcgtagtgtggtcggagctgccccccggggcgggcttgggctccagcgccgcctactcggtgtgtctggcagcagccctcctgactgtgtgcgaggagatcccaaacccgctgaaggacggggattgcgtcaacaggtggaccaaggaggatttggagctaattaacaagtgggccttccaaggggagagaatgattcacgggaacccctccggagtggacaatgctgtcagcacctggggaggagccctccgataccatcaagggaagatttcatccttaaagagttcccagagatcgtggcccccctcctgacctcaatagatgccatctccctggagtgtgagcgcgtgctgggagagatgggggaagccccagccccggagcagtacctcgtgctggaagagctcattgacatgaaccagcaccatctgaatgccctcggcgtgggccacgcctctctggaccagctctgccaggtgaccagggcccgcggacttcacagcaagctgactggcgcaggcggtggtggctgtggcatcacactcctcaagccagggctggagcagccagaagtggaggccacgaagcaggccctgaccagctgtggctttgactgcttggaaaccagcatcggtgcccccggcgtctccatccactcagccacctccctggacagccgagtccagcaagccctggatggcctctgagaggagcccacgacactgcagccccacccagatgcccctttctggattattctgggggctgcagttcgactctgtgctggccagcgagcgcccagctcctgacactgctggagaggccccagccgcttggcgatgccagccaagctctgcagtcccagcggtgggacctagggaggcatggtctgccctctgcatcctctggagccagccgagcaggaggcctaggagggtcctctgagactccagacctgaggcgagaagggctgcttccctgaagctcccacagtcccatctgcttcaggcccccgccttggcctgtgttcttcctggccgcctgggtccaatgctcaggtgctggggcctggttcccggagaagtgtgccttctctctcccttttcagggaccgccccctgtctctcagggccaggcctctccctcctccaggaagccttcccctaccccttgtcgcccctccctcccagagcacctgctgtctgggtggctcactcagcacttggtgtggccttcccttctacctagcgggatggggctcccccaggggctgtcccggaggcggtgggcctggttaaataaggcagggtttatatgcactttcttccgatctgtacctgagaggtttgtggaaaagatggcaaatggggaataaaaagattttgtgtcaaca

SEQ ID NO: 347763 - DNA, 1498 bp, Homo sapiens
ctccccttgaggcacgggcgctctgggttgtgggagttggggagctgctccggcttcggcgcggaggggcggcggccggggaggcggcggcggcggcaggattcccaggagccatgttgtcagaagtcctactggtgtctgctccggggaaagtcatccttcatggagaacatgccgtggtacatggcaaggtagcactggctgtatccttgaacttgagaacattcctccggcttcaaccccacagcaatgggaaagtggacctcagcttacccaacattggtatcaagcgggcctgggatgtggccaggcttcagtcactggacacaagctttctgggtggaccaaggaggatttggagctaattaacaagtgggccttccaaggggagagaatgattcacgggaacccctccggagtggacaatgctgtcagcacctgggtgtgagcgcgtgctgggagagatgggggaagccccagccccggagcagtacctcgtgctggaagagctcattgacatgaaccagcaccatctgaatgccctcggcgtgggccacgcctctctggaccagctctgccaggtgaccagggcccgcggacttcacagcaagctgactggcgcaggcggtggtggctgtggcatcacactcctcaagccagggctggagcagccagaagtggaggccacgaagcaggccctgaccagctgtggctttgactgcttggaaaccagcatcggtgcccccggcgtctccatccactcagccacctccctggacagccgagtccagcaagccctggatggcctctgagaggagcccacgacactgcagccccacccagatgcccctttctggattattctgggggctgcagttcgactctgtgctggccagcgagcgcccagctcctgacactgctggagaggccccagccgcttggcgatgccagccaagctctgcagtcccagcggtgggacctagggaggcatggtctgccctctgcatcctctggagccagccgagcaggaggcctaggagggtcctctgagactccagacctgaggcgagaagggctgcttccctgaagctcccacagtcccatctgcttcaggcccccgccttggcctgtgttcttcctggccgcctgggtccaatgctcaggtgctggggcctggttcccggagaagtgtgccttctctctcccttttcagggaccgccccctgtctctcagggccaggcctctccctcctccaggaagccttcccctaccccttgtcgcccctccctcccagagcacctgctgtctgggtggctcactcagcacttggtgtggccttcccttctacctagcgggatggggctcccccaggggctgtcccggaggcggtgggcctggttaaataaggcagggtttatatgcactttcttccgatctgtacctgagaggtttgtggaaaagatggcaaatggggaataaaaagattttgtgtcaaca

SEQ ID NO: 347764 - DNA, 1091 bp, Homo sapiens
ctccccttgaggcacgggcgctctgggttgtgggagttggggagctgctccggcttcggcgcggaggggcggcggccggggaggcggcggcggcggcaggattcccaggagccatgttgtcagaagtcctactggtgtctgctccggggaaagtcatccttcatggagaacatgccgtggtacatggcaaggtagcactggctgtatccttgaacttgagaacattcctccggcttcaaccccacagcaatgggaaagtggacctcagcttacccaacattggtatcaagcgggcctgggatgtggccaggcttcagtcactggacacaagctttctggagcaaggtgatgtcacaacacccacctcagagcaagtggagaagctaaaggaggttgcaggcttgcctgacgactgtgctgtcaccgagcgcctggctgtgctggcctttctttacttatacctgtccatctgccggaagcagagggccctgccgagcctggatatcgtagtgtggtcggagctgccccccggggcgggcttgggctccagcgccgcctactcggtgtgtctggcagcagccctcctgactgtgtgcgaggagatcccaaacccgctgaaggacggggattgcgtcaacaggtggaccaaggaggatttggagctaattaacaagtgggccttccaaggggagagaatgattcacgggaacccctccggagtggacaatgctgtcagcacctggggaggagccctccgataccatcaagggaagatttcatccttaaagaggtcgccagctctccagatcctgctgaccaacaccaaagtccctcgcaataccagggcccttgtggctggcgtcagaaacaggctgctcaagctcccagagcacctgctgtctgggtggctcactcagcacttggtgtggccttcccttctacctagcgggatggggctcccccaggggctgtcccggaggcggtgggcctggttaaataaggcagggtttatatgcactttcttccgatctgtacctgagaggtttgtggaaaagatggcaaatggggaataaaaagattttgtgtcaaca

SEQ ID NO: 347765 - DNA, 1642 bp, Homo sapiens
ctagtcatcctcaggccatgcagtggaattccacagccttccaccaagctctgcaagatcccagagtcaggggcctgtattttcctgctggtggctccagttcaggaacagtaaaccctgctcagaatattgcctctcacatctcgtcaatctcctcgaggactggggaccctgcaccgaacatggagaacattacatcaggattcctaggacccctgctcgtgttacaggcggggtttttcttgttgacaagaatcctcacaataccacagagtctagactcgtggtggacttctctcaattttctagggggatcacccgtgtgtcttggccaaaattcgcagtccccaacctccaatcactcaccaacctcctgtcctccaatttgtcctggttatcgctggatgtgtctgcggcgttttatcatattcctcttcatcctgctgctatgcctcatcttcttattggttcttctggactatcaaggattcccaggagccatgttgtcagaagtcctactggtgtctgctccggggaaagtcatccttcatggagaacatgccgtggtacatggcaaggtagcactggctgtatccttgaacttgagaacattcctccggcttcaaccccacagcaatgggaaagtggacctcagcttacccaacattggtatcaagcgggcctgggatgtggccaggcttcagtcactggacacaagctttctggagcaaggtgatgtcacaacacccacctcagagcaagtggagaagctaaaggaggttgcaggcttgcctgacgactgtgctgtcaccgagcgcctggctgtgctggcctttctttacttatacctgtccatctgccggaagcagaggtggaccaaggaggatttggagctaattaacaagtgggccttccaaggggagagaatgattcacgggaacccctccggagtggacaatgctgtcagcacctggggaggagccctccgataccatcaagggaagatttcatccttaaagaggtcgccagctctccagatcctgctgaccaacaccaaagtccctcgcaataccagggcccttgtggctggcgtcagaaacaggctgctcaagttcccagagatcgtggcccccctcctgacctcaatagatgccatctccctggagtgtgagcgcgtgctgggagagatgggggaagccccagccccggagcagtacctcgtgctggaagagctcattgacatgaaccagcaccatctgaatgccctcggcgtgggccacgcctctctggaccagctctgccaggtgaccagggcccgcggacttcacagcaagctgactggcgcaggcggtggtggctgtggcatcacactcctcaagccagggctggagcagccagaagtggaggccacgaagcaggccctgaccagctgtggctttgactgcttggaaaccagcatcggtgcccccggcgtctccatccactcagccacctccctggacagccgagtccagcaagccctggatggcctctgagaggagcccacgacactgcagccccacccattcttggagaatcaggggaggagaccaactgttctggcagagagccacgactgtactggggagaagccccccttgga

SEQ ID NO: 347766 - DNA, 699 bp, Homo sapiens
tcacagcaagctgactggcgcaggcggtggtggctgtggcatcacactcctcaagccaggtatcccgggggtaggtgggccaggctgccagcctgggctcctaagaggggtccacctggagaattcccttgaaaggaaaaagagacctggaaacaggtctcagctccgctgtgtggccttgggcaagttagttaacctctggtctttgcttcctcattggtaaaataaggatgagagtatctagcttgcaagatcgttgcccagattcaagcaggaaagtgcacctagagagcctggtgcagggctgggctgtggctggggctcctgtcatcggggctgtccgcacaagcttgggaagtaaccagggcattgtcactctccacgtctgcctaaccttgccccacttgtacccttgatgtggtcaggatgcggttgattttgctacaaaacgaaagggtttccttcccgttggtttggggaaagaggaagaccgagtaatgggcttggcttaggaagctccctggtgcctgggggcctggcaaggggcttctgctagtgtttaaccacctgacacctacctctgccctcaggctcgctcctggcctacagtaggcactaaccggtcccacctgcctccatttccctctgtgctccttgtcccctccttccttccttctttctctttctgtctttatctcc

SEQ ID NO: 347767 - DNA, 1990 bp, Homo sapiens
ctccccttgaggcacgggcgctctgggttgtgggagttggggagctgctccggcttcggcgcggaggggcggcggccggggaggcggcggcggcggcaggattcccaggagccatgttgtcagaagtcctactggtgtctgctccggggaaagtcatccttcatggagaacatgccgtggtacatggcaaggtagcactggctgtatccttgaacttgagaacattcctccggcttcaaccccacagcaatgggaaagtggacctcagcttacccaacattggtatcaagcgggcctgggatgtggccaggcttcagtcactggacacaagctttctggagcaaggtgatgtcacaacacccacctcagagcaagtggagaagctaaaggaggttgcaggcttgcctgacgactgtgctgtcaccgagcgcctggctgtgctggcctttctttacttatacctgtccatctgccggaagcagagggccctgccgagcctggatatcgtagtgtggtcggagctgccccccggggcgggcttgggctccagcgccgcctactcggtgtgtctggcagcagccctcctgactgtgtgcgaggagatcccaaacccgctgaaggacggggattgcgtcaacaggtggaccaaggaggatttggagctaattaacaagtgggccttccaaggggagagaatgattcacgggaacccctccggagtggacaatgctgtcagcacctggggaggagccctccgataccatcaagggaagatttcatccttaaagaggtcgccagctctccagatcctgctgaccaacaccaaagtccctcgcaataccagggcccttgtggctggcgtcagaaacaggctgctcaagttcccagagatcgtggcccccctcctgacctcaatagatgccatctccctggagtgtgagcgcgtgctgggagagatgggggaagccccagccccggagcagtacctcgtgctggaagagctcattgacatgaaccagcaccatctgaatgccctcggcgtgggccacgcctctctggaccagctctgccaggtgaccagggcccgcggacttcacagcaagctgactggcgcaggcggtggtggctgtggcatcacactcctcaagccagggctggagcagccagaagtggaggccacgaagcaggccctgaccagctgtggctttgactgcttggaaaccagcatcggtgcccccggcgtctccatccactcagccacctccctggacagccgagtccagcaagccctggatggcctctgagaggagcccacgacactgcagccccacccagatgcccctttctggattattctgggggctgcagttcgactctgtgctggccagcgagcgcccagctcctgacactgctggagaggccccagccgcttggcgatgccagccaagctctgcagtcccagcggtgggacctagggaggcatggtctgccctctgcatcctctggagccagccgagcaggaggcctaggagggtcctctgagactccagacctgaggcgagaagggctgcttccctgaagctcccacagtcccatctgcttcaggcccccgccttggcctgtgttcttcctggccgcctgggtccaatgctcaggtgctggggcctggttcccggagaagtgtgccttctctctcccttttcagggaccgccccctgtctctcagggccaggcctctccctcctccaggaagccttcccctaccccttgtcgcccctccctcccagagcacctgctgtctgggtggctcactcagcacttggtgtggccttcccttctacctagcgggatggggctcccccaggggctgtcccggaggcggtgggcctggttaaataaggcagggtttatatgcactttcttccgatctgtacctgagaggtttgtggaaaagatggcaaatggggaataaaaagattttgtgtcaaca

SEQ ID NO: 347768 - DNA, 2406 bp, Homo sapiens
atgttcatcttttgtaaagttaaaaaaaaaaaaaaaagccagcctccaaggctgagaatcgatattaatttcatgggcttatgggcagtgagataaagcaggtttctggcagccctttccagccctattggattttacaatcttgaactgtgaagacagcgaataaaggtatcaagggctctgcccgtctccagctgtctcgggccagagctcatccaaatcccccaccttccatcccagcctgcagccctctgaaaggcaggttggatggcaagaaatgtcagcttgagccctcgaagacggctcactacaaggacagttgggattgtggctttaggagggatttatgcagctcctctggggcaggtgaggaccacggggtcatgctagagagtcagctcaacgtggctgcctgggacacgtctatgtgccagagggcagccaaggggatgactgactctacatctggttttagaccagggctgctcgtccgggcaccattgaggtagggcaagaatgggctcagcgtgctggggaccatcctcctctgcaaccctgccctccctgcatttacgagcccgtgcgtggcactgcccgcaccagctagcctgggcatcttccctctgtgtgatccatttcagggcctgttgcttggtctttctaaaactccagcttcgtgggggtgacccacacaagtgaaccttcgccccctccttgtactctgctatagccactttgaatttctcactggatgactgtgccgggttccgccacctccaggctcacacaggctgctccaactgccagaaatcctcacccttctagctttgcttggtggcttcttacccttcctcagttctcagtgtccacgtcatgccagaaaaaccttctcggcccttctcccctatcccctctctggccccggccccaaggccacgctgtgcctagcatgttgtaggtcccagttgaagttgaatgaataaatgagtgaaaagccaagggagaatggccacccaaccagtgcctgggatggaggcgcagctgtggccagcagcagaagccccatgctcccccaatccagtgtcacctcttgtgcctcccttcttcctccgtatcagggtgggcggcttcccggactgctcccagtcctgtcccagctcctccatcttgagttcagtgtggacctgcctcctcttcaccctgcaggtcgccagctctccagatcctgctgaccaacaccaaagtccctcgcaataccagggcccttgtggctggcgtcagaaacaggctgctcaagttcccagagatcgtggcccccctcctgacctcaatagatgccatctccctggagtgtgagcgcgtgctgggagagatgggggaagccccagccccggagcagtacctcgtgctggaagagctcattgacatgaaccagcaccatctgaatgccctcggcgtgggccacgcctctctggaccagctctgccaggtgaccagggcccgcggacttcacagcaagctgactggcgcaggcggtggtggctgtggcatcacactcctcaagccagggctggagcagccagaagtggaggccacgaagcaggccctgaccagctgtggctttgactgcttggaaaccagcatcggtgcccccggcgtctccatccactcagccacctccctggacagccgagtccagcaagccctggatggcctctgagaggagcccacgacactgcagccccacccagatgcccctttctggattattctgggggctgcagttcgactctgtgctggccagcgagcgcccagctcctgacactgctggagaggccccagccgcttggcgatgccagccaagctctgcagtcccagcggtgggacctagggaggcatggtctgccctctgcatcctctggagccagccgagcaggaggcctaggagggtcctctgagactccagacctgaggcgagaagggctgcttccctgaagctcccacagtcccatctgcttcaggcccccgccttggcctgtgttcttcctggccgcctgggtccaatgctcaggtgctggggcctggttcccggagaagtgtgccttctctctcccttttcagggaccgccccctgtctctcagggccaggcctctccctcctccaggaagccttcccctaccccttgtcgcccctccctcccagagcacctgctgtctgggtggctcactcagcacttggtgtggccttcccttctacctagcgggatggggctcccccaggggctgtcccggaggcggtgggcctggttaaataaggcagggtttatatgcactttcttccgatctgtacctgagaggtttgtggaaaagatggcaaatggggaataaaaagattttgtgtcaaca

SEQ ID NO: 347769 - DNA, 1689 bp, Homo sapiens
ctccccttgaggcacgggcgctctgggttgtgggagttggggagctgctccggcttcggcgcggaggggcggcggccggggaggcggcggcggcggcaggattcccaggagccatgttgtcagaagtcctactggtgtctgctccggggaaagtcatccttcatggagaacatgccgtggtacatggcaaggtagcactggctgtatccttgaacttgagaacattcctccggcttcaaccccacagcaatgggaaagtggacctcagcttacccaacattggtatcaagcgggcctgggatgtggccaggcttcagtcactggacacaagctttctgggtggaccaaggaggatttggagctaattaacaagtgggccttccaaggggagagaatgattcacgggaacccctccggagtggacaatgctgtcagcacctggggaggagccctccgataccatcaagggaagatttcatccttaaagaggtcgccagctctccagatcctgctgaccaacaccaaagtccctcgcaataccagggcccttgtggctggcgtcagaaacaggctgctcaagttcccagagatcgtggcccccctcctgacctcaatagatgccatctccctggagtgtgagcgcgtgctgggagagatgggggaagccccagccccggagcagtacctcgtgctggaagagctcattgacatgaaccagcaccatctgaatgccctcggcgtgggccacgcctctctggaccagctctgccaggtgaccagggcccgcggacttcacagcaagctgactggcgcaggcggtggtggctgtggcatcacactcctcaagccagggctggagcagccagaagtggaggccacgaagcaggccctgaccagctgtggctttgactgcttggaaaccagcatcggtgcccccggcgtctccatccactcagccacctccctggacagccgagtccagcaagccctggatggcctctgagaggagcccacgacactgcagccccacccagatgcccctttctggattattctgggggctgcagttcgactctgtgctggccagcgagcgcccagctcctgacactgctggagaggccccagccgcttggcgatgccagccaagctctgcagtcccagcggtgggacctagggaggcatggtctgccctctgcatcctctggagccagccgagcaggaggcctaggagggtcctctgagactccagacctgaggcgagaagggctgcttccctgaagctcccacagtcccatctgcttcaggcccccgccttggcctgtgttcttcctggccgcctgggtccaatgctcaggtgctggggcctggttcccggagaagtgtgccttctctctcccttttcagggaccgccccctgtctctcagggccaggcctctccctcctccaggaagccttcccctaccccttgtcgcccctccctcccagagcacctgctgtctgggtggctcactcagcacttggtgtggccttcccttctacctagcgggatggggctcccccaggggctgtcccggaggcggtgggcctggttaaataaggcagggtttatatgcactttcttccgatctgtacctgagaggtttgtggaaaagatggcaaatggggaataaaaagattttgtgtcaaca

SEQ ID NO: 347770 - DNA, 2232 bp, Homo sapiens
ctagtcatcctcaggccatgcagtggaattccacagccttccaccaagctctgcaagatcccagagtcaggggcctgtattttcctgctggtggctccagttcaggaacagtaaaccctgctcagaatattgcctctcacatctcgtcaatctcctcgaggactggggaccctgcaccgaacatggagaacattacatcaggattcctaggacccctgctcgtgttacaggcggggtttttcttgttgacaagaatcctcacaataccacagagtctagactcgtggtggacttctctcaattttctagggggatcacccgtgtgtcttggccaaaattcgcagtccccaacctccaatcactcaccaacctcctgtcctccaatttgtcctggttatcgctggatgtgtctgcggcgttttatcatattcctcttcatcctgctgctatgcctcatcttcttattggttcttctggactatcaaggattcccaggagccatgttgtcagaagtcctactggtgtctgctccggggaaagtcatccttcatggagaacatgccgtggtacatggcaaggtagcactggctgtatccttgaacttgagaacattcctccggcttcaaccccacagcaatgggaaagtggacctcagcttacccaacattggtatcaagcgggcctgggatgtggccaggcttcagtcactggacacaagctttctggggccctgccgagcctggatatcgtagtgtggtcggagctgccccccggggcgggcttgggctccagcgccgcctactcggtgtgtctggcagcagccctcctgactgtgtgcgaggagatcccaaacccgctgaaggacggggattgcgtcaacaggtggaccaaggaggatttggagctaattaacaagtgggccttccaaggggagagaatgattcacgggaacccctccggagtggacaatgctgtcagcacctggggaggagccctccgataccatcaagggaagatttcatccttaaagaggtcgccagctctccagatcctgctgaccaacaccaaagtccctcgcaataccagggcccttgtggctggcgtcagaaacaggctgctcaagttcccagagatcgtggcccccctcctgacctcaatagatgccatctccctggagtgtgagcgcgtgctgggagagatgggggaagccccagccccggagcagtacctcgtgctggaagagctcattgacatgaaccagcaccatctgaatgccctcggcgtgggccacgcctctctggaccagctctgccaggtgaccagggcccgcggacttcacagcaagctgactggcgcaggcggtggtggctgtggcatcacactcctcaagccagggctggagcagccagaagtggaggccacgaagcaggccctgaccagctgtggctttgactgcttggaaaccagcatcggtgcccccggcgtctccatccactcagccacctccctggacagccgagtccagcaagccctggatggcctctgagaggagcccacgacactgcagccccacccagatgcccctttctggattattctgggggctgcagttcgactctgtgctggccagcgagcgcccagctcctgacactgctggagaggccccagccgcttggcgatgccagccaagctctgcagtcccagcggtgggacctagggaggcatggtctgccctctgcatcctctggagccagccgagcaggaggcctaggagggtcctctgagactccagacctgaggcgagaagggctgcttccctgaagctcccacagtcccatctgcttcaggcccccgccttggcctgtgttcttcctggccgcctgggtccaatgctcaggtgctggggcctggttcccggagaagtgtgccttctctctcccttttcagggaccgccccctgtctctcagggccaggcctctccctcctccaggaagccttcccctaccccttgtcgcccctccctcccagagcacctgctgtctgggtggctcactcagcacttggtgtggccttcccttctacctagcgggatggggctcccccaggggctgtcccggaggcggtgggcctggttaaataaggcagggtttatatgcactttcttccgatctgtacctgagaggtttgtggaaaagatggcaaatggggaataaaaagattttgtgtcaaca

SEQ ID NO: 347771 - DNA, 1101 bp, Homo sapiens
ctccccttgaggcacgggcgctctgggttgtgggagttggggagctgctccggcttcggcgcggaggggcggcggccggggaggcggcggcggcggcaggattcccaggagccatgttgtcagaagtcctactggtgtctgctccggggaaagtcatccttcatggagaacatgccgtggtacatggcaaggtagcactggctgtatccttgaacttgagaacattcctccggcttcaaccccacagcaatgggaaagtggacctcagcttacccaacattggtatcaagcgggcctgggatgtggccaggcttcagtcactggacacaagctttctggagcaaggtgatgtcacaacacccacctcagagcaagtggagaagctaaaggaggttgcaggcttgcctgacgactgtgctgtcaccgagcgcctggctgtgctggcctttctttacttatacctgtccatctgccggaagcagagggccctgccgagcctggatatcgtagtgtggtcggagctgccccccggggcgggcttgggctccagcgccgcctactcggtgtgtctggcagcagccctcctgactgtgtgcgaggagatcccaaacccgctgaaggacggggattgcgtcaacaggtggaccaaggaggatttggagctaattaacaagtgggccttccaaggggagagaatgattcacgggaacccctccggagtggacaatgctgtcagcacctggggaggagccctccgataccatcaagggaagatttcatccttaaagaggtaacctgggggtggagcagcacattcagccatggctgcattgatgtgtgcagggggcagagctctgcacctttgggaagtaccataggaggcaggtgtccctggctcttcatcccccaatgtggccctcacagtgcactagctgcaaggaagcaggggtggtggggaagacctgctctctccttctccccttcagctcttaaattgcagagatatcagaaagggaaagtcatgcatggctgtgcccgtagactctcagctgctcattcattcattcctgtatttgcttagtaaacaagaatccattactt

SEQ ID NO: 347772 - DNA, 210 bp, Homo sapiens
gttgtattctaggacaataccatatactcctctttcttgcagttttaaagttttgtatatttgcttccttttgtctttttcactagtttactgtccatcccaaccacgagggtgtcagcttcacaagggctgaagccctgtctgtctggttcattcttgtctccccaggacctagtgtaatgcctgccatacaacaggtgctgaataatt

SEQ ID NO: 347773 - DNA, 363 bp, Homo sapiens
tccccaaagatgtccatggccgaatccccagaacctgtgaatatgttgttttatgtggtaaaggggactttgcagatgtgataaaggatcttaagatgggagattattgtggattagtgtgtgggcccagtgtaatcacaaggatcctcatgggagagagacaggagaatcaggaaaaggagctgtgatggccaaagcagaggttggcgtgatgtgatctgaagatggaagaaggggccaggagccaggaagtacacgcggcctctggaagttagaaaaggcaaggaagtggattcttccctagagcctccagaacacgggtcggccaacaccttggttttagctcctaagacccattttaga

SEQ ID NO: 347774 - DNA, 446 bp, Homo sapiens
aaaaaaaaaaaaaagactgaagaatgaagtctgattgtatagggctttataggccattgtatagaactttagatggtccacttctccaaccctatcacccattagttgtttaatttaaaatagctgactctcttctcttcccttccccattttaagaatgtaagtctcctgggagtaaggacctaatctcttgtttactcctgtattttcagcacttgttacagttgcctagcacagagtaggccctcagtaaatacttgttaaaacaacaaatggggtatgtctccaagatcttaatctggttgaagaagtgctgttaggactgaaaacaatagtaaccatatgagaaagcttccaggaggatcctcattaagtattacttttccaagtcatcacagttgtgtgtgaaagcaaaagttgttagaatatgaaaatatttgttaatg

SEQ ID NO: 347775 - DNA, 280 bp, Homo sapiens
ctatgaaaagtgatgttttaattaattaaattctatggccatttatattctgactcttgcttttgaacatctttttaatatgtgtgtgtacactttccttgcttggtgagtacatcatttaaactttctttggtatttgaaaaaggccttgcagttatcctttgatcacatttgcaaattttcaccattactatttaatcaataaatgaattcattgcttgagcacctgctcagtgcatttcacattggactagttgctatggggacagagaggaagtaa

SEQ ID NO: 347776 - DNA, 1051 bp, Homo sapiens
  misc_feature (1051)..(1051): n is a, c, g, or t
gcggccgcggggctgcggctccccagccccgccagctggagcgctcggaggtagaggaaaggtcttgacggggtggctggatccgtggcagactcaaatccaggccaagtgtatggctgtctgaggtattggaacagaaggaggtccattcctgttggtgacaacaccgtggccctgttctgggatgagcaaggtgtaaaggagctgtgaaattagttgtaactgaaaatgtctgacggtctggataatgaagagaaacccccggctcctccactgaggatgaatagtaacaaccgggattcttcagcactcaaccacagctccaaaccacttcccatggcccctgaagagaagaataagaaagccaggcttcgctctatcttcccaggaggaggggataaaagtaaagtatcagtggccgggcattgaaaatgggctagtttattctttcattttcactttctttcttaggtagttgtttcttgaggattgactgttcagggcctgccggccctttacatctacgtcttcagaggttgcattttgtcagagaataatgtttgattgatttactgtgggctgacagaaaatacatttacactatgtttgcttttcacataaaattaaattcatagtgttaagccaagggtaatcatagcaacagtactgtcttgaatatatcaacagtgactttctttctgataatgtagagtagaatttacaataatccctccctaactataagttgttctttttggaactgggtatggaggttactccgatacttttgtaacgagactgactcgatttgaatctccggtcccaagtctccgcatttttctggagggctcacacagtgccaacttacggggccaaagcgtctggtgcccattttacacgggaacaggcaaatcaggcgggaccacatgcatagattattagatataaacataaattatagagagcgagaaatactcacccaccacccagacccacgaccgcccagatacaccaccacgaccacgcaccagcccacccacgccccccccgn

SEQ ID NO: 347777 - DNA, 719 bp, Homo sapiens
aaatatttcacatctgtcctatttgatttagttcttccaacacttacccaaggcaactaaggcaggccttttcacttgatactaagcaggcccagaatgatgaggtgactaacagcaattctcagcttgtaactcccaactcctgactcccacttccgtgccctttctggaatcctatgtaacaatgcctttttacacttcttagccctctgattttctagctttcttaagagatattctgaaattcaccagagagattgagaaagagagagagagagagtgtgtgtgtgtgtgtatgagagagagagtatgtgtgtgtgtgtgagagagagagagagagagagatgtttggtgggagttggatgagggagcagtagcaggtggggaaagaggttccctctcccctacaatgcttctctcagcaggtttcccccaagaaagagcagctgagtccttgcatcttgtggcagctggtgtgcccagcactgagtctgtaggagctgaagccagcccggacccttctcatgggcagtgcccacctgtgctgaagtcctgcagcggtggcggtgtgaggtgagtaatggagtccagggcagggagttagggatctccaaatccaggcaaatgctgcttttccaccagatctcccaatattggggaatttggcccagctgccttaatctcttgcctcctccatctctatatgggatgaccctgac

SEQ ID NO: 347778 - DNA, 487 bp, Homo sapiens
gcggccgcggggctgcggctccccagccccgccagctggagcgctcggaggtagaggaaaggtcttgacggggtggctggatccgtggcagcctcgagtctcctacgtggctccccggagccctgagaccaagcgagcagtttgcatgatcccagttcgcggacaagtgggtgtgtcagggccgttcccagagggccggggctccttcgcttggtcaaaccctagactcgtttactggggcctgggccgcttgaggcaaaacccgccttgaaagctacgtcagcctaatccagttccagattctagacttgagggttctgggctgttggtctgtagaagcgaaggagagaaggactcaaatccaggccaagtgtatggctgtctgaggtattggaacagaaggaggtccattcctgttggtgacaacaccgtggccctgttctgggatgagcaaggtgtaaagcatccccacccacgtaacccacct

SEQ ID NO: 347779 - DNA, 2736 bp, Homo sapiens
aaatatttcacatctgtcctatttgatttagttcttccaacacttacccaaggcaactaaggcaggccttttcacttgatactaagcaggcccagaatgatgaggtgactaacagcaattctcagcttgtaactcccaactcctgactcccacttccgtgccctttctggaatcctatgtaacaatgcctttttacacttcttagccctctgattttctagctttcttaagagatattctgaaattcaccagagagattgagaaagagagagagagagagtgtgtgtgtgtgtgtatgagagagagagtatgtgtgtgtgtgtgagagagagagagagagagagatgtttggtgggagttggatgagggagcagtagcaggtggggaaagaggttccctctcccctacaatgcttctctcagcaggtttcccccaagaaagagcagctgagtccttgcatcttgtggcagctggtgtgcccagcactgagtctgtaggagctgaagccagcccggacccttctcatgggcagtgcccacctgtgctgaagtcctgcagcggtggcggtgtgaggagctgtgaaattagttgtaactgaaaatgtctgacggtctggataatgaagagaaacccccggctcctccactgaggatgaatagtaacaaccgggattcttcagcactcaaccacagctccaaaccacttcccatggcccctgaagagaagaataagaaagccaggcttcgctctatcttcccaggaggaggggataaaaccaataagaagaaggagaaagagcgcccagagatctctcttccttcagactttgagcatacgattcatgtggggtttgatgcagtcaccggggaattcactggaattccagagcaatgggcacgattactccaaacttccaacataacaaaattggaacagaagaagaacccacaagctgttctagatgttctcaaattctatgattccaaagaaacagtcaacaaccagaaatacatgagctttacatcaggagataaaagtgcacatggatacatagcagcccatccttcgagtacaaaaacagcatctgagcctccattggcccctcctgtgtctgaagaagaagatgaagaggaagaagaagaagaagatgaaaatgagccaccaccagttatcgcaccaagaccagagcatacaaaatcaatctatactcgttctgtggttgaatccattgcttcaccagcagtaccaaataaagaggtcacaccaccctctgctgaaaatgccaattccagtactttgtacaggaacacagatcggcaaagaaaaaaatccaagatgacagatgaggagatcttagagaagctaagaagcattgtgagtgttggggacccaaagaaaaaatacacaagatttgaaaaaattggtcaaggggcatcaggtactgtttatacagcactagacattgcaacaggacaagaggtggccataaagcagatgaaccttcaacagcaacccaagaaggaattaattattaatgaaattctggtcatgagggaaaataagaaccctaatattgttaattatttagatagctacttggtgggtgatgaactatgggtagtcatggaatacttggctggtggctctctgactgatgtggtcacagagacctgtatggatgaaggacagatagcagctgtctgcagagagtgcctgcaagctttggatttcctgcactcaaaccaggtgatccatagagatataaagagtgacaatattcttctcgggatggatggctctgttaaattgactgactttgggttctgtgcccagatcactcctgagcaaagtaaacgaagcactatggtgggaaccccatattggatggcacctgaggtggtgactcgaaaagcttatggtccgaaagttgatatctggtctcttggaattatggcaattgaaatggtggaaggtgaacccccttaccttaatgaaaatccactcagggcattgtatctgatagccactaatggaactccagagctccagaatcctgagagactgtcagctgtattccgtgactttttaaatcgctgtcttgagatggatgtggataggcgaggatctgccaaggagcttttgcagcatccatttttaaaattagccaagcctctctccagcctgactcctctgattatcgctgcaaaggaagcaattaagaacagcagccgctaagactgcaagccttacacctcaccatctccctcatgagtaagactgaaataaaactctgctgcaggaaagatggaagaaaagacagtcaaatggggtgggggttctttacctttcaaatgaatagaaacttcttataagcctttttcctactccctcagattatgtaatttatttgtaagcctgaatcgcagcccaaacagggcagcaatgttgaagtgaccataaagtggtcacttccaccgtgaagcgaaagagccagtagtgaatcccctcattttgtgcattcactttgaagaaaaaggtttctcaaagatgcacactccctcttcatagtgttgtgtttgtttttaagttagagagtagtccctcttgcattcaaacctccttcaaaactccttacccaatgtgatgtttttcacttgcattgtcattagatgtccagaaaaaaaaaagatgtcaaaatgtttttctaaaaaaagaaagcaaaaaaagcaaggcaaa

SEQ ID NO: 347780 - DNA, 1279 bp, Homo sapiens
ctccttctctcttcctcctcctcctaccacggccgccgccaccaccgctgcggctgtgatctcctatcccctctggtcctccttcctcccccagttcctgctcctcctcccatcccctgctcctcctgcccagcagcgaagggcagaaccctcggctgccgccctccttcgctctgaccaagaagaggctggaacagaggtttcccccaagaaagagcagctgagtccttgcatcttgtggcagctggtgtgcccagcactgagtctgtaggagctgaagccagcccggacccttctcatgggcagtgcccacctgtgctgaagtcctgcagcggtggcggtgtgaggagctgtgaaattagttgtaactgaaaatgtctgacggtctggataatgaagagaaacccccggctcctccactgaggatgaatagtaacaaccgggattcttcagcactcaaccacagctccaaaccacttcccatggcccctgaagagaagaataagaaagccaggcttcgctctatcttcccaggaggaggggataaaagtaaagtatcagtggccgggcattgaaaatgggctagtttattctttcattttcactttctttcttaggtagttgtttcttgaggattgactgttcagggcctgccggccctttacatctacgtcttcagaggttgcattttgtcagagaataatgtttgattgatttactgtgggctgacagaaaatacatttacactatgtttgcttttcacataaaattaaattcatagtgttaagccaagggtaatcatagcaacagtactgtcttgaatatatcaacagtgactttctttctgataatgtagagtagaatttacaataatccctccctaactataagttgttctttttggaaatttgggtataggtaggtttacttctgtatacctttttgataactgaaaattttgaattcagtatatgagaatcagtccacgttgccacaatattgtctctctgactatattgtaagtgggaaggcatttctgagtcatttgtttccattatcattcttcaacctgttttcccctagacagccccatgtgtactgagtagcacaccaatatattataatttatccttctggtgtttgtaataccatttggtgcttaaatgtcatatgctaatgctttgtgacgtgcagggatatgaaatctctagtaagtaactttcagggtacattaattagcataaagcttgacatggcttctcagatatgaagcaagtac

SEQ ID NO: 347781 - DNA, 1222 bp, Homo sapiens
ctccttctctcttcctcctcctcctaccacggccgccgccaccaccgctgcggctgtgatctcctatcccctctggtcctccttcctcccccagttcctgctcctcctcccatcccctgctcctcctgcccagcagcgaagggcagaaccctcggctgccgccctccttcgctctgaccaagaagaggctggaacagaggtttcccccaagaaagagcagctgagtccttgcatcttgtggcagctggtgtgcccagcactgagtctgtaggagctgaagccagcccggacccttctcatgggcagtgcccacctgtgctgaagtcctgcagcggtggcggtgtgaggagctgtgaaattagttgtaactgaaaatgtctgacggtctggataatgaagagaaacccccggctcctccactgaggatgaatagtaacaaccgggattcttcagcactcaaccacagctccaaaccacttcccatggcccctgaagagaagaataagaaagccaggcttcgctctatcttcccaggaggaggggataaaaccaataagaagaaggagaaagagcgcccagagatctctcttccttcagactttgagcatacgattcatgtggggtttgatgcagtcaccggggaattcactggaattccagagcaatgggcacgattactccaaacttccaacataacaaaattggaacagaagaagaacccacaagctgttctagatgttctcaaattctatgattccaaagaaacagtcaacaaccagaaatacatgagctttacatcaggagataaaagtgcacatggatacatagcagcccatccttcggtaagtgaaaaattgaaaactgtttcacatgattggtgtttccaaagatttaagagaatataactgcacagatccagtttttagatataaagtcttttaaaaacaattttaaggtataattcagtttatataaaattcacctattttcaggtaaacagttcaatgagttttggtaaatgtatatacctatgctaccatcaccacaattgagttttagaacaagtccatcaccccagtaaaatccttcatacctacttacagttaactccacccaccccaccctagtcacaggcaagaactaatatggaatctgcctttatggatttggctttctggacatttcatgtaaatgaaataatacagcgtgtgacttttgagga

SEQ ID NO: 347782 - DNA, 304 bp, Homo sapiens
aattacattttatttcaagtaaaatatattggtaacagcttgattgcttattcttttgataattttcaccttcacagggcatcaggtactgtttatacagcactagacattgcaacaggacaagaggtaagtgctaacgttcaatcctgatttttattttcttttattcatatttaacagttatcttcttcgatggcaacttcgcctaaaaaaaaaatgggtagcactgggttgacataggtgtttacttccttggtgcccaaagcctctgaagtgagtagtttacccatgataaccaaaaaat

SEQ ID NO: 347783 - DNA, 443 bp, Homo sapiens
tctgtgccaagccatgattttaatatgtatgtgctgaatggatttttctatttttttctacaggcattgtatctgatagccactaatggaactccagagctccagaatcctgagagactgtcagctgtattccgtgactttttaaatcgctgtcttgagatggatgtggataggcgaggatctgccaaggagcttttgcaggtgaaaataaaataggacaattacaaagagaggcattatactcagcttttccatctcaatgtgtgacagagagctctgtcaagagatgtctagagttaggctattaccattttattttagaccacaggcacataactataggcacgcatctaatacatgattgattgacgtgttgcctttcttctgagaagttggcagtgtaatctgtaaatctcttttgttcttcctggagtcttattttg

SEQ ID NO: 347784 - DNA, 2581 bp, Homo sapiens
gcggccgcggggctgcggctccccagccccgccagctggagcgctcggaggtagaggaaaggtcttgacggggtggctggatccgtggcagaatccagttccagattctagacttgagggttctgggctgttggtctgtagaagcgaaggagagaaggactcaaatccaggccaagtgtatggctgtctgaggtattggaacagaaggaggtccattcctgttggtgacaacaccgtggccctgttctgggatgagcaaggtgtaaagaggtttcccccaagaaagagcagctgagtccttgcatcttgtggcagctggtgtgcccagcactgagtctgtaggagctgaagccagcccggacccttctcatgggcagtgcccacctgtgctgaagtcctgcagcggtggcggtgtgaggagctgtgaaattagttgtaactgaaaatgtctgacggtctggataatgaagagaaacccccggctcctccactgaggatgaatagtaacaaccgggattcttcagcactcaaccacagctccaaaccacttcccatggcccctgaagagaagaataagaaagccaggcttcgctctatcttcccaggaggaggggataaaaccaataagaagaaggagaaagagcgcccagagatctctcttccttcagactttgagcatacgattcatgtggggtttgatgcagtcaccggggaattcactggaattccagagcaatgggcacgattactccaaacttccaacataacaaaattggaacagaagaagaacccacaagctgttctagatgttctcaaattctatgattccaaagaaacagtcaacaaccagaaatacatgagctttacatcaggagataaaagtgcacatggatacatagcagcccatccttcgagtacaaaaacagcatctgagcctccattggcccctcctgtgtctgaagaagaagatgaagaggaagaagaagaagaagatgaaaatgagccaccaccagttatcgcaccaagaccagagcatacaaaatcaatctatactcgttctgtggttgaatccattgcttcaccagcagtaccaaataaagaggtcacaccaccctctgctgaaaatgccaattccagtactttgtacaggaacacagatcggcaaagaaaaaaatccaagatgacagatgaggagatcttagagaagctaagaagcattgtgagtgttggggacccaaagaaaaaatacacaagatttgaaaaaattggtcaaggggcatcaggtactgtttatacagcactagacattgcaacaggacaagaggtggccataaagcagatgaaccttcaacagcaacccaagaaggaattaattattaatgaaattctggtcatgagggaaaataagaaccctaatattgttaattatttagatagctacttggtgggtgatgaactatgggtagtcatggaatacttggctggtggctctctgactgatgtggtcacagagacctgtatggatgaaggacagatagcagctgtctgcagagagtgcctgcaagctttggatttcctgcactcaaaccaggtgatccatagagatataaagagtgacaatattcttctcgggatggatggctctgttaaattgactgactttgggttctgtgcccagatcactcctgagcaaagtaaacgaagcactatggtgggaaccccatattggatggcacctgaggtggtgactcgaaaagcttatggtccgaaagttgatatctggtctcttggaattatggcaattgaaatggtggaaggtgaacccccttaccttaatgaaaatccactcagggcattgtatctgatagccactaatggaactccagagctccagaatcctgagagactgtcagctgtattccgtgactttttaaatcgctgtcttgagatggatgtggataggcgaggatctgccaaggagcttttgcagcatccatttttaaaattagccaagcctctctccagcctgactcctctgattatcgctgcaaaggaagcaattaagaacagcagccgctaagactgcaagccttacacctcaccatctccctcatgagtaagactgaaataaaactctgctgcaggaaagatggaagaaaagacagtcaaatggggtgggggttctttacctttcaaatgaatagaaacttcttataagcctttttcctactccctcagattatgtaatttatttgtaagcctgaatcgcagcccaaacagggcagcaatgttgaagtgaccataaagtggtcacttccaccgtgaagcgaaagagccagtagtgaatcccctcattttgtgcattcactttgaagaaaaaggtttctcaaagatgcacactccctcttcatagtgttgtgtttgtttttaagttagagagtagtccctcttgcattcaaacctccttcaaaactccttacccaatgtgatgtttttcacttgcattgtcattagatgtccagaaaaaaaaaagatgtcaaaatgtttttctaaaaaaagaaagcaaaaaaagcaaggcaaa

SEQ ID NO: 347785 - DNA, 2510 bp, Homo sapiens
ctccttctctcttcctcctcctcctaccacggccgccgccaccaccgctgcggctgtgatctcctatcccctctggtcctccttcctcccccagttcctgctcctcctcccatcccctgctcctcctgcccagcagcgaagggcagaaccctcggctgccgccctccttcgctctgaccaagaagaggctggaacagaggtttcccccaagaaagagcagctgagtccttgcatcttgtggcagctggtgtgcccagcactgagtctgtaggagctgaagccagcccggacccttctcatgggcagtgcccacctgtgctgaagtcctgcagcggtggcggtgtgaggagctgtgaaattagttgtaactgaaaatgtctgacggtctggataatgaagagaaacccccggctcctccactgaggatgaatagtaacaaccgggattcttcagcactcaaccacagctccaaaccacttcccatggcccctgaagagaagaataagaaagccaggcttcgctctatcttcccaggaggaggggataaaaccaataagaagaaggagaaagagcgcccagagatctctcttccttcagactttgagcatacgattcatgtggggtttgatgcagtcaccggggaattcactggaattccagagcaatgggcacgattactccaaacttccaacataacaaaattggaacagaagaagaacccacaagctgttctagatgttctcaaattctatgattccaaagaaacagtcaacaaccagaaatacatgagctttacatcaggagataaaagtgcacatggatacatagcagcccatccttcgagtacaaaaacagcatctgagcctccattggcccctcctgtgtctgaagaagaagatgaagaggaagaagaagaagaagatgaaaatgagccaccaccagttatcgcaccaagaccagagcatacaaaatcaatctatactcgttctgtggttgaatccattgcttcaccagcagtaccaaataaagaggtcacaccaccctctgctgaaaatgccaattccagtactttgtacaggaacacagatcggcaaagaaaaaaatccaagatgacagatgaggagatcttagagaagctaagaagcattgtgagtgttggggacccaaagaaaaaatacacaagatttgaaaaaattggtcaaggggcatcaggtactgtttatacagcactagacattgcaacaggacaagaggtggccataaagcagatgaaccttcaacagcaacccaagaaggaattaattattaatgaaattctggtcatgagggaaaataagaaccctaatattgttaattatttagatagctacttggtgggtgatgaactatgggtagtcatggaatacttggctggtggctctctgactgatgtggtcacagagacctgtatggatgaaggacagatagcagctgtctgcagagagtgcctgcaagctttggatttcctgcactcaaaccaggtgatccatagagatataaagagtgacaatattcttctcgggatggatggctctgttaaattgactgactttgggttctgtgcccagatcactcctgagcaaagtaaacgaagcactatggtgggaaccccatattggatggcacctgaggtggtgactcgaaaagcttatggtccgaaagttgatatctggtctcttggaattatggcaattgaaatggtggaaggtgaacccccttaccttaatgaaaatccactcagggcattgtatctgatagccactaatggaactccagagctccagaatcctgagagactgtcagctgtattccgtgactttttaaatcgctgtcttgagatggatgtggataggcgaggatctgccaaggagcttttgcagcatccatttttaaaattagccaagcctctctccagcctgactcctctgattatcgctgcaaaggaagcaattaagaacagcagccgctaagactgcaagccttacacctcaccatctccctcatgagtaagactgaaataaaactctgctgcaggaaagatggaagaaaagacagtcaaatggggtgggggttctttacctttcaaatgaatagaaacttcttataagcctttttcctactccctcagattatgtaatttatttgtaagcctgaatcgcagcccaaacagggcagcaatgttgaagtgaccataaagtggtcacttccaccgtgaagcgaaagagccagtagtgaatcccctcattttgtgcattcactttgaagaaaaaggtttctcaaagatgcacactccctcttcatagtgttgtgtttgtttttaagttagagagtagtccctcttgcattcaaacctccttcaaaactccttacccaatgtgatgtttttcacttgcattgtcattagatgtccagaaaaaaaaaagatgtcaaaatgtttttctaaaaaaagaaagcaaaaaaagcaaggcaaa

SEQ ID NO: 347786 - DNA, 714 bp, Homo sapiens
tgagacagggtctcactctgtcccccaggctggagtgcaggggtgcaatctcagcttgctgcagcctcgacttcccgggttcaagcgattctcctgcctcagcctcccaagtagctgaggaggcgcgcactaccacacctggctaatttttgtatttttagtttcatcatgttgcccaagctggtctcaaactcctgatctcacgtcatccacctgcatcggcctcccaaagtgctgggattacaggccagccaccacatcgggccccatctccctacttctacctgccatcactgctgctctctgcaagcagtgcaccgggaaggggaggcctgcattgtgcactgctctccaccctgcaggtggccttgacacaggcacggggagggttggggtcacacaggtgccacatgttatccagccccatcctaaactagaacagccacagcaagctgagcacacagcttggcaggcacctctcacccacccccatccagatcctgagctcgccccagcacacagcttgccatttcccggaacctgcccatcctttgaaggttggggcagcagggccatgggaagggaggctttcccacgcccagccagagcccagcattttcattttgcactagtcctcgtaatcacatggccggccctgcctcttcctctaacagtctccccgcagcccttcacttgctagtcctttgatcattc

SEQ ID NO: 347787 - DNA, 741 bp, Homo sapiens
caggcgcctgccaccacacccagctaatttttgtatttttagtagaaacggggtttcaacatgttggccaggctggtcttgaactcctgacctcaggtgatccagccaccttggcctcccaaagaagagtttggatgagtttcacgtttgaaaagctcacttcactctggctgctgagcagcatggttgtgacagacataccgggaagtcagttgagggccatcctagttctgccaatctagctgtgcctcctaaaataactcatttagtgtctctgagcctcagtgtcctcatgatgggagtgggtgttctgtatgtttttttatgaggaagtgagaggccagtcacatctgaaatcagtgactacagggatctacaagaacagttggaaatgataggaccttccttagagctctatgaggattgaatgagtgaattccactgaaacagtgcctggcacagaataagtgcattctaaatgctggtgttggttattatcatgcaaacactgtaggagagcgatgctggaggtttggattggggtaatgacagcagagatggtaaaaaagtggcttgacttcctttactgaaagagagctgggttcagacacgggtgaggggtggtctctgcttttgtggaactggtggttcactgtgggagacgggtttgtaaacagataatcaccatgagatgcagtaaaagcaacagtggtgcttaattagccagattgttttgttttg

SEQ ID NO: 347788 - DNA, 364 bp, Homo sapiens
gctaacattctaatgtagaaaacttggccctttggaggactctgttgactacttgattttagggctgttcaattctcccacttttactgttcaccatatgtgtgttttttcattaaaaacaatgcaaattccttgagaggctgaggcaaggaattcgaaacctgcctaagcaacatggccagactctgtctctatgaaaaacaaaaatagcaaattagccaggcttggtggtgcatgcctgtagtcccagctattcgggaggctgaggtgggaggattgcttgagcctgggaggtcgagggttatagtgagctatgattgtgccactgcactacagcctgggcaatagagcaagactttgtcta

SEQ ID NO: 347789 - DNA, 825 bp, Homo sapiens
ttgctagataaccatcccaatccaggatccaagtgtgagaacaggcccttactcagtagctcagatctcaagatgactccggagtacactttttgcactaggccaattaagagagctgggagcaaactgactcataacctctagagacaaagaatcagacctttctggaatcccacagaatgtttttccaccaggctgttctagttagcattttgaaacagacattctactttagaactgaaggcctgacttcctcaagatattttgatagacgtgaacataagccaaagactcggccaaacttgagcatcctacataatgcatcaagctcaacagtaaaatgcctccttcacagcacagcgtgggtggtggaggacaggctgcaagctgccactgtaaaccactaaaccagggacaaagtggttaacccaacaagatgcattaccaccactgtctagatagactgcaaagtttaaagaaaaaaggatccatatgtaatgggacataacaaaccactatccatacaagataggagaacacggccctgcctgaaaattgggtttgagtcaggattacatatgccaggtacttggctaagctctgagaatataaaggcaacatgggccctgtctgtatctaggagagaaaaagaaacgtgtaaacactgcagtcaaataaagcactaccagggctctgatgcaaatctagcccagatattctccttggaggccctaatgcttcagtcatgtttttaaaaaaagaatagggatttgccaggcattgcaatccgcttgacagtgagcggttgcaatccgcttgacagtg

SEQ ID NO: 347790 - DNA, 306 bp, Homo sapiens
atgtttttaaaaaaagaatagggatttgccaggcattgcaggcagatggagcaggtagggtgttctgaagcagaaagagctattagggaaatgtaaggagttccacatagctaggaaggtgggaaggtaggcaaggggccaattttgaagggcactgtacactaacacagagtcacagtgttattaggctagtgcaaaagtaatcgcggtctttgccattacttttaatggcaaagaccgcgattacttttgcagcaacctaatagctctgggggaatgaggagcctttctatgatttgtcaagat

SEQ ID NO: 347791 - DNA, 339 bp, Homo sapiens
gacccagcaattccaccaccacatcgatgcccaagaggactgaaagcagctgctcaaagaaaaacttgtgcacgaatgttcacagcaatgatattccaatggccgagaggtggaaacagcccaagtgtcctccaatgaatgaatgaataagcaaaatgtggtctatccatatagcggaaaattactcagcaataaacagaagtgaagcgctgatacaggctacaacatgaatgcaccttgaaaacattctgccaagtgaaagaacccagacacaggccgggcatggtggctcatgcctgtaatcccagcacgtggggaggccgaggcgggtggatcacc

SEQ ID NO: 347792 - DNA, 581 bp, Homo sapiens
  misc_feature (14)..(15): n is a, c, g, or t
gtatctctaacatnntgcagaaggtataggggttagtccttgctatattatgcttggttataatttttcatctttcccttgcggtactatatctattgcgccaggtttcaatttctatcgctaagacccccgaaaccagacgagctacctaagaacagctaaaagagcacacccgtctatgtagcaaaatagtgggaagattctatggtagaggcgactgacctagcgtgcatgatgttattattggccgattaactagattacttctgaaccacatacgggcgagattcagtacatcacagaatggctgaggaacatccttgggtcgtgacgagagtagaaaccctagggagcagtgcttttgggtcctagaacctgttgagtttctaatgaatatttgtagaatctcataaaacagtttaaatacaagcttaagtggcttatgaatcctgtgaagctcatttatggactagtgtaaaacaatgtgaagctctactaagttctgtccttaatcataaataatagacccttgaggactagcctgttctctggtcaccttaccagttgggttgcacattgtg

SEQ ID NO: 347793 - DNA, 3437 bp, Homo sapiens
  misc_feature (1873)..(1873): n is a, c, g, or t
agcctcatgatatgccttgccagaagtagcgcctgagatggagatttgggtgcaggtgatttattgacgatgtgttcttcaggaaaaatactttctattcacatttttagatggcaggatggtggctggcaaagtgttgatggcaaagcaagaaattgttgaatgtgtagcctcagcagctatgatatcgccgggaaaacttcctggagaaacacattcccaacggatagctgaagaagctttgggaggtctggacaactctaagaagcaaaagggaaatgctgcagggaacaaaatcagtcagcttccttcccaggacagacatttcagtctggcaaccttcaacagaagaatccccacagaacacagtgtccttgaatctcatgagagtgaaggaagtttcagtatgaattcaaatgatattacacaacagagcgttgacactagggaaaagctctatgagtgctttgactgtgggaaggccttttgccagagctcaaagctgattagacatcagagaattcatactggagagagaccttatgcatgtaaagaatgtggcaaagccttcagtttgagctcagaccttgttagacatcagagaattcatagtggtgaaaaaccctatgaatgttgtgaatgtggaaaagccttcaggggcagttcagagctcatcaggcatcggagaatccacactggagagaagccttatgaatgtggagaatgtgggaaggccttcagccggagctcagcccttattcagcataagaaaattcacactggagataaaagctatgaatgtattgcatgtggtaaggcttttggtaggagttctatccttattgaacatcaaagaattcacactggagagaaaccttatgaatgtaatgaatgtggaaaatccttcaatcagagctcagccctcacccagcaccagagaattcacactggagagaagccttatgaatgtagtgaatgtagaaaaacatttaggcataggtcaggccttatgcagcatcagagaacacacaccagagtttaactctgtgggtaagagttgtacaattgtgaaatgcaaggagttcactgtaggggtgagactccacagaaaagaaaagtttcctgagagcagaacttctgtccttccctcccagttcggtactataagaagacatgcacacaaagatgtttgttatgattattgaagtgttaaatggaagaaaaatgttacccaagtcttctccaaaaagaatggtagatatttccttgaaatgcctaacccatttctggatgagactcatcaatatccccttcactccactctctgccaactcagatataatttccattgggcaccttcacagtaatgccaggattggggcagagatcctgaaagagcttcttataagatggcaaatgtgcctggcaagagcatttgtattttgtcaggtggaggcatgtgctgagagttattcaactatctgaaatgttgaatttggaggttgtgaaaatattgaattatgctattagtttaataatatctgaggcagtaaaatagtacctgaggaatggtgcctcattctgcccccttgccagttgtctcctcaatcctgagcttcctgctgaggttaattcaagtctactagtttattgagcacctgctatgtgctaggcattgaggtagacctggtcattgccctcccagagttaagggctaataggatatgcatatatactaaacagtaattacagtaaagtgtggtaagtgctttggtaggaaaaatgcgggtttccatcaaagtacatggcagggatacctaaatctggtctatgagtcactaaagacttcctggatatgatggtatctcagacntaaaggtgggtagaaggtagcaagggcaggggagaagagaacaggatctggagacactccatgaagactcttctctactgcagaaattgtcatagacctaatttttaaaaaaatgaatctgaaggagtaattcaacaaatatttattgccctcaagtataatagctcagggcctgcaagcctggtaaggaggggtgtgggcagggaatggggaatagcagagcctgggaaggcagatcaccgtgttcctttatacttcccactgcctgagtcccagagtcatgggacacaaacactccagtccccactgtctctctagcctctgatatgcattctttccctgtgtatatacatgccttttcccataaaatgcaccagtctctcaccacactaattctgagtacttcagagtctcacaggtcattctgggtctagaataggctccccaactcagtgattataagtaggaagaggaaaagcaacacatggggattctgagccaggctttatgacaactaattcctgctggagagaagagtcctgatgatgggctgtctccagatcctatcttatcttcatgccattgtatgggctataacctctgcctgtaactctctctgctaatttttattttggcagttttaattaacccacaattgctgagggcaattaatacctaaaagaaagtttgattcctcttctaagatatcctaggtagtgtcatttctaaagaagacttggtgatcactgcttgtattagtccattttcacagtgctatgaagatactacctgatactgggtaatttattaaaaaaaaaaaagaggtttaattgactgacagttctgcagggctggggaggcctcaggaaacttaaatcatggtggaaggcgaaggggaagcaagcaccttcttcacaaggtggcaagagagagtgcaggggaaatgctaggcacttatcaatcagccaaatctcatgagaattcactatcatgagaacaagggggaaatctgctcccatgatctaatcacctcccaccacgaccctccctcaacacctggggattactattggagatttgggtggggacacaagagccaaaccatatcactgctgttgtgggtaataggggaggtgaaattggggggacaattcggcctctttgtgtccagaggttgtgcagttatcgagtgaggtcgatcagaagtctaaagggatctttcaaatggatagtgagttgccttttcctataggtgacaatcagagatttaatgttttaagtatcatataataggtttttctcctgattgtgaattgtaagtgttggtaatacagaaaatgagaaagtataaaccacccccaatcccaatgcccatagaaacgttgttaacattttggagtactttctattagtgtttatttttcccaatcctagtatttttagtaaaactactgtttagtaaatgatttttggtaactaatttcaaaatttatacttcaaccgtttattattagaatgtaatgcaagatgtattgcaataaaacttgagttttaaaagtttgct

SEQ ID NO: 347794 - DNA, 504 bp, Homo sapiens
ctgctgatgttggagcagttcctggccatccttcctgaggagctgcaagcttggctgcgagagcatcggccagagaatggagaggaagctgtgactatgctggaggagctggaaaaagaactggaggagccaaggcaacaggacacaactcatggccaagaaatgttctggcaggaaatgacatccacaggagcactgaagtctctgtctctgaatagcccggtgcagcccttagagaaccagtgcaagactgagactcaggagtcccaggctttccaggagagaggtgagaagccccagtccatgtggggttgaggatggaggtgagagctatcaactgtggcacggttcattttcttaacgacagccacttgtggctatcactaagtattgtggaaaggcttctttgcctagaaatattcttccttaggctctgcctagaatctgaaattccagtatcatttgtaactttgggttaagaattaaagtctttagtaaaattct

SEQ ID NO: 347795 - DNA, 3613 bp, Homo sapiens
  misc_feature (2049)..(2049): n is a, c, g, or t
ctgctgatgttggagcagttcctggccatccttcctgaggagctgcaagcttggctgcgagagcatcggccagagaatggagaggaagctgtgactatgctggaggagctggaaaaagaactggaggagccaaggcaacaggacacaactcatggccaagaaatgttctggcaggaaatgacatccacaggagcactgaagtctctgtctctgaatagcccggtgcagcccttagagaaccagtgcaagactgagactcaggagtcccaggctttccaggagagagatggcaggatggtggctggcaaagtgttgatggcaaagcaagaaattgttgaatgtgtagcctcagcagctatgatatcgccgggaaaacttcctggagaaacacattcccaacggatagctgaagaagctttgggaggtctggacaactctaagaagcaaaagggaaatgctgcagggaacaaaatcagtcagcttccttcccaggacagacatttcagtctggcaaccttcaacagaagaatccccacagaacacagtgtccttgaatctcatgagagtgaaggaagtttcagtatgaattcaaatgatattacacaacagagcgttgacactagggaaaagctctatgagtgctttgactgtgggaaggccttttgccagagctcaaagctgattagacatcagagaattcatactggagagagaccttatgcatgtaaagaatgtggcaaagccttcagtttgagctcagaccttgttagacatcagagaattcatagtggtgaaaaaccctatgaatgttgtgaatgtggaaaagccttcaggggcagttcagagctcatcaggcatcggagaatccacactggagagaagccttatgaatgtggagaatgtgggaaggccttcagccggagctcagcccttattcagcataagaaaattcacactggagataaaagctatgaatgtattgcatgtggtaaggcttttggtaggagttctatccttattgaacatcaaagaattcacactggagagaaaccttatgaatgtaatgaatgtggaaaatccttcaatcagagctcagccctcacccagcaccagagaattcacactggagagaagccttatgaatgtagtgaatgtagaaaaacatttaggcataggtcaggccttatgcagcatcagagaacacacaccagagtttaactctgtgggtaagagttgtacaattgtgaaatgcaaggagttcactgtaggggtgagactccacagaaaagaaaagtttcctgagagcagaacttctgtccttccctcccagttcggtactataagaagacatgcacacaaagatgtttgttatgattattgaagtgttaaatggaagaaaaatgttacccaagtcttctccaaaaagaatggtagatatttccttgaaatgcctaacccatttctggatgagactcatcaatatccccttcactccactctctgccaactcagatataatttccattgggcaccttcacagtaatgccaggattggggcagagatcctgaaagagcttcttataagatggcaaatgtgcctggcaagagcatttgtattttgtcaggtggaggcatgtgctgagagttattcaactatctgaaatgttgaatttggaggttgtgaaaatattgaattatgctattagtttaataatatctgaggcagtaaaatagtacctgaggaatggtgcctcattctgcccccttgccagttgtctcctcaatcctgagcttcctgctgaggttaattcaagtctactagtttattgagcacctgctatgtgctaggcattgaggtagacctggtcattgccctcccagagttaagggctaataggatatgcatatatactaaacagtaattacagtaaagtgtggtaagtgctttggtaggaaaaatgcgggtttccatcaaagtacatggcagggatacctaaatctggtctatgagtcactaaagacttcctggatatgatggtatctcagacntaaaggtgggtagaaggtagcaagggcaggggagaagagaacaggatctggagacactccatgaagactcttctctactgcagaaattgtcatagacctaatttttaaaaaaatgaatctgaaggagtaattcaacaaatatttattgccctcaagtataatagctcagggcctgcaagcctggtaaggaggggtgtgggcagggaatggggaatagcagagcctgggaaggcagatcaccgtgttcctttatacttcccactgcctgagtcccagagtcatgggacacaaacactccagtccccactgtctctctagcctctgatatgcattctttccctgtgtatatacatgccttttcccataaaatgcaccagtctctcaccacactaattctgagtacttcagagtctcacaggtcattctgggtctagaataggctccccaactcagtgattataagtaggaagaggaaaagcaacacatggggattctgagccaggctttatgacaactaattcctgctggagagaagagtcctgatgatgggctgtctccagatcctatcttatcttcatgccattgtatgggctataacctctgcctgtaactctctctgctaatttttattttggcagttttaattaacccacaattgctgagggcaattaatacctaaaagaaagtttgattcctcttctaagatatcctaggtagtgtcatttctaaagaagacttggtgatcactgcttgtattagtccattttcacagtgctatgaagatactacctgatactgggtaatttattaaaaaaaaaaaagaggtttaattgactgacagttctgcagggctggggaggcctcaggaaacttaaatcatggtggaaggcgaaggggaagcaagcaccttcttcacaaggtggcaagagagagtgcaggggaaatgctaggcacttatcaatcagccaaatctcatgagaattcactatcatgagaacaagggggaaatctgctcccatgatctaatcacctcccaccacgaccctccctcaacacctggggattactattggagatttgggtggggacacaagagccaaaccatatcactgctgttgtgggtaataggggaggtgaaattggggggacaattcggcctctttgtgtccagaggttgtgcagttatcgagtgaggtcgatcagaagtctaaagggatctttcaaatggatagtgagttgccttttcctataggtgacaatcagagatttaatgttttaagtatcatataataggtttttctcctgattgtgaattgtaagtgttggtaatacagaaaatgagaaagtataaaccacccccaatcccaatgcccatagaaacgttgttaacattttggagtactttctattagtgtttatttttcccaatcctagtatttttagtaaaactactgtttagtaaatgatttttggtaactaatttcaaaatttatacttcaaccgtttattattagaatgtaatgcaagatgtattgcaataaaacttgagttttaaaagtttgct

SEQ ID NO: 347796 - DNA, 562 bp, Homo sapiens
gaattcagaaggaatctctcagacgcaaatctccatctcctccctgcctcacctgggcagccttttcagactgtctctgcccagaatgtcaggagaggccacagtcttggcctaccatgctccagaagaacaggaaggacttctagttgtcaaggttgaagaagaaaattatgttttggaccaggactttggccttcaggaaaacccctggagccaagaaatgttctggcaggaaatgacatccacaggagcactgaagtctctgtctctgaatagcccggtgcagcccttagagaaccagtgcaagactgagactcaggagtcccaggctttccaggagagaggtgagaagccccagtccatgtggggttgaggatggaggtgagagctatcaactgtggcacggttcattttcttaacgacagccacttgtggctatcactaagtattgtggaaaggcttctttgcctagaaatattcttccttaggctctgcctagaatctgaaattccagtatcatttgtaactttgggttaagaattaaagtctttagtaaaattct

SEQ ID NO: 347797 - DNA, 3671 bp, Homo sapiens
  misc_feature (2107)..(2107): n is a, c, g, or t
gaattcagaaggaatctctcagacgcaaatctccatctcctccctgcctcacctgggcagccttttcagactgtctctgcccagaatgtcaggagaggccacagtcttggcctaccatgctccagaagaacaggaaggacttctagttgtcaaggttgaagaagaaaattatgttttggaccaggactttggccttcaggaaaacccctggagccaagaaatgttctggcaggaaatgacatccacaggagcactgaagtctctgtctctgaatagcccggtgcagcccttagagaaccagtgcaagactgagactcaggagtcccaggctttccaggagagagatggcaggatggtggctggcaaagtgttgatggcaaagcaagaaattgttgaatgtgtagcctcagcagctatgatatcgccgggaaaacttcctggagaaacacattcccaacggatagctgaagaagctttgggaggtctggacaactctaagaagcaaaagggaaatgctgcagggaacaaaatcagtcagcttccttcccaggacagacatttcagtctggcaaccttcaacagaagaatccccacagaacacagtgtccttgaatctcatgagagtgaaggaagtttcagtatgaattcaaatgatattacacaacagagcgttgacactagggaaaagctctatgagtgctttgactgtgggaaggccttttgccagagctcaaagctgattagacatcagagaattcatactggagagagaccttatgcatgtaaagaatgtggcaaagccttcagtttgagctcagaccttgttagacatcagagaattcatagtggtgaaaaaccctatgaatgttgtgaatgtggaaaagccttcaggggcagttcagagctcatcaggcatcggagaatccacactggagagaagccttatgaatgtggagaatgtgggaaggccttcagccggagctcagcccttattcagcataagaaaattcacactggagataaaagctatgaatgtattgcatgtggtaaggcttttggtaggagttctatccttattgaacatcaaagaattcacactggagagaaaccttatgaatgtaatgaatgtggaaaatccttcaatcagagctcagccctcacccagcaccagagaattcacactggagagaagccttatgaatgtagtgaatgtagaaaaacatttaggcataggtcaggccttatgcagcatcagagaacacacaccagagtttaactctgtgggtaagagttgtacaattgtgaaatgcaaggagttcactgtaggggtgagactccacagaaaagaaaagtttcctgagagcagaacttctgtccttccctcccagttcggtactataagaagacatgcacacaaagatgtttgttatgattattgaagtgttaaatggaagaaaaatgttacccaagtcttctccaaaaagaatggtagatatttccttgaaatgcctaacccatttctggatgagactcatcaatatccccttcactccactctctgccaactcagatataatttccattgggcaccttcacagtaatgccaggattggggcagagatcctgaaagagcttcttataagatggcaaatgtgcctggcaagagcatttgtattttgtcaggtggaggcatgtgctgagagttattcaactatctgaaatgttgaatttggaggttgtgaaaatattgaattatgctattagtttaataatatctgaggcagtaaaatagtacctgaggaatggtgcctcattctgcccccttgccagttgtctcctcaatcctgagcttcctgctgaggttaattcaagtctactagtttattgagcacctgctatgtgctaggcattgaggtagacctggtcattgccctcccagagttaagggctaataggatatgcatatatactaaacagtaattacagtaaagtgtggtaagtgctttggtaggaaaaatgcgggtttccatcaaagtacatggcagggatacctaaatctggtctatgagtcactaaagacttcctggatatgatggtatctcagacntaaaggtgggtagaaggtagcaagggcaggggagaagagaacaggatctggagacactccatgaagactcttctctactgcagaaattgtcatagacctaatttttaaaaaaatgaatctgaaggagtaattcaacaaatatttattgccctcaagtataatagctcagggcctgcaagcctggtaaggaggggtgtgggcagggaatggggaatagcagagcctgggaaggcagatcaccgtgttcctttatacttcccactgcctgagtcccagagtcatgggacacaaacactccagtccccactgtctctctagcctctgatatgcattctttccctgtgtatatacatgccttttcccataaaatgcaccagtctctcaccacactaattctgagtacttcagagtctcacaggtcattctgggtctagaataggctccccaactcagtgattataagtaggaagaggaaaagcaacacatggggattctgagccaggctttatgacaactaattcctgctggagagaagagtcctgatgatgggctgtctccagatcctatcttatcttcatgccattgtatgggctataacctctgcctgtaactctctctgctaatttttattttggcagttttaattaacccacaattgctgagggcaattaatacctaaaagaaagtttgattcctcttctaagatatcctaggtagtgtcatttctaaagaagacttggtgatcactgcttgtattagtccattttcacagtgctatgaagatactacctgatactgggtaatttattaaaaaaaaaaaagaggtttaattgactgacagttctgcagggctggggaggcctcaggaaacttaaatcatggtggaaggcgaaggggaagcaagcaccttcttcacaaggtggcaagagagagtgcaggggaaatgctaggcacttatcaatcagccaaatctcatgagaattcactatcatgagaacaagggggaaatctgctcccatgatctaatcacctcccaccacgaccctccctcaacacctggggattactattggagatttgggtggggacacaagagccaaaccatatcactgctgttgtgggtaataggggaggtgaaattggggggacaattcggcctctttgtgtccagaggttgtgcagttatcgagtgaggtcgatcagaagtctaaagggatctttcaaatggatagtgagttgccttttcctataggtgacaatcagagatttaatgttttaagtatcatataataggtttttctcctgattgtgaattgtaagtgttggtaatacagaaaatgagaaagtataaaccacccccaatcccaatgcccatagaaacgttgttaacattttggagtactttctattagtgtttatttttcccaatcctagtatttttagtaaaactactgtttagtaaatgatttttggtaactaatttcaaaatttatacttcaaccgtttattattagaatgtaatgcaagatgtattgcaataaaacttgagttttaaaagtttgct

SEQ ID NO: 347798 - DNA, 1092 bp, Homo sapiens
caggttaaatgggtatttcaggaagaagtgccaggcctaggttatttgtagaataagactgtaaacagaactgccctgctgttctttataaaacattaggcttgcaatagatagggacttagttcccagacttagcaatctatatatactgtagtacatgcagcaacaaatggaatttaccattgaccttaaacaacttttgacctgtctcggtttgcaaataggggttaaaattaaacaagagtcgtaagtgagcataatttcttacttggctgctcgtacatggaattggagggaaggttttacaagttgtgaatgaattctgcatttatatctagctgggtgcagcctggtgccttgttttgaaggtgaagaaggcactgtgtgcagggcaagatgaaaatttgtctggtggagtcattaagaacttttcccccggttacaaacaaaacagttcagggcaaactgtgttctattgatttcagacagagagacgaccctgctgtgagaggcaaatcaatgctgtacttttatttgaaagagtcagtaaaacctaggaaatgccacctgaaatgcaaaatacctaggtcaagctgtgaacaaacacatctgaataaatagatggcagaaaaagcttattacttgatgttcaagtgctgcaaacaacagaatctctcatttctggaatccaataaaacttaagtcctaaagaggcagtttttgaactcaaaaacccatcaaagtgataaacgtgtacatgagtgacgcctcacctcatttaatgtaaggaaacctcatacatctcaatggtacaggtcccttgtaaaaggttgttttcaatctatgttcaatgtaggttagtcagctatttaatagttacgttattgtcataagctcacatggaagtatttctttgtctggaagatgttttatgaaatggtattttcttccctttttttctgccattggaagaaaactttaatgttattcacagttgccctagaaacaagaggcactgcgcaccacacagcgccacggtgggaagcacccgtgtcagtccagatgcagacaggggagggaaagacataagcc

SEQ ID NO: 347799 - DNA, 408 bp, Homo sapiens
cctcagttgatctgcccgcctcggcctctcaaaactgctgggattacaggcatgagccacaacgcccagccatatataaacttttcaaagcactgtgccttcaaagatgtgataattttcagaattttgaaattttaacaatattaagagaatacactgtgagggcagtgtgcatgacttggtactagttatgctggatagctctgctaggttgttttctgtgtctgttattggaatgaaagcaatggcataagggcatagagatgccaatttggatttgtccccaagtatctctttgctgtcatgagcagtgggaaataagaatttcaagtggaaaagagtgaagaagtgaaaccattttgaattaggccatttcccaaaagaatcttcctttttttttaaaaaaaa

SEQ ID NO: 347800 - DNA, 606 bp, Homo sapiens
tttcctgcacttctccttctcctaaccagtgactaaacattgttagttattgcttgtagtactgccatacaaattaagtgtcaggtttacctaggttccctcctaatccaaagagggagagtgaggcccctttaacaaggctggcagggataaatgaggcccacagggactggcctcaatcatatctcagagacccaaggacagactgatccatctgtcttactgaaagcacaagtttgatgcgtatcaaccttaaatactagttctcttctttctagaggaaattggcacatattgaaaggcaagcaattcagctatagcatacagacaaaccagagctactgtggcccttcactctgccttgttgttttctgcatgcactgtagaagaccaagccccaacttaagcaggcaatctgaaagcccaggagaaattaaaaacttctgttggtatacttgacaacagaacaatttaccccagctttatgcagtcattacacttggagcagctttttcaatacaaattcctttcagagtctagtaaaaaatttcattgttcaacagcagcattataggtttattatcaattataactatgtcaggtctt

SEQ ID NO: 347801 - DNA, 278 bp, Homo sapiens
gaatgggtatggcatatgcataagcccagtttggaaaggagcttggtgtacttaaggagcagaatggtgaccagggtcaagcatagtgaaagggaatgtaggatgagctgagtaagaggggcaggctgaagccaggtcatgcagggcctgtggccacaggaaagaagttggaagtgatcagcacacacaaggagaaggtgacccttaggagaggagattggagagggcaagaatggatgaagtgagttgaggcttagagtggtagcttgtgtcaggtg

SEQ ID NO: 347802 - DNA, 119 bp, Homo sapiens
acaagttactctgcaaaaagcaaaaccaggctaactgaagagacagctgcaaaacacacaatgatataatgtgtttgccgatctgcaaaatcatttgaaagttgctgcttcaacagctg

SEQ ID NO: 347803 - DNA, 462 bp, Homo sapiens
gagacagagtctcactcttttgcccaggctggagtcagtgttgtaatcactgctcacttggcagcctcgacctcctgggctcaagtgatcctcccaccccagcctcccaagtagctgggaccacaggcatgtgccaccattcctgattttttttattttttgcagtgagccaatattgtgccattgcactccagcttgggcaacaagagcgaaactccatctcaaaaataaataaataaataagaaacatttgtttatatgtacacacataatctctgaaagggtaaaagtggcatactggttggccagaagaattgggaggacagtgatgaggaataattttcactctttatcattttatatttttggaattttgaaacatgtaaaattattaccagttcaaaaaataaatttaaacaaaaatcttaactgttcaaattaaagtaagtttgataatttctt

SEQ ID NO: 347804 - DNA, 3442 bp, Homo sapiens
gtggagttagaatttgatgtcagcacccagctgaccatggcttaaacagatgaggctttgttcaaaggctgtcttttcagtggctcagctgtgtcacagtcgatgttttctgcaatctctcaacctttccattgtggtcatgaggagactcctatggctccagccattgcatccacagtgaagactgaaagaagggggaatgggcaggccaacacttaccgctgatggtgtttaaaggaaaaacattcccagaagcctgcagcacatgccccccttagtctcactggccacagatgggtcagggggccacccctaataacaacggggcttagaaacctcgtatttacctttctaacctctgtggtggagacaggtgggagagaaaagtcctgggaagtggatgatggaggcagctagccgtagctgctgcttttctcttcaagctcttgggagaattgcttgtgctccctattcccttggtggatgatggaggcagctagccgtatctgctgcttttctccttcaagctcttgggagaatcgcttgtgctccctattcccttggtggcagctcacacctcagacctgctgtccgcccccactgcttcacagaacccactgcaaccactgtccaaggtactacctctggtgtcgtctctcttcatccccaggactgtgaagcctgctaacctctttgcagagctccatctccttgcattgtggggttccttctaactcttcagggacttctcaacctcccgtcacccttcctaaatgctggggtcctagagtccaccttgtgctccacgccctccccaggtgtcatctacatccctagctttgtgctgctcaccaccaaatcagtctggtgcttctgagatttgggcttcagacccaaacaactgctgtgtgctactgggcaactccccgaggtgtgccgaaagctccccaaacccagcctaccccaaacaaaactcattttccacccagactagtctctgcttccctgatccctttcctggaggctgtttccacttgccatcccatcatggaagccagaaaaccagtcttcttgacctctccccttcctcactccatggagttagaggtcctgttgattttgccatgtaaacatttcggatttgcttacttcatccccactgccaccaacagtgcaggatggccctaagaggagaagtaatgtgctaccaagtggcccagccagagtgtgaaccaaacagtctggtaccaaaaccctattctggatcattcctcctttctgctccaccagcagtttggggcacaggcttgggaatccagacaggaaagctcctcccctctgaagcagtgggaccaaaaatgacagcatggttctagacagctctggaagtcaggcctgtgattgcctcattccctccaccttggcccccaaaatggccagtcctgaaggggtcacagttgatacttctctgagggggcatggggttggctgaggttatagcagccccacagggtggtaagctgggatgaagcaatcaactggaactcaacaagccttgagttctcaaagggggtgtgggaaggttcttatacatcttctatgaagggcagtttatcagtcactaaattacaaatacataaaccctttgtctcaccaaacctgctgggaatgaatcctacatatatatttatatgtgtgcaggctacatggttttcattatgctattgattttaaaagtaaaaatttggaaagaacctccatgtccaccatggggaactggctaagtcatttatggtggaatggtgatcataaaaattcattaaaaatgaagactctatatacagcttgaatattccttatcgaaatgcttgggaccagaagtgtttcagatctttgcatattttctgtttctcatttcagttcacattttctaagcatgatattcctactgatttccttgtagatattttgaaacagataagaaactcctccgtggaaattactgttaactagggaaaagacatgtttttttctgttcataaaagtaatgcgagttctttgtagcaaaacttggaaaatgcataaaagtaaaaaaaaaatgaaaacttgtgtaaaattcctcatactttagccatccatagatggtccttaccattaggattttactaattttccttgcagctttttcttaaaatatacacgtgtgtctacacatacatagtgtacactaaattttacatacacacagaggaatatatatgtgtatagttatcttgtgtttagaaatttggaatcccttctagttgtcttgtaacatgtgcttactctattttgaggattttctctatgaatttcatgtagctctttaaattaactttcaggaggattgtaacaatgtgctctccacccagtattttaccagccttgagttttctcaaagggggcattggaggggttcttatacatttacagtgggaatgtgaattgatacaacttctgtggagggcagtttatcagccactatctaaattacacatacataaaccctttgtctaagcaaacttgctgggaataaatcctacacatatatttgtatgtgtgcagactgtttgtacatggttttcattatgctattgattttaaaagtcagaatttggaaacaaccctccatgtccaccatggggaactggctaagtcatttatggtggaatggagatcatagccttaaaaatgaagactctttatatacaggttgagtatcccttatccaaaatgctcaggaccagaagtgtttcagatttcagatttttgaattagggatcctcaaactatactaatgtgagaaagagctctaagatagttaagtagataaaagcaaggtgtcaaactgtagagtatgtttccatttatgtaaagaagaaacaggctaggcaaggtgactcacgcctgtaatcccagcactttgggaggccgaggcgggtggatcacctgaggtccggagttcaagaccagcctgaccaacacggtgaaaccccatctctactaaaaatacaaaagctgggtgtggtggtgcacacttctaatcccagctactccgtaggctaaggcaggagaatcgcttgaacccaggaagtggaggttgcagtgagccaatattgtgccattgcactccagcttgggcaacaagagcgaaactccatctcaaaaataaataaataaataagaaacatttgtttatatgtacacacataatctctgaaagggtaaaagtggcatactggttggccagaagaattgggaggacagtgatgaggaataattttcactctttatcattttatatttttggaattttgaaacatgtaaaattattaccagttcaaaaaataaatttaaacaaaaatcttaactgttcaaattaaagtaagtttgataatttctt

SEQ ID NO: 347805 - DNA, 3388 bp, Homo sapiens
gtggagttagaatttgatgtcagcacccagctgaccatggcttaaacagatgaggctttgttcaaaggctgtcttttcagtggctcagctgtgtcacagtcgatgttttctgcaatctctcaacctttccattgtggtcatgaggagactcctatggctccagccattgcatccacagtgaagactgaaagaagggggaatgggcaggccaacacttaccgctgatggtgtttaaaggaaaaacattcccagaagcctgcagcacatgccccccttagtctcactggccacagatgggtcagggggccacccctaataacaacggggcttagaaacctcgtatttacctttctaacctctgtggtggagacaggtgggagagcttcaagctcttgggagaattgcttgtgctccctattcccttggtggatgatggaggcagctagccgtatctgctgcttttctccttcaagctcttgggagaatcgcttgtgctccctattcccttggtggcagctcacacctcagacctgctgtccgcccccactgcttcacagaacccactgcaaccactgtccaaggtactacctctggtgtcgtctctcttcatccccaggactgtgaagcctgctaacctctttgcagagctccatctccttgcattgtggggttccttctaactcttcagggacttctcaacctcccgtcacccttcctaaatgctggggtcctagagtccaccttgtgctccacgccctccccaggtgtcatctacatccctagctttgtgctgctcaccaccaaatcagtctggtgcttctgagatttgggcttcagacccaaacaactgctgtgtgctactgggcaactccccgaggtgtgccgaaagctccccaaacccagcctaccccaaacaaaactcattttccacccagactagtctctgcttccctgatccctttcctggaggctgtttccacttgccatcccatcatggaagccagaaaaccagtcttcttgacctctccccttcctcactccatggagttagaggtcctgttgattttgccatgtaaacatttcggatttgcttacttcatccccactgccaccaacagtgcaggatggccctaagaggagaagtaatgtgctaccaagtggcccagccagagtgtgaaccaaacagtctggtaccaaaaccctattctggatcattcctcctttctgctccaccagcagtttggggcacaggcttgggaatccagacaggaaagctcctcccctctgaagcagtgggaccaaaaatgacagcatggttctagacagctctggaagtcaggcctgtgattgcctcattccctccaccttggcccccaaaatggccagtcctgaaggggtcacagttgatacttctctgagggggcatggggttggctgaggttatagcagccccacagggtggtaagctgggatgaagcaatcaactggaactcaacaagccttgagttctcaaagggggtgtgggaaggttcttatacatcttctatgaagggcagtttatcagtcactaaattacaaatacataaaccctttgtctcaccaaacctgctgggaatgaatcctacatatatatttatatgtgtgcaggctacatggttttcattatgctattgattttaaaagtaaaaatttggaaagaacctccatgtccaccatggggaactggctaagtcatttatggtggaatggtgatcataaaaattcattaaaaatgaagactctatatacagcttgaatattccttatcgaaatgcttgggaccagaagtgtttcagatctttgcatattttctgtttctcatttcagttcacattttctaagcatgatattcctactgatttccttgtagatattttgaaacagataagaaactcctccgtggaaattactgttaactagggaaaagacatgtttttttctgttcataaaagtaatgcgagttctttgtagcaaaacttggaaaatgcataaaagtaaaaaaaaaatgaaaacttgtgtaaaattcctcatactttagccatccatagatggtccttaccattaggattttactaattttccttgcagctttttcttaaaatatacacgtgtgtctacacatacatagtgtacactaaattttacatacacacagaggaatatatatgtgtatagttatcttgtgtttagaaatttggaatcccttctagttgtcttgtaacatgtgcttactctattttgaggattttctctatgaatttcatgtagctctttaaattaactttcaggaggattgtaacaatgtgctctccacccagtattttaccagccttgagttttctcaaagggggcattggaggggttcttatacatttacagtgggaatgtgaattgatacaacttctgtggagggcagtttatcagccactatctaaattacacatacataaaccctttgtctaagcaaacttgctgggaataaatcctacacatatatttgtatgtgtgcagactgtttgtacatggttttcattatgctattgattttaaaagtcagaatttggaaacaaccctccatgtccaccatggggaactggctaagtcatttatggtggaatggagatcatagccttaaaaatgaagactctttatatacaggttgagtatcccttatccaaaatgctcaggaccagaagtgtttcagatttcagatttttgaattagggatcctcaaactatactaatgtgagaaagagctctaagatagttaagtagataaaagcaaggtgtcaaactgtagagtatgtttccatttatgtaaagaagaaacaggctaggcaaggtgactcacgcctgtaatcccagcactttgggaggccgaggcgggtggatcacctgaggtccggagttcaagaccagcctgaccaacacggtgaaaccccatctctactaaaaatacaaaagctgggtgtggtggtgcacacttctaatcccagctactccgtaggctaaggcaggagaatcgcttgaacccaggaagtggaggttgcagtgagccaatattgtgccattgcactccagcttgggcaacaagagcgaaactccatctcaaaaataaataaataaataagaaacatttgtttatatgtacacacataatctctgaaagggtaaaagtggcatactggttggccagaagaattgggaggacagtgatgaggaataattttcactctttatcattttatatttttggaattttgaaacatgtaaaattattaccagttcaaaaaataaatttaaacaaaaatcttaactgttcaaattaaagtaagtttgataatttctt

SEQ ID NO: 347806 - DNA, 3680 bp, Homo sapiens
  misc_feature (3680)..(3680): n is a, c, g, or t
gtggagttagaatttgatgtcagcacccagctgaccatggcttaaacagatgaggctttgttcaaaggctgtcttttcagtggctcagctgtgtcacagtcgatgttttctgcaatctctcaacctttccattgtggtcatgaggagactcctatggctccagccattgcatccacagtgaagactgaaagaagggggaatgggcaggccaacacttaccgctgatggtgtttaaaggaaaaacattcccagaagcctgcagcacatgccccccttagtctcactggccacagatgggtcagggggccacccctaataacaacggggcttagaaacctcgtatttacctttctaacctctgtggtggagacaggtgggagagaaaagtcctgggaagtggatgatggaggcagctagccgtagctgctgcttttctcttcaagctcttgggagaattgcttgtgctccctattcccttggtggatgatggaggcagctagccgtatctgctgcttttctccttcaagctcttgggagaatcgcttgtgctccctattcccttggtggcagctcacacctcagacctgctgtccgcccccactgcttcacagaacccactgcaaccactgtccaaggtactacctctggtgtcgtctctcttcatccccaggactgtgaagcctgctaacctctttgcagagctccatctccttgcattgtggggttccttctaactcttcagggacttctcaacctcccgtcacccttcctaaatgctggggtcctagagtccaccttgtgctccacgccctccccaggtgtcatctacatccctagctttgtgctgctcaccaccaaatcagtctggtgcttctgagatttgggcttcagacccaaacaactgctgtgtgctactgggcaactccccgaggtgtgccgaaagctccccaaacccagcctaccccaaacaaaactcattttccacccagactagtctctgcttccctgatccctttcctggaggctgtttccacttgccatcccatcatggaagccagaaaaccagtcttcttgacctctccccttcctcactccatggagttagaggtcctgttgattttgccatgtaaacatttcggatttgcttacttcatccccactgccaccaacagtgcaggatggccctaagaggagaagtaatgtgctaccaagtggcccagccagagtgtgaaccaaacagtctggtaccaaaaccctattctggatcattcctcctttctgctccaccagcagtttggggcacaggcttgggaatccagacaggaaagctcctcccctctgaagcagtgggaccaaaaatgacagcatggttctagacagctctggaagtcaggcctgtgattgcctcattccctccaccttggcccccaaaatggccagtcctgaaggggtcacagttgatacttctctgagggggcatggggttggctgaggttatagcagccccacagggtggtaagctgggatgaagcaatcaactggaactcaacaagccttgagttctcaaagggggtgtgggaaggttcttatacatcttctatgaagggcagtttatcagtcactaaattacaaatacataaaccctttgtctcaccaaacctgctgggaatgaatcctacatatatatttatatgtgtgcaggctacatggttttcattatgctattgattttaaaagtaaaaatttggaaagaacctccatgtccaccatggggaactggctaagtcatttatggtggaatggtgatcataaaaattcattaaaaatgaagactctatatacagcttgaatattccttatcgaaatgcttgggaccagaagtgtttcagatctttgcatattttctgtttctcatttcagttcacattttctaagcatgatattcctactgatttccttgtagatattttgaaacagataagaaactcctccgtggaaattactgttaactagggaaaagacatgtttttttctgttcataaaagtaatgcgagttctttgtagcaaaacttggaaaatgcataaaagtaaaaaaaaaatgaaaacttgtgtaaaattcctcatactttagccatccatagatggtccttaccattaggattttactaattttccttgcagctttttcttaaaatatacacgtgtgtctacacatacatagtgtacactaaattttacatacacacagaggaatatatatgtgtatagttatcttgtgtttagaaatttggaatcccttctagttgtcttgtaacatgtgcttactctattttgaggattttctctatgaatttcatgtagctctttaaattaactttcaggaggattgtaacaatgtgctctccacccagtattttaccagccttgagttttctcaaagggggcattggaggggttcttatacatttacagtgggaatgtgaattgatacaacttctgtggagggcagtttatcagccactatctaaattacacatacataaaccctttgtctaagcaaacttgctgggaataaatcctacacatatatttgtatgtgtgcagactgtttgtacatggttttcattatgctattgattttaaaagtcagaatttggaaacaaccctccatgtccaccatggggaactggctaagtcatttatggtggaatggagatcatagccttaaaaatgaagactctttatatacaggttgagtatcccttatccaaaatgctcaggaccagaagtgtttcagatttcagatttttgaattagggatcctcaaactatactaatgtgagaaagagctctaagatagttaagtagataaaagcaaggtgtcaaactgtagagtatgtttccatttatgtaaagaagaaacaggctaggcaaggtgactcacgcctgtaatcccagcactttgggaggccgaggcgggtggatcacctgaggtccggagttcaagaccagcctgaccaacacggtgaaaccccatctctactaaaaatacaaaagctgggtgtggtggtgcacacttctaatcccagctactccgtaggctaaggcaggagaatcgcttgaacccaggaagtggaggttgcagtgagccaatattgtgccattgcactccagcttgggcaacaagagcgaaactccatctcaaaaataaataaataaataagaaacatttgtttatatgtacacacataatctctgaaagggtaaaagtggcatactggttggccagaagaattgggaggacagtgatgaggaataattttcactctttatcattttatatttttggaattttgaaacatgtaaaattattaccagttcaaaaaataaatttaaacaaaaaaaaaaaaaaaaaaaaaaaaaaactgtggtggggccggccgcggacccgagaaagaaggtttctgaacccttccgtgggcgccgcgggcgccgcagtaggtcattgaccattggccaacacgcggtggccaaggaaacccgggcctggatctaggggttggttcttccaccataaaaaaaccccgcgcggccccggcgttcggaccaatcccagagcggtcggagctaccggtctcacacgggtccacgcccgtagccccccccccgcggtgcggggn

SEQ ID NO: 347807 - DNA, 1986 bp, Homo sapiens
  misc_feature (1937)..(1937): n is a, c, g, or t
gtggagttagaatttgatgtcagcacccagctgaccatggcttaaacagatgaggctttgttcaaaggctgtcttttcagtggctcagctgtgtcacagtcgatgttttctgcaatctctcaacctttccattgtggtcatgaggagactcctatggctccagccattgcatccacagtgaagactgaaagaagggggaatgggcaggccaacacttaccgctgatggtgtttaaaggaaaaacattcccagaagcctgcagcacatgccccccttagtctcactggccacagatgggtcagggggccacccctaataacaacggggcttagaaacctcgtatttacctttctaacctctgtggtggagacaggtgggagagaaaagtcctgggaagtggatgatggaggcagctagccgtagctgctgcttttctcttcaagctcttgggagaattgcttgtgctccctattcccttggtggatgatggaggcagctagccgtatctgctgcttttctccttcaagctcttgggagaatcgcttgtgctccctattcccttggtggcagctcacacctcagacctgctgtccgcccccactgcttcacagaacccactgcaaccactgtccaaggtactacctctggtgtcgtctctcttcatccccaggactgtgaagcctgctaacctctttgcagagctccatctccttgcattgtggggttccttctaactcttcagggacttctcaacctcccgtcacccttcctaaatgctggggtcctagagtccaccttgtgctccacgccctccccaggtgtcatctacatccctagctttgtgctgctcaccaccaaatcagtctggtgcttctgagatttgggcttcagacccaaacaactgctgtgtgctactgggcaactccccgaggtgtgccgaaagctccccaaacccagcctaccccaaacaaaactcattttccacccagactagtctctgcttccctgatccctttcctggaggctgtttccacttgccatcccatcatggaagccagaaaaccagtcttcttgacctctccccttcctcactccatggagttagaggtcctgttgattttgccatgtaaacatttcggatttgcttacttcatccccactgccaccaacagtgcaggatggccctaagaggagaagtaatgtgctaccaagtggcccagccagagtgtgaaccaaacagtctggtaccaaaaccctattctggatcattcctcctttctgctccaccagcagtttggggcacaggcttgggaatccagacaggaaagctcctcccctctgaagcagtgggaccaaaaatgacagcatggttctagacagctctggaagtcaggcctgtgattgcctcattccctccaccttggcccccaaaatggccagtcctgaaggggtcacagttgatacttctctgagggggcatggggttggctgaggttatagcagccccacagggtggtaagctgggatgaagcaatcaactggaactcaacaagccttgagttctcaaagggggtgtgggaaggttcttatacatcttctatgaagggcagtttatcagtcactaaattacaaatacataaaccctttgtctcaccaaacctgctgggaatgaatcctacatatatatttatatgtgtgcaggctacatggttttcattatgctattgattttaaaagtaaaaatttggaaagaacctccatgtccaccatggggaactggctaagtcatttatggtggaatggtgatcataaaaattcattaaaaatgaagactctatatacagcttgaatattccttatcgaaatgcttgggaccagaagtgtttcagatctttgcatattttctgtttcttcatccttgggacgcagtttctcantccttgggaagctcccaaggaatgaggaatgtggggtaccggagctcga

SEQ ID NO: 347808 - DNA, 325 bp, Homo sapiens
tttattggaatacagcctcattcattcatttacatattatctatgactgttttctctataatggcagagtggagcaggaaggacagtggctcagtatccagtaaagatgaaaatatttactatttctgtctttatcaaaaaagaaggaaagaaagaatgaaagaaaggaaggaaggaaagggaagggaaggaaggaaggaaggaaggggaagaaagaaagaaaggaaggaaagaaagaaagaaagaaagaaagaaagaaagaaagaaagaaagaaagaaagaaagaaagaaagaagaaagaaagagagagagaaagaaaaaaaga

SEQ ID NO: 347809 - DNA, 271 bp, Homo sapiens
agtttgaatggtaacgtttaaatgtctgctgctacggaagcaagaaaattcactccctgtgtggctgctgattctgagaagtgttctgtttaagtccagcccatcttctctccaccattccacacacacacagccacatcatccctgcttcacccggcataccaggaggaggcaggaaggactttggaaaacttttatactgaatgcagaacttggtactccagatcaaactgcagaagtaaatgataatccttccccttcaaggccctca

SEQ ID NO: 347810 - DNA, 1519 bp, Homo sapiens
tgaaagaactgtcttgggccacacataaaatacactaacgatatttgatgagcttaaaaaaaaacgcaaaaaaaaaaactcacagtgttttaagaaagtttacaaatttgtgttgggcagtattcaaagccaccacaagctgcaggttggacaagcgtgtgctacacatttaactcacctgagtttcacaaacactcagcagagggcgtggtgagggaagtttcaacaatgttcctccacttactggaatcaaaaaaagtgttttgagaaaagaattatttcctcctgccagtcctgccctagacatccatttgtaaagaaactttcaacatttctcaagtccaagaagtggacggtcagtgtttgttttgcatggaacaaagaaagcttccctaacatcctaagatgtacaattctgattatacatacagagtttctgggtgtgaaaacagtattttttcattcccggttttttggctgtgctccaagatttctttttttaccaaataatctttagtgagatcctttcttgggaagaagtagagggtttttcaaagacttttatgaaaatatttgcacatacacatagatatacattttagcatttcatgtaatgataccaagtgttctttgaggttctaaaaagaaaaataatctaaaattacctaatcctatcaaaatttccaatagaggctatcactaccatatctaaatcacataatcgtttttgctggcaaagagaaaggaaaattaacatgctctgtgcacttactatatgctaggcatttaacatgtattttaaactaaatcttcctaacaaccctaataagtgggtaatattattgtctaaatattacagatgagaaaaatggggcactgagaggctagtaaggtgttaacttagggcaccaaatagtaaatggcaaaaccaggatgtgaaccctagcaatctgactgcaacatttgaactactctgtgttaatactgacataggagttaaaaagaaattacttgggtagatagggtacgggagtcctcagtaaggtttcccttttaatgaaaagcagccccaaatcactttcctaacaaagagcagcctataaaatagagctgcagacatatatgccggcagttgtgccaatcaggttcaaaatggcggctccatcttcccttctctgccagccacgtgtactgtaaagggcagccaaaatgacgccggtcaaggggaaagtacatttgcatcctaagattagggtgggtcttcctacaattgtagattctaatttactcccctaaactactgttttaaaacaaattaaaactgatttatatactggagataaccaggtacagtctgaagctccttagaacagaacaaatatttgcatgttgggaaataaaatatatttttttagaagacaaatggctaattaaggttcaaaactaattcacattaaagaatcagaatattctagtcaaaattttaaattaaaaattgctttctatagtaggtagggga

SEQ ID NO: 347811 - DNA, 617 bp, Homo sapiens
ggaaaacgccttacttgtctgtctgccgccaaagaaaaaatatagctttgtgataagagcatggggcctggaatcagaccacctagcatttaatcctggctttataattttctatgtaatatgttttccagtgaattacttagattgtatgtccttatgtcaattacttttctatctgtaaaactgaggtactgtacatcgtatagattgtgagagttaaatgagctataacaggtgaagtgcttagaactgtatctagcatataagtactcaatacatgttagttgtcattcatattgatattactgcctggtgcttaaataagtttttttgaattaaacttaagctaaaatttagtgtaggataactaaggtacttatttggaatggggggaagttattatgcttggaacttggtttgatggcttgtactatgtgtcagtcatttaacttaccatacttaatgtacacaacacttcttgaagtaagaattatcattccttattttctggataagaaaacagactctcagactcttcagggttcttccttcctgttaaatagtaaagttgcagtgtaactctagatttgtttaactctaaagcctgtttcttcaca

SEQ ID NO: 347812 - DNA, 251 bp, Homo sapiens
tcgacagcgtctatgtggggccaggcacatggcaggcctcagcatgtatctgttgaatgagagagcttgggaaagaagggtcagaccagatcataaagggccctaaaggactccctacagttaaattttatattgcagggaatagggaaccattgagagttataatgaaatttgagcttttttaaaaaaaaatcacgcagcctgcagtatgctgaaaggctcagagggaggcaggctgcaggcaggagacc

SEQ ID NO: 347813 - DNA, 473 bp, Homo sapiens
ccgggtgatctgagatcccgataactggtaggagactattcataacaattaataaagaagtttgtgatggttaataatgagtgtcagcctgattggattgaaggatacaaagtattgatcctgggtgtgtctgtgagggtgttgagtcagtgggctgctattccttgaaaatggcaagtgagtcatggcagtactcgggaaaagtacatactacatggaaatgactgcactccagcctgggtgacagagcaagaccctccctgtctctaacaataaaaatagtgctcgcttcagcagcacataaactaaaattggcatgatacagagattagcacaggccctgcgcaaggatgacatgcaaattcgtgaagcagttgcatatttttaataaatggcgttgggaaaactggatattcatatgcacattgagaacctcaaggaggagctggcctacctgaagaagaaccacgagg

SEQ ID NO: 347814 - DNA, 2432 bp, Homo sapiens
tgagtgactcagccgctgagcaagaaacctctgaactgttcactaatacagtcaggtagaggttgagactccactgaataaactctaggttcccatttctttcagccagatcctcccagggaatcactacaggctggttagccaaaaagtcctgattttctgctcaatagaggtccttactggaaggcagcatgtccaatgttaccttgagaaaaatgtctcccacaggaaatgagatgaagagcaccactcagggaaccacacggaagcagcaggattttcacgaggtgaacaaaagaagaactttcttacaggataacagttggataaagaaacgccctgaagaagaaaaagatgaaaattacggtagggtggtgctcaaccgacataattcccatgatgcattggacaggaaagtaaatgagagagatgtgccaaaagctacaattagtcggtacagttctgatgacactttggacaggatctcagacagaaatgatgctgctaaaacatataaggccaataccttggataaccaactaaccaataggagcatgtccatgtttagatcactggaagtaacaaagttgcaacctggcggttcattgaatgccaacacctccaacaccatagcatccacttctgctactactcctgtaaagaagaagaggcagtcctggtttccaccgccccctccaggttacaatgcctcttcgagcacaggaaccaggagacgggaaccaggtgttcaccctccaatacctccaaagcccagttctcctgtttcttctcctaaccagctgagacaggataataggcagatacatccacctaaaccaggtgtatatacagaaaccaacagatctgctgaaagaaatataagtgaagaattggataatctcatcaaaatgaacaaaagcttgaataggaatcaaggtcttgatagtctcttcagagcaaatccaaaggtagaagaaagagagaaaagagccaaaagccttgaaagtctcatctatatgagtacccggacagataaagatggcaaaggaatccaaagccttggaagtccgattaaagttaatcaaaggactgacaaaaatgagaaaggaagacaaaatctcgaatctgttgctaaagtgaatgccaggatgaataaaacgagcagaagaagtgaagaccttgataatgctactgaagtaaatcccaaaggacatgaaaataccactggaaaaaaagaccttgatgggcttattaaagtggatcctgaaacaaataaaaatattacgaggggccagagccttgataatctcatcaaagtgacccctgaagtaaagagaagtaaccaaggttccaaagaccttaataacttcatcaaagtgtatccaggaacagaaaaaagtactgaagggggccaaagtctcgacagcctcattaaagtgactcctgaaagaaacagaactaaccaagggaaccaagacttggaaaatcttatcaaagtgatcccttcagcaaacaaaagcagtgaacaaggtcttgatgaacatattaatgtcagccccaaagctgtcaaaaacactgatggaaaacaagatcttgataaactcatcaaggtgaatcctgaaattttcacaaacaaccaaagaaaccaagatcttgctaacctcatcaaagtaaatcctgcagtaatcagaaacaatcagagccaagacttggacaatcttattaaagtgaaaccttcagctcttagaaacactaatcgagaccagaacctggaaaatttaattgaagtaaattctcatgtgtctgaaaacaagaatggaagctctaacactggagccaagcaggcaggaccacaggatactgttgtgtacacaaggacatatgtggagaatagtaaatcacccaaggatggatatcaggagaatatctctggaaaatacatacaaactgtttattcaacttctgataggtctgtcattgaaagagatatgtgcacttactgccgaaaacccttgggtgtagaaactaaaatgattttagatgaattacaaatttgctgccattctacttgctttaagtgtgaaatatgcaagcagcctttggaaaatctacaagcgggtgatagtatttggatttatagacagacaatacactgtgaaccttgctactctaaaattatggcaaagtggattccataactctggcacaaggaaatcaagatgaaaagcactcattaaggaattaaagttacaagttttatcttaataatatgtaatctagaaaagctttcacattgaagatcaactcttgtacaaaattaacaattctgttattgcataagtaatctaattgtcttcaataaggtcacacacataaaaagagccatctggtctctggctagagttagcaataaaaagttcaaatggttccag

SEQ ID NO: 347815 - DNA, 514 bp, Homo sapiens
tagagcccacgaggcccacaaaatatacgtgttccttgattcgatatatatgtcttttattttactctatgattttttttttttcatggagaatgtttattgcatttgacctttcaagataccacacaatttcatttcagtatgcagccttttatgtgaatttctttgtgttttcagagccaaaagccttgaaagtctcatctatatgagtacccggacagataaagatggcaaagggtaagattttattaagacagaccattttgattgagtcccagatggtgtactattttctggaggagacctcctgcttagtacaagggtcaggcaggctggtggaataagccttagactggggtccagggatagtgtgtatcttggtgctggttttgccaccaacatcaatctgggtgaccctgggcaagttgtgtaatttctggagagctctgtttcctcattccataaaatgaaggatatgacctagatgatctcccagttccccttcatatctaaa

SEQ ID NO: 347816 - DNA, 632 bp, Homo sapiens
  misc_feature (554)..(554): n is a, c, g, or t
  misc_feature (561)..(561): n is a, c, g, or t
gaacaaatgttttctagaagctacgtgtgcaagtacattgcacaatgctgtaattaatcagtgtacctatgtgtggactcaattaaaatgaagaattggataatctcatcaaaatgaacaaaagcttgaatagagccaaaagccttgaaagtctcatctatatgagtacccggacagataaagatggcaaaggaatccaaagccttggaagtccgattaaagttaatcaaaggactgacaaaaatgagaaagggggccagagccttgataatctcatcaaagtgacccctgaagtaaagagaagtaaccaaggttccaaagaccttaataacttcatcaaagtgtatccaggaacagaaaaaagtactgaagggggccaaagtctcgacagcctcattaaagtgactcctgaaagaaacagaactaaccaagggaaccaagacttggaaaatcttatcaaagtgatcccttcagcaaacaaaagcagtgaacaaggtcttgatgaacatattaatgtcagccccaaagctgtcaaaaacactgatggaaaacangatcttngataactcattaagggtgaatccttgaattctgcagtaatcagaaacaatcagagccaagacttggacatt

SEQ ID NO: 347817 - DNA, 3582 bp, Homo sapiens
acctttccctccacacctcccggcaagctgagggagccgcctccggccttggccagcccagaaagtggctcccacagtgcagcagcgggttgaagggctcctcaagcgcggccagagtgggcgccaaggctgaggaggcgccaagagcgagcaagggctgtgagggctgccagcatgctgttacctctcactgggattacaggcatgagccaccgcgcccggcctgaggtccttactggaaggcagcatgtccaatgttaccttgagaaaaatgtctcccacaggaaatgagatgaagagcaccactcagggaaccacacggaagcagcaggattttcacgaggtgaacaaaagaagaactttcttacaggataacagttggataaagaaacgccctgaagaagaaaaagatgaaaattacggtagggtggtgctcaaccgacataattcccatgatgcattggacaggaaagtaaatgagagagatgtgccaaaagctacaattagtcggtacagttctgatgacactttggacaggatctcagacagaaatgatgctgctaaaacatataaggccaataccttggataaccaactaaccaataggagcatgtccatgtttagatcactggaagtaacaaagttgcaacctggcggttcattgaatgccaacacctccaacaccatagcatccacttctgctactactcctgtaaagaagaagaggcagtcctggtttccaccgccccctccaggttacaatgcctcttcgagcacaggaaccaggagacgggaaccaggtgttcaccctccaatacctccaaagcccagttctcctgtttcttctcctaaccagctgagacaggataataggcagatacatccacctaaaccaggtgtatatacagaaaccaacagatctgctgaaagaaatataagtgaagaattggataatctcatcaaaatgaacaaaagcttgaataggaatcaaggtcttgatagtctcttcagagcaaatccaaaggtagaagaaagagagaaaagagccaaaagccttgaaagtctcatctatatgagtacccggacagataaagatggcaaaggaatccaaagccttggaagtccgattaaagttaatcaaaggactgacaaaaatgagaaaggaagtgaagaccttgataatgctactgaagtaaatcccaaaggacatgaaaataccactgggggccagagccttgataatctcatcaaagtgacccctgaagtaaagagaagtaaccaaggttccaaagaccttaataacttcatcaaagtgtatccaggaacagaaaaaagtactgaagggggccaaagtctcgacagcctcattaaagtgactcctgaaagaaacagaactaaccaagggaaccaagacttggaaaatcttatcaaagtgatcccttcagcaaacaaaagcagtgaacaaggtcttgatgaacatattaatgtcagccccaaagctgtcaaaaacactgatggaaaacaagatcttgataaactcatcaaggtgaatcctgaaattttcacaaacaaccaaagaaaccaagatcttgctaacctcatcaaagtaaatcctgcagtaatcagaaacaatcagagccaagacttggacaatcttattaaagtgaaaccttcagctcttagaaacactaatcgagaccagaacctggaaaatttaattgaagtaaattctcatgtgtctgaaaacaagaatggaagctctaacactggagccaagcaggcaggaccacaggatactgttgtgtacacaaggacatatgtggagaatagtaaatcacccaaggatggatatcaggagaatatctctggaaaatacatacaaactgtttattcaacttctgataggtctgtcattgaaagagatatgtgcacttactgccgaaaacccttgggtgtagaaactaaaatgattttagatgaattacaaatttgctgccattctacttgctttaagtgtgaaatatgcaagcagcctttggaaaatctacaagcgggtgatagtatttggatttatagacagacaatacactgtgaaccttgctactctaaaattatggcaaagtggattccataactctggcacaaggaaatcaagatgaaaagcactcattaaggaattaaagttacaagttttatcttaataatatgtaatctagaaaagctttcacattgaagatcaactcttgtacaaaattaacaattctgttattgcataagtaatctaattgtcttcaataaggtcacacacataaaaagagccatctggtctctggctagagttagcaataaaaagttcaaatggttccagattccagtgtcaaaggagtgatgcattacactccagccaggtccatccctgctccgtatgttggctgtgagtggtggtttccatttaaaccaagtttctcatttcttcacctttttttctctaagaatttggattcgtagacattgacatcccgaagaactgtcaaggaagcaagatatgctttcttcatctgcaaaagaaatactaacaacaattttcttatacagtttggcagaaagatgttaacataaaaagtttatatacctcaaaaatcactaaactttccagatctctgtcctattatttgtaacacaaggggcattggataaaatgatttctagggttccttttgcttcccaaattctctgattctaaagcagtttttagaatcattagctctttggaaacatatatgcatacatgtttgttaagcctattgaactaggtaggacatataaacaatttaattttagtgtcattgtttaatcacagacttagtgtttgaaaactgtgttttaaaaacagaaacagattgatgggtaacaggtaaaatatgacatgtatagcttacatgttattatttgttaaattttctttgtatacatttcaaaatctgggtatacttataatccattagaagtaatggttatggactaaaaagatatgttctttagtatgttatatatactcatattacatagcagtatgtttacaaaaggcttataaaaataaaatgaactatcagttacatagaatctttatgtgaagtgtttgtaaatataattcactaacatcaattttgtcaattatagtgatcacaatctattatattctctgcagcactaatttatttttaactgctcaagctatagattttatttttaagaaacttttctgaagaaattgaacatgtaataatcatgtgaggaactagtataattaacattgggaaattgaacttctaaaccatttaattgcatatagcaactgtttctagaaaaaagatgtatggaacatggaagtgggggcagaattctagagaagttttaaggcagttgtggaaaactgctataaactagggagattaaaagattatcatgtattttccaaatgttaatacattcaaagaattattcttctgtgtaataatttcatgcctctgttcctcttaaagcctggttcacaaagtgttaaacataaaatgcttatcaaaa

SEQ ID NO: 347818 - DNA, 3321 bp, Homo sapiens
tgagtgactcagccgctgagcaagaaacctctgaactgttcactaatacagtcaggtagaggttgagactccactgaataaactctaggttcccatttctttcagccagatcctcccagggaatcactacaggctggttagccaaaaagtcctgattttctgctcaatagagctcaaccgacataattcccatgatgcattggacaggaaagtaaatgagagagatgtgccaaaagctacaattagtcggtacagttctgatgacactttggacaggatctcagacagaaatgatgctgctaaaacatataaggccaataccttggataaccaactaaccaataggagcatgtccatgtttagatcactggaagtaacaaagttgcaacctggcggttcattgaatgccaacacctccaacaccatagcatccacttctgctactactcctgtaaagaagaagaggcagtcctggtttccaccgccccctccaggttacaatgcctcttcgagcacaggaaccaggagacgggaaccaggtgttcaccctccaatacctccaaagcccagttctcctgtttcttctcctaaccagctgagacaggataataggcagatacatccacctaaaccaggtgtatatacagaaaccaacagatctgctgaaagaaatataagtgaagaattggataatctcatcaaaatgaacaaaagcttgaataggaatcaaggtcttgatagtctcttcagagcaaatccaaaggtagaagaaagagagaaaagagccaaaagccttgaaagtctcatctatatgagtacccggacagataaagatggcaaaggaatccaaagccttggaagtccgattaaagttaatcaaaggactgacaaaaatgagaaaggaagtgaagaccttgataatgctactgaagtaaatcccaaaggacatgaaaataccactgggggccagagccttgataatctcatcaaagtgacccctgaagtaaagagaagtaaccaaggttccaaagaccttaataacttcatcaaagtgtatccaggaacagaaaaaagtactgaagggggccaaagtctcgacagcctcattaaagtgactcctgaaagaaacagaactaaccaagggaaccaagacttggaaaatcttatcaaagtgatcccttcagcaaacaaaagcagtgaacaaggtcttgatgaacatattaatgtcagccccaaagctgtcaaaaacactgatggaaaacaagatcttgataaactcatcaaggtgaatcctgaaattttcacaaacaaccaaagaaaccaagatcttgctaacctcatcaaagtaaatcctgcagtaatcagaaacaatcagagccaagacttggacaatcttattaaagtgaaaccttcagctcttagaaacactaatcgagaccagaacctggaaaatttaattgaagtaaattctcatgtgtctgaaaacaagaatggaagctctaacactggagccaagcaggcaggaccacaggatactgttgtgtacacaaggacatatgtggagaatagtaaatcacccaaggatggatatcaggagaatatctctggaaaatacatacaaactgtttattcaacttctgataggtctgtcattgaaagagatatgtgcacttactgccgaaaacccttgggtgtagaaactaaaatgattttagatgaattacaaatttgctgccattctacttgctttaagtgtgaaatatgcaagcagcctttggaaaatctacaagcgggtgatagtatttggatttatagacagacaatacactgtgaaccttgctactctaaaattatggcaaagtggattccataactctggcacaaggaaatcaagatgaaaagcactcattaaggaattaaagttacaagttttatcttaataatatgtaatctagaaaagctttcacattgaagatcaactcttgtacaaaattaacaattctgttattgcataagtaatctaattgtcttcaataaggtcacacacataaaaagagccatctggtctctggctagagttagcaataaaaagttcaaatggttccagattccagtgtcaaaggagtgatgcattacactccagccaggtccatccctgctccgtatgttggctgtgagtggtggtttccatttaaaccaagtttctcatttcttcacctttttttctctaagaatttggattcgtagacattgacatcccgaagaactgtcaaggaagcaagatatgctttcttcatctgcaaaagaaatactaacaacaattttcttatacagtttggcagaaagatgttaacataaaaagtttatatacctcaaaaatcactaaactttccagatctctgtcctattatttgtaacacaaggggcattggataaaatgatttctagggttccttttgcttcccaaattctctgattctaaagcagtttttagaatcattagctctttggaaacatatatgcatacatgtttgttaagcctattgaactaggtaggacatataaacaatttaattttagtgtcattgtttaatcacagacttagtgtttgaaaactgtgttttaaaaacagaaacagattgatgggtaacaggtaaaatatgacatgtatagcttacatgttattatttgttaaattttctttgtatacatttcaaaatctgggtatacttataatccattagaagtaatggttatggactaaaaagatatgttctttagtatgttatatatactcatattacatagcagtatgtttacaaaaggcttataaaaataaaatgaactatcagttacatagaatctttatgtgaagtgtttgtaaatataattcactaacatcaattttgtcaattatagtgatcacaatctattatattctctgcagcactaatttatttttaactgctcaagctatagattttatttttaagaaacttttctgaagaaattgaacatgtaataatcatgtgaggaactagtataattaacattgggaaattgaacttctaaaccatttaattgcatatagcaactgtttctagaaaaaagatgtatggaacatggaagtgggggcagaattctagagaagttttaaggcagttgtggaaaactgctataaactagggagattaaaagattatcatgtattttccaaatgttaatacattcaaagaattattcttctgtgtaataatttcatgcctctgttcctcttaaagcctggttcacaaagtgttaaacataaaatgcttatcaaaa

SEQ ID NO: 347819 - DNA, 1463 bp, Homo sapiens
  misc_feature (1400)..(1400): n is a, c, g, or t
  misc_feature (1404)..(1404): n is a, c, g, or t
tgagtgactcagccgctgagcaagaaacctctgaactgttcactaatacagtcaggtagaggttgagactccactgaataaactctaggttcccatttctttcagccagatcctcccagggaatcactacaggctggttagccaaaaagtcctgattttctgctcaatagaggtccttactggaaggcagcatgtccaatgttaccttgagaaaaatgtctcccacaggaaatgagatgaagagcaccactcagggaaccacacggaagcagcaggattttcacgaggtgaacaaaagaagaactttcttacaggataacagttggataaagaaacgccctgaagaagaaaaagatgaaaattacggtagggtggtgctcaaccgacataattcccatgatgcattggacaggaaagtaaatgagagagatgtgccaaaagctacaattagtcggtacagttctgatgacactttggacaggagcatgtccatgtttagatcactggaagtaacaaagttgcaacctggcggttcattgaatgccaacacctccaacaccatagcatccacttctgctactactcctgtaaagaagaagaggcagtcctggtttccaccgccccctccaggttacaatgcctcttcgagcacaggaaccaggagacgggaaccaggtgttcaccctccaatacctccaaagcccagttctcctgtttcttctcctaaccagctgagacaggataataggcagatacatccacctaaaccaggtgtatatacagaaaccaacagatctgctgaaagaaatataagtgaagaattggataatctcatcaaaatgaacaaaagcttgaataggaatcaaggtcttgatagtctcttcagagcaaatccaaaggtagaagaaagagagaaaagagccaaaagccttgaaagtctcatctatatgagtacccggacagataaagatggcaaaggaatccaaagccttggaagtccgattaaagttaatcaaaggactgacaaaaatgagaaaggaagacaaaatctcgaatctgttgctaaagtgaatgccaggatgaataaaacgagcagaagaagtgaagaccttgataatgctactgaagtaaatcccaaaggacatgaaaataccactgggggccagagccttgataatctcatcaaagtgacccctgaagtaaagagaagtaaccaaggttccaaagaccttaataacttcatcaaagtgtatccaggaacagaaaaaagtactgaagggggccaaagtctcgacagcctcattaaagtgactcctgaaagaaacagaactaaccaagggaaccaagacttggaaaatcttatcaaagtgatcccttcagcaaacaaaagcagtgaaaangtcntgatgaactattagtgacagccccaacctgtcaaaacattatagaaccaaacctgataa

SEQ ID NO: 347820 - DNA, 435 bp, Homo sapiens
cagatttataaccttaatgatattaccaaaagaacttcaaaattaacctgctctcattttattttttgatttaaagaaaccaagatcttgctaacctcatcaaagtaaatcctgcagtaatcagaaacaatcagaggtatatatagaagcagtcaattcatgtttttatttgtctgttgccctggatgaagtggatttataatgttgctttattgacctagcacaaccccaaaatctattaccaatctgaacttttttctctctctcttttaaacagccaagacttggacaatcttattaaagtgaaaccttcagctcttagaaacactaatcggtaaatgaccttgactatcttgacatgtttacaagtttctagggtaggaacttctccctccctccttgcctccctgcctccctcccttcctcccttactcc

SEQ ID NO: 347821 - DNA, 2492 bp, Homo sapiens
tgagtgactcagccgctgagcaagaaacctctgaactgttcactaatacagtcaggtagaggttgagactccactgaataaactctaggttcccatttctttcagccagatcctcccagggaatcactacaggctggttagccaaaaagtcctgattttctgctcaatagaggtccttactggaaggcagcatgtccaatgttaccttgagaaaaatgtctcccacaggaaatgagatgaagagcaccactcagggaaccacacggaagcagcaggattttcacgaggtgaacaaaagaagaactttcttacaggataacagttggataaagaaacgccctgaagaagaaaaagatgaaaattacggtagggtggtgctcaaccgacataattcccatgatgcattggacaggaaagtaaatgagagagatgtgccaaaagctacaattagtcggtacagttctgatgacactttggacaggatctcagacagaaatgatgctgctaaaacatataaggccaataccttggataaccaactaaccaataggagcatgtccatgtttagatcactggaagtaacaaagttgcaacctggcggttcattgaatgccaacacctccaacaccatagcatccacttctgctactactcctgtaaagaagaagaggcagtcctggtttccaccgccccctccaggttacaatgcctcttcgagcacaggaaccaggagacgggaaccaggtgttcaccctccaatacctccaaagcccagttctcctgtttcttctcctaaccagctgagacaggataataggcagatacatccacctaaaccaggtgtatatacagaaaccaacagatctgctgaaagaaatataaggagtcaggatcttgataacatcgtcaaagtggccacttcacttcagagaagtgacaaaggtgaagaattggataatctcatcaaaatgaacaaaagcttgaataggaatcaaggtcttgatagtctcttcagagcaaatccaaaggtagaagaaagagagaaaagagccaaaagccttgaaagtctcatctatatgagtacccggacagataaagatggcaaaggaatccaaagccttggaagtccgattaaagttaatcaaaggactgacaaaaatgagaaaggaagacaaaatctcgaatctgttgctaaagtgaatgccaggatgaataaaacgagcagaagaagtgaagaccttgataatgctactgaagtaaatcccaaaggacatgaaaataccactggaaaaaaagaccttgatgggcttattaaagtggatcctgaaacaaataaaaatattacgaggggccagagccttgataatctcatcaaagtgacccctgaagtaaagagaagtaaccaaggttccaaagaccttaataacttcatcaaagtgtatccaggaacagaaaaaagtactgaagggggccaaagtctcgacagcctcattaaagtgactcctgaaagaaacagaactaaccaagggaaccaagacttggaaaatcttatcaaagtgatcccttcagcaaacaaaagcagtgaacaaggtcttgatgaacatattaatgtcagccccaaagctgtcaaaaacactgatggaaaacaagatcttgataaactcatcaaggtgaatcctgaaattttcacaaacaaccaaagaaaccaagatcttgctaacctcatcaaagtaaatcctgcagtaatcagaaacaatcagagccaagacttggacaatcttattaaagtgaaaccttcagctcttagaaacactaatcgagaccagaacctggaaaatttaattgaagtaaattctcatgtgtctgaaaacaagaatggaagctctaacactggagccaagcaggcaggaccacaggatactgttgtgtacacaaggacatatgtggagaatagtaaatcacccaaggatggatatcaggagaatatctctggaaaatacatacaaactgtttattcaacttctgataggtctgtcattgaaagagatatgtgcacttactgccgaaaacccttgggtgtagaaactaaaatgattttagatgaattacaaatttgctgccattctacttgctttaagtgtgaaatatgcaagcagcctttggaaaatctacaagcgggtgatagtatttggatttatagacagacaatacactgtgaaccttgctactctaaaattatggcaaagtggattccataactctggcacaaggaaatcaagatgaaaagcactcattaaggaattaaagttacaagttttatcttaataatatgtaatctagaaaagctttcacattgaagatcaactcttgtacaaaattaacaattctgttattgcataagtaatctaattgtcttcaataaggtcacacacataaaaagagccatctggtctctggctagagttagcaataaaaagttcaaatggttccag

SEQ ID NO: 347822 - DNA, 3457 bp, Homo sapiens
tgagtgactcagccgctgagcaagaaacctctgaactgttcactaatacagtcaggtagaggttgagactccactgaataaactctaggttcccatttctttcagccagatcctcccagggaatcactacaggctggttagccaaaaagtcctgattttctgctcaatagaggtccttactggaaggcagcatgtccaatgttaccttgagaaaaatgtctcccacaggaaatgagatgaagagcaccactcagggaaccacacggaagcagcaggattttcacgaggtgaacaaaagaagaactttcttacaggataacagttggataaagaaacgccctgaagaagaaaaagatgaaaattacggtagggtggtgctcaaccgacataattcccatgatgcattggacaggaaagtaaatgagagagatgtgccaaaagctacaattagtcggtacagttctgatgacactttggacaggagcatgtccatgtttagatcactggaagtaacaaagttgcaacctggcggttcattgaatgccaacacctccaacaccatagcatccacttctgctactactcctgtaaagaagaagaggcagtcctggtttccaccgccccctccaggttacaatgcctcttcgagcacaggaaccaggagacgggaaccaggtgttcaccctccaatacctccaaagcccagttctcctgtttcttctcctaaccagctgagacaggataataggcagatacatccacctaaaccaggtgtatatacagaaaccaacagatctgctgaaagaaatataagtgaagaattggataatctcatcaaaatgaacaaaagcttgaataggaatcaaggtcttgatagtctcttcagagcaaatccaaaggtagaagaaagagagaaaagagccaaaagccttgaaagtctcatctatatgagtacccggacagataaagatggcaaaggaatccaaagccttggaagtccgattaaagttaatcaaaggactgacaaaaatgagaaaggaagtgaagaccttgataatgctactgaagtaaatcccaaaggacatgaaaataccactgggggccagagccttgataatctcatcaaagtgacccctgaagtaaagagaagtaaccaaggttccaaagaccttaataacttcatcaaagtgtatccaggaacagaaaaaagtactgaagggggccaaagtctcgacagcctcattaaagtgactcctgaaagaaacagaactaaccaagggaaccaagacttggaaaatcttatcaaagtgatcccttcagcaaacaaaagcagtgaacaaggtcttgatgaacatattaatgtcagccccaaagctgtcaaaaacactgatggaaaacaagatcttgataaactcatcaaggtgaatcctgaaattttcacaaacaaccaaagaaaccaagatcttgctaacctcatcaaagtaaatcctgcagtaatcagaaacaatcagagccaagacttggacaatcttattaaagtgaaaccttcagctcttagaaacactaatcgagaccagaacctggaaaatttaattgaagtaaattctcatgtgtctgaaaacaagaatggaagctctaacactggagccaagcaggcaggaccacaggatactgttgtgtacacaaggacatatgtggagaatagtaaatcacccaaggatggatatcaggagaatatctctggaaaatacatacaaactgtttattcaacttctgataggtctgtcattgaaagagatatgtgcacttactgccgaaaacccttgggtgtagaaactaaaatgattttagatgaattacaaatttgctgccattctacttgctttaagtgtgaaatatgcaagcagcctttggaaaatctacaagcgggtgatagtatttggatttatagacagacaatacactgtgaaccttgctactctaaaattatggcaaagtggattccataactctggcacaaggaaatcaagatgaaaagcactcattaaggaattaaagttacaagttttatcttaataatatgtaatctagaaaagctttcacattgaagatcaactcttgtacaaaattaacaattctgttattgcataagtaatctaattgtcttcaataaggtcacacacataaaaagagccatctggtctctggctagagttagcaataaaaagttcaaatggttccagattccagtgtcaaaggagtgatgcattacactccagccaggtccatccctgctccgtatgttggctgtgagtggtggtttccatttaaaccaagtttctcatttcttcacctttttttctctaagaatttggattcgtagacattgacatcccgaagaactgtcaaggaagcaagatatgctttcttcatctgcaaaagaaatactaacaacaattttcttatacagtttggcagaaagatgttaacataaaaagtttatatacctcaaaaatcactaaactttccagatctctgtcctattatttgtaacacaaggggcattggataaaatgatttctagggttccttttgcttcccaaattctctgattctaaagcagtttttagaatcattagctctttggaaacatatatgcatacatgtttgttaagcctattgaactaggtaggacatataaacaatttaattttagtgtcattgtttaatcacagacttagtgtttgaaaactgtgttttaaaaacagaaacagattgatgggtaacaggtaaaatatgacatgtatagcttacatgttattatttgttaaattttctttgtatacatttcaaaatctgggtatacttataatccattagaagtaatggttatggactaaaaagatatgttctttagtatgttatatatactcatattacatagcagtatgtttacaaaaggcttataaaaataaaatgaactatcagttacatagaatctttatgtgaagtgtttgtaaatataattcactaacatcaattttgtcaattatagtgatcacaatctattatattctctgcagcactaatttatttttaactgctcaagctatagattttatttttaagaaacttttctgaagaaattgaacatgtaataatcatgtgaggaactagtataattaacattgggaaattgaacttctaaaccatttaattgcatatagcaactgtttctagaaaaaagatgtatggaacatggaagtgggggcagaattctagagaagttttaaggcagttgtggaaaactgctataaactagggagattaaaagattatcatgtattttccaaatgttaatacattcaaagaattattcttctgtgtaataatttcatgcctctgttcctcttaaagcctggttcacaaagtgttaaacataaaatgcttatcaaaa

SEQ ID NO: 347823 - DNA, 2768 bp, Homo sapiens
tgagtgactcagccgctgagcaagaaacctctgaactgttcactaatacagtcaggtagaggttgagactccactgaataaactctaggttcccatttctttcagccagatcctcccagggaatcactacaggctggttagccaaaaagtcctgattttctgctcaatagaggtccttactggaaggcagcatgtccaatgttaccttgagaaaaatgtctcccacaggaaatgagatgaagagcaccactcagggaaccacacggaagcagcaggattttcacgaggtgaacaaaagaagaactttcttacaggataacagttggataaagaaacgccctgaagaagaaaaagatgaaaattacggtagggtggtgctcaaccgacataattcccatgatgcattggacaggaaagtaaatgagagagatgtgccaaaagctacaattagtcggtacagttctgatgacactttggacaggagcatgtccatgtttagatcactggaagtaacaaagttgcaacctggcggttcattgaatgccaacacctccaacaccatagcatccacttctgctactactcctgtaaagaagaagaggcagtcctggtttccaccgccccctccaggttacaatgcctcttcgagcacaggaaccaggagacgggaaccaggtgttcaccctccaatacctccaaagcccagttctcctgtttcttctcctaaccagctgagacaggataataggcagatacatccacctaaaccaggtgtatatacagaaaccaacagatctgctgaaagaaatataagtgaagaattggataatctcatcaaaatgaacaaaagcttgaataggaatcaaggtcttgatagtctcttcagagcaaatccaaaggtagaagaaagagagaaaagagccaaaagccttgaaagtctcatctatatgagtacccggacagataaagatggcaaaggaatccaaagccttggaagtccgattaaagttaatcaaaggactgacaaaaatgagaaaggaagtgaagaccttgataatgctactgaagtaaatcccaaaggacatgaaaataccactgggggccagagccttgataatctcatcaaagtgacccctgaagtaaagagaagtaaccaaggttccaaagaccttaataacttcatcaaagtgtatccaggaacagaaaaaagtactgaagggggccaaagtctcgacagcctcattaaagtgactcctgaaagaaacagaactaaccaagggaaccaagacttggaaaatcttatcaaagtgatcccttcagcaaacaaaagcagtgaacaaggtcttgatgaacatattaatgtcagccccaaagctgtcaaaaacactgatggaaaacaagatcttgataaactcatcaaggtgaatcctgaaattttcacaaacaaccaaagaaaccaagatcttgctaacctcatcaaagtaaatcctgcagtaatcagaaacaatcagagccaagacttggacaatcttattaaagtgaaaccttcagctcttagaaacactaatcgagaccagaacctggaaaatttaattgaagtaaattctcatgtgtctgaaaacaagaatggaagctctaacactggagccaagcaggcaggaccacaggatactgttgtgtacacaaggacatatgtggagaatagtaaatcacccaaggatggatatcaggagaatatctctggaaaatacatacaaactgtttattcaacttctgataggtctgtcattgaaagagatatgtgcacttactgccgaaaacccttgggtgtagaaactaaaatgattttagatgaattacaaatttgctgccattctacttgctttaagtgtgaaatatgcaagcagcctttggaaaatctacaagcgggtgatagtatttggatttatagacagacaatacactgtgaaccttgctactctaaaattatggcaaagtggattccataactctggcacaaggaaatcaagatgaaaagcactcattaaggaattaaagttacaagttttatcttaataatatgtaatctagaaaagctttcacattgaagatcaactcttgtacaaaattaacaattctgttattgcataagtaatctaattgtcttcaataaggtcacacacataaaaagagccatctggtctctggctagagttagcaataaaaagttcaaatggttccagattccagtgtcaaaggagtgatgcattacactccagccaggtccatccctgctccgtatgttggctgtgagtggtggtttccatttaaaccaagtttctcatttcttcacctttttttctctaagaatttggattcgtagacattgacatcccgaagaactgtcaaggaagcaagatatgctttcttcatctgcaaaagaaatactaacaacaattttcttatacagtttggcagaaagatgttaacataaaaagtttatatacctcaaaaatcactaaactttccagatctctgtcctattatttgtaacacaaggggcattggataaaatgatttctagggttccttttgcttcccaaattctctgattctaaagcagtttttagaatcattagctctttggaaacatatatgcatacatgtttgttaagcctattgaactaggtaggacatataaacaatttaattttagtgtcattgtttaatcacagccattaggtaacagccatttagggagatcctgt

SEQ ID NO: 347824 - DNA, 1256 bp, Homo sapiens
tgagtgactcagccgctgagcaagaaacctctgaactgttcactaatacagtcaggtagaggttgagactccactgaataaactctaggttcccatttctttcagccagatcctcccagggaatcactacaggctggttagccaaaaagtcctgattttctgctcaatagaggtccttactggaaggcagcatgtccaatgttaccttgagaaaaatgtctcccacaggaaatgagatgaagagcaccactcagggaaccacacggaagcagcaggattttcacgaggtgaacaaaagaagaactttcttacaggataacagttggataaagaaacgccctgaagaagaaaaagatgaaaattacggtagggtggtgctcaaccgacataattcccatgatgcattggacaggaaagtaaatgagagagatgtgccaaaagctacaattagtcggtacagttctgatgacactttggacaggagcatgtccatgtttagatcactggaagtaacaaagttgcaacctggcggttcattgaatgccaacacctccaacaccatagcatccacttctgctactactcctgtaaagaagaagaggcagtcctggtttccaccgccccctccaggttacaatgcctcttcgagcacaggaaccaggagacgggaaccaggtgttcaccctccaatacctccaaagcccagttctcctgtttcttctcctaaccagctgagacaggataataggcagatacatccacctaaaccaggtgtatatacagaaaccaacagatctgctgaaagaaatataagtgaagaattggataatctcatcaaaatgaacaaaagcttgaataggaatcaaggtcttgatagtctcttcagagcaaatccaaaggtagaagaaagagagaaaagagccaaaagccttgaaagtctcatctatatgagtacccggacagataaagatggcaaagggtaagattttattaagacagaccattttgattgagtcccagatggtgtactattttctggaggagacctcctgcttagtacaagggtcaggcaggctggtggaataagccttagactggggtccagggatagtgtgtatcttggtgctggttttgccaccaacatcaatctgggtgaccctgggcaagttgtgtaatttctggagagctctgtttcctcattccataaaatgaaggatatgacctagatgatctcccagttccccttcatatctaaa

SEQ ID NO: 347825 - DNA, 222 bp, Homo sapiens
catttcacatttatagatttattctgagataactggataagtaggtaaagatgcttaaataaggtgattacagtgaaaatttttccttttttttctctaaacaaatctcatcacagtgttcacaggaaaaattcaaatgcataggcagatacatgctttattctttttctgaaaggttaaccataaatgagactttaataaatgtcccatacaattctgtac

SEQ ID NO: 347826 - DNA, 305 bp, Homo sapiens
attgaagaaataattttttataggactctggagtgaagggattaatattgaccagagccaatgaggtcatctcatccttgaggggagcaggtgtgagcttcaaatgcttagggcctctggaaggaagcttccctgttggagaaatcaccaaccggctcagcatggtctgaatgaggatgacaaaagagaagcccctatgagaaggatggaaaactctttgaagaaaaaaacaactattatacaatcaagctgtccctcttctcttccagttatatagccaaaggaaataaaatcactatctcaaa

SEQ ID NO: 347827 - DNA, 6330 bp, Homo sapiens
tagtgaacagcggagccggacggggatcgccggcgggcggcaagcggaggcggcccaggcccggcggtctccgagatgtcacgatggctgtggccatggtcaaactgtgtgaaagagcgggtctgccgctacttgctgcaccactacttaggtcacttcttccaagagcacctcagcctggaccagctcagcctcgatctgtacaagggcagcgttgccctgcgagacatccacctggaaatctggtctgtgaacgaggtgctggagtcaatggagtcaccgctggagctggtggaaggcttcgtgggctccatcgaggtggccgtgccctgggctgctctgctcaccgaccactgcacagtgcgcgtgtccggcctccagctcaccttgcagccccgccggggtccagcgccaggggctgccgactcacagagctgggcctcatgcatgaccacaagcctgcagctggcccaggagtgtctgcgggatgggctaccggagccctctgagccaccacagcccctggaggggctggagatgtttgcccagaccattgagactgtgcttcggaggatcaaagtgaccttcctggacactgtcgtgagggtggagcactctccgggtgatggggaacgtggtgtggccgtcgaggtccgtgtgcagagactggagtactgtgatgaggcagtgcgggacccaagccaggcgccgccggtggatgtgcatcagccgcctgccttcctgcacaagctgctgcagctggcaggggtccgcctgcactacgaggagctcccggcacaggaagagcctccagagccccccttgcagatcggcagctgctcagggtacatggagctgatggtgaagttgaagcaaaatgaggccttccctggccccaagttggaggtggcgggacagctgggctccctgcacctgctcctgaccccgaggcagctccagcaacttcaggaactgctcagcgccgtgagccttacagaccacgagggcctggctgacaagctgaacaagagccgcccgctaggtgccgaagacctgtggctgattgagcaggacctgaaccagcagctgcaggcaggggcagtggctgagcccctcagcccagacccccttaccaacccccttctcaacctggataacactgacctcttcttctccatggctggcctcacaagcagtgtggcctcagccctctctgagctctccctctccgatgtagacctggcctcctctgtgcgcagcgacatggcctcccgccggctctctgcccaggcccacccagctggcaagatggcccccaaccccctcctggacaccatgcgccctgactcgctgctgaagatgaccttggggggtgtgaccctgaccttgcttcagacgtctgccccatcttccggaccacctgacctcgccacgcactttttcaccgagtttgatgccaccaaggatgggcccttcggttcccgagacttccatcaccttcgaccacgcttccagagggcctgtccctgtagccatgttcggctaacgggcacagccgtgcagctgtcctgggagctgcggacgggcagtcggggccggcggacaaccagcatggaagtgcacttcgggcagctggaggtgctggagtgtctgtggccccggggcacctctgagcctgagtacacggagatcctgacctttcctggtacgctgggctcccaggcctcagctcggccctgcgcccatctgcgccacacacagatcctgcgccgtgtgcctaagagccgaccccggcgctcagttgcctgccattgccactcagaactggccctggacctggccaacttccaggcggacgtggagctgggggccctggaccggctggccgccctactgcgcctggccaccgtacctgctgagcctccagccggcctgctgacagagcccctgccggcgatggagcagcagacggtatttcggctctctgcaccccgggccacgctgcggctgcgcttccccattgccgacctgcggcctgagcgggacccctgggcgggccaggccgtgcgggctgagcagcttcggctggagctgagtgagccccagttccggtcagagcttagcagtgggcctggtcccccagtccccacccacctggaactcacctgctccgacctacatggtatctatgaagatggagggaagccacctgtcccttgcctgcgtgtctccaaagccctggaccccaagagcactgggcgcaagtacttcctgccccaggtagtggtgactgtgaacccccagtccagcagcacacagtgggaggtggccccggagaagggagaggaactggagctgtcagtggagagtccctgtgagctgcgggaacctgagccctcgcccttctcctctaagaggaccatgtatgagacagaggagatggtgatccctggagaccctgaggagatgaggacgttccagagccggaccctggcactgtcccgctgcagcctggaagtgatcctgcccagtgtccacatctttctgcccagcaaggaggtctacgagagcatctacaacaggatcaacaacgacctgctcatgtgggagcctgcagatctgcttcccacccccgaccccgccgcccagccctcgggcttccccggcccctcaggcttctggcacgacagctttaagatgtgcaagtcagccttcaagctggccaactgctttgatctcaccccagactcggactcggatgacgaggatgcccacttcttctcagtgggggcatcaggtggcccacaggccgctgcccctgaggccccaagtcttcacttgcagagcaccttctctacactggtgacagtgctgaaggggcggatcacagccctctgtgagaccaaggatgagggtgggaagcggctggaggctgtgcacggggagctggtgctggacatggagcacggtaccctcttcagcgtctcccagtactgtggccagccaggacttggctacttctgtctggaagctgaaaaggcaacactctaccaccgaggatgactacccgctgcccagtcacctggaccttcccagtttcgctcccccggctcagctggccccaaccatctacccatcggaggaaggggtgaccgagcggggagcctcgggccgcaagggccagggccggggaccccacatgttgtccactgctgtgcgcatccacctggacccccacaagaatgtgaaggagttcctggtgacactgcggttgcacaaagccaccttgcgccactacatggccctgcccgagcagagctggcattcccagttgttggagttcctagacgtgctggatgaccctgtgctgggctacctgcccccgacggtcatcaccatcctgcacacacacctgttctcctgctctgtggactataggccactctacctcccagtgcgtgtcctcatcaccgcggagaccttcactctctccagcaacatcatcatggacacctccaccttcctgctcaggttcatcctcgatgactccgccttgtacctgtccgacaagtgtgaggtggagaccctggacctgcggcgagattatgtctgtgttttggatgttgacctcttggaacttgtgattaaaacctggaaagggagcaccgagggcaaactgagccagccactattcgagctgcgctgctccaacaatgtggtacacgtgcacagctgtgccgactcctgtgccctgctggtcaacctgctccagtacgtaatgagcacaggcgatctgcaccccccaccccggccccccagccccacggagatcgccggccagaagctctcggagagtcctgcctctctgccctcgtgccccccagtggagacggccctcatcaaccagcgtgacctggccgacgccctcctggacaccgagcgcagcctacgggagctggcccagccttcaggtggccacctccctcaggcgtcgcccatctccgtctacctattcccaggtgaacggagtggggccccacccccttcaccacctgtcgggggccctgctggcagcttagggtcatgctcagaggagaaggaagatgaaagggaagaggagggcgatggagacaccctggacagtgatgagttctgcatccttgatgctcccggcctgggcatcccgccccgagatggggagcctgtggtgacacagctgcatcccggccccatcgttgtgagggacggttacttctcacggccgatcggcagcacggacttgctgcgggcacctgcccatttcccagtgcccagcactcgggtggtgctacgtgaggtctccctcgtctggcacctctatgggggccgagactttggcccccaccccggccacagggcaagaactggcctctcaggtcccaggagctccccttcccgctgctctggccccaaccggccccagaactcatggcgcacgcaggggggcagcgggcggcagcaccatgtcctcatggagatccagctgagcaaggtaagcttccagcacgaggtgtacccagcggagccagccacaggccctgcggcccccagccaggagctggaggagcgaccgctgtcccgtcaggtgttcatcgtgcaggagctggaggtccgagaccggctcgcctcctcccagatcaacaagttcctgtacctacacacgagtgagcggatgccgcgacgtgcccactctaacatgctcaccatcaaagcgctgcatgtggcccccactaccaacctgggtgggcctgagtgctgtctccgcgtctcgctgatgcccctgcggctcaatgtggaccaggatgccctcttcttcctcaaggacttcttcactagtctggtggccggcatcaaccccgtggtcccaggggagacctccgctgaggctcgccccgagactcgagcccagcccagcagccccctggaagggcaggccgaaggcgtagagaccactggttcgcaggaggccccaggaggtggacacagcccctcccctcctgaccagcagcccatctacttcagagagttccgcttcacgtctgaggtccccatctggctggattaccatggcaagcacgtcacgatggaccaggtgggcacttttgctggcctcctcatcggcctggcccaactcaactgctccgagctgaagctaaagcggctctgttgcaggcacgggctcctgggtgtggacaaggtgctgggctatgccctcaacgagtggctgcaggacatccgcaagaaccagctgcccggcctgctgggaggcgtgggccccatgcactcggttgtccagctcttccaagggttccgggacctgctgtggctgcccattgagcagtacaggaaggatggccgcctcatgcgggggctgcagcgaggggctgcctcctttggctcatccacagcctctgccgccctggaactcagcaaccggttggtacaggctatccaggccacagctgagaccgtgtatgacatcctgtccccggcagcccccgtctcccgctccctgcaggataagcgctctgcgcggaggctgcgcaggggccagcagcctgccgacctgcgggagggtgtggccaaggcctacgacacagtgcgagagggcatcttggatacagctcagaccatctgtgacgtggcatcgcggggccatgagcagaaggggctgacgggcgccgtggggggcgtgatccgccagctgcccccgactgtggtgaagccgctcatcctggccacggaggccacgtccagcctgctcgggggcatgcgcaaccagattgtccccgacgcccacaaggaccacgccctcaagtggcgctcggacagtgcccaagactgagcctggggtgcccggcacccagagggtgctgcccaccatgctcctgagcctcccaagagctgcagcccacgggcccggcccggcctggcccttcaggggatggccactgtgaaggacgccttcccagcctgcccgttgccaatctgctgtgagaggggggcctccctgccttggggccttagccctggctctgcacttttcctccggggagaaaggacactgcccctcccccgacctgggcccacactgctgccttctcccaggacggaggcttttggaccctcggaccccatcccactcagccaagtgtctttctgtgtctggggggaggaggggatgatatccgtgtggttcgatgtattatttttaagctccgtgagtgcgtgggtcagtgtctgcatgaagtggaataaactgcccaccgccagcccccctctcagatcctc

SEQ ID NO: 347828 - DNA, 343 bp, Homo sapiens
  misc_feature (23)..(23): n is a, c, g, or t
gcaaaacccagctaatttttgtntttttagtagagatggggtttcaccatgttgtccaggctggtctcaaagtcctgacctcaagcgatccacccacctcagcctgcactacgaggagctcccggcacaggaagagcctccagagccccccttgcagatcggcagctgctcagggtacatggagctgatggtgaagttgaagcaaaatgaggccttccctggccccaaggtgggtccccaggcccctggggagggggtgagtaccccatctcaagactcctcctcctcagcaaggctgattatctacagcccacagtggggatgtcaagtgggggatttactt

SEQ ID NO: 347829 - DNA, 6235 bp, Homo sapiens
tagtgaacagcggagccggacggggatcgccggcgggcggcaagcggaggcggcccaggcccggcggtctccgagatgtcacgatggctgtggccatggtcaaactgtgtgaaagagcgggtctgccgctacttgctgcaccactacttaggtcacttcttccaagagcacctcagcctggaccagctcagcctcgatctgtacaagggcagcgttgccctgcgagacatccacctggaaatctggtctgtgaacgaggtgctggagtcaatggagtcaccgctggagctggtggaaggcttcgtgggctccatcgaggtggccgtgccctgggctgctctgctcaccgaccactgcacagtgcgcgtgtccggcctccagctcaccttgcagccccgccggggtccagcgccaggggctgccgactcacagagctgggcctcatgcatgaccacaagcctgcagctggcccaggagtgtctgcgggatgggctaccggagccctctgagccaccacagcccctggaggggctggagatgtttgcccagaccattgagactgtgcttcggaggatcaaagtgaccttcctggacactgtcgtgagggtggagcactctccgggtgatggggaacgtggtgtggccgtcgaggtccgtgtgcagagactggagtactgtgatgaggcagtgcgggacccaagccaggcgccgccggtggatgtgcatcagccgcctgccttcctgcacaagctgctgcagctggcaggggtccgcctgcactacgaggagctcccggcacaggaagagcctccagagccccccttgcagatcggcagctgctcagggtacatggagctgatggtgaagttgaagcaaaatgaggccttccctggccccaagttggaggtggcgggacagctgggctccctgcacctgctcctgaccccgaggcagctccagcaacttcaggaactgctcagcgccgtgagccttacagaccacgagggcctggctgacaagctgaacaagagccgcccgctaggtgccgaagacctgtggctgattgagcaggacctgaaccagcagctgcaggcaggggcagtggctgagcccctcagcccagacccccttaccaacccccttctcaacctggataacactgacctcttcttctccatggctggcctcacaagcagtgtggcctcagccctctctgagctctccctctccgatgtagacctggcctcctctgtgcgcagcgacatggcctcccgccggctctctgcccaggcccacccagctggcaagatggcccccaaccccctcctggacaccatgcgccctgactcgctgctgaagatgaccttggggggtgtgaccctgaccttgcttcagacgtctgccccatcttccggaccacctgacctcgccacgcactttttcaccgagtttgatgccaccaaggatgggcccttcggttcccgagacttccatcaccttcgaccacgcttccagagggcctgtccctgtagccatgttcggctaacgggcacagccgtgcagctgtcctgggagctgcggacgggcagtcggggccggcggacaaccagcatggaagtgcacttcgggcagctggaggtgctggagtgtctgtggccccggggcacctctgagcctgagtacacggagatcctgacctttcctggtacgctgggctcccaggcctcagctcggccctgcgcccatctgcgccacacacagatcctgcgccgtgtgcctaagagccgaccccggcgctcagttgcctgccattgccactcagaactggccctggacctggccaacttccaggcggacgtggagctgggggccctggaccggctggccgccctactgcgcctggccaccgtacctgctgagcctccagccggcctgctgacagagcccctgccggcgatggagcagcagacggtatttcggctctctgcaccccgggccacgctgcggctgcgcttccccattgccgacctgcggcctgagcgggacccctgggcgggccaggccgtgcgggctgagcagcttcggctggagctgagtgagccccagttccggtcagagcttagcagtgggcctggtcccccagtccccacccacctggaactcacctgctccgacctacatggtatctatgaagatggagggaagccacctgtcccttgcctgcgtgtctccaaagccctggaccccaagagcactgggcgcaagtacttcctgccccaggtagtggtgactgtgaacccccagtccagcagcacacagtgggaggtggccccggagaagggagaggaactggagctgtcagtggagagtccctgtgagctgcgggaacctgagccctcgcccttctcctctaagaggaccatgtatgagacagaggagatggtgatccctggagaccctgaggagatgaggacgttccagagccggaccctggcactgtcccgctgcagcctggaagtgatcctgcccagtgtccacatctttctgcccagcaaggaggtctacgagagcatctacaacaggatcaacaacgacctgctcatgtgggagcctgcagatctgcttcccacccccgaccccgccgcccagccctcgggcttccccggcccctcaggcttctggcacgacagctttaagatgtgcaagtcagccttcaagctggactcggactcggatgacgaggatgcccacttcttctcagtgggggcatcaggtggcccacaggccgctgcccctgaggccccaagtcttcacttgcagagcaccttctctacactggtgacagtgctgaaggggcggatcacagccctctgtgagaccaaggatgagggtgggaagcggctggaggctgtgcacggggagctggtgctggacatggagcacggtaccctcttcagcgtctcccagtactgtggccagccaggacttggctacttctgtctggaagctgaaaaggcaacactctaccaccgaggatgactacccgctgcccagtcacctggaccttcccagtttcgctcccccggctcagctggccccaaccatctacccatcggaggaaggggtgaccgagcggggagcctcgggccgcaagggccagggccggggaccccacatgttgtccactgctgtgcgcatccacctggacccccacaagaatgtgaaggagttcctggtgacactgcggttgcacaaagccaccttgcgccactacatggccctgcccgagcagagctggcattcccagttgttggagttcctagacgtgctggatgaccctgtgctgggctacctgcccccgacggtcatcaccatcctgcacacacacctgttctcctgctctgtggactataggccactctacctcccagtgcgtgtcctcatcaccgcggagaccttcactctctccagcaacatcatcatggacacctccaccttcctgctcagattatgtctgtgttttggatgttgacctcttggaacttgtgattaaaacctggaaagggagcaccgagggcaaactgagccagccactattcgagctgcgctgctccaacaatgtggtacacgtgcacagctgtgccgactcctgtgccctgctggtcaacctgctccagtacgtaatgagcacaggcgatctgcaccccccaccccggccccccagccccacggagatcgccggccagaagctctcggagagtcctgcctctctgccctcgtgccccccagtggagacggccctcatcaaccagcgtgacctggccgacgccctcctggacaccgagcgcagcctacgggagctggcccagccttcaggtggccacctccctcaggcgtcgcccatctccgtctacctattcccaggtgaacggagtggggccccacccccttcaccacctgtcgggggccctgctggcagcttagggtcatgctcagaggagaaggaagatgaaagggaagaggagggcgatggagacaccctggacagtgatgagttctgcatccttgatgctcccggcctgggcatcccgccccgagatggggagcctgtggtgacacagctgcatcccggccccatcgttgtgagggacggttacttctcacggccgatcggcagcacggacttgctgcgggcacctgcccatttcccagtgcccagcactcgggtggtgctacgtgaggtctccctcgtctggcacctctatgggggccgagactttggcccccaccccggccacagggcaagaactggcctctcaggtcccaggagctccccttcccgctgctctggccccaaccggccccagaactcatggcgcacgcaggggggcagcgggcggcagcaccatgtcctcatggagatccagctgagcaaggtaagcttccagcacgaggtgtacccagcggagccagccacaggccctgcggcccccagccaggagctggaggagcgaccgctgtcccgtcaggtgttcatcgtgcaggagctggaggtccgagaccggctcgcctcctcccagatcaacaagttcctgtacctacacacgagtgagcggatgccgcgacgtgcccactctaacatgctcaccatcaaagcgctgcatgtggcccccactaccaacctgggtgggcctgagtgctgtctccgcgtctcgctgatgcccctgcggctcaatgtggaccaggatgccctcttcttcctcaaggacttcttcactagtctggtggccggcatcaaccccgtggtcccaggggagacctccgctgaggctcgccccgagactcgagcccagcccagcagccccctggaagggcaggccgaaggcgtagagaccactggttcgcaggaggccccaggaggtggacacagcccctcccctcctgaccagcagcccatctacttcagagagttccgcttcacgtctgaggtccccatctggctggattaccatggcaagcacgtcacgatggaccaggtgggcacttttgctggcctcctcatcggcctggcccaactcaactgctccgagctgaagctaaagcggctctgttgcaggcacgggctcctgggtgtggacaaggtgctgggctatgccctcaacgagtggctgcaggacatccgcaagaaccagctgcccggcctgctgggaggcgtgggccccatgcactcggttgtccagctcttccaagggttccgggacctgctgtggctgcccattgagcagtacaggaaggatggccgcctcatgcgggggctgcagcgaggggctgcctcctttggctcatccacagcctctgccgccctggaactcagcaaccggttggtacaggctatccaggccacagctgagaccgtgtatgacatcctgtccccggcagcccccgtctcccgctccctgcaggataagcgctctgcgcggaggctgcgcaggggccagcagcctgccgacctgcgggagggtgtggccaaggcctacgacacagtgcgagagggcatcttggatacagctcagaccatctgtgacgtggcatcgcggggccatgagcagaaggggctgacgggcgccgtggggggcgtgatccgccagctgcccccgactgtggtgaagccgctcatcctggccacggaggccacgtccagcctgctcgggggcatgcgcaaccagattgtccccgacgcccacaaggaccacgccctcaagtggcgctcggacagtgcccaagactgagcctggggtgcccggcacccagagggtgctgcccaccatgctcctgagcctcccaagagctgcagcccacgggcccggcccggcctggcccttcaggggatggccactgtgaaggacgccttcccagcctgcccgttgccaatctgctgtgagaggggggcctccctgccttggggccttagccctggctctgcacttttcctccggggagaaaggacactgcccctcccccgacctgggcccacactgctgccttctcccaggacggaggcttttggaccctcggaccccatcccactcagccaagtgtctttctgtgtctggggggaggaggggatgatatccgtgtggttcgatgtattatttttaagctccgtgagtgcgtgggtcagtgtctgcatgaagtggaataaactgcccaccgccagcccccctctcagatcctc

SEQ ID NO: 347830 - DNA, 6977 bp, Homo sapiens
tagtgaacagcggagccggacggggatcgccggcgggcggcaagcggaggcggcccaggcccggcggtctccgagatgtcacgatggctgtggccatggtcaaactgtgtgaaagagcgggtctgccgctacttgctgcaccactacttaggtcacttcttccaagagcacctcagcctggaccagctcagcctcgatctgtacaagggcagcgttgccctgcgagacatccacctggaaatctggtctgtgaacgaggtgctggagtcaatggagtcaccgctggagctggtggaaggcttcgtgggctccatcgaggtggccgtgccctgggctgctctgctcaccgaccactgcacagtgcgcgtgtccggcctccagctcaccttgcagccccgccggggtccagcgccaggggctgccgactcacagagctgggcctcatgcatgaccacaagcctgcagctggcccaggagtgtctgcgggatgggctaccggagccctctgagccaccacagcccctggaggggctggagatgtttgcccagaccattgagactgtgcttcggaggatcaaagtgaccttcctggacactgtcgtgagggtggagcactctccgggtgatggggaacgtggtgtggccgtcgaggtccgtgtgcagagactggagtactgtgatgaggcagtgcgggacccaagccaggcgccgccggtggatgtgcatcagccgcctgccttcctgcacaagctgctgcagctggcaggggtccgcctgcactacgaggagctcccggcacaggaagagcctccagagccccccttgcagatcggcagctgctcagggtacatggagctgatggtgaagttgaagcaaaatgaggccttccctggccccaagttggaggtggcgggacagctgggctccctgcacctgctcctgaccccgaggcagctccagcaacttcaggaactgctcagcgccgtgagccttacagaccacgagggcctggctgacaagctgaacaagagccgcccgctaggtgccgaagacctgtggctgattgagcaggacctgaaccagcagctgcaggcaggggcagtggctgagcccctcagcccagacccccttaccaacccccttctcaacctggataacactgacctcttcttctccatggctggcctcacaagcagtgtggcctcagccctctctgagctctccctctccgatgtagacctggcctcctctgtgcgcagcgacatggcctcccgccggctctctgcccaggcccacccagctggcaagatggcccccaaccccctcctggacaccatgcgccctgactcgctgctgaagatgaccttggggggtgtgaccctgaccttgcttcagacgtctgccccatcttccggaccacctgacctcgccacgcactttttcaccgagtttgatgccaccaaggatgggcccttcggttcccgagacttccatcaccttcgaccacgcttccagagggcctgtccctgtagccatgttcggctaacgggcacagccgtgcagctgtcctgggagctgcggacgggcagtcggggccggcggacaaccagcatggaagtgcacttcgggcagctggaggtgctggagtgtctgtggccccggggcacctctgagcctgagtacacggagatcctgacctttcctggtacgctgggctcccaggcctcagctcggccctgcgcccatctgcgccacacacagatcctgcgccgtgtgcctaagagccgaccccggcgctcagttgcctgccattgccactcagaactggccctggacctggccaacttccaggcggacgtggagctgggggccctggaccggctggccgccctactgcgcctggccaccgtacctgctgagcctccagccggcctgctgacagagcccctgccggcgatggagcagcagacggtatttcggctctctgcaccccgggccacgctgcggctgcgcttccccattgccgacctgcggcctgagcgggacccctgggcgggccaggccgtgcgggctgagcagcttcggctggagctgagtgagccccagttccggtcagagcttagcagtgggcctggtcccccagtccccacccacctggaactcacctgctccgacctacatggtatctatgaagatggagggaagccacctgtcccttgcctgcgtgtctccaaagccctggaccccaagagcactgggcgcaagtacttcctgccccaggtagtggtgactgtgaacccccagtccagcagcacacagtgggaggtggccccggagaagggagaggaactggagctgtcagtggagagtccctgtgagctgcgggaacctgagccctcgcccttctcctctaagaggaccatgtatgagacagaggagatggtgatccctggagaccctgaggagatgaggacgttccagagccggaccctggcactgtcccgctgcagcctggaagtgatcctgcccagtgtccacatctttctgcccagcaaggaggtctacgagagcatctacaacaggatcaacaacgacctgctcatgtgggagcctgcagatctgcttcccacccccgaccccgccgcccagccctcgggcttccccggcccctcaggcttctggcacgacagctttaagatgtgcaagtcagccttcaagctggactcggactcggatgacgaggatgcccacttcttctcagtgggggcatcaggtggcccacaggccgctgcccctgaggccccaagtcttcacttgcagagcaccttctctacactggtgacagtgctgaaggggcggatcacagccctctgtgagaccaaggatgagggtgggaagcggctggaggctgtgcacggggagctggtgctggacatggagcacggtaccctcttcagcgtctcccagtactgtggccagccaggacttggctacttctgtctggaagctgaaaaggcaacactctaccaccgaggatgactacccgctgcccagtcacctggaccttcccagtttcgctcccccggctcagctggccccaaccatctacccatcggaggaaggggtgaccgagcggggagcctcgggccgcaagggccagggccggggaccccacatgttgtccactgctgtgcgcatccacctggacccccacaagaatgtgaaggagttcctggtgacactgcggttgcacaaagccaccttgcgccactacatggccctgcccgagcagagctggcattcccagttgttggagttcctagacgtgctggatgaccctgtgctgggctacctgcccccgacggtcatcaccatcctgcacacacacctgttctcctgctctgtggactataggccactctacctcccagtgcgtgtcctcatcaccgcggagaccttcactctctccagcaacatcatcatggacacctccaccttcctgctcaggttcatcctcgatgactccgccttgtacctgtccgacaagtgtgaggtggagaccctggacctgcggcgagattatgtctgtgttttggatgttgacctcttggaacttgtgattaaaacctggaaagggagcaccgagggcaaactgagccagccactattcgagctgcgctgctccaacaatgtggtacacgtgcacagctgtgccgactcctgtgccctgctggtcaacctgctccagtacgtaatgagcacaggcgatctgcaccccccaccccggccccccagccccacggagatcgccggccagaagctctcggagagtcctgcctctctgccctcgtgccccccagtggagacggccctcatcaaccagcgtgacctggccgacgccctcctggacaccgagcgcagcctacgggagctggcccagccttcaggtggccacctccctcaggcgtcgcccatctccgtctacctattcccaggtgaacggagtggggccccacccccttcaccacctgtcgggggccctgctggcagcttagggtcatgctcagaggagaaggaagatgaaagggaagaggagggcgatggagacaccctggacagtgatgagttctgcatccttgatgctcccggcctgggcatcccgccccgagatggggagcctgtggtgacacagctgcatcccggccccatcgttgtgagggacggttacttctcacggccgatcggcagcacggacttgctgcgggcacctgcccatttcccagtgcccagcactcgggtggtgctacgtgaggtctccctcgtctggcacctctatgggggccgagactttggcccccaccccggccacagggcaagaactggcctctcaggtcccaggagctccccttcccgctgctctggccccaaccggccccagaactcatggcgcacgcaggggggcagcgggcggcagcaccatgtcctcatggagatccagctgagcaaggtaagcttccagcacgaggtgtacccagcggagccagccacaggccctgcggcccccagccaggagctggaggagcgaccgctgtcccgtcaggtgttcatcgtgcaggagctggaggtccgagaccggctcgcctcctcccagatcaacaagttcctgtacctacacacgagtgagcggatgccgcgacgtgcccactctaacatgctcaccatcaaagcgctgcatgtggcccccactaccaacctgggtgggcctgagtgctgtctccgcgtctcgctgatgcccctgcggctcaatgtggaccaggatgccctcttcttcctcaaggacttcttcactagtctggtggccggcatcaaccccgtggtcccaggggagacctccgctgaggctcgccccgagactcgagcccagcccagcagccccctggaagggcaggccgaaggcgtagagaccactggttcgcaggaggccccaggaggtggacacagcccctcccctcctgaccagcagcccatctacttcagagagttccgcttcacgtctgaggtccccatctggctggattaccatggcaagcacgtcacgatggaccaggtgggcacttttgctggcctcctcatcggcctggcccaactcaactgctccgagctgaagctaaagcggctctgttgcaggcacgggctcctgggtgtggacaaggtgctgggctatgccctcaacgagtggctgcaggacatccgcaagaaccagctgcccggcctgctgggaggcgtgggccccatgcactcggttgtccagctcttccaagggttccgggacctgctgtggctgcccattgagcagtacaggaaggatggccgcctcatgcgggggctgcagcgaggggctgcctcctttggctcatccacagcctctgccgccctggaactcagcaaccggttggtacaggctatccaggccacagctgagaccgtgtatgacatcctgtccccggcagcccccgtctcccgctccctgcaggataagcgctctgcgcggaggctgcgcaggggccagcagcctgccgacctgcgggagggtgtggccaaggcctacgacacagtgcgagagggcatcttggatacagctcagaccatctgtgacgtggcatcgcggggccatgagcagaaggggctgacgggcgccgtggggggcgtgatccgccagctgcccccgactgtggtgaagccgctcatcctggccacggaggccacgtccagcctgctcgggggcatgcgcaaccagattgtccccgacgcccacaaggaccacgccctcaagtggcgctcggacagtgcccaagactgagcctggggtgcccggcacccagagggtgctgcccaccatgctcctgagcctcccaagagctgcagcccacgggcccggcccggcctggcccttcaggggatggccactgtgaaggacgccttcccagcctgcccgttgccaatctgctgtgagaggggggcctccctgccttggggccttagccctggctctgcacttttcctccggggagaaaggacactgcccctcccccgacctgggcccacactgctgccttctcccaggacggaggcttttggaccctcggaccccatcccactcagccaagtgtctttctgtgtctggggggaggaggggatgatatccgtgtggttcgatgtattatttttaagctccgtgagtgcgtgggtcagtgtctgcatgaagtggaataaactgcccaccgcaaaaaaaaaaaaaaaaaaaaaaaaaaaaaaaaaaggggggggggtcaaaaattcccgaggggccaaactggcataccgccctgttttcttggtaaacacgttggccccttaatggtgggctccgtataaaaagctatagcatgggcccggtcgttttacaggagggtctgctactttgggtaaaacctgtcgtaaggcgggcgaacttctttggggcagagcgacccttaacttggggcgggggtgcgacataacttgtgcgaacaactctatcctatactacgatctttacacacgcgcctcttacggcgttaacaataatacaccctttcacacacttgtctccagcgggtgttcaacccctacacccggactaatagtgccctgccccgctgatagaaagaagttttggggctcgagggggcatttgccactctctgcgcaccacctctcttactcccccgcggcggagttaacatcgaaaaaaaacctttctccctgcttgatgtcaccgatccatcttgctctcacatcaccaactctcttactctccaactaccacctatactccgactacttgctatactccttagctatctcccttcctgcgccctctactgctgccgtctggactcatatccagcacctctcctcatacccccgttccattcctcaccatactccagctcacc

SEQ ID NO: 347831 - DNA, 5066 bp, Homo sapiens
tagtgaacagcggagccggacggggatcgccggcgggcggcaagcggaggcggcccaggcccggcggtctccgagatgtcacgatggctgtggccatggtcaaactgtgtgaaagagcgggtctgccgctacttgctgcaccactacttaggtcacttcttccaagagcacctcagcctggaccagctcagcctcgatctgtacaagggcagcgttgccctgcgagacatccacctggaaatctggtctgtgaacgaggtgctggagtcaatggagtcaccgctggagctggtggaaggcttcgtgggctccatcgaggtggccgtgccctgggctgctctgctcaccgaccactgcacagtgcgcgtgtccggcctccagctcaccttgcagccccgccggggtccagcgccaggggctgccgactcacagagctgggcctcatgcatgaccacaagcctgcagctggcccaggagtgtctgcgggatgggctaccggagccctctgagccaccacagcccctggaggggctggagatgtttgcccagaccattgagactgtgcttcggaggatcaaagtgaccttcctggacactgtcgtgagggtggagcactctccgggtgatggggaacgtggtgtggccgtcgaggtccgtgtgcagagactggagtactgtgatgaggcagtgcgggacccaagccaggcgccgccggtggatgtgcatcagccgcctgccttcctgcacaagctgctgcagctggcaggggtccgcctgcactacgaggagctcccggcacaggaagagcctccagagccccccttgcagatcggcagctgctcagggtacatggagctgatggtgaagttgaagcaaaatgaggccttccctggccccaagttggaggtggcgggacagctgggctccctgcacctgctcctgaccccgaggcagctccagcaacttcaggaactgctcagcgccgtgagccttacagaccacgagggcctggctgacaagctgaacaagagccgcccgctaggtgccgaagacctgtggctgattgagcaggacctgaaccagcagctgcaggcaggggcagtggctgagcccctcagcccagacccccttaccaacccccttctcaacctggataacactgacctcttcttctccatggctggcctcacaagcagtgtggcctcagccctctctgagctctccctctccgatgtagacctggcctcctctgtgcgcagcgacatggcctcccgccggctctctgcccaggcccacccagctggcaagatggcccccaaccccctcctggacaccatgcgccctgactcgctgctgaagatgaccttggggggtgtgaccctgaccttgcttcagacgtctgccccatcttccggaccacctgacctcgccacgcactttttcaccgagtttgatgccaccaaggatgggcccttcggttcccgagacttccatcaccttcgaccacgcttccagagggcctgtccctgtagccatgttcggctaacgggcacagccgtgcagctgtcctgggagctgcggacgggcagtcggggccggcggacaaccagcatggaagtgcacttcgggcagctggaggtgctggagtgtctgtggccccggggcacctctgagcctgagtacacggagatcctgacctttcctggtacgctgggctcccaggcctcagctcggccctgcgcccatctgcgccacacacagatcctgcgccgtgtgcctaagagccgaccccggcgctcagttgcctgccattgccactcagaactggccctggacctggccaacttccaggcggacgtggagctgggggccctggaccggctggccgccctactgcgcctggccaccgtacctgctgagcctccagccggcctgctgacagagcccctgccggcgatggagcagcagacggtatttcggctctctgcaccccgggccacgctgcggctgcgcttccccattgccgacctgcggcctgagcgggacccctgggcgggccaggccgtgcgggctgagcagcttcggctggagctgagtgagccccagttccggtcagagcttagcagtgggcctggtcccccagtccccacccacctggaactcacctgctccgacctacatggtatctatgaagatggagggaagccacctgtcccttgcctgcgtgtctccaaagccctggaccccaagagcactgggcgcaagtacttcctgccccaggtagtggtgactgtgaacccccagtccagcagcacacagtgggaggtggccccggagaagggagaggaactggagctgtcagtggagagtccctgtgagctgcgggaacctgagccctcgcccttctcctctaagaggaccatgtatgagacagaggagatggtgatccctggagaccctgaggagatgaggacgttccagagccggaccctggcactgtcccgctgcagcctggaagtgatcctgcccagtgtccacatctttctgcccagcaaggaggtctacgagagcatctacaacaggatcaacaacgacctgctcatgtgggagcctgcagatctgcttcccacccccgaccccgccgcccagccctcgggcttccccggcccctcaggcttctggcacgacagctttaagatgtgcaagtcagccttcaagctggactcggactcggatgacgaggatgcccacttcttctcagtgggggcatcaggtggcccacaggccgctgcccctgaggccccaagtcttcacttgcagagcaccttctctacactggtgacagtgctgaaggggcggatcacagccctctgtgagaccaaggatgagggtgggaagcggctggaggctgtgcacggggagctggtgctggacatggagcacggtaccctcttcagcgtctcccagtactgtggccagccaggacttggctacttctgtctggaagctgaaaaggcaacactctaccaccgaggatgactacccgctgcccagtcacctggaccttcccagtttcgctcccccggctcagctggccccaaccatctacccatcggaggaaggggtgaccgagcggggagcctcgggccgcaagggccagggccggggaccccacatgttgtccactgctgtgcgcatccacctggacccccacaagaatgtgaaggagttcctggtgacactgcggttgcacaaagccaccttgcgccactacatggccctgcccgagcagagctggcattcccagttgttggagttcctagacgtgctggatgaccctgtgctgggctacctgcccccgacggtcatcaccatcctgcacacacacctgttctcctgctctgtggactataggccactctacctcccagtgcgtgtcctcatcaccgcggagaccttcactctctccagcaacatcatcatggacacctccaccttcctgctcaggttcatcctcgatgactccgccttgtacctgtccgacaagtgtgaggtggagaccctggacctgcggcgagattatgtctgtgttttggatgttgacctcttggaacttgtgattaaaacctggaaagggagcaccgagggcaaactgagccagccactattcgagctgcgctgctccaacaatgtggtacacgtgcacagctgtgccgactcctgtgccctgctggtcaacctgctccagtacgtaatgagcacaggcgatctgcaccccccaccccggccccccagccccacggagatcgccggccagaagctctcggagagtcctgcctctctgccctcgtgccccccagtggagacggccctcatcaaccagcgtgacctggccgacgccctcctggacaccgagcgcagcctacgggagctggcccagccttcaggtggccacctccctcaggcgtcgcccatctccgtctacctattcccaggtgaacggagtggggccccacccccttcaccacctgtcgggggccctgctggcagcttagggtcatgctcagaggagaaggaagatgaaagggaagaggagggcgatggagacaccctggacagtgatgagttctgcatccttgatgctcccggcctgggcatcccgccccgagatggggagcctgtggtgacacagctgcatcccggccccatcgttgtgagggacggttacttctcacggccgatcggcagcacggacttgctgcgggcacctgcccatttcccagtgcccagcactcgggtggtgctacgtgaggtctccctcgtctggcacctctatgggggccgagactttggcccccaccccggccacagggcaagaactggcctctcaggtcccaggagctccccttcccgctgctctggccccaaccggccccagaactcatggcgcacgcaggggggcagcgggcggcagcaccatgtcctcatggagatccagctgagcaaggtaagcttccagcacgaggtgtacccagcggagccagccacaggccctgcggcccccagccaggagctggaggagcgaccgctgtcccgtcaggtgttcatcgtgcaggagctggaggtccgagaccggctcgcctcctcccagatcaacaagttcctgtacctacacacgagtgagcggatgccgcgacgtgcccactctaacatgttagtactttaatcaagcagatatgggagatggtgaattaccatctacagtgttgtcatatatgtcacatactgagcattatcagctagtagaatctagttaattgttctatgtgtgatgtatgcagagttcccattttgaatgtgtttttactatgcttaaataaatgactgatgtcagcaaccccaaaatgatacatctgatgtaagagcccctgttccccaataataacatctaaactatagacattggaatgtacaggtgcccctaagtttcctccctcagcctggatgacagagtgagaccctgtttaaaaaaaaatagttagatttttctcttccgagagactgaa

SEQ ID NO: 347832 - DNA, 279 bp, Homo sapiens
gaagcggctggaggctgtgcacggggagctggtgctggacatggagcacggtaccctcttcagcgtctcccagtactgtggccagccaggacttggctacttctgtctggaagctgaaaaggcaacactctaccaccgaggtgtgaggcctgggggcaggtcaccactggggtccagggttgggggtggagggctttcaggacggatgtgggccctgggtggagtgggtagccagttggcttggcagggggctcatgagacccctccccagcggccgtg

SEQ ID NO: 347833 - DNA, 6306 bp, Homo sapiens
tagtgaacagcggagccggacggggatcgccggcgggcggcaagcggaggcggcccaggcccggcggtctccgagatgtcacgatggctgtggccatggtcaaactgtgtgaaagagcgggtctgccgctacttgctgcaccactacttaggtcacttcttccaagagcacctcagcctggaccagctcagcctcgatctgtacaagggcagcgttgccctgcgagacatccacctggaaatctggtctgtgaacgaggtgctggagtcaatggagtcaccgctggagctggtggaaggcttcgtgggctccatcgaggtggccgtgccctgggctgctctgctcaccgaccactgcacagtgcgcgtgtccggcctccagctcaccttgcagccccgccggggtccagcgccaggggctgccgactcacagagctgggcctcatgcatgaccacaagcctgcagctggcccaggagtgtctgcgggatgggctaccggagccctctgagccaccacagcccctggaggggctggagatgtttgcccagaccattgagactgtgcttcggaggatcaaagtgaccttcctggacactgtcgtgagggtggagcactctccgggtgatggggaacgtggtgtggccgtcgaggtccgtgtgcagagactggagtactgtgatgaggcagtgcgggacccaagccaggcgccgccggtggatgtgcatcagccgcctgccttcctgcacaagctgctgcagctggcaggggtccgcctgcactacgaggagctcccggcacaggaagagcctccagagccccccttgcagatcggcagctgctcagggtacatggagctgatggtgaagttgaagcaaaatgaggccttccctggccccaagttggaggtggcgggacagctgggctccctgcacctgctcctgaccccgaggcagctccagcaacttcaggaactgctcagcgccgtgagccttacagaccacgagggcctggctgacaagctgaacaagagccgcccgctaggtgccgaagacctgtggctgattgagcaggacctgaaccagcagctgcaggcaggggcagtggctgagcccctcagcccagacccccttaccaacccccttctcaacctggataacactgacctcttcttctccatggctggcctcacaagcagtgtggcctcagccctctctgagctctccctctccgatgtagacctggcctcctctgtgcgcagcgacatggcctcccgccggctctctgcccaggcccacccagctggcaagatggcccccaaccccctcctggacaccatgcgccctgactcgctgctgaagatgaccttggggggtgtgaccctgaccttgcttcagacgtctgccccatcttccggaccacctgacctcgccacgcactttttcaccgagtttgatgccaccaaggatgggcccttcggttcccgagacttccatcaccttcgaccacgcttccagagggcctgtccctgtagccatgttcggctaacgggcacagccgtgcagctgtcctgggagctgcggacgggcagtcggggccggcggacaaccagcatggaagtgcacttcgggcagctggaggtgctggagtgtctgtggccccggggcacctctgagcctgagtacacggagatcctgacctttcctggtacgctgggctcccaggcctcagctcggccctgcgcccatctgcgccacacacagatcctgcgccgtgtgcctaagagccgaccccggcgctcagttgcctgccattgccactcagaactggccctggacctggccaacttccaggcggacgtggagctgggggccctggaccggctggccgccctactgcgcctggccaccgtacctgctgagcctccagccggcctgctgacagagcccctgccggcgatggagcagcagacggtatttcggctctctgcaccccgggccacgctgcggctgcgcttccccattgccgacctgcggcctgagcgggacccctgggcgggccaggccgtgcgggctgagcagcttcggctggagctgagtgagccccagttccggtcagagcttagcagtgggcctggtcccccagtccccacccacctggaactcacctgctccgacctacatggtatctatgaagatggagggaagccacctgtcccttgcctgcgtgtctccaaagccctggaccccaagagcactgggcgcaagtacttcctgccccaggtagtggtgactgtgaacccccagtccagcagcacacagtgggaggtggccccggagaagggagaggaactggagctgtcagtggagagtccctgtgagctgcgggaacctgagccctcgcccttctcctctaagaggaccatgtatgagacagaggagatggtgatccctggagaccctgaggagatgaggacgttccagagccggaccctggcactgtcccgctgcagcctggaagtgatcctgcccagtgtccacatctttctgcccagcaaggaggtctacgagagcatctacaacaggatcaacaacgacctgctcatgtgggagcctgcagatctgcttcccacccccgaccccgccgcccagccctcgggcttccccggcccctcaggcttctggcacgacagctttaagatgtgcaagtcagccttcaagctggactcggactcggatgacgaggatgcccacttcttctcagtgggggcatcaggtggcccacaggccgctgcccctgaggccccaagtcttcacttgcagagcaccttctctacactggtgacagtgctgaaggggcggatcacagccctctgtgagaccaaggatgagggtgggaagcggctggaggctgtgcacggggagctggtgctggacatggagcacggtaccctcttcagcgtctcccagtactgtggccagccaggacttggctacttctgtctggaagctgaaaaggcaacactctaccaccgaggatgactacccgctgcccagtcacctggaccttcccagtttcgctcccccggctcagctggccccaaccatctacccatcggaggaaggggtgaccgagcggggagcctcgggccgcaagggccagggccggggaccccacatgttgtccactgctgtgcgcatccacctggacccccacaagaatgtgaaggagttcctggtgacactgcggttgcacaaagccaccttgcgccactacatggccctgcccgagcagagctggcattcccagttgttggagttcctagacgtgctggatgaccctgtgctgggctacctgcccccgacggtcatcaccatcctgcacacacacctgttctcctgctctgtggactataggccactctacctcccagtgcgtgtcctcatcaccgcggagaccttcactctctccagcaacatcatcatggacacctccaccttcctgctcaggttcatcctcgatgactccgccttgtacctgtccgacaagtgtgaggtggagaccctggacctgcggcgagattatgtctgtgttttggatgttgacctcttggaacttgtgattaaaacctggaaagggagcaccgagggcaaactgagccagccactattcgagctgcgctgctccaacaatgtggtacacgtgcacagctgtgccgactcctgtgccctgctggtcaacctgctccagtacgtaatgagcacaggcgatctgcaccccccaccccggccccccagccccacggagatcgccggccagaagctctcggagagtcctgcctctctgccctcgtgccccccagtggagacggccctcatcaaccagcgtgacctggccgacgccctcctggacaccgagcgcagcctacgggagctggcccagccttcaggtggccacctccctcaggcgtcgcccatctccgtctacctattcccaggtgaacggagtggggccccacccccttcaccacctgtcgggggccctgctggcagcttagggtcatgctcagaggagaaggaagatgaaagggaagaggagggcgatggagacaccctggacagtgatgagttctgcatccttgatgctcccggcctgggcatcccgccccgagatggggagcctgtggtgacacagctgcatcccggccccatcgttgtgagggacggttacttctcacggccgatcggcagcacggacttgctgcgggcacctgcccatttcccagtgcccagcactcgggtggtgctacgtgaggtctccctcgtctggcacctctatgggggccgagactttggcccccaccccggccacagggcaagaactggcctctcaggtcccaggagctccccttcccgctgctctggccccaaccggccccagaactcatggcgcacgcaggggggcagcgggcggcagcaccatgtcctcatggagatccagctgagcaaggtaagcttccagcacgaggtgtacccagcggagccagccacaggccctgcggcccccagccaggagctggaggagcgaccgctgtcccgtcaggtgttcatcgtgcaggagctggaggtccgagaccggctcgcctcctcccagatcaacaagttcctgtacctacacacgagtgagcggatgccgcgacgtgcccactctaacatgctcaccatcaaagcgctgcatgtggcccccactaccaacctgggtgggcctgagtgctgtctccgcgtctcgctgatgcccctgcggctcaatgtggaccaggatgccctcttcttcctcaaggacttcttcactagtctggtggccggcatcaaccccgtggtcccaggggagacctccgctgaggctcgccccgagactcgagcccagcccagcagccccctggaagggcaggccgaaggcgtagagaccactggttcgcaggaggccccaggaggtggacacagcccctcccctcctgaccagcagcccatctacttcagagagttccgcttcacgtctgaggtccccatctggctggattaccatggcaagcacgtcacgatggaccaggtgggcacttttgctggcctcctcatcggcctggcccaactcaactgctccgagctgaagctaaagcggctctgttgcaggcacgggctcctgggtgtggacaaggtgctgggctatgccctcaacgagtggctgcaggacatccgcaagaaccagctgcccggcctgctgggaggcgtgggccccatgcactcggttgtccagctcttccaagggttccgggacctgctgtggctgcccattgagcagtacaggaaggatggccgcctcatgcgggggctgcagcgaggggctgcctcctttggctcatccacagcctctgccgccctggaactcagcaaccggttggtacaggctatccaggccacagctgagaccgtgtatgacatcctgtccccggcagcccccgtctcccgctccctgcaggataagcgctctgcgcggaggctgcgcaggggccagcagcctgccgacctgcgggagggtgtggccaaggcctacgacacagtgcgagagggcatcttggatacagctcagaccatctgtgacgtggcatcgcggggccatgagcagaaggggctgacgggcgccgtggggggcgtgatccgccagctgcccccgactgtggtgaagccgctcatcctggccacggaggccacgtccagcctgctcgggggcatgcgcaaccagattgtccccgacgcccacaaggaccacgccctcaagtggcgctcggacagtgcccaagactgagcctggggtgcccggcacccagagggtgctgcccaccatgctcctgagcctcccaagagctgcagcccacgggcccggcccggcctggcccttcaggggatggccactgtgaaggacgccttcccagcctgcccgttgccaatctgctgtgagaggggggcctccctgccttggggccttagccctggctctgcacttttcctccggggagaaaggacactgcccctcccccgacctgggcccacactgctgccttctcccaggacggaggcttttggaccctcggaccccatcccactcagccaagtgtctttctgtgtctggggggaggaggggatgatatccgtgtggttcgatgtattatttttaagctccgtgagtgcgtgggtcagtgtctgcatgaagtggaataaactgcccaccgccagcccccctctcagatcctc

SEQ ID NO: 347834 - DNA, 6401 bp, Homo sapiens
tagtgaacagcggagccggacggggatcgccggcgggcggcaagcggaggcggcccaggcccggcggtctccgagatgtcacgatggctgtggccatggtcaaactgtgtgaaagagcgggtctgccgctacttgctgcaccactacttaggtcacttcttccaagagcacctcagcctggaccagctcagcctcgatctgtacaagggcagcgttgccctgcgagacatccacctggaaatctggtctgtgaacgaggtgctggagtcaatggagtcaccgctggagctggtggaaggcttcgtgggctccatcgaggtggccgtgccctgggctgctctgctcaccgaccactgcacagtgcgcgtgtccggcctccagctcaccttgcagccccgccggggtccagcgccaggggctgccgactcacagagctgggcctcatgcatgaccacaagcctgcagctggcccaggagtgtctgcgggatgggctaccggagccctctgagccaccacagcccctggaggggctggagatgtttgcccagaccattgagactgtgcttcggaggatcaaagtgaccttcctggacactgtcgtgagggtggagcactctccgggtgatggggaacgtggtgtggccgtcgaggtccgtgtgcagagactggagtactgtgatgaggcagtgcgggacccaagccaggcgccgccggtggatgtgcatcagccgcctgccttcctgcacaagctgctgcagctggcaggggtccgcctgcactacgaggagctcccggcacaggaagagcctccagagccccccttgcagatcggcagctgctcagggtacatggagctgatggtgaagttgaagcaaaatgaggccttccctggccccaagttggaggtggcgggacagctgggctccctgcacctgctcctgaccccgaggcagctccagcaacttcaggaactgctcagcgccgtgagccttacagaccacgagggcctggctgacaagctgaacaagagccgcccgctaggtgccgaagacctgtggctgattgagcaggacctgaaccagcagctgcaggcaggggcagtggctgagcccctcagcccagacccccttaccaacccccttctcaacctggataacactgacctcttcttctccatggctggcctcacaagcagtgtggcctcagccctctctgagctctccctctccgatgtagacctggcctcctctgtgcgcagcgacatggcctcccgccggctctctgcccaggcccacccagctggcaagatggcccccaaccccctcctggacaccatgcgccctgactcgctgctgaagatgaccttggggggtgtgaccctgaccttgcttcagacgtctgccccatcttccggaccacctgacctcgccacgcactttttcaccgagtttgatgccaccaaggatgggcccttcggttcccgagacttccatcaccttcgaccacgcttccagagggcctgtccctgtagccatgttcggctaacgggcacagccgtgcagctgtcctgggagctgcggacgggcagtcggggccggcggacaaccagcatggaagtgcacttcgggcagctggaggtgctggagtgtctgtggccccggggcacctctgagcctgagtacacggagatcctgacctttcctggtacgctgggctcccaggcctcagctcggccctgcgcccatctgcgccacacacagatcctgcgccgtgtgcctaagagccgaccccggcgctcagttgcctgccattgccactcagaactggccctggacctggccaacttccaggcggacgtggagctgggggccctggaccggctggccgccctactgcgcctggccaccgtacctgctgagcctccagccggcctgctgacagagcccctgccggcgatggagcagcagacggtatttcggctctctgcaccccgggccacgctgcggctgcgcttccccattgccgacctgcggcctgagcgggacccctgggcgggccaggccgtgcgggctgagcagcttcggctggagctgagtgagccccagttccggtcagagcttagcagtgggcctggtcccccagtccccacccacctggaactcacctgctccgacctacatggtatctatgaagatggagggaagccacctgtcccttgcctgcgtgtctccaaagccctggaccccaagagcactgggcgcaagtacttcctgccccaggtagtggtgactgtgaacccccagtccagcagcacacagtgggaggtggccccggagaagggagaggaactggagctgtcagtggagagtccctgtgagctgcgggaacctgagccctcgcccttctcctctaagaggaccatgtatgagacagaggagatggtgatccctggagaccctgaggagatgaggacgttccagagccggaccctggcactgtcccgctgcagcctggaagtgatcctgcccagtgtccacatctttctgcccagcaaggaggtctacgagagcatctacaacaggatcaacaacgacctgctcatgtgggagcctgcagatctgcttcccacccccgaccccgccgcccagccctcgggcttccccggcccctcaggcttctggcacgacagctttaagatgtgcaagtcagccttcaagctggactcggactcggatgacgaggatgcccacttcttctcagtgggggcatcaggtggcccacaggccgctgcccctgaggccccaagtcttcacttgcagagcaccttctctacactggtgacagtgctgaaggggcggatcacagccctctgtgagaccaaggatgagggtgggaagcggctggaggctgtgcacggggagctggtgctggacatggagcacggtaccctcttcagcgtctcccagtactgtggccagccaggacttggctacttctgtctggaagctgaaaaggcaacactctaccaccgaggatgactacccgctgcccagtcacctggaccttcccagtttcgctcccccggctcagctggccccaaccatctacccatcggaggaaggggtgaccgagcggggagcctcgggccgcaagggccagggccggggaccccacatgttgtccactgctgtgcgcatccacctggacccccacaagaatgtgaaggagttcctggtgacactgcggttgcacaaagccaccttgcgccactacatggccctgcccgagcagagctggcattcccagttgttggagttcctagacgtgctggatgaccctgtgctgggctacctgcccccgacggtcatcaccatcctgcacacacacctgttctcctgctctgtggactataggccactctacctcccagtgcgtgtcctcatcaccgcggagaccttcactctctccagcaacatcatcatggacacctccaccttcctgctcaggttcatcctcgatgactccgccttgtacctgtccgacaagtgtgaggtggagaccctggacctgcggcgagattatgtctgtgttttggatgttgacctcttggaacttgtgattaaaacctggaaagggagcaccgagggcaaactgagccagccactattcgagctgcgctgctccaacaatgtggtacacgtgcacagctgtgccgactcctgtgccctgctggtcaacctgctccagtacgtaatgagcacaggcgatctgcaccccccaccccggccccccagccccacggagatcgccggccagaagctctcggagagtcctgcctctctgccctcgtgccccccagtggagacggccctcatcaaccagcgtgacctggccgacgccctcctggacaccgagcgcagcctacgggagctggcccagccttcaggtggccacctccctcaggcgtcgcccatctccgtctacctattcccaggtgaacggagtggggccccacccccttcaccacctgtcgggggccctgctggcagcttagggtcatgctcagaggagaaggaagatgaaagggaagaggagggcgatggagacaccctggacagtgatgagttctgcatccttgatgctcccggcctgggcatcccgccccgagatggggagcctgtggtgacacagctgcatcccggccccatcgttgtgagggacggttacttctcacggccgatcggcagcacggacttgctgcgggcacctgcccatttcccagtgcccagcactcgggtggtgctacgtgaggtctccctcgtctggcacctctatgggggccgagactttggcccccaccccggccacagggcaagaactggcctctcaggtcccaggagctccccttcccgctgctctggccccaaccggccccagaactcatggcgcacgcaggggggcagcgggcggcagcaccatgtcctcatggagatccagctgagcaaggtaagcttccagcacgaggtgtacccagcggagccagccacaggccctgcggcccccagccaggagctggaggagcgaccgctgtcccgtcaggtgttcatcgtgcaggagctggaggtccgagaccggctcgcctcctcccagatcaacaagttcctgtacctacacacgagtgagcggatgccgcgacgtgcccactctaacatgctcaccatcaaagcgctgcatgtggcccccactaccaacctgggtgggcctgagtgctgtctccgcgtctcgctgatgcccctgcggctcaatgtggaccaggatgccctcttcttcctcaaggacttcttcactagtctggtggccggcatcaaccccgtggtcccaggggagacctccgctgaggctcgccccgagactcgagcccagcccagcagccccctggaagggcaggccgaaggcgtagagaccactggttcgcaggaggccccaggaggtggacacagcccctcccctcctgaccagcagcccatctacttcaggtaggctgctggactgcgggtggggggccctgggccagattgctgggggccaggccagtgagcaaagaaccccctcttcctgctcccctacccagagagttccgcttcacgtctgaggtccccatctggctggattaccatggcaagcacgtcacgatggaccaggtgggcacttttgctggcctcctcatcggcctggcccaactcaactgctccgagctgaagctaaagcggctctgttgcaggcacgggctcctgggtgtggacaaggtgctgggctatgccctcaacgagtggctgcaggacatccgcaagaaccagctgcccggcctgctgggaggcgtgggccccatgcactcggttgtccagctcttccaagggttccgggacctgctgtggctgcccattgagcagtacaggaaggatggccgcctcatgcgggggctgcagcgaggggctgcctcctttggctcatccacagcctctgccgccctggaactcagcaaccggttggtacaggctatccaggccacagctgagaccgtgtatgacatcctgtccccggcagcccccgtctcccgctccctgcaggataagcgctctgcgcggaggctgcgcaggggccagcagcctgccgacctgcgggagggtgtggccaaggcctacgacacagtgcgagagggcatcttggatacagctcagaccatctgtgacgtggcatcgcggggccatgagcagaaggggctgacgggcgccgtggggggcgtgatccgccagctgcccccgactgtggtgaagccgctcatcctggccacggaggccacgtccagcctgctcgggggcatgcgcaaccagattgtccccgacgcccacaaggaccacgccctcaagtggcgctcggacagtgcccaagactgagcctggggtgcccggcacccagagggtgctgcccaccatgctcctgagcctcccaagagctgcagcccacgggcccggcccggcctggcccttcaggggatggccactgtgaaggacgccttcccagcctgcccgttgccaatctgctgtgagaggggggcctccctgccttggggccttagccctggctctgcacttttcctccggggagaaaggacactgcccctcccccgacctgggcccacactgctgccttctcccaggacggaggcttttggaccctcggaccccatcccactcagccaagtgtctttctgtgtctggggggaggaggggatgatatccgtgtggttcgatgtattatttttaagctccgtgagtgcgtgggtcagtgtctgcatgaagtggaataaactgcccaccgccagcccccctctcagatcctc

SEQ ID NO: 347835 - DNA, 5565 bp, Homo sapiens
tagtgaacagcggagccggacggggatcgccggcgggcggcaagcggaggcggcccaggcccggcggtctccgagatgtcacgatggctgtggccatggtcaaactgtgtgaaagagcgggtctgccgctacttgctgcaccactacttaggtcacttcttccaagagcacctcagcctggaccagctcagcctcgatctgtacaagggcagcgttgccctgcgagacatccacctggaaatctggtctgtgaacgaggtgctggagtcaatggagtcaccgctggagctggtggaaggcttcgtgggctccatcgaggtggccgtgccctgggctgctctgctcaccgaccactgcacagtgcgcgtgtccggcctccagctcaccttgcagccccgccggggtccagcgccaggggctgccgactcacagagctgggcctcatgcatgaccacaagcctgcagctggcccaggagtgtctgcgggatgggctaccggagccctctgagccaccacagcccctggaggggctggagatgtttgcccagaccattgagactgtgcttcggaggatcaaagtgaccttcctggacactgtcgtgagggtggagcactctccgggtgatggggaacgtggtgtggccgtcgaggtccgtgtgcagagactggagtactgtgatgaggcagtgcgggacccaagccaggcgccgccggtggatgtgcatcagccgcctgccttcctgcacaagctgctgcagctggcaggggtccgcctgcactacgaggagctcccggcacaggaagagcctccagagccccccttgcagatcggcagctgctcagggtacatggagctgatggtgaagttgaagcaaaatgaggccttccctggccccaagttggaggtggcgggacagctgggctccctgcacctgctcctgaccccgaggcagctccagcaacttcaggaactgctcagcgccgtgagccttacagaccacgagggcctggctgacaagctgaacaagagccgcccgctaggtgccgaagacctgtggctgattgagcaggacctgaaccagcagctgcaggcaggggcagtggctgagcccctcagcccagacccccttaccaacccccttctcaacctggataacactgacctcttcttctccatggctggcctcacaagcagtgtggcctcagccctctctgagctctccctctccgatgtagacctggcctcctctgtgcgcagcgacatggcctcccgccggctctctgcccaggcccacccagctggcaagatggcccccaaccccctcctggacaccatgcgccctgactcgctgctgaagatgaccttggggggtgtgaccctgaccttgcttcagacgtctgccccatcttccggaccacctgacctcgccacgcactttttcaccgagtttgatgccaccaaggatgggcccttcggttcccgagacttccatcaccttcgaccacgcttccagagggcctgtccctgtagccatgttcggctaacgggcacagccgtgcagctgtcctgggagctgcggacgggcagtcggggccggcggacaaccagcatggaagtgcacttcgggcagctggaggtgctggagtgtctgtggccccggggcacctctgagcctgagtacacggagatcctgacctttcctggtacgctgggctcccaggcctcagctcggccctgcgcccatctgcgccacacacagatcctgcgccgtgtgcctaagagccgaccccggcgctcagttgcctgccattgccactcagaactggccctggacctggccaacttccaggcggacgtggagctgggggccctggaccggctggccgccctactgcgcctggccaccgtacctgctgagcctccagccggcctgctgacagagcccctgccggcgatggagcagcagacggtatttcggctctctgcaccccgggccacgctgcggctgcgcttccccattgccgacctgcggcctgagcgggacccctgggcgggccaggccgtgcgggctgagcagcttcggctggagctgagtgagccccagttccggtcagagcttagcagtgggcctggtcccccagtccccacccacctggaactcacctgctccgacctacatggtatctatgaagatggagggaagccacctgtcccttgcctgcgtgtctccaaagccctggaccccaagagcactgggcgcaagtacttcctgccccaggtagtggtgactgtgaacccccagtccagcagcacacagtgggaggtggccccggagaagggagaggaactggagctgtcagtggagagtccctgtgagctgcgggaacctgagccctcgcccttctcctctaagaggaccatgtatgagacagaggagatggtgatccctggagaccctgaggagatgaggacgttccagagccggaccctggcactgtcccgctgcagcctggaagtgatcctgcccagtgtccacatctttctgcccagcaaggaggtctacgagagcatctacaacaggatcaacaacgacctgctcatgtgggagcctgcagatctgcttcccacccccgaccccgccgcccagccctcgggcttccccggcccctcaggcttctggcacgacagctttaagatgtgcaagtcagccttcaagctggactcggactcggatgacgaggatgcccacttcttctcagtgggggcatcaggtggcccacaggccgctgcccctgaggccccaagtcttcacttgcagagcaccttctctacactggtgacagtgctgaaggggcggatcacagccctctgtgagaccaaggatgagggtgggaagcggctggaggctgtgcacggggagctggtgctggacatggagcacggtaccctcttcagcgtctcccagtactgtggccagccaggacttggctacttctgtctggaagctgaaaaggcaacactctaccaccgaggatgactacccgctgcccagtcacctggaccttcccagtttcgctcccccggctcagctggccccaaccatctacccatcggaggaaggggtgaccgagcggggagcctcgggccgcaagggccagggccggggaccccacatgttgtccactgctgtgcgcatccacctggacccccacaagaatgtgaaggagttcctggtgacactgcggttgcacaaagccaccttgcgccactacatggccctgcccgagcagagctggcattcccagttgttggagttcctagacgtgctggatgaccctgtgctgggctacctgcccccgacggtcatcaccatcctgcacacacacctgttctcctgctctgtggactataggccactctacctcccagtgcgtgtcctcatcaccgcggagaccttcactctctccagcaacatcatcatggacacctccaccttcctgctcaggttcatcctcgatgactccgccttgtacctgtccgacaagtgtgaggtggagaccctggacctgcggcgagattatgtctgtgttttggatgttgacctcttggaacttgtgattaaaacctggaaagggagcaccgagggcaaactgagccagccactattcgagctgcgctgctccaacaatgtggtacacgtgcacagctgtgccgactcctgtgccctgctggtcaacctgctccagtacgtaatgagcacaggcgatctgcaccccccaccccggccccccagccccacggagatcgccggccagaagctctcggagagtcctgcctctctgccctcgtgccccccagtggagacggccctcatcaaccagcgtgacctggccgacgccctcctggacaccgagcgcagcctacgggagctggcccagccttcaggtggccacctccctcaggcgtcgcccatctccgtctacctattcccaggtgaacggagtggggccccacccccttcaccacctgtcgggggccctgctggcagcttagggtcatgctcagaggagaaggaagatgaaagggaagaggagggcgatggagacaccctggacagtgatgagttctgcatccttgatgctcccggcctgggcatcccgccccgagatggggagcctgtggtgacacagctgcatcccggccccatcgttgtgagggacggttacttctcacggccgatcggcagcacggacttgctgcgggcacctgcccatttcccagtgcccagcactcgggtggtgctacgtgaggtctccctcgtctggcacctctatgggggccgagactttggcccccaccccggccacagggcaagaactggcctctcaggtcccaggagctccccttcccgctgctctggccccaaccggccccagaactcatggcgcacgcaggggggcagcgggcggcagcaccatgtcctcatggagatccagctgagcaaggtaagcttccagcacgaggtgtacccagcggagccagccacaggccctgcggcccccagccaggagctggaggagcgaccgctgtcccgtcaggtgttcatcgtgcaggagctggaggtccgagaccggctcgcctcctcccagatcaacaagttcctgtacctacacacgagtgagcggatgccgcgacgtgcccactctaacatgctcaccatcaaagcgctgcatgtggcccccactaccaacctgggtgggcctgagtgctgtctccgcgtctcgctgatgcccctgcggctcaatgtggaccaggatgccctcttcttcctcaaggacttcttcactagtctggtggccggcatcaaccccgtggtcccaggggagacctccgctgaggctcgccccgagactcgagcccagcccagcagccccctggaagggcaggccgaaggcgtagagaccactggttcgcaggaggccccaggaggtggacacagcccctcccctcctgaccagcagcccatctacttcagagagttccgcttcacgtctgaggtccccatctggctggattaccatggcaagcacgtcacgatggaccaggtgggcacttttgctggcctcctcatcggcctggcccaactcaactgctccgagctgaagctaaagcggctctgttgcaggcacgggtgagtccccagcaccccagcctctctccagggtccctgatcttccttctgttctggtcctgactggttgtgtggccttggccaagtcatcacccttctcagggcctcaatttctcctctgtaaaaaggacgcagttggctgggcatgatggctcacacattcaggcattcgagaccagcctgaccaacatggtgaaacccccccgtctctactaaaaatacaaaaattagccaggcgtggtggcatacacatgtaatcccagctactcaggaggctgaggcaggagaactgcttgaacctgggaggcggttgcagtgagccaagatcgcaccacttcactccagcctgggcaacggagcaagactccatct

SEQ ID NO: 347836 - DNA, 736 bp, Homo sapiens
atgtcattctactgcttaaactttttcatggctctccaaagtttacaagataaactctcatctttttggtatggcatgttgtgcgactgtcaggatatggccaacacctacctgacgacaatatggatccattttttcctacttaacattagaaaatacccaatttctgggtcattaaaatctcacaaaatatatgtggacagtttcttccctttctcttgaacatttagagtgtttccaatataattgtgacattataaatactactgcaaagaaccacgtagtgaggttttatttttgtttgcttgttttatcaggagtagtcatgttatttcctcagaatatagtcctagctatagacttactgttcaaaggaatgatgttataaatcattcagcttcctcatacgacccttccccttgcttctaataaactccattctttaggactcagctcggatttttttgatggaaaaactttctattccccaactttttagccagcctctctgtagttccacaaacatggtgcaaaactctatcataacacatatcaaaataactgtagttatgacttttcttcttcattaaactataaatcctttctgtaaagactcattcttcttgtatctgtaactttctagtgttacagatgtaaggaaatactaactatatataaactaaatttccagcagtatataaaataagacaaaaatgcctgtcctcccagagctgac

SEQ ID NO: 347837 - DNA, 813 bp, Homo sapiens
tcccgtctggtaaatgagaaatggtatcttgtagttgttttacaatatgtgtttatctaattctgagtaagtctgttcgagggtcattgttctattttattttgtgcattgtctgtccgtgtctttttcttccacctttctgtgagggcttgatcctttgttccttgatatttaaaagcactttatataccataaatatcagcccttcgtctgtggcatatgttaggaatatttctctcagtttgtcaagtactttgtcttctgactttgtttaaggtgttctgtgatttttttttttgtcgaaaatttaaaaatgttcatgtaataaaactgatcagtttttttattttattgcctctagatcttaagtcatagttagaaagcctttcccacccacaagtttaaaaaggaatttacccatgttttcatttagtagttgtatcattgtttacatctagatcccaaatccacttggagttcatctctctgtatggtgtgagacttgaatcaaatttcaccttttcccacatagctacccagtagtccgagcaccatttattaaaaagtctgtcttaaccccagtgacctgtgataccacctttgttatgtactgtatttccgtagacatttgggtctaattctgaacttactattatctttggtctatttgccaattcacacaccagtaagcacactgttttaattacagaggctttccagtatgttttactatctggcaggaatagttttacttcttctttacccctttctaatgcttctaattgacttctctcatttaatcacatttgctaa

SEQ ID NO: 347838 - DNA, 425 bp, Homo sapiens
gctgaagccaggaaatgacccaacattgagggtaatctgggcactgaaggcactacaattcccaggatttttcaagaaaatgtcgaatgtgctgccacatatgtcggatgcacatggatcccctcccacaaggaaaatcacgattgaagatcacctccttgaagatgtcgtattgggagcggtgtttttccctgttgctgacaggttagacttgcacaggcgtcagtactgaggtgtgagacggagcccatgtatggcttctatctctgcactgtggctgctccgttcatgtgtcagtcacatcagctcagagactgcctaatgtcaactggcctagtcattttgtctactctgttgttcagtgcctcttctgtgattgatgctttctagtgttcatgaatacaagagccaaaaatcttcacata

SEQ ID NO: 347839 - DNA, 1638 bp, Homo sapiens
cccacgcccctcagatgagtctcacgccaatggcaggaacagatccgagctattagaagtctcgggaacctccagagatgacagaaggtggcagatttggtccaagccctcaccccactcgagaggagggcgtcggggaaagctgtggctgcctggagagggagcccctgatcccacacttccttggagcctgagtgtgagaggaagctaatgtcagccgggctagacaccgtttaaagtctaatccatgaaaccctaagccgcaaatgacacttggggctttgcagacacccgcagactcagcagatactcctgcggtaacacactgtgctggaaaacgcctggagccatgacacattatgtatttttattattatttatggtaggaagaggagatgagggaaaatcgggctgaatctaagcagcctgacaattcagctagttaatatttagccagttaagaaaggtggttgtaatccctgcaaggcagtgagctctcctttgatttctctaatagcttaaaaaataatttcttacaagacaattagaaattctgcctatggatgcaaatttcatagaaaacaatgttaagccttgaaagtgggtaaaatgtgccttcgattgaagtcatttattctgttgatacacttctacaacatatatattttaaacctgctcagataaagtgaaatttagcaaaaggatatcccctcccacccccaaatctaacatgccattttaaaaacagcacaaaggaacaaggaaactaaatattattttgagccatcattacttagtgaaatacaaacatccaaatagaaacgattgttgttccaccagaagattagaagttaaattatttccacacaataggaatttcacttcgtgtcatcggggatgtagtaggagttgcattatttgtcaaaccaaatagagatgcgtgggctgactttgctgaaatacaaaagaattgaaccttatctgaaggcgttttctaagtggcccctcccatagaagccgggaagttgtccacccctagcagaagccacattaatatttacaaaatggttataaatccttgaagacatttttgcccattttgtataagaaacaggagtaaacaaggtgtttatacttgttatgtttcattaatgaaatattattactttacatcttggggaatgtttgttttctttagaaatgaactaatgatcactacaaaggaagaattcatgacagcatttcctagagaaaaagcttaggtacgcgtctccaaatgatggtttctttttctacaccttagctttttcatagctcaattcttcttacaacttctcttgtgttttttctttgattgtcagttttctttcaaagtttattttttgttacttaatgcagaaaagtgagctctggtctccccagtgtaaaagtcgattgtgtctagaaagaaggcagtaaaaacagcaaagcaggcgctgctttcaaaaagccctgcccaaatcatcccgcccagaaccttcttaggtttgcatcctcatttccccctcccctaatttcaatagctggaaagtaatcaagtatcccgagaaccaatttatgcactagactccaaataaataaaatatttttttcaaagtg

SEQ ID NO: 347840 - DNA, 434 bp, Homo sapiens
atcacctaccaccccacacagccaggcccccacttcctcaccaactcagacagaagattagagattttctctctggtaagattaaacagaatgactgtggacaccaggcacagctgagagaagggtttaggtgccaagctgaaaacgagattaatggaaagctgcaatgttgaacaaggaagctccttccccaacttggtttcctggacagaaatcggagaatttctctccaaggatgtgaccagtccaaaagaaaaaatctttaggagtcctccagagagaggatgcaatccacccacccattaacaagctccatcctcatgcaaaaaacttccaagcagcttttcagtgtctcactttcaaatatgatgagtcaactaaagattatcagacatatgaaaaactcttctgaaataaaagacctgcagtttaca

SEQ ID NO: 347841 - DNA, 343 bp, Homo sapiens
ggactggtctgtagtactcacaaggcgggatgcggtagcctgtacgcctgtgtgctgacacaatggtcggaattgtttcatctgtgtgtttccaggtggcttgataatgtacaatgatttcagttccagggaagaagaaggagccattcgatactcagtccactgcacccggctatacgagaactcttttaatagctaagttttccaggcgatgtagtatgaaaatcaaacccgtccatgtttgcattgactcgactctgatgtaaagacactgggttttgatcctgaactccatttcgaaattcagaaacgccgtagataaacagggcttcctgtcttcact

SEQ ID NO: 347842 - DNA, 1523 bp, Homo sapiens
gcactttggagtattgagaaagattgtcctggaaaaatacgtcacacacagttgcaggaaagagtgcctttaagcacacataaaaactcggttacttggctttgtttatgaattccacatagaaacaacagaaaattgtgccttttgaggaactgcttgagaatccttccttctgcatttcaagacaagattttaaaaatcacatatatcaaatatatggggaaatgagacacaatgtttttagagagtgtctagaaataataggactgtgcaagttagtacagcaaaattttgggtcaaagcatgggtcatttgacaaactctctttatgaacattacctctgcaatatttttctaaatgaaaacaatcacacttaatagaattaatcaggatgggagctagaagcatataattcactttccacagattggagtaaatcctcataatgcccctttcctgtgtatttagttaaaaaagcactccagtgagattgctttcgcagtaagtttctgtaaaccactgtacccttgtatttctctcctgtgtttccaagagttctcagatgctattttcgaatggcagcgttcactccagagctggctgaggtcaacgaagctaattttggtgccttggtgcccagggtgaagggagagagaagtcctctgcagagccaaaaggactctctggggcctgggtttggagcagtgtggtgttgctggacacaccacatttcacctttagaacctttatttgtgtgcttgcacaacaaatgtttacccagatattaagataaggaaagtatgaaggtcacatttcactggtgacaagagagcttctataaatgtaaccatatcgttgtgcagcgggagtctgtcttttattctgtacccgggacttagggggaattattggtgggtggggcatgggagttgaggctcttcttggttttctggctttcttgctatcactctgtttgtcttgcctcagctgatgtgcgcctcccatttggtaagggcctttgtcatggccaagacatctaaagaaatcctagtctgtgtggctgggcactgtgtggtcccctgactctctggagtcttccagagttccatggaaattagtgcccccgtgcatttccctgccgactgactggaaggcaccctggctgctgagatcgctttcctggtcccccagaagaggtccacatggtgctgatcctgcagctgttttaggcctcctcagcgggattgtcctatcctcggagcacagagaatcttcagagtgggataggggtttcttttgtggatttgggtttctcttagggatctccaaagattagctagacactcagggcctcagtaaagacatgggtccttggtctagttttcttcccaagggcagccaccatggcagtgggagttcaccttgctgactgcaagggaccccacctcacctctatcgcccattcaccatcattcactgtgcctcctgagttcctaatacacaagcctcctcccacagctca

SEQ ID NO: 347843 - DNA, 637 bp, Homo sapiens
gtgtcgaccttgtgggtcatcttgcacctttgcaaacgaggaattcccctctgtgccctgataaatcagcacctcagtggacttgccaggaggtttcctgatgtcaaatttatcaaagccaattcaaccacccgcatacccaattatcctgataggaatctgcccatggtatttgtttacttggaaggagacatcaaggctcagttgatcggtcctctggtgtttggcggcatgaacctgaccagagatgagttggggtggaaactgtctgaatctagagcagttaagacggacttggaggaaaaccctaagaagccgattgaaggtgtattgctgtcttcagtgcagagctctgtccccatgaggagggacagcgattccaagggtgactgaggctgcagctgctatcacatgctgaactttcttgtgacaaattgtctggatttctttaagaaaaggaaaagcaagaatgaatccttctggtttttagttttgtataaattatgtttcaaatctttacattttagaaataataattgctggaaattctgttaaatattttggaactctttttttaaactatagtatttcctctaaaaaaattaaaaccagctattggtatggcaaaaaaaaaaaa

SEQ ID NO: 347844 - DNA, 819 bp, Homo sapiens
gaaaagaaagatgttgtaaccctaaccctggagccgaacttcctctcctaacaatgctggggaggaacccaggctgggggagaagttaaagccagaggaggggcaggaatgtctgaggtggcaacacttctcttcagccagacagcactggccagtttggagtctgtccatcctgcaggccacaagctctggatgaggaacttgaggcaagtcaccagcccctgatcatttcgcctaaaagagcaaggactagagttcctgacctccaggccagtccctgatccctgacctaatgttatcgcggaatgatgatatatgtatctacgggggcctggggctgggcgggctcctgcttctggcagtggtccttctgtccgcctgcctgtgttggctgcatcgaagagtaaagaggctggagaggagctgggcccagggctcctcagagcaggaactccactatgcatctctgcagaggctgccagtgcccagcagtgagggacctgacctcaggggcagagacaagagaggcaccaaggaggatccaagagctgactatgcctgcattgctgagaacaaacccacctgagcaccccagacaccttcctcaacccaggcgggtggacagggtccccctgtggtccagccagtaaaaaccatggtccccccacttctgtgtctcagtcctctcagtccatctcgagcctccgttcaaattgatcatcatcaaaacttatgtggctttttgacctttgaatagggaattttttaaattttttaaaaattaaaataaaaaaaacacatggctcacccttccaccca

SEQ ID NO: 347845 - DNA, 658 bp, Homo sapiens
gaaaagaaagatgttgtaaccctaaccctggagccgaacttcctctcctaacaatgctggggaggaacccaggctgggggagaagttaaagccagaggaggggcaggaatgtctgaggtggcaacacttctcttcagccagacagcactggccagtttggagtctgtccatcctgcaggccacaagctctggatgaggaacttgaggcaagtcaccagcccctgatcatttcgcctaaaagagcaaggactagagttcctgacctccaggccagtccctgatccctgacctaatgttatcgcggaatgatgaggctgccagtgcccagcagtgagggacctgacctcaggggcagagacaagagaggcaccaaggaggatccaagagctgactatgcctgcattgctgagaacaaacccacctgagcaccccagacaccttcctcaacccaggcgggtggacagggtccccctgtggtccagccagtaaaaaccatggtccccccacttctgtgtctcagtcctctcagtccatctcgagcctccgttcaaattgatcatcatcaaaacttatgtggctttttgacctttgaatagggaattttttaaattttttaaaaattaaaataaaaaaaacacatggctcacccttccaccca

SEQ ID NO: 347846 - DNA, 529 bp, Homo sapiens
gaaaagaaagatgttgtaaccctaaccctggagccgaacttcctctcctaacaatgctggggaggaacccaggctgggggagaagttaaagccagaggaggggcaggaatgtctgaggtggcaacacttctcttcagccagacagcactggccagtttggagtctgtccatcctgcaggccacaagctctggatgaggaacttgaggcaagtcaccagcccctgatcatttcgcctaaaagagcaaggactagagttcctgacctccaggccagtccctgatccctgacctaatgttatcgcggaatgatgtaaagaggctggagaggagctggaggctgccagtgcccagcagtgagggacctgacctcaggggcagagacaagagaggcaccaaggaggatccaagagctgactatgcctgcattgctgagaacaaacccacctgagcaccccagacaccttcctcaacccaggcgggtggacagggtccccctgtggtccagccagtaaaaaccatggtcccccca

SEQ ID NO: 347847 - DNA, 506 bp, Homo sapiens
gaaaagaaagatgttgtaaccctaaccctggagccgaacttcctctcctaacaatgctggggaggaacccaggctgggggagaagttaaagccagaggaggggcaggaatgtctgaggtggcaacacttctcttcagccagacagcactggccagtttggagtctgtccatcctgcaggccacaagctctggatgaggaacttgaggcaagtcaccagcccctgatcatttcgcctaaaagagcaaggactagagttcctgacctccaggccagtccctgatccctgacctaatgttatcgcggaatgatgaggctgccagtgcccagcagtgagggacctgacctcaggggcagagacaagagaggcaccaaggaggatccaagagctgactatgcctgcattgctgagaacaaacccacctgagcaccccagacaccttcctcaacccaggcgggtggacagggtccccctgtggtccagccagtaaaaaccatggtcccccca

SEQ ID NO: 347848 - DNA, 915 bp, Homo sapiens
  misc_feature (692)..(692): n is a, c, g, or t
gaaaagaaagatgttgtaaccctaaccctggagccgaacttcctctcctaacaatgctggggaggaacccaggctgggggagaagttaaagccagaggaggggcaggaatgtctgaggtggcaacacttctcttcagccagacagcactggccagtttggagtctgtccatcctgcaggccacaagctctggatgaggaacttgaggcaagtcaccagcccctgatcatttcgcctaaaagagcaaggactagagttcctgacctccaggccagtccctgatccctgacctaatgttatcgcggaatgatggcccagggctcctcagagcaggaactccactatgcatctctgcagaggctgccagtgcccagcagtgagggacctgacctcaggggcagagacaagagaggcaccaaggaggatccaagagctgactatgcctgcattgctgagaacaaacccacctgagcaccccagacaccttcctcaacccaggcgggtggacagggtccccctgtggtccagccagtaaaaaccatggtccccccacttctgtgtctcagtcctctcagtccatctcgagcctccgttcaaattgatcatcatcaaaacttatgtggctttttgacctttgaatagggaattttttaaattttttacacaagtttaacgattaagaaagacgcacantggcgtccacccctttccaagccggaagaatagcacagctgcaacgcagcagaacaaccacactggttgcgcgccgcctgtgggccctgaaaggaagttttgaagaaccaatattgttaggagcgggggggcccaagcagggtagcgggacacgtgggccctcgcgtgtcccagaaggaaactgggcgcacaacagagcgcggactcccccaagaaaacgccg

SEQ ID NO: 347849 - DNA, 551 bp, Homo sapiens
gaaaagaaagatgttgtaaccctaaccctggagccgaacttcctctcctaacaatgctggggaggaacccaggctgggggagaagttaaagccagaggaggggcaggaatgtctgaggtggcaacacttctcttcagccagacagcactggccagtttggagtctgtccatcctgcaggccacaagctctggatgaggaacttgaggcaagtcaccagcccctgatcatttcgcctaaaagagcaaggactagagttcctgacctccaggccagtccctgatccctgacctaatgttatcgcggaatgatggcccagggctcctcagagcaggaactccactatgcatctctgcagaggctgccagtgcccagcagtgagggacctgacctcaggggcagagacaagagaggcaccaaggaggatccaagagctgactatgcctgcattgctgagaacaaacccacctgagcaccccagacaccttcctcaacccaggcgggtggacagggtccccctgtggtccagccagtaaaaaccatggtcccccca

SEQ ID NO: 347850 - DNA, 566 bp, Homo sapiens
aaaccccagctccacctttctgggatgggtgacctagtaaagtccaggcttgaatctcgggtctttacttgggcaacgggcaccatgataccctatgttctggggattagcagtgaggaatgtggaaagtgcccagctcagggttggcacataagggaggctccccagcctgggaacgattataacagagggcccctcacttcacagatgaggaacttgaggcaagtcaccagcccctgatcatttcgcctaaaagagcaaggactagagttcctgacctccaggccagtccctgatccctgacctaatgttatcgcggaatgatggcccagggctcctcagagcaggaactccactatgcatctctgcagaggctgccagtgcccagcagtgagggacctgacctcaggggcagagacaagagaggcaccaaggaggatccaagagctgactatgcctgcattgctgagaacaaacccacctgagcaccccagacaccttcctcaacccaggcgggtggacagggtccccctgtggtccagccagtaaaaaccatggtcccccca

SEQ ID NO: 347851 - DNA, 625 bp, Homo sapiens
  misc_feature (568)..(569): n is a, c, g, or t
aaaccccagctccacctttctgggatgggtgacctagtaaagtccaggcttgaatctcgggtctttacttgggcaacgggcaccatgataccctatgttctggggattagcagtgaggaatgtggaaagtgcccagctcagggttggcacataagggaggctccccagcctgggaacgattataacagagggcccctcacttcacagatgaggaacttgaggcaagtcaccagcccctgatcatttcgcctaaaagagcaaggactagagttcctgacctccaggccagtccctgatccctgacctaatgttatcgcggaatgatggcccagggctcctcagagcaggaactccactatgcatctctgcagaggctgccagtgcccagcagtgagggacctgacctcaggggcagagacaagagaggcaccaaggaggatccaagagctgactatgcctgcattgctgagaacaaacccacctgagcaccccagacaccttcctcaacccaggcgggtggacagggtccccctgtggtccagccagtaaaaaccatggtccccccaannaaaaaaaatattatatatttaataattaaataaattttttccccctttccggccgc

SEQ ID NO: 347852 - DNA, 534 bp, Homo sapiens
aaaccccagctccacctttctgggatgggtgacctagtaaagtccaggcttgaatctcgggtctttacttgggcaacgggcaccatgataccctatgttctggggattagcagtgaggaatgatgaggaacttgaggcaagtcaccagcccctgatcatttcgcctaaaagagcaaggactagagttcctgacctccaggccagtccctgatccctgacctaatgttatcgcggaatgatggcccagggctcctcagagcaggaactccactatgcatctctgcagaggctgccagtgcccagcagtgagggacctgacctcaggggcagagacaagagaggcaccaaggaggatccaagagctgactatgcctgcattgctgagaacaaacccacctgagcaccccagacaccttcctcaacccaggcgggtggacagggtccccctgtggtccagccagtaaaaaccatggtccccccaaaaaaaaaaaatttcattaaaaatcaaatcagttttaaaatatttaaacatgt

SEQ ID NO: 347853 - DNA, 451 bp, Homo sapiens
cacccacccaggcccaggctccttcccctccatcatccccttaccagcacctagaaccatccagggctgaaaagtcccctccaaaccacgtgatgaggaacttgaggcaagtcaccagcccctgatcatttcgcctaaaagagcaaggactagagttcctgacctccaggccagtccctgatccctgacctaatgttatcgcggaatgatggcccagggctcctcagagcaggaactccactatgcatctctgcagaggctgccagtgcccagcagtgagggacctgacctcaggggcagagacaagagaggcaccaaggaggatccaagagctgactatgcctgcattgctgagaacaaacccacctgagcaccccagacaccttcctcaacccaggcgggtggacagggtccccctgtggtccagccagtaaaaaccatggtcccccca

SEQ ID NO: 347854 - DNA, 356 bp, Homo sapiens
caggggagtccacgcctgctggtggggggagcccgggagggcccgggagaagcacaaagggtgggctgtgttgagcttcttcttttcttccagtaaagaggctggagaggagctgggcccagggctcctcagagcaggaactccactatgcatctctgcagaggctgccagtgcccagcagtgagggacctgacctcaggggcagagacaagagaggcaccaaggaggatccaagagctgactatgcctgcattgctgagaacaaacccacctgagcaccccagacaccttcctcaacccaggcgggtggacagggtccccctgtggtccagccagtaaaaaccatggtcccccca

SEQ ID NO: 347855 - DNA, 345 bp, Homo sapiens
agagagagagggagagaagtaagaaaggctggaggtgggagcagaactcacagggaaggatctgacggcatcgcctcccatcagcaccttctgtcctggtcccaggcccagggctcctcagagcaggaactccactatgcatctctgcagaggctgccagtgcccagcagtgagggacctgacctcaggggcagagacaagagaggcaccaaggaggatccaagagctgactatgcctgcattgctgagaacaaacccacctgagcaccccagacaccttcctcaacccaggcgggtggacagggtccccctgtggtccagccagtaaaaaccatggtcccccca

SEQ ID NO: 347856 - DNA, 389 bp, Homo sapiens
caggggagtccacgcctgctggtggggggagcccgggagggcccgggagaagcacaaagggtgggctgtgttgagcttcttcttttcttccagtaaagaggctggagaggagctgggtgagtctggggacagggaagggggagggcaagagagatcctgagtgggtgagtggggagaagcatggctgagcgctgagaggagggttggggacgggagacaaggagagagaaagtaggagcatgagagaggcagagaaaatcgaggcaaaagagaaagagaaaatgagacagaaaccaagagaaaaagtgagacagaggataggagagacagggagaaaatgagagtgagagagacacaaagagaagagcaatgaaagagagagagagaga

SEQ ID NO: 347857 - DNA, 734 bp, Homo sapiens
acttcagccctagcagcatctgcctgtgggaagcagctctccacaccagccaagggggcccccacactcccgcgctgctctgcggctcagggagcagcccacctgctggatgaggaacttgaggcaagtcaccagcccctgatcatttcgcctaaaagagcaaggactagagttcctgacctccaggccagtccctgatccctgacctaatgttatcgcggaatgatgatatatgtatctacgggggcctggggctgggcgggctcctgcttctggcagtggtccttctgtccgcctgcctgtgttggctgcatcgaagagcaccttctgtcctggtcccaggcccagggctcctcagagcaggaactccactatgcatctctgcagaggctgccagtgcccagcagtgagggacctgacctcaggggcagagacaagagaggcaccaaggaggatccaagagctgactatgcctgcattgctgagaacaaacccacctgagcaccccagacaccttcctcaacccaggcgggtggacagggtccccctgtggtccagccagtaaaaaccatggtccccccacttctgtgtctcagtcctctcagtccatctcgagcctccgttcaaattgatcatcatcaaaacttatgtggctttttgacctttgaatagggaattttttaaattttttaaaaattaaaataaaaaaaacacatggctcacccttccaccca

SEQ ID NO: 347858 - DNA, 811 bp, Homo sapiens
aaaccccagctccacctttctgggatgggtgacctagtaaagtccaggcttgaatctcgggtctttacttgggcaacgggcaccatgataccctatgttctggggattagcagtgaggaatgtggaaagtgcccagctcagggttggcacataagggaggctccccagcctgggaacgattataacagagggcccctcacttcacagatgaggaacttgaggcaagtcaccagcccctgatcatttcgcctaaaagagcaaggactagagttcctgacctccaggccagtccctgatccctgacctaatgttatcgcggaatgatgatatatgtatctacgggggcctggggctgggcgggctcctgcttctggcagtggtccttctgtccgcctgcctgtgttggctgcatcgaagaggcccagggctcctcagagcaggaactccactatgcatctctgcagaggctgccagtgcccagcagtgagggacctgacctcaggggcagagacaagagaggcaccaaggaggatccaagagctgactatgcctgcattgctgagaacaaacccacctgagcaccccagacaccttcctcaacccaggcgggtggacagggtccccctgtggtccagccagtaaaaaccatggtccccccacttctgtgtctcagtcctctcagtccatctcgagcctccgttcaaattgatcatcatcaaaacttatgtggctttttgacctttgaatagggaattttttaaattttttaaaaattaaaataaaaaaaacacatggctcacccttccaccca

SEQ ID NO: 347859 - DNA, 670 bp, Homo sapiens
agcagggtacatgtgtccacagacatatgccaagatcaagaggtctcaacagatgcagtgtaagagatgaggaacttgaggcaagtcaccagcccctgatcatttcgcctaaaagagcaaggactagagttcctgacctccaggccagtccctgatccctgacctaatgttatcgcggaatgatgatatatgtatctacgggggcctggggctgggcgggctcctgcttctggcagtggtccttctgtccgcctgcctgtgttggctgcatcgaagaggcccagggctcctcagagcaggaactccactatgcatctctgcagaggctgccagtgcccagcagtgagggacctgacctcaggggcagagacaagagaggcaccaaggaggatccaagagctgactatgcctgcattgctgagaacaaacccacctgagcaccccagacaccttcctcaacccaggcgggtggacagggtccccctgtggtccagccagtaaaaaccatggtccccccacttctgtgtctcagtcctctcagtccatctcgagcctccgttcaaattgatcatcatcaaaacttatgtggctttttgacctttgaatagggaattttttaaattttttaaaaattaaaataaaaaaaacacatggctcacccttccaccca

SEQ ID NO: 347860 - DNA, 762 bp, Homo sapiens
aaaccccagctccacctttctgggatgggtgacctagtaaagtccaggcttgaatctcgggtctttacttgggcaacgggcaccatgataccctatgttctggggattagcagtgaggaatgtggaaagtgcccagctcagggttggcacataagggaggctccccagcctgggaacgattataacagagggcccctcacttcacagatgaggaacttgaggcaagtcaccagcccctgatcatttcgcctaaaagagcaaggactagagttcctgacctccaggccagtccctgatccctgacctaatgttatcgcggaatgatgtaaagaggctggagaggagctggcaccttctgtcctggtcccaggcccagggctcctcagagcaggaactccactatgcatctctgcagaggctgccagtgcccagcagtgagggacctgacctcaggggcagagacaagagaggcaccaaggaggatccaagagctgactatgcctgcattgctgagaacaaacccacctgagcaccccagacaccttcctcaacccaggcgggtggacagggtccccctgtggtccagccagtaaaaaccatggtccccccacttctgtgtctcagtcctctcagtccatctcgagcctccgttcaaattgatcatcatcaaaacttatgtggctttttgacctttgaatagggaattttttaaattttttaaaaattaaaataaaaaaaacacatggctcacccttccaccca

SEQ ID NO: 347861 - DNA, 749 bp, Homo sapiens
aaaccccagctccacctttctgggatgggtgacctagtaaagtccaggcttgaatctcgggtctttacttgggcaacgggcaccatgataccctatgttctggggattagcagtgaggaatgatgaggaacttgaggcaagtcaccagcccctgatcatttcgcctaaaagagcaaggactagagttcctgacctccaggccagtccctgatccctgacctaatgttatcgcggaatgatgatatatgtatctacgggggcctggggctgggcgggctcctgcttctggcagtggtccttctgtccgcctgcctgtgttggctgcatcgaagagtaaagaggctggagaggagctgggcccagggctcctcagagcaggaactccactatgcatctctgcagaggctgccagtgcccagcagtgagggacctgacctcaggggcagagacaagagaggcaccaaggaggatccaagagctgactatgcctgcattgctgagaacaaacccacctgagcaccccagacaccttcctcaacccaggcgggtggacagggtccccctgtggtccagccagtaaaaaccatggtccccccacttctgtgtctcagtcctctcagtccatctcgagcctccgttcaaattgatcatcatcaaaacttatgtggctttttgacctttgaatagggaattttttaaattttttaaaaattaaaataaaaaaaacacatggctcacccttccaccca

SEQ ID NO: 347862 - DNA, 633 bp, Homo sapiens
aaaccccagctccacctttctgggatgggtgacctagtaaagtccaggcttgaatctcgggtctttacttgggcaacgggcaccatgataccctatgttctggggattagcagtgaggaatgatgaggaacttgaggcaagtcaccagcccctgatcatttcgcctaaaagagcaaggactagagttcctgacctccaggccagtccctgatccctgacctaatgttatcgcggaatgatggcccagggctcctcagagcaggaactccactatgcatctctgcagaggctgccagtgcccagcagtgagggacctgacctcaggggcagagacaagagaggcaccaaggaggatccaagagctgactatgcctgcattgctgagaacaaacccacctgagcaccccagacaccttcctcaacccaggcgggtggacagggtccccctgtggtccagccagtaaaaaccatggtccccccacttctgtgtctcagtcctctcagtccatctcgagcctccgttcaaattgatcatcatcaaaacttatgtggctttttgacctttgaatagggaattttttaaattttttaaaaattaaaataaaaaaaacacatggctcacccttccaccca

SEQ ID NO: 347863 - DNA, 680 bp, Homo sapiens
aaaccccagctccacctttctgggatgggtgacctagtaaagtccaggcttgaatctcgggtctttacttgggcaacgggcaccatgataccctatgttctggggattagcagtgaggaatgtggaaagtgcccagctcagggttggcacataagggaggctccccagcctgggaacgattataacagagggcccctcacttcacagatgaggaacttgaggcaagtcaccagcccctgatcatttcgcctaaaagagcaaggactagagttcctgacctccaggccagtccctgatccctgacctaatgttatcgcggaatgatgatatatgtatctacgggggcctggggctgggcgggctcctgcttctggcagtggtccttctgtccgcctgcctgtgttggctgcatcgaagagcaccttctgtcctggtcccaggcccagggctcctcagagcaggaactccactatgcatctctgcagaggctgccagtgcccagcagtgagggacctgacctcaggggcagagacaagagaggcaccaaggaggatccaagagctgactatgcctgcattgctgagaacaaacccacctgagcaccccagacaccttcctcaacccaggcgggtggacagggtccccctgtggtccagccagtaaaaaccatggtcccccca

SEQ ID NO: 347864 - DNA, 766 bp, Homo sapiens
aaaccccagctccacctttctgggatgggtgacctagtaaagtccaggcttgaatctcgggtctttacttgggcaacgggcaccatgataccctatgttctggggattagcagtgaggaatgtggaaagtgcccagctcagggttggcacataagggaggctccccagcctgggaacgattataacagagggcccctcacttcacagatgaggaacttgaggcaagtcaccagcccctgatcatttcgcctaaaagagcaaggactagagttcctgacctccaggccagtccctgatccctgacctaatgttatcgcggaatgatgatatatgtatctacgggggcctggggctgggcgggctcctgcttctggcagtggtccttctgtccgcctgcctgtgttggctgcatcgaagagaggctgccagtgcccagcagtgagggacctgacctcaggggcagagacaagagaggcaccaaggaggatccaagagctgactatgcctgcattgctgagaacaaacccacctgagcaccccagacaccttcctcaacccaggcgggtggacagggtccccctgtggtccagccagtaaaaaccatggtccccccacttctgtgtctcagtcctctcagtccatctcgagcctccgttcaaattgatcatcatcaaaacttatgtggctttttgacctttgaatagggaattttttaaattttttaaaaattaaaataaaaaaaacacatggctcacccttccaccca

SEQ ID NO: 347865 - DNA, 690 bp, Homo sapiens
aaaccccagctccacctttctgggatgggtgacctagtaaagtccaggcttgaatctcgggtctttacttgggcaacgggcaccatgataccctatgttctggggattagcagtgaggaatgtggaaagtgcccagctcagggttggcacataagggaggctccccagcctgggaacgattataacagagggcccctcacttcacagatgaggaacttgaggcaagtcaccagcccctgatcatttcgcctaaaagagcaaggactagagttcctgacctccaggccagtccctgatccctgacctaatgttatcgcggaatgatgatatatgtatctacgggggcctggggctgggcgggctcctgcttctggcagtggtccttctgtccgcctgcctgtgttggctgcatcgaagagctgactatgcctgcattgctgagaacaaacccacctgagcaccccagacaccttcctcaacccaggcgggtggacagggtccccctgtggtccagccagtaaaaaccatggtccccccacttctgtgtctcagtcctctcagtccatctcgagcctccgttcaaattgatcatcatcaaaacttatgtggctttttgacctttgaatagggaattttttaaattttttaaaaattaaaataaaaaaaacacatggctcacccttccaccca

SEQ ID NO: 347866 - DNA, 614 bp, Homo sapiens
aaaccccagctccacctttctgggatgggtgacctagtaaagtccaggcttgaatctcgggtctttacttgggcaacgggcaccatgataccctatgttctggggattagcagtgaggaatgtggaaagtgcccagctcagggttggcacataagggaggctccccagcctgggaacgattataacagagggcccctcacttcacagatgaggaacttgaggcaagtcaccagcccctgatcatttcgcctaaaagagcaaggactagagttcctgacctccaggccagtccctgatccctgacctaatgttatcgcggaatgatgatatatgtatctacgggggcctggggctgggcgggctcctgcttctggcagtggtccttctgtccgcctgcctgtgttggctgcatcgaagagaggctgccagtgcccagcagtgagggacctgacctcaggggcagagacaagagaggcaccaaggaggatccaagagctgactatgcctgcattgctgagaacaaacccacctgagcaccccagacaccttcctcaacccaggcgggtggacagggtccccctgtggtccagccagtaaaaaccatggtcccccca

SEQ ID NO: 347867 - DNA, 726 bp, Homo sapiens
aaaccccagctccacctttctgggatgggtgacctagtaaagtccaggcttgaatctcgggtctttacttgggcaacgggcaccatgataccctatgttctggggattagcagtgaggaatgatgaggaacttgaggcaagtcaccagcccctgatcatttcgcctaaaagagcaaggactagagttcctgacctccaggccagtccctgatccctgacctaatgttatcgcggaatgatgatatatgtatctacgggggcctggggctgggcgggctcctgcttctggcagtggtccttctgtccgcctgcctgtgttggctgcatcgaagaggcccagggctcctcagagcaggaactccactatgcatctctgcagaggctgccagtgcccagcagtgagggacctgacctcaggggcagagacaagagaggcaccaaggaggatccaagagctgactatgcctgcattgctgagaacaaacccacctgagcaccccagacaccttcctcaacccaggcgggtggacagggtccccctgtggtccagccagtaaaaaccatggtccccccacttctgtgtctcagtcctctcagtccatctcgagcctccgttcaaattgatcatcatcaaaacttatgtggctttttgacctttgaatagggaattttttaaattttttaaaaattaaaataaaaaaaacacatggctcacccttccaccca

SEQ ID NO: 347868 - DNA, 603 bp, Homo sapiens
cacccacccaggcccaggctccttcccctccatcatccccttaccagcacctagaaccatccagggctgaaaagtcccctccaaaccacgtgatgaggaacttgaggcaagtcaccagcccctgatcatttcgcctaaaagagcaaggactagagttcctgacctccaggccagtccctgatccctgacctaatgttatcgcggaatgatggcccagggctcctcagagcaggaactccactatgcatctctgcagaggctgccagtgcccagcagtgagggacctgacctcaggggcagagacaagagaggcaccaaggaggatccaagagctgactatgcctgcattgctgagaacaaacccacctgagcaccccagacaccttcctcaacccaggcgggtggacagggtccccctgtggtccagccagtaaaaaccatggtccccccacttctgtgtctcagtcctctcagtccatctcgagcctccgttcaaattgatcatcatcaaaacttatgtggctttttgacctttgaatagggaattttttaaattttttaaaaattaaaataaaaaaaacacatggctcacccttccaccca

SEQ ID NO: 347869 - DNA, 726 bp, Homo sapiens
gaaaagaaagatgttgtaaccctaaccctggagccgaacttcctctcctaacaatgctggggaggaacccaggctgggggagaagttaaagccagaggaggggcaggaatgtctgaggtggcaacacttctcttcagccagacagcactggccagtttggagtctgtccatcctgcaggccacaagctctggatgaggaacttgaggcaagtcaccagcccctgatcatttcgcctaaaagagcaaggactagagttcctgacctccaggccagtccctgatccctgacctaatgttatcgcggaatgatgtaaagaggctggagaggagctgggcccagggctcctcagagcaggaactccactatgcatctctgcagaggctgccagtgcccagcagtgagggacctgacctcaggggcagagacaagagaggcaccaaggaggatccaagagctgactatgcctgcattgctgagaacaaacccacctgagcaccccagacaccttcctcaacccaggcgggtggacagggtccccctgtggtccagccagtaaaaaccatggtccccccacttctgtgtctcagtcctctcagtccatctcgagcctccgttcaaattgatcatcatcaaaacttatgtggctttttgacctttgaatagggaattttttaaattttttaaaaattaaaataaaaaaaacacatggctcacccttccaccca

SEQ ID NO: 347870 - DNA, 847 bp, Homo sapiens
gaaaagaaagatgttgtaaccctaaccctggagccgaacttcctctcctaacaatgctggggaggaacccaggctgggggagaagttaaagccagaggaggggcaggaatgtctgaggtggcaacacttctcttcagccagacagcactggccagtttggagtctgtccatcctgcaggccacaagctctggatgaggaacttgaggcaagtcaccagcccctgatcatttcgcctaaaagagcaaggactagagttcctgacctccaggccagtccctgatccctgacctaatgttatcgcggaatgatgaggctgccagtgcccagcagtgagggacctgacctcaggggcagagacaagagaggcaccaaggaggatccaagagctgactatgcctgcattgctgagaacaaacccacctgagcaccccagacaccttcctcaacccaggcgggtggacagggtccccctgtggtccagccagtaaaaaccatggtccccccaaaaaaaaaaaaaaaaaaaaaaaaaaaaaaaaaaaaaaaaaaaaaaaaaaaaaaaaaaaataataaaaatattatatttttataataaaacatatttaattttatttttttatactgctataaaaaattaaaataaataaaaattttggccccccttggccccgtttgtttttttctcgggccagttttttcttcgggcccaaatttggagctcctttgcccatttccccttaaggggggcgatttaaattcacgggcggggttttaaaaggggggggtgggaaaacccggggtgtccccccttttttctctgggaaaaaaccccttttgcaagtggtgaaa

SEQ ID NO: 347871 - DNA, 504 bp, Homo sapiens
aaaccccagctccacctttctgggatgggtgacctagtaaagtccaggcttgaatctcgggtctttacttgggcaacgggcaccatgataccctatgttctggggattagcagtgaggaatgatgaggaacttgaggcaagtcaccagcccctgatcatttcgcctaaaagagcaaggactagagttcctgacctccaggccagtccctgatccctgacctaatgttatcgcggaatgatgtaaagaggctggagaggagctgggcccagggctcctcagagcaggaactccactatgcatctctgcagaggctgccagtgcccagcagtgagggacctgacctcaggggcagagacaagagaggcaccaaggaggatccaagagctgactatgcctgcattgctgagaacaaacccacctgagcaccccagacaccttcctcaacccaggcgggtggacagggtccccctgtggtccagccagtaaaaaccatggtcccccca

SEQ ID NO: 347872 - DNA, 656 bp, Homo sapiens
aaaccccagctccacctttctgggatgggtgacctagtaaagtccaggcttgaatctcgggtctttacttgggcaacgggcaccatgataccctatgttctggggattagcagtgaggaatgatgaggaacttgaggcaagtcaccagcccctgatcatttcgcctaaaagagcaaggactagagttcctgacctccaggccagtccctgatccctgacctaatgttatcgcggaatgatgtaaagaggctggagaggagctgggcccagggctcctcagagcaggaactccactatgcatctctgcagaggctgccagtgcccagcagtgagggacctgacctcaggggcagagacaagagaggcaccaaggaggatccaagagctgactatgcctgcattgctgagaacaaacccacctgagcaccccagacaccttcctcaacccaggcgggtggacagggtccccctgtggtccagccagtaaaaaccatggtccccccacttctgtgtctcagtcctctcagtccatctcgagcctccgttcaaattgatcatcatcaaaacttatgtggctttttgacctttgaatagggaattttttaaattttttaaaaattaaaataaaaaaaacacatggctcacccttccaccca

SEQ ID NO: 347873 - DNA, 2765 bp, Homo sapiens
gcacacttctatttgtttggatgtggagagagaaaagaagaaatccacgtggtgggtaaagcacctgggtccacagccgaaaaatcccgggtttagtctgtttcactatacaaaattgggccatttacctgagttccaggctccacatataaaacacagacataatattactcacccatgtcactgggctgctgggggactctactaggacaacagaggcaaagctctgatataagctctttgcaaatgtaagaagtggtccttatgtcacccagtttagggcagtggttgagagcagacacattctgatccctcgaatctgaatcctatctttggcccatctggaagtgggacaagtttcttaaacctttgtgcctgggtttcctatctggggaagaataaattaacagatgcaaggaccctgaacagtccggttggagactgctccagtccttggcaccgtcctgcattctgtgggtcccaacagtgtggtgaaaccaggaagccgaccagccatccaaccagggtgtggtcctctggctgagactctctatcccacgtctgggcacccatgccaccagctggccttgaattccagggatgcgggaggacaatgagcatgaacgaaacgtgccgagtggagttgagaacgtaaaggaagaagggggcgatgaggacctctcctggggagatgagggctgccaagtcctaagacacaggctcagggtctgcaggaaggtcggcttgttggatcgtctctgtgcgctgacttctctttgctccccaggggcctctacccgctgcccttgctcaacagcaccctggacgacgggaaggccaccctgaccccttccaacacgccactggggcgcaacctctcgactcaccagacctaccccgtggtggcagatcctcactcacccttcgccataaagcaggaaacccccgaggtgtccagttctagctccaccccttcctctttatctagctccgcctttttggatctgcagcaagtcggctccggggtcccgcccttcaatgcctttccccatgctgcctccgtgtacgggcagttcacgggccaggccctcctctcagggcgagagatggtggggcccacgctgcccggatacccaccccacatccccaccagcggacagggcagctatgcctcctctgccatcgcaggcatggtggcaggtaaggagagggccggcaggaaggggagcactgcaaagaggaagtattggagcaaggtgggacacaaggagcaagaggcatactgtgccctattcatagacttcccaaagggcattgaaggatggaccaaagagggcatctccttgtaaatgcctggagacgatgtcccagtgcagtcctgactccctatttaacttgccccagctcggcctccttcttcccaggcctgctacattaccctccatgatgaaaagggaggggctgagacaggtctgtgttcaaatccaagctccaccacttcttccagtgaatcagtgagcataaatggagagcactctaagggccccaaaacactgtgagtggaagatgaaccctaccctcaagcagtgctggtctcccagtgatttaactctgatgaatcccagtttacccgttctgtaaaatctgaatctgaagggtattgatgatgatgatgatgatgatgacgatgacgatgatgatgatgaaatatatgcttcacatctctctctcaagcctgcatggataggacccgggttctaggtactctaagagtactatagaggatgaaatgagcctggagtagctctccatcctcatttggactgttctggaacctgcctgccagtcatttgggtttctttgtctgccagtcatcatccaatgatgattcaagatgacaaggtctggacaaatgaagataatgggagtttccttgggcaagtctcaattttttaggagccatgtagggaagactttgggatggatgagacataattgagccattgtcactggtcaaaaaggcctgggacctggagtttctggaaagagctctgaacacaaggcatctgtgacccccatgccagccctaggccagcctctctggctgtgaccccagagacttggcgtatttacctaggcctgcttcccttccttgccggcaggagttaatctttgccagccacccactctgggcaccctatgcagaggcaggtgggctgggatctcctgggcagagggaagggagggagagaaagagggagggagaaatgctctgtgctccctgggaacctgctgagctggcacttgttgctgcctggttaccgtggcgatgtgcttaatgcagcgttgaaaatacagaatactgactcctctgtccctcctggccccggactccctccctccctcccttcctcttctggagcgtgaaatgagattggtcaagataaaaaaggaaaagattcggttatttttttaagagtgtggataatggggcctctcaatcaaaatcccagtctccagtcggttccccccattccccttccaacccctccaccttcccctgccgcctgcttagaggaggaggaagaaacataaagcacaaggcttttctcttaattatgaatcattccctgagggcaggcccagggcaaggggttcctggggcccagagtctgacctgtgaggtagctagaaggcttgagcctctcatcaaagtcccccaggttgtttccagaaagaatcctgagtgggttctgtgaaaaaga

SEQ ID NO: 347874 - DNA, 2217 bp, Homo sapiens
ttctgtcgtcgtctccctgtgcgttccggtcttgcagcctgcttggcttctagttgtccagtgtcggttgtctgtgcttcctgacttgctgttcctctgtcgcctctctgtgctcctttctgtttgttttccgctcccgtcgttttttcttctttcgtgctgctctgttctcccttttgttgtcagcgtgtggttttttgctctcttgtgtttttgttattctcttgcgtctgttcccttccttcttgtcatctgtgttgttccttcctcccccatctgttccctcttccgcttgtcgttttcttgtctctttccttcttgtttttttgttttgtttgctcgtccttccctcctgttctctgtctgtgtttgacccaccccacagatccgtggctgcttaaaattttgcattacttcggggacttctctccgtttggacacccttctctggtgtggtgatggatcccccccttttttggtgccccctctgggaaccccctcatctgtgtgagttgtgcttccgcagagccgcctcctcggggtgttccccgcccggcgcgttttttaactttgggtgagaatccccgaccgcttgtgctgtgccccgcgtttctcctttgggaaccccgcttttggccccatgtctaccttccctctttggggcccctcggcgcccactacaccgagtgggttcttgaaagcctcttttcgaggggccaaggggcccaaaaattttttttttttttttttttttttttttataaacgttaaacatcgtttttattcccagcacctaccattgtgccccccttataatagacagtaatggtatagtgaatgaatgaacaaatgaatgagttgagaaatccagaataatacatcacaagctacagcgaatttttcttgctagtgctcaggacaggtgaaatgaatcataacaggttggtgtctgtgaaaagctgacagagatgtgagaggtcccaccctgaggccaacaaagactctgcagctctggcagaaccactaagctctcagctcctagtcatcacatctttttcccttaaccctgccaagtcaaccagatgaggagtgtcttcagggtgggtctgttgcccctctttgcccatgccgtcatttgctgtaggagtgaggcaagtccatatgcctttaagaaccgagtaggacaatggagatgatgccaataatcagcccaaccacttccagtgaccgtctgggctgctggtcccgtgccagcactcgcagctgggcaggcaatctgcatcagcaattttatcagcgttgactgtggcaaccacgagcgtgcagagaaagctgaccatcagcagcatggggagagggcctggggtgctcacgcaccagtcagcacacagctccaggaaggaaaggggttgcagtggggggcctgcaggaagctcactctgtgagagtaagcctgcaaaactcagtgtgcaggcaccagccactcagtgaaagtaaagaaaccctgctgatgagactctggacacccgctgagtcccagagccatttcctggctccatccctaagccccccaaaggaccctgcttgactacagagcacccccatgccatgctggcatatgaacatggggaatcctggaatgagaaagtctttgagctttcagggacctccatgaccaccttgtccagtttctccatttgtgtggagataatccaagcaagacaaggagggcttgggcaatcagaaggttttggagctcaggcctgccaaccctcatttcattcagactggtccactgtcacctgtttcagatatggtgcttctacgtaaacacttatttgaagactgaaaaaaaaagcatttgaaaaccattaaacttctccaaccactcatctttcagatgaggagactgaggtccagcagtgtccataaattattcattacctcctcagtcaatcattattcacccagtcattcacctggagggtggtgaaggcagggagaaccagccagtgcaagggcccctcatgtcctgcctggcctttgcttttcctacctctggtaactgactgtgctgccaaagtaacactccgtgctctctcacctgggcataggaatgccctctggcttggggagccaagaaagaagcacaagtattcatacctgaccttaggacaggttgtaacacagctatcttttctgcaaaatcaacaagtg

SEQ ID NO: 347875 - DNA, 463 bp, Homo sapiens
cactaaggtgctgatggagagacgcagagaggggtcaacgttggcaaggttcacaaggtcaaaacacagaacttgatgatgggtttgataggaaagagagggaagcagaggttaagccccatctctgttttggccttgagtgactgatggtaccaatcatgaaatgcggacaactggggaggactaggcatgcggagtagggtcacagacttgactgtggacagttgagtttcaagtgcctttgagatacccaaaaggggtgtcaaaaaggcgactgggtctggggcagccatgagttctctttcctcctcttctctctcatggcctttcttctcttcatcacagaatcatccggaccaaagtgcagcaaccattcaacctccctatggacagctgcgtggccaccaagtccctgagtcccggacacacgctgagtgagtgctgagagacctggatacacaca

SEQ ID NO: 347876 - DNA, 2618 bp, Homo sapiens
tgggaacaaacttcagaaggaggagagacaccgggcccagggcaccctgcgcgggcggacccaagcagtgagggcctgcagccggccggccagggcagcggcaggcgcggcccggacctacgggaggaagccccgagccctcggcgggctgcgagcgactccccggcgatgcctcacaactccatcagatctggccatggagggctgaaccagctgggaggggcctttgtgaatggcagacctctgccggaagtggtccgccagcgcatcgtagacctggcccaccagggtgtaaggccctgcgacatctctcgccagctccgcgtcagccatggctgcgtcagcaagatccttggcaggtactacgagactggcagcatccggcctggagtgatagggggctccaagcccaaggtggccacccccaaggtggtggagaagattggggactacaaacgccagaaccctaccatgtttgcctgggagatccgagaccggctcctggctgagggcgtctgtgacaatgacactgtgcccagtgtcagctccattaatagaatcatccggaccaaagtgcagcaaccattcaacctccctatggacagctgcgtggccaccaagtccctgagtcccggacacacgctgatccccagctcagctgtaactcccccggagtcaccccagtcggattccctgggctccacctactccatcaatgggctcctgggcatcgctcagcctggcagcgacaagaggaaaatggatgacagtgatcaggatagctgccgactaagcattgactcacagagcagcagcagcggaccccgaaagcaccttcgcacggatgccttcagccagcaccacctcgagccgctcgagtgcccatttgagcggcagcactacccagaggcctatgcctcccccagccacaccaaaggcgagcagggcctctacccgctgcccttgctcaacagcaccctggacgacgggaaggccaccctgaccccttccaacacgccactggggcgcaacctctcgactcaccagacctaccccgtggtggcagctccgcctttttggatctgcagcaagtcggctccggggtcccgcccttcaatgcctttccccatgctgcctccgtgtacgggcagttcacgggccaggccctcctctcagggcgagagatggtggggcccacgctgcccggatacccaccccacatccccaccagcggacagggcagctatgcctcctctgccatcgcaggcatggtggcaggaagtgaatactctggcaatgcctatggccacaccccctactcctcctacagcgaggcctggcgcttccccaactccagcttgctgagttccccatattattacagttccacatcaaggccgagtgcaccgcccaccactgccacggcctttgaccatctgtagttgccatggggacagtgggagcgactgagcaacaggaggactcagcctgggacaggccccagagagtcacacaaaggaatctttatttattacatgaaaaataaccacaagtccagcattgcggcacactccctgtgtggttaatttaatgaaccatgaaagacaggatgaccttggacaaggccaaactgtcctccaagactccttaatgaggggcaggagtcccagggaaagagaaccatgccatgctgaaaaagacaaaattgaagaagaaatgtagcccccagccggtacccaccaaaggagagaagaagcaatagccgaggaacttggggggatggcgaatggttcctgcccgggcccaaggggtgcacagggcacctccatggctccattattaacacaactctagcaattatggaccataagcacttccctccagcccacaagtcacagcctggtgccgaggctctcctcaccagccacccagggagtcacctccctcagcctcccgcctgccccacacggaggctctggctgtcctctttctccactccatttgcttggctctttctacacctccctcttgggcatgggctgagggctggagcgagtccctcagaaattccaccaggctgtcagctgacctcttttgcctgctgctgtgaaggtatagcaccaccccaggtcctcctgcagtgcggcatccccttggcagctgccgtcagccaggccagccccagggagcttaaaacagacattccacagggcctgggcccctgggaggtgaggtgtggtgtgcggcttcacccagggcagaacaaggcagaatcgcaggaaacccgcttccccttcctgacagctcctgccaagccaaatgtgcttcctgcagctcacgcccaccagctactgaagggacccaaggcaccccctgaagccagcgatagagggtccctctctgctccccagcagctcctgcccccaaggcctgactgtatatactgtaaatgaaactttgtttgggtcaagcttccttctttctaacccccagactttggcctctgagtgaaatgtctctctttgccctgtggggcttctctccttgatgcttctttctttttttaaagacaacctgccattaccacatgactcaataaaccattgctcttcaactca

SEQ ID NO: 347877 - DNA, 4064 bp, Homo sapiens
tgggaacaaacttcagaaggaggagagacaccgggcccagggcaccctgcgcgggcggacccaagcagtgagggcctgcagccggccggccagggcagcggcaggcgcggcccggacctacgggaggaagccccgagccctcggcgggctgcgagcgactccccggcgatgcctcacaactccatcagatctggccatggagggctgaaccagctgggaggggcctttgtgaatggcagacctctgccggaagtggtccgccagcgcatcgtagacctggcccaccagggtgtaaggccctgcgacatctctcgccagctccgcgtcagccatggctgcgtcagcaagatccttggcaggtactacgagactggcagcatccggcctggagtgatagggggctccaagcccaaggtggccacccccaaggtggtggagaagattggggactacaaacgccagaaccctaccatgtttgcctgggagatccgagaccggctcctggctgagggcgtctgtgacaatgacactgtgcccagtgtcagctccattaatagaatcatccggaccaaagtgcagcaaccattcaacctccctatggacagctgcgtggccaccaagtccctgagtcccggacacacgctgatccccagctcagctgtaactcccccggagtcaccccagtcggattccctgggctccacctactccatcaatgggctcctgggcatcgctcagcctggcagcgacaagaggaaaatggatgacagtgatcaggatagctgccgactaagcattgactcacagagcagcagcagcggaccccgaaagcaccttcgcacggatgccttcagccagcaccacctcgagccgctcgagtgcccatttgagcggcagcactacccagaggcctatgcctcccccagccacaccaaaggcgagcagggcctctacccgctgcccttgctcaacagcaccctggacgacgggaaggccaccctgaccccttccaacacgccactggggcgcaacctctcgactcaccagacctaccccgtggtggcagatcctcactcacccttcgccataaagcaggaaacccccgaggtgtccagttctagctccaccccttcctctttatctagctccgcctttttggatctgcagcaagtcggctccggggtcccgcccttcaatgcctttccccatgctgcctccgtgtacgggcagttcacgggccaggccctcctctcagggcgagagatggtggggcccacgctgcccggatacccaccccacatccccaccagcggacagggcagctatgcctcctctgccatcgcaggcatggtggcaggaagtgaatactctggcaatgcctatggccacaccccctactcctcctacagcgaggcctggcgcttccccaactccagcttgctgagttccccatattattacagttccacatcaaggccgagtgcaccgcccaccactgccacggcctttgaccatctgtagttgccatggggacagtgggagcgactgagcaacaggaggactcagcctgggacaggccccagagagtcacacaaaggaatctttatttattacatgaaaaataaccacaagtccagcattgcggcacactccctgtgtggttaatttaatgaaccatgaaagacaggatgaccttggacaaggccaaactgtcctccaagactccttaatgaggggcaggagtcccagggaaagagaaccatgccatgctgaaaaagacaaaattgaagaagaaatgtagcccccagccggtacccaccaaaggagagaagaagcaatagccgaggaacttggggggatggcgaatggttcctgcccgggcccaaggggtgcacagggcacctccatggctccattattaacacaactctagcaattatggaccataagcacttccctccagcccacaagtcacagcctggtgccgaggctctcctcaccagccacccagggagtcacctccctcagcctcccgcctgccccacacggaggctctggctgtcctctttctccactccatttgcttggctctttctacacctccctcttgggcatgggctgagggctggagcgagtccctcagaaattccaccaggctgtcagctgacctcttttgcctgctgctgtgaaggtatagcaccaccccaggtcctcctgcagtgcggcatccccttggcagctgccgtcagccaggccagccccagggagcttaaaacagacattccacagggcctgggcccctgggaggtgaggtgtggtgtgcggcttcacccagggcagaacaaggcagaatcgcaggaaacccgcttccccttcctgacagctcctgccaagccaaatgtgcttcctgcagctcacgcccaccagctactgaagggacccaaggcaccccctgaagccagcgatagagggtccctctctgctccccagcagctcctgcccccaaggcctgactgtatatactgtaaatgaaactttgtttgggtcaagcttccttctttctaacccccagactttggcctctgagtgaaatgtctctctttgccctgtggggcttctctccttgatgcttctttctttttttaaagacaacctgccattaccacatgactcaataaaccattgctcttcaactcaggctttggggttggctggggaaggaggcatcccggggctgggctttctcccaagaacatcagagctgagtagccgacaaactcactttggggccgtgggctggaagggaccatctgatgccccagagctctggcttggccttctccctctgcctttaattcacgttgaacgctgggtacctcactcatcccaagttcttcaacactgagcaaatgcaaggatagcacagtactgagccaaccatagactccccacaaggagttgctgttgttattaacaggaagccagagaatcagcagggtgggttagtgagggatccgggaatagctgtgactggagcctgcataaacagctctgaagggagagagaagactgggctctcttgtgtgccaggcacagtatggaaggcttcatataagttaagctgaaattagccctgttttacatacagcttcattttacatatgaggaaactgaggctttgaaaaaaatgagatgtcttgtccaagatgaaaagtagtagattcaaccaagtcctcttactctaagcccaacgcttttacccaaaaccccagagtcctcatcagggatgccaaatggttctagacccagtggaggttctggagctgccactggggatttaatttcttttgatttgctaaagatttgacctgactgaatggagaggtagagtgtagtgtggccaggacaaggtgagggaggctgtagagacttaggactttaggccaaccacctccaggaaatctgggaaatgcaatgtgacagctcgggctctgcactccagggggctgtctggtgtccacatggaccttctccatgtgggacacagctggaacaagggggcaggggcctgcagctgggatgcccaggtgaatatgggcagctggacaaacaacactgggattgagtcagatagaaggggcccaaggactccagggctgggaggacagaggctgggagagagggctcttacctccttaggcctcccaaagagcggttagggatgctgccatggatggcatggcagggggaaccctcctggaagaaaatccatctcttctgaagggatctgagatgcggctggtttttcaatggcagaacttccctctgcggcgcgactccgaatccatgacatctgagagtcttcctgaccacaaacctctgggatcccgagggctccctacccaagaatcactttgagcacagcatcccaaggagcccatagagcgatcccttgcattcacagccacagcccctctggggacactctgtacccccggcagaccctttccaactcacaaccaataaaggggcttgggctgtgctttgactaaggtgaaaaaagt

SEQ ID NO: 347878 - DNA, 2285 bp, Homo sapiens
tgggaacaaacttcagaaggaggagagacaccgggcccagggcaccctgcgcgggcggacccaagcagtgagggcctgcagccggccggccagggcagcggcaggcgcggcccggacctacgggaggaagccccgagccctcggcgggctgcgagcgactccccggcgatgcctcacaactccatcagatctggccatggagggctgaaccagctgggaggggcctttgtgaatggcagacctctgccggaagtggtccgccagcgcatcgtagacctggcccaccagggtgtaaggccctgcgacatctctcgccagctccgcgtcagccatggctgcgtcagcaagatccttggcaggtactacgagactggcagcatccggcctggagtgatagggggctccaagcccaaggtggccacccccaaggtggtggagaagattggggactacaaacgccagaaccctaccatgtttgcctgggagatccgagaccggctcctggctgagggcgtctgtgacaatgacactgtgcccagtgtcagctccattaatagaatcatccggaccaaagtgcagcaaccattcaacctccctatggacagctgcgtggccaccaagtccctgagtcccggacacacgctgatccccagctcagctgtaactcccccggagtcaccccagtcggattccctgggctccacctactccatcaatgggctcctgggcatcgctcagcctggcagcgacaagaggaaaatggatgacagtgatcaggatagctgccgactaagcattgactcacagagcagcagcagcggaccccgaaagcaccttcgcacggatgccttcagccagcaccacctcgagccgctcgagtgcccatttgagcggcagcactacccagaggcctatgcctcccccagccacaccaaaggcgagcaggaagtgaatactctggcaatgcctatggccacaccccctactcctcctacagcgaggcctggcgcttccccaactccagcttgctgagttccccatattattacagttccacatcaaggccgagtgcaccgcccaccactgccacggcctttgaccatctgtagttgccatggggacagtgggagcgactgagcaacaggaggactcagcctgggacaggccccagagagtcacacaaaggaatctttatttattacatgaaaaataaccacaagtccagcattgcggcacactccctgtgtggttaatttaatgaaccatgaaagacaggatgaccttggacaaggccaaactgtcctccaagactccttaatgaggggcaggagtcccagggaaagagaaccatgccatgctgaaaaagacaaaattgaagaagaaatgtagcccccagccggtacccaccaaaggagagaagaagcaatagccgaggaacttggggggatggcgaatggttcctgcccgggcccaaggggtgcacagggcacctccatggctccattattaacacaactctagcaattatggaccataagcacttccctccagcccacaagtcacagcctggtgccgaggctctcctcaccagccacccagggagtcacctccctcagcctcccgcctgccccacacggaggctctggctgtcctctttctccactccatttgcttggctctttctacacctccctcttgggcatgggctgagggctggagcgagtccctcagaaattccaccaggctgtcagctgacctcttttgcctgctgctgtgaaggtatagcaccaccccaggtcctcctgcagtgcggcatccccttggcagctgccgtcagccaggccagccccagggagcttaaaacagacattccacagggcctgggcccctgggaggtgaggtgtggtgtgcggcttcacccagggcagaacaaggcagaatcgcaggaaacccgcttccccttcctgacagctcctgccaagccaaatgtgcttcctgcagctcacgcccaccagctactgaagggacccaaggcaccccctgaagccagcgatagagggtccctctctgctccccagcagctcctgcccccaaggcctgactgtatatactgtaaatgaaactttgtttgggtcaagcttccttctttctaacccccagactttggcctctgagtgaaatgtctctctttgccctgtggggcttctctccttgatgcttctttctttttttaaagacaacctgccattaccacatgactcaataaaccattgctcttcaactca

SEQ ID NO: 347879 - DNA, 2887 bp, Homo sapiens
tgggaacaaacttcagaaggaggagagacaccgggcccagggcaccctgcgcgggcggacccaagcagtgagggcctgcagccggccggccagggcagcggcaggcgcggcccggacctacgggaggaagccccgagccctcggcgggctgcgagcgactccccggcgatgcctcacaactccatcagatctggccatggagggctgaaccagctgggaggggcctttgtgaatggcagacctctgccggaagtggtccgccagcgcatcgtagacctggcccaccagggtgtaaggccctgcgacatctctcgccagctccgcgtcagccatggctgcgtcagcaagatccttggcaggtactacgagactggcagcatccggcctggagtgatagggggctccaagcccaaggtggccacccccaaggtggtggagaagattggggactacaaacgccagaaccctaccatgtttgcctgggagatccgagaccggctcctggctgagggcgtctgtgacaatgacactgtgcccagtgtcagctccattaatagaatcatccggaccaaagtgcagcaaccattcaacctccctatggacagctgcgtggccaccaagtccctgagtcccggacacacgctgatccccagctcagctgtaactcccccggagtcaccccagtcggattccctgggctccacctactccatcaatgggctcctgggcatcgctcagcctggcagcgacaagaggaaaatggatgacagtgatcaggatagctgccgactaagcattgactcacagagcagcagcagcggaccccgaaagcaccttcgcacggatgccttcagccagcaccacctcgagccgctcgagtgcccatttgagcggcagcactacccagaggcctatgcctcccccagccacaccaaaggcgagcagggcctctacccgctgcccttgctcaacagcaccctggacgacgggaaggccaccctgaccccttccaacacgccactggggcgcaacctctcgactcaccagacctaccccgtggtggcagatcctcactcacccttcgccataaagcaggaaacccccgaggtgtccagttctagctccaccccttcctctttatctagctccgcctttttggatctgcagcaagtcggctccggggtcccgcccttcaatgcctttccccatgctgcctccgtgtacgggcagttcacgggccaggccctcctctcagggcgagagatggtggggcccacgctgcccggatacccaccccacatccccaccagcggacagggcagctatgcctcctctgccatcgcaggcatggtggcaggaagtgaatactctggcaatgcctatggccacaccccctactcctcctacagcgaggcctggcgcttccccaactccagcttgctgagttccccatattattacagttccacatcaaggccgagtgcaccgcccaccactgccacggcctttgaccatctgtagttgccatggggacagtgggagcgactgagcaacaggaggactcagcctgggacaggccccagagagtcacacaaaggaatctttatttattacatgaaaaataaccacaagtccagcattgcggcacactccctgtgtggttaatttaatgaaccatgaaagacaggatgaccttggacaaggccaaactgtcctccaagactccttaatgaggggcaggagtcccagggaaagagaaccatgccatgctgaaaaagacaaaattgaagaagaaatgtagcccccagccggtacccaccaaaggagagaagaagcaatagccgaggaacttggggggatggcgaatggttcctgcccgggcccaaggggtgcacagggcacctccatggctccattattaacacaactctagcaattatggaccataagcacttccctccagcccacaagtcacagcctggtgccgaggctctcctcaccagccacccagggagtcacctccctcagcctcccgcctgccccacacggaggctctggctgtcctctttctccactccatttgcttggctctttctacacctccctcttgggcatgggctgagggctggagcgagtccctcagaaattccaccaggctgtcagctgacctcttttgcctgctgctgtgaaggtatagcaccaccccaggtcctcctgcagtgcggcatccccttggcagctgccgtcagccaggccagccccagggagcttaaaacagacattccacagggcctgggcccctgggaggtgaggtgtggtgtgcggcttcacccagggcagaacaaggcagaatcgcaggaaacccgcttccccttcctgacagctcctgccaagccaaatgtgcttcctgcagctcacgcccaccagctactgaagggacccaaggcaccccctgaagccagcgatagagggtccctctctgctccccagcagctcctgcccccaaggcctgactgtatatactgtaaatgaaactttgtttgggtcaagcttccttctttctaacccccagactttggcctctgagtgaaatgtctctctttgccctgtggggcttctctccttgatgcttctttctttttttaaagacaacctgccattaccacatgactcaataaaccattgctcttcaactcaaagcaaaacaacaacacacgcgggagcacacgcaaacaaaaaagtggggcgggccccaaataaactggggggggcccagaaaaagccacgcagacgcgacatgggtcccaaagcgggaagtgcacaaggggtcggtagagctctccccccggagcggcgaggggcaagcgttgtgtctgccccgcccgtg

SEQ ID NO: 347880 - DNA, 2753 bp, Homo sapiens
tgggaacaaacttcagaaggaggagagacaccgggcccagggcaccctgcgcgggcggacccaagcagtgagggcctgcagccggccggccagggcagcggcaggcgcggcccggacctacgggaggaagccccgagccctcggcgggctgcgagcgactccccggcgatgcctcacaactccatcagatctggccatggagggctgaaccagctgggaggggcctttgtgaatggcagacctctgccggaagtggtccgccagcgcatcgtagacctggcccaccagggtgtaaggccctgcgacatctctcgccagctccgcgtcagccatggctgcgtcagcaagatccttggcaggtactacgagactggcagcatccggcctggagtgatagggggctccaagcccaaggtggccacccccaaggtggtggagaagattggggactacaaacgccagaaccctaccatgtttgcctgggagatccgagaccggctcctggctgagggcgtctgtgacaatgacactgtgcccagtgtcagctccattaatagaatcatccggaccaaagtgcagcaaccattcaacctccctatggacagctgcgtggccaccaagtccctgagtcccggacacacgctgatccccagctcagctgtaactcccccggagtcaccccagtcggattccctgggctccacctactccatcaatgggctcctgggcatcgctcagcctggcagcgacaagaggaaaatggatgacagtgatcaggatagctgccgactaagcattgactcacagagcagcagcagcggaccccgaaagcaccttcgcacggatgccttcagccagcaccacctcgagccgctcgagtgcccatttgagcggcagcactacccagaggcctatgcctcccccagccacaccaaaggcgagcagggcctctacccgctgcccttgctcaacagcaccctggacgacgggaaggccaccctgaccccttccaacacgccactggggcgcaacctctcgactcaccagacctaccccgtggtggcagatcctcactcacccttcgccataaagcaggaaacccccgaggtgtccagttctagctccaccccttcctctttatctagctccgcctttttggatctgcagcaagtcggctccggggtcccgcccttcaatgcctttccccatgctgcctccgtgtacgggcagttcacgggccaggccctcctctcagggcgagagatggtggggcccacgctgcccggatacccaccccacatccccaccagcggacagggcagctatgcctcctctgccatcgcaggcatggtggcaggtaaggagagggccggcaggaaggggagcactgcaaagaggaagtattggagcaaggaagtgaatactctggcaatgcctatggccacaccccctactcctcctacagcgaggcctggcgcttccccaactccagcttgctgagttccccatattattacagttccacatcaaggccgagtgcaccgcccaccactgccacggcctttgaccatctgtagttgccatggggacagtgggagcgactgagcaacaggaggactcagcctgggacaggccccagagagtcacacaaaggaatctttatttattacatgaaaaataaccacaagtccagcattgcggcacactccctgtgtggttaatttaatgaaccatgaaagacaggatgaccttggacaaggccaaactgtcctccaagactccttaatgaggggcaggagtcccagggaaagagaaccatgccatgctgaaaaagacaaaattgaagaagaaatgtagcccccagccggtacccaccaaaggagagaagaagcaatagccgaggaacttggggggatggcgaatggttcctgcccgggcccaaggggtgcacagggcacctccatggctccattattaacacaactctagcaattatggaccataagcacttccctccagcccacaagtcacagcctggtgccgaggctctcctcaccagccacccagggagtcacctccctcagcctcccgcctgccccacacggaggctctggctgtcctctttctccactccatttgcttggctctttctacacctccctcttgggcatgggctgagggctggagcgagtccctcagaaattccaccaggctgtcagctgacctcttttgcctgctgctgtgaaggtatagcaccaccccaggtcctcctgcagtgcggcatccccttggcagctgccgtcagccaggccagccccagggagcttaaaacagacattccacagggcctgggcccctgggaggtgaggtgtggtgtgcggcttcacccagggcagaacaaggcagaatcgcaggaaacccgcttccccttcctgacagctcctgccaagccaaatgtgcttcctgcagctcacgcccaccagctactgaagggacccaaggcaccccctgaagccagcgatagagggtccctctctgctccccagcagctcctgcccccaaggcctgactgtatatactgtaaatgaaactttgtttgggtcaagcttccttctttctaacccccagactttggcctctgagtgaaatgtctctctttgccctgtggggcttctctccttgatgcttctttctttttttaaagacaacctgccattaccacatgactcaataaaccattgctcttcaactca

SEQ ID NO: 347881 - DNA, 2509 bp, Homo sapiens
accacatagctcccaatcgtaggtgagtttctgaaaggctgggtggacattcattgagtctcagggttggcaggaatctagctttgtaaatggaattatcgcataagtgaataaagggattatctgcaatttggagtcaagagccctaaggtcgagttctactctgacatttaacaacagtgtgatttgaggcaaactgcttaatcatgctgcactccagtttccttttctataaattggtagtatccatgagtacctcatggggtagtcttgagaataaaagatcataatgtatgggaaagtgctttacaaactttaagctctttaccaagcaccggtagtagctgtggtgatcagtttgactttgtttttgttatgtaagggaattcttaagtaatttcttcggtaaataattcctttggaaaactcaagaatccattaacagaaggaggtgatctgatttactttgtgtaaatttatacgttgagtttgcttaaagcggcagactcaggatggaacaacaaactactccaagtcccaggacacagcttcctgagggtgtgtgccctctggggctctccctcctctcccatccttaaccctcacacctcccctcagccccccatgcacacaaacacacacactcatacctagcgaggctaaaaggttcatatatatggatgtcctctttggcccctaaccccatacccctgctgtggggccctcccagaagagcccttctccagaaggtccaggcagcagaaggagcagttagtccctgggccctacactcacagcacagtttcccagctccaccaaaccctccagctctgggagcttccgcagatcccagaggctcagtttcttcatctggaaaatgggggtagttataacatctaccttctgggcctcctgggagggctgtagtatgtcaagccagtgcctccagtacctacggaaaaggacactgccccaaattttccagatcgatgggttccaaaagggatgacagagggaccttctgagctccattgtccctgccgtggctccaactgtctcccccaccattcctgagcttgcccattgccagccctgcagaccttcccacaccccagccctgcattgatgcccttcacctcacaggcctctcccctgtgtgcctccaacaggaagtgaatactctggcaatgcctatggccacaccccctactcctcctacagcgaggcctggcgcttccccaactccagcttgctgagttccccatattattacagttccacatcaaggccgagtgcaccgcccaccactgccacggcctttgaccatctgtagttgccatggggacagtgggagcgactgagcaacaggaggactcagcctgggacaggccccagagagtcacacaaaggaatctttatttattacatgaaaaataaccacaagtccagcattgcggcacactccctgtgtggttaatttaatgaaccatgaaagacaggatgaccttggacaaggccaaactgtcctccaagactccttaatgaggggcaggagtcccagggaaagagaaccatgccatgctgaaaaagacaaaattgaagaagaaatgtagcccccagccggtacccaccaaaggagagaagaagcaatagccgaggaacttggggggatggcgaatggttcctgcccgggcccaaggggtgcacagggcacctccatggctccattattaacacaactctagcaattatggaccataagcacttccctccagcccacaagtcacagcctggtgccgaggctctcctcaccagccacccagggagtcacctccctcagcctcccgcctgccccacacggaggctctggctgtcctctttctccactccatttgcttggctctttctacacctccctcttgggcatgggctgagggctggagcgagtccctcagaaattccaccaggctgtcagctgacctcttttgcctgctgctgtgaaggtatagcaccaccccaggtcctcctgcagtgcggcatccccttggcagctgccgtcagccaggccagccccagggagcttaaaacagacattccacagggcctgggcccctgggaggtgaggtgtggtgtgcggcttcacccagggcagaacaaggcagaatcgcaggaaacccgcttccccttcctgacagctcctgccaagccaaatgtgcttcctgcagctcacgcccaccagctactgaagggacccaaggcaccccctgaagccagcgatagagggtccctctctgctccccagcagctcctgcccccaaggcctgactgtatatactgtaaatgaaactttgtttgggtcaagcttccttctttctaacccccagactttggcctctgagtgaaatgtctctctttgccctgtggggcttctctccttgatgcttctttctttttttaaagacaacctgccattaccacatgactcaataaaccattgctcttcaactca

SEQ ID NO: 347882 - DNA, 2478 bp, Homo sapiens
caggtacaaatctgaggagcagtatctgtagggctatctgaggtcctgcgtggcattccttggacagtaataggtagtttcacagggattatctgcaatttggagtcaagagccctaaggtcgagttctactctgacatttaacaacagtgtgatttgaggcaaactgcttaatcatgctgcactccagtttccttttctataaattggtagtatccatgagtacctcatggggtagtcttgagaataaaagatcataatgtatgggaaagtgctttacaaactttaagctctttaccaagcaccggtagtagctgtggtgatcagtttgactttgtttttgttatgtaagggaattcttaagtaatttcttcggtaaataattcctttggaaaactcaagaatccattaacagaaggaggtgatctgatttactttgtgtaaatttatacgttgagtttgcttaaagcggcagactcaggatggaacaacaaactactccaagtcccaggacacagcttcctgagggtgtgtgccctctggggctctccctcctctcccatccttaaccctcacacctcccctcagccccccatgcacacaaacacacacactcatacctagcgaggctaaaaggttcatatatatggatgtcctctttggcccctaaccccatacccctgctgtggggccctcccagaagagcccttctccagaaggtccaggcagcagaaggagcagttagtccctgggccctacactcacagcacagtttcccagctccaccaaaccctccagctctgggagcttccgcagatcccagaggctcagtttcttcatctggaaaatgggggtagttataacatctaccttctgggcctcctgggagggctgtagtatgtcaagccagtgcctccagtacctacggaaaaggacactgccccaaattttccagatcgatgggttccaaaagggatgacagagggaccttctgagctccattgtccctgccgtggctccaactgtctcccccaccattcctgagcttgcccattgccagccctgcagaccttcccacaccccagccctgcattgatgcccttcacctcacaggcctctcccctgtgtgcctccaacaggaagtgaatactctggcaatgcctatggccacaccccctactcctcctacagcgaggcctggcgcttccccaactccagcttgctgagttccccatattattacagttccacatcaaggccgagtgcaccgcccaccactgccacggcctttgaccatctgtagttgccatggggacagtgggagcgactgagcaacaggaggactcagcctgggacaggccccagagagtcacacaaaggaatctttatttattacatgaaaaataaccacaagtccagcattgcggcacactccctgtgtggttaatttaatgaaccatgaaagacaggatgaccttggacaaggccaaactgtcctccaagactccttaatgaggggcaggagtcccagggaaagagaaccatgccatgctgaaaaagacaaaattgaagaagaaatgtagcccccagccggtacccaccaaaggagagaagaagcaatagccgaggaacttggggggatggcgaatggttcctgcccgggcccaaggggtgcacagggcacctccatggctccattattaacacaactctagcaattatggaccataagcacttccctccagcccacaagtcacagcctggtgccgaggctctcctcaccagccacccagggagtcacctccctcagcctcccgcctgccccacacggaggctctggctgtcctctttctccactccatttgcttggctctttctacacctccctcttgggcatgggctgagggctggagcgagtccctcagaaattccaccaggctgtcagctgacctcttttgcctgctgctgtgaaggtatagcaccaccccaggtcctcctgcagtgcggcatccccttggcagctgccgtcagccaggccagccccagggagcttaaaacagacattccacagggcctgggcccctgggaggtgaggtgtggtgtgcggcttcacccagggcagaacaaggcagaatcgcaggaaacccgcttccccttcctgacagctcctgccaagccaaatgtgcttcctgcagctcacgcccaccagctactgaagggacccaaggcaccccctgaagccagcgatagagggtccctctctgctccccagcagctcctgcccccaaggcctgactgtatatactgtaaatgaaactttgtttgggtcaagcttccttctttctaacccccagactttggcctctgagtgaaatgtctctctttgccctgtggggcttctctccttgatgcttctttctttttttaaagacaacctgccattaccacatgactcaataaaccattgctcttcaactca

SEQ ID NO: 347883 - DNA, 2216 bp, Homo sapiens
tgggaacaaacttcagaaggaggagagacaccgggcccagggcaccctgcgcgggcggacccaagcagtgagggcctgcagccggccggccagggcagcggcaggcgcggcccggacctacgggaggaagccccgagccctcggcgggctgcgagcgactccccggcgatgcctcacaactccatcagatctggccatggagggctgaaccagctgggaggggcctttgtgaatggcagacctctgccggaagtggtccgccagcgcatcgtagacctggcccaccagggtgtaaggccctgcgacatctctcgccagctccgcgtcagccatggctgcgtcagcaagatccttggcaggtactacgagactggcagcatccggcctggagtgatagggggctccaagcccaaggtggccacccccaaggtggtggagaagattggggactacaaacgccagaaccctaccatgtttgcctgggagatccgagaccggctcctggctgagggcgtctgtgacaatgacactgtgcccagtgtcagctccattaatagaatcatccggaccaaagtgcagcaaccattcaacctccctatggacagctgcgtggccaccaagtccctgagtcccggacacacgctgatccccagctcagctgtaactcccccggagtcaccccagtcggattccctgggctccacctactccatcaatgggctcctgggcatcgctcagcctggcagcgacaagaggaaaatggatgacagtgatcaggatagctgccgactaagcattgactcacagagcagcagcagcggaccccgaaagcaccttcgcacggatgccttcagccagcaccacctcgagccgctcgagtgcccatttgagcggcagcactacccagaggcctatgcctcccccagccacaccaaaggcgagcagggcctctacccgctgcccttgctcaacagcaccctggacgacgggaaggccaccctgaccccttccaacacgccactggggcgcaacctctcgactcaccagacctaccccgtggtggcagatcctcactcacccttcgccataaagcaggaaacccccgaggtgtccagttctagctccaccccttcctctttatctagctccgcctttttggatctgcagcaagtcggctccggggtcccgcccttcaatgcctttccccatgctgcctccgtgtacgggcagttcacgggccaggccctcctctcagggcgagagatggtggggcccacgctgcccggatacccaccccacatccccaccagcggacagggcagctatgcctcctctgccatcgcaggcatggtggcaggaagtgaatactctggcaatgcctatggccacaccccctactcctcctacagcgaggcctggcgcttccccaactccagcttgctgagttccccatattattacagttccacatcaaggccgagtgcaccgcccaccactgccacggcctttgaccatctgtagttgccatggggacagtgggagcgactgagcaacaggaggactcagcctgggacaggccccagagagtcacacaaaggaatctttatttattacatgaaaaataaccacaagtccagcattgcggcacactccctgtgtggttaatttaatgaaccatgaaagacaggatgaccttggacaaggccaaactgtcctccaagactccttaatgaggggcaggagtcccagggaaagagaaccatgccatgctgaaaaagacaaaattgaagaagaaatgtagcccccagccggtacccaccaaaggagagaagaagcaatagccgaggaacttggggggatggcgaatggttcctgcccgggcccaaggggtgcacagggcacctccatggctccattattaacacaactctagcaattatggaccataagcacttccctccagcccacaagtcacagcctggtgccgaggctctcctcaccagccacccagggagtcacctccctcagcctcccgcctgccccacacggaggctctggctgtcctctttctccactccatttgcttggctctttcccacccagatcctctacaccacatactacgagtccatcagcaacaggggtcccttcttcggctactacttcttcaacgggcttctgatgttgctgcagcacaacacgtgcttcttacataa

SEQ ID NO: 347884 - DNA, 2014 bp, Homo sapiens
tgggaacaaacttcagaaggaggagagacaccgggcccagggcaccctgcgcgggcggacccaagcagtgagggcctgcagccggccggccagggcagcggcaggcgcggcccggacctacgggaggaagccccgagccctcggcgggctgcgagcgactccccggcgatgcctcacaactccatcagatctggccatggagggctgaaccagctgggaggggcctttgtgaatggcagacctctgccggaagtggtccgccagcgcatcgtagacctggcccaccagggtgtaaggccctgcgacatctctcgccagctccgcgtcagccatggctgcgtcagcaagatccttggcaggtactacgagactggcagcatccggcctggagtgatagggggctccaagcccaaggtggccacccccaaggtggtggagaagattggggactacaaacgccagaaccctaccatgtttgcctgggagatccgagaccggctcctggctgagggcgtctgtgacaatgacactgtgcccagtgtcagctccattaatagaatcatccggaccaaagtgcagcaaccattcaacctccctatggacagctgcgtggccaccaagtccctgagtcccggacacacgctgatccccagctcagctgtaactcccccggagtcaccccagtcggattccctgggctccacctactccatcaatgggctcctgggcatcgctcagcctggcagcgacaagaggaaaatggatgacagtgatcaggatagctgccgactaagcattgactcacagagcagcagcagcggaccccgaaagcaccttcgcacggatgccttcagccagcaccacctcgagccgctcgagtgcccatttgagcggcagcactacccagaggcctatgcctcccccagccacaccaaaggcgagcagggcctctacccgctgcccttgctcaacagcaccctggacgacgggaaggccaccctgaccccttccaacacgccactggggcgcaacctctcgactcaccagacctaccccgtggtggcagatcctcactcacccttcgccataaagcaggaaacccccgaggtgtccagttctagctccaccccttcctctttatctagctccgcctttttggatctgcagcaagtcggctccggggtcccgcccttcaatgcctttccccatgctgcctccgtgtacgggcagttcacgggccaggccctcctctcagggcgagagatggtggggcccacgctgcccggatacccaccccacatccccaccagcggacagggcagctatgcctcctctgccatcgcaggcatggtggcaggaagtgaatactctggcaatgcctatggccacaccccctactcctcctacagcgaggcctggcgcttccccaactccagcttgctgagttccccatattattacagttccacatcaaggccgagtgcaccgcccaccactgccacggcctttgaccatctgtagttgccatggggacagtgggagcgactgagcaacaggaggactcagcctgggacaggccccagagagtcacacaaaggaatctttatttattacatgaaaaataaccacaagtccagcattgcggcacactccctgtgtggttaatttaatgaaccatgaaagacaggatgaccttggacaaggccaaactgtcctccaagactccttaatgaggggcaggagtcccagggaaagagaaccatgccatgctgaaaaagacaaaattgaagaagaaatgtagcccccagccggtacccaccaaaggcctgactgtatatactgtaaatgaaactttgtttgggtcaagcttccttctttctaacccccagactttggcctctgagtgaaatgtctctctttgccctgtggggcttctctccttgatgcttctttctttttttaaagacaacctgccattaccacatgactcaataaaccattgctcttcaactca

SEQ ID NO: 347885 - DNA, 1630 bp, Homo sapiens
gtgatctagcaggatgctactccacttggttgcagccccagtccagaccggcagggagctgatatcacctcctcccctgcccctccgacatgaatcatctctcctgcctcttgcccttctgcatgtcccacatgctgctctcagtagcttctcacagtgtcacttaataatctagcagacagacaggtacaaagacacgcggactccttaaggacagggaagcctcatgaaacgttaaacatcgtttttattcccagcacctaccattgtgccccccttataatagacagtaatggtatagtgaatgaatgaacaaatgaatgagttgagaaatccagaataatacatcacaagctacagcgaatttttcttgctagtgctcaggacaggtgaaatgaatcataacaggttggtgtctgtgaaaagctgacagagatgtgagaggtcccaccctgaggccaacaaagactctgcagctctggcagaaccactaagctctcagctcctagtcatcacatctttttcccttaaccctgccaagtcaaccagatgaggagtgtcttcagggtgggtctgttgcccctctttgcccatgccgtcatttgctgtaggagtgaggcaagtccatatgcctttaagaaccgagtaggacaatggagatgatgccaataatcagcccaaccacttccagtgaccgtctgggctatcagcgttgactgtggcaaccacgagcgtgcagagaaagctgaccatcagcagcatggggagagggcctggggtgctcacgcaccagtcagcacacagctccaggaaggaaaggggttgcagtggggggcctgcaggaagctcactctgtgagagtaagcctgcaaaactcagtgtgcaggcaccagccactcagtgaaagtaaagaaaccctgctgatgagactctggacacccgctgagtcccagagccatttcctggctccatccctaagccccccaaaggaccctgcttgactacagagcacccccatgccatgctggcatatgaacatggggaatcctggaatgagaaagtctttgagctttcagggacctccatgaccaccttgtccagtttctccatttgtgtggagataatccaagcaagacaaggagggcttgggcaatcagaaggttttggagctcaggcctgccaaccctcatttcattcagactggtccactgtcacctgtttcagatatggtgcttctacgtaaacacttatttgaagactgaaaaaaaaagcatttgaaaaccattaaacttctccaaccactcatctttcagatgaggagactgaggtccagcagtgtccataaattattcattacctcctcagtcaatcattattcacccagtcattcacctggagggtggtgaaggcagggagaaccagccagtgcaagggcccctcatgtcctgcctggcctttgcttttcctacctctggtaactgactgtgctgccaaagtaacactccgtgctctctcacctgggcataggaatgccctctggcttggggagccaagaaagaagcacaagtattcatacctgaccttaggacaggttgtaacacagctatcttttctgcaaaatcaacaagtg

SEQ ID NO: 347886 - DNA, 898 bp, Homo sapiens
tgggaacaaacttcagaaggaggagagacaccgggcccagggcaccctgcgcgggcggacccaagcagtgagggcctgcagccggccggccagggcagcggcaggcgcggcccggacctacgggaggaagccccgagccctcggcgggctgcgagcgactccccggcgatgcctcacaactccatcagatctggccatggagggctgaaccagctgggaggggcctttgtgaatggcagacctctgccggaagtggtccgccagcgcatcgtagacctggcccaccagggtgtaaggccctgcgacatctctcgccagctccgcgtcagccatggctgcgtcagcaagatccttggcaggtactacgagactggcagcatccggcctggagtgatagggggctccaagcccaaggtggccacccccaaggtggtggagaagattggggactacaaacgccagaaccctaccatgtttgcctgggagatccgagaccggctcctggctgagggcgtctgtgacaatgacactgtgcccagtgtcagctccattaataggtaagagagaaagcagcctctggtgtcaggctggggcccctgggctttggggaaatcaggaaagagacaagaaaggcctggcttgggtggagcagaggccgggaaggggcctgatgctgaacaatcaggcagggagcacacctggctccaggcagatatcatacctccctgcctcctcccttgccccatgctatggggcaccctccccctggcccccagccatagtgtgctatctacagtttccttcctcaaacaccacatctgctttcattcaataaaagaatcttcatgaattgatccttttctaagccatcagacccctaacccagcccacattcaag

SEQ ID NO: 347887 - DNA, 370 bp, Homo sapiens
tgggaacaaacttcagaaggaggagagacaccgggcccagggcaccctgcgcgggcggacccaagcagtgagggcctgcagccggccggccagggcagcggcaggcgcggcccggacctacgggaggaagccccgagccctcggcgggctgcgagcgactccccggcgatgcctcacaactccatcagatctggccatggagggctgaaccagctgggaggggcctttgtgaatggcagacctctgccggaagtggtccgccagcgcatcgtagacctggcccaccccggcctaattattagcatcatccctctactattttttatccaaatcaacaacaacctatttagctgttcccagcttgctcaga

SEQ ID NO: 347888 - DNA, 615 bp, Homo sapiens
actttgtaggggctctgcatgtgactgtcacatgtcctgtccctcagttggccaaggctcctgggcccacgtggctggccctttttctccctccacagtgagtcagcttggagtcagtcctctactttggcctagagcatgaatagataggtcccctaaaagctttcttccttcccggggggtaccaggtgatcaggatagctgccgactaagcattgactcacagagcagcagcagcggaccccgaaagcaccttcgcacggatgccttcagccagcaccacctcgagccgctcgagtgcccatttgagcggcagcactacccagaggcctatgcctcccccagccacaccaaaggcgagcaggtgagaagctgggccctgggaggtgaacagggtgggcaagggccagagaaggtctattctccaaatgagcctgtgctccatcaaagcagctggaagttgcatcaatgggctcagggcacctgccttatgcaactccaagcctgacacatgctttattttaccagatgccctggcatcttcctccctttctaaccctcctggcttccttcacccaaaacctttgagcctgggcctttcagggatggcagcac

SEQ ID NO: 347889 - DNA, 2697 bp, Homo sapiens
tgggaacaaacttcagaaggaggagagacaccgggcccagggcaccctgcgcgggcggacccaagcagtgagggcctgcagccggccggccagggcagcggcaggcgcggcccggacctacgggaggaagccccgagccctcggcgggctgcgagcgactccccggcgatgcctcacaactccatcagatctggccatggagggctgaaccagctgggaggggcctttgtgaatggcagacctctgccggaagtggtccgccagcgcatcgtagacctggcccaccagggtgtaaggccctgcgacatctctcgccagctccgcgtcagccatggctgcgtcagcaagatccttggcaggtactacgagactggcagcatccggcctggagtgatagggggctccaagcccaaggtggccacccccaaggtggtggagaagattggggactacaaacgccagaaccctaccatgtttgcctgggagatccgagaccggctcctggctgagggcgtctgtgacaatgacactgtgcccagtgtcagctccattaatagaatcatccggaccaaagtgcagcaaccattcaacctccctatggacagctgcgtggccaccaagtccctgagtcccggacacacgctgatccccagctcagctgtaactcccccggagtcaccccagtcggattccctgggctccacctactccatcaatgggctcctgggcatcgctcagcctggcagcgacaagaggaaaatggatgacagtgatcaggatagctgccgactaagcattgactcacagagcagcagcagcggaccccgaaagcaccttcgcacggatgccttcagccagcaccacctcgagccgctcgagtgcccatttgagcggcagcactacccagaggcctatgcctcccccagccacaccaaaggcgagcagggcctctacccgctgcccttgctcaacagcaccctggacgacgggaaggccaccctgaccccttccaacacgccactggggcgcaacctctcgactcaccagacctaccccgtggtggcagatcctcactcacccttcgccataaagcaggaaacccccgaggtgtccagttctagctccaccccttcctctttatctagctccgcctttttggatctgcagcaagtcggctccggggtcccgcccttcaatgcctttccccatgctgcctccgtgtacgggcagttcacgggccaggccctcctctcagggcgagagatggtggggcccacgctgcccggatacccaccccacatccccaccagcggacagggcagctatgcctcctctgccatcgcaggcatggtggcaggaagtgaatactctggcaatgcctatggccacaccccctactcctcctacagcgaggcctggcgcttccccaactccagcttgctgagttccccatattattacagttccacatcaaggccgagtgcaccgcccaccactgccacggcctttgaccatctgtagttgccatggggacagtgggagcgactgagcaacaggaggactcagcctgggacaggccccagagagtcacacaaaggaatctttatttattacatgaaaaataaccacaagtccagcattgcggcacactccctgtgtggttaatttaatgaaccatgaaagacaggatgaccttggacaaggccaaactgtcctccaagactccttaatgaggggcaggagtcccagggaaagagaaccatgccatgctgaaaaagacaaaattgaagaagaaatgtagcccccagccggtacccaccaaaggagagaagaagcaatagccgaggaacttggggggatggcgaatggttcctgcccgggcccaaggggtgcacagggcacctccatggctccattattaacacaactctagcaattatggaccataagcacttccctccagcccacaagtcacagcctggtgccgaggctctcctcaccagccacccagggagtcacctccctcagcctcccgcctgccccacacggaggctctggctgtcctctttctccactccatttgcttggctctttctacacctccctcttgggcatgggctgagggctggagcgagtccctcagaaattccaccaggctgtcagctgacctcttttgcctgctgctgtgaaggtatagcaccaccccaggtcctcctgcagtgcggcatccccttggcagctgccgtcagccaggccagccccagggagcttaaaacagacattccacagggcctgggcccctgggaggtgaggtgtggtgtgcggcttcacccagggcagaacaaggcagaatcgcaggaaacccgcttccccttcctgacagctcctgccaagccaaatgtgcttcctgcagctcacgcccaccagctactgaagggacccaaggcaccccctgaagccagcgatagagggtccctctctgctccccagcagctcctgcccccaaggcctgactgtatatactgtaaatgaaactttgtttgggtcaagcttccttctttctaacccccagactttggcctctgagtgaaatgtctctctttgccctgtggggcttctctccttgatgcttctttctttttttaaagacaacctgccattaccacatgactcaataaaccattgctcttcaactca

SEQ ID NO: 347890 - DNA, 843 bp, Homo sapiens
tgggaacaaacttcagaaggaggagagacaccgggcccagggcaccctgcgcgggcggacccaagcagtgagggcctgcagccggccggccagggcagcggcaggcgcggcccggacctacgggaggaagccccgagccctcggcgggctgcgagcgactccccggcgatgcctcacaactccatcagatctgaatcatccggaccaaagtgcagcaaccattcaacctccctatggacagctgcgtggccaccaagtccctgagtcccggacacacgctgatccccagctcagctgtaactcccccggagtcaccccagtcggattccctgggctccacctactccatcaatgggctcctgggcatcgctcagcctggcagcgacaagaggaaaatggatgacagtgatcaggatagctgccgactaagcattgactcacagagcagcagcagcggaccccgaaagcaccttcgcacggatgccttcagccagcaccacctcgagccgctcgagtgcccatttgagcggcagcactacccagaggcctatgcctcccccagccacaccaaaggcgagcagggcctctacccgctgcccttgctcaacagcaccctggacgacgggaaggccaccctgaccccttccaacacgccactggggcgcaacctctcgactcaccagacctaccccgtggtggcagctccgcctttttggatctgcagcaagtcggctccggggtcccgcccttcaatgcctttccccatgctgcctccgtgtacgggcagttcacgggccaggccctcctctcaggtacgacagggaggtcccggggccatgcagc

SEQ ID NO: 347891 - DNA, 2387 bp, Homo sapiens
tgggaacaaacttcagaaggaggagagacaccgggcccagggcaccctgcgcgggcggacccaagcagtgagggcctgcagccggccggccagggcagcggcaggcgcggcccggacctacgggaggaagccccgagccctcggcgggctgcgagcgactccccggcgatgcctcacaactccatcagatctggccatggagggctgaaccagctgggaggggcctttgtgaatggcagacctctgccggaagtggtccgccagcgcatcgtagacctggcccaccagggtgtaaggccctgcgacatctctcgccagctccgcgtcagccatggctgcgtcagcaagatccttggcaggtactacgagactggcagcatccggcctggagtgatagggggctccaagcccaaggtggccacccccaaggtggtggagaagattggggactacaaacgccagaaccctaccatgtttgcctgggagatccgagaccggctcctggctgagggcgtctgtgacaatgacactgtgcccagtgtcagctccattaatagaatcatccggaccaaagtgcagcaaccattcaacctccctatggacagctgcgtggccaccaagtccctgagtcccggacacacgctgatccccagctcagctgtaactcccccggagtcaccccagtcggattccctgggctccacctactccatcaatgggctcctgggcatcgctcagcctggcagcgacaagaggaaaatggatgacagtgatcaggatagctgccgactaagcattgactcacagagcagcagcagcggaccccgaaagcaccttcgcacggatgccttcagccagcaccacctcgagccgctcgagtgcccatttgagcggcagcactacccagaggcctatgcctcccccagccacaccaaaggcgagcagggcgagagatggtggggcccacgctgcccggatacccaccccacatccccaccagcggacagggcagctatgcctcctctgccatcgcaggcatggtggcaggaagtgaatactctggcaatgcctatggccacaccccctactcctcctacagcgaggcctggcgcttccccaactccagcttgctgagttccccatattattacagttccacatcaaggccgagtgcaccgcccaccactgccacggcctttgaccatctgtagttgccatggggacagtgggagcgactgagcaacaggaggactcagcctgggacaggccccagagagtcacacaaaggaatctttatttattacatgaaaaataaccacaagtccagcattgcggcacactccctgtgtggttaatttaatgaaccatgaaagacaggatgaccttggacaaggccaaactgtcctccaagactccttaatgaggggcaggagtcccagggaaagagaaccatgccatgctgaaaaagacaaaattgaagaagaaatgtagcccccagccggtacccaccaaaggagagaagaagcaatagccgaggaacttggggggatggcgaatggttcctgcccgggcccaaggggtgcacagggcacctccatggctccattattaacacaactctagcaattatggaccataagcacttccctccagcccacaagtcacagcctggtgccgaggctctcctcaccagccacccagggagtcacctccctcagcctcccgcctgccccacacggaggctctggctgtcctctttctccactccatttgcttggctctttctacacctccctcttgggcatgggctgagggctggagcgagtccctcagaaattccaccaggctgtcagctgacctcttttgcctgctgctgtgaaggtatagcaccaccccaggtcctcctgcagtgcggcatccccttggcagctgccgtcagccaggccagccccagggagcttaaaacagacattccacagggcctgggcccctgggaggtgaggtgtggtgtgcggcttcacccagggcagaacaaggcagaatcgcaggaaacccgcttccccttcctgacagctcctgccaagccaaatgtgcttcctgcagctcacgcccaccagctactgaagggacccaaggcaccccctgaagccagcgatagagggtccctctctgctccccagcagctcctgcccccaaggcctgactgtatatactgtaaatgaaactttgtttgggtcaagcttccttctttctaacccccagactttggcctctgagtgaaatgtctctctttgccctgtggggcttctctccttgatgcttctttctttttttaaagacaacctgccattaccacatgactcaataaaccattgctcttcaactca

SEQ ID NO: 347892 - DNA, 2508 bp, Homo sapiens
tgggaacaaacttcagaaggaggagagacaccgggcccagggcaccctgcgcgggcggacccaagcagtgagggcctgcagccggccggccagggcagcggcaggcgcggcccggacctacgggaggaagccccgagccctcggcgggctgcgagcgactccccggcgatgcctcacaactccatcagatctggccatggagggctgaaccagctgggaggggcctttgtgaatggcagacctctgccggaagtggtccgccagcgcatcgtagacctggcccaccagggtgtaaggccctgcgacatctctcgccagctccgcgtcagccatggctgcgtcagcaagatccttggcaggtactacgagactggcagcatccggcctggagtgatagggggctccaagcccaaggtggccacccccaaggtggtggagaagattggggactacaaacgccagaaccctaccatgtttgcctgggagatccgagaccggctcctggctgagggcgtctgtgacaatgacactgtgcccagtgtcagctccattaatagaatcatccggaccaaagtgcagcaaccattcaacctccctatggacagctgcgtggccaccaagtccctgagtcccggacacacgctgatccccagctcagctgtaactcccccggagtcaccccagtcggattccctgggctccacctactccatcaatgggctcctgggcatcgctcagcctggcagcgacaagaggaaaatggatgacagtgatcaggatagctgccgactaagcattgactcacagagcagcagcagcggaccccgaaagcaccttcgcacggatgccttcagccagcaccacctcgagccgctcgagtgcccatttgagcggcagcactacccagaggcctatgcctcccccagccacaccaaaggcgagcagggcctctacccgctgcccttgctcaacagcaccctggacgacgggaaggccaccctgaccccttccaacacgccactggggcgcaacctctcgactcaccagacctaccccgtggtggcagggcgagagatggtggggcccacgctgcccggatacccaccccacatccccaccagcggacagggcagctatgcctcctctgccatcgcaggcatggtggcaggaagtgaatactctggcaatgcctatggccacaccccctactcctcctacagcgaggcctggcgcttccccaactccagcttgctgagttccccatattattacagttccacatcaaggccgagtgcaccgcccaccactgccacggcctttgaccatctgtagttgccatggggacagtgggagcgactgagcaacaggaggactcagcctgggacaggccccagagagtcacacaaaggaatctttatttattacatgaaaaataaccacaagtccagcattgcggcacactccctgtgtggttaatttaatgaaccatgaaagacaggatgaccttggacaaggccaaactgtcctccaagactccttaatgaggggcaggagtcccagggaaagagaaccatgccatgctgaaaaagacaaaattgaagaagaaatgtagcccccagccggtacccaccaaaggagagaagaagcaatagccgaggaacttggggggatggcgaatggttcctgcccgggcccaaggggtgcacagggcacctccatggctccattattaacacaactctagcaattatggaccataagcacttccctccagcccacaagtcacagcctggtgccgaggctctcctcaccagccacccagggagtcacctccctcagcctcccgcctgccccacacggaggctctggctgtcctctttctccactccatttgcttggctctttctacacctccctcttgggcatgggctgagggctggagcgagtccctcagaaattccaccaggctgtcagctgacctcttttgcctgctgctgtgaaggtatagcaccaccccaggtcctcctgcagtgcggcatccccttggcagctgccgtcagccaggccagccccagggagcttaaaacagacattccacagggcctgggcccctgggaggtgaggtgtggtgtgcggcttcacccagggcagaacaaggcagaatcgcaggaaacccgcttccccttcctgacagctcctgccaagccaaatgtgcttcctgcagctcacgcccaccagctactgaagggacccaaggcaccccctgaagccagcgatagagggtccctctctgctccccagcagctcctgcccccaaggcctgactgtatatactgtaaatgaaactttgtttgggtcaagcttccttctttctaacccccagactttggcctctgagtgaaatgtctctctttgccctgtggggcttctctccttgatgcttctttctttttttaaagacaacctgccattaccacatgactcaataaaccattgctcttcaactca

SEQ ID NO: 347893 - DNA, 2540 bp, Homo sapiens
gcacacttctatttgtttggatgtggagagagaaaagaagaaatccacgtggtgggtaaagcacctgggtccacagccgaaaaatcccgggtttagtctgtttcactatacaaaattgggccatttacctgagttccaggctccacatataaaacacagacataatattactcacccatgtcactgggctgctgggggactctactaggacaacagaggcaaagctctgatataagctctttgcaaatgtaagaagtggtccttatgtcacccagtttagggcagtggttgagagcagacacattctgatccctcgaatctgaatcctatctttggcccatctggaagtgggacaagtttcttaaacctttgtgcctgggtttcctatctggggaagaataaattaacagatgcaaggaccctgaacagtccggttggagactgctccagtccttggcaccgtcctgcattctgtgggtcccaacagtgtggtgaaaccaggaagccgaccagccatccaaccagggtgtggtcctctggctgagactctctatcccacgtctgggcacccatgccaccagctggccttgaattccagggatgcgggaggacaatgagcatgaacgaaacgtgccgagtggagttgagaacgtaaaggaagaagggggcgatgaggacctctcctggggagatgagggctgccaagtcctaagacacaggctcagggtctgcaggaaggtcggcttgttggatcgtctctgtgcgctgacttctctttgctccccaggggcctctacccgctgcccttgctcaacagcaccctggacgacgggaaggccaccctgaccccttccaacacgccactggggcgcaacctctcgactcaccagacctaccccgtggtggcagatcctcactcacccttcgccataaagcaggaaacccccgaggtgtccagttctagctccaccccttcctctttatctagctccgcctttttggatctgcagcaagtcggctccggggtcccgcccttcaatgcctttccccatgctgcctccgtgtacgggcagttcacgggccaggccctcctctcagggcgagagatggtggggcccacgctgcccggatacccaccccacatccccaccagcggacagggcagctatgcctcctctgccatcgcaggcatggtggcaggaagtgaatactctggcaatgcctatggccacaccccctactcctcctacagcgaggcctggcgcttccccaactccagcttgctgagttccccatattattacagttccacatcaaggccgagtgcaccgcccaccactgccacggcctttgaccatctgtagttgccatggggacagtgggagcgactgagcaacaggaggactcagcctgggacaggccccagagagtcacacaaaggaatctttatttattacatgaaaaataaccacaagtccagcattgcggcacactccctgtgtggttaatttaatgaaccatgaaagacaggatgaccttggacaaggccaaactgtcctccaagactccttaatgaggggcaggagtcccagggaaagagaaccatgccatgctgaaaaagacaaaattgaagaagaaatgtagcccccagccggtacccaccaaaggagagaagaagcaatagccgaggaacttggggggatggcgaatggttcctgcccgggcccaaggggtgcacagggcacctccatggctccattattaacacaactctagcaattatggaccataagcacttccctccagcccacaagtcacagcctggtgccgaggctctcctcaccagccacccagggagtcacctccctcagcctcccgcctgccccacacggaggctctggctgtcctctttctccactccatttgcttggctctttctacacctccctcttgggcatgggctgagggctggagcgagtccctcagaaattccaccaggctgtcagctgacctcttttgcctgctgctgtgaaggtatagcaccaccccaggtcctcctgcagtgcggcatccccttggcagctgccgtcagccaggccagccccagggagcttaaaacagacattccacagggcctgggcccctgggaggtgaggtgtggtgtgcggcttcacccagggcagaacaaggcagaatcgcaggaaacccgcttccccttcctgacagctcctgccaagccaaatgtgcttcctgcagctcacgcccaccagctactgaagggacccaaggcaccccctgaagccagcgatagagggtccctctctgctccccagcagctcctgcccccaaggcctgactgtatatactgtaaatgaaactttgtttgggtcaagcttccttctttctaacccccagactttggcctctgagtgaaatgtctctctttgccctgtggggcttctctccttgatgcttctttctttttttaaagacaacctgccattaccacatgactcaataaaccattgctcttcaactca

SEQ ID NO: 347894 - DNA, 1055 bp, Homo sapiens
gcaggagtcccacggaaagagaaccatgcccctcattaaggagtcttggaggacagtttggccttgtccaaggtcatcctgtccttaatgaggggcaggagtcccagggaaagagaaccatgccatgctgaaaaagacaaaattgaagaagaaatgtagcccccagccggtacccaccaaaggagagaagaagcaatagccgaggaacttggggggatggcgaatggttcctgcccgggcccaaggggtgcacagggcacctccatggctccattattaacacaactctagcaattatggaccataagcacttccctccagcccacaagtcacagcctggtgccgaggctctcctcaccagccacccagggagtcacctccctcagcctcccgcctgccccacacggaggctctggctgtcctctttctccactccatttgcttggctctttctacacctccctcttgggcatgggctgagggctggagcgagtccctcagaaattccaccaggctgtcagctgacctcttttgcctgctgctgtgaaggtatagcaccaccccaggtcctcctgcagtgcggcatccccttggcagctgccgtcagccaggccagccccagggagcttaaaacagacattccacagggcctgggcccctgggaggtgaggtgtggtgtgcggcttcacccagggcagaacaaggcagaatcgcaggaaacccgcttccccttcctgacagctcctgccaagccaaatgtgcttcctgcagctcacgcccaccagctactgaagggacccaaggcaccccctgaagccagcgatagagggtccctctctgctccccagcagctcctgcccccaaggcctgactgtatatactgtaaatgaaactttgtttgggtcaagcttccttctttctaacccccagactttggcctctgagtgaaatgtctctctttgccctgtggggcttctctccttgatgcttctttctttttttaaagacaacctgccattaccacatgactcaataaaccattgctcttcaactca

SEQ ID NO: 347895 - DNA, 3071 bp, Homo sapiens
tgggaacaaacttcagaaggaggagagacaccgggcccagggcaccctgcgcgggcggacccaagcagtgagggcctgcagccggccggccagggcagcggcaggcgcggcccggacctacgggaggaagccccgagccctcggcgggctgcgagcgactccccggcgatgcctcacaactccatcagatctggccatggagggctgaaccagctgggaggggcctttgtgaatggcagacctctgccggaagtggtccgccagcgcatcgtagacctggcccaccagggtgtaaggccctgcgacatctctcgccagctccgcgtcagccatggctgcgtcagcaagatccttggcaggtactacgagactggcagcatccggcctggagtgatagggggctccaagcccaaggtggccacccccaaggtggtggagaagattggggactacaaacgccagaaccctaccatgtttgcctgggagatccgagaccggctcctggctgagggcgtctgtgacaatgacactgtgcccagtgtcagctccattaatagaatcatccggaccaaagtgcagcaaccattcaacctccctatggacagctgcgtggccaccaagtccctgagtcccggacacacgctgatccccagctcagctgtaactcccccggagtcaccccagtcggattccctgggctccacctactccatcaatgggctcctgggcatcgctcagcctggcagcgacaagaggaaaatggatgacagtgatcaggatagctgccgactaagcattgactcacagagcagcagcagcggaccccgaaagcaccttcgcacggatgccttcagccagcaccacctcgagccgctcgagtgcccatttgagcggcagcactacccagaggcctatgcctcccccagccacaccaaaggcgagcaggtgagaagctgggccctgggaggtgaacagggtgggcaagggccagagaaggtctattctccaaatgagcctgtgctccatcaaagcagctggaagttgcatcaatgggctcagggcacctgccttatgcaactccaagcctgacacatgctttattttaccagatgccctggcatcttcctccctttctaaccctcctggcttccttcacccaaaacctttgagcctgggcctttcagggatggcagcacaacctgatgatgctatcccttgccatcagcgtctttcccagattgcaacatcacgttccacaactctgaagcagtagcacaaagccttcacataatgacctcagccactatttcctagccccacctttggccactcatcctgcacaccccatgctcttgcattactcatggccccgagctcaccaccctcgctcacacctctctgcccttgcacactgtgtgccctccacacagaatgcctttcctcccacttctctgcatggaaaaataccactagccttcatgactcagccaaacatcaccctctccgtcagtcctcccctgcccctccgacatgaatcatctctcctgcctcttgcccttctgcatgtcccacatgctgctctcagtagcttctcacagtgtcacttaataatctagcagacagacaggtacaaagacacgcggactccttaaggacagggaagcctcatgaaacgttaaacatcgtttttattcccagcacctaccattgtgccccccttataatagacagtaatggtatagtgaatgaatgaacaaatgaatgagttgagaaatccagaataatacatcacaagctacagcgaatttttcttgctagtgctcaggacaggtgaaatgaatcataacaggttggtgtctgtgaaaagctgacagagatgtgagaggtcccaccctgaggccaacaaagactctgcagctctggcagaaccactaagctctcagctcctagtcatcacatctttttcccttaaccctgccaagtcaaccagatgaggagtgtcttcagggtgggtctgttgcccctctttgcccatgccgtcatttgctgtaggagtgaggcaagtccatatgcctttaagaaccgagtaggacaatggagatgatgccaataatcagcccaaccacttccagtgaccgtctgggctatcagcgttgactgtggcaaccacgagcgtgcagagaaagctgaccatcagcagcatggggagagggcctggggtgctcacgcaccagtcagcacacagctccaggaaggaaaggggttgcagtggggggcctgcaggaagctcactctgtgagagtaagcctgcaaaactcagtgtgcaggcaccagccactcagtgaaagtaaagaaaccctgctgatgagactctggacacccgctgagtcccagagccatttcctggctccatccctaagccccccaaaggaccctgcttgactacagagcacccccatgccatgctggcatatgaacatggggaatcctggaatgagaaagtctttgagctttcagggacctccatgaccaccttgtccagtttctccatttgtgtggagataatccaagcaagacaaggagggcttgggcaatcagaaggttttggagctcaggcctgccaaccctcatttcattcagactggtccactgtcacctgtttcagatatggtgcttctacgtaaacacttatttgaagactgaaaaaaaaagcatttgaaaaccattaaacttctccaaccactcatctttcagatgaggagactgaggtccagcagtgtccataaattattcattacctcctcagtcaatcattattcacccagtcattcacctggagggtggtgaaggcagggagaaccagccagtgcaagggcccctcatgtcctgcctggcctttgcttttcctacctctggtaactgactgtgctgccaaagtaacactccgtgctctctcacctgggcataggaatgccctctggcttggggagccaagaaagaagcacaagtattcatacctgaccttaggacaggttgtaacacagctatcttttctgcaaaatcaacaagtg

SEQ ID NO: 347896 - DNA, 2662 bp, Homo sapiens
tgggaacaaacttcagaaggaggagagacaccgggcccagggcaccctgcgcgggcggacccaagcagtgagggcctgcagccggccggccagggcagcggcaggcgcggcccggacctacgggaggaagccccgagccctcggcgggctgcgagcgactccccggcgatgcctcacaactccatcagatctggccatggagggctgaaccagctgggaggggcctttgtgaatggcagacctctgccggaagtggtccgccagcgcatcgtagacctggcccaccagggtgtaaggccctgcgacatctctcgccagctccgcgtcagccatggctgcgtcagcaagatccttggcaggtactacgagactggcagcatccggcctggagtgatagggggctccaagcccaaggtggccacccccaaggtggtggagaagattggggactacaaacgccagaaccctaccatgtttgcctgggagatccgagaccggctcctggctgagggcgtctgtgacaatgacactgtgcccagtgtcagctccattaatagaatcatccggaccaaagtgcagcaaccattcaacctccctatggacagctgcgtggccaccaagtccctgagtcccggacacacgctgatccccagctcagctgtaactcccccggagtcaccccagtcggattccctgggctccacctactccatcaatgggctcctgggcatcgctcagcctggcagcgacaagaggaaaatggatgacagtgatcaggatagctgccgactaagcattgactcacagagcagcagcagcggaccccgaaagcaccttcgcacggatgccttcagccagcaccacctcgagccgctcgagtgcccatttgagcggcagcactacccagaggcctatgcctcccccagccacaccaaaggcgagcagggcctctacccgctgcccttgctcaacagcaccctggacgacgggaaggccaccctgaccccttccaacacgccactggggcgcaacctctcgactcaccagacctaccccgtggtggcagatcctcactcacccttcgccataaagcaggaaacccccgaggtgtccagttctagctccaccccttcctctttatctagctccgcctttttggatctgcagcaagtcggctccggggtcccgcccttcaatgcctttccccatgctgcctccgtgtacgggcagttcacgggccaggccctcctctcagggcgagagatggtggggcccacgctgcccggatacccaccccacatccccaccagcggacagggcagctatgcctcctctgccatcgcaggcatggtggcaggtaaggagagggccggcaggaaggggagcactgcaaagaggaagtattggagcaaggtgggacacaaggagcaagaggcatactgtgccctattcatagacttcccaaagggcattgaaggatggaccaaagagggcatctccttgtaaatgcctggagacgatgtcccagtgcagtcctgactccctatttaacttgccccagctcggcctccttcttcccaggcctgctacattaccctccatgatgaaaagggaggggctgagacaggtctgtgttcaaatccaagctccaccacttcttccagtgaatcagtgagcataaatggagagcactctaagggccccaaaacactgtgagtggaagatgaaccctaccctcaagcagtgctggtctcccagtgatttaactctgatgaatcccagtttacccgttctgtaaaatctgaatctgaagggtattgatgatgatgatgatgatgatgacgatgacgatgatgatgatgaaatatatgcttcacatctctctctcaagcctgcatggataggacccgggttctaggtactctaagagtactatagaggatgaaatgagcctggagtagctctccatcctcatttggactgttctggaacctgcctgccagtcatttgggtttctttgtctgccagtcatcatccaatgatgattcaagatgacaaggtctggacaaatgaagataatgggagtttccttgggcaagtctcaattttttaggagccatgtagggaagactttgggatggatgagacataattgagccattgtcactggtcaaaaaggcctgggacctggagtttctggaaagagctctgaacacaaggcatctgtgacccccatgccagccctaggccagcctctctggctgtgaccccagagacttggcgtatttacctaggcctgcttcccttcctcttctggagcgtgaaatgagattggtcaagataaaaaaggaaaagattcggttatttttttaagagtgtggataatggggcctctcaatcaaaatcccagtctccagtcggttccccccattccccttccaacccctccaccttcccctgccgcctgcttagaggaggaggaagaaacataaagcacaaggcttttctcttaattatgaatcattccctgagggcaggcccagggcaaggggttcctggggcccagagtctgacctgtgaggtagctagaaggcttgagcctctcatcaaagtcccccaggttgtttccagaaagaatcctgagtgggttctgtgaaaaaga

SEQ ID NO: 347897 - DNA, 788 bp, Homo sapiens
tgggaacaaacttcagaaggaggagagacaccgggcccagggcaccctgcgcgggcggacccaagcagtgagggcctgcagccggccggccagggcagcggcaggcgcggcccggacctacgggaggaagccccgagccctcggcgggctgcgagcgactccccggcgatgcctcacaactccatcagatctggccatggagggctgaaccagctgggaggggcctttgtgaatggcagacctctgccggaagtggtccgccagcgcatcgtagacctggcccaccagggtgtaaggccctgcgacatctctcgccagctccgcgtcagccatggctgcgtcagcaagatccttggcaggtaagcacgaaattcaccgcaggccgccttccccgcagggcttgacttctccagctgatctcagggcagctagagaattcccctcccagggaacggggatttgctcccaatgtccagctttggtcctgagacctgaacagttatggtggtccttctgggcctctacccagccactatttttctactgttttcttgcccttccttctttctttgtccatttatccttcttttagtttctccctctcctttgaaaatcactaataaaaacttgctggttttgtggcttgaggggcatcatggaacctgccgacatgtgatgtctcctctggacacccagctttaaaatttctctcttttgtactctttccctttatttcagactggccaacacttagggaaacatgcgaaccggaccgagctgcgattatc

SEQ ID NO: 347898 - DNA, 2399 bp, Homo sapiens
ttttctcccttagatgccttttatgaacaagattttactagaagacatcactattactggattcttcatgaaagagcactggctgatatttatatcgggctattagctgagtggtagtctgcctggtcgcaattgcttctatagttgattgaatgctcttaacacggagagacaggataccttcaagtttctccctgttgcagtgggagtaagaagaaagatggtctaattgtttcaagtacactagcccttgtccattttcctggcaactgtcggtaggcctgtggcccacagatccaatagagaccagagggtgcttgccagatgccctgtacagacttttggggaactgggtactgatgaacccgaacaggagttgcttctggttttaattctgctactactggtgcatgatttacagctaaaccagagaggagtctgcaatgccgagtggaggaaggaggaaccggagtgtgagcagtagctgggtgggcagcatggctgggatcaccaccatcgaggcagtgaagcgcaagatccaggttctgcagcaccaggcagatgatgcagaggagtgagctgagcacctccagtgagaagctgagggaaaaaggtgggcctgggaacaggcagaggctgaagtggcctccgtgaacggtaggatccagctggttgaagaggagctggactgtgctcaggagcgcctggccactgccctgcaaaagctggaagaagcgggaaaagctgctgatgagagtgagagagatacaaaggttattgaaatctgggccttaaaagatgaagaagatggaactccaggaaatccaactcaaagaagctaagcacattgcagatgaggcagatgggaagtatgaagaggtggctcgtaagttggtgatcattgaaggagacatgggatgcacagaggaacgagctgagctggcagagtcccgttgctgagagatggatgagcagatcagactgatggaccagaacctgaagtgtctgagtgcagctgaagaaaagtactctcaaaaagaagacaaatgtgaggaagagatgaagattcttactgataatctcaaggaggcagagacccatgctgagttggctgagagatcagtagccaagctggaaaagacaattgatgacttggaagataaactgaaatgcaccaaagaggaacacctctgtacacaaaggatgctggaccagactctgcttgacctgaatgagatgtagaatgccccagtcccaccctgctgctgctccttcctctgaccctgactctgcctgaggccagcctgcccgaagctgacctttacctgagggctgatctttaacgggaaggctgctttctccttttgccaccccctcctcccctgcctctttttcaccaaactgtctctgcctcttcctggagattccagctgggctagaggctgagaacctttgcaaacaacatttaagggaatgtgagcccaatgcataatgtctttaaaaatcatgttgtgaaaaaaaaaatacataatcacttctgaaagatgcctttgtcacatcctataatcagctcacatcatttttttctgtacaagtatattttccagttatttacctgttgaccccagaatttgttagatttttaaaaaaacaatttctaaatagtttctgtttgaaactagttgcgtccagttcagatcaaggtctgcatgctttctagtctttattatttattggaaaacttcggtacctaatacaaaagtttgattgtttcagtgtgtacctggtaaagaatcagtgaccttttaccttaacatcaaaatgtagtttaaccagttaatgtatttttcagttttctttccttatgtcatctgtgaacatcttgagctgtgagctattaagtgcatgtttccctcaaggccctctggtccattctggactaatgttgaaagatgggatggattggcatggaactgttggggtgatcagacccaacaccgggctgtgggggctaagaagtccagtggagtcaaaggaatgagaaaagacaagttaagaatgcataaggtgggtccagggggccaacgctagtatggaggctgcaatagacctgagctctggaagcccacactattagtgatcaaacaaagcagcaggtggtgaggatgtggggtttgaaaggaagcagtgcatcaagcacatgatctataggtgtgtcaggttaacatttatatggaacatgttctgctacttgagatcatggggaacatattcttctagtttaagatacaatcattttatgagtctgggagtgctagaagcaaagaaccatcaagtctaggcacattccagaggccacgaggggttttatgccctgaaacctggattccatccaagcc

SEQ ID NO: 347899 - DNA, 2246 bp, Homo sapiens
ttttctcccttagatgccttttatgaacaagattttactagaagacatcactattactggattcttcatgaaagagcactggctgatatttatatcgggctattagctgagtggtagtctgcctggtcgcaattgcttctatagttgattgaatgctcttaacacggagagatgccctgtacagacttttggggaactgggtactgatgaacccgaacaggagttgcttctggttttaattctgctactactggtgcatgatttacagctaaaccagagaggagtctgcaatgccgagtggaggaaggaggaaccggagtgtgagcagtagctgggtgggcagcatggctgggatcaccaccatcgaggcagtgaagcgcaagatccaggttctgcagcaccaggcagatgatgcagaggagtgagctgagcacctccagtgagaagctgagggaaaaaggtgggcctgggaacaggcagaggctgaagtggcctccgtgaacggtaggatccagctggttgaagaggagctggactgtgctcaggagcgcctggccactgccctgcaaaagctggaagaagcgggaaaagctgctgatgagagtgagagagatacaaaggttattgaaatctgggccttaaaagatgaagaagatggaactccaggaaatccaactcaaagaagctaagcacattgcagatgaggcagatgggaagtatgaagaggtggctcgtaagttggtgatcattgaaggagacatgggatgcacagaggaacgagctgagctggcagagtcccgttgctgagagatggatgagcagatcagactgatggaccagaacctgaagtgtctgagtgcagctgaagaaaagtactctcaaaaagaagacaaatgtgaggaagagatgaagattcttactgataatctcaaggaggcagagacccatgctgagttggctgagagatcagtagccaagctggaaaagacaattgatgacttggaagataaactgaaatgcaccaaagaggaacacctctgtacacaaaggatgctggaccagactctgcttgacctgaatgagatgtagaatgccccagtcccaccctgctgctgctccttcctctgaccctgactctgcctgaggccagcctgcccgaagctgacctttacctgagggctgatctttaacgggaaggctgctttctccttttgccaccccctcctcccctgcctctttttcaccaaactgtctctgcctcttcctggagattccagctgggctagaggctgagaacctttgcaaacaacatttaagggaatgtgagcccaatgcataatgtctttaaaaatcatgttgtgaaaaaaaaaatacataatcacttctgaaagatgcctttgtcacatcctataatcagctcacatcatttttttctgtacaagtatattttccagttatttacctgttgaccccagaatttgttagatttttaaaaaaacaatttctaaatagtttctgtttgaaactagttgcgtccagttcagatcaaggtctgcatgctttctagtctttattatttattggaaaacttcggtacctaatacaaaagtttgattgtttcagtgtgtacctggtaaagaatcagtgaccttttaccttaacatcaaaatgtagtttaaccagttaatgtatttttcagttttctttccttatgtcatctgtgaacatcttgagctgtgagctattaagtgcatgtttccctcaaggccctctggtccattctggactaatgttgaaagatgggatggattggcatggaactgttggggtgatcagacccaacaccgggctgtgggggctaagaagtccagtggagtcaaaggaatgagaaaagacaagttaagaatgcataaggtgggtccagggggccaacgctagtatggaggctgcaatagacctgagctctggaagcccacactattagtgatcaaacaaagcagcaggtggtgaggatgtggggtttgaaaggaagcagtgcatcaagcacatgatctataggtgtgtcaggttaacatttatatggaacatgttctgctacttgagatcatggggaacatattcttctagtttaagatacaatcattttatgagtctgggagtgctagaagcaaagaaccatcaagtctaggcacattccagaggccacgaggggttttatgccctgaaacctggattccatccaagcc

SEQ ID NO: 347900 - DNA, 2003 bp, Homo sapiens
tgcgaagtttggggagggaggagctcgggcggccggagctggtcgctgcgcgcgccggggggagggccggggctgcgagagaggaagctctttcgcggcgctacggcgttggcaccagtctctagaaaagaagtcagctctggttcggagaagcagcggctggcgtgggccatccggggaatgggcgccctcgtgacctagtgttgcggggcaaaaagggtcttgccggcctcgctcgtgcaggggcgtatctgggcgcctgagcgcggcgtgggagccttgggagccgccgcagcagggggcacacccggaaccggcctgagcgcccgggaccatgaacggggaggccatctgcagcgccctgcccaccattccctaccacaaactcgccgacctgcgctacctgagccgcggcgcctctggcactgtgtcgtccgcccgccacgcagactggcgcgtccaggtggccgtgaagcacctgcacatccacactccgctgctcgacagtgaaagaaaggatgtcttaagagaagctgaaattttacacaaagctagatttagttacattcttccaattttgggaatttgcaatgagcctgaatttttgggaatagttactgaatacatgccaaatggatcattaaatgaactcctacataggaaaactgaatatcctgatgttgcttggccattgagatttcgcatcctgcatgaaattgcccttggtgtaaattacctgcacaatatgactcctcctttacttcatcatgacttgaagactcagaatatcttattggacaatgaatttcatgttaagattgcagattttggtttatcaaagtggcgcatgatgtccctctcacagtcacgaagtagcaaatctgcaccagaaggagggacaattatctatatgccacctgaaaactatgaacctggacaaaaatcaagggccagtatcaagcacgatatatatagctatgcagttatcacatgggaagtgttatccagaaaacagccttttgaagatgtcaccaatcctttgcagataatgtatagtgtgtcacaaggacatcgacctgttattaatgaagaaagtttgccatatgatatacctcaccgagcacgtatgatctctctaatagaaagtggatgggcacaaaatccagatgaaagaccatctttcttaaaatgtttaatagaacttgaaccagttttgagaacatttgaagagataacttttcttgaagctgttattcagctaaagaaaacaaagttacagagtgtttcaagtgccattcacctatgtgacaagaagaaaatggaattatctctgaacatacctgtaaatcatggtccacaagaggaatcatgtggatcctctcagctccatgaaaatagtggttctcctgaaacttcaaggtccctgccagctcctcaagacaatgattttttatctagaaaagctcaagactgttattttatgaagctgcatcactgtcctggaaatcacagttgggatagcaccatttctggatctcaaagggctgcattctgtgatcacaagaccactccatgctcttcagcaataataaatccactctcaactgcaggaaactcagaacgtctgcagcctggtatagcccagcagtggatccagagcaaaagggaagacattgtgaaccaaatgacagaagcctgccttaaccagtcgctagatgcccttctgtccagggacttgatcatgaaagaggactatgaacttgttagtaccaagcctacaaggacctcaaaagtcagacaattactagacactactgacatccaaggagaagaatttgccaaagttatagtacaaaaattgaaagataacaaacaaatgggtcttcagccttacccggaaatacttgtggtttctagatcaccatctttaaatttacttcaaaataaaagcatgtaagtgactgtttttcaagaagaaatgtgtttcataaaaggatatttat

SEQ ID NO: 347901 - DNA, 2608 bp, Homo sapiens
tgcgaagtttggggagggaggagctcgggcggccggagctggtcgctgcgcgcgccggggggagggccggggctgcgagagaggaagctctttcgcggcgctacggcgttggcaccagtctctagaaaagaagtcagctctggttcggagaagcagcggctggcgtgggccatccggggaatgggcgccctcgtgacctagtgttgcggggcaaaaagggtcttgccggcctcgctcgtgcaggggcgtatctgggcgcctgagcgcggcgtgggagccttgggagccgccgcagcagggggcacacccggaaccggcctgagcgcccgggaccatgaacggggaggccatctgcagcgccctgcccaccattccctaccacaaactcgccgacctgcgctacctgagccgcggcgcctctggcactgtgtcgtccgcccgccacgcagactggcgcgtccaggtggccgtgaagcacctgcacatccacactccgctgctcgacagtgaaagaaaggatgtcttaagagaagctgaaattttacacaaagctagatttagttacattcttccaattttgggaatttgcaatgagcctgaatttttgggaatagttactgaatacatgccaaatggatcattaaatgaactcctacataggaaaactgaatatcctgatgttgcttggccattgagatttcgcatcctgcatgaaattgcccttggtgtaaattacctgcacaatatgactcctcctttacttcatcatgacttgaagactcagaatatcttattggacaatgaatttcatgttaagattgcagattttggtttatcaaagtggcgcatgatgtccctctcacagtcacgaagtagcaaatctgcaccagaaggagggacaattatctatatgccacctgaaaactatgaacctggacaaaaatcaagggccagtatcaagcacgatatatatagctatgcagttatcacatgggaagtgttatccagaaaacagccttttgaagatgtcaccaatcctttgcagataatgtatagtgtgtcacaaggacatcgacctgttattaatgaagaaagtttgccatatgatatacctcaccgagcacgtatgatctctctaatagaaagtggatgggcacaaaatccagatgaaagaccatctttcttaaaatgtttaatagaacttgaaccagttttgagaacatttgaagagataacttttcttgaagctgttattcagctaaagaaaacaaagttacagagtgtttcaagtgccattcacctatgtgacaagaagaaaatggaattatctctgaacatacctgtaaatcatggtccacaagaggaatcatgtggatcctctcagctccatgaaaatagtggttctcctgaaacttcaaggtccctgccagctcctcaagacaatgattttttatctagaaaagctcaagactgttattttatgaagctgcatcactgtcctggaaatcacagttgggatagcaccatttctggatctcaaagggctgcattctgtgatcacaagaccactccatgctcttcagcaataataaatccactctcaactgcaggaaactcagaacgtctgcagcctggtatagcccagcagtggatccagagcaaaagggaagacattgtgaaccaaatgacagaagcctgccttaaccagtcgctagatgcccttctgtccagggacttgatcatgaaagaggactatgaacttgttagtaccaagcctacaaggacctcaaaagtcagacaattactagacactactgacatccaaggagaagaatttgccaaagttatagtacaaaaattgaaagataacaaacaaatgggtcttcagccttacccggaaatacttgtggtttctagatcaccatctttaaatttacttcaaaataaaagcatgtaagtgactgtttttcaagaagaaatgtgtttcataaaaggatatttatatctctgttgctttgactttttttatataaaatccgtgagtattaaagctttattgaaggttctttgggtaaatattagtctccctccatgacactgcagtattttttttaattaatacaagtaaaaagtttgaattttgctacatagttcaatttttatgtctcttttgttaacagaaaccacttttaaaggatagtaattattcttgtttataacagtgccttaaggtatgatgtatttctgatggaagccattttcacattcatgttcttcatggattatttgttacttgtctaagatgcaatttgattttatgaagtatataccctttacccaccagagacagtacagaatccctgccctaaaatcccaggcttaattgccctacaaagggttattaatttaaaactccattattaggattacattttaaagttttatttatgaattccctttaaaaatgatatttcaaaggtaaaacaatacaatataaagaaaaaaataaatatattaataccggcttcctgtccccatttttaacctcagccttccctactgtcaccaacaaccaagctaaataaagtcaacagcctgatgtgtatct

SEQ ID NO: 347902 - DNA, 1972 bp, Homo sapiens
tgcgaagtttggggagggaggagctcgggcggccggagctggtcgctgcgcgcgccggggggagggccggggctgcgagagaggaagctctttcgcggcgctacggcgttggcaccagtctctagaaaagaagtcagctctggttcggagaagcagcggctggcgtgggccatccggggaatgggcgccctcgtgacctagtgttgcggggcaaaaagggtcttgccggcctcgctcgtgcaggggcgtatctgggcgcctgagcgcggcgtgggagccttgggagccgccgcagcagggggcacacccggaaccggcctgagcgcccgggaccatgaacggggaggccatctgcagcgccctgcccaccattccctaccacaaactcgccgacctgcgctacctgagccgcggcgcctctggcactgtgtcgtccgcccgccacgcagactggcgcgtccaggtggccgtgaagcacctgcacatccacactccgctgctcgacagaaaactgaatatcctgatgttgcttggccattgagatttcgcatcctgcatgaaattgcccttggtgtaaattacctgcacaatatgactcctcctttacttcatcatgacttgaagactcagaatatcttattggacaatgaatttcatgttaagattgcagattttggtttatcaaagtggcgcatgatgtccctctcacagtcacgaagtagcaaatctgcaccagaaggagggacaattatctatatgccacctgaaaactatgaacctggacaaaaatcaagggccagtatcaagcacgatatatatagctatgcagttatcacatgggaagtgttatccagaaaacagccttttgaagatgtcaccaatcctttgcagataatgtatagtgtgtcacaaggacatcgacctgttattaatgaagaaagtttgccatatgatatacctcaccgagcacgtatgatctctctaatagaaagtggatgggcacaaaatccagatgaaagaccatctttcttaaaatgtttaatagaacttgaaccagttttgagaacatttgaagagataacttttcttgaagctgttattcagctaaagaaaacaaagttacagagtgtttcaagtgccattcacctatgtgacaagaagaaaatggaattatctctgaacatacctgtaaatcatggtccacaagaggaatcatgtggatcctctcagctccatgaaaatagtggttctcctgaaacttcaaggtccctgccagctcctcaagacaatgattttttatctagaaaagctcaagactgttattttatgaagctgcatcactgtcctggaaatcacagttgggatagcaccatttctggatctcaaagggctgcattctgtgatcacaagaccactccatgctcttcagcaataataaatccactctcaactgcaggaaactcagaacgtctgcagcctggtatagcccagcagtggatccagagcaaaagggaagacattgtgaaccaaatgacagaagcctgccttaaccagtcgctagatgcccttctgtccagggacttgatcatgaaagaggactatgaacttgttagtaccaagcctacaaggacctcaaaagtcagacaattactagacactactgacatccaaggagaagaatttgccaaagttatagtacaaaaattgaaagataacaaacaaatgggtcttcagccttacccggaaatacttgtggtttctagatcaccatctttaaatttacttcaaaataaaagcatgtaagtgactgtttttcaagaagaaatgtgtttcataaaaggatatttatatctctgttgctttgactttttttatataaaatccgtgagtattaaagctttattgaaggttctttgggtaaatattagtctccctccatgacactgctggctgatgaattcggggcctcaaa

SEQ ID NO: 347903 - DNA, 505 bp, Homo sapiens
gctcctcaagacaatgattttttatctagtatgtagattttccaatcattatttacttgcaagttttccattttctttcaagatcaaatttttgcaagcagtcatgatttctatggaactttaatttgcatatataactcattttgtaaagcgacagagtctaaagataggaaaatagtagtgtgatattcaacaaatacatttaagttttaaggcattatgtttggccaggcgcagtggttcacacctataatcccagcatgttgggtggccaaggtgggcagatcacctgaggtcaggagttcgagaccagcctggccaacatggtgaaaccccatctctactaaaaatacaaaaattagccaggcatggtggtgggcacctgtagtctcagctacttcggaggctgaggcggaaagatcgcttgaacctgggagggaggttgcagtgagccgagattgcaccaccacactccatcctgggcgacagagtgagactctgtgtc

SEQ ID NO: 347904 - DNA, 340 bp, Homo sapiens
atcataattttctctataaagtgaggaaagtaagacacaaaaatgttaaaccctatcaaattggtgctattttataaaaatgagcatatgttttaaccttagtttatactgtatttcctcatggaatatttaactttctaagtgtgaaacatagtgaaatttggactaatttcattttctttcttttcacatatatatgaagaaaactgaatatcctgatgttgcttggccattgagatttcgcatcctgcatgaaattgcccttggtgtaaattacctgcacaatatgactcctcctttacttcatcatgacttgaagactcagaatatcttattggac

SEQ ID NO: 347905 - DNA, 421 bp, Homo sapiens
acctagtttataccagatatttcatatttataagctcaatctctagaaccatcctgcatgtaggtaattgttagatttcgaggatgaagctctgagacactgagagaaggtaaccaattaatatgagccaggattcaaagtctgtgtttctaaagttatttcccgttctacactgtcttttccttcagttatatgttatattctcaactctttatattttctttccatgtattttgtacaaacatataaaatgtgttagattgtattttacttctataatttcctaatcatctccagttaaagtgtatatatatttatgtattcattacagttacagagtgtttcaagtgccattcacctatgtgacaagaagaaaatggaattatctctgaacatacctgtaaatcatggtccacaagag

SEQ ID NO: 347906 - DNA, 2371 bp, Homo sapiens
tgcgaagtttggggagggaggagctcgggcggccggagctggtcgctgcgcgcgccggggggagggccggggctgcgagagaggaagctctttcgcggcgctacggcgttggcaccagtctctagaaaagaagtcagctctggttcggagaagcagcggctggcgtgggccatccggggaatgggcgccctcgtgacctagtgttgcggggcaaaaagggtcttgccggcctcgctcgtgcaggggcgtatctgggcgcctgagcgcggcgtgggagccttgggagccgccgcagcagggggcacacccggaaccggcctgagcgcccgggaccatgaacggggaggccatctgcagcgccctgcccaccattccctaccacaaactcgccgacctgcgctacctgagccgcggcgcctctggcactgtgtcgtccgcccgccacgcagactggcgcgtccaggtggccgtgaagcacctgcacatccacactccgctgctcgacagaaaactgaatatcctgatgttgcttggccattgagatttcgcatcctgcatgaaattgcccttggtgtaaattacctgcacaatatgactcctcctttacttcatcatgacttgaagactcagaatatcttattggacaatgaatttcatgttaagattgcagattttggtttatcaaagtggcgcatgatgtccctctcacagtcacgaagtagcaaatctgcaccagaaggagggacaattatctatatgccacctgaaaactatgaacctggacaaaaatcaagggccagtatcaagcacgatatatatagctatgcagttatcacatgggaagtgttatccagaaaacagccttttgaagatgtcaccaatcctttgcagataatgtatagtgtgtcacaaggacatcgacctgttattaatgaagaaagtttgccatatgatatacctcaccgagcacgtatgatctctctaatagaaagtggatgggcacaaaatccagatgaaagaccatctttcttaaaatgtttaatagaacttgaaccagttttgagaacatttgaagagataacttttcttgaagctgttattcagctaaagaaaacaaagttacagagtgtttcaagtgccattcacctatgtgacaagaagaaaatggaattatctctgaacatacctgtaaatcatggtccacaagaggaatcatgtggatcctctcagctccatgaaaatagtggttctcctgaaacttcaaggtccctgccagctcctcaagacaatgattttttatctagaaaagctcaagactgttattttatgaagctgcatcactgtcctggaaatcacagttgggatagcaccatttctggatctcaaagggctgcattctgtgatcacaagaccactccatgctcttcagcaataataaatccactctcaactgcaggaaactcagaacgtctgcagcctggtatagcccagcagtggatccagagcaaaagggaagacattgtgaaccaaatgacagaagcctgccttaaccagtcgctagatgcccttctgtccagggacttgatcatgaaagaggactatgaacttgttagtaccaagcctacaaggacctcaaaagtcagacaattactagacactactgacatccaaggagaagaatttgccaaagttatagtacaaaaattgaaagataacaaacaaatgggtcttcagccttacccggaaatacttgtggtttctagatcaccatctttaaatttacttcaaaataaaagcatgtaagtgactgtttttcaagaagaaatgtgtttcataaaaggatatttatatctctgttgctttgactttttttatataaaatccgtgagtattaaagctttattgaaggttctttgggtaaatattagtctccctccatgacactgcagtattttttttaattaatacaagtaaaaagtttgaattttgctacatagttcaatttttatgtctcttttgttaacagaaaccacttttaaaggatagtaattattcttgtttataacagtgccttaaggtatgatgtatttctgatggaagccattttcacattcatgttcttcatggattatttgttacttgtctaagatgcaatttgattttatgaagtatataccctttacccaccagagacagtacagaatccctgccctaaaatcccaggcttaattgccctacaaagggttattaatttaaaactccattattaggattacattttaaagttttatttatgaattccctttaaaaatgatatttcaaaggtaaaacaatacaatataaagaaaaaaataaatatattaataccggc

SEQ ID NO: 347907 - DNA, 2238 bp, Homo sapiens
tgcgaagtttggggagggaggagctcgggcggccggagctggtcgctgcgcgcgccggggggagggccggggctgcgagagaggaagctctttcgcggcgctacggcgttggcaccagtctctagaaaagaagtcagactgtgtcgtccgcccgccacgcagactggcgcgtccaggtggccgtgaagcacctgcacatccacactccgctgctcgacagtgaaagaaaggatgtcttaagagaagctgaaattttacacaaagctagatttagttacattcttccaattttgggaatttgcaatgagcctgaatttttgggaatagttactgaatacatgccaaatggatcattaaatgaactcctacataggaaaactgaatatcctgatgttgcttggccattgagatttcgcatcctgcatgaaattgcccttggtgtaaattacctgcacaatatgactcctcctttacttcatcatgacttgaagactcagaatatcttattggacaatgaatttcatgttaagattgcagattttggtttatcaaagtggcgcatgatgtccctctcacagtcacgaagtagcaaatctgcaccagaaggagggacaattatctatatgccacctgaaaactatgaacctggacaaaaatcaagggccagtatcaagcacgatatatatagctatgcagttatcacatgggaagtgttatccagaaaacagccttttgaagatgtcaccaatcctttgcagataatgtatagtgtgtcacaaggacatcgacctgttattaatgaagaaagtttgccatatgatatacctcaccgagcacgtatgatctctctaatagaaagtggatgggcacaaaatccagatgaaagaccatctttcttaaaatgtttaatagaacttgaaccagttttgagaacatttgaagagataacttttcttgaagctgttattcagctaaagaaaacaaagttacagagtgtttcaagtgccattcacctatgtgacaagaagaaaatggaattatctctgaacatacctgtaaatcatggtccacaagaggaatcatgtggatcctctcagctccatgaaaatagtggttctcctgaaacttcaaggtccctgccagctcctcaagacaatgattttttatctagaaaagctcaagactgttattttatgaagctgcatcactgtcctggaaatcacagttgggatagcaccatttctggatctcaaagggctgcattctgtgatcacaagaccactccatgctcttcagcaataataaatccactctcaactgcaggaaactcagaacgtctgcagcctggtatagcccagcagtggatccagagcaaaagggaagacattgtgaaccaaatgacagaagcctgccttaaccagtcgctagatgcccttctgtccagggacttgatcatgaaagaggactatgaacttgttagtaccaagcctacaaggacctcaaaagtcagacaattactagacactactgacatccaaggagaagaatttgccaaagttatagtacaaaaattgaaagataacaaacaaatgggtcttcagccttacccggaaatacttgtggtttctagatcaccatctttaaatttacttcaaaataaaagcatgtaagtgactgtttttcaagaagaaatgtgtttcataaaaggatatttatatctctgttgctttgactttttttatataaaatccgtgagtattaaagctttattgaaggttctttgggtaaatattagtctccctccatgacactgcagtattttttttaattaatacaagtaaaaagtttgaattttgctacatagttcaatttttatgtctcttttgttaacagaaaccacttttaaaggatagtaattattcttgtttataacagtgccttaaggtatgatgtatttctgatggaagccattttcacattcatgttcttcatggattatttgttacttgtctaagatgcaatttgattttatgaagtatataccctttacccaccagagacagtacagaatccctgccctaaaatcccaggcttaattgccctacaaagggttattaatttaaaactccattattaggattacattttaaagttttatttatgaattccctttaaaaatgatatttcaaaggtaaaacaatacaatataaagaaaaaaataaatatattaataccggc

SEQ ID NO: 347908 - DNA, 997 bp, Homo sapiens
ccacagcagctccataatcccctccagaacattctgcaacagccccatgatcccctctagaacattccacaatagcctcacaggtcccctgtagaacattccaccacagccccatgatccccttgctcctcagagcatgtggccgccagccccaggagcccagcctcttgagatgctcccagggtggacccacacattgtctccactccgaagcagttgctattggtccaagaggatgctcgggtagtcttcggtggctgcaggagagcgatgctgcgcctctgcccctctcctgccacctggctgcccacagaggtgaagacgcccctgctgtcagccctcatgggatccctgaggggagggtccgagctgtgaggagggaagggagtgaagggcccagccagagagccaggctccatttggggaacagattgcaagggtaaggggtagctcaccaaatccctccatgggaacgggctgggagcaagcacaaaggaaaccacactggaggcagcagcccagggcagactgcaagacactggttgcccacggcctggagggctccacccagacacaagctgcactggttttctatgctgcgtaagaagcagcatggatgtaaggactgcaagcagtgcccatttatgatctcgcagctctccagggcagaagtcgcggtgggctcagtgggtgccctgagcggggtctctcagactgacgtcaggccttggtgggctgcactctcacctggaggctccggggaagcatctgcctccaggaccattcaggctgttgacaagtcaactcctcatggctgtaggactgaggttcccaagtccttgtccctggtcctgtggtccctccaccttcaaaccagcaatggtgcattgagcaaattgtggtcaaatatacatcacatcaaatttaccatcttaaccattgttaagtgtatggtttgtggcattaaatacattcacattgttgtgcaaccatcacc

SEQ ID NO: 347909 - DNA, 1395 bp, Homo sapiens
ccagcagctcggtcctagggcgatgttgacagacagacagaggggcggatgcagcctacctcctgggcagtgagctgcggtctgaggcccctgcccagctggaaaccacagggaggggaagggaggggaggagaggagaggagaggaaccgtcatggggccttggagtcgagtcagggttgccaaatgccagatgctggtcacctgcttctttatcttgctgctgggcctctctgtggccaccatggtgactcttacctacttcggggcccactttgctgtcatccgccgagcgtccctggagaagaacccgtaccaggctgtgcaccaatgggccttctctgcggggttgagcctggtgggcctcctgactctgggagccgtgctgagcgctgcagccaccgtgagggaggcccagggcctcatggcagggggcttcctgtgcttctccctggcgttctgcgcacaggtgcaggtggtgttctggagactccacagccccacccaggtggaggacgccatgctggacacctacgacctggtatatgagcaggcgatgaaaggtacgtcccacgtccggcggcaggagctggcggccatccaggacgtgtttctgtgctgtgggaagaagtctcctttcagccgtctggggagcacagaggctgacctgtgtcagggagaggaggcggcgagagaggactgccttcagggcatccggagcttcctgaggacacaccagcaggtcgcctccagcctgaccagcatcggcctggccctcacggtgtccgccttgctcttcagctccttcctgtggtttgccatccgctgtggctgcagcttggaccgcaagggcaaatacaccctgaccccacgagcatgtggccgccagccccaggagcccagcctcttgagatgctcccagggtggacccacacattgtctccactccgaagcagttgctattggtccaagaggatgctcgggtagtcttcggtggctgcaggagagcgatgctgcgcctctgcccctctcctgccacctggctgcccacagagctctccagggcagaagtcgcggtgggctcagtgggtgccctgagcggggtctctcagactgacgtcaggccttggtgggctgcactctcacctggaggctccggggaagcatctgcctccaggaccattcaggctgttgacaagtcaactcctcatggctgtaggactgaggttcccaagtccttgtccctggtcctgtggtccctccaccttcaaaccagcaatggtgcattgagcaaattgtggtcaaatatacatcacatcaaatttaccatcttaaccattgttaagtgtatggtttgtggcattaaatacattcacattgttgtgcaaccatcacc

SEQ ID NO: 347910 - DNA, 791 bp, Homo sapiens
ccagcagctcggtcctagggcgatgttgacagacagacagaggggcggatgcagcctacctcctgggcagtgagctgcggtctgaggcccctgcccagctggaaaccacagggaggggaagggaggggaggagaggagaggagaggaaccgtcatggggccttggagtcgagtcagggttgccaaatgccagatgctggtcacctgcttctttatcttgctgctgggcctctctgtggccaccatggtgactcttacctacttcggggcccactttgctgtcatccgccgagcgtccctggagaagaacccgtaccaggctgtgcaccaatgggccttctctgcggggttgagcctggtgggcctcctgactctgggagccgtgctgagcgctgcagccaccgtgagggaggcccagggcctcatggcagggggcttcctgtgcttctccctggcgttctgcgcacaggtgcaggtggtgttctggagactccacagccccacccaggtggaggacgccatgctggacacctacgacctggtatatgagcaggcgatgaaaggtacgtcccacgtccggcggcaggagctggcggccatccaggacgtgtttctgtgctgtgggaagaagtctcctttcagccgtctggggagcacagaggctgacctgtgtcagggagaggaggcggcgagagaggtgagggggggacctggatgctggccaggcaagaccctcgggggctggacaccctggggcccaaccccaagacccagggccatcctcccacccca

SEQ ID NO: 347911 - DNA, 2023 bp, Homo sapiens
ccagcagctcggtcctagggcgatgttgacagacagacagaggggcggatgcagcctacctcctgggcagtgagctgcggtctgaggcccctgcccagctggaaaccacagggaggggaagggaggggaggagaggagaggagaggaaccgtcatggggccttggagtcgagtcagggttgccaaatgccagatgctggtcacctgcttctttatcttggtaacaggcaggtcgggcaggagtgggtggtgggtgggggtgagcaggggtgaggggtggcagggcctcagcacagggattatccctcccctgacacacacaccagccctactgtccctgtcctgcccttgcagacatgtgtcctgcccttgcagacagccgcaggcaggcagggaccaccatgagcaaccccgtctctcctcctgaggggcagcacagagcctggaggaggcctgagtggggctgaggcctggggcgagctggggtggaggggcactggctgccgggctccagggatcttctccccttcctgccccggagggtgctggcacaggggtggggctcactcccactccgtagacacaatgatcagaggtcctgggtgtctggggaagctgggctgtgcgtgtatgcgtctaccatgtgggggtgcctgtgagtgtgctggggcgtctgcagtgaaggcctcctgagaccactccacggaaacaccgggaatccctgcagctgagcctgtctctcacgggaccgggaagctggagagagccccaaccctgcccgctggggccgagctccctgctcctgcagcagtcccgtgccccacactctgagtctgccctatccacagctgctgggcctctctgtggccaccatggtgactcttacctacttcggggcccactttgctgtcatccgccgagcgtccctggagaagaacccgtaccaggctgtgcaccaatgggccttctctgcggggttgagcctggtgggcctcctgactctgggagccgtgctgagcgctgcagccaccgtgagggaggcccagggcctcatggcagggggcttcctgtgcttctccctggcgttctgcgcacaggtgcaggtggtgttctggagactccacagccccacccaggtggaggacgccatgctggacacctacgacctggtatatgagcaggcgatgaaaggtacgtcccacgtccggcggcaggagctggcggccatccaggacgtgtttctgtgctgtgggaagaagtctcctttcagccgtctggggagcacagaggctgacctgtgtcagggagaggaggcggcgagagaggactgccttcagggcatccggagcttcctgaggacacaccagcaggtcgcctccagcctgaccagcatcggcctggccctcacggtgtccgccttgctcttcagctccttcctgtggtttgccatccgctgtggctgcagcttggaccgcaagggcaaatacaccctgaccccacgagcatgtggccgccagccccaggagcccagcctcttgagatgctcccagggtggacccacacattgtctccactccgaagcagttgctattggtccaagaggatgctcgggtagtcttcggtggctgcaggagagcgatgctgcgcctctgcccctctcctgccacctggctgcccacagagctctccagggcagaagtcgcggtgggctcagtgggtgccctgagcggggtctctcagactgacgtcaggccttggtgggctgcactctcacctggaggctccggggaagcatctgcctccaggaccattcaggctgttgacaagtcaactcctcatggctgtaggactgaggttcccaagtccttgtccctggtcctgtggtccctccaccttcaaaccagcaatggtgcattgagcaaattgtggtcaaatatacatcacatcaaatttaccatcttaaccattgttaagtgtatggtttgtggcattaaatacattcacattgttgtgcaaccatcacc

SEQ ID NO: 347912 - DNA, 1976 bp, Homo sapiens
ccagcagctcggtcctagggcgatgttgacagacagacagaggggcggatgcagcctacctcctgggcagtgagctgcggtctgaggcccctgcccagctggaaaccacagggaggggaagggaggggaggagaggagaggagaggaaccgtcatggggccttggagtcgagtcagggttgccaaatgccagatgctggtcacctgcttctttatcttggtaacaggcaggtcgggcaggagtgggtggtgggtgggggtgagcaggggtgaggggtggcagggcctcagcacagggattatccctcccctgacacacacaccagccctactgtccctgtcctgcccttgcagacatgtgtcctgcccttgcagacagccgcaggcaggcagggaccaccatgagcaaccccgtctctcctcctgaggggcagcacagagcctggaggaggcctgagtggggctgaggcctggggcgagctggggtggaggggcactggctgccgggctccagggatcttctccccttcctgccccggagggtgctggcacaggggtggggctcactcccactccgtagacacaatgatcagaggtcctgggtgtctggggaagctgggctgtgcgtgtatgcgtctaccatgtgggggtgcctgtgagtgtgctggggcgtctgcagtgaaggcctcctgagaccactccacggaaacaccgggaatccctgcagctgagcctgtctctcacgggaccgggaagctggagagagccccaaccctgcccgctggggccgagctccctgctcctgcagcagtcccgtgccccacactctgagtctgccctatccacagctgctgggcctctctgtggccaccatggtgactcttacctacttcggggcccactttgctgtcatccgccgagcgtccctggagaagaacccgtaccaggctgtgcaccaatgggccttctctgcggggttgagcctggtgggcctcctgactctgggagccgtgctgagcgctgcagccaccgtgagggaggcccagggcctcatggcagggggcttcctgtgcttctccctggcgttctgcgcacaggtgcaggtggtgttctggagactccacagccccacccaggtggaggacgccatgctggacacctacgacctggtatatgagcaggcgatgaaagtttctgtgctgtgggaagaagtctcctttcagccgtctggggagcacagaggctgacctgtgtcagggagaggaggcggcgagagaggactgccttcagggcatccggagcttcctgaggacacaccagcaggtcgcctccagcctgaccagcatcggcctggccctcacggtgtccgccttgctcttcagctccttcctgtggtttgccatccgctgtggctgcagcttggaccgcaagggcaaatacaccctgaccccacgagcatgtggccgccagccccaggagcccagcctcttgagatgctcccagggtggacccacacattgtctccactccgaagcagttgctattggtccaagaggatgctcgggtagtcttcggtggctgcaggagagcgatgctgcgcctctgcccctctcctgccacctggctgcccacagagctctccagggcagaagtcgcggtgggctcagtgggtgccctgagcggggtctctcagactgacgtcaggccttggtgggctgcactctcacctggaggctccggggaagcatctgcctccaggaccattcaggctgttgacaagtcaactcctcatggctgtaggactgaggttcccaagtccttgtccctggtcctgtggtccctccaccttcaaaccagcaatggtgcattgagcaaattgtggtcaaatatacatcacatcaaatttaccatcttaaccattgttaagtgtatggtttgtggcattaaatacattcacattgttgtgcaaccatcacc

SEQ ID NO: 347913 - DNA, 2580 bp, Homo sapiens
ccagcagctcggtcctagggcgatgttgacagacagacagaggggcggatgcagcctacctcctgggcagtgagctgcggtctgaggcccctgcccagctggaaaccacagggaggggaagggaggggaggagaggagaggagaggaaccgtcatggggccttggagtcgagtcagggttgccaaatgccagatgctggtcacctgcttctttatcttggtaacaggcaggtcgggcaggagtgggtggtgggtgggggtgagcaggggtgaggggtggcagggcctcagcacagggattatccctcccctgacacacacaccagccctactgtccctgtcctgcccttgcagacatgtgtcctgcccttgcagacagccgcaggcaggcagggaccaccatgagcaaccccgtctctcctcctgaggggcagcacagagcctggaggaggcctgagtggggctgaggcctggggcgagctggggtggaggggcactggctgccgggctccagggatcttctccccttcctgccccggagggtgctggcacaggggtggggctcactcccactccgtagacacaatgatcagaggtcctgggtgtctggggaagctgggctgtgcgtgtatgcgtctaccatgtgggggtgcctgtgagtgtgctggggcgtctgcagtgaaggcctcctgagaccactccacggaaacaccgggaatccctgcagctgagcctgtctctcacgggaccgggaagctggagagagccccaaccctgcccgctggggccgagctccctgctcctgcagcagtcccgtgccccacactctgagtctgccctatccacagctgctgggcctctctgtggccaccatggtgactcttacctacttcggggcccactttgctgtcatccgccgagcgtccctggagaagaacccgtaccaggctgtgcaccaatgggccttctctgcggggttgagcctggtgggcctcctgactctgggagccgtgctgagcgctgcagccaccgtgagggaggcccagggcctcatggcagggggcttcctgtgcttctccctggcgttctgcgcacaggtgcaggtggtgttctggagactccacagccccacccaggtggaggacgccatgctggacacctacgacctggtatatgagcaggcgatgaaagtttctgtgctgtgggaagaagtctcctttcagccgtctggggagcacagaggctgacctgtgtcagggagaggaggcggcgagagaggactgccttcagggcatccggagcttcctgaggacacaccagcaggtcgcctccagcctgaccagcatcggcctggccctcacggtaccctctcgcctccctcactgccccttcccacctcctgcccctcagcctgcccagcccccgactcagatggaagggtgacccgggacaggatctctggtcttgagcctcactggctgccaacctcagggagctgctctggtgtgacagggcctgcctcctacagctgggccgcccccttacactgcagagtcctgatgcttcctggggaggggcgcccgcaccctggggcagtggggcagccgcgggtgtctccctcccaggtgtccgccttgctcttcagctccttcctgtggtttgccatccgctgtggctgcagcttggaccgcaagggcaaatacaccctgaccccacgagcatgtggccgccagccccaggagcccagcctcttgagatgctcccagggtggacccacacattgtctccactccgaagcagttgctattggtccaagaggatgctcgggtagtcttcggtggctgcaggagagcgatgctgcgcctctgcccctctcctgccacctggctgcccacagaggtgaagacgcccctgctgtcagccctcatgggatccctgaggggagggtccgagctgtgaggagggaagggagtgaagggcccagccagagagccaggctccatttggggaacagattgcaagggtaaggggtagctcaccaaatccctccatgggaacgggctgggagcaagcacaaaggaaaccacactggaggcagcagcccagggcagactgcaagacactggttgcccacggcctggagggctccacccagacacaagctgcactggttttctatgctgcgtaagaagcagcatggatgtaaggactgcaagcagtgcccatttatgatctcgcagctctccagggcagaagtcgcggtgggctcagtgggtgccctgagcggggtctctcagactgacgtcaggccttggtgggctgcactctcacctggaggctccggggaagcatctgcctccaggaccattcaggctgttgacaagtcaactcctcatggctgtaggactgaggttcccaagtccttgtccctggtcctgtggtccctccaccttcaaaccagcaatggtgcattgagcaaattgtggtcaaatatacatcacatcaaatttaccatcttaaccattgttaagtgtatggtttgtggcattaaatacattcacattgttgtgcaaccatcacc

SEQ ID NO: 347914 - DNA, 1893 bp, Homo sapiens
ccagcagctcggtcctagggcgatgttgacagacagacagaggggcggatgcagcctacctcctgggcagtgagctgcggtctgaggcccctgcccagctggaaaccacagggaggggaagggaggggaggagaggagaggagaggaaccgtcatggggccttggagtcgagtcagggttgccaaatgccagatgctggtcacctgcttctttatcttggtaacaggcaggtcgggcaggagtgggtggtgggtgggggtgagcaggggtgaggggtggcagggcctcagcacagggattatccctcccctgacacacacaccagccctactgtccctgtcctgcccttgcagacatgtgtcctgcccttgcagacagccgcaggcaggcagggaccaccatgagcaaccccgtctctcctcctgaggggcagcacagagcctggaggaggcctgagtggggctgaggcctggggcgagctggggtggaggggcactggctgccgggctccagggatcttctccccttcctgccccggagggtgctggcacaggggtggggctcactcccactccgtagacacaatgatcagaggtcctgggtgtctggggaagctgggctgtgcgtgtatgcgtctaccatgtgggggtgcctgtgagtgtgctggggcgtctgcagtgaaggcctcctgagaccactccacggaaacaccgggaatccctgcagctgagcctgtctctcacgggaccgggaagctggagagagccccaaccctgcccgctggggccgagctccctgctcctgcagcagtcccgtgccccacactctgagtctgccctatccacagctgctgggcctctctgtggccaccatggtgactcttacctacttcggggcccactttgctgtcatccgccgagcgtccctggagaagaacccgtaccaggctgtgcaccaatgggccttctctgcggggttgagcctggtgggcctcctgactctgggagccgtgctgagcgctgcagccaccgtgagggaggcccagggcctcatggcagggggcttcctgtgcttctccctggcgttctgcgcacaggtgcaggtggtgttctggagactccacagccccacccaggtggaggacgccatgctggacacctacgacctggtatatgagcaggcgatgaaagtttctgtgctgtgggaagaagtctcctttcagccgtctggggagcacagaggctgacctgtgtcagggagaggaggcggcgagagaggactgccttcagggcatccggagcttcctgaggacacaccagcaggtcgcctccagcctgaccagcatcggcctggccctcacggtgtccgccttgctcttcagctccttcctgtggtttgccatccgctgtggctgcagcttggaccgcaagggcaaatacaccctgaccccacgttgctattggtccaagaggatgctcgggtagtcttcggtggctgcaggagagcgatgctgcgcctctgcccctctcctgccacctggctgcccacagagctctccagggcagaagtcgcggtgggctcagtgggtgccctgagcggggtctctcagactgacgtcaggccttggtgggctgcactctcacctggaggctccggggaagcatctgcctccaggaccattcaggctgttgacaagtcaactcctcatggctgtaggactgaggttcccaagtccttgtccctggtcctgtggtccctccaccttcaaaccagcaatggtgcattgagcaaattgtggtcaaatatacatcacatcaaatttaccatcttaaccattgttaagtgtatggtttgtggcattaaatacattcacattgttgtgcaaccatcacc

SEQ ID NO: 347915 - DNA, 784 bp, Homo sapiens
ccagcagctcggtcctagggcgatgttgacagacagacagaggggcggatgcagcctacctcctgggcagtgagctgcggtctgaggcccctgcccagctggaaaccacagggaggggaagggaggggaggagaggagaggagaggaaccgtcatggggccttggagtcgagtcagggttgccaaatgccagatgctggtcacctgcttctttatcttgctgctgggcctctctgtggccaccatggtgactcttacctacttcggggcccactttgctgtcatccgccgagcgtccctggagaagaacccgtaccaggctgtgcaccaatgggccttctctgcggggttgagcctggtgggcctcctgactctgggagccgtgctgagcgctgcagccaccgtgagggaggcccagggcctcatggcagggggcttcctgtgcttctccctggcgttctgcgcacaggtgcaggtggtgttctggagactccacagccccacccaggtggaggacgccatgctggacacctacgacctggtatatgagcaggcgatgaaaggtacgtcccacgtccggcggcaggagctggcggccatccaggacgtgtttctgtgctgtgggaagaagtctcctttcagccgtctggggagcacagaggctgacctgtgtcagggagaggaggcggcgagagaggtgctgtgcccggccctgggctggatgctgggaacccagagtgaattcgaagtggcccggcccaggggagccaacgtgtggcccaaca

SEQ ID NO: 347916 - DNA, 744 bp, Homo sapiens
ccagcagctcggtcctagggcgatgttgacagacagacagaggggcggatgcagcctacctcctgggcagtgagctgcggtctgaggcccctgcccagctggaaaccacagggaggggaagggaggggaggagaggagaggagaggaaccgtcatggggccttggagtcgagtcagggttgccaaatgccagatgctggtcacctgcttctttatcttgctgctgggcctctctgtggccaccatggtgactcttacctacttcggggcccactttgctgtcatccgccgagcgtccctggagaagaacccgtaccaggctgtgcaccaatgggccttctctgcggggttgagcctggtgggcctcctgactctgggagccgtgctgagcgctgcagccaccgtgagggaggcccagggcctcatggcagggggcttcctgtgcttctccctggcgttctgcgcacaggtgcaggtggtgttctggagactccacagccccacccaggtggaggacgccatgctggacacctacgacctggtatatgagcaggcgatgaaagtttctgtgctgtgggaagaagtctcctttcagccgtctggggagcacagaggctgacctgtgtcagggagaggaggcggcgagagaggtgagggggggacctggatgctggccaggcaagaccctcgggggctggacaccctggggcccaaccccaagacccagggccatcctcccacccca

SEQ ID NO: 347917 - DNA, 731 bp, Homo sapiens
ccagcagctcggtcctagggcgatgttgacagacagacagaggggcggatgcagcctacctcctgggcagtgagctgcggtctgaggcccctgcccagctggaaaccacagggaggggaagggaggggaggagaggagaggagaggaaccgtcatggggccttggagtcgagtcagggttgccaaatgccagatgctggtcacctgcttctttatcttgctgctgggcctctctgtggccaccatggtgactcttacctacttcggggcccactttgctgtcatccgccgagcgtccctggagaagaacccgtaccaggctgtgcaccaatgggccttctctgcggggttgagcctggtgggcctcctgactctgggagccgtgctgagcgctgcagccaccgtgagggaggcccagggcctcatggcagggggcttcctgtgcttctccctggcgttctgcgcacaggtgcaggtggtgttctggagactccacagccccacccagcacccatccttccgtcctggatgctgacctgcctggaggagggtccggcctagctgaccgtgggcaggggccaagggcgtccccgtggaaaggccagcagcttggagaggaaggaggcctccctggcccagcagagaatgagagctcggtagcagagccagccccaccttccccttgagagccagacctggcccagaaggatcccagaggggctgagcccccag

SEQ ID NO: 347918 - DNA, 1841 bp, Homo sapiens
ccagcagctcggtcctagggcgatgttgacagacagacagaggggcggatgcagcctacctcctgggcagtgagctgcggtctgaggcccctgcccagctggaaaccacagggaggggaagggaggggaggagaggagaggagaggaaccgtcatggggccttggagtcgagtcagggttgccaaatgccagatgctggtcacctgcttctttatcttggtaacaggcaggtcgggcaggagtgggtggtgggtgggggtgagcaggggtgaggggtggcagggcctcagcacagggattatccctcccctgacacacacaccagccctactgtccctgtcctgcccttgcagacatgtgtcctgcccttgcagacagccgcaggcaggcagggaccaccatgagcaaccccgtctctcctcctgaggggcagcacagagcctggaggaggcctgagtggggctgaggcctggggcgagctggggtggaggggcactggctgccgggctccagggatcttctccccttcctgccccggagggtgctggcacaggggtggggctcactcccactccgtagacacaatgatcagaggtcctgggtgtctggggaagctgggctgtgcgtgtatgcgtctaccatgtgggggtgcctgtgagtgtgctggggcgtctgcagtgaaggcctcctgagaccactccacggaaacaccgggaatccctgcagctgagcctgtctctcacgggaccgggaagctggagagagccccaaccctgcccgctggggccgagctccctgctcctgcagcagtcccgtgccccacactctgagtctgccctatccacagctgctgggcctctctgtggccaccatggtgactcttacctacttcggggcccactttgctgtcatccgccgagcgtccctggagaagaacccgtaccaggctgtgcaccaatgggccttctctgcggggttgagcctggtgggcctcctgactctgggagccgtgctgagcgctgcagccaccgtgagggaggcccagggcctcatggcagggggcttcctgtgcttctccctggcgttctgcgcacaggtgcaggtggtgttctggagactccacagccccacccaggtggaggacgccatgctggacacctacgacctggtatatgagcaggcgatgaaaggtacgtcccacgtccggcggcaggagctggcggccatccaggacgtgtttctgtgctgtgggaagaagtctcctttcagccgtctggggagcacagaggctgacctgtgtcagggagaggaggcggcgagagaggactgccttcagggcatccggagcttcctgaggacacaccagcaggtcgcctccagcctgaccagcatcggcctggccctcacggtgtccgccttgctcttcagctccttcctgtggtttgccatccgctgtggctgcagcttggaccgcaagggcaaatacaccctgaccccacgctctccagggcagaagtcgcggtgggctcagtgggtgccctgagcggggtctctcagactgacgtcaggccttggtgggctgcactctcacctggaggctccggggaagcatctgcctccaggaccattcaggctgttgacaagtcaactcctcatggctgtaggactgaggttcccaagtccttgtccctggtcctgtggtccctccaccttcaaaccagcaatggtgcattgagcaaattgtggtcaaatatacatcacatcaaatttaccatcttaaccattgttaagtgtatggtttgtggcattaaatacattcacattgttgtgcaaccatcacc

SEQ ID NO: 347919 - DNA, 1450 bp, Homo sapiens
ggcttcctaggaatgtgccgcacccgccgccctgctgccctggcattggcctaggtgggcgctgcagctccatggccccacagaggccgcttgtccaggcagggagggccgctcagggcgggtaccatgcctgctgccctctcacaggactgccttcagggcatccggagcttcctgaggacacaccagcaggtcgcctccagcctgaccagcatcggcctggccctcacggtaccctctcgcctccctcactgccccttcccacctcctgcccctcagcctgcccagcccccgactcagatggaagggtgacccgggacaggatctctggtcttgagcctcactggctgccaacctcagggagctgctctggtgtgacagggcctgcctcctacagctgggccgcccccttacactgcagagtcctgatgcttcctggggaggggcgcccgcaccctggggcagtggggcagccgcgggtgtctccctcccaggtgtccgccttgctcttcagctccttcctgtggtttgccatccgctgtggctgcagcttggaccgcaagggcaaatacaccctgaccccacgagcatgtggccgccagccccaggagcccagcctcttgagatgctcccagggtggacccacacattgtctccactccgaagcagttgctattggtccaagaggatgctcgggtagtcttcggtggctgcaggagagcgatgctgcgcctctgcccctctcctgccacctggctgcccacagaggtgaagacgcccctgctgtcagccctcatgggatccctgaggggagggtccgagctgtgaggagggaagggagtgaagggcccagccagagagccaggctccatttggggaacagattgcaagggtaaggggtagctcaccaaatccctccatgggaacgggctgggagcaagcacaaaggaaaccacactggaggcagcagcccagggcagactgcaagacactggttgcccacggcctggagggctccacccagacacaagctgcactggttttctatgctgcgtaagaagcagcatggatgtaaggactgcaagcagtgcccatttatgatctcgcagctctccagggcagaagtcgcggtgggctcagtgggtgccctgagcggggtctctcagactgacgtcaggccttggtgggctgcactctcacctggaggctccggggaagcatctgcctccaggaccattcaggctgttgacaagtcaactcctcatggctgtaggactgaggttcccaagtccttgtccctggtcctgtggtccctccaccttcaaaccagcaatggtgcattgagcaaattgtggtcaaatatacatcacatcaaatttaccatcttaaccattgttaagtgtatggtttgtggcattaaatacattcacattgttgtgcaaccatcacc

SEQ ID NO: 347920 - DNA, 400 bp, Homo sapiens
catgttggcaagaaaattcttattcagcctaaaagtataagaattcctatccatcccaccctggccctgtaaaccagctctctcagccaagaagtttgaataatccagcagtcaccaggagcctcctttgggatgaaatttgtttcctctactcccttcaacccatcgatttcctgctcctgtttccctggctctctgggagaggatagcaaagagcctgctatctgtgaccctctttctgttttgatgactcttacagactcttgtatcaggcttttggattcctatttttcttcccacctcctgcaaccacatctaccaatggattctttgatttgcatgctcagaggcagcatgggtctagataagagacctcttggccccagcccttgatttgggg

SEQ ID NO: 347921 - DNA, 3482 bp, Homo sapiens
acagagcgagactccgtttaaataaataaataaataaaccaatcacacaagcacagcaccgcagcgcaatggcaacgcccagggcggcccgcagaccccaatcccgggcccctcctggcctctgccaacgcagctccctgacccggaactttcgtggtgtcgggcgagagtttgtgcccacttcctgagagggatgggtaagaagaggaccacttccggcgagggacgggaaagacagcggcttccggcgcggcggttccggacaaccgtgcgcttttagtaaaagattggggttcgcgcgggggagaagggctgccccgggccctctggttctcgtcccgcagcgtccgctcccccgcgccactgcgccgctcccaggaaccctgtactccggggtcgccggcttctctcctgcctccggtcccgccagacacctcgagctccttaagtagctcggtccttgacgtccctctgggcccttcccgcgtctatcgcctgagtccccgggcccctctagccctctgttccctcccctcttttgttcctccctagagccccgccgccctcagggctgacagtgtggacggcgggagtctcctcgctcccctgctgggattgactgaccgagcgtttagtgactgcccagatctggctgatgggggtaccgagaggtggcctgggccgggaatgtccagctagagtcttccgtggaagtcagacatgaaactgacaggcctaagggaagctaggaagtcccctcaccgctcagccagggtgatgggctggactgacagactccagtgaatttgagcttgcctgtcaggctgattggctgatagacagccctggattggctcactaagactgaccagcccgggaccaagcagttctggggtcccaacctgggtggaaggtctgaactgatgacccacccaggctgaccaggccagcccacctcactgacctcctgacccctgacctcatcacctgtgcagccatggagaagatgtcccgtgtgaccacagccctgggtggcagcgtgctgacaggccgcaccatgcactgccacctggatgctcccgccaatgccatcagtgtgtgccgcgacgcagcccaggtggtcgtggcaggccgtagcatcttcaagatctatgccatcgaggaggaacagttcgtggaaaagctgaacctgcgtgtggggcgcaagccttcgcttaacctgagctgtgctgacgtggtctggcaccagatggatgagaacctgctggccacagcagccaccaatggcgtggtggtcacgtggaacctgggccggccatcccgcaacaagcaggaccagctgttcacagaacacaagcgcacggtaaacaaagtctgcttccaccccaccgaagcccacgtgctgctcagtggctcccaggatggcttcatgaagtgctttgacctccgcagaaaggactctgtcagcaccttctcgggccagtcggagagcgtgcgggacgtgcagttcagtatccgggactacttcaccttcgcctccacctttgagaacggcaatgtgcagctctgggacatccggcgtcccgaccggtgcgagaggatgttcacagcccacaacggacccgtcttctgctgcgactggcaccccgaggacaggggctggttggccactggagggcgcgacaagatggtgaaggtctgggacatgaccacgcaccgtgccaaggagatgcactgtgtgcagaccatcgcctcggtggcccgtgtgaagtggcggccagagtgccgccaccacctggccacgtgctccatgatggtggaccacaacatctatgtttgggacgtgcgccggcccttcgtgccagctgccatgtttgaggaacaccgagacgtcaccacgggaattgcctggcgccacccccacgacccctccttcctgctgtctggctccaaggacagctcgctgtgccagcacctgttccgcgacgccagccagcccgtcgagcgcgccaaccctgagggcctctgctacggcctcttcggggacctggccttcgccgccaaggagagcctcgtggctgccgagtcggggcgcaagccctacactggcgaccggcgccaccccatcttctttaagcgcaagctggaccctgccgagcccttcgcaggcctcgcctccagtgccctcagtgtctttgagacggagccaggtggcggcggcatgcgctggtttgtggacacagctgagcgttatgcgctggctggccggccactggccgagctctgtgaccacaacgcaaaggtggctcgagagcttggccgcaaccaggtggcgcaaacgtggaccatgctgcggatcatctactgcagccctggcctagtgcccactgcaaacctcaaccacagtgtgggcaagggtggctcctgtggcctcccgctcatgaacagtttcaacctgaaggatatggccccagggttgggcagtgagacgcggctggaccgcagcaaaggagatgcacggagcgacacagttctgctcgactcctcggccacactcatcaccaatgaggataacgaggaaaccgagggcagcgacgtacctgccgactacctgctgggtgacgtggaaggtgaggaggacgagctgtacctgctggatccggaacacgcgcaccccgaggaccctgagtgcgtgctgccgcaggaggcctttccgctgcgccacgagatcgtggacacgcctcccgggcccgagcacctgcaggacaaggccgactccccgcacgtgagcggcagcgaggcggatgtggcctccctggcccccgtggactcctccttctcgctcctgtctgtctcacacgcgctctacgacagccgcctgccgcccgacttcttcggcgtgctggtgcgcgacatgctgcacttctacgctgagcagggcgacgtgcagatggctgtgtctgtgctcatcgtcctgggtgaacgggtgcgcaaggacatcgacgagcagacccaggagcactggtacacttcctacatcgacctgctgcagcgcttccgcctctggaacgtgtccaacgaggtggtcaagctgagcaccagccgcgccgtcagctgcctcaaccaggcctccaccaccctgcacgtcaactgcagccactgcaagcggcccatgagcagccggggctgggtctgcgacaggtgccaccgctgcgccagcatgtgtgccgtctgccaccacgtagtcaagggtctcttcgtgtggtgccagggctgcagccacggcggccacctgcagcacatcatgaagtggctggaaggcagctcccactgtcccgcaggctgcggccacctctgcgagtactcctgacggggcatctgctgggcttgcccgggcggccgcgtgcagaaccccgcctggtcttgtgcccgagacgggcggaggctggaacttgagacctcaataaaggaagtagagccgc

SEQ ID NO: 347922 - DNA, 3559 bp, Homo sapiens
acagagcgagactccgtttaaataaataaataaataaaccaatcacacaagcacagcaccgcagcgcaatggcaacgcccagggcggcccgcagaccccaatcccgggcccctcctggcctctgccaacgcagctccctgacccggaactttcgtggtgtcgggcgagagtttgtgcccacttcctgagagggatgggtaagaagaggaccacttccggcgagggacgggaaagacagcggcttccggcgcggcggttccggacaaccgtgcgcttttagtaaaagattggggttcgcgcgggggagaagggctgccccgggccctctggttctcgtcccgcagcgtccgctcccccgcgccactgcgccgctcccaggaaccctgtactccggggtcgccggcttctctcctgcctccggtcccgccagacacctcgagctccttaagtagctcggtccttgacgtccctctgggcccttcccgcgtctatcgcctgagtccccgggcccctctagccctctgttccctcccctcttttgttcctccctagagccccgccgccctcagggctgacagtgtggacggcgggagtctcctcgctcccctgctgggattgactgaccgagcgtttagtgactgcccagatctggctgatgggggtaccgagaggtggcctgggccgggaatgtccagctagagtcttccgtggaagtcagacatgaaactgacaggcctaagggaagctaggaagtcccctcaccgctcagccagggtgatgggctggactgacagactccagtgaatttgagcttgcctgtcaggctgattggctgatagacagccctggattggctcactaagactgaccagcccgggaccaagcagttctggggtcccaacctgggtggaaggtctgaactgatgacccacccaggctgaccaggccagcccacctcactgacctcctgacccctgacctcatcacctgtgcagccatggagaagatgtcccgtgtgaccacagccctgggtggcagcgtgctgacaggccgcaccatgcactgccacctggatgctcccgccaatgccatcagtgtgtgccgcgacgcagcccaggtggtcgtggcaggccgtagcatcttcaagatctatgccatcgaggaggaacagttcgtggaaaagctgaacctgcgtgtggggcgcaagccttcgcttaacctgagctgtgctgacgtggtctggcaccagatggatgagaacctgctggccacagcagccaccaatggcgtggtggtcacgtggaacctgggccggccatcccgcaacaagcaggaccagctgttcacagaacacaagcgcacggtaaacaaagtctgcttccaccccaccgaagcccacgtgctgctcagtggctcccaggatggcttcatgaagtgctttgacctccgcagaaaggactctgtcagcaccttctcgggccagtcggagagcgtgcgggacgtgcagttcagtatccgggactacttcaccttcgcctccacctttgagaacggcaatgtgcagctctgggacatccggcgtcccgaccggtgcgagaggatgttcacagcccacaacggacccgtcttctgctgcgactggcaccccgaggacaggggctggttggccactggagggcgcgacaagatggtgaaggtctgggacatgaccacgcaccgtgccaaggagatgcactgtgtgcagaccatcgcctcggtggcccgtgtgaagtggcggccagagtgccgccaccacctggccacgtgctccatgatggtggaccacaacatctatgtttgggacgtgcgccggcccttcgtgccagctgccatgtttgaggaacaccgagacgtcaccacgggaattgcctggcgccacccccacgacccctccttcctgctgtctggctccaaggacagctcgctgtgccagcacctgttccgcgacgccagccagcccgtcgagcgcgccaaccctgagggcctctgctacggcctcttcggggacctggccttcgccgccaaggagagcctcgtggctgccgagtcggggcgcaagccctacactggcgaccggcgccaccccatcttctttaagcgcaagctggaccctgccgagcccttcgcaggcctcgcctccagtgccctcagtgtctttgagacggagccaggtggcggcggcatgcgctggtttgtggacacagctgagcgttatgcgctggctggccggccactggccgagctctgtgaccacaacgcaaaggtggctcgagagcttggccgcaaccaggtggcgcaaacgtggaccatgctgcggatcatctactgcagccctggcctagtgcccactgcaaacctcaaccacagtgtgggcaagggtggctcctgtggcctcccgctcatgaacaggtagatgccgggggcagctctccccaggggctggggctgctcgagcccacccacccatgggcccttcctgcccccagtttcaacctgaaggatatggccccagggttgggcagtgagacgcggctggaccgcagcaaaggagatgcacggagcgacacagttctgctcgactcctcggccacactcatcaccaatgaggataacgaggaaaccgagggcagcgacgtacctgccgactacctgctgggtgacgtggaaggtgaggaggacgagctgtacctgctggatccggaacacgcgcaccccgaggaccctgagtgcgtgctgccgcaggaggcctttccgctgcgccacgagatcgtggacacgcctcccgggcccgagcacctgcaggacaaggccgactccccgcacgtgagcggcagcgaggcggatgtggcctccctggcccccgtggactcctccttctcgctcctgtctgtctcacacgcgctctacgacagccgcctgccgcccgacttcttcggcgtgctggtgcgcgacatgctgcacttctacgctgagcagggcgacgtgcagatggctgtgtctgtgctcatcgtcctgggtgaacgggtgcgcaaggacatcgacgagcagacccaggagcactggtacacttcctacatcgacctgctgcagcgcttccgcctctggaacgtgtccaacgaggtggtcaagctgagcaccagccgcgccgtcagctgcctcaaccaggcctccaccaccctgcacgtcaactgcagccactgcaagcggcccatgagcagccggggctgggtctgcgacaggtgccaccgctgcgccagcatgtgtgccgtctgccaccacgtagtcaagggtctcttcgtgtggtgccagggctgcagccacggcggccacctgcagcacatcatgaagtggctggaaggcagctcccactgtcccgcaggctgcggccacctctgcgagtactcctgacggggcatctgctgggcttgcccgggcggccgcgtgcagaaccccgcctggtcttgtgcccgagacgggcggaggctggaacttgagacctcaataaaggaagtagagccgc

SEQ ID NO: 347923 - DNA, 3562 bp, Homo sapiens
acagagcgagactccgtttaaataaataaataaataaaccaatcacacaagcacagcaccgcagcgcaatggcaacgcccagggcggcccgcagaccccaatcccgggcccctcctggcctctgccaacgcagctccctgacccggaactttcgtggtgtcgggcgagagtttgtgcccacttcctgagagggatgggtaagaagaggaccacttccggcgagggacgggaaagacagcggcttccggcgcggcggttccggacaaccgtgcgcttttagtaaaagattggggttcgcgcgggggagaagggctgccccgggccctctggttctcgtcccgcagcgtccgctcccccgcgccactgcgccgctcccaggaaccctgtactccggggtcgccggcttctctcctgcctccggtcccgccagacacctcgagctccttaagtagctcggtccttgacgtccctctgggcccttcccgcgtctatcgcctgagtccccgggcccctctagccctctgttccctcccctcttttgttcctccctagagccccgccgccctcagggctgacagtgtggacggcgggagtctcctcgctcccctgctgggattgactgaccgagcgtttagtgactgcccagatctggctgatgggggtaccgagaggtggcctgggccgggaatgtccagctagagtcttccgtggaagtcagacatgaaactgacaggcctaagggaagctaggaagtcccctcaccgctcagccagggtgatgggctggactgacagactccagtgaatttgagcttgcctgtcaggctgattggctgatagacagccctggattggctcactaagactgaccagcccgggaccaagcagttctggggtcccaacctgggtggaaggtctgaactgatgacccacccaggctgaccaggccagcccacctcactgacctcctgacccctgacctcatcacctgtgcagccatggagaagatgtcccgtgtgaccacagccctgggtggcagcgtgctgacaggccgcaccatgcactgccacctggatgctcccgccaatgccatcagtgtgtgccgcgacgcagcccaggtggtcgtggcaggccgtagcatcttcaagatctatgccatcgaggaggaacagttcgtggaaaagctgaacctgcgtgtggggcgcaagccttcgcttaacctgagctgtgctgacgtggtctggcaccagatggatgagaacctgctggccacagcagccaccaatggcgtggtggtcacgtggaacctgggccggccatcccgcaacaagcaggaccagctgttcacagaacacaagcgcacggtaaacaaagtctgcttccaccccaccgaagcccacgtgctgctcagtggctcccaggatggcttcatgaagtgctttgacctccgcagaaaggactctgtcagcaccttctcgggccagtcggagagcgtgcgggacgtgcagttcagtatccgggactacttcaccttcgcctccacctttgagaacggcaatgtgcagctctgggacatccggcgtcccgaccggtgcgagaggatgttcacagcccacaacggacccgtcttctgctgcgactggcaccccgaggacaggggctggttggccactggagggcgcgacaagatggtgaaggtctgggacatgaccacgcaccgtgccaaggagatgcactgtgtgcagaccatcgcctcggtggcccgtgtgaagtggcggccagagtgccgccaccacctggccacgtgctccatgatggtggaccacaacatctatgtttgggacgtgcgccggcccttcgtgccagctgccatgtttgaggaacaccgagacgtcaccacgggaattgcctggcgccacccccacgacccctccttcctgctgtctggctccaaggacagctcgctgtgccagcacctgttccgcgacgccagccagcccgtcgagcgcgccaaccctgagggcctctgctacggcctcttcggggacctggccttcgccgccaaggagagcctcgtggctgccgagtcggggcgcaagccctacactggcgaccggcgccaccccatcttctttaagcgcaagctggaccctgccgagcccttcgcaggcctcgcctccagtgccctcagtgtctttgagacggagccaggtggcggcggcatgcgctggtttgtggacacagctgagcgttatgcgctggctggccggccactggccgagctctgtgaccacaacgcaaaggtggctcgagagcttggccgcaaccaggtggcgcaaacgtggaccatgctgcggatcatctactgcagccctggcctagtgcccactgcaaacctcaaccacagtgtgggcaagggtggctcctgtggcctcccgctcatgaacagtttcaacctgaaggatatggccccagggttgggcagtgagacgcggctggaccgcagcaaaggagatgcacggagcgacacagttctgctcgactcctcggccacactcatcaccaatgaggataacgaggaaaccgagggcagcgacgtacctgccgactacctgctgggtgacgtggaaggtgaggaggacgagctgtacctgctggatccggaacacgcgcaccccgaggaccctgagtgcgtgctgccgcaggaggcctttccgctgcgccacgagatcgtggacacgcctcccgggcccgagcacctgcaggacaaggccgactccccgcacgtgagcggcagcgaggcggatgtggcctccctggcccccgtggactcctccttctcgctcctgtctgtctcacacgcgctctacgacagccgcctgccgcccgacttcttcggcgtgctggtgcgcgacatgctgcacttctacgctgagcagggcgacgtgcagatggctgtgtctgtgctcatcgtcctgggtgaacgggtgcgcaaggacatcgacgagcagacccaggtgtgtggtgggcggggcctcccccctgcagcgccgcccctggcacccagatcctgactgccgggcgctccctcccccaggagcactggtacacttcctacatcgacctgctgcagcgcttccgcctctggaacgtgtccaacgaggtggtcaagctgagcaccagccgcgccgtcagctgcctcaaccaggcctccaccaccctgcacgtcaactgcagccactgcaagcggcccatgagcagccggggctgggtctgcgacaggtgccaccgctgcgccagcatgtgtgccgtctgccaccacgtagtcaagggtctcttcgtgtggtgccagggctgcagccacggcggccacctgcagcacatcatgaagtggctggaaggcagctcccactgtcccgcaggctgcggccacctctgcgagtactcctgacggggcatctgctgggcttgcccgggcggccgcgtgcagaaccccgcctggtcttgtgcccgagacgggcggaggctggaacttgagacctcaataaaggaagtagagccgc

SEQ ID NO: 347924 - DNA, 3651 bp, Homo sapiens
acagagcgagactccgtttaaataaataaataaataaaccaatcacacaagcacagcaccgcagcgcaatggcaacgcccagggcggcccgcagaccccaatcccgggcccctcctggcctctgccaacgcagctccctgacccggaactttcgtggtgtcgggcgagagtttgtgcccacttcctgagagggatgggtaagaagaggaccacttccggcgagggacgggaaagacagcggcttccggcgcggcggttccggacaaccgtgcgcttttagtaaaagattggggttcgcgcgggggagaagggctgccccgggccctctggttctcgtcccgcagcgtccgctcccccgcgccactgcgccgctcccaggaaccctgtactccggggtcgccggcttctctcctgcctccggtcccgccagacacctcgagctccttaagtagctcggtccttgacgtccctctgggcccttcccgcgtctatcgcctgagtccccgggcccctctagccctctgttccctcccctcttttgttcctccctagagccccgccgccctcagggctgacagtgtggacggcgggagtctcctcgctcccctgctgggattgactgaccgagcgtttagtgactgcccagatctggctgatgggggtaccgagaggtggcctgggccgggaatgtccagctagagtcttccgtggaagtcagacatgaaactgacaggcctaagggaagctaggaagtcccctcaccgctcagccagggtgatgggctggactgacagactccagtgaatttgagcttgcctgtcaggctgattggctgatagacagccctggattggctcactaagactgaccagcccgggaccaagcagttctggggtcccaacctgggtggaaggtctgaactgatgacccacccaggctgaccaggccagcccacctcactgacctcctgacccctgacctcatcacctgtgcagccatggagaagatgtcccgtgtgaccacagccctgggtggcagcgtgctgacaggccgcaccatgcactgccacctggatgctcccgccaatgccatcagtgtgtgccgcgacgcagcccaggtggtcgtggcaggccgtagcatcttcaagatctatgccatcgaggaggaacagttcgtggaaaagctgaacctgcgtgtggggcgcaagccttcgcttaacctgagctgtgctgacgtggtctggcaccagatggatgagaacctgctggccacagcagccaccaatggcgtggtggtcacgtggaacctgggccggccatcccgcaacaagcaggaccagctgttcacagaacacaagcgcacggtaaacaaagtctgcttccaccccaccgaagcccacgtgctgctcagtggctcccaggatggcttcatgaagtgctttgacctccgcagaaaggactctgtcagcaccttctcgggccagtcggagagcgtgcgggacgtgcagttcagtatccgggactacttcaccttcgcctccacctttgagaacggcaatgtgcagctctgggacatccggcgtcccgaccggtgcgagaggatgttcacagcccacaacggacccgtcttctgctgcgactggcaccccgaggacaggggctggttggccactggagggcgcgacaagatggtgaaggtctgggacatgaccacgcaccgtgccaaggagatgcactgtgtgcagaccatcgcctcggtggcccgtgtgaagtggcggccagagtgccgccaccacctggccacgtgctccatgatggtggaccacaacatctatgtttgggacgtgcgccggcccttcgtgccagctgccatgtttgaggaacaccgagacgtcaccacgggaattgcctggcgccacccccacgacccctccttcctgctgtctggctccaaggacagctcgctgtgccagcacctgttccgcgacgccagccagcccgtcgagcgcgccaaccctgagggcctctgctacggcctcttcggggacctggccttcgccgccaaggagagcctcgtggctgccgagtcggggcgcaagccctacactggcgaccggcgccaccccatcttctttaagcgcaagctggaccctgccgagcccttcgcaggcctcgcctccagtgccctcagtgtctttgagacggagccaggtggcggcggcatgcgctggtttgtggacacagctgagcgttatgcgctggctggccggccactggccgagctctgtgaccacaacgcaaaggtggctcgagagcttggccgcaaccaggtggcgcaaacgtggaccatgctgcggatcatctactgcagccctggcctagtgcccactgcaaacctcaaccacagtgtgggcaagggtggctcctgtggcctcccgctcatgaacagtttcaacctgaaggatatggccccagggttgggcagtgagacgcggctggaccgcagcaaaggagatgcacggagcgacacagttctgctcgactcctcggccacactcatcaccaatgaggataacgaggaaaccgagggcagcgacgtacctgccgactacctgctgggtgacgtggaaggtgaggaggacgagctgtacctgctggatccggaacacgcgcaccccgaggaccctgagtgcgtgctgccgcaggaggcctttccgctgcgccacgagatcgtggacacgcctcccgggcccgagcacctgcaggacaaggccgactccccgcacgtgagcggcagcgaggcggatgtggcctccctggcccccgtggactcctccttctcgctcctgtctgtctcacacgcgctctacgacagccgcctgccgcccgacttcttcggcgtgctggtgcgcgacatgctgcacttctacgctgagcagggcgacgtgcagatggctgtgtctgtgctcatcgtcctgggtgaacgggtgcgcaaggacatcgacgagcagacccaggtgtgtggtgggcggggcctcccccctgcagcgccgcccctggcacccagatcctgactgccgggcgctccctcccccaggagcactggtacacttcctacatcgacctgctgcagcgcttccgcctctggaacgtgtccaacgaggtggtcaagctgagcaccagccgcgccgtcagctgcctcaaccaggcctccaccaccctgcacgtcaactgcagccactgcaagcggcccatgagcagccggggctgggtctgcgacaggtggggcagtggggtcgggaggtggggcaggggcctgcaggcagcgcagcagcccccgctgaggcaccctccctcccgcccgcccccaggtgccaccgctgcgccagcatgtgtgccgtctgccaccacgtagtcaagggtctcttcgtgtggtgccagggctgcagccacggcggccacctgcagcacatcatgaagtggctggaaggcagctcccactgtcccgcaggctgcggccacctctgcgagtactcctgacggggcatctgctgggcttgcccgggcggccgcgtgcagaaccccgcctggtcttgtgcccgagacgggcggaggctggaacttgagacctcaataaaggaagtagagccgc

SEQ ID NO: 347925 - DNA, 2590 bp, Homo sapiens
acagagcgagactccgtttaaataaataaataaataaaccaatcacacaagcacagcaccgcagcgcaatggcaacgcccagggcggcccgcagaccccaatcccgggcccctcctggcctctgccaacgcagctccctgacccggaactttcgtggtgtcgggcgagagtttgtgcccacttcctgagagggatgggtaagaagaggaccacttccggcgagggacgggaaagacagcggcttccggcgcggcggttccggacaaccgtgcgcttttagtaaaagattggggttcgcgcgggggagaagggctgccccgggccctctggttctcgtcccgcagcgtccgctcccccgcgccactgcgccgctcccaggaaccctgtactccggggtcgccggcttctctcctgcctccggtcccgccagacacctcgagctccttaagtagctcggtccttgacgtccctctgggcccttcccgcgtctatcgcctgagtccccgggcccctctagccctctgttccctcccctcttttgttcctccctagagccccgccgccctcagggctgacagtgtggacggcgggagtctcctcgctcccctgctgggattgactgaccgagcgtttagtgactgcccagatctggctgatgggggtaccgagaggtggcctgggccgggaatgtccagctagagtcttccgtggaagtcagacatgaaactgacaggcctaagggaagctaggaagtcccctcaccgctcagccagggtgatgggctggactgacagactccagtgaatttgagcttgcctgtcaggctgattggctgatagacagccctggattggctcactaagactgaccagcccgggaccaagcagttctggggtcccaacctgggtggaaggtctgaactgatgacccacccaggctgaccaggccagcccacctcactgacctcctgacccctgacctcatcacctgtgcagccatggagaagatgtcccgtgtgaccacagccctgggtggcagcgtgctgacaggccgcaccatgcactgccacctggatgctcccgccaatgccatcagtgtgtgccgcgacgcagcccaggtggtcgtggcaggccgtagcatcttcaagatctatgccatcgaggaggaacagttcgtggaaaagctgaacctgcgtgtggggcgcaagccttcgcttaacctgagctgtgctgacgtggtctggcaccagatggatgagaacctgctggccacagcagccaccaatggcgtggtggtcacgtggaacctgggccggccatcccgcaacaagcaggaccagctgttcacagaacacaagcgcacggtaaacaaagtctgcttccaccccaccgaagcccacgtgctgctcagtggctcccaggatggcttcatgaagtgctttgacctccgcagaaaggactctgtcagcaccttctcgggccagtcggagagcgtgcgggacgtgcagttcagtatccgggactacttcaccttcgcctccacctttgagaacggcaatgtgcagctctgggacatccggcgtcccgaccggtgcgagaggatgttcacagcccacaacggacccgtcttctgctgcgactggcaccccgaggacaggggctggttggccactggagggcgcgacaagatggtgaaggtctgggacatgaccacgcaccgtgccaaggagatgcactgtgtgcagaccatcgcctcggtggcccgtgtgaagtggcggccagagtgccgccaccacctggccacgtgctccatgatggtggaccacaacatctatgtttgggacgtgcgccggcccttcgtgccagctgccatgtttgaggaacaccgagacgtcaccacgggaattgcctggcgccacccccacgacccctccttcctgctgtctggctccaaggacagctcgctgtgccagcacctgttccgcgacgccagccagcccgtcgagcgcgccaaccctgagggcctctgctacggcctcttcggggacctggccttcgccgccaaggagagcctcgtggctgccgagtcggggcgcaagccctacactggcgaccggcgccaccccatcttctttaagcgcaagctggaccctgccgagcccttcgcaggcctcgcctccagtgccctcagtgtctttgagacggagccaggtggcggcggcatgcgctggtttgtggacacagctgagcgttatgcgctggctggccggccactggccgagctctgtgaccacaacgcaaaggtggctcgagagcttggccgcaaccaggtaggtaggtgctgagcctgggggtccctgggccacgacctcagggcaggggctggttcctccgtcagctgcgctcaccccacctcaagctccgcaatggactccagccagtcgcaccaacaggccttgccttggtagctgagggtgtcaggatcacacagggccagggctccagggtgggccagacccaggactgtcctctgaggggcgggggtctcgggagtcgtgtggctcaagctctctgttcttccccccttgctt

SEQ ID NO: 347926 - DNA, 1276 bp, Homo sapiens
acagagcgagactccgtttaaataaataaataaataaaccaatcacacaagcacagcaccgcagcgcaatggcaacgcccagggcggcccgcagaccccaatcccgggcccctcctggcctctgccaacgcagctccctgacccggaactttcgtggtgtcgggcgagagtttgtgcccacttcctgagagggatgggtaagaagaggaccacttccggcgagggacgggaaagacagcggcttccggcgcggcggttccggacaaccgtgcgcttttagtaaaagattggggttcgcgcgggggagaagggctgccccgggccctctggttctcgtcccgcagcgtccgctcccccgcgccactgcgccgctcccaggaaccctgtactccggggtcgccggcttctctcctgcctccggtcccgccagacacctcgagctccttaagtagctcggtccttgacgtccctctgggcccttcccgcgtctatcgcctgagtccccgggcccctctagccctctgttccctcccctcttttgttcctccctagagccccgccgccctcagggctgacagtgtggacggcgggagtctcctcgctcccctgctgggattgactgaccgagcgtttagtgactgcccagatctggctgatgggggtaccgagaggtggcctgggccgggaatgtccagctagagtcttccgtggaagtcagacatgaaactgacaggcctaagggaagctaggaagtcccctcaccgctcagccagggtgatgggctggactgacagactccagtgaatttgagcttgcctgtcaggctgattggctgatagacagccctggattggctcactaagactgaccagcccgggaccaagcagttctggggtcccaacctgggtggaaggtctgaactgatgacccacccaggctgaccaggccagcccacctcactgacctcctgacccctgacctcatcacctgtgcagccatggagaagatgtccccatgtgtgccgtctgccaccacgtagtcaagggtctcttcgtgtggtgccagggctgcagccacggcggccacctgcagcacatcatgaagtggctggaaggcagctcccactgtcccgcaggctgcggccacctctgcgagtactcctgacggggcatctgctgggcttgcccgggcggccgcgtgcagaaccccgcctggtcttgtgcccgagacgggcggaggctggaacttgagacctcaataaaggaagtagagccgc

SEQ ID NO: 347927 - DNA, 3571 bp, Homo sapiens
acagagcgagactccgtttaaataaataaataaataaaccaatcacacaagcacagcaccgcagcgcaatggcaacgcccagggcggcccgcagaccccaatcccgggcccctcctggcctctgccaacgcagctccctgacccggaactttcgtggtgtcgggcgagagtttgtgcccacttcctgagagggatgggtaagaagaggaccacttccggcgagggacgggaaagacagcggcttccggcgcggcggttccggacaaccgtgcgcttttagtaaaagattggggttcgcgcgggggagaagggctgccccgggccctctggttctcgtcccgcagcgtccgctcccccgcgccactgcgccgctcccaggaaccctgtactccggggtcgccggcttctctcctgcctccggtcccgccagacacctcgagctccttaagtagctcggtccttgacgtccctctgggcccttcccgcgtctatcgcctgagtccccgggcccctctagccctctgttccctcccctcttttgttcctccctagagccccgccgccctcagggctgacagtgtggacggcgggagtctcctcgctcccctgctgggattgactgaccgagcgtttagtgactgcccagatctggctgatgggggtaccgagaggtggcctgggccgggaatgtccagctagagtcttccgtggaagtcagacatgaaactgacaggcctaagggaagctaggaagtcccctcaccgctcagccagggtgatgggctggactgacagactccagtgaatttgagcttgcctgtcaggctgattggctgatagacagccctggattggctcactaagactgaccagcccgggaccaagcagttctggggtcccaacctgggtggaaggtctgaactgatgacccacccaggctgaccaggccagcccacctcactgacctcctgacccctgacctcatcacctgtgcagccatggagaagatgtcccgtgtgaccacagccctgggtggcagcgtgctgacaggccgcaccatgcactgccacctggatgctcccgccaatgccatcagtgtgtgccgcgacgcagcccaggtggtcgtggcaggccgtagcatcttcaagatctatgccatcgaggaggaacagttcgtggaaaagctgaacctgcgtgtggggcgcaagccttcgcttaacctgagctgtgctgacgtggtctggcaccagatggatgagaacctgctggccacagcagccaccaatggcgtggtggtcacgtggaacctgggccggccatcccgcaacaagcaggaccagctgttcacagaacacaagcgcacggtaaacaaagtctgcttccaccccaccgaagcccacgtgctgctcagtggctcccaggatggcttcatgaagtgctttgacctccgcagaaaggactctgtcagcaccttctcgggccagtcggagagcgtgcgggacgtgcagttcagtatccgggactacttcaccttcgcctccacctttgagaacggcaatgtgcagctctgggacatccggcgtcccgaccggtgcgagaggatgttcacagcccacaacggacccgtcttctgctgcgactggcaccccgaggacaggggctggttggccactggagggcgcgacaagatggtgaaggtctgggacatgaccacgcaccgtgccaaggagatgcactgtgtgcagaccatcgcctcggtggcccgtgtgaagtggcggccagagtgccgccaccacctggccacgtgctccatgatggtggaccacaacatctatgtttgggacgtgcgccggcccttcgtgccagctgccatgtttgaggaacaccgagacgtcaccacgggaattgcctggcgccacccccacgacccctccttcctgctgtctggctccaaggacagctcgctgtgccagcacctgttccgcgacgccagccagcccgtcgagcgcgccaaccctgagggcctctgctacggcctcttcggggacctggccttcgccgccaaggagagcctcgtggctgccgagtcggggcgcaagccctacactggcgaccggcgccaccccatcttctttaagcgcaagctggaccctgccgagcccttcgcaggcctcgcctccagtgccctcagtgtctttgagacggagccaggtggcggcggcatgcgctggtttgtggacacagctgagcgttatgcgctggctggccggccactggccgagctctgtgaccacaacgcaaaggtggctcgagagcttggccgcaaccaggtggcgcaaacgtggaccatgctgcggatcatctactgcagccctggcctagtgcccactgcaaacctcaaccacagtgtgggcaagggtggctcctgtggcctcccgctcatgaacagtttcaacctgaaggatatggccccagggttgggcagtgagacgcggctggaccgcagcaaaggagatgcacggagcgacacagttctgctcgactcctcggccacactcatcaccaatgaggataacgaggaaaccgagggcagcgacgtacctgccgactacctgctgggtgacgtggaaggtgaggaggacgagctgtacctgctggatccggaacacgcgcaccccgaggaccctgagtgcgtgctgccgcaggaggcctttccgctgcgccacgagatcgtggacacgcctcccgggcccgagcacctgcaggacaaggccgactccccgcacgtgagcggcagcgaggcggatgtggcctccctggcccccgtggactcctccttctcgctcctgtctgtctcacacgcgctctacgacagccgcctgccgcccgacttcttcggcgtgctggtgcgcgacatgctgcacttctacgctgagcagggcgacgtgcagatggctgtgtctgtgctcatcgtcctgggtgaacgggtgcgcaaggacatcgacgagcagacccaggagcactggtacacttcctacatcgacctgctgcagcgcttccgcctctggaacgtgtccaacgaggtggtcaagctgagcaccagccgcgccgtcagctgcctcaaccaggcctccaccaccctgcacgtcaactgcagccactgcaagcggcccatgagcagccggggctgggtctgcgacaggtggggcagtggggtcgggaggtggggcaggggcctgcaggcagcgcagcagcccccgctgaggcaccctccctcccgcccgcccccaggtgccaccgctgcgccagcatgtgtgccgtctgccaccacgtagtcaagggtctcttcgtgtggtgccagggctgcagccacggcggccacctgcagcacatcatgaagtggctggaaggcagctcccactgtcccgcaggctgcggccacctctgcgagtactcctgacggggcatctgctgggcttgcccgggcggccgcgtgcagaaccccgcctggtcttgtgcccgagacgggcggaggctggaacttgagacctcaataaaggaagtagagccgc

SEQ ID NO: 347928 - DNA, 3349 bp, Homo sapiens
acagagcgagactccgtttaaataaataaataaataaaccaatcacacaagcacagcaccgcagcgcaatggcaacgcccagggcggcccgcagaccccaatcccgggcccctcctggcctctgccaacgcagctccctgacccggaactttcgtggtgtcgggcgagagtttgtgcccacttcctgagagggatgggtaagaagaggaccacttccggcgagggacgggaaagacagcggcttccggcgcggcggttccggacaaccgtgcgcttttagtaaaagattggggttcgcgcgggggagaagggctgccccgggccctctggttctcgtcccgcagcgtccgctcccccgcgccactgcgccgctcccaggaaccctgtactccggggtcgccggcttctctcctgcctccggtcccgccagacacctcgagctccttaagtagctcggtccttgacgtccctctgggcccttcccgcgtctatcgcctgagtccccgggcccctctagccctctgttccctcccctcttttgttcctccctagagccccgccgccctcagggctgacagtgtggacggcgggagtctcctcgctcccctgctgggattgactgaccgagcgtttagtgactgcccagatctggctgatgggggtaccgagaggtggcctgggccgggaatgtccagctagagtcttccgtggaagtcagacatgaaactgacaggcctaagggaagctaggaagtcccctcaccgctcagccagggtgatgggctggactgacagactccagtgaatttgagcttgcctgtcaggctgattggctgatagacagccctggattggctcactaagactgaccagcccgggaccaagcagttctggggtcccaacctgggtggaaggtctgaactgatgacccacccaggctgaccaggccagcccacctcactgacctcctgacccctgacctcatcacctgtgcagccatggagaagatgtcccgtgtgaccacagccctgggtggcagcgtgctgacaggccgcaccatgcactgccacctggatgctcccgccaatgccatcagtgtgtgccgcgacgcagcccaggtggtcgtggcaggccgtagcatcttcaagatctatgccatcgaggaggaacagttcgtggaaaagctgaacctgcgtgtggggcgcaagccttcgcttaacctgagctgtgctgacgtggtctggcaccagatggatgagaacctgctggccacagcagccaccaatggcgtggtggtcacgtggaacctgggccggccatcccgcaacaagcaggaccagctgttcacagaacacaagcgcacggtaaacaaagtctgcttccaccccaccgaagcccacgtgctgctcagtggctcccaggatggcttcatgaagtgctttgacctccgcagaaaggactctgtcagcaccttctcgggccagtcggagagcgtgcgggacgtgcagttcagtatccgggactacttcaccttcgcctccacctttgagaacggcaatgtgcagctctgggacatccggcgtcccgaccggtgcgagaggatgttcacagcccacaacggacccgtcttctgctgcgactggcaccccgaggacaggggctggttggccactggagggcgcgacaagatggtgaaggtctgggacatgaccacgcaccgtgccaaggagatgcactgtgtgcagaccatcgcctcggtggcccgtgtgaagtggcggccagagtgccgccaccacctggccacgtgctccatgatggtggaccacaacatctatgtttgggacgtgcgccggcccttcgtgccagctgccatgtttgaggaacaccgagacgtcaccacgggaattgcctggcgccacccccacgacccctccttcctgctgtctggctccaaggacagctcgctgtgccagcacctgttccgcgacgccagccagcccgtcgagcgcgccaaccctgagggcctctgctacggcctcttcggggacctggccttcgccgccaaggagagcctcgtggctgccgagtcggggcgcaagccctacactggcgaccggcgccaccccatcttctttaagcgcaagctggaccctgccgagcccttcgcaggcctcgcctccagtgccctcagtgtctttgagacggagccaggtggcggcggcatgcgctggtttgtggacacagctgagcgttatgcgctggctggccggccactggccgagctctgtgaccacaacgcaaaggtggctcgagagcttggccgcaaccaggtggcgcaaacgtggaccatgctgcggatcatctactgcagccctggcctagtgcccactgcaaacctcaaccacagtgtgggcaagggtggctcctgtggcctcccgctcatgaacagtttcaacctgaaggatatggccccagggttgggcagtgagacgcggctggaccgcagcaaaggagatgcacggagcgacacagttctgctcgactcctcggccacactcatcaccaatgaggataacgaggaaaccgagggcagcgacgtacctgccgactacctgctgggtgacgtggaaggtgaggaggacgagctgtacctgctggatccggaacacgcgcaccccgaggaccctgagtgcgtgctgccgcaggaggcctttccgctgcgccacgagatcgtggacacgcctcccgggcccgagcacctgcaggacaaggccgactccccgcacgtgagcggcagcgaggcggatgtggcctccctggcccccgtggactcctccttctcgctcctgtctgtctcacacgcgctctacgacagccgcctgccgcccgacttcttcggcgtgctggtgcgcgacatgctgcacttctacgctgagcagggcgacgtgcagatggctgtgtctgtgctcatcgtcctgggtgaacgggtgcgcaaggacatcgacgagcagacccaggagcactggtacacttcctacatcgacctgctgcagcgcttccgcctctggaacgtgtccaacgaggtggtcaagctgagcaccagccgcgccgtcagctgcctcaaccaggcctccaccaccctgcacgtcaactgcagccactgcagcacatcatgaagtggctggaaggcagctcccactgtcccgcaggctgcggccacctctgcgagtactcctgacggggcatctgctgggcttgcccgggcggccgcgtgcagaaccccgcctggtcttgtgcccgagacgggcggaggctggaacttgagacctcaataaaggaagtagagccgc

SEQ ID NO: 347929 - DNA, 1852 bp, Homo sapiens
ggtttgggtggaccttcttcccacaggggctggttggccactggagggcgcgacaagatggtgaaggtctgggacatgaccacgcaccgtgccaaggagatgcactgtgtgcagaccatcgcctcggtggcccgtgtgaagtggcggccagagtgccgccaccacctggccacgtgctccatgatggtggaccacaacatctatgtttgggacgtgcgccggcccttcgtgccagctgccatgtttgaggaacaccgagacgtcaccacgggaattgcctggcgccacccccacgacccctccttcctgctgtctggctccaaggacagctcgctgtgccagcacctgttccgcgacgccagccagcccgtcgagcgcgccaaccctgagggcctctgctacggcctcttcggggacctggccttcgccgccaaggagagcctcgtggctgccgagtcggggcgcaagccctacactggcgaccggcgccaccccatcttctttaagcgcaagctggaccctgccgagcccttcgcaggcctcgcctccagtgccctcagtgtctttgagacggagccaggtggcggcggcatgcgctggtttgtggacacagctgagcgttatgcgctggctggccggccactggccgagctctgtgaccacaacgcaaaggtggctcgagagcttggccgcaaccaggtggcgcaaacgtggaccatgctgcggatcatctactgcagccctggcctagtgcccactgcaaacctcaaccacagtgtgggcaagggtggctcctgtggcctcccgctcatgaacagtttcaacctgaaggatatggccccagggttgggcagtgagacgcggctggaccgcagcaaaggagatgcacggagcgacacagttctgctcgactcctcggccacactcatcaccaatgaggataacgaggaaaccgagggcagcgacgtacctgccgactacctgctgggtgacgtggaaggtgaggaggacgagctgtacctgctggatccggaacacgcgcaccccgaggaccctgagtgcgtgctgccgcaggaggcctttccgctgcgccacgagatcgtggacacgcctcccgggcccgagcacctgcaggacaaggccgactccccgcacgtgagcggcagcgaggcggatgtggcctccctggcccccgtggactcctccttctcgctcctgtctgtctcacacgcgctctacgacagccgcctgccgcccgacttcttcggcgtgctggtgcgcgacatgctgcacttctacgctgagcagggcgacgtgcagatggctgtgtctgtgctcatcgtcctgggtgaacgggtgcgcaaggacatcgacgagcagacccaggagcactggtacacttcctacatcgacctgctgcagcgcttccgcctctggaacgtgtccaacgaggtggtcaagctgagcaccagccgcgccgtcagctgcctcaaccaggcctccaccaccctgcacgtcaactgcagccactgcaagcggcccatgagcagccggggctgggtctgcgacaggtgccaccgctgcgccagcatgtgtgccgtctgccaccacgtagtcaagggtctcttcgtgtggtgccagggctgcagccacggcggccacctgcagcacatcatgaagtggctggaaggcagctcccactgtcccgcaggctgcggccacctctgcgagtactcctgacggggcatctgctgggcttgcccgggcggccgcgtgcagaaccccgcctggtcttgtgcccgagacgggcggaggctggaacttgagacctcaataaaggaagtagagccgc

SEQ ID NO: 347930 - DNA, 317 bp, Homo sapiens
ttttttttttttttcagatggagtctcactctgtctcacccaggctggagtgcagtggcacacgatcttggcttgctgcagcctccacctcctgggttcaagcaattctcctatcttagcctcccaagtagctggtactacagatatgaagaagctgaagtccggaaaaaacttgaggaaaaagacaggcaggaggaagcacagcggctacaacaaaaaaggcaggaacaaatcacaatggtggaatgtcatcagttaaggcaggaaccggcccttttcacttcttttgtcttcactgcttcaggcatctgatgata

SEQ ID NO: 347931 - DNA, 272 bp, Homo sapiens
cttaacttttaaatttcctttattgtcttttgtaacaacttttatttgcacaggtcaaatttgttggggcataaaggtgaagtggcagaagaatttggtataatcatgaaagccctgtgccacactctgtgctgtcattgttcacttgtctatgcttctcactagatcacaagctttgggaaggcaggaactcttttgtgtagattgctgttgaatcactggtgcctgcagagtgactaactaaataggtgctctctgacattattgaagaa

SEQ ID NO: 347932 - DNA, 4888 bp, Homo sapiens
gggggtgagctgggctggcttccgtcctggtagccaaggctaattctccctcgagttcttgggagatgggcatttggcgagaaggctggcgttagtgaagcgcgcccggcgtcacggtgagtgcgggtcttgggccctagcacctgttctctgggaagtcgtccgctgtgaacgatgaacgcctttccttccaccagctgctggttaccccggagacaagctctgtccgcggagaggagtgggacaactcctaaaggcaacaacaatactcaacataaatatctgttcttgaactcctgggctcaagcagtcctcccacctcagtctcccagagtgttgggattacagctgtgaggcaccacgcccagtcagtgcactgctttttgcatggagaaagtcttgctgctactttaaaaaggaaagaagcacttgtaaggaaatatagcatccattgtgaaagtggaaaagtaaagataattcatcatgcctgctgtggcttcagttcctaaagaactctacctcagttcttcactaaaagaccttaataagaagacagaagttaaaccagagaaaataagcactaagagttatgtgcacagtgccctgaagatctttaagacagcagaagaatgcagattagatcgtgatgaggaaagggcctatgtactatatatgaaatacgtgactgtttataatcttatcaaaaaaagacctgatttcaagcaacagcaggattatttccattcaatacttggacctggaaacatcaaaaaagctgtcgaagaagctgaaagactctctgaaagccttaaattaagatatgaagaagctgaagtccggaaaaaacttgaggaaaaagacaggcaggaggaagcacagcggctacaacaaaaaaggcaggaaacaggaagagaggatggtggcacattggctaaaggctctttggagaatgttttggattccaaagacaaaacccaaaagagcaatggtgaaaagaatgaaaaatgtgagaccaaagagaaaggagcaatcacagcaaaggaactatacacaatgatgacggataaaaacatcagcttgattataatggatgctcgaagaatgcaggattatcaggattcctgtattttacattctctcagtgttcctgaagaagccatcagtccaggagtcactgctagttggattgaagcacacctgccagatgattctaaagacacatggaagaagagggggaatgtggagtatgtggtacttcttgactggtttagttctgccaaagatttacagattggaacaactctccggagtctgaaagatgcacttttcaagtgggaaagtaaaactgtcctgcgcaatgagcctttggttttagagggaggctatgaaaactggctcctttgttatccccagtatacaacaaatgctaaggtcactccacccccacgacgccagaatgaagaggtgtctatctcattggattttacttatccctcattggaagaatcaattccttctaaacctgctgcccagacgccacctgcatctatagaagtagatgaaaatatagaattgataagtggtcaaaatgagagaatgggaccactgaatatatcaactccagttgaaccagttgctgcttctaaatctgatgtttcacccataattcagccagtgcctagtataaagaatgttccacagattgatcgtactaaaaaaccagcagtcaaattgcctgaagagcatagaataaaatctgaaagtacaaaccatgagcaacaatctcctcagagtggaaaagttattcctgatcgttccaccaagccagtagttttttctccaactctcatgttaacagatgaagaaaaggctcgtattcatgcagaaactgctcttctaatggaaaaaaacaaacaagaaaaagaacttcgggaaaggcagcaagaggaacagaaagagaaactgaggaaggaagaacaagaacaaaaagccaaaaagaaacaagaagctgaagaaaatgaaattacagagaagcaacaaaaagcaaaagaagaaatggagaagaaagaaagtgaacaggccaagaaagaagataaagaaacctcagcaaagaggggcaaagaaataacaggagtaaaaagacaaagtaaaagtgaacatgaaacttctgatgccaagaaatctgtagaagatagggggaaaaggtgtccaaccccagaaatacagaaaaagtcaacaggagatgtgccccatacatctgtgacaggggattcaggttcaggcaaggctcaacgagaacctttgacaagagcacgaagtgaagaaatggggaggatcgtaccaggactgccttcaggctgggccaagtttcttgacccaatcactggaacctttcgttattatcattcacccaccaacactgttcatatgtacccaccggaaatggctccttcatctgcacctccttccacccctccaactcataaagccaagccacagattcctgctgagcgggatagggaaccttccaaactgaagcgctcctactcctccccagatataacccaggctattcaagaggaagagaagaggaagccaacagtaactccaacagttaatcgggaaaacaagccaacatgttatcctaaagctgagatctcaaggctttctgcttctcagattcggaacctcaatcctgtttttggaggttctggaccagctcttactggacttcgtaacttaggaaatacttgttatatgaactcaatattgcagtgcctatgtaacgctccacatttggctgattatttcaaccgaaactgttatcaggatgatattaacaggtcaaatttgttggggcataaaggtgaagtggcagaagaatttggtataatcatgaaagccctgtggacaggacagtatagatatatcagtccaaaggactttaaaatcaccattgggaagatcaatgaccagtttgcaggatacagtcagcaagattcacaagaattgcttctgttcctaatggatggtctccatgaagatctaaataaagctgataatcggaagagatataaagaagaaaataatgatcatctcgatgactttaaagctgcagaacatgcctggcagaaacacaagcagctcaatgagtctattattgttgcactttttcagggtcaattcaaatctacagtacagtgcctcacatgtcacaaaaagtctaggacatttgaggccttcatgtatttgtctctaccactagcatccacaagtaaatgtacattacaggattgccttagattattttccaaagaagaaaaactcacagataacaacagattttactgcagtcattgcagagctcgacgggattctctaaaaaagatagaaatctggaagttaccacctgtgcttttagtgcatctgaaacgtttttcctacgatggcaggtggaaacaaaaattacagacatctgtggacttcccgttagaaaatcttgacttgtcacagtatgttattggtccaaagaacaatttgaagaaatataatttgttttctgtttcaaatcactacggtgggctggatggaggccactacacagcctattgtaaaaatgcagcaagacaacggtggtttaagtttgatgatcatgaagtttctgatatctccgtttcttctgtgaaatcttcagcagcttatatcctcttttatacttcattgggaccacgagtaactgatgtagccacataaggagacataggttataaactagttatcttttaaaaggctcagcaacacaactcttgaaatgcttatcaggataatggtagctatagctggccatttagaggaattctaggacagtgggagctgtgttactagcactatataattccggtcagtgctgacaaataacatttaacaagtattgcagtaatcatcacttacaggtaccatttatttcaaaacaacttttttagtctgctccaaagttaaaataattaactagctaagcattattattcgactggtctaaaaactattgttatcttttttttttccttttcactgttatggccttttcacatttctaaatcccatcttgatatactatgaatactctagaatgatgtaaagcagataggaatgtatgtgtacatatttattgcatacttgcacatcaaatcgatgtacatagtttaacacgtggtccttttgtgaaacctagaactcagaggattgctttttttctttcagcctattttgagttaacttcagtgctttcttagggaaatgacagggcaaagcaatttttctgttggctttgggctgtatttgtgcactaaatctttattctaaaaaaaaaaatggaaactttaatttttttaaaacgagaatttcatttacagctacattaaaatcttaatgagaaaaataatttataaccctgtgggtgttctgtctttaatattgtattatcaaatataggacagtaaaaccatagattttatatacacacgtgctatataataacacccagagtcattctttcaagactagtattctcacatattgagaatattcattctaaatattaaagtaaaaatgccgggagtcaggcatgattgcaaagtgaactgcattataaactacatctttacagagtgatgtattaagagggttaaaggagcttataatttatttaaccgagggactcagttgctatatatatagtcagtaaaacactccatataaaaataagattctaaaagtgcttcagaaagagaccaccattagcaggctctcagggagaagatgaaaggatggggttcaaattgtgaagctgacaacttttcatgttttacaattagtctaagagaccact

SEQ ID NO: 347933 - DNA, 4586 bp, Homo sapiens
gggggtgagctgggctggcttccgtcctggtagccaaggctaattctccctcgagttcttgggagatgggcatttggcgagaaggctggcgttagtgaagcgcgcccggcgtcacggaaagaagcacttgtaaggaaatatagcatccattgtgaaagtggaaaagtaaagataattcatcatgcctgctgtggcttcagttcctaaagaactctacctcagttcttcactaaaagaccttaataagaagacagaagttaaaccagagaaaataagcactaagagttatgtgcacagtgccctgaagatctttaagacagcagaagaatgcagattagatcgtgatgaggaaagggcctatgtactatatatgaaatacgtgactgtttataatcttatcaaaaaaagacctgatttcaagcaacagcaggattatttccattcaatacttggacctggaaacatcaaaaaagctgtcgaagaagctgaaagactctctgaaagccttaaattaagatatgaagaagctgaagtccggaaaaaacttgaggaaaaagacaggcaggaggaagcacagcggctacaacaaaaaaggcaggaaacaggaagagaggatggtggcacattggctaaaggctctttggagaatgttttggattccaaagacaaaacccaaaagagcaatggtgaaaagaatgaaaaatgtgagaccaaagagaaaggagcaatcacagcaaaggaactatacacaatgatgacggataaaaacatcagcttgattataatggatgctcgaagaatgcaggattatcaggattcctgtattttacattctctcagtgttcctgaagaagccatcagtccaggagtcactgctagttggattgaagcacacctgccagatgattctaaagacacatggaagaagagggggaatgtggagtatgtggtacttcttgactggtttagttctgccaaagatttacagattggaacaactctccggagtctgaaagatgcacttttcaagtgggaaagtaaaactgtcctgcgcaatgagcctttggttttagagggaggctatgaaaactggctcctttgttatccccagtatacaacaaatgctaaggtcactccacccccacgacgccagaatgaagaggtgtctatctcattggattttacttatccctcattggaagaatcaattccttctaaacctgctgcccagacgccacctgcatctatagaagtagatgaaaatatagaattgataagtggtcaaaatgagagaatgggaccactgaatatatcaactccagttgaaccagttgctgcttctaaatctgatgtttcacccataattcagccagtgcctagtataaagaatgttccacagattgatcgtactaaaaaaccagcagtcaaattgcctgaagagcatagaataaaatctgaaagtacaaaccatgagcaacaatctcctcagagtggaaaagttattcctgatcgttccaccaagccagtagttttttctccaactctcatgttaacagatgaagaaaaggctcgtattcatgcagaaactgctcttctaatggaaaaaaacaaacaagaaaaagaacttcgggaaaggcagcaagaggaacagaaagagaaactgaggaaggaagaacaagaacaaaaagccaaaaagaaacaagaagctgaagaaaatgaaattacagagaagcaacaaaaagcaaaagaagaaatggagaagaaagaaagtgaacaggccaagaaagaagataaagaaacctcagcaaagaggggcaaagaaataacaggagtaaaaagacaaagtaaaagtgaacatgaaacttctgatgccaagaaatctgtagaagatagggggaaaaggtgtccaaccccagaaatacagaaaaagtcaacaggagatgtgccccatacatctgtgacaggggattcaggttcaggcaaggctcaacgagaacctttgacaagagcacgaagtgaagaaatggggaggatcgtaccaggactgccttcaggctgggccaagtttcttgacccaatcactggaacctttcgttattatcattcacccaccaacactgttcatatgtacccaccggaaatggctccttcatctgcacctccttccacccctccaactcataaagccaagccacagattcctgctgagcgggatagggaaccttccaaactgaagcgctcctactcctccccagatataacccaggctattcaagaggaagagaagaggaagccaacagtaactccaacagttaatcgggaaaacaagccaacatgttatcctaaagctgagatctcaaggctttctgcttctcagattcggaacctcaatcctgtttttggaggttctggaccagctcttactggacttcgtaacttaggaaatacttgttatatgaactcaatattgcagtgcctatgtaacgctccacatttggctgattatttcaaccgaaactgttatcaggatgatattaacaggtcaaatttgttggggcataaaggtgaagtggcagaagaatttggtataatcatgaaagccctgtggacaggacagtatagatatatcagtccaaaggactttaaaatcaccattgggaagatcaatgaccagtttgcaggatacagtcagcaagattcacaagaattgcttctgttcctaatggatggtctccatgaagatctaaataaagctgataatcggaagagatataaagaagaaaataatgatcatctcgatgactttaaagctgcagaacatgcctggcagaaacacaagcagctcaatgagtctattattgttgcactttttcagggtcaattcaaatctacagtacagtgcctcacatgtcacaaaaagtctaggacatttgaggccttcatgtatttgtctctaccactagcatccacaagtaaatgtacattacaggattgccttagattattttccaaagaagaaaaactcacagataacaacagattttactgcagtcattgcagagctcgacgggattctctaaaaaagatagaaatctggaagttaccacctgtgcttttagtgcatctgaaacgtttttcctacgatggcaggtggaaacaaaaattacagacatctgtggacttcccgttagaaaatcttgacttgtcacagtatgttattggtccaaagaacaatttgaagaaatataatttgttttctgtttcaaatcactacggtgggctggatggaggccactacacagcctattgtaaaaatgcagcaagacaacggtggtttaagtttgatgatcatgaagtttctgatatctccgtttcttctgtgaaatcttcagcagcttatatcctcttttatacttcattgggaccacgagtaactgatgtagccacataaggagacataggttataaactagttatcttttaaaaggctcagcaacacaactcttgaaatgcttatcaggataatggtagctatagctggccatttagaggaattctaggacagtgggagctgtgttactagcactatataattccggtcagtgctgacaaataacatttaacaagtattgcagtaatcatcacttacaggtaccatttatttcaaaacaacttttttagtctgctccaaagttaaaataattaactagctaagcattattattcgactggtctaaaaactattgttatcttttttttttccttttcactgttatggccttttcacatttctaaatcccatcttgatatactatgaatactctagaatgatgtaaagcagataggaatgtatgtgtacatatttattgcatacttgcacatcaaatcgatgtacatagtttaacacgtggtccttttgtgaaacctagaactcagaggattgctttttttctttcagcctattttgagttaacttcagtgctttcttagggaaatgacagggcaaagcaatttttctgttggctttgggctgtatttgtgcactaaatctttattctaaaaaaaaaaatggaaactttaatttttttaaaacgagaatttcatttacagctacattaaaatcttaatgagaaaaataatttataaccctgtgggtgttctgtctttaatattgtattatcaaatataggacagtaaaaccatagattttatatacacacgtgctatataataacacccagagtcattctttcaagactagtattctcacatattgagaatattcattctaaatattaaagtaaaaatgccgggagtcaggcatgattgcaaagtgaactgcattataaactacatctttacagagtgatgtattaagagggttaaaggagcttataatttatttaaccgagggactcagttgctatatatatagtcagtaaaacactccatataaaaataagattctaaaagtgcttcagaaagagaccaccattagcaggctctcagggagaagatgaaaggatggggttcaaattgtgaagctgacaacttttcatgttttacaattagtctaagagaccact

SEQ ID NO: 347934 - DNA, 4743 bp, Homo sapiens
gggggtgagctgggctggcttccgtcctggtagccaaggctaattctccctcgagttcttgggagatgggcatttggcgagaaggctggcgttagtgaagcgcgcccggcgtcacggtgagtgcgggtcttgggccctagcacctgttctctgggaagtcgtccgctgtgaacgatgaacgcctttccttccaccagctgctggttaccccggagacaagctctgtccgcggagaggagtgggacaactcctaaaggcaacaacaatactcaacataaatatctgttcttgaactcctgggctcaagcagtcctcccacctcagtctcccagagtgttgggattacagctgtgaggcaccacgcccagtcagtgcactgctttttgcatggagaaagtcttgctgctactttaaaaaggaaagaagcacttgtaaggaaatatagcatccattgtgaaagtggaaaagtaaagataattcatcatgcctgctgtggcttcagttcctaaagaactctacctcagttcttcactaaaagaccttaataagaagacagaagttaaaccagagaaaataagcactaagaggattatttccattcaatacttggacctggaaacatcaaaaaagctgtcgaagaagctgaaagactctctgaaagccttaaattaagatatgaagaagctgaagtccggaaaaaacttgaggaaaaagacaggcaggaggaagcacagcggctacaacaaaaaaggcaggaaacaggaagagaggatggtggcacattggctaaaggctctttggagaatgttttggattccaaagacaaaacccaaaagagcaatggtgaaaagaatgaaaaatgtgagaccaaagagaaaggagcaatcacagcaaaggaactatacacaatgatgacggataaaaacatcagcttgattataatggatgctcgaagaatgcaggattatcaggattcctgtattttacattctctcagtgttcctgaagaagccatcagtccaggagtcactgctagttggattgaagcacacctgccagatgattctaaagacacatggaagaagagggggaatgtggagtatgtggtacttcttgactggtttagttctgccaaagatttacagattggaacaactctccggagtctgaaagatgcacttttcaagtgggaaagtaaaactgtcctgcgcaatgagcctttggttttagagggaggctatgaaaactggctcctttgttatccccagtatacaacaaatgctaaggtcactccacccccacgacgccagaatgaagaggtgtctatctcattggattttacttatccctcattggaagaatcaattccttctaaacctgctgcccagacgccacctgcatctatagaagtagatgaaaatatagaattgataagtggtcaaaatgagagaatgggaccactgaatatatcaactccagttgaaccagttgctgcttctaaatctgatgtttcacccataattcagccagtgcctagtataaagaatgttccacagattgatcgtactaaaaaaccagcagtcaaattgcctgaagagcatagaataaaatctgaaagtacaaaccatgagcaacaatctcctcagagtggaaaagttattcctgatcgttccaccaagccagtagttttttctccaactctcatgttaacagatgaagaaaaggctcgtattcatgcagaaactgctcttctaatggaaaaaaacaaacaagaaaaagaacttcgggaaaggcagcaagaggaacagaaagagaaactgaggaaggaagaacaagaacaaaaagccaaaaagaaacaagaagctgaagaaaatgaaattacagagaagcaacaaaaagcaaaagaagaaatggagaagaaagaaagtgaacaggccaagaaagaagataaagaaacctcagcaaagaggggcaaagaaataacaggagtaaaaagacaaagtaaaagtgaacatgaaacttctgatgccaagaaatctgtagaagatagggggaaaaggtgtccaaccccagaaatacagaaaaagtcaacaggagatgtgccccatacatctgtgacaggggattcaggttcaggcaaggctcaacgagaacctttgacaagagcacgaagtgaagaaatggggaggatcgtaccaggactgccttcaggctgggccaagtttcttgacccaatcactggaacctttcgttattatcattcacccaccaacactgttcatatgtacccaccggaaatggctccttcatctgcacctccttccacccctccaactcataaagccaagccacagattcctgctgagcgggatagggaaccttccaaactgaagcgctcctactcctccccagatataacccaggctattcaagaggaagagaagaggaagccaacagtaactccaacagttaatcgggaaaacaagccaacatgttatcctaaagctgagatctcaaggctttctgcttctcagattcggaacctcaatcctgtttttggaggttctggaccagctcttactggacttcgtaacttaggaaatacttgttatatgaactcaatattgcagtgcctatgtaacgctccacatttggctgattatttcaaccgaaactgttatcaggatgatattaacaggtcaaatttgttggggcataaaggtgaagtggcagaagaatttggtataatcatgaaagccctgtggacaggacagtatagatatatcagtccaaaggactttaaaatcaccattgggaagatcaatgaccagtttgcaggatacagtcagcaagattcacaagaattgcttctgttcctaatggatggtctccatgaagatctaaataaagctgataatcggaagagatataaagaagaaaataatgatcatctcgatgactttaaagctgcagaacatgcctggcagaaacacaagcagctcaatgagtctattattgttgcactttttcagggtcaattcaaatctacagtacagtgcctcacatgtcacaaaaagtctaggacatttgaggccttcatgtatttgtctctaccactagcatccacaagtaaatgtacattacaggattgccttagattattttccaaagaagaaaaactcacagataacaacagattttactgcagtcattgcagagctcgacgggattctctaaaaaagatagaaatctggaagttaccacctgtgcttttagtgcatctgaaacgtttttcctacgatggcaggtggaaacaaaaattacagacatctgtggacttcccgttagaaaatcttgacttgtcacagtatgttattggtccaaagaacaatttgaagaaatataatttgttttctgtttcaaatcactacggtgggctggatggaggccactacacagcctattgtaaaaatgcagcaagacaacggtggtttaagtttgatgatcatgaagtttctgatatctccgtttcttctgtgaaatcttcagcagcttatatcctcttttatacttcattgggaccacgagtaactgatgtagccacataaggagacataggttataaactagttatcttttaaaaggctcagcaacacaactcttgaaatgcttatcaggataatggtagctatagctggccatttagaggaattctaggacagtgggagctgtgttactagcactatataattccggtcagtgctgacaaataacatttaacaagtattgcagtaatcatcacttacaggtaccatttatttcaaaacaacttttttagtctgctccaaagttaaaataattaactagctaagcattattattcgactggtctaaaaactattgttatcttttttttttccttttcactgttatggccttttcacatttctaaatcccatcttgatatactatgaatactctagaatgatgtaaagcagataggaatgtatgtgtacatatttattgcatacttgcacatcaaatcgatgtacatagtttaacacgtggtccttttgtgaaacctagaactcagaggattgctttttttctttcagcctattttgagttaacttcagtgctttcttagggaaatgacagggcaaagcaatttttctgttggctttgggctgtatttgtgcactaaatctttattctaaaaaaaaaaatggaaactttaatttttttaaaacgagaatttcatttacagctacattaaaatcttaatgagaaaaataatttataaccctgtgggtgttctgtctttaatattgtattatcaaatataggacagtaaaaccatagattttatatacacacgtgctatataataacacccagagtcattctttcaagactagtattctcacatattgagaatattcattctaaatattaaagtaaaaatgccgggagtcaggcatgattgcaaagtgaactgcattataaactacatctttacagagtgatgtattaagagggttaaaggagcttataatttatttaaccgagggactcagttgctatatatatagtcagtaaaacactccatataaaaataagattctaaaagtgcttcagaaagagaccaccattagcaggctctcagggagaagatgaaaggatggggttcaaattgtgaagctgacaacttttcatgttttacaattagtctaagagaccact

SEQ ID NO: 347935 - DNA, 5062 bp, Homo sapiens
gggggtgagctgggctggcttccgtcctggtagccaaggctaattctccctcgagttcttgggagatgggcatttggcgagaaggctggcgttagtgaagcgcgcccggcgtcacggtgagtgcgggtcttgggccctagcacctgttctctgggaagtcgtccgctgtgaacgatgaacgcctttccttccaccagctgctggttaccccggagacaagctctgtccgcggagaggagtgggacaactcctaaaggcaacaacaatactcaacataaatatctgttcttgaactcctgggctcaagcagtcctcccacctcagtctcccagagtgttgggattacagctgtgaggcaccacgcccagtcagtgcactgctttttgcatggagaaagtcttgctgctactttaaaaaggaaagaagcacttgtaaggaaatatagcatccattgtgaaagtggaaaagtaaagataattcatcatgcctgctgtggcttcagttcctaaagaactctacctcagttcttcactaaaagaccttaataagaagacagaagttaaaccagagaaaataagcactaagagttatgtgcacagtgccctgaagatctttaagacagcagaagaatgcagattagatcgtgatgaggaaagggcctatgtactatatatgaaatacgtgactgtttataatcttatcaaaaaaagacctgatttcaagcaacagcaggattatttccattcaatacttggacctggaaacatcaaaaaagctgtcgaagaagctgaaagactctctgaaagccttaaattaagatatgaagaagctgaagtccggaaaaaacttgaggaaaaagacaggcaggaggaagcacagcggctacaacaaaaaaggcaggaaacaggaagagaggatggtggcacattggctaaaggctctttggagaatgttttggattccaaagacaaaacccaaaagagcaatggtgaaaagaatgaaaaatgtgagaccaaagagaaaggagcaatcacagcaaaggaactatacacaatgatgacggataaaaacatcagcttgattataatggatgctcgaagaatgcaggattatcaggattcctgtattttacattctctcagtgttcctgaagaagccatcagtccaggagtcactgctagttggattgaagcacacctgccagatgattctaaagacacatggaagaagagggggaatgtggagtatgtggtacttcttgactggtttagttctgccaaagatttacagattggaacaactctccggagtctgaaagatgcacttttcaagtgggaaagtaaaactgtcctgcgcaatgagcctttggttttagagggaggctatgaaaactggctcctttgttatccccagtatacaacaaatgctaaggtcactccacccccacgacgccagaatgaagaggtgtctatctcattggattttacttatccctcattggaagaatcaattccttctaaacctgctgcccagacgccacctgcatctatagaagtagatgaaaatatagaattgataagtggtcaaaatgagagaatgggaccactgaatatatcaactccagttgaaccagttgctgcttctaaatctgatgtttcacccataattcagccagtgcctagtataaagaatgttccacagattgatcgtactaaaaaaccagcagtcaaattgcctgaagagcatagaataaaatctgaaagtacaaaccatgagcaacaatctcctcagagtggaaaagttattcctgatcgttccaccaagccagtagttttttctccaactctcatgttaacagatgaagaaaaggctcgtattcatgcagaaactgctcttctaatggaaaaaaacaaacaagaaaaagaacttcgggaaaggcagcaagaggaacagaaagagaaactgaggaaggaagaacaagaacaaaaagccaaaaagaaacaagaagctgaagaaaatgaaattacagagaagcaacaaaaagcaaaagaagaaatggagaagaaagaaagtgaacaggccaagaaagaagataaagaaacctcagcaaagaggggcaaagaaataacaggagtaaaaagacaaagtaaaagtgaacatgaaacttctgatgccaagaaatctgtagaagatagggggaaaaggtgtccaaccccagaaatacagaaaaagtcaacaggagatgtgccccatacatctgtgacaggggattcaggttcaggcaaggctcaacgagaacctttgacaagagcacgaagtgaagaaatggggaggatcgtaccaggactgccttcaggctgggccaagtttcttgacccaatcactggaacctttcgttattatcattcacccaccaacactgttcatatgtacccaccggaaatggctccttcatctgcacctccttccacccctccaactcataaagccaagccacagattcctgctgagcgggatagggaaccttccaaactgaagcgctcctactcctccccagatataacccaggctattcaagaggaagagaagaggaagccaacagtaactccaacagttaatcgggaaaacaagccaacatgttatcctaaagctgagatctcaaggctttctgcttctcagattcggaacctcaatcctgtttttggaggttctggaccagctcttactggacttcgtaacttaggaaatacttgttatatgaactcaatattgcagtgcctatgtaacgctccacatttggctgattatttcaaccgaaactgttatcaggatgatattaacaggtcaaatttgttggggcataaaggtgaagtggcagaagaatttggtataatcatgaaagccctgtggacaggacagtatagatatatcagtccaaaggactttaaaatcaccattgggaagatcaatgaccagtttgcaggatacagtcagcaagattcacaagaattgcttctgttcctaatggatggtctccatgaagatctaaataaagctgataatcggaagagatataaagaagaaaataatgatcatctcgatgactttaaagctgcagaacatgcctggcagaaacacaagcagctcaatgagtctattattgttgcactttttcagggtcaattcaaatctacagtacagtgcctcacatgtcacaaaaagtctaggacatttgaggccttcatgtatttgtctctaccactagcatccacaagtaaatgtacattacaggattgccttagattattttccaaagaagaaaaactcacagataacaacagattttactgcagtcattgcagagctcgacgggattctctaaaaaagatagaaatctggaagttaccacctgtgcttttagtgcatctgaaacgtttttcctacgatggcaggtggaaacaaaaattacagacatctgtggacttcccgttagaaaatcttgacttgtcacagtatgttattggtccaaagaacaatttgaagaaatataatttgttttctgtttcagtaagtatctctttgaactgaagactttttgtttcaaagcaagtttaaaaaaagttttaagtggtttcctacctcatggaagagtaagaacaacataaagctttgaaactattggcgtattttaaataacaattttaactgaattgatttttttttctatcttgtttggcacagaatcactacggtgggctggatggaggccactacacagcctattgtaaaaatgcagcaagacaacggtggtttaagtttgatgatcatgaagtttctgatatctccgtttcttctgtgaaatcttcagcagcttatatcctcttttatacttcattgggaccacgagtaactgatgtagccacataaggagacataggttataaactagttatcttttaaaaggctcagcaacacaactcttgaaatgcttatcaggataatggtagctatagctggccatttagaggaattctaggacagtgggagctgtgttactagcactatataattccggtcagtgctgacaaataacatttaacaagtattgcagtaatcatcacttacaggtaccatttatttcaaaacaacttttttagtctgctccaaagttaaaataattaactagctaagcattattattcgactggtctaaaaactattgttatcttttttttttccttttcactgttatggccttttcacatttctaaatcccatcttgatatactatgaatactctagaatgatgtaaagcagataggaatgtatgtgtacatatttattgcatacttgcacatcaaatcgatgtacatagtttaacacgtggtccttttgtgaaacctagaactcagaggattgctttttttctttcagcctattttgagttaacttcagtgctttcttagggaaatgacagggcaaagcaatttttctgttggctttgggctgtatttgtgcactaaatctttattctaaaaaaaaaaatggaaactttaatttttttaaaacgagaatttcatttacagctacattaaaatcttaatgagaaaaataatttataaccctgtgggtgttctgtctttaatattgtattatcaaatataggacagtaaaaccatagattttatatacacacgtgctatataataacacccagagtcattctttcaagactagtattctcacatattgagaatattcattctaaatattaaagtaaaaatgccgggagtcaggcatgattgcaaagtgaactgcattataaactacatctttacagagtgatgtattaagagggttaaaggagcttataatttatttaaccgagggactcagttgctatatatatagtcagtaaaacactccatataaaaataagattctaaaagtgcttcagaaagagaccaccattagcaggctctcagggagaagatgaaaggatggggttcaaattgtgaagctgacaacttttcatgttttacaattagtctaagagaccact

SEQ ID NO: 347936 - DNA, 4229 bp, Homo sapiens
gggggtgagctgggctggcttccgtcctggtagccaaggctaattctccctcgagttcttgggagatgggcatttggcgagaaggctggcgttagtgaagcgcgcccggcgtcacggtgagtgcgggtcttgggccctagcacctgttctctgggaagtcgtccgctgtgaacgatgaacgcctttccttccaccagctgctggttaccccggagacaagctctgtccgcggagaggagtgggacaactcctaaaggcaacaacaatactcaacataaatatctgttcttgaactcctgggctcaagcagtcctcccacctcagtctcccagagtgttgggattacagctgtgaggcaccacgcccagtcagtgcactgctttttgcatggagaaagtcttgctgctactttaaaaaggaaagaagcacttgtaaggaaatatagcatccattgtgaaagtggaaaagtaaagataattcatcatgcctgctgtggcttcagttcctaaagaactctacctcagttcttcactaaaagaccttaataagaagacagaagttaaaccagagaaaataagcactaagagttatgtgcacagtgccctgaagatctttaagacagcagaagaatgcagattagatcgtgatgaggaaagggcctatgtactatatatgaaatacgtgactgtttataatcttatcaaaaaaagacctgatttcaagcaacagcaggattatttccattcaatacttggacctggaaacatcaaaaaagctgtcgaagaagctgaaagactctctgaaagccttaaattaagtggattttacttatccctcattggaagaatcaattccttctaaacctgctgcccagacgccacctgcatctatagaagtagatgaaaatatagaattgataagtggtcaaaatgagagaatgggaccactgaatatatcaactccagttgaaccagttgctgcttctaaatctgatgtttcacccataattcagccagtgcctagtataaagaatgttccacagattgatcgtactaaaaaaccagcagtcaaattgcctgaagagcatagaataaaatctgaaagtacaaaccatgagcaacaatctcctcagagtggaaaagttattcctgatcgttccaccaagccagtagttttttctccaactctcatgttaacagatgaagaaaaggctcgtattcatgcagaaactgctcttctaatggaaaaaaacaaacaagaaaaagaacttcgggaaaggcagcaagaggaacagaaagagaaactgaggaaggaagaacaagaacaaaaagccaaaaagaaacaagaagctgaagaaaatgaaattacagagaagcaacaaaaagcaaaagaagaaatggagaagaaagaaagtgaacaggccaagaaagaagataaagaaacctcagcaaagaggggcaaagaaataacaggagtaaaaagacaaagtaaaagtgaacatgaaacttctgatgccaagaaatctgtagaagatagggggaaaaggtgtccaaccccagaaatacagaaaaagtcaacaggagatgtgccccatacatctgtgacaggggattcaggttcaggcaaggctcaacgagaacctttgacaagagcacgaagtgaagaaatggggaggatcgtaccaggactgccttcaggctgggccaagtttcttgacccaatcactggaacctttcgttattatcattcacccaccaacactgttcatatgtacccaccggaaatggctccttcatctgcacctccttccacccctccaactcataaagccaagccacagattcctgctgagcgggatagggaaccttccaaactgaagcgctcctactcctccccagatataacccaggctattcaagaggaagagaagaggaagccaacagtaactccaacagttaatcgggaaaacaagccaacatgttatcctaaagctgagatctcaaggctttctgcttctcagattcggaacctcaatcctgtttttggaggttctggaccagctcttactggacttcgtaacttaggaaatacttgttatatgaactcaatattgcagtgcctatgtaacgctccacatttggctgattatttcaaccgaaactgttatcaggatgatattaacaggtcaaatttgttggggcataaaggtgaagtggcagaagaatttggtataatcatgaaagccctgtggacaggacagtatagatatatcagtccaaaggactttaaaatcaccattgggaagatcaatgaccagtttgcaggatacagtcagcaagattcacaagaattgcttctgttcctaatggatggtctccatgaagatctaaataaagctgataatcggaagagatataaagaagaaaataatgatcatctcgatgactttaaagctgcagaacatgcctggcagaaacacaagcagctcaatgagtctattattgttgcactttttcagggtcaattcaaatctacagtacagtgcctcacatgtcacaaaaagtctaggacatttgaggccttcatgtatttgtctctaccactagcatccacaagtaaatgtacattacaggattgccttagattattttccaaagaagaaaaactcacagataacaacagattttactgcagtcattgcagagctcgacgggattctctaaaaaagatagaaatctggaagttaccacctgtgcttttagtgcatctgaaacgtttttcctacgatggcaggtggaaacaaaaattacagacatctgtggacttcccgttagaaaatcttgacttgtcacagtatgttattggtccaaagaacaatttgaagaaatataatttgttttctgtttcaaatcactacggtgggctggatggaggccactacacagcctattgtaaaaatgcagcaagacaacggtggtttaagtttgatgatcatgaagtttctgatatctccgtttcttctgtgaaatcttcagcagcttatatcctcttttatacttcattgggaccacgagtaactgatgtagccacataaggagacataggttataaactagttatcttttaaaaggctcagcaacacaactcttgaaatgcttatcaggataatggtagctatagctggccatttagaggaattctaggacagtgggagctgtgttactagcactatataattccggtcagtgctgacaaataacatttaacaagtattgcagtaatcatcacttacaggtaccatttatttcaaaacaacttttttagtctgctccaaagttaaaataattaactagctaagcattattattcgactggtctaaaaactattgttatcttttttttttccttttcactgttatggccttttcacatttctaaatcccatcttgatatactatgaatactctagaatgatgtaaagcagataggaatgtatgtgtacatatttattgcatacttgcacatcaaatcgatgtacatagtttaacacgtggtccttttgtgaaacctagaactcagaggattgctttttttctttcagcctattttgagttaacttcagtgctttcttagggaaatgacagggcaaagcaatttttctgttggctttgggctgtatttgtgcactaaatctttattctaaaaaaaaaaatggaaactttaatttttttaaaacgagaatttcatttacagctacattaaaatcttaatgagaaaaataatttataaccctgtgggtgttctgtctttaatattgtattatcaaatataggacagtaaaaccatagattttatatacacacgtgctatataataacacccagagtcattctttcaagactagtattctcacatattgagaatattcattctaaatattaaagtaaaaatgccgggagtcaggcatgattgcaaagtgaactgcattataaactacatctttacagagtgatgtattaagagggttaaaggagcttataatttatttaaccgagggactcagttgctatatatatagtcagtaaaacactccatataaaaataagattctaaaagtgcttcagaaagagaccaccattagcaggctctcagggagaagatgaaaggatggggttcaaattgtgaagctgacaacttttcatgttttacaattagtctaagagaccact

SEQ ID NO: 347937 - DNA, 3829 bp, Homo sapiens
gggggtgagctgggctggcttccgtcctggtagccaaggctaattctccctcgagttcttgggagatgggcatttggcgagaaggctggcgttagtgaagcgcgcccggcgtcacggtgagtgcgggtcttgggccctagcacctgttctctgggaagtcgtccgctgtgaacgatgaacgcctttccttccaccagctgctggttaccccggagacaagctctgtccgcggagaggagtgggacaactcctaaaggcaacaacaatactcaacataaatatctgttcttgaactcctgggctcaagcagtcctcccacctcagtctcccagagtgttgggattacagctgtgaggcaccacgcccagtcagtgcactgctttttgcatggagaaagtcttgctgctactttaaaaaggaaagaagcacttgtaaggaaatatagcatccattgtgaaagtggaaaagtaaagataattcatcatgcctgctgtggcttcagttcctaaagaactctacctcagttcttcactaaaagaccttaataagaagacagaagttaaaccagagaaaataagcactaagagttatgtgcacagtgccctgaagatctttaagacagcagaagaatgcagattagatcgtgatgaggaaagggcctatgtactatatatgaaatacgtgactgtttataatcttatcaaaaaaagacctgatttcaagcaacagcaggattatttccattcaatacttggacctggaaacatcaaaaaagctgtcgaagaagctgaaagactctctgaaagccttaaattaagatatgaagaagctgaagtccggaaaaaacttgaggaaaaagacaggcaggaggaagcacagcggctacaacaaaaaaggcaggaaacaggaagagaggatggtggcacattggctaaaggctctttggagaatgttttggattccaaagacaaaacccaaaagagcaatggtgaaaagaatgaaaaatgtgagaccaaagagaaaggagcaatcacagcaaaggaactatacacaatgatgacggataaaaacatcagcttgattataatggatgctcgaagaatgcaggattatcaggattcctgtattttacattctctcagtgttcctgaagaagccatcagtccaggagtcactgctagttggattgaagcacacctgccagatgattctaaagacacatggaagaagagggggaatgtggagtatgtggtacttcttgactggtttagttctgccaaagatttacagattggaacaactctccggagtctgaaagatgcacttttcaagtgggaaagtaaaactgtcctgcgcaatgagcctttggttttagagggaggctatgaaaactggctcctttgttatccccagtatacaacaaatgctaaggtcactccacccccacgacgccagaatgaagaggtgtctatctcattggattttacttatccctcattggaagaatcaattccttctaaacctgctgcccagacgccacctgcatctatagaagtagatgaaaatatagaattgataagtggtcaaaatgagagaatgggaccactgaatatatcaactccagttgaaccagttgctgcttctaaatctgatgtttcacccataattcagccagtgcctagtataaagaatgttccacagattgatcgtactaaaaaaccagcagtcaaattgcctgaagagcatagaataaaatctgaaagtacaaaccatgagcaacaatctcctcagagtggaaaagttattcctgatcgttccaccaagccagtagttttttctccaactctcatgttaacagatgaagaaaaggctcgtattcatgcagaaactgctcttctaatggaaaaaaacaaacaagaaaaagaacttcgggaaaggcagcaagaggaacagaaagagaaactgaggaaggaagaacaagaacaaaaagccaaaaagaaacaagaagctgaagaaaatgaaattacagagaagcaacaaaaagcaaaagaagaaatggagaagaaagaaagtgaacaggccaagaaagaagataaagaaacctcagcaaagaggggcaaagaaataacaggagtaaaaagacaaagtaaaagtgaacatgaaacttctgatgccaagaaatctgtagaagatagggggaaaaggtgtccaaccccagaaatacagaaaaagtcaacaggagatgtgccccatacatctgtgacaggggattcaggttcaggcaaggctcaacgagaacctttgacaagagcacgaagtgaagaaatggggaggatcgtaccaggactgccttcaggctgggccaagtttcttgacccaatcactggaacctttcgttattatcattcacccaccaacactgttcatatgtacccaccggaaatggctccttcatctgcacctccttccacccctccaactcataaagccaagccacagattcctgctgagcgggatagggaaccttccaaactgaagcgctcctactcctccccagatataacccaggctattcaagaggaagagaagaggaagccaacagtaactccaacagttaatcgggaaaacaagccaacatgttatcctaaagctgagatctcaaggctttctgcttctcagattcggaacctcaatcctgtttttggaggttctggaccagctcttactggacttcgtaacttaggaaatacttgttatatgaactcaatattgcagtgcctatgtaacgctccacatttggctgattatttcaaccgaaactgttatcaggatgatattaacaggtcaaatttgttggggcataaaggtgaagtggcagaagaatttggtataatcatgaaagccctgtggacaggacagtatagatatatcagtccaaaggactttaaaatcaccattgggaagatcaatgaccagtttgcaggatacagtcagcaagattcacaagaattgcttctgttcctaatggatggtctccatgaagatctaaataaagctgataatcggaagagatataaagaagaaaataatgatcatctcgatgactttaaagctgcagaacatgcctggcagaaacacaagcagctcaatgagtctattattgttgcactttttcagggtcaattcaaatctacagtacagtgcctcacatgtcacaaaaagtctaggacatttgaggccttcatgtatttgtctctaccactagcatccacaagtaaatgtacattacaggattgccttagattattttccaaagaagaaaaactcacagataacaacagattttactgcagtcattgcagagctcgacgggattctctaaaaaagatagaaatctggaagttaccacctgtgcttttagtgcatctgaaacgtttttcctacgatggcaggtggaaacaaaaattacagacatctgtggacttcccgttagaaaatcttgacttgtcacagtatgttattggtccaaagaacaatttgaagaaatataatttgttttctgtttcaaatcaccaaaatggttctatgggagaaaggaatgtcaaacttagtattcacatatgaacactaactactggaacagaaatgatagggccaagagatgctttttaaattgtcccttattctaaattaaaaggaagtgataattttgttgttaaatcatgcatatagcctgactgctatattgcttctcatttcattgtaactacttatatgttgtgcccattgactatcatctgtgaataaagaaagacaatatttagcagca

SEQ ID NO: 347938 - DNA, 657 bp, Homo sapiens
gattctggaagtataaacattctataagtgattacacatttgctaaaatttttaatgctgaatattttcaaaattatgaaataaccatattacaccaaccaagatatcattgttttgatgtttaaaggagcagaatatgccagaataatggaatgaatgacattattttagtcagtagtctcctactctcaatttctggctctagttttctctgaagtacaagcttgactcgagagcagctgtcattctttcttttgtggtggtcagcattataaacatgtgggtcttaccttcctagaagactcatgtagcagttgtagctggaccagagtatagtcctacctctaccattctggctgtttgaccttaggcacatcattaaatatccatatgcctcagttttcttgtttgtaaaatggaaatgaagccaaatgtctttaacaggttcctctactactaaaattccaagtctttgtatttgaaatggattttacagtcctggctaaaaatctagatgttaatgaatgaggattcatcctggtatcttcctctgtcagtgtaattgtaatgttttgttctgcagtttttcctacgatggcaggtggaaacaaaaattacagacatctgtggacttcccgttagaaaatcttgacttgt

SEQ ID NO: 347939 - DNA, 643 bp, Homo sapiens
gaaatgtaagtactgtgtatggggtttgctattctaaaaaacatttttatttttggaattttagtggattttacttatccctcattggaagaatcaattccttctaaacctgctgcccagacgccacctgcatctatagaagtagatgaaaatatagaattgataagtggtcaaaatgagagaatgggaccactgaatatatcaactccagttgaaccagttgctgcttctaaatctgatgtttcacccataattcagccagtgcctagtataaagaatgttccacaggtatgttcttgattttaacattattctcgcttttgttttaatattaaatatatagtatagctgggcacagtgcctcacgcctgtaatcccagcactttgggaggctgagaggggcagatcacctgaggtcaggagtttgagaccaacctggccaacatggtgaaacccccctctctactaataatacaaaaattagctgggcatggtggtgggtgcctataaatccagctgtttgggaggctgaggcatgagaattgtctgaacccaggaagcggaggttgcagtgagtcgagattgcaccactgcaccccagcctgggtgacagcaagactctgtctcaaaaaaaaaaaaaaga

SEQ ID NO: 347940 - DNA, 4813 bp, Homo sapiens
gggggtgagctgggctggcttccgtcctggtagccaaggctaattctccctcgagttcttgggagatgggcatttggcgagaaggctggcgttagtgaagcgcgcccggcgtcacggtgagtgcgggtcttgggccctagcacctgttctctgggaagtcgtccgctgtgaacgatgaacgcctttccttccaccagctgctggttaccccggagacaagctctgtccgcggagaggagtgggacaactcctaaaggaaagaagcacttgtaaggaaatatagcatccattgtgaaagtggaaaagtaaagataattcatcatgcctgctgtggcttcagttcctaaagaactctacctcagttcttcactaaaagaccttaataagaagacagaagttaaaccagagaaaataagcactaagagttatgtgcacagtgccctgaagatctttaagacagcagaagaatgcagattagatcgtgatgaggaaagggcctatgtactatatatgaaatacgtgactgtttataatcttatcaaaaaaagacctgatttcaagcaacagcaggattatttccattcaatacttggacctggaaacatcaaaaaagctgtcgaagaagctgaaagactctctgaaagccttaaattaagatatgaagaagctgaagtccggaaaaaacttgaggaaaaagacaggcaggaggaagcacagcggctacaacaaaaaaggcaggaaacaggaagagaggatggtggcacattggctaaaggctctttggagaatgttttggattccaaagacaaaacccaaaagagcaatggtgaaaagaatgaaaaatgtgagaccaaagagaaaggagcaatcacagcaaaggaactatacacaatgatgacggataaaaacatcagcttgattataatggatgctcgaagaatgcaggattatcaggattcctgtattttacattctctcagtgttcctgaagaagccatcagtccaggagtcactgctagttggattgaagcacacctgccagatgattctaaagacacatggaagaagagggggaatgtggagtatgtggtacttcttgactggtttagttctgccaaagatttacagattggaacaactctccggagtctgaaagatgcacttttcaagtgggaaagtaaaactgtcctgcgcaatgagcctttggttttagagggaggctatgaaaactggctcctttgttatccccagtatacaacaaatgctaaggtcactccacccccacgacgccagaatgaagaggtgtctatctcattggattttacttatccctcattggaagaatcaattccttctaaacctgctgcccagacgccacctgcatctatagaagtagatgaaaatatagaattgataagtggtcaaaatgagagaatgggaccactgaatatatcaactccagttgaaccagttgctgcttctaaatctgatgtttcacccataattcagccagtgcctagtataaagaatgttccacagattgatcgtactaaaaaaccagcagtcaaattgcctgaagagcatagaataaaatctgaaagtacaaaccatgagcaacaatctcctcagagtggaaaagttattcctgatcgttccaccaagccagtagttttttctccaactctcatgttaacagatgaagaaaaggctcgtattcatgcagaaactgctcttctaatggaaaaaaacaaacaagaaaaagaacttcgggaaaggcagcaagaggaacagaaagagaaactgaggaaggaagaacaagaacaaaaagccaaaaagaaacaagaagctgaagaaaatgaaattacagagaagcaacaaaaagcaaaagaagaaatggagaagaaagaaagtgaacaggccaagaaagaagataaagaaacctcagcaaagaggggcaaagaaataacaggagtaaaaagacaaagtaaaagtgaacatgaaacttctgatgccaagaaatctgtagaagatagggggaaaaggtgtccaaccccagaaatacagaaaaagtcaacaggagatgtgccccatacatctgtgacaggggattcaggttcaggcaagccatttaagattaaaggacaaccagaaagtggaattctaaggacaggaacttttagagaggatacagacgataccgaaagaaataaagctcaacgagaacctttgacaagagcacgaagtgaagaaatggggaggatcgtaccaggactgccttcaggctgggccaagtttcttgacccaatcactggaacctttcgttattatcattcacccaccaacactgttcatatgtacccaccggaaatggctccttcatctgcacctccttccacccctccaactcataaagccaagccacagattcctgctgagcgggatagggaaccttccaaactgaagcgctcctactcctccccagatataacccaggctattcaagaggaagagaagaggaagccaacagtaactccaacagttaatcgggaaaacaagccaacatgttatcctaaagctgagatctcaaggctttctgcttctcagattcggaacctcaatcctgtttttggaggttctggaccagctcttactggacttcgtaacttaggaaatacttgttatatgaactcaatattgcagtgcctatgtaacgctccacatttggctgattatttcaaccgaaactgttatcaggatgatattaacaggtcaaatttgttggggcataaaggtgaagtggcagaagaatttggtataatcatgaaagccctgtggacaggacagtatagatatatcagtccaaaggactttaaaatcaccattgggaagatcaatgaccagtttgcaggatacagtcagcaagattcacaagaattgcttctgttcctaatggatggtctccatgaagatctaaataaagctgataatcggaagagatataaagaagaaaataatgatcatctcgatgactttaaagctgcagaacatgcctggcagaaacacaagcagctcaatgagtctattattgttgcactttttcagggtcaattcaaatctacagtacagtgcctcacatgtcacaaaaagtctaggacatttgaggccttcatgtatttgtctctaccactagcatccacaagtaaatgtacattacaggattgccttagattattttccaaagaagaaaaactcacagataacaacagattttactgcagtcattgcagagctcgacgggattctctaaaaaagatagaaatctggaagttaccacctgtgcttttagtgcatctgaaacgtttttcctacgatggcaggtggaaacaaaaattacagacatctgtggacttcccgttagaaaatcttgacttgtcacagtatgttattggtccaaagaacaatttgaagaaatataatttgttttctgtttcaaatcactacggtgggctggatggaggccactacacagcctattgtaaaaatgcagcaagacaacggtggtttaagtttgatgatcatgaagtttctgatatctccgtttcttctgtgaaatcttcagcagcttatatcctcttttatacttcattgggaccacgagtaactgatgtagccacataaggagacataggttataaactagttatcttttaaaaggctcagcaacacaactcttgaaatgcttatcaggataatggtagctatagctggccatttagaggaattctaggacagtgggagctgtgttactagcactatataattccggtcagtgctgacaaataacatttaacaagtattgcagtaatcatcacttacaggtaccatttatttcaaaacaacttttttagtctgctccaaagttaaaataattaactagctaagcattattattcgactggtctaaaaactattgttatcttttttttttccttttcactgttatggccttttcacatttctaaatcccatcttgatatactatgaatactctagaatgatgtaaagcagataggaatgtatgtgtacatatttattgcatacttgcacatcaaatcgatgtacatagtttaacacgtggtccttttgtgaaacctagaactcagaggattgctttttttctttcagcctattttgagttaacttcagtgctttcttagggaaatgacagggcaaagcaatttttctgttggctttgggctgtatttgtgcactaaatctttattctaaaaaaaaaaatggaaactttaatttttttaaaacgagaatttcatttacagctacattaaaatcttaatgagaaaaataatttataaccctgtgggtgttctgtctttaatattgtattatcaaatataggacagtaaaaccatagattttatatacacacgtgctatataataacacccagagtcattctttcaagactagtattctcacatattgagaatattcattctaaatattaaagtaaaaatgccgggagtcaggcatgattgcaaagtgaactgcattataaactacatctttacagagtgatgtattaagagggttaaaggagcttataatttatttaaccgagggactcagttgctatatatatagtcagtaaaacactccatataaaaataagattctaaaagtgcttcagaaagagaccaccattagcaggctctcagggagaagatgaaaggatggggttcaaattgtgaagctgacaacttttcatgttttacaattagtctaagagaccact

SEQ ID NO: 347941 - DNA, 4926 bp, Homo sapiens
gggggtgagctgggctggcttccgtcctggtagccaaggctaattctccctcgagttcttgggagatgggcatttggcgagaaggctggcgttagtgaagcgcgcccggcgtcacggtgagtgcgggtcttgggccctagcacctgttctctgggaagtcgtccgctgtgaacgatgaacgcctttccttccaccagctgctggttaccccggagacaagctctgtccgcggagaggagtgggacaactcctaaaggcaacaacaatactcaacataaatatctgttcttgaactcctgggctcaagcagtcctcccacctcagtctcccagagtgttgggattacagctgtgaggcaccacgcccagtcagtgcactgctttttgcatggagaaagtcttgctgctactttaaaaaggaaagaagcacttgtaaggaaatatagcatccattgtgaaagtggaaaagtaaagataattcatcatgcctgctgtggcttcagttcctaaagaactctacctcagttcttcactaaaagaccttaataagaagacagaagttaaaccagagaaaataagcactaagagttatgtgcacagtgccctgaagatctttaagacagcagaagaatgcagattagatcgtgatgaggaaagggcctatgtactatatatgaaatacgtgactgtttataatcttatcaaaaaaagacctgatttcaagcaacagcaggattatttccattcaatacttggacctggaaacatcaaaaaagctgtcgaagaagctgaaagactctctgaaagccttaaattaagatatgaagaagctgaagtccggaaaaaacttgaggaaaaagacaggcaggaggaagcacagcggctacaacaaaaaaggcaggaaacaggaagagaggatggtggcacattggctaaaggctctttggagaatgttttggattccaaagacaaaacccaaaagagcaatggtgaaaagaatgaaaaatgtgagaccaaagagaaaggagcaatcacagcaaaggaactatacacaatgatgacggataaaaacatcagcttgattataatggatgctcgaagaatgcaggattatcaggattcctgtattttacattctctcagtgttcctgaagaagccatcagtccaggagtcactgctagttggattgaagcacacctgccagatgattctaaagacacatggaagaagagggggaatgtggagtatgtggtacttcttgactggtttagttctgccaaagatttacagattggaacaactctccggagtctgaaagatgcacttttcaagtgggaaagtaaaactgtcctgcgcaatgagcctttggttttagagggaggctatgaaaactggctcctttgttatccccagtatacaacaaatgctaaggtcactccacccccacgacgccagaatgaagaggtgtctatctcattggattttacttatccctcattggaagaatcaattccttctaaacctgctgcccagacgccacctgcatctatagaagtagatgaaaatatagaattgataagtggtcaaaatgagagaatgggaccactgaatatatcaactccagttgaaccagttgctgcttctaaatctgatgtttcacccataattcagccagtgcctagtataaagaatgttccacagattgatcgtactaaaaaaccagcagtcaaattgcctgaagagcatagaataaaatctgaaagtacaaaccatgagcaacaatctcctcagagtggaaaagttattcctgatcgttccaccaagccagtagttttttctccaactctcatgttaacagatgaagaaaaggctcgtattcatgcagaaactgctcttctaatggaaaaaaacaaacaagaaaaagaacttcgggaaaggcagcaagaggaacagaaagagaaactgaggaaggaagaacaagaacaaaaagccaaaaagaaacaagaagctgaagaaaatgaaattacagagaagcaacaaaaagcaaaagaagaaatggagaagaaagaaagtgaacaggccaagaaagaagataaagaaacctcagcaaagaggggcaaagaaataacaggagtaaaaagacaaagtaaaagtgaacatgaaacttctgatgccaagaaatctgtagaagatagggggaaaaggtgtccaaccccagaaatacagaaaaagtcaacaggagatgtgccccatacatctgtgacaggggattcaggttcaggcaagccatttaagattaaaggacaaccagaaagtggaattctaaggacaggaacttttagagaggatacagacgataccgaaagaaataaagctcaacgagaacctttgacaagagcacgaagtgaagaaatggggaggatcgtaccaggactgccttcaggctgggccaagtttcttgacccaatcactggaacctttcgttattatcattcacccaccaacactgttcatatgtacccaccggaaatggctccttcatctgcacctccttccacccctccaactcataaagccaagccacagattcctgctgagcgggatagggaaccttccaaactgaagcgctcctactcctccccagatataacccaggctattcaagaggaagagaagaggaagccaacagtaactccaacagttaatcgggaaaacaaattcggaacctcaatcctgtttttggaggttctggaccagctcttactggacttcgtaacttaggaaatacttgttatatgaactcaatattgcagtgcctatgtaacgctccacatttggctgattatttcaaccgaaactgttatcaggatgatattaacaggtcaaatttgttggggcataaaggtgaagtggcagaagaatttggtataatcatgaaagccctgtggacaggacagtatagatatatcagtccaaaggactttaaaatcaccattgggaagatcaatgaccagtttgcaggatacagtcagcaagattcacaagaattgcttctgttcctaatggatggtctccatgaagatctaaataaagctgataatcggaagagatataaagaagaaaataatgatcatctcgatgactttaaagctgcagaacatgcctggcagaaacacaagcagctcaatgagtctattattgttgcactttttcagggtcaattcaaatctacagtacagtgcctcacatgtcacaaaaagtctaggacatttgaggccttcatgtatttgtctctaccactagcatccacaagtaaatgtacattacaggattgccttagattattttccaaagaagaaaaactcacagataacaacagattttactgcagtcattgcagagctcgacgggattctctaaaaaagatagaaatctggaagttaccacctgtgcttttagtgcatctgaaacgtttttcctacgatggcaggtggaaacaaaaattacagacatctgtggacttcccgttagaaaatcttgacttgtcacagtatgttattggtccaaagaacaatttgaagaaatataatttgttttctgtttcaaatcactacggtgggctggatggaggccactacacagcctattgtaaaaatgcagcaagacaacggtggtttaagtttgatgatcatgaagtttctgatatctccgtttcttctgtgaaatcttcagcagcttatatcctcttttatacttcattgggaccacgagtaactgatgtagccacataaggagacataggttataaactagttatcttttaaaaggctcagcaacacaactcttgaaatgcttatcaggataatggtagctatagctggccatttagaggaattctaggacagtgggagctgtgttactagcactatataattccggtcagtgctgacaaataacatttaacaagtattgcagtaatcatcacttacaggtaccatttatttcaaaacaacttttttagtctgctccaaagttaaaataattaactagctaagcattattattcgactggtctaaaaactattgttatcttttttttttccttttcactgttatggccttttcacatttctaaatcccatcttgatatactatgaatactctagaatgatgtaaagcagataggaatgtatgtgtacatatttattgcatacttgcacatcaaatcgatgtacatagtttaacacgtggtccttttgtgaaacctagaactcagaggattgctttttttctttcagcctattttgagttaacttcagtgctttcttagggaaatgacagggcaaagcaatttttctgttggctttgggctgtatttgtgcactaaatctttattctaaaaaaaaaaatggaaactttaatttttttaaaacgagaatttcatttacagctacattaaaatcttaatgagaaaaataatttataaccctgtgggtgttctgtctttaatattgtattatcaaatataggacagtaaaaccatagattttatatacacacgtgctatataataacacccagagtcattctttcaagactagtattctcacatattgagaatattcattctaaatattaaagtaaaaatgccgggagtcaggcatgattgcaaagtgaactgcattataaactacatctttacagagtgatgtattaagagggttaaaggagcttataatttatttaaccgagggactcagttgctatatatatagtcagtaaaacactccatataaaaataagattctaaaagtgcttcagaaagagaccaccattagcaggctctcagggagaagatgaaaggatggggttcaaattgtgaagctgacaacttttcatgttttacaattagtctaagagaccact

SEQ ID NO: 347942 - DNA, 4762 bp, Homo sapiens
gggggtgagctgggctggcttccgtcctggtagccaaggctaattctccctcgagttcttgggagatgggcatttggcgagaaggctggcgttagtgaagcgcgcccggcgtcacggtgagtgcgggtcttgggccctagcacctgttctctgggaagtcgtccgctgtgaacgatgaacgcctttccttccaccagctgctggttaccccggagacaagctctgtccgcggagaggagtgggacaactcctaaaggcaacaacaatactcaacataaatatctgttcttgaactcctgggctcaagcagtcctcccacctcagtctcccagagtgttgggattacagctgtgaggcaccacgcccagtcagtgcactgctttttgcatggagaaagtcttgctgctactttaaaaaggaaagaagcacttgtaaggaaatatagcatccattgtgaaagtggaaaagtaaagataattcatcatgcctgctgtggcttcagttcctaaagaactctacctcagttcttcactaaaagaccttaataagaagacagaagttaaaccagagaaaataagcactaagagttatgtgcacagtgccctgaagatctttaagacagcagaagaatgcagattagatcgtgatgaggaaagggcctatgtactatatatgaaatacgtgactgtttataatcttatcaaaaaaagacctgatttcaagcaacagcaggattatttccattcaatacttggacctggaaacatcaaaaaagctgtcgaagaagctgaaagactctctgaaagccttaaattaagatatgaagaagctgaagtccggaaaaaacttgaggaaaaagacaggcaggaggaagcacagcggctacaacaaaaaaggcaggaaacaggaagagaggatggtggcacattggctaaaggctctttggagaatgttttggattccaaagacaaaacccaaaagagcaatggtgaaaagaatgaaaaatgtgagaccaaagagaaaggagcaatcacagcaaaggaactatacacaatgatgacggataaaaacatcagcttgattataatggatgctcgaagaatgcaggattatcaggattcctgtattttacattctctcagtgttcctgaagaagccatcagtccaggagtcactgctagttggattgaagcacacctgccagatgattctaaagacacatggaagaagagggggaatgtggagtatgtggtacttcttgactggtttagttctgccaaagatttacagattggaacaactctccggagtctgaaagatgcacttttcaagtgggaaagtaaaactgtcctgcgcaatgagcctttggttttagagggaggctatgaaaactggctcctttgttatccccagtatacaacaaatgctaaggtcactccacccccacgacgccagaatgaagaggtgtctatctcattggattttacttatccctcattggaagaatcaattccttctaaacctgctgcccagacgccacctgcatctatagaagtagatgaaaatatagaattgataagtggtcaaaatgagagaatgggaccactgaatatatcaactccagttgaaccagttgctgcttctaaatctgatgtttcacccataattcagccagtgcctagtataaagaatgttccacagattgatcgtactaaaaaaccagcagtcaaattgcctgaagagcatagaataaaatctgaaagtacaaaccatgagcaacaatctcctcagagtggaaaagttattcctgatcgttccaccaagccagtagttttttctccaactctcatgttaacagatgaagaaaaggctcgtattcatgcagaaactgctcttctaatggaaaaaaacaaacaagaaaaagaacttcgggaaaggcagcaagaggaacagaaagagaaactgaggaaggaagaacaagaacaaaaagccaaaaagaaacaagaagctgaagaaaatgaaattacagagaagcaacaaaaagcaaaagaagaaatggagaagaaagaaagtgaacaggccaagaaagaagataaagaaacctcagcaaagaggggcaaagaaataacaggagtaaaaagacaaagtaaaagtgaacatgaaacttctgatgccaagaaatctgtagaagatagggggaaaaggtgtccaaccccagaaatacagaaaaagtcaacaggagatgtgccccatacatctgtgacaggggattcaggttcaggcaagccatttaagattaaaggacaaccagaaagtggaattctaaggacaggaacttttagagaggatacagacgataccgaaagaaataaagctcaacgagaacctttgacaagagcacgaagtgaagaaatggggaggatcgtaccaggactgccttcaggctgggccaagtttcttgacccaatcactggaacctttcgttattatcattcacccaccaacactgttcatatgtacccaccggaaatggctccttcatctgcacctccttccacccctccaactcataaagccaagccacagattcctgctgagcgggatagggaaccttccaaactgaagcgctcctactcctccccagatataacccaggctattcaagaggaagagaagaggaagccaacagtaactccaacagttaatcgggaaaacaagtcaaatttgttggggcataaaggtgaagtggcagaagaatttggtataatcatgaaagccctgtggacaggacagtatagatatatcagtccaaaggactttaaaatcaccattgggaagatcaatgaccagtttgcaggatacagtcagcaagattcacaagaattgcttctgttcctaatggatggtctccatgaagatctaaataaagctgataatcggaagagatataaagaagaaaataatgatcatctcgatgactttaaagctgcagaacatgcctggcagaaacacaagcagctcaatgagtctattattgttgcactttttcagggtcaattcaaatctacagtacagtgcctcacatgtcacaaaaagtctaggacatttgaggccttcatgtatttgtctctaccactagcatccacaagtaaatgtacattacaggattgccttagattattttccaaagaagaaaaactcacagataacaacagattttactgcagtcattgcagagctcgacgggattctctaaaaaagatagaaatctggaagttaccacctgtgcttttagtgcatctgaaacgtttttcctacgatggcaggtggaaacaaaaattacagacatctgtggacttcccgttagaaaatcttgacttgtcacagtatgttattggtccaaagaacaatttgaagaaatataatttgttttctgtttcaaatcactacggtgggctggatggaggccactacacagcctattgtaaaaatgcagcaagacaacggtggtttaagtttgatgatcatgaagtttctgatatctccgtttcttctgtgaaatcttcagcagcttatatcctcttttatacttcattgggaccacgagtaactgatgtagccacataaggagacataggttataaactagttatcttttaaaaggctcagcaacacaactcttgaaatgcttatcaggataatggtagctatagctggccatttagaggaattctaggacagtgggagctgtgttactagcactatataattccggtcagtgctgacaaataacatttaacaagtattgcagtaatcatcacttacaggtaccatttatttcaaaacaacttttttagtctgctccaaagttaaaataattaactagctaagcattattattcgactggtctaaaaactattgttatcttttttttttccttttcactgttatggccttttcacatttctaaatcccatcttgatatactatgaatactctagaatgatgtaaagcagataggaatgtatgtgtacatatttattgcatacttgcacatcaaatcgatgtacatagtttaacacgtggtccttttgtgaaacctagaactcagaggattgctttttttctttcagcctattttgagttaacttcagtgctttcttagggaaatgacagggcaaagcaatttttctgttggctttgggctgtatttgtgcactaaatctttattctaaaaaaaaaaatggaaactttaatttttttaaaacgagaatttcatttacagctacattaaaatcttaatgagaaaaataatttataaccctgtgggtgttctgtctttaatattgtattatcaaatataggacagtaaaaccatagattttatatacacacgtgctatataataacacccagagtcattctttcaagactagtattctcacatattgagaatattcattctaaatattaaagtaaaaatgccgggagtcaggcatgattgcaaagtgaactgcattataaactacatctttacagagtgatgtattaagagggttaaaggagcttataatttatttaaccgagggactcagttgctatatatatagtcagtaaaacactccatataaaaataagattctaaaagtgcttcagaaagagaccaccattagcaggctctcagggagaagatgaaaggatggggttcaaattgtgaagctgacaacttttcatgttttacaattagtctaagagaccact

SEQ ID NO: 347943 - DNA, 4434 bp, Homo sapiens
gggggtgagctgggctggcttccgtcctggtagccaaggctaattctccctcgagttcttgggagatgggcatttggcgagaaggctggcgttagtgaagcgcgcccggcgtcacggtgagtgcgggtcttgggccctagcacctgttctctgggaagtcgtccgctgtgaacgatgaacgcctttccttccaccagctgctggttaccccggagacaagctctgtccgcggagaggagtgggacaactcctaaaggcaacaacaatactcaacataaatatctgttcttgaactcctgggctcaagcagtcctcccacctcagtctcccagagtgttgggattacagctgtgaggcaccacgcccagtcagtgcactgctttttgcatggagaaagtcttgctgctactttaaaaaggaaagaagcacttgtaaggaaatatagcatccattgtgaaagtggaaaagtaaagataattcatcatgcctgctgtggcttcagttcctaaagaactctacctcagttcttcactaaaagaccttaataagaagacagaagttaaaccagagaaaataagcactaagagttatgtgcacagtgccctgaagatctttaagacagcagaagaatgcagattagatcgtgatgaggaaagggcctatgtactatatatgaaatacgtgactgtttataatcttatcaaaaaaagacctgatttcaagcaacagcaggattatttccattcaatacttggacctggaaacatcaaaaaagctgtcgaagaagctgaaagactctctgaaagccttaaattaagatatgaagaagctgaagtccggaaaaaacttgaggaaaaagacaggcaggaggaagcacagcggctacaacaaaaaaggcaggaaacaggaagagaggatggtggcacattggctaaaggctctttggagaatgttttggattccaaagacaaaacccaaaagagcaatggtgaaaagaatgaaaaatgtgagaccaaagagaaaggagcaatcacagcaaaggaactatacacaatgatgacggataaaaacatcagcttgattataatggatgctcgaagaatgcaggattatcaggattcctgtattttacattctctcagtgttcctgaagaagccatcagtccaggagtcactgctagttggattgaagcacacctgccagatgattctaaagacacatggaagaagagggggaatgtggagtatgtggtacttcttgactggtttagttctgccaaagatttacagattggaacaactctccggagtctgaaagatgcacttttcaagtgggaaagtaaaactgtcctgcgcaatgagcctttggttttagagggaggctatgaaaactggctcctttgttatccccagtatacaacaaatgctaaggtcactccacccccacgacgccagaatgaagaggtgtctatctcattggattttacttatccctcattggaagaatcaattccttctaaacctgctgcccagacgccacctgcatctatagaagtagatgaaaatatagaattgataagtggtcaaaatgagagaatgggaccactgaatatatcaactccagttgaaccagttgctgcttctaaatctgatgtttcacccataattcagccagtgcctagtataaagaatgttccacagattgatcgtactaaaaaaccagcagtcaaattgcctgaagagcatagaataaaatctgaaagtacaaaccatgagcaacaatctcctcagagtggaaaagttattcctgatcgttccaccaagccagtagttttttctccaactctcatgttaacagatgaagaaaaggctcgtattcatgcagaaactgctcttctaatggaaaaaaacaaacaagaaaaagaacttcgggaaaggcagcaagaggaacagaaagagaaactgaggaaggaagaacaagaacaaaaagccaaaaagaaacaagaagctgaagaaaatgaaattacagagaagcaacaaaaagcaaaagaagaaatggagaagaaagaaagtgaacaggccaagaaagaagataaagaaacctcagcaaagaggggcaaagaaataacaggagtaaaaagacaaagtaaaagtgaacatgaaacttctgatgccaagaaatctgtagaagatagggggaaaaggtgtccaaccccagaaatacagaaaaagtcaacaggagatgtgccccatacatctgtgacaggggattcaggttcaggcaaggctcaacgagaacctttgacaagagcacgaagtgaagaaatggggaggatcgtaccaggactgccttcaggctgggccaagtttcttgacccaatcactggaacctttcgttattatcattcacccaccaacactgttcatatgtacccaccggaaatggctccttcatctgcacctccttccacccctccaactcataaagccaagccacagattcctgctgagcgggatagggaaccttccaaactgaagcgctcctactcctccccagatataacccaggctattcaagaggaagagaagaggaagccaacagtaactccaacagttaatcgggaaaacaagccaacatgttatcctaaagctgagatctcaaggctttctgcttctcagattcggaacctcaatcctgtttttggaggttctggaccagctcttactggacttcgtaacttaggaaatacttgttatatgaactcaatattgcagtgcctatgtaacgctccacatttggctgattatttcaaccgaaactgttatcaggatgatattaacaggtcaaatttgttggggcataaaggtgaagtggcagaagaatttggtataatcatgaaagccctgtggacaggacagtatagatatatcagtccaaaggactttaaaatcaccattgggaagatcaatgaccagtttgcaggatacagtcagcaagattcacaagaattgcttctgttcctaatggatggtctccatgaagatctaaataaagctgataatcggaagagatataaagaagaaaataatgatcatctcgatgactttaaagctgcagaacatgcctggcagaaacacaagcagctcaatgagtctattattgttgcactttttcagggtcaattcaaatctacagtacagtgcctcacatgtcacaaaaagtctaggacatttgaggccttcatgtatttgtctctaccactagcatccacaagtaaatgtacattacaggattgccttagattattttccaaagaagaaaaactcacagataacaacagattttactgcagtcattgcagagctcgacgggattctctaaaaaagatagaaatctggaagttaccacctgtgcttttagtgcatctgaaacgtttttcctacgatggcaggtggaaacaaaaattacagacatctgtggacttcccgttagaaaatcttgacttgtcacagtatgttattggtccaaagaacaatttgaagaaatataatttgttttctgtttcaaatcactacggtgggctggatggaggccactacacagcctattgtaaaaatgcagcaagacaacggtggtttaagtttgatgatcatgaagtttctgatatctccgtttcttctgtgaaatcttcagcagcttatatcctcttttatacttcattgggaccacgagtaactgatgtagccacataaggagacataggttataaactagttatcttttaaaaggctcagcaacacaactcttgaaatgcttatcaggataatggtagctatagctggccatttagaggaattctaggacagtgggagctgtgttactagcactatataattccggtcagtgctgacaaataacatttaacaagtattgcagtaatcatcacttacaggtaccatttatttcaaaacaacttttttagtctgctccaaagttaaaataattaactagctaagcattattattcgactggtctaaaaactattgttatcttttttttttccttttcactgttatggccttttcacatttctaaatcccatcttgatatactatgaatactctagaatgatgtaaagcagataggaatgtatgtgtacatatttattgcatacttgcacatcaaatcgatgtacatagtttaacacgtggtccttttgtgaaacctagaactcagaggattgctttttttctttcagcctattttgagttaacttcagtgctttcttagggaaatgacagggcaaagcaatttttctgttggctttgggctgtatttgtgcactaaatctttattctaaaaaaaaaaatggaaactttaatttttttaaaacgagaatttcatttacagctacattaaaatcttaatgaga

SEQ ID NO: 347944 - DNA, 1828 bp, Homo sapiens
  misc_feature (11)..(11): n is a, c, g, or t
  misc_feature (18)..(18): n is a, c, g, or t
  misc_feature (22)..(22): n is a, c, g, or t
  misc_feature (24)..(24): n is a, c, g, or t
gactatagacnatccccnagtncnctacatgatcatctcgatgactttaaagctgcagaacatgcctggcagaaacacaagcagctcaatgagtctattattgttgcactttttcagggtcaattcaaatctacagtacagtgcctcacatgtcacaaaaagtctaggacatttgaggccttcatgtatttgtctctaccactagcatccacaagtaaatgtacattacaggattgccttagattattttccaaagaagaaaaactcacagataacaacagattttactgcagtcattgcagagctcgacgggattctctaaaaaagatagaaatctggaagttaccacctgtgcttttagtgcatctgaaacgtttttcctacgatggcaggtggaaacaaaaattacagacatctgtggacttcccgttagaaaatcttgacttgtcacagtatgttattggtccaaagaacaatttgaagaaatataatttgttttctgtttcaaatcactacggtgggctggatggaggccactacacagcctattgtaaaaatgcagcaagacaacggtggtttaagtttgatgatcatgaagtttctgatatctccgtttcttctgtgaaatcttcagcagcttatatcctcttttatacttcattgggaccacgagtaactgatgtagccacataaggagacataggttataaactagttatcttttaaaaggctcagcaacacaactcttgaaatgcttatcaggataatggtagctatagctggccatttagaggaattctaggacagtgggagctgtgttactagcactatataattccggtcagtgctgacaaataacatttaacaagtattgcagtaatcatcacttacaggtaccatttatttcaaaacaacttttttagtctgctccaaagttaaaataattaactagctaagcattattattcgactggtctaaaaactattgttatcttttttttttccttttcactgttatggccttttcacatttctaaatcccatcttgatatactatgaatactctagaatgatgtaaagcagataggaatgtatgtgtacatatttattgcatacttgcacatcaaatcgatgtacatagtttaacacgtggtccttttgtgaaacctagaactcagaggattgctttttttctttcagcctattttgagttaacttcagtgctttcttagggaaatgacagggcaaagcaatttttctgttggctttgggctgtatttgtgcactaaatctttattctaaaaaaaaaaatggaaactttaatttttttaaaacgagaatttcatttacagctacattaaaatcttaatgagaaaaataatttataaccctgtgggtgttctgtctttaatattgtattatcaaatataggacagtaaaaccatagattttatatacacacgtgctatataataacacccagagtcattctttcaagactagtattctcacatattgagaatattcattctaaatattaaagtaaaaatgccgggagtcaggcatgattgcaaagtgaactgcattataaactacatctttacagagtgatgtattaagagggttaaaggagcttataatttatttaaccgagggactcagttgctatatatatagtcagtaaaacactccatataaaaataagattctaaaagtgcttcagaaagagaccaccattagcaggctctcagggagaagatgaaaggatggggttcaaattgtgaagctgacaacttttcatgttttacaattagtctaagagaccact

SEQ ID NO: 347945 - DNA, 1874 bp, Homo sapiens
tagaaccatgacgtattagtgcgccgctgcgtccacagatcatgtaaagtgtagcataggtctgtactcgtgcttgtcctcagcgaggactccttgcgatctgtgatctagttgctttgtgagttctctaccacatagaatcaatgcccggtcgtgcaaccagagctgtccttgaactgatatccagaatggtctttcgtgagtgtcgattgactgtgcatctatcaagtcgtgtgtccaatacggatcctcgatagtcaaattgtacgctcccggcgattgccttagattattttccaaagaagaaaaactcacagataacaacagattttactgcagtcattgcagagctcgacgggattctctaaaaaagatagaaatctggaagttaccacctgtgcttttagtgcatctgaaacgtttttcctacgatggcaggtggaaacaaaaattacagacatctgtggacttcccgttagaaaatcttgacttgtcacagtatgttattggtccaaagaacaatttgaagaaatataatttgttttctgtttcaaatcactacggtgggctggatggaggccactacacagcctattgtaaaaatgcagcaagacaacggtggtttaagtttgatgatcatgaagtttctgatatctccgtttcttctgtgaaatcttcagcagcttatatcctcttttatacttcattgggaccacgagtaactgatgtagccacataaggagacataggttataaactagttatcttttaaaaggctcagcaacacaactcttgaaatgcttatcaggataatggtagctatagctggccatttagaggaattctaggacagtgggagctgtgttactagcactatataattccggtcagtgctgacaaataacatttaacaagtattgcagtaatcatcacttacaggtaccatttatttcaaaacaacttttttagtctgctccaaagttaaaataattaactagctaagcattattattcgactggtctaaaaactattgttatcttttttttttccttttcactgttatggccttttcacatttctaaatcccatcttgatatactatgaatactctagaatgatgtaaagcagataggaatgtatgtgtacatatttattgcatacttgcacatcaaatcgatgtacatagtttaacacgtggtccttttgtgaaacctagaactcagaggattgctttttttctttcagcctattttgagttaacttcagtgctttcttagggaaatgacagggcaaagcaatttttctgttggctttgggctgtatttgtgcactaaatctttattctaaaaaaaaaaatggaaactttaatttttttaaaacgagaatttcatttacagctacattaaaatcttaatgagaaaaataatttataaccctgtgggtgttctgtctttaatattgtattatcaaatataggacagtaaaaccatagattttatatacacacgtgctatataataacacccagagtcattctttcaagactagtattctcacatattgagaatattcattctaaatattaaagtaaaaatgccgggagtcaggcatgattgcaaagtgaactgcattataaactacatctttacagagtgatgtattaagagggttaaaggagcttataatttatttaaccgagggactcagttgctatatatatagtcagtaaaacactccatataaaaataagattctaaaagtgcttcagaaagagaccaccattagcaggctctcagggagaagatgaaaggatggggttcaaattgtgaagctgacaacttttcatgttttacaattagtctaagagaccact

SEQ ID NO: 347946 - DNA, 623 bp, Homo sapiens
ccaggcgactctagaggatccgggctccacttggttgcacaaggttgcagccggagccgcccagctcaccgagagcctagttccggccagggtcgccccggcaaccacgagcccagccaatcagcgccccggactgcaccagagccatggtcggcagaagagcactgatcgtactggctcactcagagaggacgtccttcaactatgccatgaaggaggctgctgcagcggctttgaagaagaaaggatgggaggtggtggagtcggacctctatgccatgaacttcaatcccatcatttccagaaaggacatcacaggtaaactgaaggaccctgcgaactttcagtatcctgccgagtctgttctggcttataaagaaggccatctgagcccagatattgtggctgaacaaaagaagctggaagccgcagaccttgtgatattccaggtatggggggacatcggaaggggtgtcagggacatttgcgtgcttattgtcctagacatgtacctaattagctatgagatcttaaacagttacccactttactgcattctctgcaaataagggtgattactttaaaggtgcagtattacatggatttcacagatattgggaatc

SEQ ID NO: 347947 - DNA, 1106 bp, Homo sapiens
ccaggcgactctagaggatccgggctccacttggttgcacaaggttgcagccggagccgcccagctcaccgagagcctagttccggccagggtcgccccggcaaccacgagcccagccaatcagcgccccggactgcaccagagccatggtcggcagaagagcactgatcgtactggctcactcagagaggacgtccttcaactatgccatgaaggaggctgctgcagcggctttgaagaagaaaggatgggaggtggtggagtcggacctctatgccatgaacttcaatcccatcatttccagaaaggacatcacaggtaaactgaaggaccctgcgaactttcagtatcctgccgagtctgttctggcttataaagaaggccatctgagcccagatattgtggctgaacaaaagaagctggaagccgcagaccttgtgatattccagttccccctgcagtggtttggagtccctgccattctgaaaggctggtttgagcgagtgttcataggagagtttgcttacacttacgctgccatgtatgacaaaggacccttccggagtaagaaggcagtgctttccatcaccactggtggcagtggctccatgtactctctgcaagggatccacggggacatgaatgtcattctctggccaattcagagtggcattctgcatttctgtggcttccaagtcttagaacctcaactgacatatagcattgggcacactccagcagacgcccgaattcaaatcctggaaggatggaagaaacgcctggagaatatttgggatgagacaccactgtattttgctccaagcagcctctttgacctaaacttccaggcaggattcttaatgaaaaaagaggtacaggatgaggagaaaaacaagaaatttggcctttctgtgggccatcacttgggcaagtccatcccaactgacaaccagatcaaagctagaaaatgagattccttagcctggatttccttctaacatgttatcaaatctgggtatctttccaggcttccctgacttgctttagtttttaagatttgtgtttttctttttccacaaggaataaatgagagggaatcgactgta

SEQ ID NO: 347948 - DNA, 1727 bp, Homo sapiens
  misc_feature (1557)..(1557): n is a, c, g, or t
  misc_feature (1559)..(1559): n is a, c, g, or t
  misc_feature (1563)..(1563): n is a, c, g, or t
ccgcccttgtaggctgtccacctcaaacgggccggacaggatatataagagagaatgcaccgtgcactacacacgcgactcccacaacacaaggttgcagccggagccgcccagctcaccgagagcctagttccggccagggtcgccccggcaaccacgagcccagccaatcagcgccccggactgcaccagagccatggtcggcagaagagcactgatcgtactggctcactcagagaggacgtccttcaactatgccatgaaggaggctgctgcagcggctttgaagaagaaaggatgggaggtggtggagtcggacctctatgccatgaacttcaatcccatcatttccagaaaggacatcacaggtaaactgaaggaccctgcgaactttcagtatcctgccgagtctgttctggcttataaagaaggccatctgagcccagatattgtggctgaacaaaagaagctggaagccgcagaccttgtgatattccagttccccctgcagtggtttggagtccctgccattctgaaaggctggtttgagcgagtgttcataggagagtttgcttacacttacgctgccatgtatgacaaaggacccttccggagtaagaaggcagtgctttccatcaccactggtggcagtggctccatgtactctctgcaagggatccacggggacatgaatgtcattctctggccaattcagagtggcattctgcatttctgtggcttccaagtcttagaacctcaactgacatatagcattgggcacactccagcagacgcccgaattcaaatcctggaaggatggaagaaacgcctggagaatatttgggatgagacaccactgtattttgctccaagcagcctctttgacctaaacttccaggcaggattcttaatgaaaaaagaggtacaggatgaggagaaaaacaagaaatttggcctttctgtgggccatcacttgggcaagtccatcccaactgacaaccagatcaaagctagaaaatgagattccttagcctggatttccttctaacatgttatcaaatctgggtatctttccaggcttccctgacttgctttagtttttaagatttgtgtttttctttttccacaaggaataaatgagagggaatcgactgtattcgtgcatttttggatcatttttaactgattcttatgattactatcatggcatataaccaaaatccgactgggctcaagaggccacttagggaaagatgtagaaagatgctagaaaaatgttctttaaaggcatctacacaatttaattcctctttttagggctaaagttttagggtacagtttggctaggtatcattcaactctccaatgttctattaatcacctctctgtagtttatggcagaagggaattgctcagagaaggaaaagactgaatctacctgccctaagggacttaacttgtttggtagttagccatctaatgcttgtttatgatatttcttgctttcaattacaaagcagttactaatatgcctagcacaagtaccactcttggcangnttgnggtcatttcagtcaccgtcctgtagggagagtataattcctcttgcgcggcacccttttttcattcacacttttttggcgctgctgtcagcgcggcggtgttcgccgactgcccgtcgtctgcccctggagggccaccatgtaagggcgcggccccgcccgcgg

SEQ ID NO: 347949 - DNA, 1506 bp, Homo sapiens
ccgcccttgtaggctgtccacctcaaacgggccggacaggatatataagagagaatgcaccgtgcactacacacgcgactcccacaacacaaggttgcagccggagccgcccagctcaccgagagcctagttccggccagggtcgccccggcaaccacgagcccagccaatcagcgccccggactgcaccagagccatggtcggcagaagagcactgatcgtactggctcactcagagaggacgtccttcaactatgccatgaaggaggctgctgcagcggctttgaagaagaaaggatgggaggtggtggagtcggacctctatgccatgaacttcaatcccatcatttccagaaaggacatcacaggtaaactgaaggaccctgcgaactttcagtatcctgccgagtctgttctggcttataaagaaggccatctgagcccagatattgtggctgaacaaaagaagctggaagccgcagaccttgtgatattccagttccccctgcagtggtttggagtccctgccattctgaaaggctggtttgagcgagtgttcataggagagtttgcttacacttacgctgccatgtatgacaaaggacccttccggagtaagaaggcagtgctttccatcaccactggtggcagtggctccatgtactctctgcaagggatccacggggacatgaatgtcattctctggccaattcagagtggcattctgcatttctgtggcttccaagtcttagaacctcaactgacatatagcattgggcacactccagcagacgcccgaattcaaatcctggaaggatggaagaaacgcctggagaatatttgggatgagacaccactgtattttgctccaagcagcctctttgacctaaacttccaggcaggattcttaatgaaaaaagaggtacaggatgaggagaaaaacaagaaatttggcctttctgtgggccatcacttgggcaagtccatcccaactgacaaccagatcaaagctagaaaatgagattccttagcctggatttccttctaacatgttatcaaatctgggtatctttccaggcttccctgacttgctttagtttttaagatttgtgtttttctttttccacaaggaataaatgagagggaatcgactgtaaaaaaaaaaaaaaaaaaaaaaaaaaaaaaaaaaaaaaagggggggggcgacgcactaagaaataaccccagggagggcccgaaatgtagccgccacaccccgtcttttgtcgacagaggcgcccccaaaagggagcgcggattaaaaaggcaaaaggacgggcgcgcggtaaaaaaaacgcgcggggggcggaacaacggggccggggactctggagaaagaccgccttgcgggcgggcacaaactgcggaccaccaccccagagatataggcgccagggacaaaaacactggggggtagcggtcaacccacggataggcttcgggagagccggccacggatatggaaat

SEQ ID NO: 347950 - DNA, 1313 bp, Homo sapiens
  misc_feature (82)..(82): n is a, c, g, or t
  misc_feature (320)..(320): n is a, c, g, or t
acaattacccaccactggatttgactcagagaggacccccagaggtgtctccatcttccctatttattttcagcccttgagngttccattgtagatcaaagccaaggcccccaggaaggtgacatactcctggaagttcacctcctggtccttgttccggtccaagtcttccatcagccttgcaatttcagcatcctgcagcttcgagccaatggtgagctccttctggatcagctccttcagctccttcttgctcagggtgtgcttgtcaccctccctgccggagtacttgtggaagatggccacgaggaggccaatgntgaatccagggggcatgccatggctgagctcgtgccgaatgcagaagagcactgatcgtactggctcactcagagaggacgtccttcaactatgccatgaaggaggctgctgcagcggctttgaagaagaaaggatgggaggtggtggagtcggacctctatgccatgaacttcaatcccatcatttccagaaaggacatcacaggtaaactgaaggaccctgcgaactttcagtatcctgccgagtctgttctggcttataaagaaggccatctgagcccagatattgtggctgaacaaaagaagctggaagccgcagaccttgtgatattccagttccccctgcagtggtttggagtccctgccattctgaaaggctggtttgagcgagtgttcataggagagtttgcttacacttacgctgccatgtatgacaaaggacccttccggagtaagaaggcagtgctttccatcaccactggtggcagtggctccatgtactctctgcaagggatccacggggacatgaatgtcattctctggccaattcagagtggcattctgcatttctgtggcttccaagtcttagaacctcaactgacatatagcattgggcacactccagcagacgcccgaattcaaatcctggaaggatggaagaaacgcctggagaatatttgggatgagacaccactgtattttgctccaagcagcctctttgacctaaacttccaggcaggattcttaatgaaaaaagaggtacaggatgaggagaaaaacaagaaatttggcctttctgtgggccatcacttgggcaagtccatcccaactgacaaccagatcaaagctagaaaatgagattccttagcctggatttccttctaacatgttatcaaatctgggtatctttccaggcttccctgacttgctttagtttttaagatttgtgtttttctttttccacaaggaataaatgagagggaatcgactgta

SEQ ID NO: 347951 - DNA, 728 bp, Homo sapiens
tcgaggatctcctcatatcgaatcagatatgtggcgaaaaagaagctggaagcgcagagctgtgatattccttccccctgcagtggtttggagtccctgccattctgaaaggctggtttgagcgagtgttcataggagagtttgcttacacttacgctgccatgtatgacaaaggacccttccggagtaagaaggcagtgctttccatcaccactggtggcagtggctccatgtactctctgcaagggatccacggggacatgaatgtcattctctggccaattcagagtggcattctgcatttctgtggcttccaagtcttagaacctcaactgacatatagcattgggcacactccagcagacgcccgaattcaaatcctggaaggatggaagaaacgcctggagaatatttgggatgagacaccactgtattttgctccaagcagcctctttgacctaaacttccaggcaggattcttaatgaaaaaagaggtacaggatgaggagaaaaacaagaaatttggcctttctgtgggccatcacttgggcaagtccatcccaactgacaaccagatcaaagctagaaaatgagattccttagcctggatttccttctaacatgttatcaaatctgggtatctttccaggcttccctgacttgctttagtttttaagatttgtgtttttctttttccacaaggaataaatgagagggaatcgactgta

SEQ ID NO: 347952 - DNA, 1054 bp, Homo sapiens
ccgcccttgtaggctgtccacctcaaacgggccggacaggatatataagagagaatgcaccgtgcactacacacgcgactcccacaacacaaggttgcagccggagccgcccagctcaccgagagcctagttccggccagggtcgccccggcaaccacgagcccagccaatcagcgccccggactgcaccagagccatggtcggcagaagagcactgatcgtactggctcactcagagaggacgtccttcaactatgccatgaaggaggctgctgcagcggctttgaagaagaaaggatgggaggtggtggagtcggacctctatgccatgaacttcaatcccatcatttccagaaaggacatcacaggtaaactgaaggaccctgcgaactttcagtatcctgccgagtctgttctggcttataaagaaggccatctgagcccagatattgtggctgaacaaaagaagctggaagccgcagaccttgtgatattccagttccccctgcagtggtttggagtccctgccattctgaaaggctggtttgagcgagtgttcataggagagtttgcttacacttacgctgccatgtatgacaaaggacccttccggagtggcattctgcatttctgtggcttccaagtcttagaacctcaactgacatatagcattgggcacactccagcagacgcccgaattcaaatcctggaaggatggaagaaacgcctggagaatatttgggatgagacaccactgtattttgctccaagcagcctctttgacctaaacttccaggcaggattcttaatgaaaaaagaggtacaggatgaggagaaaaacaagaaatttggcctttctgtgggccatcacttgggcaagtccatcccaactgacaaccagatcaaagctagaaaatgagattccttagcctggatttccttctaacatgttatcaaatctgggtatctttccaggcttccctgacttgctttagtttttaagatttgtgtttttctttttccacaaggaataaatgagagggaatcgactgta

SEQ ID NO: 347953 - DNA, 1404 bp, Homo sapiens
ccgcccttgtaggctgtccacctcaaacgggccggacaggatatataagagagaatgcaccgtgcactacacacgcgactcccacaacacaaggttgcagccggagccgcccagctcaccgagagcctagttccggccagggtcgccccggcaaccacgagcccagccaatcagcgccccggactgcaccagagccatggtcggcagaagagcactgatcgtactggctcactcagagaggacgtccttcaactatgccatgaaggaggctgctgcagcggctttgaagaagaaaggatgggaggtggtggagtcggacctctatgccatgaacttcaatcccatcatttccagaaaggacatcacaggtaaactgaaggaccctgcgaactttcagtatcctgccgagtctgttctggcttataaagaaggccatctgagcccagatattgtggctgaacaaaagaagctggaagccgcagaccttgtgatattccagttccccctgcagtggtttggagtccctgccattctgaaaggctggtttgagcgagtgttcataggagagtttgcttacacttacgctgccatgtatgacaaaggacccttccggagtggcattctgcatttctgtggcttccaagtcttagaacctcaactgacatatagcattgggcacactccagcagacgcccgaattcaaatcctggaaggatggaagaaacgcctggagaatatttgggatgagacaccactgtattttgctccaagcagcctctttgacctaaacttccaggcaggattcttaatgaaaaaagaggtacaggatgaggagaaaaacaagaaatttggcctttctgtgggccatcacttgggcaagtccatcccaactgacaaccagatcaaagctagaaaatgagattccttagcctggatttccttctaacatgttatcaaatctgggtatctttccaggcttccctgacttgctttagtttttaagatttgtgtttttctttttccacaaggaataaatgagagggaatcgactgtaaaaaaaaaaaaaaaaaaaaaaaaaaaaaaaaaaaaaaagggggggggcgacgcactaagaaataaccccagggagggcccgaaatgtagccgccacaccccgtcttttgtcgacagaggcgcccccaaaagggagcgcggattaaaaaggcaaaaggacgggcgcgcggtaaaaaaaacgcgcggggggcggaacaacggggccggggactctggagaaagaccgccttgcgggcgggcacaaactgcggaccaccaccccagagatataggcgccagggacaaaaacactggggggtagcggtcaacccacggataggcttcgggagagccggccacggatatggaaat

SEQ ID NO: 347954 - DNA, 1730 bp, Homo sapiens
ccgcccttgtaggctgtccacctcaaacgggccggacaggatatataagagagaatgcaccgtgcactacacacgcgactcccacaacacaaggttgcagccggagccgcccagctcaccgagagcctagttccggccagggtcgccccggcaaccacgagcccagccaatcagcgccccggactgcaccagagccatggtcggcagaagagcactgatcgtactggctcactcagagaggacgtccttcaactatgccatgaaggaggctgctgcagcggctttgaagaagaaaggatgggaggtggtggagtcggacctctatgccatgaacttcaatcccatcatttccagaaaggacatcacaggtaaactgaaggaccctgcgaactttcagtatcctgccgagtctgttctggcttataaagaaggccatctgagcccagatattgtggctgaacaaaagaagctggaagccgcagaccttgtgatattccagagtaagaaggcagtgctttccatcaccactggtggcagtggctccatgtactctctgcaagggatccacggggacatgaatgtcattctctggccaattcagagtggcattctgcatttctgtggcttccaagtcttagaacctcaactgacatatagcattgggcacactccagcagacgcccgaattcaaatcctggaaggatggaagaaacgcctggagaatatttgggatgagacaccactgtattttgctccaagcagcctctttgacctaaacttccaggcaggattcttaatgaaaaaagaggtacaggatgaggagaaaaacaagaaatttggcctttctgtgggccatcacttgggcaagtccatcccaactgacaaccagatcaaagctagaaaatgagattccttagcctggatttccttctaacatgttatcaaatctgggtatctttccaggcttccctgacttgcttaagatatgcaagatatgagataacctataaccaccagtgcactaacatgacgagcggaaatcgagcagaagaaggaaactcaacaacaagaagaaaaaataatatgatgaagcgaaataggagataagaaaaagcagtaataaaacacaatctctaaattggtatcacgtggtccaactgaactatagtatcaacgtagtcacacacaccaggaaacaaagagaaaaaacccacgtgagacgaaacacaaaggcacgggacgagagccaaccaactaaacaaagcagaccggagggagagaccaaaacgcgcagcccagacacaggaccacagctagacacgccacaggacacaacaacggcagccaacaccacgggctagacccagccgcacccccactacacaattacgacggagcgcgagaagagaaaagaagcagagagagaaagaaaaagaaggagaaagacgaagggacaggaagagaagggggggagcgagggagagaaggagaggcaccaggacagagagaaggggcggagacagacactgcgaaacgcacgcgaagaaggggaaagaggagagaaagcgaaacgaagacgggtcggagagaagcctagcaagcagagctgagcacagagactacagaagaaactgacagcgctgcaggcgaagacaagagacacgaacgaacgcgaaggaagggagagaagcgagaacggcgggcgcggagacggggagccgagcgggagc

SEQ ID NO: 347955 - DNA, 543 bp, Homo sapiens
tgaggcctccttatcagagtgtcttactgagaagcccagaccaacttctgttgtttatagtacaactgcatggaattggttgacttacctctctgtgctttctgtatcctcagagtggcattctgcatttctgtggcttccaagtcttagaacctcaactgacatatagcattgggcacactccagcagacgcccgaattcaaatcctggaaggatggaagaaacgcctggagaatatttgggatgagacaccactgtattttgctccaagcagcctctttgacctaaacttccaggcaggattcttaatgaaaaaagaggtacaggatgaggagaaaaacaagaaatttggcctttctgtgggccatcacttgggcaagtccatcccaactgacaaccagatcaaagctagaaaatgagattccttagcctggatttccttctaacatgttatcaaatctgggtatctttccaggcttccctgacttgctttagtttttaagatttgtgtttttctttttccacaaggaataaatgagaggg

SEQ ID NO: 347956 - DNA, 1028 bp, Homo sapiens
ccgcccttgtaggctgtccacctcaaacgggccggacaggatatataagagagaatgcaccgtgcactacacacgcgactcccacaacacaaggttgcagccggagccgcccagctcaccgagagcctagttccggccagggtcgccccggcaaccacgagcccagccaatcagcgccccggactgcaccagagccatggtcggcagaagagcactgatcgtactggctcactcagagaggacgtccttcaactatgccatgaaggaggctgctgcagcggctttgaagaagaaaggatgggaggtggtggagtcggacctctatgccatgaacttcaatcccatcatttccagaaaggacatcacaggtaaactgaaggaccctgcgaactttcagtatcctgccgagtctgttctggcttataaagaaggccatctgagcccagatattgtggctgaacaaaagaagctggaagccgcagaccttgtgatattccagtttcttctccatctcctgaacttgatgtctgaaacatggtagtgccaggggttgcaacctgctgtgtggtagttgtagaagtttcatttccagaaactgcaggaggagaagaaaacaattcacactgcatttgcatatcctcattggtagacaatgcactcatcatgtgagaagtctgctggtaaactggcgattgctgaaggtttccatttgctgaagcagttgaagggaataactctgactgaatctgggcagctgcctggcagatactctgttgcatctccatcaccattgcggctgaagattccatcacttgctgttgctgctgctgctgctgctgttgattagataacgtgttttcagactgtggatgaacactttcagctcttccaggtaataaattatctggtctggtatggactgttggctctgttgaggaaaacattccagggcttacaccactctgaatttgactgacttgttgaaaaatatctgcactaagctgctcttgaacattctcattaccatc

SEQ ID NO: 347957 - DNA, 1156 bp, Homo sapiens
ccgcccttgtaggctgtccacctcaaacgggccggacaggatatataagagagaatgcaccgtgcactacacacgcgactcccacaacacaaggttgcagccggagccgcccagctcaccgagagcctagttccggccagggtcgccccggcaaccacgagcccagccaatcagcgccccggactgcaccagagccatggtcggcagaagagcactgatcgtactggctcactcagagaggacgtccttcaactatgccatgaaggaggctgctgcagcggctttgaagaagaaaggatgggaggtggtggagtcggacctctatgccatgaacttcaatcccatcatttccagaaaggacatcacaggtaaactgaaggaccctgcgaactttcagtatcctgccgagtctgttctggcttataaagaaggccatctgagcccagatattgtggctgaacaaaagaagctggaagccgcagaccttgtgatattccagttccccctgcagtggtttggagtccctgccattctgaaaggctggtttgagcgagtgttcataggagagtttgcttacacttacgctgccatgtatgacaaaggacccttccggagtaagaaggcagtgctttccatcaccactggtggcagtggctccatgtactctctgcaagggatccacggggacatgaatgtcattctctggccaattcagagtggcattctgcatttctgtggcttccaagtcttagaacctcaactgacatatagcattgggcacactccagcagacgcccgaattcaaatcctggaaggatggaagaaacgcctggagaatatttgggatgagacaccactgtattttgctccaagcagcctctttgacctaaacttccaggcaggattcttaatgaaaaaagaggtacaggatgaggagaaaaacaagaaatttggcctttctgtgggccatcacttgggcaagtccatcccaactgacaaccagatcaaagctagaaaatgagattccttagcctggatttccttctaacatgttatcaaatctgggtatctttccaggcttccctgacttgctttagtttttaagatttgtgtttttctttttccacaaggaataaatgagagggaatcgactgta

SEQ ID NO: 347958 - DNA, 1840 bp, Homo sapiens
ccgcccttgtaggctgtccacctcaaacgggccggacaggatatataagagagaatgcaccgtgcactacacacgcgactcccacaacacaaggttgcagccggagccgcccagctcaccgagagcctagttccggccagggtcgccccggcaaccacgagcccagccaatcagcgccccggactgcaccagagccatggtcggcagaagagcactgatcgtactggctcactcagagaggacgtccttcaactatgccatgaaggaggctgctgcagcggctttgaagaagaaaggatgggaggtggtggagtcggacctctatgccatgaacttcaatcccatcatttccagaaaggacatcacaggtaaactgaaggaccctgcgaactttcagtatcctgccgagtctgttctggcttataaagaaggccatctgagcccagatattgtggctgaacaaaagaagctggaagccgcagaccttgtgatattccagttccccctgcagtggtttggagtccctgccattctgaaaggctggtttgagcgagtgttcataggagagtttgcttacacttacgctgccatgtatgacaaaggacccttccggagtaagaaggcagtgctttccatcaccactggtggcagtggctccatgtactctctgcaagggatccacggggacatgaatgtcattctctggccaattcagagtggcattctgcatttctgtggcttccaagtcttagaacctcaactgacatatagcattgggcacactccagcagacgcccgaattcaaatcctggaaggatggaagaaacgcctggagaatatttgggatgagacaccactgtattttgctccaagcagcctctttgacctaaacttccaggcaggattcttaatgaaaaaagaggtacaggatgaggagaaaaacaagaaatttggcctttctgtgggccatcacttgggcaagtccatcccaactgacaaccagatcaaagctagaaaatgagattccttagcctggatttccttctaacatgttatcaaatctgggtatctttccaggcttccctgacttgctttagtttttaagatttgtgtttttctttttccacaaggaataaatgagagggaatcgactgtattcgtgcatttttggatcatttttaactgattcttatgattactatcatggcatataaccaaaatccgactgggctcaagaggccacttagggaaagatgtagaaagatgctagaaaaatgttctttaaaggcatctacacaatttaattcctctttttagggctaaagttttagggtacagtttggctaggtatcattcaactctccaatgttctattaatcacctctctgtagtttatggcagaagggaattgctcagagaaggaaaagactgaatctacctgccctaagggacttaacttgtttggtagttagccatctaatgcttgtttatgatatttcttgctttcaattacaaagcagttactaatatgcctagcacaagtaccactcttggtcagcttttgttgtttatatacagtacacagataccttgaaaggaagagctaataaatctcttctttgctgcagtcatctactttttttttaattaaaaaaaatttttttttgaagcagtcttgctctgttacccaggctggagtgcagtggtgtgatctcggctcactgcaacctctgcctcccaggttccagagaatagcttgaacccaggaggtggaggttgcagtgagccaagatcgcgccattgcactccagcctgggcgacacagcgagactccgtctcc

SEQ ID NO: 347959 - DNA, 1844 bp, Homo sapiens
ccgcccttgtaggctgtccacctcaaacgggccggacaggatatataagagagaatgcaccgtgcactacacacgcgactcccacaacacaaggttgcagccggagccgcccagctcaccgagagcctagttccggccagggtcgccccggcaaccacgagcccagccaatcagcgccccggactgcaccagagccatggtcggcagaagagcactgatcgtactggctcactcagagaggacgtccttcaactatgccatgaaggaggctgctgcagcggctttgaagaagaaaggatgggaggtggtggagtcggacctctatgccatgaacttcaatcccatcatttccagaaaggacatcacaggtaaactgaaggaccctgcgaactttcagtatcctgccgagtctgttctggcttataaagaaggccatctgagcccagatattgtggctgaacaaaagaagctggaagccgcagaccttgtgatattccagttccccctgcagtggtttggagtccctgccattctgaaaggctggtttgagcgagtgttcataggagagtttgcttacacttacgctgccatgtatgacaaaggacccttccggagtaagaaggcagtgctttccatcaccactggtggcagtggctccatgtactctctgcaagggatccacggggacatgaatgtcattctctggccaattcagagtggcattctgcatttctgtggcttccaagtcttagaacctcaactgacatatagcattgggcacactccagcagacgcccgaattcaaatcctggaaggatggaagaaacgcctggagaatatttgggatgagacaccactgtattttgctccaagcagcctctttgacctaaacttccaggcaggattcttaatgaaaaaagaggtacaggatgaggagaaaaacaagaaatttggcctttctgtgggccatcacttgggcaagtccatcccaactgacaaccagatcaaagctagaaaatgagattccttagcctggatttccttctaacatgttatcaaatctgggtatctttccaggcttccctgacttgcttaagatatgcaagatatgagataacctataaccaccagtgcactaacatgacgagcggaaatcgagcagaagaaggaaactcaacaacaagaagaaaaaataatatgatgaagcgaaataggagataagaaaaagcagtaataaaacacaatctctaaattggtatcacgtggtccaactgaactatagtatcaacgtagtcacacacaccaggaaacaaagagaaaaaacccacgtgagacgaaacacaaaggcacgggacgagagccaaccaactaaacaaagcagaccggagggagagaccaaaacgcgcagcccagacacaggaccacagctagacacgccacaggacacaacaacggcagccaacaccacgggctagacccagccgcacccccactacacaattacgacggagcgcgagaagagaaaagaagcagagagagaaagaaaaagaaggagaaagacgaagggacaggaagagaagggggggagcgagggagagaaggagaggcaccaggacagagagaaggggcggagacagacactgcgaaacgcacgcgaagaaggggaaagaggagagaaagcgaaacgaagacgggtcggagagaagcctagcaagcagagctgagcacagagactacagaagaaactgacagcgctgcaggcgaagacaagagacacgaacgaacgcgaaggaagggagagaagcgagaacggcgggcgcggagacggggagccgagcgggagc

SEQ ID NO: 347960 - DNA, 1118 bp, Homo sapiens
ccgcccttgtaggctgtccacctcaaacgggccggacaggatatataagagagaatgcaccgtgcactacacacgcgactcccacaacacaaggttgcagccggagccgcccagctcaccgagagcctagttccggccagggtcgccccggcaaccacgagcccagccaatcagcgccccggactgcaccagagccatggtcggcagaagagcactgatcgtactggctcactcagagaggacgtccttcaactatgccatgaaggaggctgctgcagcggctttgaagaagaaaggatgggaggtggtggagtcggacctctatgccatgaacttcaatcccatcatttccagaaaggacatcacaggtaaactgaaggaccctgcgaactttcagtatcctgccgagtctgttctggcttataaagaaggccatctgagcccagatattgtggctgaacttccccctgcagtggtttggagtccctgccattctgaaaggctggtttgagcgagtgttcataggagagtttgcttacacttacgctgccatgtatgacaaaggacccttccggagtaagaaggcagtgctttccatcaccactggtggcagtggctccatgtactctctgcaagggatccacggggacatgaatgtcattctctggccaattcagagtggcattctgcatttctgtggcttccaagtcttagaacctcaactgacatatagcattgggcacactccagcagacgcccgaattcaaatcctggaaggatggaagaaacgcctggagaatatttgggatgagacaccactgtattttgctccaagcagcctctttgacctaaacttccaggcaggattcttaatgaaaaaagaggtacaggatgaggagaaaaacaagaaatttggcctttctgtgggccatcacttgggcaagtccatcccaactgacaaccagatcaaagctagaaaatgagattccttagcctggatttccttctaacatgttatcaaatctgggtatctttccaggcttccctgacttgctttagtttttaagatttgtgtttttctttttccacaaggaataaatgagagggaatcgactgta

SEQ ID NO: 347961 - DNA, 1042 bp, Homo sapiens
ccgcccttgtaggctgtccacctcaaacgggccggacaggatatataagagagaatgcaccgtgcactacacacgcgactcccacaacacaaggttgcagccggagccgcccagctcaccgagagcctagttccggccagggtcgccccggcaaccacgagcccagccaatcagcgccccggactgcaccagagccatggtcggcagaagagcactgatcgtactggctcactcagagaggacgtccttcaactatgccatgaaggaggctgctgcagcggctttgaagaagaaaggatgggaggtggtggagtcggacctctatgccatgaacttcaatcccatcatttccagaaaggacatcacaggtaaactgaaggaccctgcgaactttcagtatcctgccgagtctgttctggcttataaagaaggccatctgagcccagatattgtggctgaacaaaagaagctggaagccgcagaccttgtgatattccagagtaagaaggcagtgctttccatcaccactggtggcagtggctccatgtactctctgcaagggatccacggggacatgaatgtcattctctggccaattcagagtggcattctgcatttctgtggcttccaagtcttagaacctcaactgacatatagcattgggcacactccagcagacgcccgaattcaaatcctggaaggatggaagaaacgcctggagaatatttgggatgagacaccactgtattttgctccaagcagcctctttgacctaaacttccaggcaggattcttaatgaaaaaagaggtacaggatgaggagaaaaacaagaaatttggcctttctgtgggccatcacttgggcaagtccatcccaactgacaaccagatcaaagctagaaaatgagattccttagcctggatttccttctaacatgttatcaaatctgggtatctttccaggcttccctgacttgctttagtttttaagatttgtgtttttctttttccacaaggaataaatgagagggaatcgactgta

SEQ ID NO: 347962 - DNA, 1168 bp, Homo sapiens
ccgcccttgtaggctgtccacctcaaacgggccggacaggatatataagagagaatgcaccgtgcactacacacgcgactcccacaacacaaggttgcagccggagccgcccagctcaccgagagcctagttccggccagggtcgccccggcaaccacgagcccagccaatcagcgccccggactgcaccagagccatggtcggcagaagagcactgatcgtactggctcactcagagaggacgtccttcaactatgccatgaaggaggctgctgcagcggctttgaagaagaaaggatgggaggtggtggagtcggacctctatgccatgaacttcaatcccatcatttccagaaaggacatcacaggtaaactgaaggaccctgcgaactttcagtatcctgccgagtctgttctggcttataaagaaggccatctgagcccagatattgtggctgaacaaaagaagctggaagccgcagaccttgtgatattccagttccccctgcagtggtttggagtccctgccattctgaaaggctggtttgagcgagtgttcataggagagtttgcttacacttacgctgccatgtatgacaaaggacccttccggagtaagaaggcagtgctttccatcaccactggtggcagtggctccatgtactctctgcaagggatccacggggacatgaatgtcattctctggccaattcagagtcttgctctattgcccaagctggagtgcagtggctcaatctgggctcactacaaccttcgcctcctggattcaagcgattctcctgtctcagcctcccaactagctaggattacaagcacacaccaccacgcccagctaatttttttatttttagtagagacagggttttgccatgttggccaggtaggtctcaaactcctgacctcaggtgatccactggcttggcctcccaaagtgctgggattacaggtgtgagtcaccacatctggccttgttccaattttatttaagtctagtcccaccaaaaacagtccaaaatgtctccaggccagacattaagtttgtcagatatgttccatcttgttaattcaataataatcttctagtcaacttcaatttagtagtacattataaatgaaaatatcagattaatctttttctcctcctaag

SEQ ID NO: 347963 - DNA, 843 bp, Homo sapiens
ccgcccttgtaggctgtccacctcaaacgggccggacaggatatataagagagaatgcaccgtgcactacacacgcgactcccacaacacaaggttgcagccggagccgcccagctcaccgagagcctagttccggccagggtcgccccggcaaccacgagcccagccaatcagcgccccggactgcaccagagccatggtcggcagaagagcactgatcgtactggctcactcagagaggacgtccttcaactatgccatgaaggaggctgctgcagcggctttgaagaagaaaggatgggaggtggtggagtcggacctctatgccatgaacttcaatcccatcatttccagaaaggacatcacaggtaaactgaaggaccctgcgaactttcagtatcctgccgagtctgttctggcttataaagaaggccatctgagcccagatattgtggctgaacaaaagaagctggaagccgcagaccttgtgatattccagagtaagaaggcagtgctttccatcaccactggtggcagtggctccatgtactctctgcaagggatccacggggacatgaatgtcattctctggccaattcagagtggcattctgcatttctgtggcttccaagtcttagaacctcaactgacatatagcattgggcacactccagcagacgcccgaattcaaatcctggaaggatggaagaaacgcctggagaatatttgggatgagacaccactgtattttgctccaagcagcctctttgacctaaacttccaggcaggattcttaatgaaaaaagaggtacctctggagttgggcaggcctctggagttgga

SEQ ID NO: 347964 - DNA, 327 bp, Homo sapiens
taggacgactgatttctgggagacgctctcagtagggcagagaatgtcattcagccctaccttggtaactctaaagagaggagtcctagaatctcttttttgggtttgaggacccttcatccctttgagaaactaagaaaatctagactcccagaaaaatctacacaaaaaatacaaaattgtgcatataatctgagagcagtgtaaatgttctttataattaaaaaaaatttttttttggccaggcatggtggcacacacctgtaatcccagcactttgggaggccaaggtgggtggatcacgaggtcaggagttcaagaccagcc

SEQ ID NO: 347965 - DNA, 312 bp, Homo sapiens
actctctggagcagaaagtggagtggaaaatagggaagaaggtggcaaagacaagcttgagaaggaagttttttcctctttggggactcctgcagtatatgctaaaggagcaaacttcctgtgttatgctttcctgatcaaataaataaaatataattgccctgcttctccttgattcagtttagatgggggaagccagtgagagttgctgccaaagaaccttcttattccttcagggattctatccctcagacaatccagtaggtttgagcatcgggactccagtttttagggtggagacacaatccagct

SEQ ID NO: 347966 - DNA, 867 bp, Homo sapiens
ccagctgctcgggaggctgatgcaggagaattgcttgaacccaggaggcggagattgcattgggccgagaacgtgccactgcactctagcctgggagtgacagagcgagactctgtcccaaaaagaaataatcaaccaatcaatcattgcccttcccttcccgtatttgaacccctttgtcagaggagaaaaccctgcatctcttgtgccttcccaggcctgaccctgtcttctcctcgccccaggtctgccctgcaggtgcttcacaaggcctgcgaagtggcccggaggcacaactacttccccgggggtgtagctctcatctgggctacctactatgagagctgcatcagctccgagcagagctgcatcaacgagtggaacgccatgcaggacctggagtctacgcggcccgactcccccgcgctatttgtggacaagtaagtgaggtgcctctggtgtgagcgcacccaagcccacaggcacctgcctctcccccacctgccctgtgcccgaccctgaacctgcattgggccacacctcccctggagtcccttgagtgagaaccctagctttctcagaaccagcgtttaaagcaggggtctgtgacacaggcccctgtcccatgccaaaaaaagaaaaaaaaaaaaattactgatgaatttggtgaatgcatttctggggacggggtccgtaactcccatcagactctcaaaggaatgtgtggccctttgtgtccccaactccttccagagctctgtggtctggccttttctcttcagattaccagagacttaattctcagagcctcccgctctgctctgaggagagttaggaatgtgtcctctgcttccttggatccataaa

SEQ ID NO: 347967 - DNA, 725 bp, Homo sapiens
tgtaatctcagcttctggggaggctgagacatgagaatcgcttgaacccaggaggcagaggttgcagtgagttgagatcacaccactgtactccagcctggatgacagagtgaaactgcgtctcaaaaaaaaaagaaagaagaaaatgttatatgacagtgagatccctgtccagtattctgcagaaaggggccctggagagcctatgtagaactttgggtgttgtcacagaagcattattttgtcacgaaaattctccagcagcaagcttttagcaaaagcaaggtttgagaaaagtactacgtggaattattataaaagcagtttcatcctatttgcattttacatgccatttgtccacgctaaagctttttcccctgcagtaattctttgtccattttcctgtctgaattccggtctaactgtgctctggtcttatccttcccagcttaagtgagagctttttcatggtgaaaggcgcagccctcttcttacaacagggaagcagccctcaaggccagcggagtcttcagcacccccacaagcatgcaggtgagggctctaagttgatactcttacattggagcttcttttctggacagcagaggaaacttccattgttggtgatgttgctgagtttgaaggccttagacatagtggacgcaggtttgcagtgaccagtgcaggcagaggctcagatgctctctcttgagcagaccacgcac

SEQ ID NO: 347968 - DNA, 1191 bp, Homo sapiens
acgtctgtggcgccctcgcaccgcgccgcagccatggccctggtgaccctgcagcgctcgcccacgcccagcgccgcctcctcctcggccagcaacagcgagttggaggctggcagcgaagaagatcgaaaattaaacctcagcttaagtgagagctttttcatggtgaaaggcgcagccctcttcttacaacagggaagcagccctcaaggccagcggagtcttcagcacccccacaagcatgcaggtgatctgcctcaacatcttcaggtgatgatcaaccttctgcgttgcgaagacagaatcaagctggcagtgcgcctggagagcgcctgggcggaccgggtccggtacatggtggtggtgtacagcagcgggcgccaggacaccgaggagaatatcttgctgggagtggacttttccagtaaggaaagtaaaagctgcaccattgggatggttctccgactgtggagcgacacgaaaatccaccttgatggagatggtgggttcagcgtgagcacagcaggaaggatgcacatatttaagcctgtgtctgtccaggccatgtggtctgccctgcaggtgcttcacaaggcctgcgaagtggcccggaggcacaactacttccccgggggtgtagctctcatctgggctacctactatgagagctgcatcagctccgagcagagctgcatcaacgagtggaacgccatgcaggacctggagtctacgcggcccgactcccccgcgctatttgtggacaagtaagtgaggtgcctctggtgtgagcgcacccaagcccacaggcacctgcctctcccccacctgccctgtgcccgaccctgaacctgcattgggccacacctcccctggagtcccttgagtgagaaccctagctttctcagaaccagcgtttaaagcaggggtctgtgacacaggcccctgtcccatgccaaaaaaagaaaaaaaaaaaaattactgatgaatttggtgaatgcatttctggggacggggtccgtaactcccatcagactctcaaaggaatgtgtggccctttgtgtccccaactccttccagagctctgtggtctggccttttctcttcagattaccagagacttaattctcagagcctcccgctctgctctgaggagagttaggaatgtgtcctctgcttccttggatccataaa

SEQ ID NO: 347969 - DNA, 858 bp, Homo sapiens
acgtctgtggcgccctcgcaccgcgccgcagccatggccctggtgaccctgcagcgctcgcccacgcccagcgccgcctcctcctcggccagcaacagcgagttggaggctggcagcgaagaagatcgaaaattaaacctcagcttaagtgagagctttttcatggtgaaaggcgcagccctcttcttacaacagggaagcagccctcaaggccagcggagtcttcagcacccccacaagcatgcaggtgatctgcctcaacatcttcaggtgatgatcaaccttctgcgttgcgaagacagaatcaagctggcagtgcgcctggagagcgcctgggcggaccgggtccggtacatggtggtggtgtacagcagcgggcgccaggacaccgaggagaatatcttgctgggagtggacttttccagtaaggaaagtaaaagctgcaccattgggatggttctccgactgtggagcgacacgaaaatccaccttgatggagatggtgggttcagcgtgagcacagcaggaaggatgcacatatttaagcctgtgtctgtccaggccatgtggtctgccctgcaggtgcttcacaaggcctgcgaagtggcccggaggcacaactacttccccgggggtgtagctctcatctgggctacctactatgagagctgcatcagctccgagcagagctgcatcaacgagtggaacgccatgcaggacctggagtctacgcggcccgactcccccgcgctatttgtggacaagcccactgaaggggaaaggaccgagcgcctcatcaaagccaagctccgaagcatcatgatgagccaggatctagaaaatgtgacttccaaagag

SEQ ID NO: 347970 - DNA, 1082 bp, Homo sapiens
ggtgcttgcctatgtacccccaagtacacatgtggcctccgccagcagagcaccagccctgggcagctgcctccctgctgtagagtgggcgtgcggtcagcccacactgcacccaaaagcctcagctgagcacttacggagttgtgtccacagggccatcccagacctgtgtcttctagaattcatcagtgaacggttcctatgcagacagcctactcccacacgtacgtccaacagcccgtcctggaccaggtggtgagctggaaaggctgtacacgtaggtgggtagacgctgactccacatgtcttctctcccccatcgcagtaaaagctgcaccattgggatggttctccgactgtggagcgacacgaaaatccaccttgatggagatggtgggttcagcgtgagcacagcaggaaggatgcacatatttaagcctgtgtctgtccaggccatgtggtctgccctgcaggtgcttcacaaggcctgcgaagtggcccggaggcacaactacttccccgggggtgtagctctcatctgggctacctactatgagagctgcatcagctccgagcagagctgcatcaacgagtggaacgccatgcaggacctggagtctacgcggcccgactcccccgcgctatttgtggacaagtaagtgaggtgcctctggtgtgagcgcacccaagcccacaggcacctgcctctcccccacctgccctgtgcccgaccctgaacctgcattgggccacacctcccctggagtcccttgagtgagaaccctagctttctcagaaccagcgtttaaagcaggggtctgtgacacaggcccctgtcccatgccaaaaaaagaaaaaaaaaaaaattactgatgaatttggtgaatgcatttctggggacggggtccgtaactcccatcagactctcaaaggaatgtgtggccctttgtgtccccaactccttccagagctctgtggtctggccttttctcttcagattaccagagacttaattctcagagcctcccgctctgctctgaggagagttaggaatgtgtcctctgcttccttggatccataaa

SEQ ID NO: 347971 - DNA, 416 bp, Homo sapiens
tgaggaaagggcacggctgtttagaagtagctaggtttcctggatatctttatctttttccagtaccggggtagaaaatgtgagactgccgcccgaggcgtgttgacagtggtgcctgtggtgtgatattctctttctttctctgtagttggaggctggcagcgaagaagatcgaaaattaaacctcaggtaagcagactttcaattcttgttcctaagtctttctcccaagcaggtaaggaatgctcttgttcctctcccaaagggaaaacgttcaaaaagaatatgccaattttgggctgggtgcggtgggtcacgcctgtaattccagcactttgggaggctgaggcgggtggatcacaaggtcaggagatcgagaccatcctggccaacatggtgaaaccctgtctctacta

SEQ ID NO: 347972 - DNA, 516 bp, Homo sapiens
ctcagactggtctcaaactcctgggctcaaactattttcttgccttggcctcccagattgctgggattccaggccagagccactgtgcctggcgtaagctctgcttattagtaaatagtgtgaatggatcagcagccactcaacatgcggtgcaagaagcagagttcaattctctgctcactttaaaccacttatcgaaaggaaaagatcattaatgagtgatactcagtgagtttggtggactgggttgaagtttacctttatttagcaaactctttcttcatccctagtataaattattaggggaaagacatgcctaagaggacacactatttctaggacacgtctatttatatgattggcataatcacaaatcatttctatgtaagcaatactttgtgggcataactttacctataaatagacccttcaaatcaatttttgttaactctggctatcttttacttagcctaatttgtactcaacagacttctggcaaataaacatctgaaaatt

SEQ ID NO: 347973 - DNA, 1818 bp, Homo sapiens
agtctgtcggccgacttcctgcttggggcctgggcagccacactgcacgcaggctgggccgactgaggggctcagaggccaggctctgaggcccacgcagggcctagggtgggaagatggcaggtgggggcggcgacctgagcaccaggaggctgaatgaatgtatttcaccagtagcaaatgagatgaaccatcttcctgcacacagccacgatttgcaaaggatgttcacggaagaccagggtgtagatgacaggctgctctatgacattgtattcaagcacttcaaaagaaataaggtggagatttcaaatgcaataaaaaagacatttccattcctcgagggcctccgtgatcgtgatctcatcacaaataaaatgtttgaagattctcaagattcttgtagaaacctggtccctgtacagagagtggtgtacaatgttcttagtgaactggagaagacatttaacctgccagttctggaagcactgttcagcgatgtcaacatgcaggaataccccgatttaattcacatttataaaggctttgaaaatgtaatccatgacaaattgcctctccaagaaagtgaagaagaagagagggaggagaggtctggcctccaactaagtcttgaacaaggaactggtgaaaactcttttcgaagcctgacttggccaccttcgggttccccatctcatgctggtacaaccccacctgaaaatggactctcagagcacccctgtgaaacagaacagataaatgcaaagagaaaagatacaaccagtgacaaagatgattcgctaggaagccaacaaacaaatgaacaatgtgctcaaaaggctgagccaacagagtcctgcgaacaaattgctgtccaagtgaataatggggatgctggaagggagatgccctgcccgttgccctgtgatgaagaaagcccagaggcagagctacacaaccatggaatccaaattaattcctgttctgtgcgactggtggatataaaaaaggaaaagccattttctaattcaaaagttgagtgccaagcccaagcaagaactcatcataaccaggcatctgacataatagtcatcagcagtgaggactctgaaggatccactgacgttgatgagcccttagaagtcttcatctcagcaccgagaagtgagcctgtgatcaataatgacaaccctttagaatcaaatgatgaaaaggagggccaagaagccacttgctcacgaccccagattgtaccagagcccatggatttcagaaaattatctacattcagagaaagttttaagaaaagagtgataggacaagaccacgacttttcagaatccagtgaggaggaggcgcccgcagaagcctcaagcggggcactgagaagcaagcatggtgagaaggctcctatgacttctagaagtacatctacttggagaatacccagcaggaagagacgtttcagcagtagtgacttttcagacctgagtaatggagaagagcttcaggaaacctgcagctcatccctaagaagagggtcaggtaaagaagattaggatgccaagacttggcctgcagaatgtcaggaatgtgaattaaaagctgctgtttccagacgctttttattctgagcaccttcactaccttgtatccagttcatctgggaactcctttttgcattttagaaaatggaaagaggcaggaaattatgataaactcatgtttaacagaaagagtttcactgactaaatgtatgtaattatattttgttgttgtagaagaaataaatagcaaatttgtggtattctttttttt

SEQ ID NO: 347974 - DNA, 3013 bp, Homo sapiens
agtctgtcggccgacttcctgcttggggcctgggcagccacactgcacgcaggctgggccgactgaggggctcagaggccaggctctgaggcccacgcagggcctagggtgggaagatggcaggtgggggcggcgacctgagcaccaggaggctgaatgaatgtatttcaccagtagcaaatgagatgaaccatcttcctgcacacagccacgatttgcaaaggatgttcacggaagaccagggtgtagatgacaggctgctctatgacattgtattcaagcacttcaaaagaaataaggtggagatttcaaatgcaataaaaaagacatttccattcctcgagggcctccgtgatcgtgatctcatcacaaataaaatgtttgaagattctcaagattcttgtagaaacctggtccctgtacagagagtggtgtacaatgttcttagtgaactggagaagacatttaacctgccagttctggaagcactgttcagcgatgtcaacatgcaggaataccccgatttaattcacatttataaaggctttgaaaatgtaatccatgacaaattgcctctccaagaaagtgaagaagaagagagggaggagaggtctggcctccaactaagtcttgaacaaggaactggtgaaaactcttttcgaagcctgacttggccaccttcgggttccccatctcatgctggtacaaccccacctgaaaatggactctcagagcacccctgtgaaacagaacagataaatgcaaagagaaaagatacaaccagtgacaaagatgattcgctaggaagccaacaaacaaatgaacaatgtgctcaaaaggctgagccaacagagtcctgcgaacaaattgctgtccaagtgaataatggggatgctggaagggagatgccctgcccgttgccctgtgatgaagaaagcccagaggcagagctacacaaccatggaatccaaattaattcctgttctgtgcgactggtggatataaaaaaggaaaagccattttctaattcaaaagttgagtgccaagcccaagcaagaactcatcataaccaggcatctgacataatagtcatcagcagtgaggactctgaaggatccactgacgttgatgagcccttagaagtcttcatctcagcaccgagaagtgagcctgtgatcaataatgacaaccctttagaatcaaatgatgaaaaggagggccaagaagccacttgctcacgaccccagattgtaccagagcccatggatttcagaaaattatctacattcagagaaagttttaagaaaagagtgataggacaagaccacgacttttcagaatccagtgaggaggaggcgcccgcagaagcctcaagcggggcactgagaagcaagcatggtgagaaggctcctatgacttctagaagtacatctacttggagaatacccagcaggaagagacgtttcagcagtagtgacttttcagacctgagtaatggagaagagcttcaggaaacctgcagctcatccctaagaagagggtcaggatcacagccacaagaacctgaaaataagaagtgctcctgtgtcatgtgttttccaaaaggtgtgccaagaagccaagaagcaaggactgaaagtagtcaagcatctgacatgatggataccatggatgttgaaaacaattctactttggaaaaacacagtgggaaaagaagaaaaaagagaaggcatagatctaaagtaaatggtctccaaagagggagaaagaaagacagacctagaaaacatttaactctgaataacaaagtccaaaagaaaagatggcaacaaagaggaagaaaagccaacactagacctttgaaaagaagaagaaaaagaggtccaagaattcccaaagatgaaaatattaattttaaacaatctgaacttcctgtgacctgtggtgaggtgaagggcactctatataaggagcgattcaaacaaggaacctcaaagaagtgtatacagagtgaggataaaaagtggttcactcccagggaatttgaaattgaaggagaccgcggagcatccaagaactggaagctaagtatacgctgcggtggatataccctgaaagtcctgatggagaacaaatttctgccagaaccaccaagcacaagaaaaaagagaatactggaatctcacaacaataccttagttgacccttgtccggaaaactcaaatatatgtgaggtgtgcaacaaatggggacggctgttctgctgcgacacttgtccaagatcctttcatgagcactgccacatcccatccgtggaagctaacaagaacccgtggagttgcatcttctgcaggataaagactattcaggaaagatgcccagaaagccaatcaggtcatcaggaatctgaagtcctgatgaggcagatgctgcctgaggagcagttgaaatgtgaattcctcctcttgaaggtctactgtgattcgaaaagctgctttttcgcctcagaaccgtattataacagagaggggtctcagggcccacagaagcccatgtggttaaacaaagtcaagacaagtttgaatgagcagatgtacacccgagtagaagggtttgtgcaggacatgcgtctcatctttcataaccacaaggaattttacagggaagataaattcaccagactgggaattcaagtacaggacatctttgagaagaatttcagaaacatttttgcaattcaggaaacaagcaagaacattataatgtttatttagccattcttatctcctcccttcagatcctctggcagctagctacgcaatgtgcctgtggtcccactaatctgtgactgctcctgtggaaactccacatcacaattctccaaaatttatcattgccattttaaaaccgtcttttcagctttcaataaaattcaacaccccttcatgttaaaaattctcaataagctaggtattgaggaacatatcccaaaataataagagccatttatgac

SEQ ID NO: 347975 - DNA, 607 bp, Homo sapiens
tgattttgcaattagggctaaaggattgtgggtctgtgctccatttgatagtaatctctttcccttagatgggaagagacagaaatgatcctcatagaatatttatagtccaaattctgtcaacagtgtaagcagtcataagatttatagatcttttagttagatattattgatttggttttcctttactttctagctcctatgacttctagaagtacatctacttggagaatacccagcaggaagagacgtttcagcagtagtgacttttcagacctgagtaatggagaagagcttcaggaaacctgcagctcatccctaagaagagggtcaggtaaagaagattaggatgccaagacttggcctgcagaatgtcaggaatgtgaattaaaagctgctgtttccagacgctttttattctgagcaccttcactaccttgtatccagttcatctgggaactcctttttgcattttagaaaatggaaagaggcaggaaattatgataaactcatgtttaacagaaagagtttcactgactaaatgtatgtaattatattttgttgttgtagaagaaataaatagcaaatttgtggtattctttttttt

SEQ ID NO: 347976 - DNA, 593 bp, Homo sapiens
tggccaaggcccctgtcatccaggggtgcagctgacccagtcccctactctcaaggctggagtctgacttcagtaattaggtagcatctgccagctccaggtggcctttgcattgagacctagaaggggtctttaactcctacgttacagagaccaaaaagggattaggggagaatggcaaaatccatacctcgatttctgaaataaacttctaatttcttcctgccaggaactggtgaaaactcttttcgaagcctgacttggccaccttcgggttccccatctcatgctggtttgttcctgtttactactctttgagcctctgctattcttgcccctttctggaatgtgctgtggggttgcctctttgtgttaatgattgtccagaattttcaggttttacatctacagtttttccatttctgggatttaaataacaagtccttatcctctaggttgcctaggagggtttcttcctcccacaccccttaatcacacagatctcatggaaatgttgacttatatttgacatttattataaaggatacaactcaagaagagccaagtggaagaaatgcatagggcaaagcgtg

SEQ ID NO: 347977 - DNA, 1990 bp, Homo sapiens
agtctgtcggccgacttcctgcttggggcctgggcagccacactgcacgcaggctgggccgactgaggggctcagaggccaggctctgaggcccacgcagggcctagggtgggaagatggcaggtgggggcggcgacctgagcaccaggaggctgaatgaatgtatttcaccagtagcaaatgagatgaaccatcttcctgcacacagccacgatttgcaaaggatgttcacggaagaccagggtgtagatgacaggctgctctatgacattgtattcaagcacttcaaaagaaataaggtggagatttcaaatgcaataaaaaagacatttccattcctcgagggcctccgtgatcgtgatctcatcacaaataaaatgtttgaagattctcaagattcttgtagaaacctggtccctgtacagagagtggtgtacaatgttcttagtgaactggagaagacatttaacctgccagttctggaagcactgttcagcgatgtcaacatgcaggaataccccgatttaattcacatttataaaggctttgaaaatgtaatccatgacaaattgcctctccaagaaagtgaagaagaagagagggaggagaggtctggcctccaactaagtcttgaacaaggaactggtgaaaactcttttcgaagcctgacttggccaccttcgggttccccatctcatgctggtacaaccccacctgaaaatggactctcagagcacccctgtgaaacagaacagataaatgcaaagagaaaagatacaaccagtgacaaagatgattcgctaggaagccaacaaacaaatgaacaatgtgctcaaaaggctgagccaacagagtcctgcgaacaaattgctgtccaagtgaataatggggatgctggaagggagatgccctgcccgttgccctgtgatgaagaaagcccagaggcagagctacacaaccatggaatccaaattaattcctgttctgtgcgactggtggatataaaaaaggaaaagccattttctaattcaaaagttgagtgccaagcccaagcaagaactcatcataaccaggcatctgacataatagtcatcagcagtgaggactctgaaggatccactgacgttgatgagcccttagaagtcttcatctcagcaccgagaagtgagcctgtgatcaataatgacaaccctttagaatcaaatgatgaaaaggagggccaagaagccacttgctcacgaccccagattgtaccagagcccatggatttcagaaaattatctacattcagagaaagttttaagaaaagagtgataggacaagaccacgacttttcagaatccagtgaggaggaggcgcccgcagaagcctcaagcggggcactgagaagcaagcatggtgagaaggctcctatgacttctagaagtacatctacttggagaatacccagcaggaagagacgtttcagcagtagtgacttttcagacctgagtaatggagaagagcttcaggaaacctgcagctcatccctaagaagagggtcaggtaaagaagattaggatgccaagacttggcctgcagaatgtcaggaatgtgaattaaaagctgctgtttccagacgctttttattctgagcaccttcactaccttgtatccagttcatctgggaactcctttttgcattttagaaaatggaaagaggcaggaaattatgataaactcatgtttaacagaaagagtttcactgactaaatgtatgtaattatattttgttgttgtagaagaaataaatagcaaatttgtggtattcttttttttaaacctgctctcattcctattaacactaagatcttagatttttatagtgataaatgggttgacatcattgtcatttgtaattgtaaagcctcaaaagacaactgttcctactatgtaattatagacagaaataaaaacttcagatcaaacactctcaaacgttagtatagtt

SEQ ID NO: 347978 - DNA, 1906 bp, Homo sapiens
agtctgtcggccgacttcctgcttggggcctgggcagccacactgcacgcaggctgggccgactgaggggctcagaggccaggctctgaggcccacgcagggcctagggtgggaagatggcaggtgggggcggcgacctgagcaccaggaggctgaatgaatgtatttcaccagtagcaaatgagatgaaccatcttcctgcacacagccacgatttgcaaaggatgttcacggaagaccagggtgtagatgacaggctgctctatgacattgtattcaagcacttcaaaagaaataaggtggagatttcaaatgcaataaaaaagacatttccattcctcgagggcctccgtgatcgtgatctcatcacaaataaaatgtttgaagattctcaagattcttgtagaaacctggtccctgtacagagagtggtgtacaatgttcttagtgaactggagaagacatttaacctgccagttctggaagcactgttcagcgatgtcaacatgcaggaataccccgatttaattcacatttataaaggctttgaaaatgtaatccatgacaaattgcctctccaagaaagtgaagaagaagagagggaggagaggtctggcctccaactaagtcttgaacaaggaactggtgaaaactcttttcgaagcctgacttggccaccttcgggttccccatctcatgctggtacaaccccacctgaaaatggactctcagagcacccctgtgaaacagaacagataaatgcaaagagaaaagatacaaccagtgacaaagatgattcgctaggaagccaacaaacaaatgaacaatgtgctcaaaaggctgagccaacagagtcctgcgaacaaattgctgtccaagtgaataatggggatgctggaagggagatgccctgcccgttgccctgtgatgaagaaagcccagaggcagagctacacaaccatggaatccaaattaattcctgttctgtgcgactggtggatataaaaaaggaaaagccattttctaattcaaaagttgagtgccaagcccaagcaagaactcatcataaccaggcatctgacataatagtcatcagcagtgaggactctgaaggatccactgacgttgatgagcccttagaagtcttcatctcagcaccgagaagtgagcctgagcccatggatttcagaaaattatctacattcagagaaagttttaagaaaagagtgataggacaagaccacgacttttcagaatccagtgaggaggaggcgcccgcagaagcctcaagcggggcactgagaagcaagcatggtgagaaggctcctatgacttctagaagtacatctacttggagaatacccagcaggaagagacgtttcagcagtagtgacttttcagacctgagtaatggagaagagcttcaggaaacctgcagctcatccctaagaagagggtcaggtaaagaagattaggatgccaagacttggcctgcagaatgtcaggaatgtgaattaaaagctgctgtttccagacgctttttattctgagcaccttcactaccttgtatccagttcatctgggaactcctttttgcattttagaaaatggaaagaggcaggaaattatgataaactcatgtttaacagaaagagtttcactgactaaatgtatgtaattatattttgttgttgtagaagaaataaatagcaaatttgtggtattcttttttttaaacctgctctcattcctattaacactaagatcttagatttttatagtgataaatgggttgacatcattgtcatttgtaattgtaaagcctcaaaagacaactgttcctactatgtaattatagacagaaataaaaacttcagatcaaacactctcaaacgttagtatagtt

SEQ ID NO: 347979 - DNA, 1913 bp, Homo sapiens
aggtcagagcagcttctgagccagcagcctagggtggaagatggcggtgggggcgggaccttgagcaccaggaggctgaatgaatgtatttcaccagtagcaaatgagatgaaccatcttcctgcacacagccacgatttgcaaaggatgttcacggaagaccagggtgtagatgacaggctgctctatgacattgtattcaagcacttcaaaagaaataaggtggagatttcaaatgcaataaaaaagacatttccattcctcgagggcctccgtgatcgtgatctcatcacaaataaaatgtttgaagattctcaagattcttgtagaaacctggtccctgtacagagagtggtgtacaatgttcttagtgaactggagaagacatttaacctgccagttctggaagcactgttcagcgatgtcaacatgcaggaataccccgatttaattcacatttataaaggctttgaaaatgtaatccatgacaaattgcctctccaagaaagtgaagaagaagagagggaggagaggtctggcctccaactaagtcttgaacaaggaactggtgaaaactcttttcgaagcctgacttggccaccttcgggttccccatctcatgctggtacaaccccacctgaaaatggactctcagagcacccctgtgaaacagaacagataaatgcaaagagaaaagatacaaccagtgacaaagatgattcgctaggaagccaacaaacaaatgaacaatgtgctcaaaaggctgagccaacagagtcctgcgaacaaattgctgtccaagtgaataatggggatgctggaagggagatgccctgcccgttgccctgtgatgaagaaagcccagaggcagagctacacaaccatggaatccaaattaattcctgttctgtgcgactggtggatataaaaaaggaaaagccattttctaattcaaaagttgagtgccaagcccaagcaagaactcatcataaccaggcatctgacataatagtcatcagcagtgaggactctgaaggatccactgacgttgatgagcccttagaagtcttcatctcagcaccgagaagtgagcctgtgatcaataatgacaaccctttagaatcaaatgatgaaaaggagggccaagaagccacttgctcacgaccccagattgtaccagagcccatggatttcagaaaattatctacattcagagaaagttttaagaaaagagtgataggacaagaccacgacttttcagaatccagtgaggaggaggcgcccgcagaagcctcaagcggggcactgagaagcaagcatggtgagaaggctcctatgacttctagaagtacatctacttggagaatacccagcaggaagagacgtttcagcagtagtgacttttcagacctgagtaatggagaagagcttcaggaaacctgcagctcatccctaagaagagggtcaggtaaagaagattaggatgccaagacttggcctgcagaatgtcaggaatgtgaattaaaagctgctgtttccagacgctttttattctgagcaccttcactaccttgtatccagttcatctgggaactcctttttgcattttagaaaatggaaagaggcaggaaattatgataaactcatgtttaacagaaagagtttcactgactaaatgtatgtaattatattttgttgttgtagaagaaataaatagcaaatttgtggtattcttttttttaaacctgctctcattcctattaacactaagatcttagatttttatagtgataaatgggttgacatcattgtcatttgtaattgtaaagcctcaaaagacaactgttcctactatgtaattatagacagaaataaaaacttcagatcaaacactctcaaacgttagtatagtt

SEQ ID NO: 347980 - DNA, 3583 bp, Homo sapiens
agtctgtcggccgacttcctgcttggggcctgggcagccacactgcacgcaggctgggccgactgaggggctcagaggccaggctctgaggcccacgcagggcctagggtgggaagatggcaggtgggggcggcgacctgagcaccaggaggctgaatgaatgtatttcaccagtagcaaatgagatgaaccatcttcctgcacacagccacgatttgcaaaggatgttcacggaagaccagggtgtagatgacaggctgctctatgacattgtattcaagcacttcaaaagaaataaggtggagatttcaaatgcaataaaaaagacatttccattcctcgagggcctccgtgatcgtgatctcatcacaaataaaatgtttgaagattctcaagattcttgtagaaacctggtccctgtacagagagtggtgtacaatgttcttagtgaactggagaagacatttaacctgccagttctggaagcactgttcagcgatgtcaacatgcaggaataccccgatttaattcacatttataaaggctttgaaaatgtaatccatgacaaattgcctctccaagaaagtgaagaagaagagagggaggagaggtctggcctccaactaagtcttgaacaaggaactggtgaaaactcttttcgaagcctgacttggccaccttcgggttccccatctcatgctggtacaaccccacctgaaaatggactctcagagcacccctgtgaaacagaacagataaatgcaaagagaaaagatacaaccagtgacaaagatgattcgctaggaagccaacaaacaaatgaacaatgtgctcaaaaggctgagccaacagagtcctgcgaacaaattgctgtccaagtgaataatggggatgctggaagggagatgccctgcccgttgccctgtgatgaagaaagcccagaggcagagctacacaaccatggaatccaaattaattcctgttctgtgcgactggtggatataaaaaaggaaaagccattttctaattcaaaagttgagtgccaagcccaagcaagaactcatcataaccaggcatctgacataatagtcatcagcagtgaggactctgaaggatccactgacgttgatgagcccttagaagtcttcatctcagcaccgagaagtgagcctgtgatcaataatgacaaccctttagaatcaaatgatgaaaaggagggccaagaagccacttgctcacgaccccagattgtaccagagcccatggatttcagaaaattatctacattcagagaaagttttaagaaaagagtgataggacaagaccacgacttttcagaatccagtgaggaggaggcgcccgcagaagcctcaagcggggcactgagaagcaagcatggtgagaaggctcctatgacttctagaagtacatctacttggagaatacccagcaggaagagacgtttcagcagtagtgacttttcagacctgagtaatggagaagagcttcaggaaacctgcagctcatccctaagaagagggtcaggtgtgccaagaagccaagaagcaaggactgaaagtagtcaagcatctgacatgatggataccatggatgttgaaaacaattctactttggaaaaacacagtgggaaaagaagaaaaaagagaaggcatagatctaaagtaaatggtctccaaagagggagaaagaaagacagacctagaaaacatttaactctgaataacaaagtccaaaagaaaagatggcaacaaagaggaagaaaagccaacactagacctttgaaaagaagaagaaaaagaggtccaagaattcccaaagatgaaaatattaattttaaacaatctgaacttcctgtgacctgtggtgaggtgaagggcactctatataaggagcgattcaaacaaggaacctcaaagaagtgtatacagagtgaggataaaaagtggttcactcccagggaatttgaaattgaaggagaccgcggagcatccaagaactggaagctaagtatacgctgcggtggatataccctgaaagtcctgatggagaacaaatttctgccagaaccaccaagcacaagaaaaaagagaatactggaatctcacaacaataccttagttgacccttgtgaggagcataagaagaagaacccagatgcttcagtcaagttctcagagtttttaaagaagtgctcagagacatggaagaccatttttgctaaagagaaaggaaaatttgaagatatggcaaaggcggacaaggcccattatgaaagagaaatgaaaacctatatccctcctaaaggggagaaaaaaaagaagttcaaggatcccaatgcacccaagaggcctcctttggcctttttcctgttctgctctgagtatcgcccaaaaatcaaaggagaacatcctggcctgtccattgatgatgttgtgaagaaactggcagggatgtggaataacaccgctgcagctgacaagcagttttatgaaaagaaggctgcaaagctgaaggaaaaatacaaaaaggatattgctgcatatcgagctaaaggaaagcctaattcagcaaaaaagagagttgtcaaggctgaaaaaagcaagaaaaagaaggaagaggaagaagatgaagaggatgaacaagaggaggaaaatgaagaagatgatgataaataagttgcttctagtgcagtttttttcttgtctataaagcatttaagctgcctgtacacaactcactccttttaaagaaaaaaacttcaacgtaagactgtgtaagatttgtttttaaaccgtacactgtgtttttttgtatagttaaccactaccgaatgtgtcttcagatagccctgtcctggtggtatttagccactaacctttgcctggtacagtatgggggttgtaaattggcatggaaatttaaagcaggttcttgttagtgcacagcacaaattagttgtatatgaggatggtagttttttcaccttcagttgtctctgatgtagcttatacaaaacatttgttgttctgttaactgaatgccactctgtaattgcaaaaaaaaaaaaacagttgcagctgttttgttgacattctgaatgcttctaagtaaatacaatttttaaaaaaccgtatgagggaactgtgtagacaaggtaccaggtcagtcttcttccatgtctattagctccacaaagccaatctcaatccctcaaaacaatcttgtcatacttgaaaatatgacactctagtcaaagccttggtaaaataatcagtgtttccaatctgtcctgttacaaaagaaacagattattattgaacttatgcaaataaccattgtcataagaatgtttatgaatagtttccaaattatggcaaattcatgtagagagagaaaagtaactgttttggttttgctcacaaaagtctactttacctaagggctgtcagatataagtaacttaaaagaaagagaagttttcttgacttttgaaaacaaaatatgaaaagaatcggcaatgtttcaaacaaaaagtcataaaagtcactttattcctccatca

SEQ ID NO: 347981 - DNA, 1990 bp, Homo sapiens
tggccaaggcccctgtcatccaggggtgcagctgacccagtcccctactctcaaggctggagtctgacttcagtaattaggtagcatctgccagctccaggtggcctttgcattgagacctagaaggggtctttaactcctacgttacagagaccaaaaagggattaggggagaatggcaaaatccatacctcgatttctgaaataaacttctaatttcttcctgccaggaactggtgaaaactcttttcgaagcctgacttggccaccttcgggttccccatctcatgctggtttgttcctgtttactactctttgagcctctgctattcttgcccctttctggaatgtgctgtggggttgcctctttgtgttaatgattgtccagaattttcaggttttacatctacagtttttccatttctgggatttaaataacaagtccttatcctctaggttgcctaggagggtttcttcctcccacaccccttaatcacacttgctgctggttcctgctgccgctgagcctggtcgttttacccatgtgcctgcttcaccattttctgcctgcatctgcttgaatctggctgttgccttggtgccttgaccttacgtccatcagtggcccgtgctgtagtggttggaggggagtgacaggcagcagagggcaaataaaatacctgtgaatcaaaccatggtttaggtacaaccccacctgaaaatggactctcagagcacccctgtgaaacagaacagataaatgcaaagagaaaagatacaaccagtgacaaagatgattcgctaggaagccaacaaacaaatgaacaatgtgctcaaaaggctgagccaacagagtcctgcgaacaaattgctgtccaagtgaataatggggatgctggaagggagatgccctgcccgttgccctgtgatgaagaaagcccagaggcagagctacacaaccatggaatccaaattaattcctgttctgtgcgactggtggatataaaaaaggaaaagccattttctaattcaaaagttgagtgccaagcccaagcaagaactcatcataaccaggcatctgacataatagtcatcagcagtgaggactctgaaggatccactgacgttgatgagcccttagaagtcttcatctcagcaccgagaagtgagcctgtgatcaataatgacaaccctttagaatcaaatgatgaaaaggagggccaagaagccacttgctcacgaccccagattgtaccagagcccatggatttcagaaaattatctacattcagagaaagttttaagaaaagagtgataggacaagaccacgacttttcagaatccagtgaggaggaggcgcccgcagaagcctcaagcggggcactgagaagcaagcatggtgagaaggctcctatgacttctagaagtacatctacttggagaatacccagcaggaagagacgtttcagcagtagtgacttttcagacctgagtaatggagaagagcttcaggaaacctgcagctcatccctaagaagagggtcaggtaaagaagattaggatgccaagacttggcctgcagaatgtcaggaatgtgaattaaaagctgctgtttccagacgctttttattctgagcaccttcactaccttgtatccagttcatctgggaactcctttttgcattttagaaaatggaaagaggcaggaaattatgataaactcatgtttaacagaaagagtttcactgactaaatgtatgtaattatattttgttgttgtagaagaaataaatagcaaatttgtggtattcttttttttaaacctgctctcattcctattaacactaagatcttagatttttatagtgataaatgggttgacatcattgtcatttgtaattgtaaagcctcaaaagacaactgttcctactatgtaattatagacagaaataaaaacttcagatcaaacactctcaaacgttagtatagtt

SEQ ID NO: 347982 - DNA, 1718 bp, Homo sapiens
agtctgtcggccgacttcctgcttggggcctgggcagccacactgcacgcaggctgggccgactgaggggctcagaggccaggctctgaggcccacgcagggcctagggtgggaagatggcaggtgggggcggcgacctgagcaccaggaggctgaatgaatgtatttcaccagtagcaaatgagatgaaccatcttcctgcacacagccacgatttgcaaaggatgttcacggaagaccagggtgtagatgacaggctgctctatgacattgtattcaagcacttcaaaagaaataaggtggagatttcaaatgcaataaaaaagacatttccattcctcgagggcctccgtgatcgtgatctcatcacaaataaaatgtttgaagattctcaagattcttgtagaaacctggtccctgtacagagagtggtgtacaatgttcttagtgaactggagaagacatttaacctgccagttctggaagcactgttcagcgatgtcaacatgcaggaataccccgatttaattcacatttataaaggctttgaaaatgtaatccatgacaaattgcctctccaagaaagtgaagaagaagagagggaggagaggtctggcctccaactaagtcttgaacaaggaactggtgaaaactcttttcgaagcctgacttggccaccttcgggttccccatctcatgctggtacaaccccacctgaaaatggactctcagagcacccctgtgaaacagaacagataaatgcaaagagaaaagatacaaccagtgacaaagatgattcgctaggaagccaacaaacaaatgaacaatgtgctcaaaaggctgagccaacagagtcctgcgaacaaattgctgtccaagtgaataatggggatgctggaagggagatgccctgcccgttgccctgtgatgaagaaagcccagaggcagagctacacaaccatggaatccaaattaattcctgttctgtgcgactggtggatataaaaaaggaaaagccattttctaattcaaaagttgagtgccaagcccaagcaagaactcatcataaccaggcatctgacataatagtcatcagcagtgaggactctgaaggatccactgacgttgatgagcccttagaagtcttcatctcagcaccgagaagtgagcctgtgatcaataatgacaaccctttagaatcaaatgatgaaaaggagggccaagaagccacttgctcacgaccccagattgtaccaggtaagaatattagagttgcaacccgagactgtagaatatccagagtacaaatccagagctctgttttcttgattaatttcattctgagtggtctccttatgccttgattccataaattctagaatatcactttctacatttaacctctctggccctgttgagaaatggaagacattaggaaggtgttataaactcttgtttaactggattggttcaatcgattgatacattgaaaatgtagcaaaaatatgctagtaaaataacagtctttttaacaacaaactatcaagagttattatttcaagagttgaaataatgtacttattctctactactaccctttatatttgatagagcatgataagcacagtcttcctttgttcattgataattattgtcttaatcacaagctcagaaagtcttcaaagaatactttgtgctgctatttaattattaacggc

SEQ ID NO: 347983 - DNA, 1351 bp, Homo sapiens
agtctgtcggccgacttcctgcttggggcctgggcagccacactgcacgcaggctgggccgactgaggggctcagaggccaggctctgaggcccacgcagggcctagggtgggaagatggcaggtgggggcggcgacctgagcaccaggaggctgaatgaatgtatttcaccagtagcaaatgagatgaaccatcttcctgcacacagccacgatttgcaaaggatgttcacggaagaccagggtgtagatgacaggctgctctatgacattgtattcaagcacttcaaaagaaataaggtggagatttcaaatgcaataaaaaagacatttccattcctcgagggcctccgtgatcgtgatctcatcacaaataaaatgtttgaagattctcaagattcttgtagaaacctggtccctgtacagagagtggtgtacaatgttcttagtgaactggagaagacatttaacctgccagttctggaagcactgttcagcgatgtcaacatgcaggaataccccgatttaattcacatttataaaggctttgaaaatgtaatccatgacaaattgcctctccaagaaagtgaagaagaagagagggaggagaggtctggcctccaactaagtcttgaacaaggaactggtgaaaactcttttcgaagcctgacttggccaccttcgggttccccatctcatgctggtacaaccccacctgaaaatggactctcagagcacccctgtgaaacagaacagataaatgcaaagagaaaagatacaaccagtgacaaagatgattcgctaggaagccaacaaacaaatgaacaatgtgctcaaaaggctgagccaacagagtcctgcgaacaaattgctgtccaagtgaataatggggatgctggaagggagatgccctgcccgttgccctgtgatgaagaaagcccagaggcagagctacacaaccatggaatccaaattaattcctgttctgtgcgactggtggatataaaaaaggaaaagccattttctaattcaaaagttgagtgccaagcccaagcaagaactcatcataaccaggcatctgacataataggtaaggctgactgggagagtttgtaactgtgagtcacaggttaccaggtaaggggctcagggacttcatcacggaccatcggggcagtgcaggtagcctgggatggaggcaggaagggaaaggggctggcacctgatgcagtgagtcttcagcttgacagaagaaagtccttaggagttgggaaaataccagaagacagaaatggaggtaatcagtaagaatgtcagagaggctatttctgaagtcagagagggctgggcct

SEQ ID NO: 347984 - DNA, 687 bp, Homo sapiens
acaggtcagatgatcaaagccaaagggtggcctagtggtgggactatttctccccctcctccacaagcttctcttgttcagttttgcttttaaagaattccctgctgattcctaagactcagactaagactgttaaggaattttatttttttctgcaggtttcagcagtagtgacttttcagacctgagtaatggagaagagcttcaggaaacctgcagctcatccctaagaagagggtcaggtaaagaagattaggatgccaagacttggcctgcagaatgtcaggaatgtgaattaaaagctgctgtttccagacgctttttattctgagcaccttcactaccttgtatccagttcatctgggaactcctttttgcattttagaaaatggaaagaggcaggaaattatgataaactcatgtttaacagaaagagtttcactgactaaatgtatgtaattatattttgttgttgtagaagaaataaatagcaaatttgtggtattcttttttttaaacctgctctcattcctattaacactaagatcttagatttttatagtgataaatgggttgacatcattgtcatttgtaattgtaaagcctcaaaagacaactgttcctactatgtaattatagacagaaataaaaacttcagatcaaacactctcaaacgttagtatagtt

SEQ ID NO: 347985 - DNA, 1052 bp, Homo sapiens
agtctgtcggccgacttcctgcttggggcctgggcagccacactgcacgcaggctgggccgactgaggggctcagaggccaggctctgaggcccacgcagggcctagggtgggaagatggcaggtgggggcggcgacctgagcaccaggaggctgaatgaatgtatttcaccagtagcaaatgagatgaaccatcttcctgcacacagccacgatttgcaaaggatgttcacggaagaccagggtgtagatgacaggctgctctatgacattgtattcaagcacttcaaaagaaataaggtggagatttcaaatgcaataaaaaagacatttccattcctcgagggcctccgtgatcgtgatctcatcacaaataaaatgtttgaagattctcaagattcttgtagaaacctggtccctgtacagagagtggtgtacaatgttcttagtgaactggagaagacatttaacctgccagttctggaagcactgttcagcgatgtcaacatgcaggaataccccgatttaattcacatttataaaggctttgaaaatgtaatccatgacaaattgcctctccaagaaagtgaagaagaagagagggaggagaggtctggcctccaactaagtcttgaacaaggaactggtgaaaactcttttcgaagcctgacttggccaccttcgggttccccatctcatgctggtacaaccccacctgaaaatggactctcagagcacccctgtgaaacagaacagataaatgcaaagagaaaagatacaaccagtgacaaagatgattcgctaggaagccaacaaacaaatgaacaatgtgctcaaaaggctgagccaacaggtaagactgactgggttggcatgaatggggaggagccaaggggccctggctggtggcagaggaagagtctaatgcacaatacaaggagacacctgtttaacaagcaggggaaaatcacatagacacagagggggcctgttatacagatgagcctgatacactgacatactgatgacaaagacctggaggaagaaagctag

SEQ ID NO: 347986 - DNA, 602 bp, Homo sapiens
gagaggaaggcatgggagaggagttaaaaaaaaaatcagagagccaagatattcacaagaggagatggggagggaaacacatcaagacaaagagaggtataaagagacaccatcgctggaaacagaggcagaagcaggggagatggcagaacaaagaggaaagatgagaagtaaaatgagagtgaaagaaaaaaatagaatgagggttggggtaagaacagtgtcagtggatgggcacaactgccttctgtgtgtcaattttatcagcttttggttaagaacttggaacaaactgcaggtggcatgcattcaaggaacaccccagggtcttgagttaacttagcttcctgggtcttcctagtgctctcattgtggaatttcctggtgcatggactccttggtcacaccctgagactcttaatggtttttgctcctttgtgcagtcatcagcagtgaggactctgaaggatccactgacgttgatgagcccttagaagtcttcatctcagcaccgagaagtgagcctggtaaggaagtttgggagagcaaggcttgggctgtgggaatctgatttaagagctactatttcctgaggcatttta

SEQ ID NO: 347987 - DNA, 577 bp, Homo sapiens
aaatcacatagacacagagggggcctgttatacagatgagcctgatacactgacatactgatgacaaagacctggaggaagaaagctagaagcaaaaaactgagagagaaaggggaagagttgcagagtctcaccaaagaagagagacaaacaaaaggcaaaaggagaaagtaagagagagattggacaggaatcaatgaagcacgaacaccttcacgcagcaatatatgcagacaggggtataagtagaaacaggagaagaaaggagaagcagggtgaggtctaaccaaatggaaacaggacagagcaaggctctactggatctcagctgtgatctcgtttatctccagagtcctgcgaacaaattgctgtccaagtgaataatggggatgctggaagggagatgccctgcccgttgccctgtgatgaagaaagtaattattgcttaccttgcctattttctttcctttcttattcagatgctatacatttggttggttggttggttggttgttgttttaccatcgtaaccactttttaaaattaccagattaaaagctggatgtatttatcatta

SEQ ID NO: 347988 - DNA, 3643 bp, Homo sapiens
agtctgtcggccgacttcctgcttggggcctgggcagccacactgcacgcaggctgggccgactgaggggctcagaggccaggctctgaggcccacgcagggcctagggtgggaagatggcaggtgggggcggcgacctgagcaccaggaggctgaatgaatgtatttcaccagtagcaaatgagatgaaccatcttcctgcacacagccacgatttgcaaaggatgttcacggaagaccagggtgtagatgacaggctgctctatgacattgtattcaagcacttcaaaagaaataaggtggagatttcaaatgcaataaaaaagacatttccattcctcgagggcctccgtgatcgtgatctcatcacaaataaaatgtttgaagattctcaagattcttgtagaaacctggtccctgtacagagagtggtgtacaatgttcttagtgaactggagaagacatttaacctgccagttctggaagcactgttcagcgatgtcaacatgcaggaataccccgatttaattcacatttataaaggctttgaaaatgtaatccatgacaaattgcctctccaagaaagtgaagaagaagagagggaggagaggtctggcctccaactaagtcttgaacaaggaactggtgaaaactcttttcgaagcctgacttggccaccttcgggttccccatctcatgctggtacaaccccacctgaaaatggactctcagagcacccctgtgaaacagaacagataaatgcaaagagaaaagatacaaccagtgacaaagatgattcgctaggaagccaacaaacaaatgaacaatgtgctcaaaaggctgagccaacagagtcctgcgaacaaattgctgtccaagtgaataatggggatgctggaagggagatgccctgcccgttgccctgtgatgaagaaagcccagaggcagagctacacaaccatggaatccaaattaattcctgttctgtgcgactggtggatataaaaaaggaaaagccattttctaattcaaaagttgagtgccaagcccaagcaagaactcatcataaccaggcatctgacataatagtcatcagcagtgaggactctgaaggatccactgacgttgatgagcccttagaagtcttcatctcagcaccgagaagtgagcctgtgatcaataatgacaaccctttagaatcaaatgatgaaaaggagggccaagaagccacttgctcacgaccccagattgtaccagagcccatggatttcagaaaattatctacattcagagaaagttttaagaaaagagtgataggacaagaccacgacttttcagaatccagtgaggaggaggcgcccgcagaagcctcaagcggggcactgagaagcaagcatggtgagaaggctcctatgacttctagaagtacatctacttggagaatacccagcaggaagagacgtttcagcagtagtgacttttcagacctgagtaatggagaagagcttcaggaaacctgcagctcatccctaagaagagggtcaggatcacagccacaagaacctgaaaataagaagtgctcctgtgtcatgtgttttccaaaaggtgtgccaagaagccaagaagcaaggactgaaagtagtcaagcatctgacatgatggataccatggatgttgaaaacaattctactttggaaaaacacagtgggaaaagaagaaaaaagagaaggcatagatctaaagtaaatggtctccaaagagggagaaagaaagacagacctagaaaacatttaactctgaataacaaagtccaaaagaaaagatggcaacaaagaggaagaaaagccaacactagacctttgaaaagaagaagaaaaagaggtccaagaattcccaaagatgaaaatattaattttaaacaatctgaacttcctgtgacctgtggtgaggtgaagggcactctatataaggagcgattcaaacaaggaacctcaaagaagtgtatacagagtgaggataaaaagtggttcactcccagggaatttgaaattgaaggagaccgcggagcatccaagaactggaagctaagtatacgctgcggtggatataccctgaaagtcctgatggagaacaaatttctgccagaaccaccaagcacaagaaaaaagagaatactggaatctcacaacaataccttagttgacccttgtgaggagcataagaagaagaacccagatgcttcagtcaagttctcagagtttttaaagaagtgctcagagacatggaagaccatttttgctaaagagaaaggaaaatttgaagatatggcaaaggcggacaaggcccattatgaaagagaaatgaaaacctatatccctcctaaaggggagaaaaaaaagaagttcaaggatcccaatgcacccaagaggcctcctttggcctttttcctgttctgctctgagtatcgcccaaaaatcaaaggagaacatcctggcctgtccattgatgatgttgtgaagaaactggcagggatgtggaataacaccgctgcagctgacaagcagttttatgaaaagaaggctgcaaagctgaaggaaaaatacaaaaaggatattgctgcatatcgagctaaaggaaagcctaattcagcaaaaaagagagttgtcaaggctgaaaaaagcaagaaaaagaaggaagaggaagaagatgaagaggatgaacaagaggaggaaaatgaagaagatgatgataaataagttgcttctagtgcagtttttttcttgtctataaagcatttaagctgcctgtacacaactcactccttttaaagaaaaaaacttcaacgtaagactgtgtaagatttgtttttaaaccgtacactgtgtttttttgtatagttaaccactaccgaatgtgtcttcagatagccctgtcctggtggtatttagccactaacctttgcctggtacagtatgggggttgtaaattggcatggaaatttaaagcaggttcttgttagtgcacagcacaaattagttgtatatgaggatggtagttttttcaccttcagttgtctctgatgtagcttatacaaaacatttgttgttctgttaactgaatgccactctgtaattgcaaaaaaaaaaaaacagttgcagctgttttgttgacattctgaatgcttctaagtaaatacaatttttaaaaaaccgtatgagggaactgtgtagacaaggtaccaggtcagtcttcttccatgtctattagctccacaaagccaatctcaatccctcaaaacaatcttgtcatacttgaaaatatgacactctagtcaaagccttggtaaaataatcagtgtttccaatctgtcctgttacaaaagaaacagattattattgaacttatgcaaataaccattgtcataagaatgtttatgaatagtttccaaattatggcaaattcatgtagagagagaaaagtaactgttttggttttgctcacaaaagtctactttacctaagggctgtcagatataagtaacttaaaagaaagagaagttttcttgacttttgaaaacaaaatatgaaaagaatcggcaatgtttcaaacaaaaagtcataaaagtcactttattcctccatca

SEQ ID NO: 347989 - DNA, 2295 bp, Homo sapiens
agtctgtcggccgacttcctgcttggggcctgggcagccacactgcacgcaggctgggccgactgaggggctcagaggccaggctctgaggcccacgcagggcctagggtgggaagatggcaggtgggggcggcgacctgagcaccaggaggctgaatgaatgtatttcaccagtagcaaatgagatgaaccatcttcctgcacacagccacgatttgcaaaggatgttcacggaagaccagggtgtagatgacaggctgctctatgacattgtattcaagcacttcaaaagaaataaggtggagatttcaaatgcaataaaaaagacatttccattcctcgagggcctccgtgatcgtgatctcatcacaaataaaatgtttgaagattctcaagattcttgtagaaacctggtccctgtacagagagtggtgtacaatgttcttagtgaactggagaagacatttaacctgccagttctggaagcactgttcagcgatgtcaacatgcaggaataccccgatttaattcacatttataaaggctttgaaaatgtaatccatgacaaattgcctctccaagaaagtgaagaagaagagagggaggagaggtctggcctccaactaagtcttgaacaaggaactggtgaaaactcttttcgaagcctgacttggccaccttcgggttccccatctcatgctggtacaaccccacctgaaaatggactctcagagcacccctgtgaaacagaacagataaatgcaaagagaaaagatacaaccagtgacaaagatgattcgctaggaagccaacaaacaaatgaacaatgtgctcaaaaggctgagccaacagagtcctgcgaacaaattgctgtccaagtgaataatggggatgctggaagggagatgccctgcccgttgccctgtgatgaagaaagcccagaggcagagctacacaaccatggaatccaaattaattcctgttctgtgcgactggtggatataaaaaaggaaaagccattttctaattcaaaagttgagtgccaagcccaagcaagaactcatcataaccaggcatctgacataatagtcatcagcagtgaggactctgaaggatccactgacgttgatgagcccttagaagtcttcatctcagcaccgagaagtgagcctgtgatcaataatgacaaccctttagaatcaaatgatgaaaaggagggccaagaagccacttgctcacgaccccagattgtaccagagcccatggatttcagaaaattatctacattcagagaaagttttaagaaaagagtgataggacaagaccacgacttttcagaatccagtgaggaggaggcgcccgcagaagcctcaagcggggcactgagaagcaagcatggtgagaaggctcctatgacttctagaagtacatctacttggagaatacccagcaggaagagacgtttcagcagtagtgacttttcagacctgagtaatggagaagagcttcaggaaacctgcagctcatccctaagaagagggtcaggatcacagccacaagaacctgaaaataagaagtgctcctgtgtcatgtgttttccaaaaggtgtgccaagaagccaagaagcaaggactgaaagtagtcaagcatctgacatgatggataccatggatgttgaaaacaattctactttggaaaaacacagtgggaaaagaagaaaaaagagaaggcatagatctaaagtaaatggtctccaaagagggagaaagaaagacagacctagaaaacatttaactctgaataacaaagtccaaaagaaaagatggcaacaaagaggaagaaaagccaacactagacctttgaaaagaagaagaaaaagaggtccaagaattcccaaagatgaaaatattaattttaaacaatctgaacttcctgtgacctgtggtgaggtgaagggcactctatataaggagcgattcaaacaaggaacctcaaagaagtgtatacagagtgaggataaaaagtggttcactcccagggaatttgaaattgaaggagaccgcggagcatccaagaactggaagctaagtatacgctgcggtggatataccctgaaagtcctgatggagaacaaatttctgccagaaccaccaagcacaagaaaaaaggtgatgatcaagtgatcttctgccaatgtctcgtctattatgttgttgattttctatctctgtggacttacagtctttaaattgacccatcatcataaaatttgattttataataaaaaacttttgc

SEQ ID NO: 347990 - DNA, 1915 bp, Homo sapiens
agtctgtcggccgacttcctgcttggggcctgggcagccacactgcacgcaggctgggccgactgaggggctcagaggccaggctctgaggcccacgcagggcctagggtgggaagatggcaggtgggggcggcgacctgagcaccaggatgttcacggaagaccagggtgtagatgacaggctgctctatgacattgtattcaagcacttcaaaagaaataaggtggagatttcaaatgcaataaaaaagacatttccattcctcgagggcctccgtgatcgtgatctcatcacaaataaaatgtttgaagattctcaagattcttgtagaaacctggtccctgtacagagagtggtgtacaatgttcttagtgaactggagaagacatttaacctgccagttctggaagcactgttcagcgatgtcaacatgcaggaataccccgatttaattcacatttataaaggctttgaaaatgtaatccatgacaaattgcctctccaagaaagtgaagaagaagagagggaggagaggtctggcctccaactaagtcttgaacaaggaactggtgaaaactcttttcgaagcctgacttggccaccttcgggttccccatctcatgctggtacaaccccacctgaaaatggactctcagagcacccctgtgaaacagaacagataaatgcaaagagaaaagatacaaccagtgacaaagatgattcgctaggaagccaacaaacaaatgaacaatgtgctcaaaaggctgagccaacagagtcctgcgaacaaattgctgtccaagtgaataatggggatgctggaagggagatgccctgcccgttgccctgtgatgaagaaagcccagaggcagagctacacaaccatggaatccaaattaattcctgttctgtgcgactggtggatataaaaaaggaaaagccattttctaattcaaaagttgagtgccaagcccaagcaagaactcatcataaccaggcatctgacataatagtcatcagcagtgaggactctgaaggatccactgacgttgatgagcccttagaagtcttcatctcagcaccgagaagtgagcctgtgatcaataatgacaaccctttagaatcaaatgatgaaaaggagggccaagaagccacttgctcacgaccccagattgtaccagagcccatggatttcagaaaattatctacattcagagaaagttttaagaaaagagtgataggacaagaccacgacttttcagaatccagtgaggaggaggcgcccgcagaagcctcaagcggggcactgagaagcaagcatggtgagaaggctcctatgacttctagaagtacatctacttggagaatacccagcaggaagagacgtttcagcagtagtgacttttcagacctgagtaatggagaagagcttcaggaaacctgcagctcatccctaagaagagggtcaggtaaagaagattaggatgccaagacttggcctgcagaatgtcaggaatgtgaattaaaagctgctgtttccagacgctttttattctgagcaccttcactaccttgtatccagttcatctgggaactcctttttgcattttagaaaatggaaagaggcaggaaattatgataaactcatgtttaacagaaagagtttcactgactaaatgtatgtaattatattttgttgttgtagaagaaataaatagcaaatttgtggtattcttttttttaaacctgctctcattcctattaacactaagatcttagatttttatagtgataaatgggttgacatcattgtcatttgtaattgtaaagcctcaaaagacaactgttcctactatgtaattatagacagaaataaaaacttcagatcaaacactctcaaacgttagtatagtt

SEQ ID NO: 347991 - DNA, 2400 bp, Homo sapiens
agtctgtcggccgacttcctgcttggggcctgggcagccacactgcacgcaggctgggccgactgaggggctcagaggccaggctctgaggcccacgcagggcctagggtgggaagatggcaggtgggggcggcgacctgagcaccaggaggctgaatgaatgtatttcaccagtagcaaatgagatgaaccatcttcctgcacacagccacgatttgcaaaggatgttcacggaagaccagggtgtagatgacaggctgctctatgacattgtattcaagcacttcaaaagaaataaggtggagatttcaaatgcaataaaaaagacatttccattcctcgagggcctccgtgatcgtgatctcatcacaaataaaatgtttgaagattctcaagattcttgtagaaacctggtccctgtacagagagtggtgtacaatgttcttagtgaactggagaagacatttaacctgccagttctggaagcactgttcagcgatgtcaacatgcaggaataccccgatttaattcacatttataaaggctttgaaaatgtaatccatgacaaattgcctctccaagaaagtgaagaagaagagagggaggagaggtctggcctccaactaagtcttgaacaaggaactggtgaaaactcttttcgaagcctgacttggccaccttcgggttccccatctcatgctggtttgttcctgtttactactctttgagcctctgctattcttgcccctttctggaatgtgctgtggggttgcctctttgtgttaatgattgtccagaattttcaggttttacatctacagtttttccatttctgggatttaaataacaagtccttatcctctaggttgcctaggagggtttcttcctcccacaccccttaatcacacttgctgctggttcctgctgccgctgagcctggtcgttttacccatgtgcctgcttcaccattttctgcctgcatctgcttgaatctggctgttgccttggtgccttgaccttacgtccatcagtggcccgtgctgtagtggttggaggggagtgacaggcagcagagggcaaataaaatacctgtgaatcaaaccatggtttaggtacaaccccacctgaaaatggactctcagagcacccctgtgaaacagaacagataaatgcaaagagaaaagatacaaccagtgacaaagatgattcgctaggaagccaacaaacaaatgaacaatgtgctcaaaaggctgagccaacagagtcctgcgaacaaattgctgtccaagtgaataatggggatgctggaagggagatgccctgcccgttgccctgtgatgaagaaagcccagaggcagagctacacaaccatggaatccaaattaattcctgttctgtgcgactggtggatataaaaaaggaaaagccattttctaattcaaaagttgagtgccaagcccaagcaagaactcatcataaccaggcatctgacataatagtcatcagcagtgaggactctgaaggatccactgacgttgatgagcccttagaagtcttcatctcagcaccgagaagtgagcctgtgatcaataatgacaaccctttagaatcaaatgatgaaaaggagggccaagaagccacttgctcacgaccccagattgtaccagagcccatggatttcagaaaattatctacattcagagaaagttttaagaaaagagtgataggacaagaccacgacttttcagaatccagtgaggaggaggcgcccgcagaagcctcaagcggggcactgagaagcaagcatggtgagaaggctcctatgacttctagaagtacatctacttggagaatacccagcaggaagagacgtttcagcagtagtgacttttcagacctgagtaatggagaagagcttcaggaaacctgcagctcatccctaagaagagggtcaggtaaagaagattaggatgccaagacttggcctgcagaatgtcaggaatgtgaattaaaagctgctgtttccagacgctttttattctgagcaccttcactaccttgtatccagttcatctgggaactcctttttgcattttagaaaatggaaagaggcaggaaattatgataaactcatgtttaacagaaagagtttcactgactaaatgtatgtaattatattttgttgttgtagaagaaataaatagcaaatttgtggtattcttttttttaaacctgctctcattcctattaacactaagatcttagatttttatagtgataaatgggttgacatcattgtcatttgtaattgtaaagcctcaaaagacaactgttcctactatgtaattatagacagaaataaaaacttcagatcaaacactctcaaacgttagtatagtt

SEQ ID NO: 347992 - DNA, 3499 bp, Homo sapiens
agtctgtcggccgacttcctgcttggggcctgggcagccacactgcacgcaggctgggccgactgaggggctcagaggccaggctctgaggcccacgcagggcctagggtgggaagatggcaggtgggggcggcgacctgagcaccaggaggctgaatgaatgtatttcaccagtagcaaatgagatgaaccatcttcctgcacacagccacgatttgcaaaggatgttcacggaagaccagggtgtagatgacaggctgctctatgacattgtattcaagcacttcaaaagaaataaggtggagatttcaaatgcaataaaaaagacatttccattcctcgagggcctccgtgatcgtgatctcatcacaaataaaatgtttgaagattctcaagattcttgtagaaacctggtccctgtacagagagtggtgtacaatgttcttagtgaactggagaagacatttaacctgccagttctggaagcactgttcagcgatgtcaacatgcaggaataccccgatttaattcacatttataaaggctttgaaaatgtaatccatgacaaattgcctctccaagaaagtgaagaagaagagagggaggagaggtctggcctccaactaagtcttgaacaaggaactggtgaaaactcttttcgaagcctgacttggccaccttcgggttccccatctcatgctggtacaaccccacctgaaaatggactctcagagcacccctgtgaaacagaacagataaatgcaaagagaaaagatacaaccagtgacaaagatgattcgctaggaagccaacaaacaaatgaacaatgtgctcaaaaggctgagccaacagagtcctgcgaacaaattgctgtccaagtgaataatggggatgctggaagggagatgccctgcccgttgccctgtgatgaagaaagcccagaggcagagctacacaaccatggaatccaaattaattcctgttctgtgcgactggtggatataaaaaaggaaaagccattttctaattcaaaagttgagtgccaagcccaagcaagaactcatcataaccaggcatctgacataatagtcatcagcagtgaggactctgaaggatccactgacgttgatgagcccttagaagtcttcatctcagcaccgagaagtgagcctgagcccatggatttcagaaaattatctacattcagagaaagttttaagaaaagagtgataggacaagaccacgacttttcagaatccagtgaggaggaggcgcccgcagaagcctcaagcggggcactgagaagcaagcatggtgagaaggctcctatgacttctagaagtacatctacttggagaatacccagcaggaagagacgtttcagcagtagtgacttttcagacctgagtaatggagaagagcttcaggaaacctgcagctcatccctaagaagagggtcaggtgtgccaagaagccaagaagcaaggactgaaagtagtcaagcatctgacatgatggataccatggatgttgaaaacaattctactttggaaaaacacagtgggaaaagaagaaaaaagagaaggcatagatctaaagtaaatggtctccaaagagggagaaagaaagacagacctagaaaacatttaactctgaataacaaagtccaaaagaaaagatggcaacaaagaggaagaaaagccaacactagacctttgaaaagaagaagaaaaagaggtccaagaattcccaaagatgaaaatattaattttaaacaatctgaacttcctgtgacctgtggtgaggtgaagggcactctatataaggagcgattcaaacaaggaacctcaaagaagtgtatacagagtgaggataaaaagtggttcactcccagggaatttgaaattgaaggagaccgcggagcatccaagaactggaagctaagtatacgctgcggtggatataccctgaaagtcctgatggagaacaaatttctgccagaaccaccaagcacaagaaaaaagagaatactggaatctcacaacaataccttagttgacccttgtgaggagcataagaagaagaacccagatgcttcagtcaagttctcagagtttttaaagaagtgctcagagacatggaagaccatttttgctaaagagaaaggaaaatttgaagatatggcaaaggcggacaaggcccattatgaaagagaaatgaaaacctatatccctcctaaaggggagaaaaaaaagaagttcaaggatcccaatgcacccaagaggcctcctttggcctttttcctgttctgctctgagtatcgcccaaaaatcaaaggagaacatcctggcctgtccattgatgatgttgtgaagaaactggcagggatgtggaataacaccgctgcagctgacaagcagttttatgaaaagaaggctgcaaagctgaaggaaaaatacaaaaaggatattgctgcatatcgagctaaaggaaagcctaattcagcaaaaaagagagttgtcaaggctgaaaaaagcaagaaaaagaaggaagaggaagaagatgaagaggatgaacaagaggaggaaaatgaagaagatgatgataaataagttgcttctagtgcagtttttttcttgtctataaagcatttaagctgcctgtacacaactcactccttttaaagaaaaaaacttcaacgtaagactgtgtaagatttgtttttaaaccgtacactgtgtttttttgtatagttaaccactaccgaatgtgtcttcagatagccctgtcctggtggtatttagccactaacctttgcctggtacagtatgggggttgtaaattggcatggaaatttaaagcaggttcttgttagtgcacagcacaaattagttgtatatgaggatggtagttttttcaccttcagttgtctctgatgtagcttatacaaaacatttgttgttctgttaactgaatgccactctgtaattgcaaaaaaaaaaaaacagttgcagctgttttgttgacattctgaatgcttctaagtaaatacaatttttaaaaaaccgtatgagggaactgtgtagacaaggtaccaggtcagtcttcttccatgtctattagctccacaaagccaatctcaatccctcaaaacaatcttgtcatacttgaaaatatgacactctagtcaaagccttggtaaaataatcagtgtttccaatctgtcctgttacaaaagaaacagattattattgaacttatgcaaataaccattgtcataagaatgtttatgaatagtttccaaattatggcaaattcatgtagagagagaaaagtaactgttttggttttgctcacaaaagtctactttacctaagggctgtcagatataagtaacttaaaagaaagagaagttttcttgacttttgaaaacaaaatatgaaaagaatcggcaatgtttcaaacaaaaagtcataaaagtcactttattcctccatca

SEQ ID NO: 347993 - DNA, 1502 bp, Homo sapiens
agtctgtcggccgacttcctgcttggggcctgggcagccacactgcacgcaggctgggccgactgaggggctcagaggccaggctctgaggcccacgcagggcctagggtgggaagatggcaggtgggggcggcgacctgagcaccaggaggctgaatgaatgtatttcaccagtagcaaatgagatgaaccatcttcctgcacacagccacgatttgcaaaggatgttcacggaagaccagggtgtagatgacaggctgctctatgacattgtattcaagcacttcaaaagaaataaggtggagatttcaaatgcaataaaaaagacatttccattcctcgagggcctccgtgatcgtgatctcatcacaaataaaatgtttgaagattctcaagattcttgtagaaacctggtccctgtacagagagtggtgtacaatgttcttagtgaactggagaagacatttaacctgccagttctggaagcactgttcagcgatgtcaacatgcaggaataccccgatttaattcacatttataaaggctttgaaaatgtaatccatgacaaattgcctctccaagaaagtgaagaagaagagagggaggagaggtctggcctccaactaagtcttgaacaaggaactggtgaaaactcttttcgaagcctgacttggccaccttcgggttccccatctcatgctggtacaaccccacctgaaaatggactctcagagcacccctgtgaaacagaacagataaatgcaaagagaaaagatacaaccagtgacaaagatgattcgctaggaagccaacaaacaaatgaacaatgtgctcaaaaggctgagccaacagagtcctgcgaacaaattgctgtccaagtgaataatggggatgctggaagggagatgccctgcccgttgccctgtgatgaagaaagcccagaggcagagctacacaaccatggaatccaaattaattcctgttctgtgcgactggtggatataaaaaaggaaaagccattttctaattcaaaagttgagtgccaagcccaagcaagaactcatcataaccaggcatctgacataatagtcatcagcagtgaggactctgaaggatccactgacgttgatgagcccttagaagtcttcatctcagcaccgagaagtgagcctgtgatcaataatgacaaccctttagaatcaaatgatgaaaaggagggccaagaagccacttgctcacgaccccagattgtaccagagcccatggatttcagaaaattatctacattcagagaaagttttaagaaaagagtgataggacaagaccacgacttttcagaatccagtgaggaggaggcgcccgcagaagcctcaagcggggcactgagaagcaagcatggtgagaaggctcctatgacttctagaagtacatctacttggagaatacccagcaggaagagacttaaaaaaaaaaaagaagaagaaacaatgtcatccccagcc

SEQ ID NO: 347994 - DNA, 4641 bp, Homo sapiens
tttgagtaagcaagagctgtttattcaccaacgtgttccatttggagactgtcggcgagccctggaaagcccaggcacatttgagaaggttcctggagagggagagaatcatctttccttcccccaactccccagccccaaacacacagagagactcgggtggaagctgtctggtccaggcagtccctatttgcccgccccctcaagaagaacctcacgcaccaaaccaaccgacccctcgcggaggtggtgtaattcccccaaaatgggctctgccgcaggagaggctggctccagcgccgggggcttcggaaggagtttctgccacccccactgccgccactgaccgccccgacgccacggccggggccggggaccctgataagaaatggcccttcagccccctcccctcacctggctcggtcccacctgagggcaagagcggaggcaaaaacaaacaggcagggagggctgaccttgttgctaccgacagtggagcggcgcatcctgctgcttcctggaaagcggcccgaaagacattttttccccctggaggaaggaaacgggagggcgccggccagacggcggcaggcgcggaggcgttggtccgggcgggctgtgcagcctctagtggagacggtccgaagactacatctcccaggctgctctgggccgccctgcgtcgtaaccctggcgcgcacggaggcggcgactcttacctcacaaaggtagctcctccgccggcagcaactcggcgcccgcggtccatggaccggaacctcgggccgacggacgggaacccgggccgcgatcgccgcctccccgcctcaggctcctcctcctcgctctccgccgcctccgccggactcccgcaggccctgcaccgccgccgccaggctagcggagctgccccgggaagctgggtgacgggttcgcggctgccgccggactgcggcctactccgccgcctctcagtgctattgtccctgggcctggccttgagcgggtccactggggaaggccgtgtgcgccggctccgcggaagatgccggaccaagccctacagcagatgctggacagaagttgctgggtttgttttgctactgatgaagatgatagaacagctgaatgggtgagaccatgcaggtgcagaggatctacaaaatgggttcaccaggcctgtctacaacgctgggtggatgaaaagcaaagaggaaacagtacagccagagtggcatgtcctcagtgcaatgctgaatacctaatagtttttccaaaattgggtccagtggtttacgtcttggatcttgcagatagactgatctcaaaagcctgtccatttgctgcagcaggaataatggtcggctctatctattggacagctgtgacttatggagcagtgacagtgatgcaggttgtaggtcataaagaaggtctggatgttatggagagagctgatcctttattccttttaattggacttcctactattcctgtcatgctgatattaggcaagatgattcgctgggaggactatgtgcttagactgtggcgcaaatactcgaataaactacaaattttaaatagtatatttccagggataggttgtcctgttcctcgaattccagctgaggccaatcctttagcagatcatgtctctgctactcgaatcttgtgtggagcccttgtctttcctactattgctacaatagttggtaaattgatgttcagtagtgttaactctaatttacaaaggacaatcttgggtggaattgcgtttgttgccataaaaggagcatttaaagtttacttcaaacagcagcaatatttacgacaggcacaccgcaaaattctgaattatccagaacaagaagaagcataaaactgacttctggttgttctgcagttctctcatccttatgaatctgttgtgttgttttgattccatcattaatgcacttgtggagacttgtgataagctgctgctcctatattttttaagaaatataataaagcacttagggcaggggaaatcatctcggtaatcatggaacctaaggatgtgatttgttttcattgtttgtatgtactacttttatggcagtcatatgaaccattatcttagcatggtaaacctgggttttgttcatattttctccagacagaaatgcaaagatcaaactgtgcaaatattaaaaaaatgcacatgctgttttattcaaatgcctcttttgtacatgttcatgtttagtgttttctcagaatcagcaactcaaggtactatgaggatttttctcactgacataatttgattacatactaaataagaggatatgttaatatgaggaaatgtaaattaaattagttataaataaataaccaaaaatgtatgtaaacattcaaatgattatctgaacaaatgagattttgtggtgttttctttaacccatgtgatgtcctccaaaatgtgtagggtaaaaattcacagggcttccagatcactttttcaatattaaattttatttacataatgttgacatctcatacttcatgaagtaattttgactcatgcagtcgtgtgtgtgtgtgtgtgtgtgtgtgtgtgtgtgtgtatttgtgtgtttcagtgtttcatcaggtccttccatctctgggagttttttcaacccatatttctagaaattacagctgccagtttatagtagtttgagcagaggatgatttgcaaaaataaaaataaagttattttactctcctcttgcattgattcagttattgagatattcgttgatcacctcctatttcccaggcactgtgcagagtgctgtaggacatagtggtgaacaagacagacttggtccaagctcttacagagttgacagtctagtttcagcacatagaaaaccagcagtgaataaaccaaggtgaggccttgagctctttgtttttatattaatgaggagaaaagtatgaaaacaagaagtcttaagtaaatattgaggtcattgtttttggcttaagtttattatagaaaatcaacactaatgtttttagattttaattgtcctattgatgaggctagcaccttaatcactgtttagttttgtattcatttttaaaagcaattattgaagccattttcaatagattggccattttaatgttcagcaacctgaatggttatttttgttaattaaaattaaatttttaagagatattttcaaaaccctatttattttcttgttcacagtaatgcatgtcaataataaatgtttccccttactgataagcggccactttaggagtgtagcaaatatagattgagctatgttagtttgcaataatatatgttaactttagtaattaaagactggtttctatagtatgaatgtcttaattttgagttatatgatgtttatttgaatgactgttgaacattcaaatttgtattatttggagatgaagatttgactaacagtgagccttattaagaacactactacagttctgaaggggaaatataacatctatggttatatattttaaaaacttagattataggctgtaattataaaatatattggcttttgttttcaatgtgaaagatacattaaatggacacatatcttgcaaaattttgttgtatagaacagtttttaggcagcctttactaaagttatgcaaacacacagttccccatttactacattaatgcccttgacagggagtagctgcttggttttataggtattagggctcatgaaggccggggaacaactctaatccttttggggcaggagggagggtttttttagggttgcggggagggaactgcaagtgcctgaggaccagagtggcctctagccccgaattgaacacttttaaacctaaagagccttattattattagctcgagaaataccacatgccagtcttcccaggaaggtgacctgcctgaccatgaagcaacaaaagagcataggcagacttaaagttggatagacctgggttcaaatcatagttcagctttcaataactgtatgtatgattttggctaaaggatttgactttctctcaactgcagttttcttaatctttgaaatgcaaataatgtttatctcagaagactatttctaggattaactgagagattaaaggaacagcagcacttaggctcaaaatcgcccctacaaagcagtagttgtttcttaattgctaagtaatctgtttgcactctaggaaaagtaaatggagaggtaaaagaaaggcattggggacaaatgaaagagatgatgtagatttttcggatgggtgggtatattttattttccagtttattttcatatttctttactgtgttatttctggaaactttaatgttttaaacctcttttataaaattcaatgacgactactagaattctattcttttcaaaagttaacttatctccaaagtggctgaaaatattgtttaccattacatgattatgaaatgactgtgaagaatataaaattaaacttagtgacttaattagtcactgccttgctaactttgctgtaatttttttaaacgtcttgtttttaatatagcaaactatctcaatactggctggattaggttaaataaagaatttttatgtt

SEQ ID NO: 347995 - DNA, 4748 bp, Homo sapiens
tttgagtaagcaagagctgtttattcaccaacgtgttccatttggagactgtcggcgagccctggaaagcccaggcacatttgagaaggttcctggagagggagagaatcatctttccttcccccaactccccagccccaaacacacagagagactcgggtggaagctgtctggtccaggcagtccctatttgcccgccccctcaagaagaacctcacgcaccaaaccaaccgacccctcgcggaggtggtgtaattcccccaaaatgggctctgccgcaggagaggctggctccagcgccgggggcttcggaaggagtttctgccacccccactgccgccactgaccgccccgacgccacggccggggccggggaccctgataagaaatggcccttcagccccctcccctcacctggctcggtcccacctgagggcaagagcggaggcaaaaacaaacaggcagggagggctgaccttgttgctaccgacagtggagcggcgcatcctgctgcttcctggaaagcggcccgaaagacattttttccccctggaggaaggaaacgggagggcgccggccagacggcggcaggcgcggaggcgttggtccgggcgggctgtgcagcctctagtggagacggtccgaagactacatctcccaggctgctctgggccgccctgcgtcgtaaccctggcgcgcacggaggcggcgactcttacctcacaaaggtagctcctccgccggcagcaactcggcgcccgcggtccatggaccggaacctcgggccgacggacgggaacccgggccgcgatcgccgcctccccgcctcaggctcctcctcctcgctctccgccgcctccgccggactcccgcaggccctgcaccgccgccgccaggctagcggagctgccccgggaagctgggtgacgggttcgcggctgccgccggactgcggcctactccgccgcctctcagtgctattgtccctgggcctggccttgagcgggtccactggggaaggccgtgtgcgccggctccgcggaagatgccggaccaagccctacagcagatgctggacagaagttgctgggtttgttttgctactgatgaagatgatagaacagctgaatgggtgagaccatgcaggtgcagaggatctacaaaatgggttcaccaggcctgtctacaacgctgggtggatgaaaagcaaagaggaaacagtacagccagagtggcatgtcctcagtgcaatgctgaatacctaatagtttttccaaaattgggtccagtggtttacgtcttggatcttgcagatagactgatctcaaaagcctgtccatttgctgcagcaggaataatggtcggctctatctattggacagctgtgacttatggagcagtgacagtgatgcaggttgtaggtcataaagaaggtctggatgttatggagagagctgatcctttattccttttaattggacttcctactattcctgtcatgctgatattaggcaagatgattcgctgggaggactatgtgcttagactgtggcgcaaatactcgaataaactacaaattttaaatagtatatttccagggataggttgtcctgttcctcgaattccagctgaggccaatcctttagcagatcatgtctctgctactcgaatcttgtgtggagcccttgtctttcctactattgctacaatagttggtaaattgatgttcagtagtgttaactctaatttacaaaggacaatcttgggtggaattgcgtttgttgccataaaaggagcatttaaagtttacttcaaacagcagcaatatttacgacaggcacaccgcaaaattctgaattatccagaacaagaagaagcataaaactgacttctggttgttctgcagttctctcatccttatgaatctgttgtgttgttttgattccatcattaatgcacttgtggagacttgtgataagctgctgctcctatattttttaagaaatataataaagcacttagggcaggggaaatcatctcggtaatcatggaacctaaggatgtgatttgttttcattgtttgtatgtactacttttatggcagtcatatgaaccattatcttagcatggtaaacctgggttttgttcatattttctccagacagaaatgcaaagatcaaactgtgcaaatattaaaaaaatgcacatgctgttttattcaaatgcctcttttgtacatgttcatgtttagtgttttctcagaatcagcaactcaaggtactatgaggatttttctcactgacataatttgattacatactaaataagaggatatgttaatatgaggaaatgtaaattaaattagttataaataaataaccaaaaatgtatgtaaacattcaaatgattatctgaacaaatgagattttgtggtgttttctttaacccatgtgatgtcctccaaaatgtgtagggtaaaaattcacagggcttccagatcactttttcaatattaaattttatttacataatgttgacatctcatacttcatgaagtaattttgactcatgcagtcgtgtgtgtgtgtgtgtgtgtgtgtgtgtgtgtgtgtatttgtgtgtttcagtgtttcatcaggtccttccatctctgggagttttttcaacccatatttctagaaattacagctgccagtttatagtagtttgagcagaggatgatttgcaaaaataaaaataaagttattttactctcctcttgcattgattcagttattgagatattcgttgatcacctcctatttcccaggcactgtgcagagtgctgtaggacatagtggtgaacaagacagacttggtccaagctcttacagagttgacagtctagtttcagcacatagaaaaccagcagtgaataaaccaaggtgaggccttgagctctttgtttttatattaatgaggagaaaagtatgaaaacaagaagtcttaagtaaatattgaggtcattgtttttggcttaagtttattatagaaaatcaacactaatgtttttagattttaattgtcctattgatgaggctagcaccttaatcactgtttagttttgtattcatttttaaaagcaattattgaagccattttcaatagattggccattttaatgttcagcaacctgaatggttatttttgttaattaaaattaaatttttaagagatattttcaaaaccctatttattttcttgttcacagtaatgcatgtcaataataaatgtttccccttactgataagcggccactttaggagtgtagcaaatatagattgagctatgttagtttgcaataatatatgttaactttagtaattaaagactggtttctatagtatgaatgtcttaattttgagttatatgatgtttatttgaatgactgttgaacattcaaatttgtattatttggagatgaagatttgactaacagtgagccttattaagaacactactacagttctgaaggggaaatataacatctatggttatatattttaaaaacttagattataggctgtaattataaaatatattggcttttgttttcaatgtgaaagatacattaaatggacacatatcttgcaaaattttgttgtatagaacagtttttaggcagcctttactaaagttatgcaaacacacagttccccatttactacattaatgcccttgacagggagtagctgcttggttttataggtattagggctcatgaaggccggggaacaactctaatccttttggggcaggagggagggtttttttagggttgcggggagggaactgcaagtgcctgaggaccagagtggcctctagccccgaattgaacacttttaaacctaaagagccttattattattagctcgagaaataccacatgccagtcttcccaggaaggtgacctgcctgaccatgaagcaacaaaagagcataggcagacttaaagttggatagacctgggttcaaatcatagttcagctttcaataactgtatgtatgattttggctaaaggatttgactttctctcaactgcagttttcttaatctttgaaatgcaaataatgtttatctcagaagactatttctaggattaactgagagattaaaggaacagcagcacttaggctcaaaatcgcccctacaaagcagtagttgtttcttaattgctaagtaatctgtttgcactctaggaaaagtaaatggagaggtaaaagaaaggcattggggacaaatgaaagagatgatgtagatttttcggatgggtgggtatattttattttccagtttattttcatatttctttactgtgttatttctggaaactttaatgttttaaacctcttttataaaattcaatgacgactactagaattctattcttttcaaaagttaacttatctccaaagtggctgaaaatattgtttaccattacatgattatgaaatgactgtgaagaatataaaattaaacttagtgacttaattagtcactgccttgctaactttgctgtaatttttttaaacgtcttgtttttaatatagcaaactatctcaatactggctggattaggttaaataaagaatttttatgttctctaggtgtactttgttaaatctcaaaacattctgtacatacataattttttttaatcacagttatcgagatactagtttttgtaagtaaaagtaatctgaattta

SEQ ID NO: 347996 - DNA, 4698 bp, Homo sapiens
tttgagtaagcaagagctgtttattcaccaacgtgttccatttggagactgtcggcgagccctggaaagcccaggcacatttgagaaggttcctggagagggagagaatcatctttccttcccccaactccccagccccaaacacacagagagactcgggtggaagctgtctggtccaggcagtccctatttgcccgccccctcaagaagaacctcacgcaccaaaccaaccgacccctcgcggaggtggtgtaattcccccaaaatgggctctgccgcaggagaggctggctccagcgccgggggcttcggaaggagtttctgccacccccactgccgccactgaccgccccgacgccacggccggggccggggaccctgataagaaatggcccttcagccccctcccctcacctggctcggtcccacctgagggcaagagcggaggcaaaaacaaacaggcagggagggctgaccttgttgctaccgacagtggagcggcgcatcctgctgcttcctggaaagcggcccgaaagacattttttccccctggaggaaggaaacgggagggcgccggccagacggcggcaggcgcggaggcgttggtccgggcgggctgtgcagcctctagtggagacggtccgaagactacatctcccaggctgctctgggccgccctgcgtcgtaaccctggcgcgcacggaggcggcgactcttacctcacaaaggtagctcctccgccggcagcaactcggcgcccgcggtccatggaccggaacctcgggccgacggacgggaacccgggccgcgatcgccgcctccccgcctcaggctcctcctcctcgctctccgccgcctccgccggactcccgcaggccctgcaccgccgccgccaggctagcggagctgccccgggaagctgggtgacgggttcgcggctgccgccggactgcggcctactccgccgcctctcagtgctattgtccctgggcctggccttgagcgggtccactggggaaggccgtgtgcgccggctccgcggaagatgccggaccaagccctacagcagatgctggacagaagttgctgggtttgttttgctactgatgaagatgatagaacagctgaatgggtgagaccatgcaggtgcagaggatctacaaaatgggttcaccaggcctgtctacaacgctgggtggatgaaaagcaaagaggaaacagtacagccagagtggcatgtcctcagtgcaatgctgaatacctaatagtttttccaaaattgggtccagtggtttacgtcttggatcttgcagatagactgatctcaaaagcctgtccatttgctgcagcaggaataatggtcggctctatctattggacagctgtgacttatggagcagtgacagtgatgcaggttgtaggtcataaagaaggtctggatgttatggagagagctgatcctttattccttttaattggacttcctactattcctgtcatgctgatattaggcaagatgattcgctgggaggactatgtgcttagactgtggcgcaaatactcgaataaactacaaattttaaatagtatatttccagggataggttgtcctgttcctcgaattccagctgaggccaatcctttagcagatcatgtctctgctactcgaatcttgtgtggagcccttgtctttcctactattgctacaatagttgggtggaattgcgtttgttgccataaaaggagcatttaaagtttacttcaaacagcagcaatatttacgacaggcacaccgcaaaattctgaattatccagaacaagaagaagcataaaactgacttctggttgttctgcagttctctcatccttatgaatctgttgtgttgttttgattccatcattaatgcacttgtggagacttgtgataagctgctgctcctatattttttaagaaatataataaagcacttagggcaggggaaatcatctcggtaatcatggaacctaaggatgtgatttgttttcattgtttgtatgtactacttttatggcagtcatatgaaccattatcttagcatggtaaacctgggttttgttcatattttctccagacagaaatgcaaagatcaaactgtgcaaatattaaaaaaatgcacatgctgttttattcaaatgcctcttttgtacatgttcatgtttagtgttttctcagaatcagcaactcaaggtactatgaggatttttctcactgacataatttgattacatactaaataagaggatatgttaatatgaggaaatgtaaattaaattagttataaataaataaccaaaaatgtatgtaaacattcaaatgattatctgaacaaatgagattttgtggtgttttctttaacccatgtgatgtcctccaaaatgtgtagggtaaaaattcacagggcttccagatcactttttcaatattaaattttatttacataatgttgacatctcatacttcatgaagtaattttgactcatgcagtcgtgtgtgtgtgtgtgtgtgtgtgtgtgtgtgtgtgtatttgtgtgtttcagtgtttcatcaggtccttccatctctgggagttttttcaacccatatttctagaaattacagctgccagtttatagtagtttgagcagaggatgatttgcaaaaataaaaataaagttattttactctcctcttgcattgattcagttattgagatattcgttgatcacctcctatttcccaggcactgtgcagagtgctgtaggacatagtggtgaacaagacagacttggtccaagctcttacagagttgacagtctagtttcagcacatagaaaaccagcagtgaataaaccaaggtgaggccttgagctctttgtttttatattaatgaggagaaaagtatgaaaacaagaagtcttaagtaaatattgaggtcattgtttttggcttaagtttattatagaaaatcaacactaatgtttttagattttaattgtcctattgatgaggctagcaccttaatcactgtttagttttgtattcatttttaaaagcaattattgaagccattttcaatagattggccattttaatgttcagcaacctgaatggttatttttgttaattaaaattaaatttttaagagatattttcaaaaccctatttattttcttgttcacagtaatgcatgtcaataataaatgtttccccttactgataagcggccactttaggagtgtagcaaatatagattgagctatgttagtttgcaataatatatgttaactttagtaattaaagactggtttctatagtatgaatgtcttaattttgagttatatgatgtttatttgaatgactgttgaacattcaaatttgtattatttggagatgaagatttgactaacagtgagccttattaagaacactactacagttctgaaggggaaatataacatctatggttatatattttaaaaacttagattataggctgtaattataaaatatattggcttttgttttcaatgtgaaagatacattaaatggacacatatcttgcaaaattttgttgtatagaacagtttttaggcagcctttactaaagttatgcaaacacacagttccccatttactacattaatgcccttgacagggagtagctgcttggttttataggtattagggctcatgaaggccggggaacaactctaatccttttggggcaggagggagggtttttttagggttgcggggagggaactgcaagtgcctgaggaccagagtggcctctagccccgaattgaacacttttaaacctaaagagccttattattattagctcgagaaataccacatgccagtcttcccaggaaggtgacctgcctgaccatgaagcaacaaaagagcataggcagacttaaagttggatagacctgggttcaaatcatagttcagctttcaataactgtatgtatgattttggctaaaggatttgactttctctcaactgcagttttcttaatctttgaaatgcaaataatgtttatctcagaagactatttctaggattaactgagagattaaaggaacagcagcacttaggctcaaaatcgcccctacaaagcagtagttgtttcttaattgctaagtaatctgtttgcactctaggaaaagtaaatggagaggtaaaagaaaggcattggggacaaatgaaagagatgatgtagatttttcggatgggtgggtatattttattttccagtttattttcatatttctttactgtgttatttctggaaactttaatgttttaaacctcttttataaaattcaatgacgactactagaattctattcttttcaaaagttaacttatctccaaagtggctgaaaatattgtttaccattacatgattatgaaatgactgtgaagaatataaaattaaacttagtgacttaattagtcactgccttgctaactttgctgtaatttttttaaacgtcttgtttttaatatagcaaactatctcaatactggctggattaggttaaataaagaatttttatgttctctaggtgtactttgttaaatctcaaaacattctgtacatacataattttttttaatcacagttatcgagatactagtttttgtaagtaaaagtaatctgaattta

SEQ ID NO: 347997 - DNA, 4826 bp, Homo sapiens
tttgagtaagcaagagctgtttattcaccaacgtgttccatttggagactgtcggcgagccctggaaagcccaggcacatttgagaaggttcctggagagggagagaatcatctttccttcccccaactccccagccccaaacacacagagagactcgggtggaagctgtctggtccaggcagtccctatttgcccgccccctcaagaagaacctcacgcaccaaaccaaccgacccctcgcggaggtggtgtaattcccccaaaatgggctctgccgcaggagaggctggctccagcgccgggggcttcggaaggagtttctgccacccccactgccgccactgaccgccccgacgccacggccggggccggggaccctgataagaaatggcccttcagccccctcccctcacctggctcggtcccacctgagggcaagagcggaggcaaaaacaaacaggcagggagggctgaccttgttgctaccgacagtggagcggcgcatcctgctgcttcctggaaagcggcccgaaagacattttttccccctggaggaaggaaacgggagggcgccggccagacggcggcaggcgcggaggcgttggtccgggcgggctgtgcagcctctagtggagacggtccgaagactacatctcccaggctgctctgggccgccctgcgtcgtaaccctggcgcgcacggaggcggcgactcttacctcacaaaggtagctcctccgccggcagcaactcggcgcccgcggtccatggaccggaacctcgggccgacggacgggaacccgggccgcgatcgccgcctccccgcctcaggctcctcctcctcgctctccgccgcctccgccggactcccgcaggccctgcaccgccgccgccaggctagcggagctgccccgggaagctgggtgacgggttcgcggctgccgccggactgcggcctactccgccgcctctcagtgctattgtccctgggcctggccttgagcgggtccactggggaaggccgtgtgcgccggctccgcggaagatgccggaccaagccctacagcagatgctggacaggtacgggcagctgtgggggggaccgggagccgccgaccctcgctctggccctgcccgcgcccgccctcgaggctcttgaagttgctgggtttgttttgctactgatgaagatgatagaacagctgaatgggtgagaccatgcaggtgcagaggatctacaaaatgggttcaccaggcctgtctacaacgctgggtggatgaaaagcaaagaggaaacagtacagccagagtggcatgtcctcagtgcaatgctgaatacctaatagtttttccaaaattgggtccagtggtttacgtcttggatcttgcagatagactgatctcaaaagcctgtccatttgctgcagcaggaataatggtcggctctatctattggacagctgtgacttatggagcagtgacagtgatgcaggttgtaggtcataaagaaggtctggatgttatggagagagctgatcctttattccttttaattggacttcctactattcctgtcatgctgatattaggcaagatgattcgctgggaggactatgtgcttagactgtggcgcaaatactcgaataaactacaaattttaaatagtatatttccagggataggttgtcctgttcctcgaattccagctgaggccaatcctttagcagatcatgtctctgctactcgaatcttgtgtggagcccttgtctttcctactattgctacaatagttggtaaattgatgttcagtagtgttaactctaatttacaaaggacaatcttgggtggaattgcgtttgttgccataaaaggagcatttaaagtttacttcaaacagcagcaatatttacgacaggcacaccgcaaaattctgaattatccagaacaagaagaagcataaaactgacttctggttgttctgcagttctctcatccttatgaatctgttgtgttgttttgattccatcattaatgcacttgtggagacttgtgataagctgctgctcctatattttttaagaaatataataaagcacttagggcaggggaaatcatctcggtaatcatggaacctaaggatgtgatttgttttcattgtttgtatgtactacttttatggcagtcatatgaaccattatcttagcatggtaaacctgggttttgttcatattttctccagacagaaatgcaaagatcaaactgtgcaaatattaaaaaaatgcacatgctgttttattcaaatgcctcttttgtacatgttcatgtttagtgttttctcagaatcagcaactcaaggtactatgaggatttttctcactgacataatttgattacatactaaataagaggatatgttaatatgaggaaatgtaaattaaattagttataaataaataaccaaaaatgtatgtaaacattcaaatgattatctgaacaaatgagattttgtggtgttttctttaacccatgtgatgtcctccaaaatgtgtagggtaaaaattcacagggcttccagatcactttttcaatattaaattttatttacataatgttgacatctcatacttcatgaagtaattttgactcatgcagtcgtgtgtgtgtgtgtgtgtgtgtgtgtgtgtgtgtgtatttgtgtgtttcagtgtttcatcaggtccttccatctctgggagttttttcaacccatatttctagaaattacagctgccagtttatagtagtttgagcagaggatgatttgcaaaaataaaaataaagttattttactctcctcttgcattgattcagttattgagatattcgttgatcacctcctatttcccaggcactgtgcagagtgctgtaggacatagtggtgaacaagacagacttggtccaagctcttacagagttgacagtctagtttcagcacatagaaaaccagcagtgaataaaccaaggtgaggccttgagctctttgtttttatattaatgaggagaaaagtatgaaaacaagaagtcttaagtaaatattgaggtcattgtttttggcttaagtttattatagaaaatcaacactaatgtttttagattttaattgtcctattgatgaggctagcaccttaatcactgtttagttttgtattcatttttaaaagcaattattgaagccattttcaatagattggccattttaatgttcagcaacctgaatggttatttttgttaattaaaattaaatttttaagagatattttcaaaaccctatttattttcttgttcacagtaatgcatgtcaataataaatgtttccccttactgataagcggccactttaggagtgtagcaaatatagattgagctatgttagtttgcaataatatatgttaactttagtaattaaagactggtttctatagtatgaatgtcttaattttgagttatatgatgtttatttgaatgactgttgaacattcaaatttgtattatttggagatgaagatttgactaacagtgagccttattaagaacactactacagttctgaaggggaaatataacatctatggttatatattttaaaaacttagattataggctgtaattataaaatatattggcttttgttttcaatgtgaaagatacattaaatggacacatatcttgcaaaattttgttgtatagaacagtttttaggcagcctttactaaagttatgcaaacacacagttccccatttactacattaatgcccttgacagggagtagctgcttggttttataggtattagggctcatgaaggccggggaacaactctaatccttttggggcaggagggagggtttttttagggttgcggggagggaactgcaagtgcctgaggaccagagtggcctctagccccgaattgaacacttttaaacctaaagagccttattattattagctcgagaaataccacatgccagtcttcccaggaaggtgacctgcctgaccatgaagcaacaaaagagcataggcagacttaaagttggatagacctgggttcaaatcatagttcagctttcaataactgtatgtatgattttggctaaaggatttgactttctctcaactgcagttttcttaatctttgaaatgcaaataatgtttatctcagaagactatttctaggattaactgagagattaaaggaacagcagcacttaggctcaaaatcgcccctacaaagcagtagttgtttcttaattgctaagtaatctgtttgcactctaggaaaagtaaatggagaggtaaaagaaaggcattggggacaaatgaaagagatgatgtagatttttcggatgggtgggtatattttattttccagtttattttcatatttctttactgtgttatttctggaaactttaatgttttaaacctcttttataaaattcaatgacgactactagaattctattcttttcaaaagttaacttatctccaaagtggctgaaaatattgtttaccattacatgattatgaaatgactgtgaagaatataaaattaaacttagtgacttaattagtcactgccttgctaactttgctgtaatttttttaaacgtcttgtttttaatatagcaaactatctcaatactggctggattaggttaaataaagaatttttatgttctctaggtgtactttgttaaatctcaaaacattctgtacatacataattttttttaatcacagttatcgagatactagtttttgtaagtaaaagtaatctgaattta

SEQ ID NO: 347998 - DNA, 4617 bp, Homo sapiens
tttgagtaagcaagagctgtttattcaccaacgtgttccatttggagactgtcggcgagccctggaaagcccaggcacatttgagaaggttcctggagagggagagaatcatctttccttcccccaactccccagccccaaacacacagagagactcgggtggaagctgtctggtccaggcagtccctatttgcccgccccctcaagaagaacctcacgcaccaaaccaaccgacccctcgcggaggtggtgtaattcccccaaaatgggctctgccgcaggagaggctggctccagcgccgggggcttcggaaggagtttctgccacccccactgccgccactgaccgccccgacgccacggccggggccggggaccctgataagaaatggcccttcagccccctcccctcacctggctcggtcccacctgagggcaagagcggaggcaaaaacaaacaggcagggagggctgaccttgttgctaccgacagtggagcggcgcatcctgctgcttcctggaaagcggcccgaaagacattttttccccctggaggaaggaaacgggagggcgccggccagacggcggcaggcgcggaggcgttggtccgggcgggctgtgcagcctctagtggagacggtccgaagactacatctcccaggctgctctgggccgccctgcgtcgtaaccctggcgcgcacggaggcggcgactcttacctcacaaaggtagctcctccgccggcagcaactcggcgcccgcggtccatggaccggaacctcgggccgacggacgggaacccgggccgcgatcgccgcctccccgcctcaggctcctcctcctcgctctccgccgcctccgccggactcccgcaggccctgcaccgccgccgccaggctagcggagctgccccgggaagctgggtgacgggttcgcggctgccgccggactgcggcctactccgccgcctctcagtgctattgtccctgggcctggccttgagcgggtccactggggaaggccgtgtgcgccggctccgcggaagatgccggaccaagccctacagcagatgctggacagaagttgctgggtttgttttgctactgatgaagatgatagaacagctgaatgggtgagaccatgcaggtgcagaggatctacaaaatgggttcaccaggcctgtctacaacgctgggtggatgaaaagcaaagaggaaacagtacagccagagtggcatgtcctcagtgcaatgctgaatacctaatagtttttccaaaattgggttgtaggtcataaagaaggtctggatgttatggagagagctgatcctttattccttttaattggacttcctactattcctgtcatgctgatattaggcaagatgattcgctgggaggactatgtgcttagactgtggcgcaaatactcgaataaactacaaattttaaatagtatatttccagggataggttgtcctgttcctcgaattccagctgaggccaatcctttagcagatcatgtctctgctactcgaatcttgtgtggagcccttgtctttcctactattgctacaatagttggtaaattgatgttcagtagtgttaactctaatttacaaaggacaatcttgggtggaattgcgtttgttgccataaaaggagcatttaaagtttacttcaaacagcagcaatatttacgacaggcacaccgcaaaattctgaattatccagaacaagaagaagcataaaactgacttctggttgttctgcagttctctcatccttatgaatctgttgtgttgttttgattccatcattaatgcacttgtggagacttgtgataagctgctgctcctatattttttaagaaatataataaagcacttagggcaggggaaatcatctcggtaatcatggaacctaaggatgtgatttgttttcattgtttgtatgtactacttttatggcagtcatatgaaccattatcttagcatggtaaacctgggttttgttcatattttctccagacagaaatgcaaagatcaaactgtgcaaatattaaaaaaatgcacatgctgttttattcaaatgcctcttttgtacatgttcatgtttagtgttttctcagaatcagcaactcaaggtactatgaggatttttctcactgacataatttgattacatactaaataagaggatatgttaatatgaggaaatgtaaattaaattagttataaataaataaccaaaaatgtatgtaaacattcaaatgattatctgaacaaatgagattttgtggtgttttctttaacccatgtgatgtcctccaaaatgtgtagggtaaaaattcacagggcttccagatcactttttcaatattaaattttatttacataatgttgacatctcatacttcatgaagtaattttgactcatgcagtcgtgtgtgtgtgtgtgtgtgtgtgtgtgtgtgtgtgtatttgtgtgtttcagtgtttcatcaggtccttccatctctgggagttttttcaacccatatttctagaaattacagctgccagtttatagtagtttgagcagaggatgatttgcaaaaataaaaataaagttattttactctcctcttgcattgattcagttattgagatattcgttgatcacctcctatttcccaggcactgtgcagagtgctgtaggacatagtggtgaacaagacagacttggtccaagctcttacagagttgacagtctagtttcagcacatagaaaaccagcagtgaataaaccaaggtgaggccttgagctctttgtttttatattaatgaggagaaaagtatgaaaacaagaagtcttaagtaaatattgaggtcattgtttttggcttaagtttattatagaaaatcaacactaatgtttttagattttaattgtcctattgatgaggctagcaccttaatcactgtttagttttgtattcatttttaaaagcaattattgaagccattttcaatagattggccattttaatgttcagcaacctgaatggttatttttgttaattaaaattaaatttttaagagatattttcaaaaccctatttattttcttgttcacagtaatgcatgtcaataataaatgtttccccttactgataagcggccactttaggagtgtagcaaatatagattgagctatgttagtttgcaataatatatgttaactttagtaattaaagactggtttctatagtatgaatgtcttaattttgagttatatgatgtttatttgaatgactgttgaacattcaaatttgtattatttggagatgaagatttgactaacagtgagccttattaagaacactactacagttctgaaggggaaatataacatctatggttatatattttaaaaacttagattataggctgtaattataaaatatattggcttttgttttcaatgtgaaagatacattaaatggacacatatcttgcaaaattttgttgtatagaacagtttttaggcagcctttactaaagttatgcaaacacacagttccccatttactacattaatgcccttgacagggagtagctgcttggttttataggtattagggctcatgaaggccggggaacaactctaatccttttggggcaggagggagggtttttttagggttgcggggagggaactgcaagtgcctgaggaccagagtggcctctagccccgaattgaacacttttaaacctaaagagccttattattattagctcgagaaataccacatgccagtcttcccaggaaggtgacctgcctgaccatgaagcaacaaaagagcataggcagacttaaagttggatagacctgggttcaaatcatagttcagctttcaataactgtatgtatgattttggctaaaggatttgactttctctcaactgcagttttcttaatctttgaaatgcaaataatgtttatctcagaagactatttctaggattaactgagagattaaaggaacagcagcacttaggctcaaaatcgcccctacaaagcagtagttgtttcttaattgctaagtaatctgtttgcactctaggaaaagtaaatggagaggtaaaagaaaggcattggggacaaatgaaagagatgatgtagatttttcggatgggtgggtatattttattttccagtttattttcatatttctttactgtgttatttctggaaactttaatgttttaaacctcttttataaaattcaatgacgactactagaattctattcttttcaaaagttaacttatctccaaagtggctgaaaatattgtttaccattacatgattatgaaatgactgtgaagaatataaaattaaacttagtgacttaattagtcactgccttgctaactttgctgtaatttttttaaacgtcttgtttttaatatagcaaactatctcaatactggctggattaggttaaataaagaatttttatgttctctaggtgtactttgttaaatctcaaaacattctgtacatacataattttttttaatcacagttatcgagatactagtttttgtaagtaaaagtaatctgaattta

SEQ ID NO: 347999 - DNA, 3126 bp, Homo sapiens
aaaaagaaaactgtttcatttgcagtcatctgaattagtttagcatcaaagcctatgtcttttgtgatctaaataaaattatttttattactctgtttctctaaatctgcattataaaaagctaattttcctttttattttagggtggaattgcgtttgttgccataaaaggagcatttaaagtttacttcaaacagcagcaatatttacgacaggcacaccgcaaaattctgaattatccagaacaagaagaagcataaaactgacttctggttgttctgcagttctctcatccttatgaatctgttgtgttgttttgattccatcattaatgcacttgtggagacttgtgataagctgctgctcctatattttttaagaaatataataaagcacttagggcaggggaaatcatctcggtaatcatggaacctaaggatgtgatttgttttcattgtttgtatgtactacttttatggcagtcatatgaaccattatcttagcatggtaaacctgggttttgttcatattttctccagacagaaatgcaaagatcaaactgtgcaaatattaaaaaaatgcacatgctgttttattcaaatgcctcttttgtacatgttcatgtttagtgttttctcagaatcagcaactcaaggtactatgaggatttttctcactgacataatttgattacatactaaataagaggatatgttaatatgaggaaatgtaaattaaattagttataaataaataaccaaaaatgtatgtaaacattcaaatgattatctgaacaaatgagattttgtggtgttttctttaacccatgtgatgtcctccaaaatgtgtagggtaaaaattcacagggcttccagatcactttttcaatattaaattttatttacataatgttgacatctcatacttcatgaagtaattttgactcatgcagtcgtgtgtgtgtgtgtgtgtgtgtgtgtgtgtgtgtgtatttgtgtgtttcagtgtttcatcaggtccttccatctctgggagttttttcaacccatatttctagaaattacagctgccagtttatagtagtttgagcagaggatgatttgcaaaaataaaaataaagttattttactctcctcttgcattgattcagttattgagatattcgttgatcacctcctatttcccaggcactgtgcagagtgctgtaggacatagtggtgaacaagacagacttggtccaagctcttacagagttgacagtctagtttcagcacatagaaaaccagcagtgaataaaccaaggtgaggccttgagctctttgtttttatattaatgaggagaaaagtatgaaaacaagaagtcttaagtaaatattgaggtcattgtttttggcttaagtttattatagaaaatcaacactaatgtttttagattttaattgtcctattgatgaggctagcaccttaatcactgtttagttttgtattcatttttaaaagcaattattgaagccattttcaatagattggccattttaatgttcagcaacctgaatggttatttttgttaattaaaattaaatttttaagagatattttcaaaaccctatttattttcttgttcacagtaatgcatgtcaataataaatgtttccccttactgataagcggccactttaggagtgtagcaaatatagattgagctatgttagtttgcaataatatatgttaactttagtaattaaagactggtttctatagtatgaatgtcttaattttgagttatatgatgtttatttgaatgactgttgaacattcaaatttgtattatttggagatgaagatttgactaacagtgagccttattaagaacactactacagttctgaaggggaaatataacatctatggttatatattttaaaaacttagattataggctgtaattataaaatatattggcttttgttttcaatgtgaaagatacattaaatggacacatatcttgcaaaattttgttgtatagaacagtttttaggcagcctttactaaagttatgcaaacacacagttccccatttactacattaatgcccttgacagggagtagctgcttggttttataggtattagggctcatgaaggccggggaacaactctaatccttttggggcaggagggagggtttttttagggttgcggggagggaactgcaagtgcctgaggaccagagtggcctctagccccgaattgaacacttttaaacctaaagagccttattattattagctcgagaaataccacatgccagtcttcccaggaaggtgacctgcctgaccatgaagcaacaaaagagcataggcagacttaaagttggatagacctgggttcaaatcatagttcagctttcaataactgtatgtatgattttggctaaaggatttgactttctctcaactgcagttttcttaatctttgaaatgcaaataatgtttatctcagaagactatttctaggattaactgagagattaaaggaacagcagcacttaggctcaaaatcgcccctacaaagcagtagttgtttcttaattgctaagtaatctgtttgcactctaggaaaagtaaatggagaggtaaaagaaaggcattggggacaaatgaaagagatgatgtagatttttcggatgggtgggtatattttattttccagtttattttcatatttctttactgtgttatttctggaaactttaatgttttaaacctcttttataaaattcaatgacgactactagaattctattcttttcaaaagttaacttatctccaaagtggctgaaaatattgtttaccattacatgattatgaaatgactgtgaagaatataaaattaaacttagtgacttaattagtcactgccttgctaactttgctgtaatttttttaaacgtcttgtttttaatatagcaaactatctcaatactggctggattaggttaaataaagaatttttatgttctctaggtgtactttgttaaatctcaaaacattctgtacatacataattttttttaatcacagttatcgagatactagtttttgtaagtaaaagtaatctgaattta

SEQ ID NO: 348000 - DNA, 3050 bp, Homo sapiens
gtacccagggaacgtgccagcactgcgttgttcctcaagtcccacatgtccctaggctgtctgccttggttctccctttcaaagcttgcctgtgcttatttgttgtattttgtccagagtgtttcaagtggaggggggaagacctgggaagaatggggcctaacccatcttggcagaacaccgtcgaagcttcgacggtgttctgcagttctctcatccttatgaatctgttgtgttgttttgattccatcattaatgcacttgtggagacttgtgataagctgctgctcctatattttttaagaaatataataaagcacttagggcaggggaaatcatctcggtaatcatggaacctaaggatgtgatttgttttcattgtttgtatgtactacttttatggcagtcatatgaaccattatcttagcatggtaaacctgggttttgttcatattttctccagacagaaatgcaaagatcaaactgtgcaaatattaaaaaaatgcacatgctgttttattcaaatgcctcttttgtacatgttcatgtttagtgttttctcagaatcagcaactcaaggtactatgaggatttttctcactgacataatttgattacatactaaataagaggatatgttaatatgaggaaatgtaaattaaattagttataaataaataaccaaaaatgtatgtaaacattcaaatgattatctgaacaaatgagattttgtggtgttttctttaacccatgtgatgtcctccaaaatgtgtagggtaaaaattcacagggcttccagatcactttttcaatattaaattttatttacataatgttgacatctcatacttcatgaagtaattttgactcatgcagtcgtgtgtgtgtgtgtgtgtgtgtgtgtgtgtgtgtgtatttgtgtgtttcagtgtttcatcaggtccttccatctctgggagttttttcaacccatatttctagaaattacagctgccagtttatagtagtttgagcagaggatgatttgcaaaaataaaaataaagttattttactctcctcttgcattgattcagttattgagatattcgttgatcacctcctatttcccaggcactgtgcagagtgctgtaggacatagtggtgaacaagacagacttggtccaagctcttacagagttgacagtctagtttcagcacatagaaaaccagcagtgaataaaccaaggtgaggccttgagctctttgtttttatattaatgaggagaaaagtatgaaaacaagaagtcttaagtaaatattgaggtcattgtttttggcttaagtttattatagaaaatcaacactaatgtttttagattttaattgtcctattgatgaggctagcaccttaatcactgtttagttttgtattcatttttaaaagcaattattgaagccattttcaatagattggccattttaatgttcagcaacctgaatggttatttttgttaattaaaattaaatttttaagagatattttcaaaaccctatttattttcttgttcacagtaatgcatgtcaataataaatgtttccccttactgataagcggccactttaggagtgtagcaaatatagattgagctatgttagtttgcaataatatatgttaactttagtaattaaagactggtttctatagtatgaatgtcttaattttgagttatatgatgtttatttgaatgactgttgaacattcaaatttgtattatttggagatgaagatttgactaacagtgagccttattaagaacactactacagttctgaaggggaaatataacatctatggttatatattttaaaaacttagattataggctgtaattataaaatatattggcttttgttttcaatgtgaaagatacattaaatggacacatatcttgcaaaattttgttgtatagaacagtttttaggcagcctttactaaagttatgcaaacacacagttccccatttactacattaatgcccttgacagggagtagctgcttggttttataggtattagggctcatgaaggccggggaacaactctaatccttttggggcaggagggagggtttttttagggttgcggggagggaactgcaagtgcctgaggaccagagtggcctctagccccgaattgaacacttttaaacctaaagagccttattattattagctcgagaaataccacatgccagtcttcccaggaaggtgacctgcctgaccatgaagcaacaaaagagcataggcagacttaaagttggatagacctgggttcaaatcatagttcagctttcaataactgtatgtatgattttggctaaaggatttgactttctctcaactgcagttttcttaatctttgaaatgcaaataatgtttatctcagaagactatttctaggattaactgagagattaaaggaacagcagcacttaggctcaaaatcgcccctacaaagcagtagttgtttcttaattgctaagtaatctgtttgcactctaggaaaagtaaatggagaggtaaaagaaaggcattggggacaaatgaaagagatgatgtagatttttcggatgggtgggtatattttattttccagtttattttcatatttctttactgtgttatttctggaaactttaatgttttaaacctcttttataaaattcaatgacgactactagaattctattcttttcaaaagttaacttatctccaaagtggctgaaaatattgtttaccattacatgattatgaaatgactgtgaagaatataaaattaaacttagtgacttaattagtcactgccttgctaactttgctgtaatttttttaaacgtcttgtttttaatatagcaaactatctcaatactggctggattaggttaaataaagaatttttatgttctctaggtgtactttgttaaatctcaaaacattctgtacatacataattttttttaatcacagttatcgagatactagtttttgtaagtaaaagtaatctgaattta

SEQ ID NO: 348001 - DNA, 2888 bp, Homo sapiens
cctgttatgttttcattaccaagacgcagagtatctagcctcggcttttgctgattcgcagagttgaggtacgagggtgaatgcccccaaggtaattcttcctaagactctggggctacctgctgctcctatattttttaagaaatataataaagcacttagggcaggggaaatcatctcggtaatcatggaacctaaggatgtgatttgttttcattgtttgtatgtactacttttatggcagtcatatgaaccattatcttagcatggtaaacctgggttttgttcatattttctccagacagaaatgcaaagatcaaactgtgcaaatattaaaaaaatgcacatgctgttttattcaaatgcctcttttgtacatgttcatgtttagtgttttctcagaatcagcaactcaaggtactatgaggatttttctcactgacataatttgattacatactaaataagaggatatgttaatatgaggaaatgtaaattaaattagttataaataaataaccaaaaatgtatgtaaacattcaaatgattatctgaacaaatgagattttgtggtgttttctttaacccatgtgatgtcctccaaaatgtgtagggtaaaaattcacagggcttccagatcactttttcaatattaaattttatttacataatgttgacatctcatacttcatgaagtaattttgactcatgcagtcgtgtgtgtgtgtgtgtgtgtgtgtgtgtgtgtgtgtatttgtgtgtttcagtgtttcatcaggtccttccatctctgggagttttttcaacccatatttctagaaattacagctgccagtttatagtagtttgagcagaggatgatttgcaaaaataaaaataaagttattttactctcctcttgcattgattcagttattgagatattcgttgatcacctcctatttcccaggcactgtgcagagtgctgtaggacatagtggtgaacaagacagacttggtccaagctcttacagagttgacagtctagtttcagcacatagaaaaccagcagtgaataaaccaaggtgaggccttgagctctttgtttttatattaatgaggagaaaagtatgaaaacaagaagtcttaagtaaatattgaggtcattgtttttggcttaagtttattatagaaaatcaacactaatgtttttagattttaattgtcctattgatgaggctagcaccttaatcactgtttagttttgtattcatttttaaaagcaattattgaagccattttcaatagattggccattttaatgttcagcaacctgaatggttatttttgttaattaaaattaaatttttaagagatattttcaaaaccctatttattttcttgttcacagtaatgcatgtcaataataaatgtttccccttactgataagcggccactttaggagtgtagcaaatatagattgagctatgttagtttgcaataatatatgttaactttagtaattaaagactggtttctatagtatgaatgtcttaattttgagttatatgatgtttatttgaatgactgttgaacattcaaatttgtattatttggagatgaagatttgactaacagtgagccttattaagaacactactacagttctgaaggggaaatataacatctatggttatatattttaaaaacttagattataggctgtaattataaaatatattggcttttgttttcaatgtgaaagatacattaaatggacacatatcttgcaaaattttgttgtatagaacagtttttaggcagcctttactaaagttatgcaaacacacagttccccatttactacattaatgcccttgacagggagtagctgcttggttttataggtattagggctcatgaaggccggggaacaactctaatccttttggggcaggagggagggtttttttagggttgcggggagggaactgcaagtgcctgaggaccagagtggcctctagccccgaattgaacacttttaaacctaaagagccttattattattagctcgagaaataccacatgccagtcttcccaggaaggtgacctgcctgaccatgaagcaacaaaagagcataggcagacttaaagttggatagacctgggttcaaatcatagttcagctttcaataactgtatgtatgattttggctaaaggatttgactttctctcaactgcagttttcttaatctttgaaatgcaaataatgtttatctcagaagactatttctaggattaactgagagattaaaggaacagcagcacttaggctcaaaatcgcccctacaaagcagtagttgtttcttaattgctaagtaatctgtttgcactctaggaaaagtaaatggagaggtaaaagaaaggcattggggacaaatgaaagagatgatgtagatttttcggatgggtgggtatattttattttccagtttattttcatatttctttactgtgttatttctggaaactttaatgttttaaacctcttttataaaattcaatgacgactactagaattctattcttttcaaaagttaacttatctccaaagtggctgaaaatattgtttaccattacatgattatgaaatgactgtgaagaatataaaattaaacttagtgacttaattagtcactgccttgctaactttgctgtaatttttttaaacgtcttgtttttaatatagcaaactatctcaatactggctggattaggttaaataaagaatttttatgttctctaggtgtactttgttaaatctcaaaacattctgtacatacataattttttttaatcacagttatcgagatactagtttttgtaagtaaaagtaatctgaattta

SEQ ID NO: 348002 - DNA, 2482 bp, Homo sapiens
tttgagtaagcaagagctgtttattcaccaacgtgttccatttggagactgtcggcgagccctggaaagcccaggcacatttgagaaggttcctggagagggagagaatcatctttccttcccccaactccccagccccaaacacacagagagactcgggtggaagctgtctggtccaggcagtccctatttgcccgccccctcaagaagaacctcacgcaccaaaccaaccgacccctcgcggaggtggtgtaattcccccaaaatgggctctgccgcaggagaggctggctccagcgccgggggcttcggaaggagtttctgccacccccactgccgccactgaccgccccgacgccacggccggggccggggaccctgataagaaatggcccttcagccccctcccctcacctggctcggtcccacctgagggcaagagcggaggcaaaaacaaacaggcagggagggctgaccttgttgctaccgacagtggagcggcgcatcctgctgcttcctggaaagcggcccgaaagacattttttccccctggaggaaggaaacgggagggcgccggccagacggcggcaggcgcggaggcgttggtccgggcgggctgtgcagcctctagtggagacggtccgaagactacatctcccaggctgctctgggccgccctgcgtcgtaaccctggcgcgcacggaggcggcgactcttacctcacaaaggtagctcctccgccggcagcaactcggcgcccgcggtccatggaccggaacctcgggccgacggacgggaacccgggccgcgatcgccgcctccccgcctcaggctcctcctcctcgctctccgccgcctccgccggactcccgcaggccctgcaccgccgccgccaggctagcggagctgccccgggaagctgggtgacgggttcgcggctgccgccggactgcggcctactccgccgcctctcagtgctattgtccctgggcctggccttgagcgggtccactggggaaggccgtgtgcgccggctccgcggaagatgccggaccaagccctacagcagatgctggacagaagttgctgggtttgttttgctactgatgaagatgatagaacagctgaatgggtgagaccatgcaggtgcagaggatctacaaaatgggttcaccaggcctgtctacaacgctgggtggatgaaaagcaaagaggaaacagtacagccagagtggcatgtcctcagtgcaatgctgaatacctaatagtttttccaaaattgggtccagtggtttacgtcttggatcttgcagatagactgatctcaaaagcctgtccatttgctgcagcaggaataatggtcggctctatctattggacagctgtgacttatggagcagtgacagtgatgcaggttgtaggtcataaagaaggtctggatgttatggagagagctgatcctttattccttttaattggacttcctactattcctgtcatgctgatattaggcaagatgattcgctgggaggactatgtgcttagactgtggcgcaaatactcgaataaactacaaattttaaatagtatatttccagggataggttgtcctgttcctcgaattccagctgaggccaatcctttagcagatcatgtctctgctactcgaatcttgtgtggagcccttgtctttcctactattgctacaatagttggtaaattgatgttcagtagtgttaactctaatttacaaaggacaatcttggtaagacggctttaacattacttatattaccttgcaaaagagaatgaagtgtatttgtttttaaaaggtggggaactgtataaatattcggtctgtggctcctatgcattaagcctctatttgagcctcactatcattcaatagcttgagtggaaataaaaagaggagaaaccactgcagcagttctggccttttggaactatgttgtaggtgctttctctcctggcatatgcatgaatcatcacacctgtccctcttgccagtgggattacagtactttactatcagaccacctggttcaaatcccatcacagaaattgtcttgctgtgaaatctaaatcaaatgtctggactttttgttcctgtagtatggtgatggtaataatcaggattattgtgaggattgtataagtactagcacatagtaagcactcatgttgtttgctattattgttactcccacttctcccctctggtggcatgtaacctgcacggaccttggaggactgaacaaagggggcaagcgtgggaataaaagacaaagacaagagagtatatttggaagaaggggtcagggggcaccttgcctctagtggacaagggccctgagctttacacagccctctgtatttattaggcaaaagagatagtgagaagcaggggtgattgtcgggtaattgtcagtccatttggcagtttggttcacagcaggcttgc

SEQ ID NO: 348003 - DNA, 4267 bp, Homo sapiens
  misc_feature (17)..(17): n is a, c, g, or t
tgcaggctgtacccccnggggttatgggatatcgtcgacccacggcgctcgcatcctgagggcaagagcggaggcaaaaacaaacaggcagggagggctgaccttgttgctaccgacagtggagcggcgcatcctgctgcttcctggaaagcggcccgaaagacattttttccccctggaggaaggaaacgggagggcgccggccagacggcggcaggcgcggaggcgttggtccgggcgggctgtgcagcctctagtggagacggtccgaagactacatctcccaggctgctctgggccgccctgcgtcgtaaccctggcgcgcacggaggcggcgactcttacctcacaaaggtagctcctccgccggcagcaactcggcgcccgcggtccatggaccggaacctcgggccgacggacgggaacccgggccgcgatcgccgcctccccgcctcaggctcctcctcctcgctctccgccgcctccgccggactcccgcaggccctgcaccgccgccgccaggctagcggagctgccccgggaagctgggtgacgggttcgcggctgccgccggactgcggcctactccgccgcctctcagtgctattgtccctgggcctggccttgagcgggtccactggggaaggccgtgtgcgccggctccgcggaagatgccggaccaagccctacagcagatgctggacagaagttgctgggtttgttttgctactgatgaagatgatagaacagctgaatgggtgagaccatgcaggtgcagaggatctacaaaatgggttcaccaggcctgtctacaacgctgggtggatgaaaagcaaagaggaaacagtacagccagagtggcatgtcctcagtgcaatgctgaatacctaatagtttttccaaaattgggtccagtggtttacgtcttggatcttgcagatagactgatctcaaaagcctgtccatttgctgcagcaggaataatggtcggctctatctattggacagctgtgacttatggagcagtgacagtgatgcaggttgtaggtcataaagaaggtctggatgttatggagagagctgatcctttattccttttaattggacttcctactattcctgtcatgctgatattaggcaagatgattcgctgggaggactatgtgcttagactgtggcgcaaatactcgaataaactacaaattttaaatagtatatttccagggataggttgtcctgttcctcgaattccagctgaggccaatcctttagcagatcatgtctctgctactcgaatcttgtgtggagcccttgtctttcctactattgctacaatagttggtaaattgatgttcagtagtgttaactctaatttacaaaggacaatcttgggtggaattgcgtttgttgccataaaaggagcatttaaagtttacttcaaacagcagcaatatttacgacaggcacaccgcaaaattctgaattatccagaacaagaagaagcataaaactgacttctggttgttctgcagttctctcatccttatgaatctgttgtgttgttttgattccatcattaatgcacttgtggagacttgtgataagctgctgctcctatattttttaagaaatataataaagcacttagggcaggggaaatcatctcggtaatcatggaacctaaggatgtgatttgttttcattgtttgtatgtactacttttatggcagtcatatgaaccattatcttagcatggtaaacctgggttttgttcatattttctccagacagaaatgcaaagatcaaactgtgcaaatattaaaaaaatgcacatgctgttttattcaaatgcctcttttgtacatgttcatgtttagtgttttctcagaatcagcaactcaaggtactatgaggatttttctcactgacataatttgattacatactaaataagaggatatgttaatatgaggaaatgtaaattaaattagttataaataaataaccaaaaatgtatgtaaacattcaaatgattatctgaacaaatgagattttgtggtgttttctttaacccatgtgatgtcctccaaaatgtgtagggtaaaaattcacagggcttccagatcactttttcaatattaaattttatttacataatgttgacatctcatacttcatgaagtaattttgactcatgcagtcgtgtgtgtgtgtgtgtgtgtgtgtgtgtgtgtgtgtatttgtgtgtttcagtgtttcatcaggtccttccatctctgggagttttttcaacccatatttctagaaattacagctgccagtttatagtagtttgagcagaggatgatttgcaaaaataaaaataaagttattttactctcctcttgcattgattcagttattgagatattcgttgatcacctcctatttcccaggcactgtgcagagtgctgtaggacatagtggtgaacaagacagacttggtccaagctcttacagagttgacagtctagtttcagcacatagaaaaccagcagtgaataaaccaaggtgaggccttgagctctttgtttttatattaatgaggagaaaagtatgaaaacaagaagtcttaagtaaatattgaggtcattgtttttggcttaagtttattatagaaaatcaacactaatgtttttagattttaattgtcctattgatgaggctagcaccttaatcactgtttagttttgtattcatttttaaaagcaattattgaagccattttcaatagattggccattttaatgttcagcaacctgaatggttatttttgttaattaaaattaaatttttaagagatattttcaaaaccctatttattttcttgttcacagtaatgcatgtcaataataaatgtttccccttactgataagcggccactttaggagtgtagcaaatatagattgagctatgttagtttgcaataatatatgttaactttagtaattaaagactggtttctatagtatgaatgtcttaattttgagttatatgatgtttatttgaatgactgttgaacattcaaatttgtattatttggagatgaagatttgactaacagtgagccttattaagaacactactacagttctgaaggggaaatataacatctatggttatatattttaaaaacttagattataggctgtaattataaaatatattggcttttgttttcaatgtgaaagatacattaaatggacacatatcttgcaaaattttgttgtatagaacagtttttaggcagcctttactaaagttatgcaaacacacagttccccatttactacattaatgcccttgacagggagtagctgcttggttttataggtattagggctcatgaaggccggggaacaactctaatccttttggggcaggagggagggtttttttagggttgcggggagggaactgcaagtgcctgaggaccagagtggcctctagccccgaattgaacacttttaaacctaaagagccttattattattagctcgagaaataccacatgccagtcttcccaggaaggtgacctgcctgaccatgaagcaacaaaagagcataggcagacttaaagttggatagacctgggttcaaatcatagttcagctttcaataactgtatgtatgattttggctaaaggatttgactttctctcaactgcagttttcttaatctttgaaatgcaaataatgtttatctcagaagactatttctaggattaactgagagattaaaggaacagcagcacttaggctcaaaatcgcccctacaaagcagtagttgtttcttaattgctaagtaatctgtttgcactctaggaaaagtaaatggagaggtaaaagaaaggcattggggacaaatgaaagagatgatgtagatttttcggatgggtgggtatattttattttccagtttattttcatatttctttactgtgttatttctggaaactttaatgttttaaacctcttttataaaattcaatgacgactactagaattctattcttttcaaaagttaacttatctccaaagtggctgaaaatattgtttaccattacatgattatgaaatgactgtgaagaatataaaattaaacttagtgacttaattagtcactgccttgctaactttgctgtaatttttttaaacgtcttgtttttaatatagcaaactatctcaatactggctggattaggttaaataaagaatttttatgtt

SEQ ID NO: 348004 - DNA, 4732 bp, Homo sapiens
tttgagtaagcaagagctgtttattcaccaacgtgttccatttggagactgtcggcgagccctggaaagcccaggcacatttgagaaggttcctggagagggagagaatcatctttccttcccccaactccccagccccaaacacacagagagactcgggtggaagctgtctggtccaggcagtccctatttgcccgccccctcaagaagaacctcacgcaccaaaccaaccgacccctcgcggaggtggtgtaattcccccaaaatgggctctgccgcaggagaggctggctccagcgccgggggcttcggaaggagtttctgccacccccactgccgccactgaccgccccgacgccacggccggggccggggaccctgataagaaatggcccttcagccccctcccctcacctggctcggtcccacctgagggcaagagcggaggcaaaaacaaacaggcagggagggctgaccttgttgctaccgacagtggagcggcgcatcctgctgcttcctggaaagcggcccgaaagacattttttccccctggaggaaggaaacgggagggcgccggccagacggcggcaggcgcggaggcgttggtccgggcgggctgtgcagcctctagtggagacggtccgaagactacatctcccaggctgctctgggccgccctgcgtcgtaaccctggcgcgcacggaggcggcgactcttacctcacaaaggtagctcctccgccggcagcaactcggcgcccgcggtccatggaccggaacctcgggccgacggacgggaacccgggccgcgatcgccgcctccccgcctcaggctcctcctcctcgctctccgccgcctccgccggactcccgcaggccctgcaccgccgccgccaggctagcggagctgccccgggaagctgggtgacgggttcgcggctgccgccggactgcggcctactccgccgcctctcagtgctattgtccctgggcctggccttgagcgggtccactggggaaggccgtgtgcgccggctccgcggaagatgccggaccaagccctacagcagatgctggacagaagttgctgggtttgttttgctactgatgaagatgatagaacagctgaatgggtgagaccatgcaggtgcagaggatctacaaaatgggttcaccaggcctgtctacaacgctgggtggatgaaaagcaaagaggaaacagtacagccagagtggcatgtcctcagtgcaatgctgaatacctaatagtttttccaaaattgggtccagtggtttacgtcttggatcttgcagatagactgatctcaaaagcctgtccatttgctgcagcaggaataatggtcggctctatctattggacagctgtgacttatggagcagtgacagtgatgcaggttgtaggtcataaagaaggtctggatgttatggagagagctgatcctttattccttttaattggacttcctactattcctgtcatgctgatattaggcaagatgattcgctgggaggactatgtgcttagactgtggcgcaaatactcgaataaactacaaattttaaatagtatatttccagggataggttgtcctgttcctcgaattccagctgaggccaatcctttagcagatcatgtctctgctactcgaatcttgtgtggagcccttgtctttcctactattgctacaatagttggtaaattgatgttcagtagtgttaactctaatttacaaaggacaatcttgggtggaattgcgtttgttgccataaaaggagcatttaaagtttacttcaaacagcagcaatatttacgacaggcacaccgcaaaattctgaattatccagaacaagaagaagcataaaactgacttctggttgttctgcagttctctcatccttatgaatctgttgtgttgttttgattccatcattaatgcacttgtggagacttgtgataagctgctgctcctatattttttaagaaatataataaagcacttagggcaggggaaatcatctcggtaatcatggaacctaaggatgtgatttgttttcattgtttgtatgtactacttttatggcagtcatatgaaccattatcttagcatggtaaacctgggttttgttcatattttctccagacagaaatgcaaagatcaaaaaaatgcacatgctgttttattcaaatgcctcttttgtacatgttcatgtttagtgttttctcagaatcagcaactcaaggtactatgaggatttttctcactgacataatttgattacatactaaataagaggatatgttaatatgaggaaatgtaaattaaattagttataaataaataaccaaaaatgtatgtaaacattcaaatgattatctgaacaaatgagattttgtggtgttttctttaacccatgtgatgtcctccaaaatgtgtagggtaaaaattcacagggcttccagatcactttttcaatattaaattttatttacataatgttgacatctcatacttcatgaagtaattttgactcatgcagtcgtgtgtgtgtgtgtgtgtgtgtgtgtgtgtgtgtgtatttgtgtgtttcagtgtttcatcaggtccttccatctctgggagttttttcaacccatatttctagaaattacagctgccagtttatagtagtttgagcagaggatgatttgcaaaaataaaaataaagttattttactctcctcttgcattgattcagttattgagatattcgttgatcacctcctatttcccaggcactgtgcagagtgctgtaggacatagtggtgaacaagacagacttggtccaagctcttacagagttgacagtctagtttcagcacatagaaaaccagcagtgaataaaccaaggtgaggccttgagctctttgtttttatattaatgaggagaaaagtatgaaaacaagaagtcttaagtaaatattgaggtcattgtttttggcttaagtttattatagaaaatcaacactaatgtttttagattttaattgtcctattgatgaggctagcaccttaatcactgtttagttttgtattcatttttaaaagcaattattgaagccattttcaatagattggccattttaatgttcagcaacctgaatggttatttttgttaattaaaattaaatttttaagagatattttcaaaaccctatttattttcttgttcacagtaatgcatgtcaataataaatgtttccccttactgataagcggccactttaggagtgtagcaaatatagattgagctatgttagtttgcaataatatatgttaactttagtaattaaagactggtttctatagtatgaatgtcttaattttgagttatatgatgtttatttgaatgactgttgaacattcaaatttgtattatttggagatgaagatttgactaacagtgagccttattaagaacactactacagttctgaaggggaaatataacatctatggttatatattttaaaaacttagattataggctgtaattataaaatatattggcttttgttttcaatgtgaaagatacattaaatggacacatatcttgcaaaattttgttgtatagaacagtttttaggcagcctttactaaagttatgcaaacacacagttccccatttactacattaatgcccttgacagggagtagctgcttggttttataggtattagggctcatgaaggccggggaacaactctaatccttttggggcaggagggagggtttttttagggttgcggggagggaactgcaagtgcctgaggaccagagtggcctctagccccgaattgaacacttttaaacctaaagagccttattattattagctcgagaaataccacatgccagtcttcccaggaaggtgacctgcctgaccatgaagcaacaaaagagcataggcagacttaaagttggatagacctgggttcaaatcatagttcagctttcaataactgtatgtatgattttggctaaaggatttgactttctctcaactgcagttttcttaatctttgaaatgcaaataatgtttatctcagaagactatttctaggattaactgagagattaaaggaacagcagcacttaggctcaaaatcgcccctacaaagcagtagttgtttcttaattgctaagtaatctgtttgcactctaggaaaagtaaatggagaggtaaaagaaaggcattggggacaaatgaaagagatgatgtagatttttcggatgggtgggtatattttattttccagtttattttcatatttctttactgtgttatttctggaaactttaatgttttaaacctcttttataaaattcaatgacgactactagaattctattcttttcaaaagttaacttatctccaaagtggctgaaaatattgtttaccattacatgattatgaaatgactgtgaagaatataaaattaaacttagtgacttaattagtcactgccttgctaactttgctgtaatttttttaaacgtcttgtttttaatatagcaaactatctcaatactggctggattaggttaaataaagaatttttatgttctctaggtgtactttgttaaatctcaaaacattctgtacatacataattttttttaatcacagttatcgagatactagtttttgtaagtaaaagtaatctgaattta

SEQ ID NO: 348005 - DNA, 2404 bp, Homo sapiens
tttgagtaagcaagagctgtttattcaccaacgtgttccatttggagactgtcggcgagccctggaaagcccaggcacatttgagaaggttcctggagagggagagaatcatctttccttcccccaactccccagccccaaacacacagagagactcgggtggaagctgtctggtccaggcagtccctatttgcccgccccctcaagaagaacctcacgcaccaaaccaaccgacccctcgcggaggtggtgtaattcccccaaaatgggctctgccgcaggagaggctggctccagcgccgggggcttcggaaggagtttctgccacccccactgccgccactgaccgccccgacgccacggccggggccggggaccctgataagaaatggcccttcagccccctcccctcacctggctcggtcccacctgagggcaagagcggaggcaaaaacaaacaggcagggagggctgaccttgttgctaccgacagtggagcggcgcatcctgctgcttcctggaaagcggcccgaaagacattttttccccctggaggaaggaaacgggagggcgccggccagacggcggcaggcgcggaggcgttggtccgggcgggctgtgcagcctctagtggagacggtccgaagactacatctcccaggctgctctgggccgccctgcgtcgtaaccctggcgcgcacggaggcggcgactcttacctcacaaaggtagctcctccgccggcagcaactcggcgcccgcggtccatggaccggaacctcgggccgacggacgggaacccgggccgcgatcgccgcctccccgcctcaggctcctcctcctcgctctccgccgcctccgccggactcccgcaggccctgcaccgccgccgccaggctagcggagctgccccgggaagctgggtgacgggttcgcggctgccgccggactgcggcctactccgccgcctctcagtgctattgtccctgggcctggccttgagcgggtccactggggaaggccgtgtgcgccggctccgcggaagatgccggaccaagccctacagcagatgctggacagaagttgctgggtttgttttgctactgatgaagatgatagaacagctgaatgggtgagaccatgcaggtgcagaggatctacaaaatgggttcaccaggcctgtctacaacgctgggtggatgaaaagcaaagaggaaacagtacagccagagtggcatgtcctcagtgcaatgctgaatacctaatagtttttccaaaattgggtccagtggtttacgtcttggatcttgcagatagactgatctcaaaagcctgtccatttgctgcagcaggaataatggtcggctctatctattggacagctgtgacttatggagcagtgacagtgatgcaggttgtaggtcataaagaaggtctggatgttatggagagagctgatcctttattccttttaattggacttcctactattcctgtcatgctgatattaggcaagatgattcgctgggaggactatgtgcttagactgtggcgcaaatactcgaataaactacaaattttaaatagtatatttccagggataggttgtcctgttcctcgaattccagctgaggccaatcctttagcagatcatgtctctgctactcgaatcttgtgtggagcccttgtctttcctactattgctacaatagttggtaaattgatgttcagtagtgttaactctaatttacaaaggacaatcttgggtggaattgcgtttgttgccataaaaggagcatttaaagtttacttcaaacagcagcaatatttacgacaggcacaccgcaaaattctgaattatccagaacaagaagaagcataaaactgacttctggttgttctgcagttctctcatccttatgaatctgttgtgttgttttgattccatcattaatgcacttgtggagacttgtgataagctgctgctcctatattttttaagaaatataataaagcacttagggcaggggaaatcatctcggtaatcatggaacctaaggatgtgatttgttttcattgtttgtatgtactacttttatggcagtcatatgaaccattatcttagcatggtaaacctgggttttgttcatattttctccagacagaaatgcaaagatcaaactgtgcaaatattaaaaaaatgcacatgctgttttattcaaatgcctcttttgtacatgttcatgtttagtgttttctcagaatcagcaactcaaggtactatgaggatttttctcactgacataatttgattacatactaaataagaggatatgttaatatgaggaaatgtaaattaaatcacttcactccagcctgggcgacagagcgaaactctgtctca

SEQ ID NO: 348006 - DNA, 3584 bp, Homo sapiens
ccccctgggagttttcagtctaagatgatgctgacatggacagacataaaggatattgagacaactgaacaaacattgaacaagaacataaagtactaacattatgcacaagcaaaggggtccagtggtttacgtcttggatcttgcagatagactgatctcaaaagcctgtccatttgctgcagcaggaataatggtcggctctatctattggacagctgtgacttatggagcagtgacagtgatgcaggttgtaggtcataaagaaggtctggatgttatggagagagctgatcctttattccttttaattggacttcctactattcctgtcatgctgatattaggcaagatgattcgctgggaggactatgtgcttagactgtggcgcaaatactcgaataaactacaaattttaaatagtatatttccagggataggttgtcctgttcctcgaattccagctgaggccaatcctttagcagatcatgtctctgctactcgaatcttgtgtggagcccttgtctttcctactattgctacaatagttggtaaattgatgttcagtagtgttaactctaatttacaaaggacaatcttgggtggaattgcgtttgttgccataaaaggagcatttaaagtttacttcaaacagcagcaatatttacgacaggcacaccgcaaaattctgaattatccagaacaagaagaagcataaaactgacttctggttgttctgcagttctctcatccttatgaatctgttgtgttgttttgattccatcattaatgcacttgtggagacttgtgataagctgctgctcctatattttttaagaaatataataaagcacttagggcaggggaaatcatctcggtaatcatggaacctaaggatgtgatttgttttcattgtttgtatgtactacttttatggcagtcatatgaaccattatcttagcatggtaaacctgggttttgttcatattttctccagacagaaatgcaaagatcaaactgtgcaaatattaaaaaaatgcacatgctgttttattcaaatgcctcttttgtacatgttcatgtttagtgttttctcagaatcagcaactcaaggtactatgaggatttttctcactgacataatttgattacatactaaataagaggatatgttaatatgaggaaatgtaaattaaattagttataaataaataaccaaaaatgtatgtaaacattcaaatgattatctgaacaaatgagattttgtggtgttttctttaacccatgtgatgtcctccaaaatgtgtagggtaaaaattcacagggcttccagatcactttttcaatattaaattttatttacataatgttgacatctcatacttcatgaagtaattttgactcatgcagtcgtgtgtgtgtgtgtgtgtgtgtgtgtgtgtgtgtgtatttgtgtgtttcagtgtttcatcaggtccttccatctctgggagttttttcaacccatatttctagaaattacagctgccagtttatagtagtttgagcagaggatgatttgcaaaaataaaaataaagttattttactctcctcttgcattgattcagttattgagatattcgttgatcacctcctatttcccaggcactgtgcagagtgctgtaggacatagtggtgaacaagacagacttggtccaagctcttacagagttgacagtctagtttcagcacatagaaaaccagcagtgaataaaccaaggtgaggccttgagctctttgtttttatattaatgaggagaaaagtatgaaaacaagaagtcttaagtaaatattgaggtcattgtttttggcttaagtttattatagaaaatcaacactaatgtttttagattttaattgtcctattgatgaggctagcaccttaatcactgtttagttttgtattcatttttaaaagcaattattgaagccattttcaatagattggccattttaatgttcagcaacctgaatggttatttttgttaattaaaattaaatttttaagagatattttcaaaaccctatttattttcttgttcacagtaatgcatgtcaataataaatgtttccccttactgataagcggccactttaggagtgtagcaaatatagattgagctatgttagtttgcaataatatatgttaactttagtaattaaagactggtttctatagtatgaatgtcttaattttgagttatatgatgtttatttgaatgactgttgaacattcaaatttgtattatttggagatgaagatttgactaacagtgagccttattaagaacactactacagttctgaaggggaaatataacatctatggttatatattttaaaaacttagattataggctgtaattataaaatatattggcttttgttttcaatgtgaaagatacattaaatggacacatatcttgcaaaattttgttgtatagaacagtttttaggcagcctttactaaagttatgcaaacacacagttccccatttactacattaatgcccttgacagggagtagctgcttggttttataggtattagggctcatgaaggccggggaacaactctaatccttttggggcaggagggagggtttttttagggttgcggggagggaactgcaagtgcctgaggaccagagtggcctctagccccgaattgaacacttttaaacctaaagagccttattattattagctcgagaaataccacatgccagtcttcccaggaaggtgacctgcctgaccatgaagcaacaaaagagcataggcagacttaaagttggatagacctgggttcaaatcatagttcagctttcaataactgtatgtatgattttggctaaaggatttgactttctctcaactgcagttttcttaatctttgaaatgcaaataatgtttatctcagaagactatttctaggattaactgagagattaaaggaacagcagcacttaggctcaaaatcgcccctacaaagcagtagttgtttcttaattgctaagtaatctgtttgcactctaggaaaagtaaatggagaggtaaaagaaaggcattggggacaaatgaaagagatgatgtagatttttcggatgggtgggtatattttattttccagtttattttcatatttctttactgtgttatttctggaaactttaatgttttaaacctcttttataaaattcaatgacgactactagaattctattcttttcaaaagttaacttatctccaaagtggctgaaaatattgtttaccattacatgattatgaaatgactgtgaagaatataaaattaaacttagtgacttaattagtcactgccttgctaactttgctgtaatttttttaaacgtcttgtttttaatatagcaaactatctcaatactggctggattaggttaaataaagaatttttatgttctctaggtgtactttgttaaatctcaaaacattctgtacatacataattttttttaatcacagttatcgagatactagtttttgtaagtaaaagtaatctgaattta

SEQ ID NO: 348007 - DNA, 1104 bp, Homo sapiens
gcgactctagaggatccccagcggggaacaatcacttcttgctgtcctctgtgctgtgctgaggaatccaacctctctcttaagtgacgagtgcaagagagaaataggattatttgtgttttggaaaaaaaccttagttcattgtagagggcggacagcaagaagtgatgaggacctttaagaccacggtagtggaatttgagaggcaagagcagatttgagaactattaagaagacagactcatcagccctgtatacatgattgtgtaatggaacagaggaatgagggacctatgtaagataacgtggagttctggggtgggtggctaggtggctcatggtaccattcaccaagatgggaagtgcagaacaggcttggttagaaagaaaatgagttcagttttgcacttacttaatcctggcagacaagcaggtataaaatgggttgagctggaagacaggtcttggctatagcttagggagattttatcatattgcttatagctcaagcaatgggtatggatgaggtaacacaggcacgatgtaaaaatgagaaaataaaaataaaataataaaagtgattgcggcccaccaacacttggagagtggaagtagaggagattgagaaggagtggccacagatggaggtattgaaagggaaacaatagtcttgtagaaatccaaagaagagtttcaggaaagtcagaaaggttaagactgcccagtgctttagagtgagtggccttaattccataacagtgcaacagccatttcagaaaataggtagaggaggtttaggagtgttggagggagagaaagttgagactcttcccaggagcctaggactgaagagtaagtaagggaaggtattacctcacagtggacattgggtgtattgaagggggaatttgggtatgtgtgtgggagcatgagagagagacagagacattttcagatggagagacttgagtgcatctgctaaggagaagacatcagtggaggaggaagcatcagaaacatatttgagaggagatgatcggtggagctaagtctcagaggacacaatgggttagaagtgtttagccttggaaggagggcagcacc

SEQ ID NO: 348008 - DNA, 667 bp, Homo sapiens
cccttgagccatgttgcctaattgtccccaagcagaaaacttcccaggtcttcggaggcagcaaaagctttcctggcacagagctagaaaagaagattctcatggtgtcccatgtggcaggaactacaggagctggggtgggtaatccatttaggccacttgacaaacacctatttgtaggtcaactctgagaatagaaagatgaaaaaggagtggcctctgccatcctggagctaagcaactggtataagggaagtgacagcccccatggaatcggaccatttcaacttcatgccacgaatgacaggtcagggcttctgggcatgatcataggaatgaccacagctaacattgaccatgggcctaatttgtgtgctgtttgctttttttttttttgagacggagtctcactcaagtcgccaggctggatggagtgcagtggtgcgatctcggctcactgcagcctccgcctcccaggttcaagcaattctcctgcctcccaggttcaagcaattctcctgcctcagcctcccgagtagctgggattacaggtgccctccaccacgcctggctaatttttgtatttttagtagagacggggtttcaccatgttggccaggatggtctcaatctcttgacctcgtgatccgcccacctcgccctccca

SEQ ID NO: 348009 - DNA, 2094 bp, Homo sapiens
agagcggagtctgcgcggggttgggcggagcctgcgcggggccggtaggatcgcgtcgggagccggtaccgaggcccgagccgcgggagtcgagcgaagacagcgccgaggccgcggtttccccctgggcctccccagcagcagccatgggcatcaaatttttagaagttatcaaaccattctgtgcagttctaccagaaattcagaaaccggaaaggaaaatccagtttagagagaaggttctgtggactgctataacgctcttcattttcttagtgtgttgtcagatcccactgtttggaatcatgtcatcagattctgcagatcctttctactggatgagagttattctggcttccaatagaggaactttaatggaattgggtatctccccaattgtaacatctggtttgattatgcagttgttagctggagccaaaatcattgaagttggagatacaccgaaagatagagctttattcaatggagcccagaaactgtttggtatgatcattaccattgggcaagccattgtgtatgtcatgacggggatgtatggggaccctgcagaaatgggtgccggaatctgtctcctgatcatcattcagttgtttgttgctggtttgattgtgctgctgttagatgagctgctacagaagggttacggcttggggtctgggatttccctctttattgccaccaacatctgtgagaccattgtctggaaggcctttagtcccactaccattaacactggcagaggtactgagtttgagggtgcagtcatagctctgttccatttgttggccaccaggacggacaaagtccgagctttacgggaggctttttatcggcagaacttacccaatctcatgaacctcattgctacagtttttgtgtttgctgttgttatatatttccaaggatttcgcgttgatctgcccattaagtcggcccgttaccgaggacagtacagcagctaccccatcaaactcttctacacctccaacatccccatcatcctccagtcggccctggtgtccaacctgtatgttatttcccagatgctgtctgttcgatttagtggcaactttttagtaaatttactaggacagtgggccgatgtcagtgggggaggacccgcacgttcttacccagttggaggcctttgttactatctttctcctcctgagtccatgggcgccatctttgaggatcctgtccatgtcgttgtttatatcatcttcatgttggggtcatgtgcattcttctctaagacatggattgaagtgtctggttcctcagccaaagatgtagctaaacagctgaaagaacagcagatggtaatgaggggccaccgagatacctctatggttcatgagcttaatagaccaaaagtgaagttaagaaggtggaagggagaaggaagacattttacaaaaaggatactcttctactaaaagataaccccgcacggcatttcacacttgcctacgtcaccctgctttccacgcacctcctcagagggaggggctgttattgttcctgttttatgaaaaaagccgagagaggctacagaacctgtttgatgtgatagctaattatggtccgcggagcctcaaaccgagtcgggcctgtgactccgagctgcgctgcctcgtattgattgtcatgcctttctccaaatacgcaccagataaactattgtatctattcagtatgactgttctaactctggctttgagctgtcgaggtggcttctaccttaggtctagtttttggaaaggtgaagcaggagtggaagctctctaagggatacgaaatctgattttatccaaagaaatcacagcagcctttgaaagacacattcagattttcaaacaaacaacagacatttcaaaaccaggcgctctgcttattcactgaaaccgtaagctgctgaaactcagggaaaagcttaagaaactggtcttaaagcttcaggccaaacaatgcttcaaatcacatttgaagtaatcacttaaaaacagtagaaaaatcagttatcaattacctaaaacacttatacccaataaaatattcccatgatgaaaa

SEQ ID NO: 348010 - DNA, 361 bp, Homo sapiens
ataggccaatgcagtggactaactggtttcccagaccaggcttcccagtgacagcatcatcgtgctgtttgcctgtattggctatgccttctaactccaaccagtcacttgagaatattctttcaagattctgggccccgattcttttctgtttaaatccctaaagcaaagatctaattctcaagcaatgtctgtagttcagtgggggtgaacaatgaatatattcatgctaggaatttgtgtctgttgttgtactcacagcagcaacatgagtgtaaacagtagacaataaacttttatttaagaaaactgattcagttgtgttggaaaaaataaagaaatctgatattaaacgtttaaa

SEQ ID NO: 348011 - DNA, 2538 bp, Homo sapiens
agagcggagtctgcgcggggttgggcggagcctgcgcggggccggtaggatcgcgtcgggagccggtaccgaggcccgagccgcgggagtcgagcgaagacagcgccgaggccgcggtttccccctgggcctccccagcagcagccatgggcatcaaatttttagaagttatcaaaccattctgtgcagttctaccagaaattcagaaaccggaaaggaaaatccagtttagagagaaggttctgtggactgctataacgctcttcattttcttagtgtgttgtcagatcccactgtttggaatcatgtcatcagattctgcagatcctttctactggatgagagttattctggcttccaatagaggaactttaatggaattgggtatctccccaattgtaacatctggtttgattatgcagttgttagctggagccaaaatcattgaagttggagatacaccgaaagatagagctttattcaatggagcccagaaactgtttggtatgatcattaccattgggcaagccattgtgtatgtcatgacggggatgtatggggaccctgcagaaatgggtgccggaatctgtctcctgatcatcattcagttgtttgttgctggtttgattgtgctgctgttagatgagctgctacagaagggttacggcttggggtctgggatttccctctttattgccaccaacatctgtgagaccattgtctggaaggcctttagtcccactaccattaacactggcagaggtactgagtttgagggtgcagtcatagctctgttccatttgttggccaccaggacggacaaagtccgagctttacgggaggctttttatcggcagaacttacccaatctcatgaacctcattgctacagtttttgtgtttgctgttgttatatatttccaaggatttcgcgttgatctgcccattaagtcggcccgttaccgaggacagtacagcagctaccccatcaaactcttctacacctccaacatccccatcatcctccagtcggccctggtgtccaacctgtatgttatttcccagatgctgtctgttcgatttagtggcaactttttagtaaatttactaggacagtgggccgatgtcagtgggggaggacccgcacgttcttacccagttggaggcctttgttactatctttctcctcctgagtccatgggcgccatctttgaggatcctgtccatgtcgttgtttatatcatcttcatgttggggtcatgtgcattcttctctaagacatggattgaagtgtctggttcctcagccaaagatgtagctaaacagctgaaagaacagcagatggtaatgaggggccaccgagatacctctatggttcatgagcttaataggtacatccccaccgcagctgcgtttggcggtttgtgcattggcgccctgtcagtgctggctgacttcctgggggccattggatctggcactggaattctgctagcagtcactattatttaccagtattttgaaatatttgttaaagaacaggccgaagttggtgggatgggtgctttgtttttctaaatgttcaaatatttcattttgtgcgtgtgaaagggaaaacactttgacggatcgtttttgtcagatgacactggtggctccccttttctcccctcacagtttcttgtttcgagtgctgactgacccgtttctgaaatgggcaccgagctaagtctgtgtgcagcattagtacccgctgccttaaaactcaagtttacattattcattaaaaaaagtacatctagtgttgcctgtaatgctggaaaccagtgtatctaccttgctgtgttaaatcatgacagtgagacggtgagatggattcgttttgcacacaacattcaaaacacttcatattgcccccacttgttgaaaaataaatgtagttcaaattgccactttccagtatttttgagcttatttaatgagttctggaacatttatatctaatctatattttagataattactttttatacttttttaactcatggtatccccactccccacccccacctcatttttatttgtcccttctcaaagcagccacttagcccacatgggcgaaatcaagtctccagttatttctgccacaactgcttctaaggcctcctccttctcctcctcctcttcctcttcctccttttccttctcctcctcctctcttcccagtgacagcatcatcgtgctgtttgcctgtattggctatgccttctaactccaaccagtcacttgagaatattctttcaagattctgggccccgattcttttctgtttaaatccctaaagcaaagatctaattctcaagcaatgtctgtagttcagtgggggtgaacaatgaatatattcatgctaggaatttgtgtctgttgttgtactcacagcagcaacatgagtgtaaacagtagacaataaacttttatttaagaaaactgattcagttgtgttggaaaaaataaagaaatctgatattaaacgtttaaa

SEQ ID NO: 348012 - DNA, 2561 bp, Homo sapiens
agagcggagtctgcgcggggttgggcggagcctgcgcggggccggtaggatcgcgtcgggagccggtaccgaggcccgagccgcgggagtcgagcgaagacagcgccgaggccgcggtttccccctgggcctccccagcagcagccatgggcatcaaatttttagaagttatcaaaccattctgtgcagttctaccagaaattcagaaaccggaaaggaaaatccagtttagagagaaggttctgtggactgctataacgctcttcattttcttagtgtgttgtcagatcccactgtttggaatcatgtcatcagattctgcagatcctttctactggatgagagttattctggcttccaatagaggaactttaatggaattgggtatctccccaattgtaacatctggtttgattatgcagttgttagctggagccaaaatcattgaagttggagatacaccgaaagatagagctttattcaatggagcccagaaactgtttggtatgatcattaccattgggcaagccattgtgtatgtcatgacggggatgtatggggaccctgcagaaatgggtgccggaatctgtctcctgatcatcattcagttgtttgttgctggtttgattgtgctgctgttagatgagctgctacagaagggttacggcttggggtctgggatttccctctttattgccaccaacatctgtgagaccattgtctggaaggcctttagtcccactaccattaacactggcagaggtactgagtttgagggtgcagtcatagctctgttccatttgttggccaccaggacggacaaagtccgagctttacgggaggctttttatcggcagaacttacccaatctcatgaacctcattgctacagtttttgtgtttgctgttgttatatatttccaagtaagtataaccttttcaccaaaggatttcgcgttgatctgcccattaagtcggcccgttaccgaggacagtacagcagctaccccatcaaactcttctacacctccaacatccccatcatcctccagtcggccctggtgtccaacctgtatgttatttcccagatgctgtctgttcgatttagtggcaactttttagtaaatttactaggacagtgggccgatgtcagtgggggaggacccgcacgttcttacccagttggaggcctttgttactatctttctcctcctgagtccatgggcgccatctttgaggatcctgtccatgtcgttgtttatatcatcttcatgttggggtcatgtgcattcttctctaagacatggattgaagtgtctggttcctcagccaaagatgtagctaaacagctgaaagaacagcagatggtaatgaggggccaccgagatacctctatggttcatgagcttaataggtacatccccaccgcagctgcgtttggcggtttgtgcattggcgccctgtcagtgctggctgacttcctgggggccattggatctggcactggaattctgctagcagtcactattatttaccagtattttgaaatatttgttaaagaacaggccgaagttggtgggatgggtgctttgtttttctaaatgttcaaatatttcattttgtgcgtgtgaaagggaaaacactttgacggatcgtttttgtcagatgacactggtggctccccttttctcccctcacagtttcttgtttcgagtgctgactgacccgtttctgaaatgggcaccgagctaagtctgtgtgcagcattagtacccgctgccttaaaactcaagtttacattattcattaaaaaaagtacatctagtgttgcctgtaatgctggaaaccagtgtatctaccttgctgtgttaaatcatgacagtgagacggtgagatggattcgttttgcacacaacattcaaaacacttcatattgcccccacttgttgaaaaataaatgtagttcaaattgccactttccagtatttttgagcttatttaatgagttctggaacatttatatctaatctatattttagataattactttttatacttttttaactcatggtatccccactccccacccccacctcatttttatttgtcccttctcaaagcagccacttagcccacatgggcgaaatcaagtctccagttatttctgccacaactgcttctaaggcctcctccttctcctcctcctcttcctcttcctccttttccttctcctcctcctctcttcccagtgacagcatcatcgtgctgtttgcctgtattggctatgccttctaactccaaccagtcacttgagaatattctttcaagattctgggccccgattcttttctgtttaaatccctaaagcaaagatctaattctcaagcaatgtctgtagttcagtgggggtgaacaatgaatatattcatgctaggaatttgtgtctgttgttgtactcacagcagcaacatgagtgtaaacagtagacaataaacttttatttaagaaaactgattcagttgtgttggaaaaaataaagaaatctgatattaaacgtttaaa

SEQ ID NO: 348013 - DNA, 1797 bp, Homo sapiens
agagcggagtctgcgcggggttgggcggagcctgcgcggggccggtaggatcgcgtcgggagccggtaccgaggcccgagccgcgggagtcgagcgaagacagcgccgaggccgcggtttccccctgggcctccccagcagcagccatgggcatcaaatttttagaagttatcaaaccattctgtgcagttctaccagaaattcagaaaccggaaaggaaaatccagtttagagagaaggttctgtggactgctataacgctcttcattttcttagtgtgttgtcagatcccactgtttggaatcatgtcatcagattctgcagatcctttctactggatgagagttattctggcttccaatagaggaactttaatggaattgggtatctccccaattgtaacatctggtttgattatgcagttgttagctggagccaaaatcattgaagttggagatacaccgaaagatagagctttattcaatggagcccagaaactgtttggtatgatcattaccattgggcaagccattgtgtatgtcatgacggggatgtatggggaccctgcagaaatgggtgccggaatctgtctcctgatcatcattcaggtactgagtttgagggtgcagtcatagctctgttccatttgttggccaccaggacggacaaagtccgagctttacgggaggctttttatcggcagaacttacccaatctcatgaacctcattgctacagtttttgtgtttgctgttgttatatatttccaaggatttcgcgttgatctgcccattaagtcggcccgttaccgaggacagtacagcagctaccccatcaaactcttctacacctccaacatccccatcatcctccagtcggccctggtgtccaacctgtatgttatttcccagatgctgtctgttcgatttagtggcaactttttagtaaatttactaggacagtgggccgatgtcagtgggggaggacccgcacgttcttacccagttggaggcctttgttactatctttctcctcctgagtccatgggcgccatctttgaggatcctgtccatgtcgttgtttatatcatcttcatgttggggtcatgtgcattcttctctaagacatggattgaagtgtctggttcctcagccaaagatgtagctaaacagctgaaagaacagcagatggtaatgaggggccaccgagatacctctatggttcatgagcttaataggtacatccccaccgcagctgcgtttggcggtttgtgcattggcgccctgtcagtgctggctgacttcctgggggccattggatctggcactggaattctgctagcagtcactattatttaccagtattttgaaatatttgttaaagaacaggccgaagttggtgggatgggtgctttgtttttctaaatgttcaaatatttcattttgtgcgtgtgaaagggaaaacactttgacggatcgtttttgtcagatgacactggtggctccccttttctcccctcacagtttcttgtttcgagtgctgactgacccgtttctgaaatgggcaccgagctaagtctgtgtgcagcattagtacccgctgccttaaaactcaagtttacattattcattaaaaaaagtacatctagtgttgcctgtaatgctggaaaccagtgtatctaccttgctgtgttaaatcatgacagtgagacggtgagatggattcgttttgcacacaacattcaaaacacttcatattgcccccacttgttgaaaaataaatgtagttcaaattgcca

SEQ ID NO: 348014 - DNA, 1895 bp, Homo sapiens
cccatgttggccaggctcgtcttgaacttctgatctaatcatccacccgccttggcctcccaaagtgttgggattacaggcatgagccaccatgcctggtgggatccagattccttcttttgcttgggggcatcctgttgtcccagcatcatttgttgaaaaggcactagtatttttccttaaactttttatttatttagaacacagactgcagagtagtatgatggatctccagctccagttgtcaccatcttgctgttcttgtttcacctatcactgcctctaatcttttttgagtattttaaatcccatttttcagttttccaggtgattctaatgtgcagccaaaggttgaattactgaaatggatcctcaaaatcttatgacataaatttgttcatacctactcttcattccacaagagggaacgaaaggttactcattaaaaaatcttaaacattttaatatttaaatctgtccaggaatctcatgtcctgtaagattacatattgtctttcttggctgttgactggttcctggaaattagggtcagagtctttgcctggatcagagctcctgttcccatgccgtgccctgcacacccctccacactgcagcctgttccctctggagttcagggaggctttagacccagctatggctgctgcgcctcgacctgtcttcgtctctagctgccgtgctgttcctggtctctgctgccgcctaacttggggttctgtctcctaggtacatccccaccgcagctgcgtttggcggtttgtgcattggcgccctgtcagtgctggctgacttcctgggggccattggatctggcactggaattctgctagcagtcactattatttaccagtattttgaaatatttgttaaagaacaggccgaagttggtgggatgggtgctttgtttttctaaatgttcaaatatttcattttgtgcgtgtgaaagggaaaacactttgacggatcgtttttgtcagatgacactggtggctccccttttctcccctcacagtttcttgtttcgagtgctgactgacccgtttctgaaatgggcaccgagctaagtctgtgtgcagcattagtacccgctgccttaaaactcaagtttacattattcattaaaaaaagtacatctagtgttgcctgtaatgctggaaaccagtgtatctaccttgctgtgttaaatcatgacagtgagacggtgagatggattcgttttgcacacaacattcaaaacacttcatattgcccccacttgttgaaaaataaatgtagttcaaattgccactttccagtatttttgagcttatttaatgagttctggaacatttatatctaatctatattttagataattactttttatacttttttaactcatggtatccccactccccacccccacctcatttttatttgtcccttctcaaagcagccacttagcccacatgggcgaaatcaagtctccagttatttctgccacaactgcttctaaggcctcctccttctcctcctcctcttcctcttcctccttttccttctcctcctcctctcttcccagtgacagcatcatcgtgctgtttgcctgtattggctatgccttctaactccaaccagtcacttgagaatattctttcaagattctgggccccgattcttttctgtttaaatccctaaagcaaagatctaattctcaagcaatgtctgtagttcagtgggggtgaacaatgaatatattcatgctaggaatttgtgtctgttgttgtactcacagcagcaacatgagtgtaaacagtagacaataaacttttatttaagaaaactgattcagttgtgttggaaaaaataaagaaatctgatattaaacgtttaaa

SEQ ID NO: 348015 - DNA, 404 bp, Homo sapiens
tacgttgtatgttttcttcaagaatagtctcttgagaaaacttcggatttatgctataaaaacatagatttgcctcaatgatctaaatatttgtagaacctgctcacatggctatatcataaagcaaacattggcgaattcttttgacccatattttctgctgtatactggactttcacggttagttgtttgagctttgggacagctttggacgatgagtccacaggtcgtgtctgtcttgattttacaggtactgagtttgagggtgcagtcatagctctgttccatttgttggccaccaggacggacaaagtccgagctttacgggaggctttttatcggcagaacttacccaatctcatgaacctcattgctacagtttttgtgtttgctgttgttatata

SEQ ID NO: 348016 - DNA, 414 bp, Homo sapiens
atttttatttgtcccttctcaaagcagccacttagcccacatgggcgaaatcaagtctccagttatttctgccacaactgcttctaaggcctcctccttctcctcctcctcttcctcttcctccttttccttctcctcctcctctcttcccagtgacagcatcatcgtgctgtttgcctgtattggctatgccttctaactccaaccagtcacttgagaatattctttcaagattctgggccccgattcttttctgtttaaatccctaaagcaaagatctaattctcaagcaatgtctgtagttcagtgggggtgaacaatgaatatattcatgctaggaatttgtgtctgttgttgtactcacagcagcaacatgagtgtaaacagtagacaataaacttttatttaagaaaa

SEQ ID NO: 348017 - DNA, 1951 bp, Homo sapiens
agagcggagtctgcgcggggttgggcggagcctgcgcggggccggtaggatcgcgtcgggagccggtaccgaggcccgagccgcgggagtcgagcgaagacagcgccgaggccgcggtttccccctgggcctccccagcagcagccatgggcatcaaatttttagaagttatcaaaccattctgtgcagttctaccagaaattcagaaaccggaaaggaaaatccagtttagagagaaggttctgtggactgctataacgctcttcattttcttagtgtgttgtcagatcccactgtttggaatcatgtcatcagattctgcagatcctttctactggatgagagttattctggcttccaatagaggaactttaatggaattgggtatctccccaattgtaacatctggtttgattatgcagttgttagctggagccaaaatcattgaagttggagatacaccgaaagatagagctttattcaatggagcccagaaactgtttggtatgatcattaccattgggcaagccattgtgtatgtcatgacggggatgtatggggaccctgcagaaatgggtgccggaatctgtctcctgatcatcattcagttgtttgttgctggtttgattgtgctgctgttagatgagctgctacagaagggttacggcttggggtctgggatttccctctttattgccaccaacatctgtgagaccattgtctggaaggcctttagtcccactaccattaacactggcagaggtactgagtttgagggtgcagtcatagctctgttccatttgttggccaccaggacggacaaagtccgagctttacgggaggctttttatcggcagaacttacccaatctcatgaacctcattgctacagtttttgtgtttgctgttgttatatatttccaaggatttcgcgttgatctgcccattaagtcggcccgttaccgaggacagtacagcagctaccccatcaaactcttctacacctccaacatccccatcatcctccagtcggccctggtgtccaacctgtatgttatttcccagatgctgtctgttcgatttagtggcaactttttagtaaatttactaggacagtgggccgatgtcagtgggggaggacccgcacgttcttacccagttggaggcctttgttactatctttctcctcctgagtccatgggcgccatctttgaggatcctgtccatgtcgttgtttatatcatcttcatgttggggtcatgtgcattcttctctaagacatggattgaagtgtctggttcctcagccaaagatgtagctaaacagctgaaagaacagcagatggtaatgaggggccaccgagatacctctatggttcatgagcttaataggtacatccccaccgcagctgcgtttggcggtttgtgcattggcgccctgtcagtgctggctgacttcctgggggccattggatctggcactggaattctgctagcagtcactattatttaccagtattttgaaatatttgttaaagaacaggccgaagttggtgggatgggtgctttgtttttctaaatgttcaaatatttcattttgtgcgtgtgaaagggaaaacactttgacggatcgtttttgtcagatgacactggtggctccccttttctcccctcacagtttcttgtttcgagtgctgactgacccgtttctgaaatgggcaccgagctaagtctgtgtgcagcattagtacccgctgccttaaaactcaagtttacattattcattaaaaaaagtacatctagtgttgcctgtaatgctggaaaccagtgtatctaccttgctgtgttaaatcatgacagtgagacggtgagatggattcgttttgcacacaacattcaaaacacttcatattgcccccacttgttgaaaaataaatgtagttcaaattgcca

SEQ ID NO: 348018 - DNA, 702 bp, Homo sapiens
agagcggagtctgcgcggggttgggcggagcctgcgcggggccggtaggatcgcgtcgggagccggtaccgaggcccgagccgcgggagtcgagcgaagacagcgccgaggccgcggtttccccctgggcctccccagcagcagccatgggcatcaaatttttagaagttatcaaaccattctgtgcagttctaccagaaattcagaaaccggaaaggaaaatccagtttagagagaaggttctgtggactgctataacgctcttcattttcttagtgtgttgtcagatcccactgtttggaatcatgtcatcagattctgcagatcctttctactggatgagagttattctggcttccaatagaggaactttaatggaattgggtatctccccaattgtaacatctggtttgattatgcagttgttagctggagccaaaatcattgaagttggagatacaccgaaagatagagctttattcaatggagcccagaaactgtttggtatgatcattaccattgggcaagccattgtgtatgtcatgacggggatgtatggggaccctgcagaaatgggtgccggaatctgtctcctgatcatcattcaggatcaacacagcccttagacttatcctttgatggcagtgtacatttccatcttgctattataccagaattcatctgactttttacttccttgga

SEQ ID NO: 348019 - DNA, 1923 bp, Homo sapiens
  misc_feature (21)..(21): n is a, c, g, or t
  misc_feature (23)..(23): n is a, c, g, or t
  misc_feature (38)..(38): n is a, c, g, or t
  misc_feature (49)..(50): n is a, c, g, or t
gagcatctatcgctatacacntnattggaacaccgttntggtgttaaannaaagcagtgtaccgtccgatccggatgcagacaggcgagcgcgttccccctggggctcccagcagcagcatggcatcaaatttttagaagttatcaaaccattctgtgcagttctaccagaaattcagaaaccggaaaggaaaatccagtttagagagaaggttctgtggactgctataacgctcttcattttcttagtgtgttgtcagatcccactgtttggaatcatgtcatcagattctgcagatcctttctactggatgagagttattctggcttccaatagaggaactttaatggaattgggtatctccccaattgtaacatctggtttgattatgcagttgttagctggagccaaaatcattgaagttggagatacaccgaaagatagagctttattcaatggagcccagaaactgtttggtatgatcattaccattgggcaagccattgtgtatgtcatgacggggatgtatggggaccctgcagaaatgggtgccggaatctgtctcctgatcatcattcagttgtttgttgctggtttgattgtgctgctgttagatgagctgctacagaagggttacggcttggggtctgggatttccctctttattgccaccaacatctgtgagaccattgtctggaaggcctttagtcccactaccattaacactggcagaggtactgagtttgagggtgcagtcatagctctgttccatttgttggccaccaggacggacaaagtccgagctttacgggaggctttttatcggcagaacttacccaatctcatgaacctcattgctacagtttttgtgtttgctgttgttatatatttccaaggatttcgcgttgatctgcccattaagtcggcccgttaccgaggacagtacagcagctaccccatcaaactcttctacacctccaacatccccatcatcctccagtcggccctggtgtccaacctgtatgttatttcccagatgctgtctgttcgatttagtggcaactttttagtaaatttactaggacagtgggccgatgtcagtgggggaggacccgcacgttcttacccagttggaggcctttgttactatctttctcctcctgagtccatgggcgccatctttgaggatcctgtccatgtcgttgtttatatcatcttcatgttggggtcatgtgcattcttctctaagacatggattgaagtgtctggttcctcagccaaagatgtagctaaacagctgaaagaacagcagatggtaatgaggggccaccgagatacctctatggttcatgagcttaataggtacatccccaccgcagctgcgtttggcggtttgtgcattggcgccctgtcagtgctggctgacttcctgggggccattggatctggcactggaattctgctagcagtcactattatttaccagtattttgaaatatttgttaaagaacaggccgaagttggtgggatgggtgctttgtttttctaaatgttcaaatatttcattttgtgcgtgtgaaagggaaaacactttgacggatcgtttttgtcagatgacactggtggctccccttttctcccctcacagtttcttgtttcgagtgctgactgacccgtttctgaaatgggcaccgagctaagtctgtgtgcagcattagtacccgctgccttaaaactcaagtttacattattcattaaaaaaagtacatctagtgttgcctgtaatgctggaaaccagtgtatctaccttgctgtgttaaatcatgacagtgagacggtgagatggattcgttttgcacacaacattcaaaacacttcatattgcccccacttgttgaaaaataaatgtagttcaaattgcca

SEQ ID NO: 348020 - DNA, 324 bp, Homo sapiens
ctatcttgggggtattgggacacttattttagctttccttctgcccctcctgcttctcctcagttttcctcgtcttgctttcaccttacctggctttctagggctttctgggctctgggtgctcaccctgagggcctccctctcttacctccaactccaaacccacaccaggtcctgccactggctgtctacgtgttttgggaacttactgtctccactgttgtcactttagtttgggcctcatcactgtggtctgggtgatgccttttctgcctcctggcctccctgcctctgtctctcccctcctgctggttctgtctccat

SEQ ID NO: 348021 - DNA, 229 bp, Homo sapiens
cggaatacaccagcgcggaatacaccagcgcggaatacaccagcgcggaatacacgcgcggaatacaccagcccaggtcctgccactggctgtctacgtgttttgggaacttactgtctccactgttgtcactttagtttgggcctcatcactgtggtctgggtgatgccttttctgcctcctggcctccctgcctctgtctctcccctcctgctggttctgtctccat

SEQ ID NO: 348022 - DNA, 317 bp, Homo sapiens
tcagttgtcatctttttactgagtgtccttcctgacctctccctactttaaaatgttatgcttttttctactacctctcctgttcctcattcctaccttatttttctggataacacttattgccttctaaattgtatcgtataatttacttctttgtttcttctccgttgtcacactagcatataaattcagtgaaggtagagattcttttactgctgacaaaagcatctaggacatttcctggcactgataaggatctgcataaatatttgttgagtgaatgaatctccttggtaaagtccttttttgtttgcctg

SEQ ID NO: 348023 - DNA, 1122 bp, Homo sapiens
taatttgacagccatgcattttttactggttggttctctttagtttacatttttaaaaataactcatgccccattcacccagagctcaaagtggtctgcaggagaagccagtacaaagaatcaggatggcatttcttgaagtgggtaaggatcgttatattgcatgtcagtacaaatcccagtaaagattttaagctggttagaccttgctgagaggtaatggggagggtctacaattttgtattcacctttccccaagtggggccctgtttccagctttcttcttttacctgaacttgcttctttggctacagggagaacttcgggtgaaatgcatccctcctgtgactggattggagacacaagaacagaaacatcctgatctctctactctactgtgcaggcttatgtactcataaaatggcagttatggacctatcctccccatgggctttaactaaacaggactctgcctgtttccatctgagaaatgctgaagaggaaaggatgattgctgtatttctgacaacctggttacaggaaccaatgactttcaaagatgtagctgtggagttcactcaggaggagtggatgatgctggattctgctcaaagaagtctgtacagagatgtgatgttggaaaactatagaaatctcacctccgtggaatatcagttgtacaggcttactgtgatctccccattggatcaagaagagataaggaatatgaaaaagagaattccccaagccatctgtccagaccagaagattcaacctaaaaccaaagaatcaactgtgcagaaaattttgtgggaggaaccatccaatgcagtgaaaatgataaaactcacaatgcataattggtcctccacattaagagaagactgggaatgccataagatcagaaaacagcataagattccagggggacattggaggcaaatgatatatgccccaaagaaaacagtacctcaggagctattccgtgactatcatgaattagaggaaaactctaaacttggatcaaaacttattttttcacagagcattttcaccagtaaacattgccaaaaatgttactcagagattggatgtttgaaacacaattcaatcataaacaat

SEQ ID NO: 348024 - DNA, 252 bp, Homo sapiens
agcatacatatcaacgcaacagaacagaaattccagaaacttctcataacaatttagcatgtaaatagcatttcaaattaatggaaagaatattcaattaattgttctgagaaaattggctaaatttctgaaaaaaattgagttgagatcttagctcacacacaaaaaaaggttcaaatatctgaaaatgttaaaggcaaaaaataaaccatatttatgtccagccagggcaagacagcgagatcctatttc

SEQ ID NO: 348025 - DNA, 372 bp, Homo sapiens
atcctcagaactagtacttttttcttgataggaagaataatttgttttgtcaatgattaaaaattatcctagaacgcagtcactgccaaggatgtggtttactcatatccgtagtttgggaacaaaattatgtttcaaactgtaaggttggacatgctggctcctgcttgtaatctcagaactttgggaagccaaggcaggaggatcgctttaaggccaggagtttgagaccagcctggggaacataacaaaacctagtcttcaaaaaaaaaaaaaaaaaaaaaaaaaaagccaggagtggtggcacacacctataggcctagctattcaggaagctgagacagaaggatctcttgagcccaggagtttgag

SEQ ID NO: 348026 - DNA, 272 bp, Homo sapiens
ggcaacaagaatgaaactctgcctcaaaaacaaaacaaaacaaaacaagaaacaaaacacacacacacacacacacaaacctgtgcttagaacagtgtacagaaccaaaaacaatttatttcttttagaataatgaacttaatcttcacagcaatcttaggccatagatgctatactaggggatagatactatccccattctatggaagaggaaattgaggctttgagtggtcaagtaatttaccaaatattactcagcttaccaatggcca

SEQ ID NO: 348027 - DNA, 618 bp, Homo sapiens
ctctctggactgtaagaatatgtctccagggccagtgtctgctgcgatcgagtcccaccttccaagtcctggcatctcaatgcatctgggaagctacctgcattaagtcaggactgagcacacaggtgaactccagaaagaagaagctatggccgcagtgattctggagagcatctttctgaagcgatcccaacagaaaaagaaaacatcacctctaaacttcaagaagcgcctgtttctcttgaccgtgcacaaactctcctactatgagtatgactttgaacgtgggagaagaggcagtaagaagggttcaatagatgttgagaagatcacttgtgttgaaacagtggttcctgaaaaaaatcctcctccagaaagacagattccggtaagaagagaccaatgtctgagatggggaacagcagatttgaagaaatttgcaacatttaaattctctgtaaatagactggtgatgctgtgcaacgtggaacacggtcaagtttcctttaaaaattcttcactctaccatattggttataaagaatcttagcttctttccttcatattcagaacatctcactaaacatggaaaatttgttaacacaaacttttaaatga

SEQ ID NO: 348028 - DNA, 2164 bp, Homo sapiens
tcctgtgatctgctctccttcagggtggccaaggagggggcagttgcttgaagttcaccactaagctcaaagaggaaaacatgcaaatggtggcttctcctccatgtcagatgtgatctctctcttctttcctgctaccgtaatccggtacaacagtgatctggttcagaaatatcacccttgcttctggatcgatgggcagtatctctgctgctctcagacagccaaaaatgctatgggctgccaaattttggagaacaggaatggaagcttaaaacctgggagttctcaccggaagacaaaaaagcctcttcccccaacgcctgaggaggaccagatcttgaaaaagccactaccgcctgagccagcagcagcaccagtctccacaagtgagctgaaaaaggttgtggccctttatgattacatgccaatgaatgcaaatgatctacagctgcggaagggtgatgaatattttatcttggaggaaagcaacttaccatggtggagagcacgagataaaaatgggcaggaaggctacattcctagtaactatgtcactgaagcagaagactccatagaaatgtatgagtggtattccaaacacatgactcggagtcaggctgagcaactgctaaagcaagaggggaaagaaggaggtttcattgtcagagactccagcaaagctggcaaatatacagtgtctgtgtttgctaaatccacaggggaccctcaaggggtgatacgtcattatgttgtgtgttccacacctcagagccagtattacctggctgagaagcaccttttcagcaccatccctgagctcattaactaccatcagcacaactctgcaggactcatatccaggctcaaatatccagtgtctcaacaaaacaagaatgcaccttccactgcaggcctgggatacggatcatgggaaattgatccaaaggacctgaccttcttgaaggagctggggactggacaatttggggtagtgaagtatgggaaatggagaggccagtacgacgtggccatcaagatgatcaaagaaggctccatgtctgaagatgaattcattgaagaagccaaagtcatgatgaatctttcccatgagaagctggtgcagttgtatggcgtctgcaccaagcagcgccccatcttcatcatcactgagtacatggccaatggctgcctcctgaactacctgagggagatgcgccaccgcttccagactcagcagctgctagagatgtgcaaggatgtctgtgaagccatggaatacctggagtcaaagcagttccttcaccgagacctggcagctcgaaactgtttggtaaacgatcaaggagttgttaaagtatctgatttcggcctgtccaggtatgtcctggatgatgaatacacaagctcagtaggctccaaatttccagtccgttggtccccaccggaagtcctgatgtatagcaagttcagcagcaaatctgacatttgggcttttggggttttgatgtgggaaatttactccctggggaagatgccatatgagagatttactaacagtgagactgctgaacacattgcccaaggcctacgtctctacaggcctcatctggcttcagagaaggtatataccatcatgtacagttgctggcatgagaaagcagatgagcgtcccactttcaaaattcttctgagcaatattctagatgtcatggatgaagaatcctgagctcgccaataagcttcttggttctacttctcttctccacaagccccaatttcactttctcagaggaaatcccaagcttaggagccctggagcctttgtgctcccactcaatacaaaaaggcccctctctacatctgggaatgcacctcttctttgattccctgggatagtggcttctgagcaaaggccaaaaaattattgtgcctgaaatttcccgagagaattaagacagactgaatttgcgatgaaaatattttttaggagggaggatgtaaatagccgcacaaaggggtccaacagctctttgagtaggcatttggtagagcttgggggtgtgtgtgtgggggtggaccgaatttggcaagaatgaaatggtgtcataaagatgggaggggagggtgttttgataaaataaaattactagaaagcttgaaa

SEQ ID NO: 348029 - DNA, 2226 bp, Homo sapiens
ctctctggactgtaagaatatgtctccagggccagtgtctgctgcgatcgagtcccaccttccaagtcctggcatctcaatgcatctgggaagctacctgcattaagtcaggactgagcacacaggtgaactccagaaagaagaagctatggccgcagtgattctggagagcatctttctgaagcgatcccaacagaaaaagaaaacatcacctctaaacttcaagaagcgcctgtttctcttgaccgtgcacaaactctcctactatgagtatgactttgaacgtgggagaagaggcagtaagaagggttcaatagatgttgagaagatcacttgtgttgaaacagtggttcctgaaaaaaatcctcctccagaaagacagattccgagaagaggtgaagagtccagtgaaatggagcaaatttcaatcattgaaaggttcccttatcccttccaggttgtatatgatgaagggcctctctacgtcttctccccaactgaagaactaaggaagcggtggattcaccagctcaaaaacgtaatccggtacaacagtgatctggttcagaaatatcacccttgcttctggatcgatgggcagtatctctgctgctctcagacagccaaaaatgctatgggctgccaaattttggagaacaggaatggaagcttaaaacctgggagttctcaccggaagacaaaaaagcctcttcccccaacgcctgaggaggaccagatcttgaaaaagccactaccgcctgagccagcagcagcaccagtctccacaagtgagctgaaaaaggttgtggccctttatgattacatgccaatgaatgcaaatgatctacagctgcggaagggtgatgaatattttatcttggaggaaagcaacttaccatggtggagagcacgagataaaaatgggcaggaaggctacattcctagtaactatgtcactgaagcagaagactccatagaaatgtatgagtggtattccaaacacatgactcggagtcaggctgagcaactgctaaagcaagaggggaaagaaggaggtttcattgtcagagactccagcaaagctggcaaatatacagtgtctgtgtttgctaaatccacaggggaccctcaaggggtgatacgtcattatgttgtgtgttccacacctcagagccagtattacctggctgagaagcaccttttcagcaccatccctgagctcattaactaccatcagcacaactctgcaggactcatatccaggctcaaatatccagtgtctcaacaaaacaagaatgcaccttccactgcaggcctgggatacggatcatgggaaattgatccaaaggacctgaccttcttgaaggagctggggactggacaatttggggtagtgaagtatgggaaatggagaggccagtacgacgtggccatcaagatgatcaaagaaggctccatgtctgaagatgaattcattgaagaagccaaagtcatgatgaatctttcccatgagaagctggtgcagttgtatggcgtctgcaccaagcagcgccccatcttcatcatcactgagtacatggccaatggctgcctcctgaactacctgagggagatgcgccaccgcttccagactcagcagctgctagagatgtgcaaggatgtctgtgaagccatggaatacctggagtcaaagcagttccttcaccgagacctggcagctcgaaactgtttggtaaacgatcaaggagttgttaaagtatctgatttcggcctgtccaggtatgtcctggatgatgaatacacaagctcagtaggctccaaatttccagtccgttggtccccaccggaagtcctgatgtatagcaagttcagcagcaaatctgacatttgggcttttggggttttgatgtgggaaatttactccctggggaagatgccatatgagagatttactaacagtgagactgctgaacacattgcccaaggcctacgtctctacaggcctcatctggcttcagagaaggtatataccatcatgtacagttgctggcatgaggtaagtgctttattaggatctcttaaattatttccttgaatctacttgcccatttagctggccattcagccaccaaagactgatagctgcacacattcttttttttcctttttttttttttttaatttgagacaaggtctcgctctttcacccaggttggagtacagtgg

SEQ ID NO: 348030 - DNA, 1014 bp, Homo sapiens
gatcttatttcacttcatccttcttgtaaccatattgtcaatcaggaaagctcaatcagatacaaaaacaggaaattcgttaaaagtaacgtttgtagaagatactagttgaggaggagagacttttgagaaagcctgtgtgtgtttgtgacactcttgtgaccgtgccaagaaaacgtaagcaaatatcaagcctccaaatcctaatgcaacaagtcctgaatcccttggtatgtcctggatgatgaatacacaagctcagtaggctccaaatttccagtccgttggtccccaccggaagtcctgatgtatagcaagttcagcagcaaatctgacatttgggcttttggggttttgatgtgggaaatttactccctggggaagatgccatatgagagatttactaacagtgagactgctgaacacattgcccaaggcctacgtctctacaggcctcatctggcttcagagaaggtatataccatcatgtacagttgctggcatgagaaagcagatgagcgtcccactttcaaaattcttctgagcaatattctagatgtcatggatgaagaatcctgagctcgccaataagcttcttggttctacttctcttctccacaagccccaatttcactttctcagaggaaatcccaagcttaggagccctggagcctttgtgctcccactcaatacaaaaaggcccctctctacatctgggaatgcacctcttctttgattccctgggatagtggcttctgagcaaaggccaaaaaattattgtgcctgaaatttcccgagagaattaagacagactgaatttgcgatgaaaatattttttaggagggaggatgtaaatagccgcacaaaggggtccaacagctctttgagtaggcatttggtagagcttgggggtgtgtgtgtgggggtggaccgaatttggcaagaatgaaatggtgtcataaagatgggaggggagggtgttttgataaaataaaattactagaaagcttgaaa

SEQ ID NO: 348031 - DNA, 956 bp, Homo sapiens
gatcttatttcacttcatccttcttgtaaccatattgtcaatcaggaaagctcaatcagatacaaaaacaggaaattcgttaaaagtaacgtttgtagaagatactagttgaggaggagagacttttgagaaagcctgtgtgtgtttgtgacactcttgtgaccgtgccaaggtatgtcctggatgatgaatacacaagctcagtaggctccaaatttccagtccgttggtccccaccggaagtcctgatgtatagcaagttcagcagcaaatctgacatttgggcttttggggttttgatgtgggaaatttactccctggggaagatgccatatgagagatttactaacagtgagactgctgaacacattgcccaaggcctacgtctctacaggcctcatctggcttcagagaaggtatataccatcatgtacagttgctggcatgagaaagcagatgagcgtcccactttcaaaattcttctgagcaatattctagatgtcatggatgaagaatcctgagctcgccaataagcttcttggttctacttctcttctccacaagccccaatttcactttctcagaggaaatcccaagcttaggagccctggagcctttgtgctcccactcaatacaaaaaggcccctctctacatctgggaatgcacctcttctttgattccctgggatagtggcttctgagcaaaggccaaaaaattattgtgcctgaaatttcccgagagaattaagacagactgaatttgcgatgaaaatattttttaggagggaggatgtaaatagccgcacaaaggggtccaacagctctttgagtaggcatttggtagagcttgggggtgtgtgtgtgggggtggaccgaatttggcaagaatgaaatggtgtcataaagatgggaggggagggtgttttgataaaataaaattactagaaagcttgaaa

SEQ ID NO: 348032 - DNA, 540 bp, Homo sapiens
gaggacctaagagtatgaaaaattctaagagcttttaaacgctacattcctagatatgaagagttcaggaatccttcagatagttcacataacctgaacaccattgctgactgaagattctgcctttctttgttttctacaataaatatacaaattgtcccctaagattagtactttcaaggtctttctccttttttctgaatcctaactgctgaagtctgtgttttcatcgacccaggttgtatatgatgaagggcctctctacgtcttctccccaactgaagaactaaggaagcggtggattcaccagctcaaaaacggtgagaattatttggaaaataaatgtttccaaagaaagaaggaaaggaaggaagaggagatagacgggaggaaaaggaaagaaggaagagagaaacgagaaagaaagagaaaggagaaacgtagagagaaaagaagaaaaaaatggatagaaggggagaaaagaaagagagagggaggggaggagggagacaggaaggaaggaagcaaggaaagaaggaa

SEQ ID NO: 348033 - DNA, 491 bp, Homo sapiens
aatccttggggagtgcttactgtgtgtcagccaccacaggggtttctgaggatgaaaactaaactggacatgatctctgcctttttagaacttaaaccatgttaaggaaaacaattcattcagttttcaacagcttctgaatactgattatgtaccaggcactctgccagaccctataactgcaaagacaaataagatgctgtctctcttctagaggagttaatagtctagtacgaccttgatctccatctagtgtggtcagtactatagcagaaatttgggcaaaatataaaaagcacagagcggggaaccaactgattctaatctttgaggttgatctaggaagactaggacccctgctatccaaaaagactgcaaaccaatttaataatttttttcaccttctaggggttttgatgtgggaaatttactccctggggaagatgccatatgagagatttactaacagtgagactgctgaacacattgcc

SEQ ID NO: 348034 - DNA, 2563 bp, Homo sapiens
ctctctggactgtaagaatatgtctccagggccagtgtctgctgcgatcgagtcccaccttccaagtcctggcatctcaatgcatctgggaagctacctgcattaagtcaggactgagcacacaggtgaactccagaaagaagaagctatggccgcagtgattctggagagcatctttctgaagcgatcccaacagaaaaagaaaacatcacctctaaacttcaagaagcgcctgtttctcttgaccgtgcacaaactctcctactatgagtatgactttgaacgtgggagaagaggcagtaagaagggttcaatagatgttgagaagatcacttgtgttgaaacagtggttcctgaaaaaaatcctcctccagaaagacagattccgagaagaggtgaagagtccagtgaaatggagcaaatttcaatcattgaaaggttcccttatcccttccaggttgtatatgatgaagggcctctctacgtcttctccccaactgaagaactaaggaagcggtggattcaccagctcaaaaacgtaatccggtacaacagtgatctggttcagaaatatcacccttgcttctggatcgatgggcagtatctctgctgctctcagacagccaaaaatgctatgggctgccaaattttggagaacaggaatggaagcttaaaacctgggagttctcaccggaagacaaaaaagcctcttcccccaacgcctgaggaggaccagatcttgaaaaagccactaccgcctgagccagcagcagcaccagtctccacaagtgagctgaaaaaggttgtggccctttatgattacatgccaatgaatgcaaatgatctacagctgcggaagggtgatgaatattttatcttggaggaaagcaacttaccatggtggagagcacgagataaaaatgggcaggaaggctacattcctagtaactatgtcactgaagcagaagactccatagaaatgtatgagtggtattccaaacacatgactcggagtcaggctgagcaactgctaaagcaagaggggaaagaaggaggtttcattgtcagagactccagcaaagctggcaaatatacagtgtctgtgtttgctaaatccacaggggaccctcaaggggtgatacgtcattatgttgtgtgttccacacctcagagccagtattacctggctgagaagcaccttttcagcaccatccctgagctcattaactaccatcagcacaactctgcaggactcatatccaggctcaaatatccagtgtctcaacaaaacaagaatgcaccttccactgcaggcctgggatacggatcatgggaaattgatccaaaggacctgaccttcttgaaggagctggggactggacaatttggggtagtgaagtatgggaaatggagaggccagtacgacgtggccatcaagatgatcaaagaaggctccatgtctgaagatgaattcattgaagaagccaaagtcatgatgaatctttcccatgagaagctggtgcagttgtatggcgtctgcaccaagcagcgccccatcttcatcatcactgagtacatggccaatggctgcctcctgaactacctgagggagatgcgccaccgcttccagactcagcagctgctagagatgtgcaaggatgtctgtgaagccatggaatacctggagtcaaagcagttccttcaccgagacctggcagctcgaaactgtttggtaaacgatcaaggagttgttaaagtatctgatttcggcctgtccaggtatgtcctggatgatgaatacacaagctcagtaggctccaaatttccagtccgttggtccccaccggaagtcctgatgtatagcaagttcagcagcaaatctgacatttgggcttttggggttttgatgtgggaaatttactccctggggaagatgccatatgagagatttactaacagtgagactgctgaacacattgcccaaggcctacgtctctacaggcctcatctggcttcagagaaggtatataccatcatgtacagttgctggcatgagaaagcagatgagcgtcccactttcaaaattcttctgagcaatattctagatgtcatggatgaagaatcctgagctcgccaataagcttcttggttctacttctcttctccacaagccccaatttcactttctcagaggaaatcccaagcttaggagccctggagcctttgtgctcccactcaatacaaaaaggcccctctctacatctgggaatgcacctcttctttgattccctgggatagtggcttctgagcaaaggccaaaaaattattgtgcctgaaatttcccgagagaattaagacagactgaatttgcgatgaaaatattttttaggagggaggatgtaaatagccgcacaaaggggtccaacagctctttgagtaggcatttggtagagcttgggggtgtgtgtgtgggggtggaccgaatttggcaagaatgaaatggtgtcataaagatgggaggggagggtgttttgataaaataaaattactagaaagcttgaaa

SEQ ID NO: 348035 - DNA, 585 bp, Homo sapiens
ttcgtcactttatctcttttggtggactctgctacgtagtggcgttcagtgaagggagcagtgtttttcccagatcctctggcctccccgtccccgagggaagccaggactagggtcgaatgaaggggtcctccacctccacgttccattcctgttccacctcaaggtcactgggaacacctttcgcagcaaactgctaattcaatgaagacctggagggagccaattgttccagttcatctatcacatggccagttggtccattcaacaaatggttattggatgcccattatgtggcaggcactgttccgggggagagcacacaggtgaactccagaaagaagaagctatggccgcagtgattctggagagcatctttctgaagcgatcccaacagaaaaagaaaacatcacctctaaacttcaagaagcgcctgtttctcttgaccgtgcacaaactctcctactatgagtatgactttgaacgtgggaaaagaggcaataaaaagggttcatagatgttgaaaaaatcattgtgtagtaacagcgaaagctggaatttactccataaagctatcgtttggat

SEQ ID NO: 348036 - DNA, 2177 bp, Homo sapiens
ctctctggactgtaagaatatgtctccagggccagtgtctgctgcgatcgagtcccaccttccaagtcctggcatctcaatgcatctgggaagctacctgcattaagtcaggactgagcacacaggtgaactccagaaagaagaagctatggccgcagtgattctggagagcatctttctgaagcgatcccaacagaaaaagaaaacatcacctctaaacttcaagaagcgcctgtttctcttgaccgtgcacaaactctcctactatgagtatgactttgaacgtgggagaagaggcagtaagaagggttcaatagatgttgagaagatcacttgtgttgaaacagtggttcctgaaaaaaatcctcctccagaaagacagattccgagaagaggtgaagagtccagtgaaatggagcaaatttcaatcattgaaaggttcccttatcccttccaggttgtatatgatgaagggcctctctacgtcttctccccaactgaagaactaaggaagcggtggattcaccagctcaaaaacgtaatccggtacaacagtgatctggttcagaaatatcacccttgcttctggatcgatgggcagtatctctgctgctctcagacagccaaaaatgctatgggctgccaaattttggagaacaggaatggaagcttaaaacctgggagttctcaccggaagacaaaaaagcctcttcccccaacgcctgaggaggaccagatcttgaaaaagccactaccgcctgagccagcagcagcaccagtctccacaagtgagctgaaaaaggttgtggccctttatgattacatgccaatgaatgcaaatgatctacagctgcggaagggtgatgaatattttatcttggaggaaagcaacttaccatggtggagagcacgagataaaaatgggcaggaaggctacattcctagtaactatgtcactgaagcagaagactccatagaaatgtatgagtggtattccaaacacatgactcggagtcaggctgagcaactgctaaagcaagaggggaaagaaggaggtttcattgtcagagactccagcaaagctggcaaatatacagtgtctgtgtttgctaaatccacaggggaccctcaaggggtgatacgtcattatgttgtgtgttccacacctcagagccagtattacctggctgagaagcaccttttcagcaccatccctgagctcattaactaccatcagcacaactctgcaggactcatatccaggctcaaatatccagtgtctcaacaaaacaagaatgcaccttccactgcaggcctgggatacggatcatgggaaattgatccaaaggacctgaccttcttgaaggagctggggactggacaatttggggtagtgaagtatgggaaatggagaggccagtacgacgtggccatcaagatgatcaaagaaggctccatgtctgaagatgaattcattgaagaagccaaagtcatgatgaatctttcccatgagaagctggtgcagttgtatggcgtctgcaccaagcagcgccccatcttcatcatcactgagtacatggccaatggctgcctcctgaactacctgagggagatgcgccaccgcttccagactcagcagctgctagagatgtgcaaggatgtctgtgaagccatggaatacctggagtcaaagcagttccttcaccgagacctggtgggaccttagaaggattggcctaggacaaagggctgatggggtggaagtagcagtggaagatatatcatacatggttgaggggggctgctggtgccatcatttcaattttatctagaaagtactataagttaggcgtgcctctgccccagtgctgagcccatcaaatatctccagcctcagctccatgaagtctgccgtggtgggaatcagagcagtcactcactcccaaccccctaccacccacaagaaaatggtggggtctttcagtggccattctggatttggaacagaagggactgtgcttcccaatgggactgctcctggcatggggccatcatttggttccttcagagtcacatactggggcctgtggatgcatttggcccacatgtgtgggttttttttatgttatataataattagcaaacccttaaaaagaaacatttcgcttaaaaaaaaa

SEQ ID NO: 348037 - DNA, 3824 bp, Homo sapiens
agtcatttttccagcgtgaattgatttttaatagcaaaatggcattttacacagaagcagctacattcatggatgaaaacaaaaatccaagtgacgctcctttgttgaatccatgtaaaaatctgatttttaatctacagagaaatttctacccacacattcggtatcccctgggggtaatgacatggaaaacaaacatcttttctggtctgttaaagtaaaacaatgggtccctggatagactctcaagagggcctttgatggaatggaaccagtccccccaccccgaaagcatccccccagctcaatatgtcaccatttacaccagcacagccctcacattgggtccacagcacaacctattaagaaaggattataacacctgttcggattgggaggccaattcctcagctctaagatcctgctcatagcaagcttgatgttcagtagactccaaagcagactgaatgagggaggggtcgaagagaatgtgcctgcttgggctcagcctcctctaatattgtcaagatgcacacacactcttagaatctcacaaccatcgccaatctctatgttggcctagtcccaatccttctgcctctgggaacaaaaggttcattacccaccaaggcatatttttccctctctgggaccaggatcagctcttgcaagcttactccacacttgtatctgccccttgcagccatgcatgacaaatgggctccctccccaatggaattatcttatagacttgcagcctatgactgtgtttcccctgatcttctccagggacttcccaccaccatgggatgacatgttttcaagattgctccccttccgagcctttattttcaccttggtcctctttactttccagtcattgcagagatacttccaactggggtagacatgtatggattctgtttatcaaaagatggaccaaagggtcttcctagtttcaaaaagttctgctcagttgtctaaaatgtggccagaggccattgcaaactcctctgagttccacctgggctggaaaagccaaatggccagcctaaaactcaaatccactaactccctttctcagatcatatccgtcgctccccaaggcctaaggataaaatctaaacttcttggcaaccagacccggcaccatgtccatgtctcctatctcttgctacattccacatgaaccttccagaacctctttggatcctctctgatccccagaaactggtgtccaccactctcgctgcccggaactcatccccacccacactccacccagccacagctcagcttagatgcctccctctccagaaagccaccacagggtggattaggtgtctctctgtccccattccacccccctgcacccaacacactagaattaaagctcctgaagaccaaatggtgtttaactaccactacatccccaatgcctggcacacgcctggcacagagtaggtgcacatcaatcttgtctgtctccttggtgctcccacagacccctgaccaatcataacacccatctcactgaatcactatctacttcaccaactctcccactaggctataaaagcaccatgacgaaaaagcccaggtgcaggtcccagcgcccagagcagtgcctggcacatagtagatccttagcagcatcaagtctttgcagttaaacaaagaggagtttcaggaataggagatgtgagcttcctgctttgagtgaaatggagcaaggcagccactagagatggcaggcaggcacttccgggtgtagactaccccatccaaggtccctgccagcagccaaggcatgttctcaaagctctttctaagacatcttttctctcttgtgccctctgcagctcaggcctctggatcacccttcacccccactgccaactacaattggttagctctgagtccacagttgccagagaaaagggctctcagcaccagactagcattcaacgacccaagcaacctgcctctaaggtgtctgccatgtgctgagacccttatattgacgggaatcctcactgcaacctgtaaggtatcagaactcgcattctaccactgaggaaactgaggttgagagaagtgaggtgacttactcaaactcactcaacaggaagtggcagagctggtgagtcttatttgcattctctgtcctggaacgtgggtctgcacaaagatcccagcccataggcagagccttctggagccttggctgcccccatatcccagccccttgaaaggcccatgagctgcacagttagtaggatctggctgcgggggggtggttagtagggcatgctcgggcctggttagtgggttagttggttggcagaaggccaggcacctcgtcacacgccacagcgtcccggctgagccctgggttagtaggttaatcacaccatgcaacactgccccggcccctccagctgcagcttcagaggcctcccgcccccaccagccagggagtggggcctgaccagggcagggggtctaactctaagccccccagccccatcaaaatcaaccctaaccacatggaccctgaccaaaagcatgttgcttccctatttattggctgtgggtctcagagcaccccctgcaaatatttcagctcccctgaaaatggaccctacttgtcctagacagaaaccccctgcctggttctggtcagccccttcccagagggctggatcctgttacactctgacagacacacgcacaccagcatctctccgcaaaagatctgacaaccgtgcttagtagacatctcttccatcaccgactgtcaggcctctagtttctccaactattggcctgccctcccaccattagaaaaaaaaaaaacgcatcaagctggcctgccaatgctacaaagcacctaagtgtaccctaattatgccatcttctatcactgctgtacttttcccatagaaaccccagcctagcatctcccacagttctaaacgatgttccatgagaaaaagattctacggccataaaagtcaaggaacacttcatcctatgccctgtccctgagtatttgaaattgccattagcattttaaaggttctgataagtcctgcactacttcagtagtgcagcggaatttgaattagaacctgcttttttttttttttttttttttttaaggagcaatgacatttcctagaagttactctaagaatttccctagagggtcgggtatcatctcagccagatctttctcatccttcaaggccctgtttggtacagcttgctaggaagctgttccagactgcagcagccctctctggggtctctctaccacttcccaggcactcagaacttgtgcctcagtagactgttttgtggcactgtcccattctctgattctccatgtgagctggttttatcccatccagcatggctgtgaaatcctaaaggttcaaaccccagccactcttcacctatatttcccccaaatggctagcacgggaaagggcccaaagtaggtgctcagtgctgatgagagagtagaatttaaataccccaggaagcattgtgagttactacggaggccatgaaatgctgccacctccccaagctgattaaagagtgatactaggaaaataggtagggaagggctaatcagaaatgcctctggttcagaagatgctgagttttaaagtccagagagccaaaaaaaaaaaaaatagataaaccctaagtctatactcccagatggatgggagcatttgctgagcacctactgggagtcaggcactgtgctaggcacacaatctcactgaattctccctgcacctgacagg

SEQ ID NO: 348038 - DNA, 3382 bp, Homo sapiens
agtcatttttccagcgtgaattgatttttaatagcaaaatggcattttacacagaagcagctacattcatggatgaaaacaaaaatccaagtgacgctcctttgttgaatccatgtaaaaatctgatttttaatctacagagaaatttctacccacacattcggtatcccctgggggtaatgacatggaaaacaaacatcttttctggtctgttaaagtaaaacaatgggtccctggatagactctcaagagggcctttgatggaatggaaccagtccccccaccccgaaagcatccccccagctcaatatgtcaccatttacaccagcacagccctcacattgggtccacagcacaacctattaagaaaggattataacacctgttcggattgggaggccaattcctcagctctaagatcctgctcatagcaagcttgatgttcagtagactccaaagcagactgaatgagggaggggtcgaagagaatgtgcctgcttgggctcagcctcctctaatattgtcaagatgcacacacactcttagaatctcacaaccatcgccaatctctatgttggcctagtcccaatccttctgcctctgggaacaaaaggttcattacccaccaaggcatatttttccctctctgggaccaggatcagctcttgcaagcttactccacacttgtatctgccccttgcagccatgcatgacaaatgggctccctccccaatggaattatcttatagacttgcagcctatgactgtgtttcccctgatcttctccagggacttcccaccaccatgggatgacatgttttcaagattgctccccttccgagcctttattttcaccttggtcctctttactttccagtcattgcagagatacttccaactggggtagacatgtatggattctgtttatcaaaagatggaccaaagggtcttcctagtttcaaaaagttctgctcagttgtctaaaatgtggccagaggccattgcaaactcctctgagttccacctgggctggaaaagccaaatggccagcctaaaactcaaatccactaactccctttctcagatcatatccgtcgctccccaaggcctaaggataaaatctaaacttcttggcaaccagacccggcaccatgtccatgtctcctatctcttgctacattccacatgaaccttccagaacctctttggatcctctctgatccccagaaactggtgtccaccactctcgctgcccggaactcatccccacccacactccacccagccacagctcagcttagatgcctccctctccagaaagccaccacagggtggattaggtgtctctctgtccccattccacccccctgcacccaacacactagaattaaagctcctgaagaccaaatggtgtttaactaccactacatccccaatgcctggcacacgcctggcacagagtaggtgcacatcaatcttgtctgtctccttggtgctcccacagacccctgaccaatcataacacccatctcactgaatcactatctacttcaccaactctcccactaggctataaaagcaccatgacgaaaaagcccaggtgcaggtcccagcgcccagagcagtgcctggcacatagtagatccttagcagcatcaagtctttgcagttaaacaaagaggagtttcaggaataggagatgtgagcttcctgctttgagtgaaatggagcaaggcagccactagagatggcaggcaggcacttccgggtgtagactaccccatccaaggtccctgccagcagccaaggcatgttctcaaagctctttctaagacatcttttctctcttgtgccctctgcagctcaggcctctggatcacccttcacccccactgccaactacaattggttagctctgagtccacagttgccagagaaaagggctctcagcaccagactagcattcaacgacccaagcaacctgcctctaaggtctgtaagccagcctttgacctgtccctaaactgatccaatcctccaggccctgccttgaactgtcttctcctgcagactctgactaccagactgagtcagcaaaaccttgaactagtgccaccttttacctgcacctggaatcccttgcgtatgctccctgcccctctactcccaaaggacgttccctcagtctaaagagatcaaaagtcccttccagaaaaactcccgtttcctcggtgcagctaaattgcacagaagagtttatgctagaagagctaaaagttagaacaggaagctcagataatttatactactaacatgtaaatgactgacggagttataacccttctgaatactctgatctaaagctttatgtcctagaacttccaaaacacaaagtccccaaaatgaagactctaggccctggcctggggaagggtgactctatacaaaatggcatatgctctgtagacaccagacaggtattttaaggtttataagagctgcatctacttgtgcaaactactgtagctataaggctatatatttttaagaactgaaaccaaatgcagactatgaggagtgaagatatgcccaatggccaaaaccttgcaagactggctatacttctgaccccaccttggtgggtaccactgctccatcaggcctggtccacaccagagccctggcacctcctttagaaaactaccatctttaccgacttctgattgttctgactcagagcagccaccacgcccaaaattgttagctatgcttttccctgtgttagtcaagttcaaacctgtgttagccaagttcaaacctgtgttagccaagttcaaagctgtgttagccccttcccagccatgccgacatccaagctgttaacagtaacgaggaatgttagacctgttgttagtcagaaaaaaatccacaaaccattagtttctgctgaaaggaacagaccaggaaggcaggagttagtcaaggtgaaggaaaggttaattaagaactggtcagggccaggccaggagcctggaacccccagacagggccaggttggttgttagtggtcagcccctggggcagtcagggtgaggcagggattagctgggtgagagcaagagttagcgcaagggagccagagattagcccaaagaaaccaaggtgcctactggaggtgaggcatgaaatcacccccaggtgtggccccggcttagcggctggcgggctctgggggaggctggctgaggcagtgacgtccgtgggaacagagagccagagatgcattcctggccggcctgagcatctgcgggaaccctgtgagcccctgaggttcacttcttgctccccacttctctctcctgcaaactccgagcccggggta

SEQ ID NO: 348039 - DNA, 2545 bp, Homo sapiens
agtcatttttccagcgtgaattgatttttaatagcaaaatggcattttacacagaagcagctacattcatggatgaaaacaaaaatccaagtgacgctcctttgttgaatccatgtaaaaatctgatttttaatctacagagaaatttctacccacacattcggtatcccctgggggtaatgacatggaaaacaaacatcttttctggtctgttaaagtaaaacaatgggtccctggatagactctcaagagggcctttgatggaatggaaccagtccccccaccccgaaagcatccccccagctcaatatgtcaccatttacaccagcacagccctcacattgggtccacagcacaacctattaagaaaggattataacacctgttcggattgggaggccaattcctcagctctaagatcctgctcatagcaagcttgatgttcagtagactccaaagcagactgaatgagggaggggtcgaagagaatgtgcctgcttgggctcagcctcctctaatattgtcaagatgcacacacactcttagaatctcacaaccatcgccaatctctatgttggcctagtcccaatccttctgcctctgggaacaaaaggttcattacccaccaaggcatatttttccctctctgggaccaggatcagctcttgcaagcttactccacacttgtatctgccccttgcagccatgcatgacaaatgggctccctccccaatggaattatcttatagacttgcagcctatgactgtgtttcccctgatcttctccagggacttcccaccaccatgggatgacatgttttcaagattgctccccttccgagcctttattttcaccttggtcctctttactttccagtcattgcagagatacttccaactggggtagacatgtatggattctgtttatcaaaagatggaccaaagggtcttcctagtttcaaaaagttctgctcagttgtctaaaatgtggccagaggccattgcaaactcctctgagttccacctgggctggaaaagccaaatggccagcctaaaactcaaatccactaactccctttctcagatcatatccgtcgctccccaaggcctaaggataaaatctaaacttcttggcaaccagacccggcaccatgtccatgtctcctatctcttgctacattccacatgaaccttccagaacctctttggatcctctctgatccccagaaactggtgtccaccactctcgctgcccggaactcatccccacccacactccacccagccacagctcagcttagatgcctccctctccagaaagccaccacagggtggattaggtgtctctctgtccccattccacccccctgcacccaacacactagaattaaagctcctgaagaccaaatggtgtttaactaccactacatccccaatgcctggcacacgcctggcacagagtaggtgcacatcaatcttgtctgtctccttggtgctcccacagacccctgaccaatcataacacccatctcactgaatcactatctacttcaccaactctcccactaggctataaaagcaccatgacgaaaaagcccaggtgcaggtcccagcgcccagagcagtgcctggcacatagtagatccttagcagcatcaagtctttgcagttaaacaaagaggagtttcaggaataggagatgtgagcttcctgctttgagtgaaatggagcaaggcagccactagagatggcaggcaggcacttccgggtgtagactaccccatccaaggtccctgccagcagccaaggcatgttctcaaagctctttctaagacatcttttctctcttgtgccctctgcagctcaggcctctggatcacccttcacccccactgccaactacaattggttagctctgagtccacagttgccagagaaaagggctctcagcaccagactagcattcaacgacccaagcaacctgcctctaaggtgtctgccatgtgctgagacccttatattgacgggaatcctcactgcaacctgtaaggtatcagaactcgcattctaccactgaggaaactgaggttgagagaagtgaggtgacttactcaaactcactcaacaggaagtggcagagctggtgagtcttatttgcattctctgtcctggaacgtgggtctgcacaaagatcccagcccataggcagagccttctggagccttggctgcccccatatcccagccccttgaaaggcccatgagctgcacagttagtaggatctggctgcgggggggtggttagtagggcatgctcgggcctggttagtgggttagttggttggcagaaggccaggcacctcgtcacacgccacagcgtcccggctgagccctgggttagtaggttaatcacaccatgcaacactgccccggcccctccagctgcagcttcagaggcctcccgcccccaccagccagggtggtggcggcgcctgtaatcccagctactcaggaggctgaggcaggagaattgcttgaacccggga

SEQ ID NO: 348040 - DNA, 2766 bp, Homo sapiens
agtcatttttccagcgtgaattgatttttaatagcaaaatggcattttacacagaagcagctacattcatggatgaaaacaaaaatccaagtgacgctcctttgttgaatccatgtaaaaatctgatttttaatctacagagaaatttctacccacacattcggtatcccctgggggtaatgacatggaaaacaaacatcttttctggtctgttaaagtaaaacaatgggtccctggatagactctcaagagggcctttgatggaatggaaccagtccccccaccccgaaagcatccccccagctcaatatgtcaccatttacaccagcacagccctcacattgggtccacagcacaacctattaagaaaggattataacacctgttcggattgggaggccaattcctcagctctaagatcctgctcatagcaagcttgatgttcagtagactccaaagcagactgaatgagggaggggtcgaagagaatgtgcctgcttgggctcagcctcctctaatattgtcaagatgcacacacactcttagaatctcacaaccatcgccaatctctatgttggcctagtcccaatccttctgcctctgggaacaaaaggttcattacccaccaaggcatatttttccctctctgggaccaggatcagctcttgcaagcttactccacacttgtatctgccccttgcagccatgcatgacaaatgggctccctccccaatggaattatcttatagacttgcagcctatgactgtgtttcccctgatcttctccagggacttcccaccaccatgggatgacatgttttcaagattgctccccttccgagcctttattttcaccttggtcctctttactttccagtcattgcagagatacttccaactggggtagacatgtatggattctgtttatcaaaagatggaccaaagggtcttcctagtttcaaaaagttctgctcagttgtctaaaatgtggccagaggccattgcaaactcctctgagttccacctgggctggaaaagccaaatggccagcctaaaactcaaatccactaactccctttctcagatcatatccgtcgctccccaaggcctaaggataaaatctaaacttcttggcaaccagacccggcaccatgtccatgtctcctatctcttgctacattccacatgaaccttccagaacctctttggatcctctctgatccccagaaactggtgtcctctgcagctcaggcctctggatcacccttcacccccactgccaactacaattggttagctctgagtccacagttgccagagaaaagggctctcagcaccagactagcattcaacgacccaagcaacctgcctctaaggtctgtaagccagcctttgacctgtccctaaactgatccaatcctccaggccctgccttgaactgtcttctcctgcagactctgactaccagactgagtcagcaaaaccttgaactagtgccaccttttacctgcacctggaatcccttgcgtatgctccctgcccctctactcccaaaggacgttccctcagtctaaagagatcaaaagtcccttccagaaaaactcccgtttcctcggtgcagctaaattgcacagaagagtttatgctagaagagctaaaagttagaacaggaagctcagataatttatactactaacatgtaaatgactgacggagttataacccttctgaatactctgatctaaagctttatgtcctagaacttccaaaacacaaagtccccaaaatgaagactctaggccctggcctggggaagggtgactctatacaaaatggcatatgctctgtagacaccagacaggtattttaaggtttataagagctgcatctacttgtgcaaactactgtagctataaggctatatatttttaagaactgaaaccaaatgcagactatgaggagtgaagatatgcccaatggccaaaaccttgcaagactggctatacttctgaccccaccttggtgggtaccactgctccatcaggcctggtccacaccagagccctggcacctcctttagaaaactaccatctttaccgacttctgattgttctgactcagagcagccaccacgcccaaaattgttagctatgcttttccctgtgttagtcaagttcaaacctgtgttagccaagttcaaacctgtgttagccaagttcaaagctgtgttagccccttcccagccatgccgacatccaagctgttaacagtaacgaggaatgttagacctgttgttagtcagaaaaaaatccacaaaccattagtttctgctgaaaggaacagaccaggaaggcaggagttagtcaaggtgaaggaaaggttaattaagaactggtcagggccaggccaggagcctggaacccccagacagggccaggttggttgttagtggtcagcccctggggcagtcagggtgaggcagggattagctgggtgagagcaagagttagcgcaagggagccagagattagcccaaagaaaccaaggtgcctactggaggtgaggcatgaaatcacccccaggtgtggccccggcttagcggctggcgggctctgggggaggctggctgaggcagtgacgtccgtgggaacagagagccagagatgcattcctggccggcctgagcatctgcgggaaccctgtgagcccctgaggttcacttcttgctccccacttctctctcctgcaaactccgagcccggggta

SEQ ID NO: 348041 - DNA, 961 bp, Homo sapiens
agtcatttttccagcgtgaattgatttttaatagcaaaatggcattttacacagaagcagctacattcatggatgaaaacaaaaatccaagtgacgctcctttgttgaatccatgtaaaaatctgatttttaatctacagagaaatttctacccacacattcggtatcccctgggggtaatgacatggaaaacaaacatcttttctggtctgttaaagtaaaacaatgggtccctggatagactctcaagagggcctttgatggaatggaaccagtccccccaccccgaaagcatccccccagctcaatatgtcaccatttacaccagcacagccctcacattgggtccacagcacaacctattaagaaaggattataacacctgttcggattgggaggccaattcctcagctctaagatcctgctcatagcaagcttgatgttcagtagactccaaagcagactgaatgagggaggggtcgaagagaatgtgcctgcttgggctcagcctcctctaatattgtcaagatgcacacacactcttagaatctcacaaccatcgccaatctctatgttggcctagtcccaatccttctgcctctgggaacaaaaggttcattacccaccaaggcatatttttccctctctgggaccaggatcagctcttgcaagcttactccacacttgtatctgccccttgcagccatgcatgacaaatgggctccctccccaatggaattatcttatagacttgcagcctatgactgtgtttcccctgatcttctccagggacttcccaccaccatgggatgacatgttttcaagattgctccccttccgagcctttattttcaccttggtcctctttactttccagtcattgcagagatacttccaactggggtagagagagagagagagagagagagtgagagagagagagagagagccagtgtggaga

SEQ ID NO: 348042 - DNA, 3360 bp, Homo sapiens
ggcaagccagtcttatatgggggttgcagaaaagtccccgttggcaaccctctttgatgtgcacatgcacacacactcttagaatctcacaaccatcgccaatctctatgttggcctagtcccaatccttctgcctctgggaacaaaaggttcattacccaccaaggcatatttttccctctctgggaccaggatcagctcttgcaagcttactccacacttgtatctgccccttgcagccatgcatgacaaatgggctccctccccaatggaattatcttatagacttgcagcctatgactgtgtttcccctgatcttctccagggacttcccaccaccatgggatgacatgttttcaagattgctccccttccgagcctttattttcaccttggtcctctttactttccagtcattgcagagatacttccaactggggtagacatgtatggattctgtttatcaaaagatggaccaaagggtcttcctagtttcaaaaagttctgctcagttgtctaaaatgtggccagaggccattgcaaactcctctgagttccacctgggctggaaaagccaaatggccagcctaaaactcaaatccactaactccctttctcagatcatatccgtcgctccccaaggcctaaggataaaatctaaacttcttggcaaccagacccggcaccatgtccatgtctcctatctcttgctacattccacatgaaccttccagaacctctttggatcctctctgatccccagaaactggtgtccaccactctcgctgcccggaactcatccccacccacactccacccagccacagctcagcttagatgcctccctctccagaaagccaccacagggtggattaggtgtctctctgtccccattccacccccctgcacccaacacactagaattaaagctcctgaagaccaaatggtgtttaactaccactacatccccaatgcctggcacacgcctggcacagagtaggtgcacatcaatcttgtctgtctccttggtgctcccacagacccctgaccaatcataacacccatctcactgaatcactatctacttcaccaactctcccactaggctataaaagcaccatgacgaaaaagcccaggtgcaggtcccagcgcccagagcagtgcctggcacatagtagatccttagcagcatcaagtctttgcagttaaacaaagaggagtttcaggaataggagatgtgagcttcctgctttgagtgaaatggagcaaggcagccactagagatggcaggcaggcacttccgggtgtagactaccccatccaaggtccctgccagcagccaaggcatgttctcaaagctctttctaagacatcttttctctcttgtgccctctgcagctcaggcctctggatcacccttcacccccactgccaactacaattggttagctctgagtccacagttgccagagaaaagggctctcagcaccagactagcattcaacgacccaagcaacctgcctctaaggtgtctgccatgtgctgagacccttatattgacgggaatcctcactgcaacctgtaaggtatcagaactcgcattctaccactgaggaaactgaggttgagagaagtgaggtgacttactcaaactcactcaacaggaagtggcagagctggtgagtcttatttgcattctctgtcctggaacgtgggtctgcacaaagatcccagcccataggcagagccttctggagccttggctgcccccatatcccagccccttgaaaggcccatgagctgcacagttagtaggatctggctgcgggggggtggttagtagggcatgctcgggcctggttagtgggttagttggttggcagaaggccaggcacctcgtcacacgccacagcgtcccggctgagccctgggttagtaggttaatcacaccatgcaacactgccccggcccctccagctgcagcttcagaggcctcccgcccccaccagccagggagtggggcctgaccagggcagggggtctaactctaagccccccagccccatcaaaatcaaccctaaccacatggaccctgaccaaaagcatgttgcttccctatttattggctgtgggtctcagagcaccccctgcaaatatttcagctcccctgaaaatggaccctacttgtcctagacagaaaccccctgcctggttctggtcagccccttcccagagggctggatcctgttacactctgacagacacacgcacaccagcatctctccgcaaaagatctgacaaccgtgcttagtagacatctcttccatcaccgactgtcaggcctctagtttctccaactattggcctgccctcccaccattagaaaaaaaaaaaacgcatcaagctggcctgccaatgctacaaagcacctaagtgtaccctaattatgccatcttctatcactgctgtacttttcccatagaaaccccagcctagcatctcccacagttctaaacgatgttccatgagaaaaagattctacggccataaaagtcaaggaacacttcatcctatgccctgtccctgagtatttgaaattgccattagcattttaaaggttctgataagtcctgcactacttcagtagtgcagcggaatttgaattagaacctgcttttttttttttttttttttttttaaggagcaatgacatttcctagaagttactctaagaatttccctagagggtcgggtatcatctcagccagatctttctcatccttcaaggccctgtttggtacagcttgctaggaagctgttccagactgcagcagccctctctggggtctctctaccacttcccaggcactcagaacttgtgcctcagtagactgttttgtggcactgtcccattctctgattctccatgtgagctggttttatcccatccagcatggctgtgaaatcctaaaggttcaaaccccagccactcttcacctatatttcccccaaatggctagcacgggaaagggcccaaagtaggtgctcagtgctgatgagagagtagaatttaaataccccaggaagcattgtgagttactacggaggccatgaaatgctgccacctccccaagctgattaaagagtgatactaggaaaataggtagggaagggctaatcagaaatgcctctggttcagaagatgctgagttttaaagtccagagagccaaaaaaaaaaaaaatagataaaccctaagtctatactcccagatggatgggagcatttgctgagcacctactgggagtcaggcactgtgctaggcacacaatctcactgaattctccctgcacctgacagg

SEQ ID NO: 348043 - DNA, 1682 bp, Homo sapiens
tttttgtatgcaccacgggcggcggtggtcggtgcgggaggagggaggggagcttgcgggcccgagagggggcgacggcggcggcggtggcctgaggaggcccgagcggcggcggtggcggcgaaggccgaggcgtctaggtgtttttggaagagctgcagccctcttctcacagatgagctacgaggagatgatgacactgactgagcagcacctggagtctcagaacgtcaccaaaggtgcccgccacaagatagccctgagcatccagaagctgcgtgagagacagagcgtcctcaagtccctagagaaggatgtgctggaaggcgggaacctacgaaacgctctgcaggagctgcagcagatcatcatcactcccatcaaggcctacagtgtcctccaggccaccgtggctgccgccaccaccacccctactgccaaggatggggccccgggggaaccaccgctgccaggtgctgagcctcccctagcccaccccggcacagacaaaggcaccgaggccagagccgggaccatgtgacggcgctggccctcgccaccgccgtcccccgaccctggccccaggcccggcaccatgatgttccgagaccaggtgggcatcctcgctggctggttcaaaggctggaatgagtgtgagcagacagtggccctcctgtcacttccgaaacgggtcacccgtacccaggcccgcttcctgcagctctgcctggagcactcactggcggactgcaatgacatccacctgctggagtcggaggccaacagtgctgccatcgtcagccagtggcagcaggagtccaaagagaaggtggtgtccctcctgctgtcccaccttcccctgcttcagccaggcaacacagaggccaagtcggagtacatgaggctactgcagaaagtgctggcctactcaatcgagagcaatgctttcatcgaggagagtcgccagctgctttcctatgccctcatccacccagccaccacactggaggaccgcaacgcactggccctctggctgagccacctggaagagcggttggctagtggcttccgctcccggccagagccctcctaccattcacgtcaaggctcagatgagtgggggggccctgcagagctaggccctggggaggcagggccaggctggcaggacaagccaccccgggaaaatggacacgtgcccttccacccatccagctcagtgccgccagccatcaacagtattgggagcaatgcaaacacaggtctcccctgccaaatccaccctagcccactgaagcgctccatgtcactcatccctacaagcccccaggtccctggtgagtggccgagtccagaggagcttggggcccgggctgcttttaccacgcccgatcacgcacctctctcgccccagagcagcgtggcctcctctggcagtgagcagacagaggagcagggctccagccggaacaccttccaggaggatggcagtggcatgaaagatgtgccctcatggctcaagagcctccgtttgcacaagtatgcagccctcttctcacagaatcagctttgagtaactgtacagtttttctcgctgttggagaagacttatttgttggagtttcacttgtttaatggtctgggcttattttggaaaaaaaaaaaacaaacaaaaaaaacga

SEQ ID NO: 348044 - DNA, 3624 bp, Homo sapiens
gtcccgtgttaggcttggagcatgcaaacacaggtctcccctgccaaatccaccctagcccactgaagcgctccatgtcactcatccctacaagcccccaggtccctggtgagtggccgagtccagaggagcttggggcccgggctgcttttaccacgcccgatcacgcacctctctcgccccagagcagcgtggcctcctctggcagtgagcagacagaggagcagggctccagccggaacaccttccaggaggatggcagtggcatgaaagatgtgccctcatggctcaagagcctccgtttgcacaagtatgcagccctcttctcacagatgagctacgaggagatgatgacactgactgagcagcacctggagtctcagaacgtcaccaaaggtgcccgccacaagatagccctgagcatccagaagctgcgtgagagacagagcgtcctcaagtccctagagaaggatgtgctggaaggcgggaacctacgaaacgctctgcaggagctgcagcagatcatcatcactcccatcaaggcctacagtgtcctccaggccaccgtggctgccgccaccaccacccctactgccaaggatggggccccgggggaaccaccgctgccaggtgctgagcctcccctagcccaccccggcacagacaaaggcaccgaggccaaggaccctccagctgtggagaactacccacctccaccagctccagctcccactgatggcagtgagcctgccccggctcccgtcgccgacggagacatccccagccagtttacacgggtgatgggcaaagtgtgcacccaactgctggtgtcccgaccagacgaggagaacatcaccagttacctccagctcatcgaaaagtgcctgactcatgaggctttcacggagacgcagaagaaacggctgctatcctggaaacagcaagtgctgaagctcctccggacattcccgcgcaaagccgcactagagatgcagaactaccggcagcagaaaggctgggcattcggctccaactcgctccccatagctggctctgtggggatgggagtggcccggcgtacccagcggcagttcccaatgcctccccgggccctcccacccggccggatgggcctcctgagcccctcgggcattgggggtgtctcccctcgacatgccctcaccagccccagccttggaggccagggccgacagaacctgtggtttgccaaccctggaggcagcaacagcatgcccagtcagagccgcagctctgtgcagcgcacccactcgctcccggtccactcgtcaccccaggccattctcatgttccctccagactgcccggttcctgggcctgacctggagatcaatcccactctggagtctctgtgtctgagcatgacagaacacgccttgggtgatgggacagacaaaacctccaccatctgacgggacccacagcccagcgcacccataggctccctgggcggcgggcgggggccaacccccaacgggcttctccgcgacagcgagagggtgggctggctcagctatatattctaatatttttctactctcttaccctcttaacttttgtttaacattggcacatgccttgctcactcccaggcccgtcgagggatctctgctgaggcccggggagttgggggcagccaggataaagggggcagggactggccagactgcctgcctctctcctttccttcctcatccccacctggtcccatcccacccctgcctcctccagaccgctgaccacctgcctctccccaagggagcagactccccagagacaaactgaccactaccttgtggagcctgctcagaaacatttgacatttggggtgacgcgcagggcagagaacctgccctccagaatgttattgagaggagctggggagaaggaaggggagcaaggagaggaagctctctctcctctccctgcttccccttcaccattccccacattctgcaaggacaggagccaccttcctctctctcacctcccctggccctgttcaccagaggttctctatgattaatttcttaggcctatttaagatacatatttatatagttcttaacggtttttctctgatcatttcctctcatttttagaatccccaggtctctctcagccaagacagtggcagggagagcctgaactttatgaggggagagggcagagccccctcctccagaccctcaagctctaacccattttcctccagccctggctacccggatgaagaggttggaggtgggcagccagggtagccagtgaggtcaggaagtctgttgccttaacgtccccttccccacgaacacacacccttctccgctcccaggtctggttggtgagacttgggagtcaggaataagggaaaggggattgtttggtttttgggtttttccctaagcccctcccttttctttcagcctttttccttcccccattatgtcatgacctcacttaagtggaacactatatcataacccagagattcgtcccagccccagagtccgacagactgtctggtccctattcctaatgaggggttgtgttggggcccaggtggagggaggggatttgggggttcagactgcggggaagccagggtctccctcttcaacgccctcctccccctcaacccaccttcccaactgggacattctcaagcttttcacaccgaaaaggaaaaaaaatgttatttttagatacattttatgaataacttttgttatgaatatggctggtaaccattgtgtatgttattaaagatacaaaatgttgggaaaaaaacaaaaaaaccaaaaaaaaaaaaaaattttaaaaccaccaccctccctgcactatcaccccattccccagaccttcttgcccccgccctcctggtctgtggacttccctctgctctgagcccagggagggggaagaagccagggggtagggtggccctgggaacctggctctgggtccccacttcctctcccagtgccgggctgggtggggtgtcaggtttatttatgtacctcttgcacactcatcaacctatgcaagtcccccaccccggccctccatgtttctgtgcctttgctcatcccctcaatctcccagggcttctccagtccccctcccactagctgcaggaagtgggatggatgggccacctcgtttggaatcagcagggtgtccctctcatgggaccctcccctctccccagcctgtcctgtcttgttcactctccatcagggtgagctgactgtgcctggcactgggaggtggtgagggacaccgtctcacacacacagggaggcaagagctgccccccaccccacctgacagcagagtgtgcaggacgcaggcggccccactctgatgggcaggaccctgaccctctcccgctccagccccctccccaggccctcctccatgatttcaccctccctacccacttctgtccccggccccactggcagaatcagctttgagtaactgtacagtttttctcgctgttggagaagacttatttgttggagtttcacttgtttaatggtctgggcttattttggaaaaaaaaaaaacaaacaaaaaaaacga

SEQ ID NO: 348045 - DNA, 3068 bp, Homo sapiens
tttttgtatgcaccacgggcggcggtggtcggtgcgggaggagggaggggagcttgcgggcccgagagggggcgacggcggcggcggtggcctgaggaggcccgagcggcggcggtggcggcgaaggccgaggcgtctaggtgtttttggaagagctgcagccctcttctcacagatgagctacgaggagatgatgacactgactgagcagcacctggagtctcagaacgtcaccaaaggtgcccgccacaagatagccctgagcatccagaagctgcgtgagagacagagcgtcctcaagtccctagagaaggatgtgctggaaggcgggaacctacgaaacgctctgcaggagctgcagcagatcatcatcactcccatcaaggcctacagtgtcctccaggccaccgtggctgccgccaccaccacccctactgccaaggatggggccccgggggaaccaccgctgccaggtgctgagcctcccctagcccaccccggcacagacaaaggcaccgaggccagagccgggaccatgtgacggcgctggccctcgccaccgccgtcccccgaccctggccccaggcccggcaccatgatgttccgagaccaggtgggcatcctcgctggctggttcaaaggctggaatgagtgtgagcagacagtggccctcctgtcacttccgaaacgggtcacccgtacccaggcccgcttcctgcagctctgcctggagcactcactggcggactgcaatgacatccacctgctggagtcggaggccaacagtgctgccatcgtcagccagtggcagcaggagtccaaagagaaggtggtgtccctcctgctgtcccaccttcccctgcttcagccaggcaacacagaggccaagtcggagtacatgaggctactgcagaaagtgctggcctactcaatcgagagcaatgctttcatcgaggagagtcgccagctgctttcctatgccctcatccacccagccaccacactggaggaccgcaacgcactggccctctggctgagccacctggaagagcggttggctagtggcttccgctcccggccagagccctcctaccattcacgtcaaggctcagatgagtgggggggccctgcagagctaggccctggggaggcagggccaggctggcaggacaagccaccccgggaaaatggacacgtgcccttccacccatccaaccgctgaccacctgcctctccccaagggagcagactccccagagacaaactgaccactaccttgtggagcctgctcagaaacatttgacatttggggtgacgcgcagggcagagaacctgccctccagaatgttattgagaggagctggggagaaggaaggggagcaaggagaggaagctctctctcctctccctgcttccccttcaccattccccacattctgcaaggacaggagccaccttcctctctctcacctcccctggccctgttcaccagaggttctctatgattaatttcttaggcctatttaagatacatatttatatagttcttaacggtttttctctgatcatttcctctcatttttagaatccccaggtctctctcagccaagacagtggcagggagagcctgaactttatgaggggagagggcagagccccctcctccagaccctcaagctctaacccattttcctccagccctggctacccggatgaagaggttggaggtgggcagccagggtagccagtgaggtcaggaagtctgttgccttaacgtccccttccccacgaacacacacccttctccgctcccaggtctggttggtgagacttgggagtcaggaataagggaaaggggattgtttggtttttgggtttttccctaagcccctcccttttctttcagcctttttccttcccccattatgtcatgacctcacttaagtggaacactatatcataacccagagattcgtcccagccccagagtccgacagactgtctggtccctattcctaatgaggggttgtgttggggcccaggtggagggaggggatttgggggttcagactgcggggaagccagggtctccctcttcaacgccctcctccccctcaacccaccttcccaactgggacattctcaagcttttcacaccgaaaaggaaaaaaaatgttatttttagatacattttatgaataacttttgttatgaatatggctggtaaccattgtgtatgttattaaagatacaaaatgttgggaaaaaaacaaaaaaaccaaaaaaaaaaaaaaattttaaaaccaccaccctccctgcactatcaccccattccccagaccttcttgcccccgccctcctggtctgtggacttccctctgctctgagcccagggagggggaagaagccagggggtagggtggccctgggaacctggctctgggtccccacttcctctcccagtgccgggctgggtggggtgtcaggtttatttatgtacctcttgcacactcatcaacctatgcaagtcccccaccccggccctccatgtttctgtgcctttgctcatcccctcaatctcccagggcttctccagtccccctcccactagctgcaggaagtgggatggatgggccacctcgtttggaatcagcagggtgtccctctcatgggaccctcccctctccccagcctgtcctgtcttgttcactctccatcagggtgagctgactgtgcctggcactgggaggtggtgagggacaccgtctcacacacacagggaggcaagagctgccccccaccccacctgacagcagagtgtgcaggacgcaggcggccccactctgatgggcaggaccctgaccctctcccgctccagccccctccccaggccctcctccatgatttcaccctccctacccacttctgtccccggccccactggcagaatcagctttgagtaactgtacagtttttctcgctgttggagaagacttatttgttggagtttcacttgtttaatggtctgggcttattttggaaaaaaaaaaaacaaacaaaaaaaacga

SEQ ID NO: 348046 - DNA, 1883 bp, Homo sapiens
gtcccgtgttaggcttggagcatgcaaacacaggtctcccctgccaaatccaccctagcccactgaagcgctccatgtcactcatccctacaagcccccaggtccctggtgagtggccgagtccagaggagcttggggcccgggctgcttttaccacgcccgatcacgcacctctctcgccccagagcagcgtggcctcctctggcagtgagcagacagaggagcagggctccagccggaacaccttccaggaggatggcagtggcatgaaagatgtgccctcatggctcaagagcctccgtttgcacaagtatgcagccctcttctcacagatgagctacgaggagatgatgacactgactgagcagcacctggagtctcagaacgtcaccaaaggtgcccgccacaagatagccctgagcatccagaagctgcgtgagagacagagcgtcctcaagtccctagagaaggatgtgctggaaggcgggaacctacgaaacgctctgcaggagctgcagcagatcatcatcactcccatcaaggcctacagtgtcctccaggccaccgtggctgccgccaccaccacccctactgccaaggatggggccccgggggaaccaccgctgccaggtgctgagcctcccctagcccaccccggcacagacaaaggcaccgaggccaaggaccctccagctgtggagaactacccacctccaccagctccagctcccactgatggcagtgagcctgccccggctcccgtcgccgacggagacatccccagccagtttacacgggtgatgggcaaagtgtgcacccaactgctggtgtcccgaccagacgaggagaacatcaccagttacctccagctcatcgaaaagtgcctgactcatgaggctttcacggagacgcagaagaaacggctgctatcctggaaacagcaagtgctgaagctcctccggacattcccgcgcaaagccgcactagagatgcagaactaccggcagcagaaaggctgggcattcggctccaactcgctccccatagctggctctgtggggatgggagtggcccggcgtacccagcggcagttcccaatgcctccccgggccctcccacccggccggatgggcctcctgagcccctcgggcattgggggtgtctcccctcgacatgccctcaccagccccagccttggaggccagggccgacagaacctgtggtttgccaaccctggaggcagcaacagcatgcccagtcagagccgcagctctgtgcagcgcacccactcgctcccggtccactcgtcaccccaggccattctcatgttccctccaggtgaggtgccccacccttgggactctgcctggccaacatcctcagctgacctttcttttttctcctgggtctcatgtccactgttcttctagactgcattggcacctctccccatacctcacaccactctgcacccatctcccccaattgtggggggttgttttcctcctctgcttcaattttatctctcaggtcttgcccccacccctctgagtcatcatctctcaccccttactcctaccccatctcatgtttcccaccctatgtcataatcttagtgtctgtgttgctcctttgtcatcatctctttctttacaggatcattgaatactcaacttagaaggggttgaggggatgggacagttaaagtgtgagatttctgtggaggggagtcctgcccatcagcctactgggattctttcagatgccaggtgaccacacaggaaccagtggacttcacctcttagaacaggtgtttgaagtgagagggctgttttgacctctgcttacagaccatcctggagatgggagagcagaagttgggc

SEQ ID NO: 348047 - DNA, 342 bp, Homo sapiens
ccaccccgggaaaatggacacgtgcccttccacccatccagctcagtgccgccagccatcaacagtattgggagcaatgcaaacacaggtaagtggcgggggtgtcccagaaggccatgcctacttgaaaaaggttggactaggctcagtgagagctctctcgctctgtggcattagacaagtcacataagctgtaggcctcaactttatgaggcaatgcagaggctgtgaactggctttcccagagctgaatctgacctacagacatgtcttattgaacccatactttggtttggttttattttgttgtgttgggtttttaaataaatgtgagtggtacaa

SEQ ID NO: 348048 - DNA, 591 bp, Homo sapiens
tggtgacctcctaggagtgggggaccaccaggttgcctaaggaggggtgaactggcccagtttggaaatggagcaggtcaaaactcccgtgctgatcaatagtgggattgcacttgtgaatagccactgcactgcagcctgggcaacatagtgagaccccatctcttaaaaaaaataagacaaaaattactccagaggcagggtcagtgtgtttgatctcacctatatgagggataagtttgggagttatgaaaagaaaatcgttatgaaaagaagattggagctgagggaataggccataggcagtgctctcaggtgaataggagtaccccaccctggctctcctgatatttcttcttatcccttctgtagccatcgtcagccagtggcagcaggagtccaaagagaaggtggtgtccctcctgctgtcccaccttcccctgcttcagccaggcaacacagaggccaagtcggagtacatgaggctactgcagaaagtgctggcctactcaatcgagagcaatgctttcatcgaggagagtcgccagctgctttcctatgccctcatccacccagccaccacactggagg

SEQ ID NO: 348049 - DNA, 365 bp, Homo sapiens
ttaccacccccattctcctctctcccacccagactgcccggttcctgggcctgacctggagatcaatcccactctggagtctctgtgtctgagcatgacagaacacgccttgggtggtgagcatttcctctttccctgacccagctcccacctacccagcgtctctgcctctgaactgagcaactcagagtcatcctgaggggtccccaggggaggccagactccagggagggcctgactgggatgacaggctacctgagtgccttttcttgggcctccctccagctcctgatcttcctcccttcctccctttcttaccacagatgggacagacaaaacctccaccatctgacgggacccacagc

SEQ ID NO: 348050 - DNA, 485 bp, Homo sapiens
atggcatcagaactggcaatgagcaactccgacatgcccaccagtccactggccatggaatatgttaatgacttcgatctgatgaagtttgaagtgaacaaggaaccggtggagaccgtccgcatcatcagccagtgcggccgtctcatcgccgggggctcgctgtcctccacccccatgagcacgccgtacagatgggtgcccccttcccccagcttctcggcgcccagccgagtctggggcaggcagcagaccgcgctcttagaagagtgaccctgaccctctcccgctccagccccctccccaggccctcctccatgatttcaccctccctacccacttctgtccccggccccactggcagaatcagctttgagtaactgtacagtttttctcgctgttggagaagacttatttgttggagtttcacttgtttaatggtctgggcttattttggaaaaaaaaaaaacaaacaaaaaaaacga

SEQ ID NO: 348051 - DNA, 3225 bp, Homo sapiens
gtcccgtgttaggcttggagcatgcaaacacaggtctcccctgccaaatccaccctagcccactgaagcgctccatgtcactcatccctacaagcccccaggtccctggtgagtggccgagtccagaggagcttggggcccgggctgcttttaccacgcccgatcacgcacctctctcgccccagagcagcgtggcctcctctggcagtgagcagacagaggagcagggctccagccggaacaccttccaggaggatggcagtggcatgaaagatgtgccctcatggctcaagagcctccgtttgcacaagtatgcagccctcttctcacagatgagctacgaggagatgatgacactgactgagcagcacctggagtctcagaacgtcaccaaaggtgcccgccacaagatagccctgagcatccagaagctgcgtgagagacagagcgtcctcaagtccctagagaaggatgtgctggaaggcgggaacctacgaaacgctctgcaggagctgcagcagatcatcatcactcccatcaaggcctacagtgtcctccaggccaccgtggctgccgccaccaccacccctactgccaaggatggggccccgggggaaccaccgctgccaggtgctgagcctcccctagcccaccccggcacagacaaaggcaccgaggccagagccgggaccatgtgacggcgctggccctcgccaccgccgtcccccgaccctggccccaggcccggcaccatgatgttccgagaccaggtgggcatcctcgctggctggttcaaaggctggaatgagtgtgagcagacagtggccctcctgtcacttccgaaacgggtcacccgtacccaggcccgcttcctgcagctctgcctggagcactcactggcggactgcaatgacatccacctgctggagtcggaggccaacagtgctgccatcgtcagccagtggcagcaggagtccaaagagaaggtggtgtccctcctgctgtcccaccttcccctgcttcagccaggcaacacagaggccaagtcggagtacatgaggctactgcagaaagtgctggcctactcaatcgagagcaatgctttcatcgaggagagtcgccagctgctttcctatgccctcatccacccagccaccacactggaggaccgcaacgcactggccctctggctgagccacctggaagagcggttggctagtggcttccgctcccggccagagccctcctaccattcacgtcaaggctcagatgagtgggggggccctgcagagctaggccctggggaggcagggccaggctggcaggacaagccaccccgggaaaatggacacgtgcccttccacccatccaaccgctgaccacctgcctctccccaagggagcagactccccagagacaaactgaccactaccttgtggagcctgctcagaaacatttgacatttggggtgacgcgcagggcagagaacctgccctccagaatgttattgagaggagctggggagaaggaaggggagcaaggagaggaagctctctctcctctccctgcttccccttcaccattccccacattctgcaaggacaggagccaccttcctctctctcacctcccctggccctgttcaccagaggttctctatgattaatttcttaggcctatttaagatacatatttatatagttcttaacggtttttctctgatcatttcctctcatttttagaatccccaggtctctctcagccaagacagtggcagggagagcctgaactttatgaggggagagggcagagccccctcctccagaccctcaagctctaacccattttcctccagccctggctacccggatgaagaggttggaggtgggcagccagggtagccagtgaggtcaggaagtctgttgccttaacgtccccttccccacgaacacacacccttctccgctcccaggtctggttggtgagacttgggagtcaggaataagggaaaggggattgtttggtttttgggtttttccctaagcccctcccttttctttcagcctttttccttcccccattatgtcatgacctcacttaagtggaacactatatcataacccagagattcgtcccagccccagagtccgacagactgtctggtccctattcctaatgaggggttgtgttggggcccaggtggagggaggggatttgggggttcagactgcggggaagccagggtctccctcttcaacgccctcctccccctcaacccaccttcccaactgggacattctcaagcttttcacaccgaaaaggaaaaaaaatgttatttttagatacattttatgaataacttttgttatgaatatggctggtaaccattgtgtatgttattaaagatacaaaatgttgggaaaaaaacaaaaaaaccaaaaaaaaaaaaaaattttaaaaccaccaccctccctgcactatcaccccattccccagaccttcttgcccccgccctcctggtctgtggacttccctctgctctgagcccagggagggggaagaagccagggggtagggtggccctgggaacctggctctgggtccccacttcctctcccagtgccgggctgggtggggtgtcaggtttatttatgtacctcttgcacactcatcaacctatgcaagtcccccaccccggccctccatgtttctgtgcctttgctcatcccctcaatctcccagggcttctccagtccccctcccactagctgcaggaagtgggatggatgggccacctcgtttggaatcagcagggtgtccctctcatgggaccctcccctctccccagcctgtcctgtcttgttcactctccatcagggtgagctgactgtgcctggcactgggaggtggtgagggacaccgtctcacacacacagggaggcaagagctgccccccaccccacctgacagcagagtgtgcaggacgcaggcggccccactctgatgggcaggaccctgaccctctcccgctccagccccctccccaggccctcctccatgatttcaccctccctacccacttctgtccccggccccactggcagaatcagctttgagtaactgtacagtttttctcgctgttggagaagacttatttgttggagtttcacttgtttaatggtctgggcttattttggaaaaaaaaaaaacaaacaaaaaaaacga

SEQ ID NO: 348052 - DNA, 2820 bp, Homo sapiens
gtcccgtgttaggcttggagcatgcaaacacaggtctcccctgccaaatccaccctagcccactgaagcgctccatgtcactcatccctacaagcccccaggtccctggtgagtggccgagtccagaggagcttggggcccgggctgcttttaccacgcccgatcacgcacctctctcgccccagagcagcgtggcctcctctggcagtgagcagacagaggagcagggctccagccggaacaccttccaggaggatggcagtggcatgaaagatgtgccctcatggctcaagagcctccgtttgcacaagtatgcagccctcttctcacagatgagctacgaggagatgatgacactgactgagcagcacctggagtctcagaacgtcaccaaaggtgcccgccacaagatagccctgagcatccagaagctgcgtgagagacagagcgtcctcaagtccctagagaaggatgtgctggaaggcgggaacctacgaaacgctctgcaggagctgcagcagatcatcatcactcccatcaaggcctacagtgtcctccaggccaccgtggctgccgccaccaccacccctactgccaaggatggggccccgggggaaccaccgctgccaggtgctgagcctcccctagcccaccccggcacagacaaaggcaccgaggccaaggaccctccagctgtggagaactacccacctccaccagctccagctcccactgatggcagtgagcctgccccggctcccgtcgccgacggagacatccccagccagtttacacgggtgatgggcaaagtgtgcacccaactgctggtgtcccgaccagacgaggagaacatcaccagttacctccagctcatcgaaaagtgcctgactcatgaggctttcacggagacgcagaagaaacggctgctatcctggaaacagcaagtgctgaagctcctccggacattcccgcgcaaagccgcactagagatgcagaactaccggcagcagaaaggctgggcattcggctccaactcgctccccatagctggctctgtggggatgggagtggcccggcgtacccagcggcagttcccaatgcctccccgggccctcccacccggccggatgggcctcctgagcccctcgggcattgggggtgtctcccctcgacatgccctcaccagccccagccttggaggccagggccgacagaacctgtggtttgccaaccctggaggcagcaacagcatgcccagtcagagccgcagctctgtgcagcgcacccactcgctcccggtccactcgtcaccccaggccattctcatgttccctccagactgcccggttcctgggcctgacctggagatcaatcccactctggagtctctgtgtctgagcatgacagaacacgccttgggtgatgggacagacaaaacctccaccatctgacgggacccacagcccagcgcacccataggctccctgggcggcgggcgggggccaacccccaacgggcttctccgcgacagcgagagggtgggctggctcagctatatattctaatatttttctactctcttaccctcttaacttttgtttaacattggcacatgccttgctcactcccaggcccgtcgagggatctctgctgaggcccggggagttgggggcagccaggataaagggggcagggactggccagactgcctgcctctctcctttccttcctcatccccacctggtcccatcccacccctgcctcctccagaccgctgaccacctgcctctccccaagggagcagactccccagagacaaactgaccactaccttgtggagcctgctcagaaacatttgacatttggggtgacgcgcagggcagagaacctgccctccagaatgttattgagaggagctggggagaaggaaggggagcaaggagaggaagctctctctcctctccctgcttccccttcaccattccccacattctgcaaggacaggagccaccttcctctctctcacctcccctggccctgttcaccagaggttctctatgattaatttcttaggcctatttaagatacatatttatatagttcttaacggtttttctctgatcatttcctctcatttttagaatccccaggtctctctcagccaagacagtggcagggagagcctgaactttatgaggggagagggcagagccccctcctccagaccctcaagctctaacccattttcctccagccctggctacccggatgaagaggttggaggtgggcagccagggtagccagtgaggtcaggaagtctgttgccttaacgtccccttccccacgaacacacacccttctccgctcccaggtctggttggtgagacttgggagtcaggaataagggaaaggggattgtttggtttttgggtttttccctaagcccctcccttttctttcagcctttttccttcccccattatgtcatgacctcacttaagtggaacactatatcataacccagagattcgtcccagccccagagtccgacagactgtctggtccctattcctaatgaggggttgtgttggggcccaggtggagggaggggatttgggggttcagactgcggggaagccagggtctccctcttcaacgccctcctccccctcaacccaccttcccaactgggacattctcaagcttttcacaccgaaaaggaaaaaaaatgttatttttagatacattttatgaataacttttgttatgaatatggctggtaaccattgtgtatgttattaaagatacaaaatgttggga

SEQ ID NO: 348053 - DNA, 2355 bp, Homo sapiens
  misc_feature (2153)..(2153): n is a, c, g, or t
gtcccgtgttaggcttggagcatgcaaacacaggtctcccctgccaaatccaccctagcccactgaagcgctccatgtcactcatccctacaagcccccaggtccctggtgagtggccgagtccagaggagcttggggcccgggctgcttttaccacgcccgatcacgcacctctctcgccccagagcagcgtggcctcctctggcagtgagcagacagaggagcagggctccagccggaacaccttccaggaggatggcagtggcatgaaagatgtgccctcatggctcaagagcctccgtttgcacaagtatgcagccctcttctcacagatgagctacgaggagatgatgacactgactgagcagcacctggagtctcagaacgtcaccaaaggtgcccgccacaagatagccctgagcatccagaagctgcgtgagagacagagcgtcctcaagtccctagagaaggatgtgctggaaggcgggaacctacgaaacgctctgcaggagctgcagcagatcatcatcactcccatcaaggcctacagtgtcctccaggccaccgtggctgccgccaccaccacccctactgccaaggatggggccccgggggaaccaccgctgccaggtgctgagcctcccctagcccaccccggcacagacaaaggcaccgaggccaaggaccctccagctgtggagaactacccacctccaccagctccagctcccactgatggcagtgagcctgccccggctcccgtcgccgacggagacatccccagccagtttacacgggtgatgggcaaagtgtgcacccaactgctggtgtcccgaccagacgaggagaacatcaccagttacctccagctcatcgaaaagtgcctgactcatgaggctttcacggagacgcagaagaaacggctgctatcctggaaacagcaagtgctgaagctcctccggacattcccgcgcaaagccgcactagagatgcagaactaccggcagcagaaaggctgggcattcggctccaactcgctccccatagctggctctgtggggatgggagtggcccggcgtacccagcggcagttcccaatgcctccccgggccctcccacccggccggatgggcctcctgagcccctcgggcattgggggtgtctcccctcgacatgccctcaccagccccagccttggaggccagggccgacagaacctgtggtttgccaaccctggaggcagcaacagcatgcccagtcagagccgcagctctgtgcagcgcacccactcgctcccggtccactcgtcaccccaggccattctcatgttccctccagactgcccggttcctgggcctgacctggagatcaatcccactctggagtctctgtgtctgagcatgacagaacacgccttgggtggtgagcatttcctctttccctgacccagctcccacctacccagcgtctctgcctctgaactgagcaactcagagtcatcctgaggggtccccaggggaggccagactccagggagggcctgactgggatgacaggctacctgagtgccttttcttgggcctccctccagctcctgatcttcctcccttcctccctttcttaccacagatgggacagacaaaacctccaccatctgacgggacccacagcccagcgcacccataggctccctgggcggcgggcgggggccaacccccaacgggcttctccgcgacagcgagagggtgggctggctcagctatatattctaatatttttctactctcttaccctcttaacttttgtttaacattggcacatgccttgctcactcccaggcccgtcgagggatctctgctgaggcccggggagttgggggcagccaggataaagggggcaggactggccagactgcctgctctctcctttccttcctcatcccacctggtcccatcccacccctgcctcctccagaccgctgaccacctgcctctccccaagggagcagactccccagagacaaactgaccactaccttgtggagcctgctcgaacctttgacatttggggtgacgcgcagggcagagaacctgccctccagaatgttattgagaggagctggggagaaggaaggggagctatttttttataangattattccactctagccttcccaacattcttagtgtttctctacataaaggacatctggttgggggctcattgtccggactccctcttaacccactttctgatggtgtttgaggccgaacatgatgccaccacctgctaagaggtggcctttttggttcttttgtatgggctcgtcaaagcgcttccaaatgcttgatttc

SEQ ID NO: 348054 - DNA, 637 bp, Homo sapiens
ccagcgctaaaagagggggaggccgagccaagaggaccccaggagcccagagcagcgggagagggtccttcctagcctcggcccgccgggtcggttcctggctggtgtctgctgagggagtggggggcccagccccttctcttctcccccgccaaaccacagtgggagctggggcagggggagagccaggcaatcgggggccaaagatgggggtgctcgcctacagtctgcatctgtagtgccttgtggggtatccaggaacaccctcccagcaggggatgggaaccctgtcccatgaagccctctcctcagctttacttgctcccccgcccttagccttggggagaaatggcccgtggtgggctgaccccccaccctccacacacacagttccatgacccagcgggcccccaggggcatcaggtgctggtcctcctccctcctggcctcgacccctaagggcttcgcccctcccaggggcctgtaactaagtcgggtcctgccaggcagggggcctgtgttctgtgccccttgggagacaggaactggcgagttcaggtggggtggggacagcacagactgttccaccgttgtgcatattgttgcttctgaaccacaaactgtataaatggatggt

SEQ ID NO: 348055 - DNA, 393 bp, Homo sapiens
tcaaccgctccctggaggaggaggagagccagctgtaggggcgggggcgggcagggaggtatttatttatttattcgcaacagccagcgctaaaagagggggaggccgagccaagaggaccccaggagcccagagcagcgggagagggtccttcctagcctcggcccgccgggtcggttcctggctggtgtctgctgagggagtggggggcccagccccttctcttctcccccgccaaaccacagtgggagctggggcagggggagagccaggcaatcgggggccaaagatgggggtgctcgcctacagtctgcatctgtagtgccttgtggggtatccaggaacaccctcccagcaggggatgggaaccctgtcccatgaagccctctcctc

SEQ ID NO: 348056 - DNA, 445 bp, Homo sapiens
ctcagagctggccctcggcagccttacatggtgatcgtctggtcccgctaagccgcgccttggaggctctgctgtgggagcctagcaagtgtttatttttagaagctcttactccaacaccagggctgggcccaaataacacatgtattttagtggttcaaaaatacaagtttatggtaagtcattcgatgtggagaaagtgccaaaccagtgagtgcagtgagaggtttcctggggccacgggcctcctcctgcaggtggcccaggtgcacttgactagctggagcgtgtggctataatcccaggaaatgtatccctcctctcggagggactcgggctcaggagcacacactgaagatgggaggccaggacccagagtgtgaccgtcctggccctaggagggcagggcagcctttggtttgctatcagagcctcgaggcctggc

SEQ ID NO: 348057 - DNA, 351 bp, Homo sapiens
actatcaagaaaggaataaaatatcttgtgaagataatattttaacagaggaaattgggagggtatcagccaagcgttgccagctcagagaacaggtggcttagaaagcaacaagtaaagcagggcccccaagaaattctaaaaacagctggagaatcagaggaactttcacactgctgtgggaatgctaagtggcacggccactttggaaaagtttttggcagttgctaaaaaagttatacatacacctactccatgatccagcaattctactcctaggtatttacccaagagaaacgaaagcctgtgtctatacaaagacttgtacatataaggtgcagtggctcatgc

SEQ ID NO: 348058 - DNA, 1631 bp, Homo sapiens
ggcggggccgccgcgaccgcgggcttcaggcagggctgcagatgcgcggcccagctgtacctcgcgtgtcccgggtcgggagtcggagacgcaggtgcaggagagtgcggggcaagtagcgcattttctctttgcattctcgagatcgcttagccgcgctttaaaaaggtttgcatcagctgtgagtccatctgacaagcgaggaaactaaggctgagaagtgggaggcgttgccatctgcaggcccaggcaacctgctacgggaagaccggggaccaagacctctgggttggctttcctagacccgctcgggtcttcgggtgtcgcgaggaagggccctgctcctttcgttccctgcacccctggccgctgcaggtggctccctggaggaggagctcccacgcggaggaggagccagggcagctgggagcggggacaccatcctcctggataagaggcagaggccgggaggaaccccgtcagccgggcgggcaggaagctctgggagtagcctcatggaagagaagcagatcctgtgcgtggggctagtggtgctggacgtcatcagcctggtggacaagtaccctaaggaggactcggagataaggtgtttgtcccagagatggcagcgcggaggcaacgcgtccaactcctgcaccattctctccctgctcggagccccctgtgccttcatgggctcaatggctcctggccatgttgctgattttgtcctggatgacctccgccgctattctgtggacctacgctacacagtctttcagaccacaggctccgtccccatcgccacggtcatcatcaacgaggccagtggtagccgcaccatcctatactatgacaggagcctgccagatgtgtctgctacagactttgagaaggttgatctgacccagttcaagtggatccacattgagggccggaacgcatcggagcaggtgaagatgctgcagcggatagacgcacacaacaccaggcagcctccagagcagaagatccgggtgtccgtggaggtggagaagccacgagaggagctcttccagctgtttggctacggagacgtggtgtttgtcagcaaagatgtggccaagcacttggggttccagtcagcagaggaagccttgaggggcttgtatggtcgtgtgaggaaaggggctgtgcttgtctgtgcctgggctgaggagggcgccgacgccctgggccctgatggcaaattgctccactcggatgctttcccgccaccccgcgtggtggatacactgggagctggagacaccttcaatgcctccgtcatcttcagcctctcccaggggaggagcgtgcaggaagcactgagattcgggtgccaggtggccggcaagaagtgtggcctgcagggctttgatggcatcgtgtgagagcaggtgccggctcctcacacaccatggagactaccattgcggctgcatcgccttctcccctccatccagcctggcgtccaggttgccctgttcaggggacagatgcaagctgtggggaggactctgcctgtgtcctgtgttccccacagggagaggctctggggggatggctgggggatgcagagcctcagagcaaataaatcttcctcagagcca

SEQ ID NO: 348059 - DNA, 1297 bp, Homo sapiens
ggcggggccgccgcgaccgcgggcttcaggcagggctgcagatgcgcggcccagctgtacctcgcgtgtcccgggtcgggagtcggagacgcaggtgcaggagagtgcggggcaagtagcgcattttctctttgcattctcgagatcgcttagccgcgctttaaaaaggtttgcatcagctgtgagtccatctgacaagcgaggaaactaaggctgagaagtgggaggcgttgccatctgcaggcccaggcaacctgctacgggaagaccggggaccaagacctctgggttggctttcctagacccgctcgggtcttcgggtgtcgcgaggaagggccctgctcctttcgttccctgcacccctggccgctgcaggtggctccctggaggaggagctcccacgcggaggaggagccagggcagctgggagcggggacaccatcctcctggataagaggcagaggccgggaggaaccccgtcagccgggcgggcaggaagctctgggagtagcctcatggaagagaagcagatcctgtgcgtggggctagtggtgctggacgtcatcagcctggtggacaagtaccctaaggaggactcggagataaggtgtttgtcccagagatggcagcgcggaggcaacgcgtccaactcctgcaccattctctccctgctcggagccccctgtgccttcatgggctcaatggctcctggccatgttgctgacttcctggtggccgacttcaggcggcggggcgtggacgtgtctcaggtggcctggcagagcaagggggacacccccagctcctgctgcatcatcaacaactccaatggcaaccgtaccattgtgctccatgacacgagcctgccagatgtgtctgctacagactttgagaaggttgatctgacccagttcaagtggatccacattgagggccggaacgcatcggagcaggtgaagatgctgcagcggatagacgcacacaacaccaggcagcctccagagcagaagatccgggtgtccgtggaggtggagaagccacgagaggagctcttccagctgtttggctacggagacgtggtgcagtgactcacacctgtaatcccagaaattttgggaggctgaggcaggaagatcatatggggccaggagttcaagaccagcctcagggagaccgtcttcacaaaaaataaagaaaaaagaaaaccacgttcccgtgggacagtgagatgctacgttggggatctatgtggacatgttgggggagtcgtgttgtaatgggggcaacgctaggctgc

SEQ ID NO: 348060 - DNA, 574 bp, Homo sapiens
cacatattttactttaaaagcaggtcccatattaaggcctgcttgttaaaattgccactaaagaagaaaatattgtgcaatttgtataggtaaaccatgtaagtttagataacatctgttgtaaagtctacaaatgttaacatagccaagagttggtatttgagaaaaaggtttcagtacagggtgtgaacaatgaaaaattataaaggcatgtaataaaaatgttccataaagacaaagatacctcaagcaggtccacctatacctctagtttagtttagaaactaattcagtattttaagaatcatataattttaaactttgcactaagcctaacctttttaaaaaatggtcaggtgcagtgactcacacctgtaatcccagaaattttgggaggctgaggcaggaagatcatatggggccaggagttcaagaccagcctcagggagaccgtcttcacaaaaaataaagaaaaaagaaaaccacgttcccgtgggacagtgagatgctacgttggggatctatgtggacatgttgggggagtcgtgttgtaatgggggcaacgctaggctgc

SEQ ID NO: 348061 - DNA, 493 bp, Homo sapiens
ggggactttggctgagttgaggtctctggctcaggagggtcaaggcagacctctatcgggagtcccctttcctaaaccggccaaacacaaactcttcctcaagtgctaccttgacctcagggttgcaacggggagctattaaacgcaggacaggggtgccataggtaaaccccaacgctggggcgccagaagtgagggggaccagacagcccaggcagggggtcgcgggctttatactttcccagggctctgcctgtgggagccgtgtgctgctgcaagggattctgggaagtgtaggcttggcgctctcagtgcattctgggagatgcagtctccaaggcacacagaccttgccagttgacatgtgttgcagttcagtttaccgagataatttaatcacaacctcaaactcaggaaagggcaccccagcagactgtaacagggacaaccctggagctgagcctgagaatcctgtgctgtggatccagcttcc

SEQ ID NO: 348062 - DNA, 3551 bp, Homo sapiens
ggcggggccgccgcgaccgcgggcttcaggcagggctgcagatgcgcggcccagctgtacctcgcgtgtcccgggtcgggagtcggagacgcaggtgcaggagagtgcggggcaagtagcgcattttctctttgcattctcgagatcgcttagccgcgctttaaaaaggtttgcatcagctgtgagtccatctgacaagcgaggaaactaaggctgagaagtgggaggcgttgccatctgcaggcccaggcaacctgctacgggaagaccggggaccaagacctctgggttggctttcctagacccgctcgggtcttcgggtgtcgcgaggaagggccctgctcctttcgttccctgcacccctggccgctgcaggtggctccctggaggaggagctcccacgcggaggaggagccagggcagctgggagcggggacaccatcctcctggataagaggcagaggccgggaggaaccccgtcagccgggcgggcaggaagctctgggagtagcctcatggaagagaagcagatcctgtgcgtggggctagtggtgctggacgtcatcagcctggtggacaagtaccctaaggaggactcggagataaggtgtttgtcccagagatggcagcgcggaggcaacgcgtccaactcctgcaccattctctccctgctcggagccccctgtgccttcatgggctcaatggctcctggccatgttgctgattttgtcctggatgacctccgccgctattctgtggacctacgctacacagtctttcagaccacaggctccgtccccatcgccacggtcatcatcaacgaggccagtggtagccgcaccatcctatactatgacaggagcctgccagatgtgtctgctacagactttgagaaggttgatctgacccagttcaagtggatccacattgagggccggaacgcatcggagcaggtgaagatgctgcagcggatagacgcacacaacaccaggcagcctccagagcagaagatccgggtgtccgtggaggtggagaagccacgagaggagctcttccagctgtttggctacggagacgtggtgtttgtcagcaaagatgtggccaagcacttggggttccagtcagcagaggaagccttgaggggcttgtatggtcgtgtgaggaaaggggctgtgcttgtctgtgcctgggctgaggagggcgccgacgccctgggccctgatggcaaattgctccactcggatgctttcccgccaccccgcgtggtggatacactgggagctggagacaccttcaatgcctccgtcatcttcagcctctcccaggggaggagcgtgcaggaagcactgagattcgggtgccaggtggccggcaagaagtgtggcctgcagggctttgatggcatcgtgtgagagcaggtgccggctcctcacacaccatggagactaccattgcggctgcatcgccttctcccctccatccagcctggcgtccaggttgccctgttcaggggacagatgcaagctgtggggaggactctgcctgtgtcctgtgttccccacagggagaggctctggggggatggctgggggatgcagagcctcagagcaaataaatcttcctcagagccagcttctcctctcaatgtctgaactgctctggctgggcattcctgaggctctgactcttcgatcctccctctttgtgtccattccccaaattaacctctccgcccaggcccagaggaggggctgcctgggctagagcagcgagaagtgccctgggcttgccaccagctctgccctggctggggaggacactcggtgccccacacccagtgaacctgccaaagaaaccgtgagagctcttcggggccctgcgttgtgcagactctattcccacagctcagaagctgggagtccacaccgctgagctgaactgacaggccagtggggggcaggggtgcgcctcctctgccctgcccaccagcctgtgatttgatggggtcttcattgtccagaaatacctcctcccgctgactgccccagagcctgaaagtctcacccttggagcccaccttggaattaagggcgtgcctcagccacaaatgtgacccaggatacagagtgttgctgtcctcagggaggtccgatctggaacacatattggaattggggccaactccaatatagggtgggtaaggccttataatgtaaagagcatataatgtaaagggctttagagtgagacagacctggattcaaatctgccatttaattagctgcatatcaccttagggtacagcacttaacgcaatctgcctcaatttcttcatctgtcaaatggaaccaattctgcttggctacagaattattgtgaggataaaatcatatataaaatgcccagcatgatgcctgatgtgtacaaggctctcaaaaagttctagtgatgattaatattactggggatggggtcacctgccctgagctgcaggagagcatggggtgtctgaacaccaggtgagggggaaccggtgagggtttggggcccagggatagactgagctttcctcactgggtcctctgcagccggccatggctagcaccatgcgctctgctgccggagcaccgtgaggcccagaaacactgggcaggcggcatccctgtcctttcggtccccaaccccgttcctctgagagggtctgggcaggctggacgggtagagaggtggccggggggatgaattcattcagttctttattggtaatctgccccttaacttagggtctccctgagctgcacagaaagacctgatacctactgggaccaggcagggggcacagagatggtccttgtcccagcgtacatttcccctgcccacttcagggcttatgttctggcactgagacttcgtggggtacctgtatcttcaagatctagatctcatcattctccacttgaacaatgtgcacctcaaagtcattttgggtgttcttagactccagtgtttcccctggaagttccttggcctcctctccattctccctggcctctgcctggcccccagcttcccctctgggcccgggggcatctccttcagcctctgcctggcccccagcttcccctctgggcccaggggcatctcctttagcctctgcctggccctcagcttcccctctgggccctggaacatctccatcagcctctgcctggcccccaggctcctggacaggatccaaagactcccttctggcctctacctggccctttctaatagggactgccttccaacagcttgtggctcctgaggagatggagcaaggggctctccgggctccacgtgcctgagggctactcccgggaagttgatgagctcagcaggggtcatgagcccatccccattcaggtcctgggtctcgagcactttgtccactatcaagatcacctgtggaagcagagtcactgtggggtctccagggacagagatgttcccaggagttctgaccctccctaacacacccttgcatccctgccgtgcaagctctgagccct

SEQ ID NO: 348063 - DNA, 3542 bp, Homo sapiens
ggcggggccgccgcgaccgcgggcttcaggcagggctgcagatgcgcggcccagctgtacctcgcgtgtcccgggtcgggagtcggagacgcaggtgcaggagagtgcggggcaagtagcgcattttctctttgcattctcgagatcgcttagccgcgctttaaaaaggtttgcatcagctgtgagtccatctgacaagcgaggaaactaaggctgagaagtgggaggcgttgccatctgcaggcccaggcaacctgctacgggaagaccggggaccaagacctctgggttggctttcctagacccgctcgggtcttcgggtgtcgcgaggaagggccctgctcctttcgttccctgcacccctggccgctgcaggtggctccctggaggaggagctcccacgcggaggaggagccagggcagctgggagcggggacaccatcctcctggataagaggcagaggccgggaggaaccccgtcagccgggcgggcaggaagctctgggagtagcctcatggaagagaagcagatcctgtgcgtggggctagtggtgctggacgtcatcagcctggtggacaagtaccctaaggaggactcggagataaggtgtttgtcccagagatggcagcgcggaggcaacgcgtccaactcctgcaccattctctccctgctcggagccccctgtgccttcatgggctcaatggctcctggccatgttgctgattttgtcctggatgacctccgccgctattctgtggacctacgctacacagtctttcagaccacaggctccgtccccatcgccacggtcatcatcaacgaggccagtggtagccgcaccatcctatactatgacaggagcctgccagatgtgtctgctacagactttgagaaggttgatctgacccagttcaagtggatccacattgagggccggaacgcatcggagcaggtgaagatgctgcagcggatagacgcacacaacaccaggcagcctccagagcagaagatccgggtgtccgtggaggtggagaagccacgagaggagctcttccagctgtttggctacggagacgtggtgtttgtcagcaaagatgtggccaagcacttggggttccagtcagcagaggaagccttgaggggcttgtatggtcgtgtgaggaaaggggctgtgcttgtctgtgcctgggctgaggagggcgccgacgccctgggccctgatggcaaattgctccactcggatgctttcccgccaccccgcgtggtggatacactgggagctggagacaccttcaatgcctccgtcatcttcagcctctcccaggggaggagcgtgcaggaagcactgagattcgggtgccaggtggccggcaagaagtgtggcctgcagggctttgatggcatcgtgtgagagcaggtgccggctcctcacacaccatggagactaccattgcggctgcatcgccttctcccctccatccagcctggcgtccaggttgccctgttcaggggacagatgcaagctgtggggaggactctgcctgtgtcctgtgttccccacagggagaggctctggggggatggctgggggatgcagagcctcagagcaaataaatcttcctcagagccagcttctcctctcaatgtctgaactgctctggctgggcattcctgaggctctgactcttcgatcctccctctttgtgtccattccccaaattaacctctccgcccaggcccagaggaggggctgcctgggctagagcagcgagaagtgccctgggcttgccaccagctctgccctggctggggaggacactcggtgccccacacccagtgaacctgccaaagaaaccgtgagagctcttcggggccctgcgttgtgcagactctattcccacagctcagaagctgggagtccacaccgctgagctgaactgacaggccagtggggggcaggggtgcgcctcctctgccctgcccaccagcctgtgatttgatggggtcttcattgtccagaaatacctcctcccgctgactgccccagagcctgaaagtctcacccttggagcccaccttggaattaagggcgtgcctcagcacatattggaattggggccaactccaatatagggtgggtaaggccttataatgtaaagagcatataatgtaaagggctttagagtgagacagacctggattcaaatctgccatttaattagctgcatatcaccttagggtacagcacttaacgcaatctgcctcaatttcttcatctgtcaaatggaaccaattctgcttggctacagaattattgtgaggataaaatcatatataaaatgcccagcatgatgcctgatgtgtacaaggctctcaaaaagttctagtgatgattaatattactggggatggggtcacctgccctgagctgcaggagagcatggggtgtctgaacaccaggtgagggggaaccggtgagggtttggggcccagggatagactgagctttcctcactgggtcctctgcagccggccatggctagcaccatgcgctctgctgccggagcaccgtgaggcccagaaacactgggcaggcggcatccctgtcctttcggtccccaaccccgttcctctgagagggtctgggcaggctggacgggtagagaggtggccggggggatgaattcattcagttctttattggtaatctgccccttaacttagggtctccctgagctgcacagaaagacctgatacctactgggaccaggcagggggcacagagatggtccttgtcccagcgtacatttcccctgcccacttcagggcttatgttctggcactgagacttcgtggggtacctgtatcttcaagatctagatctcatcattctccacttgaacaatgtgcacctcaaagtcattttgggtgttcttagactccagtgtttcccctggaagttccttggcctcctctccattctccctggcctctgcctggcccccagcttcccctctgggcccgggggcatctccttcagcctctgcctggcccccagcttcccctctgggcccaggggcatctcctttagcctctgcctggccctcagcttcccctctgggccctggaacatctccatcagcctctgcctggcccccaggctcctggacaggatccaaagactcccttctggcctctacctggccctttgcttcttctctgggaccaggggcttcctgtgtttcttgtcttaatgggcttttagctaatagggactgccttccaacagcttgtggctcctgaggagatggagcaaggggctctccgggctccacgtgcctgagggctactcccgggaagttgatgagctcagcaggggtcatgagcccatccccattcaggtcctgggtctcgagcactttgtccactatcaagatcaccgggttggtggtaggagagttggcagctccaggggccagagcagctgtcaacatggacagcagctccaggccatccagctgtccactctggtcatagtcat

SEQ ID NO: 348064 - DNA, 3600 bp, Homo sapiens
ggcggggccgccgcgaccgcgggcttcaggcagggctgcagatgcgcggcccagctgtacctcgcgtgtcccgggtcgggagtcggagacgcaggtgcaggagagtgcggggcaagtagcgcattttctctttgcattctcgagatcgcttagccgcgctttaaaaaggtttgcatcagctgtgagtccatctgacaagcgaggaaactaaggctgagaagtgggaggcgttgccatctgcaggcccaggcaacctgctacgggaagaccggggaccaagacctctgggttggctttcctagacccgctcgggtcttcgggtgtcgcgaggaagggccctgctcctttcgttccctgcacccctggccgctgcaggtggctccctggaggaggagctcccacgcggaggaggagccagggcagctgggagcggggacaccatcctcctggataagaggcagaggccgggaggaaccccgtcagccgggcgggcaggaagctctgggagtagcctcatggaagagaagcagatcctgtgcgtggggctagtggtgctggacgtcatcagcctggtggacaagtaccctaaggaggactcggagataaggtgtttgtcccagagatggcagcgcggaggcaacgcgtccaactcctgcaccattctctccctgctcggagccccctgtgccttcatgggctcaatggctcctggccatgttgctgacttcctggtggccgacttcaggcggcggggcgtggacgtgtctcaggtggcctggcagagcaagggggacacccccagctcctgctgcatcatcaacaactccaatggcaaccgtaccattgtgctccatgacacgagcctgccagatgtgtctgctacagactttgagaaggttgatctgacccagttcaagtggatccacattgagggccggaacgcatcggagcaggtgaagatgctgcagcggatagacgcacacaacaccaggcagcctccagagcagaagatccgggtgtccgtggaggtggagaagccacgagaggagctcttccagctgtttggctacggagacgtggtgtttgtcagcaaagatgtggccaagcacttggggttccagtcagcagaggaagccttgaggggcttgtatggtcgtgtgaggaaaggggctgtgcttgtctgtgcctgggctgaggagggcgccgacgccctgggccctgatggcaaattgctccactcggatgctttcccgccaccccgcgtggtggatacactgggagctggagacaccttcaatgcctccgtcatcttcagcctctcccaggggaggagcgtgcaggaagcactgagattcgggtgccaggtggccggcaagaagtgtggcctgcagggctttgatggcatcgtgtgagagcaggtgccggctcctcacacaccatggagactaccattgcggctgcatcgccttctcccctccatccagcctggcgtccaggttgccctgttcaggggacagatgcaagctgtggggaggactctgcctgtgtcctgtgttccccacagggagaggctctggggggatggctgggggatgcagagcctcagagcaaataaatcttcctcagagccagcttctcctctcaatgtctgaactgctctggctgggcattcctgaggctctgactcttcgatcctccctctttgtgtccattccccaaattaacctctccgcccaggcccagaggaggggctgcctgggctagagcagcgagaagtgccctgggcttgccaccagctctgccctggctggggaggacactcggtgccccacacccagtgaacctgccaaagaaaccgtgagagctcttcggggccctgcgttgtgcagactctattcccacagctcagaagctgggagtccacaccgctgagctgaactgacaggccagtggggggcaggggtgcgcctcctctgccctgcccaccagcctgtgatttgatggggtcttcattgtccagaaatacctcctcccgctgactgccccagagcctgaaagtctcacccttggagcccaccttggaattaagggcgtgcctcagccacaaatgtgacccaggatacagagtgttgctgtcctcagggaggtccgatctggaacacatattggaattggggccaactccaatatagggtgggtaaggccttataatgtaaagagcatataatgtaaagggctttagagtgagacagacctggattcaaatctgccatttaattagctgcatatcaccttagggtacagcacttaacgcaatctgcctcaatttcttcatctgtcaaatggaaccaattctgcttggctacagaattattgtgaggataaaatcatatataaaatgcccagcatgatgcctgatgtgtacaaggctctcaaaaagttctagtgatgattaatattactggggatggggtcacctgccctgagctgcaggagagcatggggtgtctgaacaccaggtgagggggaaccggtgagggtttggggcccagggatagactgagctttcctcactgggtcctctgcagccggccatggctagcaccatgcgctctgctgccggagcaccgtgaggcccagaaacactgggcaggcggcatccctgtcctttcggtccccaaccccgttcctctgagagggtctgggcaggctggacgggtagagaggtggccggggggatgaattcattcagttctttattggtaatctgccccttaacttagggtctccctgagctgcacagaaagacctgatacctactgggaccaggcagggggcacagagatggtccttgtcccagcgtacatttcccctgcccacttcagggcttatgttctggcactgagacttcgtggggtacctgtatcttcaagatctagatctcatcattctccacttgaacaatgtgcacctcaaagtcattttgggtgttcttagactccagtgtttcccctggaagttccttggcctcctctccattctccctggcctctgcctggcccccagcttcccctctgggcccgggggcatctccttcagcctctgcctggcccccagcttcccctctgggcccaggggcatctcctttagcctctgcctggccctcagcttcccctctgggccctggaacatctccatcagcctctgcctggcccccaggctcctggacaggatccaaagactcccttctggcctctacctggccctttgcttcttctctgggaccaggggcttcctgtgtttcttgtcttaatgggcttttagctaatagggactgccttccaacagcttgtggctcctgaggagatggagcaaggggctctccgggctccacgtgcctgagggctactcccgggaagttgatgagctcagcaggggtcatgagcccatccccattcaggtcctgggtctcgagcactttgtccactatcaagatcaccgggttggtggtaggagagttggcagctccaggggccagagcagctgtcaacatggacagcagctccaggccatccagctgtccactctggtcatagtcat

SEQ ID NO: 348065 - DNA, 3735 bp, Homo sapiens
ggcggggccgccgcgaccgcgggcttcaggcagggctgcagatgcgcggcccagctgtacctcgcgtgtcccgggtcgggagtcggagacgcaggtgcaggagagtgcggggcaagtagcgcattttctctttgcattctcgagatcgcttagccgcgctttaaaaaggtttgcatcagctgtgagtccatctgacaagcgaggaaactaaggctgagaagtgggaggcgttgccatctgcaggcccaggcaacctgctacgggaagaccggggaccaagacctctgggttggctttcctagacccgctcgggtcttcgggtgtcgcgaggaagggccctgctcctttcgttccctgcacccctggccgctgcaggtggctccctggaggaggagctcccacgcggaggaggagccagggcagctgggagcggggacaccatcctcctggataagaggcagaggccgggaggaaccccgtcagccgggcgggcaggaagctctgggagtagcctcatggaagagaagcagatcctgtgcgtggggctagtggtgctggacgtcatcagcctggtggacaagtaccctaaggaggactcggagataaggtgtttgtcccagagatggcagcgcggaggcaacgcgtccaactcctgcaccattctctccctgctcggagccccctgtgccttcatgggctcaatggctcctggccatgttgctgattttgtcctggatgacctccgccgctattctgtggacctacgctacacagtctttcagaccacaggctccgtccccatcgccacggtcatcatcaacgaggccagtggtagccgcaccatcctatactatgacagcttcctggtggccgacttcaggcggcggggcgtggacgtgtctcaggtggcctggcagagcaagggggacacccccagctcctgctgcatcatcaacaactccaatggcaaccgtaccattgtgctccatgacacgagcctgccagatgtgtctgctacagactttgagaaggttgatctgacccagttcaagtggatccacattgagggccggaacgcatcggagcaggtgaagatgctgcagcggatagacgcacacaacaccaggcagcctccagagcagaagatccgggtgtccgtggaggtggagaagccacgagaggagctcttccagctgtttggctacggagacgtggtgtttgtcagcaaagatgtggccaagcacttggggttccagtcagcagaggaagccttgaggggcttgtatggtcgtgtgaggaaaggggctgtgcttgtctgtgcctgggctgaggagggcgccgacgccctgggccctgatggcaaattgctccactcggatgctttcccgccaccccgcgtggtggatacactgggagctggagacaccttcaatgcctccgtcatcttcagcctctcccaggggaggagcgtgcaggaagcactgagattcgggtgccaggtggccggcaagaagtgtggcctgcagggctttgatggcatcgtgtgagagcaggtgccggctcctcacacaccatggagactaccattgcggctgcatcgccttctcccctccatccagcctggcgtccaggttgccctgttcaggggacagatgcaagctgtggggaggactctgcctgtgtcctgtgttccccacagggagaggctctggggggatggctgggggatgcagagcctcagagcaaataaatcttcctcagagccagcttctcctctcaatgtctgaactgctctggctgggcattcctgaggctctgactcttcgatcctccctctttgtgtccattccccaaattaacctctccgcccaggcccagaggaggggctgcctgggctagagcagcgagaagtgccctgggcttgccaccagctctgccctggctggggaggacactcggtgccccacacccagtgaacctgccaaagaaaccgtgagagctcttcggggccctgcgttgtgcagactctattcccacagctcagaagctgggagtccacaccgctgagctgaactgacaggccagtggggggcaggggtgcgcctcctctgccctgcccaccagcctgtgatttgatggggtcttcattgtccagaaatacctcctcccgctgactgccccagagcctgaaagtctcacccttggagcccaccttggaattaagggcgtgcctcagccacaaatgtgacccaggatacagagtgttgctgtcctcagggaggtccgatctggaacacatattggaattggggccaactccaatatagggtgggtaaggccttataatgtaaagagcatataatgtaaagggctttagagtgagacagacctggattcaaatctgccatttaattagctgcatatcaccttagggtacagcacttaacgcaatctgcctcaatttcttcatctgtcaaatggaaccaattctgcttggctacagaattattgtgaggataaaatcatatataaaatgcccagcatgatgcctgatgtgtacaaggctctcaaaaagttctagtgatgattaatattactggggatggggtcacctgccctgagctgcaggagagcatggggtgtctgaacaccaggtgagggggaaccggtgagggtttggggcccagggatagactgagctttcctcactgggtcctctgcagccggccatggctagcaccatgcgctctgctgccggagcaccgtgaggcccagaaacactgggcaggcggcatccctgtcctttcggtccccaaccccgttcctctgagagggtctgggcaggctggacgggtagagaggtggccggggggatgaattcattcagttctttattggtaatctgccccttaacttagggtctccctgagctgcacagaaagacctgatacctactgggaccaggcagggggcacagagatggtccttgtcccagcgtacatttcccctgcccacttcagggcttatgttctggcactgagacttcgtggggtacctgtatcttcaagatctagatctcatcattctccacttgaacaatgtgcacctcaaagtcattttgggtgttcttagactccagtgtttcccctggaagttccttggcctcctctccattctccctggcctctgcctggcccccagcttcccctctgggcccgggggcatctccttcagcctctgcctggcccccagcttcccctctgggcccaggggcatctcctttagcctctgcctggccctcagcttcccctctgggccctggaacatctccatcagcctctgcctggcccccaggctcctggacaggatccaaagactcccttctggcctctacctggccctttgcttcttctctgggaccaggggcttcctgtgtttcttgtcttaatgggcttttagctaatagggactgccttccaacagcttgtggctcctgaggagatggagcaaggggctctccgggctccacgtgcctgagggctactcccgggaagttgatgagctcagcaggggtcatgagcccatccccattcaggtcctgggtctcgagcactttgtccactatcaagatcaccgggttggtggtaggagagttggcagctccaggggccagagcagctgtcaacatggacagcagctccaggccatccagctgtccactctggtcatagtcat

SEQ ID NO: 348066 - DNA, 3465 bp, Homo sapiens
ggcggggccgccgcgaccgcgggcttcaggcagggctgcagatgcgcggcccagctgtacctcgcgtgtcccgggtcgggagtcggagacgcaggtgcaggagagtgcggggcaagtagcgcattttctctttgcattctcgagatcgcttagccgcgctttaaaaaggtttgcatcagctgtgagtccatctgacaagcgaggaaactaaggctgagaagtgggaggcgttgccatctgcaggcccaggcaacctgctacgggaagaccggggaccaagacctctgggttggctttcctagacccgctcgggtcttcgggtgtcgcgaggaagggccctgctcctttcgttccctgcacccctggccgctgcaggtggctccctggaggaggagctcccacgcggaggaggagccagggcagctgggagcggggacaccatcctcctggataagaggcagaggccgggaggaaccccgtcagccgggcgggcaggaagctctgggagtagcctcatggaagagaagcagatcctgtgcgtggggctagtggtgctggacgtcatcagcctggtggacaagtaccctaaggaggactcggagataaggtgtttgtcccagagatggcagcgcggaggcaacgcgtccaactcctgcaccattctctccctgctcggagccccctgtgccttcatgggctcaatggctcctggccatgttgctgagagcctgccagatgtgtctgctacagactttgagaaggttgatctgacccagttcaagtggatccacattgagggccggaacgcatcggagcaggtgaagatgctgcagcggatagacgcacacaacaccaggcagcctccagagcagaagatccgggtgtccgtggaggtggagaagccacgagaggagctcttccagctgtttggctacggagacgtggtgtttgtcagcaaagatgtggccaagcacttggggttccagtcagcagaggaagccttgaggggcttgtatggtcgtgtgaggaaaggggctgtgcttgtctgtgcctgggctgaggagggcgccgacgccctgggccctgatggcaaattgctccactcggatgctttcccgccaccccgcgtggtggatacactgggagctggagacaccttcaatgcctccgtcatcttcagcctctcccaggggaggagcgtgcaggaagcactgagattcgggtgccaggtggccggcaagaagtgtggcctgcagggctttgatggcatcgtgtgagagcaggtgccggctcctcacacaccatggagactaccattgcggctgcatcgccttctcccctccatccagcctggcgtccaggttgccctgttcaggggacagatgcaagctgtggggaggactctgcctgtgtcctgtgttccccacagggagaggctctggggggatggctgggggatgcagagcctcagagcaaataaatcttcctcagagccagcttctcctctcaatgtctgaactgctctggctgggcattcctgaggctctgactcttcgatcctccctctttgtgtccattccccaaattaacctctccgcccaggcccagaggaggggctgcctgggctagagcagcgagaagtgccctgggcttgccaccagctctgccctggctggggaggacactcggtgccccacacccagtgaacctgccaaagaaaccgtgagagctcttcggggccctgcgttgtgcagactctattcccacagctcagaagctgggagtccacaccgctgagctgaactgacaggccagtggggggcaggggtgcgcctcctctgccctgcccaccagcctgtgatttgatggggtcttcattgtccagaaatacctcctcccgctgactgccccagagcctgaaagtctcacccttggagcccaccttggaattaagggcgtgcctcagccacaaatgtgacccaggatacagagtgttgctgtcctcagggaggtccgatctggaacacatattggaattggggccaactccaatatagggtgggtaaggccttataatgtaaagagcatataatgtaaagggctttagagtgagacagacctggattcaaatctgccatttaattagctgcatatcaccttagggtacagcacttaacgcaatctgcctcaatttcttcatctgtcaaatggaaccaattctgcttggctacagaattattgtgaggataaaatcatatataaaatgcccagcatgatgcctgatgtgtacaaggctctcaaaaagttctagtgatgattaatattactggggatggggtcacctgccctgagctgcaggagagcatggggtgtctgaacaccaggtgagggggaaccggtgagggtttggggcccagggatagactgagctttcctcactgggtcctctgcagccggccatggctagcaccatgcgctctgctgccggagcaccgtgaggcccagaaacactgggcaggcggcatccctgtcctttcggtccccaaccccgttcctctgagagggtctgggcaggctggacgggtagagaggtggccggggggatgaattcattcagttctttattggtaatctgccccttaacttagggtctccctgagctgcacagaaagacctgatacctactgggaccaggcagggggcacagagatggtccttgtcccagcgtacatttcccctgcccacttcagggcttatgttctggcactgagacttcgtggggtacctgtatcttcaagatctagatctcatcattctccacttgaacaatgtgcacctcaaagtcattttgggtgttcttagactccagtgtttcccctggaagttccttggcctcctctccattctccctggcctctgcctggcccccagcttcccctctgggcccgggggcatctccttcagcctctgcctggcccccagcttcccctctgggcccaggggcatctcctttagcctctgcctggccctcagcttcccctctgggccctggaacatctccatcagcctctgcctggcccccaggctcctggacaggatccaaagactcccttctggcctctacctggccctttgcttcttctctgggaccaggggcttcctgtgtttcttgtcttaatgggcttttagctaatagggactgccttccaacagcttgtggctcctgaggagatggagcaaggggctctccgggctccacgtgcctgagggctactcccgggaagttgatgagctcagcaggggtcatgagcccatccccattcaggtcctgggtctcgagcactttgtccactatcaagatcaccgggttggtggtaggagagttggcagctccaggggccagagcagctgtcaacatggacagcagctccaggccatccagctgtccactctggtcatagtcat

SEQ ID NO: 348067 - DNA, 3348 bp, Homo sapiens
ggcggggccgccgcgaccgcgggcttcaggcagggctgcagatgcgcggcccagctgtacctcgcgtgtcccgggtcgggagtcggagacgcaggtgcaggagagtgcggggcaagtagcgcattttctctttgcattctcgagatcgcttagccgcgctttaaaaaggtttgcatcagctgtgagtccatctgacaagcgaggaaactaaggctgagaagtgggaggcgttgccatctgcaggcccaggcaacctgctacgggaagaccggggaccaagacctctgggttggctttcctagacccgctcgggtcttcgggtgtcgcgaggaagggccctgctcctttcgttccctgcacccctggccgctgcaggtggctccctggaggaggagctcccacgcggaggaggagccagggcagctgggagcggggacaccatcctcctggataagaggcagaggccgggaggaaccccgtcagccgggcgggcaggaagctctgggagtagcctcatggaagagaagcagatcctgtgcgtggggctagtggtgctggacgtcatcagcctggtggacaagtaccctaaggaggactcggagataaggagcctgccagatgtgtctgctacagactttgagaaggttgatctgacccagttcaagtggatccacattgagggccggaacgcatcggagcaggtgaagatgctgcagcggatagacgcacacaacaccaggcagcctccagagcagaagatccgggtgtccgtggaggtggagaagccacgagaggagctcttccagctgtttggctacggagacgtggtgtttgtcagcaaagatgtggccaagcacttggggttccagtcagcagaggaagccttgaggggcttgtatggtcgtgtgaggaaaggggctgtgcttgtctgtgcctgggctgaggagggcgccgacgccctgggccctgatggcaaattgctccactcggatgctttcccgccaccccgcgtggtggatacactgggagctggagacaccttcaatgcctccgtcatcttcagcctctcccaggggaggagcgtgcaggaagcactgagattcgggtgccaggtggccggcaagaagtgtggcctgcagggctttgatggcatcgtgtgagagcaggtgccggctcctcacacaccatggagactaccattgcggctgcatcgccttctcccctccatccagcctggcgtccaggttgccctgttcaggggacagatgcaagctgtggggaggactctgcctgtgtcctgtgttccccacagggagaggctctggggggatggctgggggatgcagagcctcagagcaaataaatcttcctcagagccagcttctcctctcaatgtctgaactgctctggctgggcattcctgaggctctgactcttcgatcctccctctttgtgtccattccccaaattaacctctccgcccaggcccagaggaggggctgcctgggctagagcagcgagaagtgccctgggcttgccaccagctctgccctggctggggaggacactcggtgccccacacccagtgaacctgccaaagaaaccgtgagagctcttcggggccctgcgttgtgcagactctattcccacagctcagaagctgggagtccacaccgctgagctgaactgacaggccagtggggggcaggggtgcgcctcctctgccctgcccaccagcctgtgatttgatggggtcttcattgtccagaaatacctcctcccgctgactgccccagagcctgaaagtctcacccttggagcccaccttggaattaagggcgtgcctcagccacaaatgtgacccaggatacagagtgttgctgtcctcagggaggtccgatctggaacacatattggaattggggccaactccaatatagggtgggtaaggccttataatgtaaagagcatataatgtaaagggctttagagtgagacagacctggattcaaatctgccatttaattagctgcatatcaccttagggtacagcacttaacgcaatctgcctcaatttcttcatctgtcaaatggaaccaattctgcttggctacagaattattgtgaggataaaatcatatataaaatgcccagcatgatgcctgatgtgtacaaggctctcaaaaagttctagtgatgattaatattactggggatggggtcacctgccctgagctgcaggagagcatggggtgtctgaacaccaggtgagggggaaccggtgagggtttggggcccagggatagactgagctttcctcactgggtcctctgcagccggccatggctagcaccatgcgctctgctgccggagcaccgtgaggcccagaaacactgggcaggcggcatccctgtcctttcggtccccaaccccgttcctctgagagggtctgggcaggctggacgggtagagaggtggccggggggatgaattcattcagttctttattggtaatctgccccttaacttagggtctccctgagctgcacagaaagacctgatacctactgggaccaggcagggggcacagagatggtccttgtcccagcgtacatttcccctgcccacttcagggcttatgttctggcactgagacttcgtggggtacctgtatcttcaagatctagatctcatcattctccacttgaacaatgtgcacctcaaagtcattttgggtgttcttagactccagtgtttcccctggaagttccttggcctcctctccattctccctggcctctgcctggcccccagcttcccctctgggcccgggggcatctccttcagcctctgcctggcccccagcttcccctctgggcccaggggcatctcctttagcctctgcctggccctcagcttcccctctgggccctggaacatctccatcagcctctgcctggcccccaggctcctggacaggatccaaagactcccttctggcctctacctggccctttgcttcttctctgggaccaggggcttcctgtgtttcttgtcttaatgggcttttagctaatagggactgccttccaacagcttgtggctcctgaggagatggagcaaggggctctccgggctccacgtgcctgagggctactcccgggaagttgatgagctcagcaggggtcatgagcccatccccattcaggtcctgggtctcgagcactttgtccactatcaagatcaccgggttggtggtaggagagttggcagctccaggggccagagcagctgtcaacatggacagcagctccaggccatccagctgtccactctggtcatagtcat

SEQ ID NO: 348068 - DNA, 1432 bp, Homo sapiens
ggcggggccgccgcgaccgcgggcttcaggcagggctgcagatgcgcggcccagctgtacctcgcgtgtcccgggtcgggagtcggagacgcaggtgcaggagagtgcggggcaagtagcgcattttctctttgcattctcgagatcgcttagccgcgctttaaaaaggtttgcatcagctgtgagtccatctgacaagcgaggaaactaaggctgagaagtgggaggcgttgccatctgcaggcccaggcaacctgctacgggaagaccggggaccaagacctctgggttggctttcctagacccgctcgggtcttcgggtgtcgcgaggaagggccctgctcctttcgttccctgcacccctggccgctgcaggtggctccctggaggaggagctcccacgcggaggaggagccagggcagctgggagcggggacaccatcctcctggataagaggcagaggccgggaggaaccccgtcagccgggcgggcaggaagctctgggagtagcctcatggaagagaagcagatcctgtgcgtggggctagtggtgctggacgtcatcagcctggtggacaagtaccctaaggaggactcggagataaggtgtttgtcccagagatggcagcgcggaggcaacgcgtccaactcctgcaccattctctccctgctcggagccccctgtgccttcatgggctcaatggctcctggccatgttgctgattttgtcctggatgacctccgccgctattctgtggacctacgctacacagtctttcagaccacaggctccgtccccatcgccacggtcatcatcaacgaggccagtggtagccgcaccatcctatactatgacagcttcctggtggccgacttcaggcggcggggcgtggacgtgtctcaggtggcctggcagagcaagggggacacccccagctcctgctgcatcatcaacaactccaatggcaaccgtaccattgtgctccatgacacgagcctgccagatgtgtctgctacagactttgagaaggttgatctgacccagttcaagtggatccacattgagggccggaacgcatcggagcaggtgaagatgctgcagcggatagacgcacacaacaccaggcagcctccagagcagaagatccgggtgtccgtggaggtggagaagccacgagaggagctcttccagctgtttggctacggagacgtggtgcagtgactcacacctgtaatcccagaaattttgggaggctgaggcaggaagatcatatggggccaggagttcaagaccagcctcagggagaccgtcttcacaaaaaataaagaaaaaagaaaaccacgttcccgtgggacagtgagatgctacgttggggatctatgtggacatgttgggggagtcgtgttgtaatgggggcaacgctaggctgc

SEQ ID NO: 348069 - DNA, 409 bp, Homo sapiens
acaatttacaaggctgtattctattatatataagcatcgataaaaatatgcttctggcgtgcagtgactcacacctgtaatcccagaaattttgggaggctgaggcaggaagatcatatggggccaggagttcaagaccagcctcagggagaccgtcttcacaaaaaataaagaaaaaagaaaaccacgttcccgtgggacagtgagatgctacgttggggatctatgtggacatgttgggggagtcgtgttgtaatgggggcaacgctaggctgctgttggtgaatgacgagttagaagtgaccaccagcttctcttccactgcccacaggtgtttgtcagcaaagatgtggccaagcacttggggttccagtcagcagaggaagccttgaggggcttgtatggtcgt

SEQ ID NO: 348070 - DNA, 431 bp, Homo sapiens
ttgcagttcagtttaccgagataatttaatcacaacctcaaactcaggaaagggcaccccagcagactgtaacagggacaaccctggagctgagcctgagaatcctgtgctgtggatccagcttcctgtcatgctgccagcagtgcaggcacagggtccacagctgccagttagagatcctggctctgcctgaccccatcatgctccttcttctctgtcttttccatcctgtgacctaggagcctgccagatgtgtctgctacagactttgagaaggttgatctgacccagttcaagtggatccacattgaggtaagccctgccttacctgtgtttcaaggggctcaacctgccagcctcctccacatgttctgcctccttggtttctttgaatcatgaagtaccttagagataaatgaacccaaccccct

SEQ ID NO: 348071 - DNA, 1170 bp, Homo sapiens
  misc_feature (1033)..(1033): n is a, c, g, or t
  misc_feature (1035)..(1035): n is a, c, g, or t
  misc_feature (1037)..(1038): n is a, c, g, or t
  misc_feature (1041)..(1041): n is a, c, g, or t
  misc_feature (1044)..(1044): n is a, c, g, or t
  misc_feature (1046)..(1046): n is a, c, g, or t
  misc_feature (1051)..(1051): n is a, c, g, or t
  misc_feature (1060)..(1060): n is a, c, g, or t
  misc_feature (1063)..(1063): n is a, c, g, or t
  misc_feature (1073)..(1074): n is a, c, g, or t
  misc_feature (1076)..(1076): n is a, c, g, or t
  misc_feature (1086)..(1088): n is a, c, g, or t
  misc_feature (1097)..(1098): n is a, c, g, or t
  misc_feature (1108)..(1108): n is a, c, g, or t
  misc_feature (1110)..(1110): n is a, c, g, or t
  misc_feature (1117)..(1117): n is a, c, g, or t
ggcggggccgccgcgaccgcgggcttcaggcagggctgcagatgcgcggcccagctgtacctcgcgtgtcccgggtcgggagtcggagacgcaggtgcaggagagtgcggggcaagtagcgcattttctctttgcattctcgagatcgcttagccgcgctttaaaaaggtttgcatcagctgtgagtccatctgacaagcgaggaaactaaggctgagaagtgggaggcgttgccatctgcaggcccaggcaacctgctacgggaagaccggggaccaagacctctgggttggctttcctagacccgctcgggtcttcgggtgtcgcgaggaagggccctgctcctttcgttccctgcacccctggccgctgcaggtggctccctggaggaggagctcccacgcggaggaggagccagggcagctgggagcggggacaccatcctcctggataagaggcagaggccgggaggaaccccgtcagccgggcgggcaggaagctctgggagtagcctcatggaagagaagcagatcctgtgcgtggggctagtggtgctggacgtcatcagcctggtggacaagtaccctaaggaggactcggagataaggtgtttgtcccagagatggcagcgcggaggcaacgcgtccaactcctgcaccattctctccctgctcggagccccctgtgccttcatgggctcaatggctcctggccatgttgctgattttgtcctggatgacctccgccgctattctgtggacctacgctacacagtctttcagaccacaggctccgtccccatcgccacggtcatcatcaacgaggccagtggtagccgcaccatcctatactatgacaggagcctgccagatgtgtctgctacagactttgagaaggttgatctgacccagttcaagtggatccacattgagggccggaacgcatcggagcaggtgaagatgctgcagcggatagacgcacacaacaccaggcagcctccagagcagaagatccgggtgtccgtggaggtganancnnganagncnctcanctgtttgcnagnaagtgtgttnnanaaaagtgcannnttgggtcannacaaagaacntnaggcttnttgtgtttagaaggcttctttttttctgctagaggccgacctggcctatgaat

SEQ ID NO: 348072 - DNA, 3600 bp, Homo sapiens
ggcggggccgccgcgaccgcgggcttcaggcagggctgcagatgcgcggcccagctgtacctcgcgtgtcccgggtcgggagtcggagacgcaggtgcaggagagtgcggggcaagtagcgcattttctctttgcattctcgagatcgcttagccgcgctttaaaaaggtttgcatcagctgtgagtccatctgacaagcgaggaaactaaggctgagaagtgggaggcgttgccatctgcaggcccaggcaacctgctacgggaagaccggggaccaagacctctgggttggctttcctagacccgctcgggtcttcgggtgtcgcgaggaagggccctgctcctttcgttccctgcacccctggccgctgcaggtggctccctggaggaggagctcccacgcggaggaggagccagggcagctgggagcggggacaccatcctcctggataagaggcagaggccgggaggaaccccgtcagccgggcgggcaggaagctctgggagtagcctcatggaagagaagcagatcctgtgcgtggggctagtggtgctggacgtcatcagcctggtggacaagtaccctaaggaggactcggagataaggtgtttgtcccagagatggcagcgcggaggcaacgcgtccaactcctgcaccattctctccctgctcggagccccctgtgccttcatgggctcaatggctcctggccatgttgctgattttgtcctggatgacctccgccgctattctgtggacctacgctacacagtctttcagaccacaggctccgtccccatcgccacggtcatcatcaacgaggccagtggtagccgcaccatcctatactatgacaggagcctgccagatgtgtctgctacagactttgagaaggttgatctgacccagttcaagtggatccacattgagggccggaacgcatcggagcaggtgaagatgctgcagcggatagacgcacacaacaccaggcagcctccagagcagaagatccgggtgtccgtggaggtggagaagccacgagaggagctcttccagctgtttggctacggagacgtggtgtttgtcagcaaagatgtggccaagcacttggggttccagtcagcagaggaagccttgaggggcttgtatggtcgtgtgaggaaaggggctgtgcttgtctgtgcctgggctgaggagggcgccgacgccctgggccctgatggcaaattgctccactcggatgctttcccgccaccccgcgtggtggatacactgggagctggagacaccttcaatgcctccgtcatcttcagcctctcccaggggaggagcgtgcaggaagcactgagattcgggtgccaggtggccggcaagaagtgtggcctgcagggctttgatggcatcgtgtgagagcaggtgccggctcctcacacaccatggagactaccattgcggctgcatcgccttctcccctccatccagcctggcgtccaggttgccctgttcaggggacagatgcaagctgtggggaggactctgcctgtgtcctgtgttccccacagggagaggctctggggggatggctgggggatgcagagcctcagagcaaataaatcttcctcagagccagcttctcctctcaatgtctgaactgctctggctgggcattcctgaggctctgactcttcgatcctccctctttgtgtccattccccaaattaacctctccgcccaggcccagaggaggggctgcctgggctagagcagcgagaagtgccctgggcttgccaccagctctgccctggctggggaggacactcggtgccccacacccagtgaacctgccaaagaaaccgtgagagctcttcggggccctgcgttgtgcagactctattcccacagctcagaagctgggagtccacaccgctgagctgaactgacaggccagtggggggcaggggtgcgcctcctctgccctgcccaccagcctgtgatttgatggggtcttcattgtccagaaatacctcctcccgctgactgccccagagcctgaaagtctcacccttggagcccaccttggaattaagggcgtgcctcagccacaaatgtgacccaggatacagagtgttgctgtcctcagggaggtccgatctggaacacatattggaattggggccaactccaatatagggtgggtaaggccttataatgtaaagagcatataatgtaaagggctttagagtgagacagacctggattcaaatctgccatttaattagctgcatatcaccttagggtacagcacttaacgcaatctgcctcaatttcttcatctgtcaaatggaaccaattctgcttggctacagaattattgtgaggataaaatcatatataaaatgcccagcatgatgcctgatgtgtacaaggctctcaaaaagttctagtgatgattaatattactggggatggggtcacctgccctgagctgcaggagagcatggggtgtctgaacaccaggtgagggggaaccggtgagggtttggggcccagggatagactgagctttcctcactgggtcctctgcagccggccatggctagcaccatgcgctctgctgccggagcaccgtgaggcccagaaacactgggcaggcggcatccctgtcctttcggtccccaaccccgttcctctgagagggtctgggcaggctggacgggtagagaggtggccggggggatgaattcattcagttctttattggtaatctgccccttaacttagggtctccctgagctgcacagaaagacctgatacctactgggaccaggcagggggcacagagatggtccttgtcccagcgtacatttcccctgcccacttcagggcttatgttctggcactgagacttcgtggggtacctgtatcttcaagatctagatctcatcattctccacttgaacaatgtgcacctcaaagtcattttgggtgttcttagactccagtgtttcccctggaagttccttggcctcctctccattctccctggcctctgcctggcccccagcttcccctctgggcccgggggcatctccttcagcctctgcctggcccccagcttcccctctgggcccaggggcatctcctttagcctctgcctggccctcagcttcccctctgggccctggaacatctccatcagcctctgcctggcccccaggctcctggacaggatccaaagactcccttctggcctctacctggccctttgcttcttctctgggaccaggggcttcctgtgtttcttgtcttaatgggcttttagctaatagggactgccttccaacagcttgtggctcctgaggagatggagcaaggggctctccgggctccacgtgcctgagggctactcccgggaagttgatgagctcagcaggggtcatgagcccatccccattcaggtcctgggtctcgagcactttgtccactatcaagatcaccgggttggtggtaggagagttggcagctccaggggccagagcagctgtcaacatggacagcagctccaggccatccagctgtccactctggtcatagtcat

SEQ ID NO: 348073 - DNA, 1727 bp, Homo sapiens
ggcggggccgccgcgaccgcgggcttcaggcagggctgcagatgcgcggcccagctgtacctcgcgtgtcccgggtcgggagtcggagacgcaggtgcaggagagtgcggggcaagtagcgcattttctctttgcattctcgagatcgcttagccgcgctttaaaaaggtttgcatcagctgtgagtccatctgacaagcgaggaaactaaggctgagaagtgggaggcgttgccatctgcaggcccaggcaacctgctacgggaagaccggggaccaagacctctgggttggctttcctagacccgctcgggtcttcgggtgtcgcgaggaagggccctgctcctttcgttccctgcacccctggccgctgcaggtggctccctggaggaggagctcccacgcggaggaggagccagggcagctgggagcggggacaccatcctcctggataagaggcagaggccgggaggaaccccgtcagccgggcgggcaggaagctctgggagtagcctcatggaagagaagcagatcctgtgcgtggggctagtggtgctggacgtcatcagcctggtggacaagtaccctaaggaggactcggagataaggtgtttgtcccagagatggcagcgcggaggcaacgcgtccaactcctgcaccattctctccctgctcggagccccctgtgccttcatgggctcaatggctcctggccatgttgctgattttgtcctggatgacctccgccgctattctgtggacctacgctacacagtctttcagaccacaggctccgtccccatcgccacggtcatcatcaacgaggccagtggtagccgcaccatcctatactatgacaggagcctgccagatgtgtctgctacagactttgagaaggttgatctgacccagttcaagtggatccacattgagggccggaacgcatcggagcaggtgaagatgctgcagcggatagacgcacacaacaccaggcagcctccagagcagaagatccgggtgtccgtggaggtggagaagccacgagaggagctcttccagctgtttggctacggagacgtggtgtttgtcagcaaagatgtggccaagcacttggggttccagtcagcagaggaagccttgaggggcttgtatggtcgtgtgaggaaaggggctgtgcttgtctgtgcctgggctgaggagggcgccgacgccctgggccctgatggcaaattgctccactcggatgctttcccgccaccccgcgtggtggatacactgggagctggagacaccttcaatgcctccgtcatcttcagcctctcccaggggaggagcgtgcaggaagcactgagattcgggtgccaggtggccggcaagaagtgtggcctgcagggctttgatggcatcgtgtgagagcaggtgccggctcctcacacaccatggagactaccattgcggctgcatcgccttctcccctccatccagcctggcgtccaggttgccctgttcaggggacagatgcaagctgtggggaggactctgcctgtgtcctgtgttccccacagggagaggctctggggggatggctgggggatgcagagcctcagagcaaataaatcttcctcagagccaaatatcaagaacatcgcacacaaaacaacacaaataacaacacaaacacaaaacagggggcggctaaaaaataccccgagacccaaataaagtaca

SEQ ID NO: 348074 - DNA, 2577 bp, Homo sapiens
ggcggggccgccgcgaccgcgggcttcaggcagggctgcagatgcgcggcccagctgtacctcgcgtgtcccgggtcgggagtcggagacgcaggtgcaggagagtgcggggcaagtagcgcattttctctttgcattctcgagatcgcttagccgcgctttaaaaaggtttgcatcagctgtgagtccatctgacaagcgaggaaactaaggctgagaagtgggaggcgttgccatctgcaggcccaggcaacctgctacgggaagaccggggaccaagacctctgggttggctttcctagacccgctcgggtcttcgggtgtcgcgaggaagggccctgctcctttcgttccctgcacccctggccgctgcaggtggctccctggaggaggagctcccacgcggaggaggagccagggcagctgggagcggggacaccatcctcctggataagaggcagaggccgggaggaaccccgtcagccgggcgggcaggaagctctgggagtagcctcatggaagagaagcagatcctgtgcgtggggctagtggtgctggacgtcatcagcctggtggacaagtaccctaaggaggactcggagataaggtgtttgtcccagagatggcagcgcggaggcaacgcgtccaactcctgcaccattctctccctgctcggagccccctgtgccttcatgggctcaatggctcctggccatgttgctgattttgtcctggatgacctccgccgctattctgtggacctacgctacacagtctttcagaccacaggctccgtccccatcgccacggtcatcatcaacgaggccagtggtagccgcaccatcctatactatgacaggagcctgccagatgtgtctgctacagactttgagaaggttgatctgacccagttcaagtggatccacattgagggccggaacgcatcggagcaggtgaagatgctgcagcggatagacgcacacaacaccaggcagcctccagagcagaagatccgggtgtccgtggaggtggagaagccacgagaggagctcttccagctgtttggctacggagacgtgcacaaatgtgacccaggatacagagtgttgctgtcctcagggaggtccgatctggaacacatattggaattggggccaactccaatatagggtgggtaaggccttataatgtaaagagcatataatgtaaagggctttagagtgagacagacctggattcaaatctgccatttaattagctgcatatcaccttagggtacagcacttaacgcaatctgcctcaatttcttcatctgtcaaatggaaccaattctgcttggctacagaattattgtgaggataaaatcatatataaaatgcccagcatgatgcctgatgtgtacaaggctctcaaaaagttctagtgatgattaatattactggggatggggtcacctgccctgagctgcaggagagcatggggtgtctgaacaccaggtgagggggaaccggtgagggtttggggcccagggatagactgagctttcctcactgggtcctctgcagccggccatggctagcaccatgcgctctgctgccggagcaccgtgaggcccagaaacactgggcaggcggcatccctgtcctttcggtccccaaccccgttcctctgagagggtctgggcaggctggacgggtagagaggtggccggggggatgaattcattcagttctttattggtaatctgccccttaacttagggtctccctgagctgcacagaaagacctgatacctactgggaccaggcagggggcacagagatggtccttgtcccagcgtacatttcccctgcccacttcagggcttatgttctggcactgagacttcgtggggtacctgtatcttcaagatctagatctcatcattctccacttgaacaatgtgcacctcaaagtcattttgggtgttcttagactccagtgtttcccctggaagttccttggcctcctctccattctccctggcctctgcctggcccccagcttcccctctgggcccgggggcatctccttcagcctctgcctggcccccagcttcccctctgggcccaggggcatctcctttagcctctgcctggccctcagcttcccctctgggccctggaacatctccatcagcctctgcctggcccccaggctcctggacaggatccaaagactcccttctggcctctacctggccctttgcttcttctctgggaccaggggcttcctgtgtttcttgtcttaatgggcttttagctaatagggactgccttccaacagcttgtggctcctgaggagatggagcaaggggctctccgggctccacgtgcctgagggctactcccgggaagttgatgagctcagcaggggtcatgagcccatccccattcaggtcctgggtctcgagcactttgtccactatcaagatcaccgggttggtggtaggagagttggcagctccaggggccagagcagctgtcaacatggacagcagctccaggccatccagctgtccactctggtcatagtcat

SEQ ID NO: 348075 - DNA, 1766 bp, Homo sapiens
ggcggggccgccgcgaccgcgggcttcaggcagggctgcagatgcgcggcccagctgtacctcgcgtgtcccgggtcgggagtcggagacgcaggtgcaggagagtgcggggcaagtagcgcattttctctttgcattctcgagatcgcttagccgcgctttaaaaaggtttgcatcagctgtgagtccatctgacaagcgaggaaactaaggctgagaagtgggaggcgttgccatctgcaggcccaggcaacctgctacgggaagaccggggaccaagacctctgggttggctttcctagacccgctcgggtcttcgggtgtcgcgaggaagggccctgctcctttcgttccctgcacccctggccgctgcaggtggctccctggaggaggagctcccacgcggaggaggagccagggcagctgggagcggggacaccatcctcctggataagaggcagaggccgggaggaaccccgtcagccgggcgggcaggaagctctgggagtagcctcatggaagagaagcagatcctgtgcgtggggctagtggtgctggacgtcatcagcctggtggacaagtaccctaaggaggactcggagataaggtgtttgtcccagagatggcagcgcggaggcaacgcgtccaactcctgcaccattctctccctgctcggagccccctgtgccttcatgggctcaatggctcctggccatgttgctgattttgtcctggatgacctccgccgctattctgtggacctacgctacacagtctttcagaccacaggctccgtccccatcgccacggtcatcatcaacgaggccagtggtagccgcaccatcctatactatgacagcttcctggtggccgacttcaggcggcggggcgtggacgtgtctcaggtggcctggcagagcaagggggacacccccagctcctgctgcatcatcaacaactccaatggcaaccgtaccattgtgctccatgacacgagcctgccagatgtgtctgctacagactttgagaaggttgatctgacccagttcaagtggatccacattgagggccggaacgcatcggagcaggtgaagatgctgcagcggatagacgcacacaacaccaggcagcctccagagcagaagatccgggtgtccgtggaggtggagaagccacgagaggagctcttccagctgtttggctacggagacgtggtgtttgtcagcaaagatgtggccaagcacttggggttccagtcagcagaggaagccttgaggggcttgtatggtcgtgtgaggaaaggggctgtgcttgtctgtgcctgggctgaggagggcgccgacgccctgggccctgatggcaaattgctccactcggatgctttcccgccaccccgcgtggtggatacactgggagctggagacaccttcaatgcctccgtcatcttcagcctctcccaggggaggagcgtgcaggaagcactgagattcgggtgccaggtggccggcaagaagtgtggcctgcagggctttgatggcatcgtgtgagagcaggtgccggctcctcacacaccatggagactaccattgcggctgcatcgccttctcccctccatccagcctggcgtccaggttgccctgttcaggggacagatgcaagctgtggggaggactctgcctgtgtcctgtgttccccacagggagaggctctggggggatggctgggggatgcagagcctcagagcaaataaatcttcctcagagcca

SEQ ID NO: 348076 - DNA, 1862 bp, Homo sapiens
ggcggggccgccgcgaccgcgggcttcaggcagggctgcagatgcgcggcccagctgtacctcgcgtgtcccgggtcgggagtcggagacgcaggtgcaggagagtgcggggcaagtagcgcattttctctttgcattctcgagatcgcttagccgcgctttaaaaaggtttgcatcagctgtgagtccatctgacaagcgaggaaactaaggctgagaagtgggaggcgttgccatctgcaggcccaggcaacctgctacgggaagaccggggaccaagacctctgggttggctttcctagacccgctcgggtcttcgggtgtcgcgaggaagggccctgctcctttcgttccctgcacccctggccgctgcaggtggctccctggaggaggagctcccacgcggaggaggagccagggcagctgggagcggggacaccatcctcctggataagaggcagaggccgggaggaaccccgtcagccgggcgggcaggaagctctgggagtagcctcatggaagagaagcagatcctgtgcgtggggctagtggtgctggacgtcatcagcctggtggacaagtaccctaaggaggactcggagataaggtgtttgtcccagagatggcagcgcggaggcaacgcgtccaactcctgcaccattctctccctgctcggagccccctgtgccttcatgggctcaatggctcctggccatgttgctgattttgtcctggatgacctccgccgctattctgtggacctacgctacacagtctttcagaccacaggctccgtccccatcgccacggtcatcatcaacgaggccagtggtagccgcaccatcctatactatgacagcttcctggtggccgacttcaggcggcggggcgtggacgtgtctcaggtggcctggcagagcaagggggacacccccagctcctgctgcatcatcaacaactccaatggcaaccgtaccattgtgctccatgacacgagcctgccagatgtgtctgctacagactttgagaaggttgatctgacccagttcaagtggatccacattgagggccggaacgcatcggagcaggtgaagatgctgcagcggatagacgcacacaacaccaggcagcctccagagcagaagatccgggtgtccgtggaggtggagaagccacgagaggagctcttccagctgtttggctacggagacgtggtgtttgtcagcaaagatgtggccaagcacttggggttccagtcagcagaggaagccttgaggggcttgtatggtcgtgtgaggaaaggggctgtgcttgtctgtgcctgggctgaggagggcgccgacgccctgggccctgatggcaaattgctccactcggatgctttcccgccaccccgcgtggtggatacactgggagctggagacaccttcaatgcctccgtcatcttcagcctctcccaggggaggagcgtgcaggaagcactgagattcgggtgccaggtggccggcaagaagtgtggcctgcagggctttgatggcatcgtgtgagagcaggtgccggctcctcacacaccatggagactaccattgcggctgcatcgccttctcccctccatccagcctggcgtccaggttgccctgttcaggggacagatgcaagctgtggggaggactctgcctgtgtcctgtgttccccacagggagaggctctggggggatggctgggggatgcagagcctcagagcaaataaatcttcctcagagccaaatatcaagaacatcgcacacaaaacaacacaaataacaacacaaacacaaaacagggggcggctaaaaaataccccgagacccaaataaagtaca

SEQ ID NO: 348077 - DNA, 3011 bp, Homo sapiens
cagaacaggactcttcttctcttagaggctcgtgtgctccagcaccctctccccactccttttggaggtccagaccacttccaggctctaatctgtgtctccttgcccttttcctggcccggcctccaccctaagcttcctggtggccgacttcaggcggcggggcgtggacgtgtctcaggtggcctggcagagcaagggggacacccccagctcctgctgcatcatcaacaactccaatggcaaccgtaccattgtgctccatgacacgagcctgccagatgtgtctgctacagactttgagaaggttgatctgacccagttcaagtggatccacattgagggccggaacgcatcggagcaggtgaagatgctgcagcggatagacgcacacaacaccaggcagcctccagagcagaagatccgggtgtccgtggaggtggagaagccacgagaggagctcttccagctgtttggctacggagacgtggtgtttgtcagcaaagatgtggccaagcacttggggttccagtcagcagaggaagccttgaggggcttgtatggtcgtgtgaggaaaggggctgtgcttgtctgtgcctgggctgaggagggcgccgacgccctgggccctgatggcaaattgctccactcggatgctttcccgccaccccgcgtggtggatacactgggagctggagacaccttcaatgcctccgtcatcttcagcctctcccaggggaggagcgtgcaggaagcactgagattcgggtgccaggtggccggcaagaagtgtggcctgcagggctttgatggcatcgtgtgagagcaggtgccggctcctcacacaccatggagactaccattgcggctgcatcgccttctcccctccatccagcctggcgtccaggttgccctgttcaggggacagatgcaagctgtggggaggactctgcctgtgtcctgtgttccccacagggagaggctctggggggatggctgggggatgcagagcctcagagcaaataaatcttcctcagagccagcttctcctctcaatgtctgaactgctctggctgggcattcctgaggctctgactcttcgatcctccctctttgtgtccattccccaaattaacctctccgcccaggcccagaggaggggctgcctgggctagagcagcgagaagtgccctgggcttgccaccagctctgccctggctggggaggacactcggtgccccacacccagtgaacctgccaaagaaaccgtgagagctcttcggggccctgcgttgtgcagactctattcccacagctcagaagctgggagtccacaccgctgagctgaactgacaggccagtggggggcaggggtgcgcctcctctgccctgcccaccagcctgtgatttgatggggtcttcattgtccagaaatacctcctcccgctgactgccccagagcctgaaagtctcacccttggagcccaccttggaattaagggcgtgcctcagccacaaatgtgacccaggatacagagtgttgctgtcctcagggaggtccgatctggaacacatattggaattggggccaactccaatatagggtgggtaaggccttataatgtaaagagcatataatgtaaagggctttagagtgagacagacctggattcaaatctgccatttaattagctgcatatcaccttagggtacagcacttaacgcaatctgcctcaatttcttcatctgtcaaatggaaccaattctgcttggctacagaattattgtgaggataaaatcatatataaaatgcccagcatgatgcctgatgtgtacaaggctctcaaaaagttctagtgatgattaatattactggggatggggtcacctgccctgagctgcaggagagcatggggtgtctgaacaccaggtgagggggaaccggtgagggtttggggcccagggatagactgagctttcctcactgggtcctctgcagccggccatggctagcaccatgcgctctgctgccggagcaccgtgaggcccagaaacactgggcaggcggcatccctgtcctttcggtccccaaccccgttcctctgagagggtctgggcaggctggacgggtagagaggtggccggggggatgaattcattcagttctttattggtaatctgccccttaacttagggtctccctgagctgcacagaaagacctgatacctactgggaccaggcagggggcacagagatggtccttgtcccagcgtacatttcccctgcccacttcagggcttatgttctggcactgagacttcgtggggtacctgtatcttcaagatctagatctcatcattctccacttgaacaatgtgcacctcaaagtcattttgggtgttcttagactccagtgtttcccctggaagttccttggcctcctctccattctccctggcctctgcctggcccccagcttcccctctgggcccgggggcatctccttcagcctctgcctggcccccagcttcccctctgggcccaggggcatctcctttagcctctgcctggccctcagcttcccctctgggccctggaacatctccatcagcctctgcctggcccccaggctcctggacaggatccaaagactcccttctggcctctacctggccctttgcttcttctctgggaccaggggcttcctgtgtttcttgtcttaatgggcttttagctaatagggactgccttccaacagcttgtggctcctgaggagatggagcaaggggctctccgggctccacgtgcctgagggctactcccgggaagttgatgagctcagcaggggtcatgagcccatccccattcaggtcctgggtctcgagcactttgtccactatcaagatcaccgggttggtggtaggagagttggcagctccaggggccagagcagctgtcaacatggacagcagctccaggccatccagctgtccactctggtcatagtcat

SEQ ID NO: 348078 - DNA, 1898 bp, Homo sapiens
tttgatatgcctgcattttggaaaaaaaaattgaggatttagcccagtcgctttcccttgatatagccttgttctgaattaaaatggaaaaaatatttcaattattttcatcttgttctcaactggatgttagtcaatgtggtctctttttgaatatgtatcaaatattaatgatccataatattagggagataattttaaatgaagtgatacgtgtctaacttacttaaagaataagtttttggtttttgcttttaaagacaaccaaatctgatattgttcatcctgataaaaataacaacttttagtgcttaaagcattaattaagcaagtggctaggtatgataaagaacttctgcttgctccccaagaggcaaactattagaagaactggagcgggagtcctttggacccatcgtggatctctttaagccactgctacccaaaaacattcaggacaagcaaacatttagagcaagaatctccaaattcttcaggatttgtaatgaaatgatgttcagttccattttgctctttacatagggtggagaattgtcatgtcttctctaatttttccaagtaaagtggtagcaaaatgttttaaaaagcaatcttatattagaaaacaaaaatgttgtcacttgaaataccaaaacaacatttctgagcgttgttgagggactggcaaagcaatcagctactataacaaatcagtagaaataaccctcccacaccagatatgcatgcagaaggaatggagtattatagagacttgatacaatggacatatgcacatggaggtacaaaacacacagtctaaatacaaatgaattccatcagatttactatacggaacatcagtagtgacagattgcacttcttacttaataacagcaaacttaatttctgaggggaaaaaaatggcgaagtcttatcccaaacaaatagcaagagaggtatcatcaaagagctaaaattttctttggcatggtaaagggggaaattgagtttaccaacttatttacatgacatttctctatattggtgagtaatgcaatgccattttgttacataaagttgtttgatgttttttaatatgccttcatataaatattttattcaatatgttgtatttgtgaatttaacaaatgatattaaacacaaactacaatgcagacagacaaactctttgtatgcaaattagcaatacataccaacagttcttgatacacaggtacctactacatgcagctcatcattgctgtcctcttcccatgctacaggtgagaccagacacaaagtaaatgacctaactcaattacaaataacaaggacccctctgcaatatgtctaaacatatattagaagaaagtatttgacatccttcatagggataaatgcccttatagacaccccatatataaaacacaacagagatacacatttacataaatctcagtcatttacaaaaataaatcttgtcttaatttaaaccaataaacagacttgcaggggaaaaagaaaccagcaagtagggctaattatcagtaacaaatagatgggggtgtttgctctgtgtgtgtgtgtgtgtgtgtgtgtgtgtgtgtatatgtgtgtgtttgtgtgaagtgaagtgttgctgctgtaagtagtgtccataagcccatttgactgtattacaagttagttaattactcatatagttggccacatattatgggatctatgttttctgaaaataattggttaatggaagttatctaatatattttaactgttcctgttaaaaacaataggcttcaagatgacataacaccaaatcaaaaatgaccaaaggaatcattttgtttgttagatttgtaatttagcatcattggcaataaatctactcaaacgtt

SEQ ID NO: 348079 - DNA, 1949 bp, Homo sapiens
ttttttgataggaacaaaatgtttattttcttaatggtgaaactttgctttgtatgaaattcacattgaattatgaaagtgtacaataattgggacttcccttacatatttacaggtaaatctacttatacacattagtttaggcaacctttaattatttagagctaaaaaaaaaaccactttttttctaaaggtgaattactttgtaaaatcctagaataatgtagcaaaatcatttccgtattactttaagatgaaaatttttacttggaaattttattttaatgatgtaaatattctagtcatggcttaaactttataagtcaaatttccaaaaataaggaaaatatgcatccactgagttacttaaaaatttaatattgaaaattattttaagagaacatttaactgatcctgatttttatagtactaacaatgttctcataatgtaatagatttataaaaattgttatctctatcctgagattaaggagtgcaaccatgttgtagttctattattgagtacgtaaattgatagatctcttccgtaaaatgagggaaatataagtagtcaataaataatgtaggttatattctttcctcttcactacctaaacattttaagctgtgaacaacctattattattgttttgtagcaattttgatgacgtattcgctgatgcacagacattggaattcattacattatctagccatcgtaatacaaatgacctttggatttctctatcacggcgcttatcctcctattaaggatcagaaagttaaactttacggaccacgtacgtccctgtctcatattcttctttgttggtttctgtttaatactttaaagctgtaaaaaaaatttaaaaaattccttctgagctcccaggccatacaaaagcaacttaagggtggatttggctggcagctgggcagtactttgtcagcctcagctccactggaactgcccttgattctctatagctcatcacaaaacctcaggtatgtcttatttttcttataatcctctgtatgttattatcctttttattaacaacaacaactacaacaaaagtgctgctctttttcatagtctcatgtaagaagagtgtcaaaaatgtcctcggcatttgttttctcagaaaaagaatttagatattggagaaattatcataccataaaaagttcaaaatgtgattcatctaaaattttggacaaagatgaaaatatagtcagctctgttctagtgttcatttagttagaaaccatagtaccggaactgtattatagtagaagttaatggtacctaaactctaaggaatgctttttctttgaaaacagaaatatttttacttatttctgtccactatgtttgtgtgtatgtgtgtgtttgtgtgtgtatgtgtggttttgatgccagcaatgcaaacaccaatatatctattaagaagtgattgaatttagattggaaaaaataaaatagttacatgtaaagacataaactctttccttcttaaatgtgattttcaactctatgatagaaactccctctaaaaaacaagcagggcaagaacaaacttacttgtaatgggtgagagaaaataagcaaatctcattggctcattcctgtttttaggaagttgcagtgggattaatgtcaattggaagggatgcagcaagtttagagaaggtgttggcactaacgctgcttgtttggcaaatcatcatcactgaggtattccacccagagactttttcaaaaaagtcaactaaagtgctaagtcataagaggagagccattatacccgttgtctttctgggctccttgagtttatctggattccaacagcacttggaaagtaccgccctccactacctcaaatgcaaacacaatctctgccagtagacattggaattagacttagtgaaaaccaggaaaaaaaaaa

SEQ ID NO: 348080 - DNA, 2526 bp, Homo sapiens
actctccactgaggggtttggcaccagcaccccgcccagagcagtgccgctgcccaaatcctcgcaggcagctcatcaacgcaattgcaactccggctggagccccggacctgcaagcctgggtgtccgtgggtccgtctgcccagccatctgctggtggcacctctccctcctgccgcctccctcggtgaaccccaccttgcagaagtgcagctcgcccggagcagcccaggagctcagcatgcgtcccccaggcttcaggaacttcttgctgctggcgtcctcccttctctttgctgggttgtcagctgttcctcaaagcttctcgccatctctgaggagctggccgggcgccgcctgcaggctgtcccgggccgagtcggagcgacgctgccgcgcacctgggcagcccccgggggccgcgctgtgccacggccggggccgctgcgactgcggcgtctgcatctgccacgtgactgagccgggcatgttcttcgggcccctgtgtgagtgccatgagtgggtgtgcgagacctacgacgggagcacctgtgcaggccatggtaagtgtgactgtggcaagtgcaagtgtgaccagggatggtatggggatgcttgccagtacccaactaactgtgacttgacaaagaagaaaagtaaccaaatgtgcaagaattcacaagacatcatctgctctaatgcaggtacatgtcactgtggcaggtgtaagtgtgataattcagatggaagtggacttgtgtatggtaaattttgtgagtgtgacgatagagaatgcatagacgatgaaacagaagaaatatgtggaggccatgggaagtgttactgtggaaactgctactgcaaggctggttggcatggagataaatgtgaattccagtgcgatatcaccccctgggaaagcaagcgaagatgcacgtctccagatggcaaaatctgcagtaacagagggacttgtgtatgtggtgaatgtacctgtcacgatgttgatccgactggggactggggagatattcatggggacacctgtgaatgtgatgagagggactgtagagctgtctatgaccgatattctgatgacttctgttcaggtcatggacagtgtaattgcggaagatgtgactgcaaagcaggctggtatgggaagaagtgtgagcacccacagtcctgcacgctgtcagctgaggagagcatcaggaagtgccagggaagctcggatctgccttgctctgggaggggtaaatgtgaatgtggcaaatgcacctgctatcctccaggagatcgccgggtgtatggcaagacttgtgagtgtgatgatcgccgctgtgaagacctcgatggtgtggtctgtggaggccacggcacatgttcctgtggtcgctgtgtttgtgagagaggatggtttggaaagctctgccaacatccgcggaagtgtaacatgacggaagaacaaagcaagaatctgtgtgaatcagcagatggcatattgtgctcggggaagggttcttgtcattgtgggaagtgcatttgttctgctgaagagtggtatatttctggggagttctgtgactgtgatgacagagactgcgacaaacatgatggtctcatttgtacagggaatggaatatgtagctgtggaaactgtgaatgctgggatggatggaatggaaatgcatgtgaaatctggcttggctcagaatatccttaacaattacatgagagaggtctggattcttattttttctgggccattagaacatataaatgcgaaggaaaccatgtatattcaccactaggacaggttaaaaagaccattgtatgtttttctatttctgaattacgaatgaaatccgagtacctattagaaatgagttatgcaaatttagatgcaaataacattagaaaaaaaagattcttccataattaacataagtggttcctaacgagagcaatttttccacccaaaagtcatttggcaacatctacagacaattttgattgtcacactgggtcgggtaggaaggtatgctgcagacatttggtgggtagaggccagggatgctgctgagcatcccgcagtgtacaggacagcccccaaacaaggaattatccagccccaaatgccaatagggctcaaactgagaaacattgagttatatggctattagaaatccacattcttacacaagaaagaccatattagaatctaaggaaaacatgcatattcacattaattaatcgatcagatttttccagaattccgtatcagtcaccattttaatatggggacaatgaagacaagcacacaggaggtagaatatcagagtggggctggatcaagggcaaaaactggtcattaagtcatctgacattaaatcatttagccactaagttatttgtctactctcactttaaactcaccaaagaagattctcttaaagaaattatgaaaaatgtacaatttaacattttaaataaatagtgacagaagttgtttaaaaaaaaaaa

SEQ ID NO: 348081 - DNA, 3035 bp, Homo sapiens
actctccactgaggggtttggcaccagcaccccgcccagagcagtgccgctgcccaaatcctcgcaggcagctcatcaacgcaattgcaactccggctggagccccggacctgcaagcctgggtgtccgtgggtccgtctgcccagccatctgctggtggcacctctccctcctgccgcctccctcggtgaaccccaccttgcagaagtgcagctcgcccggagcagcccaggagctcagcatgcgtcccccaggcttcaggaacttcttgctgctggcgtcctcccttctctttgctgggttgtcagctgttcctcaaagcttctcgccatctctgaggagctggccgggcgccgcctgcaggctgtcccgggccgagtcggagcgacgctgccgcgcacctgggcagcccccgggggccgcgctgtgccacggccggggccgctgcgactgcggcgtctgcatctgccacgtgactgagccgggcatgttcttcgggcccctgtgtgagtgccatgagtgggtgtgcgagacctacgacgggagcacctgtgcaggccatggtaagtgtgactgtggcaagtgcaagtgtgaccagggatggtatggggatgcttgccagtacccaactaactgtgacttgacaaagaagaaaagtaaccaaatgtgcaagaattcacaagacatcatctgctctaatgcaggtacatgtcactgtggcaggtgtaagtgtgataattcagatggaagtggacttgtgtatggtaaattttgtgagtgtgacgatagagaatgcatagacgatgaaacagaagaaatatgtggaggccatgggaagtgttactgtggaaactgctactgcaaggctggttggcatggagataaatgtgaattccagtgcgatatcaccccctgggaaagcaagcgaagatgcacgtctccagatggcaaaatctgcagtaacagagggacttgtgtatgtggtgaatgtacctgtcacgatgttgatccgactggggactggggagatattcatggggacacctgtgaatgtgatgagagggactgtagagctgtctatgaccgatattctgatgacttctgttcaggtcatggacagtgtaattgcggaagatgtgactgcaaagcaggctggtatgggaagaagtgtgagcacccacagtcctgcacgctgtcagctgaggagagcatcaggaagtgccagggaagctcggatctgccttgctctgggaggggtaaatgtgaatgtggcaaatgcacctgctatcctccaggagatcgccgggtgtatggcaagacttgtgagtgtgatgatcgccgctgtgaagacctcgatggtgtggtctgtggaggccacggcacatgttcctgtggtcgctgtgtttgtgagagaggatggtttggaaagctctgccaacatccgcggaagtgtaacatgacggaagaacaaagcaagaatctgtgtgaatcagcagatggcatattgtgctcggggaagggttcttgtcattgtgggaagtgcatttgttctgctgaagagtggtatatttctggggagttctgtgactgtgatgacagagactgcgacaaacatgatggtctcatttgtacagggaatggaatatgtagctgtggaaactgtgaatgctgggatggatggaatggaaatgcatgtgaaatctggcttggctcagaatatccttaacaattacatgagagagcaattttgatgacgtattcgctgatgcacagacattggaattcattacattatctagccatcgtaatacaaatgacctttggatttctctatcacggcgcttatcctcctattaaggatcagaaagttaaactttacggaccacgtacgtccctgtctcatattcttctttgttggtttctgtttaatactttaaagctgtaaaaaaaatttaaaaaattccttctgagctcccaggccatacaaaagcaacttaagggtggatttggctggcagctgggcagtactttgtcagcctcagctccactggaactgcccttgattctctatagctcatcacaaaacctcaggtatgtcttatttttcttataatcctctgtatgttattatcctttttattaacaacaacaactacaacaaaagtgctgctctttttcatagtctcatgtaagaagagtgtcaaaaatgtcctcggcatttgttttctcagaaaaagaatttagatattggagaaattatcataccataaaaagttcaaaatgtgattcatctaaaattttggacaaagatgaaaatatagtcagctctgttctagtgttcatttagttagaaaccatagtaccggaactgtattatagtagaagttaatggtacctaaactctaaggaatgctttttctttgaaaacagaaatatttttacttatttctgtccactatgtttgtgtgtatgtgtgtgtttgtgtgtgtatgtgtggttttgatgccagcaatgcaaacaccaatatatctattaagaagtgattgaatttagattggaaaaaataaaatagttacatgtaaagacataaactctttccttcttaaatgtgattttcaactctatgatagaaactccctctaaaaaacaagcagggcaagaacaaacttacttgtaatgggtgagagaaaataagcaaatctcattggctcattcctgtttttaggaagttgcagtgggattaatgtcaattggaagggatgcagcaagtttagagaaggtgttggcactaacgctgcttgtttggcaaatcatcatcactgaggtattccacccagagactttttcaaaaaagtcaactaaagtgctaagtcataagaggagagccattatacccgttgtctttctgggctccttgagtttatctggattccaacagcacttggaaagtaccgccctccactacctcaaatgcaaacacaatctctgccagtagacattggaattagacttagtgaaaaccaggaaaaaaaaaa

SEQ ID NO: 348082 - DNA, 3088 bp, Homo sapiens
tttgatatgcctgcattttggaaaaaaaaattgaggatttagcccagtcgctttcccttgatatagccttgttctgaattaaaatggaaaaaatatttcaattattttcatcttgttctcaactggatgttagtcaatgtggtctctttttgaatatgtatcaaatattaatgatccataatattagggagataattttaaatgaagtgatacgtgtctaacttacttaaagaataagtttttggtttttgcttttaaagacaaccaaatctgatattgttcatcctgataaaaataacaacttttagtgcttaaagcattaattaagcaagtggctaggtatgataaagaacttctgcttgctccccaagaggcaaactattagaagaactggagcgggagtcctttggacccatcgtggatctctttaagccactgctacccaaaaacattcaggacaagcaaacatttagagcaagaatctccaaattcttcaggatttgtaatgaaatgatgttcagttccattttgctctttacatagggtggagaattgtcatgtcttctctaatttttccaagtaaagtggtagcaaaatgttttaaaaagcaatcttatattagaaaacaaaaatgttgtcacttgaaataccaaaacaacatttctgagcgttgttgagggactggcaaagcaatcagctactataacaaatcagtagaaataaccctcccacaccagatatgcatgcagaaggaatggagtattatagagacttgatacaatggacatatgcacatggaggtacaaaacacacagtctaaatacaaatgaattccatcagatttactatacggaacatcagtagtgacagattgcacttcttacttaataacagcaaacttaatttctgaggggaaaaaaatggcgaagtcttatcccaaacaaatagcaagagaggtatcatcaaagagctaaaattttctttggcatggtaaagggggaaattgagtttaccaacttatttacatgacatttctctatattggtgagtaatgcaatgccattttgttacataaagttgtttgatgttttttaatatgccttcatataaatattttattcaatatgttgtatttgtgaatttaacaaatgatattaaacacaaactacaatgcagacagacaaactctttgtatgcaaattagcaatacataccaacagttcttgatacacaggtacctactacatgcagctcatcattgctgtcctcttcccatgctacaggtgagaccagacacaaagtaaatgacctaactcaattacaaataacaaggacccctctgcaatatgtctaaacatatattagaagaaagtatttgacatccttcatagggataaatgcccttatagacaccccatatataaaacacaacagagatacacatttacataaatctcagtcatttacaaaaataaatcttgtcttaatttaaaccaataaacagacttgcaggggaaaaagaaaccagcaagtagggctaattatcagtaacaaatagatgggggtgtttgctctgtgtgtgtgtgtgtgtgtgtgtgtgtgtgtgtatatgtgtgtgtttgtgtgaagtgaagtgttgctgctgtaagtagtgtccataagcccatttgactgtattacaagttagttaattactcatatagttggccacatattatgggatctatgttttctgaaaataattggttaatggaagttatctaatatattttaactgttcctgttaaaaacaataggcttcaagatgacataacaccaaatcaaaaatgaccaaaggaatcattttgtttgttagatttgtaatttagcatcattggcaataaatctactcaaacgttctgctaactttttatttattcaagtagaatccaatatgaaaatgaaataagcataaacaaacagttaaatttctactaaacctttaatcagctaagcaggccagaattttttaatgctgggcaagggctgtcatgaagaagatttatgaaagcagtgacaaaataatttcccaataaatacagtgcagatggggaaaatgatgactgggtcatcctcccacatagaaagaataacaagaggccagtacattgatcccacatataattttcaataaatgaggttcagtttggtctcaatgaactcttctgagaagaaaacattgaattttattaggtgtacacagagttaacaaatatattcccaaacagtttagtatgaaacattttgaacccctttagatccaatattgaacattttgcatggaatcttcattgtgtagtcaactgttcctggcctttcttggtagttgtcttccctaagctcaaacaaacagtgttaaactaaaaaggaaattaagaatgcaaaataaaagaaaataaatggaatggaccaaaatcctcatggatgaatgtgttggtttgcctttattttcatctaggataattcaacagactgtattctgagatcatggcaaggcacctctaacccagccactgggcaacatgagccccagatgctgagctagaggcatgtactggtgaaatacacagtaccggactcagcatgctgagctaaaaaaaatatttttcctaatatgtccagtttaaaaacttgtcattaaacaccaaaaatattaaagtctaattaatttataactaacgtttgcattgctgctgcaggaaagaacacaacagccgtcttgcccatgctctgctgagtatgaggggaacgcagccagaaacggggatggcgttaagtttggttcattaaaaacaggacggagtatatctgaaatggatttagacgcacttgtgcttttacttggcgtcaccccaggcttcgggaccgtttccccaacatcatgcaaagatggttctcggtacatggcaactagtgatgggaagaaaggaggaggaaaagcaaacattgcttggttaggtgtgagaatggtccatccatacctgcatagaccactgcagtttgcccatttctgttttccctgaagtaaagcaattccattgagacagaa

SEQ ID NO: 348083 - DNA, 1621 bp, Homo sapiens
actctccactgaggggtttggcaccagcaccccgcccagagcagtgccgctgcccaaatcctcgcaggcagctcatcaacgcaattgcaactccggctggagccccggacctgcaagcctgggtgtccgtgggtccgtctgcccagccatctgctggtggcacctctccctcctgccgcctccctcggtgaaccccaccttgcagaagtgcagctcgcccggagcagcccaggagctcagcatgcgtcccccaggcttcaggaacttcttgctgctggcgtcctcccttctctttgctgggttgtcagctgttcctcaaagcttctcgccatctctgaggagctggccgggcgccgcctgcaggctgtcccgggccgagtcggagcgacgctgccgcgcacctgggcagcccccgggggccgcgctgtgccacggccggggccgctgcgactgcggcgtctgcatctgccacgtgactgagccgggcatgttcttcgggcccctgtgtgagtgccatgagtgggtgtgcgagacctacgacgggagcacctgtgcaggccatggtaagtgtgactgtggcaagtgcaagtgtgaccagggatggtatggggatgcttgccagtacccaactaactgtgacttgacaaagaagaaaagtaaccaaatgtgcaagaattcacaagacatcatctgctctaatgcaggtacatgtcactgtggcaggtgtaagtgtgataattcagatggaagtggacttgtgtatggtaaattttgtgagtgtgacgatagagaatgcatagacgatgaaacagaagaaatatgtggaggccatgggaagtgttactgtggaaactgctactgcaaggctggttggcatggagataaatgtgaattccagtgcgatatcaccccctgggaaagcaagcgaagatgcacgtctccagatggcaaaatctgcagtaacagagggacttgtgtatgtggtgaatgtacctgtcacgatgttgatccgactggggactggggagatattcatggggacacctgtgaatgtgatgagagggactgtagagctgtctatgaccgatattctgatgacttctgttcaggtcatggacagtgtaattgcggaagatgtgactgcaaagcaggctggtatgggaagaagtgtgagcacccacagtcctgcacgctgtcagctgaggagagcatcaggaagtgccagggaagctcggatctgccttgctctgggaggggtaaatgtgaatgtggcaaatgcacctgctatcctccaggagatcgccgggtgtatggcaagacttgtgagtgtgatgatcgccgctgtgaagacctcgatggtgtggtctgtggaggtagtaacctttctcatagctgtatgctacctgcatgcaacttgctttacctgcctttgttattctactgactcttgctttttcaattgctgttaaaaataagataaacagaaagcaatataccattgaacctaaaagcaatatacaattaggtttgtaatgacttttatttccctgaactctttatttagcaggtatgtgaaagtacgcagtacactatcaataaaagatcattgaatctaaactaa

SEQ ID NO: 348084 - DNA, 2459 bp, Homo sapiens
actctccactgaggggtttggcaccagcaccccgcccagagcagtgccgctgcccaaatcctcgcaggcagctcatcaacgcaattgcaactccggctggagccccggacctgcaagcctgggtgtccgtgggtccgtctgcccagccatctgctggtggcacctctccctcctgccgcctccctcggtgaaccccaccttgcagaagtgcagctcgcccggagcagcccaggagctcagcatgcgtcccccaggcttcaggaacttcttgctgctggcgtcctcccttctctttgctgggttgtcagctgttcctcaaagcttctcgccatctctgaggagctggccgggcgccgcctgcaggctgtcccgggccgagtcggatgcggcgtctgcatctgccacgtgactgagccgggcatgttcttcgggcccctgtgtgagtgccatgagtgggtgtgcgagacctacgacgggagcacctgtgcaggccatggtaagtgtgactgtggcaagtgcaagtgtgaccagggatggtatggggatgcttgccagtacccaactaactgtgacttgacaaagaagaaaagtaaccaaatgtgcaagaattcacaagacatcatctgctctaatgcaggtacatgtcactgtggcaggtgtaagtgtgataattcagatggaagtggacttgtgtatggtaaattttgtgagtgtgacgatagagaatgcatagacgatgaaacagaagaaatatgtggaggccatgggaagtgttactgtggaaactgctactgcaaggctggttggcatggagataaatgtgaattccagtgcgatatcaccccctgggaaagcaagcgaagatgcacgtctccagatggcaaaatctgcagtaacagagggacttgtgtatgtggtgaatgtacctgtcacgatgttgatccgactggggactggggagatattcatggggacacctgtgaatgtgatgagagggactgtagagctgtctatgaccgatattctgatgacttctgttcaggtcatggacagtgtaattgcggaagatgtgactgcaaagcaggctggtatgggaagaagtgtgagcacccacagtcctgcacgctgtcagctgaggagagcatcaggaagtgccagggaagctcggatctgccttgctctgggaggggtaaatgtgaatgtggcaaatgcacctgctatcctccaggagatcgccgggtgtatggcaagacttgtgagtgtgatgatcgccgctgtgaagacctcgatggtgtggtctgtggaggccacggcacatgttcctgtggtcgctgtgtttgtgagagaggatggtttggaaagctctgccaacatccgcggaagtgtaacatgacggaagaacaaagcaagaatctgtgtgaatcagcagatggcatattgtgctcggggaagggttcttgtcattgtgggaagtgcatttgttctgctgaagagtggtatatttctggggagttctgtgactgtgatgacagagactgcgacaaacatgatggtctcatttgtacagggaatggaatatgtagctgtggaaactgtgaatgctgggatggatggaatggaaatgcatgtgaaatctggcttggctcagaatatccttaacaattacatgagagaggtctggattcttattttttctgggccattagaacatataaatgcgaaggaaaccatgtatattcaccactaggacaggttaaaaagaccattgtatgtttttctatttctgaattacgaatgaaatccgagtacctattagaaatgagttatgcaaatttagatgcaaataacattagaaaaaaaagattcttccataattaacataagtggttcctaacgagagcaatttttccacccaaaagtcatttggcaacatctacagacaattttgattgtcacactgggtcgggtaggaaggtatgctgcagacatttggtgggtagaggccagggatgctgctgagcatcccgcagtgtacaggacagcccccaaacaaggaattatccagccccaaatgccaatagggctcaaactgagaaacattgagttatatggctattagaaatccacattcttacacaagaaagaccatattagaatctaaggaaaacatgcatattcacattaattaatcgatcagatttttccagaattccgtatcagtcaccattttaatatggggacaatgaagacaagcacacaggaggtagaatatcagagtggggctggatcaagggcaaaaactggtcattaagtcatctgacattaaatcatttagccactaagttatttgtctactctcactttaaactcaccaaagaagattctcttaaagaaattatgaaaaatgtacaatttaacattttaaataaatagtgacagaagttgtttaaaaaaaaaaa

SEQ ID NO: 348085 - DNA, 2236 bp, Homo sapiens
actctccactgaggggtttggcaccagcaccccgcccagagcagtgccgctgcccaaatcctcgcaggcagctcatcaacgcaattgcaactccggctggagccccggacctgcaagcctgggtgtccgtgggtccgtctgcccagccatctgctggtggcacctctccctcctgccgcctccctcggtgaaccccaccttgcagaagtgcagctcgcccggagcagcccaggagctcagcatgcgtcccccaggcttcaggaacttcttgctgctggcgtcctcccttctctttgctgggttgtcagctgttcctcaaagcttctcgccatctctgaggagctggccgggcgccgcctgcaggctgtcccgggccgagtcggagcgacgctgccgcgcacctgggcagcccccgggggccgcgctgtgccacggccggggccgctgcgactgcggcgtctgcatctgccacgtgactgagccgggcatgttcttcgggcccctgtgtgagtgccatgagtgggtgtgcgagacctacgacgggagcacctgtgcaggccatggtaagtgtgactgtggcaagtgcaagtgtgaccagggatggtatggggatgcttgccagtacccaactaactgtgacttgacaaagaagaaaagtaaccaaatgtgcaagaattcacaagacatcatctgctctaatgcaggtacatgtcactgtggcaggtgtaagtgtgataattcagatggaagtggacttgtgtatggtaaattttgtgagtgtgacgatagagaatgcatagacgatgaaacagaagaaatatgtggaggccatgggaagtgttactgtggaaactgctactgcaaggctggttggcatggagataaatgtgaattccagtgcgatatcaccccctgggaaagcaagcgaagatgcacgtctccagatggcaaaatctgcagtaacagagggacttgtgtatgtggtgaatgtacctgtcacgatgttgatccgactggggactggggagatattcatggggacacctgtgaatgtgatgagagggactgtagagctgtctatgaccgatattctgatgacttctgttcaggtcatggacagtgtaattgcggaagatgtgactgcaaagcaggctggtatgggaagaagtgtgagcacccacagtcctgcacgctgtcagctgaggagagcatcaggaagtgccagggaagctcggatctgccttgctctgggaggggtaaatgtgaatgtggcaaatgcacctgctatcctccaggagatcgccgggtgtatggcaagacttgtgagtgtgatgatcgccgctgtgaagacctcgatggtgtggtctgtggaggccacggcacatgttcctgtggtcgctgtgtttgtgagagaggatggtttggaaagctctgccaacatccgcggaagtgtaacatgacggaagaacaaagcaagaatctgtgtgaatcagcagatggcatattgtgctcggggaagggttcttgtcattgtgggaagtgcatttgttctgctgaagagtggtatatttctggggagttctgtgactgtgatgacagagactgcgacaaacatgatggtctcatttgtacagggaatggaatatgtagctgtggaaactgtgaatgctgggatggatggaatggaaatgcatgtgaaatctggcttggctcagaatatccttaacaattacatgagagagcaattttgatgacgtattcgctgatgcacagacattggaattcattacattatctagccatcgtaatacaaatgacctttggatttctctatcacggcgcttatcctcctattaaggatcagaaagttaaactttacggaccacgaaagaacacaacagccgtcttgcccatgctctgctgagtatgaggggaacgcagccagaaacggggatggcgttaagtttggttcattaaaaacaggacggagtatatctgaaatggatttagacgcacttgtgcttttacttggcgtcaccccaggcttcgggaccgtttccccaacatcatgcaaagatggttctcggtacatggcaactagtgatgggaagaaaggaggaggaaaagcaaacattgcttggttaggtgtgagaatggtccatccatacctgcatagaccactgcagtttgcccatttctgttttccctgaagtaaagcaattccattgagacagaa

SEQ ID NO: 348086 - DNA, 777 bp, Homo sapiens
tctacacggacttaatacacctaccgcaattctatgcacctgtctttcaaattctataaaatatttgttgacactttccctttcacttgttttttacaatatattttgtacaaaaatttgtcaaacattgaaaagaaacatagtcctcatcaaaatgtcttagctttcccttcagagcatttctttcagcctgcttcacggtgatattcttgctttgacagcggtccggaggcagcagtgtccacctttcagacccagttgcaccatcttctgcaggactgtattttgagcctgaaccaatttcttccacgcccaattatttgcaacggggagaattttccagttgtgtttcatgtgaagaaaactcaagctgcctcgaccagatctttgattcctaccttcagacagagatgcacccggagcctttgctcaattccacacaaagtgctccacaccatttcccagacagcttccaggccacccctttctgctttaaccagagcctgatcccaggatcaccttcaaattcctccattctctctggctccttagactacagttactcgccagtgcagctgccttcatatgctccagagaattacaattcccctgcttctctggacaccagaacctgtggctaccccccagaagaccattcctaccaacacttgtcctcacacgccacacacgagttaccacggaccactccactgggggttctggaggacaggaagggtgacccacagaggattataccaccggggtgtgccaccgccg

SEQ ID NO: 348087 - DNA, 1341 bp, Homo sapiens
agggagagaggggaagaaggggagagtaggagcgggggcgaaggagggaggagggcaagatggagcgcggaaaaggcggagaaaagggacgagggagagcgggcagaaggcaaagacagaagggagcgagggagggagttcctcgggcctggcccctttactaggtcagtctggcaggtacctcgccggcccaggacggggctggccaaacctcaccgcttgctcccgggctggcttccagaccaagggcacgcagaggtcggagcctgcccagaagccacacctggccagaaaaaccgaaggtgtatcaaggtgtccgagtgaagatcacagtgaaggagctgctgcagcaaagacgggcacaccaggcggcctccgggggaacccggtccggaggcagcagtgtccacctttcagacccagttgcaccatcttctgcaggactgtattttgagcctgaaccaatttcttccacgcccaattatttgcaacggggagaattttccagttgtgtttcatgtgaagaaaactcaagctgcctcgaccagatctttgattcctaccttcagacagagatgcacccggagcctttgctcaattccacacaaagtgctccacaccatttcccagacagcttccaggccacccctttctgctttaaccagagcctgatcccaggatcaccttcaaattcctccattctctctggctccttagactacagttactcgccagtgcagctgccttcatatgctccagagaattacaattcccctgcttctctggacaccagaacctgtggctaccccccagaagaccattcctaccaacacttgtcctcacacgcccagtacagctgcttctcctcggccaccacctccatctgctactgcgcatcgtgtgaggcagaggacttggatgctctccaggcagcagagtacttctacccgagcacagactgtgtggactttgccccctcagcagccgccaccagtgatttctataagagggaaacaaactgtgacatctgctatagttaatagaaattacagtaattcagaacatggcatgggtatatctatttttctaccacgtctagatgacactgcaaaatatgcaacttggtaacacaatatcccaagcacagtttacatgtcactatttccaattttctgatgctaagcattcatatgaagtcctcagacccggtcacagcgccactcctactttgtatgctcatagtttaaatttttgtaggaaactttcaattgttttactttttgtataacgaacaaatgctgtctccttttttactaataaataattttgtattactaaaaa

SEQ ID NO: 348088 - DNA, 1388 bp, Homo sapiens
aagcagaatggctggaggaagagccctgtgggggagtggaatttcagttgctaaaattaggagcaggggaaggaggtggaaagagcaaaattatgtaacatgggttgtctgttcttgggcaactggagctccacacccaaagccagccaggctgctggctccatccatctctgccctctagcttgtcagttgtatctctcttcctccagggccccaatcctcatctccgccattcagctgctgccccatcctaaacctgagttcatctctgggcagcccaggcatggccttccctataaacatttccttttccaagaaccagtagttgaagtcctgagaggtggagggagagtctgggattcccacggaggagagaggggggctccctggaaactaagataggtagaccccactaccatcgcccaggacacaactgggaacttggcaaaaagaaaggacagggctgcaaggagagtacagacatgtgctggtgagtgcactgtctgcatagttacaccagagcatcttatcaatcagaaacttatctttcaggttttgagcccagttctctacaggagaatcccaggagtggaagtggaaggcagtagaagacagggagggcacgcctctgggaacacgggaacatgggtgggcatgagatccttgaataagacagcctgaagttcggaagagaccaaggcctctgaaggaccaggcagatgttcagggtgcaggagggggaagggctggtgagaaagatcctgtgagaggaagctgctgtgattcagagaagagacttcaagctgtgtgtgaccctggcgtccggttcctctcacaggctggagcttttcggaagtggcatgcaaagagtccaggtttggccttggggggagttggggttaggatccctaagctggaggttgagaagtaaattacagaaaactctggtgaccaaatttgctcctccacccaggagatttctcactggtttttaagcacatcatttccccttctgcaagagttacataaaaccaaagcaaaataagccctgaaacctgggcccaccggaccacagtcttttcaacgtcccttcctggtgtctggcccccagccctggtgggggttcccctgagataagggctgttcactttctctgaccacatggtttccgcttctgtgtctcttgtttcctaggctgataaaaatactgagccctagaggccctggcttcctctgaccccttggggcaggcagcaggcatcctgtccagcatggtgggggcagggacaggggccagggattcccaaggggtgactcagtgcctgccatgaaacagtgggtaggtggaagtgtatctctgctctctagagctggcaccaggagttgag

SEQ ID NO: 348089 - DNA, 752 bp, Homo sapiens
tctctgctcgccctcagtcccacccggtgcctacggggccgcatcgccgcccggctcggcccggcccatgcccagggccgctgctccctcagttgccgccgccgccgccggcgcccagggggccgccgcggctgtgaggtgggggcggcagcgggaggcggcggggcgggccgccggggccggggctgggggcgcagcgcggccggcgtaggtctatgtcgcgggcggcggcggcggcggcggccgcggagggacgatgcgcgagtacaaagtggtggtgctgggctcgggcggggtaggcaaatccgccctgaccgtgcagttcgtgaccggcaccttcatcgagaaatacgaccccaccatcgaggacttctaccgcaaggagatcgaggtggattcgtcgccgtcggtgctggagatcctggacacggcgggcaccgagcagttcgcgtccatgcgggacctgtacatcaagaacggccagggcttcatcctcgtctacagcctcgtcaaccagcagagcttccaggacatcaagcccatgcgggaccagatcatccgcgtgaagcggtgagcgagggcacacgggggcttggcggctgcaccccggagtcaccgtcccggggccggaactccccgcgcggggctccggggaaggggctttctggggggtggctccaagctggaggctttactattgtcattctgctcctcctcctcaatctcaaatttgagtgctttgtttcacaact

SEQ ID NO: 348090 - DNA, 4367 bp, Homo sapiens
tctctgctcgccctcagtcccacccggtgcctacggggccgcatcgccgcccggctcggcccggcccatgcccagggccgctgctccctcagttgccgccgccgccgccggcgcccagggggccgccgcggctgtgaggtgggggcggcagcgggaggcggcggggcgggccgccggggccggggctgggggcgcagcgcggccggcgtaggtctatgtcgcgggcggcggcggcggcggcggccgcggagggacgatgcgcgagtacaaagtggtggtgctgggctcgggcggggtaggcaaatccgccctgaccgtgcagttcgtgaccggcaccttcatcgagaaatacgaccccaccatcgaggacttctaccgcaaggagatcgaggtggattcgtcgccgtcggtgctggagatcctggacacggcgggcaccgagcagttcgcgtccatgcgggacctgtacatcaagaacggccagggcttcatcctcgtctacagcctcgtcaaccagcagagcttccaggacatcaagcccatgcgggaccagatcatccgcgtgaagcggtatgagaaagtgccagtcatcttggttgggaacaaagtggacctggaaagtgagagagaagtatcgtccagcgaaggcagagcccttgctgaagagtggggctgcccctttatggaaacttccgctaagagtaaaacaatggtggacgaactctttgcagaaattgtgaggcagatgaactatgctgctcagcctgacaaagatgacccatgctgttctgcatgtaacatacaatagcatccaaatatggctgtcctggatgggatttgcccaatgtcgtaggtgatagaaaactcgcctactccactgcagaacttgcagaatgcgtggtgttaatctacagagaactgcagcccttattcagaattgagcagtgattgtcagttgatatctctgagtaacatttgggttcagtaactacagttttcaccatttgtcctcagtctcctttatgcatctgcaactttaaggcatagtccatcgatctacagggtgatctcatttgaaagctatgatggcattgtcgctgagttgacagaagcaactattgtacaaattaaaaataaccataagggagaaaccagaagaattcctctgaccacttacaattaaaatattttgtcttctttaaaaaaataagtaaaggagaaatattttcctacaagagtactgaatttcaggaaatgggatagagcttctaaccagtgtattccgtcaagtaagataataacagctgacctgccaacagcattacagggagattctttgctcagctaacacatttctgtttttcaaaattgatgcttaattgtagctgttattctaatttgtgacatggaactaactcatgcttcaatccttgatagagcaaaactcagaacaggttatgtaaaaatatagtctggctttagaatttgttaattcacctgctttgccacagaaaatggaggctttcacaagggtttgatcagaattaaaaccccaaacccgccctctgttaggggtggtctttataactttactgaacaagagggaagcaactgtgatgggaagagattacctagccttactaacaagaagcattctaatagataaactagtaccatcatgtaaggaagatgaagccatgttgcatccacatgttcccgtttgcagaaacctcacaggacagtacgaatatctggcatttttaagttcattaaagcagcaaattccttctcgcctttaagggctatggttgtagtgtgacccgtggctaacctgctttcaaaatcaagtatttgctgtagcagagctttattgcaggcattttaaaaattgaataaccatgtgaaataatttgggcttaaaagtgaacataaattatagagtggaaggtaagggacaaaagccttttacctttaattttcctggagaattatataaaggttttcttagaacaattttgccctgattactgaagcgtcaaataaagctggagtgaaaattttgttttgaaaaggtgctcaagctctgacatttttggttttcatagtcgtgaagtatttatcatttgcatgactaatggcacaggaaaaacctattcataagttttacaatcaagtatagaggggtcttcagctaacttagttatacataaatgctgaaaagattatcttgagctgggccttgggagaagaatttggccttcagaactgcaatatcactgagcctgcgatctatacaccaccccacattttgttggtttcacagtcttgtgcaagtaacctctggtcttacgtgtgtaactgagagaagagtgtgtgtttgtgtgtgcatgtgtgtttattgttcctaagaatttggcacaagtcagagataattgcctatactaagaatctatactgcagaatatagtgtatcaaaaacttttttcttttaaattattaaagtgtcttttatacttttatgaaatcattggtagccccccaagtgtttaataactggcattaagcttagagggtgaaaaaaaaaaaaaagattgatagtatttttcataatgaaaaaactgaagagatacgtgaatgaaaccaggccatagctgtcataaatctttgacttttgaatatttacattcttcagtataattttttataatcctcaattatgaaccaccttgtttataggacaaaaaaatttaaccaattttattgaaacgaatttcactgtgtaaaagttggtttgattcaaacatgtagagaagttgtagattcaagatatatgatttctctatggaaataaaaatatttgttagtgaattggttgagttttgattcctctaacttctcagaatgattctttagaattctataattcatagcaatttttgacaagtaagattgcaaaatagaaatatctataaagattccacagtttgacattatggcttgctatgcagatgtgaaaataggttaaataatatgaaagatatggcagaatgtaaagtggaaaagatgacctaaaattttgagttgtattaatagttaaaaacatttgtgtcagatgacagggtgggcttttactgtcaagacatgaataagaactgatctggctgcctgatgagtgtttccacgcagccctgcatatttagtgaccaaggcatcaaggacatcccgaaactggaaattcatatccatctggtatgaatatataactcagctggcaaatgaatgtgtttgttgagatattacagtaataaaacacttaagaacaggaagattacatttgttggcatacgaaaccttagtggctacagaagaaagttgaccttgtgtcactatttattttatgccctgatcagactagcaacttagataagtgaaagtttttctaacatgccttaaaaatattatggtttgatccaaagacccactttttctttagctcttgtgataagattttcttttttttacttttatacaaaggcagcatctttgaatttttttttcttttgatgttgcaacttttgggttcttttaaactgtgatagtgatggtaactgatgcctttcattttgttcaacttatacaaaacaagccagcatctgatcaaaagtattacataaaatattttcttaaactattgaaaggtgctttgatgattttctcctttggtttgtagaattaggactgaacttttgactcaaattgctacagttgccatcacctttctgtggtaatactactgatatttgcttttctatataaagaaatgttgcctaaggctgtctggtatttcttttcaagggttttccagtatgaatgttaatgttgtcagtgtatgtatgaatatgaaagtgctttgttttgtttgttgctgttttttgtttatgtgtgtgtttttaatttttttgttcttatcagcagtcttgtgttagcactgggtaagctttaattgtcccttagccaatcaaacattaaggactatggaggtcttttttttttttatttaacatgtcattgttcatctattaaatcttgatcagggtttcaagaatgactgcagtgggttttggaaacagacttatcattattgatttgaggtttcccagagatatagttcacagttaattgttgcgctctaatacaactgaccatttaaaattgaacaagtttattgttttgtaacaatgtcagttgttaaaccttgacatttcaattaaaacatgaattgtagttataactcaatgcaaattcaacagttgtatttggagttaaattattttaacaaataaatttatttaatgaaaaaaaaaaat

SEQ ID NO: 348091 - DNA, 3920 bp, Homo sapiens
tctctgctcgccctcagtcccacccggtgcctacggggccgcatcgccgcccggctcggcccggcccatgcccagggccgctgctccctcagttgccgccgccgccgccggcgcccagggggccgccgcggctgtgaggtgggggcggcagcgggaggcggcggggcgggccgccggggccggggctgggggcgcagcgcggccggcgtaggtctatgtcgcgggcggcggcggcggcggcggccgcggagggacgatgcgcgagtacaaagtggtggtgctgggctcgggcggggtaggcaaatccgccctgaccgtgcagttcgtgaccggcaccttcatcgagaaatacgaccccaccatcgaggacttctaccgcaaggagatcgaggtggattcgtcgccgtcggtgctggagatcctggacacggcgggcaccgagcagttcgcgtccatgcgggacctgtacatcaagaacggccagggcttcatcctcgtctacagcctcgtcaaccagcagagcttccaggacatcaagcccatgcgggaccagatcatccgcgtgaagcggtatgagaaagtgccagtcatcttggttgggaacaaagtggacctggaaagtgagagagaagtatcgtccagcgaaggcagagcccttgctgaagagtggggctgcccctttatggaaacttccgctaagagtaaaacaatggtggacgaactctttgcagaaattgtgaggcagatgaactatgctgctcagcctgacaaagatgacccatgctgttctgcatgtaacatacaatagcatccaaatatggctgtcctggatgggatttgcccaatgtcgtaggtgatagaaaactcgcctactccactgcagaacttgcagaatgcgtggtgttaatctacagagaactgcagcccttattcagaattgagcagtgattgtcagttgatatctctgagtaacatttgggttcagtaactacagttttcaccatttgtcctcagtctcctttatgcatctgcaactttaaggcatagtccatcgatctacagggtgatctcatttgaaagctatgatggcattgtcgctgagttgacagaagcaactattgtacaaattaaaaataaccataagggagaaaccagaagaattcctctgaccacttacaattaaaatattttgtcttctttaaaaaaataagtaaaggagaaatattttcctacaagagtactgaatttcaggaaatgggatagagcttctaaccagtgtattccgtcaagtaagataataacagctgacctgccaacagcattacagggagattctttgctcagctaacacatttctgtttttcaaaattgatgcttaattgtagctgttattctaatttgtgacatggaactaactcatgcttcaatccttgatagagcaaaactcagaacaggttatgtaaaaatatagtctggctttagaatttgttaattcacctgctttgccacagaaaatggaggctttcacaagggtttgatcagaattaaaaccccaaacccgccctctgttaggggtggtctttataactttactgaacaagagggaagcaactgtgatgggaagagattacctagccttactaacaagaagcattctaatagataaactagtaccatcatgtaaggaagatgaagccatgttgcatccacatgttcccgtttgcagaaacctcacaggacagtacgaatatctggcatttttaagttcattaaagcagcaaattccttctcgcctttaagggctatggttgtagtgtgacccgtggctaacctgctttcaaaatcaagtatttgctgtagcagagctttattgcaggcattttaaaaattgaataaccatgtgaaataatttgggcttaaaagtgaacataaattatagagtggaaggtaagggacaaaagccttttacctttaattttcctggagaattatataaaggttttcttagaacaattttgccctgattactgaagcgtcaaataaagctggagtgaaaattttgttttgaaaaggtgctcaagctctgacatttttggttttcatagtcgtgaagtatttatcatttgcatgactaatggcacaggaaaaacctattcataagttttacaatcaagtatagaggggtcttcagctaacttagttatacataaatgctgaaaagattatcttgagctgggccttgggagaagaatttggccttcagaactgcaatatcactgagcctgcgatctatacaccaccccacattttgttggtttcacagtcttgtgcaagtaacctctggtcttacgtgtgtaactgagagaagagtgtgtgtttgtgtgtgcatgtgtgtttattgttcctaagaatttggcacaagtcagagataattgcctatactaagaatctatactgcagaatatagtgtatcaaaaacttttttcttttaaattattaaagtgtcttttatacttttatgaaatcattggtagccccccaagtgtttaataactggcattaagcttagagggtgaaaaaaaaaaaaaagattgatagtatttttcataatgaaaaaactgaagagatacgtgaatgaaaccaggccatagctgtcataaatctttgacttttgaatatttacattcttcagtataattttttataatcctcaattatgaaccaccttgtttataggacaaaaaaatttaaccaattttattgaaacgaatttcactgtgtaaaagttggtttgattcaaacatgtagagaagttgtagattcaagatatatgatttctctatggaaataaaaatatttgttagtgaattggttgagttttgattcctctaacttctcagaatgattctttagaattctataattcatagcaatttttgacaagtaagattgcaaaatagaaatatctataaagattccacagtttgacattatggcttgctatgcagatgtgaaaataggttaaataatatgaaagatatggcagaatgtaaagtggaaaagatgacctaaaattttgagttgtattaatagttaaaaacatttgtgtcagatgacagggtgggcttttactgtcaagacatgaataagaactgatctggctgcctgatgagtgtttccacgcagccctgcatatttagtgaccaaggcatcaaggacatcccgaaactggaaattcatatccatctggtatgaatatataactcagctggcaaatgaatgtgtttgttgagatattacagtaataaaacacttaagaacaggaagattacatttgttggcatacgaaaccttagtggctacagaagaaagttgaccttgtgtcactatttattttatgccctgatcagactagcaacttagataagtgaaagtttttctaacatgccttaaaaatattatggtttgatccaaagacccactttttctttagctcttgtgataagattttcttttttttacttttatacaaaggcagcatctttgaatttttttttcttttgatgttgcaacttttgggttcttttaaactgtgatagtgatggtaactgatgcctttcattttgttcaacttatacaaaacaagccagcatctgatcaaaagtattacataaaatattttcttaaactattgaaaggtgctttgatgattttctcctttggtttgtagaattaggactgaacttttgactcaaattgctacagttgccatcacctttctgtggtaatactactgatatttgcttttctatataaagaaatgttgcctaaggctgtctggtatttcttttcaagggttttccagtatgaatgttaatgcatcacacatgtatttttatcctctagagtcagctatagcg

SEQ ID NO: 348092 - DNA, 2783 bp, Homo sapiens
  misc_feature (16)..(16): n is a, c, g, or t
  misc_feature (34)..(35): n is a, c, g, or t
  misc_feature (41)..(41): n is a, c, g, or t
tgggaggtggttgttnaggtatcctcactttganncccttnctacgagaccatagagtgttgctacccggtatttcggccattatggccggggcatgtaaggaagatgaagccatgttgcatccacatgttcccgtttgcagaaacctcacaggacagtacgaatatctggcatttttaagttcattaaagcagcaaattccttctcgcctttaagggctatggttgtagtgtgacccgtggctaacctgctttcaaaatcaagtatttgctgtagcagagctttattgcaggcattttaaaaattgaataaccatgtgaaataatttgggcttaaaagtgaacataaattatagagtggaaggtaagggacaaaagccttttacctttaattttcctggagaattatataaaggttttcttagaacaattttgccctgattactgaagcgtcaaataaagctggagtgaaaattttgttttgaaaaggtgctcaagctctgacatttttggttttcatagtcgtgaagtatttatcatttgcatgactaatggcacaggaaaaacctattcataagttttacaatcaagtatagaggggtcttcagctaacttagttatacataaatgctgaaaagattatcttgagctgggccttgggagaagaatttggccttcagaactgcaatatcactgagcctgcgatctatacaccaccccacattttgttggtttcacagtcttgtgcaagtaacctctggtcttacgtgtgtaactgagagaagagtgtgtgtttgtgtgtgcatgtgtgtttattgttcctaagaatttggcacaagtcagagataattgcctatactaagaatctatactgcagaatatagtgtatcaaaaacttttttcttttaaattattaaagtgtcttttatacttttatgaaatcattggtagccccccaagtgtttaataactggcattaagcttagagggtgaaaaaaaaaaaaaagattgatagtatttttcataatgaaaaaactgaagagatacgtgaatgaaaccaggccatagctgtcataaatctttgacttttgaatatttacattcttcagtataattttttataatcctcaattatgaaccaccttgtttataggacaaaaaaatttaaccaattttattgaaacgaatttcactgtgtaaaagttggtttgattcaaacatgtagagaagttgtagattcaagatatatgatttctctatggaaataaaaatatttgttagtgaattggttgagttttgattcctctaacttctcagaatgattctttagaattctataattcatagcaatttttgacaagtaagattgcaaaatagaaatatctataaagattccacagtttgacattatggcttgctatgcagatgtgaaaataggttaaataatatgaaagatatggcagaatgtaaagtggaaaagatgacctaaaattttgagttgtattaatagttaaaaacatttgtgtcagatgacagggtgggcttttactgtcaagacatgaataagaactgatctggctgcctgatgagtgtttccacgcagccctgcatatttagtgaccaaggcatcaaggacatcccgaaactggaaattcatatccatctggtatgaatatataactcagctggcaaatgaatgtgtttgttgagatattacagtaataaaacacttaagaacaggaagattacatttgttggcatacgaaaccttagtggctacagaagaaagttgaccttgtgtcactatttattttatgccctgatcagactagcaacttagataagtgaaagtttttctaacatgccttaaaaatattatggtttgatccaaagacccactttttctttagctcttgtgataagattttcttttttttacttttatacaaaggcagcatctttgaatttttttttcttttgatgttgcaacttttgggttcttttaaactgtgatagtgatggtaactgatgcctttcattttgttcaacttatacaaaacaagccagcatctgatcaaaagtattacataaaatattttcttaaactattgaaaggtgctttgatgattttctcctttggtttgtagaattaggactgaacttttgactcaaattgctacagttgccatcacctttctgtggtaatactactgatatttgcttttctatataaagaaatgttgcctaaggctgtctggtatttcttttcaagggttttccagtatgaatgttaatgttgtcagtgtatgtatgaatatgaaagtgctttgttttgtttgttgctgttttttgtttatgtgtgtgtttttaatttttttgttcttatcagcagtcttgtgttagcactgggtaagctttaattgtcccttagccaatcaaacattaaggactatggaggtcttttttttttttatttaacatgtcattgttcatctattaaatcttgatcagggtttcaagaatgactgcagtgggttttggaaacagacttatcattattgatttgaggtttcccagagatatagttcacagttaattgttgcgctctaatacaactgaccatttaaaattgaacaagtttattgttttgtaacaatgtcagttgttaaaccttgacatttcaattaaaacatgaattgtagttataactcaatgcaaattcaacagttgtatttggagttaaattattttaacaaataaatttatttaatgaaaaaaaaaaat

SEQ ID NO: 348093 - DNA, 663 bp, Homo sapiens
cccgggcaaaacacgcaaccaggaccgggatcgaggccattccgttagtcaaaccactaagccagggcggaagaccccttcaagcacgcgcatcatggtgggcattacccgcaaaagatgccattaatggggtgcaaacatgccggaacgggctcctgggatgccaatgccccgcccatgctcagcagcagcaacagcagcagcccctggagctcgtgccgaattcggcacgagttgtcagtgtatgtatgaatatgaaagtgctttgttttgtttgttgctgttttttgtttatgtgtgtgtttttaatttttttgttcttatcagcagtcttgtgttagcactggttttatttaacatgtcattgttcatctattaaatcttgatcagggtttcaagaatgactgcagtgggttttggaaacagacttatcattattgatttgaggtttcccagagatatagttcacagttaattgttgcgctctaatacaactgaccatttaaaattgaacaagtttattgttttgtaacaatgtcagttgttaaaccttgacatttcaattaaaacatgaattgtagttataactcaatgcaaattcaacagttgtatttggagttaaattattttaacaaataaatttatttaatgaaaaaaaaaaat

SEQ ID NO: 348094 - DNA, 4336 bp, Homo sapiens
tctctgctcgccctcagtcccacccggtgcctacggggccgcatcgccgcccggctcggcccggcccatgcccagggccgctgctccctcagttgccgccgccgccgccggcgcccagggggccgccgcggctgtgaggtgggggcggcagcgggaggcggcggggcgggccgccggggccggggctgggggcgcagcgcggccggcgtaggtctatgtcgcgggcggcggcggcggcggcggccgcggagggacgatgcgcgagtacaaagtggtggtgctgggctcgggcggggtaggcaaatccgccctgaccgtgcagttcgtgaccggcaccttcatcgagaaatacgaccccaccatcgaggacttctaccgcaaggagatcgaggtggattcgtcgccgtcggtgctggagatcctggacacggcgggcaccgagcagttcgcgtccatgcgggacctgtacatcaagaacggccagggcttcatcctcgtctacagcctcgtcaaccagcagagcttccaggacatcaagcccatgcgggaccagatcatccgcgtgaagcggtatgagaaagtgccagtcatcttggttgggaacaaagtggacctggaaagtgagagagaagtatcgtccagcgaaggcagagcccttgctgaagagtggggctgcccctttatggaaacttccgctaagagtaaaacaatggtggacgaactctttgcagaaattgtgaggcagatgaactatgctgctcagcctgacaaagatgacccatgctgttctgcatgtaacatacaatagcatccaaatatggctgtcctggatgggatttgcccaatgtcgtaggtgatagaaaactcgcctactccactgcagaacttgcagaatgcgtggtgttaatctacagagaactgcagcccttattcagaattgagcagtgattgtcagttgatatctctgagtaacatttgggttcagtaactacagttttcaccatttgtcctcagtctcctttatgcatctgcaactttaaggcatagtccatcgatctacagggtgatctcatttgaaagctatgatggcattgtcgctgagttgacagaagcaactattgtacaaattaaaaataaccataagggagaaaccagaagaattcctctgaccacttacaattaaaatattttgtcttctttaaaaaaataagtaaaggagaaatattttcctacaagagtactgaatttcaggaaatgggatagagcttctaaccagtgtattccgtcaagtaagataataacagctgacctgccaacagcattacagggagattctttgctcagctaacacatttctgtttttcaaaattgatgcttaattgtagctgttattctaatttgtgacatggaactaactcatgcttcaatccttgatagagcaaaactcagaacaggttatgtaaaaatatagtctggctttagaatttgttaattcacctgctttgccacagaaaatggaggctttcacaagggtttgatcagaattaaaaccccaaacccgccctctgttaggggtggtctttataactttactgaacaagagggaagcaactgtgatgggaagagattacctagccttactaacaagaagcattctaatagataaactagtaccatcatgtaaggaagatgaagccatgttgcatccacatgttcccgtttgcagaaacctcacaggacagtacgaatatctggcatttttaagttcattaaagcagcaaattccttctcgcctttaagggctatggttgtagtgtgacccgtggctaacctgctttcaaaatcaagtatttgctgtagcagagctttattgcaggcattttaaaaattgaataaccatgtgaaataatttgggcttaaaagtgaacataaattatagagtggaaggtaagggacaaaagccttttacctttaattttcctggagaattatataaaggttttcttagaacaattttgccctgattactgaagcgtcaaataaagctggagtgaaaattttgttttgaaaaggtgctcaagctctgacatttttggttttcatagtcgtgaagaaaaacctattcataagttttacaatcaagtatagaggggtcttcagctaacttagttatacataaatgctgaaaagattatcttgagctgggccttgggagaagaatttggccttcagaactgcaatatcactgagcctgcgatctatacaccaccccacattttgttggtttcacagtcttgtgcaagtaacctctggtcttacgtgtgtaactgagagaagagtgtgtgtttgtgtgtgcatgtgtgtttattgttcctaagaatttggcacaagtcagagataattgcctatactaagaatctatactgcagaatatagtgtatcaaaaacttttttcttttaaattattaaagtgtcttttatacttttatgaaatcattggtagccccccaagtgtttaataactggcattaagcttagagggtgaaaaaaaaaaaaaagattgatagtatttttcataatgaaaaaactgaagagatacgtgaatgaaaccaggccatagctgtcataaatctttgacttttgaatatttacattcttcagtataattttttataatcctcaattatgaaccaccttgtttataggacaaaaaaatttaaccaattttattgaaacgaatttcactgtgtaaaagttggtttgattcaaacatgtagagaagttgtagattcaagatatatgatttctctatggaaataaaaatatttgttagtgaattggttgagttttgattcctctaacttctcagaatgattctttagaattctataattcatagcaatttttgacaagtaagattgcaaaatagaaatatctataaagattccacagtttgacattatggcttgctatgcagatgtgaaaataggttaaataatatgaaagatatggcagaatgtaaagtggaaaagatgacctaaaattttgagttgtattaatagttaaaaacatttgtgtcagatgacagggtgggcttttactgtcaagacatgaataagaactgatctggctgcctgatgagtgtttccacgcagccctgcatatttagtgaccaaggcatcaaggacatcccgaaactggaaattcatatccatctggtatgaatatataactcagctggcaaatgaatgtgtttgttgagatattacagtaataaaacacttaagaacaggaagattacatttgttggcatacgaaaccttagtggctacagaagaaagttgaccttgtgtcactatttattttatgccctgatcagactagcaacttagataagtgaaagtttttctaacatgccttaaaaatattatggtttgatccaaagacccactttttctttagctcttgtgataagattttcttttttttacttttatacaaaggcagcatctttgaatttttttttcttttgatgttgcaacttttgggttcttttaaactgtgatagtgatggtaactgatgcctttcattttgttcaacttatacaaaacaagccagcatctgatcaaaagtattacataaaatattttcttaaactattgaaaggtgctttgatgattttctcctttggtttgtagaattaggactgaacttttgactcaaattgctacagttgccatcacctttctgtggtaatactactgatatttgcttttctatataaagaaatgttgcctaaggctgtctggtatttcttttcaagggttttccagtatgaatgttaatgttgtcagtgtatgtatgaatatgaaagtgctttgttttgtttgttgctgttttttgtttatgtgtgtgtttttaatttttttgttcttatcagcagtcttgtgttagcactgggtaagctttaattgtcccttagccaatcaaacattaaggactatggaggtcttttttttttttatttaacatgtcattgttcatctattaaatcttgatcagggtttcaagaatgactgcagtgggttttggaaacagacttatcattattgatttgaggtttcccagagatatagttcacagttaattgttgcgctctaatacaactgaccatttaaaattgaacaagtttattgttttgtaacaatgtcagttgttaaaccttgacatttcaattaaaacatgaattgtagttataactcaatgcaaattcaacagttgtatttggagttaaattattttaacaaataaatttatttaatgaaaaaaaaaaat

SEQ ID NO: 348095 - DNA, 3561 bp, Homo sapiens
tctctgctcgccctcagtcccacccggtgcctacggggccgcatcgccgcccggctcggcccggcccatgcccagggccgctgctccctcagttgccgccgccgccgccggcgcccagggggccgccgcggctgtgaggtgggggcggcagcgggaggcggcggggcgggccgccggggccggggctgggggcgcagcgcggccggcgtaggtctatgtcgcgggcggcggcggcggcggcggccgcggagggacgatgcgcgagtacaaagtggtggtgctgggctcgggcggggtaggcaaatccgccctgaccgtgcagttcgtgaccggcaccttcatcgagaaatacgaccccaccatcgaggacttctaccgcaaggagatcgaggtggattcgtcgccgtcggtgctggagatcctggacacggcgggcaccgagcagttcgcgtccatgcgggacctgtacatcaagaacggccagggcttcatcctcgtctacagcctcgtcaaccagcagagcttccaggacatcaagcccatgcgggaccagatcatccgcgtgaagcggtatgagaaagtgccagtcatcttggttgggaacaaagtggacctggaaagtgagagagaagtatcgtccagcgaaggcagagcccttgctgaagagtggggctgcccctttatggaaacttccgctaagagtaaaacaatggtggacgaactctttgcagaaattgtgaggcagatgaactatgctgctcagcctgacaaagatgacccatgctgttctgcatgtaacatacaatagcatccaaatatggctgtcctggatgggatttgcccaatgtcgtaggtgatagaaaactcgcctactccactgcagaacttgcagaatgcgtggtgttaatctacagagaactgcagcccttattcagaattgagcagtgattgtcagttgatatctctgagtaacatttgggttcagtaactacagttttcaccatttgtcctcagtctcctttatgcatctgcaactttaaggcatagtccatcgatctacagggtgatctcatttgaaagctatgatggcattgtcgctgagttgacagaagcaactattgtacaaattaaaaataaccataagggagaaaccagaagaattcctctgaccacttacaattaaaatattttgtcttctttaaaaaaataagtaaaggagaaatattttcctacaagagtactgaatttcaggaaatgggatagagcttctaaccagtgtattccgtcaagtaagataataacagctgacctgccaacagcattacagggagattctttgctcagctaacacatttctgtttttcaaaattgatgcttaattgtagctgttattctaatttgtgacatggaactaactcatgcttcaatccttgatagagcaaaactcagaacaggttatgtaaaaatatagtctggctttagaatttgttaattcacctgctttgccacagaaaatggaggctttcacaagggtttgatcagaattaaaaccccaaacccgccctctgttaggggtggtctttataactttactgaacaagagggaagcaactgtgatgggaagagattacctagccttactaacaagaagcattctaatagataaactagtaccatcatgtaaggaagatgaagccatgttgcatccacatgttcccgtttgcagaaacctcacaggacagtacgaatatctggcatttttaagttcattaaagcagcaaattccttctcgcctttaagggctatggttgtagtgtgacccgtggctaacctgctttcaaaatcaagtatttgctgtagcagagctttattgcaggcattttaaaaattgaataaccatgtgaaataatttgggcttaaaagtgaacataaattatagagtggaaggtaagggacaaaagccttttacctttaattttcctggagaattatataaaggttttcttagaacaattttgccctgattactgaagcgtcaaataaagctggagtgaaaattttgttttgaaaaggtgctcaagctctgacatttttggttttcatagtcgtgaagtatttatcatttgcatgactaatggcacaggaaaaacctattcataagttttacaatcaagtatagaggggtcttcagctaacttagttatacataaatgctgaaaagattatcttgagctgggccttgggagaagaatttggccttcagaactgcaatatcactgagcctgcgatctatacaccaccccacattttgttggtttcacagtcttgtgcaagtaacctctggtcttacgtgtgtaactgagagaagagtgtgtgtttgtgtgtgcatgtgtgtttattgttcctaagaatttggcacaagtcagagataattgcctatactaagaatctatactgcagaatatagtgtatcaaaaacttttttcttttaaattattaaagtgtcttttatacttttatgaaatcattggtagccccccaagtgtttaataactggcattaagcttagagggtgaaaaaaaaaaaaaagattgatagtatttttcataatgaaaaaactgaagagatacgtgaatgaaaccaggccatagctgtcataaatctttgacttttgaatatttacattcttcagtataattttttataatcctcaattatgaaccaccttgtttataggacaaaaaaatttaaccaattttattgaaacgaatttcactgtgtaaaagttggtttgattcaaacatgtagagaagttgtagattcaagatatatgatttctctatggaaataaaaatatttgttagtgaattggttgagttttgattcctctaacttctcagaatgattctttagaattctataattcatagcaatttttgacaagtaagattgcaaaatagaaatatctataaagattccacagtttgacattatggcttgctatgcagatgtgaaaataggttaaataatatgaaagatatggcagaatgtaaagtggaaaagatgacctaaaattttgagttgtattaatagttaaaaacatttgtgtcagatgacagggtgggcttttactgtcaagacatgaataagaactgatctggctgcctgatgagtgtttccacgcagccctgcatatttagtgaccaaggcatcaaggacatcccgaaactggaaattcatatccatctggtatgaatatataactcagctggcaaatgaatgtgtttgttgagatattacagtaataaaacacttaagaacaggaagattacatttgttggcatacgaaaccttagtggctacagaagaaagttgaccttgtgtcactatttattttatgccctgatcagactagcaacttagataagtgaaagtttttctaacatgccttaaaaatattatggtttgatccaaagacccactttttctaagagctttgctttcttttctttttgtttcttttttcttttttttattttttggaaagggagttcccccttt

SEQ ID NO: 348096 - DNA, 1115 bp, Homo sapiens
agttaaaacctaaatgagcaacaaacgaggtgacgtgcgttatcagttttgtcttccatgtcttcctcatcctgctgtttgctccacggctcttgacaggatggagacgaggaaagaacttccacatccacattcaaaacgtctgccagaactccctcaggcgattactttaaaacatgaaagaaattgcaccttttccttaagggcaagatggtgctgtgggctttcctctctcctgatgagatgatgcaaatggactccatagagaaacgctgcccgtgtaacaatgcagttacgcaacccggtgcatgacacatgaattgcagcgcacctgagatcctgatgaaatcctgggagcctggagctgtcaaacatggttttaaaaaataaagggaatacacccagcccacaccctgactttacaacctttaattaattagaggaaagaaagagagatttgtctggtttcatgacttcaactttccacctggaatatgaagctcctgctcttcccacctccttttcttctctctctctctctcaggtttttaaatttctatttccagttctgccaccaaaaatagattgcaaatatattctgcataattccgaggctacactataaatgttggagtgctactacttgtataatagtcacaaatgaacgcacgagtgggcacagaccgccactctgcctccctcctgctcctgcaccagccaatagtgtctgaagtcagacccatcccatcttcctgtccagctgtttagtctcaaattgtacatttatttcattaatagatcagtctaagatgttcatctcatgtaacaaaggggcatctttttttcttgggagcctggctggtttgttggtggaaaggcagggctcaggggccgtcgatgtttaacttaagcctcctgtactttcacattctgggacccagcaccttcttgtctatagttagctttttgaaaagtgctatttgattacaatttaaggctgggcgccgtggctcacgcctgtaatcccagcactttgggaggccaaggcaggcggatcacctgaggtagggaattcgagaccaacctgaccaatatggagaaacccccatctctac

SEQ ID NO: 348097 - DNA, 533 bp, Homo sapiens
atgtgggtgcatggtgcgtgtgttcctgtttgtgtctatgcatgtgtgtgtgtgcatgtgtcttttgtaagtacaggaagaagtcaggagtcgtcatggtagtgaggatagcagtactgtgtcctatcagggccagacacggcacctttcagatactgtagtcatgcacttaatcctcaactgggttaccactgttatctccaattcacagatcaggaaactgaggcaagcgaccaacctaagttgaattctgaagtcaggcaacttgtgtccaaagtccatgaccagaatctttctgttttgccgccatgctcaaaataggaaaggcggcaagatggtgctgtgggctttcctctctcctgatgagatgatgcaaatggactccatagagaaacgctgcccgtgtaacaatgcagttacgcaacccggtgcatgacacatgaattgcagcgcacctgagatcctgatgaaatcctgggagcctggagctgtcaaacatggttttaaaaaataaagggaatacacccagccca

SEQ ID NO: 348098 - DNA, 565 bp, Homo sapiens
cctggatgtactatgtatggtctttcaagtgaaaactgtctacagagcaagagtccagcatccacgtgcactcctgaccaggacgtagagagaggccctccaggaggtgtgcaaagtggcgtggatttgggacagcgatttgacagtatctgagaaagttaaaactctgcatccccaacacacagcaagccctgcagcgatcaggaaactgaggcaagcgaccaacctaagttgaattctgaagtcaggcaacttgtgtccaaagtccatgaccagaatctttctgttttgccgccatgctcaaaataggaaaggcgcgattactttaaaacatgaaagaaattgcaccttttccttaagggcaagatggtgctgtgggctttcctctctcctgatgagatgatgcaaatggactccatagagaaacgctgcccgtgtaacaatgcagttacgcaacccggtgcatgacacatgaattgcagcgcacctgagatcctgatgaaatcctgggagcctggagctgtcaaacatggttttaaaaaataaagggaatacacccagccca

SEQ ID NO: 348099 - DNA, 354 bp, Homo sapiens
gggggggaaggaggcgcacgacagatggccgtatcgcgcgaaggcagcaccttgaggatttttatgtgtatggtcatttcaagtgaattttgtatacagagcaaggcgattactttaaaacatgaaagaaattgcaccttttccttaagggcaagatggtgctgtgggctttcctctctcctgatgagatgatgcaaatggactccatagagaaacgctgcccgtgtaacaatgcagttacgcaacccggtgcatgacacatgaattgcagcgcacctgagatcctgatgaaatcctgggagcctggagctgtcaaacatggttttaaaaaataaagggaatacacccagccca

SEQ ID NO: 348100 - DNA, 308 bp, Homo sapiens
  misc_feature (1)..(1): n is a, c, g, or t
  misc_feature (40)..(40): n is a, c, g, or t
ntctattaagtaactatgccgcctggccgttttcaggtgnactttgtatacagagcaaggcgattactttaaaacatgaaagaaattgcaccttttccttaagggcaagatggtgctgtgggctttcctctctcctgatgagatgatgcaaatggactccatagagaaacgctgcccgtgtaacaatgcagttacgcaacccggtgcatgacacatgaattgcagcgcacctgagatcctgatgaaatcctgggagcctggagctgtcaaacatggttttaaaaaataaagggaatacacccagccca

SEQ ID NO: 348101 - DNA, 1239 bp, Homo sapiens
atgtgggtgcatggtgcgtgtgttcctgtttgtgtctatgcatgtgtgtgtgtgcatgtgtcttttgtaagtacaggaagaagtcaggagtcgtcatggtagtgaggatagcagtactgtgtcctatcagggccagacacggcacctttcagatactgtagtcatgcacttaatcctcaactgggttaccactgttatctccaattcacagatcaggaaactgaggcaagcgaccaacctaagttgaattctgaagtcaggcaacttgtgtccaaagtccatgaccagaatctttctgttttgccgccatgctcaaaataggaaaggcggcaagatggtgctgtgggctttcctctctcctgatgagatgatgcaaatggactccatagagaaacgctgcccgtgtaacaatgcagttacgcaacccggtgcatgacacatgaattgcagcgcacctgagatcctgatgaaatcctgggagcctggagctgtcaaacatggttttaaaaaataaagggaatacacccagcccacaccctgactttacaacctttaattaattagaggaaagaaagagagatttgtctggtttcatgacttcaactttccacctggaatatgaagctcctgctcttcccacctccttttcttctctctctctctctcaggtttttaaatttctatttccagttctgccaccaaaaatagattgcaaatatattctgcataattccgaggctacactataaatgttggagtgctactacttgtataatagtcacaaatgaacgcacgagtgggcacagaccgccactctgcctccctcctgctcctgcaccagccaatagtgtctgaagtcagacccatcccatcttcctgtccagctgtttagtctcaaattgtacatttatttcattaatagatcagtctaagatgttcatctcatgtaacaaaggggcatctttttttcttgggagcctggctggtttgttggtggaaaggcagggctcaggggccgtcgatgtttaacttaagcctcctgtactttcacattctgggacccagcaccttcttgtctatagttagctttttgaaaagtgctatttgattacaatttaaggctgggcgccgtggctcacgcctgtaatcccagcactttgggaggccaaggcaggcggatcacctgaggtagggaattcgagaccaacctgaccaatatggagaaacccccatctctac

SEQ ID NO: 348102 - DNA, 1280 bp, Homo sapiens
tctagtaagaggttaactattcatgatcactagattattaaaataatcttttttcatgatcactagatcactctgaatccttgtttcagagcaagaacgacatgattcttttgacacagattgagcttttaaagagctcactcaaagggcttttagacgccaatcttctaatcgtttatggcagagttaaggacagcaattgaatgtgattgctactacaaggatttttactttctagaattacttttagttaaaaagttgtggagatttatgctgcatcaccacacttaagatctttgccaatttctggatttatgttaagattcatcagtttatctcaggatatatttttaacacgtgtttcaaaaccgtggaacctctggagtattacaggagatttctgaaagagaactgccgtcctgatggaagagaacttggtgaattcagaaccacaactgtcaacatcggttcaattagtaccgcagatggttctgctttagtgaagttgggaaatactacagtaatctgtggagttaaagcagaatttgcagcaccatcaacagatgcccctgataaaggatacgttgttcctaatgtggatctaccacccctgtgttcatcgagattccggtctggacctcctggagaagaggcccaagtggctagccagttcattgcagatgtcattgaaaattcacagataattcagaaagaggacttatgcatttctccaggaaagcttgtctgggttctatactgtgatctcatttgcctcgactacgatggaaacattttggatgcctgcacatttgctttgctagcggctttaaaaaatgtacagttgcctgaagttactataaatgaagaaactgctttagcagaagttaatttaaagaagaaaagttatttgaatattagaactcatccagttgcaacttcctttgctgtgtttgatgacactttgcttatagttgaccctactggagaggaggaacatctggcaacaggaaccttaacaatagtaatggatgaggaaggcaaactctgttgtcttcacaaaccaggtggaagtgggctaactggagctaaacttcaggactgtatgagccgagcagttacaagacacaaagaagttaaaaaactgatggatgaagtaattaagagtatgaaacccaaataaacagccaccacattttcaaaacagatttgtaaaaattgtatttgttaacactgtgcacaaacgttttatactaaataaatatcaaactacattcttctga

SEQ ID NO: 348103 - DNA, 1083 bp, Homo sapiens
ctttccctttttttgtccttgtactacctgccgcgttttccatgcgcttccctctctctgctgtctgtcagacgcccaaactcatgatacatacgagttcgccggccgaccacccggattcgccttacgccggggcaaacgcgggcgggaagatggcggctgggttcaaaaccgtggaacctctggagtattacaggagatttctgaaagagaactgccgtcctgatggaagagaacttggtgaattcagaaccacaactgtcaacatcggttcaattagtaccgcagatggttctgctttagtgaagttgggaaatactacagtaatctgtggagttaaagcagaatttgcagcaccatcaacagatgcccctgataaaggatacgttgttcctaatgtggatctaccacccctgtgttcatcgagattccggtctggacctcctggagaagaggcccaagtggctagccagttcattgcagatgtcattgaaaattcacagataattcagaaagaggacttatgcatttctccaggaaagcttgtctgggttctatactgtgatctcatttgcctcgactacgatggaaacattttggatgcctgcacatttgctttgctagcggctttaaaaaatgtacagttgcctgaagttactataaatgaagaaactgctttagcagaagttaatttaaagaagaaaagttatttgaatattagaactcatccagttgcaacttcctttgctgtgtttgatgacactttgcttatagttgaccctactggagaggaggaacatctggcaacaggaaccttaacaatagtaatggatgaggaaggcaaactctgttgtcttcacaaaccaggtggaagtgggctaactggagctaaacttcaggactgtatgagccgagcagttacaagacacaaagaagttaaaaaactgatggatgaagtaattaagagtatgaaacccaaataaacagccaccacattttcaaaacagatttgtaaaaattgtatttgttaacactgtgcacaaacgttttatactaaataaatatcaaactacattcttctga

SEQ ID NO: 348104 - DNA, 1557 bp, Homo sapiens
agcccttgaccagtgaagaggcaaggccagggctgagcctaagtcacaggcagaaaaaagacgcagaaacattggaataacgctccacacgcactgcttgattctgcgctagaaaccctgttatctccgaactgttggtgttattctgagttacagcaccagctcttttataaagaggaagacctgctccttctttaacagcagattcgtcaaaatacgtccaaggcaaggaaacctagaaaggcgtctgggcaggggaaagtcgatgcgagggcgggccagggacctttcgtcgcgtccccaccttggcatttcccgtggcgtgagcggccccggcatccgtgtcgaaagtgcggcggcggaacaggcgcgcaggagaggagcgggcaggcgcagacgcgcgggcgggaagatggcggctgggttcaaaaccgtggaacctctggagtattacaggagatttctgaaagagaactgccgtcctgatggaagagaacttggtgaattcagaaccacaactgtcaacatcggttcaattagtaccgcagatggttctgctttagtgaagttgggaaatactacagtaatctgtggagttaaagcagaatttgcagcaccatcaacagatgcccctgataaaggatacgttgttcctaatgtggatctaccacccctgtgttcatcgagattccggtctggacctcctggagaagaggcccaagtggctagccagttcattgcagatgtcattgaaaattcacagataattcagaaagaggacttatgcatttctccaggaaagcttgtctgggttctatactgtgatctcatttgcctcgactacgatggaaacattttggatgcctgcacatttgctttgctagcggctttaaaaaatgtacagttgcctgaagttactataaatgaagaaactgctttagcagaagttaatttaaagaagaaaagttatttgaatattagaactcatccagttgcaacttcctttgctgtgtttgatgacactttgcttatagttgaccctactggagaggaggaacatctggcaacaggaaccttaacaatagtaatggatgaggaaggcaaactctgttgtcttcacaaaccaggtggaagtgggctaactggagctaaacttcaggactgtatgagccgagcagttacaagacacaaagaagttaaaaaactgatggatgaagtaattaagagtatgaaacccaaataaacagccaccacattttcaaaacagatttgtaaaaattgtatttgttaacactgtgcacaaacgttttatactaaataaatatcaaactacattcttctgaaagatgtttctattatttcttaggtcacttccatatatattatgtatagtgaaaccatttttaaaaagcaatgacttaggcaaaccaaccctagtttgttaaaccatttccctgtttttatttaaaaatgataaggttgtgcttctgtataaagtttgtacatctagcaatgtaaaatactgacacattaaaaaaaacaaaaagtagaaactca

SEQ ID NO: 348105 - DNA, 1859 bp, Homo sapiens
agcccttgaccagtgaagaggcaaggccagggctgagcctaagtcacaggcagaaaaaagacgcagaaacattggaataacgctccacacgcactgcttgattctgcgctagaaaccctgttatctccgaactgttggtgttattctgagttacagcaccagctcttttataaagaggaagacctgctccttctttaacagcagattcgtcaaaatacgtccaaggcaaggaaacctagaaaggcgtctgggcaggggaaagtcgatgcgagggcgggccagggacctttcgtcgcgtccccaccttggcatttcccgtggcgtgagcggccccggcatccgtgtcgaaagtgcggcggcggaacaggcgcgcaggagaggagcgggcaggcgcagacgcgcgggcgggaagatggcggctgggttcaaaaccgtggaacctctggagtattacaggagatttctgaaagagaactgccgtcctgatggaagagaacttggtgaattcagaaccacaactgtcaacatcggttcaattagtaccgcagatggttctgctttagtgaagttgggaaatactacagtaatctgtggagttaaagcagaatttgcagcaccatcaacagatgcccctgataaaggatacgttgttcctaatgtggatctaccacccctgtgttcatcgagattccggtctggacctcctggagaagaggcccaagtggctagccagttcattgcagatgtcattgaaaattcacagataattcagaaagaggacttatgcatttctccaggaaagcttgtctgggttctatactgtgatctcatttgcctcgactacgatggaaacattttggatgcctgcacatttgctttgctagcggctttaaaaaatgtacagttgcctgaagttactataaatgaagaaactgctttagcagaagttaatttaaagaagaaaagttatttgaatattagaactcatccagttgcaacttcctttgctgtgtttgatgacactttgcttatagttgaccctactggagaggaggaacatctggcaacaggaaccttaacaatagtaatggatgaggaaggcaaactctgttgtcttcacaaaccaggtggaagtgggctaactggagctaaacttcaggactgtatgagccgagcagttacaagacacaaagaagttaaaaaactgatggatgaagtaattaagagtatgaaacccaaataaacagccaccacattttcaaaacagatttgtaaaaattgtatttgttaacactgtgcacaaacgttttatactaaataaatatcaaactacattcttctgaaagatgtttctattatttcttaggtcacttccatatatattatgtatagtgaaaccatttttaaaaagcaatgacttaggcaaaccaaccctagtttgttaaaccatttccctgtttttatttaaaaatgataaggttgtgcttctgtataaagtttgtacatctagcaatgtaaaatactgacacattaaaaaaaacaaaaagtagaaactcaattcttttgattcagtgctcttgtgtttttaaaaaaaggaacaaaaagtaatgcaagactcaaaattttggagtggttggcgtgcctctcttcattttactttttgactggctgcctgtatgccgatgatgatgtagctgagctgtttgtgctgctgctgctgccatagccatttgatgctgcaagaatcgcaactgcagctgcctgtgactgcataaaacttcctactccagtaaggttaataacagcagcttgctgagcagataaggcctgttcttgactggttgaaccttgctcagaac

SEQ ID NO: 348106 - DNA, 1696 bp, Homo sapiens
agcccttgaccagtgaagaggcaaggccagggctgagcctaagtcacaggcagaaaaaagacgcagaaacattggaataacgctccacacgcactgcttgattctgcgctagaaaccctgttatctccgaactgttggtgttattctgagttacagcaccagctcttttataaagaggaagacctgctccttctttaacagcagattcgtcaaaatacgtccaaggcaaggaaacctagaaaggcgtctgggcaggggaaagtcgatgcgagggcgggccagggacctttcgtcgcgtccccaccttggcatttcccgtggcgtgagcggccccggcatccgtgtcgaaagtgcggcggcggaacaggcgcgcaggagaggagcgggcaggcgcagacgcgcgggcgggaagatggcggctgggttcaaaaccgtggaacctctggagtattacaggagatttctgaaagagaactgccgtcctgatggaagagaacttggtgaattcagaaccacaactgtcaacatcggttcaattagtaccgcagatggttctgctttagtgaagttgggaaatactacagtaatctgtggagttaaagcagaatttgcagcaccatcaacagatgcccctgataaaggatacgttgttcctaatgtggatctaccacccctgtgttcatcgagattccggtctggacctcctggagaagaggcccaagtggctagccagttcattgcagatgtcattgaaaattcacagataattcagaaagaggacttatgcatttctccaggaaagcttgtctgggttctatactgtgatctcatttgcctcgactacgatggaaacattttggatgcctgcacatttgctttgctagcggctttaaaaaatgtacagttgcctgaagttactataaatgaagaaactgctttagcagaagttaatttaaagaagaaaagttatttgaatattagaactcatccagttgcaacttcctttgctgtgtttgatgacactttgcttatagttgaccctactggagaggaggaacatctggcaacaggaaccttaacaatagtaatggatgaggaaggcaaactctgttgtcttcacaaaccagaccaggcatgttcccgccacttcagtcctaaacatatgtagatgaaaactcagtgtgagccttaaattagggagggccaaatagaatatgggatattttatttacctaattttagtatagtttcttagctacctaaaatgttcttccatcttaatggtatatgtcagtggttcttaaacttaagacatacattagaatcacttggaggtcttgtgaaactaacttgtagatcttgagactgtaccctgatttacattatccaatttttttgttttataatttgacatgacattaatgttttttgaaaaggaatgataactgagattaaaagtattggcaaaataatttttcaggtggaagtgggctaactggagctaaacttcaggactgtatgagccgagcagttacaagacacaaagaagttaaaaaactgatggatgaagtaattaagagtatgaaacccaaataaacagccaccacattttcaaaacagatttgtaaaaattgtatttgttaacactgtgcacaaacgttttatactaaataaatatcaaactacattcttctga

SEQ ID NO: 348107 - DNA, 1396 bp, Homo sapiens
agcccttgaccagtgaagaggcaaggccagggctgagcctaagtcacaggcagaaaaaagacgcagaaacattggaataacgctccacacgcactgcttgattctgcgctagaaaccctgttatctccgaactgttggtgttattctgagttacagcaccagctcttttataaagaggaagacctgctccttctttaacagcagattcgtcaaaatacgtccaaggcaaggaaacctagaaaggcgtctgggcaggggaaagtcgatgcgagggcgggccagggacctttcgtcgcgtccccaccttggcatttcccgtggcgtgagcggccccggcatccgtgtcgaaagtgcggcggcggaacaggcgcgcaggagaggagcgggcaggcgcagacgcgcgggcgggaagatggcggctgggttcaactaaagggtgcaaacgaaaacatctgtggtctccgtggttgttaaagttgcagaaccgtggaacctctggagtattacaggagatttctgaaagagaactgccgtcctgatggaagagaacttggtgaattcagaaccacaactgtcaacatcggttcaattagtaccgcagatggttctgctttagtgaagttgggaaatactacagtaatctgtggagttaaagcagaatttgcagcaccatcaacagatgcccctgataaaggatacgttgttcctaatgtggatctaccacccctgtgttcatcgagattccggtctggacctcctggagaagaggcccaagtggctagccagttcattgcagatgtcattgaaaattcacagataattcagaaagaggacttatgcatttctccaggaaagcttgtctgggttctatactgtgatctcatttgcctcgactacgatggaaacattttggatgcctgcacatttgctttgctagcggctttaaaaaatgtacagttgcctgaagttactataaatgaagaaactgctttagcagaagttaatttaaagaagaaaagttatttgaatattagaactcatccagttgcaacttcctttgctgtgtttgatgacactttgcttatagttgaccctactggagaggaggaacatctggcaacaggaaccttaacaatagtaatggatgaggaaggcaaactctgttgtcttcacaaaccaggtggaagtgggctaactggagctaaacttcaggactgtatgagccgagcagttacaagacacaaagaagttaaaaaactgatggatgaagtaattaagagtatgaaacccaaataaacagccaccacattttcaaaacagatttgtaaaaattgtatttgttaacactgtgcacaaacgttttatactaaataaatatcaaactacattcttctga

SEQ ID NO: 348108 - DNA, 1300 bp, Homo sapiens
ggagcaggctagggagcacaccccttctgggggctcgagacctccctgggtggagcagaactgcagcggctgcaggtcccggagagtctgggagaggtcgaggttgacagaggaggtgggtagggggcgcgggcgccaggggcgatggaagcggcgatgatgccaggccgggtgggtgcgctccagtgtgaaaaaacttacaagtctctgagcacacaaagagataagattccaagggaaaattaaagaaccgaagaaaaggagagtgaaactccaggaaactccgaggtcaggaatttgggggaatctaggggaaaagggacttctccgagaactggtagcgcggaggaggggacgcctgaggagccgcagtctccaggagagcgaaccgtggaacctctggagtattacaggagatttctgaaagagaactgccgtcctgatggaagagaacttggtgaattcagaaccacaactgtcaacatcggttcaattagtaccgcagatggttctgctttagtgaagttgggaaatactacagtaatctgtggagttaaagcagaatttgcagcaccatcaacagatgcccctgataaaggatacgttgttcctaatgtggatctaccacccctgtgttcatcgagattccggtctggacctcctggagaagaggcccaagtggctagccagttcattgcagatgtcattgaaaattcacagataattcagaaagaggacttatgcatttctccaggaaagcttgtctgggttctatactgtgatctcatttgcctcgactacgatggaaacattttggatgcctgcacatttgctttgctagcggctttaaaaaatgtacagttgcctgaagttactataaatgaagaaactgctttagcagaagttaatttaaagaagaaaagttatttgaatattagaactcatccagttgcaacttcctttgctgtgtttgatgacactttgcttatagttgaccctactggagaggaggaacatctggcaacaggaaccttaacaatagtaatggatgaggaaggcaaactctgttgtcttcacaaaccaggtggaagtgggctaactggagctaaacttcaggactgtatgagccgagcagttacaagacacaaagaagttaaaaaactgatggatgaagtaattaagagtatgaaacccaaataaacagccaccacattttcaaaacagatttgtaaaaattgtatttgttaacactgtgcacaaacgttttatactaaataaatatcaaactacattcttctga

SEQ ID NO: 348109 - DNA, 2849 bp, Homo sapiens
  misc_feature (1185)..(1185): n is a, c, g, or t
  misc_feature (1548)..(1548): n is a, c, g, or t
  misc_feature (1584)..(1584): n is a, c, g, or t
agcccttgaccagtgaagaggcaaggccagggctgagcctaagtcacaggcagaaaaaagacgcagaaacattggaataacgctccacacgcactgcttgattctgcgctagaaaccctgttatctccgaactgttggtgttattctgagttacagcaccagctcttttataaagaggaagacctgctccttctttaacagcagattcgtcaaaatacgtccaaggcaaggaaacctagaaaggcgtctgggcaggggaaagtcgatgcgagggcgggccagggacctttcgtcgcgtccccaccttggcatttcccgtggcgtgagcggccccggcatccgtgtcgaaagtgcggcggcggaacaggcgcgcaggagaggagcgggcaggcgcagacgcgcgggcgggaagatggcggctgggttcaaaaccgtggaacctctggagtattacaggagatttctgaaagagaactgccgtcctgatggaagagaacttggtgaattcagaaccacaactgtcaacatcggttcaattagtaccgcagatggttctgctttagtgaagttgggaaatactacagtaatctgtggagttaaagcagtaagtctaaatatgtcctattgagatttgagttacaaagttagctttatttattagattgtaatatacacctgtaattctactcttgatttggtagttgggtgtcaatttttaatgtttaatttcccaagagctttcactatgagtgttagataatatgacccaagtttaatgactaagtgaacaattgtcaaatgtagcaaaatgaaacaacttttaaaatctgagtcaccattttaaaaaaattgttatatcatttgagacattaacagatttttggtgacatccttttagccagtgatgacatgtaatctgtgtaaatgtgtagaaaattgaaattgttgaaaagaaaaatttgagggaatactggctaccatttactgagtacttgctatgttccagacacctttttaggtgctttacagaattatccactttaatgcctataacaatcatttgttacttgtcttcacctcctgttttacagatgactttcagtaacctgtccaggtacataagactcataagtaaaacttagacataaatctgactccaaagcctgtgcttctttgactacagtntaccctgtgttatttaacctcagttgagattcttctttcgtaaacctggagtgatgtataacagtaagatttgagaacttgctccttgtcaggttttatgcctgggatttaacaggtctatctcatttggcccttattaacagtccctaggagtagacactattttcttcccatttgacaagatgaggagtttaaggtaagaggttaaataacttgcctgaagtctctcagccagtaagtatggctctgacatttgaactggcttagtaattgcagagcatttgcttttttttttttttgagacggagtcttgctctgtcgcccaggctggagtgcagtggcacgatgtcagctcactgcaanttccgtctcctgggttgaagtgattctcctgcctcngcctcccaagtagctgggattacaggcgcccgccaccatgcctggctaatttttgtatttttagtagagacggggttttgccatcttggccaggctggtctcaaactcctgacctcaggtgatccgcccgcctctgtgtcccaaagtgctgggattaccggtgtgagccaccgcgcccagctgagcttttgctctttaccactaaagcagcagttcctaaatcttgctctatcatctggagaacaaattaagattcttggctagtagttgggggcacaaacccagttactattttttaaaagatctccaggtaatcttgccgagcagcactgtagtgtagtccactgtactgtagtgccttcttatcttgtagagctattgtgaggatcagcaccaatgtccgtagaggccctgacacaattccctaagctgatatttgatagagccttccataactgattgctaaattgtcttcataatttttcagtagcttctttcaataggaaacatttctttgctactataggaatttgcagcaccatcaacagatgcccctgataaaggatacgttgttcctaatgtggatctaccacccctgtgttcatcgagattccggtctggacctcctggagaagaggcccaagtggctagccagttcattgcagatgtcattgaaaattcacagataattcagaaagaggacttatgcatttctccaggaaagcttgtctgggttctatactgtgatctcatttgcctcgactacgatggaaacattttggatgcctgcacatttgctttgctagcggctttaaaaaatgtacagttgcctgaagttactataaatgaagaaactgctttagcagaagttaatttaaagaagaaaagttatttgaatattagaactcatccagttgcaacttcctttgctgtgtttgatgacactttgcttatagttgaccctactggagaggaggaacatctggcaacaggaaccttaacaatagtaatggatgaggaaggcaaactctgttgtcttcacaaaccaggtggaagtgggctaactggagctaaacttcaggactgtatgagccgagcagttacaagacacaaagaagttaaaaaactgatggatgaagtaattaagagtatgaaacccaaataaacagccaccacattttcaaaacagatttgtaaaaattgtatttgttaacactgtgcacaaacgttttatactaaataaatatcaaactacattcttctga

SEQ ID NO: 348110 - DNA, 2812 bp, Homo sapiens
  misc_feature (1185)..(1185): n is a, c, g, or t
  misc_feature (1548)..(1548): n is a, c, g, or t
  misc_feature (1584)..(1584): n is a, c, g, or t
agcccttgaccagtgaagaggcaaggccagggctgagcctaagtcacaggcagaaaaaagacgcagaaacattggaataacgctccacacgcactgcttgattctgcgctagaaaccctgttatctccgaactgttggtgttattctgagttacagcaccagctcttttataaagaggaagacctgctccttctttaacagcagattcgtcaaaatacgtccaaggcaaggaaacctagaaaggcgtctgggcaggggaaagtcgatgcgagggcgggccagggacctttcgtcgcgtccccaccttggcatttcccgtggcgtgagcggccccggcatccgtgtcgaaagtgcggcggcggaacaggcgcgcaggagaggagcgggcaggcgcagacgcgcgggcgggaagatggcggctgggttcaaaaccgtggaacctctggagtattacaggagatttctgaaagagaactgccgtcctgatggaagagaacttggtgaattcagaaccacaactgtcaacatcggttcaattagtaccgcagatggttctgctttagtgaagttgggaaatactacagtaatctgtggagttaaagcagtaagtctaaatatgtcctattgagatttgagttacaaagttagctttatttattagattgtaatatacacctgtaattctactcttgatttggtagttgggtgtcaatttttaatgtttaatttcccaagagctttcactatgagtgttagataatatgacccaagtttaatgactaagtgaacaattgtcaaatgtagcaaaatgaaacaacttttaaaatctgagtcaccattttaaaaaaattgttatatcatttgagacattaacagatttttggtgacatccttttagccagtgatgacatgtaatctgtgtaaatgtgtagaaaattgaaattgttgaaaagaaaaatttgagggaatactggctaccatttactgagtacttgctatgttccagacacctttttaggtgctttacagaattatccactttaatgcctataacaatcatttgttacttgtcttcacctcctgttttacagatgactttcagtaacctgtccaggtacataagactcataagtaaaacttagacataaatctgactccaaagcctgtgcttctttgactacagtntaccctgtgttatttaacctcagttgagattcttctttcgtaaacctggagtgatgtataacagtaagatttgagaacttgctccttgtcaggttttatgcctgggatttaacaggtctatctcatttggcccttattaacagtccctaggagtagacactattttcttcccatttgacaagatgaggagtttaaggtaagaggttaaataacttgcctgaagtctctcagccagtaagtatggctctgacatttgaactggcttagtaattgcagagcatttgcttttttttttttttgagacggagtcttgctctgtcgcccaggctggagtgcagtggcacgatgtcagctcactgcaanttccgtctcctgggttgaagtgattctcctgcctcngcctcccaagtagctgggattacaggcgcccgccaccatgcctggctaatttttgtatttttagtagagacggggttttgccatcttggccaggctggtctcaaactcctgacctcaggtgatccgcccgcctctgtgtcccaaagtgctgggattaccggtgtgagccaccgcgcccagctgagcttttgctctttaccactaaagcagcagttcctaaatcttgctctatcatctggagaacaaattaagattcttggctagtagttgggggcacaaacccagttactattttttaaaagatctccaggtaatcttgccgagcagcactgtagtgtagtccactgtactgtagtgccttcttatcttgtagagctattgtgaggatcagcaccaatgtccgtagaggccctgacacaattccctaagctgatatttgatagagccttccataactgattgctaaattgtcttcataatttttcagtagcttctttcaataggaaacatttctttgctactataggaatttgcagcaccatcaacagatgcccctgataaaggatacgttgattccggtctggacctcctggagaagaggcccaagtggctagccagttcattgcagatgtcattgaaaattcacagataattcagaaagaggacttatgcatttctccaggaaagcttgtctgggttctatactgtgatctcatttgcctcgactacgatggaaacattttggatgcctgcacatttgctttgctagcggctttaaaaaatgtacagttgcctgaagttactataaatgaagaaactgctttagcagaagttaatttaaagaagaaaagttatttgaatattagaactcatccagttgcaacttcctttgctgtgtttgatgacactttgcttatagttgaccctactggagaggaggaacatctggcaacaggaaccttaacaatagtaatggatgaggaaggcaaactctgttgtcttcacaaaccaggtggaagtgggctaactggagctaaacttcaggactgtatgagccgagcagttacaagacacaaagaagttaaaaaactgatggatgaagtaattaagagtatgaaacccaaataaacagccaccacattttcaaaacagatttgtaaaaattgtatttgttaacactgtgcacaaacgttttatactaaataaatatcaaactacattcttctga

SEQ ID NO: 348111 - DNA, 1345 bp, Homo sapiens
agcccttgaccagtgaagaggcaaggccagggctgagcctaagtcacaggcagaaaaaagacgcagaaacattggaataacgctccacacgcactgcttgattctgcgctagaaaccctgttatctccgaactgttggtgttattctgagttacagcaccagctcttttataaagaggaagacctgctccttctttaacagcagattcgtcaaaatacgtccaaggcaaggaaacctagaaaggcgtctgggcaggggaaagtcgatgcgagggcgggccagggacctttcgtcgcgtccccaccttggcatttcccgtggcgtgagcggccccggcatccgtgtcgaaagtgcggcggcggaacaggcgcgcaggagaggagcgggcaggcgcagacgcgcgggcgggaagatggcggctgggttcaaaaagagaactgccgtcctgatggaagagaacttggtgaattcagaaccacaactgtcaacatcggttcaattagtaccgcagatggttctgctttagtgaagttgggaaatactacagtaatctgtggagttaaagcatagcttctttcaataggaaacatttctttgctactataggaatttgcagcaccatcaacagatgcccctgataaaggatacgttgttcctaatgtggatctaccacccctgtgttcatcgagattccggtctggacctcctggagaagaggcccaagtggctagccagttcattgcagatgtcattgaaaattcacagataattcagaaagaggacttatgcatttctccaggaaagcttgtctgggttctatactgtgatctcatttgcctcgactacgatggaaacattttggatgcctgcacatttgctttgctagcggctttaaaaaatgtacagttgcctgaagttactataaatgaagaaactgctttagcagaagttaatttaaagaagaaaagttatttgaatattagaactcatccagttgcaacttcctttgctgtgtttgatgacactttgcttatagttgaccctactggagaggaggaacatctggcaacaggaaccttaacaatagtaatggatgaggaaggcaaactctgttgtcttcacaaaccaggtggaagtgggctaactggagctaaacttcaggactgtatgagccgagcagttacaagacacaaagaagttaaaaaactgatggatgaagtaattaagagtatgaaacccaaataaacagccaccacattttcaaaacagatttgtaaaaattgtatttgttaacactgtgcacaaacgttttatactaaataaatatcaaactacattcttctga

SEQ ID NO: 348112 - DNA, 1269 bp, Homo sapiens
agcccttgaccagtgaagaggcaaggccagggctgagcctaagtcacaggcagaaaaaagacgcagaaacattggaataacgctccacacgcactgcttgattctgcgctagaaaccctgttatctccgaactgttggtgttattctgagttacagcaccagctcttttataaagaggaagacctgctccttctttaacagcagattcgtcaaaatacgtccaaggcaaggaaacctagaaaggcgtctgggcaggggaaagtcgatgcgagggcgggccagggacctttcgtcgcgtccccaccttggcatttcccgtggcgtgagcggccccggcatccgtgtcgaaagtgcggcggcggaacaggcgcgcaggagaggagcgggcaggcgcagacgcgcgggcgggaagatggcggctgggttcaaaaccgtggaacctctggagtattacaggagatttctgaaagagaactgccgtcctgatggaagagaacttggtgaattcagaaccacaactgtcaacatcggaatttgcagcaccatcaacagatgcccctgataaaggatacgttgttcctaatgtggatctaccacccctgtgttcatcgagattccggtctggacctcctggagaagaggcccaagtggctagccagttcattgcagatgtcattgaaaattcacagataattcagaaagaggacttatgcatttctccaggaaagcttgtctgggttctatactgtgatctcatttgcctcgactacgatggaaacattttggatgcctgcacatttgctttgctagcggctttaaaaaatgtacagttgcctgaagttactataaatgaagaaactgctttagcagaagttaatttaaagaagaaaagttatttgaatattagaactcatccagttgcaacttcctttgctgtgtttgatgacactttgcttatagttgaccctactggagaggaggaacatctggcaacaggaaccttaacaatagtaatggatgaggaaggcaaactctgttgtcttcacaaaccaggtggaagtgggctaactggagctaaacttcaggactgtatgagccgagcagttacaagacacaaagaagttaaaaaactgatggatgaagtaattaagagtatgaaacccaaataaacagccaccacattttcaaaacagatttgtaaaaattgtatttgttaacactgtgcacaaacgttttatactaaataaatatcaaactacattcttctga

SEQ ID NO: 348113 - DNA, 998 bp, Homo sapiens
atacgtagcagcactgcaagatggcggcggggttcaaaaggcgatgtagaccttggtcgtatcatgtggaccatttgctgatacctggatcctgacgttacctgttggaatgactacactctggtagaaatatacagaccgcaggaatgtcgagcgtttgttgtcacatatatctcaccagtgagagtggttgcagctctatagacgagagggtcgggactcactacgtgacatgccaatctgtgagagttaatcgcagtaattgcgcagccctgtcaaagatgcccctgataaaggatacgttgttcctaatgtggatctaccacccctgtgttcatcgagattccggtctggacctcctggagaagaggcccaagtggctagccagttcattgcagatgtcattgaaaattcacagataattcagaaagaggacttatgcatttctccaggaaagcttgtctgggttctatactgtgatctcatttgcctcgactacgatggaaacattttggatgcctgcacatttgctttgctagcggctttaaaaaatgtacagttgcctgaagttactataaatgaagaaactgctttagcagaagttaatttaaagaagaaaagttatttgaatattagaactcatccagttgcaacttcctttgctgtgtttgatgacactttgcttatagttgaccctactggagaggaggaacatctggcaacaggaaccttaacaatagtaatggatgaggaaggcaaactctgttgtcttcacaaaccaggtggaagtgggctaactggagctaaacttcaggactgtatgagccgagcagttacaagacacaaagaagttaaaaaactgatggatgaagtaattaagagtatgaaacccaaataaacagccaccacattttcaaaacagatttgtaaaaattgtatttgttaacactgtgcacaaacgttttatactaaataaatatcaaactacattcttctga

SEQ ID NO: 348114 - DNA, 777 bp, Homo sapiens
tgtattgcttctggaaagttcatttggggttacaacaactaggatgggtggggtgagatgttcagatctggagaaatgacgttgttcctaatgtggatctaccacccctgtgttcatcgagattccggtctggacctcctggagaagaggcccaagtggctagccagttcattgcagatgtcattgaaaattcacagataattcagaaagaggacttatgcatttctccaggaaagcttgtctgggttctatactgtgatctcatttgcctcgactacgatggaaacattttggatgcctgcacatttgctttgctagcggctttaaaaaatgtacagttgcctgaagttactataaatgaagaaactgctttagcagaagttaatttaaagaagaaaagttatttgaatattagaactcatccagttgcaacttcctttgctgtgtttgatgacactttgcttatagttgaccctactggagaggaggaacatctggcaacaggaaccttaacaatagtaatggatgaggaaggcaaactctgttgtcttcacaaaccaggtggaagtgggctaactggagctaaacttcaggactgtatgagccgagcagttacaagacacaaagaagttaaaaaactgatggatgaagtaattaagagtatgaaacccaaataaacagccaccacattttcaaaacagatttgtaaaaattgtatttgttaacactgtgcacaaacgttttatactaaataaatatcaaactacattcttctga

SEQ ID NO: 348115 - DNA, 1236 bp, Homo sapiens
agcccttgaccagtgaagaggcaaggccagggctgagcctaagtcacaggcagaaaaaagacgcagaaacattggaataacgctccacacgcactgcttgattctgcgctagaaaccctgttatctccgaactgttggtgttattctgagttacagcaccagctcttttataaagaggaagacctgctccttctttaacagcagattcgtcaaaatacgtccaaggcaaggaaacctagaaaggcgtctgggcaggggaaagtcgatgcgagggcgggccagggacctttcgtcgcgtccccaccttggcatttcccgtggcgtgagcggccccggcatccgtgtcgaaagtgcggcggcggaacaggcgcgcaggagaggagcgggcaggcgcagacgcgcgggcgggaagatggcggctgggttcaaaaccgtggaacctctggagtattacaggagatttctgaaagagaactgccgtcctgatggaagagaacttggtgaattcagaaccacaactgtcaacatcggttcaattagtaccgcagatggttctgctttagtgaagttgggaaatactacagtaatctgtggagttaaagcagaatttgcagcaccatcaacagatgcccctgataaaggatacgttgttcctaatgtggatctaccacccctgtgttcatcgagattccggtctggacctcctggagaagaggcccaagtggctagccagttcattgcagatgtcattgaaaattcacagataattcagaaagaggacttatgcatttctccaggaaagcttgtctgggttctatactgtgatctcatttgcctcgactacgatggaaacattttggatgcctgcacatttgctttgctagcggctttaaaaaatgtacagttgcctgaagttactataaatgaagaaactgctttagcagaagttaatttaaagaagaaaagttatttgaatattagaactcatccagttgcaacttcctttgctgtgtttgatgagtggaagtgggctaactggagctaaacttcaggactgtatgagccgagcagttacaagacacaaagaagttaaaaaactgatggatgaagtaattaagagtatgaaacccaaataaacagccaccacattttcaaaacagatttgtaaaaattgtatttgttaacactgtgcacaaacgttttatactaaataaatatcaaactacattcttctga

SEQ ID NO: 348116 - DNA, 1329 bp, Homo sapiens
agcccttgaccagtgaagaggcaaggccagggctgagcctaagtcacaggcagaaaaaagacgcagaaacattggaataacgctccacacgcactgcttgattctgcgctagaaaccctgttatctccgaactgttggtgttattctgagttacagcaccagctcttttataaagaggaagacctgctccttctttaacagcagattcgtcaaaatacgtccaaggcaaggaaacctagaaaggcgtctgggcaggggaaagtcgatgcgagggcgggccagggacctttcgtcgcgtccccaccttggcatttcccgtggcgtgagcggccccggcatccgtgtcgaaagtgcggcggcggaacaggcgcgcaggagaggagcgggcaggcgcagacgcgcgggcgggaagatggcggctgggttcaaaaccgtggaacctctggagtattacaggagatttctgaaagagaactgccgtcctgatggaagagaacttggtgaattcagaaccacaactgtcaacatcggttcaattagtaccgcagatggttctgctttagtgaagttgggaaatactacagtaatctgtggagttaaagcagaatttgcagcaccatcaacagatgcccctgataaaggatacgttgttcctaatgtggatctaccacccctgtgttcatcgagattccggtctggacctcctggagaagaggcccaagtggctagccagttcattgcagatgtcattgaaaattcacagataattcagaaagaggacttatgcatttctccaggaaagcttgtctgggttctatactgtgatctcatttgcctcgactacgatggaaacattttggatgcctgcacatttgctttgctagcggctttaaaaaatggtggaagtgggctaactggagctaaacttcaggactgtatgagccgagcagttacaagacacaaagaagttaaaaaactgatggatgaagtaattaagagtatgaaacccaaataaacagccaccacattttcaaaacagatttgtaaaaattgtatttgttaacactgtgcacaaacgttttatactaaataaatatcaaactacattcttctgaaagatgtttctattatttcttaggtcacttccatatatattatgtatagtgaaaccatttttaaaaagcaatgacttaggcaaaccaaccctagtttgttaaaccatttccctgtttttatttaaaaatgataaggttgtgcttctgtataaagtttgtacatctagcaatgtaaaatactgacacattaaaaaaaacaaaaagtagaaactca

SEQ ID NO: 348117 - DNA, 2676 bp, Homo sapiens
agcccttgaccagtgaagaggcaaggccagggctgagcctaagtcacaggcagaaaaaagacgcagaaacattggaataacgctccacacgcactgcttgattctgcgctagaaaccctgttatctccgaactgttggtgttattctgagttacagcaccagctcttttataaagaggaagacctgctccttctttaacagcagattcgtcaaaatacgtccaaggcaaggaaacctagaaaggcgtctgggcaggggaaagtcgatgcgagggcgggccagggacctttcgtcgcgtccccaccttggcatttcccgtggcgtgagcggccccggcatccgtgtcgaaagtgcggcggcggaacaggcgcgcaggagaggagcgggcaggcgcagacgcgcgggcgggaagatggcggctgggttcaaaaccgtggaacctctggagtattacaggagatttctgaaagagaactgccgtcctgatggaagagaacttggtgaattcagaaccacaactgtcaacatcggttcaattagtaccgcagatggttctgctttagtgaagttgggaaatactacagtaatctgtggagttaaagcagaatttgcagcaccatcaacagatgcccctgataaaggatacgttgattccggtctggacctcctggagaagaggcccaagtggctagccagttcattgcagatgtcattgaaaattcacagataattcagaaagaggacttatgcatttctccaggaaagcttgtctgggttctatactgtgatctcatttgcctcgactacgatggaaacattttggatgcctgcacatttgctttgctagcggctttaaaaaatgtacagttgcctgaagttactataaatgaagaaactgctttagcagaagttaatttaaagaagaaaagttatttgaatattagaactcatccagttgcaacttcctttgctgtgtttgatgacactttgcttatagttgaccctactggagaggaggaacatctggcaacaggaaccttaacaatagtaatggatgaggaaggcaaactctgttgtcttcacaaaccagaccaggcatgttcccgccacttcagtcctaaacatatgtagatgaaaactcagtgtgagccttaaattagggagggccaaatagaatatgggatattttatttacctaattttagtatagtttcttagctacctaaaatgttcttccatcttaatggtatatgtcagtggttcttaaacttaagacatacattagaatcacttggaggtcttgtgaaactaacttgtagatcttgagactgtaccctgatttacattatccaatttttttgttttataatttgacatgacattaatgttttttgaaaaggaatgataactgagattaaaagtattggcaaaataatttttcaggtggaagtgggctaactggagctaaacttcaggactgtatgagccgagcagttacaagacacaaagaagttaaaaaactgatggatgaagtaattaagagtatgaaacccaaataaacagccaccacattttcaaaacagatttgtaaaaattgtatttgttaacactgtgcacaaacgttttatactaaataaatatcaaactacattcttctgaaagatgtttctattatttcttaggtcacttccatatatattatgtatagtgaaaccatttttaaaaagcaatgacttaggcaaaccaaccctagtttgttaaaccatttccctgtttttatttaaaaatgataaggttgtgcttctgtataaagtttgtacatctagcaatgtaaaatactgacacattaaaaaaaacaaaaagtagaaactcaattcttttgattcagtgctcttgtgtttttaaaaaaaggaacaaaaagtaatgcaagactcaaaattttggagtggttggcgtgcctctcttcattttactttttgactggctgcctgtatgccgatgatgatgtagctgagctgtttgtgctgctgctgctgccatagccatttgatgctgcaagaatcgcaactgctgcaaaagggagggaaaaaaatcgagttatgttaaatgcaggcaggtgtagaaaggtgcttttcctgagtgacgaaacaacacaactgaaaaagggagaaagcaccaagataacaaaaagggactataccacattgagacaatgcacagtcaaacagcaccagtggcacagaagcctgctaagggctttaaaaatgattcttggcaaacttcaaaattatttgttactttgccctgccagtctatattgtagtaactcagcaacttcagttaccattttgttgtataatgatggtttatagcaatataaaacaaccctgaatatcaagatagtcaactataatatgctgactttccttcctaaaattatggtataacatttttctaaataaacaggtatgacatttactaataggaacacttttctgcagtaaaatattagaaagttaacaattggcacttacaactgtctttcaaaatatactgcatactagaaaaatgtatgttaatgtgccaccagcacttcatgaaaaatttatagagtatggcttaaatatacaaaatatattcagtgctccaagttgactggctaaaatgtcagacttt

SEQ ID NO: 348118 - DNA, 1343 bp, Homo sapiens
agcccttgaccagtgaagaggcaaggccagggctgagcctaagtcacaggcagaaaaaagacgcagaaacattggaataacgctccacacgcactgcttgattctgcgctagaaaccctgttatctccgaactgttggtgttattctgagttacagcaccagctcttttataaagaggaagacctgctccttctttaacagcagattcgtcaaaatacgtccaaggcaaggaaacctagaaaggcgtctgggcaggggaaagtcgatgcgagggcgggccagggacctttcgtcgcgtccccaccttggcatttcccgtggcgtgagcggccccggcatccgtgtcgaaagtgcggcggcggaacaggcgcgcaggagaggagcgggcaggcgcagacgcgcgggcgggaagatggcggctgggttcaaaaccgtggaacctctggagtattacaggagatttctgaaagagaactgccgtcctgatggaagagaacttggtgaattcagaaccacaactgtcaacatcggttcaattagtaccgcagatggttctgctttagtgaagttgggaaatactacagtaatctgtggagttaaagcagaatttgcagcaccatcaacagatgcccctgataaaggatacgttgttcctaatgtggatctaccacccctgtgttcatcgagattccggtctggacctcctggagaagaggcccaagtggctagccagttcattgcagatgtcattgaaaattcacagataattcagaaagaggacttatgcatttctccaggaaagcttgtctgggttctatactgtgatctcatttgcctcgactacgatggaaacattttggatgcctgcacatttgctttgctagcggctttaaaaaatgtacagttgcctgaagttactataaatgaagaaactgctttagcagaagttaatttaaagaagaaaagttatttgaatattagaactcatccagttgcaacttcctttgctgtgtttgatgacactttgcttatagttgaccctactggagaggaggaacatctggcaacaggaaccttaacaatagtaatggatgaggaaggcaaactctgttgtcttcacaaaccaggtggaagtgggctaactggagctaaacttcaggactgtatgagccgagcagttacaagacacaaagaagttaaaaaactgatggatgaagtaattaagagtatgaaacccaaataaacagccaccacattttcaaaacagatttgtaaaaattgtatttgttaacactgtgcacaaacgttttatactaaataaatatcaaactacattcttctga

SEQ ID NO: 348119 - DNA, 2360 bp, Homo sapiens
agcccttgaccagtgaagaggcaaggccagggctgagcctaagtcacaggcagaaaaaagacgcagaaacattggaataacgctccacacgcactgcttgattctgcgctagaaaccctgttatctccgaactgttggtgttattctgagttacagcaccagctcttttataaagaggaagacctgctccttctttaacagcagattcgtcaaaatacgtccaaggcaaggaaacctagaaaggcgtctgggcaggggaaagtcgatgcgagggcgggccagggacctttcgtcgcgtccccaccttggcatttcccgtggcgtgagcggccccggcatccgtgtcgaaagtgcggcggcggaacaggcgcgcaggagaggagcgggcaggcgcagacgcgcgggcgggaagatggcggctgggttcaaaaccgtggaacctctggagtattacaggagatttctgaaagagaactgccgtcctgatggaagagaacttggtgaattcagaaccacaactgtcaacatcggttcaattagtaccgcagatggttctgctttagtgaagttgggaaatactacagtaatctgtggagttaaagcagaatttgcagcaccatcaacagatgcccctgataaaggatacgttgttcctaatgtggatctaccacccctgtgttcatcgagattccggtctggacctcctggagaagaggcccaagtggctagccagttcattgcagatgtcattgaaaattcacagataattcagaaagaggacttatgcatttctccaggaaagcttgtctgggttctatactgtgatctcatttgcctcgactacgatggaaacattttggatgcctgcacatttgctttgctagcggctttaaaaaatgtacagttgcctgaagttactataaatgaagaaactgctttagcagaagttaatttaaagaagaaaagttatttgaatattagaactcatccagttgcaacttcctttgctgtgtttgatgacactttgcttatagttgaccctactggagaggaggaacatctggcaacaggaaccttaacaatagtaatggatgaggaaggcaaactctgttgtcttcacaaaccaggtggaagtgggctaactggagctaaacttcaggactgtatgagccgagcagttacaagacacaaagaagttaaaaaactgatggatgaagtaattaagagtatgaaacccaaataaacagccaccacattttcaaaacagatttgtaaaaattgtatttgttaacactgtgcacaaacgttttatactaaataaatatcaaactacattcttctgaaagatgtttctattatttcttaggtcacttccatatatattatgtatagtgaaaccatttttaaaaagcaatgacttaggcaaaccaaccctagtttgttaaaccatttccctgtttttatttaaaaatgataaggttgtgcttctgtataaagtttgtacatctagcaatgtaaaatactgacacattaaaaaaaacaaaaagtagaaactcaattcttttgattcagtgctcttgtgtttttaaaaaaaggaacaaaaagtaatgcaagactcaaaattttggagtggttggcgtgcctctcttcattttactttttgactggctgcctgtatgccgatgatgatgtagctgagctgtttgtgctgctgctgctgccatagccatttgatgctgcaagaatcgcaactgctgcaaaagggagggaaaaaaatcgagttatgttaaatgcaggcaggtgtagaaaggtgcttttcctgagtgacgaaacaacacaactgaaaaagggagaaagcaccaagataacaaaaagggactataccacattgagacaatgcacagtcaaacagcaccagtggcacagaagcctgctaagggctttaaaaatgattcttggcaaacttcaaaattatttgttactttgccctgccagtctatattgtagtaactcagcaacttcagttaccattttgttgtataatgatggtttatagcaatataaaacaaccctgaatatcaagatagtcaactataatatgctgactttccttcctaaaattatggtataacatttttctaaataaacaggtatgacatttactaataggaacacttttctgcagtaaaatattagaaagttaacaattggcacttacaactgtctttcaaaatatactgcatactagaaaaatgtatgttaatgtgccaccagcacttcatgaaaaatttatagagtatggcttaaatatacaaaatatattcagtgctccaagttgactggctaaaatgtcagacttt

SEQ ID NO: 348120 - DNA, 2713 bp, Homo sapiens
agcccttgaccagtgaagaggcaaggccagggctgagcctaagtcacaggcagaaaaaagacgcagaaacattggaataacgctccacacgcactgcttgattctgcgctagaaaccctgttatctccgaactgttggtgttattctgagttacagcaccagctcttttataaagaggaagacctgctccttctttaacagcagattcgtcaaaatacgtccaaggcaaggaaacctagaaaggcgtctgggcaggggaaagtcgatgcgagggcgggccagggacctttcgtcgcgtccccaccttggcatttcccgtggcgtgagcggccccggcatccgtgtcgaaagtgcggcggcggaacaggcgcgcaggagaggagcgggcaggcgcagacgcgcgggcgggaagatggcggctgggttcaaaaccgtggaacctctggagtattacaggagatttctgaaagagaactgccgtcctgatggaagagaacttggtgaattcagaaccacaactgtcaacatcggttcaattagtaccgcagatggttctgctttagtgaagttgggaaatactacagtaatctgtggagttaaagcagaatttgcagcaccatcaacagatgcccctgataaaggatacgttgttcctaatgtggatctaccacccctgtgttcatcgagattccggtctggacctcctggagaagaggcccaagtggctagccagttcattgcagatgtcattgaaaattcacagataattcagaaagaggacttatgcatttctccaggaaagcttgtctgggttctatactgtgatctcatttgcctcgactacgatggaaacattttggatgcctgcacatttgctttgctagcggctttaaaaaatgtacagttgcctgaagttactataaatgaagaaactgctttagcagaagttaatttaaagaagaaaagttatttgaatattagaactcatccagttgcaacttcctttgctgtgtttgatgacactttgcttatagttgaccctactggagaggaggaacatctggcaacaggaaccttaacaatagtaatggatgaggaaggcaaactctgttgtcttcacaaaccagaccaggcatgttcccgccacttcagtcctaaacatatgtagatgaaaactcagtgtgagccttaaattagggagggccaaatagaatatgggatattttatttacctaattttagtatagtttcttagctacctaaaatgttcttccatcttaatggtatatgtcagtggttcttaaacttaagacatacattagaatcacttggaggtcttgtgaaactaacttgtagatcttgagactgtaccctgatttacattatccaatttttttgttttataatttgacatgacattaatgttttttgaaaaggaatgataactgagattaaaagtattggcaaaataatttttcaggtggaagtgggctaactggagctaaacttcaggactgtatgagccgagcagttacaagacacaaagaagttaaaaaactgatggatgaagtaattaagagtatgaaacccaaataaacagccaccacattttcaaaacagatttgtaaaaattgtatttgttaacactgtgcacaaacgttttatactaaataaatatcaaactacattcttctgaaagatgtttctattatttcttaggtcacttccatatatattatgtatagtgaaaccatttttaaaaagcaatgacttaggcaaaccaaccctagtttgttaaaccatttccctgtttttatttaaaaatgataaggttgtgcttctgtataaagtttgtacatctagcaatgtaaaatactgacacattaaaaaaaacaaaaagtagaaactcaattcttttgattcagtgctcttgtgtttttaaaaaaaggaacaaaaagtaatgcaagactcaaaattttggagtggttggcgtgcctctcttcattttactttttgactggctgcctgtatgccgatgatgatgtagctgagctgtttgtgctgctgctgctgccatagccatttgatgctgcaagaatcgcaactgctgcaaaagggagggaaaaaaatcgagttatgttaaatgcaggcaggtgtagaaaggtgcttttcctgagtgacgaaacaacacaactgaaaaagggagaaagcaccaagataacaaaaagggactataccacattgagacaatgcacagtcaaacagcaccagtggcacagaagcctgctaagggctttaaaaatgattcttggcaaacttcaaaattatttgttactttgccctgccagtctatattgtagtaactcagcaacttcagttaccattttgttgtataatgatggtttatagcaatataaaacaaccctgaatatcaagatagtcaactataatatgctgactttccttcctaaaattatggtataacatttttctaaataaacaggtatgacatttactaataggaacacttttctgcagtaaaatattagaaagttaacaattggcacttacaactgtctttcaaaatatactgcatactagaaaaatgtatgttaatgtgccaccagcacttcatgaaaaatttatagagtatggcttaaatatacaaaatatattcagtgctccaagttgactggctaaaatgtcagacttt

SEQ ID NO: 348121 - DNA, 951 bp, Homo sapiens
aaaaaaaaaaaaaaaaaaagatgggggctgggttcaaaaccgtggaacctctggagtattacaggagatttctgaaagagaactgccgtcctgatggaagagaacttggtgaattcagaaccacaactgtcaacatcggttcaattagtaccgcagatggttctgctttagtgaagttgggaaatactacagtaatctgtggagttaaagcagaatttgcagcaccatcaacagatgcccctgataaaggatacgttgttcctaatgtggatctaccacccctgtgttcatcgagattccggtctggacctcctggagaagaggcccaagtggctagccagttcattgcagatgtcattgaaaattcacagataattcagaaagaggacttatgcatttctccaggaaagcttgtctgggttctatactgtgatctcatttgcctcgactacgatggaaacattttggatgcctgcacatttgctttgctagcggctttaaaaaatgtacagttgcctgaagttactataaatgaagaaactgctttagcagaagttaatttaaagaagaaaagttatttgaatattagaactcatccagttgcaacttcctttgctgtgtttgatgacactttgcttatagttgaccctactggagaggaggaacatctggcaacaggaaccttaacaatagtaatggatgaggaaggcaaactctgttgtcttcacaaaccaggtggaagtgggctaactggagctaaacttcaggactgtatgagccgagcagttacaagacacaaagaagttaaaaaactgatggatgaagtaattaagagtatgaaacccaaataaacagccaccacattttcaaaacagatttgtaaaaattgtatttgttaacactgtgcacaaacgttttatactaaataaatatcaaactacattcttctga

SEQ ID NO: 348122 - DNA, 1306 bp, Homo sapiens
agcccttgaccagtgaagaggcaaggccagggctgagcctaagtcacaggcagaaaaaagacgcagaaacattggaataacgctccacacgcactgcttgattctgcgctagaaaccctgttatctccgaactgttggtgttattctgagttacagcaccagctcttttataaagaggaagacctgctccttctttaacagcagattcgtcaaaatacgtccaaggcaaggaaacctagaaaggcgtctgggcaggggaaagtcgatgcgagggcgggccagggacctttcgtcgcgtccccaccttggcatttcccgtggcgtgagcggccccggcatccgtgtcgaaagtgcggcggcggaacaggcgcgcaggagaggagcgggcaggcgcagacgcgcgggcgggaagatggcggctgggttcaaaaagagaactgccgtcctgatggaagagaacttggtgaattcagaaccacaactgtcaacatcggttcaattagtaccgcagatggttctgctttagtgaagttgggaaatactacagtaatctgtggagttaaagcagaatttgcagcaccatcaacagatgcccctgataaaggatacgttgttcctaatgtggatctaccacccctgtgttcatcgagattccggtctggacctcctggagaagaggcccaagtggctagccagttcattgcagatgtcattgaaaattcacagataattcagaaagaggacttatgcatttctccaggaaagcttgtctgggttctatactgtgatctcatttgcctcgactacgatggaaacattttggatgcctgcacatttgctttgctagcggctttaaaaaatgtacagttgcctgaagttactataaatgaagaaactgctttagcagaagttaatttaaagaagaaaagttatttgaatattagaactcatccagttgcaacttcctttgctgtgtttgatgacactttgcttatagttgaccctactggagaggaggaacatctggcaacaggaaccttaacaatagtaatggatgaggaaggcaaactctgttgtcttcacaaaccaggtggaagtgggctaactggagctaaacttcaggactgtatgagccgagcagttacaagacacaaagaagttaaaaaactgatggatgaagtaattaagagtatgaaacccaaataaacagccaccacattttcaaaacagatttgtaaaaattgtatttgttaacactgtgcacaaacgttttatactaaataaatatcaaactacattcttctga

SEQ ID NO: 348123 - DNA, 1382 bp, Homo sapiens
agcccttgaccagtgaagaggcaaggccagggctgagcctaagtcacaggcagaaaaaagacgcagaaacattggaataacgctccacacgcactgcttgattctgcgctagaaaccctgttatctccgaactgttggtgttattctgagttacagcaccagctcttttataaagaggaagacctgctccttctttaacagcagattcgtcaaaatacgtccaaggcaaggaaacctagaaaggcgtctgggcaggggaaagtcgatgcgagggcgggccagggacctttcgtcgcgtccccaccttggcatttcccgtggcgtgagcggccccggcatccgtgtcgaaagtgcggcggcggaacaggcgcgcaggagaggagcgggcaggcgcagacgcgcgggcgggaagatggcggctgggttcaaaaccgtggaacctctggagtattacaggagatttctgaaagagaactgccgtcctgatggaagagaacttggtgaattcagaaccacaactgtcaacatcggttcaattagtaccgcagatggttctgctttagtgaagttgggaaatactacagtaatctgtggagttaaagcatagcttctttcaataggaaacatttctttgctactataggaatttgcagcaccatcaacagatgcccctgataaaggatacgttgttcctaatgtggatctaccacccctgtgttcatcgagattccggtctggacctcctggagaagaggcccaagtggctagccagttcattgcagatgtcattgaaaattcacagataattcagaaagaggacttatgcatttctccaggaaagcttgtctgggttctatactgtgatctcatttgcctcgactacgatggaaacattttggatgcctgcacatttgctttgctagcggctttaaaaaatgtacagttgcctgaagttactataaatgaagaaactgctttagcagaagttaatttaaagaagaaaagttatttgaatattagaactcatccagttgcaacttcctttgctgtgtttgatgacactttgcttatagttgaccctactggagaggaggaacatctggcaacaggaaccttaacaatagtaatggatgaggaaggcaaactctgttgtcttcacaaaccaggtggaagtgggctaactggagctaaacttcaggactgtatgagccgagcagttacaagacacaaagaagttaaaaaactgatggatgaagtaattaagagtatgaaacccaaataaacagccaccacattttcaaaacagatttgtaaaaattgtatttgttaacactgtgcacaaacgttttatactaaataaatatcaaactacattcttctga

SEQ ID NO: 348124 - DNA, 3026 bp, Homo sapiens
  misc_feature (1185)..(1185): n is a, c, g, or t
  misc_feature (1548)..(1548): n is a, c, g, or t
  misc_feature (1584)..(1584): n is a, c, g, or t
agcccttgaccagtgaagaggcaaggccagggctgagcctaagtcacaggcagaaaaaagacgcagaaacattggaataacgctccacacgcactgcttgattctgcgctagaaaccctgttatctccgaactgttggtgttattctgagttacagcaccagctcttttataaagaggaagacctgctccttctttaacagcagattcgtcaaaatacgtccaaggcaaggaaacctagaaaggcgtctgggcaggggaaagtcgatgcgagggcgggccagggacctttcgtcgcgtccccaccttggcatttcccgtggcgtgagcggccccggcatccgtgtcgaaagtgcggcggcggaacaggcgcgcaggagaggagcgggcaggcgcagacgcgcgggcgggaagatggcggctgggttcaaaaccgtggaacctctggagtattacaggagatttctgaaagagaactgccgtcctgatggaagagaacttggtgaattcagaaccacaactgtcaacatcggttcaattagtaccgcagatggttctgctttagtgaagttgggaaatactacagtaatctgtggagttaaagcagtaagtctaaatatgtcctattgagatttgagttacaaagttagctttatttattagattgtaatatacacctgtaattctactcttgatttggtagttgggtgtcaatttttaatgtttaatttcccaagagctttcactatgagtgttagataatatgacccaagtttaatgactaagtgaacaattgtcaaatgtagcaaaatgaaacaacttttaaaatctgagtcaccattttaaaaaaattgttatatcatttgagacattaacagatttttggtgacatccttttagccagtgatgacatgtaatctgtgtaaatgtgtagaaaattgaaattgttgaaaagaaaaatttgagggaatactggctaccatttactgagtacttgctatgttccagacacctttttaggtgctttacagaattatccactttaatgcctataacaatcatttgttacttgtcttcacctcctgttttacagatgactttcagtaacctgtccaggtacataagactcataagtaaaacttagacataaatctgactccaaagcctgtgcttctttgactacagtntaccctgtgttatttaacctcagttgagattcttctttcgtaaacctggagtgatgtataacagtaagatttgagaacttgctccttgtcaggttttatgcctgggatttaacaggtctatctcatttggcccttattaacagtccctaggagtagacactattttcttcccatttgacaagatgaggagtttaaggtaagaggttaaataacttgcctgaagtctctcagccagtaagtatggctctgacatttgaactggcttagtaattgcagagcatttgcttttttttttttttgagacggagtcttgctctgtcgcccaggctggagtgcagtggcacgatgtcagctcactgcaanttccgtctcctgggttgaagtgattctcctgcctcngcctcccaagtagctgggattacaggcgcccgccaccatgcctggctaatttttgtatttttagtagagacggggttttgccatcttggccaggctggtctcaaactcctgacctcaggtgatccgcccgcctctgtgtcccaaagtgctgggattaccggtgtgagccaccgcgcccagctgagcttttgctctttaccactaaagcagcagttcctaaatcttgctctatcatctggagaacaaattaagattcttggctagtagttgggggcacaaacccagttactattttttaaaagatctccaggtaatcttgccgagcagcactgtagtgtagtccactgtactgtagtgccttcttatcttgtagagctattgtgaggatcagcaccaatgtccgtagaggccctgacacaattccctaagctgatatttgatagagccttccataactgattgctaaattgtcttcataatttttcagtagcttctttcaataggaaacatttctttgctactataggaatttgcagcaccatcaacagatgcccctgataaaggatacgttgattccggtctggacctcctggagaagaggcccaagtggctagccagttcattgcagatgtcattgaaaattcacagataattcagaaagaggacttatgcatttctccaggaaagcttgtctgggttctatactgtgatctcatttgcctcgactacgatggaaacattttggatgcctgcacatttgctttgctagcggctttaaaaaatgtacagttgcctgaagttactataaatgaagaaactgctttagcagaagttaatttaaagaagaaaagttatttgaatattagaactcatccagttgcaacttcctttgctgtgtttgatgacactttgcttatagttgaccctactggagaggaggaacatctggcaacaggaaccttaacaatagtaatggatgaggaaggcaaactctgttgtcttcacaaaccaggtggaagtgggctaactggagctaaacttcaggactgtatgagccgagcagttacaagacacaaagaagttaaaaaactgatggatgaagtaattaagagtatgaaacccaaataaacagccaccacattttcaaaacagatttgtaaaaattgtatttgttaacactgtgcacaaacgttttatactaaataaatatcaaactacattcttctgaaagatgtttctattatttcttaggtcacttccatatatattatgtatagtgaaaccatttttaaaaagcaatgacttaggcaaaccaaccctagtttgttaaaccatttccctgtttttatttaaaaatgataaggttgtgcttctgtataaagtttgtacatctagcaatgtaaaatactgacacattaaaaaaaacaaaaagtagaaactca

SEQ ID NO: 348125 - DNA, 2266 bp, Homo sapiens
aaaaaaaaaaaaaaaaaaagatgggggctgggttcaaaaccgtggaacctctggagtattacaggagatttctgaaagagaactgccgtcctgatggaagagaacttggtgaattcagaaccacaactgtcaacatcggttcaattagtaccgcagatggttctgctttagtgaagttgggaaatactacagtaatctgtggagttaaagcagaatttgcagcaccatcaacagatgcccctgataaaggatacgttgttcctaatgtggatctaccacccctgtgttcatcgagattccggtctggacctcctggagaagaggcccaagtggctagccagttcattgcagatgtcattgaaaattcacagataattcagaaagaggacttatgcatttctccaggaaagcttgtctgggttctatactgtgatctcatttgcctcgactacgatggaaacattttggatgcctgcacatttgctttgctagcggctttaaaaaatgtacagttgcctgaagttactataaatgaagaaactgctttagcagaagttaatttaaagaagaaaacactttgcttatagttgaccctactggagaggaggaacatctggcaacaggaaccttaacaatagtaatggatgaggaaggcaaactctgttgtcttcacaaaccagaccaggcatgttcccgccacttcagtcctaaacatatgtagatgaaaactcagtgtgagccttaaattagggagggccaaatagaatatgggatattttatttacctaattttagtatagtttcttagctacctaaaatgttcttccatcttaatggtatatgtcagtggttcttaaacttaagacatacattagaatcacttggaggtcttgtgaaactaacttgtagatcttgagactgtaccctgatttacattatccaatttttttgttttataatttgacatgacattaatgttttttgaaaaggaatgataactgagattaaaagtattggcaaaataatttttcaggtggaagtgggctaactggagctaaacttcaggactgtatgagccgagcagttacaagacacaaagaagttaaaaaactgatggatgaagtaattaagagtatgaaacccaaataaacagccaccacattttcaaaacagatttgtaaaaattgtatttgttaacactgtgcacaaacgttttatactaaataaatatcaaactacattcttctgaaagatgtttctattatttcttaggtcacttccatatatattatgtatagtgaaaccatttttaaaaagcaatgacttaggcaaaccaaccctagtttgttaaaccatttccctgtttttatttaaaaatgataaggttgtgcttctgtataaagtttgtacatctagcaatgtaaaatactgacacattaaaaaaaacaaaaagtagaaactcaattcttttgattcagtgctcttgtgtttttaaaaaaaggaacaaaaagtaatgcaagactcaaaattttggagtggttggcgtgcctctcttcattttactttttgactggctgcctgtatgccgatgatgatgtagctgagctgtttgtgctgctgctgctgccatagccatttgatgctgcaagaatcgcaactgctgcaaaagggagggaaaaaaatcgagttatgttaaatgcaggcaggtgtagaaaggtgcttttcctgagtgacgaaacaacacaactgaaaaagggagaaagcaccaagataacaaaaagggactataccacattgagacaatgcacagtcaaacagcaccagtggcacagaagcctgctaagggctttaaaaatgattcttggcaaacttcaaaattatttgttactttgccctgccagtctatattgtagtaactcagcaacttcagttaccattttgttgtataatgatggtttatagcaatataaaacaaccctgaatatcaagatagtcaactataatatgctgactttccttcctaaaattatggtataacatttttctaaataaacaggtatgacatttactaataggaacacttttctgcagtaaaatattagaaagttaacaattggcacttacaactgtctttcaaaatatactgcatactagaaaaatgtatgttaatgtgccaccagcacttcatgaaaaatttatagagtatggcttaaatatacaaaatatattcagtgctccaagttgactggctaaaatgtcagacttt

SEQ ID NO: 348126 - DNA, 1020 bp, Homo sapiens
agcgggtttccaggagggagcggcctttgctcagcgcgagacggctgggcgccgagtgggacagcgctggtgcggagactgcttccggactccaggtaccgcgcttggcggcagctggccccagacttctgtcttttcagctgcagtgaaggctcggggctgcagaattgcaaccttgccaatggacctgatcggttttggttatgcagccctcgtgacatttggaagcatttttggatataagcggagaggtggtgttccgtctttgattgctggtctttttgttggatgtttggccggctatggagcttaccgtgtctccaatgacaaacgagatgtaaaagtgtcactgtttacagctttcttcctggctaccataatgggtgtgagatttaagaggtccaagaaaataatgcctgctggtttggttgcaggtttaagcctcatgatgatcctgagacttgtcttgttgctgctctgagcatctggaggaacagaaaactaagttcatgtcatcctgctgtaatgggcagagcatattttttttgtatttaaaagataaacttcaatatggaatgctagaaacacaaatagcactgtcacctctaatatgaacattagtttgaggtagtttttttctaaagcaaaaattttaactgttttctaattgtcaagcactattttcattaaaagtgtctaatgaatcatgatatactcttccatttgttgtgtctattttttatatatttggtattttttgaaaattccaaatactcatgtctcaagtaagcttaaactacaacttgtcacataaaggaagtcttaagtggagttcacagaatgataatgtatctatttgtcatttgtgttatatttgaaattattagaaattatgctttttccattttaattgtattgctgccagtgctatttttttctttaaaaaattttattcttagcacactgttatgtcctaactgaatgtattcagtattcaaataaaagacattttggttcaaa

SEQ ID NO: 348127 - DNA, 1059 bp, Homo sapiens
cttccggactccaggtaccgcgcttgggcgactgcgccccagacttctgtcttttcagctgcagtgaaggctcggggctgcaggctggagtgcagtgggacagcgctggtgcggagactgcttccggactccaggtaccgcgcttggcggcagctggccccagacttctgtcttttcagctgcagtgaaggctcggggctgcagaattgcaaccttgccaatggacctgatcggttttggttatgcagccctcgtgacatttggaagcatttttggatataagcggagaggtggtgttccgtctttgattgctggtctttttgttggatgtttggccggctatggagcttaccgtgtctccaatgacaaacgagatgtaaaagtgtcactgtttacagctttcttcctggctaccataatgggtgtgagatttaagaggtccaagaaaataatgcctgctggtttggttgcaggtttaagcctcatgatgatcctgagacttgtcttgttgctgctctgagcatctggaggaacagaaaactaagttcatgtcatcctgctgtaatgggcagagcatattttttttgtatttaaaagataaacttcaatatggaatgctagaaacacaaatagcactgtcacctctaatatgaacattagtttgaggtagtttttttctaaagcaaaaattttaactgttttctaattgtcaagcactattttcattaaaagtgtctaatgaatcatgatatactcttccatttgttgtgtctattttttatatatttggtattttttgaaaattccaaatactcatgtctcaagtaagcttaaactacaacttgtcacataaaggaagtcttaagtggagttcacagaatgataatgtatctatttgtcatttgtgttatatttgaaattattagaaattatgctttttccattttaattgtattgctgccagtgctatttttttctttaaaaaattttattcttagcacactgttatgtcctaactgaatgtattcagtattcaaataaaagacattttggttcaaa

SEQ ID NO: 348128 - DNA, 690 bp, Homo sapiens
aagaaaaaaaaaaggaagaaaaaatgaagtagggtttatggatccggaagaaggcctcagttaatagaaagtagctgagattgaattagtaactgccccaagttggtcctcgattattttttcaagttgctttattttactagcttctgaaagtttgtttcttcccaaacctttctcttataaaccctcatccaaggttttcagaacaacaggttctgatttttccttattcatttagcgaacattttaaagtggctaattcagttatgtctgggatgttttaatcctccaaggggttgagctgggagagcccccaagccaaggattagtaacactactgggtaggcgagtgcatggccctttctgtcttatgccagataaaagtgactctccctttgtctttgttttattttaaatccagcctcatgatgatcctgagacttgtcttgttgctgctctgagcatctggaggaacagaaaactaagttcatgtcatcctgctgtaatgggcagagcatattttttttgtatttaaaagataaacttcaatatggaatgctagaaacacaaatagcactgtcacctctaatatgaacattagtttgaggtagtttttttctaaagcaaaaattttaactgttttctaattgtcaagcactattttcattaaaagtgtctaatgaatcatga

SEQ ID NO: 348129 - DNA, 1109 bp, Homo sapiens
agcgggtttccaggagggagcggcctttgctcagcgcgagacggctgggcgccgagtgggacagcgctggtgcggagactgcttccggactccaggtaccgcgcttggcggcagctggccccagacttctgtcttttcagctgcagtgaaggctcggggctgcagaattgcaaccttgccaatggacctgatcggttttggttatgcagccctcgtgacatttggaagcatttttggatataagcggagaggtggtgttccgtctttgattgctggtctttttgttggatgtttggccggctatggagcttaccgtgtctccaatgacaaacgagatgtaaaagtgtcactgtttacagctttcttcctggctaccataatgggtgtgagatttaagaggtccaagaaaataatgcctgctggtttggttgcaggtttaagcctcatgatgatcctgagacttgtcttgttgctgctctgagcatctggaggaacagaaaactaagttcatgtcatcctgctgtaatgggcagagcatattttttttgtatttaaaagataaacttcaatatggaatgctagaaacacaaatagcactgtcacctctaatatgaacattagtttgaggtagtttttttctaaagcaaaaattttaactgttttctaattgtcaagcactattttcattaaaagtgtctaatgaatcatgatatactcttccatttgttgtgtctattttttatatatttggtattttttgaaaattccaaatactcatgtctcaagtaagcttaaactacaacttgtcacataaaggaagtcttaagtggagttcacagaatgataatgtatctatttgtcatttgtgttatatttgaaattattagaaattatgctttttccattttaattgtattgctgccagtgctatttttttctttaaaaaattttattcttagcacactgttatgtcctaactgaatgtattcagtattcaaataaaagacattttggttcaaaaatgacaaatagatacattatcattctgtgaactccacttaagacttcctttatgtgacgtcgacgcggccgcgaatttagtagtagta

SEQ ID NO: 348130 - DNA, 710 bp, Homo sapiens
agcgggtttccaggagggagcggcctttgctcagcgcgagacggctgggcgccgagtgggacagcgctggtgcggagactgcttccggactccaggtaccgcgcttggcggcagctggccccagacttctgtcttttcagctgcagtgaaggctcggggctgcagaattgcaaccttgccaatggacctgatcggttttggttatgcagccctcgtgacatttggaagcatttttggatataagcggagaggtggtgttccgtctttgattgctggtctttttgttggatgtttggccggctatggagcttaccgtgtctccaatgacaaacgagatgtaaaagtgtcactgtttacagctttcttcctggctaccataatgggtgtgagatttaagaggtccaagaaaataatgcctgctggtttggttgcaggtttaagcctcatgatgatcctgagacttgtcttgttgctgctctgagcatctggaggaacagaaaactaagttcatgtcatcctgctgtaatgggcagagcatattttttttgtatttaaaagataaacttcaatatggaatgctagaaacacaaatagcactgtcacctctaatatgaacattagtttgaggtagtttttttctaaagcaaaaattttaactgttttctaattgtcaagcactattttcattaaaagtgtctaatgaatcatga

SEQ ID NO: 348131 - DNA, 1144 bp, Homo sapiens
agcgggtttccaggagggagcggcctttgctcagcgcgagacggctgggcgccgagtgggacagcgctggtgcggagactgcttccggactccaggtaccgcgcttggcggcagctggccccagacttctgtcttttcagctgcagtgaaggctcggggctgcaggctggagtgcagtggcacgactcacagttgattgcaacctctgcctcgcaggttcaagggattttccggtctcagcctcctgagtagctgggattacagacatgcaccaccatgccacgtccggaattgcaaccttgccaatggacctgatcggttttggttatgcagccctcgtgacatttggaagcatttttggatataagcggagaggtggtgttccgtctttgattgctggtctttttgttggatgtttggccggctatggagcttaccgtgtctccaatgacaaacgagatgtaaaagtgtcactgtttacagctttcttcctggctaccataatgggtgtgagatttaagaggtccaagaaaataatgcctgctggtttggttgcaggtttaagcctcatgatgatcctgagacttgtcttgttgctgctctgagcatctggaggaacagaaaactaagttcatgtcatcctgctgtaatgggcagagcatattttttttgtatttaaaagataaacttcaatatggaatgctagaaacacaaatagcactgtcacctctaatatgaacattagtttgaggtagtttttttctaaagcaaaaattttaactgttttctaattgtcaagcactattttcattaaaagtgtctaatgaatcatgatatactcttccatttgttgtgtctattttttatatatttggtattttttgaaaattccaaatactcatgtctcaagtaagcttaaactacaacttgtcacataaaggaagtcttaagtggagttcacagaatgataatgtatctatttgtcatttgtgttatatttgaaattattagaaattatgctttttccattttaattgtattgctgccagtgctatttttttctttaaaaaattttattcttagcacactgttatgtcctaactgaatgtattcagtattcaaataaaagacattttggttcaaa

SEQ ID NO: 348132 - DNA, 851 bp, Homo sapiens
  misc_feature (4)..(4): n is a, c, g, or t
  misc_feature (17)..(17): n is a, c, g, or t
  misc_feature (46)..(47): n is a, c, g, or t
aaanctcattcaactanaggtgagatataaattggtacatgcgtcnnttaaaagcggggcacagcgtcagtgagtggtggatgtggtgttccgtctttgattgctggtctttttgttggatgtttggccggctatggagcttaccgtgtctccaatgacaaacgagatgtaaaagtgtcactgtttacagctttcttcctggctaccataatgggtgtgagatttaagaggtccaagaaaataatgcctgctggtttggttgcaggtttaagcctcatgatgatcctgagacttgtcttgttgctgctctgagcatctggaggaacagaaaactaagttcatgtcatcctgctgtaatgggcagagcatattttttttgtatttaaaagataaacttcaatatggaatgctagaaacacaaatagcactgtcacctctaatatgaacattagtttgaggtagtttttttctaaagcaaaaattttaactgttttctaattgtcaagcactattttcattaaaagtgtctaatgaatcatgatatactcttccatttgttgtgtctattttttatatatttggtattttttgaaaattccaaatactcatgtctcaagtaagcttaaactacaacttgtcacataaaggaagtcttaagtggagttcacagaatgataatgtatctatttgtcatttgtgttatatttgaaattattagaaattatgctttttccattttaattgtattgctgccagtgctatttttttctttaaaaaattttattcttagcacactgttatgtcctaactgaatgtattcagtattcaaataaaagacattttggttcaaa

SEQ ID NO: 348133 - DNA, 798 bp, Homo sapiens
gagctggtccggctgatcttgccggagaggtggtgttccgtctttgattgctggtctttttgttggatgtttggccggctatggagcttaccgtgtctccaatgacaaacgagatgtaaaagtgtcactgtttacagctttcttcctggctaccataatgggtgtgagatttaagaggtccaagaaaataatgcctgctggtttggttgcaggtttaagcctcatgatgatcctgagacttgtcttgttgctgctctgagcatctggaggaacagaaaactaagttcatgtcatcctgctgtaatgggcagagcatattttttttgtatttaaaagataaacttcaatatggaatgctagaaacacaaatagcactgtcacctctaatatgaacattagtttgaggtagtttttttctaaagcaaaaattttaactgttttctaattgtcaagcactattttcattaaaagtgtctaatgaatcatgatatactcttccatttgttgtgtctattttttatatatttggtattttttgaaaattccaaatactcatgtctcaagtaagcttaaactacaacttgtcacataaaggaagtcttaagtggagttcacagaatgataatgtatctatttgtcatttgtgttatatttgaaattattagaaattatgctttttccattttaattgtattgctgccagtgctatttttttctttaaaaaattttattcttagcacactgttatgtcctaactgaatgtattcagtattcaaataaaagacattttggttcaaa

SEQ ID NO: 348134 - DNA, 721 bp, Homo sapiens
caagcattgataacatgtttgaaactctggttcatgaattagtttggttttcagttacagctttcttcctggctaccataatgggtgtgagatttaagaggtccaagaaaataatgcctgctggtttggttgcaggtttaagcctcatgatgatcctgagacttgtcttgttgctgctctgagcatctggaggaacagaaaactaagttcatgtcatcctgctgtaatgggcagagcatattttttttgtatttaaaagataaacttcaatatggaatgctagaaacacaaatagcactgtcacctctaatatgaacattagtttgaggtagtttttttctaaagcaaaaattttaactgttttctaattgtcaagcactattttcattaaaagtgtctaatgaatcatgatatactcttccatttgttgtgtctattttttatatatttggtattttttgaaaattccaaatactcatgtctcaagtaagcttaaactacaacttgtcacataaaggaagtcttaagtggagttcacagaatgataatgtatctatttgtcatttgtgttatatttgaaattattagaaattatgctttttccattttaattgtattgctgccagtgctatttttttctttaaaaaattttattcttagcacactgttatgtcctaactgaatgtattcagtattcaaataaaagacattttggttcaaa

SEQ ID NO: 348135 - DNA, 1000 bp, Homo sapiens
aagaaaaaaaaaaggaagaaaaaatgaagtagggtttatggatccggaagaaggcctcagttaatagaaagtagctgagattgaattagtaactgccccaagttggtcctcgattattttttcaagttgctttattttactagcttctgaaagtttgtttcttcccaaacctttctcttataaaccctcatccaaggttttcagaacaacaggttctgatttttccttattcatttagcgaacattttaaagtggctaattcagttatgtctgggatgttttaatcctccaaggggttgagctgggagagcccccaagccaaggattagtaacactactgggtaggcgagtgcatggccctttctgtcttatgccagataaaagtgactctccctttgtctttgttttattttaaatccagcctcatgatgatcctgagacttgtcttgttgctgctctgagcatctggaggaacagaaaactaagttcatgtcatcctgctgtaatgggcagagcatattttttttgtatttaaaagataaacttcaatatggaatgctagaaacacaaatagcactgtcacctctaatatgaacattagtttgaggtagtttttttctaaagcaaaaattttaactgttttctaattgtcaagcactattttcattaaaagtgtctaatgaatcatgatatactcttccatttgttgtgtctattttttatatatttggtattttttgaaaattccaaatactcatgtctcaagtaagcttaaactacaacttgtcacataaaggaagtcttaagtggagttcacagaatgataatgtatctatttgtcatttgtgttatatttgaaattattagaaattatgctttttccattttaattgtattgctgccagtgctatttttttctttaaaaaattttattcttagcacactgttatgtcctaactgaatgtattcagtattcaaataaaagacattttggttcaaa

SEQ ID NO: 348136 - DNA, 672 bp, Homo sapiens
agcgggtttccaggagggagcggcctttgctcagcgcgagacggctgggcgccgagtgggacagcgctggtgcggagactgcttccggactccaggtaccgcgcttggcggcagctggccccagacttctgtcttttcagctgcagtgaaggctcggggctgcagaattgcaaccttgccaatggacctgatcggttttggttatgcagccctcgtgacatttggaagcatttttggatataagcggagaggtggtgttccgtctttgattgctggtctttttgttggatgtttggccggctatggagcttaccgtgtctccaatgacaaacgagatgtaaaagtgtcactgtttacagctttcttcctggctaccataatgggtgtgagatttaagaggtccaagaaaataatgcctgctggtttggttgcaggtttaagcctcatgatgatcctgagacttgtcttgttgctgctctgagcatctggaggaacagaaaactaagttcatgtcatcctgctgtaatgggcagagcatattttttttgtatttaaaagataaacttcaatatggaattgctatttttttctttaaaaaattttattcttagcacactgttatgtcctaactgaatgtattcagtattcaaataaaagacattttggttcaaa

SEQ ID NO: 348137 - DNA, 710 bp, Homo sapiens
agcgggtttccaggagggagcggcctttgctcagcgcgagacggctgggcgccgagtgggacagcgctggtgcggagactgcttccggactccaggtaccgcgcttggcggcagctggccccagacttctgtcttttcagctgcagtgaaggctcggggctgcagaattgcaaccttgccaatggacctgatcggttttggttatgcagccctcgtgacatttggaagcatttttggatataagcggagaggtggtgttccgtctttgattgctggtctttttgttggatgtttggccggctatggagcttaccgtgtctccaatgacaaacgagatgtaaaagtgtcactgtttacagctttcttcctggctaccataatgggtgtgagatttaagaggtccacgctcgtcttgctgctcctcttgacaattctgcggaccagtctattaaccctatcgtatccctcgtctcccgtactcagcatcctccttagcgcattcttcacatctcctctcaacctgttctctctactcacacactttcaactcttcacatttaactatgatccgctctcctctcgccatccttctcttccatcctaaatttctctttctgctcataatactcgctaccgttctctcttatatccctcctctggtccatatactcatactctctcccctcccttcctccacgcctctattcctc

SEQ ID NO: 348138 - DNA, 1207 bp, Homo sapiens
cttccggactccaggtaccgcgcttgggcgactgcgccccagacttctgtcttttcagctgcagtgaaggctcggggctgcaggctggagtgcagtgggacagcgctggtgcggagactgcttccggactccaggtaccgcgcttggcggcagctggccccagacttctgtcttttcagctgcagtgaaggctcggggctgcagaattgcaaccttgccaatggacctgatcggttttggttatgcagccctcgtgacatttggaagcatttttggatataagcggagaggtggtgttccgtctttgattgctggtctttttgttggatgtttggccggctatggagcttaccgtgtctccaatgacaaacgagatgtaaaagtgtcactgtttacagctttcttcctggctaccataatgggtgtgagatttaagaggtccaagaaaataatgcctgctggtttggttgcaggtttaagcctcatgatgatcctgagacttgtcttgttgctgctctgagcatctggaggaacagaaaactaagttcatgtcatcctgctgtaatgggcagagcatattttttttgtatttaaaagataaacttcaatatggaatgctagaaacacaaatagcactgtcacctctaatatgaacattagtttgaggtagtttttttctaaagcaaaaattttaactgttttctaattgtcaagcactattttcattaaaagtgtctaatgaatcatgatatactcttccatttgttgtgtctattttttatatatttggtattttttgaaaattccaaatactcatgtctcaagtaagcttaaactacaacttgtcacataaaggaagtcttaagtggagttcacagaatgataatgtatctatttgtcatttgtgttatatttgaaattattagaaattatgctttttccattttaattgtattgctgccagtgctatttttttctttaaaaaattttattcttagcacactgttatgtcctaactgaatgtattcagtattcaaataaaagacattttggttcaaaaaaaaaaaaaaacaaaaaaaaaaaaattttgggggccccggccagaaaattttaaacacaccgtggggcgggccagggtaggaaccgtcaactgcccaggagaccggccacaagggggggtccccaaaaacggggacgggttgaaaac

SEQ ID NO: 348139 - DNA, 1168 bp, Homo sapiens
agcgggtttccaggagggagcggcctttgctcagcgcgagacggctgggcgccgagtgggacagcgctggtgcggagactgcttccggactccaggtaccgcgcttggcggcagctggccccagacttctgtcttttcagctgcagtgaaggctcggggctgcagaattgcaaccttgccaatggacctgatcggttttggttatgcagccctcgtgacatttggaagcatttttggatataagcggagaggtggtgttccgtctttgattgctggtctttttgttggatgtttggccggctatggagcttaccgtgtctccaatgacaaacgagatgtaaaagtgtcactgtttacagctttcttcctggctaccataatgggtgtgagatttaagaggtccaagaaaataatgcctgctggtttggttgcaggtttaagcctcatgatgatcctgagacttgtcttgttgctgctctgagcatctggaggaacagaaaactaagttcatgtcatcctgctgtaatgggcagagcatattttttttgtatttaaaagataaacttcaatatggaatgctagaaacacaaatagcactgtcacctctaatatgaacattagtttgaggtagtttttttctaaagcaaaaattttaactgttttctaattgtcaagcactattttcattaaaagtgtctaatgaatcatgatatactcttccatttgttgtgtctattttttatatatttggtattttttgaaaattccaaatactcatgtctcaagtaagcttaaactacaacttgtcacataaaggaagtcttaagtggagttcacagaatgataatgtatctatttgtcatttgtgttatatttgaaattattagaaattatgctttttccattttaattgtattgctgccagtgctatttttttctttaaaaaattttattcttagcacactgttatgtcctaactgaatgtattcagtattcaaataaaagacattttggttcaaaaaaaaaaaaaaacaaaaaaaaaaaaattttgggggccccggccagaaaattttaaacacaccgtggggcgggccagggtaggaaccgtcaactgcccaggagaccggccacaagggggggtccccaaaaacggggacgggttgaaaac

SEQ ID NO: 348140 - DNA, 950 bp, Homo sapiens
agcgggtttccaggagggagcggcctttgctcagcgcgagacggctgggcgccgagtgggacagcgctggtgcggagactgcttccggactccagaattgcaaccttgccaatggacctgatcggttttggttatgcagccctcgtgacatttggaagcatttttggatataagcggagaggtggtgttccgtctttgattgctggtctttttgttggatgtttggccggctatggagcttaccgtgtctccaatgacaaacgagatgtaaaagtgtcactgtttacagctttcttcctggctaccataatgggtgtgagatttaagaggtccaagaaaataatgcctgctggtttggttgcaggtttaagcctcatgatgatcctgagacttgtcttgttgctgctctgagcatctggaggaacagaaaactaagttcatgtcatcctgctgtaatgggcagagcatattttttttgtatttaaaagataaacttcaatatggaatgctagaaacacaaatagcactgtcacctctaatatgaacattagtttgaggtagtttttttctaaagcaaaaattttaactgttttctaattgtcaagcactattttcattaaaagtgtctaatgaatcatgatatactcttccatttgttgtgtctattttttatatatttggtattttttgaaaattccaaatactcatgtctcaagtaagcttaaactacaacttgtcacataaaggaagtcttaagtggagttcacagaatgataatgtatctatttgtcatttgtgttatatttgaaattattagaaattatgctttttccattttaattgtattgctgccagtgctatttttttctttaaaaaattttattcttagcacactgttatgtcctaactgaatgtattcagtattcaaataaaagacattttggttcaaa

SEQ ID NO: 348141 - DNA, 1084 bp, Homo sapiens
  misc_feature (182)..(182): n is a, c, g, or t
  misc_feature (189)..(189): n is a, c, g, or t
  misc_feature (201)..(201): n is a, c, g, or t
  misc_feature (205)..(205): n is a, c, g, or t
  misc_feature (210)..(210): n is a, c, g, or t
cttccggactccaggtaccgcgcttgggcgactgcgccccagacttctgtcttttcagctgcagtgaaggctcggggctgcaggctggagtgcagtgggacagcgctggtgcggagactgcttccggactccaggtaccgcgcttggcggcagctggccccagacttctgtcttttccaggnccccccntttttggggggncccnaggtntgaaggctcggggctgcagaattgcaaccttgccaatggacctgatcggttttggttatgcagccctcgtgacatttggaagcatttttggatataagcggagaggtggtgttccgtctttgattgctggtctttttgttggatgtttggccggctatggagcttaccgtgtctccaatgacaaacgagatgtaaaagtgtcactgtttacagctttcttcctggctaccataatgggtgtgagatttaagaggtccaagaaaataatgcctgctggtttggttgcaggtttaagcctcatgatgatcctgagacttgtcttgttgctgctctgagcatctggaggaacagaaaactaagttcatgtcatcctgctgtaatgggcagagcatattttttttgtatttaaaagataaacttcaatatggaatgctagaaacacaaatagcactgtcacctctaatatgaacattagtttgaggtagtttttttctaaagcaaaaattttaactgttttctaattgtcaagcactattttcattaaaagtgtctaatgaatcatgatatactcttccatttgttgtgtctattttttatatatttggtattttttgaaaattccaaatactcatgtctcaagtaagcttaaactacaacttgtcacataaaggaagtcttaagtggagttcacagaatgataatgtatctatttgtcatttgtgttatatttgaaattattagaaattatgctttttccattttaattgtattgctgccagtgctatttttttctttaaaaaattttattcttagcacactgttatgtcctaactgaatgtattcagtattcaaataaaagacattttggttcaaa

SEQ ID NO: 348142 - DNA, 1003 bp, Homo sapiens
agcgggtttccaggagggagcggcctttgctcagcgcgagacggctgggcgccgagtgggacagcgctggtgcggagactgcttccggactccaggtaccgcgcttggcggcagctggccccagacttctgtcttttcagctgcagtgaaggctcggggctgcagaattgcaaccttgccaatggacctgatcggttttggttatgcagccctcgtgacatttggaagcatttttggatataagcggagaggtggtgttccgtctttgattgctggtctttttgttggatgtttggccggctatggagcttaccgtgtctccaatgacaaacgagatgtaaaagtgtcactgtttacagctttcttcctggctaccataatgggtgtgagatttaagaggtccaagaaaataatgcctgctggtttggttgcaggtttaaggtaagtaaaactattttgatcaatactttcctctgctgttgttttgaagtgctgaatttttgggaaacatcaattttaatttgaaagatcaaagtcctttttgttataataagcatgacagtaaaaaccttaagatagcatggattcagtgggtctttgatattgatgtacccatgaacattcttattggatacgcatagtgttgctgtagtatctggtcacataggcatacttgcctttttcagaagaaagagctaactaaactcagcctcatttttcctcaagattcacccatctgcaacactaaatgtgttcatttaaatctaatactcagtcccttttagagagtttgacagagtgacagtgtgatacagttatttcaagtttttaagggacagaaatttaatatttttaagagtttttaagagagaagttttaatattttttaaaagataaacagagggcctcaagtttctcttaatttgatccagtaattctatccatgagattaagcatattaccaaataaaaatttagagataacattttaaaaatttctccag

SEQ ID NO: 348143 - DNA, 336 bp, Homo sapiens
cctgggcgacagagcgagattctgtctcaaaaaaaaaaaaaattgaatttatttgttatcagcaggttaaaaagataccaaaaaaagaggtcaaaaatattaactgtagtagtctccggacagtggacttatggacaaatttcttaagctttaaaaaatacttacatgtacttgccaccttttccatagtgagtactctgttaatactcaggagaaaataggccaagcatggtggctcacatctgtaatcctagcactttgggaggccaagatgggaggattggttgaggccaggagttcgagaccagcctggtcaacacagagagctcccatctc

SEQ ID NO: 348144 - DNA, 823 bp, Homo sapiens
caatgccggaccgcttcggcaccgcccgcccgatccctccacccgtgggccggcaatggcgggcgcagtttcgctcttgggtgtggtggggctgctgcttgtgtctgcgctgtccggggtcctaggagaccgcgccaatcccgacctccgggcacacccagggaacgcagcccaccccggctctggagccacggaaccccggcggcgaccaccgctcaaggatcaacgcgagcggacccgggccgggtcgctgcctctgggggcgctgtacaccgcggccgtcgcggcttttgtgctgtacaagtgtttgcaggggaaagatgaaactgcggttctccacgaggaggcaagcaagcagcagccactgcagtcagagcaacagctggcccagttgacacaacagctggcccagacagagcagcacctgaacaacctgatggcccagctggaccccctttttgagcgtgtgactactctggctggagcccagcaggagcttctgaacatgaagctatggaccatccacgagctgctgcaagatagcaagccggacaaggatatggaggcttcagaaccagaggccagcagacctcttcctgaggacttctgtttaaaggaggacgaggaggaggttggtgacagtcaggcctgggaggagcccacaaactggagcacagagacatggaacctagctacttcctgggaggtggggcggggactacggagaaggtgcagccaggctgtggcaaagggccccagtcacagccttggctgggaaggagggacgacagctgaaggtcgactaaaacaaagtctgttttca

SEQ ID NO: 348145 - DNA, 801 bp, Homo sapiens
caatgccggaccgcttcggcaccgcccgcccgatccctccacccgtgggccggcaatggcgggcgcagtttcgctcttgggtgtggtggggctgctgcttgtgtctgcgctgtccggggtcctaggagaccgcgccaatcccgacctccgggcacacccagggaacgcagcccaccccggctctggagccacggaaccccggcggcgaccaccgctcaaggatcaacgcgagcggacccgggccgggtcgctgcctctgggggcgctgtacaccgcggccgtcgcggcttttgtgctgtacaagtgtttgcaggggaaagatgaaactgcggttctccacgaggaggcaagcaagcagcagccactgcagtcagagcaacagctggcccagttgacacaacagctggcccagacagagcagcacctgaacaacctgatggcccagctggaccccctttttgagcgcagcaggagcttctgaacatgaagctatggaccatccacgagctgctgcaagatagcaagccggacaaggatatggaggcttcagaaccagaggccagcagacctcttcctgaggacttctgtttaaaggaggacgaggaggaggttggtgacagtcaggcctgggaggagcccacaaactggagcacagagacatggaacctagctacttcctgggaggtggggcggggactacggagaaggtgcagccaggctgtggcaaagggccccagtcacagccttggctgggaaggagggacgacagctgaaggtcgactaaaacaaagtctgttttca

SEQ ID NO: 348146 - DNA, 882 bp, Homo sapiens
caatgccggaccgcttcggcaccgcccgcccgatccctccacccgtgggccggcaatggcgggcgcagtttcgctcttgggtgtggtggggctgctgcttgtgtctgcgctgtccggggtcctaggagaccgcgccaatcccgacctccgggcacacccagggaacgcagcccaccccggctctggagccacggaaccccggcggcgaccaccgctcaaggatcaacgcgagcggacccgggccgggtcgctgcctctgggggcgctgtacaccgcggccgtcgcggcttttgtgctgtacaagtgtttgcaggggaaagatgaaactgcggttctccacgaggaggcaagcaagcagcagccactgcagtcagagcaacagctggcccagttgacacaacagctggcccagacagagcagcacctgaacaacctgatggcccagctggaccccctttttgagcgcagcaggagcttctgaacatgaagctatggaccatccacgagctgctgcaagatagcaagccggacaaggatatggaggcttcagaaccaggtgaaggctcgggaggcgagtctgctggaggtggagacaaagtctctgaaactggaacattcctgatctctccccacacagaggccagcagacctcttcctgaggacttctgtttaaaggaggacgaggaggaggttggtgacagtcaggcctgggaggagcccacaaactggagcacagagacatggaacctagctacttcctgggaggtggggcggggactacggagaaggtgcagccaggctgtggcaaagggccccagtcacagccttggctgggaaggagggacgacagctgaaggtcgactaaaacaaagtctgttttca

SEQ ID NO: 348147 - DNA, 1097 bp, Homo sapiens
caatgccggaccgcttcggcaccgcccgcccgatccctccacccgtgggccggcaatggcgggcgcagtttcgctcttgggtgtggtggggctgctgcttgtgtctgcgctgtccggggtcctaggagaccgcgccaatcccgacctccgggcacacccagggaacgcagcccaccccggctctggagccacggaaccccggcggcgaccaccgctcaaggatcaacgcgagcggacccgggccgggtcgctgcctctgggggcgctgtacaccgcggccgtcgcggcttttgtgctgtacaagtgtttgcaggggaaagatgaaactgcggttctccacgaggaggcaagcaagcagcagccactgcagtcaggtgggtttagcagaagtctgtgctgggtcgggggagtttaggggacagcagaagatacataaccacttctgcccccttttttcccttatccccagagcaacagctggcccagttgacacaacagctggcccagacagagcagcacctgaacaacctgatggcccagctggaccccctttttgagcggtgaggagagcaatgattctgtgaatttttggggaatttgtggcaggagggaggaatggggacataggttgggagccactgagtggacatttcttcagtgtgactactctggctggagcccagcaggagcttctgaacatgaagctatggaccatccacgagctgctgcaagatagcaagccggacaaggatatggaggcttcagaaccaggtgaaggctcgggaggcgagtctgctggaggtggagacaaagtctctgaaactggaacattcctgatctctccccacacagaggccagcagacctcttcctgaggacttctgtttaaaggaggacgaggaggaggttggtgacagtcaggcctgggaggagcccacaaactggagcacagagacatggaacctagctacttcctgggaggtggggcggggactacggagaaggtgcagccaggctgtggcaaagggccccagtcacagccttggctgggaaggagggacgacagctgaaggtcgactaaaacaaagtctgttttca

SEQ ID NO: 348148 - DNA, 904 bp, Homo sapiens
caatgccggaccgcttcggcaccgcccgcccgatccctccacccgtgggccggcaatggcgggcgcagtttcgctcttgggtgtggtggggctgctgcttgtgtctgcgctgtccggggtcctaggagaccgcgccaatcccgacctccgggcacacccagggaacgcagcccaccccggctctggagccacggaaccccggcggcgaccaccgctcaaggatcaacgcgagcggacccgggccgggtcgctgcctctgggggcgctgtacaccgcggccgtcgcggcttttgtgctgtacaagtgtttgcaggggaaagatgaaactgcggttctccacgaggaggcaagcaagcagcagccactgcagtcagagcaacagctggcccagttgacacaacagctggcccagacagagcagcacctgaacaacctgatggcccagctggaccccctttttgagcgtgtgactactctggctggagcccagcaggagcttctgaacatgaagctatggaccatccacgagctgctgcaagatagcaagccggacaaggatatggaggcttcagaaccaggtgaaggctcgggaggcgagtctgctggaggtggagacaaagtctctgaaactggaacattcctgatctctccccacacagaggccagcagacctcttcctgaggacttctgtttaaaggaggacgaggaggaggttggtgacagtcaggcctgggaggagcccacaaactggagcacagagacatggaacctagctacttcctgggaggtggggcggggactacggagaaggtgcagccaggctgtggcaaagggccccagtcacagccttggctgggaaggagggacgacagctgaaggtcgactaaaacaaagtctgttttca

SEQ ID NO: 348149 - DNA, 376 bp, Homo sapiens
attaagaaactgaggctcagagaggtcaagctactttcccaaggtcacatagccagcaagtgaaggagccaaggtacaaatgcagacttcttgacttctcagatgctgctaactcctatggtaaactatgaggagccaacctaggagaaaagaagaaaacacaatagaatgatttcacagaatgagcttagattatagaatatctgaatccacctatgacttgtaagcccttgcttcaagatatcccaccttttcgggctgaaccaatatatactttccaggtatcgatttatgcttttgcctgtaactcctactacctccttgaaatgtataaaaccaatctgtaatttaaccacctcaggaccaaacttgttgg

SEQ ID NO: 348150 - DNA, 359 bp, Homo sapiens
cctctccagcacctgttgtttcctgactttttaatgatcgccattctaactggtgtgagatggtacctcattgtggttttgatttgcatttctctgatggccagtgatggccatcccaccacactcgtcccacctggcttgtgtcaatgttccattactgttcaccggctgcccacgcacctccagctccacatcagaatgtgttgctagacgtcattgtcatggtggcaggaggaatttgttaaacttcaaaggaatgcctgtttgtcataaagcctttaaaacaagaagatggcatctcctatgtgggaggagtgaggtttgatcctgcggaaaataaacttagctgacattttcga

SEQ ID NO: 348151 - DNA, 688 bp, Homo sapiens
ctcccctcttccttggctcttgggaaggaacctctgccctcagagttttagccagatgctaagaatatccaaatagcaagagttacaaaagatcagttaaaaaacaaagatgtgagaactgatattgaaggacaccccactgctttggataagccttctgcatgtagtggctaaagggctgagaaatccggagtcagtaccagggatacaagttcagtgaggaggggagatggcaaggagctggtgactacagctacagtctctctgatatctacatcatacacaacctttccaatgtcaaatggcttccttcagaaaaggtcctattggcatttgggaggcatcaagctgactcttctcatctccttactgggtcagatataggaatccaactcagcagggcaggttaaccgcaaaacagcaaggaagataatggtcagagaacgggaacacatgtgcttgtctaggaaaagcaagtcagattttctaatctttagctattttttttaaacactgagttataggaaatcaaacttaccaaactttattagatttcacagtagaataatctaaagttgtctttttggttttttttttttagcttttaaaagacttttgtttaagctattcaacaaaacaatgtgctacagaatgatttttccttaacacaaccagatgtctacaaaga

SEQ ID NO: 348152 - DNA, 288 bp, Homo sapiens
gaggtgagaccagcctgagcaacgtagtgtgacttcgtttctataaataaataaataataaaaattatatccatcctattagtttctactatctttagaaaaagaggccaaggcaggcagatcacctgaggtcagaagttcaagaccagcctgacccacgtagagaaaccccatctcttctaaaaatacaaaattagctgggtgtggtggcacatgcctgtaatcccagctatatgggaggctgaggcaagagaatcacttgaacccaggaggcggaggttgtggtga

SEQ ID NO: 348153 - DNA, 483 bp, Homo sapiens
attcgcggccgcgtcgacagtgagaccctatctctctatgttgcctagactggtttcaaaatcccgggctcaagtgatccacctgtcttggcctcccaaaatgctgggattactggcacaaacaccgcacccgaccctctgcagctacttactcctcctaagcatcagccctctcatctctgaaatatggctcttcctgcctacctcaaatattggctgtaaggatgaaaataaacaatgaagataagggttttgcagagcttctggtccataacaagtacttaatacttcttttggacatatatttaataagtgcctacgtgtaccatatgctgatctaggtgttggaaattcctaatagaagaaactcctttttctcatggagcttacaatgttgatgccagtggcaaacgagttgacccattgttacgtggaaacaaatggtatgaaaagaacctggggtaagcagatggaagaagggag

SEQ ID NO: 348154 - DNA, 253 bp, Homo sapiens
aaaaaattagctagacgtcgtggtgggcacctgtaatcccagctactcaggaggctgaggcaggagaatcgcttgaatccaggaggcggaggttgcagtgagtcaagatcacgccattgcactccaacctggatgacagagcaagactccatctccaaaagaaaaacaaagatggaggccgggcatggtggctcacacctgtaatcccagtggcaattcacttgagattaggagttcaagaccagcctcgtca

SEQ ID NO: 348155 - DNA, 1350 bp, Homo sapiens
agtcctagcggaaacggaaacgcgcgaggagcgagatgttctggctcctctaggctagctggttcttcaaagatctcgatggttcctcataaatatgtaaatattgtgggggcgtggcgggactttatgccccgccctcccaccgaggctgcgctggaagacgggcgtccggaactcctgggtccattcccaatgtctcctggctcctcctccttttgctcagccccaccaccgccccgctcaggccgattgcaaaattcttagctgttctttgagtaaccacacgtcctccacgctcctttcctctttatcccaccctcctcctcctccccactttgaggcctccagctccagattgacagagctgaaggccactcgtttccgtaaagcgcagcggcaagctccgccccctggaggtctcacggccgaggcggggccgggacacagcgactccaacccgttccaccaatgaggacacgcggaaatccccgcccccgggcgtgggccaatggcgctggctggggggggcggccaccgcctcctggcggctgcgaggtttcactgcaggggcgccagtgggctcagtgacgctgcggcctccttctgcctaggtcccaacgcttcggggcaggggtgcggtcttgcaataggaagccgagcgtcttgcaagcttcccgtcgggcaccagctactcggccccgcaccctacctggtgcattccctagacacctccggggtccctacctggagatccccggagccccccttcctgcgccagccatgcctttaaaccgcactttgtccatgtcctcactgccaggactggaggactgggaggatgaattcgacctggagaacgcagtgctcttcgaagtggcctgggaggtggctaacaaggtgggtggcatctacacggtgctgcagacgaaggcgaaggtgacaggggacgaatggggcgacaactacttcctggtggggccgtacacggagcagggcgtgaggacccaggtggaactgctggaggcccccaccccggccctgaagaggacactggattccatgaacagcaagggctgcaaggtgtatttcgggcgctggctgatcgagggaggccctctggtggtgctcctggacgtgggtgcctcagcttgggccctggagcgctggaagggagagctctgggatacctgcaacatcggagtgccgtggtacgaccgcgaggccaacgacgctgtcctctttggctttctgaccacctggttcctgggtgagttcctggcccgagtgcgggaaccctgtggttgcccctcctgatgttgggggtggcctgctgtttgccgggagctggac

SEQ ID NO: 348156 - DNA, 4154 bp, Homo sapiens
agtcctagcggaaacggaaacgcgcgaggagcgagatgttctggctcctctaggctagctggttcttcaaagatctcgatggttcctcataaatatgtaaatattgtgggggcgtggcgggactttatgccccgccctcccaccgaggctgcgctggaagacgggcgtccggaactcctgggtccattcccaatgtctcctggctcctcctccttttgctcagccccaccaccgccccgctcaggccgattgcaaaattcttagctgttctttgagtaaccacacgtcctccacgctcctttcctctttatcccaccctcctcctcctccccactttgaggcctccagctccagattgacagagctgaaggccactcgtttccgtaaagcgcagcggcaagctccgccccctggaggtctcacggccgaggcggggccgggacacagcgactccaacccgttccaccaatgaggacacgcggaaatccccgcccccgggcgtgggccaatggcgctggctggggggggcggccaccgcctcctggcggctgcgaggtttcactgcaggggcgccagtgggctcagtgacgctgcggcctccttctgcctaggtcccaacgcttcggggcaggggtgcggtcttgcaataggaagccgagcgtcttgcaagcttcccgtcgggcaccagctactcggccccgcaccctacctggtgcattccctagacacctccggggtccctacctggagatccccggagccccccttcctgcgccagccatgcctttaaaccgcactttgtccatgtcctcactgccaggactggaggactgggaggatgaattcgacctggagaacgcagtgctcttcgaagtggcctgggaggtggctaacaaggtgggtggcatctacacggtgctgcagacgaaggcgaaggtgacaggggacgaatggggcgacaactacttcctggtggggccgtacacggagcagggcgtgaggacccaggtggaactgctggaggcccccaccccggccctgaagaggacactggattccatgaacagcaagggctgcaaggtgtatttcgggcgctggctgatcgagggaggccctctggtggtgctcctggacgtgggtgcctcagcttgggccctggagcgctggaagggagagctctgggatacctgcaacatcggagtgccgtggtacgaccgcgaggccaacgacgctgtcctctttggctttctgaccacctggttcctgggtgagttcctggcacagagtgaggagaagccacatgtggttgctcacttccatgagtggttggcaggcgttggactctgcctgtgtcgtgcccggcgactgcctgtagcaaccatcttcaccacccatgccacgctgctggggcgctacctgtgtgccggtgccgtggacttctacaacaacctggagaacttcaacgtggacaaggaagcaggggagaggcagatctaccaccgatactgcatggaaagggcggcagcccactgcgctcacgtcttcactactgtgtcccagatcaccgccatcgaggcacagcacttgctcaagaggaaaccagatattgtgacccccaatgggctgaatgtgaagaagttttctgccatgcatgagttccagaacctccatgctcagagcaaggctcgaatccaggagtttgtgcggggccatttttatgggcatctggacttcaacttggacaagaccttatacttctttatcgccggccgctatgagttctccaacaagggtgctgacgtcttcctggaggcattggctcggctcaactatctgctcagagtgaacggcagcgagcagacagtggttgccttcttcatcatgccagcgcggaccaacaatttcaacgtggaaaccctcaaaggccaagctgtgcgcaaacagctttgggacacggccaacacggtgaaggaaaagttcgggaggaagctttatgaatccttactggttgggagccttcccgacatgaacaagatgctggataaggaagacttcactatgatgaagagagccatctttgcaacgcagcggcagtctttcccccctgtgtgcacccacaatatgctggatgactcctcagaccccatcctgaccaccatccgccgaatcggcctcttcaatagcagtgccgacagggtgaaggtgattttccacccggagttcctctcctccacaagccccctgctccctgtggactatgaggagtttgtccgtggctgtcaccttggagtcttcccctcctactatgagccttggggctacacaccggctgagtgcacggttatgggaatccccagtatctccaccaatctctccggcttcggctgcttcatggaggaacacatcgcagacccctcagcttacggtatctacattcttgaccggcggttccgcagcctggatgattcctgctcgcagctcacctccttcctctacagtttctgtcagcagagccggcggcagcgtatcatccagcggaaccgcacggagcgcctctccgaccttctggactggaaatacctaggccggtactatatgtctgcgcgccacatggcgctgtccaaggcctttccagagcacttcacctacgagcccaacgaggcggatgcggcccaggggtaccgctacccacggccagcctcggtgccaccgtcgccctcgctgtcacgacactccagcccgcaccagagtgaggacgaggaggatccccggaacgggccgctggaggaagacggcgagcgctacgatgaggacgaggaggccgccaaggaccggcgcaacatccgtgcaccagagtggccgcgccgagcgtcctgcacctcctccaccagcggcagcaagcgcaactctgtggacacggccacctccagctcactcagcaccccgagcgagcccctcagccccaccagctccctgggcgaggagcgtaactaagtccgccccaccacactccccgcctgtcctgcctctctgctccagagagaggatgcagaggggtgctgctcctaaacccccgctccagatctgcactgggtgtggccccgcagtgcccccacccagtccgccaaacactccaccccctccagctccagtttccaagttcctgcactccagaatccacaaagccgtgcctttctctggctccagaatatgcataatcagcgccctggagtcccctgggcctggaccgcttcccagaggccaggaatctgccattactctgcggtggtgccagaggttttaggaaacctggcatggtgctttcaggtctggggcttttagagccccccgtgtggcttacaaattctacagcatacagagcaggccacgctcaggcccggcatgcgggccaccaagttctggaaaccacgtggtgtccctgcgaatggggcgatcaagtccagagccggggcactttcagagtttgaaggtaactgagagcagatggtcctccatttcaactccagaagtggggctctgggagggatgttctagccctccctggcatgtcagagccaggctctgcctggaggatccctccatccggctcctgtcatcccctacactttggccaagcaagaggtggtagaaccacttggctgctcattccttctggaggacacacagtctcagtccagatgccttcctgtctttctggccctttctggaccagatcctactcttcctttctaaatctgagatctccctccagggaatccgcctgcagaggacagagctggctgtcttcccccacccctaacctggcttattcccaactgctctgcccactgtgaaaccactaggttctaggtcctggcttctagatctggaaccttaccacgttactgcatactgatccctttcccatgatccagaactgaggtcactgggttctagaacccccacatttacctcgaggctcttccatccccaaactgtgccctgccttcagctttggtgaaagggagggcccctcatgtgtgctgtgctgtgtctgcaccgcttggtttgcagttgagaggggagggcaggaggggtgtgattggagtgtgtccggagatgagatgaaaaaaatacatctatatttaagaatc

SEQ ID NO: 348157 - DNA, 3591 bp, Homo sapiens
tagagctaggaaaggcctggtgttaatcaggcgaggccttctgcctaggtcccaacgcttcggggcaggggtgcggtcttgcaataggaagccgagcgtcttgcaagcttcccgtcgggcaccagctactcggccccgcaccctacctggtgcattccctagacacctccggggtccctacctggagatccccggagccccccttcctgcgccagccatgcctttaaaccgcactttgtccatgtcctcactgccaggactggaggactgggaggatgaattcgacctggagaacgcagtgctcttcgaagtggcctgggaggtggctaacaaggtgggtggcatctacacggtgctgcagacgaaggcgaaggtgacaggggacgaatggggcgacaactacttcctggtggggccgtacacggagcagggcgtgaggacccaggtggaactgctggaggcccccaccccggccctgaagaggacactggattccatgaacagcaagggctgcaaggtgtatttcgggcgctggctgatcgagggaggccctctggtggtgctcctggacgtgggtgcctcagcttgggccctggagcgctggaagggagagctctgggatacctgcaacatcggagtgccgtggtacgaccgcgaggccaacgacgctgtcctctttggctttctgaccacctggttcctgggtgagttcctggcacagagtgaggagaagccacatgtggttgctcacttccatgagtggttggcaggcgttggactctgcctgtgtcgtgcccggcgactgcctgtagcaaccatcttcaccacccatgccacgctgctggggcgctacctgtgtgccggtgccgtggacttctacaacaacctggagaacttcaacgtggacaaggaagcaggggagaggcagatctaccaccgatactgcatggaaagggcggcagcccactgcgctcacgtcttcactactgtgtcccagatcaccgccatcgaggcacagcacttgctcaagaggaaaccagatattgtgacccccaatgggctgaatgtgaagaagttttctgccatgcatgagttccagaacctccatgctcagagcaaggctcgaatccaggagtttgtgcggggccatttttatgggcatctggacttcaacttggacaagaccttatacttctttatcgccggccgctatgagttctccaacaagggtgctgacgtcttcctggaggcattggctcggctcaactatctgctcagagtgaacggcagcgagcagacagtggttgccttcttcatcatgccagcgcggaccaacaatttcaacgtggaaaccctcaaaggccaagctgtgcgcaaacagctttgggacacggccaacacggtgaaggaaaagttcgggaggaagctttatgaatccttactggttgggagccttcccgacatgaacaagatgctggataaggaagacttcactatgatgaagagagccatctttgcaacgcagcggcagtctttcccccctgtgtgcacccacaatatgctggatgactcctcagaccccatcctgaccaccatccgccgaatcggcctcttcaatagcagtgccgacagggtgaaggtgattttccacccggagttcctctcctccacaagccccctgctccctgtggactatgaggagtttgtccgtggctgtcaccttggagtcttcccctcctactatgagccttggggctacacaccggctgagtgcacggttatgggaatccccagtatctccaccaatctctccggcttcggctgcttcatggaggaacacatcgcagacccctcagcttacggtatctacattcttgaccggcggttccgcagcctggatgattcctgctcgcagctcacctccttcctctacagtttctgtcagcagagccggcggcagcgtatcatccagcggaaccgcacggagcgcctctccgaccttctggactggaaatacctaggccggtactatatgtctgcgcgccacatggcgctgtccaaggcctttccagagcacttcacctacgagcccaacgaggcggatgcggcccaggggtaccgctacccacggccagcctcggtgccaccgtcgccctcgctgtcacgacactccagcccgcaccagagtgaggacgaggaggatccccggaacgggccgctggaggaagacggcgagcgctacgatgaggacgaggaggccgccaaggaccggcgcaacatccgtgcaccagagtggccgcgccgagcgtcctgcacctcctccaccagcggcagcaagcgcaactctgtggacacggccacctccagctcactcagcaccccgagcgagcccctcagccccaccagctccctgggcgaggagcgtaactaagtccgccccaccacactccccgcctgtcctgcctctctgctccagagagaggatgcagaggggtgctgctcctaaacccccgctccagatctgcactgggtgtggccccgcagtgcccccacccagtccgccaaacactccaccccctccagctccagtttccaagttcctgcactccagaatccacaaagccgtgcctttctctggctccagaatatgcataatcagcgccctggagtcccctgggcctggaccgcttcccagaggccaggaatctgccattactctgcggtggtgccagaggttttaggaaacctggcatggtgctttcaggtctggggcttttagagccccccgtgtggcttacaaattctacagcatacagagcaggccacgctcaggcccggcatgcgggccaccaagttctggaaaccacgtggtgtccctgcgaatggggcgatcaagtccagagccggggcactttcagagtttgaaggtaactgagagcagatggtcctccatttcaactccagaagtggggctctgggagggatgttctagccctccctggcatgtcagagccaggctctgcctggaggatccctccatccggctcctgtcatcccctacactttggccaagcaagaggtggtagaaccacttggctgctcattccttctggaggacacacagtctcagtccagatgccttcctgtctttctggccctttctggaccagatcctactcttcctttctaaatctgagatctccctccagggaatccgcctgcagaggacagagctggctgtcttcccccacccctaacctggcttattcccaactgctctgcccactgtgaaaccactaggttctaggtcctggcttctagatctggaaccttaccacgttactgcatactgatccctttcccatgatccagaactgaggtcactgggttctagaacccccacatttacctcgaggctcttccatccccaaactgtgccctgccttcagctttggtgaaagggagggcccctcatgtgtgctgtgctgtgtctgcaccgcttggtttgcagttgagaggggagggcaggaggggtgtgattggagtgtgtccggagatgagatgaaaaaaatacatctatatttaagaatc

SEQ ID NO: 348158 - DNA, 3605 bp, Homo sapiens
atactgagccctataaacttgacgaggcccccgttggttttaagtgtcgcagcagcgtaggacctacgtcctccgggggttagggtgcggtcttgcaataggaagccgagcgtcttgcaagcttcccgtcgggcaccagctactcggccccgcaccctacctggtgcattccctagacacctccggggtccctacctggagatccccggagccccccttcctgcgccagccatgcctttaaaccgcactttgtccatgtcctcactgccaggactggaggactgggaggatgaattcgacctggagaacgcagtgctcttcgaagtggcctgggaggtggctaacaaggtgggtggcatctacacggtgctgcagacgaaggcgaaggtgacaggggacgaatggggcgacaactacttcctggtggggccgtacacggagcagggcgtgaggacccaggtggaactgctggaggcccccaccccggccctgaagaggacactggattccatgaacagcaagggctgcaaggtgtatttcgggcgctggctgatcgagggaggccctctggtggtgctcctggacgtgggtgcctcagcttgggccctggagcgctggaagggagagctctgggatacctgcaacatcggagtgccgtggtacgaccgcgaggccaacgacgctgtcctctttggctttctgaccacctggttcctgggtgagttcctggcacagagtgaggagaagccacatgtggttgctcacttccatgagtggttggcaggcgttggactctgcctgtgtcgtgcccggcgactgcctgtagcaaccatcttcaccacccatgccacgctgctggggcgctacctgtgtgccggtgccgtggacttctacaacaacctggagaacttcaacgtggacaaggaagcaggggagaggcagatctaccaccgatactgcatggaaagggcggcagcccactgcgctcacgtcttcactactgtgtcccagatcaccgccatcgaggcacagcacttgctcaagaggaaaccagatattgtgacccccaatgggctgaatgtgaagaagttttctgccatgcatgagttccagaacctccatgctcagagcaaggctcgaatccaggagtttgtgcggggccatttttatgggcatctggacttcaacttggacaagaccttatacttctttatcgccggccgctatgagttctccaacaagggtgctgacgtcttcctggaggcattggctcggctcaactatctgctcagagtgaacggcagcgagcagacagtggttgccttcttcatcatgccagcgcggaccaacaatttcaacgtggaaaccctcaaaggccaagctgtgcgcaaacagctttgggacacggccaacacggtgaaggaaaagttcgggaggaagctttatgaatccttactggttgggagccttcccgacatgaacaagatgctggataaggaagacttcactatgatgaagagagccatctttgcaacgcagcggcagtctttcccccctgtgtgcacccacaatatgctggatgactcctcagaccccatcctgaccaccatccgccgaatcggcctcttcaatagcagtgccgacagggtgaaggtgattttccacccggagttcctctcctccacaagccccctgctccctgtggactatgaggagtttgtccgtggctgtcaccttggagtcttcccctcctactatgagccttggggctacacaccggctgagtgcacggttatgggaatccccagtatctccaccaatctctccggcttcggctgcttcatggaggaacacatcgcagacccctcagcttacggtatctacattcttgaccggcggttccgcagcctggatgattcctgctcgcagctcacctccttcctctacagtttctgtcagcagagccggcggcagcgtatcatccagcggaaccgcacggagcgcctctccgaccttctggactggaaatacctaggccggtactatatgtctgcgcgccacatggcgctgtccaaggcctttccagagcacttcacctacgagcccaacgaggcggatgcggcccaggggtaccgctacccacggccagcctcggtgccaccgtcgccctcgctgtcacgacactccagcccgcaccagagtgaggacgaggaggatccccggaacgggccgctggaggaagacggcgagcgctacgatgaggacgaggaggccgccaaggaccggcgcaacatccgtgcaccagagtggccgcgccgagcgtcctgcacctcctccaccagcggcagcaagcgcaactctgtggacacggccacctccagctcactcagcaccccgagcgagcccctcagccccaccagctccctgggcgaggagcgtaactaagtccgccccaccacactccccgcctgtcctgcctctctgctccagagagaggatgcagaggggtgctgctcctaaacccccgctccagatctgcactgggtgtggccccgcagtgcccccacccagtccgccaaacactccaccccctccagctccagtttccaagttcctgcactccagaatccacaaagccgtgcctttctctggctccagaatatgcataatcagcgccctggagtcccctgggcctggaccgcttcccagaggccaggaatctgccattactctgcggtggtgccagaggttttaggaaacctggcatggtgctttcaggtctggggcttttagagccccccgtgtggcttacaaattctacagcatacagagcaggccacgctcaggcccggcatgcgggccaccaagttctggaaaccacgtggtgtccctgcgaatggggcgatcaagtccagagccggggcactttcagagtttgaaggtaactgagagcagatggtcctccatttcaactccagaagtggggctctgggagggatgttctagccctccctggcatgtcagagccaggctctgcctggaggatccctccatccggctcctgtcatcccctacactttggccaagcaagaggtggtagaaccacttggctgctcattccttctggaggacacacagtctcagtccagatgccttcctgtctttctggccctttctggaccagatcctactcttcctttctaaatctgagatctccctccagggaatccgcctgcagaggacagagctggctgtcttcccccacccctaacctggcttattcccaactgctctgcccactgtgaaaccactaggttctaggtcctggcttctagatctggaaccttaccacgttactgcatactgatccctttcccatgatccagaactgaggtcactgggttctagaacccccacatttacctcgaggctcttccatccccaaactgtgccctgccttcagctttggtgaaagggagggcccctcatgtgtgctgtgctgtgtctgcaccgcttggtttgcagttgagaggggagggcaggaggggtgtgattggagtgtgtccggagatgagatgaaaaaaatacatctatatttaagaatc

SEQ ID NO: 348159 - DNA, 3405 bp, Homo sapiens
  misc_feature (18)..(18): n is a, c, g, or t
taggctaggtacgaggcngggtgttaatcggccgaggccttctgcctaggtcccaacgcttcggggcaggggtgcggtcttgcaataggaagccgagcgtcttgcaagcttcccgtcgggcaccagctactcggccccgcaccctacctggtgcattccctagacacctccggggtccctacctggagatccccggagccccccttcctgcgccagccatgcctttaaaccgcactttgtccatgtcctcactgccaggactggaggactgggaggatgaattcgacctggagaacgcagtgctcttcgaagtggcctgggaggtggctaacaaggtgggtggcatctacacggtgctgcagacgaaggcgaaggtgacaggggacgaatggggcgacaactacttcctggtggggccgtacacggagcagggcgtgaggacccaggtggaactgctggaggcccccaccccggccctgaagaggacactggattccatgaacagcaagggctgcaaggtgagttcctggcacagagtgaggagaagccacatgtggttgctcacttccatgagtggttggcaggcgttggactctgcctgtgtcgtgcccggcgactgcctgtagcaaccatcttcaccacccatgccacgctgctggggcgctacctgtgtgccggtgccgtggacttctacaacaacctggagaacttcaacgtggacaaggaagcaggggagaggcagatctaccaccgatactgcatggaaagggcggcagcccactgcgctcacgtcttcactactgtgtcccagatcaccgccatcgaggcacagcacttgctcaagaggaaaccagatattgtgacccccaatgggctgaatgtgaagaagttttctgccatgcatgagttccagaacctccatgctcagagcaaggctcgaatccaggagtttgtgcggggccatttttatgggcatctggacttcaacttggacaagaccttatacttctttatcgccggccgctatgagttctccaacaagggtgctgacgtcttcctggaggcattggctcggctcaactatctgctcagagtgaacggcagcgagcagacagtggttgccttcttcatcatgccagcgcggaccaacaatttcaacgtggaaaccctcaaaggccaagctgtgcgcaaacagctttgggacacggccaacacggtgaaggaaaagttcgggaggaagctttatgaatccttactggttgggagccttcccgacatgaacaagatgctggataaggaagacttcactatgatgaagagagccatctttgcaacgcagcggcagtctttcccccctgtgtgcacccacaatatgctggatgactcctcagaccccatcctgaccaccatccgccgaatcggcctcttcaatagcagtgccgacagggtgaaggtgattttccacccggagttcctctcctccacaagccccctgctccctgtggactatgaggagtttgtccgtggctgtcaccttggagtcttcccctcctactatgagccttggggctacacaccggctgagtgcacggttatgggaatccccagtatctccaccaatctctccggcttcggctgcttcatggaggaacacatcgcagacccctcagcttacggtatctacattcttgaccggcggttccgcagcctggatgattcctgctcgcagctcacctccttcctctacagtttctgtcagcagagccggcggcagcgtatcatccagcggaaccgcacggagcgcctctccgaccttctggactggaaatacctaggccggtactatatgtctgcgcgccacatggcgctgtccaaggcctttccagagcacttcacctacgagcccaacgaggcggatgcggcccaggggtaccgctacccacggccagcctcggtgccaccgtcgccctcgctgtcacgacactccagcccgcaccagagtgaggacgaggaggatccccggaacgggccgctggaggaagacggcgagcgctacgatgaggacgaggaggccgccaaggaccggcgcaacatccgtgcaccagagtggccgcgccgagcgtcctgcacctcctccaccagcggcagcaagcgcaactctgtggacacggccacctccagctcactcagcaccccgagcgagcccctcagccccaccagctccctgggcgaggagcgtaactaagtccgccccaccacactccccgcctgtcctgcctctctgctccagagagaggatgcagaggggtgctgctcctaaacccccgctccagatctgcactgggtgtggccccgcagtgcccccacccagtccgccaaacactccaccccctccagctccagtttccaagttcctgcactccagaatccacaaagccgtgcctttctctggctccagaatatgcataatcagcgccctggagtcccctgggcctggaccgcttcccagaggccaggaatctgccattactctgcggtggtgccagaggttttaggaaacctggcatggtgctttcaggtctggggcttttagagccccccgtgtggcttacaaattctacagcatacagagcaggccacgctcaggcccggcatgcgggccaccaagttctggaaaccacgtggtgtccctgcgaatggggcgatcaagtccagagccggggcactttcagagtttgaaggtaactgagagcagatggtcctccatttcaactccagaagtggggctctgggagggatgttctagccctccctggcatgtcagagccaggctctgcctggaggatccctccatccggctcctgtcatcccctacactttggccaagcaagaggtggtagaaccacttggctgctcattccttctggaggacacacagtctcagtccagatgccttcctgtctttctggccctttctggaccagatcctactcttcctttctaaatctgagatctccctccagggaatccgcctgcagaggacagagctggctgtcttcccccacccctaacctggcttattcccaactgctctgcccactgtgaaaccactaggttctaggtcctggcttctagatctggaaccttaccacgttactgcatactgatccctttcccatgatccagaactgaggtcactgggttctagaacccccacatttacctcgaggctcttccatccccaaactgtgccctgccttcagctttggtgaaagggagggcccctcatgtgtgctgtgctgtgtctgcaccgcttggtttgcagttgagaggggagggcaggaggggtgtgattggagtgtgtccggagatgagatgaaaaaaatacatctatatttaagaatc

SEQ ID NO: 348160 - DNA, 4188 bp, Homo sapiens
agtcctagcggaaacggaaacgcgcgaggagcgagatgttctggctcctctaggctagctggttcttcaaagatctcgatggttcctcataaatatgtaaatattgtgggggcgtggcgggactttatgccccgccctcccaccgaggctgcgctggaagacgggcgtccggaactcctgggtccattcccaatgtctcctggctcctcctccttttgctcagccccaccaccgccccgctcaggccgattgcaaaattcttagctgttctttgagtaaccacacgtcctccacgctcctttcctctttatcccaccctcctcctcctccccactttgaggcctccagctccagattgacagagctgaaggccactcgtttccgtaaagcgcagcggcaagctccgccccctggaggtctcacggccgaggcggggccgggacacagcgactccaacccgttccaccaatgaggacacgcggaaatccccgcccccgggcgtgggccaatggcgctggctggggggggcggccaccgcctcctggcggctgcgaggtttcactgcaggggcgccagtgggctcagtgacgctgcggcctccttctgcctaggtcccaacgcttcggggcaggggtgcggtcttgcaataggaagccgagcgtcttgcaagcttcccgtcgggcaccagctactcggccccgcaccctacctggtgcattccctagacacctccggggtccctacctggagatccccggagccccccttcctgcgccagccatgcctttaaaccgcactttgtccatgtcctcactgccaggactggaggactgggaggatgaattcgacctggagaacgcagtgctcttcgaagtggcctgggaggtggctaacaaggtgggtggcatctacacggtgctgcagacgaaggcgaaggtgacaggggacgaatggggcgacaactacttcctggtggggccgtacacggagcagggcgtgaggacccaggtggaactgctggaggcccccaccccggccctgaagaggacactggattccatgaacagcaagggctgcaaggtgtatttcgggcgctggctgatcgagggaggccctctggtggtgctcctggacgtgggtgcctcagcttgggccctggagcgctggaagggagagctctgggatacctgcaacatcggagtgccgtggtacgaccgcgaggccaacgacgctgtcctctttggctttctgaccacctggttcctgggtgagttcctggcacagagtgaggagaagccacatgtggttgctcacttccatgagtggttggcaggcgttggactctgcctgtgtcgtgcccggcgactgcctgtagcaaccatcttcaccacccatgccacgctgctggggcgctacctgtgtgccggtgccgtggacttctacaacaacctggagaacttcaacgtggacaaggaagcaggggagaggcagatctaccaccgatactgcatggaaagggcggcagcccactgcgctcacgtcttcactactgtgtcccagatcaccgccatcgaggcacagcacttgctcaagaggaaaccagatattgtgacccccaatgggctgaatgtgaagaagttttctgccatgcatgagttccagaacctccatgctcagagcaaggctcgaatccaggagtttgtgcggggccatttttatgggcatctggacttcaacttggacaagaccttatacttctttatcgccggccgctatgagttctccaacaagggtgctgacgtcttcctggaggcattggctcggctcaactatctgctcagagtgaacggcagcgagcagacagtggttgccttcttcatcatgccagcgcggaccaacaatttcaacgtggaaaccctcaaaggccaagctgtgcgcaaacagctttgggacacggccaacacggtgaaggaaaagttcgggaggaagctttatgaatccttactggttgggagccttcccgacatgaacaagatgctggataaggaagacttcactatgatgaagagagccatctttgcaacgcagcggcagtctttcccccctgtgtgcacccacaatatgctggatgactcctcagaccccatcctgaccaccatccgccgaatcggcctcttcaatagcagtgccgacagggtgaaggtgattttccacccggagttcctctcctccacaagccccctgctccctgtggactatgaggagtttgtccgtggctgtcaccttggagtcttcccctcctactatgagccttggggctacacaccggctgagtgcacggttatgggaatccccagtatctccaccaatctctccggcttcggctgcttcatggaggaacacatcgcagacccctcagcttacggtatctacattcttgaccggcggttccgcagcctggatgattcctgctcgcagctcacctccttcctctacagtttctgtcagcagagccggcggcagcgtatcatccagcggaaccgcacggagcgcctctccgaccttctggactggaaatacctaggccggtactatatgtctgcgcgccacatggcgctgtccaaggcctttccagagcacttcacctacgagcccaacgaggcggatgcggcccaggggtaccgctacccacggccagcctcggtgccaccgtcgccctcgctgtcacgacactccagcccgcaccagagtgaggacgaggaggatccccggaacgggccgctggaggaagacggcgagcgctacgatgaggacgaggaggccgccaaggaccggcgcaacatccgtgcaccagagtggccgcgccgagcgtcctgcacctcctccaccagcggcagcaagcgcaactctgtggacacggccacctccagctcactcagcaccccgagcgagcccctcagccccaccagctccctgggcgaggagcgtaactaagtccgccccaccacactccccgcctgtcctgcctctctgctccagagagaggatgcagaggggtgctgctcctaaacccccgctccagatctgcactgggtgtggccccgcagtgcccccacccagtccgccaaacactccaccccctccagctccagtttccaagttcctgcactccagaatccacaaagccgtgcctttctctggctccagaatatgcataatcagcgccctggagtcccctgggcctggaccgcttcccagaggccaggaatctgccattactctgcggtggtgccagaggttttaggaaacctggcatggtgctttcaggtctggggcttttagagccccccgtgtggcttacaaattctacagcatacagagcaggccacgctcaggcccggcatgcgggccaccaagttctggaaaccacgtggtgtccctgcgaatggggcgatcaagtccagagccggggcactttcagagtttgaaggtaactgagagcagatggtcctccatttcaactccagaagtggggctctgggagggatgttctagccctccctggcatgtcagagccaggctctgcctggaggatccctccatccggctcctgtcatcccctacactttggccaagcaagaggtggtagaaccacttggctgctcattccttctggaggacacacagtctcagtccagatgccttcctgtctttctggccctttctggaccagatcctactcttcctttctaaatctgagatctccctccagggaatccgcctgcagaggacagagctggctgtcttcccccacccctaacctggcttattcccaactgctctgcccactgtgaaaccactaggttctaggtcctggcttctagatctggaaccttaccacgttactgcatactgatccctttcccatgatccagaactgaggtcactgggttctagaacccccacatttacctcgaggctcttccatccccaaactgtgccctgccttcagctttggtgaaagggagggcccctcatgtgtgctgtgctgtgtctgcaccgcttggtttgcagttgagaggggagggcaggaggggtgtgattggagtgtgtccggagatgagatgaaaaaaatacatctatatttaagaatctcccaggtgtggtcagacatgacacttcgtgcag

SEQ ID NO: 348161 - DNA, 4193 bp, Homo sapiens
agtcctagcggaaacggaaacgcgcgaggagcgagatgttctggctcctctaggctagctggttcttcaaagatctcgatggttcctcataaatatgtaaatattgtgggggcgtggcgggactttatgccccgccctcccaccgaggctgcgctggaagacgggcgtccggaactcctgggtccattcccaatgtctcctggctcctcctccttttgctcagccccaccaccgccccgctcaggccgattgcaaaattcttagctgttctttgagtaaccacacgtcctccacgctcctttcctctttatcccaccctcctcctcctccccactttgaggcctccagctccagattgacagagctgaaggccactcgtttccgtaaagcgcagcggcaagctccgccccctggaggtctcacggccgaggcggggccgggacacagcgactccaacccgttccaccaatgaggacacgcggaaatccccgcccccgggcgtgggccaatggcgctggctggggggggcggccaccgcctcctggcggctgcgaggtttcactgcaggggcgccagtgggctcagtgacgctgcggcctccttctgcctaggtcccaacgcttcggggcaggggtgcggtcttgcaataggaagccgagcgtcttgcaagcttcccgtcgggcaccagctactcggccccgcaccctacctggtgcattccctagacacctccggggtccctacctggagatccccggagccccccttcctgcgccagccatgcctttaaaccgcactttgtccatgtcctcactgccaggactggaggactgggaggatgaattcgacctggagaacgcagtgctcttcgaagtggcctgggaggtggctaacaaggtgggtggcatctacacggtgctgcagacgaaggcgaaggtgacaggggacgaatggggcgacaactacttcctggtggggccgtacacggagcagggcgtgaggacccaggtggaactgctggaggcccccaccccggccctgaagaggacactggattccatgaacagcaagggctgcaaggtgtatttcgggcgctggctgatcgagggaggccctctggtggtgctcctggacgtgggtgcctcagcttgggccctggagcgctggaagggagagctctgggatacctgcaacatcggagtgccgtggtacgaccgcgaggccaacgacgctgtcctctttggctttctgaccacctggttcctgggtgagttcctggcacagagtgaggagaagccacatgtggttgctcacttccatgagtggttggcaggcgttggactctgcctgtgtcgtgcccggcgactgcctgtagcaaccatcttcaccacccatgccacgctgctggggcgctacctgtgtgccggtgccgtggacttctacaacaacctggagaacttcaacgtggacaaggaagcaggggagaggcagatctaccaccgatactgcatggaaagggcggcagcccactgcgctcacgtcttcactactgtgtcccagatcaccgccatcgaggcacagcacttgctcaagaggaaaccagatattgtgacccccaatgggctgaatgtgaagaagttttctgccatgcatgagttccagaacctccatgctcagagcaaggctcgaatccaggagtttgtgcggggccatttttatgggcatctggacttcaacttggacaagaccttatacttctttatcgccggccgctatgagttctccaacaagggtgctgacgtcttcctggaggcattggctcggctcaactatctgctcagagtgaacggcagcgagcagacagtggttgccttcttcatcatgccagcgcggaccaacaatttcaacgtggaaaccctcaaaggccaagctgtgcgcaaacagctttgggacacggccaacacggtgaaggaaaagttcgggaggaagctttatgaatccttactggttgggagccttcccgacatgaacaagatgctggataaggaagacttcactatgatgaagagagccatctttgcaacgcagcggcagtctttcccccctgtgtgcacccacaatatgctggatgactcctcagaccccatcctgaccaccatccgccgaatcggcctcttcaatagcagtgccgacagggtgaaggtgattttccacccggagttcctctcctccacaagccccctgctccctgtggactatgaggagtttgtccgtggctgtcaccttggagtcttcccctcctactatgagccttggggctacacaccggctgagtgcacggttatgggaatccccagtatctccaccaatctctccggcttcggctgcttcatggaggaacacatcgcagacccctcagcttacggtatctacattcttgaccggcggttccgcagcctggatgattcctgctcgcagctcacctccttcctctacagtttctgtcagcagagccggcggcagcgtatcatccagcggaaccgcacggagcgcctctccgaccttctggactggaaatacctaggccggtactatatgtctgcgcgccacatggcgctgtccaaggcctttccagagcacttcacctacgagcccaacgaggcggatgcggcccaggggtaccgctacccacggccagcctcggtgccaccgtcgccctcgctgtcacgacactccagcccgcaccagagtgaggacgaggaggatccccggaacgggccgctggaggaagacggcgagcgctacgatgaggacgaggaggccgccaaggaccggcgcaacatccgtgcaccagagtggccgcgccgagcgtcctgcacctcctccaccagcggcagcaagcgcaactctgtggacacggccacctccagctcactcagcaccccgagcgagcccctcagccccaccagctccctgggcgaggagcgtaactaagtccgccccaccacactccccgcctgtcctgcctctctgctccagagagaggatgcagaggggtgctgctcctaaacccccgctccagatctgcactgggtgtggccccgcagtgcccccacccagtccgccaaacactccaccccctccagctccagtttccaagttcctgcactccagaatccacaaagccgtgcctttctctggctccagaatatgcataatcagcgccctggagtcccctgggcctggaccgcttcccagaggccaggaatctgccattactctgcggtggtgccagaggttttaggaaacctggcatggtgctttcaggtctggggcttttagagccccccgtgtggcttacaaattctacagcatacagagcaggccacgctcaggcccggcatgcgggccaccaagttctggaaaccacgtggtgtccctgcgaatggggcgatcaagtccagagccggggcactttcagagtttgaaggtaactgagagcagatggtcctccatttcaactccagaagtggggctctgggagggatgttctagccctccctggcatgtcagagccaggctctgcctggaggatccctccatccggctcctgtcatcccctacactttggccaagcaagaggtggtagaaccacttggctgctcattccttctggaggacacacagtctcagtccagatgccttcctgtctttctggccctttctggaccagatcctactcttcctttctaaatctgagatctccctccagggaatccgcctgcagaggacagagctggctgtcttcccccacccctaacctggcttattcccaactgctctgcccactgtgaaaccactaggttctaggtcctggcttctagatctggaaccttaccacgttactgcatactgatccctttcccatgatccagaactgaggtcactgggttctagaacccccacatttacctcgaggctcttccatccccaaactgtgccctgccttcagctttggtgaaagggagggcccctcatgtgtgctgtgctgtgtctgcaccgcttggtttgcagttgagaggggagggcaggaggggtgtgattggagtgtgtccggagatgagatgaaaaaaatacatctatatttaagaatcgtcaaaaaataataaaataatatatgtatatgatgatat

SEQ ID NO: 348162 - DNA, 4209 bp, Homo sapiens
agtcctagcggaaacggaaacgcgcgaggagcgagatgttctggctcctctaggctagctggttcttcaaagatctcgatggttcctcataaatatgtaaatattgtgggggcgtggcgggactttatgccccgccctcccaccgaggctgcgctggaagacgggcgtccggaactcctgggtccattcccaatgtctcctggctcctcctccttttgctcagccccaccaccgccccgctcaggccgattgcaaaattcttagctgttctttgagtaaccacacgtcctccacgctcctttcctctttatcccaccctcctcctcctccccactttgaggcctccagctccagattgacagagctgaaggccactcgtttccgtaaagcgcagcggcaagctccgccccctggaggtctcacggccgaggcggggccgggacacagcgactccaacccgttccaccaatgaggacacgcggaaatccccgcccccgggcgtgggccaatggcgctggctggggggggcggccaccgcctcctggcggctgcgaggtttcactgcaggggcgccagtgggctcagtgacgctgcggcctccttctgcctaggtcccaacgcttcggggcaggggtgcggtcttgcaataggaagccgagcgtcttgcaagcttcccgtcgggcaccagctactcggccccgcaccctacctggtgcattccctagacacctccggggtccctacctggagatccccggagccccccttcctgcgccagccatgcctttaaaccgcactttgtccatgtcctcactgccaggactggaggactgggaggatgaattcgacctggagaacgcagtgctcttcgaagtggcctgggaggtggctaacaagggccccagaactatggacctcggccggggcctgccctcacacgcttgggcccacagtgggtggcatctacacggtgctgcagacgaaggcgaaggtgacaggggacgaatggggcgacaactacttcctggtggggccgtacacggagcagggcgtgaggacccaggtggaactgctggaggcccccaccccggccctgaagaggacactggattccatgaacagcaagggctgcaaggtgtatttcgggcgctggctgatcgagggaggccctctggtggtgctcctggacgtgggtgcctcagcttgggccctggagcgctggaagggagagctctgggatacctgcaacatcggagtgccgtggtacgaccgcgaggccaacgacgctgtcctctttggctttctgaccacctggttcctgggtgagttcctggcacagagtgaggagaagccacatgtggttgctcacttccatgagtggttggcaggcgttggactctgcctgtgtcgtgcccggcgactgcctgtagcaaccatcttcaccacccatgccacgctgctggggcgctacctgtgtgccggtgccgtggacttctacaacaacctggagaacttcaacgtggacaaggaagcaggggagaggcagatctaccaccgatactgcatggaaagggcggcagcccactgcgctcacgtcttcactactgtgtcccagatcaccgccatcgaggcacagcacttgctcaagaggaaaccagatattgtgacccccaatgggctgaatgtgaagaagttttctgccatgcatgagttccagaacctccatgctcagagcaaggctcgaatccaggagtttgtgcggggccatttttatgggcatctggacttcaacttggacaagaccttatacttctttatcgccggccgctatgagttctccaacaagggtgctgacgtcttcctggaggcattggctcggctcaactatctgctcagagtgaacggcagcgagcagacagtggttgccttcttcatcatgccagcgcggaccaacaatttcaacgtggaaaccctcaaaggccaagctgtgcgcaaacagctttgggacacggccaacacggtgaaggaaaagttcgggaggaagctttatgaatccttactggttgggagccttcccgacatgaacaagatgctggataaggaagacttcactatgatgaagagagccatctttgcaacgcagcggcagtctttcccccctgtgtgcacccacaatatgctggatgactcctcagaccccatcctgaccaccatccgccgaatcggcctcttcaatagcagtgccgacagggtgaaggtgattttccacccggagttcctctcctccacaagccccctgctccctgtggactatgaggagtttgtccgtggctgtcaccttggagtcttcccctcctactatgagccttggggctacacaccggctgagtgcacggttatgggaatccccagtatctccaccaatctctccggcttcggctgcttcatggaggaacacatcgcagacccctcagcttacggtatctacattcttgaccggcggttccgcagcctggatgattcctgctcgcagctcacctccttcctctacagtttctgtcagcagagccggcggcagcgtatcatccagcggaaccgcacggagcgcctctccgaccttctggactggaaatacctaggccggtactatatgtctgcgcgccacatggcgctgtccaaggcctttccagagcacttcacctacgagcccaacgaggcggatgcggcccaggggtaccgctacccacggccagcctcggtgccaccgtcgccctcgctgtcacgacactccagcccgcaccagagtgaggacgaggaggatccccggaacgggccgctggaggaagacggcgagcgctacgatgaggacgaggaggccgccaaggaccggcgcaacatccgtgcaccagagtggccgcgccgagcgtcctgcacctcctccaccagcggcagcaagcgcaactctgtggacacggccacctccagctcactcagcaccccgagcgagcccctcagccccaccagctccctgggcgaggagcgtaactaagtccgccccaccacactccccgcctgtcctgcctctctgctccagagagaggatgcagaggggtgctgctcctaaacccccgctccagatctgcactgggtgtggccccgcagtgcccccacccagtccgccaaacactccaccccctccagctccagtttccaagttcctgcactccagaatccacaaagccgtgcctttctctggctccagaatatgcataatcagcgccctggagtcccctgggcctggaccgcttcccagaggccaggaatctgccattactctgcggtggtgccagaggttttaggaaacctggcatggtgctttcaggtctggggcttttagagccccccgtgtggcttacaaattctacagcatacagagcaggccacgctcaggcccggcatgcgggccaccaagttctggaaaccacgtggtgtccctgcgaatggggcgatcaagtccagagccggggcactttcagagtttgaaggtaactgagagcagatggtcctccatttcaactccagaagtggggctctgggagggatgttctagccctccctggcatgtcagagccaggctctgcctggaggatccctccatccggctcctgtcatcccctacactttggccaagcaagaggtggtagaaccacttggctgctcattccttctggaggacacacagtctcagtccagatgccttcctgtctttctggccctttctggaccagatcctactcttcctttctaaatctgagatctccctccagggaatccgcctgcagaggacagagctggctgtcttcccccacccctaacctggcttattcccaactgctctgcccactgtgaaaccactaggttctaggtcctggcttctagatctggaaccttaccacgttactgcatactgatccctttcccatgatccagaactgaggtcactgggttctagaacccccacatttacctcgaggctcttccatccccaaactgtgccctgccttcagctttggtgaaagggagggcccctcatgtgtgctgtgctgtgtctgcaccgcttggtttgcagttgagaggggagggcaggaggggtgtgattggagtgtgtccggagatgagatgaaaaaaatacatctatatttaagaatc

SEQ ID NO: 348163 - DNA, 3543 bp, Homo sapiens
ggcgctttcgtgttatgagcatgggccttggctctgacaattgacacgcgtcttgcaagcttcccgtcgggcaccagctactcggccccgcaccctacctggtgcattccctagacacctccggggtccctacctggagatccccggagccccccttcctgcgccagccatgcctttaaaccgcactttgtccatgtcctcactgccaggactggaggactgggaggatgaattcgacctggagaacgcagtgctcttcgaagtggcctgggaggtggctaacaaggtgggtggcatctacacggtgctgcagacgaaggcgaaggtgacaggggacgaatggggcgacaactacttcctggtggggccgtacacggagcagggcgtgaggacccaggtggaactgctggaggcccccaccccggccctgaagaggacactggattccatgaacagcaagggctgcaaggtgtatttcgggcgctggctgatcgagggaggccctctggtggtgctcctggacgtgggtgcctcagcttgggccctggagcgctggaagggagagctctgggatacctgcaacatcggagtgccgtggtacgaccgcgaggccaacgacgctgtcctctttggctttctgaccacctggttcctgggtgagttcctggcacagagtgaggagaagccacatgtggttgctcacttccatgagtggttggcaggcgttggactctgcctgtgtcgtgcccggcgactgcctgtagcaaccatcttcaccacccatgccacgctgctggggcgctacctgtgtgccggtgccgtggacttctacaacaacctggagaacttcaacgtggacaaggaagcaggggagaggcagatctaccaccgatactgcatggaaagggcggcagcccactgcgctcacgtcttcactactgtgtcccagatcaccgccatcgaggcacagcacttgctcaagaggaaaccagatattgtgacccccaatgggctgaatgtgaagaagttttctgccatgcatgagttccagaacctccatgctcagagcaaggctcgaatccaggagtttgtgcggggccatttttatgggcatctggacttcaacttggacaagaccttatacttctttatcgccggccgctatgagttctccaacaagggtgctgacgtcttcctggaggcattggctcggctcaactatctgctcagagtgaacggcagcgagcagacagtggttgccttcttcatcatgccagcgcggaccaacaatttcaacgtggaaaccctcaaaggccaagctgtgcgcaaacagctttgggacacggccaacacggtgaaggaaaagttcgggaggaagctttatgaatccttactggttgggagccttcccgacatgaacaagatgctggataaggaagacttcactatgatgaagagagccatctttgcaacgcagcggcagtctttcccccctgtgtgcacccacaatatgctggatgactcctcagaccccatcctgaccaccatccgccgaatcggcctcttcaatagcagtgccgacagggtgaaggtgattttccacccggagttcctctcctccacaagccccctgctccctgtggactatgaggagtttgtccgtggctgtcaccttggagtcttcccctcctactatgagccttggggctacacaccggctgagtgcacggttatgggaatccccagtatctccaccaatctctccggcttcggctgcttcatggaggaacacatcgcagacccctcagcttacggtatctacattcttgaccggcggttccgcagcctggatgattcctgctcgcagctcacctccttcctctacagtttctgtcagcagagccggcggcagcgtatcatccagcggaaccgcacggagcgcctctccgaccttctggactggaaatacctaggccggtactatatgtctgcgcgccacatggcgctgtccaaggcctttccagagcacttcacctacgagcccaacgaggcggatgcggcccaggggtaccgctacccacggccagcctcggtgccaccgtcgccctcgctgtcacgacactccagcccgcaccagagtgaggacgaggaggatccccggaacgggccgctggaggaagacggcgagcgctacgatgaggacgaggaggccgccaaggaccggcgcaacatccgtgcaccagagtggccgcgccgagcgtcctgcacctcctccaccagcggcagcaagcgcaactctgtggacacggccacctccagctcactcagcaccccgagcgagcccctcagccccaccagctccctgggcgaggagcgtaactaagtccgccccaccacactccccgcctgtcctgcctctctgctccagagagaggatgcagaggggtgctgctcctaaacccccgctccagatctgcactgggtgtggccccgcagtgcccccacccagtccgccaaacactccaccccctccagctccagtttccaagttcctgcactccagaatccacaaagccgtgcctttctctggctccagaatatgcataatcagcgccctggagtcccctgggcctggaccgcttcccagaggccaggaatctgccattactctgcggtggtgccagaggttttaggaaacctggcatggtgctttcaggtctggggcttttagagccccccgtgtggcttacaaattctacagcatacagagcaggccacgctcaggcccggcatgcgggccaccaagttctggaaaccacgtggtgtccctgcgaatggggcgatcaagtccagagccggggcactttcagagtttgaaggtaactgagagcagatggtcctccatttcaactccagaagtggggctctgggagggatgttctagccctccctggcatgtcagagccaggctctgcctggaggatccctccatccggctcctgtcatcccctacactttggccaagcaagaggtggtagaaccacttggctgctcattccttctggaggacacacagtctcagtccagatgccttcctgtctttctggccctttctggaccagatcctactcttcctttctaaatctgagatctccctccagggaatccgcctgcagaggacagagctggctgtcttcccccacccctaacctggcttattcccaactgctctgcccactgtgaaaccactaggttctaggtcctggcttctagatctggaaccttaccacgttactgcatactgatccctttcccatgatccagaactgaggtcactgggttctagaacccccacatttacctcgaggctcttccatccccaaactgtgccctgccttcagctttggtgaaagggagggcccctcatgtgtgctgtgctgtgtctgcaccgcttggtttgcagttgagaggggagggcaggaggggtgtgattggagtgtgtccggagatgagatgaaaaaaatacatctatatttaagaatc

SEQ ID NO: 348164 - DNA, 3593 bp, Homo sapiens
cggcctggtacggtcggaagtcttagatccttctgcctaggtcccaacgcttcggggcaggggtgcggtcttgcaataggaagccgagcgtcttgcaagcttcccgtcgggcaccagctactcggccccgcaccctacctggtgcattccctagacacctccggggtccctacctggagatccccggagccccccttcctgcgccagccatgcctttaaaccgcactttgtccatgtcctcactgccaggactggaggactgggaggatgaattcgacctggagaacgcagtgctcttcgaagtggcctgggaggtggctaacaaggtgggtggcatctacacggtgctgcagacgaaggcgaaggtgacaggggacgaatggggcgacaactacttcctggtggggccgtacacggagcagggcgtgaggacccaggtggaactgctggaggcccccaccccggccctgaagaggacactggattccatgaacagcaagggctgcaaggtgtatttcgggcgctggctgatcgagggaggccctctggtggtgctcctggacgtgggtgcctcagcttgggccctggagcgctggaagggagagctctgggatacctgcaacatcggagtgccgtggtacgaccgcgaggccaacgacgctgtcctctttggctttctgaccacctggttcctgggtgagttcctggcagttcctggcacagagtgaggagaagccacatgtggttgctcacttccatgagtggttggcaggcgttggactctgcctgtgtcgtgcccggcgactgcctgtagcaaccatcttcaccacccatgccacgctgctggggcgctacctgtgtgccggtgccgtggacttctacaacaacctggagaacttcaacgtggacaaggaagcaggggagaggcagatctaccaccgatactgcatggaaagggcggcagcccactgcgctcacgtcttcactactgtgtcccagatcaccgccatcgaggcacagcacttgctcaagaggaaaccagatattgtgacccccaatgggctgaatgtgaagaagttttctgccatgcatgagttccagaacctccatgctcagagcaaggctcgaatccaggagtttgtgcggggccatttttatgggcatctggacttcaacttggacaagaccttatacttctttatcgccggccgctatgagttctccaacaagggtgctgacgtcttcctggaggcattggctcggctcaactatctgctcagagtgaacggcagcgagcagacagtggttgccttcttcatcatgccagcgcggaccaacaatttcaacgtggaaaccctcaaaggccaagctgtgcgcaaacagctttgggacacggccaacacggtgaaggaaaagttcgggaggaagctttatgaatccttactggttgggagccttcccgacatgaacaagatgctggataaggaagacttcactatgatgaagagagccatctttgcaacgcagcggcagtctttcccccctgtgtgcacccacaatatgctggatgactcctcagaccccatcctgaccaccatccgccgaatcggcctcttcaatagcagtgccgacagggtgaaggtgattttccacccggagttcctctcctccacaagccccctgctccctgtggactatgaggagtttgtccgtggctgtcaccttggagtcttcccctcctactatgagccttggggctacacaccggctgagtgcacggttatgggaatccccagtatctccaccaatctctccggcttcggctgcttcatggaggaacacatcgcagacccctcagcttacggtatctacattcttgaccggcggttccgcagcctggatgattcctgctcgcagctcacctccttcctctacagtttctgtcagcagagccggcggcagcgtatcatccagcggaaccgcacggagcgcctctccgaccttctggactggaaatacctaggccggtactatatgtctgcgcgccacatggcgctgtccaaggcctttccagagcacttcacctacgagcccaacgaggcggatgcggcccaggggtaccgctacccacggccagcctcggtgccaccgtcgccctcgctgtcacgacactccagcccgcaccagagtgaggacgaggaggatccccggaacgggccgctggaggaagacggcgagcgctacgatgaggacgaggaggccgccaaggaccggcgcaacatccgtgcaccagagtggccgcgccgagcgtcctgcacctcctccaccagcggcagcaagcgcaactctgtggacacggccacctccagctcactcagcaccccgagcgagcccctcagccccaccagctccctgggcgaggagcgtaactaagtccgccccaccacactccccgcctgtcctgcctctctgctccagagagaggatgcagaggggtgctgctcctaaacccccgctccagatctgcactgggtgtggccccgcagtgcccccacccagtccgccaaacactccaccccctccagctccagtttccaagttcctgcactccagaatccacaaagccgtgcctttctctggctccagaatatgcataatcagcgccctggagtcccctgggcctggaccgcttcccagaggccaggaatctgccattactctgcggtggtgccagaggttttaggaaacctggcatggtgctttcaggtctggggcttttagagccccccgtgtggcttacaaattctacagcatacagagcaggccacgctcaggcccggcatgcgggccaccaagttctggaaaccacgtggtgtccctgcgaatggggcgatcaagtccagagccggggcactttcagagtttgaaggtaactgagagcagatggtcctccatttcaactccagaagtggggctctgggagggatgttctagccctccctggcatgtcagagccaggctctgcctggaggatccctccatccggctcctgtcatcccctacactttggccaagcaagaggtggtagaaccacttggctgctcattccttctggaggacacacagtctcagtccagatgccttcctgtctttctggccctttctggaccagatcctactcttcctttctaaatctgagatctccctccagggaatccgcctgcagaggacagagctggctgtcttcccccacccctaacctggcttattcccaactgctctgcccactgtgaaaccactaggttctaggtcctggcttctagatctggaaccttaccacgttactgcatactgatccctttcccatgatccagaactgaggtcactgggttctagaacccccacatttacctcgaggctcttccatccccaaactgtgccctgccttcagctttggtgaaagggagggcccctcatgtgtgctgtgctgtgtctgcaccgcttggtttgcagttgagaggggagggcaggaggggtgtgattggagtgtgtccggagatgagatgaaaaaaatacatctatatttaagaatc

SEQ ID NO: 348165 - DNA, 3566 bp, Homo sapiens
agtcctagcggaaacggaaacgcgcgaggagcgagatgttctggctcctctaggctagctggttcttcaaagatctcgatggttcctcataaatatgtaaatattgtgggggcgtggcgggactttatgccccgccctcccaccgaggctgcgctggaagacgggcgtccggaactcctgggtccattcccaatgtctcctggctcctcctccttttgctcagccccaccaccgccccgctcaggccgattgcaaaattcttagctgttctttgagtaaccacacgtcctccacgctcctttcctctttatcccaccctcctcctcctccccactttgaggcctccagctccagattgacagagctgaaggccactcgtttccgtaaagcgcagcggcaagctccgccccctggaggtctcacggccgaggcggggccgggacacagcgactccaacccgttccaccaatgaggacacgcggaaatccccgcccccgggcgtgggccaatggcgctggctggggggggcggccaccgcctcctggcggctgcgaggtttcactgcaggggcgccagtgggctcagtgacgctgcggcctccttctgcctaggtcccaacgcttcggggcaggggtgcggtcttgcaataggaagccgagcgtcttgcaagcttcccgtcgggcaccagctactcggccccgcaccctacctggtgcattccctagacacctccggggtccctacctggagatccccggagccccccttcctgcgccagccatgcctttaaaccgcactttgtccatgtcctcactgccaggactggaggactgggaggatgaattcgacctggagaacgcagtgctcttcgaagtggcctgggaggtggctaacaaggtgggtggcatctacacggtgctgcagacgaaggcgaaggtgacaggggacgaatggggcgacaactacttcctggtggggccgtacacggagcagggcgtgaggacccaggtggaactgctggaggcccccaccccggccctgaagaggacactggattccatgaacagcaagggctgcaaggtgtatttcgggcgctggctgatcgagggaggccctctggtggtgctcctggacgtgggtgcctcagcttgggccctggagcgctggaagggagagctctgggatacctgcaacatcggagtgccgtggtacgaccgcgaggccaacgacgctgtcctctttggctttctgaccacctggttcctgggtgagttcctggcacagagtgaggagaagccacatgtggttgctcacttccatgagtggttggcaggcgttggactctgcctgtgtcgtgcccggcgactgcctgtagcaaccatcttcaccacccatgccacgctgctggggcgctacctgtgtgccggtgccgtggacttctacaacaacctggagaacttcaacgtggacaaggaagcaggggagaggcagatctaccaccgatactgcatggaaagggcggcagcccactgcgctcacgtcttcactactgtgtcccagatcaccgccatcgaggcacagcacttgctcaagaggaaaccagatattgtgacccccaatgggctgaatgtgaagaagttttctgccatgcatgagttccagaacctccatgctcagagcaaggctcgaatccaggagtttgtgcggggccatttttatgggcatctggacttcaacttggacaagaccttatacttctttatcgccggccgctatgagttctccaacaagggtgctgacgtcttcctggaggcattggctcggctcaactatctgctcagagtgaacggcagcgagcagacagtggttgccttcttcatcatgccagcgcggaccaacaatttcaacgtggaaaccctcaaaggccaagctgtgcgcaaacagctttgggacacggccaacacggtgaaggaaaagttcgggaggaagctttatgaatccttactggttgggagccttcccgacatgaacaagatgctggataaggaagacttcactatgatgaagagagccatctttgcaacgcagcggcagtctttcccccctgtgtgcacccacaatatgctggatgactcctcagaccccatcctgaccaccatccgccgaatcggcctcttcaatagcagtgccgacagggtgaaggtgattttccacccggagttcctctcctccacaagccccctgctccctgtggactatgaggagtttgtccgtggctgtcaccttggagtcttcccctcctactatgagccttggggctacacaccggctgagtgcacggttatgggaatccccagtatctccaccaatctctccggcttcggctgcttcatggaggaacacatcgcagacccctcagcttacggtatctacattcttgaccggcggttccgcagcctggatgattcctgctcgcagctcacctccttcctctacagtttctgtcagcagagccggcggcagcgtatcatccagcggaaccgcacggagcgcctctccgaccttctggactggaaatacctaggccggtactatatgtctgcgcgccacatggcgctgtccaaggcctttccagagcacttcacctacgagcccaacgaggcggatgcggcccaggggtaccgctacccacggccagcctcggtgccaccgtcgccctcgctgtcacgacactccagcccgcaccagagtgaggacgaggaggatccccggaacgggccgctggaggaagacggcgagcgctacgatgaggacgaggaggccgccaaggaccggcgcaacatccgtgcaccagagtggccgcgccgagcgtcctgcacctcctccaccagcggcagcaagcgcaactctgtggacacggccacctccagctcactcagcaccccgagcgagcccctcagccccaccagctccctgggcgaggagcgtaactaagtccgccccaccacactccccgcctgtcctgcctctctgctccagagagaggatgcagaggggtgctgctcctaaacccccgctccagatctgcactgggtgtggccccgcagtgcccccacccagtccgccaaacactccaccccctccaatcctactcttcctttctaaatctgagatctccctccagggaatccgcctgcagaggacagagctggctgtcttcccccacccctaacctggcttattcccaactgctctgcccactgtgaaaccactaggttctaggtcctggcttctagatctggaaccttaccacgttactgcatactgatccctttcccatgatccagaactgaggtcactgggttctagaacccccacatttacctcgaggctcttccatccccaaactgtgccctgccttcagctttggtgaaagggagggcccctcatgtgtgctgtgctgtgtctgcaccgcttggtttgcagttgagaggggagggcaggaggggtgtgattggagtgtgtccggagatgagatgaaaaaaatacatctatatttaagaatc

SEQ ID NO: 348166 - DNA, 2862 bp, Homo sapiens
agtcctagcggaaacggaaacgcgcgaggagcgagatgttctggctcctctaggctagctggttcttcaaagatctcgatggttcctcataaatatgtaaatattgtgggggcgtggcgggactttatgccccgccctcccaccgaggctgcgctggaagacgggcgtccggaactcctgggtccattcccaatgtctcctggctcctcctccttttgctcagccccaccaccgccccgctcaggccgattgcaaaattcttagctgttctttgagtaaccacacgtcctccacgctcctttcctctttatcccaccctcctcctcctccccactttgaggcctccagctccagattgacagagctgaaggccactcgtttccgtaaagcgcagcggcaagctccgccccctggaggtctcacggccgaggcggggccgggacacagcgactccaacccgttccaccaatgaggacacgcggaaatccccgcccccgggcgtgggccaatggcgctggctggggggggcggccaccgcctcctggcggctgcgaggtttcactgcaggggcgccagtgggctcagtgacgctgcggcctccttctgcctaggtcccaacgcttcggggcaggggtgcggtcttgcaataggaagccgagcgtcttgcaagcttcccgtcgggcaccagctactcggccccgcaccctacctggtgcattccctagacacctccggggtccctacctggagatccccggagccccccttcctgcgccagccatgcctttaaaccgcactttgtccatgtcctcactgccaggactggaggactgggaggatgaattcgacctggagaacgcagtgctcttcgaagtggcctgggaggtggctaacaaggtgggtggcatctacacggtgctgcagacgaaggcgaaggtgacaggggacgaatggggcgacaactacttcctggtggggccgtacacggagcagggcgtgaggacccaggtggaactgctggaggcccccaccccggccctgaagaggacactggattccatgaacagcaagggctgcaaggtgtatttcgggcgctggctgatcgagggaggccctctggtggtgctcctggacgtgggtgcctcagcttgggccctggagcgctggaagggagagctctgggatacctgcaacatcggagtgccgtggtacgaccgcgaggccaacgacgctgtcctctttggctttctgaccacctggttcctgggtgagttcctggcacagagtgaggagaagccacatgtggttgctcacttccatgagtggttggcaggcgttggactctgcctgtgtcgtgcccggcgactgcctgtagcaaccatcttcaccacccatgccacgctgctggggcgctacctgtgtgccggtgccgtggacttctacaacaacctggagaacttcaacgtggacaaggaagcaggggagaggcagatctaccaccgatactgcatggaaagggcggcagcccactgcgctcacgtcttcactactgtgtcccagatcaccgccatcgaggcacagcacttgctcaagaggaaaccagatattgtgacccccaatgggctgaatgtgaagaagttttctgccatgcatgagttccagaacctccatgctcagagcaaggctcgaatccaggagtttgtgcggggccatttttatgggcatctggacttcaacttggacaagaccttatacttctttatcgccggccgctatgagttctccaacaagggtgctgacgtcttcctggaggcattggctcggctcaactatctgctcagagtgaacggcagcgagcagacagtggttgccttcttcatcatgccagcgcggaccaacaatttcaacgtggaaaccctcaaaggccaagctgtgcgcaaacagctttgggacacggccaacacggtgaaggaaaagttcgggaggaagctttatgaatccttactggttgggagccttcccgacatgaacaagatgctggataaggaagacttcactatgatgaagagagccatctttgcaacgcagcggcagtctttcccccctgtgtgcacccacaatatgctggatgactcctcagaccccatcctgaccaccatccgccgaatcggcctcttcaatagcagtgccgacagggtgaaggtgattttccacccggagttcctctcctccacaagccccctgctccctgtggactatgaggagtttgtccgtggctgtcaccttggagtcttcccctcctactatgagccttggggctacacaccggctgagtgcacggttatgggaatccccagtatctccaccaatctctccggcttcggctgcttcatggaggaacacatcgcagacccctcagcttacggtatctacattcttgaccggcggttccgcagcctggatgattcctgctcgcagctcacctccttcctctacagtttctgtcagcagagccggcggcagcgtatcatccagcggaaccgcacggagcgcctctccgaccttctggactggaaatacctaggccgggtaggacccccactttcctatcctctcctggcaaatcagcagctcctggctaggggtctttggtgcagggtgcagggtctcatcctacttgtaacagttgctgtccctttaagcaatgaaccaggccgatcgcgatggtggctcatggttgtaatcccagcactttgggaggcctaacaggaaggatcgcatgagctcaggagttaagagaccagcctgggcaacattttatttttactaaaaataaaaaaaaatcagccgagcgtgatggtg

SEQ ID NO: 348167 - DNA, 3123 bp, Homo sapiens
agtcctagcggaaacggaaacgcgcgaggagcgagatgttctggctcctctaggctagctggttcttcaaagatctcgatggttcctcataaatatgtaaatattgtgggggcgtggcgggactttatgccccgccctcccaccgaggctgcgctggaagacgggcgtccggaactcctgggtccattcccaatgtctcctggctcctcctccttttgctcagccccaccaccgccccgctcaggccgattgcaaaattcttagctgttctttgagtaaccacacgtcctccacgctcctttcctctttatcccaccctcctcctcctccccactttgaggcctccagctccagattgacagagctgaaggccactcgtttccgtaaagcgcagcggcaagctccgccccctggaggtctcacggccgaggcggggccgggacacagcgactccaacccgttccaccaatgaggacacgcggaaatccccgcccccgggcgtgggccaatggcgctggctggggggggcggccaccgcctcctggcggctgcgaggtttcactgcaggggcgccagtgggctcagtgacgctgcggcctccttctgcctaggtcccaacgcttcggggcaggggtgcggtcttgcaataggaagccgagcgtcttgcaagcttcccgtcgggcaccagctactcggccccgcaccctacctggtgcattccctagacacctccggggtccctacctggagatccccggagccccccttcctgcgccagccatgcctttaaaccgcactttgtccatgtcctcactgccaggactggaggactgggaggatgaattcgacctggagaacgcagtgctcttcgaagtggcctgggaggtggctaacaaggtgggtggcatctacacggtgctgcagacgaaggcgaaggtgacaggggacgaatggggcgacaactacttcctggtggggccgtacacggagcagggcgtgaggacccaggtggaactgctggaggcccccaccccggccctgaagaggacactggattccatgaacagcaagggctgcaaggtgtatttcgggcgctggctgatcgagggaggccctctggtggtgctcctggacgtgggtgcctcagcttgggccctggagcgctggaagggagagctctgggatacctgcaacatcggagtgccgtggtacgaccgcgaggccaacgacgctgtcctctttggctttctgaccacctggttcctgggtgagttcctggcacagagtgaggagaagccacatgtggttgctcacttccatgagtggttggcaggcgttggactctgcctgtgtcgtgcccggcgactgcctgtagcaaccatcttcaccacccatgccacgctgctggggcgctacctgtgtgccggtgccgtggacttctacaacaacctggagaacttcaacgtggacaaggaagcaggggagaggcagatctaccaccgatactgcatggaaagggcggcagcccactgcgctcacgtcttcactactgtgtcccagatcaccgccatcgaggcacagcacttgctcaagaggaaaccagatattgtgacccccaatgggctgaatgtgaagaagttttctgccatgcatgagttccagaacctccatgctcagagcaaggctcgaatccaggagtttgtgcggggccatttttatgggcatctggacttcaacttggacaagaccttatacttctttatcgccggccgctatgagttctccaacaagggtgctgacgtcttcctggaggcattggctcggctcaactatctgctcagagtgaacggcagcgagcagacagtggttgccttcttcatcatgccagcgcggaccaacaatttcaacgtggaaaccctcaaaggccaagctgtgcgcaaacagctttgggacacggccaacacggtgaaggaaaagttcgggaggaagctttatgaatccttactggttgggagccttcccgacatgaacaagatgctggataaggaagacttcactatgatgaagagagccatctttgcaacgcagcggcagtctttcccccctgtgtgcacccacaatatgctggatgactcctcagaccccatcctgaccaccatccgccgaatcggcctcttcaatagcagtgccgacagggtgaaggtgattttccacccggagttcctctcctccacaagccccctgctccctgtggactatgaggagtttgtccgtggctgtcaccttggagtcttcccctcctactatgagccttggggctacacaccggctgagtgcacggttatgggaatccccagtatctccaccaatctctccggcttcggctgcttcatggaggaacacatcgcagacccctcagcttacgcgtatcatccagcggaaccgcacggagcgcctctccgaccttctggactggaaatacctaggccggtactatatgtctgcgcgccacatggcgctgtccaaggcctttccagagcacttcacctacgagcccaacgaggcggatgcggcccaggggtaccgctacccacggccagcctcggtgccaccgtcgccctcgctgtcacgacactccagcccgcaccagagtgaggacgaggaggatccccggaacgggccgctggaggaagacggcgagcgctacgatgaggacgaggaggccgccaaggaccggcgcaacatccgtgcaccagagtggccgcgccgagcgtcctgcacctcctccaccagcggcagcaagcgcaactctgtggacacggccacctccagctcactcagcaccccgagcgagcccctcagccccaccagctccctgggcgaggagcgtaactaagtccgccccaccacactccccgcctgtcctgcctctctgctccagagagaggatgcagaggggtgctgctcctaaacccccgctccagatctgcactgggtgtggccccgcagtgccccaccatcgcaaagatccaacccttcaggtcagttcaagttctggctcagattccaagcggcttttttggtccgaattgctatcacgctgagtcctggctgctgttcaag

SEQ ID NO: 348168 - DNA, 387 bp, Homo sapiens
actaaaaatagaaaattagccgggcgcggtggctcatgcctgtaatcccagctactcgggaggctgaggcaggagaattgcttgaacctgggaggcagaggttgcagtgagccgagatcacgccattgcattccagcctgggcaacaagagccaaactccgtctcaaaataaacaaacaaactaactaaagaagcctaacagtaaatggcagctggtgtgtatgtgaccctgttgctctgcttcctccagggacacggccaacacggtgaaggaaaagttcgggaggaagctttatgaatccttactggtgtgagtgccccaccctcagccctgtgccctcctaggccctgactaacccctctcattactccgttctcacatgcatg

SEQ ID NO: 348169 - DNA, 483 bp, Homo sapiens
ctggtgccacagagtcctggagaccatgaagatctccccaggatgttttctgaacctgggtcctggcctccacaggtatctacattcttgaccggcggttccgcagcctggatgattcctgctcgcagctcacctccttcctctacagtttctgtcagcagagccggcggcagcgtatcatccagcggaaccgcacggagcgcctctccgaccttctggactggaaatacctaggccgggtaggacccccactttcctatcctctcctggcaaatcagcagctcctggctaggggtctttggtgcagggtgcagggtctcatcctacttgtaacagttgctgtccctttaagcaatgaaccaggccgatcgcgatggtggctcatggttgtaatcccagcactttgggaggcctaacaggaaggatcgcatgagctcaggagttaagagaccagcctgggcaacattttatttttactaaaaa

SEQ ID NO: 348170 - DNA, 422 bp, Homo sapiens
tgtggtgatctagaggaccccgtacagcccgcaccctacctggtgcattccctagacacctccggggtccctacctggagatccccggagccccccttcctgcgccagccatgcctttaaaccgcactttgtccatgtcctcactgccaggactggaggactgggaggatgaattcgacctggagaacgcagtgctcttcgaagtggcctgggaggtggctaacaaggtgggtggcatctacacggtgctgcagacgaaggcgaaggtgacaggggacgaatggggcgacaactacttcctggtggggccttggatcaggcagattctctgaagtagatccctgacactaaggaactgcttgaagctaaatggcctcctggcagtctgtccaaccttcaggtcactcagcctacagttggga

SEQ ID NO: 348171 - DNA, 3967 bp, Homo sapiens
agtcctagcggaaacggaaacgcgcgaggagcgagatgttctggctcctctaggctagctggttcttcaaagatctcgatggttcctcataaatatgtaaatattgtgggggcgtggcgggactttatgccccgccctcccaccgaggctgcgctggaagacgggcgtccggaactcctgggtccattcccaatgtctcctggctcctcctccttttgctcagccccaccaccgccccgctcaggccgattgcaaaattcttagctgttctttgagtaaccacacgtcctccacgctcctttcctctttatcccaccctcctcctcctccccactttgaggcctccagctccagattgacagagctgaaggccactcgtttccgtaaagcgcagcggcaagctccgccccctggaggtctcacggccgaggcggggccgggacacagcgactccaacccgttccaccaatgaggacacgcggaaatccccgcccccgggcgtgggccaatggcgctggctggggggggcggccaccgcctcctggcggctgcgaggtttcactgcaggggcgccagtgggctcagtgacgctgcggcctccttctgcctaggtcccaacgcttcggggcaggggtgcggtcttgcaataggaagccgagcgtcttgcaagcttcccgtcgggcaccagctactcggccccgcaccctacctggtgcattccctagacacctccggggtccctacctggagatccccggagccccccttcctgcgccagccatgcctttaaaccgcactttgtccatgtcctcactgccaggactggaggactgggaggatgaattcgacctggagaacgcagtgctcttcgaagtggcctgggaggtggctaacaaggtgggtggcatctacacggtgctgcagacgaaggcgaaggtgacaggggacgaatggggcgacaactacttcctggtggggccgtacacggagcagggcgtgaggacccaggtggaactgctggaggcccccaccccggccctgaagaggacactggattccatgaacagcaagggctgcaaggtgagttcctggcacagagtgaggagaagccacatgtggttgctcacttccatgagtggttggcaggcgttggactctgcctgtgtcgtgcccggcgactgcctgtagcaaccatcttcaccacccatgccacgctgctggggcgctacctgtgtgccggtgccgtggacttctacaacaacctggagaacttcaacgtggacaaggaagcaggggagaggcagatctaccaccgatactgcatggaaagggcggcagcccactgcgctcacgtcttcactactgtgtcccagatcaccgccatcgaggcacagcacttgctcaagaggaaaccagatattgtgacccccaatgggctgaatgtgaagaagttttctgccatgcatgagttccagaacctccatgctcagagcaaggctcgaatccaggagtttgtgcggggccatttttatgggcatctggacttcaacttggacaagaccttatacttctttatcgccggccgctatgagttctccaacaagggtgctgacgtcttcctggaggcattggctcggctcaactatctgctcagagtgaacggcagcgagcagacagtggttgccttcttcatcatgccagcgcggaccaacaatttcaacgtggaaaccctcaaaggccaagctgtgcgcaaacagctttgggacacggccaacacggtgaaggaaaagttcgggaggaagctttatgaatccttactggttgggagccttcccgacatgaacaagatgctggataaggaagacttcactatgatgaagagagccatctttgcaacgcagcggcagtctttcccccctgtgtgcacccacaatatgctggatgactcctcagaccccatcctgaccaccatccgccgaatcggcctcttcaatagcagtgccgacagggtgaaggtgattttccacccggagttcctctcctccacaagccccctgctccctgtggactatgaggagtttgtccgtggctgtcaccttggagtcttcccctcctactatgagccttggggctacacaccggctgagtgcacggttatgggaatccccagtatctccaccaatctctccggcttcggctgcttcatggaggaacacatcgcagacccctcagcttacggtatctacattcttgaccggcggttccgcagcctggatgattcctgctcgcagctcacctccttcctctacagtttctgtcagcagagccggcggcagcgtatcatccagcggaaccgcacggagcgcctctccgaccttctggactggaaatacctaggccggtactatatgtctgcgcgccacatggcgctgtccaaggcctttccagagcacttcacctacgagcccaacgaggcggatgcggcccaggggtaccgctacccacggccagcctcggtgccaccgtcgccctcgctgtcacgacactccagcccgcaccagagtgaggacgaggaggatccccggaacgggccgctggaggaagacggcgagcgctacgatgaggacgaggaggccgccaaggaccggcgcaacatccgtgcaccagagtggccgcgccgagcgtcctgcacctcctccaccagcggcagcaagcgcaactctgtggacacggccacctccagctcactcagcaccccgagcgagcccctcagccccaccagctccctgggcgaggagcgtaactaagtccgccccaccacactccccgcctgtcctgcctctctgctccagagagaggatgcagaggggtgctgctcctaaacccccgctccagatctgcactgggtgtggccccgcagtgcccccacccagtccgccaaacactccaccccctccagctccagtttccaagttcctgcactccagaatccacaaagccgtgcctttctctggctccagaatatgcataatcagcgccctggagtcccctgggcctggaccgcttcccagaggccaggaatctgccattactctgcggtggtgccagaggttttaggaaacctggcatggtgctttcaggtctggggcttttagagccccccgtgtggcttacaaattctacagcatacagagcaggccacgctcaggcccggcatgcgggccaccaagttctggaaaccacgtggtgtccctgcgaatggggcgatcaagtccagagccggggcactttcagagtttgaaggtaactgagagcagatggtcctccatttcaactccagaagtggggctctgggagggatgttctagccctccctggcatgtcagagccaggctctgcctggaggatccctccatccggctcctgtcatcccctacactttggccaagcaagaggtggtagaaccacttggctgctcattccttctggaggacacacagtctcagtccagatgccttcctgtctttctggccctttctggaccagatcctactcttcctttctaaatctgagatctccctccagggaatccgcctgcagaggacagagctggctgtcttcccccacccctaacctggcttattcccaactgctctgcccactgtgaaaccactaggttctaggtcctggcttctagatctggaaccttaccacgttactgcatactgatccctttcccatgatccagaactgaggtcactgggttctagaacccccacatttacctcgaggctcttccatccccaaactgtgccctgccttcagctttggtgaaagggagggcccctcatgtgtgctgtgctgtgtctgcaccgcttggtttgcagttgagaggggagggcaggaggggtgtgattggagtgtgtccggagatgagatgaaaaaaatacatctatatttaagaatc

SEQ ID NO: 348172 - DNA, 4364 bp, Homo sapiens
agtcctagcggaaacggaaacgcgcgaggagcgagatgttctggctcctctaggctagctggttcttcaaagatctcgatggttcctcataaatatgtaaatattgtgggggcgtggcgggactttatgccccgccctcccaccgaggctgcgctggaagacgggcgtccggaactcctgggtccattcccaatgtctcctggctcctcctccttttgctcagccccaccaccgccccgctcaggccgattgcaaaattcttagctgttctttgagtaaccacacgtcctccacgctcctttcctctttatcccaccctcctcctcctccccactttgaggcctccagctccagattgacagagctgaaggccactcgtttccgtaaagcgcagcggcaagctccgccccctggaggtctcacggccgaggcggggccgggacacagcgactccaacccgttccaccaatgaggacacgcggaaatccccgcccccgggcgtgggccaatggcgctggctggggggggcggccaccgcctcctggcggctgcgaggtttcactgcaggggcgccagtgggctcagtgacgctgcggcctccttctgcctaggtcccaacgcttcggggcaggggtgcggtcttgcaataggaagccgagcgtcttgcaagcttcccgtcgggcaccagctactcggccccgcaccctacctggtgcattccctagacacctccggggtccctacctggagatccccggagccccccttcctgcgccagccatgcctttaaaccgcactttgtccatgtcctcactgccaggactggaggactgggaggatgaattcgacctggagaacgcagtgctcttcgaagtggcctgggaggtggctaacaaggtgggtggcatctacacggtgctgcagacgaaggcgaaggtgacaggggacgaatggggcgacaactacttcctggtggggccgtacacggagcagggcgtgaggacccaggtggaactgctggaggcccccaccccggccctgaagaggacactggattccatgaacagcaagggctgcaaggtgtatttcgggcgctggctgatcgagggaggccctctggtggtgctcctggacgtgggtgcctcagcttgggccctggagcgctggaagggagagctctgggatacctgcaacatcggagtgccgtggtacgaccgcgaggccaacgacgctgtcctctttggctttctgaccacctggttcctgggtgagttcctggcacagagtgaggagaagccacatgtggttgctcacttccatgagtggttggcaggcgttggactctgcctgtgtcgtgcccggcgactgcctgtagcaaccatcttcaccacccatgccacgctgctggggcgctacctgtgtgccggtgccgtggacttctacaacaacctggagaacttcaacgtggacaaggaagcaggggagaggcagatctaccaccgatactgcatggaaagggcggcagcccactgcgctcacgtcttcactactgtgtcccagatcaccgccatcgaggcacagcacttgctcaagaggaaaccagatattgtgacccccaatgggctgaatgtgaagaagttttctgccatgcatgagttccagaacctccatgctcagagcaaggctcgaatccaggagtttgtgcggggccatttttatgggcatctggacttcaacttggacaagaccttatacttctttatcgccggccgctatgagttctccaacaagggtgctgacgtcttcctggaggcattggctcggctcaactatctgctcagagtgaacggcagcgagcagacagtggttgccttcttcatcatgccagcgcggaccaacaatttcaacgtggaaaccctcaaaggccaagctgtgcgcaaacagctttgggacacggccaacacggtgaaggaaaagttcgggaggaagctttatgaatccttactggttgggagccttcccgacatgaacaagatgctggataaggaagacttcactatgatgaagagagccatctttgcaacgcagcggcagtctttcccccctgtgtgcacccacaatatgctggatgactcctcagaccccatcctgaccaccatccgccgaatcggcctcttcaatagcagtgccgacagggtgaaggtgattttccacccggagttcctctcctccacaagccccctgctccctgtggactatgaggagtttgtccgtggctgtcaccttggagtcttcccctcctactatgagccttggggctacacaccggctgagtgcacggttatgggaatccccagtatctccaccaatctctccggcttcggctgcttcatggaggaacacatcgcagacccctcagcttacggtatctacattcttgaccggcggttccgcagcctggatgattcctgctcgcagctcacctccttcctctacagtttctgtcagcagagccggcggcagcgtatcatccagcggaaccgcacggagcgcctctccgaccttctggactggaaatacctaggccggtactatatgtctgcgcgccacatggcgctgtccaaggcctttccagagcacttcacctacgagcccaacgaggcggatgcggcccaggggtaccgctacccacggccagcctcggtgccaccgtcgccctcgctgtcacgacactccagcccgcaccagagtgaggacgaggaggatccccggaacgggccgctggaggaagacggcgagcgctacgatgaggacgaggaggccgccaaggaccggcgcaacatccgtgcaccagagtggccgcgccgagcgtcctgcacctcctccaccagcggcagcaagcgcaactctgtggacacggccacctccagctcactcagcaccccgagcgagcccctcagccccaccagctccctgggcgaggagcgtaactaagtccgccccaccacactccccgcctgtcctgcctctctgctccagagagaggatgcagaggggtgctgctcctaaacccccgctccagatctgcactgggtgtggccccgcagtgcccccacccagtccgccaaacactccaccccctccagctccagtttccaagttcctgcactccagaatccacaaagccgtgcctttctctggctccagaatatgcataatcagcgccctggagtcccctgggcctggaccgcttcccagaggccaggaatctgccattactctgcggtggtgccagaggttttaggaaacctggcatggtgctttcaggtctggggcttttagagccccccgtgtggcttacaaattctacagcatacagagcaggccacgctcaggcccggcatgcgggccaccaagttctggaaaccacgtggtgtccctgcgaatggggcgatcaagtccagagccggggcactttcagagtttgaaggtaactgagagcagatggtcctccatttcaactccagaagtggggctctgggagggatgttctagccctccctggcatgtcagagccaggctctgcctggaggatccctccatccggctcctgtcatcccctacactttggccaagcaagaggtggtagaaccacttggctgctcattccttctggaggacacacagtctcagtccagatgccttcctgtctttctggccctttctggaccagatcctactcttcctttctaaatctgagatctccctccagggaatccgcctgcagaggacagagctggctgtcttcccccacccctaacctggcttattcccaactgctctgcccactgtgaaaccactaggttctaggtcctggcttctagatctggaaccttaccacgttactgcatactgatccctttcccatgatccagaactgaggtcactgggttctagaacccccacatttacctcgaggctcttccatccccaaactgtgccctgccttcagctttggtgaaagggagggcccctcatgtgtgctgtgctgtgtctgcaccgcttggtttgcagttgagaggggagggcaggaggggtgtgattggagtgtgtccggagatgagatgaaaaaaatacatctatatttaagaatcaaaaaaaataaaaaaaaaaaaaaaacatcgttcggagcgcttcattactccgggggtcggaaacaaagggggtatctagcaggcgcccttgggtcaaagcggtttcccctgagcccacagttttcctttgcccacagggggcaacattggcgcggtccccctatagggagccgcgaaaaaattcgcaaaagcccggttaccctgtagatg

SEQ ID NO: 348173 - DNA, 4154 bp, Homo sapiens; identical to SEQ ID NO: 348156

SEQ ID NO: 348174 - DNA, 4164 bp, Homo sapiens
agtcctagcggaaacggaaacgcgcgaggagcgagatgttctggctcctctaggctagctggttcttcaaagatctcgatggttcctcataaatatgtaaatattgtgggggcgtggcgggactttatgccccgccctcccaccgaggctgcgctggaagacgggcgtccggaactcctgggtccattcccaatgtctcctggctcctcctccttttgctcagccccaccaccgccccgctcaggccgattgcaaaattcttagctgttctttgagtaaccacacgtcctccacgctcctttcctctttatcccaccctcctcctcctccccactttgaggcctccagctccagattgacagagctgaaggccactcgtttccgtaaagcgcagcggcaagctccgccccctggaggtctcacggccgaggcggggccgggacacagcgactccaacccgttccaccaatgaggacacgcggaaatccccgcccccgggcgtgggccaatggcgctggctggggggggcggccaccgcctcctggcggctgcgaggtttcactgcaggggcgccagtgggctcagtgacgctgcggcctccttctgcctaggtcccaacgcttcggggcaggggtgcggtcttgcaataggaagccgagcgtcttgcaagcttcccgtcgggcaccagctactcggccccgcaccctacctggtgcattccctagacacctccggggtccctacctggagatccccggagccccccttcctgcgccagccatgcctttaaaccgcactttgtccatgtcctcactgccaggactggaggactgggaggatgaattcgacctggagaacgcagtgctcttcgaagtggcctgggaggtggctaacaaggtgggtggcatctacacggtgctgcagacgaaggcgaaggtgacaggggacgaatggggcgacaactacttcctggtggggccgtacacggagcagggcgtgaggacccaggtggaactgctggaggcccccaccccggccctgaagaggacactggattccatgaacagcaagggctgcaaggtgtatttcgggcgctggctgatcgagggaggccctctggtggtgctcctggacgtgggtgcctcagcttgggccctggagcgctggaagggagagctctgggatacctgcaacatcggagtgccgtggtacgaccgcgaggccaacgacgctgtcctctttggctttctgaccacctggttcctgggtgagttcctggcagttcctggcacagagtgaggagaagccacatgtggttgctcacttccatgagtggttggcaggcgttggactctgcctgtgtcgtgcccggcgactgcctgtagcaaccatcttcaccacccatgccacgctgctggggcgctacctgtgtgccggtgccgtggacttctacaacaacctggagaacttcaacgtggacaaggaagcaggggagaggcagatctaccaccgatactgcatggaaagggcggcagcccactgcgctcacgtcttcactactgtgtcccagatcaccgccatcgaggcacagcacttgctcaagaggaaaccagatattgtgacccccaatgggctgaatgtgaagaagttttctgccatgcatgagttccagaacctccatgctcagagcaaggctcgaatccaggagtttgtgcggggccatttttatgggcatctggacttcaacttggacaagaccttatacttctttatcgccggccgctatgagttctccaacaagggtgctgacgtcttcctggaggcattggctcggctcaactatctgctcagagtgaacggcagcgagcagacagtggttgccttcttcatcatgccagcgcggaccaacaatttcaacgtggaaaccctcaaaggccaagctgtgcgcaaacagctttgggacacggccaacacggtgaaggaaaagttcgggaggaagctttatgaatccttactggttgggagccttcccgacatgaacaagatgctggataaggaagacttcactatgatgaagagagccatctttgcaacgcagcggcagtctttcccccctgtgtgcacccacaatatgctggatgactcctcagaccccatcctgaccaccatccgccgaatcggcctcttcaatagcagtgccgacagggtgaaggtgattttccacccggagttcctctcctccacaagccccctgctccctgtggactatgaggagtttgtccgtggctgtcaccttggagtcttcccctcctactatgagccttggggctacacaccggctgagtgcacggttatgggaatccccagtatctccaccaatctctccggcttcggctgcttcatggaggaacacatcgcagacccctcagcttacggtatctacattcttgaccggcggttccgcagcctggatgattcctgctcgcagctcacctccttcctctacagtttctgtcagcagagccggcggcagcgtatcatccagcggaaccgcacggagcgcctctccgaccttctggactggaaatacctaggccggtactatatgtctgcgcgccacatggcgctgtccaaggcctttccagagcacttcacctacgagcccaacgaggcggatgcggcccaggggtaccgctacccacggccagcctcggtgccaccgtcgccctcgctgtcacgacactccagcccgcaccagagtgaggacgaggaggatccccggaacgggccgctggaggaagacggcgagcgctacgatgaggacgaggaggccgccaaggaccggcgcaacatccgtgcaccagagtggccgcgccgagcgtcctgcacctcctccaccagcggcagcaagcgcaactctgtggacacggccacctccagctcactcagcaccccgagcgagcccctcagccccaccagctccctgggcgaggagcgtaactaagtccgccccaccacactccccgcctgtcctgcctctctgctccagagagaggatgcagaggggtgctgctcctaaacccccgctccagatctgcactgggtgtggccccgcagtgcccccacccagtccgccaaacactccaccccctccagctccagtttccaagttcctgcactccagaatccacaaagccgtgcctttctctggctccagaatatgcataatcagcgccctggagtcccctgggcctggaccgcttcccagaggccaggaatctgccattactctgcggtggtgccagaggttttaggaaacctggcatggtgctttcaggtctggggcttttagagccccccgtgtggcttacaaattctacagcatacagagcaggccacgctcaggcccggcatgcgggccaccaagttctggaaaccacgtggtgtccctgcgaatggggcgatcaagtccagagccggggcactttcagagtttgaaggtaactgagagcagatggtcctccatttcaactccagaagtggggctctgggagggatgttctagccctccctggcatgtcagagccaggctctgcctggaggatccctccatccggctcctgtcatcccctacactttggccaagcaagaggtggtagaaccacttggctgctcattccttctggaggacacacagtctcagtccagatgccttcctgtctttctggccctttctggaccagatcctactcttcctttctaaatctgagatctccctccagggaatccgcctgcagaggacagagctggctgtcttcccccacccctaacctggcttattcccaactgctctgcccactgtgaaaccactaggttctaggtcctggcttctagatctggaaccttaccacgttactgcatactgatccctttcccatgatccagaactgaggtcactgggttctagaacccccacatttacctcgaggctcttccatccccaaactgtgccctgccttcagctttggtgaaagggagggcccctcatgtgtgctgtgctgtgtctgcaccgcttggtttgcagttgagaggggagggcaggaggggtgtgattggagtgtgtccggagatgagatgaaaaaaatacatctatatttaagaatc

SEQ ID NO: 348175 - DNA, 3331 bp, Homo sapiens
  misc_feature (15)..(16): n is a, c, g, or t
  misc_feature (21)..(21): n is a, c, g, or t
ggcacgagggacaanntgcgntttaaaggcatggctggcgcaggaaggggggctccggggaggtggctaacaaggtgggtggcatctacacggtgctgcagacgaaggcgaaggtgacaggggacgaatggggcgacaactacttcctggtggggccgtacacggagcagggcgtgaggacccaggtggaactgctggaggcccccaccccggccctgaagaggacactggattccatgaacagcaagggctgcaaggtgtatttcgggcgctggctgatcgagggaggccctctggtggtgctcctggacgtgggtgcctcagcttgggccctggagcgctggaagggagagctctgggatacctgcaacatcggagtgccgtggtacgaccgcgaggccaacgacgctgtcctctttggctttctgaccacctggttcctgggtgagttcctggcacagagtgaggagaagccacatgtggttgctcacttccatgagtggttggcaggcgttggactctgcctgtgtcgtgcccggcgactgcctgtagcaaccatcttcaccacccatgccacgctgctggggcgctacctgtgtgccggtgccgtggacttctacaacaacctggagaacttcaacgtggacaaggaagcaggggagaggcagatctaccaccgatactgcatggaaagggcggcagcccactgcgctcacgtcttcactactgtgtcccagatcaccgccatcgaggcacagcacttgctcaagaggaaaccagatattgtgacccccaatgggctgaatgtgaagaagttttctgccatgcatgagttccagaacctccatgctcagagcaaggctcgaatccaggagtttgtgcggggccatttttatgggcatctggacttcaacttggacaagaccttatacttctttatcgccggccgctatgagttctccaacaagggtgctgacgtcttcctggaggcattggctcggctcaactatctgctcagagtgaacggcagcgagcagacagtggttgccttcttcatcatgccagcgcggaccaacaatttcaacgtggaaaccctcaaaggccaagctgtgcgcaaacagctttgggacacggccaacacggtgaaggaaaagttcgggaggaagctttatgaatccttactggttgggagccttcccgacatgaacaagatgctggataaggaagacttcactatgatgaagagagccatctttgcaacgcagcggcagtctttcccccctgtgtgcacccacaatatgctggatgactcctcagaccccatcctgaccaccatccgccgaatcggcctcttcaatagcagtgccgacagggtgaaggtgattttccacccggagttcctctcctccacaagccccctgctccctgtggactatgaggagtttgtccgtggctgtcaccttggagtcttcccctcctactatgagccttggggctacacaccggctgagtgcacggttatgggaatccccagtatctccaccaatctctccggcttcggctgcttcatggaggaacacatcgcagacccctcagcttacggtatctacattcttgaccggcggttccgcagcctggatgattcctgctcgcagctcacctccttcctctacagtttctgtcagcagagccggcggcagcgtatcatccagcggaaccgcacggagcgcctctccgaccttctggactggaaatacctaggccggtactatatgtctgcgcgccacatggcgctgtccaaggcctttccagagcacttcacctacgagcccaacgaggcggatgcggcccaggggtaccgctacccacggccagcctcggtgccaccgtcgccctcgctgtcacgacactccagcccgcaccagagtgaggacgaggaggatccccggaacgggccgctggaggaagacggcgagcgctacgatgaggacgaggaggccgccaaggaccggcgcaacatccgtgcaccagagtggccgcgccgagcgtcctgcacctcctccaccagcggcagcaagcgcaactctgtggacacggccacctccagctcactcagcaccccgagcgagcccctcagccccaccagctccctgggcgaggagcgtaactaagtccgccccaccacactccccgcctgtcctgcctctctgctccagagagaggatgcagaggggtgctgctcctaaacccccgctccagatctgcactgggtgtggccccgcagtgcccccacccagtccgccaaacactccaccccctccagctccagtttccaagttcctgcactccagaatccacaaagccgtgcctttctctggctccagaatatgcataatcagcgccctggagtcccctgggcctggaccgcttcccagaggccaggaatctgccattactctgcggtggtgccagaggttttaggaaacctggcatggtgctttcaggtctggggcttttagagccccccgtgtggcttacaaattctacagcatacagagcaggccacgctcaggcccggcatgcgggccaccaagttctggaaaccacgtggtgtccctgcgaatggggcgatcaagtccagagccggggcactttcagagtttgaaggtaactgagagcagatggtcctccatttcaactccagaagtggggctctgggagggatgttctagccctccctggcatgtcagagccaggctctgcctggaggatccctccatccggctcctgtcatcccctacactttggccaagcaagaggtggtagaaccacttggctgctcattccttctggaggacacacagtctcagtccagatgccttcctgtctttctggccctttctggaccagatcctactcttcctttctaaatctgagatctccctccagggaatccgcctgcagaggacagagctggctgtcttcccccacccctaacctggcttattcccaactgctctgcccactgtgaaaccactaggttctaggtcctggcttctagatctggaaccttaccacgttactgcatactgatccctttcccatgatccagaactgaggtcactgggttctagaacccccacatttacctcgaggctcttccatccccaaactgtgccctgccttcagctttggtgaaagggagggcccctcatgtgtgctgtgctgtgtctgcaccgcttggtttgcagttgagaggggagggcaggaggggtgtgattggagtgtgtccggagatgagatgaaaaaaatacatctatatttaagaatc

SEQ ID NO: 348176 - DNA, 2652 bp, Homo sapiens
  misc_feature (18)..(18): n is a, c, g, or t
taggctaggtacgaggcngggtgttaatcggccgagggtcttcactactgtgtcccagatcaccgccatcgaggcacagcacttgctcaagaggaaaccagatattgtgacccccaatgggctgaatgtgaagaagttttctgccatgcatgagttccagaacctccatgctcagagcaaggctcgaatccaggagtttgtgcggggccatttttatgggcatctggacttcaacttggacaagaccttatacttctttatcgccggccgctatgagttctccaacaagggtgctgacgtcttcctggaggcattggctcggctcaactatctgctcagagtgaacggcagcgagcagacagtggttgccttcttcatcatgccagcgcggaccaacaatttcaacgtggaaaccctcaaaggccaagctgtgcgcaaacagctttgggacacggccaacacggtgaaggaaaagttcgggaggaagctttatgaatccttactggttgggagccttcccgacatgaacaagatgctggataaggaagacttcactatgatgaagagagccatctttgcaacgcagcggcagtctttcccccctgtgtgcacccacaatatgctggatgactcctcagaccccatcctgaccaccatccgccgaatcggcctcttcaatagcagtgccgacagggtgaaggtgattttccacccggagttcctctcctccacaagccccctgctccctgtggactatgaggagtttgtccgtggctgtcaccttggagtcttcccctcctactatgagccttggggctacacaccggctgagtgcacggttatgggaatccccagtatctccaccaatctctccggcttcggctgcttcatggaggaacacatcgcagacccctcagcttacggtatctacattcttgaccggcggttccgcagcctggatgattcctgctcgcagctcacctccttcctctacagtttctgtcagcagagccggcggcagcgtatcatccagcggaaccgcacggagcgcctctccgaccttctggactggaaatacctaggccggtactatatgtctgcgcgccacatggcgctgtccaaggcctttccagagcacttcacctacgagcccaacgaggcggatgcggcccaggggtaccgctacccacggccagcctcggtgccaccgtcgccctcgctgtcacgacactccagcccgcaccagagtgaggacgaggaggatccccggaacgggccgctggaggaagacggcgagcgctacgatgaggacgaggaggccgccaaggaccggcgcaacatccgtgcaccagagtggccgcgccgagcgtcctgcacctcctccaccagcggcagcaagcgcaactctgtggacacggccacctccagctcactcagcaccccgagcgagcccctcagccccaccagctccctgggcgaggagcgtaactaagtccgccccaccacactccccgcctgtcctgcctctctgctccagagagaggatgcagaggggtgctgctcctaaacccccgctccagatctgcactgggtgtggccccgcagtgcccccacccagtccgccaaacactccaccccctccagctccagtttccaagttcctgcactccagaatccacaaagccgtgcctttctctggctccagaatatgcataatcagcgccctggagtcccctgggcctggaccgcttcccagaggccaggaatctgccattactctgcggtggtgccagaggttttaggaaacctggcatggtgctttcaggtctggggcttttagagccccccgtgtggcttacaaattctacagcatacagagcaggccacgctcaggcccggcatgcgggccaccaagttctggaaaccacgtggtgtccctgcgaatggggcgatcaagtccagagccggggcactttcagagtttgaaggtaactgagagcagatggtcctccatttcaactccagaagtggggctctgggagggatgttctagccctccctggcatgtcagagccaggctctgcctggaggatccctccatccggctcctgtcatcccctacactttggccaagcaagaggtggtagaaccacttggctgctcattccttctggaggacacacagtctcagtccagatgccttcctgtctttctggccctttctggaccagatcctactcttcctttctaaatctgagatctccctccagggaatccgcctgcagaggacagagctggctgtcttcccccacccctaacctggcttattcccaactgctctgcccactgtgaaaccactaggttctaggtcctggcttctagatctggaaccttaccacgttactgcatactgatccctttcccatgatccagaactgaggtcactgggttctagaacccccacatttacctcgaggctcttccatccccaaactgtgccctgccttcagctttggtgaaagggagggcccctcatgtgtgctgtgctgtgtctgcaccgcttggtttgcagttgagaggggagggcaggaggggtgtgattggagtgtgtccggagatgagatgaaaaaaatacatctatatttaagaatc

SEQ ID NO: 348177 - DNA, 2248 bp, Homo sapiens
ggcagctggtgtgtatgtgaccctgttgctctgcttcctccagggacacggccaacacggtgaaggaaaagttcgggaggaagctttatgaatccttactggttgggagccttcccgacatgaacaagatgctggataaggaagacttcactatgatgaagagagccatctttgcaacgcagcggcagtctttcccccctgtgtgcacccacaatatgctggatgactcctcagaccccatcctgaccaccatccgccgaatcggcctcttcaatagcagtgccgacagggtgaaggtgattttccacccggagttcctctcctccacaagccccctgctccctgtggactatgaggagtttgtccgtggctgtcaccttggagtcttcccctcctactatgagccttggggctacacaccggctgagtgcacggttatgggaatccccagtatctccaccaatctctccggcttcggctgcttcatggaggaacacatcgcagacccctcagcttacggtatctacattcttgaccggcggttccgcagcctggatgattcctgctcgcagctcacctccttcctctacagtttctgtcagcagagccggcggcagcgtatcatccagcggaaccgcacggagcgcctctccgaccttctggactggaaatacctaggccggtactatatgtctgcgcgccacatggcgctgtccaaggcctttccagagcacttcacctacgagcccaacgaggcggatgcggcccaggggtaccgctacccacggccagcctcggtgccaccgtcgccctcgctgtcacgacactccagcccgcaccagagtgaggacgaggaggatccccggaacgggccgctggaggaagacggcgagcgctacgatgaggacgaggaggccgccaaggaccggcgcaacatccgtgcaccagagtggccgcgccgagcgtcctgcacctcctccaccagcggcagcaagcgcaactctgtggacacggccacctccagctcactcagcaccccgagcgagcccctcagccccaccagctccctgggcgaggagcgtaactaagtccgccccaccacactccccgcctgtcctgcctctctgctccagagagaggatgcagaggggtgctgctcctaaacccccgctccagatctgcactgggtgtggccccgcagtgcccccacccagtccgccaaacactccaccccctccagctccagtttccaagttcctgcactccagaatccacaaagccgtgcctttctctggctccagaatatgcataatcagcgccctggagtcccctgggcctggaccgcttcccagaggccaggaatctgccattactctgcggtggtgccagaggttttaggaaacctggcatggtgctttcaggtctggggcttttagagccccccgtgtggcttacaaattctacagcatacagagcaggccacgctcaggcccggcatgcgggccaccaagttctggaaaccacgtggtgtccctgcgaatggggcgatcaagtccagagccggggcactttcagagtttgaaggtaactgagagcagatggtcctccatttcaactccagaagtggggctctgggagggatgttctagccctccctggcatgtcagagccaggctctgcctggaggatccctccatccggctcctgtcatcccctacactttggccaagcaagaggtggtagaaccacttggctgctcattccttctggaggacacacagtctcagtccagatgccttcctgtctttctggccctttctggaccagatcctactcttcctttctaaatctgagatctccctccagggaatccgcctgcagaggacagagctggctgtcttcccccacccctaacctggcttattcccaactgctctgcccactgtgaaaccactaggttctaggtcctggcttctagatctggaaccttaccacgttactgcatactgatccctttcccatgatccagaactgaggtcactgggttctagaacccccacatttacctcgaggctcttccatccccaaactgtgccctgccttcagctttggtgaaagggagggcccctcatgtgtgctgtgctgtgtctgcaccgcttggtttgcagttgagaggggagggcaggaggggtgtgattggagtgtgtccggagatgagatgaaaaaaatacatctatatttaagaatc

SEQ ID NO: 348178 - DNA, 1597 bp, Homo sapiens
tcatcagctcggtcccccttttcagccgggtgggtaggaccgtagactcgctcatctcgcctgggtttgtccgcatgttgtgccgcagctgcgagcccaacgaggcggatgcggcccaggggtaccgctacccacggccagcctcggtgccaccgtcgccctcgctgtcacgacactccagcccgcaccagagtgaggacgaggaggatccccggaacgggccgctggaggaagacggcgagcgctacgatgaggacgaggaggccgccaaggaccggcgcaacatccgtgcaccagagtggccgcgccgagcgtcctgcacctcctccaccagcggcagcaagcgcaactctgtggacacggccacctccagctcactcagcaccccgagcgagcccctcagccccaccagctccctgggcgaggagcgtaactaagtccgccccaccacactccccgcctgtcctgcctctctgctccagagagaggatgcagaggggtgctgctcctaaacccccgctccagatctgcactgggtgtggccccgcagtgcccccacccagtccgccaaacactccaccccctccagctccagtttccaagttcctgcactccagaatccacaaagccgtgcctttctctggctccagaatatgcataatcagcgccctggagtcccctgggcctggaccgcttcccagaggccaggaatctgccattactctgcggtggtgccagaggttttaggaaacctggcatggtgctttcaggtctggggcttttagagccccccgtgtggcttacaaattctacagcatacagagcaggccacgctcaggcccggcatgcgggccaccaagttctggaaaccacgtggtgtccctgcgaatggggcgatcaagtccagagccggggcactttcagagtttgaaggtaactgagagcagatggtcctccatttcaactccagaagtggggctctgggagggatgttctagccctccctggcatgtcagagccaggctctgcctggaggatccctccatccggctcctgtcatcccctacactttggccaagcaagaggtggtagaaccacttggctgctcattccttctggaggacacacagtctcagtccagatgccttcctgtctttctggccctttctggaccagatcctactcttcctttctaaatctgagatctccctccagggaatccgcctgcagaggacagagctggctgtcttcccccacccctaacctggcttattcccaactgctctgcccactgtgaaaccactaggttctaggtcctggcttctagatctggaaccttaccacgttactgcatactgatccctttcccatgatccagaactgaggtcactgggttctagaacccccacatttacctcgaggctcttccatccccaaactgtgccctgccttcagctttggtgaaagggagggcccctcatgtgtgctgtgctgtgtctgcaccgcttggtttgcagttgagaggggagggcaggaggggtgtgattggagtgtgtccggagatgagatgaaaaaaatacatctatatttaagaatc

SEQ ID NO: 348179 - DNA, 1913 bp, Homo sapiens
agtcctagcggaaacggaaacgcgcgaggagcgagatgttctggctcctctaggctagctggttcttcaaagatctcgatggttcctcataaatatgtaaatattgtgggggcgtggcgggactttatgccccgccctcccaccgaggctgcgctggaagacgggcgtccggaactcctgggtccattcccaatgtctcctggctcctcctccttttgctcagccccaccaccgccccgctcaggccgattgcaaaattcttagctgttctttgagtaaccacacgtcctccacgctcctttcctctttatcccaccctcctcctcctccccactttgaggcctccagctccagattgacagagctgaaggccactcgtttccgtaaagcgcagcggcaagctccgccccctggaggtctcacggccgaggcggggccgggacacagcgactccaacccgttccaccaatgaggacacgcggaaatccccgcccccgggcgtgggccaatggcgctggctggggggggcggccaccgcctcctggcggctgcgaggtttcactgcaggggcgccagtgggctcagtgacgctgcggcctccttctgcctaggtcccaacgcttcggggcaggggtgcggtcttgcaataggaagccgagcgtcttgcaagcttcccgtcgggcaccagctactcggccccgcaccctacctggtgcattccctagacacctccggggtccctacctggagatccccggagccccccttcctgcgccagccatgcctttaaaccgcactttgtccatgtcctcactgccaggactggaggactgggaggatgaattcgacctggagaacgcagtgctcttcgaagtggcctgggaggtggctaacaaggtgggtggcatctacacggtgctgcagacgaaggcgaaggtgacaggggacgaatggggcgacaactacttcctggtggggccgtacacggagcagggcgtgaggacccaggtggaactgctggaggcccccaccccggccctgaagaggacactggattccatgaacagcaagggctgcaaggtgtatttcgggcgctggctgatcgagggaggccctctggtggtgctcctggacgtgggtgcctcagcttgggccctggagcgctggaagggagagctctgggatacctgcaacatcggagtgccgtggtacgaccgcgaggccaacgacgctgtcctctttggctttctgaccacctggttcctgggtgagttcctggcacagagtgaggagaagccacatgtggttgctcacttccatgagtggttggcaggcgttggactctgcctgtgtcgtgcccggcgactgcctgtagcaaccatcttcaccacccatgccacgctgctggggcgctacctgtgtgccggtgccgtggacttctacaacaacctggagaacttcaacgtggacaaggaagcaggggagaggcagatctaccaccgatactgcatggaaagggcggcagcccactgcgctcacgtcttcactactgtgtcccagatcaccgccatcgaggcacagcacttgctcaagaggaaaccagatattgtgacccccaatgggctgaatgtgaagaagttttctgccatgcatgagttccagaacctccatgctcagagcaaggctcgaatccaggagtttgtgcggggccatttttatgggcatctggacttcaacttggacaagaccttatacttctttatcgccggccgctatgagttctccaacaagggtgctgacgtcttcctggaggcattggctcggctcaactatctgctcagagtgaacgcagcgagcagacggtgttgccttcttcatcatgcctgcgaacctatgagggatcctctagacga

SEQ ID NO: 348180 - DNA, 2322 bp, Homo sapiens
  misc_feature (850)..(850): n is a, c, g, or t
  misc_feature (1021)..(1021): n is a, c, g, or t
  misc_feature (1027)..(1027): n is a, c, g, or t
  misc_feature (1152)..(1152): n is a, c, g, or t
  misc_feature (1286)..(1286): n is a, c, g, or t
  misc_feature (1630)..(1630): n is a, c, g, or t
aacaaaagttttcccaaacctaaatcctttttcttcaatcgtgcttaaattcactgtttttttaccccagagtaaggaagtcaggcagagggctgggggaaattcaggaagtgtccatctgtcaattaatggagctcccgagaattttcctcaggtagatttcttccactgataacttgagtttggttttgtctaatgtttcaaggttgagaagtggaagatgggtattcagtataaaatatggagataagagtgggggaaagcctgcagactcagtgatggtctaaggacatatatgataaatgaaaatttctcagaagtacaaaagacttctctcagaagattaaacatctcctagaaggcttatgaaattaaagtccaatttttttaagaacatcgtccttggattgaaaggttgaatcaaaagcatgataattgaatttacttacaatacagagttatgagctattgcaagggtgaagtgatagattttcaagataaccagtttggttctgaagctggtccttatttactcctctgccttccattgcagctctggttacccacgtatttcctttaatgagttaagtaagtaatgcccatggacttggtctctgcagggccactcctatgcagaggtctccgcttgtgttttagaggtataaatatctgcccttagctctgccatggttcctggcatttaatcatcaattgaaagtagtatgtctataagggcagagcattatctataacgtaaattccatgcaatgtgctgccttctgttgtggatttcctgccagcaccagtcagagattagaggcagctggagtgggagaaaggtggctcgganacatacatccgtaaactatagaaccaccaatcaaaatctattctatttcctcatctccctaaccactaattattttttacacattacctctttttacttactatcctctaaattcatgttcattttatttttattattttttttagaggcgggggtcttgccatgttacanaggctngtcttgaactcctggccttaagcaatccgcctcggcctcccaaagtgctgggactataagtgtgagccactgcatctggccctctaagttcattgtaaactggcttctcctttatacaagctaanacttaagaccacatgaatgattaagcctagcctccctcctcattcagccaaatgattagtgaacacttttttcaatatttttttttcagtatgttgggcattaagaatccaaagattagagtctaccaaagganaaggcaatgggagtaaatagacaaagtgcttggagagcattgagaaatgagtgatttatttcatcagagacctgtagaggccttccagggacaaagatatttcggtttagtcttgaggtatgtaggatatcttcaggtaaagaaatttaaaaaggacatcaaaatgggatatacatacatgtacacacacatgtcatccacacacatacatatatatatgtttgtatggatatgtgtgtgtatgtgtgtgtatacacagaaccgacagatttcctcatgtctgaaaacaataacatttaagaatatcttaagagtatataagttcttgagatttaacacctgancccctaacatccaagtttagatgagtagtcattcattcaacagataatcatcaaggactcacagtctgccagacactgctaggtaagcatcaaggatgcaaagacagtaaatacaggacatgttttctgcccttaagaaactcacagtttccctgaaaactagttaatcactatggaaaacagggtcccgtgagaaaagaattttatgcaagaacaaggtgaagatggagtcataacataagacatcctttaggaaagaaagcccaggctggtaatcccaaattgagatttttccagggccactaggaaaggctaaggatgccttggaagaaaaagggaaacaaaactagagaaaaggctgttgaaagaggacagaccaagtagcaaacaaattttggccgaaatgaaccaaaaattcatcattctaccaggtggctggtacccttttagaactttttattctgagatgtgttataagccactctttacaaaagaggcaactaagtaattttcccaaggttacacagcaagggtgagaactaaggtctttctgatgcaaaatctaccctctttctacaacacccaatcgcccttcaattttatctcacaattgctaccagaggctcattgtttaactggcttgtccataccctctgcaatacactgctttcaacaaaaatcagaattgtgtc

SEQ ID NO: 348181 - DNA, 2575 bp, Homo sapiens
  misc_feature (850)..(850): n is a, c, g, or t
  misc_feature (1021)..(1021): n is a, c, g, or t
  misc_feature (1027)..(1027): n is a, c, g, or t
  misc_feature (1152)..(1152): n is a, c, g, or t
  misc_feature (1286)..(1286): n is a, c, g, or t
  misc_feature (1630)..(1630): n is a, c, g, or t
aacaaaagttttcccaaacctaaatcctttttcttcaatcgtgcttaaattcactgtttttttaccccagagtaaggaagtcaggcagagggctgggggaaattcaggaagtgtccatctgtcaattaatggagctcccgagaattttcctcaggtagatttcttccactgataacttgagtttggttttgtctaatgtttcaaggttgagaagtggaagatgggtattcagtataaaatatggagataagagtgggggaaagcctgcagactcagtgatggtctaaggacatatatgataaatgaaaatttctcagaagtacaaaagacttctctcagaagattaaacatctcctagaaggcttatgaaattaaagtccaatttttttaagaacatcgtccttggattgaaaggttgaatcaaaagcatgataattgaatttacttacaatacagagttatgagctattgcaagggtgaagtgatagattttcaagataaccagtttggttctgaagctggtccttatttactcctctgccttccattgcagctctggttacccacgtatttcctttaatgagttaagtaagtaatgcccatggacttggtctctgcagggccactcctatgcagaggtctccgcttgtgttttagaggtataaatatctgcccttagctctgccatggttcctggcatttaatcatcaattgaaagtagtatgtctataagggcagagcattatctataacgtaaattccatgcaatgtgctgccttctgttgtggatttcctgccagcaccagtcagagattagaggcagctggagtgggagaaaggtggctcgganacatacatccgtaaactatagaaccaccaatcaaaatctattctatttcctcatctccctaaccactaattattttttacacattacctctttttacttactatcctctaaattcatgttcattttatttttattattttttttagaggcgggggtcttgccatgttacanaggctngtcttgaactcctggccttaagcaatccgcctcggcctcccaaagtgctgggactataagtgtgagccactgcatctggccctctaagttcattgtaaactggcttctcctttatacaagctaanacttaagaccacatgaatgattaagcctagcctccctcctcattcagccaaatgattagtgaacacttttttcaatatttttttttcagtatgttgggcattaagaatccaaagattagagtctaccaaagganaaggcaatgggagtaaatagacaaagtgcttggagagcattgagaaatgagtgatttatttcatcagagacctgtagaggccttccagggacaaagatatttcggtttagtcttgaggtatgtaggatatcttcaggtaaagaaatttaaaaaggacatcaaaatgggatatacatacatgtacacacacatgtcatccacacacatacatatatatatgtttgtatggatatgtgtgtgtatgtgtgtgtatacacagaaccgacagatttcctcatgtctgaaaacaataacatttaagaatatcttaagagtatataagttcttgagatttaacacctgancccctaacatccaagtttagatgagtagtcattcattcaacagataatcatcaaggactcacagtctgccagacactgctaggtaagcatcaaggatgcaaagacagtaaatacaggacatgttttctgcccttaagaaactcacagtttccctgaaaactagttaatcactatggaaaacagggtcccgtgagaaaagaattttatgcaagaacaaggtgaagatggagtcataacataagacatcctttaggaaagaaagcccaggctggtaatcccaaattgagatttttccagggccactaggaaaggctaaggatgccttggaagaaaaagggaaacaaaactagagaaaaggctgttgaaagaggacagaccaagtagcaaacaaattttggccgaaatgaaccaaaaattcatcattctaccaggtggctggtacccttttagaactttttattctgagatgtgttataagccactctttacaaaagaggcaactaagtaattttcccaaggttacacagcaagggtgagaactaaggtctttctgatgcaaaatctaccctctttctacaacacccaatcgcccttcaattttatctcacaattgctaccagaggctcattgtttaactggcttgtccataccctctgcaatacactgctttcaacaaaaatcagaattgtgtcaaaaaaatttcaaaaaaaggtcatgcatatggaactaccacttaaagtaggggcgatatgagaatagaaaccaactagaatgtcctgagtagatataattgagaaataggagagatatagtatattcttgagatacttggatacttgagaggaaaagcccttgtccagactttctttgactcaagaaagggagaatagtgattcagaaagggaagagttattattgttttctcaggactcaacattgtgcctc

SEQ ID NO: 348182 - DNA, 700 bp, Homo sapiens
ggccagactggtcagttttgacttttcatccccctagaagtgaatgtttcagcttatttatttatttctaatttttaaaaagttgtagaagtcctaaaaagactagcctcaattcgtaaaaaaagagttattgggtttgaaaatgtgaaataccaagactgatcattgagggaagcagtgaggttaggggaattgttccgaagggtggtactcacgcttttctatttggaaaatcaaatgacagaagccttttctcatttcatagaaaattgagatgtttgtttttctttctcccataaatgttttctttcttaagtaagtgccaaaagtttgttatttgactgctaacagaaaacactgttaatggggacactcaaatgtgatttttaaaaatatcttatatattttatatattgagttgtattttcttgtagtaaaattcctagttcatatggatgaattaaatattaccgttccatgttgatctgccactcagaaccagtttgggaaccatgatctatcctgattattgggtaaataacagatgtttacaatattcaacattgttcccattgccctcttaatcatcatctccgggaggttatgcttaacaaagctaaaagtcctcatttatgcttcaaactctggcccaattggaagtgatttcgtatattaattaataaagtgtaccaaactggga

SEQ ID NO: 348183 - DNA, 833 bp, Homo sapiens
ggccagactggtcagttttgacttttcatccccctagaagtgaatgtttcagcttatttatttatttctaatttttaaaaagttgtagaagtcctaaaaagactagcctcaattcgtaaaaaaagagttattgggtttgaaaatgtgaaataccaagactgatcattgagggaagcagtgaggttaggggaattgttccgaagggtggtactcacgcttttctatttggaaaatcaaatgacagaagccttttctcatttcatagaaaattgagatgtttgtttttctttctcccataaatgttttctttcttaagtaagtgccaaaagtttgttatttgactgctaacagaaaacactgttaatggggacactcaaatgtgatttttaaaaatatcttatatattttatatattgagttgtattttcttgtagtaaaattcctagttcatatggatgaattaaatattaccgttccatgttgatctgccactcagaaccagtttgggaaccatgatctatcctgattattgggtaaataacagatgtttacaatattcaacattgttcccattgccctcttaatcatcatctccgggaggttatgcttaacaaagctaaaagtcctcatttatgcttcaaactctggcccaattggaagtgatttcgtatattaattaataaagtgtaccaaactgggaaaaaaaaaaaaaagtatgttgagtccataattgcatttcagtatctcagtgggaggttaggctgctggatggaaaacagtgctggaccttcacctttcttgacttagctaagtgaacagatggggtgttggtc

SEQ ID NO: 348184 - DNA, 675 bp, Homo sapiens
tccgggtgtgggtgtgggtcccgggggacggcggcccaccctgcgggttcgaatccgggcgctggcacctctcgacgctaggcccgcgccggtcgcggtaatggcagccaccatttgccgagcgcttgccaagagcagggccgcacgacataggcgccctgtgtccctcagacagcagcccggtgtgacaggcagaatccgtaatcccattttacagaataggatatcagggcctaaggagctttgcccaaggtcacacagctcgagagagccagaagcggggttcaaaaccgcgtcgccctactccagatactgctctcttactcgctgccctcggcttccccacgtgggttcactgacgaagttgcgtggaccccggttcccccaggaggggtattgacgtttcccaagttttgaggcttaacggaaaatgcaactgaagcgcctggcacagtgttggggacgcagtaaatgctcaaggaatgatgattatggatacacctattacatatatggtaaaataacgctttatatcatctgtctcctttaggatttggggtggaaggcaggcatggtcaaacccatttcactgacaggagagcagagacaggacgtgtctctctccacgtcttccacctgactatggtctagaggcctggctacttttggtcctgg

SEQ ID NO: 348185 - DNA, 4413 bp, Homo sapiens
gaagcggaccggccgggtggaggccacacgctaccccgaggctgcgtaggccgcgcgaagggggacgccgtgccgtgggcctggggtcgggggagcagcagaccgggaagcaccgtgaggaccgaggatttggggtggaaggcaggcatggtcaaacccatttcactgacaggagagcagagacaggacgtgtctctctccacgtcttccagccagtaaaagaagccaagctggagcccaaagccaggtgttctgactcccagcgtgggggtccctgcaccaaccatgagccgcctgctctggaggaaggtggccggcgccaccgtcgggccagggccggttccagctccggggcgctgggtctccagctccgtccccgcgtccgaccccagcgacgggcagcggcggcggcagcagcagcagcagcagcagcagcagcagcaacagcagcctcagcagccgcaagtgctatcctcggagggcgggcagctgcggcacaacccattggacatccagatgctctcgagagggctgcacgagcaaatcttcgggcaaggaggggagatgcctggcgaggccgcggtgcgccgcagcgtcgagcacctgcagaagcacgggctctgggggcagccagccgtgcccttgcccgacgtggagctgcgcctgccgcccctctacggggacaacctggaccagcacttccgcctcctggcccagaagcagagcctgccctacctggaggcggccaacttgctgttgcaggcccagctgcccccgaagcccccggcttgggcctgggcggagggctggacccggtacggccccgagggggaggccgtacccgtggccatccccgaggagcgggccctggtgttcgacgtggaggtctgcttggcagagggaacttgccccacattggcggtggccatatccccctcggcctggtattcctggtgcagccagcggctggtggaagagcgttactcttggaccagccagctgtcgccggctgacctcatccccctggaggtccctactggtgccagcagccccacccagagagactggcaggagcagttagtggtggggcacaatgtttcctttgaccgagctcatatcagggagcagtacctgatccagggttcccgcatgcgtttcctggacaccatgagcatgcacatggccatctcagggctaagcagcttccagcgcagtctgtggatagcagccaagcagggcaaacacaaggtccagccccccacaaagcaaggccagaagtcccagaggaaagccagaagaggcccagcgatctcatcctgggactggctggacatcagcagtgtcaacagtctggcagaggtgcacagactttatgtaggggggcctcccttagagaaggagcctcgagaactgtttgtgaagggcaccatgaaggacattcgtgagaacttccaggacctgatgcagtactgtgcccaggacgtgtgggccacccatgaggttttccagcagcagctaccgctcttcttggagaggtgtccccacccagtgactctggccggcatgctggagatgggtgtctcctacctgcctgtcaaccagaactgggagcgttacctggcagaggcacagggcacttatgaggagctccagcgggagatgaagaagtcgttgatggatctggccaatgatgcctgccagctgctctcaggagagaggtacaaagaagacccctggctctgggacctggagtgggacctgcaagaatttaagcagaagaaagctaagaaggtgaagaaggaaccagccacagccagcaagttgcccatcgagggggctggggcccctggtgatcccatggatcaggaagacctcggcccctgcagtgaggaggaggagtttcaacaagatgtcatggcccgcgcctgcttgcagaagctgaaggggaccacagagctcctgcccaagcggccccagcaccttcctggacaccctggatggtaccggaagctctgcccccggctagacgaccctgcatggaccccgggccccagcctcctcagcctgcagatgcgggtcacacctaaactcatggcacttacctgggatggcttccctctgcactactcagagcgtcatggctggggctacttggtgcctgggcggcgggacaacctggccaagctgccgacaggtaccaccctggagtcagctggggtggtctgcccctacaggggaagcagcagctgatgccccaggaggccggcctggcggaggagttcctgctcactgacaatagtgccatatggcaaacggtagaagaactggattacttagaagtggaggctgaggccaagatggagaacttgcgagctgcagtgccaggtcaacccctagctctgactgcccgtggtggccccaaggacacccagcccagctatcaccatggcaatggaccttacaacgacgtggacatccctggctgctggtttttcaagctgcctcacaaggatggtaatagctgtaatgtgggaagcccctttgccaaggacttcctgcccaagatggaggatggcaccctgcaggctggcccaggaggtgccagtgggccccgtgctctggaaatcaacaaaatgatttctttctggaggaacgcccataaacgtatcagctcccagatggtggtgtggctgcccaggtcagctctgccccgtgctgtgatcaggcaccccgactatgatgaggaaggcctctatggggccatcctgccccaagtggtgactgccggcaccatcactcgccgggctgtggagcccacatggctcaccgccagcaatgcccggcctgaccgagtaggcagtgagttgaaagccatggtgcaggccccacctggctacacccttgtgggtgctgatgtggactcccaagagctgtggattgcagctgtgcttggagacgcccactttgccggcatgcatggctgcacagcctttgggtggatgacactgcagggcaggaagagcaggggcactgatctacacagtaagacagccactactgtgggcatcagccgtgagcatgccaaaatcttcaactacggccgcatctatggtgctgggcagccctttgctgagcgcttactaatgcagtttaaccaccggctcacacagcaggaggcagctgagaaggcccagcagatgtacgctgccaccaagggcctccgctggtatcggctgtcggatgagggcgagtggctggtgagggagttgaacctcccagtggacaggactgagggtggctggatttccctgcaggatctgcgcaaggtccagagagaaactgcaaggaagtcacagtggaagaagtgggaggtggttgctgaacgggcatggaaggggggcacagagtcagaaatgttcaataagcttgagagcattgctacgtctgacataccacgtaccccggtgctgggctgctgcatcagccgagccctggagccctcggctgtccaggaagagtttatgaccagccgtgtgaattgggtggtacagagctctgctgttgactacttacacctcatgcttgtggccatgaagtggctgtttgaagagtttgccatagatgggcgcttctgcatcagcatccatgacgaggttcgctacctggtgcgggaggaggaccgctaccgcgctgccctggccttgcagatcaccaacctcttgaccaggtgcatgtttgcctacaagctgggtctgaatgacttgccccagtcagtcgcctttttcagtgcagtcgatattgaccggtgcctcaggaaggaagtgaccatggattgtaaaaccccttccaacccaactgggatggaaaggagatacgggattccccagggtgaagcgctggatatttaccagataattgaactcaccaaaggctccttggaaaaacgaagccagcctggaccatagcactgcctggaggctctgtatttgctcccgtggagcttcatcggggtggtgcaggctcccaaactcaggctttcagctgtgctttttgcaaaagggcttgcctaaggccagccatttttcagtagcaggacctgccaagaagattccttctaactgaaggtgcagttgaattcagtgggttcagaaccaagatgccaacatcggtgtggactacaggacaaggggcattgttgcttgttgggtaaaaatgaagcagaagccccaaagttcacattaactcaggcatttcatttattttttccttttcttcttggctggttctttgttctgtcccccatgctctgatgcagtgccctagaaggggaaagaattaatgctctaacgtgataaacctgctccaaggcagtggaaataaaaagaaggaaaaaaaagactctatcttctcatc

SEQ ID NO: 348186 - DNA, 4552 bp, Homo sapiens
gaagcggaccggccgggtggaggccacacgctaccccgaggctgcgtaggccgcgcgaagggggacgccgtgccgtgggcctggggtcgggggagcagcagaccgggaagcaccgtgaggaccgaggatttggggtggaaggcaggcatggtcaaacccatttcactgacaggagagcagagacaggacgtgtctctctccacgtcttccagccagtaaaagaagccaagctggagcccaaagccaggtgttctgactcccagcgtgggggtccctgcaccaaccatgagccgcctgctctggaggaaggtggccggcgccaccgtcgggccagggccggttccagctccggggcgctgggtctccagctccgtccccgcgtccgaccccagcgacgggcagcggcggcggcagcagcagcagcagcagcagcagcagcagcaacagcagcctcagcagccgcaagtgctatcctcggagggcgggcagctgcggcacaacccattggacatccagatgctctcgagagggctgcacgagcaaatcttcgggcaaggaggggagatgcctggcgaggccgcggtgcgccgcagcgtcgagcacctgcagaagcacgggctctgggggcagccagccgtgcccttgcccgacgtggagctgcgcctgccgcccctctacggggacaacctggaccagcacttccgcctcctggcccagaagcagagcctgccctacctggaggcggccaacttgctgttgcaggcccagctgcccccgaagcccccggcttgggcctgggcggagggctggacccggtacggccccgagggggaggccgtacccgtggccatccccgaggagcgggccctggtgttcgacgtggaggtctgcttggcagagggaacttgccccacattggcggtggccatatccccctcggcctggtattcctggtgcagccagcggctggtggaagagcgttactcttggaccagccagctgtcgccggctgacctcatccccctggaggtccctactggtgccagcagccccacccagagagactggcaggagcagttagtggtggggcacaatgtttcctttgaccgagctcatatcagggagcagtacctgatccagggttcccgcatgcgtttcctggacaccatgagcatgcacatggccatctcagggctaagcagcttccagcgcagtctgtggatagcagccaagcagggcaaacacaaggtccagccccccacaaagcaaggccagaagtcccagaggaaagccagaagaggcccagcgatctcatcctgggactggctggacatcagcagtgtcaacagtctggcagaggtgcacagactttatgtaggggggcctcccttagagaaggagcctcgagaactgtttgtgaagggcaccatgaaggacattcgtgagaacttccaggacctgatgcagtactgtgcccaggacgtgtgggccacccatgaggttttccagcagcagctaccgctcttcttggagaggtgtccccacccagtgactctggccggcatgctggagatgggtgtctcctacctgcctgtcaaccagaactgggagcgttacctggcagaggcacagggcacttatgaggagctccagcgggagatgaagaagtcgttgatggatctggccaatgatgcctgccagctgctctcaggagagaggtacaaagaagacccctggctctgggacctggagtgggacctgcaagaatttaagcagaagaaagctaagaaggtgaagaaggaaccagccacagccagcaagttgcccatcgagggggctggggcccctggtgatcccatggatcaggaagacctcggcccctgcagtgaggaggaggagtttcaacaagatgtcatggcccgcgcctgcttgcagaagctgaaggggaccacagagctcctgcccaagcggccccagcaccttcctggacaccctggatggtaccggaagctctgcccccggctagacgaccctgcatggaccccgggccccagcctcctcagcctgcagatgcgggtcacacctaaactcatggcacttacctgggatggcttccctctgcactactcagagcgtcatggctggggctacttggtgcctgggcggcgggacaacctggccaagctgccgacaggtaccaccctggagtcagctggggtggtctgcccctacagagccatcgagtccctgtacaggaagcactgtctcgaacaggggaagcagcagctgatgccccaggaggccggcctggcggaggagttcctgctcactgacaatagtgccatatggcaaacggtagaagaactggattacttagaagtggaggctgaggccaagatggagaacttgcgagctgcagtgccaggtcaacccctagctctgactgcccgtggtggccccaaggacacccagcccagctatcaccatggcaatggaccttacaacgacgtggacatccctggctgctggtttttcaagctgcctcacaaggatggtaatagctgtaatgtgggaagcccctttgccaaggacttcctgcccaagatggaggatggcaccctgcaggctggcccaggaggtgccagtgggccccgtgctctggaaatcaacaaaatgatttctttctggaggaacgcccataaacgtatcagctcccagatggtggtgtggctgcccaggtcagctctgccccgtgctgtgatcaggcaccccgactatgatgaggaaggcctctatggggccatcctgccccaagtggtgactgccggcaccatcactcgccgggctgtggagcccacatggctcaccgccagcaatgcccggcctgaccgagtaggcagtgagttgaaagccatggtgcaggccccacctggctacacccttgtgggtgctgatgtggactcccaagagctgtggattgcagctgtgcttggagacgcccactttgccggcatgcatggctgcacagcctttgggtggatgacactgcagggcaggaagagcaggggcactgatctacacagtaagacagccactactgtgggcatcagccgtgagcatgccaaaatcttcaactacggccgcatctatggtgctgggcagccctttgctgagcgcttactaatgcagtttaaccaccggctcacacagcaggaggcagctgagaaggcccagcagatgtacgctgccaccaagggcctccgctggtatcggctgtcggatgagggcgagtggctggtgagggagttgaacctcccagtggacaggactgagggtggctggatttccctgcaggatctgcgcaaggtccagagagaaactgcaaggaagtcacagtggaagaagtgggaggtggttgctgaacgggcatggaaggggggcacagagtcagaaatgttcaataagcttgagagcattgctacgtctgacataccacgtaccccggtgctgggctgctgcatcagccgagccctggagccctcggctgtccaggaagagtttatgaccagccgtgtgaattgggtggtacagagctctgctgttgactacttacacctcatgcttgtggccatgaagtggctgtttgaagagtttgccatagatgggcgcttctgcatcagcatccatgacgaggttcgctacctggtgcgggaggaggaccgctaccgcgctgccctggccttgcagatcaccaacctcttgaccagtaaaattcctagttcatatggatgaattaaatattaccgttccatgttgatctgccactcagaaccagtttgggaaccatgatctatcctgattattgggtgcatgtttgcctacaagctgggtctgaatgacttgccccagtcagtcgcctttttcagtgcagtcgatattgaccggtgcctcaggaaggaagtgaccatggattgtaaaaccccttccaacccaactgggatggaaaggagatacgggattccccagggtgaagcgctggatatttaccagataattgaactcaccaaaggctccttggaaaaacgaagccagcctggaccatagcactgcctggaggctctgtatttgctcccgtggagcttcatcggggtggtgcaggctcccaaactcaggctttcagctgtgctttttgcaaaagggcttgcctaaggccagccatttttcagtagcaggacctgccaagaagattccttctaactgaaggtgcagttgaattcagtgggttcagaaccaagatgccaacatcggtgtggactacaggacaaggggcattgttgcttgttgggtaaaaatgaagcagaagccccaaagttcacattaactcaggcatttcatttattttttccttttcttcttggctggttctttgttctgtcccccatgctctgatgcagtgccctagaaggggaaagaattaatgctctaacgtgataaacctgctccaaggcagtggaaataaaaagaaggaaaaaaaagactctatcttctcatc

SEQ ID NO: 348187 - DNA, 4498 bp, Homo sapiens
gaagcggaccggccgggtggaggccacacgctaccccgaggctgcgtaggccgcgcgaagggggacgccgtgccgtgggcctggggtcgggggagcagcagaccgggaagcaccgtgaggaccgaggatttggggtggaaggcaggcatggtcaaacccatttcactgacaggagagcagagacaggacgtgtctctctccacgtcttccagccagtaaaagaagccaagctggagcccaaagccaggtgttctgactcccagcgtgggggtccctgcaccaaccatgagccgcctgctctggaggaaggtggccggcgccaccgtcgggccagggccggttccagctccggggcgctgggtctccagctccgtccccgcgtccgaccccagcgacgggcagcggcggcggcagcagcagcagcagcagcagcagcagcagcaacagcagcctcagcagccgcaagtgctatcctcggagggcgggcagctgcggcacaacccattggacatccagatgctctcgagagggctgcacgagcaaatcttcgggcaaggaggggagatgcctggcgaggccgcggtgcgccgcagcgtcgagcacctgcagaagcacgggctctgggggcagccagccgtgcccttgcccgacgtggagctgcgcctgccgcccctctacggggacaacctggaccagcacttccgcctcctggcccagaagcagagcctgccctacctggaggcggccaacttgctgttgcaggcccagctgcccccgaagcccccggcttgggcctgggcggagggctggacccggtacggccccgagggggaggccgtacccgtggccatccccgaggagcgggccctggtgttcgacgtggaggtctgcttggcagagggaacttgccccacattggcggtggccatatccccctcggcctggtattcctggtgcagccagcggctggtggaagagcgttactcttggaccagccagctgtcgccggctgacctcatccccctggaggtccctactggtgccagcagccccacccagagagactggcaggagcagttagtggtggggcacaatgtttcctttgaccgagctcatatcagggagcagtacctgatccagggttcccgcatgcgtttcctggacaccatgagcatgcacatggccatctcagggctaagcagcttccagcgcagtctgtggatagcagccaagcagggcaaacacaaggtccagccccccacaaagcaaggccagaagtcccagaggaaagccagaagaggcccagcgatctcatcctgggactggctggacatcagcagtgtcaacagtctggcagaggtgcacagactttatgtaggggggcctcccttagagaaggagcctcgagaactgtttgtgaagggcaccatgaaggacattcgtgagaacttccaggacctgatgcagtactgtgcccaggacgtgtgggccacccatgaggttttccagcagcagctaccgctcttcttggagaggtgtccccacccagtgactctggccggcatgctggagatgggtgtctcctacctgcctgtcaaccagaactgggagcgttacctggcagaggcacagggcacttatgaggagctccagcgggagatgaagaagtcgttgatggatctggccaatgatgcctgccagctgctctcaggagagaggtacaaagaagacccctggctctgggacctggagtgggacctgcaagaatttaagcagaagaaagctaagaaggtgaagaaggaaccagccacagccagcaagttgcccatcgagggggctggggcccctggtgatcccatggatcaggaagacctcggcccctgcagtgaggaggaggagtttcaacaagatgtcatggcccgcgcctgcttgcagaagctgaaggggaccacagagctcctgcccaagcggccccagcaccttcctggacaccctggatggtaccggaagctctgcccccggctagacgaccctgcatggaccccgggccccagcctcctcagcctgcagatgcgggtcacacctaaactcatggcacttacctgggatggcttccctctgcactactcagagcgtcatggctggggctacttggtgcctgggcggcgggacaacctggccaagctgccgacaggtaccaccctggagtcagctggggtggtctgcccctacagagccatcgagtccctgtacaggaagcactgtctcgaacaggggaagcagcagctgatgccccaggaggccggcctggcggaggagttcctgctcactgacaatagtgccatatggcaaacggtagaagaactggattacttagaagtggaggctgaggccaagatggagaacttgcgagctgcagtgccaggtcaacccctagctctgactgcccgtggtggccccaaggacacccagcccagctatcaccatggcaatggaccttacaacgacgtggacatccctggctgctggtttttcaagctgcctcacaaggatggtaatagctgtaatgtgggaagcccctttgccaaggacttcctgcccaagatggaggatggcaccctgcaggctggcccaggaggtgccagtgggccccgtgctctggaaatcaacaaaatgatttctttctggaggaacgcccataaacgtatcagctcccagatggtggtgtggctgcccaggtcagctctgccccgtgctgtgatcaggcaccccgactatgatgaggaaggcctctatggggccatcctgccccaagtggtgactgccggcaccatcactcgccgggctgtggagcccacatggctcaccgccagcaatgcccggcctgaccgagtaggcagtgagttgaaagccatggtgcaggccccacctggctacacccttgtgggtgctgatgtggactcccaagagctgtggattgcagctgtgcttggagacgcccactttgccggcatgcatggctgcacagcctttgggtggatgacactgcagggcaggaagagcaggggcactgatctacacagtaagacagccactactgtgggcatcagccgtgagcatgccaaaatcttcaactacggccgcatctatggtgctgggcagccctttgctgagcgcttactaatgcagtttaaccaccggctcacacagcaggaggcagctgagaaggcccagcagatgtacgctgccaccaagggcctccgctggtatcggctgtcggatgagggcgagtggctggtgagggagttgaacctcccagtggacaggactgagggtggctggatttccctgcaggatctgcgcaaggtccagagagaaactgcaaggaagtcacagtggaagaagtgggaggtggttgctgaacgggcatggaaggggggcacagagtcagaaatgttcaataagcttgagagcattgctacgtctgacataccacgtaccccggtgctgggctgctgcatcagccgagccctggagccctcggctgtccaggaagagtttatgaccagccgtgtgaattgggtggtacagagctctgctgttgactacttacacctcatgcttgtggccatgaagtggctgtttgaagagtttgccatagatgggcgcttctgcatcagcatccatgacgaggttcgctacctggtgcgggaggaggaccgctaccgcgctgccctggccttgcagatcaccaacctcttgaccagtaaaattcctagttcatatggatgaattaaatattaccgttccatgttgatctgccactcagaaccagtttgggaaccatgatctatcctgattattgggtgcatgtttgcctacaagctgggtctgaatgacttgccccagtcagtcgcctttttcagtgcagtcgatattgaccggtgcctcaggaaggaagtgaccatggattgtgaagcgctggatatttaccagataattgaactcaccaaaggctccttggaaaaacgaagccagcctggaccatagcactgcctggaggctctgtatttgctcccgtggagcttcatcggggtggtgcaggctcccaaactcaggctttcagctgtgctttttgcaaaagggcttgcctaaggccagccatttttcagtagcaggacctgccaagaagattccttctaactgaaggtgcagttgaattcagtgggttcagaaccaagatgccaacatcggtgtggactacaggacaaggggcattgttgcttgttgggtaaaaatgaagcagaagccccaaagttcacattaactcaggcatttcatttattttttccttttcttcttggctggttctttgttctgtcccccatgctctgatgcagtgccctagaaggggaaagaattaatgctctaacgtgataaacctgctccaaggcagtggaaataaaaagaaggaaaaaaaagactctatcttctcatc

SEQ ID NO: 348188 - DNA, 4166 bp, Homo sapiens
gaagcggaccggccgggtggaggccacacgctaccccgaggctgcgtaggccgcgcgaagggggacgccgtgccgtgggcctggggtcgggggagcagcagaccgggaagcaccgtgaggaccgaggatttggggtggaaggcaggcatggtcaaacccatttcactgacaggagagcagagacaggacgtgtctctctccacgtcttccagccagtaaaagaagccaagctggagcccaaagccaggtgttctgactcccagcgtgggggtccctgcaccaaccatgagccgcctgctctggaggaaggtggccggcgccaccgtcgggccagggccggttccagctccggggcgctgggtctccagctccgtccccgcgtccgaccccagcgacgggcagcggcggcggcagcagcagcagcagcagcagcagcagcagcaacagcagcctcagcagccgcaagtgctatcctcggagggcgggcagctgcggcacaacccattggacatccagatgctctcgagagggctgcacgagcaaatcttcgggcaaggaggggagatgcctggcgaggccgcggtgcgccgcagcgtcgagcacctgcagaagcacgggctctgggggcagccagccgtgcccttgcccgacgtggagctgcgcctgccgcccctctacggggacaacctggaccagcacttccgcctcctggcccagaagcagagcctgccctacctggaggcggccaacttgctgttgcaggcccagctgcccccgaagcccccggcttgggcctgggcggagggctggacccggtacggccccgagggggaggccgtacccgtggccatccccgaggagcgggccctggtgttcgacgtggaggtctgcttggcagagggaacttgccccacattggcggtggccatatccccctcggcctggtattcctggtgcagccagcggctggtggaagagcgttactcttggaccagccagctgtcgccggctgacctcatccccctggaggtccctactggtgccagcagccccacccagagagactggcaggagcagttagtggtggggcacaatgtttcctttgaccgagctcatatcagggagcagtacctgatccagggttcccgcatgcgtttcctggacaccatgagcatgcacatggccatctcagggctaagcagcttccagcgcagtctgtggatagcagccaagcagggcaaacacaaggtccagccccccacaaagcaaggccagaagtcccagaggaaagccagaagaggcccagcgatctcatcctgggactggctggacatcagcagtgtcaacagtctggcagaggtgcacagactttatgtaggggggcctcccttagagaaggagcctcgagaactgtttgtgaagggcaccatgaaggacattcgtgagaacttccaggacctgatgcagtactgtgcccaggacgtgtgggccacccatgaggttttccagcagcagctaccgctcttcttggagaggtgtccccacccagtgactctggccggcatgctggagatgggtgtctcctacctgcctgtcaaccagaactgggagcgttacctggcagaggcacagggcacttatgaggagctccagcgggagatgaagaagtcgttgatggatctggccaatgatgcctgccagctgctctcaggagagaggtacaaagaagacccctggctctgggacctggagtgggacctgcaagaatttaagcagaagaaagctaagaaggtgaagaaggaaccagccacagccagcaagttgcccatcgagggggctggggcccctggtgatcccatggatcaggaagacctcggcccctgcagtgaggaggaggagtttcaacaagatgtcatggcccgcgcctgcttgcagaagctgaaggggaccacagagctcctgcccaagcggccccagcaccttcctggacaccctggatggtaccggaagctctgcccccggctagacgaccctgcatggaccccgggccccagcctcctcagcctgcagatgcgggtcacacctaaactcatggcacttacctgggatggcttccctctgcactactcagagcgtcatggctggggctacttggtgcctgggcggcgggacaacctggccaagctgccgacaggtaccaccctggagtcagctggggtggtctgcccctacagagccatcgagtccctgtacaggaagcactgtctcgaacaggggaagcagcagctgatgccccaggaggccggcctggcggaggagttcctgctcactgacaatagtgccatatggcaaacggtagaagaactggattacttagaagtggaggctgaggccaagatggagaacttgcgagctgcagtgccaggtcaacccctagctctgactgcccgtggtggccccaaggacacccagcccagctatcaccatggcaatggaccttacaacgacgtggacatccctggctgctggtttttcaagctgcctcacaaggatggtaatagctgtaatgtgggaagcccctttgccaaggacttcctgcccaagatggaggatggcaccctgcaggctggcccaggaggtgccagtgggccccgtgctctggaaatcaacaaaatgatttctttctggaggaacgcccataaacgtatcagctcccagatggtggtgtggctgcccaggtcagctctgccccgtgctgtgatcaggcaccccgactatgatgaggaaggcctctatggggccatcctgccccaagtggtgactgccggcaccatcactcgccgggctgtggagcccacatggctcaccgccagcaatgcccggcctgaccgagtaggcagtgagttgaaagccatggtgcaggccccacctggctacacccttgtgggtgctgatgtggactcccaagagctgtggattgcagctgtgcttggagacgcccactttgccggcatgcatggctgcacagcctttgggtggatgacactgcagggcaggaagagcaggggcactgatctacacagtaagacagccactactgtgggcatcagccgtgagcatgccaaaatcttcaactacggccgcatctatggtgctgggcagccctttgctgagcgcttactaatgcagtttaaccaccggctcacacagcaggaggcagctgagaaggcccagcagatgtacgctgccaccaagggcctccgctggtatcggctgtcggatgagggcgagtggctggtgagggagttgaacctcccagtggacaggactgagggtggctggatttccctgcaggatctgcgcaaggtccagagagaaactgcaaggaagtcacagtggaagaagtgggaggtggttgctgaacgggcatggaaggggggcacagagtcagaaatgttcaataagcttgagagcattgctacgtctgacataccacgtaccccggtgctgggctgctgcatcagccgagccctggagccctcggctgtccaggaagagtttatgaccagccgtgtgaattgggtggtacagagctctgctgttgactacttacacctcatgcttgtggccatgaagtggctgtttgaagagtttgccatagatgggcgcttctgcatcagcatccatgacgaggttcgctacctggtgcgggaggaggaccgctaccgcgctgccctggccttgcagatcaccaacctcttgaccagtaaaattcctagttcatatggatgaattaaatattaccgttccatgttgatctgccactcagaaccagtttgggaaccatgatctatcctgattattgggtaaataacagatgtttacaatattcaacattgttcccattgccctcttaatcatcatctccgggaggttatgcttaacaaagctaaaagtcctcatttatgcttcaaactctggcccaattggaagtgatttcgtatattaattaataaagtgtaccaaactgggaaaaaaaaaaaaaagtatgttgagtccataattgcatttcagtatctcagtgggaggttaggctgctggatggaaaacagtgctggaccttcacctttcttgacttagctaagtgaacagatggggtgttggtc

SEQ ID NO: 348189 - DNA, 3730 bp, Homo sapiens
gaagcggaccggccgggtggaggccacacgctaccccgaggctgcgtaggccgcgcgaagggggacgccgtgccgtgggcctggggtcgggggagcagcagaccgggaagcaccgtgaggaccgaggatttggggtggaaggcaggcatggtcaaacccatttcactgacaggagagcagagacaggacgtgtctctctccacgtcttccagccagtaaaagaagccaagctggagcccaaagccaggtgttctgactcccagcgtgggggtccctgcaccaaccatgagccgcctgctctggaggaaggtggccggcgccaccgtcgggccagggccggttccagctccggggcgctgggtctccagctccgtccccgcgtccgaccccagcgacgggcagcggcggcggcagcagcagcagcagcagcagcagcagcagcaacagcagcctcagcagccgcaagtgctatcctcggagggcgggcagctgcggcacaacccattggacatccagatgctctcgagagggctgcacgagcaaatcttcgggcaaggaggggagatgcctggcgaggccgcggtgcgccgcagcgtcgagcacctgcagaagcacgggctctgggggcagccagccgtgcccttgcccgacgtggagctgcgcctgccgcccctctacggggacaacctggaccagcacttccgcctcctggcccagaagcagagcctgccctacctggaggcggccaacttgctgttgcaggcccagctgcccccgaagcccccggcttgggcctgggcggagggctggacccggtacggccccgagggggaggccgtacccgtggccatccccgaggagcgggccctggtgttcgacgtggaggtctgcttggcagagggaacttgccccacattggcggtggccatatccccctcggcctggtattcctggtgcagccagcggctggtggaagagcgttactcttggaccagccagctgtcgccggctgacctcatccccctggaggtccctactggtgccagcagccccacccagagagactggcaggagcagttagtggtggggcacaatgtttcctttgaccgagctcatatcagggagcagtacctgatccagggttcccgcatgcgtttcctggacaccatgagcatgcacatggccatctcagggctaagcagcttccagcgcagtctgtggatagcagccaagcagggcaaacacaaggtccagccccccacaaagcaaggccagaagtcccagaggaaagccagaagaggcccagcgatctcatcctgggactggctggacatcagcagtgtcaacagtctggcagaggtgcacagactttatgtaggggggcctcccttagagaaggagcctcgagaactgtttgtgaagggcaccatgaaggacattcgtgagaacttccaggacctgatgcagtactgtgcccaggacgtgtgggccacccatgaggttttccagcagcagctaccgctcttcttggagaggtgtccccacccagtgactctggccggcatgctggagatgggtgtctcctacctgcctgtcaaccagaactgggagcgttacctggcagaggcacagggcacttatgaggagctccagcgggagatgaagaagtcgttgatggatctggccaatgatgcctgccagctgctctcaggagagaggtacaaagaagacccctggctctgggacctggagtgggacctgcaagaatttaagcagaagaaagctaagaaggtgaagaaggaaccagccacagccagcaagttgcccatcgagggggctggggcccctggtgatcccatggatcaggaagacctcggcccctgcagtgaggaggaggagtttcaacaagatgtcatggcccgcgcctgcttgcagaagctgaaggggaccacagagctcctgcccaagcggccccagcaccttcctggacaccctggatggtaccggaagctctgcccccggctagacgaccctgcatggaccccgggccccagcctcctcagcctgcagatgcgggtcacacctaaactcatggcacttacctgggatggcttccctctgcactactcagagcgtcatggctggggctacttggtgcctgggcggcgggacaacctggccaagctgccgacaggtaccaccctggagtcagctggggtggtctgcccctacagagccatcgagtccctgtacaggaagcactgtctcgaacaggggaagcagcagctgatgccccaggaggccggcctggcggaggagttcctgctcactgacaatagtgccatatggcaaacggtagaagaactggattacttagaagtggaggctgaggccaagatggagaacttgcgagctgcagtgccaggtcaacccctagctctgactgcccgtggtggccccaaggacacccagcccagctatcaccatggcaatggaccttacaacgacgtggacatccctggctgctggtttttcaagctgcctcacaaggatggtaatagctgtaatgtgggaagcccctttgccaaggacttcctgcccaagatggaggatggcaccctgcaggctggcccaggaggtgccagtgggccccgtgctctggaaatcaacaaaatgatttctttctggaggaacgcccataaacgtatcagctcccagatggtggtgtggctgcccaggtcagctctgccccgtgctgtgatcaggcaccccgactatgatgaggaaggcctctatggggccatcctgccccaagtggtgactgccggcaccatcactcgccgggctgtggagcccacatggctcaccgccagcaatgcccggcctgaccgagtaggcagtgagttgaaagccatggtgcaggccccacctggctacacccttgtgggtgctgatgtggactcccaagagctgtggattgcagctgtgcttggagacgcccactttgccggcatgcatggctgcacagcctttgggtggatgacactgcagggcaggaagagcaggggcactgatctacacagtaagacagccactactgtgggcatcagccgtgagcatgccaaaatcttcaactacggccgcatctatggtgctgggcagccctttgctgagcgcttactaatgcagtttaaccaccggctcacacagcaggaggcagctgagaaggcccagcagatgtacgctgccaccaagggcctccgctggtatcggctgtcggatgagggcgagtggctggtgagggagttgaacctcccagtggacaggactgagggtggctggatttccctgcaggatctgcgcaaggtccagagagaaactgcaaggaagtaagaaccttctttgtgttaaggatggagggaggggtctgggcttgccccagaagagcttggatgctttgttttttagctttgagatgctgaaagacaaagtctgccctctgtttctggtcccttaggtcacagtggaagaagtgggaggtggttgctgaacgggcatggaaggggggcacagagtcagaaatgttcaataagcttgagagcattgctacgtctgacataccacgtaccccgtgccctagaaggggaaagaattaatgctctaacgtgataaacctgctccaaggcagtggaaataaaaagaaggaaaaaaaagactctatcttctcatc

SEQ ID NO: 348190 - DNA, 1219 bp, Homo sapiens
ggccagactggtcagttttgacttttcatccccctagaagtgaatgtttcagcttatttatttatttctaatttttaaaaagttgtagaagtcctaaaaagactagcctcaattcgtaaaaaaagagttattgggtttgaaaatgtgaaataccaagactgatcattgagggaagcagtgaggttaggggaattgttccgaagggtggtactcacgcttttctatttggaaaatcaaatgacagaagccttttctcatttcatagaaaattgagatgtttgtttttctttctcccataaatgttttctttcttaagtaagtgccaaaagtttgttatttgactgctaacagaaaacactgttaatggggacactcaaatgtgatttttaaaaatatcttatatattttatatattgagttgtattttcttgtagtaaaattcctagttcatatggatgaattaaatattaccgttccatgttgatctgccactcagaaccagtttgggaaccatgatctatcctgattattgggtgcatgtttgcctacaagctgggtctgaatgacttgccccagtcagtcgcctttttcagtgcagtcgatattgaccggtgcctcaggaaggaagtgaccatggattgtaaaaccccttccaacccaactgggatggaaaggagatacgggattccccagggtgaagcgctggatatttaccagataattgaactcaccaaaggctccttggaaaaacgaagccagcctggaccatagcactgcctggaggctctgtatttgctcccgtggagcttcatcggggtggtgcaggctcccaaactcaggctttcagctgtgctttttgcaaaagggcttgcctaaggccagccatttttcagtagcaggacctgccaagaagattccttctaactgaaggtgcagttgaattcagtgggttcagaaccaagatgccaacatcggtgtggactacaggacaaggggcattgttgcttgttgggtaaaaatgaagcagaagccccaaagttcacattaactcaggcatttcatttattttttccttttcttcttggctggttctttgttctgtcccccatgctctgatgcagtgccctagaaggggaaagaattaatgctctaacgtgataaacctgctccaaggcagtggaaataaaaagaaggaaaaaaaagactctatcttctcatc

SEQ ID NO: 348191 - DNA, 178 bp, Homo sapiens
ctggagccctcggctgtccaggaagaggtatcttgctacctttggagcatgggcagaggggccccagggagggcagggcagagctccctgtggaccttaccaatgtttgtaggtagggccagagtgaagcttctcttggggcttctaccctggagttaattggtatgtagcatagccc

SEQ ID NO: 348192 - DNA, 418 bp, Homo sapiens
ctggccagacagtgacaggcgtaatagctacagctctcatggaatttagataggaccatgtaggtgaggggtctggcatagcgctaggcatagagtagattctttacctgtcacaccaattgctgataggtggccatctctggaactgtggaatttcagcagtgctgtctggcattctctaaagccatcccctcaggaaaggctctagctctttctcagtcaactctggctccaggaatggggtaggaagagtctcatttgggtatctcactcttcccacagcctgaccgagtaggcagtgagttgaaagccatggtgcaggccccacctggctacacccttgtgggtgctgatgtggactcccaagagctgtggattgcagctgtgcttggagacgcccactttgccggcatgcatg

SEQ ID NO: 348193 - DNA, 4453 bp, Homo sapiens
gaagcggaccggccgggtggaggccacacgctaccccgaggctgcgtaggccgcgcgaagggggacgccgtgccgtgggcctggggtcgggggagcagcagaccgggaagcaccgtgaggaccgaggatttggggtggaaggcaggcatggtcaaacccatttcactgacaggagagcagagacaggacgtgtctctctccacgtcttccagccagtaaaagaagccaagctggagcccaaagccaggtgttctgactcccagcgtgggggtccctgcaccaaccatgagccgcctgctctggaggaaggtggccggcgccaccgtcgggccagggccggttccagctccggggcgctgggtctccagctccgtccccgcgtccgaccccagcgacgggcagcggcggcggcagcagcagcagcagcagcagcagcagcagcaacagcagcctcagcagccgcaagtgctatcctcggagggcgggcagctgcggcacaacccattggacatccagatgctctcgagagggctgcacgagcaaatcttcgggcaaggaggggagatgcctggcgaggccgcggtgcgccgcagcgtcgagcacctgcagaagcacgggctctgggggcagccagccgtgcccttgcccgacgtggagctgcgcctgccgcccctctacggggacaacctggaccagcacttccgcctcctggcccagaagcagagcctgccctacctggaggcggccaacttgctgttgcaggcccagctgcccccgaagcccccggcttgggcctgggcggagggctggacccggtacggccccgagggggaggccgtacccgtggccatccccgaggagcgggccctggtgttcgacgtggaggtctgcttggcagagggaacttgccccacattggcggtggccatatccccctcggcctggtattcctggtgcagccagcggctggtggaagagcgttactcttggaccagccagctgtcgccggctgacctcatccccctggaggtccctactggtgccagcagccccacccagagagactggcaggagcagttagtggtggggcacaatgtttcctttgaccgagctcatatcagggagcagtacctgatccagggttcccgcatgcgtttcctggacaccatgagcatgcacatggccatctcagggctaagcagcttccagcgcagtctgtggatagcagccaagcagggcaaacacaaggtccagccccccacaaagcaaggccagaagtcccagaggaaagccagaagaggcccagcgatctcatcctgggactggctggacatcagcagtgtcaacagtctggcagaggtgcacagactttatgtaggggggcctcccttagagaaggagcctcgagaactgtttgtgaagggcaccatgaaggacattcgtgagaacttccaggacctgatgcagtactgtgcccaggacgtgtgggccacccatgaggttttccagcagcagctaccgctcttcttggagaggtgtccccacccagtgactctggccggcatgctggagatgggtgtctcctacctgcctgtcaaccagaactgggagcgttacctggcagaggcacagggcacttatgaggagctccagcgggagatgaagaagtcgttgatggatctggccaatgatgcctgccagctgctctcaggagagaggtacaaagaagacccctggctctgggacctggagtgggacctgcaagaatttaagcagaagaaagctaagaaggtgaagaaggaaccagccacagccagcaagttgcccatcgagggggctggggcccctggtgatcccatggatcaggaagacctcggcccctgcagtgaggaggaggagtttcaacaagatgtcatggcccgcgcctgcttgcagaagctgaaggggaccacagagctcctgcccaagcggccccagcaccttcctggacaccctggatggtaccggaagctctgcccccggctagacgaccctgcatggaccccgggccccagcctcctcagcctgcagatgcgggtcacacctaaactcatggcacttacctgggatggcttccctctgcactactcagagcgtcatggctggggctacttggtgcctgggcggcgggacaacctggccaagctgccgacaggtaccaccctggagtcagctggggtggtctgcccctacagagccatcgagtccctgtacaggaagcactgtctcgaacaggggaagcagcagctgatgccccaggaggccggcctggcggaggagttcctgctcactgacaatagtgccatatggcaaacggtagaagaactggattacttagaagtggaggctgaggccaagatggagaacttgcgagctgcagtgccaggtcaacccctagctctgactgcccgtggtggccccaaggacacccagcccagctatcaccatggcaatggaccttacaacgacgtggacatccctggctgctggtttttcaagctgcctcacaaggatggtaatagctgtaatgtgggaagcccctttgccaaggacttcctgcccaagatggaggatggcaccctgcaggctggcccaggaggtgccagtgggccccgtgctctggaaatcaacaaaatgatttctttctggaggaacgcccataaacgtatcagctcccagatggtggtgtggctgcccaggtcagctctgccccgtgctgtgatcaggcaccccgactatgatgaggaaggcctctatggggccatcctgccccaagtggtgactgccggcaccatcactcgccgggctgtggagcccacatggctcaccgccagcaatgcccggcctgaccgagtaggcagtgagttgaaagccatggtgcaggccccacctggctacacccttgtgggtgctgatgtggactcccaagagctgtggattgcagctgtgcttggagacgcccactttgccggcatgcatggctgcacagcctttgggtggatgacactgcagggcaggaagagcaggggcactgatctacacagtaagacagccactactgtgggcatcagccgtgagcatgccaaaatcttcaactacggccgcatctatggtgctgggcagccctttgctgagcgcttactaatgcagtttaaccaccggctcacacagcaggaggcagctgagaaggcccagcagatgtacgctgccaccaagggcctccgctggtatcggctgtcggatgagggcgagtggctggtgagggagttgaacctcccagtggacaggactgagggtggctggatttccctgcaggatctgcgcaaggtccagagagaaactgcaaggaagtcacagtggaagaagtgggaggtggttgctgaacgggcatggaaggggggcacagagtcagaaatgttcaataagcttgagagcattgctacgtctgacataccacgtaccccggtgctgggctgctgcatcagccgagccctggagccctcggctgtccaggaagagtttatgaccagccgtgtgaattgggtggtacagagctctgctgttgactacttacacctcatgcttgtggccatgaagtggctgtttgaagagtttgccatagatgggcgcttctgcatcagcatccatgacgaggttcgctacctggtgcgggaggaggaccgctaccgcgctgccctggccttgcagatcaccaacctcttgaccaggtgcatgtttgcctacaagctgggtctgaatgacttgccccagtcagtcgcctttttcagtgcagtcgatattgaccggtgcctcaggaaggaagtgaccatggattgtaaaaccccttccaacccaactgggatggaaaggagatacgggattccccagggtgaagcgctggatatttaccagataattgaactcaccaaaggctccttggaaaaacgaagccagcctggaccatagcactgcctggaggctctgtatttgctcccgtggagcttcatcggggtggtgcaggctcccaaactcaggctttcagctgtgctttttgcaaaagggcttgcctaaggccagccatttttcagtagcaggacctgccaagaagattccttctaactgaaggtgcagttgaattcagtgggttcagaaccaagatgccaacatcggtgtggactacaggacaaggggcattgttgcttgttgggtaaaaatgaagcagaagccccaaagttcacattaactcaggcatttcatttattttttccttttcttcttggctggttctttgttctgtcccccatgctctgatgcagtgccctagaaggggaaagaattaatgctctaacgtgataaacctgctccaaggcagtggaaataaaaagaaggaaaaaaaagactctatcttctcatc

SEQ ID NO: 348194 - DNA, 595 bp, Homo sapiens
cataaggctgtgcagccatgcatgccggcaagtgggcgtctccaagcacagctgcaatccacagctcttgggagtccacatcagcacccacaagggtgtagccagggtgggcctgcagggcaggaagagcaggggcactgatctacacagtaagacagccactactgtgggcatcagccgtgagcatgccaaaatcttcaactacggccgcatctatggtgctgggcagccctttgctgagcgcttactaatgcagtttaaccaccggctcacacagcaggaggcagctgagaaggcccagcagatgtacgctgccaccaagggcctccgctggtgagggtccctctcccatccactttaacacccaggacccgaggcctgctttactgtccatctgacccatcttaagatgggtcagatggacttattcatctggctcagcttaatacatgttggcctaatgctacaaatacctaacattaaaaaaagtctgagggtataaacaagtacagaccacagtcactggcagcaatgatttggcctggaggtgcacctgcggctgtgcggcagaccaggcctcagaaccagtaatcag

SEQ ID NO: 348195 - DNA, 4435 bp, Homo sapiens
gaagcggaccggccgggtggaggccacacgctaccccgaggctgcgtaggccgcgcgaagggggacgccgtgccgtgggcctggggtcgggggagcagcagaccgggaagcaccgtgaggaccgaggatttggggtggaaggcaggcatggtcaaacccatttcactgacaggagagcagagacaggacgtgtctctctccacgtcttccagccagtaaaagaagccaagctggagcccaaagccaggtgttctgactcccagcgtgggggtccctgcaccaaccatgagccgcctgctctggaggaaggtggccggcgccaccgtcgggccagggccggttccagctccggggcgctgggtctccagctccgtccccgcgtccgaccccagcgacgggcagcggcggcggcagcagcagcagcagcagcagcagcagcagcaacagcagcctcagcagccgcaagtgctatcctcggagggcgggcagctgcggcacaacccattggacatccagatgctctcgagagggctgcacgagcaaatcttcgggcaaggaggggagatgcctggcgaggccgcggtgcgccgcagcgtcgagcacctgcagaagcacgggctctgggggcagccagccgtgcccttgcccgacgtggagctgcgcctgccgcccctctacggggacaacctggaccagcacttccgcctcctggcccagaagcagagcctgccctacctggaggcggccaacttgctgttgcaggcccagctgcccccgaagcccccggcttgggcctgggcggagggctggacccggtacggccccgagggggaggccgtacccgtggccatccccgaggagcgggccctggtgttcgacgtggaggtctgcttggcagagggaacttgccccacattggcggtggccatatccccctcggcctggtattcctggtgcagccagcggctggtggaagagcgttactcttggaccagccagctgtcgccggctgacctcatccccctggaggtccctactggtgccagcagccccacccagagagactggcaggagcagttagtggtggggcacaatgtttcctttgaccgagctcatatcagggagcagtacctgatccagggttcccgcatgcgtttcctggacaccatgagcatgcacatggccatctcagggctaagcagcttccagcgcagtctgtggatagcagccaagcagggcaaacacaaggtccagccccccacaaagcaaggccagaagtcccagaggaaagccagaagaggcccagcgatctcatcctgggactggctggacatcagcagtgtcaacagtctggcagaggtgcacagactttatgtaggggggcctcccttagagaaggagcctcgagaactgtttgtgaagggcaccatgaaggacattcgtgagaacttccaggacctgatgcagtactgtgcccaggacgtgtgggccacccatgaggttttccagcagcagctaccgctcttcttggagaggtgtccccacccagtgactctggccggcatgctggagatgggtgtctcctacctgcctgtcaaccagaactgggagcgttacctggcagaggcacagggcacttatgaggagctccagcgggagatgaagaagtcgttgatggatctggccaatgatgcctgccagctgctctcaggagagaggtacaaagaagacccctggctctgggacctggagtgggacctgcaagaatttaagcagaagaaagctaagaaggtgaagaaggaaccagccacagccagcaagttgcccatcgagggggctggggcccctggtgatcccatggatcaggaagacctcggcccctgcagtgaggaggaggagtttcaacaagatgtcatggcccgcgcctgcttgcagaagctgaaggggaccacagagctcctgcccaagcggccccagcaccttcctggacaccctggatggtaccggaagctctgcccccggctagacgaccctgcatggaccccgggccccagcctcctcagcctgcagatgcgggtcacacctaaactcatggcacttacctgggatggcttccctctgcactactcagagcgtcatggctggggctacttggtgcctgggcggcgggacaacctggccaagctgccgacaggtaccaccctggagtcagctggggtggtctgcccctacagagccatcgagtccctgtacaggaagcactgtctcgaacaggggaagcagcagctgatgccccaggaggccggcctggcggaggagttcctgctcactgacaatagtgccatatggcaaacggtagaagaactggattacttagaagtggaggctgaggccaagatggagaacttgcgagctgcagtgccaggtcaacccctagctctgactgcccgtggtggccccaaggacacccagcccagctatcaccatggcaatggaccttacaacgacgtggacatccctggctgctggtttttcaagctgcctcacaaggatggtaatagctgtaatgtgggaagcccctttgccaaggacttcctgcccaagatggaggatggcaccctgcaggctggcccaggaggtgccagtgggccccgtgctctggaaatcaacaaaatgatttctttctggaggaacgcccataaacgtatcagctcccagatggtggtgtggctgcccaggtcagctctgccccgtgctgtgatcaggcaccccgactatgatgaggaaggcctctatggggccatcctgccccaagtggtgactgccggcaccatcactcgccgggctgtggagcccacatggctcaccgccagcaatgcccggcctgaccgagtaggcagtgagttgaaagccatggtgcaggccccacctggctacacccttgtgggtgctgatgtggactcccaagagctgtggattgcagctgtgcttggagacgcccactttgccggcatgcatggctgcacagcctttgggtggatgacactgcagggcaggaagagcaggggcactgatctacacagtaagacagccactactgtgggcatcagccgtgagcatgccaaaatcttcaactacggccgcatctatggtgctgggcagccctttgctgagcgcttactaatgcagtttaaccaccggctcacacagcaggaggcagctgagaaggcccagcagatgtacgctgccaccaagggcctccgctggtatcggctgtcggatgagggcgagtggctggtgagggagttgaacctcccagtggacaggactgagggtggctggatttccctgcaggatctgcgcaaggtccagagagaaactgcaaggaagtcacagtggaagaagtgggaggtggttgctgaacgggcatggaaggggggcacagagtcagaaatgttcaataagcttgagagcattgctacgtctgacataccacgtaccccggtgctgggctgctgcatcagccgagccctggagccctcggctgtccaggaagagtttatgaccagccgtgtgaattgggtggtacagagctctgctgttgactacttacacctcatgcttgtggccatgaagtggctgtttgaagagtttgccatcagcatccatgacgaggttcgctacctggtgcgggaggaggaccgctaccgcgctgccctggccttgcagatcaccaacctcttgaccaggtgcatgtttgcctacaagctgggtctgaatgacttgccccagtcagtcgcctttttcagtgcagtcgatattgaccggtgcctcaggaaggaagtgaccatggattgtaaaaccccttccaacccaactgggatggaaaggagatacgggattccccagggtgaagcgctggatatttaccagataattgaactcaccaaaggctccttggaaaaacgaagccagcctggaccatagcactgcctggaggctctgtatttgctcccgtggagcttcatcggggtggtgcaggctcccaaactcaggctttcagctgtgctttttgcaaaagggcttgcctaaggccagccatttttcagtagcaggacctgccaagaagattccttctaactgaaggtgcagttgaattcagtgggttcagaaccaagatgccaacatcggtgtggactacaggacaaggggcattgttgcttgttgggtaaaaatgaagcagaagccccaaagttcacattaactcaggcatttcatttattttttccttttcttcttggctggttctttgttctgtcccccatgctctgatgcagtgccctagaaggggaaagaattaatgctctaacgtgataaacctgctccaaggcagtggaaataaaaagaaggaaaaaaaagactctatcttctcatc

SEQ ID NO: 348196 - DNA, 4002 bp, Homo sapiens
gaagcggaccggccgggtggaggccacacgctaccccgaggctgcgtaggccgcgcgaagggggacgccgtgccgtgggcctggggtcgggggagcagcagaccgggaagcaccgtgaggaccgaggatttggggtggaaggcaggcatggtcaaacccatttcactgacaggagagcagagacaggacgtgtctctctccacgtcttccagccagtaaaagaagccaagctggagcccaaagccaggtgttctgactcccagcgtgggggtccctgcaccaaccatgagccgcctgctctggaggaaggtggccggcgccaccgtcgggccagggccggttccagctccggggcgctgggtctccagctccgtccccgcgtccgaccccagcgacgggcagcggcggcggcagcagcagcagcagcagcagcagcagcagcaacagcagcctcagcagccgcaagtgctatcctcggagggcgggcagctgcggcacaacccattggacatccagatgctctcgagagggctgcacgagcaaatcttcgggcaaggaggggagatgcctggcgaggccgcggtgcgccgcagcgtcgagcacctgcagaagcacgggctctgggggcagccagccgtgcccttgcccgacgtggagctgcgcctgccgcccctctacggggacaacctggaccagcacttccgcctcctggcccagaagcagagcctgccctacctggaggcggccaacttgctgttgcaggcccagctgcccccgaagcccccggcttgggcctgggcggagggctggacccggtacggccccgagggggaggccgtacccgtggccatccccgaggagcgggccctggtgttcgacgtggaggtctgcttggcagagggaacttgccccacattggcggtggccatatccccctcggcctggtattcctggtgcagccagcggctggtggaagagcgttactcttggaccagccagctgtcgccggctgacctcatccccctggaggtccctactggtgccagcagccccacccagagagactggcaggagcagttagtggtggggcacaatgtttcctttgaccgagctcatatcagggagcagtacctgatccagggttcccgcatgcgtttcctggacaccatgagcatgcacatggccatctcagggctaagcagcttccagcgcagtctgtggatagcagccaagcagggcaaacacaaggtccagccccccacaaagcaaggccagaagtcccagaggaaagccagaagaggcccagcgatctcatcctgggactggctggacatcagcagtgtcaacagtctggcagaggtgcacagactttatgtaggggggcctcccttagagaaggagcctcgagaactgtttgtgaagggcaccatgaaggacattcgtgagaacttccaggacctgatgcagtactgtgcccaggacgtgtgggccacccatgaggttttccagcagcagctaccgctcttcttggagaggtgtccccacccagtgactctggccggcatgctggagatgggtgtctcctacctgcctgtcaaccagaactgggagcgttacctggcagaggcacagggcacttatgaggagctccagcgggagatgaagaagtcgttgatggatctggccaatgatgcctgccagctgctctcaggagagaggtacaaagaagacccctggctctgggacctggagtgggacctgcaagaatttaagcagaagaaagctaagaaggtgaagaaggaaccagccacagccagcaagttgcccatcgagggggctggggcccctggtgatcccatggatcaggaagacctcggcccctgcagtgaggaggaggagtttcaacaagatgtcatggcccgcgcctgcttgcagaagctgaaggggaccacagagctcctgcccaagcggccccagcaccttcctggacaccctggatggtaccggaagctctgcccccggctagacgaccctgcatggaccccgggccccagcctcctcagcctgcagatgcgggtcacacctaaactcatggcacttacctgggatggcttccctctgcactactcagagcgtcatggctggggctacttggtgcctgggcggcgggacaacctggccaagctgccgacaggtaccaccctggagtcagctggggtggtctgcccctacagagccatcgagtccctgtacaggaagcactgtctcgaacaggggaagcagcagctgatgccccaggaggccggcctggcggaggagttcctgctcactgacaatagtgccatatggcaaacggtagaagaactggattacttagaagtggaggctgaggccaagatggagaacttgcgagctgcagtgccaggtcaacccctagctctgactgcccgtggtggccccaaggacacccagcccagctatcaccatggcaatggaccttacaacgacgtggacatccctggctgctggtttttcaagctgcctcacaaggatggtaatagctgtaatgtgggaagcccctttgccaaggacttcctgcccaagatggaggatggcaccctgcaggctggcccaggaggtgccagtgggccccgtgctctggaaatcaacaaaatgatttctttctggaggaacgcccataaacgtatcagccctttgctgagcgcttactaatgcagtttaaccaccggctcacacagcaggaggcagctgagaaggcccagcagatgtacgctgccaccaagggcctccgctggtatcggctgtcggatgagggcgagtggctggtgagggagttgaacctcccagtggacaggactgagggtggctggatttccctgcaggatctgcgcaaggtccagagagaaactgcaaggaagtcacagtggaagaagtgggaggtggttgctgaacgggcatggaaggggggcacagagtcagaaatgttcaataagcttgagagcattgctacgtctgacataccacgtaccccggtgctgggctgctgcatcagccgagccctggagccctcggctgtccaggaagagtttatgaccagccgtgtgaattgggtggtacagagctctgctgttgactacttacacctcatgcttgtggccatgaagtggctgtttgaagagtttgccatagatgggcgcttctgcatcagcatccatgacgaggttcgctacctggtgcgggaggaggaccgctaccgcgctgccctggccttgcagatcaccaacctcttgaccaggtgcatgtttgcctacaagctgggtctgaatgacttgccccagtcagtcgcctttttcagtgcagtcgatattgaccggtgcctcaggaaggaagtgaccatggattgtaaaaccccttccaacccaactgggatggaaaggagatacgggattccccagggtgaagcgctggatatttaccagataattgaactcaccaaaggctccttggaaaaacgaagccagcctggaccatagcactgcctggaggctctgtatttgctcccgtggagcttcatcggggtggtgcaggctcccaaactcaggctttcagctgtgctttttgcaaaagggcttgcctaaggccagccatttttcagtagcaggacctgccaagaagattccttctaactgaaggtgcagttgaattcagtgggttcagaaccaagatgccaacatcggtgtggactacaggacaaggggcattgttgcttgttgggtaaaaatgaagcagaagccccaaagttcacattaactcaggcatttcatttattttttccttttcttcttggctggttctttgttctgtcccccatgctctgatgcagtgccctagaaggggaaagaattaatgctctaacgtgataaacctgctccaaggcagtggaaataaaaagaaggaaaaaaaagactctatcttctcatc

SEQ ID NO: 348197 - DNA, 3602 bp, Homo sapiens
gaagcggaccggccgggtggaggccacacgctaccccgaggctgcgtaggccgcgcgaagggggacgccgtgccgtgggcctggggtcgggggagcagcagaccgggaagcaccgtgaggaccgaggatttggggtggaaggcaggcatggtcaaacccatttcactgacaggagagcagagacaggacgtgtctctctccacgtcttccagccagtaaaagaagccaagctggagcccaaagccaggtgttctgactcccagcgtgggggtccctgcaccaaccatgagccgcctgctctggaggaaggtggccggcgccaccgtcgggccagggccggttccagctccggggcgctgggtctccagctccgtccccgcgtccgaccccagcgacgggcagcggcggcggcagcagcagcagcagcagcagcagcagcagcaacagcagcctcagcagccgcaagtgctatcctcggagggcgggcagctgcggcacaacccattggacatccagatgctctcgagagggctgcacgagcaaatcttcgggcaaggaggggagatgcctggcgaggccgcggtgcgccgcagcgtcgagcacctgcagaagcacgggctctgggggcagccagccgtgcccttgcccgacgtggagctgcgcctgccgcccctctacggggacaacctggaccagcacttccgcctcctggcccagaagcagagcctgccctacctggaggcggccaacttgctgttgcaggcccagctgcccccgaagcccccggcttgggcctgggcggagggctggacccggtacggccccgagggggaggccgtacccgtggccatccccgaggagcgggccctggtgttcgacgtggaggtctgcttggcagagggaacttgccccacattggcggtggccatatccccctcggcctggtattcctggtgcagccagcggctggtggaagagcgttactcttggaccagccagctgtcgccggctgacctcatccccctggaggtccctactggtgccagcagccccacccagagagactggcaggagcagttagtggtggggcacaatgtttcctttgaccgagctcatatcagggagcagtacctgatccagggttcccgcatgcgtttcctggacaccatgagcatgcacatggccatctcagggctaagcagcttccagcgcagtctgtggatagcagccaagcagggcaaacacaaggtccagccccccacaaagcaaggccagaagtcccagaggaaagccagaagaggcccagcgatctcatcctgggactggctggacatcagcagtgtcaacagtctggcagaggtgcacagactttatgtaggggggcctcccttagagaaggagcctcgagaactgtttgtgaagggcaccatgaaggacattcgtgagaacttccaggacctgatgcagtactgtgcccaggacgtgtgggccacccatgaggttttccagcagcagctaccgctcttcttggagaggtgtccccacccagtgactctggccggcatgctggagatgggtgtctcctacctgcctgtcaaccagaactgggagcgttacctggcagaggcacagggcacttatgaggagctccagcgggagatgaagaagtcgttgatggatctggccaatgatgcctgccagctgctctcaggagagaggtacaaagaagacccctggctctgggacctggagtgggacctgcaagaatttaagcagaagaaagctaagaaggtgaagaaggaaccagccacagccagcaagttgcccatcgagggggctggggcccctggtgatcccatggatcaggaagacctcggcccctgcagtgaggaggaggagtttcaacaagatgtcatggcccgcgcctgcttgcagaagctgaaggggaccacagagctcctgcccaagcggccccagcaccttcctggacaccctggatggtaccggaagctctgcccccggctagacgaccctgcatggaccccgggccccagcctcctcagcctgcagatgcgggtcacacctaaactcatggcacttacctgggatggcttccctctgcactactcagagcgtcatggctggggctacttggtgcctgggcggcgggacaacctggccaagctgccgacaggtaccaccctggagtcagctggggtggtctgcccctacagagccatcgagtccctgtacaggaagcactgtctcgaacaggggaagcagcagctgatgccccaggaggccggcctggcggaggagttcctgctcactgacaatagtgccatatggcaaacggtagaagaactggattacttagaagtggaggctgaggccaagatggagaacttgcgagctgcagtgccaggtcaacccctagctctgactgcccgtggtggccccaaggacacccagcccagctatcaccatggcaatggaccttacaacgacgtggacatccctggctgctggtttttcaagctgcctcacaaggatggtaatagctgtaatgtgggaagcccctttgccaaggacttcctgcccaagatggaggatggcaccctgcaggctggcccaggaggtgccagtgggccccgtgctctggaaatcaacaaaatgatttctttctggaggaacgcccataaacgtatcagctcccagatggtggtgtggctgcccaggtcagctctgccccgtgctgtgatcaggcaccccgactatgatgaggaaggcctctatggggccatcctgccccaagtggtgactgccggcaccatcactcgccgggctgtggagcccacatggctcaccgccagcaatgcccggcctgaccgagtaggcagtgagttgaaagccatggtgcaggccccacctggctacacccttgtgggtgctgatgtggactcccaagagctgtggattgcagctgtgcttggagacgcccactttgccggcatgcatggctgcacagcctttgggtggatgacactgcagggcaggaagagcaggggcactgatctacacagtaagacagccactactgtgggcatcagccgtgagcatgccaaaatcttcaactacggccgcatctatggtgctgggcagccctttgctgagcgcttactaatgcagtttaaccaccggctcacacagcaggaggcagctgagaaggcccagcagatgtacgctgccaccaagggcctccgctggtatcggctgtcggatgagggcgagtggctggtgagggagttgaacctcccagtggacaggactgagggtggctggatttccctgcaggatctgcgcaaggtccagagagaaactgcaaggaagtcacagtggaagaagtgggaggtggttgctgaacgggcatggaaggggggcacagagtcagaaatgttcaataagcttgagagcattgctacgtctgacataccacgtaccccgtgccctagaaggggaaagaattaatgctctaacgtgataaacctgctccaaggcagtggaaataaaaagaaggaaaaaaaagactctatcttctcatc

SEQ ID NO: 348198 - DNA, 177 bp, Homo sapiens
gcgtggcacaggaagcactcccgtggaatgatggtgataacactgcccccaggtatcggctgtcggatgagggcgagtggctggtgagggagttgaacctcccagtggacaggactgagggtggctggatttccctgcaggatctgcgcaaggtccagagagaaactgcaaggaagt

SEQ ID NO: 348199 - DNA, 206 bp, Homo sapiens
tttttttttttgagccagggtcttcctctgttgcccaggctggagtgcagtggtgccgtcacagctcactgcaacctacacctcctggactcaagcgatccttctgcctcagccccccagtagctgggactacaggtgcgagcccggctaatattttttggatgcagtttcaccatgttaaccatgctggtcttgaactactgagc

SEQ ID NO: 348200 - DNA, 306 bp, Homo sapiens
gatcctgggacctcccagcgccctgcagacgtgcacattcccagtccgtgccctagccgtcctgggtccccttacaagcccgggtctgccacttcacccttgtttttccccatcctccgggtccacatttcatatgcccctgccctcattcccttatgattccctagctgctggttccagagtcttctgggcttacagtctcccggccctcggggagttccgaccccttctttccaatcatcccctttacccgcctgccctcagccccgaggacccctccccgcgcccggctcctgggcgccggtg

SEQ ID NO: 348201 - DNA, 444 bp, Homo sapiens
aagacaaaatgaaaaagagatggaagcggggcatggtggctcacatgtttaatcctagctagttgggaggctgagatgggaggattgcttgagtcccggtggtcaaggctggagtgagctattattgtaccactgtgctccagccagggcaacagagtgagaccctgctgtatcttaaaaaggaaaaagggttgggcgtgatggttcacgcctgtaatcccagcactttgagacgccaaggtgggtggatgacttcagcccgaaaatttgagaccagcctgggaacatagtgagacctcatctctacaagaaatacaaaaattatttgggtgtggtggtgcctgcctgtagtcccagctactcaggaggctgaactaggtggaatgcttgaggccagaaggttgaggctgcagtgagccctgatcttgccactgcactccaacc

SEQ ID NO: 348202 - DNA, 2504 bp, Homo sapiens
gcgtgcacgtggccatccttctccaggaggcgacgaggcagtcccgcctggggtctcccggcggcgcgtccgactcttttcctcgaggctgaggctgccgaggctgtcgttccaggtgtggtttcaaaactgccgggcgcgtcataaaaagcacacgccgcaacacccagtgccgccctcgggggcgcccccgtcccgccttccctccgccctgtccgacgacatccactacaccccgttcagcagccccgagcgggcgcgcatggtcaccctgcacggctacattgagagtcatcctttttcagtactaacgctgccggcacttccgcatctgcccgtgggcgccccacagctgcccctcagccgctgagatccagtgtccaagctgcggccaggagtccacccacctccgcatccacccccgtccgccatcctgcccaccaccaggtcggttcccgaggcctggcctttccctctcctgctgagaaccagaacccaccaggagcaccacagagtcctcctcttggaaggcagaactccctgaaatctggaatcagggtggaaacagcctgtttttcccatttaaacaggagtcctcttcaacttcagctgattacaataacaaaaggcggaattgaattgtgcgatgccaacggccttctcatttacaggtttttttcccccacattggcctttatttactacttccttggaaccatctctgaattctgaatagctgacaacccccaatgttatccactctgttgcttttgtctggaaaactctacagtgtttgtgggatgtccccaaaggaaagctatgttctaattttatcatttccatctgtctggttatgtcaagttaattcagaaagagaagagacagtgaccaaccctgagaggcctaatagggcagagatggaggcctgcccagactaggaggcagcggggatagacagggaatggggagaagaaagacccccattggtttggaaatcaaggagagggcggtgacatattggaccagaagaggcactagccattttaaggagaggaaagagaaaactctggggtcagggagagaccctacccccacctaattatccagcatatatgtaagaaacatagcagcgatggtattcgatctgtgccatgactcttctgaatgtttggacaggttagagttggggacccctgttggccacttgttgacctctcatagtggtgcttgggccaggtcttctcaatggaaggggaatcccttataggggagagggaacagagcccagtgaaatggcagtcagaatgttaaccctggatccatctctaagtagagagagggtgcccattgcctaggtgagtgtgccaagctcaggattccaactggtgcctctgagcttcccaatcaatacttcctggagccagccccacccacccctgagaacagaggtcagacacagctgcgtaacatccatcctgctacaactcttccaccccaaacaaaagggctcaggctacacacgaccatgatttatgttttcaggggatgcccatttgtcccaagcttatcctgtaattctagaattacctggtgtcctgatgcattttccactagaggttgctaatcagcatgttttagcccaagtccaccttcctgctgtggttaacctgttatgttgcttttggaaggagactctaagacagggaaagcaagttcatggtacatacgcagccattgtctctgtttttacccatggcagacattgctaatcaatggcagctctatttcactgagtctggataaggtttcagagttcaaatgcttgacgttggcacttaacatgaaagcctataggtcattcttgctctgggatctacaggcagggtaggcacaggtgcagcctaagaagggaacctgcttcctctcccttccaaagacagtgacagctgactgagggcaaagagcaggcaccactcagaacgtggtgagtacagctcagctcagcactcagtcagtggtaacttgtgcccagccctgtgctaggcgctgacattaacaggagcaaccagggcccaattcctggccttggagctcaaatctttcctttgatttttgctcctgatcatcaaggccccagtggcaaccatgtggtaagtggccaaccaagccctacccagggtcacccaacacactctgccttgagcctctcctcagggtctattccttgcgtggattatgtggccgtagcatgttacagttcaaacatgtctccactaccctgttaagagcagcctgggaacgtacaggccatcaagactatttatttaaatacaaaaaaaggggaaaacacacacacggaaaaaaaattgtaagcactttttttgtaaaaccaatgtctgttttgttacatacctttcatgtcgtgctttgtaaatgtcttatttgtgtaataaagttaatgcaagtagaagtgctggcactgaaatccagaacaaaaaaggatt

SEQ ID NO: 348203 - DNA, 3233 bp, Homo sapiens
gcccgagggctgccggctgccggccgagggcggccccgccaccgaccaggtgatggcccagccagggtccggctgcaaagcgaccacccgctgtcttgaagggaccgcgccgcccgccatggctcagtctgacgccgaggccctggcaggagctctggacaaggacgagggtcaggcctccccatgtacgcccagcacgccatctgtctgctcaccgccctctgccgcctcctccgtgccgtctgcaggcaagaacatctgctccagctgcggcctcgagatcctggaccgatatctgctcaaggtcaacaacctcatctggcacgtgcggtgcctcgagtgctccgtgtgtcgcacgtcgctgaggcagcagaacagctgctacatcaagaacaaggagatcttctgcaagatggactacttcagccgattcgggaccaagtgtgcccggtgcggccgacagatctacgccagcgactgggtgcggagagctcgcggcaacgcctaccacctggcctgcttcgcctgcttctcgtgcaagcgccagctgtccactggtgaggagttcggcctggtcgaggagaaggtgctctgccgcatccactacgacaccatgattgagaacctcaagagggccgccgagaacgggaacggcctcacgttggagggggcagtgccctcggaacaggacagtcaacccaagccggccaagcgcgcgcggacgtccttcaccgcggaacagctgcaggttatgcaggcgcagttcgcgcaggacaacaaccccgacgctcagacgctgcagaagctggcggacatgacgggcctcagccggagagtcatccaggtgtggtttcaaaactgccgggcgcgtcataaaaagcacacgccgcaacacccagtgccgccctcgggggcgcccccgtcccgccttccctccgccctgtccgacgacatccactacaccccgttcagcagccccgagcgggcgcgcatggtcaccctgcacggctacattgagagtcatcctttttcagtactaacgctgccggcacttccgcatctgcccgtgggcgccccacagctgcccctcagccgctgagatccagtgtccaagctgcggccaggagtccacccacctccgcatccacccccgtccgccatcctgcccaccaccaggtcggttcccgaggcctggcctttccctctcctgctgagaaccagaacccaccaggagcaccacagagtcctcctcttggaaggcagaactccctgaaatctggaatcagggtggaaacagcctgtttttcccatttaaacaggagtcctcttcaacttcagctgattacaataacaaaaggcggaattgaattgtgcgatgccaacggccttctcatttacaggtttttttcccccacattggcctttatttactacttccttggaaccatctctgaattctgaatagctgacaacccccaatgttatccactctgttgcttttgtctggaaaactctacagtgtttgtgggatgtccccaaaggaaagctatgttctaattttatcatttccatctgtctggttatgtcaagttaattcagaaagagaagagacagtgaccaaccctgagaggcctaatagggcagagatggaggcctgcccagactaggaggcagcggggatagacagggaatggggagaagaaagacccccattggtttggaaatcaaggagagggcggtgacatattggaccagaagaggcactagccattttaaggagaggaaagagaaaactctggggtcagggagagaccctacccccacctaattatccagcatatatgtaagaaacatagcagcgatggtattcgatctgtgccatgactcttctgaatgtttggacaggttagagttggggacccctgttggccacttgttgacctctcatagtggtgcttgggccaggtcttctcaatggaaggggaatcccttataggggagagggaacagagcccagtgaaatggcagtcagaatgttaaccctggatccatctctaagtagagagagggtgcccattgcctaggtgagtgtgccaagctcaggattccaactggtgcctctgagcttcccaatcaatacttcctggagccagccccacccacccctgagaacagaggtcagacacagctgcgtaacatccatcctgctacaactcttccaccccaaacaaaagggctcaggctacacacgaccatgatttatgttttcaggggatgcccatttgtcccaagcttatcctgtaattctagaattacctggtgtcctgatgcattttccactagaggttgctaatcagcatgttttagcccaagtccaccttcctgctgtggttaacctgttatgttgcttttggaaggagactctaagacagggaaagcaagttcatggtacatacgcagccattgtctctgtttttacccatggcagacattgctaatcaatggcagctctatttcactgagtctggataaggtttcagagttcaaatgcttgacgttggcacttaacatgaaagcctataggtcattcttgctctgggatctacaggcagggtaggcacaggtgcagcctaagaagggaacctgcttcctctcccttccaaagacagtgacagctgactgagggcaaagagcaggcaccactcagaacgtggtgagtacagctcagctcagcactcagtcagtggtaacttgtgcccagccctgtgctaggcgctgacattaacaggagcaaccagggcccaattcctggccttggagctcaaatctttcctttgatttttgctcctgatcatcaaggccccagtggcaaccatgtggtaagtggccaaccaagccctacccagggtcacccaacacactctgccttgagcctctcctcagggtctattccttgcgtggattatgtggccgtagcatgttacagttcaaacatgtctccactaccctgttaagagcagcctgggaacgtacaggccatcaagactatttatttaaatacaaaaaaaggggaaaacacacacacggaaaaaaaattgtaagcactttttttgtaaaaccaatgtctgttttgttacatacctttcatgtcgtgctttgtaaatgtcttatttgtgtaataaagttaatgcaagtagaagtgctggcactgaaatccagaacaaaaaaggatt

SEQ ID NO: 348204 - DNA, 3337 bp, Homo sapiens
gcccgagggctgccggctgccggccgagggcggccccgccaccgaccaggtgatggcccagccagggtccggctgcaaagcgaccacccgctgtcttgaagggaccgcgccgcccgccatggctcagtctgacgccgaggccctggcaggagctctggacaaggacgagggtcaggcctccccatgtacgcccagcacgccatctgtctgctcaccgccctctgccgcctcctccgtgccgtctgcaggcaagaacatctgctccagctgcggcctcgagatcctggaccgatatctgctcaaggtcaacaacctcatctggcacgtgcggtgcctcgagtgctccgtgtgtcgcacgtcgctgaggcagcagaacagctgctacatcaagaacaaggagatcttctgcaagatggactacttcagccgattcgggaccaagtgtgcccggtgcggccgacagatctacgccagcgactgggtgcggagagctcgcggcaacgcctaccacctggcctgcttcgcctgcttctcgtgcaagcgccagctgtccactggtgaggagttcggcctggtcgaggagaaggtgctctgccgcatccactacgacaccatgattgagaacctcaagagggccgccgagaacgggaacggcctcacgttggagggggcagtgccctcggaacaggacagtcaacccaagccggccaagcgcgcgcggacgtccttcaccgcggaacagctgcaggttatgcaggcgcagttcgcgcaggacaacaaccccgacgctcagacgctgcagaagctggcggacatgacgggcctcagccggagagtcatccaggtgtggtttcaaaactgccgggcgcgtcataaaaagcacacgccgcaacacccagtgccgccctcgggggcgcccccgtcccgccttccctccgccctgtccgacgacatccactacaccccgttcagcagccccgagcgggcgcgcatggtcaccctgcacggctacattgagagtcaggtacagtgcgggcaggtgcactgccggctgccttacaccgcaccccccgtccacctcaaagccgatatggatgggccgctctccaaccggggtgagaaggtcatcctttttcagtactaacgctgccggcacttccgcatctgcccgtgggcgccccacagctgcccctcagccgctgagatccagtgtccaagctgcggccaggagtccacccacctccgcatccacccccgtccgccatcctgcccaccaccaggtcggttcccgaggcctggcctttccctctcctgctgagaaccagaacccaccaggagcaccacagagtcctcctcttggaaggcagaactccctgaaatctggaatcagggtggaaacagcctgtttttcccatttaaacaggagtcctcttcaacttcagctgattacaataacaaaaggcggaattgaattgtgcgatgccaacggccttctcatttacaggtttttttcccccacattggcctttatttactacttccttggaaccatctctgaattctgaatagctgacaacccccaatgttatccactctgttgcttttgtctggaaaactctacagtgtttgtgggatgtccccaaaggaaagctatgttctaattttatcatttccatctgtctggttatgtcaagttaattcagaaagagaagagacagtgaccaaccctgagaggcctaatagggcagagatggaggcctgcccagactaggaggcagcggggatagacagggaatggggagaagaaagacccccattggtttggaaatcaaggagagggcggtgacatattggaccagaagaggcactagccattttaaggagaggaaagagaaaactctggggtcagggagagaccctacccccacctaattatccagcatatatgtaagaaacatagcagcgatggtattcgatctgtgccatgactcttctgaatgtttggacaggttagagttggggacccctgttggccacttgttgacctctcatagtggtgcttgggccaggtcttctcaatggaaggggaatcccttataggggagagggaacagagcccagtgaaatggcagtcagaatgttaaccctggatccatctctaagtagagagagggtgcccattgcctaggtgagtgtgccaagctcaggattccaactggtgcctctgagcttcccaatcaatacttcctggagccagccccacccacccctgagaacagaggtcagacacagctgcgtaacatccatcctgctacaactcttccaccccaaacaaaagggctcaggctacacacgaccatgatttatgttttcaggggatgcccatttgtcccaagcttatcctgtaattctagaattacctggtgtcctgatgcattttccactagaggttgctaatcagcatgttttagcccaagtccaccttcctgctgtggttaacctgttatgttgcttttggaaggagactctaagacagggaaagcaagttcatggtacatacgcagccattgtctctgtttttacccatggcagacattgctaatcaatggcagctctatttcactgagtctggataaggtttcagagttcaaatgcttgacgttggcacttaacatgaaagcctataggtcattcttgctctgggatctacaggcagggtaggcacaggtgcagcctaagaagggaacctgcttcctctcccttccaaagacagtgacagctgactgagggcaaagagcaggcaccactcagaacgtggtgagtacagctcagctcagcactcagtcagtggtaacttgtgcccagccctgtgctaggcgctgacattaacaggagcaaccagggcccaattcctggccttggagctcaaatctttcctttgatttttgctcctgatcatcaaggccccagtggcaaccatgtggtaagtggccaaccaagccctacccagggtcacccaacacactctgccttgagcctctcctcagggtctattccttgcgtggattatgtggccgtagcatgttacagttcaaacatgtctccactaccctgttaagagcagcctgggaacgtacaggccatcaagactatttatttaaatacaaaaaaaggggaaaacacacacacggaaaaaaaattgtaagcactttttttgtaaaaccaatgtctgttttgttacatacctttcatgtcgtgctttgtaaatgtcttatttgtgtaataaagttaatgcaagtagaagtgctggcactgaaatccagaacaaaaaaggatt

SEQ ID NO: 348205 - DNA, 2608 bp, Homo sapiens
gcgtgcacgtggccatccttctccaggaggcgacgaggcagtcccgcctggggtctcccggcggcgcgtccgactcttttcctcgaggctgaggctgccgaggctgtcgttccaggtgtggtttcaaaactgccgggcgcgtcataaaaagcacacgccgcaacacccagtgccgccctcgggggcgcccccgtcccgccttccctccgccctgtccgacgacatccactacaccccgttcagcagccccgagcgggcgcgcatggtcaccctgcacggctacattgagagtcaggtacagtgcgggcaggtgcactgccggctgccttacaccgcaccccccgtccacctcaaagccgatatggatgggccgctctccaaccggggtgagaaggtcatcctttttcagtactaacgctgccggcacttccgcatctgcccgtgggcgccccacagctgcccctcagccgctgagatccagtgtccaagctgcggccaggagtccacccacctccgcatccacccccgtccgccatcctgcccaccaccaggtcggttcccgaggcctggcctttccctctcctgctgagaaccagaacccaccaggagcaccacagagtcctcctcttggaaggcagaactccctgaaatctggaatcagggtggaaacagcctgtttttcccatttaaacaggagtcctcttcaacttcagctgattacaataacaaaaggcggaattgaattgtgcgatgccaacggccttctcatttacaggtttttttcccccacattggcctttatttactacttccttggaaccatctctgaattctgaatagctgacaacccccaatgttatccactctgttgcttttgtctggaaaactctacagtgtttgtgggatgtccccaaaggaaagctatgttctaattttatcatttccatctgtctggttatgtcaagttaattcagaaagagaagagacagtgaccaaccctgagaggcctaatagggcagagatggaggcctgcccagactaggaggcagcggggatagacagggaatggggagaagaaagacccccattggtttggaaatcaaggagagggcggtgacatattggaccagaagaggcactagccattttaaggagaggaaagagaaaactctggggtcagggagagaccctacccccacctaattatccagcatatatgtaagaaacatagcagcgatggtattcgatctgtgccatgactcttctgaatgtttggacaggttagagttggggacccctgttggccacttgttgacctctcatagtggtgcttgggccaggtcttctcaatggaaggggaatcccttataggggagagggaacagagcccagtgaaatggcagtcagaatgttaaccctggatccatctctaagtagagagagggtgcccattgcctaggtgagtgtgccaagctcaggattccaactggtgcctctgagcttcccaatcaatacttcctggagccagccccacccacccctgagaacagaggtcagacacagctgcgtaacatccatcctgctacaactcttccaccccaaacaaaagggctcaggctacacacgaccatgatttatgttttcaggggatgcccatttgtcccaagcttatcctgtaattctagaattacctggtgtcctgatgcattttccactagaggttgctaatcagcatgttttagcccaagtccaccttcctgctgtggttaacctgttatgttgcttttggaaggagactctaagacagggaaagcaagttcatggtacatacgcagccattgtctctgtttttacccatggcagacattgctaatcaatggcagctctatttcactgagtctggataaggtttcagagttcaaatgcttgacgttggcacttaacatgaaagcctataggtcattcttgctctgggatctacaggcagggtaggcacaggtgcagcctaagaagggaacctgcttcctctcccttccaaagacagtgacagctgactgagggcaaagagcaggcaccactcagaacgtggtgagtacagctcagctcagcactcagtcagtggtaacttgtgcccagccctgtgctaggcgctgacattaacaggagcaaccagggcccaattcctggccttggagctcaaatctttcctttgatttttgctcctgatcatcaaggccccagtggcaaccatgtggtaagtggccaaccaagccctacccagggtcacccaacacactctgccttgagcctctcctcagggtctattccttgcgtggattatgtggccgtagcatgttacagttcaaacatgtctccactaccctgttaagagcagcctgggaacgtacaggccatcaagactatttatttaaatacaaaaaaaggggaaaacacacacacggaaaaaaaattgtaagcactttttttgtaaaaccaatgtctgttttgttacatacctttcatgtcgtgctttgtaaatgtcttatttgtgtaataaagttaatgcaagtagaagtgctggcactgaaatccagaacaaaaaaggatt

SEQ ID NO: 348206 - DNA, 3269 bp, Homo sapiens
ctagaattcagcggccgctgaattctagagagcccggatgaagagtaacgccattaccgccggagccgccgagagccttagccgacggaaactggacactggaccggcagcgccatgagactcctcccccgcttgctgctgcttctcttactcgtgttccctgccactgtcttgttccgaggcggccccagaggcttgttagcagtggcacaagatcttacagaggatgaagaaacagtagaagattccataattgaggatgaagatgatgaagccgaggtagaagaagatgaacccacagatttggtagaagataaagaggaagaagatgtgtctggtgaacctgaagcttcaccgagtgcagatacaactatactgtttgtaaaaggagaagattttccagcaaataacattgtgaagttcctggtaggctttaccaacaagggtacagaagattttattgttgaatccttagatgcctcattccgttatcctcaggactaccagttttatatccagaatttcacagctcttcctctgaacactgtagtgccaccccagagacaggcaacttttgagtactctttcattcctgcagagcccatgggcggacgaccatttggtttggtcatcaatctgaactacaaagatttgaacggcaatgtattccaagatgcagtcttcaatcaaacagttacagttattgaaagagaggatgggttagatggagaaacaatctttatgtatatgttccttgctggtcttgggcttctggttattgttggccttcatcaactcctagaatctagaaagcgtaagagacccatacagaaagtagaaatgggtacatcaagtcagaatgatgttgacatgagttggattcctcaggaaacattgaatcaaatcaataaagcttcaccaagaaggttgcccaggaaacgggcacagaagagatcagtgggatctgatgagtaaatgttcctttgtgcaacaattcggtctttacttaacctgccctaatatttttcggcctgatgggaattagtgcagagaagccatgtcaccatagaaggcaactcctacttgtgtgtggactgagcaatcagagtctgtggcgataatattgctgaaaatgcactgcattcatttttctaaagtaacaaatttggtttttttttaaaccattaaaatctatgtgtgtgcgtgtgtatgtatgtgagcagttggtcttaccagaatcattgttgaactacctgaaacaagtctttagaatactaaatataatgctgttgtctcttcctttttgacattttctgattttttcccccaaaactcagttaatatttacccactatgattattgatgtcctgccttgaacagttttaaagaaaacaatttttggaatagctcaaatttcaattgatggcacaaatcagcattttgttgttgttactgtattacaattagtattctaaaggcagaagcagaagtagctgctttttagcaatagaattgtttcagtattttgctgctgtttaatgcgcatcttcagaaaacttcccagtggcttcaaggaatttggggatctctctggcaacaaattgtgaaacatgaaatttctgctgactttaatatatgaaacctaatcctacccccttttttaacaaaaagaaactagtacatttgtgaaaattgtgttgtgttgtccattgttgctctagttctgacccagaggtagctctggagtgattttagacctactcactcagttgtgtgtaggtttttttgttttgttttgagagagaatttttctctccttaatagaagcatcctttttaaagagaagttgccttggtccacacactaagcagaaaaccaagttatcaggacagagatatttcccagttactcctaatcaatgaagaaagtgagttggatatttttaaagcagttaactaattttttcttacctaatcttttgggagttttgcttgttgatataacctttttagttaacctgaaagattccaaaaattgttcttaagtgcttgagactggaaccaaaattaaattgtacttcataaaatcctcttatagagttactcttgccctagattgtaaattaagtttggcattattgtcagactggatggagggtgaagtaaaatagtatgaacaattaagaggctctccccctcttgtctttaagccatattctcctacatgtattttataagaaaatgttaagtcaaattttagtggctctttaattcctgacctcttcattctccttttcagtataacctcccctatgctcatgcccacacagacaaaaaaacaaaacgaaatacacacagaaaaaagtctttccaaactgtttaagtatttaaacatctgagccaaagcagatagaagttattgtataattgttaatcactttgcaaataggggctatcaaattacctatattggcattgctggattataaactctatatctgtaatataaagtgtttgagtttttaattgggctgttatgatcagtagttgattttgagaaagctctatgagctctaagtaactgcatggttttttgtttaatgtaatataggagacccttcacattcccaaggaatatattccaaaacatttttgtgaatatctaagtttgtgaaactactagggcatgatacagtaaggtgtaattacagaatttacgaaatgtaaatggcctctacagagttttatggaatacctggtactaacgtaggcagctgcaaaaccacactgagttacagctgtcagccctcctcattcctaaataacttgccttacatatcagccctcccacttctgaagttcaaattagtgcctcggaaatgtagaatttattatttgtcatttttttttttttagcatagattgagaacagttgaactcttaaatcctcagatgccaggggtctgctctagcatcagtaagtatttagcagaaactaactccgtaatgaatggaattcaattccacacatggtttgttcaagcacacttaataagtagcctattttttaaatgtctttttaaaatgtaaatatttggatgaagtttttctttgttttgatatattcatttgctacaccaactatgttttcagaattcatcttttgaacaacttggtttcagaatatgtaaaatgactttaaggatcttgtgtatcaaacctatccccggatgtgtgagaataatgtgttcataaagcatggatctcgc

SEQ ID NO: 348207 - DNA, 1384 bp, Homo sapiens
ggcctgctctccccacctctccgcgctgagcagccacgtcggcggcggtccctggtccagggaggggcgtggcaaaggcccgtgcgcggtacgtgtcccgcccctcgctgcccggagcccggatgaagagtaacgccattaccgccggagccgccgagagccttagccgacggaaactggacactggaccggcagcgccatgagactcctcccccgcttgctgctgcttctcttactcgtgttccctgccactgtcttgttccgaggcggccccagaggcttgttagcagtggcacaagatcttacagaggatgaagaaacagtagaagattccataattgaggatgaagatgatgaagccgaggtagaagaagatgaacccacagatttggtagaagataaagaggaagaagatgtgtctggtgaacctgaagcttcaccgagtgcagatacaactatactgtttgtaaaaggagaagattttccagcaaataacattgtgaagttcctggtaggctttaccaacaagggtacagaagattttattgttgaatccttagatgcctcattccgttatcctcaggactaccagttttatatccagaatttcacagctcttcctctgaacactgtagtgccaccccagagacaggcaacttttgagtactctttcattcctgcagagcccatgggcggacgaccatttggtttggtcatcaatctgaactacaaagatttgaacggcaatgtattccaagatgcagtcttcaatcaaacagttacagttattgaaagagaggatgggttagatggagaaacaatctttatgtatatgttccttgctggtcttgggcttctggttattgttggccttcatcaactcctagaatctagaaagcgtaagagacccatacagaaagtagaaatgggtacatcaagtcagaatgatgttgacatgagttggattcctcaggaaacattgaatcaaatcaataaagcttcaccaagaaggttgcccaggaaacgggcacagaagagatcagtgggatctgatgagtaaatgttcctttgtgcaacaattcggtctttacttaacctgccctaatatttttcggcctgatgggaattagtgcagagaagccatgtcaccatagaaggcaactcctacttgtgtgtggactgagcaatcagagtctgtggcgataatattgctgaaaatgcactgcattcatttttctaaagtaacaaatttggtttttttttaaaccattaaaatctatgtgtgtgcgtgtgtatgtatgtgagcagttggtcttaccagaatcattgttgaactacctgaaacaagtctttagaatactaaatataatgctgttgtctcttc

SEQ ID NO: 348208 - DNA, 3393 bp, Homo sapiens
  misc_feature (3385)..(3385): n is a, c, g, or t
ggcctgctctccccacctctccgcgctgagcagccacgtcggcggcggtccctggtccagggaggggcgtggcaaaggcccgtgcgcggtacgtgtcccgcccctcgctgcccggagcccggatgaagagtaacgccattaccgccggagccgccgagagccttagccgacggaaactggacactggaccggcagcgccatgagactcctcccccgcttgctgctgcttctcttactcgtgttccctgccactgtcttgttccgaggcggccccagaggcttgttagcagtggcacaagatcttacagaggatgaagaaacagtagaagattccataattgaggatgaagatgatgaagccgaggtagaagaagatgaacccacagatttggtagaagataaagaggaagaagatgtgtctggtgaacctgaagcttcaccgagtgcagatacaactatactgtttgtaaaaggagaagattttccagcaaataacattgtgaagttcctggtaggctttaccaacaagggtacagaagattttattgttgaatccttagatgcctcattccgttatcctcaggactaccagttttatatccagaatttcacagctcttcctctgaacactgtagtgccaccccagagacaggcaacttttgagtactctttcattcctgcagagcccatgggcggacgaccatttggtttggtcatcaatctgaactacaaagatttgaacggcaatgtattccaagatgcagtcttcaatcaaacagttacagttattgaaagagaggatgggttagatggagaaacaatctttatgtatatgttccttgctggtcttgggcttctggttattgttggccttcatcaactcctagaatctagaaagcgtaagagacccatacagaaagtagaaatgggtacatcaagtcagaatgatgttgacatgagttggattcctcaggaaacattgaatcaaatcaataaagcttcaccaagaaggttgcccaggaaacgggcacagaagagatcagtgggatctgatgagtaaatgttcctttgtgcaacaattcggtctttacttaacctgccctaatatttttcggcctgatgggaattagtgcagagaagccatgtcaccatagaaggcaactcctacttgtgtgtggactgagcaatcagagtctgtggcgataatattgctgaaaatgcactgcattcatttttctaaagtaacaaatttggtttttttttaaaccattaaaatctatgtgtgtgcgtgtgtatgtatgtgagcagttggtcttaccagaatcattgttgaactacctgaaacaagtctttagaatactaaatataatgctgttgtctcttcctttttgacattttctgattttttcccccaaaactcagttaatatttacccactatgattattgatgtcctgccttgaacagttttaaagaaaacaatttttggaatagctcaaatttcaattgatggcacaaatcagcattttgttgttgttactgtattacaattagtattctaaaggcagaagcagaagtagctgctttttagcaatagaattgtttcagtattttgctgctgtttaatgcgcatcttcagaaaacttcccagtggcttcaaggaatttggggatctctctggcaacaaattgtgaaacatgaaatttctgctgactttaatatatgaaacctaatcctacccccttttttaacaaaaagaaactagtacatttgtgaaaattgtgttgtgttgtccattgttgctctagttctgacccagaggtagctctggagtgattttagacctactcactcagttgtgtgtaggtttttttgttttgttttgagagagaatttttctctccttaatagaagcatcctttttaaagagaagttgccttggtccacacactaagcagaaaaccaagttatcagaaagtgagttggatatttttaaagcagttaactaattttttcttacctaatcttttgggagttttgcttgttgatataacctttttagttaacctgaaagattccaaaaattgttcttaagtgcttgagactggaaccaaaattaaattgtacttcataaaatcctcttatagagttactcttgccctagattgtaaattaagtttggcattattgtcagactggatggagggtgaagtaaaatagtatgaacaattaagaggctctccccctcttgtctttaagccatattctcctacatgtattttataagaaaatgttaagtcaaattttagtggctctttaattcctgacctcttcattctccttttcagtataacctcccctatgctcatgcccacacagacaaaaaaacaaaacgaaatacacacagaaaaaagtctttccaaactgtttaagtatttaaacatctgagccaaagcagatagaagttattgtataattgttaatcactttgcaaataggggctatcaaattacctatattggcattgctggattataaactctatatctgtaatataaagtgtttgagtttttaattgggctgttatgatcagtagttgattttgagaaagctctatgagctctaagtaactgcatggttttttgtttaatgtaatataggagacccttcacattcccaaggaatatattccaaaacatttttgtgaatatctaagtttgtgaaactactagggcatgatacagtaaggtgtaattacagaatttacgaaatgtaaatggcctctacagagttttatggaatacctggtactaacgtaggcagctgcaaaaccacactgagttacagctgtcagccctcctcattcctaaataacttgccttacatatcagccctcccacttctgaagttcaaattagtgcctcggaaatgtagaatttattatttgtcatttttttttttttagcatagattgagaacagttgaactcttaaatcctcagatgccaggggtctgctctagcatcagtaagtatttagcagaaactaactccgtaatgaatggaattcaattccacacatggtttgttcaagcacacttaataagtagcctattttttaaatgtctttttaaaatgtaaatatttggatgaagtttttctttgttttgatatattcatttgctacaccaactatgttttcagaattcatcttttgaacaacttggtttcagaatatgtaaaatgactttaaggatcttgtgtatcaaacctatccccggatgtgtgagaataatgtgttcataaagcatggatctcgcaaaaaaaaaaaaaaaacaaaaaaaaaaaaaaaaaaaaaaaaaaaaaaaaaaaaaaaaaaaacaaaaanaaaaaaca

SEQ ID NO: 348209 - DNA, 3969 bp, Homo sapiens
ggcctgctctccccacctctccgcgctgagcagccacgtcggcggcggtccctggtccagggaggggcgtggcaaaggcccgtgcgcggtacgtgtcccgcccctcgctgcccggagcccggatgaagagtaacgccattaccgccggagccgccgagagccttagccgacggaaactggacactggaccggcagcgccatgagactcctcccccgcttgctgctgcttctcttactcgtgttccctgccactgtcttgttccgaggcggccccagaggcttgttagcagtggcacaagatcttacagaggatgaagaaacagtagaagattccataattgaggatgaagatgatgaagccgaggtagaagaagatgaacccacagatttggtagaagataaagaggaagaagatgtgtctggtgaacctgaagcttcaccgagtgcagatacaactatactgtttgtaaaaggagaagattttccagcaaataacattgtgaagttcctggtaggctttaccaacaagggtacagaagattttattgttgaatccttagatgcctcattccgttatcctcaggactaccagttttatatccagaatttcacagctcttcctctgaacactgtagtgccaccccagagacaggcaacttttgagtactctttcattcctgcagagcccatgggcggacgaccatttggtttggtcatcaatctgaactacaaagatttgaacggcaatgtattccaagatgcagtcttcaatcaaacagttacagttattgaaagagaggatgggttagatggagaaacaatctttatgtatatgttccttgctggtcttgggcttctggttattgttggccttcatcaactcctagaatctagaaagcgtaagagacccatacagaaagtagaaatgggtacatcaagtcagaatgatgttgacatgagttggattcctcaggaaacattgaatcaaatcaataaagcttcaccaagaaggttgcccaggaaacgggcacagaagagatcagtgggatctgatgagtaaatgttcctttgtgcaacaattcggtctttacttaacctgccctaatatttttcggcctgatgggaattagtgcagagaagccatgtcaccatagaaggcaactcctacttgtgtgtggactgagcaatcagagtctgtggcgataatattgctgaaaatgcactgcattcatttttctaaagtaacaaatttggtttttttttaaaccattaaaatctatgtgtgtgcgtgtgtatgtatgtgagcagttggtcttaccagaatcattgttgaactacctgaaacaagtctttagaatactaaatataatgctgttgtctcttcctttttgacattttctgattttttcccccaaaactcagttaatatttacccactatgattattgatgtcctgccttgaacagttttaaagaaaacaatttttggaatagctcaaatttcaattgatggcacaaatcagcattttgttgttgttactgtattacaattagtattctaaaggcagaagcagaagtagctgctttttagcaatagaattgtttcagtattttgctgctgtttaatgcgcatcttcagaaaacttcccagtggcttcaaggaatttggggatctctctggcaacaaattgtgaaacatgaaatttctgctgactttaatatatgaaacctaatcctacccccttttttaacaaaaagaaactagtacatttgtgaaaattgtgttgtgttgtccattgttgctctagttctgacccagaggtagctctggagtgattttagacctactcactcagttgtgtgtaggtttttttgttttgttttgagagagaatttttctctccttaatagaagcatcctttttaaagagaagttgccttggtccacacactaagcagaaaaccaagttatcaggacagagatatttcccagttactcctaatcaatgaagaaagtgagttggatatttttaaagcagttaactaattttttcttacctaatcttttgggagttttgcttgttgatataacctttttagttaacctgaaagattccaaaaattgttcttaagtgcttgagactggaaccaaaattaaattgtacttcataaaatcctcttatagagttactcttgccctagattgtaaattaagtttggcattattgtcagactggatggagggtgaagtaaaatagtatgaacaattaagaggctctccccctcttgtctttaagccatattctcctacatgtattttataagaaaatgttaagtcaaattttagtggctctttaattcctgacctcttcattctccttttcagtataacctcccctatgctcatgcccacacagacaaaaaaacaaaacgaaatacacacagaaaaaagtctttccaaactgtttaagtatttaaacatctgagccaaagcagatagaagttattgtataattgttaatcactttgcaaataggggctatcaaattacctatattggcattgctggattataaactctatatctgtaatataaagtgtttgagtttttaattgggctgttatgatcagtagttgattttgagaaagctctatgagctctaagtaactgcatggttttttgtttaatgtaatataggagacccttcacattcccaaggaatatattccaaaacatttttgtgaatatctaagtttgtgaaactactagggcatgatacagtaaggtgtaattacagaatttacgaaatgtaaatggcctctacagagttttatggaatacctggtactaacgtaggcagctgcaaaaccacactgagttacagctgtcagccctcctcattcctaaataacttgccttacatatcagccctcccacttctgaagttcaaattagtgcctcggaaatgtagaatttattatttgtcatttttttttttttagcatagattgagaacagttgaactcttaaatcctcagatgccaggggtctgctctagcatcagtaagtatttagcagaaactaactccgtaatgaatggaattcaattccacacatggtttgttcaagcacacttaataagtagcctattttttaaatgtctttttaaaatgtaaatatttggatgaagtttttctttgttttgatatattcatttgctacaccaactatgttttcagaattcatcttttgaacaacttggtttcagaatatgtaaaatgactttaaggatcttgtgtatcaaacctatccccggatgtgtgagaataatgtgttcataaagcatggatctcgctttggttgtatagcttcctcatttacttcatggtcttacatagctggtgactttcagggctaatctgccctctaaagcattgtcccaggagaggaaaaggaaatgggacctcagaagtagaagcctcagggaaggagtaaagtagaaatcagaagaaaagaagcttcacttgatagtaataaggtttttaacttcaagtaccttcagaaaatgtgattttgataagaggaaagggcaaatttagaccttaaaaaatatggaagaactactgccttaaaagtgcatttgtagcacatcagcctagaactgtatcatggctgtgctggggagaagtaaatggtggtaatgtaacattgccacctttacttaatgatgtgttattttcgaggtacagtagatcaatatagtaataggcgagcctcatatatagcattcatcttgtacaatgatatccatacccttgatatgaaggaaaattgacttggtttgtgcatttgaatactgaaataattttttaaaactcagtgacacataccatctcttgccaagaattgagccactgcactccagcctgggcgacagagcgagactctgtcttaaaaaaaaatatatata

SEQ ID NO: 348210 - DNA, 3106 bp, Homo sapiens
  misc_feature (3098)..(3098): n is a, c, g, or t
ggcctgctctccccacctctccgcgctgagcagccacgtcggcggcggtccctggtccagggaggggcgtggcaaaggcccgtgcgcggtacgtgtcccgcccctcgctgcccggagcccggatgaagagtaacgccattaccgccggagccgccgagagccttagccgacggaaactggacactggaccggcagcgccatgagactcctcccccgcttgctgctgcttctcttactcgtgttccctgccactgtcttgttccgaggcggccccagaggcttgttagcagtggcacaagatcttacagaggatgaagaaacagtagaagattccataattgaggatgaagatgatgaagccgaggtagaagaagatgaacccacagatttggtagaagataaagaggaagaagatgtgtctggtgaacctgaagcttcaccgagtgcagatacaactatactgtttgtaaaaggagaagattttccagcaaataacattgtgaagttcctggtaggctttaccaacaagggtacagaagattttattgttgaatccttagatgcctcattccgttatcctcaggactaccagttttatatccagaatttcacagctcttcctctgaacactgtagtgccaccccagagacaggcaacttttgagtactctttcattcctgcagagcccatgggcggacgaccatttggtttggtcatcaatctgaactacaaagatttgaacggcaatgtattccaagatgcagtcttcaatcaaacagttacagttattgaaagagaggatgggttagatggagaaacaatctttatgtatatgttccttgctggtcttgggcttctggttattgttggccttcatcaactcctagaatctagaaagcgtaagagacccatacagaaagtagaaatgggtacatcaagtcagaatgatgttgacatgagttggattcctcaggaaacattgaatcaaatcaataaagcttcaccaagaaggttgcccaggaaacgggcacagaagagatcagtgggatctgatgagtaaatgttcctttgtgcaacaattcggtctttacttaacctgccctaatatttttcggcctgatgggaattagtgcagagaagccatgtcaccatagaaggcaactcctacttgtgtgtggactgagcaatcagagtctgtggcgataatattgctgaaaatgcactgcattcatttttctaaagtaacaaatttggtttttttttaaaccattaaaatctatgtgtgtgcgtgtgtatgtatgtgagcagttggtcttaccagaatcattgttgaactacctgaaacaagtctttagaatactaaatataatgctgttgtctcttcctttttgacattttctgattttttcccccaaaactcagttaatatttacccactatgattattgatgtcctgccttgaacagttttaaagaaaacaatttttggaatagctcaaatttcaattgatggcacaaatcagcattttgttgttgttactgtattacaattagtattctaaaggcagaagcagaagtagctgctttttagcaatagaattgtttcagtattttgctgctgtttaatgcgcatcttcagaaaacttcccagacagagatatttcccagttactcctaatcaatgaagaaagtgagttggatatttttaaagcagttaactaattttttcttacctaatcttttgggagttttgcttgttgatataacctttttagttaacctgaaagattccaaaaattgttcttaagtgcttgagactggaaccaaaattaaattgtacttcataaaatcctcttatagagttactcttgccctagattgtaaattaagtttggcattattgtcagactggatggagggtgaagtaaaatagtatgaacaattaagaggctctccccctcttgtctttaagccatattctcctacatgtattttataagaaaatgttaagtcaaattttagtggctctttaattcctgacctcttcattctccttttcagtataacctcccctatgctcatgcccacacagacaaaaaaacaaaacgaaatacacacagaaaaaagtctttccaaactgtttaagtatttaaacatctgagccaaagcagatagaagttattgtataattgttaatcactttgcaaataggggctatcaaattacctatattggcattgctggattataaactctatatctgtaatataaagtgtttgagtttttaattgggctgttatgatcagtagttgattttgagaaagctctatgagctctaagtaactgcatggttttttgtttaatgtaatataggagacccttcacattcccaaggaatatattccaaaacatttttgtgaatatctaagtttgtgaaactactagggcatgatacagtaaggtgtaattacagaatttacgaaatgtaaatggcctctacagagttttatggaatacctggtactaacgtaggcagctgcaaaaccacactgagttacagctgtcagccctcctcattcctaaataacttgccttacatatcagccctcccacttctgaagttcaaattagtgcctcggaaatgtagaatttattatttgtcatttttttttttttagcatagattgagaacagttgaactcttaaatcctcagatgccaggggtctgctctagcatcagtaagtatttagcagaaactaactccgtaatgaatggaattcaattccacacatggtttgttcaagcacacttaataagtagcctattttttaaatgtctttttaaaatgtaaatatttggatgaagtttttctttgttttgatatattcatttgctacaccaactatgttttcagaattcatcttttgaacaacttggtttcagaatatgtaaaatgactttaaggatcttgtgtatcaaacctatccccggatgtgtgagaataatgtgttcataaagcatggatctcgcaaaaaaaaaaaaaaaacaaaaaaaaaaaaaaaaaaaaaaaaaaaaaaaaaaaaaaaaaaaacaaaaanaaaaaaca

SEQ ID NO: 348211 - DNA, 3243 bp, Homo sapiens
  misc_feature (34)..(34): n is a, c, g, or t
  misc_feature (61)..(61): n is a, c, g, or t
  misc_feature (70)..(70): n is a, c, g, or t
  misc_feature (72)..(73): n is a, c, g, or t
  misc_feature (76)..(76): n is a, c, g, or t
  misc_feature (3235)..(3235): n is a, c, g, or t
gctagcacgaactgaaatgaccgcacccataaanctccccgctgctgtgctttctactcgntcctgccantnntgntccgagcgccccagagcttgttagcagtggcacaagatcttacagaggatgaagaaacagtagaagattccataattgaggatgaagatgatgaagccgaggtagaagaagatgaacccacagatttggtagaagataaagaggaagaagatgtgtctggtgaacctgaagcttcaccgagtgcagatacaactatactgtttgtaaaaggagaagattttccagcaaataacattgtgaagttcctggtaggctttaccaacaagggtacagaagattttattgttgaatccttagatgcctcattccgttatcctcaggactaccagttttatatccagaatttcacagctcttcctctgaacactgtagtgccaccccagagacaggcaacttttgagtactctttcattcctgcagagcccatgggcggacgaccatttggtttggtcatcaatctgaactacaaagatttgaacggcaatgtattccaagatgcagtcttcaatcaaacagttacagttattgaaagagaggatgggttagatggagaaacaatctttatgtatatgttccttgctggtcttgggcttctggttattgttggccttcatcaactcctagaatctagaaagcgtaagagacccatacagaaagtagaaatgggtacatcaagtcagaatgatgttgacatgagttggattcctcaggaaacattgaatcaaatcaataaagcttcaccaagaaggttgcccaggaaacgggcacagaagagatcagtgggatctgatgagtaaatgttcctttgtgcaacaattcggtctttacttaacctgccctaatatttttcggcctgatgggaattagtgcagagaagccatgtcaccatagaaggcaactcctacttgtgtgtggactgagcaatcagagtctgtggcgataatattgctgaaaatgcactgcattcatttttctaaagtaacaaatttggtttttttttaaaccattaaaatctatgtgtgtgcgtgtgtatgtatgtgagcagttggtcttaccagaatcattgttgaactacctgaaacaagtctttagaatactaaatataatgctgttgtctcttcctttttgacattttctgattttttcccccaaaactcagttaatatttacccactatgattattgatgtcctgccttgaacagttttaaagaaaacaatttttggaatagctcaaatttcaattgatggcacaaatcagcattttgttgttgttactgtattacaattagtattctaaaggcagaagcagaagtagctgctttttagcaatagaattgtttcagtattttgctgctgtttaatgcgcatcttcagaaaacttcccagtggcttcaaggaatttggggatctctctggcaacaaattgtgaaacatgaaatttctgctgactttaatatatgaaacctaatcctacccccttttttaacaaaaagaaactagtacatttgtgaaaattgtgttgtgttgtccattgttgctctagttctgacccagaggtagctctggagtgattttagacctactcactcagttgtgtgtaggtttttttgttttgttttgagagagaatttttctctccttaatagaagcatcctttttaaagagaagttgccttggtccacacactaagcagaaaaccaagttatcaggacagagatatttcccagttactcctaatcaatgaagaaagtgagttggatatttttaaagcagttaactaattttttcttacctaatcttttgggagttttgcttgttgatataacctttttagttaacctgaaagattccaaaaattgttcttaagtgcttgagactggaaccaaaattaaattgtacttcataaaatcctcttatagagttactcttgccctagattgtaaattaagtttggcattattgtcagactggatggagggtgaagtaaaatagtatgaacaattaagaggctctccccctcttgtctttaagccatattctcctacatgtattttataagaaaatgttaagtcaaattttagtggctctttaattcctgacctcttcattctccttttcagtataacctcccctatgctcatgcccacacagacaaaaaaacaaaacgaaatacacacagaaaaaagtctttccaaactgtttaagtatttaaacatctgagccaaagcagatagaagttattgtataattgttaatcactttgcaaataggggctatcaaattacctatattggcattgctggattataaactctatatctgtaatataaagtgtttgagtttttaattgggctgttatgatcagtagttgattttgagaaagctctatgagctctaagtaactgcatggttttttgtttaatgtaatataggagacccttcacattcccaaggaatatattccaaaacatttttgtgaatatctaagtttgtgaaactactagggcatgatacagtaaggtgtaattacagaatttacgaaatgtaaatggcctctacagagttttatggaatacctggtactaacgtaggcagctgcaaaaccacactgagttacagctgtcagccctcctcattcctaaataacttgccttacatatcagccctcccacttctgaagttcaaattagtgcctcggaaatgtagaatttattatttgtcatttttttttttttagcatagattgagaacagttgaactcttaaatcctcagatgccaggggtctgctctagcatcagtaagtatttagcagaaactaactccgtaatgaatggaattcaattccacacatggtttgttcaagcacacttaataagtagcctattttttaaatgtctttttaaaatgtaaatatttggatgaagtttttctttgttttgatatattcatttgctacaccaactatgttttcagaattcatcttttgaacaacttggtttcagaatatgtaaaatgactttaaggatcttgtgtatcaaacctatccccggatgtgtgagaataatgtgttcataaagcatggatctcgcaaaaaaaaaaaaaaaacaaaaaaaaaaaaaaaaaaaaaaaaaaaaaaaaaaaaaaaaaaaacaaaaanaaaaaaca

SEQ ID NO: 348212 - DNA, 3141 bp, Homo sapiens
  misc_feature (3133)..(3133): n is a, c, g, or t
ctagaattcagcggccgctgaattctagagagcccggatgaagagtaacgccattaccgccggagccgccgagagccttagccgacggaaactggacactggaccggcagcgccatgagactcctcccccgcttgctgctgcttctcttactcgtgttccctgccactgtcttgttccgaggcggccccagaggcttgttagcagtggcacaagatcttacagaggatgaagaaacagtagaagattccataattgaggatgaagatgatgaagccgaggtagaagaagatgaacccacagatttggtagaagataaagaggaagaagatgtgtctggtgaacctgaagcttcaccgagtgcagatacaactatactgtttgtaaaaggagaagagcccatgggcggacgaccatttggtttggtcatcaatctgaactacaaagatttgaacggcaatgtattccaagatgcagtcttcaatcaaacagttacagttattgaaagagaggatgggttagatggagaaacaatctttatgtatatgttccttgctggtcttgggcttctggttattgttggccttcatcaactcctagaatctagaaagcgtaagagacccatacagaaagtagaaatgggtacatcaagtcagaatgatgttgacatgagttggattcctcaggaaacattgaatcaaatcaataaagcttcaccaagaaggttgcccaggaaacgggcacagaagagatcagtgggatctgatgagtaaatgttcctttgtgcaacaattcggtctttacttaacctgccctaatatttttcggcctgatgggaattagtgcagagaagccatgtcaccatagaaggcaactcctacttgtgtgtggactgagcaatcagagtctgtggcgataatattgctgaaaatgcactgcattcatttttctaaagtaacaaatttggtttttttttaaaccattaaaatctatgtgtgtgcgtgtgtatgtatgtgagcagttggtcttaccagaatcattgttgaactacctgaaacaagtctttagaatactaaatataatgctgttgtctcttcctttttgacattttctgattttttcccccaaaactcagttaatatttacccactatgattattgatgtcctgccttgaacagttttaaagaaaacaatttttggaatagctcaaatttcaattgatggcacaaatcagcattttgttgttgttactgtattacaattagtattctaaaggcagaagcagaagtagctgctttttagcaatagaattgtttcagtattttgctgctgtttaatgcgcatcttcagaaaacttcccagtggcttcaaggaatttggggatctctctggcaacaaattgtgaaacatgaaatttctgctgactttaatatatgaaacctaatcctacccccttttttaacaaaaagaaactagtacatttgtgaaaattgtgttgtgttgtccattgttgctctagttctgacccagaggtagctctggagtgattttagacctactcactcagttgtgtgtaggtttttttgttttgttttgagagagaatttttctctccttaatagaagcatcctttttaaagagaagttgccttggtccacacactaagcagaaaaccaagttatcaggacagagatatttcccagttactcctaatcaatgaagaaagtgagttggatatttttaaagcagttaactaattttttcttacctaatcttttgggagttttgcttgttgatataacctttttagttaacctgaaagattccaaaaattgttcttaagtgcttgagactggaaccaaaattaaattgtacttcataaaatcctcttatagagttactcttgccctagattgtaaattaagtttggcattattgtcagactggatggagggtgaagtaaaatagtatgaacaattaagaggctctccccctcttgtctttaagccatattctcctacatgtattttataagaaaatgttaagtcaaattttagtggctctttaattcctgacctcttcattctccttttcagtataacctcccctatgctcatgcccacacagacaaaaaaacaaaacgaaatacacacagaaaaaagtctttccaaactgtttaagtatttaaacatctgagccaaagcagatagaagttattgtataattgttaatcactttgcaaataggggctatcaaattacctatattggcattgctggattataaactctatatctgtaatataaagtgtttgagtttttaattgggctgttatgatcagtagttgattttgagaaagctctatgagctctaagtaactgcatggttttttgtttaatgtaatataggagacccttcacattcccaaggaatatattccaaaacatttttgtgaatatctaagtttgtgaaactactagggcatgatacagtaaggtgtaattacagaatttacgaaatgtaaatggcctctacagagttttatggaatacctggtactaacgtaggcagctgcaaaaccacactgagttacagctgtcagccctcctcattcctaaataacttgccttacatatcagccctcccacttctgaagttcaaattagtgcctcggaaatgtagaatttattatttgtcatttttttttttttagcatagattgagaacagttgaactcttaaatcctcagatgccaggggtctgctctagcatcagtaagtatttagcagaaactaactccgtaatgaatggaattcaattccacacatggtttgttcaagcacacttaataagtagcctattttttaaatgtctttttaaaatgtaaatatttggatgaagtttttctttgttttgatatattcatttgctacaccaactatgttttcagaattcatcttttgaacaacttggtttcagaatatgtaaaatgactttaaggatcttgtgtatcaaacctatccccggatgtgtgagaataatgtgttcataaagcatggatctcgcaaaaaaaaaaaaaaaacaaaaaaaaaaaaaaaaaaaaaaaaaaaaaaaaaaaaaaaaaaaacaaaaanaaaaaaca

SEQ ID NO: 348213 - DNA, 2750 bp, Homo sapiens
  misc_feature (2742)..(2742): n is a, c, g, or t
agttaagactagtttcatatgctgcgtgagtgagtgaaacaggcctagaatgctcagatctgggcaatgtattccaagatgcagtcttcaatcaaacagttacagttattgaaagagaggatgggttagatggagaaacaatctttatgtatatgttccttgctggtcttgggcttctggttattgttggccttcatcaactcctagaatctagaaagcgtaagagacccatacagaaagtagaaatgggtacatcaagtcagaatgatgttgacatgagttggattcctcaggaaacattgaatcaaatcaataaagcttcaccaagaaggttgcccaggaaacgggcacagaagagatcagtgggatctgatgagtaaatgttcctttgtgcaacaattcggtctttacttaacctgccctaatatttttcggcctgatgggaattagtgcagagaagccatgtcaccatagaaggcaactcctacttgtgtgtggactgagcaatcagagtctgtggcgataatattgctgaaaatgcactgcattcatttttctaaagtaacaaatttggtttttttttaaaccattaaaatctatgtgtgtgcgtgtgtatgtatgtgagcagttggtcttaccagaatcattgttgaactacctgaaacaagtctttagaatactaaatataatgctgttgtctcttcctttttgacattttctgattttttcccccaaaactcagttaatatttacccactatgattattgatgtcctgccttgaacagttttaaagaaaacaatttttggaatagctcaaatttcaattgatggcacaaatcagcattttgttgttgttactgtattacaattagtattctaaaggcagaagcagaagtagctgctttttagcaatagaattgtttcagtattttgctgctgtttaatgcgcatcttcagaaaacttcccagtggcttcaaggaatttggggatctctctggcaacaaattgtgaaacatgaaatttctgctgactttaatatatgaaacctaatcctacccccttttttaacaaaaagaaactagtacatttgtgaaaattgtgttgtgttgtccattgttgctctagttctgacccagaggtagctctggagtgattttagacctactcactcagttgtgtgtaggtttttttgttttgttttgagagagaatttttctctccttaatagaagcatcctttttaaagagaagttgccttggtccacacactaagcagaaaaccaagttatcaggacagagatatttcccagttactcctaatcaatgaagaaagtgagttggatatttttaaagcagttaactaattttttcttacctaatcttttgggagttttgcttgttgatataacctttttagttaacctgaaagattccaaaaattgttcttaagtgcttgagactggaaccaaaattaaattgtacttcataaaatcctcttatagagttactcttgccctagattgtaaattaagtttggcattattgtcagactggatggagggtgaagtaaaatagtatgaacaattaagaggctctccccctcttgtctttaagccatattctcctacatgtattttataagaaaatgttaagtcaaattttagtggctctttaattcctgacctcttcattctccttttcagtataacctcccctatgctcatgcccacacagacaaaaaaacaaaacgaaatacacacagaaaaaagtctttccaaactgtttaagtatttaaacatctgagccaaagcagatagaagttattgtataattgttaatcactttgcaaataggggctatcaaattacctatattggcattgctggattataaactctatatctgtaatataaagtgtttgagtttttaattgggctgttatgatcagtagttgattttgagaaagctctatgagctctaagtaactgcatggttttttgtttaatgtaatataggagacccttcacattcccaaggaatatattccaaaacatttttgtgaatatctaagtttgtgaaactactagggcatgatacagtaaggtgtaattacagaatttacgaaatgtaaatggcctctacagagttttatggaatacctggtactaacgtaggcagctgcaaaaccacactgagttacagctgtcagccctcctcattcctaaataacttgccttacatatcagccctcccacttctgaagttcaaattagtgcctcggaaatgtagaatttattatttgtcatttttttttttttagcatagattgagaacagttgaactcttaaatcctcagatgccaggggtctgctctagcatcagtaagtatttagcagaaactaactccgtaatgaatggaattcaattccacacatggtttgttcaagcacacttaataagtagcctattttttaaatgtctttttaaaatgtaaatatttggatgaagtttttctttgttttgatatattcatttgctacaccaactatgttttcagaattcatcttttgaacaacttggtttcagaatatgtaaaatgactttaaggatcttgtgtatcaaacctatccccggatgtgtgagaataatgtgttcataaagcatggatctcgcaaaaaaaaaaaaaaaacaaaaaaaaaaaaaaaaaaaaaaaaaaaaaaaaaaaaaaaaaaaacaaaaanaaaaaaca

SEQ ID NO: 348214 - DNA, 2290 bp, Homo sapiens
  misc_feature (2282)..(2282): n is a, c, g, or t
ggcctgctctccccacctctccgcgctgagcagccacgtcggcggcggtccctggtccagggaggggcgtggcaaaggcccgtgcgcggtacgtgtcccgcccctcgctgcccggagcccggatgaagagtaacgccattaccgccggagccgccgagagccttagccgacggaaactggacactggaccggcagcgccatgagactcctcccccgcttgctgctgcttctcttactcgtgttccctgccactgtcttgttccgaggcggccccagaggcttgttagcagtggcacaagatcttacagaggatgaagaaacagtagaagattccataattgaggatgaagatgatgaagccgaggtagaagaagatgaacccacagatttggtagaagataaagaggaagaagatgtgtctggtgaacctgaagcttcaccgagtgcagatacaactatactgtttgtaaaaggagaagattttccagcaaataacattgtgaagttcctggtaggctttaccaacaagggtacagaagattttattgttgaatccttagatgcctcattccgttatcctcaggactaccagttttatatccagaatttcacagctcttcctctgaacactgtagtgccaccccagagacaggcaacttttgagtactctttcattcctgcagagcccatgggcggacgaccatttggtttggtcatcaatctgaactacaaagatttgaacggcaatgtattccaagatgcagtcttcaatcaaacagttacagttattgaaagagaggatgggttagatggagaaacaatctttatgtatatgttccttgctggtcttgggcttctggttattgttggccttcatcaactcctagaatctagaaagcgtaagagacccatacagaaagtagaaatgggtacatcaagtcagaatgatgttgacatgagttggattcctcaggaaacattgaatcaaatcaataaagcttcaccaagaaggttgcccaggaaacgggcacagaagagatcagtgggatctgatgagtaaatgttcctttgtgcaacaattcggtctttacttaacctgccctaatatttttcggcctgatgggaattagtgcagagaagccatgtcaccatagaaggcaactcctacttgtgtgtggactgagcaatcagagtctgtggcgataatattgctgaaaatgcactgcattcatttttctaaagtaacaaatttggtttttttttaaaccattaaaatctatgtgtgtgcgtgtgtatgtatgtgagcagttggtcttaccagaatcattgttgaactacctgaaacaagtctttagaatactaaatataatgctgttgtctcttcctttttgacattttctgattttttcccccaaaactcagttaatatttacccactatgattattgatgtcctgccttgaacagttttaaagaaaacaatttttggaatagctcaaatttcaattgatggcacaaatcagcattttgttgttgttactgtattacaattagtattctaaaggcagaagcagaagtagctgctttttagcaatagaattgtttcagtattttgctgctgtttaatgcgcatcttcagaaaacttcccagtggcttcaaggaatttggggatctctctggcaacaaattgtgaaacatgaaatttctgctgactttaatatatgaaacctaatcctacccccttttttaacaaaaagaaactagtacatttgtgaaaattgtgttgtgttgtccattgttgctctagttctgacccagaggtagctctggagtgattttagacctactcactcagttgtgtgtaggtttttttgttttgttttgagagagaatttttctctccttaatagaagcatcctttttaaagagaagttgccttggtccacacactaagcagaaaaccaagttatcaggacagagatatttcccagttactcctaatcaatgaagaaagtgagttggatatttttaaagcagttaactaattttttcttacctaatcttttgggagttttgcttgttgatataacctttttagttaacctgaaagattccaaaaattgttcttaagtgcttgagactggaaccaaaattaaattgtacttcataaaatcctcttatagagttactcttgccctagattgtaaattaagtttggcattattgtcagactggatggagggtgaagtaaaatagtatgaacaattaaaaaaaacaaaaanaaaaaaca

SEQ ID NO: 348215 - DNA, 1295 bp, Homo sapiens
ggcctgctctccccacctctccgcgctgagcagccacgtcggcggcggtccctggtccagggaggggcgtggcaaaggcccgtgcgcggtacgtgtcccgcccctcgctgcccggagcccggatgaagagtaacgccattaccgccggagccgccgagagccttagccgacggaaactggacactggaccggcagcgccatgagactcctcccccgcttgctgctgcttctcttactcgtgttccctgccactgtcttgttccgaggcggccccagaggcttgttagcagtggcacaagatcttacagaggatgaagaaacagtagaagattccataattgaggatgaagatgatgaagccgaggtagaagaagatgaacccacagatttggtagaagataaagaggaagaagatgtgtctggtgaacctgaagcttcaccgagtgcagatacaactatactgtttgtaaaaggagaagattttccagcaaataacattgtgaagttcctggtaggctttaccaacaagggtacagaagattttattgttgaatccttagatgcctcattccgttatcctcaggactaccagttttatatccagaatttcacagctcttcctctgaacactgtagtgccaccccagagacaggcaacttttgagtactctttcattcctgcagagcccatgggcggacgaccatttggtttggtcatcaatctgaactacaaagatttgaacggcaatgtattccaagatgcagtcttcaatcaaacagttacagttattgaaagagaggatgggttagatggagaaacaatctttatgtatatgttccttgctggtcttgggcttctggttattgttggccttcatcaactcctagaatctagaaagcgtaagagacccatacagaaagtagaaatgggtacatcaagtcagaatgatgttgacatgagttggattcctcaggaaacattgaatcaaatcaataaagcttcaccaagaaggttgcccaggaaacgggcacagaagagatcagtgggatctgatgagtaaatgttcctttgtgcaacaattcggtctttacttaacctgccctaatatttttcggcctgatgggaattagtgcagagaagccatgtcaccatagaaggcaactcctacttgtgtgtggactgagcaatcagagtctgtggcgataatattgctgaaaatgcactgcattcatttttctaaagtaacaaatttggtttttttttaaaccattaaaatctatgtgtgtgcgtgtgta

SEQ ID NO: 348216 - DNA, 1506 bp, Homo sapiens
ggcctgctctccccacctctccgcgctgagcagccacgtcggcggcggtccctggtccagggaggggcgtggcaaaggcccgtgcgcggtacgtgtcccgcccctcgctgcccggagcccggatgaagagtaacgccattaccgccggagccgccgagagccttagccgacggaaactggacactggaccggcagcgccatgagactcctcccccgcttgctgctgcttctcttactcgtgttccctgccactgtcttgttccgaggcggccccagaggcttgttagcagtggcacaagatcttacagaggatgaagaaacagtagaagattccataattgaggatgaagatgatgaagccgaggtagaagaagatgaacccacagatttggtagaagataaagaggaagaagatgtgtctggtgaacctgaagcttcaccgagtgcagatacaactatactgtttgtaaaaggagaagattttccagcaaataacattgtgaagttcctggtaggctttaccaacaagggtacagaagattttattgttgaatccttagatgcctcattccgttatcctcaggactaccagttttatatccagaatttcacagctcttcctctgaacactgtagtgccaccccagagacaggcaacttttgagtactctttcattcctgcagagcccatgggcggacgaccatttggtttggtcatcaatctgaactacaaagatttgaacggcaatgtattccaagatgcagtcttcaatcaaacagttacagttattgaaagagaggatgggttagatggagaaacaatctttatgtatatgttccttgctggtcttgggcttctggttattgttggccttcatcaactcctagaatctagaaagcgtaagagacccatacagaaagtagaaatgggtacatcaagtcagaatgatgttgacatgagttggattcctcaggaaacattgaatcaaatcaataaagcttcaccaagaaggttgcccaggaaacgggcacagaagagatcagtgggatctgatgagtaaatgttcctttgtgcaacaattcggtctttacttaacctgccctaatatttttcggcctgatgggaattagtgcagagaagccatgtcaccatagaaggcaactcctacttgtgtgtggactgagcaatcagagtctgtggcgataatattgctgaatcagcacatttagtagcgcatgtaatctgcaacattctggcccatgatgtgcttccgatgtacttctgcattaaattccttgctttcagaatcataaccagggaatcgtttggtactgtgagggatagacaagcctccatccacagctcccttcagggcaccaaaaactttattgccagcggtagttctggcaaggcctgactccaaatagcaggtgagggcactggctgaccatcaatgcttccacatgtatcatcaccagtcactccattggcttctagatcttgtca

SEQ ID NO: 348217 - DNA, 956 bp, Homo sapiens
ggcctgctctccccacctctccgcgctgagcagccacgtcggcggcggtccctggtccagggaggggcgtggcaaaggcccgtgcgcggtacgtgtcccgcccctcgctgcccggagcccggatgaagagtaacgccattaccgccggagccgccgagagccttagccgacggaaactggacactggaccggcagcgccatgagactcctcccccgcttgctgctgcttctcttactcgtgttccctgccactgtcttgttccgaggcggccccagaggcttgttagcagtggcacaagatcttacagaggatgaagaaacagtagaagattccataattgaggatgaagatgatgaagccgaggtagaagaagatgaacccacagatttggtagaagataaagaggaagaagatgtgtctggtgaacctgaagcttcaccgagtgcagatacaactatactgtttgtaaaaggagaagattttccagcaaataacattgtgaagttcctggtaggctttaccaacaagggtacagaagattttattgttgaatccttagatgcctcattccgttatcctcaggactaccagttttatatccagaatttcacagctcttcctctgaacactgtagtgccaccccagagacaggcaacttttgagtactctttcattcctgcagagcccatgggcggacgaccatttggtttggtcatcaatctgaactacaaagatttgaacgtaagatcctctaaaccttctttttgtttaagttagagatggatgggggcggtgacgttgtttaatagaatatatctgttcattcagttgcctgttttgtggttgaacctgtgatagccaccagggaagcaaagataaattgcacgtttcttcttcaagtctaatccagtgggggaggcatatgaaaacaggcactagaacatgctgataagtg

SEQ ID NO: 348218 - DNA, 242 bp, Homo sapiens
tacatcaagtcagaatgatgttgacatgagttggattcctcaggaaacattgaatcaaatcaaagtagtcttacagacttggctgggaagtttttctcttaagtggaaattaaataccttagatttagtttaaaaaaaaaactttttcagtactatttaacattcatcttttccattacttgtgtagaatctagtatagtgattaattaagaccttaaaggtttattcagtgtgtagtcttc

SEQ ID NO: 348219 - DNA, 3430 bp, Homo sapiens
  misc_feature (3422)..(3422): n is a, c, g, or t
ggcctgctctccccacctctccgcgctgagcagccacgtcggcggcggtccctggtccagggaggggcgtggcaaaggcccgtgcgcggtacgtgtcccgcccctcgctgcccggagcccggatgaagagtaacgccattaccgccggagccgccgagagccttagccgacggaaactggacactggaccggcagcgccatgagactcctcccccgcttgctgctgcttctcttactcgtgttccctgccactgtcttgttccgaggcggccccagaggcttgttagcagtggcacaagatcttacagaggatgaagaaacagtagaagattccataattgaggatgaagatgatgaagccgaggtagaagaagatgaacccacagatttggtagaagataaagaggaagaagatgtgtctggtgaacctgaagcttcaccgagtgcagatacaactatactgtttgtaaaaggagaagattttccagcaaataacattgtgaagttcctggtaggctttaccaacaagggtacagaagattttattgttgaatccttagatgcctcattccgttatcctcaggactaccagttttatatccagaatttcacagctcttcctctgaacactgtagtgccaccccagagacaggcaacttttgagtactctttcattcctgcagagcccatgggcggacgaccatttggtttggtcatcaatctgaactacaaagatttgaacggcaatgtattccaagatgcagtcttcaatcaaacagttacagttattgaaagagaggatgggttagatggagaaacaatctttatgtatatgttccttgctggtcttgggcttctggttattgttggccttcatcaactcctagaatctagaaagcgtaagagacccatacagaaagtagaaatgggtacatcaagtcagaatgatgttgacatgagttggattcctcaggaaacattgaatcaaatcaataaagcttcaccaagaaggttgcccaggaaacgggcacagaagagatcagtgggatctgatgagtaaatgttcctttgtgcaacaattcggtctttacttaacctgccctaatatttttcggcctgatgggaattagtgcagagaagccatgtcaccatagaaggcaactcctacttgtgtgtggactgagcaatcagagtctgtggcgataatattgctgaaaatgcactgcattcatttttctaaagtaacaaatttggtttttttttaaaccattaaaatctatgtgtgtgcgtgtgtatgtatgtgagcagttggtcttaccagaatcattgttgaactacctgaaacaagtctttagaatactaaatataatgctgttgtctcttcctttttgacattttctgattttttcccccaaaactcagttaatatttacccactatgattattgatgtcctgccttgaacagttttaaagaaaacaatttttggaatagctcaaatttcaattgatggcacaaatcagcattttgttgttgttactgtattacaattagtattctaaaggcagaagcagaagtagctgctttttagcaatagaattgtttcagtattttgctgctgtttaatgcgcatcttcagaaaacttcccagtggcttcaaggaatttggggatctctctggcaacaaattgtgaaacatgaaatttctgctgactttaatatatgaaacctaatcctacccccttttttaacaaaaagaaactagtacatttgtgaaaattgtgttgtgttgtccattgttgctctagttctgacccagaggtagctctggagtgattttagacctactcactcagttgtgtgtaggtttttttgttttgttttgagagagaatttttctctccttaatagaagcatcctttttaaagagaagttgccttggtccacacactaagcagaaaaccaagttatcaggacagagatatttcccagttactcctaatcaatgaagaaagtgagttggatatttttaaagcagttaactaattttttcttacctaatcttttgggagttttgcttgttgatataacctttttagttaacctgaaagattccaaaaattgttcttaagtgcttgagactggaaccaaaattaaattgtacttcataaaatcctcttatagagttactcttgccctagattgtaaattaagtttggcattattgtcagactggatggagggtgaagtaaaatagtatgaacaattaagaggctctccccctcttgtctttaagccatattctcctacatgtattttataagaaaatgttaagtcaaattttagtggctctttaattcctgacctcttcattctccttttcagtataacctcccctatgctcatgcccacacagacaaaaaaacaaaacgaaatacacacagaaaaaagtctttccaaactgtttaagtatttaaacatctgagccaaagcagatagaagttattgtataattgttaatcactttgcaaataggggctatcaaattacctatattggcattgctggattataaactctatatctgtaatataaagtgtttgagtttttaattgggctgttatgatcagtagttgattttgagaaagctctatgagctctaagtaactgcatggttttttgtttaatgtaatataggagacccttcacattcccaaggaatatattccaaaacatttttgtgaatatctaagtttgtgaaactactagggcatgatacagtaaggtgtaattacagaatttacgaaatgtaaatggcctctacagagttttatggaatacctggtactaacgtaggcagctgcaaaaccacactgagttacagctgtcagccctcctcattcctaaataacttgccttacatatcagccctcccacttctgaagttcaaattagtgcctcggaaatgtagaatttattatttgtcatttttttttttttagcatagattgagaacagttgaactcttaaatcctcagatgccaggggtctgctctagcatcagtaagtatttagcagaaactaactccgtaatgaatggaattcaattccacacatggtttgttcaagcacacttaataagtagcctattttttaaatgtctttttaaaatgtaaatatttggatgaagtttttctttgttttgatatattcatttgctacaccaactatgttttcagaattcatcttttgaacaacttggtttcagaatatgtaaaatgactttaaggatcttgtgtatcaaacctatccccggatgtgtgagaataatgtgttcataaagcatggatctcgcaaaaaaaaaaaaaaaacaaaaaaaaaaaaaaaaaaaaaaaaaaaaaaaaaaaaaaaaaaaacaaaaanaaaaaaca

SEQ ID NO: 348220 - DNA, 3376 bp, Homo sapiens
  misc_feature (3368)..(3368): n is a, c, g, or t
ggcctgctctccccacctctccgcgctgagcagccacgtcggcggcggtccctggtccagggaggggcgtggcaaaggcccgtgcgcggtacgtgtcccgcccctcgctgcccggagcccggatgaagagtaacgccattaccgccggagccgccgagagccttagccgacggaaactggacactggaccggcagcgccatgagactcctcccccgcttgctgctgcttctcttactcgtgttccctgccactgtcttgttccgaggcggccccagaggcttgttagcagtggcacaagatcttacagaggatgaagaaacagtagaagattccataattgaggatgaagatgatgaagccgaggtagaagaagatgaacccacagatttggtagaagataaagaggaagaagatgtgtctggtgaacctgaagcttcaccgagtgcagatacaactatactgtttgtaaaaggagaagattttccagcaaataacattgtgaagttcctggtaggctttaccaacaagggtacagaagattttattgttgaatccttagatgcctcattccgttatcctcaggactaccagttttatatccagaatttcacagctcttcctctgaacactgtagtgccaccccagagacaggcaacttttgagtactctttcattcctgcagagcccatgggcggacgaccatttggtttggtcatcaatctgaactacaaagatttgaacggcaatgtattccaagatgcagtcttcaatcaaacagttacagttattgaaagagaggatgggttagatggagaaacaatctttatgtatatgttccttgctggtcttgggcttctggttattgttggccttcatcaactcctagaatctagaaagcgtaagagacccatacagaaagtagaaatgggtacatcaagtcagaatgatgttgacatgagttggattcctcaggaaacattgaatcaaatcaataaagcttcaccaagaaggttgcccaggaaacgggcacagaagagatcagtgggatctgatgagtaaatgttcctttgtgcaacaattcggtctttacttaacctgccctaatatttttcggcctgatgggaattagtgcagagaagccatgtcaccatagaaggcaactcctacttgtgtgtggactgagcaatcagagtctgtggcgataatattgctgaaaatgcactgcattcatttttctaaagtaacaaatttggtttttttttaaaccattaaaatctatgtgtgtgcgtgtgtatgtatgtgagcagttggtcttaccagaatcattgttgaactacctgaaacaagtctttagaatactaaatataatgctgttgtctcttcctttttgacattttctgattttttcccccaaaactcagttaatatttacccactatgattattgatgtcctgccttgaacagttttaaagaaaacaatttttggaatagctcaaatttcaattgatggcacaaatcagcattttgttgttgttactgtattacaattagtattctaaaggcagaagcagaagtagctgctttttagcaatagaattgtttcagtattttgctgctgtttaatgcgcatcttcagaaaacttcccagtggcttcaaggaatttggggatctctctggcaacaaattgtgaaacatgaaatttctgctgactttaatatatgaaacctaatcctacccccttttttaacaaaaagaaactagtacatttgtgggagtgattttagacctactcactcagttgtgtgtaggtttttttgttttgttttgagagagaatttttctctccttaatagaagcatcctttttaaagagaagttgccttggtccacacactaagcagaaaaccaagttatcaggacagagatatttcccagttactcctaatcaatgaagaaagtgagttggatatttttaaagcagttaactaattttttcttacctaatcttttgggagttttgcttgttgatataacctttttagttaacctgaaagattccaaaaattgttcttaagtgcttgagactggaaccaaaattaaattgtacttcataaaatcctcttatagagttactcttgccctagattgtaaattaagtttggcattattgtcagactggatggagggtgaagtaaaatagtatgaacaattaagaggctctccccctcttgtctttaagccatattctcctacatgtattttataagaaaatgttaagtcaaattttagtggctctttaattcctgacctcttcattctccttttcagtataacctcccctatgctcatgcccacacagacaaaaaaacaaaacgaaatacacacagaaaaaagtctttccaaactgtttaagtatttaaacatctgagccaaagcagatagaagttattgtataattgttaatcactttgcaaataggggctatcaaattacctatattggcattgctggattataaactctatatctgtaatataaagtgtttgagtttttaattgggctgttatgatcagtagttgattttgagaaagctctatgagctctaagtaactgcatggttttttgtttaatgtaatataggagacccttcacattcccaaggaatatattccaaaacatttttgtgaatatctaagtttgtgaaactactagggcatgatacagtaaggtgtaattacagaatttacgaaatgtaaatggcctctacagagttttatggaatacctggtactaacgtaggcagctgcaaaaccacactgagttacagctgtcagccctcctcattcctaaataacttgccttacatatcagccctcccacttctgaagttcaaattagtgcctcggaaatgtagaatttattatttgtcatttttttttttttagcatagattgagaacagttgaactcttaaatcctcagatgccaggggtctgctctagcatcagtaagtatttagcagaaactaactccgtaatgaatggaattcaattccacacatggtttgttcaagcacacttaataagtagcctattttttaaatgtctttttaaaatgtaaatatttggatgaagtttttctttgttttgatatattcatttgctacaccaactatgttttcagaattcatcttttgaacaacttggtttcagaatatgtaaaatgactttaaggatcttgtgtatcaaacctatccccggatgtgtgagaataatgtgttcataaagcatggatctcgcaaaaaaaaaaaaaaaacaaaaaaaaaaaaaaaaaaaaaaaaaaaaaaaaaaaaaaaaaaaacaaaaanaaaaaaca

SEQ ID NO: 348221 - DNA, 3375 bp, Homo sapiens
ggcctgctctccccacctctccgcgctgagcagccacgtcggcggcggtccctggtccagggaggggcgtggcaaaggcccgtgcgcggtacgtgtcccgcccctcgctgcccggagcccggatgaagagtaacgccattaccgccggagccgccgagagccttagccgacggaaactggacactggaccggcagcgccatgagactcctcccccgcttgctgctgcttctcttactcgtgttccctgccactgtcttgttccgaggcggccccagaggcttgttagcagtggcacaagatcttacagaggatgaagaaacagtagaagattccataattgaggatgaagatgatgaagccgaggtagaagaagatgaacccacagatttggtagaagataaagaggaagaagatgtgtctggtgaacctgaagcttcaccgagtgcagatacaactatactgtttgtaaaaggagaagattttccagcaaataacattgtgaagttcctggtaggctttaccaacaagggtacagaagattttattgttgaatccttagatgcctcattccgttatcctcaggactaccagttttatatccagaatttcacagctcttcctctgaacactgtagtgccaccccagagacaggcaacttttgagtactctttcattcctgcagagcccatgggcggacgaccatttggtttggtcatcaatctgaactacaaagatttgaacggcaatgtattccaagatgcagtcttcaatcaaacagttacagttattgaaagagaggatgggttagatggagaaacaatctttatgtatatgttccttgctggtcttgggcttctggttattgttggccttcatcaactcctagaatctagaaagcgtaagagacccatacagaaagtagaaatgggtacatcaagtcagaatgatgttgacatgagttggattcctcaggaaacattgaatcaaatcaataaagcttcaccaagaaggttgcccaggaaacgggcacagaagagatcagtgggatctgatgagtaaatgttcctttgtgcaacaattcggtctttacttaacctgccctaatatttttcggcctgatgggaattagtgcagagaagccatgtcaccatagaaggcaactcctacttgtgtgtggactgagcaatcagagtctgtggcgataatattgctgaaaatgcactgcattcatttttctaaagtaacaaatttggtttttttttaaaccattaaaatctatgtgtgtgcgtgtgtatgtatgtgagcagttggtcttaccagaatcattgttgaactacctgaaacaagtctttagaatactaaatataatgctgttgtctcttcctttttgacattttctgattttttcccccaaaactcagttaatatttacccactatgattattgatgtcctgccttgaacagttttaaagaaaacaatttttggaatagctcaaatttcaattgatggcacaaatcagcattttgttgttgttactgtattacaattagtattctaaaggcagaagcagaagtagctgctttttagcaatagaattgtttcagtattttgctgctgtttaatgcgcatcttcagaaaacttcccagtggcttcaaggaatttggggatctctctggcaacaaattgtgaaacatgaaatttctgctgactttaatatatgaaacctaatcctacccccttttttaacaaaaagaaactagtacatttgtgaaaattgtgttgtgttgtccattgttgctctagttctgacccagaggtagctctggagtgattttagacctactcactcagttgtgtgtaggtttttttgttttgttttgagagagaatttttctctccttaatagaagcatcctttttaaagagaagttgccttggtccacacactaagcagaaaaccaagttatcaggacagagatatttcccagttactcctaatcaatgaagaaagtgagttggatatttttaaagcagttaactaattttttcttacctaatcttttgggagttttgcttgttgatataacctttttagttaacctgaaagattccaaaaattgttcttaagtgcttgagactggaaccaaaattaaattgtacttcataaaatcctcttatagagttactcttgccctagattgtaaattaagtttggcattattgtcagactggatggagggtgaagtaaaatagtatgaacaattaagaggctctccccctcttgtctttaagccatattctcctacatgtattttataagaaaatgttaagtcaaattttagtggctctttaattcctgacctcttcattctccttttcagtataacctcccctatgctcatgcccacacagacaaaaaaacaaaacgaaatacacacagaaaaaagtctttccaaactgtttaagtatttaaacatctgagccaaagcagatagaagttattgtataattgttaatcactttgcaaataggggctatcaaattacctatattggcattgctggattataaactctatatctgtaatataaagtgtttgagtttttaattgggctgttatgatcagtagttgattttgagaaagctctatgagctctaagtaactgcatggttttttgtttaatgtaatataggagacccttcacattcccaaggaatatattccaaaacatttttgtgaatatctaagtttgtgaaactactagggcatgatacagtaaggtgtaattacagaatttacgaaatgtaaatggcctctacagagttttatggaatacctggtactaacgtaggcagctgcaaaaccacactgagttacagctgtcagccctcctcattcctaaataacttgccttacatatcagccctcccacttctgaagttcaaattagtgcctcggaaatgtagaatttattatttgtcatttttttttttttagcatagattgagaacagttgaactcttaaatcctcagatgccaggggtctgctctagcatcagtaagtatttagcagaaactaactccgtaatgaatggaattcaattccacacatggtttgttcaagcacacttaataagtagcctattttttaaatgtctttttaaaatgtaaatatttggatgaagtttttctttgttttgatatattcatttgctacaccaactatgttttcagaattcatcttttgaacaacttggtttcagaatatgtaaaatgactttaaggatcttgttcatgggggtcccttttgtgtctctgagaataatgtgttcataaagcatgtcttcagcaagacagcacatacacctaag

SEQ ID NO: 348222 - DNA, 3302 bp, Homo sapiens
  misc_feature (3294)..(3294): n is a, c, g, or t
ctagaattcagcggccgctgaattctagagagcccggatgaagagtaacgccattaccgccggagccgccgagagccttagccgacggaaactggacactggaccggcagcgccatgagactcctcccccgcttgctgctgcttctcttactcgtgttccctgccactgtcttgttccgaggcggccccagaggcttgttagcagtggcacaagatcttacagaggatgaagaaacagtagaagattccataattgaggatgaagatgatgaagccgaggtagaagaagatgaacccacagatttggtagaagataaagaggaagaagatgtgtctggtgaacctgaagcttcaccgagtgcagatacaactatactgtttgtaaaaggagaagcaacaagggtacagaagattttattgttgaatccttagatgcctcattccgttatcctcaggactaccagttttatatccagaatttcacagctcttcctctgaacactgtagtgccaccccagagacaggcaacttttgagtactctttcattcctgcagagcccatgggcggacgaccatttggtttggtcatcaatctgaactacaaagatttgaacggcaatgtattccaagatgcagtcttcaatcaaacagttacagttattgaaagagaggatgggttagatggagaaacaatctttatgtatatgttccttgctggtcttgggcttctggttattgttggccttcatcaactcctagaatctagaaagcgtaagagacccatacagaaagtagaaatgggtacatcaagtcagaatgatgttgacatgagttggattcctcaggaaacattgaatcaaatcaataaagcttcaccaagaaggttgcccaggaaacgggcacagaagagatcagtgggatctgatgagtaaatgttcctttgtgcaacaattcggtctttacttaacctgccctaatatttttcggcctgatgggaattagtgcagagaagccatgtcaccatagaaggcaactcctacttgtgtgtggactgagcaatcagagtctgtggcgataatattgctgaaaatgcactgcattcatttttctaaagtaacaaatttggtttttttttaaaccattaaaatctatgtgtgtgcgtgtgtatgtatgtgagcagttggtcttaccagaatcattgttgaactacctgaaacaagtctttagaatactaaatataatgctgttgtctcttcctttttgacattttctgattttttcccccaaaactcagttaatatttacccactatgattattgatgtcctgccttgaacagttttaaagaaaacaatttttggaatagctcaaatttcaattgatggcacaaatcagcattttgttgttgttactgtattacaattagtattctaaaggcagaagcagaagtagctgctttttagcaatagaattgtttcagtattttgctgctgtttaatgcgcatcttcagaaaacttcccagtggcttcaaggaatttggggatctctctggcaacaaattgtgaaacatgaaatttctgctgactttaatatatgaaacctaatcctacccccttttttaacaaaaagaaactagtacatttgtgaaaattgtgttgtgttgtccattgttgctctagttctgacccagaggtagctctggagtgattttagacctactcactcagttgtgtgtaggtttttttgttttgttttgagagagaatttttctctccttaatagaagcatcctttttaaagagaagttgccttggtccacacactaagcagaaaaccaagttatcaggacagagatatttcccagttactcctaatcaatgaagaaagtgagttggatatttttaaagcagttaactaattttttcttacctaatcttttgggagttttgcttgttgatataacctttttagttaacctgaaagattccaaaaattgttcttaagtgcttgagactggaaccaaaattaaattgtacttcataaaatcctcttatagagttactcttgccctagattgtaaattaagtttggcattattgtcagactggatggagggtgaagtaaaatagtatgaacaattaagaggctctccccctcttgtctttaagccatattctcctacatgtattttataagaaaatgttaagtcaaattttagtggctctttaattcctgacctcttcattctccttttcagtataacctcccctatgctcatgcccacacagacaaaaaaacaaaacgaaatacacacagaaaaaagtctttccaaactgtttaagtatttaaacatctgagccaaagcagatagaagttattgtataattgttaatcactttgcaaataggggctatcaaattacctatattggcattgctggattataaactctatatctgtaatataaagtgtttgagtttttaattgggctgttatgatcagtagttgattttgagaaagctctatgagctctaagtaactgcatggttttttgtttaatgtaatataggagacccttcacattcccaaggaatatattccaaaacatttttgtgaatatctaagtttgtgaaactactagggcatgatacagtaaggtgtaattacagaatttacgaaatgtaaatggcctctacagagttttatggaatacctggtactaacgtaggcagctgcaaaaccacactgagttacagctgtcagccctcctcattcctaaataacttgccttacatatcagccctcccacttctgaagttcaaattagtgcctcggaaatgtagaatttattatttgtcatttttttttttttagcatagattgagaacagttgaactcttaaatcctcagatgccaggggtctgctctagcatcagtaagtatttagcagaaactaactccgtaatgaatggaattcaattccacacatggtttgttcaagcacacttaataagtagcctattttttaaatgtctttttaaaatgtaaatatttggatgaagtttttctttgttttgatatattcatttgctacaccaactatgttttcagaattcatcttttgaacaacttggtttcagaatatgtaaaatgactttaaggatcttgtgtatcaaacctatccccggatgtgtgagaataatgtgttcataaagcatggatctcgcaaaaaaaaaaaaaaaacaaaaaaaaaaaaaaaaaaaaaaaaaaaaaaaaaaaaaaaaaaaacaaaaanaaaaaaca

SEQ ID NO: 348223 - DNA, 2588 bp, Homo sapiens
ggcctgctctccccacctctccgcgctgagcagccacgtcggcggcggtccctggtccagggaggggcgtggcaaaggcccgtgcgcggtacgtgtcccgcccctcgctgcccggagcccggatgaagagtaacgccattaccgccggagccgccgagagccttagccgacggaaactggacactggaccggcagcgccatgagactcctcccccgcttgctgctgcttctcttactcgtgttccctgccactgtcttgttccgaggcggccccagaggcttgttagcagtggcacaagatcttacagaggatgaagaaacagtagaagattccataattgaggatgaagatgatgaagccgaggtagaagaagatgaacccacagatttggtagaagataaagaggaagaagatgtgtctggtgaacctgaagcttcaccgagtgcagatacaactatactgtttgtaaaaggagaagattttccagcaaataacattgtgaagttcctggtaggctttaccaacaagggtacagaagattttattgttgaatccttagatgcctcattccgttatcctcaggactaccagttttatatccagaatttcacagctcttcctctgaacactgtagtgccaccccagagacaggcaacttttgagtactctttcattcctgcagagcccatgggcggacgaccatttggtttggtcatcaatctgaactacaaagatttgaacggcaatgtattccaagatgcagtcttcaatcaaacagttacagttattgaaagagaggatgggttagatggagaaacaatctttatgtatatgttccttgctggtcttgggcttctggttattgttggccttcatcaactcctagaatctagaaagcgtaagagacccatacagaaagtagaaatgggtacatcaagtcagaatgatgttgacatgagttggattcctcaggaaacattgaatcaaatcaataaagcttcaccaagaaggttgcccaggaaacgggcacagaagagatcagtgggatctgatgagtaaatgttcctttgtgcaacaattcggtctttacttaacctgccctaatatttttcggcctgatgggaattagtgcagagaagccatgtcaccatagaaggcaactcctacttgtgtgtggactgagcaatcagagtctgtggcgataatattgctgaaaatgcactgcattcatttttctaaagtaacaaatttggtttttttttaaaccattaaaatctatgtgtgtgcgtgtgtatgtatgtgagcagttggtcttaccagaatcattgttgaactacctgaaacaagtctttagaatactaaatataatgctgttgtctcttcctttttgacattttctgattttttcccccaaaactcagttaatatttacccactatgattattgatgtcctgccttgaacagttttaaagaaaacaatttttggaatagctcaaatttcaattgatggcacaaatcagcattttgttgttgttactgtattacaattagtattctaaaggcagaagcagaagtagctgctttttagcaatagaattgtttcagtattttgctgctgtttaatgcgcatcttcagaaaacttcccagtggcttcaaggaatttggggatctctctggcaacaaattgtgaaacatgaaatttctgctgactttaatatatgaaacctaatcctacccccttttttaacaaaaagaaactagtacatttgtgaaaattgtgttgtgttgtccattgttgctctagttctgacccagaggtagctctggagtgattttagacctactcactcagttgtgtgtaggtttttttgttttgttttgagagagaatttttctctccttaatagaagcatcctttttaaagagaagttgccttggtccacacactaagcagaaaaccaagttatcaggacagagatatttcccagttactcctaatcaatgaagaaagtgagttggatatttttaaagcagttaactaattttttcttacctaatcttttgggagttttgcttgttgatataacctttttagttaacctgaaagattccaaaaattgttcttaagtgcttgagactggaaccaaaattaaattgtacttcataaaatcctcttatagagttactcttgccctagattgtaaattaagtttggcattattgtcagactggatggagggtgaagtaaaatagtatgaacaattaagaggctctccccctcttgtctttaagccatattctcctacatgtattttataagaaaatgttaagtcaaattttagtggctctttaattcctgacctcttcattctccttttcagtataacctcccctatgctcatgcccacacagacaaaaaaacaaaacgaaatacacacagaaaaaagtctttccaaactgtttaagtatttaaacatctgagccaaagcagatagaagttattgtataattgttaatcactttgcaaataggggctatcaaattacctatattggcattgctggattataaactctatatctgta

SEQ ID NO: 348224 - DNA, 1519 bp, Homo sapiens
ggcctgctctccccacctctccgcgctgagcagccacgtcggcggcggtccctggtccagggaggggcgtggcaaaggcccgtgcgcggtacgtgtcccgcccctcgctgcccggagcccggatgaagagtaacgccattaccgccggagccgccgagagccttagccgacggaaactggacactggaccggcagcgccatgagactcctcccccgcttgctgctgcttctcttactcgtgttccctgccactgtcttgttccgaggcggccccagaggcttgttagcagtggcacaagatcttacagaggatgaagaaacagtagaagattccataattgaggatgaagatgatgaagccgaggtagaagaagatgaacccacagatttggtagaagataaagaggaagaagatgtgtctggtgaacctgaagcttcaccgagtgcagatacaactatactgtttgtaaaaggagaagattttccagcaaataacattgtgaagttcctggtaggctttaccaacaagggtacagaagattttattgttgaatccttagatgcctcattccgttatcctcaggactaccagttttatatccagaatttcacagctcttcctctgaacactgtagtgccaccccagagacaggcaacttttgagtactctttcattcctgcagagcccatgggcggacgaccatttggtttggtcatcaatctgaactacaaagatttgaacggcaatgtattccaagatgcagtcttcaatcaaacagttacagttattgaaagagaggatgggttagatggagaaacaatctttatgtatatgttccttgctggtcttgggcttctggttattgttggccttcatcaactcctagaatctagaaagcgtaagagacccatacagaaagtagaaatgggtacatcaagtcagaatgatgttgacatgagttggattcctcaggaaacattgaatcaaatcaataaagcttcaccaagaaggttgcccaggaaacgggcacagaagagatcagtgggatctgatgagtaaatgttcctttgtgcaacaattcggtctttacttaacctgccctaatatttttcggcctgatgggaattagtgcagagaagccatgtcaccatagaaggcaactcctacttgtgtgtggactgagcaatcagagtctgtggcgataatattgctgaaaatgcactgcattcatttttctaaacatagattgagaacagttgaactcttaaatcctcagatgccaggggtctgctctagcatcaacgcaggaggagggagacgcactgatgacatcgggccgctcctgcagctcgggcgcctcgcagtctccaggtgcaaggccagcgcttccgccgtggctgcttcaggacatcccccagcacagccgttcctggagacccggccatcttttctgcatcgttttgcaatttgtgaaacttaggacagcagccgcctgttcaaccgggccctccgccggat

SEQ ID NO: 348225 - DNA, 1290 bp, Homo sapiens
ggcctgctctccccacctctccgcgctgagcagccacgtcggcggcggtccctggtccagggaggggcgtggcaaaggcccgtgcgcggtacgtgtcccgcccctcgctgcccggagcccggatgaagagtaacgccattaccgccggagccgccgagagccttagccgacggaaactggacactggaccggcagcgccatgagactcctcccccgcttgctgctgcttctcttactcgtgttccctgccactgtcttgttccgaggcggccccagaggcttgttagcagtggcacaagatcttacagaggatgaagaaacagtagaagattccataattgaggatgaagatgatgaagccgaggtagaagaagatgaacccacagatttggtagaagataaagaggaagaagatgtgtctggtgaacctgaagcttcaccgagtgcagatacaactatactgtttgtaaaaggagaagattttccagcaaataacattgtgaagttcctggtaggctttaccaacaagggtacagaagattttattgttgaatccttagatgcctcattccgttatcctcaggactaccagttttatatccagaatttcacagctcttcctctgaacactgtagtgccaccccagagacaggcaacttttgagtactctttcattcctgcagagcccatgggcggacgaccatttggtttggtcatcaatctgaactacaaagatttgaacggcaatgtattccaagatgcagtcttcaatcaaacagttacagttattgaaagagaggatgggttagatggagaaacaatctttatgtatatgttccttgctggtcttgggcttctggttattgttggccttcatcaactcctagaatctagaaagataaagcttcaccaagaaggttgcccaggaaacgggcacagaagagatcagtgggatctgatgagtaaatgttcctttgtgcaacaattcggtctttacttaacctgccctaatatttttcggcctgatgggaattagtgcagagaagccatgtcaccatagaaggcaactcctacttgtgtgtggactgagcaatcagagtctgtggcgataatattgctgaaaatgcactgcattcatttttctaaagtaacaaatttggtttttttttaaaccattaaaatctatgtgtgtgcgtgtgtatgtatgtgagcagttggtcttaccagaatcattgttgaactacctgaaacaagtctttagaatactaaatataatgctgttgtctcttc

SEQ ID NO: 348226 - DNA, 1006 bp, Homo sapiens
ctagaattcagcggccgctgaattctagagagcccggatgaagagtaacgccattaccgccggagccgccgagagccttagccgacggaaactggacactggaccggcagcgccatgagactcctcccccgcttgctgctgcttctcttactcgtgttccctgccactgtcttgttccgaggcggccccagaggcttgttagcagtggcacaagatcttacagaggatgaagaaacagtagaagattccataattgaggatgaagatgatgaagccgaggtagaagaagatgaacccacagatttggtagaagataaagaggaagaagatgtgtctggtgaacctgaagcttcaccgagtgcagatacaactatactgtttgtaaaaggagaagagcccatgggcggacgaccatttggtttggtcatcaatctgaactacaaagatttgaacggcaatgtattccaagatgcagtcttcaatcaaacagttacagttattgaaagagaggatgggttagatggagaaacaatctttatgtatatgttccttgctggtcttgggcttctggttattgttggccttcatcaactcctagaatctagaaagcgtaagagacccatacagaaagtagaaatgggtacatcaagtcagaatgatgttgacatgagttggattcctcaggaaacattgaatcaaatcaataaagcttcaccaagaaggttgcccaggaaacgggcacagaagagatcagtgggatctgatgagtaaatgttcctttgtgcaacaattcggtctttacttaacctgccctaatatttttcggcctgatgggaattagtgcagagaagccatgtcaccatagaaggcaactcctacttgtgtgtggactgagcaatcagagtctgtggcgataatattgctgaaaatgcactgcattcatttttctaaagtaacaaatttggtttttttttaaaccattaaaatctatgtgtgtgcgtgtgta

SEQ ID NO: 348227 - DNA, 329 bp, Homo sapiens
accaaatggacctaaaagacatttacagcatatttaatccaaaattacagtatacacattcttctcatcaccacatggaacattttcaaagatataccatatgttaggacacaaaagaagtcccaacaaatgttttacaaatcaaaatcatgtcaagtattttctcaggcaacaataaaaaataatctagaaatcaataacaacgggaactttggaaactgtgtaaatatgtgtaaattaaacaagatgtccctgaatggcaattagttcaatgaaaaaattaaggagaaaattattaacaattttttggaacatatgaatatcaaaac

SEQ ID NO: 348228 - DNA, 916 bp, Homo sapiens
tcatcgggggcggcgcggggaggggtggtgtggacggagaaagtgaaaggtgaggcacggccctgcagattttccagcggatcccccggtggcctcatgtcgcgcagtggaaccgatcctcagcaacgccagcaggcgtcagaggcggacgccgcagcagcaaccttccgggcaaacgaccatcagcatatccgctacaacccgctgcaggatgagtgggtgctggtgtcagctcaccgcatgaagcggccctggcagggtcaagtggagccccagcttctgaagacagtgccccgccatgaccctctcaaccctctgtgtcctggggccatccgagccaacggagagatctttgaaaacaaaggtgccatgatgggctgttctaacccccacccccactgccaggtatgggccagcagtttcctgccagatattgcccagcgtgaggagcgatctcagcaggcctataagagtcagcatggagagcccctgctaatggagtacagccgccaggagctactcaggaagatgagcagcagctgctcagggctgagcagggtcctggtggccgtggctacagccctggtgtctgcctcctccccctgcccccaggcctggggccccccaggggtccagtatgggcagccaggcaggtccgtgaagctgtgttgtcctggagtgactgccggggacccagtgtcctggtttcgggatggggagccaaagctgctccagggacctgactctgggctagggcatgaactggtcctggcccaggcagacagcactgatgagggcacctacatctgccagaccctggatggtgcacttgggggcacagtgaccctgcagctgggctaccctccagcccgccctgttgtctcctgccaagcagccgactatgagaacttctctt

SEQ ID NO: 348229 - DNA, 388 bp, Homo sapiens
atcctggggctaggcactggatggaggttgctcccagtagggtcagcatctggaccccaggctgagagtcaggctctgattccagatctagcctccatcatgaagaagctcttgaccaagtatgacaacctctttgagacgtcctttcctcaggctcagagggacctcacccctgagcaggctgcagagagactaagggcacttcctgaggttcattaccacctggggcagaaggacagggagacagcaaccatcgcctgaccacgccgaccacagggccttgaatccttttttgttttcaacagtcttgctgaattaagcagaaagggccttgaatcctggcctggaatttgggcagatatagcattaataaaactgtgcatctcaa

SEQ ID NO: 348230 - DNA, 1503 bp, Homo sapiens
caggactgaagcggagaggaggcagttcaagctgggagccccagggtgggcattccagaggcggtgacacctgagcagtgtctttaagagctcgcagaaggggcatgccagcccacagggaccagcccctagagcaaaggcctccgaggagagacagcttggggtcttcaggggcctacaattccttctctgttctgcggcacaaaatattttccagcggatcccccggtggcctcatgtcgcgcagtggaaccgatcctcagcaacgccagcaggcgtcagaggcggacgccgcagcagcaaccttccgggcaaacgaccatcagcatatccgctacaacccgctgcaggatgagtgggtgctggtgtcagctcaccgcatgaagcggccctggcagggtcaagtggagccccagcttctgaagacagtgccccgccatgaccctctcaaccctctgtgtcctggggccatccgagccaacggagaggtgaatccccagtacgatagcaccttcctgtttgacaacgacttcccagctctgcagcctgatgcccccagtccaggacccagtgatcatccccttttccaagcaaagtctgctcgaggagtctgtaaggtcatgtgcttccacccctggtcggatgtaacgctgccactcatgtcggtccctgagatccgggctgttgttgatgcatgggcctcagtcacagaggagctgggtgcccagtacccttgggtgcagatctttgaaaacaaaggtgccatgatgggctgttctaacccccacccccactgccaggtatgggccagcagtttcctgccagatattgcccagcgtgaggagcgatctcagcaggcctataagagtcagcatggagagcccctgctaatggagtacagccgccaggagctactcaggaaggaacgtctggtcctaaccagtgagcactggttagtactggtccccttctgggcaacatggccctaccagacactgctgctgccccgtcggcatgtgcggcggctacctgagctgacccctgctgagcgtgatgatctagcctccatcatgaagaagctcttgaccaagtatgacaacctctttgagacgtcctttccctactccatgggctggcatggggctcccacaggatcagaggctggggccaactggaaccattggcagctgcacgctcattactaccctccgctcctgcgctctgccactgtccggaaattcatggttggctacgaaatgcttgctcaggctcagagggacctcacccctgagcaggctgcagagagactaagggcacttcctgaggttcattaccacctggggcagaaggacagggagacagcaaccatcgcctgaccacgccgaccacagggccttgaatccttttttgttttcaacagtcttgctgaattaagcagaaagggccttgaatcctggcctggaatttgggcagatatagcattaataaaactgtgcatctcaa

SEQ ID NO: 348231 - DNA, 1805 bp, Homo sapiens
caggactgaagcggagaggaggcagttcaagctgggagccccagggtgggcattccagaggcggtgacacctgagcagtgtctttaagagctcgcagaaggggcatgccagcccacagggaccagcccctagagcaaaggcctccgaggagagacagcttggggtcttcaggggcctacaattccttctctgttctgcggcacaaaatattttccagcggatcccccggtggcctcatgtcgcgcagtggaaccgatcctcagcaacgccagcaggcgtcagaggcggacgccgcagcagcaaccttccgggcaaacggtaactgcaccgcggcagggactcgctggggcgcggagccgagccctccccttccttaggaagctttcgtcccctccgaaggttggaacgctcatcccgagccagaccgacaaggcgtacagtctgcaggcctgtacgagcagcaggccaattggcgctgggaaagtccaatcctgggcctctagctcctgagcgggacagggccgagagggcgctcccgagcttgggcctgctggtgggtgagacccaggagagagggagctagagagctctgaggactgatcttgactgtctgcccccagaccatcagcatatccgctacaacccgctgcaggatgagtgggtgctggtgtcagctcaccgcatgaagcggccctggcagggtcaagtggagccccagcttctgaagacagtgccccgccatgaccctctcaaccctctgtgtcctggggccatccgagccaacggagaggtgaatccccagtacgatagcaccttcctgtttgacaacgacttcccagctctgcagcctgatgcccccagtccaggacccagtgatcatccccttttccaagcaaagtctgctcgaggagtctgtaaggtcatgtgcttccacccctggtcggatgtaacgctgccactcatgtcggtccctgagatccgggctgttgttgatgcatgggcctcagtcacagaggagctgggtgcccagtacccttgggtgcagatctttgaaaacaaaggtgccatgatgggctgttctaacccccacccccactgccaggtatgggccagcagtttcctgccagatattgcccagcgtgaggagcgatctcagcaggcctataagagtcagcatggagagcccctgctaatggagtacagccgccaggagctactcaggaaggaacgtctggtcctaaccagtgagcactggttagtactggtccccttctgggcaacatggccctaccagacactgctgctgccccgtcggcatgtgcggcggctacctgagctgacccctgctgagcgtgatgatctagcctccatcatgaagaagctcttgaccaagtatgacaacctctttgagacgtcctttccctactccatgggctggcatggggctcccacaggatcagaggctggggccaactggaaccattggcagctgcacgctcattactaccctccgctcctgcgctctgccactgtccggaaattcatggttggctacgaaatgcttgctcaggctcagagggacctcacccctgagcaggctgcagagagactaagggcacttcctgaggttcattaccacctggggcagaaggacagggagacagcaaccatcgcctgaccacgccgaccacagggccttgaatccttttttgttttcaacagtcttgctgaattaagcagaaagggccttgaatcctggcctggaatttgggcagatatagcattaataaaactgtgcatctcaa

SEQ ID NO: 348232 - DNA, 1831 bp, Homo sapiens
caggactgaagcggagaggaggcagttcaagctgggagccccagggtgggcattccagaggcggtgacacctgagcagtgtctttaagagctcgcagaaggggcatgccagcccacagggaccagcccctagagcaaaggcctccgaggagagacagcttggggtcttcaggggcctacaattccttctctgttctgcggcacaaaatattttccagcggatcccccggtggcctcatgtcgcgcagtggaaccgatcctcagcaacgccagcaggcgtcagaggcggacgccgcagcagcaaccttccgggcaaacgaccatcagcatatccgctacaacccgctgcaggatgagtgggtgctggtgtcagctcaccgcatgaagcggccctggcagggtcaagtggagccccagcttctgaagacagtgccccgccatgaccctctcaaccctctgtgtcctggggccatccgagccaacggagaggtgaatccccagtacgatagcaccttcctgtttgacaacgacttcccagctctgcagcctgatgcccccagtccaggacccagtgatcatccccttttccaagcaaagtctgctcgaggagtctgtaaggtcatgtgcttccacccctggtcggatgtaacgctgccactcatgtcggtccctgagatccgggctgttgttgatgcatgggcctcagtcacagaggagctgggtgcccagtacccttgggtgcagatctttgaaaacaaaggtgccatgatgggctgttctaacccccacccccactgccaggtatgggccagcagtttcctgccagatattgcccagcgtgaggagcgatctcagcaggcctataagagtcagcatggagagcccctgctaatggagtacagccgccaggagctactcaggaaggaacgtctggtcctaaccagtgagcactggttagtactggtccccttctgggcaacatggccctaccagacactgctgctgccccgtcggcatgtgcggcggctacctgagctgacccctgctgagcgtgatgatctagcctccatcatgaagaagctcttgaccaagtatgacaacctctttgagacgtcctttccctactccatgggctggcatggtgaggcttttcaagtacctatatttagccccaacaccatttctgggctcctggggctcagcctagtgaactgcaacctcaaaggagcaagccttgaaacagttgctgggggaagtggccagagtagagatgctgggactgagggtggagcagcaaacttggtgaaactacatctccaatgtgctttctaatctcctgccagctcttctcaagcaggggatcctgggagatgtagttttcagatacctggttgggtttgggagtaggtgctaacctggataactgtaaaagggctctctctccccactgtctctcttctttctgtcaggggctcccacaggatcagaggctggggccaactggaaccattggcagctgcacgctcattactaccctccgctcctgcgctctgccactgtccggaaattcatggttggctacgaaatgcttgctcaggctcagagggacctcacccctgagcaggctgcagagagactaagggcacttcctgaggttcattaccacctggggcagaaggacagggagacagcaaccatcgcctgaccacgccgaccacagggccttgaatccttttttgttttcaacagtcttgctgaattaagcagaaagggccttgaatcctggcctggaatttgggcagatatagcattaataaaactgtgcatctcaa

SEQ ID NO: 348233 - DNA, 1879 bp, Homo sapiens
caggactgaagcggagaggaggcagttcaagctgggagccccagggtgggcattccagaggcggtgacacctgagcagtgtctttaagagctcgcagaaggggcatgccagcccacagggaccagcccctagagcaaaggcctccgaggagagacagcttggggtcttcaggggcctacaattccttctctgttctgcggcacaaaatattttccagcggatcccccggtggcctcatgtcgcgcagtggaaccgatcctcagcaacgccagcaggcgtcagaggcggacgccgcagcagcaaccttccgggcaaacgaccatcagcatatccgctacaacccgctgcaggatgagtgggtgctggtgtcagctcaccgcatgaagcggccctggcagggtcaagtggagccccagcttctgaagacagtgccccgccatgaccctctcaaccctctgtgtcctggggccatccgagccaacggagaggtgaatccccagtacgatagcaccttcctgtttgacaacgacttcccagctctgcagcctgatgcccccagtccaggacccagtgatcatccccttttccaagcaaagtctgctcgaggagtctgtaaggtcatgtgcttccacccctggtcggatgtaacgctgccactcatgtcggtccctgagatccgggctgttgttgatgcatgggcctcagtcacagaggagctgggtgcccagtacccttgggtgcagatctttgaaaacaaaggtgccatgatgggctgttctaacccccacccccactgccaggtatgggccagcagtttcctgccagatattgcccagcgtgaggagcgatctcagcaggcctataagagtcagcatggagagcccctgctaatggagtacagccgccaggagctactcaggaaggaacgtctggtcctaaccagtgagcactggttagtactggtccccttctgggcaacatggccctaccagacactgctgctgccccgtcggcatgtgcggcggctacctgagctgacccctgctgagcgtgatggggctcccacaggatcagaggctggggccaactggaaccattggcagctgcacgctcattactaccctccgctcctgcgctctgccactgtccggaaattcatggttggctacgaaatgcttgctcaggctcagagggacctcacccctgagcaggctgcagagagactaagggcacttcctgaggttcattaccacctggggcagaaggacagggagacagcaaccatcgcctgaccacgccgaccacagggccttgaatccttttttgttttcaacagtcttgctgaattaagcagaaagggccttgaatcctggcctggaatttgggcagatatagcattaataaaactgtgcatctcaaacttttatcacatactctaatatcagaggagtgtgaaccttcagagatctagggttaaaagctaaaggcatagctccagctacaacttttctttgtctacagatgtgtaaaatcttgatgcaaaaatctaccccaaatttctgaacaaaattaatattcagtattatatctagcctatagattctcttactcttggtgtaatgacagcattcccagtttaggaaactgttttaaaatcttgtgtcttggttgtggctgaggctttgggaaggccagagccccctttgccaccacccctagggtgtcagctccaagcctgggcctgagggtttgatggggagcgggtgagctggatcctgatcccagtggtcagtggccagatcctgggctgctggccagaaccctggctttgtgagtggctgcagcttggctctgctccagcccacaggggctaaagggg

SEQ ID NO: 348234 - DNA, 2251 bp, Homo sapiens
caggactgaagcggagaggaggcagttcaagctgggagccccagggtgggcattccagaggcggtgacacctgagcagtgtctttaagagctcgcagaaggggcatgccagcccacagggaccagcccctagagcaaaggcctccgaggagagacagcttggggtcttcaggggcctacaattccttctctgttctgcggcacaaaatattttccagcggatcccccggtggcctcatgtcgcgcagtggaaccgatcctcagcaacgccagcaggcgtcagaggcggacgccgcagcagcaaccttccgggcaaacggtaactgcaccgcggcagggactcgctggggcgcggagccgagccctccccttccttaggaagctttcgtcccctccgaaggttggaacgctcatcccgagccagaccgacaaggcgtacagtctgcaggcctgtacgagcagcaggccaattggcgctgggaaagtccaatcctgggcctctagctcctgagcgggacagggccgagagggcgctcccgagcttgggcctgctggtgggtgagacccaggagagagggagctagagagctctgaggactgatcttgactgtctgcccccagaccatcagcatatccgctacaacccgctgcaggatgagtgggtgctggtgtcagctcaccgcatgaagcggccctggcagggtcaagtggagccccagcttctgaagacagtgccccgccatgaccctctcaaccctctgtgtcctggggccatccgagccaacggagaggtaagcctgtagagccctgcatctgcaggctgggccacggggagtagttccctcttagaactgtcctccacccacagggatagtgaacctccttctgggtcatatcccaccaagctttttggtcccctagggtgggccttccctactcccttgtagcctgtccagtctttgaagcccaccaggtaactggtggtatggggcagtgagtgcttctagcctatccttgtcggtgtgaatccccagtacgatagcaccttcctgtttgacaacgacttcccagctctgcagcctgatgcccccagtccaggtaacctggctccaactgctgctggggaggagggtggctagacctcttgagggacttctgctgcagagagtgatactcctttacctcaggacccagtgatcatccccttttccaagcaaagtctgctcgaggagtctggtaactatggatttcccctcttacaactttcaaaccagagttggagactcagcattggggttcggccctgcccgtagcacagccaagccctacctctcggttatcttttctcccgtcaccacccagtaaggtcatgtgcttccacccctggtcggatgtaacgctgccactcatgtcggtccctgagatccgggctgttgttgatgcatgggcctcagtcacagaggagctgggtgcccagtacccttgggtgcagatctttgaaaacaaaggtgccatgatgggctgttctaacccccacccccactgccaggtatgggccagcagtttcctgccagatattgcccagcgtgaggagcgatctcagcaggcctataagagtcagcatggagagcccctgctaatggagtacagccgccaggagctactcaggaaggaacgtctggtcctaaccagtgagcactggttagtactggtccccttctgggcaacatggccctaccagacactgctgctgccccgtcggcatgtgcggcggctacctgagctgacccctgctgagcgtgatgatctagcctccatcatgaagaagctcttgaccaagtatgacaacctctttgagacgtcctttccctactccatgggctggcatggggctcccacaggatcagaggctggggccaactggaaccattggcagctgcacgctcattactaccctccgctcctgcgctctgccactgtccggaaattcatggttggctacgaaatgcttgctcaggctcagagggacctcacccctgagcaggctgcagagagactaagggcacttcctgaggttcattaccacctggggcagaaggacagggagacagcaaccatcgcctgaccacgccgaccacagggccttgaatccttttttgttttcaacagtcttgctgaattaagcagaaagggccttgaatcctggcctggaatttgggcagatatagcattaataaaactgtgcatctcaa

SEQ ID NO: 348235 - DNA, 2082 bp, Homo sapiens
caggactgaagcggagaggaggcagttcaagctgggagccccagggtgggcattccagaggcggtgacacctgagcagtgtctttaagagctcgcagaaggggcatgccagcccacagggaccagcccctagagcaaaggcctccgaggagagacagcttggggtcttcaggggcctacaattccttctctgttctgcggcacaaaatattttccagcggatcccccggtggcctcatgtcgcgcagtggaaccgatcctcagcaacgccagcaggcgtcagaggcggacgccgcagcagcaaccttccgggcaaacggtaactgcaccgcggcagggactcgctggggcgcggagccgagccctccccttccttaggaagctttcgtcccctccgaaggttggaacgctcatcccgagccagaccgacaaggcgtacagtctgcaggcctaccatcagcatatccgctacaacccgctgcaggatgagtgggtgctggtgtcagctcaccgcatgaagcggccctggcagggtcaagtggagccccagcttctgaagacagtgccccgccatgaccctctcaaccctctgtgtcctggggccatccgagccaacggagaggtaagcctgtagagccctgcatctgcaggctgggccacggggagtagttccctcttagaactgtcctccacccacagggatagtgaacctccttctgggtcatatcccaccaagctttttggtcccctagggtgggccttccctactcccttgtagcctgtccagtctttgaagcccaccaggtaactggtggtatggggcagtgagtgcttctagcctatccttgtcggtgtgaatccccagtacgatagcaccttcctgtttgacaacgacttcccagctctgcagcctgatgcccccagtccaggtaacctggctccaactgctgctggggaggagggtggctagacctcttgagggacttctgctgcagagagtgatactcctttacctcaggacccagtgatcatccccttttccaagcaaagtctgctcgaggagtctggtaactatggatttcccctcttacaactttcaaaccagagttggagactcagcattggggttcggccctgcccgtagcacagccaagccctacctctcggttatcttttctcccgtcaccacccagtaaggtcatgtgcttccacccctggtcggatgtaacgctgccactcatgtcggtccctgagatccgggctgttgttgatgcatgggcctcagtcacagaggagctgggtgcccagtacccttgggtgcagatctttgaaaacaaaggtgccatgatgggctgttctaacccccacccccactgccaggtatgggccagcagtttcctgccagatattgcccagcgtgaggagcgatctcagcaggcctataagagtcagcatggagagcccctgctaatggagtacagccgccaggagctactcaggaaggaacgtctggtcctaaccagtgagcactggttagtactggtccccttctgggcaacatggccctaccagacactgctgctgccccgtcggcatgtgcggcggctacctgagctgacccctgctgagcgtgatgatctagcctccatcatgaagaagctcttgaccaagtatgacaacctctttgagacgtcctttccctactccatgggctggcatggggctcccacaggatcagaggctggggccaactggaaccattggcagctgcacgctcattactaccctccgctcctgcgctctgccactgtccggaaattcatggttggctacgaaatgcttgctcaggctcagagggacctcacccctgagcaggctgcagagagactaagggcacttcctgaggttcattaccacctggggcagaaggacagggagacagcaaccatcgcctgaccacgccgaccacagggccttgaatccttttttgttttcaacagtcttgctgaattaagcagaaagggccttgaatcctggcctggaatttgggcagatatagcattaataaaactgtgcatctcaa

SEQ ID NO: 348236 - DNA, 1327 bp, Homo sapiens
caggactgaagcggagaggaggcagttcaagctgggagccccagggtgggcattccagaggcggtgacacctgagcagtgtctttaagagctcgcagaaggggcatgccagcccacagggaccagcccctagagcaaaggcctccgaggagagacagcttggggtcttcaggggcctacaattccttctctgttctgcggcacaaaatattttccagcggatcccccggtggcctcatgtcgcgcagtggaaccgatcctcagcaacgccagcaggcgtcagaggcggacgccgcagcagcaaccttccgggcaaacgaccatcagcatatccgctacaacccgctgcaggatgagtgggtgctggtgtcagctcaccgcatgaagcggccctggcagggtcaagtggagccccagcttctgaagacagtgccccgccatgaccctctcaaccctctgtgtcctggggccatccgagccaacggagaggtgaatccccagtacgatagcaccttcctgtttgacaacgacttcccagctctgcagcctgatgcccccagtccaggacccagtgatcatccccttttccaagcaaagtctgctcgaggagtctgtaaggtcatgtgcttccacccctggtcggatgtaacgctgccactcatgtcggtccctgagatccgggctgttgttgatgcatgggcctcagtcacagaggagctgggtgcccagtacccttgggtgcagatctttgaaaacaaaggtgccatgatgggctgttctaacccccacccccactgccaggtatgggccagcagtttcctgccagatattgcccagcgtgaggagcgatctcagcaggcctataagagtcagcatggagagcccctgctaatggagtacagccgccaggagctactcaggaaggaacgtctggtcctaaccagtgagcactggttagtactggtccccttctgggcaacatggccctaccagacactgctgctgccccgtcggcatgtgcggcggctacctgagctgacccctgctgagcgtgatgatctagcctccatcatgaagaagctcttgaccaagtatgacaacctctttgagacgtcctttccctactccatgggctggcatggggctcccacaggatcagaggctggggccaactggaaccattggcagctgcacgctcattactaccctccgctcctgcgctctgccactgtccggaaattcatggttggctacgaaatgcttgctcaggctcagagggacctcacccctgagcaggtcaggactcagaacagtctggcgtctccaga

SEQ ID NO: 348237 - DNA, 1871 bp, Homo sapiens
caggactgaagcggagaggaggcagttcaagctgggagccccagggtgggcattccagaggcggtgacacctgagcagtgtctttaagagctcgcagaaggggcatgccagcccacagggaccagcccctagagcaaaggcctccgaggagagacagcttggggtcttcaggggcctacaattccttctctgttctgcggcacaaaatattttccagcggatcccccggtggcctcatgtcgcgcagtggaaccgatcctcagcaacgccagcaggcgtcagaggcggacgccgcagcagcaaccttccgggcaaacgaccatcagcatatccgctacaacccgctgcaggatgagtgggtgctggtgtcagctcaccgcatgaagcggccctggcagggtcaagtggagccccagcttctgaagacagtgccccgccatgaccctctcaaccctctgtgtcctggggccatccgagccaacggagaggtgaatccccagtacgatagcaccttcctgtttgacaacgacttcccagctctgcagcctgatgcccccagtccaggtaacctggctccaactgctgctggggaggagggtggctagacctcttgagggacttctgctgcagagagtgatactcctttacctcaggacccagtgatcatccccttttccaagcaaagtctgctcgaggagtctggtaactatggatttcccctcttacaactttcaaaccagagttggagactcagcattggggttcggccctgcccgtagcacagccaagccctacctctcggttatcttttctcccgtcaccacccagtaaggtcatgtgcttccacccctggtcggatgtaacgctgccactcatgtcggtccctgagatccgggctgttgttgatgcatgggcctcagtcacagaggagctgggtgcccagtacccttgggtgcaggtttgtgaggtcgccccttcccctggatgggcagggagggggtgatgaagctttggttctggggagtaacatttctgtttccacagggtgtggtcaggagggagttgacttggtgtcttttggctaacagagctccgtatccctatctgatagatctttgaaaacaaaggtgccatgatgggctgttctaacccccacccccactgccaggtatgggccagcagtttcctgccagatattgcccagcgtgaggagcgatctcagcaggcctataagagtcagcatggagagcccctgctaatggagtacagccgccaggagctactcaggaaggaacgtctggtcctaaccagtgagcactggttagtactggtccccttctgggcaacatggccctaccagacactgctgctgccccgtcggcatgtgcggcggctacctgagctgacccctgctgagcgtgatgatctagcctccatcatgaagaagctcttgaccaagtatgacaacctctttgagacgtcctttccctactccatgggctggcatggggctcccacaggatcagaggctggggccaactggaaccattggcagctgcacgctcattactaccctccgctcctgcgctctgccactgtccggaaattcatggttggctacgaaatgcttgctcaggctcagagggacctcacccctgagcaggctgcagagagactaagggcacttcctgaggttcattaccacctggggcagaaggacagggagacagcaaccatcgcctgaccacgccgaccacagggccttgaatccttttttgttttcaacagtcttgctgaattaagcagaaagggccttgaatcctggcctggaatttgggcagatatagcattaataaaactgtgcatctcaa

SEQ ID NO: 348238 - DNA, 2539 bp, Homo sapiens
caggactgaagcggagaggaggcagttcaagctgggagccccagggtgggcattccagaggcggtgacacctgagcagtgtctttaagagctcgcagaaggggcatgccagcccacagggaccagcccctagagcaaaggcctccgaggagagacagcttggggtcttcaggggcctacaattccttctctgttctgcggcacaaaatattttccagcggatcccccggtggcctcatgtcgcgcagtggaaccgatcctcagcaacgccagcaggcgtcagaggcggacgccgcagcagcaaccttccgggcaaacgaccatcagcatatccgctacaacccgctgcaggatgagtgggtgctggtgtcagctcaccgcatgaagcggccctggcagggtcaagtggagccccagcttctgaagacagtgccccgccatgaccctctcaaccctctgtgtcctggggccatccgagccaacggagaggtgaatccccagtacgatagcaccttcctgtttgacaacgacttcccagctctgcagcctgatgcccccagtccaggacccagtgatcatccccttttccaagcaaagtctgctcgaggagtctgtaaggtcatgtgcttccacccctggtcggatgtaacgctgccactcatgtcggtccctgagatccgggctgttgttgatgcatgggcctcagtcacagaggagctgggtgcccagtacccttgggtgcaggtatgggccagcagtttcctgccagatattgcccagcgtgaggagcgatctcagcaggcctataagagtcagcatggagagcccctgctaatggagtacagccgccaggagctactcaggaaggtgggagagagccaagccctgtgtccccaaggagtccctaactttcttatcccatgagagaggtgtgtaaaggagaaagctagaggtgaactagtagagagagacttgctaggaggccttagcaataatccagtaatctaaaggaaagatgatggtgacttagactcgggtggttagtggtagaggtggtgagaagacatcagatcctgggcacattcttttcttctgcttcccttgcctatttgctgaccacactccggctcctatgtcaccttgatgacttcctatccattctgtcttcctaggaacgtctggtcctaaccagtgagcactggttagtactggtccccttctgggcaacatggccctaccagacactgctgctgccccgtcggcatgtgcggcggctacctgagctgacccctgctgagcgtgatgatctagcctccatcatgaagaagctcttgaccaagtatgacaacctctttgagacgtcctttccctactccatgggctggcatggtgaggcttttcaagtacctatatttagccccaacaccatttctgggctcctggggctcagcctagtgaactgcaacctcaaaggagcaagccttgaaacagttgctgggggaagtggccagagtagagatgctgggactgagggtggagcagcaaacttggtgaaactacatctccaatgtgctttctaatctcctgccagctcttctcaagcaggggatcctgggagatgtagttttcagatacctggttgggtttgggagtaggtgctaacctggataactgtaaaagggctctctctccccactgtctctcttctttctgtcaggggctcccacaggatcagaggctggggccaactggaaccattggcagctgcacgctcattactaccctccgctcctgcgctctgccactgtccggaaattcatggttggctacgaaatgcttgctcaggctcagagggacctcacccctgagcaggctgcagagagactaagggcacttcctgaggttcattaccacctggggcagaaggacagggagacagcaaccatcgcctgaccacgccgaccacagggccttgaatccttttttgttttcaacagtcttgctgaattaagcagaaagggccttgaatcctggcctggaatttgggcagatatagcattaataaaactgtgcatctcaaacttttatcacatactctaatatcagaggagtgtgaaccttcagagatctagggttaaaagctaaaggcatagctccagctacaacttttctttgtctacagatgtgtaaaatcttgatgcaaaaatctaccccaaatttctgaacaaaattaatattcagtattatatctagcctatagattctcttactcttggtgtaatgacagcattcccagtttaggaaactgttttaaaatcttgtgtcttggttgtggctgaggctttgggaaggccagagccccctttgccaccacccctagggtgtcagctccaagcctgggcctgagggtttgatggggagcgggtgagctggatcctgatcccagtggtcagtggccagatcctgggctgctggccagaaccctggctttgtgagtggctgcagcttggctctgctccagcccacaggggctaaagggg

SEQ ID NO: 348239 - DNA, 2685 bp, Homo sapiens
caggactgaagcggagaggaggcagttcaagctgggagccccagggtgggcattccagaggcggtgacacctgagcagtgtctttaagagctcgcagaaggggcatgccagcccacagggaccagcccctagagcaaaggcctccgaggagagacagcttggggtcttcaggggcctacaattccttctctgttctgcggcacaaaatattttccagcggatcccccggtggcctcatgtcgcgcagtggaaccgatcctcagcaacgccagcaggcgtcagaggcggacgccgcagcagcaaccttccgggcaaacgaccatcagcatatccgctacaacccgctgcaggatgagtgggtgctggtgtcagctcaccgcatgaagcggccctggcagggtcaagtggagccccagcttctgaagacagtgccccgccatgaccctctcaaccctctgtgtcctggggccatccgagccaacggagaggtgaatccccagtacgatagcaccttcctgtttgacaacgacttcccagctctgcagcctgatgcccccagtccaggtaacctggctccaactgctgctggggaggagggtggctagacctcttgagggacttctgctgcagagagtgatactcctttacctcaggacccagtgatcatccccttttccaagcaaagtctgctcgaggagtctgtaaggtcatgtgcttccacccctggtcggatgtaacgctgccactcatgtcggtccctgagatccgggctgttgttgatgcatgggcctcagtcacagaggagctgggtgcccagtacccttgggtgcagatctttgaaaacaaaggtgccatgatgggctgttctaacccccacccccactgccaggtatgggccagcagtttcctgccagatattgcccagcgtgaggagcgatctcagcaggcctataagagtcagcatggagagcccctgctaatggagtacagccgccaggagctactcaggaaggtgggagagagccaagccctgtgtccccaaggagtccctaactttcttatcccatgagagaggtgtgtaaaggagaaagctagaggtgaactagtagagagagacttgctaggaggccttagcaataatccagtaatctaaaggaaagatgatggtgacttagactcgggtggttagtggtagaggtggtgagaagacatcagatcctgggcacattcttttcttctgcttcccttgcctatttgctgaccacactccggctcctatgtcaccttgatgacttcctatccattctgtcttcctaggaacgtctggtcctaaccagtgagcactggttagtactggtccccttctgggcaacatggccctaccagacactgctgctgccccgtcggcatgtgcggcggctacctgagctgacccctgctgagcgtgatgatctagcctccatcatgaagaagctcttgaccaagtatgacaacctctttgagacgtcctttccctactccatgggctggcatggtgaggcttttcaagtacctatatttagccccaacaccatttctgggctcctggggctcagcctagtgaactgcaacctcaaaggagcaagccttgaaacagttgctgggggaagtggccagagtagagatgctgggactgagggtggagcagcaaacttggtgaaactacatctccaatgtgctttctaatctcctgccagctcttctcaagcaggggatcctgggagatgtagttttcagatacctggttgggtttgggagtaggtgctaacctggataactgtaaaagggctctctctccccactgtctctcttctttctgtcaggggctcccacaggatcagaggctggggccaactggaaccattggcagctgcacgctcattactaccctccgctcctgcgctctgccactgtccggaaattcatggttggctacgaaatgcttgctcaggctcagagggacctcacccctgagcaggctgcagagagactaagggcacttcctgaggttcattaccacctggggcagaaggacagggagacagcaaccatcgcctgaccacgccgaccacagggccttgaatccttttttgttttcaacagtcttgctgaattaagcagaaagggccttgaatcctggcctggaatttgggcagatatagcattaataaaactgtgcatctcaaacttttatcacatactctaatatcagaggagtgtgaaccttcagagatctagggttaaaagctaaaggcatagctccagctacaacttttctttgtctacagatgtgtaaaatcttgatgcaaaaatctaccccaaatttctgaacaaaattaatattcagtattatatctagcctatagattctcttactcttggtgtaatgacagcattcccagtttaggaaactgttttaaaatcttgtgtcttggttgtggctgaggctttgggaaggccagagccccctttgccaccacccctagggtgtcagctccaagcctgggcctgagggtttgatggggagcgggtgagctggatcctgatcccagtggtcagtggccagatcctgggctgctggccagaaccctggctttgtgagtggctgcagcttggctctgctccagcccacaggggctaaagggg

SEQ ID NO: 348240 - DNA, 1386 bp, Homo sapiens
caggactgaagcggagaggaggcagttcaagctgggagccccagggtgggcattccagaggcggtgacacctgagcagtgtctttaagagctcgcagaaggggcatgccagcccacagggaccagcccctagagcaaaggcctccgaggagagacagcttggggtcttcaggggcctacaattccttctctgttctgcggcacaaaatattttccagcggatcccccggtggcctcatgtcgcgcagtggaaccgatcctcagcaacgccagcaggcgtcagaggcggacgccgcagcagcaaccttccgggcaaacgaccatcagcatatccgctacaacccgctgcaggatgagtgggtgctggtgtcagctcaccgcatgaagcggccctggcagggtcaagtggagccccagcttctgaagacagtgccccgccatgaccctctcaaccctctgtgtcctggggccatccgagccaacggagaggtgaatccccagtacgatagcaccttcctgtttgacaacgacttcccagctctgcagcctgatgcccccagtccaggacccagtgatcatccccttttccaagcaaagtctgctcgaggagtctggtaactatggatttcccctcttacaactttcaaaccagagttggagactcagcattggggttcggccctgcccgtagcacagccaagccctacctctcggttatcttttctcccgtcaccacccagtaaggtcatgtgcttccacccctggtcggatgtaacgctgccactcatgtcggtccctgagatccgggctgttgttgatgcatgggcctcagtcacagaggagctgggtgcccagtacccttgggtgcagatctttgaaaacaaaggtgccatgatgggctgttctaacccccacccccactgccaggtatgggccagcagtttcctgccagatattgcccagcgtgaggagcgatctcagcaggcctataagagtcagcatggagagcccctgctaatggagtacagccgccaggagctactcaggaagaagggggcaaccaggagcctggaagacggggcccttaggggacacgggcgtacgacgaacagctgcgtgcccggcgcctgtgggggggaagcggaacgcaaccggggacgggagatatacaccccgcagggaagaccgtgacagagtacgcacactgtaagagcgtctcctacccaggggcgcggtgccacgacagaggggcacgggacgcaaagtggccacaacaccgcaacggagaggtcataacgtcgcgaactgactaggcaccgcagaaagagcgaacatcgagctagaccctgaattttgtaggcattatctctgttgactgaggagacac

SEQ ID NO: 348241 - DNA, 1363 bp, Homo sapiens
tcatcgggggcggcgcggggaggggtggtgtggacggagaaagtgaaaggtgaggcacggccctgcagattttccagcggatcccccggtggcctcatgtcgcgcagtggaaccgatcctcagcaacgccagcaggcgtcagaggcggacgccgcagcagcaaccttccgggcaaacgaccatcagcatatccgctacaacccgctgcaggatgagtgggtgctggtgtcagctcaccgcatgaagcggccctggcagggtcaagtggagccccagcttctgaagacagtgccccgccatgaccctctcaaccctctgtgtcctggggccatccgagccaacggagaggtgaatccccagtacgatagcaccttcctgtttgacaacgacttcccagctctgcagcctgatgcccccagtccaggacccagtgatcatccccttttccaagcaaagtctgctcgaggagtctgtaaggtcatgtgcttccacccctggtcggatgtaacgctgccactcatgtcggtccctgagatccgggctgttgttgatgcatgggcctcagtcacagaggagctgggtgcccagtacccttgggtgcagatctttgaaaacaaaggtgccatgatgggctgttctaacccccacccccactgccaggtatgggccagcagtttcctgccagatattgcccagcgtgaggagcgatctcagcaggcctataagagtcagcatggagagcccctgctaatggagtacagccgccaggagctactcaggaaggaacgtctggtcctaaccagtgagcactggttagtactggtccccttctgggcaacatggccctaccagacactgctgctgccccgtcggcatgtgcggcggctacctgagctgacccctgctgagcgtgatgatctagcctccatcatgaagaagctcttgaccaagtatgacaacctctttgagacgtcctttccctactccatgggctggcatggggctcccacaggatcagaggctggggccaactggaaccattggcagctgcacgctcattactaccctccgctcctgcgctctgccactgtccggaaattcatggttggctacgaaatgcttgctcaggctcagagggacctcacccctgagcaggctgcagagagactaagggcacttcctgaggttcattaccacctggggcagaaggacagggagacagcaaccatcgcctgaccacgccgaccacagggccttgaatccttttttgttttcaacagtcttgctgaattaagcagaaagggccttgaatcctggcctggaatttgggcagatatagcattaataaaactgtgcatctcaa

SEQ ID NO: 348242 - DNA, 1963 bp, Homo sapiens
caggactgaagcggagaggaggcagttcaagctgggagccccagggtgggcattccagaggcggtgacacctgagcagtgtctttaagagctcgcagaaggggcatgccagcccacagggaccagcccctagagcaaaggcctccgaggagagacagcttggggtcttcaggggcctacaattccttctctgttctgcggcacaaaatattttccagcggatcccccggtggcctcatgtcgcgcagtggaaccgatcctcagcaacgccagcaggcgtcagaggcggacgccgcagcagcaaccttccgggcaaacgaccatcagcatatccgctacaacccgctgcaggatgagtgggtgctggtgtcagctcaccgcatgaagcggccctggcagggtcaagtggagccccagcttctgaagacagtgccccgccatgaccctctcaaccctctgtgtcctggggccatccgagccaacggagaggtgaatccccagtacgatagcaccttcctgtttgacaacgacttcccagctctgcagcctgatgcccccagtccaggacccagtgatcatccccttttccaagcaaagtctgctcgaggagtctgtaaggtcatgtgcttccacccctggtcggatgtaacgctgccactcatgtcggtccctgagatccgggctgttgttgatgcatgggcctcagtcacagaggagctgggtgcccagtacccttgggtgcagatctttgaaaacaaaggtgccatgatgggctgttctaacccccacccccactgccaggtatgggccagcagtttcctgccagatattgcccagcgtgaggagcgatctcagcaggcctataagagtcagcatggagagcccctgctaatggagtacagccgccaggagctactcaggaaggaacgtctggtcctaaccagtgagcactggttagtactggtccccttctgggcaacatggccctaccagacactgctgctgccccgtcggcatgtgcggcggctacctgagctgacccctgctgagcgtgatgatctagcctccatcatgaagaagctcttgaccaagtatgacaacctctttgagacgtcctttccctactccatgggctggcatggggctcccacaggatcagaggctggggccaactggaaccattggcagctgcacgctcattactaccctccgctcctgcgctctgccactgtccggaaattcatggttggctacgaaatgcttgctcaggctcagagggacctcacccctgagcaggctgcagagagactaagggcacttcctgaggttcattaccacctggggcagaaggacagggagacagcaaccatcgcctgaccacgccgaccacagggccttgaatccttttttgttttcaacagtcttgctgaattaagcagaaagggccttgaatcctggcctggaatttgggcagatatagcattaataaaactgtgcatctcaaacttttatcacatactctaatatcagaggagtgtgaaccttcagagatctagggttaaaagctaaaggcatagctccagctacaacttttctttgtctacagatgtgtaaaatcttgatgcaaaaatctaccccaaatttctgaacaaaattaatattcagtattatatctagcctatagattctcttactcttggtgtaatgacagcattcccagtttaggaaactgttttaaaatcttgtgtcttggttgtggctgaggctttgggaaggccagagccccctttgccaccacccctagggtgtcagctccaagcctgggcctgagggtttgatggggagcgggtgagctggatcctgatcccagtggtcagtggccagatcctgggctgctggccagaaccctggctttgtgagtggctgcagcttggctctgctccagcccacaggggctaaagggg

SEQ ID NO: 348243 - DNA, 2291 bp, Homo sapiens
caggactgaagcggagaggaggcagttcaagctgggagccccagggtgggcattccagaggcggtgacacctgagcagtgtctttaagagctcgcagaaggggcatgccagcccacagggaccagcccctagagcaaaggcctccgaggagagacagcttggggtcttcaggggcctacaattccttctctgttctgcggcacaaaatattttccagcggatcccccggtggcctcatgtcgcgcagtggaaccgatcctcagcaacgccagcaggcgtcagaggcggacgccgcagcagcaaccttccgggcaaacgaccatcagcatatccgctacaacccgctgcaggatgagtgggtgctggtgtcagctcaccgcatgaagcggccctggcagggtcaagtggagccccagcttctgaagacagtgccccgccatgaccctctcaaccctctgtgtcctggggccatccgagccaacggagaggtgaatccccagtacgatagcaccttcctgtttgacaacgacttcccagctctgcagcctgatgcccccagtccaggacccagtgatcatccccttttccaagcaaagtctgctcgaggagtctgtaaggtcatgtgcttccacccctggtcggatgtaacgctgccactcatgtcggtccctgagatccgggctgttgttgatgcatgggcctcagtcacagaggagctgggtgcccagtacccttgggtgcagatctttgaaaacaaaggtgccatgatgggctgttctaacccccacccccactgccaggtatgggccagcagtttcctgccagatattgcccagcgtgaggagcgatctcagcaggcctataagagtcagcatggagagcccctgctaatggagtacagccgccaggagctactcaggaaggaacgtctggtcctaaccagtgagcactggttagtactggtccccttctgggcaacatggccctaccagacactgctgctgccccgtcggcatgtgcggcggctacctgagctgacccctgctgagcgtgatgatctagcctccatcatgaagaagctcttgaccaagtatgacaacctctttgagacgtcctttccctactccatgggctggcatggtgaggcttttcaagtacctatatttagccccaacaccatttctgggctcctggggctcagcctagtgaactgcaacctcaaaggagcaagccttgaaacagttgctgggggaagtggccagagtagagatgctgggactgagggtggagcagcaaacttggtgaaactacatctccaatgtgctttctaatctcctgccagctcttctcaagcaggggatcctgggagatgtagttttcagatacctggttgggtttgggagtaggtgctaacctggataactgtaaaagggctctctctccccactgtctctcttctttctgtcaggggctcccacaggatcagaggctggggccaactggaaccattggcagctgcacgctcattactaccctccgctcctgcgctctgccactgtccggaaattcatggttggctacgaaatgcttgctcaggctcagagggacctcacccctgagcaggctgcagagagactaagggcacttcctgaggttcattaccacctggggcagaaggacagggagacagcaaccatcgcctgaccacgccgaccacagggccttgaatccttttttgttttcaacagtcttgctgaattaagcagaaagggccttgaatcctggcctggaatttgggcagatatagcattaataaaactgtgcatctcaaacttttatcacatactctaatatcagaggagtgtgaaccttcagagatctagggttaaaagctaaaggcatagctccagctacaacttttctttgtctacagatgtgtaaaatcttgatgcaaaaatctaccccaaatttctgaacaaaattaatattcagtattatatctagcctatagattctcttactcttggtgtaatgacagcattcccagtttaggaaactgttttaaaatcttgtgtcttggttgtggctgaggctttgggaaggccagagccccctttgccaccacccctagggtgtcagctccaagcctgggcctgagggtttgatggggagcgggtgagctggatcctgatcccagtggtcagtggccagatcctgggctgctggccagaaccctggctttgtgagtggctgcagcttggctctgctccagcccacaggggctaaagggg

SEQ ID NO: 348244 - DNA, 1715 bp, Homo sapiens
  misc_feature (1547)..(1547): n is a, c, g, or t
  misc_feature (1552)..(1552): n is a, c, g, or t
  misc_feature (1562)..(1562): n is a, c, g, or t
  misc_feature (1575)..(1575): n is a, c, g, or t
  misc_feature (1577)..(1577): n is a, c, g, or t
  misc_feature (1579)..(1579): n is a, c, g, or t
  misc_feature (1584)..(1584): n is a, c, g, or t
  misc_feature (1588)..(1588): n is a, c, g, or t
  misc_feature (1597)..(1597): n is a, c, g, or t
  misc_feature (1601)..(1603): n is a, c, g, or t
  misc_feature (1607)..(1607): n is a, c, g, or t
  misc_feature (1620)..(1620): n is a, c, g, or t
  misc_feature (1623)..(1624): n is a, c, g, or t
  misc_feature (1626)..(1627): n is a, c, g, or t
  misc_feature (1629)..(1629): n is a, c, g, or t
  misc_feature (1646)..(1646): n is a, c, g, or t
  misc_feature (1651)..(1651): n is a, c, g, or t
  misc_feature (1661)..(1661): n is a, c, g, or t
  misc_feature (1679)..(1680): n is a, c, g, or t
caggactgaagcggagaggaggcagttcaagctgggagccccagggtgggcattccagaggcggtgacacctgagcagtgtctttaagagctcgcagaaggggcatgccagcccacagggaccagcccctagagcaaaggcctccgaggagagacagcttggggtcttcaggggcctacaattccttctctgttctgcggcacaaaatattttccagcggatcccccggtggcctcatgtcgcgcagtggaaccgatcctcagcaacgccagcaggcgtcagaggcggacgccgcagcagcaaccttccgggcaaacgaccatcagcatatccgctacaacccgctgcaggatgagtgggtgctggtgtcagctcaccgcatgaagcggccctggcagggtcaagtggagccccagcttctgaagacagtgccccgccatgaccctctcaaccctctgtgtcctggggccatccgagccaacggagaggtgaatccccagtacgatagcaccttcctgtttgacaacgacttcccagctctgcagcctgatgcccccagtccaggacccagtgatcatccccttttccaagcaaagtctgctcgaggagtctgtaaggtcatgtgcttccacccctggtcggatgtaacgctgccactcatgtcggtccctgagatccgggctgttgttgatgcatgggcctcagtcacagaggagctgggtgcccagtacccttgggtgcagatctttgaaaacaaaggtgccatgatgggctgttctaacccccacccccactgccaggtatgggccagcagtttcctgccagatattgcccagcgtgaggagcgatctcagcaggcctataagagtcagcatggagagcccctgctaatggagtacagccgccaggagctactcaggaaggaacgtctggtcctaaccagtgagcactggttagtactggtccccttctgggcaacatggccctaccagacactgctgctgccccgtcggcatgtgcggcggctacctgagctgacccctgctgagcgtgatgatctagcctccatcatgaagaagctcttgaccaagtatgacaacctctttgagacgtcctttccctactccatgggctggcatggggctcccacaggatcagaggctggggccaactggaaccattggcagctgcacgctcattactaccctccgctcctgcgctctgccactgtccggaaattcatggttggctacgaaatgcttgctcaggctcagagggacctcacccctgagcaggctgcagagagactaagggcacttcctgaggttcattaccacctggggcagaaggacagggagacagcaaccatcgcctgaccacgccgaccacagggccttgaatccttttttgttttcaacagtcttgctgaattaagcagaaagggccttgaatcctggcctggaatttgggcagatatagcattaataaaactgtgcatctcaaaaaaaaaaaaaaaaaaaaaaaaaaaaaaacccccgggggccctntatgngggggggggngaaaaagaggggnangngaaangggncacggggcncaannngggnccccgggccccanttnntnngnccaagggggaaaactcnggcgngggcccccanaaaggggggccggataanntccggaaaacccgggtacccggataatgaacggaa

SEQ ID NO: 348245 - DNA, 1738 bp, Homo sapiens
  misc_feature (1738)..(1738): n is a, c, g, or t
caggactgaagcggagaggaggcagttcaagctgggagccccagggtgggcattccagaggcggtgacacctgagcagtgtctttaagagctcgcagaaggggcatgccagcccacagggaccagcccctagagcaaaggcctccgaggagagacagcttggggtcttcaggggcctacaattccttctctgttctgcggcacaaaatattttccagcggatcccccggtggcctcatgtcgcgcagtggaaccgatcctcagcaacgccagcaggcgtcagaggcggacgccgcagcagcaaccttccgggcaaacgaccatcagcatatccgctacaacccgctgcaggatgagtgggtgctggtgtcagctcaccgcatgaagcggccctggcagggtcaagtggagccccagcttctgaagacagtgccccgccatgaccctctcaaccctctgtgtcctggggccatccgagccaacggagaggtgaatccccagtacgatagcaccttcctgtttgacaacgacttcccagctctgcagcctgatgcccccagtccaggacccagtgatcatccccttttccaagcaaagtctgctcgaggagtctgtaaggtcatgtgcttccacccctggtcggatgtaacgctgccactcatgtcggtccctgagatccgggctgttgttgatgcatgggcctcagtcacagaggagctgggtgcccagtacccttgggtgcagatctttgaaaacaaaggtgccatgatgggctgttctaacccccacccccactgccaggtatgggccagcagtttcctgccagatattgcccagcgtgaggagcgatctcagcaggcctataagagtcagcatggagagcccctgctaatggagtacagccgccaggagctactcaggaaggaacgtctggtcctaaccagtgagcactggttagtactggtccccttctgggcaacatggccctaccagacactgctgctgccccgtcggcatgtgcggcggctacctgagctgacccctgctgagcgtgatgatctagcctccatcatgaagaagctcttgaccaagtatgacaacctctttgagacgtcctttccctactccatgggctggcatggggctcccacaggatcagaggctggggccaactggaaccattggcagctgcacgctcattactaccctccgctcctgcgctctgccactgtccggaaattcatggttggctacgaaatgcttgctcaggctcagagggacctcacccctgagcaggctgcagagagactaagggcacttcctgaggttcattaccacctggggcagaaggacagggagacagcaaccatcgcctgaccacgccgaccacagggccttgaatccttttttgttttcaacagtcttgctgaattaagcagaaagggccttgaatcctggcctggaatttgggcagatatagcattaataaaactgtgcatctcaaaaaaaaaaaaaaaaaaaaaaaaaaaaaaactctggggggttttattgtgtgtgggggggggaaaaaggggggtatgtgtgaagtgggccatgtggggctatatggggtgtttccctgtaacccaggtttttttgtgtccaggggggaaaattgggggggccccccaaaatgggggggggaattaaattcgagaaaaggccgggttcacccggtttttataccttctgggaaaagn

SEQ ID NO: 348246 - DNA, 1629 bp, Homo sapiens
caggactgaagcggagaggaggcagttcaagctgggagccccagggtgggcattccagaggcggtgacacctgagcagtgtctttaagagctcgcagaaggggcatgccagcccacagggaccagcccctagagcaaaggcctccgaggagagacagcttggggtcttcaggggcctacaattccttctctgttctgcggcacaaaatattttccagcggatcccccggtggcctcatgtcgcgcagtggaaccgatcctcagcaacgccagcaggcgtcagaggcggacgccgcagcagcaaccttccgggcaaacgaccatcagcatatccgctacaacccgctgcaggatgagtgggtgctggtgtcagctcaccgcatgaagcggccctggcagggtcaagtggagccccagcttctgaagacagtgccccgccatgaccctctcaaccctctgtgtcctggggccatccgagccaacggagaggtgaatccccagtacgatagcaccttcctgtttgacaacgacttcccagctctgcagcctgatgcccccagtccaggacccagtgatcatccccttttccaagcaaagtctgctcgaggagtctggtaactatggatttcccctcttacaactttcaaaccagagttggagactcagcattggggttcggccctgcccgtagcacagccaagccctacctctcggttatcttttctcccgtcaccacccagtaaggtcatgtgcttccacccctggtcggatgtaacgctgccactcatgtcggtccctgagatccgggctgttgttgatgcatgggcctcagtcacagaggagctgggtgcccagtacccttgggtgcagatctttgaaaacaaaggtgccatgatgggctgttctaacccccacccccactgccaggtatgggccagcagtttcctgccagatattgcccagcgtgaggagcgatctcagcaggcctataagagtcagcatggagagcccctgctaatggagtacagccgccaggagctactcaggaaggaacgtctggtcctaaccagtgagcactggttagtactggtccccttctgggcaacatggccctaccagacactgctgctgccccgtcggcatgtgcggcggctacctgagctgacccctgctgagcgtgatgatctagcctccatcatgaagaagctcttgaccaagtatgacaacctctttgagacgtcctttccctactccatgggctggcatggggctcccacaggatcagaggctggggccaactggaaccattggcagctgcacgctcattactaccctccgctcctgcgctctgccactgtccggaaattcatggttggctacgaaatgcttgctcaggctcagagggacctcacccctgagcaggctgcagagagactaagggcacttcctgaggttcattaccacctggggcagaaggacagggagacagcaaccatcgcctgaccacgccgaccacagggccttgaatccttttttgttttcaacagtcttgctgaattaagcagaaagggccttgaatcctggcctggaatttgggcagatatagcattaataaaactgtgcatctcaa

SEQ ID NO: 348247 - DNA, 1718 bp, Homo sapiens
caggactgaagcggagaggaggcagttcaagctgggagccccagggtgggcattccagaggcggtgacacctgagcagtgtctttaagagctcgcagaaggggcatgccagcccacagggaccagcccctagagcaaaggcctccgaggagagacagcttggggtcttcaggggcctacaattccttctctgttctgcggcacaaaatattttccagcggatcccccggtggcctcatgtcgcgcagtggaaccgatcctcagcaacgccagcaggcgtcagaggcggacgccgcagcagcaaccttccgggcaaacgaccatcagcatatccgctacaacccgctgcaggatgagtgggtgctggtgtcagctcaccgcatgaagcggccctggcagggtcaagtggagccccagcttctgaagacagtgccccgccatgaccctctcaaccctctgtgtcctggggccatccgagccaacggagaggtgaatccccagtacgatagcaccttcctgtttgacaacgacttcccagctctgcagcctgatgcccccagtccaggtaacctggctccaactgctgctggggaggagggtggctagacctcttgagggacttctgctgcagagagtgatactcctttacctcaggacccagtgatcatccccttttccaagcaaagtctgctcgaggagtctggtaactatggatttcccctcttacaactttcaaaccagagttggagactcagcattggggttcggccctgcccgtagcacagccaagccctacctctcggttatcttttctcccgtcaccacccagtaaggtcatgtgcttccacccctggtcggatgtaacgctgccactcatgtcggtccctgagatccgggctgttgttgatgcatgggcctcagtcacagaggagctgggtgcccagtacccttgggtgcagatctttgaaaacaaaggtgccatgatgggctgttctaacccccacccccactgccaggtatgggccagcagtttcctgccagatattgcccagcgtgaggagcgatctcagcaggcctataagagtcagcatggagagcccctgctaatggagtacagccgccaggagctactcaggaaggaacgtctggtcctaaccagtgagcactggttagtactggtccccttctgggcaacatggccctaccagacactgctgctgccccgtcggcatgtgcggcggctacctgagctgacccctgctgagcgtgatgatctagcctccatcatgaagaagctcttgaccaagtatgacaacctctttgagacgtcctttccctactccatgggctggcatggggctcccacaggatcagaggctggggccaactggaaccattggcagctgcacgctcattactaccctccgctcctgcgctctgccactgtccggaaattcatggttggctacgaaatgcttgctcaggctcagagggacctcacccctgagcaggctgcagagagactaagggcacttcctgaggttcattaccacctggggcagaaggacagggagacagcaaccatcgcctgaccacgccgaccacagggccttgaatccttttttgttttcaacagtcttgctgaattaagcagaaagggccttgaatcctggcctggaatttgggcagatatagcattaataaaactgtgcatctcaa

SEQ ID NO: 348248 - DNA, 1378 bp, Homo sapiens
caggactgaagcggagaggaggcagttcaagctgggagccccagggtgggcattccagaggcggtgacacctgagcagtgtctttaagagctcgcagaaggggcatgccagcccacagggaccagcccctagagcaaaggcctccgaggagagacagcttggggtcttcaggggcctacaattccttctctgttctgcggcacaaaatattttccagcggatcccccggtggcctcatgtcgcgcagtggaaccgatcctcagcaacgccagcaggcgtcagaggcggacgccgcagcagcaaccttccgggcaaacgaccatcagcatatccgctacaacccgctgcaggatgagtgggtgctggtgtcagctcaccgcatgaagcggccctggcagggtcaagtggagccccagcttctgaagacagtgccccgccatgaccctctcaaccctctgtgtcctggggccatccgagccaacggagagtaaggtcatgtgcttccacccctggtcggatgtaacgctgccactcatgtcggtccctgagatccgggctgttgttgatgcatgggcctcagtcacagaggagctgggtgcccagtacccttgggtgcagatctttgaaaacaaaggtgccatgatgggctgttctaacccccacccccactgccaggtatgggccagcagtttcctgccagatattgcccagcgtgaggagcgatctcagcaggcctataagagtcagcatggagagcccctgctaatggagtacagccgccaggagctactcaggaaggaacgtctggtcctaaccagtgagcactggttagtactggtccccttctgggcaacatggccctaccagacactgctgctgccccgtcggcatgtgcggcggctacctgagctgacccctgctgagcgtgatgatctagcctccatcatgaagaagctcttgaccaagtatgacaacctctttgagacgtcctttccctactccatgggctggcatggggctcccacaggatcagaggctggggccaactggaaccattggcagctgcacgctcattactaccctccgctcctgcgctctgccactgtccggaaattcatggttggctacgaaatgcttgctcaggctcagagggacctcacccctgagcaggctgcagagagactaagggcacttcctgaggttcattaccacctggggcagaaggacagggagacagcaaccatcgcctgaccacgccgaccacagggccttgaatccttttttgttttcaacagtcttgctgaattaagcagaaagggccttgaatcctggcctggaatttgggcagatatagcattaataaaactgtgcatctcaa

SEQ ID NO: 348249 - DNA, 2818 bp, Homo sapiens
caggactgaagcggagaggaggcagttcaagctgggagccccagggtgggcattccagaggcggtgacacctgagcagtgtctttaagagctcgcagaaggggcatgccagcccacagggaccagcccctagagcaaaggcctccgaggagagacagcttggggtcttcaggggcctacaattccttctctgttctgcggcacaaaatattttccagcggatcccccggtggcctcatgtcgcgcagtggaaccgatcctcagcaacgccagcaggcgtcagaggcggacgccgcagcagcaaccttccgggcaaacggtaactgcaccgcggcagggactcgctggggcgcggagccgagccctccccttccttaggaagctttcgtcccctccgaaggttggaacgctcatcccgagccagaccgacaaggcgtacagtctgcaggcctaccatcagcatatccgctacaacccgctgcaggatgagtgggtgctggtgtcagctcaccgcatgaagcggccctggcagggtcaagtggagccccagcttctgaagacagtgccccgccatgaccctctcaaccctctgtgtcctggggccatccgagccaacggagaggtgaatccccagtacgatagcaccttcctgtttgacaacgacttcccagctctgcagcctgatgcccccagtccaggtaacctggctccaactgctgctggggaggagggtggctagacctcttgagggacttctgctgcagagagtgatactcctttacctcaggacccagtgatcatccccttttccaagcaaagtctgctcgaggagtctgtaaggtcatgtgcttccacccctggtcggatgtaacgctgccactcatgtcggtccctgagatccgggctgttgttgatgcatgggcctcagtcacagaggagctgggtgcccagtacccttgggtgcagatctttgaaaacaaaggtgccatgatgggctgttctaacccccacccccactgccaggtatgggccagcagtttcctgccagatattgcccagcgtgaggagcgatctcagcaggcctataagagtcagcatggagagcccctgctaatggagtacagccgccaggagctactcaggaaggtgggagagagccaagccctgtgtccccaaggagtccctaactttcttatcccatgagagaggtgtgtaaaggagaaagctagaggtgaactagtagagagagacttgctaggaggccttagcaataatccagtaatctaaaggaaagatgatggtgacttagactcgggtggttagtggtagaggtggtgagaagacatcagatcctgggcacattcttttcttctgcttcccttgcctatttgctgaccacactccggctcctatgtcaccttgatgacttcctatccattctgtcttcctaggaacgtctggtcctaaccagtgagcactggttagtactggtccccttctgggcaacatggccctaccagacactgctgctgccccgtcggcatgtgcggcggctacctgagctgacccctgctgagcgtgatgatctagcctccatcatgaagaagctcttgaccaagtatgacaacctctttgagacgtcctttccctactccatgggctggcatggtgaggcttttcaagtacctatatttagccccaacaccatttctgggctcctggggctcagcctagtgaactgcaacctcaaaggagcaagccttgaaacagttgctgggggaagtggccagagtagagatgctgggactgagggtggagcagcaaacttggtgaaactacatctccaatgtgctttctaatctcctgccagctcttctcaagcaggggatcctgggagatgtagttttcagatacctggttgggtttgggagtaggtgctaacctggataactgtaaaagggctctctctccccactgtctctcttctttctgtcaggggctcccacaggatcagaggctggggccaactggaaccattggcagctgcacgctcattactaccctccgctcctgcgctctgccactgtccggaaattcatggttggctacgaaatgcttgctcaggctcagagggacctcacccctgagcaggctgcagagagactaagggcacttcctgaggttcattaccacctggggcagaaggacagggagacagcaaccatcgcctgaccacgccgaccacagggccttgaatccttttttgttttcaacagtcttgctgaattaagcagaaagggccttgaatcctggcctggaatttgggcagatatagcattaataaaactgtgcatctcaaacttttatcacatactctaatatcagaggagtgtgaaccttcagagatctagggttaaaagctaaaggcatagctccagctacaacttttctttgtctacagatgtgtaaaatcttgatgcaaaaatctaccccaaatttctgaacaaaattaatattcagtattatatctagcctatagattctcttactcttggtgtaatgacagcattcccagtttaggaaactgttttaaaatcttgtgtcttggttgtggctgaggctttgggaaggccagagccccctttgccaccacccctagggtgtcagctccaagcctgggcctgagggtttgatggggagcgggtgagctggatcctgatcccagtggtcagtggccagatcctgggctgctggccagaaccctggctttgtgagtggctgcagcttggctctgctccagcccacaggggctaaagggg

SEQ ID NO: 348250 - DNA, 821 bp, Homo sapiens
caggactgaagcggagaggaggcagttcaagctgggagccccagggtgggcattccagaggcggtgacacctgagcagtgtctttaagagctcgcagaaggggcatgccagcccacagggaccagcccctagagcaaaggcctccgaggagagacagcttggggtcttcaggggcctacaattccttctctgttctgcggcacaaaatattttccagcggatcccccggtggcctcatgtcgcgcagtggaaccgatcctcagcaacgccagcaggcgtcagaggcggacgccgcagcagcaaccttccgggcaaacgaccatcagcatatccgctacaacccgctgcaggatgagtgggtgctggtgtcagctcaccgcatgaagcggccctggcagggtcaagtggagccccagcttctgaagacagtgccccgccatgaccctctcaaccctctgtgtcctggggccatccgagccaacggagaggtgaatccccagtacgatagcaccttcctgtttgacaacgacttcccagctctgcagcctgatgcccccagtccaggacccagtgatcatccccttttccaagcaaagtctgctcgaggagtctggctgcagagagactaagggcacttcctgaggttcattaccacctggggcagaaggacagggagacagcaaccatcgcctgaccacgccgaccacagggccttgaatccttttttgttttcaacagtcttgctgaattaagcagaaagggccttgaatcctggcctggaatttgggcagatatagcattaataaaactgtgcatctcaa

SEQ ID NO: 348251 - DNA, 383 bp, Homo sapiens
ctgtgtgtgtgggatctacagctctgttgtgttaaagtagaaactttagacaaattaaatctaacagtttaactgagcaaggaacaatccatgaagtacatagccctaagaatcagaagaggttcagaaagctccactccacaatgtggacagaaaatggaagttaaatacagaaacagcttgattggttgggatttgcatttgtctcacttggccgtggcctgattggttggccacctgtgattgactgaagcttggctactgtgattggctgagactcagctatttattttaaaagcatactgctgtgtagtgagctgagatcacgccactgcactccagcctgggtgacagagtgagactccattctcaaaaaaaaaaaa

SEQ ID NO: 348252 - DNA, 3613 bp, Homo sapiens
actccccatgctattaatttgttaaaggctttggtgttgtacagtactgaataactgccaatgccatctgcctgtggccttctcaagtttgtctgcacctgtggttatcctgacttcaaacccggggagacagaggctagaagaggcagacagctcttgtgtattctcctgtccagtgcaaagaacacctggaactctgagccctaaccttaaatgcaagacctcatctgcaggtgttcctcatccttttagcccctcagtgatgtaagcaacaaacgtcacccagctcctggggcacacttcactcccagatgagcttgtcctggatttgcagggagcctggctccctagaccttttggccagatccccacaggggaattgtgcaggtgcgccctccccagatccccagttggtattggaatcacaccaactgtcacacatggggagggcagctgcacccagccaccctctgacttctctcctcccacagattggccatctgcaagcttcccttctccgtggagagcaggaagacagtcatgggacctcagggagccaggagacaggctttcttggcatttggggatgtcactgtggatttcacccagaaggaatggaggctgctgagccctgctcagagggccctgtacagggaggtgacactggagaactacagccacctggtctcactaggaattctccattctaaaccagaactcatcaggcggctagagcaaggggaagtgccctggggagaagagagaagacgccggccaggcccctgtgcaggaatatatgcagaacatgtcctgcggcccaagaatcttggacttgcacatcagaggcaacagcaactacaattttctgatcaaagcttccagagtgacacagctgaaggtcaagagaaagaaaaaagcactaagcccatggcattttccagcccacccctaagacatgcagtaagctcaaggaggaggaacagtgtagtggaaatagagtctagtcaaggccagagggaaaatcctacagaaatagacaaagtattgaaaggaatagaaaattcaagatggggagcattcaagtgtgcagagcgtgggcaagacttcagccggaagatgatggtaatcatacacaaaaaagcacattccaggcagaaactttttacatgcagggagtgtcaccagggctttagagatgagtcagcattgctcttgcaccagaacacacacacaggagagaagtcctatgtgtgcagtgtgtgtgggcgaggcttcagcctcaaggccaacctcctcagacaccagaggacacactcaggagagaagccttttctgtgcaaggtgtgtggacgaggctataccagtaagtcatacctcactgtgcatgagagaacacacacaggagagaagccttatgaatgccaggagtgtgggcgaaggtttaacgataagtcctcatacaacaagcacttgaaggcgcattcaggggagaagccttttgtgtgcaaggagtgtgggcgaggctatactaataagtcatacttcgttgtgcacaagagaatacactcaggagagaagccttacagatgccaggagtgtggccgaggctttagcaataagtcacaccttatcacacaccagaggacacactcaggggagaagccctttgcgtgcaggcagtgtaagcaaagttttagcgtgaaaggaagtctcctcagacaccagagaacacactcaggggagaagccttttgtgtgcaaggattgtgagcgaagctttagccaaaagtcaactcttgtctaccaccagagaacacactcaggggagaaaccttttgtttgtagagaatgtgggcaaggatttattcagaagtcaacccttgtgaaacatcagatcacacactcagaggagaagccttttgtgtgcaaggactgtggacgaggctttatccaaaagtcaaccttcactttacaccagaggacacactcagaggagaagccttatggatgtcgggagtgtgggcgaaggtttcgggataagtcctcctataacaagcacctgagggcacacttgggtgagaaacgttttttctgcagggattgtgggcgaggctttaccttgaagccaaatctcaccatacatcagaggacacactcaggagagaagcccttcatgtgcaagcagtgtgagaaaagttttagtttgaaggcaaatcttcttagacatcagtggacacactcgggggaaaggccatttaattgcaaggattgcgggcgaggcttcatcctaaaatcaactctcctcttccaccagaagacacactcaggggagaagcctttcatctgtagtgaatgtgggcaaggatttatctggaagtcaaatcttgtgaaacaccagcttgcacattctggcaagcagccttttgtatgcaaggagtgtgggcgaggcttcaactggaagggaaatctcctcacacaccagaggacacactcaggggagaagcccttcgtgtgtaatgtgtgtgggcaaggcttcagctggaagagaagtctcaccagacaccactggcggatacactcaaaggagaagccttttgtttgccaggagtgtaagcgaggctataccagtaagtcagacctcactgtgcatgaaagaatacacacaggagagaggccttatgaatgccaagagtgtggacgaaagtttagcaataagtcatactacagtaagcacttaaagagacacttacgtgagaagcgtttttgtacagggagtgtgggtgaggcttcatcttgaagttatatctcaccatccatcagaggacacactcaggagagtaactttgctttgttacaagctttagttgaggctgcataacttgttcgtgaagatataacagaggcagacagaatccagagggctacagagaacctgaattcaacccatgtgtccccaagagattcagagaaaagaggtcaatgtttagggaacagagatgccagttgaggggagggcattacctgggctattggggaaatgtggtctctttcctactgagcacatattcttgttgtatttgtgccaggctgtgctttctaaggactgctcttagccagtgactgcagagcagggataccaaggcaggcctgttacactctccccaacctccttggactgcaaacaatctaggacacctccaccaaacctcctcttgcactttccctctggcttccctcccagccttccttggtttggatgttttgtcccctccttaatttatgttgaaactctacataaactgtttactgttgaaacagtgtaagtattaggaggtgggacctttgggaagtgattaagtcaagtcacgaagatagagctttgcgaatgggatcaggtgcccttatgaaaaggcttgatagagggagtttgtcctgtggcccttctattttctgctctgtgaggacacaatgctcctcccttccaaaagatgcagcatgaaggcatcatcttggaaacagacatgagccctcaacagacaactgcacctactgatgttttgatgttgaacttcccagcctccagaactctgggaaaataaagtcctctttataca

SEQ ID NO: 348253 - DNA, 3198 bp, Homo sapiens
tgggcgtcagcgagccgtgagatgcgtggtccaccatcggtgacctcaccgcctcggttcgccctcagccgccccgattggccatctgcaagcttcccttctccgtggagagcaggaagacagtcatgggacctcagggagccaggagacaggctttcttggcatttggggatgtcactgtggatttcacccagaaggaatggaggctgctgagccctgctcagagggccctgtacagggaggtgacactggagaactacagccacctggtctcactaggaattctccattctaaaccagaactcatcaggcggctagagcaaggggaagtgccctggggagaagagagaagacgccggccaggcccctgtgcaggaatatatgcagaacatgtcctgcggcccaagaatcttggacttgcacatcagaggcaacagcaactacaattttctgatcaaagcttccagagtgacacagctgaaggtcaagagaaagaaaaaagcactaagcccatggcattttccagcccacccctaagacatgcagtaagctcaaggaggaggaacagtgtagtggaaatagagtctagtcaaggccagagggaaaatcctacagaaatagacaaagtattgaaaggaatagaaaattcaagatggggagcattcaagtgtgcagagcgtgggcaagacttcagccggaagatgatggtaatcatacacaaaaaagcacattccaggcagaaactttttacatgcagggagtgtcaccagggctttagagatgagtcagcattgctcttgcaccagaacacacacacaggagagaagtcctatgtgtgcagtgtgtgtgggcgaggcttcagcctcaaggccaacctcctcagacaccagaggacacactcaggagagaagccttttctgtgcaaggtgtgtggacgaggctataccagtaagtcatacctcactgtgcatgagagaacacacacaggagagaagccttatgaatgccaggagtgtgggcgaaggtttaacgataagtcctcatacaacaagcacttgaaggcgcattcaggggagaagccttttgtgtgcaaggagtgtgggcgaggctatactaataagtcatacttcgttgtgcacaagagaatacactcaggagagaagccttacagatgccaggagtgtggccgaggctttagcaataagtcacaccttatcacacaccagaggacacactcaggggagaagccctttgcgtgcaggcagtgtaagcaaagttttagcgtgaaaggaagtctcctcagacaccagagaacacactcaggggagaagccttttgtgtgcaaggattgtgagcgaagctttagccaaaagtcaactcttgtctaccaccagagaacacactcaggggagaaaccttttgtttgtagagaatgtgggcaaggatttattcagaagtcaacccttgtgaaacatcagatcacacactcagaggagaagccttttgtgtgcaaggactgtggacgaggctttatccaaaagtcaaccttcactttacaccagaggacacactcagaggagaagccttatggatgtcgggagtgtgggcgaaggtttcgggataagtcctcctataacaagcacctgagggcacacttgggtgagaaacgttttttctgcagggattgtgggcgaggctttaccttgaagccaaatctcaccatacatcagaggacacactcaggagagaagcccttcatgtgcaagcagtgtgagaaaagttttagtttgaaggcaaatcttcttagacatcagtggacacactcgggggaaaggccatttaattgcaaggattgcgggcgaggcttcatcctaaaatcaactctcctcttccaccagaagacacactcaggggagaagcctttcatctgtagtgaatgtgggcaaggatttatctggaagtcaaatcttgtgaaacaccagcttgcacattctggcaagcagccttttgtatgcaaggagtgtgggcgaggcttcaactggaagggaaatctcctcacacaccagaggacacactcaggggagaagcccttcgtgtgtaatgtgtgtgggcaaggcttcagctggaagagaagtctcaccagacaccactggcggatacactcaaaggagaagccttttgtttgccaggagtgtaagcgaggctataccagtaagtcagacctcactgtgcatgaaagaatacacacaggagagaggccttatgaatgccaagagtgtggacgaaagtttagcaataagtcatactacagtaagcacttaaagagacacttacgtgagaagcgtttttgtacagggagtgtgggtgaggcttcatcttgaagttatatctcaccatccatcagaggacacactcaggagagtaactttgctttgttacaagctttagttgaggctgcataacttgttcgtgaagatataacagaggcagacagaatccagagggctacagagaacctgaattcaacccatgtgtccccaagagattcagagaaaagaggtcaatgtttagggaacagagatgccagttgaggggagggcattacctgggctattggggaaatgtggtctctttcctactgagcacatattcttgttgtatttgtgccaggctgtgctttctaaggactgctcttagccagtgactgcagagcagggataccaaggcaggcctgttacactctccccaacctccttggactgcaaacaatctaggacacctccaccaaacctcctcttgcactttccctctggcttccctcccagccttccttggtttggatgttttgtcccctccttaatttatgttgaaactctacataaactgtttactgttgaaacagtgtaagtattaggaggtgggacctttgggaagtgattaagtcaagtcacgaagatagagctttgcgaatgggatcaggtgcccttatgaaaaggcttgatagagggagtttgtcctgtggcccttctattttctgctctgtgaggacacaatgctcctcccttccaaaagatgcagcatgaaggcatcatcttggaaacagacatgagccctcaacagacaactgcacctactgatgttttgatgttgaacttcccagcctccagaactctgggaaaataaagtcctctttataca

SEQ ID NO: 348254 - DNA, 3038 bp, Homo sapiens
ggtcctcctgagccttccccctctgattctccctcccttcctgccctgggtggctccagcaaatggcccgtggagcctacaaccaggagtcacctcatggtttttttccctgtgagcaggaattctccattctaaaccagaactcatcaggcggctagagcaaggggaagtgccctggggagaagagagaagacgccggccaggcccctgtgcaggaatatatgcagaacatgtcctgcggcccaagaatcttggacttgcacatcagaggcaacagcaactacaattttctgatcaaagcttccagagtgacacagctgaaggtcaagagaaagaaaaaagcactaagcccatggcattttccagcccacccctaagacatgcagtaagctcaaggaggaggaacagtgtagtggaaatagagtctagtcaaggccagagggaaaatcctacagaaatagacaaagtattgaaaggaatagaaaattcaagatggggagcattcaagtgtgcagagcgtgggcaagacttcagccggaagatgatggtaatcatacacaaaaaagcacattccaggcagaaactttttacatgcagggagtgtcaccagggctttagagatgagtcagcattgctcttgcaccagaacacacacacaggagagaagtcctatgtgtgcagtgtgtgtgggcgaggcttcagcctcaaggccaacctcctcagacaccagaggacacactcaggagagaagccttttctgtgcaaggtgtgtggacgaggctataccagtaagtcatacctcactgtgcatgagagaacacacacaggagagaagccttatgaatgccaggagtgtgggcgaaggtttaacgataagtcctcatacaacaagcacttgaaggcgcattcaggggagaagccttttgtgtgcaaggagtgtgggcgaggctatactaataagtcatacttcgttgtgcacaagagaatacactcaggagagaagccttacagatgccaggagtgtggccgaggctttagcaataagtcacaccttatcacacaccagaggacacactcaggggagaagccctttgcgtgcaggcagtgtaagcaaagttttagcgtgaaaggaagtctcctcagacaccagagaacacactcaggggagaagccttttgtgtgcaaggattgtgagcgaagctttagccaaaagtcaactcttgtctaccaccagagaacacactcaggggagaaaccttttgtttgtagagaatgtgggcaaggatttattcagaagtcaacccttgtgaaacatcagatcacacactcagaggagaagccttttgtgtgcaaggactgtggacgaggctttatccaaaagtcaaccttcactttacaccagaggacacactcagaggagaagccttatggatgtcgggagtgtgggcgaaggtttcgggataagtcctcctataacaagcacctgagggcacacttgggtgagaaacgttttttctgcagggattgtgggcgaggctttaccttgaagccaaatctcaccatacatcagaggacacactcaggagagaagcccttcatgtgcaagcagtgtgagaaaagttttagtttgaaggcaaatcttcttagacatcagtggacacactcgggggaaaggccatttaattgcaaggattgcgggcgaggcttcatcctaaaatcaactctcctcttccaccagaagacacactcaggggagaagcctttcatctgtagtgaatgtgggcaaggatttatctggaagtcaaatcttgtgaaacaccagcttgcacattctggcaagcagccttttgtatgcaaggagtgtgggcgaggcttcaactggaagggaaatctcctcacacaccagaggacacactcaggggagaagcccttcgtgtgtaatgtgtgtgggcaaggcttcagctggaagagaagtctcaccagacaccactggcggatacactcaaaggagaagccttttgtttgccaggagtgtaagcgaggctataccagtaagtcagacctcactgtgcatgaaagaatacacacaggagagaggccttatgaatgccaagagtgtggacgaaagtttagcaataagtcatactacagtaagcacttaaagagacacttacgtgagaagcgtttttgtacagggagtgtgggtgaggcttcatcttgaagttatatctcaccatccatcagaggacacactcaggagagtaactttgctttgttacaagctttagttgaggctgcataacttgttcgtgaagatataacagaggcagacagaatccagagggctacagagaacctgaattcaacccatgtgtccccaagagattcagagaaaagaggtcaatgtttagggaacagagatgccagttgaggggagggcattacctgggctattggggaaatgtggtctctttcctactgagcacatattcttgttgtatttgtgccaggctgtgctttctaaggactgctcttagccagtgactgcagagcagggataccaaggcaggcctgttacactctccccaacctccttggactgcaaacaatctaggacacctccaccaaacctcctcttgcactttccctctggcttccctcccagccttccttggtttggatgttttgtcccctccttaatttatgttgaaactctacataaactgtttactgttgaaacagtgtaagtattaggaggtgggacctttgggaagtgattaagtcaagtcacgaagatagagctttgcgaatgggatcaggtgcccttatgaaaaggcttgatagagggagtttgtcctgtggcccttctattttctgctctgtgaggacacaatgctcctcccttccaaaagatgcagcatgaaggcatcatcttggaaacagacatgagccctcaacagacaactgcacctactgatgttttgatgttgaacttcccagcctccagaactctgggaaaataaagtcctctttataca

SEQ ID NO: 348255 - DNA, 3334 bp, Homo sapiens
actccccatgctattaatttgttaaaggctttggtgttgtacagtactgaataactgccaatgccatctgcctgtggccttctcaagtttgtctgcacctgtggttatcctgacttcaaacccggggagacagaggctagaagaggcagacagctcttgtgtattctcctgtccagtgcaaagaacacctggaactctgagccctaaccttaaatgcaagacctcatctgcaggtgttcctcatccttttagcccctcagtgatgtaagcaacaaacgtcacccagctcctggggcacacttcactcccagatgagcttgtcctggatttgcagggagcctggctccctagaccttttggccagatccccacaggggaattgtgcaggtgcgccctccccagatccccagttggtattggaatcacaccaactgtcacacatggggagggcagctgcacccagccaccctctgacttctctcctcccacagattggccatctgcaagcttcccttctccgtggagagcaggaagacagtcatgggacctcagggagccaggagacaggctttcttggcatttggggatgtcactgtggatttcacccagaaggaatggaggctgctgagccctgctcagagggccctgtacagggaggtgacactggagaactacagccacctggtctcactaggaattctccattctaaaccagaactcatcaggcggctagagcaaggggaagtgccctggggagaagagagaagacgccggccaggcccctgtgcaggaatatatgcagaacatgtcctgcggcccaagaatcttggacttgcacatcagaggcaacagcaactacaattttctgatcaaagcttccagagtgacacagctgaaggtcaagagaaagaaaaaagcactaagcccatggcattttccagcccacccctaagacatgcagtaagctcaaggaggaggaacagtgtagtggaaatagagtctagtcaaggccagagggaaaatcctacagaaatagacaaagtattgaaaggaatagaaaattcaagatggggagcattcaagtgtgcagagcgtgggcaagacttcagccggaagatgatggtaatcatacacaaaaaagcacattccaggcagaaactttttacatgcagggagtgtcaccagggctttagagatgagtcagcattgctcttgcaccagaacacacacacaggagagaagtcctatgtgtgcagtgtgtgtgggcgaggcttcagcctcaaggccaacctcctcagacaccagaggacacactcaggagagaagccttttctgtgcaaggtgtgtggacgaggctataccagtaagtcatacctcactgtgcatgagagaacacacacaggagagaagccttatgaatgccaggagtgtgggcgaaggtttaacgataagtcctcatacaacaagcacttgaaggcgcattcaggggagaagccttttgtgtgcaaggagtgtgggcgaggctatactaataagtcatacttcgttgtgcacaagagaatacactcaggagagaagccttacagatgccaggagtgtggccgaggctttagcaataagtcacaccttatcacacaccagaggacacactcaggggagaagccctttgcgtgcaggcagtgtaagcaaagttttagcgtgaaaggaagtctcctcagacaccagagaacacactcaggggagaagccttttgtgtgcaaggattgtgagcgaagctttagccaaaagtcaactcttgtctaccaccagagaacacactcaggggagaaaccttttgtttgtagagaatgtgggcaaggatttattcagaagtcaacccttgtgaaacatcagatcacacactcagaggagaagccttttgtgtgcaaggactgtggacgaggctttatccaaaagtcaaccttcactttacaccagaggacacactcagaggagaagccttatggatgtcgggagtgtgggcgaaggtttcgggataagtcctcctataacaagcacctgagggcacacttgggtgagaaacgttttttctgcagggattgtgggcgaggctttaccttgaagccaaatctcaccatacatcagaggacacactcaggagagaagcccttcatgtgcaagcagtgtgagaaaagttttagtttgaaggcaaatcttcttagacatcagtggacacactcgggggaaaggccatttaattgcaaggattgcgggcgaggcttcatcctaaaatcaactctcctcttccaccagaagacacactcaggggagaagcctttcatctgtagtgaatgtgggcaaggatttatctggaagtcaaatcttgtgaaacaccagcttgcacattctggcaagcagccttttgtatgcaaggagtgtgggcgaggcttcaactggaagggaaatctcctcacacaccagaggacacactcaggggagaagcccttcgtgtgtaatgtgtgtgggcaaggcttcagctggaagagaagtctcaccagacaccactggcggatacactcaaaggagaagccttttgtttgccaggagtgtaagcgaggctataccagtaagtcagacctcactgtgcatgaaagaatacacacaggagagaggccttatgaatgccaagagtgtggacgaaagtttagcaataagtcatactacagtaagcacttaaagagacacttacgtgagaagcgtttttgtacagggagtgtgggtgaggcttcatcttgaagttatatctcaccatccatcagaggacacactcaggagagtaactttgctttgttacaagctttagttgaggctgcataacttgttcgtgaagatataacagaggcagacagaatccagagggctacagagaacctgaattcaacccatgtgtccccaagagattcagagaaaagaggtcaatgtttagggaacagagatgccagttgaggggagggcattacctgggctattggggaaatgtggtctctttcctactgagcacatattcttgttgtatttgtgccaggctgtgctttctaaggactgctcttagccagtgactgcagagcagggataccaaggcaggcctgttacactctccccaacctccttggactgcaaacaatctaggacacctcccttccaaaagatgcagcatgaaggcatcatcttggaaacagacatgagccctcaacagacaactgcacctactgatgttttgatgttgaacttcccagcctccagaactctgggaaaataaagtcctctttataca

SEQ ID NO: 348256 - DNA, 2743 bp, Homo sapiens
tcgtaaccgttcgtacgagaatcgctgtcctctccttgcggccgccagtgtggtggaattccattttccagcccacccctaagacatgcagtaagctcaaggaggaggaacagtgtagtggaaatagagtctagtcaaggccagagggaaaatcctacagaaatagacaaagtattgaaaggaatagaaaattcaagatggggagcattcaagtgtgcagagcgtgggcaagacttcagccggaagatgatggtaatcatacacaaaaaagcacattccaggcagaaactttttacatgcagggagtgtcaccagggctttagagatgagtcagcattgctcttgcaccagaacacacacacaggagagaagtcctatgtgtgcagtgtgtgtgggcgaggcttcagcctcaaggccaacctcctcagacaccagaggacacactcaggagagaagccttttctgtgcaaggtgtgtggacgaggctataccagtaagtcatacctcactgtgcatgagagaacacacacaggagagaagccttatgaatgccaggagtgtgggcgaaggtttaacgataagtcctcatacaacaagcacttgaaggcgcattcaggggagaagccttttgtgtgcaaggagtgtgggcgaggctatactaataagtcatacttcgttgtgcacaagagaatacactcaggagagaagccttacagatgccaggagtgtggccgaggctttagcaataagtcacaccttatcacacaccagaggacacactcaggggagaagccctttgcgtgcaggcagtgtaagcaaagttttagcgtgaaaggaagtctcctcagacaccagagaacacactcaggggagaagccttttgtgtgcaaggattgtgagcgaagctttagccaaaagtcaactcttgtctaccaccagagaacacactcaggggagaaaccttttgtttgtagagaatgtgggcaaggatttattcagaagtcaacccttgtgaaacatcagatcacacactcagaggagaagccttttgtgtgcaaggactgtggacgaggctttatccaaaagtcaaccttcactttacaccagaggacacactcagaggagaagccttatggatgtcgggagtgtgggcgaaggtttcgggataagtcctcctataacaagcacctgagggcacacttgggtgagaaacgttttttctgcagggattgtgggcgaggctttaccttgaagccaaatctcaccatacatcagaggacacactcaggagagaagcccttcatgtgcaagcagtgtgagaaaagttttagtttgaaggcaaatcttcttagacatcagtggacacactcgggggaaaggccatttaattgcaaggattgcgggcgaggcttcatcctaaaatcaactctcctcttccaccagaagacacactcaggggagaagcctttcatctgtagtgaatgtgggcaaggatttatctggaagtcaaatcttgtgaaacaccagcttgcacattctggcaagcagccttttgtatgcaaggagtgtgggcgaggcttcaactggaagggaaatctcctcacacaccagaggacacactcaggggagaagcccttcgtgtgtaatgtgtgtgggcaaggcttcagctggaagagaagtctcaccagacaccactggcggatacactcaaaggagaagccttttgtttgccaggagtgtaagcgaggctataccagtaagtcagacctcactgtgcatgaaagaatacacacaggagagaggccttatgaatgccaagagtgtggacgaaagtttagcaataagtcatactacagtaagcacttaaagagacacttacgtgagaagcgtttttgtacagggagtgtgggtgaggcttcatcttgaagttatatctcaccatccatcagaggacacactcaggagagtaactttgctttgttacaagctttagttgaggctgcataacttgttcgtgaagatataacagaggcagacagaatccagagggctacagagaacctgaattcaacccatgtgtccccaagagattcagagaaaagaggtcaatgtttagggaacagagatgccagttgaggggagggcattacctgggctattggggaaatgtggtctctttcctactgagcacatattcttgttgtatttgtgccaggctgtgctttctaaggactgctcttagccagtgactgcagagcagggataccaaggcaggcctgttacactctccccaacctccttggactgcaaacaatctaggacacctccaccaaacctcctcttgcactttccctctggcttccctcccagccttccttggtttggatgttttgtcccctccttaatttatgttgaaactctacataaactgtttactgttgaaacagtgtaagtattaggaggtgggacctttgggaagtgattaagtcaagtcacgaagatagagctttgcgaatgggatcaggtgcccttatgaaaaggcttgatagagggagtttgtcctgtggcccttctattttctgctctgtgaggacacaatgctcctcccttccaaaagatgcagcatgaaggcatcatcttggaaacagacatgagccctcaacagacaactgcacctactgatgttttgatgttgaacttcccagcctccagaactctgggaaaataaagtcctctttataca

SEQ ID NO: 348257 - DNA, 3731 bp, Homo sapiens
actccccatgctattaatttgttaaaggctttggtgttgtacagtactgaataactgccaatgccatctgcctgtggccttctcaagtttgtctgcacctgtggttatcctgacttcaaacccggggagacagaggctagaagaggcagacagctcttgtgtattctcctgtccagtgcaaagaacacctggaactctgagccctaaccttaaatgcaagacctcatctgcaggtgttcctcatccttttagcccctcagtgatgtaagcaacaaacgtcacccagctcctggggcacacttcactcccagatgagcttgtcctggatttgcagggagcctggctccctagaccttttggccagatccccacaggggaattgtgcaggtgcgccctccccagatccccagttggtattggaatcacaccaactgtcacacatggggagggcagctgcacccagccaccctctgacttctctcctcccacagattggccatctgcaagcttcccttctccgtggagagcaggaagacagtcatgggacctcagggagccaggagacaggctttcttggcatttggggatgtcactgtggatttcacccagaaggaatggaggctgctgagccctgctcagagggccctgtacagggaggtgacactggagaactacagccacctggtctcactaggaattctccattctaaaccagaactcatcaggcggctagagcaaggggaagtgccctggggagaagagagaagacgccggccaggcccctgtgcaggaatatatgcagaacatgtcctgcggcccaagaatcttggacttgcacatcagaggcaacagcaactacaattttctgatcaaagcttccagagtgacacagctgaaggtcaagagaaagaaaaaagcactaagcccatggcattttccagcccacccctaagacatgcagtaagctcaaggaggaggaacagtgtagtggaaatagagtctagtcaaggccagagggaaaatcctacagaaatagacaaagtattgaaaggaatagaaaattcaagatggggagcattcaagtgtgcagagcgtgggcaagacttcagccggaagatgatggtaatcatacacaaaaaagcacattccaggcagaaactttttacatgcagggagtgtcaccagggctttagagatgagtcagcattgctcttgcaccagaacacacacacaggagagaagtcctatgtgtgcagtgtgtgtgggcgaggcttcagcctcaaggccaacctcctcagacaccagaggacacactcaggagagaagccttttctgtgcaaggtgtgtggacgaggctataccagtaagtcatacctcactgtgcatgagagaacacacacaggagagaagccttatgaatgccaggagtgtgggcgaaggtttaacgataagtcctcatacaacaagcacttgaaggcgcattcaggggagaagccttttgtgtgcaaggagtgtgggcgaggctatactaataagtcatacttcgttgtgcacaagagaatacactcaggagagaagccttacagatgccaggagtgtggccgaggctttagcaataagtcacaccttatcacacaccagaggacacactcaggggagaagccctttgcgtgcaggcagtgtaagcaaagttttagcgtgaaaggaagtctcctcagacaccagagaacacactcaggggagaagccttttgtgtgcaaggattgtgagcgaagctttagccaaaagtcaactcttgtctaccaccagagaacacactcaggggagaaaccttttgtttgtagagaatgtgggcaaggatttattcagaagtcaacccttgtgaaacatcagatcacacactcagaggagaagccttttgtgtgcaaggactgtggacgaggctttatccaaaagtcaaccttcactttacaccagaggacacactcagaggagaagccttatggatgtcgggagtgtgggcgaaggtttcgggataagtcctcctataacaagcacctgagggcacacttgggtgagaaacgttttttctgcagggattgtgggcgaggctttaccttgaagccaaatctcaccatacatcagaggacacactcaggagagaagcccttcatgtgcaagcagtgtgagaaaagttttagtttgaaggcaaatcttcttagacatcagtggacacactcgggggaaaggccatttaattgcaaggattgcgggcgaggcttcatcctaaaatcaactctcctcttccaccagaagacacactcaggggagaagcctttcatctgtagtgaatgtgggcaaggatttatctggaagtcaaatcttgtgaaacaccagcttgcacattctggcaagcagccttttgtatgcaaggagtgtgggcgaggcttcaactggaagggaaatctcctcacacaccagaggacacactcaggggagaagcccttcgtgtgtaatgtgtgtgggcaaggcttcagctggaagagaagtctcaccagacaccactggcggatacactcaaaggagaagccttttgtttgccaggagtgtaagcgaggctataccagtaagtcagacctcactgtgcatgaaagaatacacacaggagagaggccttatgaatgccaagagtgtggacgaaagtttagcaataagtcatactacagtaagcacttaaagagacacttacgtgagaagcgtttttgtacagggagtgtgggtgaggcttcatcttgaagttatatctcaccatccatcagaggacacactcaggagagtaactttgctttgttacaagctttagttgaggctgcataacttgttcgtgaagatataacagaggcagacagaatccagagggctacagagaacctgaattcaacccatgtgtccccaagagattcagagaaaagaggtcaatgtttagggaacagagatgccagttgaggggagggcattacctgggctattggggaaatgtggtctctttcctactgagcacatattcttgttgtatttgtgccaggctgtgctttctaaggactgctcttagccagtgactgcagagcagggataccaaggcaggcctgttacactctccccaacctccttggactgcaaacaatctaggacacctccaccaaacctcctcttgcactttccctctggcttccctcccagccttccttggtttggatgttttgtcccctccttaatttatgttgaaactctacataaactgtttactgttgaaacagtgtaagtattaggaggtgggacctttgggaagtgattaagtcaagtcacgaagatagagctttgcgaatgggatcaggtgcccttatgaaaaggcttgatagagggagtttgtcctgtggcccttctattttctgctctgtgaggacacaatgctcctcccttccaaaagatgcagcatgaaggcatcatcttggaaacagacatgagccctcaacagacaactgcacctactgatgttttgatgttgaacttcccagcctccagaactctgggaaaataaagtcctctttatacatttcctagtcagtggtattttattataacagctcaaatagactaagtaactgctcccctcatcattctctcacagtcatatctggaaataaaatctctgtatatgcaaaaaaaaaaaa

SEQ ID NO: 348258 - DNA, 791 bp, Homo sapiens
actccccatgctattaatttgttaaaggctttggtgttgtacagtactgaataactgccaatgccatctgcctgtggccttctcaagtttgtctgcacctgtggttatcctgacttcaaacccggggagacagaggctagaagaggcagacagctcttgtgtattctcctgtccagtgcaaagaacacctggaactctgagccctaaccttaaatgcaagacctcatctgcaggtgttcctcatccttttagcccctcagtgatgtaagcaacaaacgtcacccagctcctggggcacacttcactcccagatgagcttgtcctggatttgcagggagcctggctccctagaccttttggccagatccccacaggggaattgtgcaggtgcgccctccccagatccccagttggtattggaatcacaccaactgtcacacatggggagggcagctgcacccagccaccctctgacttctctcctcccacagattggccatctgcaagcttcccttctccgtggagagcaggaagacagtcatgggacctcagggagccaggagacaggctttcttggcatttggggatgtcactgtggatttcacccagaaggaatggaggctgctgagccctgctcagagggccctgtacagggaggtgacactggagaactacagccacctggtctcactaggtaagcgtggcttccctcgagcctaacatttggcctgtggtgcctctgatgttgccatagggttaggttcagagacaagaatgttgttttctctatt

SEQ ID NO: 348259 - DNA, 582 bp, Homo sapiens
  misc_feature (569)..(569): n is a, c, g, or t
tgagactaacagtgaaatggtaataattacctctggatattttggtttatttcagggtgtaccttctaatgaaatacttaacatattgtccagcattcctgaagctgaaaaatttgctaaattctggatctgcaaagcaaagttgttggcaagtaaaggcacctttgatgttattgggctatatgaagaggccattaaaaatggggcaacagtgagtatctgtcttgggtgggtaacttcttaaaattctctttcatgtgagttctctgttgttgtttgtaatatgatggttagaagtttgcaacatcaatatccaacacttataaagtcataccttaccataaagaacttaaaaataaaacacctcatattcctaaaatcaggaatgaaagtgaggcttttaccatacagaaattgaacagtatcttaagggaataacatgaacaaatgtgtgtaccattacttgtatgctcataggaagtctagacaaatggacaagctcctagaaagatacaaacaattgaacttgactcaagaagcagcagtaaccttagctatggagagacggnggatccgctagag

SEQ ID NO: 348260 - DNA, 3217 bp, Homo sapiens
tgaagaaaaactgtcactgaagagtcatggtggggcccgggcctaccgctgctgccgctgtcgaagagcggcagagaaagcttcaggagtaccttgcagccaagggaaaactgaagagccaaaacaccaagccttatctaaaatccaagaataattgccagaatcaaccaccttctaaatctactattagacccaaaaatgatgttaccaaccatgttgttttgcctgtcaaacctaaaaggtccatcagcattaaactccagcccagaccacctaatactgcagggtcccagaagccgaagttggagccaccaaaacttctgggcaaaaggctgacttcagaatgtgtttcttctaacccatactctaagccttctagcaagagttttcaacagtgtgaagctggatcgtccacaacaggagaactgtcaagaaaacctgtggggtcacttaatatagagcaattgaaaactacaaagcagcagttaacagatcaaggaaatggtaaatgtatagactttatgaataatatccatgttgaaaacgaatctttggataactttctaaaagaaacaaacaaagagaacttgctcgatatcttaacagaacctgagaggaagccagatcctaaattatataccagaagtaagccaaagactgactcttataatcaaaccaagaacagtttagttcctaaacaagccttgggcaaaagttcagttaatagtgctgttctgaaagatagggttaataaacaatttgttggagaaacacaaagcaggactttcccagtgaaatcacagcaactctctagtggagcagatcttgcaagaccaggagtaaaaccctcaaggacggttccctctcactttattcggacccttagtaaagttcagtcatcaaagaaaccagtagtcaagaacatcaaagatataaaggttaataggagtcaatatgaaagaccaaatgaaactaagatacggtcataccctgttactgaacagagagtgaagcacaccaaacccagaacataccccagtttgcttcagggtgaatataacaacagacatccaaacatcaagcaagatcagaagtccagccaagtttgtatacctcagacatcatgtgtactgcaaaagtcaaaagccataagccagaggcctaatttgacagttggcagatttaattcagccattccaagcacccctagcataagaccaaatggaaccagtggtaataaacataacaataatggctttcagcaaaaagcacagactttggactccaagttgaaaaaggctgttccccagaaccattttctgaacaagacagctcccaaaactcaagctgatgtcacaaccgtaaatgggacccaaacaaacccaaatattaaaaagaaggcaacagcagaggatcgaaggaaacaactagaagaatggcagaaatctaagggaaaaacctataaacggcctcctatggaacttaaaacaaaaagaaaagtaataaaggaaatgaatatttcattctggaagagcattgaaaaagaagaggaagaaaagaaagcacaactcgaactgtccagtaaaattaacaacactctgacagaatgtctgaacctcatcgaagggggtgtaccttctaatgaaatacttaacatattgtccagcattcctgaagctgaaaaatttgctaaattctggatctgcaaagcaaagttgttggcaagtaaaggcacctttgatgttattgggctatatgaagaggccattaaaaatggggcaacaccaatacaagagttgcggaaagttgttcttaatatcttgcaagactcaaacagaaccacagaagggattacttctgactcttcagttgctgaaactagtataacatcagtggaagagctggccaagaagatggaatctgtgaagtcttgtctttctccaaaagagagggaacaagtcacggcgacaccccgaatagccaaggcagaacagcataattatcctggtatcaaattacagattggtccaatccctagaataaatgggatgccggaagtgcaagacatgaaatttatcactcctgtacggcgttcgtcgaggattgagcgagcagtgtcccgctacccagaaatgctgcaggaacacgatttagtagtggcttctcttgatgaactgttagaagtggaagaaacaaaatgttttatattccgtagaaatgaggcgctgcctgtaacattggggtttcaaacccctgaatcataatttcttgatgctttttttaaaaaaggtgtttcagaaccaacataagacaagaaatattcttgtccaagtgacctggaaaaaaagagaggcatcatggatgcagattatggacgctcaggacttaagtaattcactgggcttactctcaaattttctctccccatgggaaaatctttgctttatgtgtttaagaccagtttgccagttttacagtatacataaatttcaaacttttgaatatttaccctacaactatgataaatatttatactttattgatctactttaatcccaacatagttttttatatcagaaggttggtcccacaatataatgggacttttctttctgcatccaccttagcagagggcaagttctttcatcgtggaagatctgaactttgacgctagcttgacaggctgaatggaccttgacagatggccaagtcaaaacccctcattttacagatgagtttatgctagctgtgcctttgctcagagatcataaatttatgtgtgatctttgactttcatcacagtatccttgtaaatgagagagaattcttgttttttctatgccaggtctcctcagatgaaacacaatcctgaattggcgtggtcgtctagcttttatattcaaacctagttttgcatttgttactcagaaacacttcaagtaacaaaaggggggcaggggagaggggtggggagtggacacttgcttcttcagttctttgctcagctagggtatagctggcctgagaaggcagtgcaagccccagagactgttgtaggttgctttttcttcctcctgggcaactatttgtggaaaggttttaccttagtcattatgtaaatataattgtgtagaaaaacctagtcaacacattttaaattttagctttcttaatatttaagtattatcttaaaacaacattaaatttctattagttc

SEQ ID NO: 348261 - DNA, 1978 bp, Homo sapiens
tgaagaaaaactgtcactgaagagtcatggtggggcccgggcctaccgctgctgccgctgtcgaagagcggcagagaaagcttcaggagtaccttgcagccaagggaaaactgaagagccaaaacaccaagccttatctaaaatccaagaataattgccagaatcaaccaccttctaaatctactattagacccaaaaatgatgttaccaaccatgttgttttgcctgtcaaacctaaaaggtccatcagcattaaactccagcccagaccacctaatactgcagggtcccagaagccgaagttggagccaccaaaacttctgggcaaaaggctgacttcagaatgtgtttcttctaacccatactctaagccttctagcaagagttttcaacagtgtgaagctggatcgtccacaacaggagaactgtcaagaaaacctgtggggtcacttaatatagagcaattgaaaactacaaagcagcagttaacagatcaaggaaatggtaaatgtatagactttatgaataatatccatgttgaaaacgaatctttggataactttctaaaagaaacaaacaaagagaacttgctcgatatcttaacagaacctgagaggaagccagatcctaaattatataccagaagtaagccaaagactgactcttataatcaaaccaagaacagtttagttcctaaacaagccttgggcaaaagttcagttaatagtgctgttctgaaagatagggttaataaacaatttgttggagaaacacaaagcaggactttcccagtgaaatcacagcaactctctagtggagcagatcttgcaagaccaggagtaaaaccctcaaggacggttccctctcactttattcggacccttagtaaagttcagtcatcaaagaaaccagtagtcaagaacatcaaagatataaaggttaataggagtcaatatgaaagaccaaatgaaactaagatacggtcataccctgttactgaacagagagtgaagcacaccaaacccagaacataccccagtttgcttcagggtgaatataacaacagacatccaaacatcaagcaagatcagaagtccagccaagtttgtatacctcagacatcatgtgtactgcaaaagtcaaaagccataagccagaggcctaatttgacagttggcagatttaattcagccattccaagcacccctagcataagaccaaatggaaccagtggtaataaacataacaataatggctttcagcaaaaagcacagactttggactccaagttgaaaaaggctgttccccagaaccattttctgaacaagacagctcccaaaactcaagctgatgtcacaaccgtaaatgggacccaaacaaacccaaatattaaaaagaaggcaacagcagaggatcgaaggaaacaactagaagaatggcagaaatctaagggaaaaacctataaacggcctcctatggaacttaaaacaaaaagaaaagtaataaaggaaatgaatatttcattctggaagagcattgaaaaagaagaggaagaaaagaaagcacaactcgaactgtccagtaaaattaacaacactctgacagaatgtctgaacctcatcgaagggggtgtaccttctaatgaaatacttaacatattgtccagcattcctgaagctgaaaaatttgctaaattctggatctgcaaagcaaagttgttggcaagtaaaggcacctttgatgttattgggctatatgaagaggccattaaaaatggggcaacaccaatacaagagttgcggaaagttgttcttaatatcttgcaagactcaaacagaaccacagaagggattacttctgactcttcagttgctgaaactagtataacatcaaaggtgcctttactcgccaacaactttgctttgcagatccagagtttagcaaatatttcagcttcaggcagttctctctccctgta

SEQ ID NO: 348262 - DNA, 322 bp, Homo sapiens
gaatcttggtgtctgccttctcgtgggtgggcgcaacccaatgctgccattacccatttgtaaattgttttttaattccattctcctgattttgtctgtagttgaaagtatttaattatactctatctatacatatcatatactttagcagcttgactatgtttaaaaataaataaaaccactctccctttaattgaatttcaggaaacaactagaagaatggcagaaatctaagggaaaaacctataaacggcctcctatggaacttaaaacaaaaagaaaagtaataaaggaaatgaatatttcattctggaagagcatt

SEQ ID NO: 348263 - DNA, 382 bp, Homo sapiens
tttaaatgataaggtttttaatgcatctcttgctgtctctcagaataaatgggatgccggaagtgcaagacatgaaatttatcactcctgtacggcgttcgtcgaggattgagcgagcagtgtcccgctacccagaaatgctgcaggaacacgatttagtagtggcttctcttgatgaactgttagaagtggaagaaacaaaatgttttatattccgtagaaatgaggcgctgcctgtaacattggggtttcaaacccctgaatcataatttcttgatgctttttttaaaaaaggtgtttcagaaccaacataagacaagaaatattcttgtccaagtgacctggaaaaaaagagaggcatcatggatgcagattatggacg

SEQ ID NO: 348264 - DNA, 2123 bp, Homo sapiens
tgaagaaaaactgtcactgaagagtcatggtggggcccgggcctaccgctgctgccgctgtcgaagagcggcagagaaagcttcaggagtaccttgcagccaagggaaaactgaagagccaaaacaccaagccttatctaaaatccaagaataattgccagaatcaaccaccttctaaatctactattagacccaaaaatgatgttaccaaccatgttgttttgcctgtcaaacctaaaaggtccatcagcattaaactccagcccagaccacctaatactgcagggtcccagaagccgaagttggagccaccaaaacttctgggcaaaaggctgacttcagaatgtgtttcttctaacccatactctaagccttctagcaagagttttcaacagtgtgaagctggatcgtccacaacaggagaactgtcaagaaaacctgtggggtcacttaatatagagcaattgaaaactacaaagcagcagttaacagatcaaggaaatggtaaatgtatagactttatgaataatatccatgttgaaaacgaatctttggataactttctaaaagaaacaaacaaagagaacttgctcgatatcttaacagaacctgagaggaagccagatcctaaattatataccagaagtaagccaaagactgactcttataatcaaaccaagaacagtttagttcctaaacaagccttgggcaaaagttcagttaatagtgctgttctgaaagatagggttaataaacaatttgttggagaaacacaaagcaggactttcccagtgaaatcacagcaactctctagtggagcagatcttgcaagaccaggagtaaaaccctcaaggacggttccctctcactttattcggacccttagtaaagttcagtcatcaaagaaaccagtagtcaagaacatcaaagatataaaggttaataggagtcaatatgaaagaccaaatgaaactaagatacggtcataccctgttactgaacagagagtgaagcacaccaaacccagaacataccccagtttgcttcagggtgaatataacaacagacatccaaacatcaagcaagatcagaagtccagccaagtttgtatacctcagacatcatgtgtactgcaaaagtcaaaagccataagccagaggcctaatttgacagttggcagatttaattcagccattccaagcacccctagcataagaccaaatggaaccagtggtaataaacataacaataatggctttcagcaaaaagcacagactttggactccaagttgaaaaaggctgttccccagaaccattttctgaacaagacagctcccaaaactcaagctgatgtcacaaccgtaaatgggacccaaacaaacccaaatattaaaaagaaggcaacagcagaggatcgaaggaaacaactagaagaatggcagaaatctaagggaaaaacctataaacggcctcctatggaacttaaaacaaaaagaaaagtaataaaggaaatgaatatttcattctggaagagcattgaaaaagaagaggaagaaaagaaagcacaactcgaactgtccagtaaaattaacaacactctgacagaatgtctgaacctcatcgaagggggtgtaccttctaatgaaatacttaacatattgtccagcattcctgaagctgaaaaatttgctaaattctggatctgcaaagcaaagttgttggcaagtaaaggcacctttgatgttattgggctatatgaagaggccattaaaaatggggcaacaccaatacaagagttgcggaaagttgttcttaatatcttgcaagactcaaacagaaccacagaaggtactattatttttgaatttaaattcatcttctctagctgtaccagtaaaaatcatccaggacatataggaaaaagaagaaaagaatcatcccctgaaatgcttctcacttcttggtttccatgacctggccctttcagccattgtcatcagctgacttatttgtattattacaagtaaatgcactactcaatactgaacaaaggttgtttccaccaaaacagcctagactggagtgtcccacttccttggaatcctagatggcagaagacaaac

SEQ ID NO: 348265 - DNA, 1850 bp, Homo sapiens
tataatattatatgaacaacagataggagagttcttttacaaccagaaaggacttagagaagtccttgtgttcctggacagccactgtgaagtgaatgtgatgtggctgcagcccttgctggccgccatccgtgaggaccggcacaccgtggtgtgcccagtgattgacatcatcagcgccgacacgctggcctacagctcgtcccctgtcgtccgcggagggttcaactggggactgcacttcaaatgggatcttgtccccctttctgagctaggacgagcggagggagccactgcaccaataaagtcaccaacaatggctggaggtttgtttgccatgaacagacagtatttccatgaacttggacagtatgatagtggcatggatatctggggaggagaaaatttggaaatatcatttcggatctggatgtgtggcggtaagctcttcatcatcccttgctctagagtaggacacattttccgaaaaaggcgaccatatggatctcccgaaggccaggacaccatgacacacaactctttgcggctggcacatgtctggttggatgaatacaaggagcagtatttttccttaagacctgacctgaagacgaaaagctatggcaatatcagtgagcgtgtggaactgagaaagaagttgggctgtaaatcatttaaatggtatttggataatgtatacccagagatgcagatatctgggtcccacgccaaaccccaacaacccatttttgtcaatagagggccaaaacgacccaaagtccttcaacgtggaaggctctatcacctccagaccaacaaatgcctggtggcccagggccgcccaagtcagaagggaggtctcgtggtgcttaaggcctgtgactacagtgacccaaatcagatctggatctataatgaagagcatgaattggttttaaatagtctcctttgtctagatatgtcagagactcgctcatcagacccgccacggctcatgaaatgccacgggtcaggaggatcccagcagtggacctttgggaaaaacaatcggctataccaggtgtcggttggacagtgcctgagagcagtggatcccctgggtcagaagggctctgtcgccatggcgatctgcgatggctcctcttcacagcagtggcatttggaaggttaaggtggatgctgtggcgggaacgttgcttcatcaggcgttgcctccggtgtggagtttggggctttaggaaagcctgggttgggtggagcagaaccatcttggagaagatgacagttccctgtcctcccggagatgcctgggtgtgttagcagaggtgacacgtgtctgacagagacgggagctctgagtgtccacgggtgaagaagtgagtgtccacgggtgaagaagtgagtatgtttcacctggacattaaggtgatgtttgagctgctgttaaggaatttcttgcttatagaggcaaaccacagtatcattttaactctagaattgggcttgtacagaaggataaaacccaggaaaatggatatttctattcagatttatttatgcctctttttaatcccctttaatgatgcagtggtttttatctgatcaggaacttgtcatgatttcctttcttagacttcataggagatagtgctttaaaaaaaaaaaaaacttctattatttgtttagtatgttgtaagtagatcattttaaaaaactgaatctatattatgtttaacttcagaaggcatcatttataagacagtatggcagttaattataaaattattttgatgaattatgatacaatctacataataaagaatccttttgattatttaggatattttgtc

SEQ ID NO: 348266 - DNA, 1557 bp, Homo sapiens
ggtttggcaagagaccaacctcagctcagactttccatctgagcacagccgtttggctatgagctttttactgaattttatagcaactctgatttcttcctttaaatgattggaggctttttaaagatcttatggggctcaaatactaacttcataaatggccttttgaataacagcagcaaataatctctcagctgatatttcaatttactaaggaagcacaaattaaaacattcctgctacacagtcatgggctggcacatgtctggttggatgaatacaaggagcagtatttttccttaagacctgacctgaagacgaaaagctatggcaatatcagtgagcgtgtggaactgagaaagaagttgggctgtaaatcatttaaatggtatttggataatgtatacccagagatgcagatatctgggtcccacgccaaaccccaacaacccatttttgtcaatagagggccaaaacgacccaaagtccttcaacgtggaaggctctatcacctccagaccaacaaatgcctggtggcccagggccgcccaagtcagaagggaggtctcgtggtgcttaaggcctgtgactacagtgacccaaatcagatctggatctataatgaagagcatgaattggttttaaatagtctcctttgtctagatatgtcagagactcgctcatcagacccgccacggctcatgaaatgccacgggtcaggaggatcccagcagtggacctttgggaaaaacaatcggctataccaggtgtcggttggacagtgcctgagagcagtggatcccctgggtcagaagggctctgtcgccatggcgatctgcgatggctcctcttcacagcagtggcatttggaaggttaaggtggatgctgtggcgggaacgttgcttcatcaggcgttgcctccggtgtggagtttggggctttaggaaagcctgggttgggtggagcagaaccatcttggagaagatgacagttccctgtcctcccggagatgcctgggtgtgttagcagaggtgacacgtgtctgacagagacgggagctctgagtgtccacgggtgaagaagtgagtgtccacgggtgaagaagtgagtatgtttcacctggacattaaggtgatgtttgagctgctgttaaggaatttcttgcttatagaggcaaaccacagtatcattttaactctagaattgggcttgtacagaaggataaaacccaggaaaatggatatttctattcagatttatttatgcctctttttaatcccctttaatgatgcagtggtttttatctgatcaggaacttgtcatgatttcctttcttagacttcataggagatagtgctttaaaaaaaaaaaaaacttctattatttgtttagtatgttgtaagtagatcattttaaaaaactgaatctatattatgtttaacttcagaaggcatcatttataagacagtatggcagttaattataaaattattttgatgaattatgatacaatctacataataaagaatccttttgattatttaggatattttgtc

SEQ ID NO: 348267 - DNA, 1270 bp, Homo sapiens
agcgcctgcgcgacgcctggctgctgggccccggggcagttcagcccgcgccgctcctgcgggtcggactggggctgtggcgggagagaagatgccgcagcccgagtcccagaaggcggcgatcctgggctgcgggcaaggcggaaattgacaatggcccttcagctatgctaggtctataatgggaagtgtcacagttcggtatttctgttatgggtgcctttttacatctgcgacctggacagttttgctttttgtttatttcaacttcagtgaagtgactcagccattaaggcctgtgactacagtgacccaaatcagatctggatctataatgaagagcatgaattggttttaaatagtctcctttgtctagatatgtcagagactcgctcatcagacccgccacggctcatgaaatgccacgggtcaggaggatcccagcagtggacctttgggaaaaacaatcggctataccaggtgtcggttggacagtgcctgagagcagtggatcccctgggtcagaagggctctgtcgccatggcgatctgcgatggctcctcttcacagcagtggcatttggaaggttaaggtggatgctgtggcgggaacgttgcttcatcaggcgttgcctccggtgtggagtttggggctttaggaaagcctgggttgggtggagcagaaccatcttggagaagatgacagttccctgtcctcccggagatgcctgggtgtgttagcagaggtgacacgtgtctgacagagacgggagctctgagtgtccacgggtgaagaagtgagtgtccacgggtgaagaagtgagtatgtttcacctggacattaaggtgatgtttgagctgctgttaaggaatttcttgcttatagaggcaaaccacagtatcattttaactctagaattgggcttgtacagaaggataaaacccaggaaaatggatatttctattcagatttatttatgcctctttttaatcccctttaatgatgcagtggtttttatctgatcaggaacttgtcatgatttcctttcttagacttcataggagatagtgctttaaaaaaaaaaaaaacttctattatttgtttagtatgttgtaagtagatcattttaaaaaactgaatctatattatgtttaacttcagaaggcatcatttataagacagtatggcagttaattataaaattattttgatgaattatgatacaatctacataataaagaatccttttgattatttaggatattttgtc

SEQ ID NO: 348268 - DNA, 920 bp, Homo sapiens
agcgcctgcgcgacgcctggctgctgggccccggggcagttcagcccgcgccgctcctgcgggtcggactggggctgtggcgggagagaagatgccgcagcccgagtcccagaaggcggcgatcctgggctgcgggcaaggcggaaattgacaatggcccttcagctatgctaggtctataatgggaagtgtcacagttcggtatttctgttatgggtgcctttttacatctgcgacctggacagttttgctttttgtttatttcaacttcagtgaagtgactcagccacttaagaatgtgcccgtcaaggggtctgggccccacggaccatctccaaaaaaattctatccccgtttcactcgaggcccaagtcgagtgctcgagccacagttcaaagcaaacaaaattgacgatgtgatagacagtcgtgttgaagatccagaagaaggccacttgaaattctcttctgaattaggtaagtatatgatgtttaccagcatccatatcaatgtatttaatcactggaagtttgattaattagttaattaggagatcagaaatgctgcatcattttttccccactgatttattttgtttgtgaactacctgaagttctgtggtttctgcagactcagtggggagttatattctaatttatccagttctgacttcagtatcttatgagaaaacaaacaaggtccagggaagaaaaattaaaaggctagaaagaaaatggaacctatgggagaaggggtttgttttttgtttgtttttttaagagatggggtctcaccatattgcccaggctgtccccgaattcttgggctcaagctgccctcccacctcaaccttgagagtagctgggactataggcatgcaccactgtgcccagccctggaagaaggttttaattgctaga

SEQ ID NO: 348269 - DNA, 332 bp, Homo sapiens
gaaaagaactttcgagacttagaaaagtagccttcgtatgccagatactagcatattattagcaatctagaaaattcagttgtatggcctggctcattctctgatactggataaaatgattcataatcattaattcaatttttattagttatgttccaaaatgacactgagtattttaaacaaaagtagtaggtaagataactgactataaggaatgagtacagtaattttcctttttctaggtcaccaacaatggctggaggtttgtttgccatgaacagacagtatttccatgaacttggacagtatgatagtggcatggatatctgggg

SEQ ID NO: 348270 - DNA, 146 bp, Homo sapiens
caccaacaatggctggaggtttgtttgccatgaacagacagtatttccatgaacttggacagtatgatagtggcatggatatctggggaggagaaaatttggaaatatcatttcgggtaatttaatttttgcatgctcaattaata

SEQ ID NO: 348271 - DNA, 2626 bp, Homo sapiens
agcgcctgcgcgacgcctggctgctgggccccggggcagttcagcccgcgccgctcctgcgggtcggactggggctgtggcggaaattgacaatggcccttcagctatgctaggtctataatgggaagtgtcacagttcggtatttctgttatgggtgcctttttacatctgcgacctggacagttttgctttttgtttatttcaacttcagtgaagtgactcagccacttaagaatgtgcccgtcaaggggtctgggccccacggaccatctccaaaaaaattctatccccgtttcactcgaggcccaagtcgagtgctcgagccacagttcaaagcaaacaaaattgacgatgtgatagacagtcgtgttgaagatccagaagaaggccacttgaaattctcttctgaattaggtatgatttttaatgaacgcgatcaagagttgagagacttgggctatcagaaacatgcttttaatatgcttatcagtgaccgcttgggctaccacagagatgtgccagacacaaggaatgcagcatgtaaagaaaagttctacccacctgacctgccagctgctagtgttgttatctgtttctataatgaagcgttttctgccttgcttcggacagtgcacagtgtcatagaccgcacgccagcacacctgcttcatgagatcatccttgtggatgatgatagtgactttgatgatttgaaaggagaactagatgaatatgtccaaaaatacctccctggaaaaattaaagtcataagaaatacaaagcgtgaggggttgattcgagggagaatgattggcgcggcccacgcgacaggagaagtccttgtgttcctggacagccactgtgaagtgaatgtgatgtggctgcagcccttgctggccgccatccgtgaggaccggcacaccgtggtgtgcccagtgattgacatcatcagcgccgacacgctggcctacagctcgtcccctgtcgtccgcggagggttcaactggggactgcacttcaaatgggatcttgtccccctttctgagctaggacgagcggagggagccactgcaccaataaagtcaccaacaatggctggaggtttgtttgccatgaacagacagtatttccatgaacttggacagtatgatagtggcatggatatctggggaggagaaaatttggaaatatcatttcggatctggatgtgtggcggtaagctcttcatcatcccttgctctagagtaggacacattttccgaaaaaggcgaccatatggatctcccgaaggccaggacaccatgacacacaactctttgcggctggcacatgtctggttggatgaatacaaggagcagtatttttccttaagacctgacctgaagacgaaaagctatggcaatatcagtgagcgtgtggaactgagaaagaagttgggctgtaaatcatttaaatggtatttggataatgtatacccagagatgcagatatctgggtcccacgccaaaccccaacaacccatttttgtcaatagagggccaaaacgacccaaagtccttcaacgtggaaggctctatcacctccagaccaacaaatgcctggtggcccagggccgcccaagtcagaagggaggtctcgtggtgcttaaggcctgtgactacagtgacccaaatcagatctggatctataatgaagagcatgaattggttttaaatagtctcctttgtctagatatgtcagagactcgctcatcagacccgccacggctcatgaaatgccacgggtcaggaggatcccagcagtggacctttgggaaaaacaatcggctataccaggtgtcggttggacagtgcctgagagcagtggatcccctgggtcagaagggctctgtcgccatggcgatctgcgatggctcctcttcacagcagtggcatttggaaggttaaggtggatgctgtggcgggaacgttgcttcatcaggcgttgcctccggtgtggagtttggggctttaggaaagcctgggttgggtggagcagaaccatcttggagaagatgacagttccctgtcctcccggagatgcctgggtgtgttagcagaggtgacacgtgtctgacagagacgggagctctgagtgtccacgggtgaagaagtgagtgtccacgggtgaagaagtgagtatgtttcacctggacattaaggtgatgtttgagctgctgttaaggaatttcttgcttatagaggcaaaccacagtatcattttaactctagaattgggcttgtacagaaggataaaacccaggaaaatggatatttctattcagatttatttatgcctctttttaatcccctttaatgatgcagtggtttttatctgatcaggaacttgtcatgatttcctttcttagacttcataggagatagtgctttaaaaaaaaaaaaaacttctattatttgtttagtatgttgtaagtagatcattttaaaaaactgaatctatattatgtttaacttcagaaggcatcatttataagacagtatggcagttaattataaaattattttgatgaattatgatacaatctacataataaagaatccttttgattatttaggatattttgtc

SEQ ID NO: 348272 - DNA, 1684 bp, Homo sapiens
acgttctgtaccctaacaaccttccgtcacttccttccctagctcagaaagggggacaagatcccatttgaagtgcagtccccagttgaaccctccgcggacgacaggggacgagcggagggagccactgcaccaataaagtcaccaacaatggctggaggtttgtttgccatgaacagacagtatttccatgaacttggacagtatgatagtggcatggatatctggggaggagaaaatttggaaatatcatttcggatctggatgtgtggcggtaagctcttcatcatcccttgctctagagtaggacacattttccgaaaaaggcgaccatatggatctcccgaaggccaggacaccatgacacacaactctttgcggctggcacatgtctggttggatgaatacaaggagcagtatttttccttaagacctgacctgaagacgaaaagctatggcaatatcagtgagcgtgtggaactgagaaagaagttgggctgtaaatcatttaaatggtatttggataatgtatacccagagatgcagatatctgggtcccacgccaaaccccaacaacccatttttgtcaatagagggccaaaacgacccaaagtccttcaacgtggaaggctctatcacctccagaccaacaaatgcctggtggcccagggccgcccaagtcagaagggaggtctcgtggtgcttaaggcctgtgactacagtgacccaaatcagatctggatctataatgaagagcatgaattggttttaaatagtctcctttgtctagatatgtcagagactcgctcatcagacccgccacggctcatgaaatgccacgggtcaggaggatcccagcagtggacctttgggaaaaacaatcggctataccaggtgtcggttggacagtgcctgagagcagtggatcccctgggtcagaagggctctgtcgccatggcgatctgcgatggctcctcttcacagcagtggcatttggaaggttaaggtggatgctgtggcgggaacgttgcttcatcaggcgttgcctccggtgtggagtttggggctttaggaaagcctgggttgggtggagcagaaccatcttggagaagatgacagttccctgtcctcccggagatgcctgggtgtgttagcagaggtgacacgtgtctgacagagacgggagctctgagtgtccacgggtgaagaagtgagtgtccacgggtgaagaagtgagtatgtttcacctggacattaaggtgatgtttgagctgctgttaaggaatttcttgcttatagaggcaaaccacagtatcattttaactctagaattgggcttgtacagaaggataaaacccaggaaaatggatatttctattcagatttatttatgcctctttttaatcccctttaatgatgcagtggtttttatctgatcaggaacttgtcatgatttcctttcttagacttcataggagatagtgctttaaaaaaaaaaaaaacttctattatttgtttagtatgttgtaagtagatcattttaaaaaactgaatctatattatgtttaacttcagaaggcatcatttataagacagtatggcagttaattataaaattattttgatgaattatgatacaatctacataataaagaatccttttgattatttaggatattttgtc

SEQ ID NO: 348273 - DNA, 1973 bp, Homo sapiens
agcgcctgcgcgacgcctggctgctgggccccggggcagttcagcccgcgccgctcctgcgggtcggactggggctgtggcgggagagaagatgccgcagcccgagtcccagaaggcggcgatcctgggctgcgggcaaggcggaaattgacaatggcccttcagctatgctaggtctataatgggaagtgtcacagttcggtatttctgttatgggtgcctttttacatctgcgacctggacagttttgctttttgtttatttcaacttcagtgaagtgactcagccacttaagaatgtgcccgtcaaggggtctgggccccacggaccatctccaaaaaaattctatccccgtttcactcgaggcccaagtcgagtgctcgagccacagttcaaagcaaacaaaattgacgatgtgatagacagtcgtgttgaagatccagaagaaggccacttgaaattctcttctgaattaggtatgatttttaatgaacgcgatcaagagttgagagacttgggctatcagaaacatgcttttaatatgcttatcagtgaccgcttgggctaccacagagatgtgccagacacaaggaatgcagcatgtaaagaaaagttctacccacctgacctgccagctgctagtgttgttatctgtttctataatgaagcgttttctgccttgcttcggacagtgcacagtgtcatagaccgcacgccagcacacctgcttcatgagatcatccttgtggatgatgatagtgactttgatgatttgaaaggagaactagatgaatatgtccaaaaatacctccctggaaaaattaaagtcataagaaatacaaagcgtgaggggttgattcgagggagaatgattggcgcggcccacgcgacaggagaagtccttgtgttcctggacagccactgtgaagtgaatgtgatgtggctgcagcccttgctggccgccatccgtgaggaccggcacaccgtggtgtgcccagtgattgacatcatcagcgccgacacgctggcctacagctcgtcccctgtcgtccgcggagggttcaactggggactgcacttcaaatgggatcttgtccccctttctgagctaggacgagcggagggagccactgcaccaataaagtcaccaacaatggctggaggtttgtttgccatgaacagacagtatttccatgaacttggacagtatgatagtggcatggatatctggggaggagaaaatttggaaatatcatttcggatctggatgtgtggcggtaagctcttcatcatcccttgctctagagtaggacacattttccgaaaaaggcgaccatatggatctcccgaaggccaggacaccatgacacacaactctttgcggctggcacatgtctggttggatgaatacaaggagcagtatttttccttaagacctgacctgaagacgaaaagctatggcaatatcagtgagcgtgtggaactgagaaagaagttgggctgtaaatcatttaaatggtatttggataatgtatacccagagatgcagatatctgggtcccacgccaaaccccaacaacccatttttgtcaatagagggccaaaacgacccaaagtccttcaacgtggaaggctctatcacctccagaccaacaaatgcctggtggcccagggccgcccaagtcagaagggaggtctcgtggtgcttaaggcctgtgactacagtgacccaaatcagatctggatctataatgaagagcatgaattggttttaaatagtctcctttgtctagatatgtgtggcctcatgagcagtttcataggcttgatgaaagtgaaagccaaactgacctgaataaagagtgaaaggaaaatgagcaaaaggagatagtcaatgtggaaaatccttgagaaaaatttgccaagaaaggaggagatggcttgatagctagtgcggtggcctcatgaggcca

SEQ ID NO: 348274 - DNA, 377 bp, Homo sapiens
tttttcattgcagaggtggtgtggagctggcagctgctgtgggagcttctggagtcaatgggtggctgctgcaccctgcagctccctcaccattgcaggatggagctctcttggtgacctggtttccctatggctttgagcgtttttcttgtgtgttcatcctggaatttgtttctttactgatatggtttggctgtgtccccacctaaatctcatcttgaattcccatgtgttgtggaagggacccagtgggaggtaattgaatcatgagggcaggtctttctcatgctgttcttgtgctagtgaataagtctcacgagatctgatggttttattttattttattttatttttatttttgagatgaagtctcactc

SEQ ID NO: 348275 - DNA, 354 bp, Homo sapiens
tcagagctttttttttttagatttactcatcttattccattcttttgtgtttaatttccttcttatcagaacatatattgagtagttatttcagcagctatctgtgattgttgaatttccccagactttgttggaaatacctttattcatttgtattcttgtataatttaattaggtgaacaaattattttatcttctaaaatttgttacttccttttttcccttcaattttgaaacattttcagccaatatctcttcacatcttgcctcttgtctattctctctgttgtctccttctggaattcttttctctctctgtctccccctacccgcccccgagttggagtctcactc

SEQ ID NO: 348276 - DNA, 527 bp, Homo sapiens
actgaagccttgttttattaagttagtatcttaaccttgcttcttgcttttcatttcaggcaacagagatgcttatttttggaaagaagttaacagcgggagaggcatgtgctcaaggacttgttactgaagttttccctgatagcacttttcagaaagaagtctggaccaggctgaaggcatttgcaaagcttcccccaaatgccttgagaatttcaaaagaggtaatcaggaaaagagagagagaaaaactacacgctgttaatgctgaagaatgcaatgtccttcagggaagatggctatcagatgaatgcacaaatgctgtggtgaacttcttatccagaaaatcaaaactgtgatgaccactacagcagagtaaagcatgtccaaggaaggatgtgctgttacctctgatttccagtactggaactaaataagcttcattgtgccttttgtagtgctagaatatcaattacaatgatgatatttcactacagctctgatgaataaaaagttttgtaaaacaa

SEQ ID NO: 348277 - DNA, 295 bp, Homo sapiens
tgaacttcttatccagaaaatcaccacagcatttgtgcattcatctgatagccatcttccctgaaggacattgcatgaatgcacaaatgctgtggtgaacttcttatccagaaaatcaaaactgtgatgaccactacagcagagtaaagcatgtccaaggaaggatgtgctgttacctctgatttccagtactggaactaaataagcttcattgtgccttttgtagtgctagaatatcaattacaatgatgatatttcactacagctctgatgaataaaaagttttgtaaaacaa

SEQ ID NO: 348278 - DNA, 1818 bp, Homo sapiens
acccccgagcccccgcagccctagcagccctagagccgcccaagggatggcgatggcgtacttggcttggagactggcgcggcgttcgtgtccgagtccgaggtcactagtttcccggtagttcagctgcacatgaatagaacagcaatgagagccagtcagaaggactttgaaaattcaatgaatcaagtgaaactcttgaaaaaggatccaggaaacgaagtgaagctaaaactctacgcgctatataagcaggccactgaaggaccttgtaacatgcccaaaccaggtgtatttgacttgatcaacaaggccaaatgggacgcatggaatgcccttggcagcctgcccaaggaagctgccaggcagaactatgtggatttggtgtccagtttgagtccttcattggaatcctctagtcaggtggagcctggaacagacaggaaatcaactgggtttgaaactctggtggtgacctccgaagatggcatcacaaagatcatgttcaaccggcccaaaaagaaaaatgccataaacactgagatgtatcatgaaattatgcgtgcacttaaagctgccagcaaggatgactcaatcatcactgttttaacaggaaatggtgactattacagtagtgggaatgatctgactaacttcactgatattccccctggtggagtagaggagaaagctaaaaataatgccgttttactgagggaatttgtgggctgttttatagattttcctaagcctctgattgcagtggtcaatggtccagctgtgggcatctccgtcaccctccttgggctattcgatgccgtgtatgcatctgacagggcaacatttcatacaccatttagtcacctaggccaaagtccggaaggatgctcctcttacacttttccgaagataatgagcccagccaaggcaacagagatgcttatttttggaaagaagttaacagcgggagaggcatgtgctcaaggacttgttactgaagttttccctgatagcacttttcagaaagaagtctggaccaggctgaaggcatttgcaaagcttcccccaaatgccttgagaatttcaaaagaggtaatcaggaaaagagagagagaaaaactacacgctgttaatgctgaagaatgcaatgtccttcagggaagatggctatcagatgaatgcacaaatgctgtggtgaacttcttatccagaaaatcaaaactgtgatgaccactacagcagagtaaagcatgtccaaggaaggatgtgctgttacctctgatttccagtactggaactaaataagcttcattgtgccttttgtagtgctagaatatcaattacaatgatgatatttcactacagctctgatgaataaaaagttttgtaaaacaaaaaaaaaaaaaaaaaaaaaaaaaaaaaaaaaaaaaaaaaaaaaaaaaaaaaaaaaaaaaaaaaaaaaaggaggggggggggaaaaaaccggggggacccaaagtcgaacgtccgacatataataatgtaaagagggcgccaaaagagagaaggctaaaaacacgaggaaggccggctcaacagacaagggtagagcgacaaagactgcggggagtttaggggagacccaccactgctggtggtgacatcgacgaaacaccaccaatgagagaagcgagcaaaaaaaccgggttgcgggccaccctatcagtggaacaatggctcgcgttttaaattggacgactctgcaaaagcgggcagacatacaccgccgtgcagacaacgtcgacgtagtcatgagcacagataacgagaaccccacac

SEQ ID NO: 348279 - DNA, 1421 bp, Homo sapiens
acccccgagcccccgcagccctagcagccctagagccgcccaagggatggcgatggcgtacttggcttggagactggcgcggcgttcgtgtccgagtccgaggtcactagtttcccggtagttcagctgcacatgaatagaacagcaatgagagccagtcagaaggactttgaaaattcaatgaatcaagtgaaactcttgaaaaaggatccaggaaacgaagtgaagctaaaactctacgcgctatataagcaggccactgaaggaccttgtaacatgcccaaaccaggtgtatttgacttgatcaacaaggccaaatgggacgcatggaatgcccttggcagcctgcccaaggaagctgccaggcagaactatgtggatttggtgtccagtttgagtccttcattggaatcctctagtcaggtggagcctggaacagacaggaaatcaactgggtttgaaactctggtggtgacctccgaagatggcatcacaaagatcatgttcaaccggcccaaaaagaaaaatgccataaacactgagatgtatcatgaaattatgcgtgcacttaaagctgccagcaaggatgactcaatcatcactgttttaacaggaaatggtgactattacagtagtgggaatgatctgactaacttcactgatattccccctggtggagtagaggagaaagctaaaaataatgccgttttactgagggaatttgtgggctgttttatagattttcctaagcctctgattgcagtggtcaatggtccagctgtgggcatctccgtcaccctccttgggctattcgatgccgtgtatgcatctgacagggcaacatttcatacaccatttagtcacctaggccaaagtccggaaggatgctcctcttacacttttccgaagataatgagcccagccaaggcaacagagatgcttatttttggaaagaagttaacagcgggagaggcatgtgctcaaggacttgttactgaagttttccctgatagcacttttcagaaagaagtctggaccaggctgaaggcatttgcaaagcttcccccaaatgccttgagaatttcaaaagaggtaatcaggaaaagagagagagaaaaactacacgctgttaatgctgaagaatgcaatgtccttcagggaagatggctatcagatgaatgcacaaatgctgtggtgaacttcttatccagaaaatcaaaactgtgatgaccactacagcagagtaaagcatgtccaaggaaggatgtgctgttacctctgatttccagtactggaactaaataagcttcattgtgccttttgtagtgctagaatatcaattacaatgatgatatttcactacagctctgatgaataaaaagttttgtaaaacaaaaacaagcttaagaattcacacaggt

SEQ ID NO: 348280 - DNA, 2159 bp, Homo sapiens
  misc_feature (988)..(988): n is a, c, g, or t
  misc_feature (1430)..(1430): n is a, c, g, or t
acccccgagcccccgcagccctagcagccctagagccgcccaagggatggcgatggcgtacttggcttggagactggcgcggcgttcgtgtccgagtccgaggtcactagtttcccggtagttcagctgcacatgaatagaacagcaatgagagccagtcagaaggactttgaaaattcaatgaatcaagtgaaactcttgaaaaaggatccaggaaacgaagtgaagctaaaactctacgcgctatataagcaggccactgaaggaccttgtaacatgcccaaaccaggtgtatttgacttgatcaacaaggccaaatgggacgcatggaatgcccttggcagcctgcccaaggaagctgccaggcagaactatgtggatttggtgtccagtttgagtccttcattggaatcctctagtcaggtggagcctggaacagacaggaaatcaactgggtttgaaactctggtggtgacctccgaagatggcatcacaaagatcatgttcaaccggcccaaaaagaaaaatgccataaacactgagatgtatcatgaaattatgcgtgcacttaaagctgccagcaaggatgactcaatcatcactgttttaacaggaaatggtgactattacagtagtgggaatgatctgactaacttcactgatattccccctggtggagtagaggagaaagctaaaaataatgccgttttactgaggtaagagttactgacctttgtctgatcccagagggcccgttcttagtcatcaaagtggtatttagttgagcaaaagtgcaatatctgcttctctgtgtcagtgcagttaattgtgactttggacaagcatatttctctaaactgcctccatccataggtgggcattcattctttctctttgacctctgttacctgttcatcctgctggtctcatgagatttgactggaaaacataaaagtgagctatagttgtaaacaaaattatcttgcantgaggcagaggaatttagcaaattctcatccagccagaggaatgggagatttccatgaacgctgaaggtaggagactcggaggagtcttgtaaacacaggaggaggtcatgaaggcttttctctttattcctgccaaatctgtaattcccacttgttgtgatattgcagcatgtgctcagtcacccaacctaatctctaagactgcggctggtttacagccctgaactcactgtccagaatacaagattcaaaccagggttgacccataggtctcactggttggtcttccatccactgccattcagacggatgccctggatgaatctggtgcggaagaccagggaagtggcaggacaaggaggcactgctggtggtggctgtggaaacacccagcctgacagaaggctttatctcagagtcagactgtcttgcccatgcttnagtcatgctgctttggcacatttaatgattttgtgtttccatttctgtagggaatttgtgggctgttttatagattttcctaagcctctgattgcagtggtcaatggtccagctgtgggcatctccgtcaccctccttgggctattcgatgccgtgtatgcatctgacagggcaacatttcatacaccatttagtcacctaggccaaagtccggaaggatgctcctcttacacttttccgaagataatgagcccagccaaggcaacagagatgcttatttttggaaagaagttaacagcgggagaggcatgtgctcaaggacttgttactgaagttttccctgatagcacttttcagaaagaagtctggaccaggctgaaggcatttgcaaagcttcccccaaatgccttgagaatttcaaaagaggtaatcaggaaaagagagagagaaaaactacacgctgttaatgctgaagaatgcaatgtccttcagggaagatggctatcagatgaatgcacaaatgctgtggtgaacttcttatccagaaaatcaaaactgtgatgaccactacagcagagtaaagcatgtccaaggaaggatgtgctgttacctctgatttccagtactggaactaaataagcttcattgtgccttttgtagtgctagaatatcaattacaatgatgatatttcactacagctctgatgaataaaaagttttgtaaaacaa

SEQ ID NO: 348281 - DNA, 1398 bp, Homo sapiens
ggataccgctgtccaggcgaaggtcgccgccgttggaagaccctccttccctattgtctaggtggcaacaggattttgctttgctggttttccggtgagtccgaggtcactagtttcccggtagttcagctgcacatgaatagaacagcaatgagagccagtcagaaggactttgaaaattcaatgaatcaagtgaaactcttgaaaaaggatccaggaaacgaagtgaagctaaaactctacgcgctatataagcaggccactgaaggaccttgtaacatgcccaaaccaggtgtatttgacttgatcaacaaggccaaatgggacgcatggaatgcccttggcagcctgcccaaggaagctgccaggcagaactatgtggatttggtgtccagtttgagtccttcattggaatcctctagtcaggtggagcctggaacagacaggaaatcaactgggtttgaaactctggtggtgacctccgaagatggcatcacaaagatcatgttcaaccggcccaaaaagaaaaatgccataaacactgagatgtatcatgaaattatgcgtgcacttaaagctgccagcaaggatgactcaatcatcactgttttaacaggaaatggtgactattacagtagtgggaatgatctgactaacttcactgatattccccctggtggagtagaggagaaagctaaaaataatgccgttttactgagggaatttgtgggctgttttatagattttcctaagcctctgattgcagtggtcaatggtccagctgtgggcatctccgtcaccctccttgggctattcgatgccgtgtatgcatctgacagggcaacatttcatacaccatttagtcacctaggccaaagtccggaaggatgctcctcttacacttttccgaagataatgagcccagccaaggcaacagagatgcttatttttggaaagaagttaacagcgggagaggcatgtgctcaaggacttgttactgaagttttccctgatagcacttttcagaaagaagtctggaccaggctgaaggcatttgcaaagcttcccccaaatgccttgagaatttcaaaagaggtaatcaggaaaagagagagagaaaaactacacgctgttaatgctgaagaatgcaatgtccttcagggaagatggctatcagatgaatgcacaaatgctgtggtgaacttcttatccagaaaatcaaaactgtgatgaccactacagcagagtaaagcatgtccaaggaaggatgtgctgttacctctgatttccagtactggaactaaataagcttcattgtgccttttgtagtgctagaatatcaattacaatgatgatatttcactacagctctgatgaataaaaagttttgtaaaacaa

SEQ ID NO: 348282 - DNA, 1341 bp, Homo sapiens
acccccgagcccccgcagccctagcagccctagagccgcccaagggatggcgatggcgtacttggcttggagactggcgcggcgttcgtgtccgagtccgaggtcactagtttcccggtagttcagctgcacatgaatagaacagcaatgagagccagtcagaaggactttgaaaattcaatgaatcaagtgaaactcttgaaaaaggatccaggaaacgaagtgaagctaacaggtgtatttgacttgatcaacaaggccaaatgggacgcatggaatgcccttggcagcctgcccaaggaagctgccaggcagaactatgtggatttggtgtccagtttgagtccttcattggaatcctctagtcaggtggagcctggaacagacaggaaatcaactgggtttgaaactctggtggtgacctccgaagatggcatcacaaagatcatgttcaaccggcccaaaaagaaaaatgccataaacactgagatgtatcatgaaattatgcgtgcacttaaagctgccagcaaggatgactcaatcatcactgttttaacaggaaatggtgactattacagtagtgggaatgatctgactaacttcactgatattccccctggtggagtagaggagaaagctaaaaataatgccgttttactgagggaatttgtgggctgttttatagattttcctaagcctctgattgcagtggtcaatggtccagctgtgggcatctccgtcaccctccttgggctattcgatgccgtgtatgcatctgacagggcaacatttcatacaccatttagtcacctaggccaaagtccggaaggatgctcctcttacacttttccgaagataatgagcccagccaaggcaacagagatgcttatttttggaaagaagttaacagcgggagaggcatgtgctcaaggacttgttactgaagttttccctgatagcacttttcagaaagaagtctggaccaggctgaaggcatttgcaaagcttcccccaaatgccttgagaatttcaaaagaggtaatcaggaaaagagagagagaaaaactacacgctgttaatgctgaagaatgcaatgtccttcagggaagatggctatcagatgaatgcacaaatgctgtggtgaacttcttatccagaaaatcaaaactgtgatgaccactacagcagagtaaagcatgtccaaggaaggatgtgctgttacctctgatttccagtactggaactaaataagcttcattgtgccttttgtagtgctagaatatcaattacaatgatgatatttcactacagctctgatgaataaaaagttttgtaaaacaa

SEQ ID NO: 348283 - DNA, 1671 bp, Homo sapiens
acccccgagcccccgcagccctagcagccctagagccgcccaagggatggcgatggcgtacttggcttggagactggcgcggcgttcgtgtccgagtccgaggtcactagtttcccggtagttcagctgcacatgaatagaacagcaatgagagccagtcagaaggactttgaaaattcaatgaatcaagtgaaactcttgaaaaaggatccaggaaacgaagtgaagctaaaactctacgcgctatataagcaggccactgaaggaccttgtaacatgcccaaaccaggtgtatttgacttgatcaacaaggccaaatgggacgcatggaatgcccttggcagcctgcccaaggtgagtttactagttactgtgcttttatttgctgtacttctaaagaagtttgtgcttctcattaagccattgtaaatggagtcttcaagatcttgatgtgcttctattctttcttcattgcaaggtgttagttattagtatagtaactttctcaaagtgcttattcattgaccatgggctgaggttgtttgtcatcgtccgttcaggaagctgccaggcagaactatgtggatttggtgtccagtttgagtccttcattggaatcctctagtcaggtggagcctgcccacggagtttgtcctgttttactttcttcttctatgtgtttcacacaaaagctgtagagtttcagcatcattcctattttaagatatctcttgtttgatttgtgcaggaaggttggtaattgtggctacttcatacaacagagttgagcattcattgtttagagtttgtgaatttcagatgtatcatgaaattatgcgtgcacttaaagctgccagcaaggatgactcaatcatcactgttttaacaggaaatggtgactattacagtagtgggaatgatctgactaacttcactgatattccccctggtggagtagaggagaaagctaaaaataatgccgttttactgagggaatttgtgggctgttttatagattttcctaagcctctgattgcagtggtcaatggtccagctgtgggcatctccgtcaccctccttgggctattcgatgccgtgtatgcatctgacagggcaacatttcatacaccatttagtcacctaggccaaagtccggaaggatgctcctcttacacttttccgaagataatgagcccagccaaggcaacagagatgcttatttttggaaagaagttaacagcgggagaggcatgtgctcaaggacttgttactgaagttttccctgatagcacttttcagaaagaagtctggaccaggctgaaggcatttgcaaagcttcccccaaatgccttgagaatttcaaaagaggtaatcaggaaaagagagagagaaaaactacacgctgttaatgctgaagaatgcaatgtccttcagggaagatggctatcagatgaatgcacaaatgctgtggtgaacttcttatccagaaaatcaaaactgtgatgaccactacagcagagtaaagcatgtccaaggaaggatgtgctgttacctctgatttccagtactggaactaaataagcttcattgtgccttttgtagtgctagaatatcaattacaatgatgatatttcactacagctctgatgaataaaaagttttgtaaaacaa

SEQ ID NO: 348284 - DNA, 798 bp, Homo sapiens
  misc_feature (723)..(723): n is a, c, g, or t
  misc_feature (729)..(730): n is a, c, g, or t
  misc_feature (732)..(732): n is a, c, g, or t
  misc_feature (740)..(741): n is a, c, g, or t
  misc_feature (744)..(745): n is a, c, g, or t
  misc_feature (751)..(751): n is a, c, g, or t
  misc_feature (753)..(753): n is a, c, g, or t
  misc_feature (762)..(762): n is a, c, g, or t
  misc_feature (765)..(766): n is a, c, g, or t
acccccgagcccccgcagccctagcagccctagagccgcccaagggatggcgatggcgtacttggcttggagactggcgcggcgttcgtgtccgagtccgaggtcactagtttcccggtagttcagctgcacatgaatagaacagcaatgagagccagtcagaaggactttgaaaattcaatgaatcaagtgaaactcttgaaaaaggatccaggaaacgaagtgaagctaaaactctacgcgctatataagcaggccactgaaggaccttgtaacatgcccaaaccaggtgtatttgacttgatcaacaaggccaaatgggacgcatggaatgcccttggcagcctgcccaaggaagctgccaggcagaactatgtggatttggtgtccagtttgagtccttcattggaatcctctagtcaggtggagcctggaacagacaggaaatcaactgggtttgaaactctggtggtgacctccgaagatggcatcacaaagatcatgttcaaccggcccaaaaagaaaaatgccataaacactgagatgtatcatgaaattatgcgtgcacttaaagctgccagcaaggatgactcaatcatcactgttttaacaggaaatggtgactattacagtagtgggaatgatctgactaacttcactgatattccccctggtggagtagaggagaaagctaaaaataatgccgttttactgaggaattgngggcgnnanagaattcnnaannctgatngngggcaaggnccnngggggctccaccccctgggaatgaacccgtta

SEQ ID NO: 348285 - DNA, 974 bp, Homo sapiens
acccccgagcccccgcagccctagcagccctagagccgcccaagggatggcgatggcgtacttggcttggagactggcgcggcgttcgtgtccgagtccgaggtcactagtttcccggtagttcagctgcacatgaatagaacagcaatgagagccagtcagaaggactttgaaaattcaatgaatcaagtgaaactcttgaaaaaggatccaggaaacgaagtgaagctaaaactctacgcgctatataagcaggccactgaaggaccttgtaacatgcccaaaccaggtgtatttgacttgatcaacaaggccaaatgggacgcatggaatgcccttggcagcctgcccaaggaagctgccaggcagaactatgtggatttggtgtccagtttgagtccttcattggaatcctctagtcaggtggagcctggaacagacaggaaatcaactgggtttgaaactctggtggtgacctccgaagatggcatcacaaagatcatgttcaaccggcccaaaaaaaaaaaaaaaaaaaaaaaatctttttgggcgggcggagccgaaaaagtttttaaacacccttctttgggggcgcgggcccctttggtgttggaacatgggccaagcgggtccaaagggaatcccgggccatacaatggggggcgtggttcccccaaataaaaaagcgcgggtcgacccgagggtttcttgaacacacctcccaggtggggtggggggcacaccgcgggccttcacacaggggggccaacgcagccgattaacgcgcgcccggggtgatagtagaagacccgagagaatcacaaaacaacagagtacaacagctacaaagaggaagaagacaacaagcagagacgatacaagccaaatagacagaacctgacacagagaaacaacagtcaagagaaacaaccgaccaagaagacgcgacgtgaaaacagcatgacaaacgacat

SEQ ID NO: 348286 - DNA, 402 bp, Homo sapiens
ttcatgtacttacagattttatggatcttaaatatttaggggtctagtttacatggacatttgaacatattgcccctctccttttcacaggccactgaaggaccttgtaacatgcccaaaccaggtgtatttgacttgatcaacaaggccaaatgggacgcatggaatgcccttggcagcctgcccaaggtgagtttactagttactgtgcttttatttgctgtacttctaaagaagtttgtgcttctcattaagccattgtaaatggagtcttcaagatcttgatgtgcttctattctttcttcattgcaaggtgttagttattagtatagtaactttctcaaagtgcttattcattgaccatgggctgaggttgtttgtcatcgtccgttcaggaagctg

SEQ ID NO: 348287 - DNA, 1395 bp, Homo sapiens
acccccgagcccccgcagccctagcagccctagagccgcccaagggatggcgatggcgtacttggcttggagactggcgcggcgttcgtgtccgagtccgaggtcactagtttcccggtagttcagctgcacatgaatagaacagcaatgagagccagtcagaaggactttgaaaattcaatgaatcaagtgaaactcttgaaaaaggatccaggaaacgaagtgaagctaaaactctacgcgctatataagcaggccactgaaggaccttgtaacatgcccaaaccaggtgtatttgacttgatcaacaaggccaaatgggacgcatggaatgcccttggcagcctgcccaaggaagctgccaggcagaactatgtggatttggtgtccagtttgagtccttcattggaatcctctagtcaggtggagcctggaacagacaggaaatcaactgggtttgaaactctggtggtgacctccgaagatggcatcacaaagatcatgttcaaccggcccaaaaagaaaaatgccataaacactgagatgtatcatgaaattatgcgtgcacttaaagctgccagcaaggatgactcaatcatcactgttttaacaggaaatggtgactattacagtagtgggaatgatctgactaacttcactgatattccccctggtggagtagaggagaaagctaaaaataatgccgttttactgagggaatttgtgggctgttttatagattttcctaagcctctgattgcagtggtcaatggtccagctgtgggcatctccgtcaccctccttgggctattcgatgccgtgtatgcatctgacagggcaacatttcatacaccatttagtcacctaggccaaagtccggaaggatgctcctcttacacttttccgaagataatgagcccagccaaggcaacagagatgcttatttttggaaagaagttaacagcgggagaggcatgtgctcaaggacttgttactgaagttttccctgatagcacttttcagaaagaagtctggaccaggctgaaggcatttgcaaagcttcccccaaatgccttgagaatttcaaaagaggtaatcaggaaaagagagagagaaaaactacacgctgttaatgctgaagaatgcaatgtccttcagggaagatggctatcagatgaatgcacaaatgctgtggtgaacttcttatccagaaaatcaaaactgtgatgaccactacagcagagtaaagcatgtccaaggaaggatgtgctgttacctctgatttccagtactggaactaaataagcttcattgtgccttttgtagtgctagaatatcaattacaatgatgatatttcactacagctctgatgaataaaaagttttgtaaaacaa

SEQ ID NO: 348288 - DNA, 1653 bp, Homo sapiens
ggataccgctgtccaggcgaaggtcgccgccgttggaagaccctccttccctattgtctaggtggcaacaggattttgctttgctggttttccggtgaggtagtgctaaaaagtgacgacctcacgcgcgccctcctgcaccgctgggcccggagtggtcaggatgggcgcgtcgggaggtcagggctatggttccctgtcagcagtccccaaggtctccgcctgcctccgcgcacgctcccatcctcctggggccggactccgggcgggtgagccgccccagctgagcacccgggcctgcacttcccagccgggctgcttctggggtgcaaagcgtcgcttgctaaaagcgagtccgaggtcactagtttcccggtagttcagctgcacatgaatagaacagcaatgagagccagtcagaaggactttgaaaattcaatgaatcaagtgaaactcttgaaaaaggatccaggaaacgaagtgaagctaaaactctacgcgctatataagcaggccactgaaggaccttgtaacatgcccaaaccaggtgtatttgacttgatcaacaaggccaaatgggacgcatggaatgcccttggcagcctgcccaaggaagctgccaggcagaactatgtggatttggtgtccagtttgagtccttcattggaatcctctagtcaggtggagcctggaacagacaggaaatcaactgggtttgaaactctggtggtgacctccgaagatggcatcacaaagatcatgttcaaccggcccaaaaagaaaaatgccataaacactgagatgtatcatgaaattatgcgtgcacttaaagctgccagcaaggatgactcaatcatcactgttttaacaggaaatggtgactattacagtagtgggaatgatctgactaacttcactgatattccccctggtggagtagaggagaaagctaaaaataatgccgttttactgagggaatttgtgggctgttttatagattttcctaagcctctgattgcagtggtcaatggtccagctgtgggcatctccgtcaccctccttgggctattcgatgccgtgtatgcatctgacagggcaacatttcatacaccatttagtcacctaggccaaagtccggaaggatgctcctcttacacttttccgaagataatgagcccagccaaggcaacagagatgcttatttttggaaagaagttaacagcgggagaggcatgtgctcaaggacttgttactgaagttttccctgatagcacttttcagaaagaagtctggaccaggctgaaggcatttgcaaagcttcccccaaatgccttgagaatttcaaaagaggtaatcaggaaaagagagagagaaaaactacacgctgttaatgctgaagaatgcaatgtccttcagggaagatggctatcagatgaatgcacaaatgctgtggtgaacttcttatccagaaaatcaaaactgtgatgaccactacagcagagtaaagcatgtccaaggaaggatgtgctgttacctctgatttccagtactggaactaaataagcttcattgtgccttttgtagtgctagaatatcaattacaatgatgatatttcactacagctctgatgaataaaaagttttgtaaaacaa

SEQ ID NO: 348289 - DNA, 1601 bp, Homo sapiens
acccccgagcccccgcagccctagcagccctagagccgcccaagggatggcgatggcgtacttggcttggagactggcgcggcgttcgtgtccgagtccgaggtcactagtttcccggtagttcagctgcacatgaatagaacagcaatgagagccagtcagaaggactttgaaaattcaatgaatcaagtgaaactcttgaaaaaggatccaggaaacgaagtgaagctaaaactctacgcgctatataagcaggccactgaaggaccttgtaacatgcccaaaccaggtgtatttgacttgatcaacaaggccaaatgggacgcatggaatgcccttggcagcctgcccaaggtgagtttactagttactgtgcttttatttgctgtacttctaaagaagtttgtgcttctcattaagccattgtaaatggagtcttcaagatcttgatgtgcttctattctttcttcattgcaaggtgttagttattagtatagtaactttctcaaagtgcttattcattgaccatgggctgaggttgtttgtcatcgtccgttcaggaagctgccaggcagaactatgtggatttggtgtccagtttgagtccttcattggaatcctctagtcaggtggagcctggaacagacaggaaatcaactgggtttgaaactctggtggtgacctccgaagatggcatcacaaagatcatgttcaaccggcccaaaaagaaaaatgccataaacactgagatgtatcatgaaattatgcgtgcacttaaagctgccagcaaggatgactcaatcatcactgttttaacaggaaatggtgactattacagtagtgggaatgatctgactaacttcactgatattccccctggtggagtagaggagaaagctaaaaataatgccgttttactgagggaatttgtgggctgttttatagattttcctaagcctctgattgcagtggtcaatggtccagctgtgggcatctccgtcaccctccttgggctattcgatgccgtgtatgcatctgacagggcaacatttcatacaccatttagtcacctaggccaaagtccggaaggatgctcctcttacacttttccgaagataatgagcccagccaaggcaacagagatgcttatttttggaaagaagttaacagcgggagaggcatgtgctcaaggacttgttactgaagttttccctgatagcacttttcagaaagaagtctggaccaggctgaaggcatttgcaaagcttcccccaaatgccttgagaatttcaaaagaggtaatcaggaaaagagagagagaaaaactacacgctgttaatgctgaagaatgcaatgtccttcagggaagatggctatcagatgaatgcacaaatgctgtggtgaacttcttatccagaaaatcaaaactgtgatgaccactacagcagagtaaagcatgtccaaggaaggatgtgctgttacctctgatttccagtactggaactaaataagcttcattgtgccttttgtagtgctagaatatcaattacaatgatgatatttcactacagctctgatgaataaaaagttttgtaaaacaa

SEQ ID NO: 348290 - DNA, 1466 bp, Homo sapiens
acccccgagcccccgcagccctagcagccctagagccgcccaagggatggcgatggcgtacttggcttggagactggcgcggcgttcgtgtccgagtccgaggtcactagtttcccggtagttcagctgcacatgaatagaacagcaatgagagccagtcagaaggactttgaaaattcaatgaatcaagtgaaactcttgaaaaaggatccaggaaacgaagtgaagctaaaactctacgcgctatataagcaggccactgaaggaccttgtaacatgcccaaaccaggtgtatttgacttgatcaacaaggccaaatgggacgcatggaatgcccttggcagcctgcccaaggaagctgccaggcagaactatgtggatttggtgtccagtttgagtccttcattggaatcctctagtcaggtggagcctggaacagacaggaaatcaactgggtttgaaactctggtggtgacctccgaagatggcatcacaaagatcatgttcaaccggcccaaaaagaaaaatgccataaacactgaggaaggttggtaattgtggctacttcatacaacagagttgagcattcattgtttagagtttgtgaatttcagatgtatcatgaaattatgcgtgcacttaaagctgccagcaaggatgactcaatcatcactgttttaacaggaaatggtgactattacagtagtgggaatgatctgactaacttcactgatattccccctggtggagtagaggagaaagctaaaaataatgccgttttactgagggaatttgtgggctgttttatagattttcctaagcctctgattgcagtggtcaatggtccagctgtgggcatctccgtcaccctccttgggctattcgatgccgtgtatgcatctgacagggcaacatttcatacaccatttagtcacctaggccaaagtccggaaggatgctcctcttacacttttccgaagataatgagcccagccaaggcaacagagatgcttatttttggaaagaagttaacagcgggagaggcatgtgctcaaggacttgttactgaagttttccctgatagcacttttcagaaagaagtctggaccaggctgaaggcatttgcaaagcttcccccaaatgccttgagaatttcaaaagaggtaatcaggaaaagagagagagaaaaactacacgctgttaatgctgaagaatgcaatgtccttcagggaagatggctatcagatgaatgcacaaatgctgtggtgaacttcttatccagaaaatcaaaactgtgatgaccactacagcagagtaaagcatgtccaaggaaggatgtgctgttacctctgatttccagtactggaactaaataagcttcattgtgccttttgtagtgctagaatatcaattacaatgatgatatttcactacagctctgatgaataaaaagttttgtaaaacaa

SEQ ID NO: 348291 - DNA, 859 bp, Homo sapiens
acccccgagcccccgcagccctagcagccctagagccgcccaagggatggcgatggcgtacttggcttggagactggcgcggcgttcgtgtccgagtccgaggtcactagtttcccggtagttcagctgcacatgaatagaacagcaatgagagccagtcagaaggactttgaaaattcaatgaatcaagtgaaactcttgaaaaaggatccaggaaacgaagtgaagctaaaactctacgcgctatataagcaggccactgaaggaccttgtaacatgcccaaaccaggtgtatttgacttgatcaacaaggccaaatgggacgcatggaatgcccttggcagcctgcccaaggtgagtttactagttactgtgcttttatttgctgtacttctaaagaagtttgtgcttctcattaagccattgtaaatggagtcttcaagatcttgatgtgcttctattctttcttcattgcaaggtgttagttattagtatagtaactttctcaaagtgcttattcattgaccatgggctgaggttgtttgtcatcgtccgttcaggaagctgccaggcagaactatgtggatttggtgtccagtttgagtccttcattggaatcctctagtcaggtggagcctgcccacggagtttgtcctgttttactttcttcttctatgtgtttcacacaaaagctgtagagtttcagcatcattcctattttaagatatctcttgtttgatttgtgcaggaaggttggtaattgtggctacttcatacaacagagttgagcattcattgtttagagtttgtgaatttcaggtaggttctgatatacccagaaggcactgtgattttccta

SEQ ID NO: 348292 - DNA, 3132 bp, Homo sapiens
  misc_feature (384)..(384): n is a, c, g, or t
  misc_feature (635)..(635): n is a, c, g, or t
ttaactccttacttgaaacatttagactatctagatgtttagaagtgcccgatgtatattaaatgtagaggtagtaaaataccaatttgtaaatatctttttgctaaaattcataggaaatacttttggaagttgaattgtgaagccacctttgtgagcagtatattactgtctatacttgctcaatggtttagaggaggtgggagggaagaaattgcaaaagataatatgctagtgtgttcatacttggacattttcagacaccatttttctgtatgttttgtgcattttgttttgctctgtatatagtgtatataatggacaaatagtcttaattttttaacatctagaggttgccagtgtatgacaaagtagtaaaattancatattttgtatgctttgtgttgaaattcataggaaaacttgtcttctgtaattgacttttgcataggaatttgttcagccatctctaagcattacacatgcgtgtacttgtccactgaattgaaggcagagaaggaagagaagagggaatgattcaaggccaaaatggtcacatttagaagataccttagatgataaccattgttatgtgtgtgcagtttatttaacagtgccgtgtacatggtggacangctatgaaatatctagtctttagatgtttggaagtgcttgatgtattttaaagtagtagtagtagaataacactttttgtaaatagcttttaaaaactgatgggaaatgctgtttggaagtggatttgttgaaccacctgggaggtgggagggaaaaaattgcaaaaggtgttttgccattgtttattagaaaatttcagcttaatccattgcctatatgttacaagcatttcatttaactttgctatactgtatatattgtgtatatactggacaaatgagtcctgattttataatatctagtctgtagctattaaagaggttgccagtgtatgacaaaagtagttagtaaactaacgcattttgtacactttgttaaaattcatagagaggctgtcttctgaaaaggactttttggaagtgaaatgataacatcagctcgaagtgacacatgtgcttatatccaccaggttggtggtggagaggagttggaaggaatgaagggttctagaccagaatgttcctatttagaagacactttcagatataaccattgttacatgtgtgtagtttattcaacagtgctatgtatatagtggacacacttaagtccttatttgaaatatctagtctttctagatgtttagaagtgcacaaagcatgttaaaagtagaggtagtaagtaacacattttgtagttattttgatatgaaatattgtcttggaaattgatcaattctctgagaagtacacgttatgatatttgtgctggttcagggggaagaaggagcacaaagttcaaagggctttctaccagtgtccagtgtgtttatgatgaggcacattgaccattgtcccttatgtctgcattttcgtttactgtgctgtgtatataagcagacataggagtcctaatttatatctagtcgatgttaaagaggttgccagtgtatggcaaaagtagagttagtaaactaatacattgagtacactttgtgttaaaattcataaggaacacttcttaaaaacagaagtaaaattgttaaacgccccccgcccccaagcattacagatggcttatagctgtcaacggggttggtagaggtcagaaagggaagtgttctaggccagaatgttcctatttagaagacactcaaattatagtctatgttatgtatatatgccatttattcaatactactgtgtatataatggaaaacttaagtgcagtttgaaacatctagtctttctaggtgtttaaaagtgcacaatggtcaggtgcggtggctcactcctgtaatcctggcactttgggaggctgaggtgggcagatcacgaagtcaagggatcgagactatcttggccaacatggtgaaaccccatctctacaaaaaatacaaaaattagctggtcgtggtggcacatgcctgtagtcccagctactcgggaggctgaggcaggagaatcgcttgagcccgggagacagaggttgcagtaagccgagaccacaccactgcactccagcatggcgacagagcaagactccatctcaaaaaaaaaaaaaaaaaaaaaaaattccacaacataggttaaaagtagagggctaaagtaacacccctctaagcatttgttttcagtacttcctaggagtggttgcatttgggaatggaattgttaaaacttgatgcttaggagcgtatgctgactattcactgcgtggtggggtggggaggaggaggaggtatgcagggagaagggttctgtgcccctgagttagattagttcagatggtctaaccattgttctatgtatgcattttattgtgttaatattgtgtattaaaggataaacaagtcttaatgctcaaagtatgttaaaaatagatgtagtgaatcagtccctttgtgaatgtcctattgttagtttttaggaaggcctgtcttctgggagtgacctttattagtccacttcttggagctagacgtcctatacttagtcactggggatggtgaaagagggagaagaggaagggcgaagggaagggctctttgctagtatctccatttctagaagatggttttagatgataaccacaggtctatatgagcatttttagtaaagtgcctgtgtttattgtggacagagtttattattttgcaacatctaacctttatgaatatctgaggtgacaatgtgtgataaaaactagagctagtgggccaggcgcggtggctcatgcctgtaatcccaacattttgggaggctgaggcaggcagatcacaaggtcaagagatcgagaccatcctggtcaacatggtgaaaccccatctctactaaaaatacaaaaattagctgggcgtggtggcgcgtgcctgtagtcccagcttctcaggaggctgaggcaggagaatcacttgaacctgggaggcggaggttgcagtgagccaatattgcgccactgcactccagcctgggcaacacagcaagactccatctc

SEQ ID NO: 348293 - DNA, 1193 bp, Homo sapiens
  misc_feature (70)..(70): n is a, c, g, or t
tggccaccccccccctccccctcccccccccgcacatcctctactcgcttttgcgccccgccggttccanttcaatgataaccggccatggctgatcctgggaacagaggagggatccaccgccccttgagcttcacctgctccctgctcattgtgggaatgtgctgtgtatctcctttcttctgccatagccagacagacttgctggctcttagccaagctgatcctcagtgctgggaatcctcctcagtgcttctcctggaaatgtggaaacctcgcgtttccaacactgtttcaggcttctgggattttatgatctacctgaagtcatctgagaacttgaagcatggagcactgttttgggatctggcccaactcttctgggacatctatgtggactgtgtgctctctaggaaccatggcttaggaaggaggcaattggttggagaggaagagaaaatctcagcagcgcagccacagcacacaaggagtaaacaaggtacatattctcagctcctaaggacctccttcctaaagaagaaagagttgattgaagatttgataagcatgcatgtgcgtaggagtgggtctagtgtcattggaaaagtgaacctggaaataaagagaaaataaattgaactcggagctaattcatgccttggaattaaatatacatatatataacatttttcttaactattgattatttatttattttaaatggtgggaatgcccagagataaatatgaacccaaattctctcagtatactaatttaaagctgccttctattatttatttatttattttaggctgctagcatgtttcttctaatggtgacattactgccagtctatcccacagtctaaaggagttaaataacttccagagatgacttgaggattctttgtattcatttaatagttcattttgggatgcttgacatgttaataaactagtgtgccatacatttaacttgaatacactgcatggcttccaagacttcaaccactggattgcttatgcacaggcacataagggactacattttggaattactagttactgacaatctatgatatctgaatcttgtttgacagcatatttttgaatactgaatgaagcaaaaagtaaaacaaaacaaaaaactggcaaataaagcattcttctaatgaaaacaaaattaataaaagc

SEQ ID NO: 348294 - DNA, 1014 bp, Homo sapiens
ccaggaactcctaggtactgaaggaacaaaagtaaattcttggcttaaagttgctcacaatttagcaggaagagacatgtttaaaaaaaaaatttctagacccaaggtgatgagtaaacaaagctactcttgtgctgggagtaaaaagaagagcactgatgggcaggtgggcgagggatgcagaagcctttccaaaagaagtgagttttgaactatattgaaacatgacaagaattcaccagtctaacaaaatgggaaacgtattcaaggcacaggaagcaacaagtgcaagacccaggaggaggcacccagacccttgggtacatattctcagctcctaaggacctccttcctaaagaagaaagagttgattgaagatttgataagcatgcatgtgcgtaggagtgggtctagtgtcattggaaaagtgaacctggaaataaagagaaaataaattgaactcggagctaattcatgccttggaattaaatatacatatatataacatttttcttaactattgattatttatttattttaaatggtgggaatgcccagagataaatatgaacccaaattctctcagtatactaatttaaagctgccttctattatttatttatttattttaggctgctagcatgtttcttctaatggtgacattactgccagtctatcccacagtctaaaggagttaaataacttccagagatgacttgaggattctttgtattcatttaatagttcattttgggatgcttgacatgttaataaactagtgtgccatacatttaacttgaatacactgcatggcttccaagacttcaaccactggattgcttatgcacaggcacataagggactacattttggaattactagttactgacaatctatgatatctgaatcttgtttgacagcatatttttgaatactgaatgaagcaaaaagtaaaacaaaacaaaaaactggcaaataaagcattcttctaatgaaaacaaaattaataaaagc

SEQ ID NO: 348295 - DNA, 721 bp, Homo sapiens
tggtaacaaaagaacaatttcaaagtggtacatattctcagctcctaaggacctccttcctaaagaagaaagagttgattgaagatttgataagcatgcatgtgcgtaggagtgggtctagtgtcattggaaaagtgaacctggaaataaagagaaaataaattgaactcggagctaattcatgccttggaattaaatatacatatatataacatttttcttaactattgattatttatttattttaaatggtgggaatgcccagagataaatatgaacccaaattctctcagtatactaatttaaagctgccttctattatttatttatttattttaggctgctagcatgtttcttctaatggtgacattactgccagtctatcccacagtctaaaggagttaaataacttccagagatgacttgaggattctttgtattcatttaatagttcattttgggatgcttgacatgttaataaactagtgtgccatacatttaacttgaatacactgcatggcttccaagacttcaaccactggattgcttatgcacaggcacataagggactacattttggaattactagttactgacaatctatgatatctgaatcttgtttgacagcatatttttgaatactgaatgaagcaaaaagtaaaacaaaacaaaaaactggcaaataaagcattcttctaatgaaaacaaaattaataaaagc

SEQ ID NO: 348296 - DNA, 469 bp, Homo sapiens
ccaggaactcctaggtactgaaggaacaaaagtaaattcttggcttaaagttgctcacaatttagcaggaagagacatgtttaaaaaaaaaatttctagacccaaggtgatgagtaaacaaagctactcttgtgctgggagtaaaaagaagagcactgatgggcaggtgggcgagggatgcagaagcctttccaaaagaagtgagttttgaactatattgaaacatgacaagaattcaccagtctaacaaaatgggaaacgtattcaaggcacaggaagcaacaagtgcaagacccaggaggaggcacccagacccttgggtacatattctcagctcctaaggacctccttcctaaagaagaaagagttgattgaagatttgataagcatgcatgtgcgtaggagtgggtctagtgtcattggaaaagtgaacctggaaataaagagaaaataaattgaactcggagct

SEQ ID NO: 348297 - DNA, 762 bp, Homo sapiens
cagatccgatacagtctatgatattgagcgttccccgatcctgtaatacaacacaaacaacaacttaagaacagacactgagctccttttgacctccttcctaaagaagaaagagttgattgaagatttgataagcatgcatgtgcgtaggagtgggtctagtgtcattggaaaagtgaacctggaaataaagagaaaataaattgaactcggagctaattcatgccttggaattaaatatacatatatataacatttttcttaactattgattatttatttattttaaatggtgggaatgcccagagataaatatgaacccaaattctctcagtatactaatttaaagctgccttctattatttatttatttattttaggctgctagcatgtttcttctaatggtgacattactgccagtctatcccacagtctaaaggagttaaataacttccagagatgacttgaggattctttgtattcatttaatagttcattttgggatgcttgacatgttaataaactagtgtgccatacatttaacttgaatacactgcatggcttccaagacttcaaccactggattgcttatgcacaggcacataagggactacattttggaattactagttactgacaatctatgatatctgaatcttgtttgacagcatatttttgaatactgaatgaagcaaaaagtaaaacaaaacaaaaaactggcaaataaagcattcttctaatgaaaacaaaattaataaaagc

SEQ ID NO: 348298 - DNA, 648 bp, Homo sapiens
  misc_feature (70)..(70): n is a, c, g, or t
tggccaccccccccctccccctcccccccccgcacatcctctactcgcttttgcgccccgccggttccanttcaatgataaccggccatggctgatcctgggaacagaggagggatccaccgccccttgagcttcacctgctccctgctcattgtgggaatgtgctgtgtatctcctttcttctgccatagccagacagacttgctggctcttagccaagctgatcctcagtgctgggaatcctcctcagtgcttctcctggaaatgtggaaacctcgcgtttccaacactgtttcaggcttctgggattttatgatctacctgaagtcatctgagaacttgaagcatggagcactgttttgggatctggcccaactcttctgggacatctatgtggactgtgtgctctctaggaaccatggcttaggaaggaggcaattggttggagaggaagagaaaatctcagcagcgcagccacagcacacaaggagtaaacaaggtacatattctcagctcctaaggacctccttcctaaagaagaaagagttgattgaagatttgataagcatgcatgtgcgtaggagtgggtctagtgtcattggaaaagtgaacctggaaataaagagaaaataaattgaactcggagct

SEQ ID NO: 348299 - DNA, 778 bp, Homo sapiens
tgccttttaaagataatttattgatatttaattaacctgaaactaatttggtgatcttatgaagttccgcttttctactttcaggtacatattctcagctcctaaggacctccttcctaaagaagaaagagttgattgaagatttgataagcatgcatgtgcgtaggagtgggtctagtgtcattggaaaagtgaacctggaaataaagagaaaataaattgaactcggagctaattcatgccttggaattaaatatacatatatataacatttttcttaactattgattatttatttattttaaatggtgggaatgcccagagataaatatgaacccaaattctctcagtatactaatttaaagctgccttctattatttatttatttattttaggctgctagcatgtttcttctaatggtgacattactgccagtctatcccacagtctaaaggagttaaataacttccagagatgacttgaggattctttgtattcatttaatagttcattttgggatgcttgacatgttaataaactagtgtgccatacatttaacttgaatacactgcatggcttccaagacttcaaccactggattgcttatgcacaggcacataagggactacattttggaattactagttactgacaatctatgatatctgaatcttgtttgacagcatatttttgaatactgaatgaagcaaaaagtaaaacaaaacaaaaaactggcaaataaagcattcttctaatgaaaacaaaattaataaaagc

SEQ ID NO: 348300 - DNA, 875 bp, Homo sapiens
  misc_feature (70)..(70): n is a, c, g, or t
tggccaccccccccctccccctcccccccccgcacatcctctactcgcttttgcgccccgccggttccanttcaatgataaccggccatggctgatcctgggaacagaggagggatccaccgccccttgagcttcacctgctccctgctcattgtgggaatgtgctgtgtatctcctttcttctgccatagccagacagacttgctggctcttagccaagctgatcctcagtgctgggaatcctcctcagtgcttctcctggaaatgtggaaacctcgcgtttccaacactgtttcaggcttctgggattttatgatctacctgaagtcatctgagaacttgaagcatggagcactgttttgggatctggcccaactcttctgggacatctatgtggactgtgtgctctctaggaaccatggcttaggaaggaggcaattggttggagaggaagagaaaatctcagcagcgcagccacagcacacaaggagtaaacaaggtggtcaaccccagctcccatgtcttttgaaagggtcaatcaagtatgaatgtgctgaattgtgaggaagagggaaatggcattaggggaatccagtgtcatatatattcctctcaagaggtgaaccccaagagcacataactgataggaagatagatagtacttctttttgcattgcatagtagctgtttatatcaacatattgtcctcatcctcatacttcctgtgaacagcagcaaggaagagtcagaaagaaaagacaaaaagcatgattcccaaaatacagcataaaagtataaacagatcccccaagatcaacattattttttactattagcctgaacactggcagtcataacctgatgtttacttgccg

SEQ ID NO: 348301 - DNA, 203 bp, Homo sapiens
acgaggctgaagaataataaatcaccaatgatttgttcaccagtttttattaatacaagtcactttttcaaaaatttggatttttttatatataactagctgctattcaaatgtgagtctaccatttttaatttatggttcaactgtttgtgagactgaattcttgcaatgcataagatataaaagcaaatatgactcactca

SEQ ID NO: 348302 - DNA, 1058 bp, Homo sapiens
cctcttacacagtttgcagcgcgggggcggcggggtgacagtccccgtgcatgaatcagccacccctcaggctccgccccggcgggggtcggccggacgctcgccccgcataaagcgggcacccgggccgcctggagagaaagccgcgcacctcctcccgccaggcgctttctcggacgccttgcccagcgggccgcccgaccccctgcaccatggaccccgctcgccccctggggctgtcgattctgctgcttttcctgacggaggctgcactgggcgatgctgctcaggagccaacaggaaataacgcggagatctgtctcctgcccctagactacggaccctgccgggccctacttctccgttactactacgacaggtacacgcagagctgccgccagttcctgtacgggggctgcgagggcaacgccaacaatttctacacctgggaggcttgcgacgatgcttgctggaggatagaaaaagttcccaaagtttgccggctgcaagtgagtgtggacgaccagtgtgaggggtccacagaaaagtatttctttaatctaagttccatgacatgtgaaaaattcttttccggtgggtgtcaccggaaccggattgagaacaggtttccagatgaagctacttgtatgggcttctgcgcaccaaagaaaattccatcattttgctacagtccaaaagatgagggactgtgctctgccaatgtgactcgctattattttaatccaagatacagaacctgtgatgctttcacctatactggctgtggagggaatgacaataactttgttagcagggaggattgcaaacgtgcatgtgcaaaagctttgaaaaagaaaaagaagatgccaaagcttcgctttgccagtagaatccggaaaattcggaagaagcaattttaaacattcttaatatgtcatcttgtttgtctttatggcttatttgcctttatggttgtatctgaagaataatatgacagcatgaggaaacaaatcattggtgatttattcaccagtttttattaatacaagtcacttttt

SEQ ID NO: 348303 - DNA, 307 bp, Homo sapiens
tgcgtcgcactagcaggtcccgccgctctctctgtgggggagcctagatagcttggtagcaggggaggattgcaaacgtgcatgtgcaaaagctttgaaaaagaaaaagaagatgccaaagcttcgctttgccagtagaatccggaaaattcggaagaagcaattttaaacattcttaatatgtcatcttgtttgtctttatggcttatttgcctttatggttgtatctgaagaataatatgacagcatgaggaaacaaatcattggtgatttattcaccagtttttattaatacaagtcacttttt

SEQ ID NO: 348304 - DNA, 3303 bp, Homo sapiens
cctcttacacagtttgcagcgcgggggcggcggggtgacagtccccgtgcatgaatcagccacccctcaggctccgccccggcgggggtcggccggacgctcgccccgcataaagcgggcacccgggccgcctggagagaaagccgcgcacctcctcccgccaggcgctttctcggacgccttgcccagcgggccgcccgaccccctgcaccatggaccccgctcgccccctggggctgtcgattctgctgcttttcctgacggaggctgcactgggcgatgctgctcaggagccaacaggaaataacgcggagatctgtctcctgcccctagactacggaccctgccgggccctacttctccgttactactacgacaggtacacgcagagctgccgccagttcctgtacgggggctgcgagggcaacgccaacaatttctacacctgggaggcttgcgacgatgcttgctggaggatagaaaaagttcccaaagtttgccggctgcaagtgagtgtggacgaccagtgtgaggggtccacagaaaagtatttctttaatctaagttccatgacatgtgaaaaattcttttccggtgggtgtcaccggaaccggattgagaacaggtttccagatgaagctacttgtatgggcttctgcgcaccaaagaaaattccatcattttgctacagtccaaaagatgagggactgtgctctgccaatgtgactcgctattattttaatccaagatacagaacctgtgatgctttcacctatactggctgtggagggaatgacaataactttgttagcagggaggattgcaaacgtgcatgtgcaaaagctttgaaaaagaaaaagaagatgccaaagcttcgctttgccagtagaatccggaaaattcggaagaagcaattttaaacattcttaatatgtcatcttgtttgtctttatggcttatttgcctttatggttgtatctgaagaataatatgacagcatgaggaaacaaatcattggtgatttattcaccagtttttattaatacaagtcactttttcaaaaatttggatttttttatatataactagctgctattcaaatgtgagtctaccatttttaatttatggttcaactgtttgtgagactgaattcttgcaatgcataagatataaaagcaaatatgactcactcatttcttggggtcgtattcctgatttcagaagaggatcataactgaaacaacataagacaatataatcatgtgcttttaacatatttgagaataaaaaggactagcaaataaaactcattttgcatttaaaagttggattatattttagtcccaagaagacaaagtcgcagattaacaacactttaaaaatattactcccattttattgtgttagattgcagtacaatgaatgaataaggggatttatttaaaagatcttaactttcttgactgatttaaaaagctaatcaatttattaaagccagaaatgttctcctctgggaaagcaatttctatctatttatctaccaatccccactcacatgtatatgtttgtgtttacatagagatagatggttttaagggttttcctattgttaaattatttcctaagacattgtgggttggagaccactaaacttataaaaaaccaaggaaagtaaagtttttcaaatgtttatactgtttaaggtgtttatttatataaaccatgcatgagaaaccatgcataaatttaataatttaaatttcaccagtaaattatcattgattaaatatggtcataccaatgaaataggttttttctttctctgtaataaaacaatttttctaaattcttatgttttcatagcaagattaacatatttaattacaaattaaatatgcaaaatgacaaatgcgtttaccttttgcttgaacaatctttcatttaaaaatttatcccagttattttgacaaataggtatatgcctgagaactttgaatgatgctgaaagctagaagcaaaccaggtactcttcagtcagggactggttgaagattttatggatgaggagttagcaaaatatctatatatgcatatcttctgactcccaggatacataagaaacacagggcctagaacagtatgaataaacacacatatacacaaacatcacagaagatactaaagatattaaaaatgtttacctatagaggtttggagagaacagaggggtggacagttgtggagataatatttgtgtaaatataactgtgatatagtttttatcttggaccatgtaaatatttgacataattaataatcaaaattaaatacaaaagaaaaagcatttctttaagcattcaaacccaactgaataccaaatagtggcaaaactacacaaaagatatatacttattttcaatgacttcacaaattaatatgagaatgtctttgggggaatataaaggtgaaaaaattctgaagaaatctcaaaatgcatttttaaatttgttattactttttatttgaatagttttgggagttacaagtggttttttattacatggatgaattatattgccagtgaattctgagattttagtgcactgtgaaaatgcatttagtagtctcattgttaatggtaatactggtgttattttgaacctattgtatctagaatactatgttgtaagaaaacaagtagttacatttctttagaagtcaggattttcagtgttaagagaaaatgagatacaagtatacaatgaaagaaattaagtaaaaatctttgacttaaattggaattagaaatattcatataaattaataactgattttctctatcaaaaaatctgtatttcccacttttccattgaaaagtccttgaagtaatgacaactcagtagcagtagttacaatgaacatcaagactgtggtctctccatactattactcactggttcctaagaaccagtgctcttaggagaatagctgaatccaggtctggggcaggaaatatgtaaaataaacttgggccatcttactccagaaatcaaggaagctatcaaagactaatgaatcatgtcacaaaaacgggagcaatattaaggagctcccactaacctaaaatgagacaatatggccatcaaaacaaataatgaccacaatgtatataaatatatagaaatctgagtttatgattatatacacacactcacctccttggtaccttttggaggtttctagggcattatctcattcatttgaaaacgatgaattaacagaaagaataaagcatttatcctt

SEQ ID NO: 348305 - DNA, 2002 bp, Homo sapiens
cctcttacacagtttgcagcgcgggggcggcggggtgacagtccccgtgcatgaatcagccacccctcaggctccgccccggcgggggtcggccggacgctcgccccgcataaagcgggcacccgggccgcctggagagaaagccgcgcacctcctcccgccaggcgctttctcggacgccttgcccagcgggccgcccgaccccctgcaccatggaccccgctcgccccctggggctgtcgattctgctgcttttcctgacggaggctgcactgggcgatgctgctcaggagccaacaggaaataacgcggagatctgtctcctgcccctagactacggaccctgccgggccctacttctccgttactactacgacaggtacacgcagagctgccgccagttcctgtacgggggctgcgagggcaacgccaacaatttctacacctgggaggcttgcgacgatgcttgctggaggatagaaaaagttcccaaagtttgccggctgcaagtgagtgtggacgaccagtgtgaggggtccacagaaaagtatttctttaatctaagttccatgacatgtgaaaaattcttttccggtgggtgtcaccggaaccggattgagaacaggtttccagatgaagctacttgtatgggcttctgcgcaccaaagaaaattccatcattttgctacagtccaaaagatgagggactgtgctctgccaatgtgactcgctattattttaatccaagatacagaacctgtgatgctttcacctatactggctgtggagggaatgacaataactttgttagcagggaggattgcaaacgtgcatgtgcaaaagctttgaaaaagaaaaagaagatgccaaagcttcgctttgccagtagaatccggaaaattcggaagaagcaattttaaacattcttaatatgtcatcttgtttgtctttatggcttatttgcctttatggttgtatctgaagaataatatgacagcatgaggaaacaaatcattggtgatttattcaccagtttttattaatacaagtcactttttcaaaaatttggatttttttatatataactagctgctattcaaatgtgagtctaccatttttaatttatggttcaactgtttgtgagactgaattcttgcaatgcataagatataaaagcaaatatgactcactcatttcttggggtcgtattcctgatttcagaagaggatcataactgaaacaacataagacaatataatcatgtgcttttaacatatttgagaataaaaaggactagcaaataaaactcattttgcatttaaaagttggattatattttagtcccaagaagacaaagtcgcagattaacaacactttaaaaatattactcccattttattgtgttagattgcagtacaatgaatgaataaggggatttatttaaaagatcttaactttcttgactgatttaaaaagctaatcaatttattaaagccagaaatgttctcctctgggaaagcaatttctatctatttatctaccaatccccactcacatgtatatgtttgtgtttacatagagatagatggttttaagggttttcctattgttaaattatttcctaagacattgtgggttggagaccactaaacttataaaaaaccaaggaaagtaaagtttttcaaatgtttatactgtttaaggtgtttatttatataaaccatgcatgagaaaccatgcataaatttaataatttaaatttcaccagtaaattatcattgattaaatatggtcataccaatgaaataggttttttctttctctgtaataaaacaatttttctaaattcttatgttttcatagcaagattaacatatttaattacaaattaaatatgcaaaatgacaaaaaaaaaaaaaaaaaaaaaaaaaaaaaatttttggggggcttgggccttggaaaaagttttttaaaaccctttcgttgtgggggggggggcccc

SEQ ID NO: 348306 - DNA, 1418 bp, Homo sapiens
cctcttacacagtttgcagcgcgggggcggcggggtgacagtccccgtgcatgaatcagccacccctcaggctccgccccggcgggggtcggccggacgctcgccccgcataaagcgggcacccgggccgcctggagagaaagccgcgcacctcctcccgccaggcgctttctcggacgccttgcccagcgggccgcccgaccccctgcaccatggaccccgctcgccccctggggctgtcgattctgctgcttttcctgacggaggctgcactgggcgatgctgctcaggagccaacaggaaataacgcggagatctgtctcctgcccctagactacggaccctgccgggccctacttctccgttactactacgacaggtacacgcagagctgccgccagttcctgtacgggggctgcgagggcaacgccaacaatttctacacctgggaggcttgcgacgatgcttgctggaggatagaaaaagttcccaaagtttgccggctgcaagtgagtgtggacgaccagtgtgaggggtccacagaaaagtatttctttaatctaagttccatgacatgtgaaaaattcttttccggtgggtgtcaccggaaccggattgagaacaggtttccagatgaagctacttgtatgggcttctgcgcaccaaagaaaattccatcattttgctacagtccaaaagatgagggactgtgctctgccaatgtgactcgctattattttaatccaagatacagaacctgtgatgctttcacctatactggctgtggagggaatgacaataactttgttagcagggaggattgcaaacgtgcatgtgcaaaagctttgaaaaagaaaaagaagatgccaaagcttcgctttgccagtagaatccggaaaattcggaagaagcaattttaaacattcttaatatgtcatcttgtttgtctttatggcttatttgcctttatggttgtatctgaagaataatatgacagcatgaggaaacaaatcattggtgatttattcaccagtttttattaatacaagtcactttttcaaaaatttggatttttttatatataactagctgctattcaaatgtgagtctaccatttttaatttatggttcaactgtttgtgagactgaattcttgcaatgcataagatataaaagcaaatatgactcactcatttcttggggtcgtattcctgatttcagaagaggatcataactgaaacaacataagacaatataatcatgtgcttttaacatatttgagaataaaaaggactagcaaataaaactcataaaaaaaaaaaaaaaaaaaaaaaaaaaaaaaaaaaaaaaaaaaaaaaaaaaaaacaaaaaaaaaaaaaaaacacaaacaacacaacaaaagaaaaaaaaaaaaaaaa

SEQ ID NO: 348307 - DNA, 1626 bp, Homo sapiens
cctcttacacagtttgcagcgcgggggcggcggggtgacagtccccgtgcatgaatcagccacccctcaggctccgccccggcgggggtcggccggacgctcgccccgcataaagcgggcacccgggccgcctggagagaaagccgcgcacctcctcccgccaggcgctttctcggacgccttgcccagcgggccgcccgaccccctgcaccatggaccccgctcgccccctggggctgtcgattctgctgcttttcctgacggaggctgcactgggcgatgctgctcaggagccaacaggaaataacgcggagatctgtctcctgcccctagactacggaccctgccgggccctacttctccgttactactacgacaggtacacgcagagctgccgccagttcctgtacgggggctgcgagggcaacgccaacaatttctacacctgggaggcttgcgacgatgcttgctggaggatagaaaaagttcccaaagtttgccggctgcaagtgagtgtggacgaccagtgtgaggggtccacagaaaagtatttctttaatctaagttccatgacatgtgaaaaattcttttccggtgggtgtcaccggaaccggattgagaacaggtttccagatgaagctacttgtatgggcttctgcgcaccaaagaaaattccatcattttgctacagtccaaaagatgagggactgtgctctgccaatgtgactcgctattattttaatccaagatacagaacctgtgatgctttcacctatactggctgtggagggaatgacaataactttgttagcagggaggattgcaaacgtgcatgtgcaaaagctttgaaaaagaaaaagaagatgccaaagcttcgctttgccagtagaatccggaaaattcggaagaagcaattttaaacattcttaatatgtcatcttgtttgtctttatggcttatttgcctttatggttgtatctgaagaataatatgacagcatgaggaaacaaatcattggtgatttattcaccagtttttattaatacaagtcactttttcaaaaatttggatttttttatatataactagctgctattcaaatgtgagtctaccatttttaatttatggttcaactgtttgtgagactgaattcttgcaatgcataagatataaaagcaaatatgactcactcatttcttggggtcgtattcctgatttcagaagaggatcataactgaaacaacataagacaatataatcatgtgcttttaacatatttgagaataaaaaggactagcaaataaaactcataaaaaaaaaaaaaaaaaaactttgtgcggccgccctgggcacacaagaaaagcttttaaaaccatagtcggtggggagacggggccccaagaaagggtaagggcacaactgtggcacaagagggggctacccagaggagaaacccggcgacacagagaaactggggcagtggggatctccgacccataaataagaaaacgcccggggggggacaacccgacagcgttctcgaaaacaacccacaaagggggtacggaggaccacacagggagaacatcacaaaggggagccacaacgaggccgaatatataatca

SEQ ID NO: 348308 - DNA, 3142 bp, Homo sapiens
  misc_feature (24)..(24): n is a, c, g, or t
  misc_feature (32)..(33): n is a, c, g, or t
agattcggcactaggcggaccttnacccagcnncacccgaccccctgcaccatggaccccgctcgccccctggggctgtcgattctgctgcttttcctgacggaggctgcactgggcgatgctgctcaggagccaacaggaaataacgcggagatctgtctcctgcccctagactacggaccctgccgggccctacttctccgttactactacgacaggtacacgcagagctgccgccagttcctgtacgggggctgcgagggcaacgccaacaatttctacacctgggaggcttgcgacgatgcttgctggaggatagaaaaagttcccaaagtttgccggctgcaagtgagtgtggacgaccagtgtgaggggtccacagaaaagtatttctttaatctaagttccatgacatgtgaaaaattcttttccggtgggtgtcaccggaaccggattgagaacaggtttccagatgaagctacttgtatgggcttctgcgcaccaaagaaaattccatcattttgctacagtccaaaagatgagggactgtgctctgccaatgtgactcgctattattttaatccaagatacagaacctgtgatgctttcacctatactggctgtggagggaatgacaataactttgttagcagggaggattgcaaacgtgcatgtgcaaaagctttgaaaaagaaaaagaagatgccaaagcttcgctttgccagtagaatccggaaaattcggaagaagcaattttaaacattcttaatatgtcatcttgtttgtctttatggcttatttgcctttatggttgtatctgaagaataatatgacagcatgaggaaacaaatcattggtgatttattcaccagtttttattaatacaagtcactttttcaaaaatttggatttttttatatataactagctgctattcaaatgtgagtctaccatttttaatttatggttcaactgtttgtgagactgaattcttgcaatgcataagatataaaagcaaatatgactcactcatttcttggggtcgtattcctgatttcagaagaggatcataactgaaacaacataagacaatataatcatgtgcttttaacatatttgagaataaaaaggactagcaaataaaactcattttgcatttaaaagttggattatattttagtcccaagaagacaaagtcgcagattaacaacactttaaaaatattactcccattttattgtgttagattgcagtacaatgaatgaataaggggatttatttaaaagatcttaactttcttgactgatttaaaaagctaatcaatttattaaagccagaaatgttctcctctgggaaagcaatttctatctatttatctaccaatccccactcacatgtatatgtttgtgtttacatagagatagatggttttaagggttttcctattgttaaattatttcctaagacattgtgggttggagaccactaaacttataaaaaaccaaggaaagtaaagtttttcaaatgtttatactgtttaaggtgtttatttatataaaccatgcatgagaaaccatgcataaatttaataatttaaatttcaccagtaaattatcattgattaaatatggtcataccaatgaaataggttttttctttctctgtaataaaacaatttttctaaattcttatgttttcatagcaagattaacatatttaattacaaattaaatatgcaaaatgacaaatgcgtttaccttttgcttgaacaatctttcatttaaaaatttatcccagttattttgacaaataggtatatgcctgagaactttgaatgatgctgaaagctagaagcaaaccaggtactcttcagtcagggactggttgaagattttatggatgaggagttagcaaaatatctatatatgcatatcttctgactcccaggatacataagaaacacagggcctagaacagtatgaataaacacacatatacacaaacatcacagaagatactaaagatattaaaaatgtttacctatagaggtttggagagaacagaggggtggacagttgtggagataatatttgtgtaaatataactgtgatatagtttttatcttggaccatgtaaatatttgacataattaataatcaaaattaaatacaaaagaaaaagcatttctttaagcattcaaacccaactgaataccaaatagtggcaaaactacacaaaagatatatacttattttcaatgacttcacaaattaatatgagaatgtctttgggggaatataaaggtgaaaaaattctgaagaaatctcaaaatgcatttttaaatttgttattactttttatttgaatagttttgggagttacaagtggttttttattacatggatgaattatattgccagtgaattctgagattttagtgcactgtgaaaatgcatttagtagtctcattgttaatggtaatactggtgttattttgaacctattgtatctagaatactatgttgtaagaaaacaagtagttacatttctttagaagtcaggattttcagtgttaagagaaaatgagatacaagtatacaatgaaagaaattaagtaaaaatctttgacttaaattggaattagaaatattcatataaattaataactgattttctctatcaaaaaatctgtatttcccacttttccattgaaaagtccttgaagtaatgacaactcagtagcagtagttacaatgaacatcaagactgtggtctctccatactattactcactggttcctaagaaccagtgctcttaggagaatagctgaatccaggtctggggcaggaaatatgtaaaataaacttgggccatcttactccagaaatcaaggaagctatcaaagactaatgaatcatgtcacaaaaacgggagcaatattaaggagctcccactaacctaaaatgagacaatatggccatcaaaacaaataatgaccacaatgtatataaatatatagaaatctgagtttatgattatatacacacactcacctccttggtaccttttggaggtttctagggcattatctcattcatttgaaaacgatgaattaacagaaagaataaagcatttatcctt

SEQ ID NO: 348309 - DNA, 1560 bp, Homo sapiens
cctcttacacagtttgcagcgcgggggcggcggggtgacagtccccgtgcatgaatcagccacccctcaggctccgccccggcgggggtcggccggacgctcgccccgcataaagcgggcacccgggccgcctggagagaaagccgcgcacctcctcccgccaggcgctttctcggacgccttgcccagcgggccgcccgaccccctgcaccatggaccccgctcgccccctggggctgtcgattctgctgcttttcctgacggaggctgcactgggcgatgctgctcaggagccaacaggaaataacgcggagatctgtctcctgcccctagactacggaccctgccgggccctacttctccgttactactacgacaggtacacgcagagctgccgccagttcctgtacgggggctgcgagggcaacgccaacaatttctacacctgggaggcttgcgacgatgcttgctggaggatagaaaaagttcccaaagtttgccggctgcaagtgagtgtggacgaccagtgtgaggggtccacagaaaagtatttctttaatctaagttccatgacatgtgaaaaattcttttccggtgggtgtcaccggaaccggattgagaacaggtttccagatgaagctacttgtatgggcttctgcgcaccaaagaaaattccatcattttgctacagtccaaaagatgagggactgtgctctgccaatgtgactcgctattattttaatccaagatacagaacctgtgatgctttcacctatactggctgtggagggaatgacaataactttgttagcagggaggattgcaaacgtgcatgtgcaaaagctttgaaaaagaaaaagaagatgccaaagcttcgctttgccagtagaatccggaaaattcggaagaagcaattttaaacattcttaatatgtcatcttgtttgtctttatggcttatttgcctttatggttgtatctgaagaataatatgacagcatgaggaaacaaatcattggtgatttattcaccagtttttattaatacaagtcactttttcaaaaatttggatttttttatatataactagctgctattcaaatgtgagtctaccatttttaatttatggttcaactgtttgtgagactgaattcttgcaatgcataagatataaaagcaaatatgactcactcaaaaaaaaaaaaaaaaaaaaaaaaaaaaaaaaaaaaaaaaaaaaaaaaaaaaaaaaaaaaaaaaaaaaaaaaaaaacaacaaaaaacaaaaaaagaagaaggagagacaagacagacagacgaaaaacgaacaaaggagaggccaagccagagcgaggcggaccgggagcgggagaggagcgaccgggacgcgggcacgggcgcgcaggcgggagggggaggagaacacagtggggaagagacaaaaagacagaaaaagaggaaagaagaaacaagaaagaaaaaaaggacaaaacagaaaaaaaggacgaaataaacaaaagaggaaagaacgaaagaagaaaaacaacaaacaccagagaagagaa

SEQ ID NO: 348310 - DNA, 3002 bp, Homo sapiens
tgatctagaggatcctatagagcataccctagactacggaccctgccgggccctacttctccgttactactacgacaggtacacgcagagctgccgccagttcctgtacgggggctgcgagggcaacgccaacaatttctacacctgggaggcttgcgacgatgcttgctggaggatagaaaaagttcccaaagtttgccggctgcaagtgagtgtggacgaccagtgtgaggggtccacagaaaagtatttctttaatctaagttccatgacatgtgaaaaattcttttccggtgggtgtcaccggaaccggattgagaacaggtttccagatgaagctacttgtatgggcttctgcgcaccaaagaaaattccatcattttgctacagtccaaaagatgagggactgtgctctgccaatgtgactcgctattattttaatccaagatacagaacctgtgatgctttcacctatactggctgtggagggaatgacaataactttgttagcagggaggattgcaaacgtgcatgtgcaaaagctttgaaaaagaaaaagaagatgccaaagcttcgctttgccagtagaatccggaaaattcggaagaagcaattttaaacattcttaatatgtcatcttgtttgtctttatggcttatttgcctttatggttgtatctgaagaataatatgacagcatgaggaaacaaatcattggtgatttattcaccagtttttattaatacaagtcactttttcaaaaatttggatttttttatatataactagctgctattcaaatgtgagtctaccatttttaatttatggttcaactgtttgtgagactgaattcttgcaatgcataagatataaaagcaaatatgactcactcatttcttggggtcgtattcctgatttcagaagaggatcataactgaaacaacataagacaatataatcatgtgcttttaacatatttgagaataaaaaggactagcaaataaaactcattttgcatttaaaagttggattatattttagtcccaagaagacaaagtcgcagattaacaacactttaaaaatattactcccattttattgtgttagattgcagtacaatgaatgaataaggggatttatttaaaagatcttaactttcttgactgatttaaaaagctaatcaatttattaaagccagaaatgttctcctctgggaaagcaatttctatctatttatctaccaatccccactcacatgtatatgtttgtgtttacatagagatagatggttttaagggttttcctattgttaaattatttcctaagacattgtgggttggagaccactaaacttataaaaaaccaaggaaagtaaagtttttcaaatgtttatactgtttaaggtgtttatttatataaaccatgcatgagaaaccatgcataaatttaataatttaaatttcaccagtaaattatcattgattaaatatggtcataccaatgaaataggttttttctttctctgtaataaaacaatttttctaaattcttatgttttcatagcaagattaacatatttaattacaaattaaatatgcaaaatgacaaatgcgtttaccttttgcttgaacaatctttcatttaaaaatttatcccagttattttgacaaataggtatatgcctgagaactttgaatgatgctgaaagctagaagcaaaccaggtactcttcagtcagggactggttgaagattttatggatgaggagttagcaaaatatctatatatgcatatcttctgactcccaggatacataagaaacacagggcctagaacagtatgaataaacacacatatacacaaacatcacagaagatactaaagatattaaaaatgtttacctatagaggtttggagagaacagaggggtggacagttgtggagataatatttgtgtaaatataactgtgatatagtttttatcttggaccatgtaaatatttgacataattaataatcaaaattaaatacaaaagaaaaagcatttctttaagcattcaaacccaactgaataccaaatagtggcaaaactacacaaaagatatatacttattttcaatgacttcacaaattaatatgagaatgtctttgggggaatataaaggtgaaaaaattctgaagaaatctcaaaatgcatttttaaatttgttattactttttatttgaatagttttgggagttacaagtggttttttattacatggatgaattatattgccagtgaattctgagattttagtgcactgtgaaaatgcatttagtagtctcattgttaatggtaatactggtgttattttgaacctattgtatctagaatactatgttgtaagaaaacaagtagttacatttctttagaagtcaggattttcagtgttaagagaaaatgagatacaagtatacaatgaaagaaattaagtaaaaatctttgacttaaattggaattagaaatattcatataaattaataactgattttctctatcaaaaaatctgtatttcccacttttccattgaaaagtccttgaagtaatgacaactcagtagcagtagttacaatgaacatcaagactgtggtctctccatactattactcactggttcctaagaaccagtgctcttaggagaatagctgaatccaggtctggggcaggaaatatgtaaaataaacttgggccatcttactccagaaatcaaggaagctatcaaagactaatgaatcatgtcacaaaaacgggagcaatattaaggagctcccactaacctaaaatgagacaatatggccatcaaaacaaataatgaccacaatgtatataaatatatagaaatctgagtttatgattatatacacacactcacctccttggtaccttttggaggtttctagggcattatctcattcatttgaaaacgatgaattaacagaaagaataaagcatttatcctt

SEQ ID NO: 348311 - DNA, 2971 bp, Homo sapiens
gctcgctactagtccacggttggctactagtccacggttggctactaggccacggttggctactagtccacggttggctactagtccacggttggctactagtccacggttggctactagtccacggttggctactagtccaggatagaaaaagttcccaaagtttgccggctgcaagtgagtgtggacgaccagtgtgaggggtccacagaaaagtatttctttaatctaagttccatgacatgtgaaaaattcttttccggtgggtgtcaccggaaccggattgagaacaggtttccagatgaagctacttgtatgggcttctgcgcaccaaagaaaattccatcattttgctacagtccaaaagatgagggactgtgctctgccaatgtgactcgctattattttaatccaagatacagaacctgtgatgctttcacctatactggctgtggagggaatgacaataactttgttagcagggaggattgcaaacgtgcatgtgcaaaagctttgaaaaagaaaaagaagatgccaaagcttcgctttgccagtagaatccggaaaattcggaagaagcaattttaaacattcttaatatgtcatcttgtttgtctttatggcttatttgcctttatggttgtatctgaagaataatatgacagcatgaggaaacaaatcattggtgatttattcaccagtttttattaatacaagtcactttttcaaaaatttggatttttttatatataactagctgctattcaaatgtgagtctaccatttttaatttatggttcaactgtttgtgagactgaattcttgcaatgcataagatataaaagcaaatatgactcactcatttcttggggtcgtattcctgatttcagaagaggatcataactgaaacaacataagacaatataatcatgtgcttttaacatatttgagaataaaaaggactagcaaataaaactcattttgcatttaaaagttggattatattttagtcccaagaagacaaagtcgcagattaacaacactttaaaaatattactcccattttattgtgttagattgcagtacaatgaatgaataaggggatttatttaaaagatcttaactttcttgactgatttaaaaagctaatcaatttattaaagccagaaatgttctcctctgggaaagcaatttctatctatttatctaccaatccccactcacatgtatatgtttgtgtttacatagagatagatggttttaagggttttcctattgttaaattatttcctaagacattgtgggttggagaccactaaacttataaaaaaccaaggaaagtaaagtttttcaaatgtttatactgtttaaggtgtttatttatataaaccatgcatgagaaaccatgcataaatttaataatttaaatttcaccagtaaattatcattgattaaatatggtcataccaatgaaataggttttttctttctctgtaataaaacaatttttctaaattcttatgttttcatagcaagattaacatatttaattacaaattaaatatgcaaaatgacaaatgcgtttaccttttgcttgaacaatctttcatttaaaaatttatcccagttattttgacaaataggtatatgcctgagaactttgaatgatgctgaaagctagaagcaaaccaggtactcttcagtcagggactggttgaagattttatggatgaggagttagcaaaatatctatatatgcatatcttctgactcccaggatacataagaaacacagggcctagaacagtatgaataaacacacatatacacaaacatcacagaagatactaaagatattaaaaatgtttacctatagaggtttggagagaacagaggggtggacagttgtggagataatatttgtgtaaatataactgtgatatagtttttatcttggaccatgtaaatatttgacataattaataatcaaaattaaatacaaaagaaaaagcatttctttaagcattcaaacccaactgaataccaaatagtggcaaaactacacaaaagatatatacttattttcaatgacttcacaaattaatatgagaatgtctttgggggaatataaaggtgaaaaaattctgaagaaatctcaaaatgcatttttaaatttgttattactttttatttgaatagttttgggagttacaagtggttttttattacatggatgaattatattgccagtgaattctgagattttagtgcactgtgaaaatgcatttagtagtctcattgttaatggtaatactggtgttattttgaacctattgtatctagaatactatgttgtaagaaaacaagtagttacatttctttagaagtcaggattttcagtgttaagagaaaatgagatacaagtatacaatgaaagaaattaagtaaaaatctttgacttaaattggaattagaaatattcatataaattaataactgattttctctatcaaaaaatctgtatttcccacttttccattgaaaagtccttgaagtaatgacaactcagtagcagtagttacaatgaacatcaagactgtggtctctccatactattactcactggttcctaagaaccagtgctcttaggagaatagctgaatccaggtctggggcaggaaatatgtaaaataaacttgggccatcttactccagaaatcaaggaagctatcaaagactaatgaatcatgtcacaaaaacgggagcaatattaaggagctcccactaacctaaaatgagacaatatggccatcaaaacaaataatgaccacaatgtatataaatatatagaaatctgagtttatgattatatacacacactcacctccttggtaccttttggaggtttctagggcattatctcattcatttgaaaacgatgaattaacagaaagaataaagcatttatcctt

SEQ ID NO: 348312 - DNA, 3227 bp, Homo sapiens
cctcttacacagtttgcagcgcgggggcggcggggtgacagtccccgtgcatgaatcagccacccctcaggctccgccccggcgggggtcggccggacgctcgccccgcataaagcgggcacccgggccgcctggagagaaagccgcgcacctcctcccgccaggcgctttctcggacgccttgcccagcgggccgcccgaccccctgcaccatggaccccgctcgccccctggggctgtcgattctgctgcttttcctgacggaggctgcactgggcgatgctgctcaggagccaacaggaaataacgcggagatctgtctcctgcccctagactacggaccctgccgggccctacttctccgttactactacgacaggtacacgcagagctgccgccagttcctgtacgggggctgcgagggcaacgccaacaatttctacacctgggaggcttgcgacgatgcttgctggaggatagaaaaagttcccaaagtttgccggctgcaagtgagtgtggacgaccagtgtgaggggtccacagaaaagtatttctttaatctaagttccatgacatgtgaaaaattcttttccggtgggtgtcaccggaaccggattgagaacaggtttccagatgaagctacttgtatgggcttctgcgcaccaaagaaaaatacagaacctgtgatgctttcacctatactggctgtggagggaatgacaataactttgttagcagggaggattgcaaacgtgcatgtgcaaaagctttgaaaaagaaaaagaagatgccaaagcttcgctttgccagtagaatccggaaaattcggaagaagcaattttaaacattcttaatatgtcatcttgtttgtctttatggcttatttgcctttatggttgtatctgaagaataatatgacagcatgaggaaacaaatcattggtgatttattcaccagtttttattaatacaagtcactttttcaaaaatttggatttttttatatataactagctgctattcaaatgtgagtctaccatttttaatttatggttcaactgtttgtgagactgaattcttgcaatgcataagatataaaagcaaatatgactcactcatttcttggggtcgtattcctgatttcagaagaggatcataactgaaacaacataagacaatataatcatgtgcttttaacatatttgagaataaaaaggactagcaaataaaactcattttgcatttaaaagttggattatattttagtcccaagaagacaaagtcgcagattaacaacactttaaaaatattactcccattttattgtgttagattgcagtacaatgaatgaataaggggatttatttaaaagatcttaactttcttgactgatttaaaaagctaatcaatttattaaagccagaaatgttctcctctgggaaagcaatttctatctatttatctaccaatccccactcacatgtatatgtttgtgtttacatagagatagatggttttaagggttttcctattgttaaattatttcctaagacattgtgggttggagaccactaaacttataaaaaaccaaggaaagtaaagtttttcaaatgtttatactgtttaaggtgtttatttatataaaccatgcatgagaaaccatgcataaatttaataatttaaatttcaccagtaaattatcattgattaaatatggtcataccaatgaaataggttttttctttctctgtaataaaacaatttttctaaattcttatgttttcatagcaagattaacatatttaattacaaattaaatatgcaaaatgacaaatgcgtttaccttttgcttgaacaatctttcatttaaaaatttatcccagttattttgacaaataggtatatgcctgagaactttgaatgatgctgaaagctagaagcaaaccaggtactcttcagtcagggactggttgaagattttatggatgaggagttagcaaaatatctatatatgcatatcttctgactcccaggatacataagaaacacagggcctagaacagtatgaataaacacacatatacacaaacatcacagaagatactaaagatattaaaaatgtttacctatagaggtttggagagaacagaggggtggacagttgtggagataatatttgtgtaaatataactgtgatatagtttttatcttggaccatgtaaatatttgacataattaataatcaaaattaaatacaaaagaaaaagcatttctttaagcattcaaacccaactgaataccaaatagtggcaaaactacacaaaagatatatacttattttcaatgacttcacaaattaatatgagaatgtctttgggggaatataaaggtgaaaaaattctgaagaaatctcaaaatgcatttttaaatttgttattactttttatttgaatagttttgggagttacaagtggttttttattacatggatgaattatattgccagtgaattctgagattttagtgcactgtgaaaatgcatttagtagtctcattgttaatggtaatactggtgttattttgaacctattgtatctagaatactatgttgtaagaaaacaagtagttacatttctttagaagtcaggattttcagtgttaagagaaaatgagatacaagtatacaatgaaagaaattaagtaaaaatctttgacttaaattggaattagaaatattcatataaattaataactgattttctctatcaaaaaatctgtatttcccacttttccattgaaaagtccttgaagtaatgacaactcagtagcagtagttacaatgaacatcaagactgtggtctctccatactattactcactggttcctaagaaccagtgctcttaggagaatagctgaatccaggtctggggcaggaaatatgtaaaataaacttgggccatcttactccagaaatcaaggaagctatcaaagactaatgaatcatgtcacaaaaacgggagcaatattaaggagctcccactaacctaaaatgagacaatatggccatcaaaacaaataatgaccacaatgtatataaatatatagaaatctgagtttatgattatatacacacactcacctccttggtaccttttggaggtttctagggcattatctcattcatttgaaaacgatgaattaacagaaagaataaagcatttatcctt

SEQ ID NO: 348313 - DNA, 3302 bp, Homo sapiens
cctcttacacagtttgcagcgcgggggcggcggggtgacagtccccgtgcatgaatcagccacccctcaggctccgccccggcgggggtcggccggacgctcgccccgcataaagcgggcacccgggccgcctggagagaaagccgcgcacctcctcccgccaggcgctttctcggacgccttgcccagcgggccgcccgaccccctgcaccatggaccccgctcgccccctggggctgtcgattctgctgcttttcctgacggaggctgcactgggcgatgctgctcaggagccaacaggaaataacgcggagatctgtctcctgcccctagactacggaccctgccgggccctacttctccgttactactacgacaggtacacgcagagctgccgccagttcctgtacgggggctgcgagggcaacgccaacaatttctacacctgggaggcttgcgacgatgcttgctggaggatagaaaaagttcccaaagtttgccggctgcaagtgagtgtggacgaccagtgtgaggggtccacagaaaagtatttctttaatctaagttccatgacatgtgaaaaattcttttccggtgggtgtcaccggaaccggattgagaacaggtttccagatgaagctacttgtatgggcttctgcgcaccaaagaaaattccatcattttgctacagtccaaaagatgagggactgtgctctgccaatgtgactcgctattattttaatccaagatacagaacctgtgatgctttcacctatactggctgtggagggaatgacaataactttgttagcaggaggattgcaaacgtgcatgtgcaaaagctttgaaaaagaaaaagaagatgccaaagcttcgctttgccagtagaatccggaaaattcggaagaagcaattttaaacattcttaatatgtcatcttgtttgtctttatggcttatttgcctttatggttgtatctgaagaataatatgacagcatgaggaaacaaatcattggtgatttattcaccagtttttattaatacaagtcactttttcaaaaatttggatttttttatatataactagctgctattcaaatgtgagtctaccatttttaatttatggttcaactgtttgtgagactgaattcttgcaatgcataagatataaaagcaaatatgactcactcatttcttggggtcgtattcctgatttcagaagaggatcataactgaaacaacataagacaatataatcatgtgcttttaacatatttgagaataaaaaggactagcaaataaaactcattttgcatttaaaagttggattatattttagtcccaagaagacaaagtcgcagattaacaacactttaaaaatattactcccattttattgtgttagattgcagtacaatgaatgaataaggggatttatttaaaagatcttaactttcttgactgatttaaaaagctaatcaatttattaaagccagaaatgttctcctctgggaaagcaatttctatctatttatctaccaatccccactcacatgtatatgtttgtgtttacatagagatagatggttttaagggttttcctattgttaaattatttcctaagacattgtgggttggagaccactaaacttataaaaaaccaaggaaagtaaagtttttcaaatgtttatactgtttaaggtgtttatttatataaaccatgcatgagaaaccatgcataaatttaataatttaaatttcaccagtaaattatcattgattaaatatggtcataccaatgaaataggttttttctttctctgtaataaaacaatttttctaaattcttatgttttcatagcaagattaacatatttaattacaaattaaatatgcaaaatgacaaatgcgtttaccttttgcttgaacaatctttcatttaaaaatttatcccagttattttgacaaataggtatatgcctgagaactttgaatgatgctgaaagctagaagcaaaccaggtactcttcagtcagggactggttgaagattttatggatgaggagttagcaaaatatctatatatgcatatcttctgactcccaggatacataagaaacacagggcctagaacagtatgaataaacacacatatacacaaacatcacagaagatactaaagatattaaaaatgtttacctatagaggtttggagagaacagaggggtggacagttgtggagataatatttgtgtaaatataactgtgatatagtttttatcttggaccatgtaaatatttgacataattaataatcaaaattaaatacaaaagaaaaagcatttctttaagcattcaaacccaactgaataccaaatagtggcaaaactacacaaaagatatatacttattttcaatgacttcacaaattaatatgagaatgtctttgggggaatataaaggtgaaaaaattctgaagaaatctcaaaatgcatttttaaatttgttattactttttatttgaatagttttgggagttacaagtggttttttattacatggatgaattatattgccagtgaattctgagattttagtgcactgtgaaaatgcatttagtagtctcattgttaatggtaatactggtgttattttgaacctattgtatctagaatactatgttgtaagaaaacaagtagttacatttctttagaagtcaggattttcagtgttaagagaaaatgagatacaagtatacaatgaaagaaattaagtaaaaatctttgacttaaattggaattagaaatattcatataaattaataactgattttctctatcaaaaaatctgtatttcccacttttccattgaaaagtccttgaagtaatgacaactcagtagcagtagttacaatgaacatcaagactgtggtctctccatactattactcactggttcctaagaaccagtgctcttaggagaatagctgaatccaggtctggggcaggaaatatgtaaaataaacttgggccatcttactccagaaatcaaggaagctatcaaagactaatgaatcatgtcacaaaaacgggagcaatattaaggagctcccactaacctaaaatgagacaatatggccatcaaaacaaataatgaccacaatgtatataaatatatagaaatctgagtttatgattatatacacacactcacctccttggtaccttttggaggtttctagggcattatctcattcatttgaaaacgatgaattaacagaaagaataaagcatttatcctt

SEQ ID NO: 348314 - DNA, 3151 bp, Homo sapiens
  misc_feature (25)..(25): n is a, c, g, or t
  misc_feature (28)..(28): n is a, c, g, or t
  misc_feature (30)..(30): n is a, c, g, or t
  misc_feature (32)..(32): n is a, c, g, or t
  misc_feature (35)..(35): n is a, c, g, or t
  misc_feature (39)..(39): n is a, c, g, or t
  misc_feature (45)..(45): n is a, c, g, or t
aaaaagcagctgtaccgtccgaatnccngnanggntttntcgacnccttgcccagcggccgcccgaccccctgcaccatggaccccgctcgccccctggggctgtcgattctgctgcttttcctgacggaggctgcactgggcgatgctgctcaggagccaacaggaaataacgcggagatctgtctcctgcccctagactacggaccctgccgggccctacttctccgttactactacgacaggtacacgcagagctgccgccagttcctgtacgggggctgcgagggcaacgccaacaatttctacacctgggaggcttgcgacgatgcttgctggaggatagaaaaagttcccaaagtttgccggctgcaagtgagtgtggacgaccagtgtgaggggtccacagaaaagtatttctttaatctaagttccatgacatgtgaaaaattcttttccggtgggtgtcaccggaaccggattgagaacaggtttccagatgaagctacttgtatgggcttctgcgcaccaaagaaaacagtccaaaagatgagggactgtgctctgccaatgtgactcgctattattttaatccaagatacagaacctgtgatgctttcacctatactggctgtggagggaatgacaataactttgttagcaggaggattgcaaacgtgcatgtgcaaaagctttgaaaaagaaaaagaagatgccaaagcttcgctttgccagtagaatccggaaaattcggaagaagcaattttaaacattcttaatatgtcatcttgtttgtctttatggcttatttgcctttatggttgtatctgaagaataatatgacagcatgaggaaacaaatcattggtgatttattcaccagtttttattaatacaagtcactttttcaaaaatttggatttttttatatataactagctgctattcaaatgtgagtctaccatttttaatttatggttcaactgtttgtgagactgaattcttgcaatgcataagatataaaagcaaatatgactcactcatttcttggggtcgtattcctgatttcagaagaggatcataactgaaacaacataagacaatataatcatgtgcttttaacatatttgagaataaaaaggactagcaaataaaactcattttgcatttaaaagttggattatattttagtcccaagaagacaaagtcgcagattaacaacactttaaaaatattactcccattttattgtgttagattgcagtacaatgaatgaataaggggatttatttaaaagatcttaactttcttgactgatttaaaaagctaatcaatttattaaagccagaaatgttctcctctgggaaagcaatttctatctatttatctaccaatccccactcacatgtatatgtttgtgtttacatagagatagatggttttaagggttttcctattgttaaattatttcctaagacattgtgggttggagaccactaaacttataaaaaaccaaggaaagtaaagtttttcaaatgtttatactgtttaaggtgtttatttatataaaccatgcatgagaaaccatgcataaatttaataatttaaatttcaccagtaaattatcattgattaaatatggtcataccaatgaaataggttttttctttctctgtaataaaacaatttttctaaattcttatgttttcatagcaagattaacatatttaattacaaattaaatatgcaaaatgacaaatgcgtttaccttttgcttgaacaatctttcatttaaaaatttatcccagttattttgacaaataggtatatgcctgagaactttgaatgatgctgaaagctagaagcaaaccaggtactcttcagtcagggactggttgaagattttatggatgaggagttagcaaaatatctatatatgcatatcttctgactcccaggatacataagaaacacagggcctagaacagtatgaataaacacacatatacacaaacatcacagaagatactaaagatattaaaaatgtttacctatagaggtttggagagaacagaggggtggacagttgtggagataatatttgtgtaaatataactgtgatatagtttttatcttggaccatgtaaatatttgacataattaataatcaaaattaaatacaaaagaaaaagcatttctttaagcattcaaacccaactgaataccaaatagtggcaaaactacacaaaagatatatacttattttcaatgacttcacaaattaatatgagaatgtctttgggggaatataaaggtgaaaaaattctgaagaaatctcaaaatgcatttttaaatttgttattactttttatttgaatagttttgggagttacaagtggttttttattacatggatgaattatattgccagtgaattctgagattttagtgcactgtgaaaatgcatttagtagtctcattgttaatggtaatactggtgttattttgaacctattgtatctagaatactatgttgtaagaaaacaagtagttacatttctttagaagtcaggattttcagtgttaagagaaaatgagatacaagtatacaatgaaagaaattaagtaaaaatctttgacttaaattggaattagaaatattcatataaattaataactgattttctctatcaaaaaatctgtatttcccacttttccattgaaaagtccttgaagtaatgacaactcagtagcagtagttacaatgaacatcaagactgtggtctctccatactattactcactggttcctaagaaccagtgctcttaggagaatagctgaatccaggtctggggcaggaaatatgtaaaataaacttgggccatcttactccagaaatcaaggaagctatcaaagactaatgaatcatgtcacaaaaacgggagcaatattaaggagctcccactaacctaaaatgagacaatatggccatcaaaacaaataatgaccacaatgtatataaatatatagaaatctgagtttatgattatatacacacactcacctccttggtaccttttggaggtttctagggcattatctcattcatttgaaaacgatgaattaacagaaagaataaagcatttatcctt

SEQ ID NO: 348315 - DNA, 3695 bp, Homo sapiens
tttctttcgacggggtgtcaccgtgtaagccaggatggtcttgatctcctgacctcatgatctgcccacctcggcctcccaaaatgctgggattacaggtgtaagccaccacgcccagccctgaattgtttctttagaactatttctcagctactcaatttatgcataaaagattaaagtattcattaatgaatgttatgacctcagatttgtacacaataagttatacatgtgagatagtggaatatatacagaattaagatggtgaaacttgaaaatttctttctaaagttttcggttagatttctgtattcttcagtaattgcaaattgcagcacaaacatctccacacgtttctgtcctatccatttgttacctctcccaccaccacccctgaatccttgaaatgatagtctcttgagtagtatttaatgtttgcagagggagacaatacaggcatttcccccagacacagagatttttgaaaagttcaacaaacaaggaaaacttgctttggcagagaatttgataaagctttatagctgtactgtgttgaatatgcaaaatcttgagttaatgtggtgatggttactgtggatgttctcttgtttgtgtacatataaatgtttgctccagtggttacctggaaattagtatgcatatattattgattaataatggaatgagagctgttaaaaacattaaagcaaaactaccaacacgacaaaatttaccaaatcatgccacatattgtccttgaaacttaccccatttttacctaaccatatctggtatttgggtttaacttctttttacatttaaaggatacaaagatgtagcttcagaagaaattctatccagtttacaaaaatttagaattaccaaaatatagcatgtaagcttacctgcaatttgaagcacatctttttaaaggtttagtatgatattttggattcagactgaggcttctatgggattagattttcttcagttacttcagtaatcaccataatttaaaaattctggtattataacatttctaattttcttctcttttttataaagttccatcattttgctacagtccaaaagatgagggactgtgctctgccaatgtgactcgctattattttaatccaagatacagaacctgtgatgctttcacctatactggctgtggagggaatgacaataactttgttagcaggaggattgcaaacgtgcatgtgcaaaagctttgaaaaagaaaaagaagatgccaaagcttcgctttgccagtagaatccggaaaattcggaagaagcaattttaaacattcttaatatgtcatcttgtttgtctttatggcttatttgcctttatggttgtatctgaagaataatatgacagcatgaggaaacaaatcattggtgatttattcaccagtttttattaatacaagtcactttttcaaaaatttggatttttttatatataactagctgctattcaaatgtgagtctaccatttttaatttatggttcaactgtttgtgagactgaattcttgcaatgcataagatataaaagcaaatatgactcactcatttcttggggtcgtattcctgatttcagaagaggatcataactgaaacaacataagacaatataatcatgtgcttttaacatatttgagaataaaaaggactagcaaataaaactcattttgcatttaaaagttggattatattttagtcccaagaagacaaagtcgcagattaacaacactttaaaaatattactcccattttattgtgttagattgcagtacaatgaatgaataaggggatttatttaaaagatcttaactttcttgactgatttaaaaagctaatcaatttattaaagccagaaatgttctcctctgggaaagcaatttctatctatttatctaccaatccccactcacatgtatatgtttgtgtttacatagagatagatggttttaagggttttcctattgttaaattatttcctaagacattgtgggttggagaccactaaacttataaaaaaccaaggaaagtaaagtttttcaaatgtttatactgtttaaggtgtttatttatataaaccatgcatgagaaaccatgcataaatttaataatttaaatttcaccagtaaattatcattgattaaatatggtcataccaatgaaataggttttttctttctctgtaataaaacaatttttctaaattcttatgttttcatagcaagattaacatatttaattacaaattaaatatgcaaaatgacaaatgcgtttaccttttgcttgaacaatctttcatttaaaaatttatcccagttattttgacaaataggtatatgcctgagaactttgaatgatgctgaaagctagaagcaaaccaggtactcttcagtcagggactggttgaagattttatggatgaggagttagcaaaatatctatatatgcatatcttctgactcccaggatacataagaaacacagggcctagaacagtatgaataaacacacatatacacaaacatcacagaagatactaaagatattaaaaatgtttacctatagaggtttggagagaacagaggggtggacagttgtggagataatatttgtgtaaatataactgtgatatagtttttatcttggaccatgtaaatatttgacataattaataatcaaaattaaatacaaaagaaaaagcatttctttaagcattcaaacccaactgaataccaaatagtggcaaaactacacaaaagatatatacttattttcaatgacttcacaaattaatatgagaatgtctttgggggaatataaaggtgaaaaaattctgaagaaatctcaaaatgcatttttaaatttgttattactttttatttgaatagttttgggagttacaagtggttttttattacatggatgaattatattgccagtgaattctgagattttagtgcactgtgaaaatgcatttagtagtctcattgttaatggtaatactggtgttattttgaacctattgtatctagaatactatgttgtaagaaaacaagtagttacatttctttagaagtcaggattttcagtgttaagagaaaatgagatacaagtatacaatgaaagaaattaagtaaaaatctttgacttaaattggaattagaaatattcatataaattaataactgattttctctatcaaaaaatctgtatttcccacttttccattgaaaagtccttgaagtaatgacaactcagtagcagtagttacaatgaacatcaagactgtggtctctccatactattactcactggttcctaagaaccagtgctcttaggagaatagctgaatccaggtctggggcaggaaatatgtaaaataaacttgggccatcttactccagaaatcaaggaagctatcaaagactaatgaatcatgtcacaaaaacgggagcaatattaaggagctcccactaacctaaaatgagacaatatggccatcaaaacaaataatgaccacaatgtatataaatatatagaaatctgagtttatgattatatacacacactcacctccttggtaccttttggaggtttctagggcattatctcattcatttgaaaacgatgaattaacagaaagaataaagcatttatcctt

SEQ ID NO: 348316 - DNA, 2831 bp, Homo sapiens
gctcgctactagtccacggttggctactagtccacggttggctactaggccacggttggctactagtccacggttggctactagtccacggttggctcatgacatgtgaaaaattcttttccggtgggtgtcaccggaaccggattgagaacaggtttccagatgaagctacttgtatgggcttctgcgcaccaaagaaaattccatcattttgctacagtccaaaagatgagggactgtgctctgccaatgtgactcgctattattttaatccaagatacagaacctgtgatgctttcacctatactggctgtggagggaatgacaataactttgttagcaggaggattgcaaacgtgcatgtgcaaaagctttgaaaaagaaaaagaagatgccaaagcttcgctttgccagtagaatccggaaaattcggaagaagcaattttaaacattcttaatatgtcatcttgtttgtctttatggcttatttgcctttatggttgtatctgaagaataatatgacagcatgaggaaacaaatcattggtgatttattcaccagtttttattaatacaagtcactttttcaaaaatttggatttttttatatataactagctgctattcaaatgtgagtctaccatttttaatttatggttcaactgtttgtgagactgaattcttgcaatgcataagatataaaagcaaatatgactcactcatttcttggggtcgtattcctgatttcagaagaggatcataactgaaacaacataagacaatataatcatgtgcttttaacatatttgagaataaaaaggactagcaaataaaactcattttgcatttaaaagttggattatattttagtcccaagaagacaaagtcgcagattaacaacactttaaaaatattactcccattttattgtgttagattgcagtacaatgaatgaataaggggatttatttaaaagatcttaactttcttgactgatttaaaaagctaatcaatttattaaagccagaaatgttctcctctgggaaagcaatttctatctatttatctaccaatccccactcacatgtatatgtttgtgtttacatagagatagatggttttaagggttttcctattgttaaattatttcctaagacattgtgggttggagaccactaaacttataaaaaaccaaggaaagtaaagtttttcaaatgtttatactgtttaaggtgtttatttatataaaccatgcatgagaaaccatgcataaatttaataatttaaatttcaccagtaaattatcattgattaaatatggtcataccaatgaaataggttttttctttctctgtaataaaacaatttttctaaattcttatgttttcatagcaagattaacatatttaattacaaattaaatatgcaaaatgacaaatgcgtttaccttttgcttgaacaatctttcatttaaaaatttatcccagttattttgacaaataggtatatgcctgagaactttgaatgatgctgaaagctagaagcaaaccaggtactcttcagtcagggactggttgaagattttatggatgaggagttagcaaaatatctatatatgcatatcttctgactcccaggatacataagaaacacagggcctagaacagtatgaataaacacacatatacacaaacatcacagaagatactaaagatattaaaaatgtttacctatagaggtttggagagaacagaggggtggacagttgtggagataatatttgtgtaaatataactgtgatatagtttttatcttggaccatgtaaatatttgacataattaataatcaaaattaaatacaaaagaaaaagcatttctttaagcattcaaacccaactgaataccaaatagtggcaaaactacacaaaagatatatacttattttcaatgacttcacaaattaatatgagaatgtctttgggggaatataaaggtgaaaaaattctgaagaaatctcaaaatgcatttttaaatttgttattactttttatttgaatagttttgggagttacaagtggttttttattacatggatgaattatattgccagtgaattctgagattttagtgcactgtgaaaatgcatttagtagtctcattgttaatggtaatactggtgttattttgaacctattgtatctagaatactatgttgtaagaaaacaagtagttacatttctttagaagtcaggattttcagtgttaagagaaaatgagatacaagtatacaatgaaagaaattaagtaaaaatctttgacttaaattggaattagaaatattcatataaattaataactgattttctctatcaaaaaatctgtatttcccacttttccattgaaaagtccttgaagtaatgacaactcagtagcagtagttacaatgaacatcaagactgtggtctctccatactattactcactggttcctaagaaccagtgctcttaggagaatagctgaatccaggtctggggcaggaaatatgtaaaataaacttgggccatcttactccagaaatcaaggaagctatcaaagactaatgaatcatgtcacaaaaacgggagcaatattaaggagctcccactaacctaaaatgagacaatatggccatcaaaacaaataatgaccacaatgtatataaatatatagaaatctgagtttatgattatatacacacactcacctccttggtaccttttggaggtttctagggcattatctcattcatttgaaaacgatgaattaacagaaagaataaagcatttatcctt

SEQ ID NO: 348317 - DNA, 2552 bp, Homo sapiens
tattaaaataaagagaaagcctagccgggcgcgggggctcatgcctgtaatcccagcactttgggaggattgcaaacgtgcatgtgcaaaagctttgaaaaagaaaaagaagatgccaaagcttcgctttgccagtagaatccggaaaattcggaagaagcaattttaaacattcttaatatgtcatcttgtttgtctttatggcttatttgcctttatggttgtatctgaagaataatatgacagcatgaggaaacaaatcattggtgatttattcaccagtttttattaatacaagtcactttttcaaaaatttggatttttttatatataactagctgctattcaaatgtgagtctaccatttttaatttatggttcaactgtttgtgagactgaattcttgcaatgcataagatataaaagcaaatatgactcactcatttcttggggtcgtattcctgatttcagaagaggatcataactgaaacaacataagacaatataatcatgtgcttttaacatatttgagaataaaaaggactagcaaataaaactcattttgcatttaaaagttggattatattttagtcccaagaagacaaagtcgcagattaacaacactttaaaaatattactcccattttattgtgttagattgcagtacaatgaatgaataaggggatttatttaaaagatcttaactttcttgactgatttaaaaagctaatcaatttattaaagccagaaatgttctcctctgggaaagcaatttctatctatttatctaccaatccccactcacatgtatatgtttgtgtttacatagagatagatggttttaagggttttcctattgttaaattatttcctaagacattgtgggttggagaccactaaacttataaaaaaccaaggaaagtaaagtttttcaaatgtttatactgtttaaggtgtttatttatataaaccatgcatgagaaaccatgcataaatttaataatttaaatttcaccagtaaattatcattgattaaatatggtcataccaatgaaataggttttttctttctctgtaataaaacaatttttctaaattcttatgttttcatagcaagattaacatatttaattacaaattaaatatgcaaaatgacaaatgcgtttaccttttgcttgaacaatctttcatttaaaaatttatcccagttattttgacaaataggtatatgcctgagaactttgaatgatgctgaaagctagaagcaaaccaggtactcttcagtcagggactggttgaagattttatggatgaggagttagcaaaatatctatatatgcatatcttctgactcccaggatacataagaaacacagggcctagaacagtatgaataaacacacatatacacaaacatcacagaagatactaaagatattaaaaatgtttacctatagaggtttggagagaacagaggggtggacagttgtggagataatatttgtgtaaatataactgtgatatagtttttatcttggaccatgtaaatatttgacataattaataatcaaaattaaatacaaaagaaaaagcatttctttaagcattcaaacccaactgaataccaaatagtggcaaaactacacaaaagatatatacttattttcaatgacttcacaaattaatatgagaatgtctttgggggaatataaaggtgaaaaaattctgaagaaatctcaaaatgcatttttaaatttgttattactttttatttgaatagttttgggagttacaagtggttttttattacatggatgaattatattgccagtgaattctgagattttagtgcactgtgaaaatgcatttagtagtctcattgttaatggtaatactggtgttattttgaacctattgtatctagaatactatgttgtaagaaaacaagtagttacatttctttagaagtcaggattttcagtgttaagagaaaatgagatacaagtatacaatgaaagaaattaagtaaaaatctttgacttaaattggaattagaaatattcatataaattaataactgattttctctatcaaaaaatctgtatttcccacttttccattgaaaagtccttgaagtaatgacaactcagtagcagtagttacaatgaacatcaagactgtggtctctccatactattactcactggttcctaagaaccagtgctcttaggagaatagctgaatccaggtctggggcaggaaatatgtaaaataaacttgggccatcttactccagaaatcaaggaagctatcaaagactaatgaatcatgtcacaaaaacgggagcaatattaaggagctcccactaacctaaaatgagacaatatggccatcaaaacaaataatgaccacaatgtatataaatatatagaaatctgagtttatgattatatacacacactcacctccttggtaccttttggaggtttctagggcattatctcattcatttgaaaacgatgaattaacagaaagaataaagcatttatcctt

SEQ ID NO: 348318 - DNA, 2552 bp, Homo sapiens
tgcgtcgcactagcaggtcccgccgctctctctgtgggggagcctagatagcttggtagcaggggaggattgcaaacgtgcatgtgcaaaagctttgaaaaagaaaaagaagatgccaaagcttcgctttgccagtagaatccggaaaattcggaagaagcaattttaaacattcttaatatgtcatcttgtttgtctttatggcttatttgcctttatggttgtatctgaagaataatatgacagcatgaggaaacaaatcattggtgatttattcaccagtttttattaatacaagtcactttttcaaaaatttggatttttttatatataactagctgctattcaaatgtgagtctaccatttttaatttatggttcaactgtttgtgagactgaattcttgcaatgcataagatataaaagcaaatatgactcactcatttcttggggtcgtattcctgatttcagaagaggatcataactgaaacaacataagacaatataatcatgtgcttttaacatatttgagaataaaaaggactagcaaataaaactcattttgcatttaaaagttggattatattttagtcccaagaagacaaagtcgcagattaacaacactttaaaaatattactcccattttattgtgttagattgcagtacaatgaatgaataaggggatttatttaaaagatcttaactttcttgactgatttaaaaagctaatcaatttattaaagccagaaatgttctcctctgggaaagcaatttctatctatttatctaccaatccccactcacatgtatatgtttgtgtttacatagagatagatggttttaagggttttcctattgttaaattatttcctaagacattgtgggttggagaccactaaacttataaaaaaccaaggaaagtaaagtttttcaaatgtttatactgtttaaggtgtttatttatataaaccatgcatgagaaaccatgcataaatttaataatttaaatttcaccagtaaattatcattgattaaatatggtcataccaatgaaataggttttttctttctctgtaataaaacaatttttctaaattcttatgttttcatagcaagattaacatatttaattacaaattaaatatgcaaaatgacaaatgcgtttaccttttgcttgaacaatctttcatttaaaaatttatcccagttattttgacaaataggtatatgcctgagaactttgaatgatgctgaaagctagaagcaaaccaggtactcttcagtcagggactggttgaagattttatggatgaggagttagcaaaatatctatatatgcatatcttctgactcccaggatacataagaaacacagggcctagaacagtatgaataaacacacatatacacaaacatcacagaagatactaaagatattaaaaatgtttacctatagaggtttggagagaacagaggggtggacagttgtggagataatatttgtgtaaatataactgtgatatagtttttatcttggaccatgtaaatatttgacataattaataatcaaaattaaatacaaaagaaaaagcatttctttaagcattcaaacccaactgaataccaaatagtggcaaaactacacaaaagatatatacttattttcaatgacttcacaaattaatatgagaatgtctttgggggaatataaaggtgaaaaaattctgaagaaatctcaaaatgcatttttaaatttgttattactttttatttgaatagttttgggagttacaagtggttttttattacatggatgaattatattgccagtgaattctgagattttagtgcactgtgaaaatgcatttagtagtctcattgttaatggtaatactggtgttattttgaacctattgtatctagaatactatgttgtaagaaaacaagtagttacatttctttagaagtcaggattttcagtgttaagagaaaatgagatacaagtatacaatgaaagaaattaagtaaaaatctttgacttaaattggaattagaaatattcatataaattaataactgattttctctatcaaaaaatctgtatttcccacttttccattgaaaagtccttgaagtaatgacaactcagtagcagtagttacaatgaacatcaagactgtggtctctccatactattactcactggttcctaagaaccagtgctcttaggagaatagctgaatccaggtctggggcaggaaatatgtaaaataaacttgggccatcttactccagaaatcaaggaagctatcaaagactaatgaatcatgtcacaaaaacgggagcaatattaaggagctcccactaacctaaaatgagacaatatggccatcaaaacaaataatgaccacaatgtatataaatatatagaaatctgagtttatgattatatacacacactcacctccttggtaccttttggaggtttctagggcattatctcattcatttgaaaacgatgaattaacagaaagaataaagcatttatcctt

SEQ ID NO: 348319 - DNA, 2650 bp, Homo sapiens
  misc_feature (1)..(1): n is a, c, g, or t
  misc_feature (13)..(13): n is a, c, g, or t
  misc_feature (47)..(47): n is a, c, g, or t
  misc_feature (53)..(53): n is a, c, g, or t
  misc_feature (188)..(188): n is a, c, g, or t
ngacaggtttccnagatagaagctagcttgtattgggaggcatatcntgacgncagcaagaatcatcattgctacgtcaagatgagacggccgcagtgatcgctatatgtatcagatacgactgtgatgctcactatactgctgtgaggatgacatactcgtagcaggagatgcacgtgcatgtgcanagctttgaaaaagaaaaagaagatgccaaagcttcgctttgccagtagaatccggaaaattcggaagaagcaattttaaacattcttaatatgtcatcttgtttgtctttatggcttatttgcctttatggttgtatctgaagaataatatgacagcatgaggaaacaaatcattggtgatttattcaccagtttttattaatacaagtcactttttcaaaaatttggatttttttatatataactagctgctattcaaatgtgagtctaccatttttaatttatggttcaactgtttgtgagactgaattcttgcaatgcataagatataaaagcaaatatgactcactcatttcttggggtcgtattcctgatttcagaagaggatcataactgaaacaacataagacaatataatcatgtgcttttaacatatttgagaataaaaaggactagcaaataaaactcattttgcatttaaaagttggattatattttagtcccaagaagacaaagtcgcagattaacaacactttaaaaatattactcccattttattgtgttagattgcagtacaatgaatgaataaggggatttatttaaaagatcttaactttcttgactgatttaaaaagctaatcaatttattaaagccagaaatgttctcctctgggaaagcaatttctatctatttatctaccaatccccactcacatgtatatgtttgtgtttacatagagatagatggttttaagggttttcctattgttaaattatttcctaagacattgtgggttggagaccactaaacttataaaaaaccaaggaaagtaaagtttttcaaatgtttatactgtttaaggtgtttatttatataaaccatgcatgagaaaccatgcataaatttaataatttaaatttcaccagtaaattatcattgattaaatatggtcataccaatgaaataggttttttctttctctgtaataaaacaatttttctaaattcttatgttttcatagcaagattaacatatttaattacaaattaaatatgcaaaatgacaaatgcgtttaccttttgcttgaacaatctttcatttaaaaatttatcccagttattttgacaaataggtatatgcctgagaactttgaatgatgctgaaagctagaagcaaaccaggtactcttcagtcagggactggttgaagattttatggatgaggagttagcaaaatatctatatatgcatatcttctgactcccaggatacataagaaacacagggcctagaacagtatgaataaacacacatatacacaaacatcacagaagatactaaagatattaaaaatgtttacctatagaggtttggagagaacagaggggtggacagttgtggagataatatttgtgtaaatataactgtgatatagtttttatcttggaccatgtaaatatttgacataattaataatcaaaattaaatacaaaagaaaaagcatttctttaagcattcaaacccaactgaataccaaatagtggcaaaactacacaaaagatatatacttattttcaatgacttcacaaattaatatgagaatgtctttgggggaatataaaggtgaaaaaattctgaagaaatctcaaaatgcatttttaaatttgttattactttttatttgaatagttttgggagttacaagtggttttttattacatggatgaattatattgccagtgaattctgagattttagtgcactgtgaaaatgcatttagtagtctcattgttaatggtaatactggtgttattttgaacctattgtatctagaatactatgttgtaagaaaacaagtagttacatttctttagaagtcaggattttcagtgttaagagaaaatgagatacaagtatacaatgaaagaaattaagtaaaaatctttgacttaaattggaattagaaatattcatataaattaataactgattttctctatcaaaaaatctgtatttcccacttttccattgaaaagtccttgaagtaatgacaactcagtagcagtagttacaatgaacatcaagactgtggtctctccatactattactcactggttcctaagaaccagtgctcttaggagaatagctgaatccaggtctggggcaggaaatatgtaaaataaacttgggccatcttactccagaaatcaaggaagctatcaaagactaatgaatcatgtcacaaaaacgggagcaatattaaggagctcccactaacctaaaatgagacaatatggccatcaaaacaaataatgaccacaatgtatataaatatatagaaatctgagtttatgattatatacacacactcacctccttggtaccttttggaggtttctagggcattatctcattcatttgaaaacgatgaattaacagaaagaataaagcatttatcctt

SEQ ID NO: 348320 - DNA, 1415 bp, Homo sapiens
cctcttacacagtttgcagcgcgggggcggcggggtgacagtccccgtgcatgaatcagccacccctcaggctccgccccggcgggggtcggccggacgctcgccccgcataaagcgggcacccgggccgcctggagagaaagccgcgcacctcctcccgccaggcgctttctcggacgccttgcccagcgggccgcccgaccccctgcaccatggaccccgctcgccccctggggctgtcgattctgctgcttttcctgacggaggctgcactgggcgatgctgctcaggagccaacaggaaataacgcggagatctgtctcctgcccctagactacggaccctgccgggccctacttctccgttactactacgacaggtacacgcagagctgccgccagttcctgtacgggggctgcgagggcaacgccaacaatttctacacctgggaggcttgcgacgatgcttgctggaggatagaaaaagttcccaaagtttgccggctgcaagtgagtgtggacgaccagtgtgaggggtccacagaaaagtatttctttaatctaagttccatgacatgtgaaaaattcttttccggtgggtgtcaccggaaccggattgagaacaggtttccagatgaagctacttgtatgggcttctgcgcaccaaagaaaattccatcattttgctacagtccaaaagatgagggactgtgctctgccaatgtgactcgctattattttaatccaagatacagaacctgtgatgctttcacctatactggctgtggagggaatgacaataactttgttagcaggcagtccaaaagatgagggactgtgctctgccaatgtgactcgctattattttaatccaagatacagaacctgtgatgctttcacctatactggctgtggagggaatgacaataactttgttagcaggaggattgcaaacgtgcatgtgcaaaagctttgaaaaagaaaaagaagatgccaaagcttcgctttgccagtagaatccggaaaattcggaagaagcaattttaaacattcttaatatgtcatcttgtttgtctttatggcttatttgcctttatggttgtatctgaagaataatatgacagcatgaggaaacaaatcattggtgatttattcaccagtttttattaatacaagtcactttttcaaaaatttggatttttttatatataactagctgctattcaaatgtgagtctaccatttttaatttatggttcaactgtttgtgagactgaattcttgcaatgcataagatataaaagcaaatatgactcactcaaaaaaaaaaaaaaaaaaaaaaaaaaaaaaatttttggggggcttgggccttggaaaaagttttttaaaaccctttcgttgtgggggggggggcccc

SEQ ID NO: 348321 - DNA, 848 bp, Homo sapiens
cctcttacacagtttgcagcgcgggggcggcggggtgacagtccccgtgcatgaatcagccacccctcaggctccgccccggcgggggtcggccggacgctcgccccgcataaagcgggcacccgggccgcctggagagaaagccgcgcacctcctcccgccaggcgctttctcggacgccttgcccagcgggccgcccgaccccctgcaccatggaccccgctcgccccctggggctgtcgattctgctgcttttcctgacggaggctgcactgggcgatgctgctcaggagccaacaggaaataacgcggagatctgtctcctgcccctagactacggaccctgccgggccctacttctccgttactactacgacaggtacacgcagagctgccgccagttcctgtacgggggctgcgagggcaacgccaacaatttctacacctgggaggcttgcgacgatgcttgctggaggatagaaaaagttcccaaagtttgccggctgcaagtgagtgtggacgaccagtgtgaggggtccacagaaaagtatttctttaatctaagttccatgacatgtgaaaaattcttttccggtgggtgtcaccggaaccggattgagaacaggtttccagatgaagctacttgtatgggcttctgcgcaccaaagaaaattccatcattttgctacagtccaaaagatgagggactgtgctctgccaatgtgactcgctattattttaatccaagatacagaacctgtgatgctttcacctatactggctgtggagggaatgacaataactttgttagcaggtgaaatggtaactgggatcctctagacgccacc

SEQ ID NO: 348322 - DNA, 1235 bp, Homo sapiens
cctcttacacagtttgcagcgcgggggcggcggggtgacagtccccgtgcatgaatcagccacccctcaggctccgccccggcgggggtcggccggacgctcgccccgcataaagcgggcacccgggccgcctggagagaaagccgcgcacctcctcccgccaggcgctttctcggacgccttgcccagcgggccgcccgaccccctgcaccatggaccccgctcgccccctggggctgtcgattctgctgcttttcctgacggaggctgcactgggcgatgctgctcaggagccaacaggaaataacgcggagatctgtctcctgcccctagactacggaccctgccgggccctacttctccgttactactacgacaggtacacgcagagctgccgccagttcctgtacgggggctgcgagggcaacgccaacaatttctacacctgggaggcttgcgacgatgcttgctggaggatagaaaaagttcccaaagtttgccggctgcaagtgagtgtggacgaccagtgtgaggggtccacagaaaagtatttctttaatctaagttccatgacatgtgaaaaattcttttccggtgggtgtcaccggaaccggattgagaacaggtttccagatgaagctacttgtatgggcttctgcgcaccaaagaaaaatacagaacctgtgatgctttcacctatactggctgtggagggaatgacaataactttgttagcagggaggattgcaaacgtgcatgtgcaaaagctttgaaaaagaaaaagaagatgccaaagcttcgctttgccagtagaatccggaaaattcggaagaagcaattttaaacattcttaatatgtcatcttgtttgtctttatggcttatttgcctttatggttgtatctgaagaataatatgacagcatgaggaaacaaatcattggtgatttattcaccagtttttattaatacaagtcactttttcaaaaatttggatttttttatatataactagctgctattcaaatgtgagtctaccatttttaatttatggttcaactgtttgtgagactgaattcttgcaatgcataagatataaaagcaaatatgactcactcatttcttggggtcgtattcctgatttcagaagaggatcataactgaaacaacataagacaatataatcatgtgcttttaacatatttgagaataaaaaggactagcaaataaaactcat

SEQ ID NO: 348323 - DNA, 1176 bp, Homo sapiens
cctcttacacagtttgcagcgcgggggcggcggggtgacagtccccgtgcatgaatcagccacccctcaggctccgccccggcgggggtcggccggacgctcgccccgcataaagcgggcacccgggccgcctggagagaaagccgcgcacctcctcccgccaggcgctttctcggacgccttgcccagcgggccgcccgaccccctgcaccatggaccccgctcgccccctggggctgtcgattctgctgcttttcctgacggaggctgcactgggcgatgctgctcaggagccaacaggaaataacgcggagatctgtctcctgcccctagactacggaccctgccgggccctacttctccgttactactacgacaggtacacgcagagctgccgccagttcctgtacgggggctgcgagggcaacgccaacaatttctacacctgggaggcttgcgacgatgcttgctggaggatagaaaaagttcccaaagtttgccggctgcaagtgagtgtggacgaccagtgtgaggggtccacagaaaagtatttctttaatctaagttccatgacatgtgaaaaattcttttccggtgggtgtcaccggaaccggattgagaacaggtttccagatgaagctacttgtatgggcttctgcgcaccaaagaaaacagtccaaaagatgagggactgtgctctgccaatgtgactcgctattattttaatccaagatacagaacctgtgatgctttcacctatactggctgtggagggaatgacaataactttgttagcaggaggattgcaaacgtgcatgtgcaaaagctttgaaaaagaaaaagaagatgccaaagcttcgctttgccagtagaatccggaaaattcggaagaagcaattttaaacattcttaatatgtcatcttgtttgtctttatggcttatttgcctttatggttgtatctgaagaataatatgacagcatgaggaaacaaatcattggtgatttattcaccagtttttattaatacaagtcactttttcaaaaatttggatttttttatatataactagctgctattcaaatgtgagtctaccatttttaatttatggttcaactgtttgtgagactgaattcttgcaatgcataagatataaaagcaaatatgactcactca

SEQ ID NO: 348324 - DNA, 1484 bp, Homo sapiens
cctcttacacagtttgcagcgcgggggcggcggggtgacagtccccgtgcatgaatcagccacccctcaggctccgccccggcgggggtcggccggacgctcgccccgcataaagcgggcacccgggccgcctggagagaaagccgcgcacctcctcccgccaggcgctttctcggacgccttgcccagcgggccgcccgaccccctgcaccatggaccccgctcgccccctggggctgtcgattctgctgcttttcctgacggaggctgcactgggcgatgctgctcaggagccaacaggaaataacgcggagatctgtctcctgcccctagactacggaccctgccgggccctacttctccgttactactacgacaggtacacgcagagctgccgccagttcctgtacgggggctgcgagggcaacgccaacaatttctacacctgggaggcttgcgacgatgcttgctggaggatagaaaaagttcccaaagtttgccggctgcaagtgagtgtggacgaccagtgtgaggggtccacagaaaagtatttctttaatctaagttccatgacatgtgaaaaattcttttccggtgggtgtcaccggaaccggattgagaacaggtttccagatgaagctacttgtatgggcttctgcgcaccaaagaaaaatacagaacctgtgatgctttcacctatactggctgtggagggaatgacaataactttgttagcagggaggattgcaaacgtgcatgtgcaaaagctttgaaaaagaaaaagaagatgccaaagcttcgctttgccagtagaatccggaaaattcggaagaagcaattttaaacattcttaatatgtcatcttgtttgtctttatggcttatttgcctttatggttgtatctgaagaataatatgacagcatgaggaaacaaatcattggtgatttattcaccagtttttattaatacaagtcactttttcaaaaatttggatttttttatatataactagctgctattcaaatgtgagtctaccatttttaatttatggttcaactgtttgtgagactgaattcttgcaatgcataagatataaaagcaaatatgactcactcaaaaaaaaaaaaaaaaaaaaaaaaaaaaaaaaaaaaaaaaaaaaaaaaaaaaaaaaaaaaaaaaaaaaaaaaaaaacaacaaaaaacaaaaaaagaagaaggagagacaagacagacagacgaaaaacgaacaaaggagaggccaagccagagcgaggcggaccgggagcgggagaggagcgaccgggacgcgggcacgggcgcgcaggcgggagggggaggagaacacagtggggaagagacaaaaagacagaaaaagaggaaagaagaaacaagaaagaaaaaaaggacaaaacagaaaaaaaggacgaaataaacaaaagaggaaagaacgaaagaagaaaaacaacaaacaccagagaagagaa

SEQ ID NO: 348325 - DNA, 1196 bp, Homo sapiens
  misc_feature (674)..(674): n is a, c, g, or t
  misc_feature (677)..(677): n is a, c, g, or t
  misc_feature (680)..(681): n is a, c, g, or t
  misc_feature (690)..(690): n is a, c, g, or t
  misc_feature (697)..(697): n is a, c, g, or t
  misc_feature (699)..(699): n is a, c, g, or t
  misc_feature (716)..(716): n is a, c, g, or t
  misc_feature (735)..(735): n is a, c, g, or t
  misc_feature (747)..(748): n is a, c, g, or t
  misc_feature (754)..(754): n is a, c, g, or t
  misc_feature (756)..(756): n is a, c, g, or t
  misc_feature (759)..(759): n is a, c, g, or t
  misc_feature (775)..(775): n is a, c, g, or t
  misc_feature (780)..(780): n is a, c, g, or t
  misc_feature (791)..(791): n is a, c, g, or t
  misc_feature (808)..(808): n is a, c, g, or t
  misc_feature (812)..(812): n is a, c, g, or t
cctcttacacagtttgcagcgcgggggcggcggggtgacagtccccgtgcatgaatcagccacccctcaggctccgccccggcgggggtcggccggacgctcgccccgcataaagcgggcacccgggccgcctggagagaaagccgcgcacctcctcccgccaggcgctttctcggacgccttgcccagcgggccgcccgaccccctgcaccatggaccccgctcgccccctggggctgtcgattctgctgcttttcctgacggaggctgcactgggcgatgctgctcaggagccaacaggaaataacgcggagatctgtctcctgcccctagactacggaccctgccgggccctacttctccgttactactacgacaggtacacgcagagctgccgccagttcctgtacgggggctgcgagggcaacgccaacaatttctacacctgggaggcttgcgacgatgcttgctggaggatagaaaaagttcccaaagtttgccggctgcaagtgagtgtggacgaccagtgtgaggggtccacagaaaagtatttctttaatctaagttccatgacatgtgaaaaattcttttccggtgggtgtcaccggaaccggattgagaacaggtttccagatgaagctacttgtatgggcttctgcgcaccaaagaaaagnggnagnnggggggganggggggngnggggggggagggggggnggggaatgtgagcgggggnggatggggaagnngagagngnganggggggaggggggganggggnggggggggggngggaatgagaaggactnggtnggcagggaggattgcaaacgtgcatgtgcaaaagctttgaaaaagaaaaagaagatgccaaagcttcgctttgccagtagaatccggaaaattcggaagaagcaattttaaacattcttaatatgtcatcttgtttgtctttatggcttatttgcctttatggttgtatctgaagaataatatgacagcatgaggaaacaaatcattggtgatttattcaccagtttttattaatacaagtcactttttcaaaaatttggatttttttatatataactagctgctattcaaatgtgagtctaccatttttaatttatggttcaactgtttgtgagactgaattcttgcaatgcataagatataaaagcaaatatgactcactca

SEQ ID NO: 348326 - DNA, 825 bp, Homo sapiens
cctcttacacagtttgcagcgcgggggcggcggggtgacagtccccgtgcatgaatcagccacccctcaggctccgccccggcgggggtcggccggacgctcgccccgcataaagcgggcacccgggccgcctggagagaaagccgcgcacctcctcccgccaggcgctttctcggacgccttgcccagcgggccgcccgaccccctgcaccatggaccccgctcgccccctggggctgtcgattctgctgcttttcctgacggaggctgcactgggcgatgctgctcaggagccaacaggaaataacgcggagatctgtctcctgcccctagactacggaccctgccgggccctacttctccgttactactacgacaggtacacgcagagctgccgccagttcctgtacgggggctgcgagggcaacgccaacaatttctacacctgggaggcttgcgacgatgcttgctggaggatagaaaaagttcccaaagtttgccggctgcaagtgagtgtggacgaccagtgtgaggggtccacagaaaagtatttctttaatctaagttccatgacatgtgaaaaattcttttccggtgggtgtcaccggaaccggattgagaacaggtttccagatgaagctacttgtatgggcttctgcgcaccaaagaaaacagtccaaaagatgagggactgtgctctgccaatgtgactcgctattattttaatccaagatacagaacctgtgatgctttcacctatactggctgtggagggaatgacaataactttgttagcagcggagagcagcagaatcacgggctgac

SEQ ID NO: 348327 - DNA, 739 bp, Homo sapiens
  misc_feature (716)..(716): n is a, c, g, or t
cctcttacacagtttgcagcgcgggggcggcggggtgacagtccccgtgcatgaatcagccacccctcaggctccgccccggcgggggtcggccggacgctcgccccgcataaagcgggcacccgggccgcctggagagaaagccgcgcacctcctcccgccaggcgctttctcggacgccttgcccagcgggccgcccgaccccctgcaccatggaccccgctcgccccctggggctgtcgattctgctgcttttcctgacggaggctgcactgggcgatgctgctcaggagccaacaggaaataacgcggagatctgtctcctgcccctagactacggaccctgccgggccctacttctccgttactactacgacaggtacacgcagagctgccgccagttcctgtacgggggctgcgagggcaacgccaacaatttctacacctgggaggcttgcgacgatgcttgctggaggatagaaaaagttcccaaagtttgccggctgcaagtgagtgtggacgaccagtgtgaggggtccacagaaaagtatttctttaatctaagttccatgacatgtgaaaaattcttttccggtgggtgtcaccggaaccggattgagaacaggtttccagatgaagctacttgtatgggcttctgcgcaccaaagaaaacagtccaaaagatgagggactgtgctctgccaatgtgatcgatnacaccggtatcagctcggattcc

SEQ ID NO: 348328 - DNA, 598 bp, Homo sapiens
gaaaatgcgtattcatgtgaataagctttgattcactgcatatgtacaatcagagaacacccagagaaaacagagagtctttctactgaacttgaaagatacatcacagctgagtcagctctgaatacactgttagaaaaaaaaaaagtaaatatctggattcatgggagtattctgggtatttactatcccaacactaatacaacttctctccccccacaaaatgttgctgaaaatacagtgatggtttaataagaaggctacttttgactaacattgttctattaccctccttttcctagaggatagaaaaagttcccaaagtttgccggctgcaagtgagtgtggacgaccagtgtgaggggtccacagaaaagtatttctttaatctaagttccatgacatgtgaaaaattcttttccggtgggtgtcaccggaaccggattgagaacaggtttccagatgaagctacttgtatgggcttctgcgcaccaaagaaaagtaaatacgatttttatggtatttctatttcacttttttgaaaagacatttgggtggaaaaaactcaatttgatgcgaaattaacatgtgcattttc

SEQ ID NO: 348329 - DNA, 1311 bp, Homo sapiens
cctcttacacagtttgcagcgcgggggcggcggggtgacagtccccgtgcatgaatcagccacccctcaggctccgccccggcgggggtcggccggacgctcgccccgcataaagcgggcacccgggccgcctggagagaaagccgcgcacctcctcccgccaggcgctttctcggacgccttgcccagcgggccgcccgaccccctgcaccatggaccccgctcgccccctggggctgtcgattctgctgcttttcctgacggaggctgcactgggcgatgctgctcaggagccaacaggaaataacgcggagatctgtctcctgcccctagactacggaccctgccgggccctacttctccgttactactacgacaggtacacgcagagctgccgccagttcctgtacgggggctgcgagggcaacgccaacaatttctacacctgggaggcttgcgacgatgcttgctggaggatagaaaaagttcccaaagtttgccggctgcaagtgagtgtggacgaccagtgtgaggggtccacagaaaagtatttctttaatctaagttccatgacatgtgaaaaattcttttccggtgggtgtcaccggaaccggattgagaacaggtttccagatgaagctacttgtatgggcttctgcgcaccaaagaaaattccatcattttgctacagtccaaaagatgagggactgtgctctgccaatgtgactcgctattattttaatccaagatacagaacctgtgatgctttcacctatactggctgtggagggaatgacaataactttgttagcagggaggattgcaaacgtgcatgtgcaaaagctttgaaaaagaaaaagaagatgccaaagcttcgctttgccagtagaatccggaaaattcggaagaagcaattttaaacattcttaatatgtcatcttgtttgtctttatggcttatttgcctttatggttgtatctgaagaataatatgacagcatgaggaaacaaatcattggtgatttattcaccagtttttattaatacaagtcactttttcaaaaatttggatttttttatatataactagctgctattcaaatgtgagtctaccatttttaatttatggttcaactgtttgtgagactgaattcttgcaatgcataagatataaaagcaaatatgactcactcatttcttggggtcgtattcctgatttcagaagaggatcataactgaaacaacataagacaatataatcatgtgcttttaacatatttgagaataaaaaggactagcaaataaaactcat

SEQ ID NO: 348330 - DNA, 1193 bp, Homo sapiens
cctcttacacagtttgcagcgcgggggcggcggggtgacagtccccgtgcatgaatcagccacccctcaggctccgccccggcgggggtcggccggacgctcgccccgcataaagcgggcacccgggccgcctggagagaaagccgcgcacctcctcccgccaggcgctttctcggacgccttgcccagcgggccgcccgaccccctgcaccatggaccccgctcgccccctggggctgtcgattctgctgcttttcctgacggaggctgcactgggcgatgctgctcaggagccaacaggaaataacgcggagatctgtctcctgcccctagactacggaccctgccgggccctacttctccgttactactacgacaggtacacgcagagctgccgccagttcctgtacgggggctgcgagggcaacgccaacaatttctacacctgggaggcttgcgacgatgcttgctggaggatagaaaaagttcccaaagtttgccggctgcaagtgagtgtggacgaccagtgtgaggggtccacagaaaagtatttctttaatctaagttccatgacatgtgaaaaattcttttccggtgggtgtcaccggaaccggattgagaacaggtttccagatgaagctacttgtatgggcttctgcgcaccaaagaaaattccatcattttgctacagtccaaaagatgagggactgtgctctgccaatgtgactcgctattattttaatccaagatacagaacctgtgatgctttcacctatactggctgtggagggaatgacaataactttgttagcagggaggattgcaaacgtgcatgtgcaaaagctttgaaaaagaaaaagaagatgccaaagcttcgctttgccagtagaatccggaaaattcggaagaagcaattttaaacattcttaatatgtcatcttgtttgtctttatggcttatttgcctttatggttgtatctgaagaataatatgacagcatgaggaaacaaatcattggtgatttattcaccagtttttattaatacaagtcactttttcaaaaatttggatttttttatatataactagctgctattcaaatgtgagtctaccatttttaatttatggttcaactgtttgtgagactgaattcttgcaatgcataagatataaaagcaaatatgactcactca

SEQ ID NO: 348331 - DNA, 1909 bp, Homo sapiens
cctcttacacagtttgcagcgcgggggcggcggggtgacagtccccgtgcatgaatcagccacccctcaggctccgccccggcgggggtcggccggacgctcgccccgcataaagcgggcacccgggccgcctggagagaaagccgcgcacctcctcccgccaggcgctttctcggacgccttgcccagcgggccgcccgaccccctgcaccatggaccccgctcgccccctggggctgtcgattctgctgcttttcctgacggaggctgcactgggcgatgctgctcaggagccaacaggaaataacgcggagatctgtctcctgcccctagactacggaccctgccgggccctacttctccgttactactacgacaggtacacgcagagctgccgccagttcctgtacgggggctgcgagggcaacgccaacaatttctacacctgggaggcttgcgacgatgcttgctggaggatagaaaaagttcccaaagtttgccggctgcaagtgagtgtggacgaccagtgtgaggggtccacagaaaagtatttctttaatctaagttccatgacatgtgaaaaattcttttccggtgggtgtcaccggaaccggattgagaacaggtttccagatgaagctacttgtatgggcttctgcgcaccaaagaaaattccatcattttgctacagtccaaaagatgagggactgtgctctgccaatgtgactcgctattattttaatccaagatacagaacctgtgatgctttcacctatactggctgtggagggaatgacaataactttgttagcagggaggattgcaaacgtgcatgtgcaaaagctttgaaaaagaaaaagaagatgccaaagcttcgctttgccagtagaatccggaaaattcggaagaagcaattttaaacattcttaatatgtcatcttgtttgtctttatggcttatttgcctttatggttgtatctgaagaataatatgacagcatgaggaaacaaatcattggtgatttattcaccagtttttattaatacaagtcactttttcaaaaatttggatttttttatatataactagctgctattcaaatgtgagtctaccatttttaatttatggttcaactgtttgtgagactgaattcttgcaatgcataagatataaaagcaaatatgactcactcatttcttggggtcgtattcctgatttcagaagaggatcataactgaaacaacataagacaatataatcatgtgcttttaacatatttgagaataaaaaggactagcaaataaaactcattttgcatttaaaagttggattatattttagtcccaagaagacaaagtcgcagattaacaacactttaaaaatattactcccattttattgtgttagattgcagtacaatgaatgaataaggggatttatttaaaagatcttaactttcttgactgatttaaaaagctaatcaatttattaaagccagaaatgttctcctctgggaaagcaatttctatctatttatctaccaatccccactcacatgtatatgtttgtgtttacatagagatagatggttttaagggttttcctattgttaaattatttcctaagacattgtgggttggagaccactaaacttataaaaaaccaaggaaagtaaagtttttcaaatgtttatactgtttaaggtgtttatttatataaaccatgcatgagaaaccatgcataaatttaataatttaaatttcaccagtaaattatcattgattaaatatggtcataccaatgaaataggttttttctttctctgtaataaaacaatttttctaaattcttatgttttcatagcaagattaacatatttaattacaaattaaatatgcaaaatgacaaa

SEQ ID NO: 348332 - DNA, 1775 bp, Homo sapiens
cctcttacacagtttgcagcgcgggggcggcggggtgacagtccccgtgcatgaatcagccacccctcaggctccgccccggcgggggtcggccggacgctcgccccgcataaagcgggcacccgggccgcctggagagaaagccgcgcacctcctcccgccaggcgctttctcggacgccttgcccagcgggccgcccgaccccctgcaccatggaccccgctcgccccctggggctgtcgattctgctgcttttcctgacggaggctgcactgggcgatgctgctcaggagccaacaggaaataacgcggagatctgtctcctgcccctagactacggaccctgccgggccctacttctccgttactactacgacaggtacacgcagagctgccgccagttcctgtacgggggctgcgagggcaacgccaacaatttctacacctgggaggcttgcgacgatgcttgctggaggatagaaaaagttcccaaagtttgccggctgcaagtgagtgtggacgaccagtgtgaggggtccacagaaaagtatttctttaatctaagttccatgacatgtgaaaaattcttttccggtgggtgtcaccggaaccggattgagaacaggtttccagatgaagctacttgtatgggcttctgcgcaccaaagaaaattccatcattttgctacagtccaaaagatgagggactgtgctctgccaatgtgactcgctattattttaatccaagatacagaacctgtgatgctttcacctatactggctgtggagggaatgacaataactttgttagcagggaggattgcaaacgtgcatgtgcaaaagctttgaaaaagaaaaagaagatgccaaagcttcgctttgccagtagaatccggaaaattcggaagaagcaattttaaacattcttaatatgtcatcttgtttgtctttatggcttatttgcctttatggttgtatctgaagaataatatgacagcatgaggaaacaaatcattggtgatttattcaccagtttttattaatacaagtcactttttcaaaaatttggatttttttatatataactagctgctattcaaatgtgagtctaccatttttaatttatggttcaactgtttgtgagactgaattcttgcaatgcataagatataaaagcaaatatgactcactcatttcttggggtcgtattcctgatttcagaagaggatcataactgaaacaacataagacaatataatcatgtgcttttaacatatttgagaataaaaaggactagcaaataaaactcattttgcatttaaaagttggattatattttagtcccaagaagacaaagtcgcagattaacaatcacatagcatgatgtgattgttcaaggccaaggtcatggcttgcaatgccgataaacttctaaaagcctggacggggatttctgttaacgcattgtcatccagccacaggtgcctcagggattgaaggcttcgcaaattctgcagagcttctgtgggtacgtgtcttagctgattattctgcagcatactgtatgttaaaagaaataaagaaaaatgttaaaaaaaatgaacaataacaggcctaaacaaggccaggcactgttccaggtgtcagaaaaacaacagagcatcagacaaagtcttgtcttagggggagctgaaattcctgtgaagagtgcagatacttaaagatgtacacatgaatattttaacctgagacaagtgatctatgtgttcttctga

SEQ ID NO: 348333 - DNA, 1490 bp, Homo sapiens
  misc_feature (1366)..(1366): n is a, c, g, or t
  misc_feature (1371)..(1371): n is a, c, g, or t
  misc_feature (1376)..(1376): n is a, c, g, or t
  misc_feature (1454)..(1454): n is a, c, g, or t
  misc_feature (1467)..(1467): n is a, c, g, or t
  misc_feature (1486)..(1486): n is a, c, g, or t
cctcttacacagtttgcagcgcgggggcggcggggtgacagtccccgtgcatgaatcagccacccctcaggctccgccccggcgggggtcggccggacgctcgccccgcataaagcgggcacccgggccgcctggagagaaagccgcgcacctcctcccgccaggcgctttctcggacgccttgcccagcgggccgcccgaccccctgcaccatggaccccgctcgccccctggggctgtcgattctgctgcttttcctgacggaggctgcactgggcgatgctgctcaggagccaacaggaaataacgcggagatctgtctcctgcccctagactacggaccctgccgggccctacttctccgttactactacgacaggtacacgcagagctgccgccagttcctgtacgggggctgcgagggcaacgccaacaatttctacacctgggaggcttgcgacgatgcttgctggaggatagaaaaagttcccaaagtttgccggctgcaagtgagtgtggacgaccagtgtgaggggtccacagaaaagtatttctttaatctaagttccatgacatgtgaaaaattcttttccggtgggtgtcaccggaaccggattgagaacaggtttccagatgaagctacttgtatgggcttctgcgcaccaaagaaaattccatcattttgctacagtccaaaagatgagggactgtgctctgccaatgtgactcgctattattttaatccaagatacagaacctgtgatgctttcacctatactggctgtggagggaatgacaataactttgttagcagggaggattgcaaacgtgcatgtgcaaaagctttgaaaaagaaaaagaagatgccaaagcttcgctttgccagtagaatccggaaaattcggaagaagcaattttaaacattcttaatatgtcatcttgtttgtctttatggcttatttgcctttatggttgtatctgaagaataatatgacagcatgaggaaacaaatcattggtgatttattcaccagtttttattaatacaagtcactttttcaaaaatttggatttttttatatataactagctgctattcaaatgtgagtctaccatttttaatttatggttcaactgtttgtgagactgaattcttgcaatgcataagatataaaagcaaatatgactcactcatttcttggggtcgtattcctgatttcagaagaggatcataactgaaacaacataagacaatataatcatgtgcttttaacatatttgagaataaaaaggactagcaaataaaactcataaaaaaaaaaaaaaaaaaaaaaaaaaaaaaaaaaaaaaaaaaaaaaaaaaaattncctgnggccncaggctttttccctttggtgggggttatttttggcttggccctggccgtccgttttccaccgtcgtgcctgggggaanccccggggggttnccccacctttttccccttnacgg

SEQ ID NO: 348334 - DNA, 1298 bp, Homo sapiens
cctcttacacagtttgcagcgcgggggcggcggggtgacagtccccgtgcatgaatcagccacccctcaggctccgccccggcgggggtcggccggacgctcgccccgcataaagcgggcacccgggccgcctggagagaaagccgcgcacctcctcccgccaggcgctttctcggacgccttgcccagcgggccgcccgaccccctgcaccatggaccccgctcgccccctggggctgtcgattctgctgcttttcctgacggaggctgcactgggcgatgctgctcaggagccaacaggaaataacgcggagatctgtctcctgcccctagactacggaccctgccgggccctacttctccgttactactacgacaggtacacgcagagctgccgccagttcctgtacgggggctgcgagggcaacgccaacaatttctacacctgggaggcttgcgacgatgcttgctggaggatagaaaaagttcccaaagtttgccggctgcaagtgagtgtggacgaccagtgtgaggggtccacagaaaagtatttctttaatctaagttccatgacatgtgaaaaattcttttccggtgggtgtcaccggaaccggattgagaacaggtttccagatgaagctacttgtatgggcttctgcgcaccaaagaaaattccatcattttgctacagtccaaaagatgagggactgtgctctgccaatgtgactcgctattattttaatccaagatacagaacctgtgatgctttcacctatactggctgtggagggaatgacaataactttgttagcagggaggattgcaaacgtgcatgtgcaaaagctttgaaaaagaaaaagaagatgccaaagcttcgctttgccagtagaatccggaaaattcggaagaagcaattttaaacattcttaatatgtcatcttgtttgtctttatggcttatttgcctttatggttgtatctgaagaataatatgacagcatgaggaaacaaatcattggtgatttattcaccagtttttattaatacaagtcactttttcaaaaatttggatttttttatatataactagctgctattcaaatgtgagtctaccatttttaatttatggttcaactgtttgtgagactgaattcttgcaatgcataagatataaaagcaaatatgactcactcatttcttggggtcgtattcctgatttcagaagaggatcataactgaaacaacattaactttcaggatcacgatgtcactcaaggaacagctatgccatagtacgtc

SEQ ID NO: 348335 - DNA, 1300 bp, Homo sapiens
cctcttacacagtttgcagcgcgggggcggcggggtgacagtccccgtgcatgaatcagccacccctcaggctccgccccggcgggggtcggccggacgctcgccccgcataaagcgggcacccgggccgcctggagagaaagccgcgcacctcctcccgccaggcgctttctcggacgccttgcccagcgggccgcccgaccccctgcaccatggaccccgctcgccccctggggctgtcgattctgctgcttttcctgacggaggctgcactgggcgatgctgctcaggagccaacaggaaataacgcggagatctgtctcctgcccctagactacggaccctgccgggccctacttctccgttactactacgacaggtacacgcagagctgccgccagttcctgtacgggggctgcgagggcaacgccaacaatttctacacctgggaggcttgcgacgatgcttgctggaggatagaaaaagttcccaaagtttgccggctgcaagtgagtgtggacgaccagtgtgaggggtccacagaaaagtatttctttaatctaagttccatgacatgtgaaaaattcttttccggtgggtgtcaccggaaccggattgagaacaggtttccagatgaagctacttgtatgggcttctgcgcaccaaagaaaattccatcattttgctacagtccaaaagatgagggactgtgctctgccaatgtgactcgctattattttaatccaagatacagaacctgtgatgctttcacctatactggctgtggagggaatgacaataactttgttagcagggaggattgcaaacgtgcatgtgcaaaagctttgaaaaagaaaaagaagatgccaaagcttcgctttgccagtagaatccggaaaattcggaagaagcaattttaaacattcttaatatgtcatcttgtttgtctttatggcttatttgcctttatggttgtatctgaagaataatatgacagcatgaggaaacaaatcattggtgatttattcaccagtttttattaatacaagtcactttttcaaaaatttggatttttttatatataactagctgctattcaaatgtgagtctaccatttttaatttatggttcaactgtttgtgagactgaattcttgcaatgcataagatataaaagcaaatatgactcactcaaaaaaaaaaaaaaaaaaaaaaaaaaaaaaaaaaaaaaaaaaaaaaaaaaaaaaacaaaaaaaaaaaaaaaacacaaacaacacaacaaaagaaaaaaaaaaaaaaaa

SEQ ID NO: 348336 - DNA, 2854 bp, Homo sapiens
gaggatccccaattagcttggcacaggatagaaaaagttcccaaagtttgccggctgcaagtgagtgtggacgaccagtgtgaggggtccacagaaaagtatttctttaatctaagttccatgacatgtgaaaaattcttttccggtgggtgtcaccggaaccggattgagaacaggtttccagatgaagctacttgtatgggcttctgcgcaccaaagaaaattccatcattttgctacagtccaaaagatgagggactgtgctctgccaatgtgactcgctattattttaatccaagatacagaacctgtgatgctttcacctatactggctgtggagggaatgacaataactttgttagcagggaggattgcaaacgtgcatgtgcaaaagctttgaaaaagaaaaagaagatgccaaagcttcgctttgccagtagaatccggaaaattcggaagaagcaattttaaacattcttaatatgtcatcttgtttgtctttatggcttatttgcctttatggttgtatctgaagaataatatgacagcatgaggaaacaaatcattggtgatttattcaccagtttttattaatacaagtcactttttcaaaaatttggatttttttatatataactagctgctattcaaatgtgagtctaccatttttaatttatggttcaactgtttgtgagactgaattcttgcaatgcataagatataaaagcaaatatgactcactcatttcttggggtcgtattcctgatttcagaagaggatcataactgaaacaacataagacaatataatcatgtgcttttaacatatttgagaataaaaaggactagcaaataaaactcattttgcatttaaaagttggattatattttagtcccaagaagacaaagtcgcagattaacaacactttaaaaatattactcccattttattgtgttagattgcagtacaatgaatgaataaggggatttatttaaaagatcttaactttcttgactgatttaaaaagctaatcaatttattaaagccagaaatgttctcctctgggaaagcaatttctatctatttatctaccaatccccactcacatgtatatgtttgtgtttacatagagatagatggttttaagggttttcctattgttaaattatttcctaagacattgtgggttggagaccactaaacttataaaaaaccaaggaaagtaaagtttttcaaatgtttatactgtttaaggtgtttatttatataaaccatgcatgagaaaccatgcataaatttaataatttaaatttcaccagtaaattatcattgattaaatatggtcataccaatgaaataggttttttctttctctgtaataaaacaatttttctaaattcttatgttttcatagcaagattaacatatttaattacaaattaaatatgcaaaatgacaaatgcgtttaccttttgcttgaacaatctttcatttaaaaatttatcccagttattttgacaaataggtatatgcctgagaactttgaatgatgctgaaagctagaagcaaaccaggtactcttcagtcagggactggttgaagattttatggatgaggagttagcaaaatatctatatatgcatatcttctgactcccaggatacataagaaacacagggcctagaacagtatgaataaacacacatatacacaaacatcacagaagatactaaagatattaaaaatgtttacctatagaggtttggagagaacagaggggtggacagttgtggagataatatttgtgtaaatataactgtgatatagtttttatcttggaccatgtaaatatttgacataattaataatcaaaattaaatacaaaagaaaaagcatttctttaagcattcaaacccaactgaataccaaatagtggcaaaactacacaaaagatatatacttattttcaatgacttcacaaattaatatgagaatgtctttgggggaatataaaggtgaaaaaattctgaagaaatctcaaaatgcatttttaaatttgttattactttttatttgaatagttttgggagttacaagtggttttttattacatggatgaattatattgccagtgaattctgagattttagtgcactgtgaaaatgcatttagtagtctcattgttaatggtaatactggtgttattttgaacctattgtatctagaatactatgttgtaagaaaacaagtagttacatttctttagaagtcaggattttcagtgttaagagaaaatgagatacaagtatacaatgaaagaaattaagtaaaaatctttgacttaaattggaattagaaatattcatataaattaataactgattttctctatcaaaaaatctgtatttcccacttttccattgaaaagtccttgaagtaatgacaactcagtagcagtagttacaatgaacatcaagactgtggtctctccatactattactcactggttcctaagaaccagtgctcttaggagaatagctgaatccaggtctggggcaggaaatatgtaaaataaacttgggccatcttactccagaaatcaaggaagctatcaaagactaatgaatcatgtcacaaaaacgggagcaatattaaggagctcccactaacctaaaatgagacaatatggccatcaaaacaaataatgaccacaatgtatataaatatatagaaatctgagtttatgattatatacacacactcacctccttggtaccttttggaggtttctagggcattatctcattcatttgaaaacgatgaattaacagaaagaataaagcatttatcctt

SEQ ID NO: 348337 - DNA, 3429 bp, Homo sapiens
cctcttacacagtttgcagcgcgggggcggcggggtgacagtccccgtgcatgaatcagccacccctcaggctccgccccggcgggggtcggccggacgctcgccccgcataaagcgggcacccgggccgcctggagagaaagccgcgcacctcctcccgccaggcgctttctcggacgccttgcccagcgggccgcccgaccccctgcaccatggaccccgctcgccccctggggctgtcgattctgctgcttttcctgacggaggctgcactgggcgatgctgctcaggagccaacaggaaataacgcggagatctgtctcctgcccctagactacggaccctgccgggccctacttctccgttactactacgacaggtacacgcagagctgccgccagttcctgtacgggggctgcgagggcaacgccaacaatttctacacctgggaggcttgcgacgatgcttgctggaggatagaaaaagttcccaaagtttgccggctgcaagtgagtgtggacgaccagtgtgaggggtccacagaaaagtatttctttaatctaagttccatgacatgtgaaaaattcttttccggtgggtgtcaccggaaccggattgagaacaggtttccagatgaagctacttgtatgggcttctgcgcaccaaagaaaattccatcattttgctacagtccaaaagatgagggactgtgctctgccaatgtgactcgctattattttaatccaagatacagaacctgtgatgctttcacctatactggctgtggagggaatgacaataactttgttagcaggcagtccaaaagatgagggactgtgctctgccaatgtgactcgctattattttaatccaagatacagaacctgtgatgctttcacctatactggctgtggagggaatgacaataactttgttagcaggaggattgcaaacgtgcatgtgcaaaagctttgaaaaagaaaaagaagatgccaaagcttcgctttgccagtagaatccggaaaattcggaagaagcaattttaaacattcttaatatgtcatcttgtttgtctttatggcttatttgcctttatggttgtatctgaagaataatatgacagcatgaggaaacaaatcattggtgatttattcaccagtttttattaatacaagtcactttttcaaaaatttggatttttttatatataactagctgctattcaaatgtgagtctaccatttttaatttatggttcaactgtttgtgagactgaattcttgcaatgcataagatataaaagcaaatatgactcactcatttcttggggtcgtattcctgatttcagaagaggatcataactgaaacaacataagacaatataatcatgtgcttttaacatatttgagaataaaaaggactagcaaataaaactcattttgcatttaaaagttggattatattttagtcccaagaagacaaagtcgcagattaacaacactttaaaaatattactcccattttattgtgttagattgcagtacaatgaatgaataaggggatttatttaaaagatcttaactttcttgactgatttaaaaagctaatcaatttattaaagccagaaatgttctcctctgggaaagcaatttctatctatttatctaccaatccccactcacatgtatatgtttgtgtttacatagagatagatggttttaagggttttcctattgttaaattatttcctaagacattgtgggttggagaccactaaacttataaaaaaccaaggaaagtaaagtttttcaaatgtttatactgtttaaggtgtttatttatataaaccatgcatgagaaaccatgcataaatttaataatttaaatttcaccagtaaattatcattgattaaatatggtcataccaatgaaataggttttttctttctctgtaataaaacaatttttctaaattcttatgttttcatagcaagattaacatatttaattacaaattaaatatgcaaaatgacaaatgcgtttaccttttgcttgaacaatctttcatttaaaaatttatcccagttattttgacaaataggtatatgcctgagaactttgaatgatgctgaaagctagaagcaaaccaggtactcttcagtcagggactggttgaagattttatggatgaggagttagcaaaatatctatatatgcatatcttctgactcccaggatacataagaaacacagggcctagaacagtatgaataaacacacatatacacaaacatcacagaagatactaaagatattaaaaatgtttacctatagaggtttggagagaacagaggggtggacagttgtggagataatatttgtgtaaatataactgtgatatagtttttatcttggaccatgtaaatatttgacataattaataatcaaaattaaatacaaaagaaaaagcatttctttaagcattcaaacccaactgaataccaaatagtggcaaaactacacaaaagatatatacttattttcaatgacttcacaaattaatatgagaatgtctttgggggaatataaaggtgaaaaaattctgaagaaatctcaaaatgcatttttaaatttgttattactttttatttgaatagttttgggagttacaagtggttttttattacatggatgaattatattgccagtgaattctgagattttagtgcactgtgaaaatgcatttagtagtctcattgttaatggtaatactggtgttattttgaacctattgtatctagaatactatgttgtaagaaaacaagtagttacatttctttagaagtcaggattttcagtgttaagagaaaatgagatacaagtatacaatgaaagaaattaagtaaaaatctttgacttaaattggaattagaaatattcatataaattaataactgattttctctatcaaaaaatctgtatttcccacttttccattgaaaagtccttgaagtaatgacaactcagtagcagtagttacaatgaacatcaagactgtggtctctccatactattactcactggttcctaagaaccagtgctcttaggagaatagctgaatccaggtctggggcaggaaatatgtaaaataaacttgggccatcttactccagaaatcaaggaagctatcaaagactaatgaatcatgtcacaaaaacgggagcaatattaaggagctcccactaacctaaaatgagacaatatggccatcaaaacaaataatgaccacaatgtatataaatatatagaaatctgagtttatgattatatacacacactcacctccttggtaccttttggaggtttctagggcattatctcattcatttgaaaacgatgaattaacagaaagaataaagcatttatcctt

SEQ ID NO: 348338 - DNA, 3286 bp, Homo sapiens
cctcttacacagtttgcagcgcgggggcggcggggtgacagtccccgtgcatgaatcagccacccctcaggctccgccccggcgggggtcggccggacgctcgccccgcataaagcgggcacccgggccgcctggagagaaagccgcgcacctcctcccgccaggcgctttctcggacgccttgcccagcgggccgcccgaccccctgcaccatggaccccgctcgccccctggggctgtcgattctgctgcttttcctgacggaggctgcactgggcgatgctgctcaggagccaacaggaaataacgcggagatctgtctcctgcccctagactacggaccctgccgggccctacttctccgttactactacgacaggtacacgcagagctgccgccagttcctgtacgggggctgcgagggcaacgccaacaatttctacacctgggaggcttgcgacgatgcttgctggaggatagaaaaagttcccaaagtttgccggctgcaagtgagtgtggacgaccagtgtgaggggtccacagaaaagtatttctttaatctaagttccatgacatgtgaaaaattcttttccggtgggtgtcaccggaaccggattgagaacaggtttccagatgaagctacttgtatgggcttctgcgcaccaaagaaaacagtccaaaagatgagggactgtgctctgccaatgtgactcgctattattttaatccaagatacagaacctgtgatgctttcacctatactggctgtggagggaatgacaataactttgttagcaggaggattgcaaacgtgcatgtgcaaaagctttgaaaaagaaaaagaagatgccaaagcttcgctttgccagtagaatccggaaaattcggaagaagcaattttaaacattcttaatatgtcatcttgtttgtctttatggcttatttgcctttatggttgtatctgaagaataatatgacagcatgaggaaacaaatcattggtgatttattcaccagtttttattaatacaagtcactttttcaaaaatttggatttttttatatataactagctgctattcaaatgtgagtctaccatttttaatttatggttcaactgtttgtgagactgaattcttgcaatgcataagatataaaagcaaatatgactcactcatttcttggggtcgtattcctgatttcagaagaggatcataactgaaacaacataagacaatataatcatgtgcttttaacatatttgagaataaaaaggactagcaaataaaactcattttgcatttaaaagttggattatattttagtcccaagaagacaaagtcgcagattaacaacactttaaaaatattactcccattttattgtgttagattgcagtacaatgaatgaataaggggatttatttaaaagatcttaactttcttgactgatttaaaaagctaatcaatttattaaagccagaaatgttctcctctgggaaagcaatttctatctatttatctaccaatccccactcacatgtatatgtttgtgtttacatagagatagatggttttaagggttttcctattgttaaattatttcctaagacattgtgggttggagaccactaaacttataaaaaaccaaggaaagtaaagtttttcaaatgtttatactgtttaaggtgtttatttatataaaccatgcatgagaaaccatgcataaatttaataatttaaatttcaccagtaaattatcattgattaaatatggtcataccaatgaaataggttttttctttctctgtaataaaacaatttttctaaattcttatgttttcatagcaagattaacatatttaattacaaattaaatatgcaaaatgacaaatgcgtttaccttttgcttgaacaatctttcatttaaaaatttatcccagttattttgacaaataggtatatgcctgagaactttgaatgatgctgaaagctagaagcaaaccaggtactcttcagtcagggactggttgaagattttatggatgaggagttagcaaaatatctatatatgcatatcttctgactcccaggatacataagaaacacagggcctagaacagtatgaataaacacacatatacacaaacatcacagaagatactaaagatattaaaaatgtttacctatagaggtttggagagaacagaggggtggacagttgtggagataatatttgtgtaaatataactgtgatatagtttttatcttggaccatgtaaatatttgacataattaataatcaaaattaaatacaaaagaaaaagcatttctttaagcattcaaacccaactgaataccaaatagtggcaaaactacacaaaagatatatacttattttcaatgacttcacaaattaatatgagaatgtctttgggggaatataaaggtgaaaaaattctgaagaaatctcaaaatgcatttttaaatttgttattactttttatttgaatagttttgggagttacaagtggttttttattacatggatgaattatattgccagtgaattctgagattttagtgcactgtgaaaatgcatttagtagtctcattgttaatggtaatactggtgttattttgaacctattgtatctagaatactatgttgtaagaaaacaagtagttacatttctttagaagtcaggattttcagtgttaagagaaaatgagatacaagtatacaatgaaagaaattaagtaaaaatctttgacttaaattggaattagaaatattcatataaattaataactgattttctctatcaaaaaatctgtatttcccacttttccattgaaaagtccttgaagtaatgacaactcagtagcagtagttacaatgaacatcaagactgtggtctctccatactattactcactggttcctaagaaccagtgctcttaggagaatagctgaatccaggtctggggcaggaaatatgtaaaataaacttgggccatcttactccagaaatcaaggaagctatcaaagactaatgaatcatgtcacaaaaacgggagcaatattaaggagctcccactaacctaaaatgagacaatatggccatcaaaacaaataatgaccacaatgtatataaatatatagaaatctgagtttatgattatatacacacactcacctccttggtaccttttggaggtttctagggcattatctcattcatttgaaaacgatgaattaacagaaagaataaagcatttatcctt

SEQ ID NO: 348339 - DNA, 3028 bp, Homo sapiens
gttcagagcgtcccgtatgtgctgtctcagcgagcaaccacgatatagctgcgtagatcggtctcctgcccctagactacggaccctgccgggccctacttctccgttactactacgacaggtacacgcagagctgccgccagttcctgtacgggggctgcgagggcaacgccaacaatttctacacctgggaggcttgcgacgatgcttgctggaggatagaaaaagttcccaaagtttgccggctgcaagtgagtgtggacgaccagtgtgaggggtccacagaaaagtatttctttaatctaagttccatgacatgtgaaaaattcttttccggtgggtgtcaccggaaccggattgagaacaggtttccagatgaagctacttgtatgggcttctgcgcaccaaagaaaacagtccaaaagatgagggactgtgctctgccaatgtgactcgctattattttaatccaagatacagaacctgtgatgctttcacctatactggctgtggagggaatgacaataactttgttagcaggaggattgcaaacgtgcatgtgcaaaagctttgaaaaagaaaaagaagatgccaaagcttcgctttgccagtagaatccggaaaattcggaagaagcaattttaaacattcttaatatgtcatcttgtttgtctttatggcttatttgcctttatggttgtatctgaagaataatatgacagcatgaggaaacaaatcattggtgatttattcaccagtttttattaatacaagtcactttttcaaaaatttggatttttttatatataactagctgctattcaaatgtgagtctaccatttttaatttatggttcaactgtttgtgagactgaattcttgcaatgcataagatataaaagcaaatatgactcactcatttcttggggtcgtattcctgatttcagaagaggatcataactgaaacaacataagacaatataatcatgtgcttttaacatatttgagaataaaaaggactagcaaataaaactcattttgcatttaaaagttggattatattttagtcccaagaagacaaagtcgcagattaacaacactttaaaaatattactcccattttattgtgttagattgcagtacaatgaatgaataaggggatttatttaaaagatcttaactttcttgactgatttaaaaagctaatcaatttattaaagccagaaatgttctcctctgggaaagcaatttctatctatttatctaccaatccccactcacatgtatatgtttgtgtttacatagagatagatggttttaagggttttcctattgttaaattatttcctaagacattgtgggttggagaccactaaacttataaaaaaccaaggaaagtaaagtttttcaaatgtttatactgtttaaggtgtttatttatataaaccatgcatgagaaaccatgcataaatttaataatttaaatttcaccagtaaattatcattgattaaatatggtcataccaatgaaataggttttttctttctctgtaataaaacaatttttctaaattcttatgttttcatagcaagattaacatatttaattacaaattaaatatgcaaaatgacaaatgcgtttaccttttgcttgaacaatctttcatttaaaaatttatcccagttattttgacaaataggtatatgcctgagaactttgaatgatgctgaaagctagaagcaaaccaggtactcttcagtcagggactggttgaagattttatggatgaggagttagcaaaatatctatatatgcatatcttctgactcccaggatacataagaaacacagggcctagaacagtatgaataaacacacatatacacaaacatcacagaagatactaaagatattaaaaatgtttacctatagaggtttggagagaacagaggggtggacagttgtggagataatatttgtgtaaatataactgtgatatagtttttatcttggaccatgtaaatatttgacataattaataatcaaaattaaatacaaaagaaaaagcatttctttaagcattcaaacccaactgaataccaaatagtggcaaaactacacaaaagatatatacttattttcaatgacttcacaaattaatatgagaatgtctttgggggaatataaaggtgaaaaaattctgaagaaatctcaaaatgcatttttaaatttgttattactttttatttgaatagttttgggagttacaagtggttttttattacatggatgaattatattgccagtgaattctgagattttagtgcactgtgaaaatgcatttagtagtctcattgttaatggtaatactggtgttattttgaacctattgtatctagaatactatgttgtaagaaaacaagtagttacatttctttagaagtcaggattttcagtgttaagagaaaatgagatacaagtatacaatgaaagaaattaagtaaaaatctttgacttaaattggaattagaaatattcatataaattaataactgattttctctatcaaaaaatctgtatttcccacttttccattgaaaagtccttgaagtaatgacaactcagtagcagtagttacaatgaacatcaagactgtggtctctccatactattactcactggttcctaagaaccagtgctcttaggagaatagctgaatccaggtctggggcaggaaatatgtaaaataaacttgggccatcttactccagaaatcaaggaagctatcaaagactaatgaatcatgtcacaaaaacgggagcaatattaaggagctcccactaacctaaaatgagacaatatggccatcaaaacaaataatgaccacaatgtatataaatatatagaaatctgagtttatgattatatacacacactcacctccttggtaccttttggaggtttctagggcattatctcattcatttgaaaacgatgaattaacagaaagaataaagcatttatcctt

SEQ ID NO: 348340 - DNA, 3019 bp, Homo sapiens
cctcttacacagtttgcagcgcgggggcggcggggtgacagtccccgtgcatgaatcagccacccctcaggctccgccccggcgggggtcggccggacgctcgccccgcataaagcgggcacccgggccgcctggagagaaagccgcgcacctcctcccgccaggcgctttctcggacgccttgcccagcgggccgcccgaccccctgcaccatggaccccgctcgccccctggggctgtcgattctgctgcttttcctgacggaggctgcactgggcgatgctgctcaggagccaacaggaaataacgcggagatctgtctcctgcccctagactacggaccctgccgggccctacttctccgttactactacgacaggtacacgcagagctgccgccagttcctgtacgggggctgcgagggcaacgccaacaatttctacacctgggaggcttgcgacgatgcttgctggaggatagaaaaagttcccaaagtttgccggctgcaagtgagtgtggacgaccagtgtgaggggtccacagaaaagtatttctttaatctaagttccatgacatgtgaaaaattcttttccggtgggtgtcaccggaaccggattgagaacaggtttccagatgaagctacttgtatgggcttctgcgcaccaaagaaaacagtccaaaagatgagggactgtgctctgccaatgtgacagcatgaggaaacaaatcattggtgatttattcaccagtttttattaatacaagtcactttttcaaaaatttggatttttttatatataactagctgctattcaaatgtgagtctaccatttttaatttatggttcaactgtttgtgagactgaattcttgcaatgcataagatataaaagcaaatatgactcactcatttcttggggtcgtattcctgatttcagaagaggatcataactgaaacaacataagacaatataatcatgtgcttttaacatatttgagaataaaaaggactagcaaataaaactcattttgcatttaaaagttggattatattttagtcccaagaagacaaagtcgcagattaacaacactttaaaaatattactcccattttattgtgttagattgcagtacaatgaatgaataaggggatttatttaaaagatcttaactttcttgactgatttaaaaagctaatcaatttattaaagccagaaatgttctcctctgggaaagcaatttctatctatttatctaccaatccccactcacatgtatatgtttgtgtttacatagagatagatggttttaagggttttcctattgttaaattatttcctaagacattgtgggttggagaccactaaacttataaaaaaccaaggaaagtaaagtttttcaaatgtttatactgtttaaggtgtttatttatataaaccatgcatgagaaaccatgcataaatttaataatttaaatttcaccagtaaattatcattgattaaatatggtcataccaatgaaataggttttttctttctctgtaataaaacaatttttctaaattcttatgttttcatagcaagattaacatatttaattacaaattaaatatgcaaaatgacaaatgcgtttaccttttgcttgaacaatctttcatttaaaaatttatcccagttattttgacaaataggtatatgcctgagaactttgaatgatgctgaaagctagaagcaaaccaggtactcttcagtcagggactggttgaagattttatggatgaggagttagcaaaatatctatatatgcatatcttctgactcccaggatacataagaaacacagggcctagaacagtatgaataaacacacatatacacaaacatcacagaagatactaaagatattaaaaatgtttacctatagaggtttggagagaacagaggggtggacagttgtggagataatatttgtgtaaatataactgtgatatagtttttatcttggaccatgtaaatatttgacataattaataatcaaaattaaatacaaaagaaaaagcatttctttaagcattcaaacccaactgaataccaaatagtggcaaaactacacaaaagatatatacttattttcaatgacttcacaaattaatatgagaatgtctttgggggaatataaaggtgaaaaaattctgaagaaatctcaaaatgcatttttaaatttgttattactttttatttgaatagttttgggagttacaagtggttttttattacatggatgaattatattgccagtgaattctgagattttagtgcactgtgaaaatgcatttagtagtctcattgttaatggtaatactggtgttattttgaacctattgtatctagaatactatgttgtaagaaaacaagtagttacatttctttagaagtcaggattttcagtgttaagagaaaatgagatacaagtatacaatgaaagaaattaagtaaaaatctttgacttaaattggaattagaaatattcatataaattaataactgattttctctatcaaaaaatctgtatttcccacttttccattgaaaagtccttgaagtaatgacaactcagtagcagtagttacaatgaacatcaagactgtggtctctccatactattactcactggttcctaagaaccagtgctcttaggagaatagctgaatccaggtctggggcaggaaatatgtaaaataaacttgggccatcttactccagaaatcaaggaagctatcaaagactaatgaatcatgtcacaaaaacgggagcaatattaaggagctcccactaacctaaaatgagacaatatggccatcaaaacaaataatgaccacaatgtatataaatatatagaaatctgagtttatgattatatacacacactcacctccttggtaccttttggaggtttctagggcattatctcattcatttgaaaacgatgaattaacagaaagaataaagcatttatcctt

SEQ ID NO: 348341 - DNA, 2644 bp, Homo sapiens
agactcgctggggcacaggcctcctggtcctggacggttcctgagagaactccaccaacaatttctacacctgggaggcttgcgacgatgcttgctggaggatagaaaaagttcccaaagtttgccggctgcaagtgagtgtggacgaccagtgtgaggggtccacagaaaagtatttctttaatctaagttccatgacatgtgaaaaattcttttccggtgggtgtcaccggaaccggattgagaacaggtttccagatgaagctacttgtatgggcttctgcgcaccaaagaaaacagtccaaaagatgagggactgtgctctgccaatgtgacagcatgaggaaacaaatcattggtgatttattcaccagtttttattaatacaagtcactttttcaaaaatttggatttttttatatataactagctgctattcaaatgtgagtctaccatttttaatttatggttcaactgtttgtgagactgaattcttgcaatgcataagatataaaagcaaatatgactcactcatttcttggggtcgtattcctgatttcagaagaggatcataactgaaacaacataagacaatataatcatgtgcttttaacatatttgagaataaaaaggactagcaaataaaactcattttgcatttaaaagttggattatattttagtcccaagaagacaaagtcgcagattaacaacactttaaaaatattactcccattttattgtgttagattgcagtacaatgaatgaataaggggatttatttaaaagatcttaactttcttgactgatttaaaaagctaatcaatttattaaagccagaaatgttctcctctgggaaagcaatttctatctatttatctaccaatccccactcacatgtatatgtttgtgtttacatagagatagatggttttaagggttttcctattgttaaattatttcctaagacattgtgggttggagaccactaaacttataaaaaaccaaggaaagtaaagtttttcaaatgtttatactgtttaaggtgtttatttatataaaccatgcatgagaaaccatgcataaatttaataatttaaatttcaccagtaaattatcattgattaaatatggtcataccaatgaaataggttttttctttctctgtaataaaacaatttttctaaattcttatgttttcatagcaagattaacatatttaattacaaattaaatatgcaaaatgacaaatgcgtttaccttttgcttgaacaatctttcatttaaaaatttatcccagttattttgacaaataggtatatgcctgagaactttgaatgatgctgaaagctagaagcaaaccaggtactcttcagtcagggactggttgaagattttatggatgaggagttagcaaaatatctatatatgcatatcttctgactcccaggatacataagaaacacagggcctagaacagtatgaataaacacacatatacacaaacatcacagaagatactaaagatattaaaaatgtttacctatagaggtttggagagaacagaggggtggacagttgtggagataatatttgtgtaaatataactgtgatatagtttttatcttggaccatgtaaatatttgacataattaataatcaaaattaaatacaaaagaaaaagcatttctttaagcattcaaacccaactgaataccaaatagtggcaaaactacacaaaagatatatacttattttcaatgacttcacaaattaatatgagaatgtctttgggggaatataaaggtgaaaaaattctgaagaaatctcaaaatgcatttttaaatttgttattactttttatttgaatagttttgggagttacaagtggttttttattacatggatgaattatattgccagtgaattctgagattttagtgcactgtgaaaatgcatttagtagtctcattgttaatggtaatactggtgttattttgaacctattgtatctagaatactatgttgtaagaaaacaagtagttacatttctttagaagtcaggattttcagtgttaagagaaaatgagatacaagtatacaatgaaagaaattaagtaaaaatctttgacttaaattggaattagaaatattcatataaattaataactgattttctctatcaaaaaatctgtatttcccacttttccattgaaaagtccttgaagtaatgacaactcagtagcagtagttacaatgaacatcaagactgtggtctctccatactattactcactggttcctaagaaccagtgctcttaggagaatagctgaatccaggtctggggcaggaaatatgtaaaataaacttgggccatcttactccagaaatcaaggaagctatcaaagactaatgaatcatgtcacaaaaacgggagcaatattaaggagctcccactaacctaaaatgagacaatatggccatcaaaacaaataatgaccacaatgtatataaatatatagaaatctgagtttatgattatatacacacactcacctccttggtaccttttggaggtttctagggcattatctcattcatttgaaaacgatgaattaacagaaagaataaagcatttatcctt

SEQ ID NO: 348342 - DNA, 859 bp, Homo sapiens
  misc_feature (803)..(803): n is a, c, g, or t
  misc_feature (844)..(844): n is a, c, g, or t
cctcttacacagtttgcagcgcgggggcggcggggtgacagtccccgtgcatgaatcagccacccctcaggctccgccccggcgggggtcggccggacgctcgccccgcataaagcgggcacccgggccgcctggagagaaagccgcgcacctcctcccgccaggcgctttctcggacgccttgcccagcgggccgcccgaccccctgcaccatggaccccgctcgccccctggggctgtcgattctgctgcttttcctgacggaggctgcactgggcgatgctgctcaggagccaacaggaaataacgcggagatctgtctcctgcccctagactacggaccctgccgggccctacttctccgttactactacgacaggtacacgcagagctgccgccagttcctgtacgggggctgcgagggcaacgccaacaatttctacacctgggaggcttgcgacgatgcttgctggaggatagaaaaagttcccaaagtttgccggctgcaagtgagtgtggacgaccagtgtgaggggtccacagaaaagtatttctttaatctaagttccatgacatgtgaaaaattcttttccggtgggtgtcaccggaaccggattgagaacaggtttccagatgaagctacttgtatgggcttctgcgcaccaaagaaaattccatcattttgctacagtccaaaagatgagggactgtgctctgccaatgtgactcgctattattttaatccaagatacagaacctgtgatgctttcacctatactgggctggtgggaaggggaaatgancaaattaaactttggttaagccaagggggagggaattggcnaaaaccgttgccatg

SEQ ID NO: 348343 - DNA, 1117 bp, Homo sapiens
cctcttacacagtttgcagcgcgggggcggcggggtgacagtccccgtgcatgaatcagccacccctcaggctccgccccggcgggggtcggccggacgctcgccccgcataaagcgggcacccgggccgcctggagagaaagccgcgcacctcctcccgccaggcgctttctcggacgccttgcccagcgggccgcccgaccccctgcaccatggaccccgctcgccccctggggctgtcgattctgctgcttttcctgacggaggctgcactgggcgatgctgctcaggagccaacaggaaataacgcggagatctgtctcctgcccctagactacggaccctgccgggccctacttctccgttactactacgacaggtacacgcagagctgccgccagttcctgtacgggggctgcgagggcaacgccaacaatttctacacctgggaggcttgcgacgatgcttgctggaggatagaaaaagttcccaaagtttgccggctgcaagtgagtgtggacgaccagtgtgaggggtccacagaaaagtatttctttaatctaagttccatgacatgtgaaaaattcttttccggtgggtgtcaccggaaccggattgagaacaggtttccagatgaagctacttgtatgggcttctgcgcaccaaagaaaaatacagaacctgtgatgctttcacctatactggctgtggagggaatgacaataactttgttagcagggaggattgcaaacgtgcatgtgcaaaagctttgaaaaagaaaaagaagatgccaaagcttcgctttgccagtagaatccggaaaattcggaagaagcaattttaaacattcttaatatgtcatcttgtttgtctttatggcttatttgcctttatggttgtatctgaagaataatatgacagcatgaggaaacaaatcattggtgatttattcaccagtttttattaatacaagtcactttttcaaaaatttggatttttttatatataactagctgctattcaaatgtgagtctaccatttttaatttatggttcaactgtttgtgagactgaattcttgcaatgcataagatataaaagcaaatatgactcactca

SEQ ID NO: 348344 - DNA, 1303 bp, Homo sapiens
  misc_feature (674)..(674): n is a, c, g, or t
  misc_feature (677)..(677): n is a, c, g, or t
  misc_feature (680)..(681): n is a, c, g, or t
  misc_feature (690)..(690): n is a, c, g, or t
  misc_feature (697)..(697): n is a, c, g, or t
  misc_feature (699)..(699): n is a, c, g, or t
  misc_feature (716)..(716): n is a, c, g, or t
  misc_feature (735)..(735): n is a, c, g, or t
  misc_feature (747)..(748): n is a, c, g, or t
  misc_feature (754)..(754): n is a, c, g, or t
  misc_feature (756)..(756): n is a, c, g, or t
  misc_feature (759)..(759): n is a, c, g, or t
  misc_feature (775)..(775): n is a, c, g, or t
  misc_feature (780)..(780): n is a, c, g, or t
  misc_feature (791)..(791): n is a, c, g, or t
  misc_feature (808)..(808): n is a, c, g, or t
  misc_feature (812)..(812): n is a, c, g, or t
cctcttacacagtttgcagcgcgggggcggcggggtgacagtccccgtgcatgaatcagccacccctcaggctccgccccggcgggggtcggccggacgctcgccccgcataaagcgggcacccgggccgcctggagagaaagccgcgcacctcctcccgccaggcgctttctcggacgccttgcccagcgggccgcccgaccccctgcaccatggaccccgctcgccccctggggctgtcgattctgctgcttttcctgacggaggctgcactgggcgatgctgctcaggagccaacaggaaataacgcggagatctgtctcctgcccctagactacggaccctgccgggccctacttctccgttactactacgacaggtacacgcagagctgccgccagttcctgtacgggggctgcgagggcaacgccaacaatttctacacctgggaggcttgcgacgatgcttgctggaggatagaaaaagttcccaaagtttgccggctgcaagtgagtgtggacgaccagtgtgaggggtccacagaaaagtatttctttaatctaagttccatgacatgtgaaaaattcttttccggtgggtgtcaccggaaccggattgagaacaggtttccagatgaagctacttgtatgggcttctgcgcaccaaagaaaagnggnagnnggggggganggggggngnggggggggagggggggnggggaatgtgagcgggggnggatggggaagnngagagngnganggggggaggggggganggggnggggggggggngggaatgagaaggactnggtnggcagggaggattgcaaacgtgcatgtgcaaaagctttgaaaaagaaaaagaagatgccaaagcttcgctttgccagtagaatccggaaaattcggaagaagcaattttaaacattcttaatatgtcatcttgtttgtctttatggcttatttgcctttatggttgtatctgaagaataatatgacagcatgaggaaacaaatcattggtgatttattcaccagtttttattaatacaagtcactttttcaaaaatttggatttttttatatataactagctgctattcaaatgtgagtctaccatttttaatttatggttcaactgtttgtgagactgaattcttgcaatgcataagatataaaagcaaatatgactcactcaaaaaaaaaaaaaaaaaaaaaaaaaaaaaaaaaaaaaaaaaaaaaaaaaaaaaaacaaaaaaaaaaaaaaaacacaaacaacacaacaaaagaaaaaaaaaaaaaaaa

SEQ ID NO: 348345 - DNA, 1119 bp, Homo sapiens
cctcttacacagtttgcagcgcgggggcggcggggtgacagtccccgtgcatgaatcagccacccctcaggctccgccccggcgggggtcggccggacgctcgccccgcataaagcgggcacccgggccgcctggagagaaagccgcgcacctcctcccgccaggcgctttctcggacgccttgcccagcgggccgcccgaccccctgcaccatggaccccgctcgccccctggggctgtcgattctgctgcttttcctgacggaggctgcactgggcgatgctgctcaggagccaacaggaaataacgcggagatctgtctcctgcccctagactacggaccctgccgggccctacttctccgttactactacgacaggtacacgcagagctgccgccagttcctgtacgggggctgcgagggcaacgccaacaatttctacacctgggaggcttgcgacgatgcttgctggaggatagaaaaagttcccaaagtttgccggctgcaagtgagtgtggacgaccagtgtgaggggtccacagaaaagtatttctttaatctaagttccatgacatgtgaaaaattcttttccggtgggtgtcaccggaaccggattgagaacaggtttccagatgaagctacttgtatgggcttctgcgcaccaaagaaaacagtccaaaagatgagggactgtgctctgccaatgtgactcgctattattttaatccaagatacagaacctgtgatgctttcacctatactggctgtggagggaatgacaataactttgttagcaggaggattgcaaacgtgcatgtgcaaaaaaagaaaaacaaaaaaaaaaacaaaaatttttggccggacatcaggcccacagcagaaaaggtttgtaagaaacccattcgtgcgttgggaggccggcagcaccccgagtggtgtaagggggaaagagcgacacacagcgcgggtcaccatagagaaaaaaccccgggacaagagaccaaagggcggagacatatcgcaccacaaacaagaaaatcgcgccgcggtgatcacaccgcaggtctgtggaaaccagcacccagagggggatcgcggggaaccaaagggagaagtac

SEQ ID NO: 348346 - DNA, 762 bp, Homo sapiens
cctcttacacagtttgcagcgcgggggcggcggggtgacagtccccgtgcatgaatcagccacccctcaggctccgccccggcgggggtcggccggacgctcgccccgcataaagcgggcacccgggccgcctggagagaaagccgcgcacctcctcccgccaggcgctttctcggacgccttgcccagcgggccgcccgaccccctgcaccatggaccccgctcgccccctggggctgtcgattctgctgcttttcctgacggaggctgcactgggcgatgctgctcaggagccaacaggaaataacgcggagatctgtctcctgcccctagactacggaccctgccgggccctacttctccgttactactacgacaggtacacgcagagctgccgccagttcctgtacgggggctgcgagggcaacgccaacaatttctacacctgggaggcttgcgacgatgcttgctggaggatagaaaaagttcccaaagtttgccggctgcaagtgagtgtggacgaccagtgtgaggggtccacagaaaagtatttctttaatctaagttccatgacatgtgaaaaattcttttccggtgggtgtcaccggaaccggattgagaacaggtttccagatgaagctacttgtatgggcttctgcgcaccaaagaaaacagtcccaaagatgagggactgtgctctgcccatgtgactcgctattattttaatccagacgactgacacggccatagagcgactgacag

SEQ ID NO: 348347 - DNA, 6333 bp, Homo sapiens
  misc_feature (113)..(115): n is a, c, g, or t
  misc_feature (119)..(120): n is a, c, g, or t
agtccagttgcttggagaggccttccaatcaactggactgggatgttcgaagcattcagcgctggtttcgacaaagacgcaatcaggagaagccaagcacgctgacgaggttnnntggnncatgtggagattttcattttacctttatgtatttacctacggagtcagattcctgaaaaagaccccctggttgtggaatacgaggcattgctggtacaactacccctatcagccactcacaactgaccttcactactattacatcctggagctgtcgttttattggtctttgatgttttctcagttcactgatatcaaaagaaaggactttggcattatgttcctgcaccaccttgtatctattttcttgattaccttttcatatgtcaacaatatggcccgagtaggaacgctggtcctttgtcttcatgattcagctgatgctcttctggaggctgccaaaatggcaaattatgccaagtttcagaaaatgtgtgatctcctgtttgttatgtttgccgtggtttttatcaccacacgactgggtatatttcctctctgggtgttaaataccacattatttgaaagctgggagatcgttggaccttacccttcctggtgggtttttaacctactgctattgctagtacaagggttgaactgcttctggtcttacttgattgtgaaaatagcttgcaaagctgtttcaagaggcaaggtgtccaaggatgatcgaagtgatattgagtctagctcagatgaggaggactcagaacctccgggaaagaatccccacactgcgacaaccaccaatgggaccagtggtaccaacgggtatctcctgactggctcctgctccatggatgattaattactcaaaactacaagtcccaagcaaagtgaactatttgttcctggaagtatttaataagttgcaaatgcagttcctttcataatatctcagcaccagaaacaaaaattaagattatcaaagcattttgaatagtgcactgccatgtgtcctgtctgtgaatgaagaagaattaccattctctctttgtaggcatgctgtatgtaattgacacaagggaacagtatttgcatttgtactgtcttagaatattatttatttttttgtatttgtaaatctgtggacaaaagagggtttcctcactccttttactcactgggctcatgacagtgaaggagatgctccatctgcttctccccctttctcttgctgtagtccaatgtgctatgagcatcagcttactttgtcacttagagcaagcaaaacccagtgcaagagtctcgttcagctctaaataggtttgctttcttttagttacagtgcccattttgaaattgcctatacagtcttagtgaccatttaaaccggacgaactaggtgtttaattttcactcttcatgttcaattagcagttcaaattaaagaagatggttattggagaacttttttgaatggttttgtattaaattgctttgaaatagatttcatttcttgtgcacacagccaagatttcttcaatgggtgtgagctagttgagggttaaccttgtaggttgcagagtgtatttgtttgtttgtttgtttttctctgtgatgaggtcagtgctctgattttgaaggaggatattcactgaagctcatagttataaacaaggaaatcactgttaagaatgggaatttgtcctgtgttctgggaataacataaagagagcaactgatttcagccaggttttgccactaccctataattagtgcagtcttatgttataaaagaaagaagttaactatatttggggacaaaaaaatatttcaagagttgataaagattacctgtgcagtgcagagcactttaatgcaaccagctttcaagaaaaagccctatctagtacttgatgttgatgtttttattttgctgagcaaaataaagccaatgggagaaagactattttaccctttgcttttctccttaaacgtaatccagatgactttcctgttactaaacactgagcagcattacactacaatgcttctttggtttccaggaatttttttcaaatggggctgtttctggaaaaatgaaaaattctattggacaatggcaatatcaacaatgaggaaaattactgaagaataagtttccataagtctcctacatagcagtgttatttatgtacagataagaaaaccatatgtcagccaaagattttatctcttcttctaacttttagtaagaggaaaaagggattataaaacccttcataaatcaagaaggccatcacttagaacgaaccccaaacaaaaatgccataatataaatgtgtgaatcagggctgtgaagacaacagcagaaatgctaacaagcgtgcagaaacaccagagagtgcgtatcctgctcagaaccattcacatttaattcaattcttggaaaaaattaaagctttttgcccacaatttgcaatctgtgggttaatagttaaaagaatgttcccaaccaaaaaattcttaccgtaatattatatcttgccctacttatttacaaaataatatgtttctgttatggtccttagtaataattgaagaggcttagaaatacatctgcttgtttattgagaaaacgatgcaaataattctgcttttagagccttgttattttatttcacaaaacaggcatatgtctaggagtgtaatttgtggatggttgagtttgtaagaacaatcataaaaggacttgttagtctccagaacatctgctaaaatgcaagtatatgtataaggtaatagcatattacagctgaaaattttgagaaggtaaaagtttcttaattaaaatatgaacatatttagcttgctttagtgtctggggcaagtcctctcaatggctaaaattaactttagagatccatgtgttcaggtttagatcatatgacactcgagcacagaagaataatttcaaggaggtcatcttgtaaattaaaggtttagaagaattgcataaaacgtagtaaatggggtctgtcattagcaaaggcaaatctaagcaatcatttttccccccagaagttacttagaaggagaactgggaacacttggggtctctctaactgatggcattcacttcacacagtcgtctatgttatccagagatttttatttcattttacattttagggcacagttctttggggctaattaaaatggggtttgcaggctttttatggtgaagaataatatatctctgtctatagctttcccatggtagcctgataaggctgagagagaaaaatatgtgcagtatctcatcctccccctgtaccaggccatagctttgaagtgtattttgtaaattcaactataggttagtcagaatgctgtttttcgttaattaacttagcctgtgttgatatctcctccttcctggtcacattcaaaccttcccagagtacaaaggggtatgtagaaaggattccagaagaagtaatactttattctctaatgttaatagcttttctggatctcttagtagggggaaagtagaaaatcgagtagaatttggcctcaggtcaataaatgatataaaaacatgtgttctatttatgtatatatatgtatgtttctccaaaaagtgataaaaccaaaatatcactgactcatccctacccatattcttttcataaaacccactcaccaggtacaatagaaacttccctccttgtttgtcagcctcctgttcatgttccccacacacctgaaggtggtagaatcttttcagcctcttagccagtgagctaaatatggctaagcacaggtcataagagcacctaaggccagcatataagccaactacagttcacctttccaaatttggtcctatggatgttgagcatagggaagcaactctcagtattttggattattcaagtgtatgtggtaaaaatgcagatgattgctgctttaccccagggtttattagcatcctacttctgctgggctgcatcattatataatgccacaggcatctagtcaaggtaaagaagccagaaaggttaggcaagaagtgagataaaatcagatcacctttgatcaaaatggttggtgaacctccacatgtccagttctgttgccaaactttccattcagagtatttggtggagtttgaatttgagcaaactaaatgccttcatcttaggtagaaagggcctgaatcttccattttatattcaaacctcattgttatttggcctaagtaaaaagtcagatttcatttccatttacctgagttcgctttaaagagcttttcaaagagagctttatagacacccacaattgtccccaatctcttcatgatgttgcattaatagttgtttttgtccctttcttggaaatgttaatgccaaagttgcctgaacattgggcggttttcttaatttgaagtataaaaattataaagagtaattccaaaggtattaaaagattgtttaacagtatgtgtggtgatgtcattatctccagagaggcttcaagaaatcctttggaaataaaaagttaaatgtttacatttcatgtggtatttcaggtcttcaggttctgattagcttacttttttcctttgtctttggctgatttctgctttgtagataaataataatagccctgagatgtttctaacatttaaataagaaaaaaatcaaatcgaagtcagcctgctggaaaagtgatcacatggcagttgcagtaacttgtatggaaagagaaaatgcaatgagcccagttactgcacttgccactaccatgctgtccatggaaggaataatcagcagttcagttgtcacaagccgcccttgaagaaaacgcagcaaaatattttaaaatgaagatattgcagtccccagagccagtgaaggtttcttttggtaaaatgaaattgtgccattgtcaaagtaccccgtagtgatgagcactgactggttcactggccacattttagttcttcataataataggccacaaaagggctctgtggtttgcctccatgtgcactggcccctccccacccctagggggcactcagtagctgctgagaaggcctgtccacgaggctgttggaacccctccaataaatacttagaggtagtgtatctgatgcttgttttcgtggagaaaattgtattggagaacttaaaacatcacgaatatttttaataggatccgcagacacccaaaggagaagcttggtcttttccaggtatttccaacttgagttcaacccaaagcctttgaaaggaatgcattaccacatgaccacatgctgagaccccatggggtctaacacgggacctaagaaagtctctgcagccagatagtacatggtgtctccacaaaactaggcattctggagattgcccagaaagggatgtgaggggaccgttaagatctgtcttgcttatctcatgcactcacattccttcagcctcctggagttcctgataaaaggaagccagggtgttgacattttttagctattgatttcccaatagcttgtggatcagttgtacacccacacttccttctctgcctaattccgtttttctggaaaaagtagtatgcccatgtatgtgtgtttttcttaacacaggtccatgaaagtttggcttcctggtttgatgtctgttgcgtggcctggaaaccagggagcagcaactattgagatggtttctgtgttcagtgaaaaattctatttcattgagacaattttttctttatccacagtaattttttgacactgtcatcatgaaactacccttaggaaaataagattacctgcaaaaaaaaaaaagaaatgagttatggaataggaacagttatgtgatgattctgaaactttaacttagagcttcattactttaagaatggaaaacaacctctgagtttgatttcccaaagtttcataaagcccctaagctcatgattttcatcaactctttgcccacatagtcatttacctccacagccgtttgttgtcatagaaggggtggtggtgtttggatttgatttttttcaacttgcagtgagaaataggataggtgacaaaaccttacttgttttcttaagacaattcagtgcttgagcatctctgtcagaaatggaatgaaatactgttagccaattagaattattttatgtattgttattgtgttttgctgatttttatatgaaaatataattattcattcttgatctctggaagcaatcattattatgaggatcattttactttggaaacactttcataataaagataagtat

SEQ ID NO: 348348 - DNA, 6279 bp, Homo sapiens
  misc_feature (113)..(115): n is a, c, g, or t
  misc_feature (119)..(120): n is a, c, g, or t
agtccagttgcttggagaggccttccaatcaactggactgggatgttcgaagcattcagcgctggtttcgacaaagacgcaatcaggagaagccaagcacgctgacgaggttnnntggnncatgtggagattttcattttacctttatgtatttacctacggagtcagattcctgaaaaagaccccctggttgtggaatacgaggcattgctggtacaactacccctatcagccactcacaactgaccttcactactattacatcctggagctgtcgttttattggtctttgatgttttctcagttcactgatatcaaaagaaaggactttggcattatgttcctgcaccaccttgtatctattttcttgattaccttttcatatgtcaacaatatggcccgagtaggaacgctggtcctttgtcttcatgattcagctgatgctcttctggaggctgccaaaatggcaaattatgccaagtttcagaaaatgtgtgatctcctgtttgttatgtttgccgtggtttttatcaccacacgactgggtatatttcctctctgggtgttaaataccacattatttgaaagctgggagatcgttggaccttacccttcctggtgggtttttaacctactgctattgctagtacaagggttgaactgcttctggtcttacttgattgtgaaaatagcttgcaaagctgtttcaagaggcaaggtgtccaaggatgatcgaagtgatattgagtctagctcagatgaggaggactcagaacctccgggaaagaatccccacactgcgacaaccaccaatgggaccagtggtaccaacgggtatctcctgactggctcctgctccatggatgattaattactcaaaactacaagtcccaagcaaagtgaactatttgttcctggaagtatttaataagttgcaaatgcagttcctttcataatatctcagcaccagaaacaaaaattaagattatcaaagcattttgaatagtgcactgccatgtgtcctgtctgtgaatgaagaagaattaccattctctctttgtaggcatgctgtatgtaattgacacaagggaacagtatttgcatttgtactgtcttagaatattatttatttttttgtatttgtaaatctgtggacaaaagagggtttcctcactccttttactcactgggctcatgacagtgaaggagatgctccatctgcttctccccctttctcttgctgtagtccaatgtgctatgagcatcagcttactttgtcacttagagcaagcaaaacccagtgcaagagtctcgttcagctctaaataggtttgctttcttttagttacagtgcccattttgaaattgcctatacagtcttagtgaccatttaaaccggacgaactaggtgtttaattttcactcttcatgttcaattagcagttcaaattaaagaagatggttattggagaacttttttgaatggttttgtattaaattgctttgaaatagatttcatttcttgtgcacacagccaagatttcttcaatgggtgtgagctagttgagggttaaccttgtaggttgcagagtgtatttgtttgtttgtttgtttttctctgtgatgaggtcagtgctctgattttgaaggaggatattcactgaagctcatagttataaacaaggaaatcactgttaagaatgggaatttgtcctgtgttctgggaataacataaagagagcaactgatttcagccaggttttgccactaccctataattagtgcagtcttatgttataaaagaaagaagttaactatatttggggacaaaaaaatatttcaagagttgataaagattacctgtgcagtgcagagcactttaatgcaaccagctttcaagaaaaagccctatctagtacttgatgttgatgtttttattttgctgagcaaaataaagccaatgggagaaagactattttaccctttgcttttctccttaaacgtaatccagatgactttcctgttactaaacactgagcagcattacactacaatgcttctttggtttccaggaatttttttcaaatggggctgtttctggaaaaatgaaaaattctattggacaatggcaatatcaacaatgaggaaaattactgaagaataagtttccataagtctcctacatagcagtgttatttatgtacagataagaaaaccatatgtcagccaaagattttatctcttcttctaacttttagtaagaggaaaaagggattataaaacccttcataaatcaagaaggccatcacttagaacgaaccccaaacaaaaatgccataatataaatgtgtgaatcagggctgtgaagacaacagcagaaatgctaacaagcgtgcagaaacaccagagagtgcgtatcctgctcagaaccattcacatttaattcaattcttggaaaaaattaaagctttttgcccacaatttgcaatctgtgggttaatagttaaaagaatgttcccaaccaaaaaattcttaccgtaatattatatcttgccctacttatttacaaaataatatgtttctgttatggtccttagtaataattgaagaggcttagaaatacatctgcttgtttattgagaaaacgatgcaaataattctgcttttagagccttgttattttatttcacaaaacaggcatatgtctaggagtgtaatttgtggatggttgagtttgtaagaacaatcataaaaggacttgttagtctccagaacatctgctaaaatgcaagtatatgtataaggtaatagcatattacagctgaaaattttgagaaggtaaaagtttcttaattaaaatatgaacatatttagcttgctttagtgtctggggcaagtcctctcaatggctaaaattaactttagagatccatgtgttcaggtttagatcatatgacactcgagcacagaagaataatttcaaggaggtcatcttgtaaattaaaggtttagaagaattgcataaaacgtagtaaatggggtctgtcattagcaaaggcaaatctaagcaatcatttttccccccagaagttacttagaaggagaactgggaacacttggggtctctctaactgatggcattcacttcacacagtcgtctatgttatccagagatttttatttcattttacattttagggcacagttctttggggctaattaaaatggggtttgcaggctttttatggtgaagaataatatatctctgtctatagctttcccatggtagcctgataaggctgagagagaaaaatatgtgcagtatctcatcctccccctgtaccaggccatagctttgaagtgtattttgtaaattcaactataggttagtcagaatgctgtttttcgttaattaacttagcctgtgttgatatctcctccttcctggtcacattcaaaccttcccagagtacaaaggggtatgtagaaaggattccagaagaagtaatactttattctctaatgttaatagcttttctggatctcttagtagggggaaagtagaaaatcgagtagaatttggcctcaggtcaataaatgatataaaaacatgtgttctatttatgtatatatatgtatgtttctccaaaaagtgataaaaccaaaatatcactgactcatccctacccatattcttttcatgttcatgttccccacacacctgaaggtggtagaatcttttcagcctcttagccagtgagctaaatatggctaagcacaggtcataagagcacctaaggccagcatataagccaactacagttcacctttccaaatttggtcctatggatgttgagcatagggaagcaactctcagtattttggattattcaagtgtatgtggtaaaaatgcagatgattgctgctttaccccagggtttattagcatcctacttctgctgggctgcatcattatataatgccacaggcatctagtcaaggtaaagaagccagaaaggttaggcaagaagtgagataaaatcagatcacctttgatcaaaatggttggtgaacctccacatgtccagttctgttgccaaactttccattcagagtatttggtggagtttgaatttgagcaaactaaatgccttcatcttaggtagaaagggcctgaatcttccattttatattcaaacctcattgttatttggcctaagtaaaaagtcagatttcatttccatttacctgagttcgctttaaagagcttttcaaagagagctttatagacacccacaattgtccccaatctcttcatgatgttgcattaatagttgtttttgtccctttcttggaaatgttaatgccaaagttgcctgaacattgggcggttttcttaatttgaagtataaaaattataaagagtaattccaaaggtattaaaagattgtttaacagtatgtgtggtgatgtcattatctccagagaggcttcaagaaatcctttggaaataaaaagttaaatgtttacatttcatgtggtatttcaggtcttcaggttctgattagcttacttttttcctttgtctttggctgatttctgctttgtagataaataataatagccctgagatgtttctaacatttaaataagaaaaaaatcaaatcgaagtcagcctgctggaaaagtgatcacatggcagttgcagtaacttgtatggaaagagaaaatgcaatgagcccagttactgcacttgccactaccatgctgtccatggaaggaataatcagcagttcagttgtcacaagccgcccttgaagaaaacgcagcaaaatattttaaaatgaagatattgcagtccccagagccagtgaaggtttcttttggtaaaatgaaattgtgccattgtcaaagtaccccgtagtgatgagcactgactggttcactggccacattttagttcttcataataataggccacaaaagggctctgtggtttgcctccatgtgcactggcccctccccacccctagggggcactcagtagctgctgagaaggcctgtccacgaggctgttggaacccctccaataaatacttagaggtagtgtatctgatgcttgttttcgtggagaaaattgtattggagaacttaaaacatcacgaatatttttaataggatccgcagacacccaaaggagaagcttggtcttttccaggtatttccaacttgagttcaacccaaagcctttgaaaggaatgcattaccacatgaccacatgctgagaccccatggggtctaacacgggacctaagaaagtctctgcagccagatagtacatggtgtctccacaaaactaggcattctggagattgcccagaaagggatgtgaggggaccgttaagatctgtcttgcttatctcatgcactcacattccttcagcctcctggagttcctgataaaaggaagccagggtgttgacattttttagctattgatttcccaatagcttgtggatcagttgtacacccacacttccttctctgcctaattccgtttttctggaaaaagtagtatgcccatgtatgtgtgtttttcttaacacaggtccatgaaagtttggcttcctggtttgatgtctgttgcgtggcctggaaaccagggagcagcaactattgagatggtttctgtgttcagtgaaaaattctatttcattgagacaattttttctttatccacagtaattttttgacactgtcatcatgaaactacccttaggaaaataagattacctgcaaaaaaaaaaaagaaatgagttatggaataggaacagttatgtgatgattctgaaactttaacttagagcttcattactttaagaatggaaaacaacctctgagtttgatttcccaaagtttcataaagcccctaagctcatgattttcatcaactctttgcccacatagtcatttacctccacagccgtttgttgtcatagaaggggtggtggtgtttggatttgatttttttcaacttgcagtgagaaataggataggtgacaaaaccttacttgttttcttaagacaattcagtgcttgagcatctctgtcagaaatggaatgaaatactgttagccaattagaattattttatgtattgttattgtgttttgctgatttttatatgaaaatataattattcattcttgatctctggaagcaatcattattatgaggatcattttactttggaaacactttcataataaagataagtat

SEQ ID NO: 348349 - DNA, 6279 bp, Homo sapiens
  misc_feature (113)..(115): n is a, c, g, or t
  misc_feature (119)..(120): n is a, c, g, or t
agtccagttgcttggagaggccttccaatcaactggactgggatgttcgaagcattcagcgctggtttcgacaaagacgcaatcaggagaagccaagcacgctgacgaggttnnntggnncatgtggagattttcattttacctttatgtatttacctacggagtcagattcctgaaaaagaccccctggttgtggaatacgaggcattgctggtacaactacccctatcagccactcacaactgaccttcactactattacatcctggagctgtcgttttattggtctttgatgttttctcagttcactgatatcaaaagaaaggactttggcattatgttcctgcaccaccttgtatctattttcttgattaccttttcatatgtcaacaatatggcccgagtaggaacgctggtcctttgtcttcatgattcagctgatgctcttctggaggctgccaaaatggcaaattatgccaagtttcagaaaatgtgtgatctcctgtttgttatgtttgccgtggtttttatcaccacacgactgggtatatttcctctctgggtgttaaataccacattatttgaaagctgggagatcgttggaccttacccttcctggtgggtttttaacctactgctattgctagtacaagggttgaactgcttctggtcttacttgattgtgaaaatagcttgcaaagctgtttcaagaggcaaggtgtccaaggatgatcgaagtgatattgagtctagctcagatgaggaggactcagaacctccgggaaagaatccccacactgcgacaaccaccaatgggaccagtggtaccaacgggtatctcctgactggctcctgctccatggatgattaattactcaaaactacaagtcccaagcaaagtgaactatttgttcctggaagtatttaataagttgcaaatgcagttcctttcataatatctcagcaccagaaacaaaaattaagattatcaaagcattttgaatagtgcactgccatgtgtcctgtctgtgaatgaagaagaattaccattctctctttgtaggcatgctgtatgtaattgacacaagggaacagtatttgcatttgtactgtcttagaatattatttatttttttgtatttgtaaatctgtggactgctccatctgcttctccccctttctcttgctgtagtccaatgtgctatgagcatcagcttactttgtcacttagagcaagcaaaacccagtgcaagagtctcgttcagctctaaataggtttgctttcttttagttacagtgcccattttgaaattgcctatacagtcttagtgaccatttaaaccggacgaactaggtgtttaattttcactcttcatgttcaattagcagttcaaattaaagaagatggttattggagaacttttttgaatggttttgtattaaattgctttgaaatagatttcatttcttgtgcacacagccaagatttcttcaatgggtgtgagctagttgagggttaaccttgtaggttgcagagtgtatttgtttgtttgtttgtttttctctgtgatgaggtcagtgctctgattttgaaggaggatattcactgaagctcatagttataaacaaggaaatcactgttaagaatgggaatttgtcctgtgttctgggaataacataaagagagcaactgatttcagccaggttttgccactaccctataattagtgcagtcttatgttataaaagaaagaagttaactatatttggggacaaaaaaatatttcaagagttgataaagattacctgtgcagtgcagagcactttaatgcaaccagctttcaagaaaaagccctatctagtacttgatgttgatgtttttattttgctgagcaaaataaagccaatgggagaaagactattttaccctttgcttttctccttaaacgtaatccagatgactttcctgttactaaacactgagcagcattacactacaatgcttctttggtttccaggaatttttttcaaatggggctgtttctggaaaaatgaaaaattctattggacaatggcaatatcaacaatgaggaaaattactgaagaataagtttccataagtctcctacatagcagtgttatttatgtacagataagaaaaccatatgtcagccaaagattttatctcttcttctaacttttagtaagaggaaaaagggattataaaacccttcataaatcaagaaggccatcacttagaacgaaccccaaacaaaaatgccataatataaatgtgtgaatcagggctgtgaagacaacagcagaaatgctaacaagcgtgcagaaacaccagagagtgcgtatcctgctcagaaccattcacatttaattcaattcttggaaaaaattaaagctttttgcccacaatttgcaatctgtgggttaatagttaaaagaatgttcccaaccaaaaaattcttaccgtaatattatatcttgccctacttatttacaaaataatatgtttctgttatggtccttagtaataattgaagaggcttagaaatacatctgcttgtttattgagaaaacgatgcaaataattctgcttttagagccttgttattttatttcacaaaacaggcatatgtctaggagtgtaatttgtggatggttgagtttgtaagaacaatcataaaaggacttgttagtctccagaacatctgctaaaatgcaagtatatgtataaggtaatagcatattacagctgaaaattttgagaaggtaaaagtttcttaattaaaatatgaacatatttagcttgctttagtgtctggggcaagtcctctcaatggctaaaattaactttagagatccatgtgttcaggtttagatcatatgacactcgagcacagaagaataatttcaaggaggtcatcttgtaaattaaaggtttagaagaattgcataaaacgtagtaaatggggtctgtcattagcaaaggcaaatctaagcaatcatttttccccccagaagttacttagaaggagaactgggaacacttggggtctctctaactgatggcattcacttcacacagtcgtctatgttatccagagatttttatttcattttacattttagggcacagttctttggggctaattaaaatggggtttgcaggctttttatggtgaagaataatatatctctgtctatagctttcccatggtagcctgataaggctgagagagaaaaatatgtgcagtatctcatcctccccctgtaccaggccatagctttgaagtgtattttgtaaattcaactataggttagtcagaatgctgtttttcgttaattaacttagcctgtgttgatatctcctccttcctggtcacattcaaaccttcccagagtacaaaggggtatgtagaaaggattccagaagaagtaatactttattctctaatgttaatagcttttctggatctcttagtagggggaaagtagaaaatcgagtagaatttggcctcaggtcaataaatgatataaaaacatgtgttctatttatgtatatatatgtatgtttctccaaaaagtgataaaaccaaaatatcactgactcatccctacccatattcttttcataaaacccactcaccaggtacaatagaaacttccctccttgtttgtcagcctcctgttcatgttccccacacacctgaaggtggtagaatcttttcagcctcttagccagtgagctaaatatggctaagcacaggtcataagagcacctaaggccagcatataagccaactacagttcacctttccaaatttggtcctatggatgttgagcatagggaagcaactctcagtattttggattattcaagtgtatgtggtaaaaatgcagatgattgctgctttaccccagggtttattagcatcctacttctgctgggctgcatcattatataatgccacaggcatctagtcaaggtaaagaagccagaaaggttaggcaagaagtgagataaaatcagatcacctttgatcaaaatggttggtgaacctccacatgtccagttctgttgccaaactttccattcagagtatttggtggagtttgaatttgagcaaactaaatgccttcatcttaggtagaaagggcctgaatcttccattttatattcaaacctcattgttatttggcctaagtaaaaagtcagatttcatttccatttacctgagttcgctttaaagagcttttcaaagagagctttatagacacccacaattgtccccaatctcttcatgatgttgcattaatagttgtttttgtccctttcttggaaatgttaatgccaaagttgcctgaacattgggcggttttcttaatttgaagtataaaaattataaagagtaattccaaaggtattaaaagattgtttaacagtatgtgtggtgatgtcattatctccagagaggcttcaagaaatcctttggaaataaaaagttaaatgtttacatttcatgtggtatttcaggtcttcaggttctgattagcttacttttttcctttgtctttggctgatttctgctttgtagataaataataatagccctgagatgtttctaacatttaaataagaaaaaaatcaaatcgaagtcagcctgctggaaaagtgatcacatggcagttgcagtaacttgtatggaaagagaaaatgcaatgagcccagttactgcacttgccactaccatgctgtccatggaaggaataatcagcagttcagttgtcacaagccgcccttgaagaaaacgcagcaaaatattttaaaatgaagatattgcagtccccagagccagtgaaggtttcttttggtaaaatgaaattgtgccattgtcaaagtaccccgtagtgatgagcactgactggttcactggccacattttagttcttcataataataggccacaaaagggctctgtggtttgcctccatgtgcactggcccctccccacccctagggggcactcagtagctgctgagaaggcctgtccacgaggctgttggaacccctccaataaatacttagaggtagtgtatctgatgcttgttttcgtggagaaaattgtattggagaacttaaaacatcacgaatatttttaataggatccgcagacacccaaaggagaagcttggtcttttccaggtatttccaacttgagttcaacccaaagcctttgaaaggaatgcattaccacatgaccacatgctgagaccccatggggtctaacacgggacctaagaaagtctctgcagccagatagtacatggtgtctccacaaaactaggcattctggagattgcccagaaagggatgtgaggggaccgttaagatctgtcttgcttatctcatgcactcacattccttcagcctcctggagttcctgataaaaggaagccagggtgttgacattttttagctattgatttcccaatagcttgtggatcagttgtacacccacacttccttctctgcctaattccgtttttctggaaaaagtagtatgcccatgtatgtgtgtttttcttaacacaggtccatgaaagtttggcttcctggtttgatgtctgttgcgtggcctggaaaccagggagcagcaactattgagatggtttctgtgttcagtgaaaaattctatttcattgagacaattttttctttatccacagtaattttttgacactgtcatcatgaaactacccttaggaaaataagattacctgcaaaaaaaaaaaagaaatgagttatggaataggaacagttatgtgatgattctgaaactttaacttagagcttcattactttaagaatggaaaacaacctctgagtttgatttcccaaagtttcataaagcccctaagctcatgattttcatcaactctttgcccacatagtcatttacctccacagccgtttgttgtcatagaaggggtggtggtgtttggatttgatttttttcaacttgcagtgagaaataggataggtgacaaaaccttacttgttttcttaagacaattcagtgcttgagcatctctgtcagaaatggaatgaaatactgttagccaattagaattattttatgtattgttattgtgttttgctgatttttatatgaaaatataattattcattcttgatctctggaagcaatcattattatgaggatcattttactttggaaacactttcataataaagataagtat

SEQ ID NO: 348350 - DNA, 6357 bp, Homo sapiens
  misc_feature (113)..(115): n is a, c, g, or t
  misc_feature (119)..(120): n is a, c, g, or t
agtccagttgcttggagaggccttccaatcaactggactgggatgttcgaagcattcagcgctggtttcgacaaagacgcaatcaggagaagccaagcacgctgacgaggttnnntggnncatgtggagattttcattttacctttatgtatttacctacggagtcagattcctgaaaaagaccccctggttgtggaatacgaggcattgctggtacaactacccctatcagccactcacaactgaccttcactactattacatcctggagctgtcgttttattggtctttgatgttttctcagttcactgatatcaaaagaaaggactttggcattatgttcctgcaccaccttgtatctattttcttgattaccttttcatatgtcaacaatatggcccgagtaggaacgctggtcctttgtcttcatgattcagctgatgctcttctggaggctgccaaaatggcaaattatgccaagtttcagaaaatgtgtgatctcctgtttgttatgtttgccgtggtttttatcaccacacgactgggtatatttcctctctgggtgttaaataccacattatttgaaagctgggagatcgttggaccttacccttcctggtgggtttttaacctactgctattgctagtacaagggttgaactgcttctggtcttacttgattgtgaaaatagcttgcaaagctgtttcaagaggcaaggctgggaagtggaaccctttacatgtgtccaaggatgatcgaagtgatattgagtctagctcagatgaggaggactcagaacctccgggaaagaatccccacactgcgacaaccaccaatgggaccagtggtaccaacgggtatctcctgactggctcctgctccatggatgattaattactcaaaactacaagtcccaagcaaagtgaactatttgttcctggaagtatttaataagttgcaaatgcagttcctttcataatatctcagcaccagaaacaaaaattaagattatcaaagcattttgaatagtgcactgccatgtgtcctgtctgtgaatgaagaagaattaccattctctctttgtaggcatgctgtatgtaattgacacaagggaacagtatttgcatttgtactgtcttagaatattatttatttttttgtatttgtaaatctgtggacaaaagagggtttcctcactccttttactcactgggctcatgacagtgaaggagatgctccatctgcttctccccctttctcttgctgtagtccaatgtgctatgagcatcagcttactttgtcacttagagcaagcaaaacccagtgcaagagtctcgttcagctctaaataggtttgctttcttttagttacagtgcccattttgaaattgcctatacagtcttagtgaccatttaaaccggacgaactaggtgtttaattttcactcttcatgttcaattagcagttcaaattaaagaagatggttattggagaacttttttgaatggttttgtattaaattgctttgaaatagatttcatttcttgtgcacacagccaagatttcttcaatgggtgtgagctagttgagggttaaccttgtaggttgcagagtgtatttgtttgtttgtttgtttttctctgtgatgaggtcagtgctctgattttgaaggaggatattcactgaagctcatagttataaacaaggaaatcactgttaagaatgggaatttgtcctgtgttctgggaataacataaagagagcaactgatttcagccaggttttgccactaccctataattagtgcagtcttatgttataaaagaaagaagttaactatatttggggacaaaaaaatatttcaagagttgataaagattacctgtgcagtgcagagcactttaatgcaaccagctttcaagaaaaagccctatctagtacttgatgttgatgtttttattttgctgagcaaaataaagccaatgggagaaagactattttaccctttgcttttctccttaaacgtaatccagatgactttcctgttactaaacactgagcagcattacactacaatgcttctttggtttccaggaatttttttcaaatggggctgtttctggaaaaatgaaaaattctattggacaatggcaatatcaacaatgaggaaaattactgaagaataagtttccataagtctcctacatagcagtgttatttatgtacagataagaaaaccatatgtcagccaaagattttatctcttcttctaacttttagtaagaggaaaaagggattataaaacccttcataaatcaagaaggccatcacttagaacgaaccccaaacaaaaatgccataatataaatgtgtgaatcagggctgtgaagacaacagcagaaatgctaacaagcgtgcagaaacaccagagagtgcgtatcctgctcagaaccattcacatttaattcaattcttggaaaaaattaaagctttttgcccacaatttgcaatctgtgggttaatagttaaaagaatgttcccaaccaaaaaattcttaccgtaatattatatcttgccctacttatttacaaaataatatgtttctgttatggtccttagtaataattgaagaggcttagaaatacatctgcttgtttattgagaaaacgatgcaaataattctgcttttagagccttgttattttatttcacaaaacaggcatatgtctaggagtgtaatttgtggatggttgagtttgtaagaacaatcataaaaggacttgttagtctccagaacatctgctaaaatgcaagtatatgtataaggtaatagcatattacagctgaaaattttgagaaggtaaaagtttcttaattaaaatatgaacatatttagcttgctttagtgtctggggcaagtcctctcaatggctaaaattaactttagagatccatgtgttcaggtttagatcatatgacactcgagcacagaagaataatttcaaggaggtcatcttgtaaattaaaggtttagaagaattgcataaaacgtagtaaatggggtctgtcattagcaaaggcaaatctaagcaatcatttttccccccagaagttacttagaaggagaactgggaacacttggggtctctctaactgatggcattcacttcacacagtcgtctatgttatccagagatttttatttcattttacattttagggcacagttctttggggctaattaaaatggggtttgcaggctttttatggtgaagaataatatatctctgtctatagctttcccatggtagcctgataaggctgagagagaaaaatatgtgcagtatctcatcctccccctgtaccaggccatagctttgaagtgtattttgtaaattcaactataggttagtcagaatgctgtttttcgttaattaacttagcctgtgttgatatctcctccttcctggtcacattcaaaccttcccagagtacaaaggggtatgtagaaaggattccagaagaagtaatactttattctctaatgttaatagcttttctggatctcttagtagggggaaagtagaaaatcgagtagaatttggcctcaggtcaataaatgatataaaaacatgtgttctatttatgtatatatatgtatgtttctccaaaaagtgataaaaccaaaatatcactgactcatccctacccatattcttttcataaaacccactcaccaggtacaatagaaacttccctccttgtttgtcagcctcctgttcatgttccccacacacctgaaggtggtagaatcttttcagcctcttagccagtgagctaaatatggctaagcacaggtcataagagcacctaaggccagcatataagccaactacagttcacctttccaaatttggtcctatggatgttgagcatagggaagcaactctcagtattttggattattcaagtgtatgtggtaaaaatgcagatgattgctgctttaccccagggtttattagcatcctacttctgctgggctgcatcattatataatgccacaggcatctagtcaaggtaaagaagccagaaaggttaggcaagaagtgagataaaatcagatcacctttgatcaaaatggttggtgaacctccacatgtccagttctgttgccaaactttccattcagagtatttggtggagtttgaatttgagcaaactaaatgccttcatcttaggtagaaagggcctgaatcttccattttatattcaaacctcattgttatttggcctaagtaaaaagtcagatttcatttccatttacctgagttcgctttaaagagcttttcaaagagagctttatagacacccacaattgtccccaatctcttcatgatgttgcattaatagttgtttttgtccctttcttggaaatgttaatgccaaagttgcctgaacattgggcggttttcttaatttgaagtataaaaattataaagagtaattccaaaggtattaaaagattgtttaacagtatgtgtggtgatgtcattatctccagagaggcttcaagaaatcctttggaaataaaaagttaaatgtttacatttcatgtggtatttcaggtcttcaggttctgattagcttacttttttcctttgtctttggctgatttctgctttgtagataaataataatagccctgagatgtttctaacatttaaataagaaaaaaatcaaatcgaagtcagcctgctggaaaagtgatcacatggcagttgcagtaacttgtatggaaagagaaaatgcaatgagcccagttactgcacttgccactaccatgctgtccatggaaggaataatcagcagttcagttgtcacaagccgcccttgaagaaaacgcagcaaaatattttaaaatgaagatattgcagtccccagagccagtgaaggtttcttttggtaaaatgaaattgtgccattgtcaaagtaccccgtagtgatgagcactgactggttcactggccacattttagttcttcataataataggccacaaaagggctctgtggtttgcctccatgtgcactggcccctccccacccctagggggcactcagtagctgctgagaaggcctgtccacgaggctgttggaacccctccaataaatacttagaggtagtgtatctgatgcttgttttcgtggagaaaattgtattggagaacttaaaacatcacgaatatttttaataggatccgcagacacccaaaggagaagcttggtcttttccaggtatttccaacttgagttcaacccaaagcctttgaaaggaatgcattaccacatgaccacatgctgagaccccatggggtctaacacgggacctaagaaagtctctgcagccagatagtacatggtgtctccacaaaactaggcattctggagattgcccagaaagggatgtgaggggaccgttaagatctgtcttgcttatctcatgcactcacattccttcagcctcctggagttcctgataaaaggaagccagggtgttgacattttttagctattgatttcccaatagcttgtggatcagttgtacacccacacttccttctctgcctaattccgtttttctggaaaaagtagtatgcccatgtatgtgtgtttttcttaacacaggtccatgaaagtttggcttcctggtttgatgtctgttgcgtggcctggaaaccagggagcagcaactattgagatggtttctgtgttcagtgaaaaattctatttcattgagacaattttttctttatccacagtaattttttgacactgtcatcatgaaactacccttaggaaaataagattacctgcaaaaaaaaaaaagaaatgagttatggaataggaacagttatgtgatgattctgaaactttaacttagagcttcattactttaagaatggaaaacaacctctgagtttgatttcccaaagtttcataaagcccctaagctcatgattttcatcaactctttgcccacatagtcatttacctccacagccgtttgttgtcatagaaggggtggtggtgtttggatttgatttttttcaacttgcagtgagaaataggataggtgacaaaaccttacttgttttcttaagacaattcagtgcttgagcatctctgtcagaaatggaatgaaatactgttagccaattagaattattttatgtattgttattgtgttttgctgatttttatatgaaaatataattattcattcttgatctctggaagcaatcattattatgaggatcattttactttggaaacactttcataataaagataagtat

SEQ ID NO: 348351 - DNA, 6560 bp, Homo sapiens
  misc_feature (113)..(115): n is a, c, g, or t
  misc_feature (119)..(120): n is a, c, g, or t
agtccagttgcttggagaggccttccaatcaactggactgggatgttcgaagcattcagcgctggtttcgacaaagacgcaatcaggagaagccaagcacgctgacgaggttnnntggnncatgtggagattttcattttacctttatgtatttacctacggagtcagattcctgaaaaagaccccctggttgtggaatacgaggcattgctggtacaactacccctatcagccactcacaactgaccttcactactattacatcctggagctgtcgttttattggtctttgatgttttctcagttcactgatatcaaaagaaaggactttggcattatgttcctgcaccaccttgtatctattttcttgattaccttttcatatgtcaacaatatggcccgagtaggaacgctggtcctttgtcttcatgattcagctgatgctcttctggaggctgccaaaatggcaaattatgccaagtttcagaaaatgtgtgatctcctgtttgttatgtttgccgtggtttttatcaccacacgactgggtatatttcctctctgggtgttaaataccacattatttgaaagctgggagatcgttggaccttacccttcctggtgggtttttaacctactgctattgctagtacaagggttgaactgcttctggtcttacttgattgtgaaaatagcttgcaaagctgtttcaagaggcaaggtgtccaaggatgatcgaagtgatattgagtctagctcagatgaggaggactcagaacctccgggaaagaatccccacactgcgacaaccaccaatgggaccagtggtaccaacgggtatctcctgactggctcctgctccatggatgattaattactcaaaactacaagtcccaagcaaagtgaactatttgttcctggaagtatttaataagttgcaaatgcagttcctttcataatatctcagcaccagaaacaaaaattaagattatcaaagcattttgaatagtgcactgccatgtgtcctgtctgtgaatgaagaagaattaccattctctctttgtaggcatgctgtatgtaattgacacaagggaacagtatttgcatttgtactgtcttagaatattatttatttttttgtatttgtaaatctgtggacaaaagagggtttcctcactccttttactcactgggctcatgacagtgaaggagatgctccatctgcttctccccctttctcttgctgtagtccaatgtgctatgagcatcagcttactttgtcacttagagcaagcaaaacccagtgcaagagtctcgttcagctctaaataggtttgctttcttttagttacagtgcccattttgaaattgcctatacagtcttagtgaccatttaaaccggacgaactaggtgtttaattttcactcttcatgttcaattagcagttcaaattaaagaagatggttattggagaacttttttgaatggttttgtattaaattgctttgaaatagatttcatttcttgtgcacacagccaagatttcttcaatgggtgtgagctagttgagggttaaccttgtaggttgcagagtgtatttgtttgtttgtttgtttttctctgtgatgaggtcagtgctctgattttgaaggaggatattcactgaagctcatagttataaacaaggaaatcactgttaagaatgggaatttgtcctgtgttctgggaataacataaagagagcaactgatttcagccaggttttgccactaccctataattagtgcagtcttatgttataaaagaaagaagttaactatatttggggacaaaaaaatatttcaagagttgataaagattacctgtgcagtgcagagcactttaatgcaaccagctttcaagaaaaagccctatctagtacttgatgttgatgtttttattttgctgagcaaaataaagccaatgggagaaagactattttaccctttgcttttctccttaaacgtaatccagatgactttcctgttactaaacactgagcagcattacactacaatgcttctttggtttccaggaatttttttcaaatggggctgtttctggaaaaatgaaaaattctattggacaatggcaatatcaacaatgaggaaaattactgaagaataagtttccataagtctcctacatagcagtgttatttatgtacagataagaaaaccatatgtcagccaaagattttatctcttcttctaacttttagtaagaggaaaaagggattataaaacccttcataaatcaagaaggccatcacttagaacgaaccccaaacaaaaatgccataatataaatgtgtgaatcagggctgtgaagacaacagcagaaatgctaacaagcgtgcagaaacaccagagagtgcgtatcctgctcagaaccattcacatttaattcaattcttggaaaaaattaaagctttttgcccacaatttgcaatctgtgggttaatagttaaaagaatgttcccaaccaaaaaattcttaccgtaatattatatcttgccctacttatttacaaaataatatgtttctgttatggtccttagtaataattgaagaggcttagaaatacatctgcttgtttattgagaaaacgatgcaaataattctgcttttagagccttgttattttatttcacaaaacaggcatatgtctaggagtgtaatttgtggatggttgagtttgtaagaacaatcataaaaggacttgttagtctccagaacatctgctaaaatgcaagtatatgtataaggtaatagcatattacagctgaaaattttgagaaggtaaaagtttcttaattaaaatatgaacatatttagcttgctttagtgtctggggcaagtcctctcaatggctaaaattaactttagagatccatgtgttcaggtttagatcatatgacactcgagcacagaagaataatttcaaggaggtcatcttgtaaattaaaggtttagaagaattgcataaaacgtagtaaatggggtctgtcattagcaaaggcaaatctaagcaatcatttttccccccagaagttacttagaaggagaactgggaacacttggggtctctctaactgatggcattcacttcacacagtcgtctatgttatccagagatttttatttcattttacattttagggcacagttctttggggctaattaaaatggggtttgcaggctttttatggtgaagaataatatatctctgtctatagctttcccatggtagcctgataaggctgagagagaaaaatatgtgcagtatctcatcctccccctgtaccaggccatagctttgaagtgtattttgtaaattcaactataggttagtcagaatgctgtttttcgttaattaacttagcctgtgttgatatctcctccttcctggtcacattcaaaccttcccagagtacaaaggggtatgtagaaaggattccagaagaagtaatactttattctctaatgttaatagcttttctggatctcttagtagggggaaagtagaaaatcgagtagaatttggcctcaggtcaataaatgatataaaaacatgtgttctatttatgtatatatatgtatgtttctccaaaaagtgataaaaccaaaatatcactgactcatccctacccatattcttttcataaaacccactcaccaggtacaatagaaacttccctccttgtttgtcagcctcctgttcatgttccccacacacctgaaggtggtagaatcttttcagcctcttagccagtgagctaaatatggctaagcacaggtcataagagcacctaaggccagcatataagccaactacagttcacctttccaaatttggtcctatggatgttgagcatagggaagcaactctcagtattttggattattcaagtgtatgtggtaaaaatgcagatgattgctgctttaccccagggtttattagcatcctacttctgctgggctgcatcattatataatgccacaggcatctagtcaaggtaaagaagccagaaaggttaggcaagaagtgagataaaatcagatcacctttgatcaaaatggttggtgaacctccacatgtccagttctgttgccaaactttccattcagagtatttggtggagtttgaatttgagcaaactaaatgccttcatcttaggtagaaagggcctgaatcttccattttatattcaaacctcattgttatttggcctaagtaaaaagtcagatttcatttccatttacctgagttcgctttaaagagcttttcaaagagagctttatagacacccacaattgtccccaatctcttcatgatgttgcattaatagttgtttttgtccctttcttggaaatgttaatgccaaagttgcctgaacattgggcggttttcttaatttgaagtataaaaattataaagagtaattccaaaggtattaaaagattgtttaacagtatgtgtggtgatgtcattatctccagagaggcttcaagaaatcctttggaaataaaaagttaaatgtttacatttcatgtggtatttcaggtcttcaggttctgattagcttacttttttcctttgtctttggctgatttctgctttgtagataaataataatagccctgagatgtttctaacatttaaataagaaaaaaatcaaatcgaagtcagcctgctggaaaagtgatcacatggcagttgcagtaacttgtatggaaagagaaaatgcaatgagcccagttactgcacttgccactaccatgctgtccatggaaggaataatcagcagttcagttgtcacaagccgcccttgaagaaaacgcagcaaaatattttaaaatgaagatattgcagtccccagagccagtgaaggtttcttttggtaaaatgaaattgtgccattgtcaaagtaccccgtagtgatgagcactgactggttcactggccacattttagttcttcataataataggccacaaaagggctctgtggtttgcctccatgtgcactggcccctccccacccctagggggcactcagtagctgctgagaaggcctgtccacgaggctgttggaacccctccaataaatacttagaggtagtgtatctgatgcttgttttcgtggagaaaattgtattggagaacttaaaacatcacgaatatttttaataggatccgcagacacccaaaggagaagcttggtcttttccaggtatttccaacttgagttcaacccaaagcctttgaaaggaatgcattaccacatgaccacatgctgagaccccatggggtctaacacgggacctaagaaagtctctgcagccagatagtacatggtgtctccacaaaactaggcattctggagattgcccagaaagggatgtgaggggaccgttaagatctgtcttgcttatctcatgcactcacattccttcagcctcctggagttcctgataaaaggaagccagggtgttgacattttttagctattgatttcccaatagcttgtggatcagttgtacacccacacttccttctctgcctaattccgtttttctggaaaaagtagtatgcccatgtatgtgtgtttttcttaacacaggtccatgaaagtttggcttcctggtttgatgtctgttgcgtggcctggaaaccagggagcagcaactattgagatggtttctgtgttcagtgaaaaattctatttcattgagacaattttttctttatccacagtaattttttgacactgtcatcatgaaactacccttaggaaaataagattacctgcaaaaaaaaaaaagaaatgagttatggaataggaacagttatgtgatgattctgaaactttaacttagagcttcattactttaagaatggaaaacaacctctgagtttgatttcccaaagtttcataaagcccctaagctcatgattttcatcaactctttgcccacatagtcatttacctccacagccgtttgttgtcatagaaggggtggtggtgtttggatttgatttttttcaacttgcagtgagaaataggataggtgacaaaaccttacttgttttcttaagacaattcagtgcttgagcatctctgtcagaaatggaatgaaatactgttagccaattagaattattttatgtattgttattgtgttttgctgatttttatatgaaaatataattattcattcttgatctctggaagcaatcattattatgaggatcattttactttggaaacactttcataataaagataagtattaagagtgcagtgtaagtgccctttactgtaaatgctaaccagctcgtgtgggtaaaacatcacatctcacctgatgaggttaataaaggctcacatcatcccagtagattgttacaagcctcgtcaactcccagtatcattgtgatcattgagaaagtaatgttacgttaacttggatagactgtagtatctctttgaaaattaagattaaaacctcaatgctaaa

SEQ ID NO: 348352 - DNA, 1437 bp, Homo sapiens
tgtgaatggtcggaccaagtatcagccagtgaaggtttcttttggtaaaatgaaattgtgccattgtcaaagtaccccgtagtgatgagcactgactggttcactggccacattttagttcttcataataataggccacaaaagggctctgtggtttgcctccatgtgcactggcccctccccacccctagggggcactcagtagctgctgagaaggcctgtccacgaggctgttggaacccctccaataaatacttagaggtagtgtatctgatgcttgttttcgtggagaaaattgtattggagaacttaaaacatcacgaatatttttaataggatccgcagacacccaaaggagaagcttggtcttttccaggtatttccaacttgagttcaacccaaagcctttgaaaggaatgcattaccacatgaccacatgctgagaccccatggggtctaacacgggacctaagaaagtctctgcagccagatagtacatggtgtctccacaaaactaggcattctggagattgcccagaaagggatgtgaggggaccgttaagatctgtcttgcttatctcatgcactcacattccttcagcctcctggagttcctgataaaaggaagccagggtgttgacattttttagctattgatttcccaatagcttgtggatcagttgtacacccacacttccttctctgcctaattccgtttttctggaaaaagtagtatgcccatgtatgtgtgtttttcttaacacaggtccatgaaagtttggcttcctggtttgatgtctgttgcgtggcctggaaaccagggagcagcaactattgagatggtttctgtgttcagtgaaaaattctatttcattgagacaattttttctttatccacagtaattttttgacactgtcatcatgaaactacccttaggaaaataagattacctgcaaaaaaaaaaaagaaatgagttatggaataggaacagttatgtgatgattctgaaactttaacttagagcttcattactttaagaatggaaaacaacctctgagtttgatttcccaaagtttcataaagcccctaagctcatgattttcatcaactctttgcccacatagtcatttacctccacagccgtttgttgtcatagaaggggtggtggtgtttggatttgatttttttcaacttgcagtgagaaataggataggtgacaaaaccttacttgttttcttaagacaattcagtgcttgagcatctctgtcagaaatggaatgaaatactgttagccaattagaattattttatgtattgttattgtgttttgctgatttttatatgaaaatataattattcattcttgatctctggaagcaatcattattatgaggatcattttactttggaaacactttcataataaagataagtat

SEQ ID NO: 348353 - DNA, 4578 bp, Homo sapiens
  misc_feature (113)..(115): n is a, c, g, or t
  misc_feature (119)..(120): n is a, c, g, or t
  misc_feature (4474)..(4474): n is a, c, g, or t
  misc_feature (4478)..(4478): n is a, c, g, or t
  misc_feature (4488)..(4488): n is a, c, g, or t
  misc_feature (4494)..(4494): n is a, c, g, or t
  misc_feature (4512)..(4512): n is a, c, g, or t
  misc_feature (4531)..(4531): n is a, c, g, or t
  misc_feature (4558)..(4558): n is a, c, g, or t
agtccagttgcttggagaggccttccaatcaactggactgggatgttcgaagcattcagcgctggtttcgacaaagacgcaatcaggagaagccaagcacgctgacgaggttnnntggnncatgtggagattttcattttacctttatgtatttacctacggagtcagattcctgaaaaagaccccctggttgtggaatacgaggcattgctggtacaactacccctatcagccactcacaactgaccttcactactattacatcctggagctgtcgttttattggtctttgatgttttctcagttcactgatatcaaaagaaaggactttggcattatgttcctgcaccaccttgtatctattttcttgattaccttttcatatgtcaacaatatggcccgagtaggaacgctggtcctttgtcttcatgattcagctgatgctcttctggaggctgccaaaatggcaaattatgccaagtttcagaaaatgtgtgatctcctgtttgttatgtttgccgtggtttttatcaccacacgactgggtatatttcctctctgggtgttaaataccacattatttgaaagctgggagatcgttggaccttacccttcctggtgggtttttaacctactgctattgctagtacaagggttgaactgcttctggtcttacttgattgtgaaaatagcttgcaaagctgtttcaagaggcaaggtgtccaaggatgatcgaagtgatattgagtctagctcagatgaggaggactcagaacctccgggaaagaatccccacactgcgacaaccaccaatgggaccagtggtaccaacgggtatctcctgactggctcctgctccatggatgattaattactcaaaactacaagtcccaagcaaagtgaactatttgttcctggaagtatttaataagttgcaaatgcagttcctttcataatatctcagcaccagaaacaaaaattaagattatcaaagcattttgaatagtgcactgccatgtgtcctgtctgtgaatgaagaagaattaccattctctctttgtaggcatgctgtatgtaattgacacaagggaacagtatttgcatttgtactgtcttagaatattatttatttttttgtatttgtaaatctgtggacaaaagagggtttcctcactccttttactcactgggctcatgacagtgaaggagatgctccatctgcttctccccctttctcttgctgtagtccaatgtgctatgagcatcagcttactttgtcacttagagcaagcaaaacccagtgcaagagtctcgttcagctctaaataggtttgctttcttttagttacagtgcccattttgaaattgcctatacagtcttagtgaccatttaaaccggacgaactaggtgtttaattttcactcttcatgttcaattagcagttcaaattaaagaagatggttattggagaacttttttgaatggttttgtattaaattgctttgaaatagatttcatttcttgtgcacacagccaagatttcttcaatgggtgtgagctagttgagggttaaccttgtaggttgcagagtgtatttgtttgtttgtttgtttttctctgtgatgaggtcagtgctctgattttgaaggaggatattcactgaagctcatagttataaacaaggaaatcactgttaagaatgggaatttgtcctgtgttctgggaataacataaagagagcaactgatttcagccaggttttgccactaccctataattagtgcagtcttatgttataaaagaaagaagttaactatatttggggacaaaaaaatatttcaagagttgataaagattacctgtgcagtgcagagcactttaatgcaaccagctttcaagaaaaagccctatctagtacttgatgttgatgtttttattttgctgagcaaaataaagccaatgggagaaagactattttaccctttgcttttctccttaaacgtaatccagatgactttcctgttactaaacactgagcagcattacactacaatgcttctttggtttccaggaatttttttcaaatggggctgtttctggaaaaatgaaaaattctattggacaatggcaatatcaacaatgaggaaaattactgaagaataagtttccataagtctcctacatagcagtgttatttatgtacagataagaaaaccatatgtcagccaaagattttatctcttcttctaacttttagtaagaggaaaaagggattataaaacccttcataaatcaagaaggccatcacttagaacgaaccccaaacaaaaatgccataatataaatgtgtgaatcagggctgtgaagacaacagcagaaatgctaacaagcgtgcagaaacaccagagagtgcgtatcctgctcagaaccattcacatttaattcaattcttggaaaaaattaaagctttttgcccacaatttgcaatctgtgggttaatagttaaaagaatgttcccaaccaaaaaattcttaccgtaatattatatcttgccctacttatttacaaaataatatgtttctgttatggtccttagtaataattgaagaggcttagaaatacatctgcttgtttattgagaaaacgatgcaaataattctgcttttagagccttgttattttatttcacaaaacaggcatatgtctaggagtgtaatttgtggatggttgagtttgtaagaacaatcataaaaggacttgttagtctccagaacatctgctaaaatgcaagtatatgtataaggtaatagcatattacagctgaaaattttgagaaggtaaaagtttcttaattaaaatatgaacatatttagcttgctttagtgtctggggcaagtcctctcaatggctaaaattaactttagagatccatgtgttcaggtttagatcatatgacactcgagcacagaagaataatttcaaggaggtcatcttgtaaattaaaggtttagaagaattgcataaaacgtagtaaatggggtctgtcattagcaaaggcaaatctaagcaatcatttttccccccagaagttacttagaaggagaactgggaacacttggggtctctctaactgatggcattcacttcacacagtcgtctatgttatccagagatttttatttcattttacattttagggcacagttctttggggctaattaaaatggggtttgcaggctttttatggtgaagaataatatatctctgtctatagctttcccatggtagcctgataaggctgagagagaaaaatatgtgcagtatctcatcctccccctgtaccaggccatagctttgaagtgtattttgtaaattcaactataggttagtcagaatgctgtttttcgttaattaacttagcctgtgttgatatctcctccttcctggtcacattcaaaccttcccagagtacaaaggggtatgtagaaaggattccagaagaagtaatactttattctctaatgttaatagcttttctggatctcttagtagggggaaagtagaaaatcgagtagaatttggcctcaggtcaataaatgatataaaaacatgtgttctatttatgtatatatatgtatgtttctccaaaaagtgataaaaccaaaatatcactgactcatccctacccatattcttttcataaaacccactcaccaggtacaatagaaacttccctccttgtttgtcagcctcctgttcatgttccccacacacctgaaggtggtagaatcttttcagcctcttagccagtgagctaaatatggctaagcacaggtcataagagcacctaaggccagcatataagccaactacagttcacctttccaaatttggtcctatggatgttgagcatagggaagcaactctcagtattttggattattcaagtgtatgtggtaaaaatgcagatgattgctgctttaccccagggtttattagcatcctacttctgctgggctgcatcattatataatgccacaggcatctagtcaaggtaaagaagccagaaaggttaggcaagaagtgagataaaatcagatcacctttgatcaaaatggttggtgaacctccacatgtccagttctgttgccaaactttccattcagagtatttggtggagtttgaatttgagcaaactaaatgccttcatcttaggtagaaagggcctgaatcttccattttatattcaaacctcattgttatttggcctaagtaaaaagtcagatttcatttccatttacctgagttcgctttaaagagcttttcaaagagagctttatagacacccacaattgtccccaatctcttcatgatgttgcattaatagttgtttttgtccctttcttggaaatgttaatgccaaagttgcctgaacattgggcggttttcttaatttgaagtataaaaattttntaangggggaattnccaaangggtatttaaaagggttngttttaaccaggtattgtngtggggggatggtccaataatcctccngggggagggctttcaaggga

SEQ ID NO: 348354 - DNA, 296 bp, Homo sapiens
ctaaaatactaccagttgagtttaacttaccaagagagaatatattgtatgatactagttgctttaatatcctatgcctagctgttttaaagtttgtcagttctcacacaggtaaattattgaaatccaaaaatattagggcaagagcctattgtaaaccttttttatcctcttatccatgttctaaaatatgtaaaatattttttgtcatttttttcagaccccctggttgtggaatacgaggcattgctggtacaactacccctatcaggtaaggaggcattattgtctgggtt

SEQ ID NO: 348355 - DNA, 563 bp, Homo sapiens
caaccttggacctcctctgattatatttatactgaacagaaatttaatcacttctttccttttatgagaagggtcgcttggtgctgtatgccggtttaaacaaacctttctttcaaactgaaaaacaaatctgttcatgacttccaacaagatttagttaaatctttttggttaaaagtggacttgaggttgattcgaataaagcttcctaagcctcagccccaaccctgtgtgtagagcagagacttttccagatcattctctgtgacattttcttacttgtttgttctcttccttctgctaccctggaaggctgggaagtggaaccctttacatgtaagtttctcctcctctctctctatccctgtcctgagtgcctcttgcctgttggaggggcactcagatgcttttgtttccacgcatattgttctgtctaacctattggcactgtctagaggcttcatgtgagctgtagctctgtgaactgcaagagacactagagacagctctgttagggccctttggtgtgagcttgtattctgctaaatgttgcatgatccaac

SEQ ID NO: 348356 - DNA, 5632 bp, Homo sapiens
  misc_feature (113)..(115): n is a, c, g, or t
  misc_feature (119)..(120): n is a, c, g, or t
agtccagttgcttggagaggccttccaatcaactggactgggatgttcgaagcattcagcgctggtttcgacaaagacgcaatcaggagaagccaagcacgctgacgaggttnnntggnncatgtggagattttcattttacctttatgtatttacctacggagtcagattcctgaaaaagaccccctggttgtggaatacgaggcattgctggtacaactacccctatcagccactcacaactgaccttcactactattacatcctggagctgtcgttttattggtctttgatgttttctcagttcactgatatcaaaagaaaggactttggcattatgttcctgcaccaccttgtatctattttcttgattaccttttcatatgtcaacaatatggcccgagtaggaacgctggtcctttgtcttcatgattcagctgatgctcttctggaggctgccaaaatggcaaattatgccaagtttcagaaaatgtgtgatctcctgtttgttatgtttgccgtggtttttatcaccacacgactgggtatatttcctctctgggtgttaaataccacattatttgaaagctgggagatcgttggaccttacccttcctggtgggtttttaacctactgctattgctagtacaagggttgaactgcttctggtcttacttgattgtgaaaatagcttgcaaagctgtttcaagaggcaaggtgtccaaggatgatcgaagtgatattgagtctagctcagatgaggaggactcagaacctccgggaaagaatccccacactgcgacaaccaccaatgggaccagtggtaccaacgggtatctcctgactggctcctgctccatggatgattaattactcaaaactacaagtcccaagcaaagtgaactatttgttcctggaagtatttaataagttgcaaatgcagttcctttcataatatctcagcaccagaaacaaaaattaagattatcaaagcattttgaatagtgcactgccatgtgtcctgtctgtgaatgaagaagaattaccattctctctttgtaggcatgctgtatgtaattgacacaagggaacagtatttgcatttgtactgtcttagaatattatttatttttttgtatttgtaaatctgtggacaaaagagggtttcctcactccttttactcactgggctcatgacagtgaaggagatgctccatctgcttctccccctttctcttgctgtagtccaatgtgctatgagcatcagcttactttgtcacttagagcaagcaaaacccagtgcaagagtctcgttcagctctaaataggtttgctttcttttagttacagtgcccattttgaaattgcctatacagtcttagtgaccatttaaaccggacgaactaggtgtttaattttcactcttcatgttcaattagcagttcaaattaaagaagatggttattggagaacttttttgaatggttttgtattaaattgctttgaaatagatttcatttcttgtgcacacagccaagatttcttcaatgggtgtgagctagttgagggttaaccttgtaggttgcagagtgtatttgtttgtttgtttgtttttctctgtgatgaggtcagtgctctgattttgaaggaggatattcactgaagctcatagttataaacaaggaaatcactgttaagaatgggaatttgtcctgtgttctgggaataacataaagagagcaactgatttcagccaggttttgccactaccctataattagtgcagtcttatgttataaaagaaagaagttaactatatttggggacaaaaaaatatttcaagagttgataaagattacctgtgcagtgcagagcactttaatgcaaccagctttcaagaaaaagccctatctagtacttgatgttgatgtttttattttgctgagcaaaataaagccaatgggagaaagactattttaccctttgcttttctccttaaacgtaatccagatgactttcctgttactaaacactgagcagcattacactacaatgcttctttggtttccaggaatttttttcaaatggggctgtttctggaaaaatgaaaaattctattggacaatggcaatatcaacaatgaggaaaattactgaagaataagtttccataagtctcctacatagcagtgttatttatgtacagataagaaaaccatatgtcagccaaagattttatctcttcttctaacttttagtaagaggaaaaagggattataaaacccttcataaatcaagaaggccatcacttagaacgaaccccaaacaaaaatgccataatataaatgtgtgaatcagggctgtgaagacaacagcagaaatgctaacaagcgtgcagaaacaccagagagtgcgtatcctgctcagaaccattcacatttaattcaattcttggaaaaaattaaagctttttgcccacaatttgcaatctgtgggttaatagttaaaagaatgttcccaaccaaaaaattcttaccgtaatattatatcttgccctacttatttacaaaataatatgtttctgttatggtccttagtaataattgaagaggcttagaaatacatctgcttgtttattgagaaaacgatgcaaataattctgcttttagagccttgttattttatttcacaaaacaggcatatgtctaggagtgtaatttgtggatggttgagtttgtaagaacaatcataaaaggacttgttagtctccagaacatctgctaaaatgcaagtatatgtataaggtaatagcatattacagctgaaaattttgagaaggtaaaagtttcttaattaaaatatgaacatatttagcttgctttagtgtctggggcaagtcctctcaatggctaaaattaactttagagatccatgtgttcaggtttagatcatatgacactcgagcacagaagaataatttcaaggaggtcatcttgtaaattaaaggtttagaagaattgcataaaacgtagtaaatggggtctgtcattagcaaaggcaaatctaagcaatcatttttccccccagaagttacttagaaggagaactgggaacacttggggtctctctaactgatggcattcacttcacacagtcgtctatgttatccagagatttttatttcattttacattttagggcacagttctttggggctaattaaaatggggtttgcaggctttttatggtgaagaataatatatctctgtctatagctttcccatggtagcctgataaggctgagagagaaaaatatgtgcagtatctcatcctccccctgtaccaggccatagctttgaagtgtattttgtaaattcaactataggttagtcagaatgctgtttttcgttaattaacttagcctgtgttgatatctcctccttcctggtcacattcaaaccttcccagagtacaaaggggtatgtagaaaggattccagaagaagtaatactttattctctaatgttaatagcttttctggatctcttagtagggggaaagtagaaaatcgaattgtttaacagtatgtgtggtgatgtcattatctccagagaggcttcaagaaatcctttggaaataaaaagttaaatgtttacatttcatgtggtatttcaggtcttcaggttctgattagcttacttttttcctttgtctttggctgatttctgctttgtagataaataataatagccctgagatgtttctaacatttaaataagaaaaaaatcaaatcgaagtcagcctgctggaaaagtgatcacatggcagttgcagtaacttgtatggaaagagaaaatgcaatgagcccagttactgcacttgccactaccatgctgtccatggaaggaataatcagcagttcagttgtcacaagccgcccttgaagaaaacgcagcaaaatattttaaaatgaagatattgcagtccccagagccagtgaaggtttcttttggtaaaatgaaattgtgccattgtcaaagtaccccgtagtgatgagcactgactggttcactggccacattttagttcttcataataataggccacaaaagggctctgtggtttgcctccatgtgcactggcccctccccacccctagggggcactcagtagctgctgagaaggcctgtccacgaggctgttggaacccctccaataaatacttagaggtagtgtatctgatgcttgttttcgtggagaaaattgtattggagaacttaaaacatcacgaatatttttaataggatccgcagacacccaaaggagaagcttggtcttttccaggtatttccaacttgagttcaacccaaagcctttgaaaggaatgcattaccacatgaccacatgctgagaccccatggggtctaacacgggacctaagaaagtctctgcagccagatagtacatggtgtctccacaaaactaggcattctggagattgcccagaaagggatgtgaggggaccgttaagatctgtcttgcttatctcatgcactcacattccttcagcctcctggagttcctgataaaaggaagccagggtgttgacattttttagctattgatttcccaatagcttgtggatcagttgtacacccacacttccttctctgcctaattccgtttttctggaaaaagtagtatgcccatgtatgtgtgtttttcttaacacaggtccatgaaagtttggcttcctggtttgatgtctgttgcgtggcctggaaaccagggagcagcaactattgagatggtttctgtgttcagtgaaaaattctatttcattgagacaattttttctttatccacagtaattttttgacactgtcatcatgaaactacccttaggaaaataagattacctgcaaaaaaaaaaaagaaatgagttatggaataggaacagttatgtgatgattctgaaactttaacttagagcttcattactttaagaatggaaaacaacctctgagtttgatttcccaaagtttcataaagcccctaagctcatgattttcatcaactctttgcccacatagtcatttacctccacagccgtttgttgtcatagaaggggtggtggtgtttggatttgatttttttcaacttgcagtgagaaataggataggtgacaaaaccttacttgttttcttaagacaattcagtgcttgagcatctctgtcagaaatggaatgaaatactgttagccaattagaattattttatgtattgttattgtgttttgctgatttttatatgaaaatataattattcattcttgatctctggaagcaatcattattatgaggatcattttactttggaaacactttcataataaagataagtattaagagtgcagtgtaagtgccctttactgtaaatgctaaccagctcgtgtgggtaaaacatcacatctcacctgatgaggttaataaaggctcacatcatcccagtagattgttacaagcctcgtcaactcccagtatcattgtgatcattgagaaagtaatgttacgttaacttggatagactgtagtatctctttgaaaattaagattaaaacctcaatgctaaa

SEQ ID NO: 348357 - DNA, 557 bp, Homo sapiens
ctagaggatccccgaaatggaacgaacaaaagaaaagaaaagaaatttacctagtctgaaaagagtcttctccctcatttttaaaaataacagctttatttatgtgatgttgaatcttctgagccagagttcagaaccaatacctagacctacaataattccttcatttttatataaacaaaaccattcctcttgtcctgacttattaatttcacttctttgccactcttgctctcacttttggaattacagcttttccttaggcacggaccagattagaaagattaagtagcttttgagctgtttgcatttcctccagatgaacaatctatataaaccattatctaattttgttcaggatgatcttctccatcctcattttacctactctgttttgcatgttcttcccactcacaaccccaattttgttcacatattatgtatcacagaacgtttagaaatggaagtcagaaaacaagtgataaagggaacattgtataaaagtaactcttctcattcattcaacaaatgtttctttaacaatctctatatttcag

SEQ ID NO: 348358 - DNA, 826 bp, Homo sapiens
ggcaaatggcaaagctggcattcaaacgcaatctgacagcgctctttacagctgcttcccaggagtaggacccagatattctagcaaccagttctccttttacttcatcatgcctgttttttaaaacataccctccgtgggatatgtactgtctaaatcatgagtgccagcagatttcacttttagggtgggcatcctttaatttgttatcagaatagggttgccatatttagcaaatacagaacctacttaacactacaaaaaaaatccttgtttatctgaaattcagaattaactgtgtgttccatgaacagatttgataacataagattataatttgatccaataagttgaataaactgaatgaataaactgttcaagaaacagttgatttgtgctcaactaaggatcaatgtactcatctttagtcaaactttgttgttgttttagtgagattttaattatatgtttcgtttttagattcatcccaccggaaaaatgtttattctttcagatggagaaggaaaaaatggaaccatcgagttgatggaaccccttgatgaagaaatctctggaattgtggaagtggttggaagagtaaccgccaaggccaccatcttgtgtacatcttatgtccagtttaaagaagatagccatccttttgatcttggactttacaatgaagctgtgaaaattatccatgacttccctcagttttatcctttagggattgtgcaacatgattgatcttgatggattttcatacgattgtaaatgagctatattaaagtctattaaaggaagcccttcttgtttgagggagaga

SEQ ID NO: 348359 - DNA, 2229 bp, Homo sapiens
  misc_feature (1)..(2): n is a, c, g, or t
nncacagaagctactcagataagaggctccaagaggacatttttggatgtgaaaaacaatgagaaggaggacaacacacatttacaatcgtcttaattttgtactcagaaaaaggatgtgaagacaatgcacagggaatacaatagtttcagatctgtgtacagtttccttttgcttcatctcctgcaacaatgtaatgaagacaccatgatatcattaacatttcacacaaaaggaaaatgaggctgaaatggtgtgggcaaggcccaggaatctggagcatccctaaccaagcagcagagcacctgggatagagaaagtgctcaagaatgttcacttactgattactacaatcaaaaaaagatacgacactaatttaccacattcttcttacttattttatgagatactattcttccaaggtggagaaagtggagaaagtagagtgacgcagctaagggagtaaatcgaccctcagccaacaagtggcaaaagcctgaagaaagtgatcaagatcactgatgaccccgcggcccatctccaagggggcgggtatcacaaccccgacgccacaccacgtatcattccgcaaaactcccgcgcctcccacgcagaactggcaagagggaaggcgagacagcagtgaacagctggtacgcagcacccacagcaccgcggcagcagctagtgccgactcccgcctagctcttttgactctgttcgcgggaagaatggggaaacagtaaggttgcggcgcctcccgcgagacgaggtacctgaggctggccccgcagtcccccgccgcaccagcaccggagcttcacaccccacttccggggtcaagtcaccgccgggaatcctgtgatcgcagaaaggtagtctcaggttccgcccctatccaagtcccgcctccactgcctctcgccctgtatctgtcaacttccgggacgccgcgcgtcactaagcagccaatctccacttccggactcatccagccccttctccacccctttcagagacagcgcgattgcgatttaggtttccgcgcatttaattggcgaagctggagcgctagtcttcgctgattggtgccgagaaatctgccccatagacacccgcggggcgcacagtttcagtcgtccgtgggtttcccgccagccgcagtcttggaccataatcatggtggacatgatggacttgcccaggtcgcgcatcaacgccggcatgctagctcaattcatcgacaagcctgtctgcttcgtagggaggctggaaaagattcatcccaccggaaaaatgtttattctttcagatggagaaggaaaaaatggaaccatcgagttgatggaaccccttgatgaagaaatctctggaattgtggaagtggttggaagagtaaccgccaaggccaccatcttgtgtacatcttatgtccagtttaaagaagatagccatccttttgatcttggactttacaatgaagctgtgaaaattatccatgacttccctcagttttatcctttagggattgtgcaacatgattgatcttgatggattttcatacgattgtaaatgagctatattaaagtctattaaaggaagcccttcttgtttgagggagagatttctgtgctttctcatatttaatttgctgtttttaagatattccaacctagagtttttgatggaactgatatattgacagttctcaccgaagtccttttataaagaattgctactccaatatatggtcagattagatgcaagaataaagcagttgtccgagtctaagtttctattttattaataaaaactaaaatggtacgtactatcggtcatttcattttcattcttttaatcatgtattcaagcacaaacttgaaatttcatagccataaggtcaagatttagacctaccaaataaaaccttgggccagctgtgttaaggatttgctcaccttttcccaaactataccttgataattatttccttgataccctacttacaaaatgaagtagatgacattaaggcaaacagagactggccacgctggcttactcctgtaatcccagcaccttgtgaggccgaggcgggtggatcacctaaggtcaggagttcgagaccagcctcaccaatatgatgaaaccctgtctctactaaaaatacaaaaattagccgggcgtggtgacatgcgcctgtaatatcagctactcaggaggctgagacag

SEQ ID NO: 348360 - DNA, 2060 bp, Homo sapiens
  misc_feature (1)..(2): n is a, c, g, or t
  misc_feature (1629)..(1629): n is a, c, g, or t
  misc_feature (1953)..(1953): n is a, c, g, or t
nncacagaagctactcagataagaggctccaagaggacatttttggatgtgaaaaacaatgagaaggaggacaacacacatttacaatcgtcttaattttgtactcagaaaaaggatgtgaagacaatgcacagggaatacaatagtttcagatctgtgtacagtttccttttgcttcatctcctgcaacaatgtaatgaagacaccatgatatcattaacatttcacacaaaaggaaaatgaggctgaaatggtgtgggcaaggcccaggaatctggagcatccctaaccaagcagcagagcacctgggatagagaaagtgctcaagaatgttcacttactgattactacaatcaaaaaaagatacgacactaatttaccacattcttcttacttattttatgagatactattcttccaaggtggagaaagtggagaaagtagagtgacgcagctaagggagtaaatcgaccctcagccaacaagtggcaaaagcctgaagaaagtgatcaagatcactgatgaccccgcggcccatctccaagggggcgggtatcacaaccccgacgccacaccacgtatcattccgcaaaactcccgcgcctcccacgcagaactggcaagagggaaggcgagacagcagtgaacagctggtacgcagcacccacagcaccgcggcagcagctagtgccgactcccgcctagctcttttgactctgttcgcgggaagaatggggaaacagtaaggttgcggcgcctcccgcgagacgaggtacctgaggctggccccgcagtcccccgccgcaccagcaccggagcttcacaccccacttccggggtcaagtcaccgccgggaatcctgtgatcgcagaaaggtagtctcaggttccgcccctatccaagtcccgcctccactgcctctcgccctgtatctgtcaacttccgggacgccgcgcgtcactaagcagccaatctccacttccggactcatccagccccttctccacccctttcagagacagcgcgattgcgatttaggtttccgcgcatttaattggcgaagctggagcgctagtcttcgctgattggtgccgagaaatctgccccatagacacccgcggggcgcacagtttcagtcgtccgtgggtttcccgccagccgcagtcttggaccataatcatggtggacatgatggacttgcccaggtcgcgcatcaacgccggcatgctagctcaattcatcgacaagcctgtctgcttcgtagggaggctggaaaagattcatcccaccggaaaaatgtttattctttcagatggagaaggaaaaaatggaaccatcgagttgatggaaccccttgatgaagaaatctctggaattgtggaagtggttggaagagtaaccgccaaggccaccatcttgtgtacatcttatgtccagtttaaagaagatagccatccttttgatcttggactttacaatgaagctgtgaaaattatccatgacttccctcagttttatcctttagggattgtgcaacatgattgatcttgatggattttcatacgattgtaaatgagctatattaaagtctattaaaggaagcccttcttgtttgagggagagaaaaanaacacaaaaaaaaacaaaaaatttttaaaaaaaaaaaaaaaaaaaaaaaaaaaaattttggggggggggggggaaaagaagattattcaaacacacatcgtgcggcgggccgggggacgccgaaattgtataagtggcaacatggccacacgctgtcgcccagaagaaaacctgggcccgacagaggggctcgggttgcccccccaaaaaaaaagcgcggggggaccaggccgtctgcgaaaacacacaaggggctccgggcgaccaggcgctttcaaaccgagggcccaggagtcgttaaccgcgcccgccgcagctagaggncagagcaggcacaacaacagcgccgcagcgaccagccaacaacgaacacaacacgacagccacgcgacgaaagctaagtacgatacacgcagccagagatagagaca

SEQ ID NO: 348361 - DNA, 1431 bp, Homo sapiens
ggcaaatggcaaagctggcattcaaacgcaatctgacagcgctctttacagctgcttcccaggagtaggacccagatattctagcaaccagttctccttttacttcatcatgcctgttttttaaaacataccctccgtgggatatgtactgtctaaatcatgagtgccagcagatttcacttttagggtgggcatcctttaatttgttatcagaatagggttgccatatttagcaaatacagaacctacttaacactacaaaaaaaatccttgtttatctgaaattcagaattaactgtgtgttccatgaacagatttgataacataagattataatttgatccaataagttgaataaactgaatgaataaactgttcaagaaacagttgatttgtgctcaactaaggatcaatgtactcatctttagtcaaactttgttgttgttttagtgagattttaattatatgtttcgtttttagattcatcccaccggaaaaatgtttattctttcagatggagaaggaaaaaatggaaccatcgagttgatggaaccccttgatgaagaaatctctggaattgtggaagtggttggaagagtaaccgccaaggccaccatcttgtgtacatcttatgtccagtttaaagaagatagccatccttttgatcttggactttacaatgaagctgtgaaaattatccatgacttccctcagttttatcctttagggattgtgcaacatgattgatcttgatggattttcatacgattgtaaatgagctatattaaagtctattaaaggaagcccttcttgtttgagggagagatttctgtgctttctcatatttaatttgctgtttttaagatattccaacctagagtttttgatggaactgatatattgacagttctcaccgaagtccttttataaagaattgctactccaatatatggtcagattagatgcaagaataaagcagttgtccgagtctaagtttctattttattaataaaaactaaaatggtacgtactatcggtcatttcattttcattcttttaatcatgtattcaagcacaaacttgaaatttcatagccataaggtcaagatttagacctaccaaataaaaccttgggccagctgtgttaaggatttgctcaccttttcccaaactataccttgataattatttccttgataccctacttacaaaatgaagtagatgacattaaggcaaacagagactggccacgctggcttactcctgtaatcccagcaccttgtgaggccgaggcgggtggatcacctaaggtcaggagttcgagaccagcctcaccaatatgatgaaaccctgtctctactaaaaatacaaaaattagccgggcgtggtgacatgcgcctgtaatatcagctactcaggaggctgagacag

SEQ ID NO: 348362 - DNA, 3303 bp, Homo sapiens
  misc_feature (1)..(2): n is a, c, g, or t
nncacagaagctactcagataagaggctccaagaggacatttttggatgtgaaaaacaatgagaaggaggacaacacacatttacaatcgtcttaattttgtactcagaaaaaggatgtgaagacaatgcacagggaatacaatagtttcagatctgtgtacagtttccttttgcttcatctcctgcaacaatgtaatgaagacaccatgatatcattaacatttcacacaaaaggaaaatgaggctgaaatggtgtgggcaaggcccaggaatctggagcatccctaaccaagcagcagagcacctgggatagagaaagtgctcaagaatgttcacttactgattactacaatcaaaaaaagatacgacactaatttaccacattcttcttacttattttatgagatactattcttccaaggtggagaaagtggagaaagtagagtgacgcagctaagggagtaaatcgaccctcagccaacaagtggcaaaagcctgaagaaagtgatcaagatcactgatgaccccgcggcccatctccaagggggcgggtatcacaaccccgacgccacaccacgtatcattccgcaaaactcccgcgcctcccacgcagaactggcaagagggaaggcgagacagcagtgaacagctggtacgcagcacccacagcaccgcggcagcagctagtgccgactcccgcctagctcttttgactctgttcgcgggaagaatggggaaacagtaaggttgcggcgcctcccgcgagacgaggtacctgaggctggccccgcagtcccccgccgcaccagcaccggagcttcacaccccacttccggggtcaagtcaccgccgggaatcctgtgatcgcagaaaggtagtctcaggttccgcccctatccaagtcccgcctccactgcctctcgccctgtatctgtcaacttccgggacgccgcgcgtcactaagcagccaatctccacttccggactcatccagccccttctccacccctttcagagacagcgcgattgcgatttaggtttccgcgcatttaattggcgaagctggagcgctagtcttcgctgattggtgccgagaaatctgccccatagacacccgcggggcgcacagtttcagtcgtccgtgggtttcccgccagccgcagtcttggaccataatcatggtggacatgatggacttgcccaggtcgcgcatcaacgccggcatgctagctcaattcatcgacaagcctgtctgcttcgtagggaggctggaaaagattcatcccaccggaaaaatgtttattctttcagatggagaaggaaaaaatggaaccatcgagttgatggaacccgtatgtttaagtgttaataagtctcttatatattatagttaattcttcatcttgatttggtttgttgccgatgtttctaatttttgcaatggatttaaaaaggatgagctggtaaaacgtccctggctgtaaaatttaattcttgtactattctctcattatatttccttttacatttttaaccaatgattttttgggcgtcatgatttttgaacatatcccataaatgttggataacaattctcattccttatgaaagaccataaaatcacataagaaaaatttacgttgcttttttcttcctcaagaggtttttgtttcgtttttgttttttcgttttgagacagggtctcactctgttaccccgggtggaatgcagtggcaccatcatggcgcactgcagccttagcctcccaagatcaagttgctcccatgtcagcctccccagtagctgggactacaggcatgcttaaccatgcctggctaattttgttgttgtagtcgtttgtaaagatggcatctccctatgttcctcaggctggtcttgaactctcggtctcaagcaatcctcctgcctcgaccagcccctcaagagttttcgattttattttattttctatttttgttcatatatttccagtttttacttatttatgtttgcattttatgtttaacatacttaaaactttttttggtattttgtgaagacaaatccatatgctgtttggttaatgtatacagaacacattgtgaaatacagattatagaagattcctctcataggatattactgcttatagaaatgctggacgttttcaatagtgattttgtctttaacttgaattgtagctttggacttgaagctactgctaaaggtagcaggaattttaacatgctgacagttaagtactcaaacatttgttaacaagttacattttaacttttacactggtaattcttaaaattactttgttacttgaagtgatagattagtaacctgtataacagttttccaaaataattgtcaactgaaaatgtgatatcaccaaatcgatgtcttgttctgtgtcttagcttgatgaagaaatctctggaattgtggaagtggttggaagagtaaccgccaaggccaccatcttgtgtacatcttatgtccagtttaaagaagatagccatccttttgatcttggactttacaatgaagctgtgaaaattatccatgacttccctcagttttatcctttagggattgtgcaacatgattgatcttgatggattttcatacgattgtaaatgagctatattaaagtctattaaaggaagcccttcttgtttgagggagagatttctgtgctttctcatatttaatttgctgtttttaagatattccaacctagagtttttgatggaactgatatattgacagttctcaccgaagtccttttataaagaattgctactccaatatatggtcagattagatgcaagaataaagcagttgtccgagtctaagtttctattttattaataaaaactaaaatggtacgtactatcggtcatttcattttcattcttttaatcatgtattcaagcacaaacttgaaatttcatagccataaggtcaagatttagacctaccaaataaaaccttgggccagctgtgttaaggatttgctcaccttttcccaaactataccttgataattatttccttgataccctacttacaaaatgaagtagatgacattaaggcaaacagagactggccacgctggcttactcctgtaatcccagcaccttgtgaggccgaggcgggtggatcacctaaggtcaggagttcgagaccagcctcaccaatatgatgaaaccctgtctctactaaaaatacaaaaattagccgggcgtggtgacatgcgcctgtaatatcagctactcaggaggctgagacag

SEQ ID NO: 348363 - DNA, 2900 bp, Homo sapiens
  misc_feature (1)..(2): n is a, c, g, or t
nncacagaagctactcagataagaggctccaagaggacatttttggatgtgaaaaacaatgagaaggaggacaacacacatttacaatcgtcttaattttgtactcagaaaaaggatgtgaagacaatgcacagggaatacaatagtttcagatctgtgtacagtttccttttgcttcatctcctgcaacaatgtaatgaagacaccatgatatcattaacatttcacacaaaaggaaaatgaggctgaaatggtgtgggcaaggcccaggaatctggagcatccctaaccaagcagcagagcacctgggatagagaaagtgctcaagaatgttcacttactgattactacaatcaaaaaaagatacgacactaatttaccacattcttcttacttattttatgagatactattcttccaaggtggagaaagtggagaaagtagagtgacgcagctaagggagtaaatcgaccctcagccaacaagtggcaaaagcctgaagaaagtgatcaagatcactgatgaccccgcggcccatctccaagggggcgggtatcacaaccccgacgccacaccacgtatcattccgcaaaactcccgcgcctcccacgcagaactggcaagagggaaggcgagacagcagtgaacagctggtacgcagcacccacagcaccgcggcagcagctagtgccgactcccgcctagctcttttgactctgttcgcgggaagaatggggaaacagtaaggttgcggcgcctcccgcgagacgaggtacctgaggctggccccgcagtcccccgccgcaccagcaccggagcttcacaccccacttccggggtcaagtcaccgccgggaatcctgtgatcgcagaaagattcatcccaccggaaaaatgtttattctttcagatggagaaggaaaaaatggaaccatcgagttgatggaacccgtatgtttaagtgttaataagtctcttatatattatagttaattcttcatcttgatttggtttgttgccgatgtttctaatttttgcaatggatttaaaaaggatgagctggtaaaacgtccctggctgtaaaatttaattcttgtactattctctcattatatttccttttacatttttaaccaatgattttttgggcgtcatgatttttgaacatatcccataaatgttggataacaattctcattccttatgaaagaccataaaatcacataagaaaaatttacgttgcttttttcttcctcaagaggtttttgtttcgtttttgttttttcgttttgagacagggtctcactctgttaccccgggtggaatgcagtggcaccatcatggcgcactgcagccttagcctcccaagatcaagttgctcccatgtcagcctccccagtagctgggactacaggcatgcttaaccatgcctggctaattttgttgttgtagtcgtttgtaaagatggcatctccctatgttcctcaggctggtcttgaactctcggtctcaagcaatcctcctgcctcgaccagcccctcaagagttttcgattttattttattttctatttttgttcatatatttccagtttttacttatttatgtttgcattttatgtttaacatacttaaaactttttttggtattttgtgaagacaaatccatatgctgtttggttaatgtatacagaacacattgtgaaatacagattatagaagattcctctcataggatattactgcttatagaaatgctggacgttttcaatagtgattttgtctttaacttgaattgtagctttggacttgaagctactgctaaaggtagcaggaattttaacatgctgacagttaagtactcaaacatttgttaacaagttacattttaacttttacactggtaattcttaaaattactttgttacttgaagtgatagattagtaacctgtataacagttttccaaaataattgtcaactgaaaatgtgatatcaccaaatcgatgtcttgttctgtgtcttagcttgatgaagaaatctctggaattgtggaagtggttggaagagtaaccgccaaggccaccatcttgtgtacatcttatgtccagtttaaagaagatagccatccttttgatcttggactttacaatgaagctgtgaaaattatccatgacttccctcagttttatcctttagggattgtgcaacatgattgatcttgatggattttcatacgattgtaaatgagctatattaaagtctattaaaggaagcccttcttgtttgagggagagatttctgtgctttctcatatttaatttgctgtttttaagatattccaacctagagtttttgatggaactgatatattgacagttctcaccgaagtccttttataaagaattgctactccaatatatggtcagattagatgcaagaataaagcagttgtccgagtctaagtttctattttattaataaaaactaaaatggtacgtactatcggtcatttcattttcattcttttaatcatgtattcaagcacaaacttgaaatttcatagccataaggtcaagatttagacctaccaaataaaaccttgggccagctgtgttaaggatttgctcaccttttcccaaactataccttgataattatttccttgataccctacttacaaaatgaagtagatgacattaaggcaaacagagactggccacgctggcttactcctgtaatcccagcaccttgtgaggccgaggcgggtggatcacctaaggtcaggagttcgagaccagcctcaccaatatgatgaaaccctgtctctactaaaaatacaaaaattagccgggcgtggtgacatgcgcctgtaatatcagctactcaggaggctgagacag

SEQ ID NO: 348364 - DNA, 1221 bp, Homo sapiens
  misc_feature (1)..(2): n is a, c, g, or t
nncacagaagctactcagataagaggctccaagaggacatttttggatgtgaaaaacaatgagaaggaggacaacacacatttacaatcgtcttaattttgtactcagaaaaaggatgtgaagacaatgcacagggaatacaatagtttcagatctgtgtacagtttccttttgcttcatctcctgcaacaatgtaatgaagacaccatgatatcattaacatttcacacaaaaggaaaatgaggctgaaatggtgtgggcaaggcccaggaatctggagcatccctaaccaagcagcagagcacctgggatagagaaagtgctcaagaatgttcacttactgattactacaatcaaaaaaagatacgacactaatttaccacattcttcttacttattttatgagatactattcttccaaggtggagaaagtggagaaagtagagtgacgcagctaagggagtaaatcgaccctcagccaacaagtggcaaaagcctgaagaaagtgatcaagatcactgatgaccccgcggcccatctccaagggggcgggtatcacaaccccgacgccacaccacgtatcattccgcaaaactcccgcgcctcccacgcagaactggcaagagggaaggcgagacagcagtgaacagctggtacgcagcacccacagcaccgcggcagcagctagtgccgactcccgcctagctcttttgactctgttcgcgggaagaatggggaaacagtaaggttgcggcgcctcccgcgagacgaggtacctgaggctggccccgcagtcccccgccgcaccagcaccggagcttcacaccccacttccggggtcaagtcaccgccgggaatcctgtgatcgcagaaagattcatcccaccggaaaaatgtttattctttcagatggagaaggaaaaaatggaaccatcgagttgatggaaccccttgatgaagaaatctctggaattgtggaagtggttggaagagtaaccgccaaggccaccatcttgtgtacatcttatgtccagtttaaagaagatagccatccttttgatcttggactttacaatgaagctgtgaaaattatccatgacttccctcagttttatcctttagggattgtgcaacatgattgatcttgatggattttcatacgattgtaaatgagctatattaaagtctattaaaggaagcccttcttgtttgagggagaga

SEQ ID NO: 348365 - DNA, 1551 bp, Homo sapiens
  misc_feature (1)..(2): n is a, c, g, or t
nncacagaagctactcagataagaggctccaagaggacatttttggatgtgaaaaacaatgagaaggaggacaacacacatttacaatcgtcttaattttgtactcagaaaaaggatgtgaagacaatgcacagggaatacaatagtttcagatctgtgtacagtttccttttgcttcatctcctgcaacaatgtaatgaagacaccatgatatcattaacatttcacacaaaaggaaaatgaggctgaaatggtgtgggcaaggcccaggaatctggagcatccctaaccaagcagcagagcacctgggatagagaaagtgctcaagaatgttcacttactgattactacaatcaaaaaaagatacgacactaatttaccacattcttcttacttattttatgagatactattcttccaaggtggagaaagtggagaaagtagagtgacgcagctaagggagtaaatcgaccctcagccaacaagtggcaaaagcctgaagaaagtgatcaagatcactgatgaccccgcggcccatctccaagggggcgggtatcacaaccccgacgccacaccacgtatcattccgcaaaactcccgcgcctcccacgcagaactggcaagagggaaggcgagacagcagtgaacagctggtacgcagcacccacagcaccgcggcagcagctagtgccgactcccgcctagctcttttgactctgttcgcgggaagaatggggaaacagtaaggttgcggcgcctcccgcgagacgaggtacctgaggctggccccgcagtcccccgccgcaccagcaccggagcttcacaccccacttccggggtcaagtcaccgccgggaatcctgtgatcgcagaaaggtagtctcaggttccgcccctatccaagtcccgcctccactgcctctcgccctgtatctgtcaacttccgggacgccgcgcgtcactaagcagccaatctccacttccggactcatccagccccttctccacccctttcagagacagcgcgattgcgatttaggtttccgcgcatttaattggcgaagctggagcgctagtcttcgctgattggtgccgagaaatctgccccatagacacccgcggggcgcacagtttcagtcgtccgtgggtttcccgccagccgcagtcttggaccataatcatggtggacatgatggacttgcccagattcatcccaccggaaaaatgtttattctttcagatggagaaggaaaaaatggaaccatcgagttgatggaaccccttgatgaagaaatctctggaattgtggaagtggttggaagagtaaccgccaaggccaccatcttgtgtacatcttatgtccagtttaaagaagatagccatccttttgatcttggactttacaatgaagctgtgaaaattatccatgacttccctcagttttatcctttagggattgtgcaacatgattgatcttgatggattttcatacgattgtaaatgagctatattaaagtctattaaaggaagcccttcttgtttgagggagaga

SEQ ID NO: 348366 - DNA, 1590 bp, Homo sapiens
  misc_feature (1)..(2): n is a, c, g, or t
nncacagaagctactcagataagaggctccaagaggacatttttggatgtgaaaaacaatgagaaggaggacaacacacatttacaatcgtcttaattttgtactcagaaaaaggatgtgaagacaatgcacagggaatacaatagtttcagatctgtgtacagtttccttttgcttcatctcctgcaacaatgtaatgaagacaccatgatatcattaacatttcacacaaaaggaaaatgaggctgaaatggtgtgggcaaggcccaggaatctggagcatccctaaccaagcagcagagcacctgggatagagaaagtgctcaagaatgttcacttactgattactacaatcaaaaaaagatacgacactaatttaccacattcttcttacttattttatgagatactattcttccaaggtggagaaagtggagaaagtagagtgacgcagctaagggagtaaatcgaccctcagccaacaagtggcaaaagcctgaagaaagtgatcaagatcactgatgaccccgcggcccatctccaagggggcgggtatcacaaccccgacgccacaccacgtatcattccgcaaaactcccgcgcctcccacgcagaactggcaagagggaaggcgagacagcagtgaacagctggtacgcagcacccacagcaccgcggcagcagctagtgccgactcccgcctagctcttttgactctgttcgcgggaagaatggggaaacagtaaggttgcggcgcctcccgcgagacgaggtacctgaggctggccccgcagtcccccgccgcaccagcaccggagcttcacaccccacttccggggtcaagtcaccgccgggaatcctgtgatcgcagaaaggtagtctcaggttccgcccctatccaagtcccgcctccactgcctctcgccctgtatctgtcaacttccgggacgccgcgcgtcactaagcagccaatctccacttccggactcatccagccccttctccacccctttcagagacagcgcgattgcgatttaggtttccgcgcatttaattggcgaagctggagcgctagtcttcgctgattggtgccgagaaatctgccccatagacacccgcggggcgcacagtttcagtcgtccgtgggtttcccgccagccgcagtcttggaccataatcatggtggacatgatggacttgcccaggtcgcgcatcaacgccggcatgctagctcaattcatcgacaagcctgtctgcttcgtagggaggctggaaaagatggagaaggaaaaaatggaaccatcgagttgatggaaccccttgatgaagaaatctctggaattgtggaagtggttggaagagtaaccgccaaggccaccatcttgtgtacatcttatgtccagtttaaagaagatagccatccttttgatcttggactttacaatgaagctgtgaaaattatccatgacttccctcagttttatcctttagggattgtgcaacatgattgatcttgatggattttcatacgattgtaaatgagctatattaaagtctattaaaggaagcccttcttgtttgagggagaga

SEQ ID NO: 348367 - DNA, 466 bp, Homo sapiens
aaaggaaaatgaggctgaaatggtaagtagcctgctcaaaatcacacagcaagtaaatgacagaacttaaatagaatccaaatactattatttccagttcagtacctgtattacttagggcttggttcatccgcaaatcacataataaaatagttgctcaaacagaacagaactttgtgtctcacataaaggaagttcaaaggaaagttcaaaggactggtatggcaacttcacaactctttgacttcactcttcagctatccttacaacgtaccctagttctcatggtcttagatgctggctagaattctacataatcatcatatccacattccaggataagggaagtgggggcaggggagaggagtaaggaaggtacacagcagtgtgtttttaaaagatttcctagaatctgcaacacaacatttcttcttatatcccattggccagaaacttcatcataatc

SEQ ID NO: 348368 - DNA, 1624 bp, Homo sapiens
  misc_feature (1)..(2): n is a, c, g, or t
nncacagaagctactcagataagaggctccaagaggacatttttggatgtgaaaaacaatgagaaggaggacaacacacatttacaatcgtcttaattttgtactcagaaaaaggatgtgaagacaatgcacagggaatacaatagtttcagatctgtgtacagtttccttttgcttcatctcctgcaacaatgtaatgaagacaccatgatatcattaacatttcacacaaaaggaaaatgaggctgaaatggtgtgggcaaggcccaggaatctggagcatccctaaccaagcagcagagcacctgggatagagaaagtgctcaagaatgttcacttactgattactacaatcaaaaaaagatacgacactaatttaccacattcttcttacttattttatgagatactattcttccaaggtggagaaagtggagaaagtagagtgacgcagctaagggagtaaatcgaccctcagccaacaagtggcaaaagcctgaagaaagtgatcaagatcactgatgaccccgcggcccatctccaagggggcgggtatcacaaccccgacgccacaccacgtatcattccgcaaaactcccgcgcctcccacgcagaactggcaagagggaaggcgagacagcagtgaacagctggtacgcagcacccacagcaccgcggcagcagctagtgccgactcccgcctagctcttttgactctgttcgcgggaagaatggggaaacagtaaggttgcggcgcctcccgcgagacgaggtacctgaggctggccccgcagtcccccgccgcaccagcaccggagcttcacaccccacttccggggtcaagtcaccgccgggaatcctgtgatcgcagaaaggtagtctcaggttccgcccctatccaagtcccgcctccactgcctctcgccctgtatctgtcaacttccgggacgccgcgcgtcactaagcagccaatctccacttccggactcatccagccccttctccacccctttcagagacagcgcgattgcgatttaggtttccgcgcatttaattggcgaagctggagcgctagtcttcgctgattggtgccgagaaatctgccccatagacacccgcggggcgcacagtttcagtcgtccgtgggtttcccgccagccgcagtcttggaccataatcatggtggacatgatggacttgcccaggtcgcgcatcaacgccggcatgctagctcaattcatcgacaagcctgtctgcttcgtagggaggctggaaaagattcatcccaccggaaaaatgtttattctttcagatggagaaggaaaaaatggaaccatcgagttgatggaaccccttgatgaagaaatctctggaattgtggaagtggttggaagagtaaccgccaaggccaccatcttgtgtacatcttatgtccagtttaaagaagatagccatccttttgatcttggactttacaatgaagctgtgaaaattatccatgacttccctcagttttatcctttagggattgtgcaacatgattgatcttgatggattttcatacgattgtaaatgagctatattaaagtctattaaaggaagcccttcttgtttgagggagaga

SEQ ID NO: 348369 - DNA, 1827 bp, Homo sapiens
  misc_feature (1)..(2): n is a, c, g, or t
nncacagaagctactcagataagaggctccaagaggacatttttggatgtgaaaaacaatgagaaggaggacaacacacatttacaatcgtcttaattttgtactcagaaaaaggatgtgaagacaatgcacagggaatacaatagtttcagatctgtgtacagtttccttttgcttcatctcctgcaacaatgtaatgaagacaccatgatatcattaacatttcacacaaaaggaaaatgaggctgaaatggtgtgggcaaggcccaggaatctggagcatccctaaccaagcagcagagcacctgggatagagaaagtgctcaagaatgttcacttactgattactacaatcaaaaaaagatacgacactaatttaccacattcttcttacttattttatgagatactattcttccaaggtggagaaagtggagaaagtagagtgacgcagctaagggagtaaatcgaccctcagccaacaagtggcaaaagcctgaagaaagtgatcaagatcactgatgaccccgcggcccatctccaagggggcgggtatcacaaccccgacgccacaccacgtatcattccgcaaaactcccgcgcctcccacgcagaactggcaagagggaaggcgagacagcagtgaacagctggtacgcagcacccacagcaccgcggcagcagctagtgccgactcccgcctagctcttttgactctgttcgcgggaagaatggggaaacagtaaggttgcggcgcctcccgcgagacgaggtacctgaggctggccccgcagtcccccgccgcaccagcaccggagcttcacaccccacttccggggtcaagtcaccgccgggaatcctgtgatcgcagaaaggtagtctcaggttccgcccctatccaagtcccgcctccactgcctctcgccctgtatctgtcaacttccgggacgccgcgcgtcactaagcagccaatctccacttccggactcatccagccccttctccacccctttcagagacagcgcgattgcgatttaggtttccgcgcatttaattggcgaagctggagcgctagtcttcgctgattggtgccgagaaatctgccccatagacacccgcggggcgcacagtttcagtcgtccgtgggtttcccgccagccgcagtcttggaccataatcatggtggacatgatggacttgcccaggtcgcgcatcaacgccggcatgctagctcaattcatcgacaagcctgtctgcttcgtagggaggctggaaaagattcatcccaccggaaaaatgtttattctttcagatggagaaggaaaaaatggaaccatcgagttgatggaaccccttgatgaagaaatctctggaattgtggaagtggttggaagagtaaccgccaaggccaccatcttgtgtacatcttatgtccagtttaaagaagatagccatccttttgatcttggactttacaatgaagctgtgaaaattatccatgacttccctcagttttatcctttagggattgtgcaacatgattgatcttgatggattttcatacgattgtaaatgagctatattaaagtctattaaaggaagcccttcttgtttgagggagagatttctgtgctttctcatatttaatttgctgtttttaagatattccaacctagagtttttgatggaactgatatattgacagttctcaccgaagtccttttataaagaattgctactccaatatatggtcagattagatgcaagaataaagcagttgtccgagtctaagtttctattttattaataaaaactaaaatggtacgt

SEQ ID NO: 348370 - DNA, 1197 bp, Homo sapiens
tgcattcggctgacagagcatgagggggaggaatcactgatgacaggcactggcctgcccagctgggggcctttgtttattcatttggtgggcacttcctgggtgcctgctctgggtcaggcctgtgggggggaccactgagggcaggaaacctggcctgtccctccaggaagcgaagtcaacactggcacctgcagatgaagtggcagagcagcccccagctttgatggcatggggtggttggggggcacattctgcatgctcagaagagagagcaactcgccctgtggaaggagcatacagtgggagatggggacaggcccagtgacgagcaccatccggaagtgaaggctgatgggtacgtggacaacctcgcagaggcagtggacctgctgctgcagcacgccgacaagtgatggcctcctgggagagccccgcctcctccacccctgcctctcctccacccctgcctcccctccacccctgcctctcctccacccgcccaggagagccccacctcctccacccctgcctctcctccacccctgcctcccctccacctgccccagtgcccagaccaaccaaggccctgacagccctgccttctgccctctgccctgcatgggcaggcatttgttccctacctgggtggcctgctcccctgcctgggccctgacttcagctccctgtagtgaagtccaggagggtgggacaggcctgtcaggcctctgggaatctcccaaatcccagaactcaccactcaccatgggcctttaaatgcagtaaactccacctaaccagattcaggggcactatgcccactgcctcctcttcagactctttgcatttcagtgaagagcctggaagaaacccaggggcctcctatgcacagatcttgcagcccagaaccaagtcagcctccctgcgactgcccaggcacactgcccaccaccccacccccgaaacaatgccagcccgctgctttttctatcctcccagtcacctttgcagacaaagaccaggggcagctcccgagggcactgtgaaggctcccatgccacacagtgagaactgtagcctctgcgtccaaggcacacagggtactttctggacccactgctggacagacttgaaggtgtcatgcccggtgtgtgcaggaggaaactaacagttcagtaaactctgccttgaccagca

SEQ ID NO: 348371 - DNA, 1759 bp, Homo sapiens
aagaactttaaaaatcacctaggtgtgggccgggcacggtggctaacgcctgtaatcccagcactttgagatgctgaggcaggtggatcacgaggtcaggagatcgagaccatcctggataacacggagaaaccccggcggagctgaggagcagggccgggcgccatggcaccgtggggcaagcggctggctggcgtgcgcggggtgctgcttgacatctcgggcgtgctgtacgacagcggcgcgggcggcggcacggccatcgccggctcggtggaggcggtggccagactgaagcgttcccggctgaaggtgaggttctgcaccaacgagtcgcagaagtcccgggcagagctggtggggcagcttcagaggctgggatttgacatctctgagcaggaggtgaccgccccggcaccagctgcctgccagatcctgaaggagcgaggcctgcgaccatacctgctcatccatgacggagtccgctcagaatttgatcagatcgacacatccaacccaaactgtgtggtaattgcagacgcaggagaaagcttttcttatcaaaacatgaataacgccttccaggtgctcatggagctggaaaaacctgtgctcatatcactgggaaaagggcgttactacaaggagacctctggcctgatgctggacgttggtccctacatgaaggcgcttgagtatgcctgtggcatcaaagccgaggtggtggggaagccttctcctgagtttttcaagtctgccctgcaagcgataggagtggaagcccaccaggccgtcatgattggggacgatatcgtgggcgacgtcggcggtgcccagcggtgtggaatgagagcgctgcaggtgcgcaccgggaagttcaggcccagtgacgagcaccatccggaagtgaaggctgatgggtacgtggacaacctcgcagaggcagtggacctgctgctgcagcacgccgacaagtgatggcctcctgggagagccccgcctcctccacccctgcctctcctccacccctgcctcccctccacccctgcctctcctccacccgcccaggagagccccacctcctccacccctgcctctcctccacccctgcctcccctccacctgccccagtgcccagaccaaccaaggccctgacagccctgccttctgccctctgccctgcatgggcaggcatttgttccctacctgggtggcctgctcccctgcctgggccctgacttcagctccctgtagtgaagtccaggagggtgggacaggcctgtcaggcctctgggaatctcccaaatcccagaactcaccactcaccatgggcctttaaatgcagtaaactccacctaaccagattcaggggcactatgcccactgcctcctcttcagactctttgcatttcagtgaagagcctggaagaaacccaggggcctcctatgcacagatcttgcagcccagaaccaagtcagcctccctgcgactgcccaggcacactgcccaccaccccacccccgaaacaatgccagcccgctgctttttctatcctcccagtcacctttgcagacaaagaccaggggcagctcccgagggcactgtgaaggctcccatgccacacagtgagaactgtagcctctgcgtccaaggcacacagggtactttctggacccactgctggacagacttgaaggtgtcatgcccggtgtgtgcaggaggaaactaacagttcagtaaactctgccttgaccagca

SEQ ID NO: 348372 - DNA, 224 bp, Homo sapiens
tagaatcgagctcggcccacttttatttctctttgcagacaaagaccaggggcagctcccgagggcactgtgaaggctcccatgccacacagtgagaactgtagcctctgcgtccaaggcacacagggtactttctggacccactgctggacagacttgaaggtgtcatgcccggtgtgtgcaggaggaaactaacagttcagtaaactctgccttgaccagca

SEQ ID NO: 348373 - DNA, 2115 bp, Homo sapiens
aagaactttaaaaatcacctaggtgtgggccgggcacggtggctaacgcctgtaatcccagcactttgagatgctgaggcaggtggatcacgaggtcaggagatcgagaccatcctggataacacggagaaaccccggcggagctgaggagcagggccgggcgccatggcaccgtggggcaagcggctggctggcgtgcgcggggtgctgcttgacatctcgggcgtgctgtacgacagcggcgcgggcggcggcacggccatcgccggctcggtggaggcggtggccagactgaagcgttcccggctgaaggtgaggttctgcaccaacgagtcgcagaagtcccgggcagagctggtggggcagcttcagaggctgggatttgacatctctgagcaggaggtgaccgccccggcaccagctgcctgccagatcctgaaggagcgaggcctgcgaccatacctgctcatccatgacggagtccgctcagaatttgatcagatcgacacatccaacccaaactgtgtggtaattgcagacgcaggagaaagcttttcttatcaaaacatgaataacgccttccaggtgctcatggagctggaaaaacctgtgctcatatcactgggaaaagggcgttactacaaggagacctctggcctgatgctggacgttggtccctacatgaaggcgcttgagtatgcctgtggcatcaaagccgaggtggtggggaagccttctcctgagtttttcaagtctgccctgcaagcgataggagtggaagcccaccaggccgtcatgattggggacgatatcgtgggcgacgtcggcggtgcccagcggtgtggaatgagagcgctgcaggtgcgcaccgggaagttcaggcccagtgacgagcaccatccggaagtgaaggctgatgggtacgtggacaacctcgcagaggcagtggacctgctgctgcagcacgccgacaagtgatggcctcctgggagagccccgcctcctccacccctgcctctcctccacccctgcctcccctccacccctgcctctcctccacccgcccaggagagccccacctcctccacccctgcctctcctccacccctgcctcccctccacctgccccagtgcccagaccaaccaaggccctgacagccctgccttctgccctctgccctgcatgggcaggcatttgttccctacctgggtggcctgctcccctgcctgggccctgacttcagctccctgtagtgaagtccaggagggtgggacaggcctgtcaggcctctgggaatctcccaaatcccagaactcaccactcaccatgggcctttaaatgcagtaaactccacctaaccagattcaggggcactatgcccactgcctcctcttcagactctttgcatttcagtgaagagcctggaagaaacccaggggcctcctatgcacagatcttgcagcccagaaccaagtcagcctccctgcgactgcccaggcacactgcccaccaccccacccccgaaacaatgccagcccgctgctttttctatcctcccagtcacctttgcagacaaagaccaggggcagctcccgagggcactgtgaaggctcccatgccacacagtgagaactgtagcctctgcgtccaaggcacacagggtactttctggacccactgctggacagacttgaaggtgtcatgcccggtgtgtgcaggaggaaactaacagttcagtaaactctgccttgaccagcaaaaacacacacaacacaacaaacaaaaacacacagtggacacctatgactataaagagatcttatcaagacaagggcgccaacactattaaagacgtaccccatgcataactataccaacacaaggagcgccccaatataatggacgaggatggccgctacaatcacagctgaccggcgcactcggagcgcaccattcctagacaaacagcgtcatcgaaccagtcgcgcacaccagccgatgtccaatacgtcgtgactttcaatcaacgcaaacaacgaaccaactaaacgaatcatccgagacgcgctaccacaagaagtgatcgaccacctgccccccacgtacgccacacc

SEQ ID NO: 348374 - DNA, 1667 bp, Homo sapiens
aagaactttaaaaatcacctaggtgtgggccgggcacggtggctaacgcctgtaatcccagcactttgagatgctgaggcaggtggatcacgaggtcaggagatcgagaccatcctggataacacggagaaaccccggcggagctgaggagcagggccgggcgccatggcaccgtggggcaagcggctggctggcgtgcgcggggtgctgcttgacatctcgggcgtgctgtacgacagcggcgcgggcggcggcacggccatcgccggctcggtggaggcggtggccagactgaagcgttcccggctgaaggtgaggttctgcaccaacgagtcgcagaagtcccgggcagagctggtggggcagcttcagaggctgggatttgacatctctgagcaggaggtgaccgccccggcaccagctgcctgccagatcctgaaggagcgaggcctgcgaccatacctgctcatccatgacggagtccgctcagaatttgatcagatcgacacatccaacccaaactgtgtggtaattgcagacgcaggagaaagcttttcttatcaaaacatgaataacgccttccaggtgctcatggagctggaaaaacctgtgctcatatcactgggaaaagggcgttactacaaggagacctctggcctgatgctggacgttggtccctacatgaaggcgcttgagtatgcctgtggcatcaaagccgaggtggtggggaagccttctcctgagtttttcaagtctgccctgcaagcgataggagtggaagcccaccaggcccagtgacgagcaccatccggaagtgaaggctgatgggtacgtggacaacctcgcagaggcagtggacctgctgctgcagcacgccgacaagtgatggcctcctgggagagccccgcctcctccacccctgcctctcctccacccctgcctcccctccacccctgcctctcctccacccgcccaggagagccccacctcctccacccctgcctctcctccacccctgcctcccctccacctgccccagtgcccagaccaaccaaggccctgacagccctgccttctgccctctgccctgcatgggcaggcatttgttccctacctgggtggcctgctcccctgcctgggccctgacttcagctccctgtagtgaagtccaggagggtgggacaggcctgtcaggcctctgggaatctcccaaatcccagaactcaccactcaccatgggcctttaaatgcagtaaactccacctaaccagattcaggggcactatgcccactgcctcctcttcagactctttgcatttcagtgaagagcctggaagaaacccaggggcctcctatgcacagatcttgcagcccagaaccaagtcagcctccctgcgactgcccaggcacactgcccaccaccccacccccgaaacaatgccagcccgctgctttttctatcctcccagtcacctttgcagacaaagaccaggggcagctcccgagggcactgtgaaggctcccatgccacacagtgagaactgtagcctctgcgtccaaggcacacagggtactttctggacccactgctggacagacttgaaggtgtcatgcccggtgtgtgcaggaggaaactaacagttcagtaaactctgccttgaccagca

SEQ ID NO: 348375 - DNA, 1086 bp, Homo sapiens
gtgagaacccagggctcgctgggatgctgtcctccctccctccctccctctgccaagctggtgggaaggcccttgccaaagcgcacaagaccccttcacacagcaggggcacaagctcttcgaggcagagtcgcctgcaggtggggtggaaggggtgcgccccagacccaagaatcgcccgcctctccaagaccatccctggctgctggcccagtgacgagcaccatccggaagtgaaggctgatgggtacgtggacaacctcgcagaggcagtggacctgctgctgcagcacgccgacaagtgatggcctcctgggagagccccgcctcctccacccctgcctctcctccacccctgcctcccctccacccctgcctctcctccacccgcccaggagagccccacctcctccacccctgcctctcctccacccctgcctcccctccacctgccccagtgcccagaccaaccaaggccctgacagccctgccttctgccctctgccctgcatgggcaggcatttgttccctacctgggtggcctgctcccctgcctgggccctgacttcagctccctgtagtgaagtccaggagggtgggacaggcctgtcaggcctctgggaatctcccaaatcccagaactcaccactcaccatgggcctttaaatgcagtaaactccacctaaccagattcaggggcactatgcccactgcctcctcttcagactctttgcatttcagtgaagagcctggaagaaacccaggggcctcctatgcacagatcttgcagcccagaaccaagtcagcctccctgcgactgcccaggcacactgcccaccaccccacccccgaaacaatgccagcccgctgctttttctatcctcccagtcacctttgcagacaaagaccaggggcagctcccgagggcactgtgaaggctcccatgccacacagtgagaactgtagcctctgcgtccaaggcacacagggtactttctggacccactgctggacagacttgaaggtgtcatgcccggtgtgtgcaggaggaaactaacagttcagtaaactctgccttgaccagca

SEQ ID NO: 348376 - DNA, 1098 bp, Homo sapiens
tgcattcggctgacagagcatgagggggaggaatcactgatgacaggcactggcctgcccagctgggggcctttgtttattcatttggtgggcacttcctgggtgcctgctctgggtcaggcctgtgggggggaccactgagggcaggaaacctggcctgtccctccaggaagcgaagtcaacactggcacctgcagatgaagtggcagagcagcccccagctttgatggcatggggtggttggggggcacattctgcatgctcagaagagagagcaactcgccctgtggaaggagcatacagtgggagatggggacaggcccagtgacgagcaccatccggaagtgaaggctgatgggtacgtggacaacctcgcagaggcagtggacctgctgctgcagcacgccgacaagtgatggcctcctgggagagccccgcctcctccacccctgcctctccacctgccccagtgcccagaccaaccaaggccctgacagccctgccttctgccctctgccctgcatgggcaggcatttgttccctacctgggtggcctgctcccctgcctgggccctgacttcagctccctgtagtgaagtccaggagggtgggacaggcctgtcaggcctctgggaatctcccaaatcccagaactcaccactcaccatgggcctttaaatgcagtaaactccacctaaccagattcaggggcactatgcccactgcctcctcttcagactctttgcatttcagtgaagagcctggaagaaacccaggggcctcctatgcacagatcttgcagcccagaaccaagtcagcctccctgcgactgcccaggcacactgcccaccaccccacccccgaaacaatgccagcccgctgctttttctatcctcccagtcacctttgcagacaaagaccaggggcagctcccgagggcactgtgaaggctcccatgccacacagtgagaactgtagcctctgcgtccaaggcacacagggtactttctggacccactgctggacagacttgaaggtgtcatgcccggtgtgtgcaggaggaaactaacagttcagtaaactctgccttgaccagca

SEQ ID NO: 348377 - DNA, 1473 bp, Homo sapiens
aagaactttaaaaatcacctaggtgtgggccgggcacggtggctaacgcctgtaatcccagcactttgagatgctgaggcaggtggatcacgaggtcaggagatcgagaccatcctggataacacggagaaaccccggcggagctgaggagcagggccgggcgccatggcaccgtggggcaagcggctggctggcgtgcgcggggtgctgcttgacatctcgggcgtgctgtacgacagcggcgcgggcggcggcacggccatcgccggctcggtggaggcggtggccagactgaagcgttcccggctgaaggtgaggttctgcaccaacgagtcgcagaagtcccgggcagagctggtggggcagcttcagaggctgggatttgacatctctgagcaggaggtgaccgccccggcaccagctgcctgccagatcctgaaggagcgaggcctgcgaccatacctgctcatccatgacggagtccgctcagaatttgatcagatcgacacatccaacccaaactgtgtggtaattgcagacgcaggagaaagcttttcttatcaaaacatgaataacgccttccaggtgctcatggagctggaaaaacctgtgctcatatcactgggaaaagggcgttactacaaggagacctctggcctgatgctggacgttggtccctacatgaaggcgcttgagtatgcctgtggcatcaaagccgaggtggtggggaagccttctcctgagtttttcaagtctgccctgcaagcgataggagtggaagcccaccaggccgtcatgattggggacgatatcgtgggcgacgtcggcggtgcccagcggtgtggaatgagagcgctgcaggtgcgcaccgggaagttcaggcccagtgacgagcaccatccggaagtgaaggctgatgggcacttcctggccctgcggggtgccctgtctctggctggagctgatgagccgtggtgtgatgcttgcctgggggtcggtgttgcctagaagtgaggaatgacctccttcacccctggctccttccggcagcctggccacttccagcatgtggagggggcccgggccctggcagagacggtgtggaaccgccggccgcatgcggggctggagttcggggctgccaatgggctaaggccctgtgttcaacacatgtcgcggaactgtcgtgaaaaaaagactcaggaccacaggtccggggtgctcccaggggtctttcccaccgaggctgggagtgagcagcagcctaggcccagccacacctcccaggctcgggagctgccaggccaggcaaccgtgaagggtagcagggtggggggtggaggggaggacagggagagcaggcctctcgggcctcacccacccttgcaccttccagctctagggcccacacagtaccaagccctgggctcaatgtaccacttatgaaaactcaattcaaattggcttagtgca

SEQ ID NO: 348378 - DNA, 952 bp, Homo sapiens
aagaactttaaaaatcacctaggtgtgggccgggcacggtggctaacgcctgtaatcccagcactttgagatgctgaggcaggtggatcacgaggtcaggagatcgagaccatcctggataacacggagaaaccccggcggagctgaggagcagggccgggcgccatggcaccgtggggcaagcggctggctggcgtgcgcggggtgctgcttgacatctcgggcgtgctgtacgacagcggcgcgggcggcggcacggccatcgccggctcggtggaggcggtggccagactgaagcgttcccggctgaaggtgaggttctgcaccaacgagtcgcagaagtcccgggcagagctggtggggcagcttcagaggctgggatttgacatctctgagcaggaggtgaccgccccggcaccagctgcctgccagatcctgaaggagcgaggcctgcgaccatacctgctcatccatgacggagtccgctcagaatttgatcagatcgacacatccaacccaaactgtgtggtaattgcagacgcaggagaaagcttttcttatcaaaacatgaataacgccttccaggtgctcatggagctggaaaaacctgtgctcatatcactgggaaaagggcgttactacaaggagacctctggcctgatgctggacgttggtccctacatgaaggcgcttgagtatgcctgtggcatcaaagccgaggtggtggggaagccttctcctgagtttttcaagtctgccctgcaagcgataggagtggaagcccaccaggccgtcatgattggggacgatatcgtgggcgacgtcggcggtgcccagcggtgtggaatgagagcgctgcagagccgctcaacacgtgttgcaaggcacgtgctctggacctggtgctcacacgtgctcttctcccaagacactccctgaagcgcgttcccca

SEQ ID NO: 348379 - DNA, 400 bp, Homo sapiens
cccccagaatcccagccagagggcagtttatccaggagcccggtgcctcctctgttgggtgggcgtggcctcagagggcaccaaccagaagacacatgctgtcactgacatgcgggcccccagcgttagggcaggcaggagctccgagtctctaccccagctgtccccacagtgcacatggactaggctcctcccacggggcactaggccaggccaggggtgtggggtgagcccctggggagcccagagcagggtacactcatgtccccaccatccaaggtgagatgtctgtgctggaggcccagagggagctgggccggctgtcactccaccacaaggctgagcaggctccccagtgggagacaggtttggggaggtgtccaggttgagggcacagtca

SEQ ID NO: 348380 - DNA, 800 bp, Homo sapiens
gtgagaacccagggctcgctgggatgctgtcctccctccctccctccctctgccaagctggtgggaaggcccttgccaaagcgcacaagaccccttcacacagcaggggcacaagctcttcgaggcagagtcgcctgcaggtggggtggaaggggtgcgccccagacccaagaatcgcccgcctctccaagaccatccctggctgctggcccagtgacgagcaccatccggaagtgaaggctgatgggcacttcctggccctgcggggtgccctgtctctggctggagctgatgagccgtggtgtgatgcttgcctgggggtcggtgttgcctagaagtgaggaatgacctccttcacccctggctccttccggcagcctggccacttccagcatgtggagggggcccgggccctggcagagacggtgtggaaccgccggccgcatgcggggctggagttcggggctgccaatgggctaaggccctgtgttcaacacatgtcgcggaactgtcgtgaaaaaaagactcaggaccacaggtccggggtgctcccaggggtctttcccaccgaggctgggagtgagcagcagcctaggcccagccacacctcccaggctcgggagctgccaggccaggcaaccgtgaagggtagcagggtggggggtggaggggaggacagggagagcaggcctctcgggcctcacccacccttgcaccttccagctctagggcccacacagtaccaagccctgggctcaatgtaccacttatgaaaactcaattcaaattggcttagtgca

SEQ ID NO: 348381 - DNA, 1660 bp, Homo sapiens
aagaactttaaaaatcacctaggtgtgggccgggcacggtggctaacgcctgtaatcccagcactttgagatgctgaggcaggtggatcacgaggtcaggagatcgagaccatcctggataacacggagaaaccccggcggagctgaggagcagggccgggcgccatggcaccgtggggcaagcggctggctggcgtgcgcggggtgctgcttgacatctcgggcgtgctgtacgacagcggcgcgggcggcggcacggccatcgccggctcggtggaggcggtggccagactgaagcgttcccggctgaaggtgaggttctgcaccaacgagtcgcagaagtcccgggcagagctggtggggcagcttcagaggctgggatttgacatctctgagcaggaggtgaccgccccggcaccagctgcctgccagatcctgaaggagcgaggcctgcgaccatacctgctcatccatgacggagtccgctcagaatttgatcagatcgacacatccaacccaaactgtgtggtaattgcagacgcaggagaaagcttttcttatcaaaacatgaataacgccttccaggtgctcatggagctggaaaaacctgtgctcatatcactgggaaaagggcgttactacaaggagacctctggcctgatgctggacgttggtccctacatgaaggcgcttgagtatgcctgtggcatcaaagccgaggtggtggggaagccttctcctgagtttttcaagtctgccctgcaagcgataggagtggaagcccaccaggccgtcatgattggggacgatatcgtgggcgacgtcggcggtgcccagcggtgtggaatgagagcgctgcaggtgcgcaccgggaagttcaggcccagtgacgagcaccatccggaagtgaaggctgatgggtacgtggacaacctcgcagaggcagtggacctgctgctgcagcacgccgacaagtgatggcctcctgggagagccccgcctcctccacccctgcctctccacctgccccagtgcccagaccaaccaaggccctgacagccctgccttctgccctctgccctgcatgggcaggcatttgttccctacctgggtggcctgctcccctgcctgggccctgacttcagctccctgtagtgaagtccaggagggtgggacaggcctgtcaggcctctgggaatctcccaaatcccagaactcaccactcaccatgggcctttaaatgcagtaaactccacctaaccagattcaggggcactatgcccactgcctcctcttcagactctttgcatttcagtgaagagcctggaagaaacccaggggcctcctatgcacagatcttgcagcccagaaccaagtcagcctccctgcgactgcccaggcacactgcccaccaccccacccccgaaacaatgccagcccgctgctttttctatcctcccagtcacctttgcagacaaagaccaggggcagctcccgagggcactgtgaaggctcccatgccacacagtgagaactgtagcctctgcgtccaaggcacacagggtactttctggacccactgctggacagacttgaaggtgtcatgcccggtgtgtgcaggaggaaactaacagttcagtaaactctgccttgaccagca

SEQ ID NO: 348382 - DNA, 1048 bp, Homo sapiens
aactcaggggagagctgcaactaactcaggggcgagctgccaagtctgccctgcaagcgataggagtggaagcccaccgccgtcatgattggggacgatatcgtgggcgacgtcggcggtgcccagcggtgtggaatgagagcgctgcaggtgcgcaccgggaagttcaggcccagtgacgagcaccatccggaagtgaaggctgatgggtacgtggacaacctcgcagaggcagtggacctgctgctgcagcacgccgacaagtgatggcctcctgggagagccccgcctcctccacccctgcctctcctccacccctgcctcccctccacccctgcctctcctccacccgcccaggagagccccacctcctccacccctgcctctcctccacccctgcctcccctccacctgccccagtgcccagaccaaccaaggccctgacagccctgccttctgccctctgccctgcatgggcaggcatttgttccctacctgggtggcctgctcccctgcctgggccctgacttcagctccctgtagtgaagtccaggagggtgggacaggcctgtcaggcctctgggaatctcccaaatcccagaactcaccactcaccatgggcctttaaatgcagtaaactccacctaaccagattcaggggcactatgcccactgcctcctcttcagactctttgcatttcagtgaagagcctggaagaaacccaggggcctcctatgcacagatcttgcagcccagaaccaagtcagcctccctgcgactgcccaggcacactgcccaccaccccacccccgaaacaatgccagcccgctgctttttctatcctcccagtcacctttgcagacaaagaccaggggcagctcccgagggcactgtgaaggctcccatgccacacagtgagaactgtagcctctgcgtccaaggcacacagggtactttctggacccactgctggacagacttgaaggtgtcatgcccggtgtgtgcaggaggaaactaacagttcagtaaactctgccttgaccagca

SEQ ID NO: 348383 - DNA, 998 bp, Homo sapiens
ctccgagtctctaccccagctgtccccacagtgcacatggactaggctcctcccacggggcactaggccaggccaggggtgtggggtgagcccctggggagcccagagcagggtacactcatgtccccaccatccaaggcccagtgacgagcaccatccggaagtgaaggctgatgggtacgtggacaacctcgcagaggcagtggacctgctgctgcagcacgccgacaagtgatggcctcctgggagagccccgcctcctccacccctgcctccctccacccctgcctctcctccacccgcccaggagagccccacctcctccacccctgcctctcctccacccctgcctcccctccacctgccccagtgcccagaccaaccaaggccctgacagccctgccttctgccctctgccctgcatgggcaggcatttgttccctacctgggtggcctgctcccctgcctgggccctgacttcagctccctgtagtgaagtccaggagggtgggacaggcctgtcaggcctctgggaatctcccaaatcccagaactcaccactcaccatgggcctttaaatgcagtaaactccacctaaccagattcaggggcactatgcccactgcctcctcttcagactctttgcatttcagtgaagagcctggaagaaacccaggggcctcctatgcacagatcttgcagcccagaaccaagtcagcctccctgcgactgcccaggcacactgcccaccaccccacccccgaaacaatgccagcccgctgctttttctatcctcccagtcacctttgcagacaaagaccaggggcagctcccgagggcactgtgaaggctcccatgccacacagtgagaactgtagcctctgcgtccaaggcacacagggtactttctggacccactgctggacagacttgaaggtgtcatgcccggtgtgtgcaggaggaaactaacagttcagtaaactctgccttgaccagca

SEQ ID NO: 348384 - DNA, 992 bp, Homo sapiens
aagaactttaaaaatcacctaggtgtgggccgggcacggtggctaacgcctgtaatcccagcactttgagatgctgaggcaggtggatcacgaggtcaggagatcgagaccatcctggataacacggagaaaccccggcggagctgaggagcagggccgggcgccatggcaccgtggggcaagcggctggctggcgtgcgcggggtgctgcttgacatctcgggcgtgctgtacgacagcggcgcgggcggcggcacggccatcgccggctcggtggaggcggtggccagactgaagcgttcccggctgaaggtgaggttctgcaccaacgagtcgcagaagtcccgggcagagctggtggggcagcttcagaggctgggatttgacatctctgagcaggaggtgaccgccccggcaccagctgcctgccagatcctgaaggagcgaggcctgcgaccatacctgctcatccatgacggagtccgctcagaatttgatcagatcgacacatccaacccaaactgtgtggtaattgcagacgcaggagaaagcttttcttatcaaaacatgaataacgccttccaggtgctcatggagctggaaaaacctgtgctcatatcactgggaaaagggcgttactacaaggagacctctggcctgatgctggacgttggtccctacatgaaggcgcttgagtatgcctgtggcatcaaagccgaggtggtggggaagccttctcctgagtttttcaagtctgccctgcaagcgataggagtggaagcccaccaggccgtcatgattggggacgatatcgtgggcgacgtcggcggtgcccagcggtgtggaatgagagcgctgcaggtgcgcaccgggaagttcaggtcagtgccagctggagtcatttattcaccttccttccaggggatgaccacattctcattctgttttgttcttcaaaataaaggggatattctttccaaatcaaagagcag

SEQ ID NO: 348385 - DNA, 792 bp, Homo sapiens
aagaactttaaaaatcacctaggtgtgggccgggcacggtggctaacgcctgtaatcccagcactttgagatgctgaggcaggtggatcacgaggtcaggagatcgagaccatcctggataacacggagaaaccccggcggagctgaggagcagggccgggcgccatggcaccgtggggcaagcggctggctggcgtgcgcggggtgctgcttgacatctcgggcgtgctgtacgacagcggcgcgggcggcggcacggccatcgccggctcggtggaggcggtggccagactgaagcgttcccggctgaaggtgaggttctgcaccaacgagtcgcagaagtcccgggcagagctggtggggcagcttcagaggctgggatttgacatctctgagcaggaggtgaccgccccggcaccagctgcctgccagatcctgaaggagcgaggcctgcgaccatacctgctcatccatgacggagtccgctcagaatttgatcagatcgacacatccaacccaaactgtgtggtaattgcagacgcaggagaaagcttttcttatcaaaacatgaataacgccttccaggtgctcatggagctggaaaaacctgtgctcatatcactgggaaaaggcatccacgggttcctctttgtggctagaacattcacgtcctaagtggggctgccgttggctgggttaaaccagtaaccagtaacaggagaaatacgtcgcatctctagtgtgtggagattaccgggcctttatattaaaaaaaaattttaagtgcttata

SEQ ID NO: 348386 - DNA, 573 bp, Homo sapiens
gcaggaatatggaagtcaaaggctgaaagatgaataggctctagcagatgaccagcatggataagaagaacccaggaaaagggaatggaatatgcaaggcacattcaagagtactgaagtggaaaatcaagaatatactgagttactgatgctaatagccaaagtgataactaaaagtaagtaagaaatcatgctgtaagtcagcttaagggggtactcctggttttaaaacaggtgctgtttttctcaaaattggagtggaaatttgactataggtgtggtagagggatacaaggttccataaactggcagatgcaattatagaatggatatgtgcatctcttttgctttaatttttattgtaggtagtttctttactcattttttgatagttgactaattccaaattttataataattataaaaataaaagtgaggaagcttttctctgtgttttataatcacttaaaatatttatagacatttcttctaaggcacaaaaatatttactttttttattgcctatgtataagtttacaggacttatttacatattctttgtggactctcagc

SEQ ID NO: 348387 - DNA, 1304 bp, Homo sapiens
gtgggtacataggtgtatatatttctggggtatatgggatattttgatacaggcatacactgtataataatcacatcagggtaaatgaggtatccgttacctcaagcatttatcctttgtgttacaatataatcttaaagggaaaaaaagagcagcacaggtagtactgactgcagctgtacagaaacaatgcgtgccataaatattcatttgaaagagaggggttatgattatttacaatcattagcgaatgtagcaacattctgggcactgacaagaaaactgccacaaacatgcaggcataatgcacaataagcaagtccaagctgtggtcggggctccctcgcgtccctgtaagctctgaatttagaatggggtggaccgcctgctgatcaagggttctgaaaggccggcggctaatggaccgccagggggcgctccacgcacgtctccacgtccccgggcgcacctcgcagccgcgcccgctcgctgccaggccgctccctccgtccctcacccgccccgactcgcttccgtcccgtccgacgctagggggcgccgcaggctgcctggcgcgctgctagcgggcctcggagggccggggctgggtggcagcggccatggaccgcttcgtttggaccagcggcctcctggagatcaacgagaccctggtgatccagcagcgcggggtgcgaatctacgatggcgaggagaagataaaatttgatgctgggactctccttcttagtacacaccgactgatttggagagatcagaaaaatcatgagtgttgcatggccattctcctttcccaaattgtgttcattgaagaacaggcggctggaattgggaagagtgccaaaatagtggttcatcttcacccagctcctcctaacaaagaacctggcccattccagagtagtaagaactcctacatcaaactctccttcaaagaacatggccagattgaggtaagtttctacatgaataaaatcgtactagaaaggtgtgtgtgtgtgtgtgtgtgtgtgtgtgtgtgtgttgtggcttgttaatatgatggaaggtagtattatacaacataccagatttcaccatatttttacaataaaatttttattatatcttaagccttagcagtgagtggagaatatgaagtttaggtttcagtgggaatgggaagcagaggttgtgttcccaaggaaggaacagaggctggaaaatacactaagtcatgccattcgcctgctagcagagttttcagtggtatagtttagttaaaggaacagagtgtaaatgcagtg

SEQ ID NO: 348388 - DNA, 279 bp, Homo sapiens
gcggccgcctactactactactactactactaaattcgcggccgctcgacctgcatatcaagagattcttatagcattaataatttccatgcatgtgtctttttccagtaggtatggttgaatttatgtaaatttattgctaatcccatcccttacgatctagagtataagctgcgcaagggcagaagtttttatctggtttgttcatggatgtattctaagagctgagaacagggcctggacacaataagcattcaataaatatttactgaatgaatg

SEQ ID NO: 348389 - DNA, 585 bp, Homo sapiens
gcaggaatatggaagtcaaaggctgaaagatgaataggctctagcagatgaccagcatggataagaagaacccaggaaaagggaatggaatatgcaaggcacattcaagagtactgaagtggaaaatcaagaatatactgagttactgatgctaatagccaaagtgataactaaaagcctttgaagacctcagcaaactaatgatcaaggctaaggaaatggtggaattatcaaaatcaattgctaataaaattaaagacaaacaaggtgacatcacagaagatgagaccatcaggtttaaatcctacttgctgagcatgggaatagctaacccagttaccagagaaacctacggctcaggcacacagtaccacatgcagctggccaaacaactggctggaatattgcaggtgcctttagaggtaaaaactaaacctatgtgtttttttttaaactgtgttaaattagccctatgtcattagaaatgttaacaagagcataactattttcatgatatggttattgtcaactgacatgttttttttttctttcaggtatattaaataagttcattgtgcttattat

SEQ ID NO: 348390 - DNA, 5061 bp, Homo sapiens
gtgggtacataggtgtatatatttctggggtatatgggatattttgatacaggcatacactgtataataatcacatcagggtaaatgaggtatccgttacctcaagcatttatcctttgtgttacaatataatcttaaagggaaaaaaagagcagcacaggtagtactgactgcagctgtacagaaacaatgcgtgccataaatattcatttgaaagagaggggttatgattatttacaatcattagcgaatgtagcaacattctgggcactgacaagaaaactgccacaaacatgcaggcataatgcacaataagcaagtccaagctgtggtcggggctccctcgcgtccctgtaagctctgaatttagaatggggtggaccgcctgctgatcaagggttctgaaaggccggcggctaatggaccgccagggggcgctccacgcacgtctccacgtccccgggcgcacctcgcagccgcgcccgctcgctgccaggccgctccctccgtccctcacccgccccgactcgcttccgtcccgtccgacgctagggggcgccgcaggctgcctggcgcgctgctagcgggcctcggagggccggggctgggtggcagcggccatggaccgcttcgtttggaccagcggcctcctggagatcaacgagaccctggtgatccagcagcgcggggtgcgaatctacgatggcgaggagaagataaaatttgatgctgggactctccttcttagtacacaccgactgatttggagagatcagaaaaatcatgagtgttgcatggccattctcctttcccaaattgtgttcattgaagaacaggcggctggaattgggaagagtgccaaaatagtggttcatcttcacccagctcctcctaacaaagaacctggcccattccagagtagtaagaactcctacatcaaactctccttcaaagaacatggccagattgagttttacaggcgtttatcagaggaaatgacacaaagaagatgggagaatatgccagtttcccagtcattacaaacaaatagaggaccccagccaggaagaataagggctgtaggaattgtaggtattgaaaggaaactggaagaaaaaagaaaagaaactgacaaaaacatttctgaggcctttgaagacctcagcaaactaatgatcaaggctaaggaaatggtggaattatcaaaatcaattgctaataaaattaaagacaaacaaggtgacatcacagaagatgagaccatcaggtttaaatcctacttgctgagcatgggaatagctaacccagttaccagagaaacctacggctcaggcacacagtaccacatgcagctggccaaacaactggctggaatattgcaggtgcctttagaggaacgagggggaataatgtcactcacggaggtgtactgcttagtaaaccgagctcgaggaatggaattgctctcaccagaagatttagtgaatgcgtgcaagatgctggaagcactgaaattacctctcaggctccgtgtgtttgacagtggcgtcatggtaattgagcttcagtctcacaaggaagaggaaatggtggcctcggccctggagacagtttcagaaaagggatccctaacatcagaagagtttgctaagcttgtgggaatgtctgtcctcctagccaaagaaaggttgctgcttgcagagaagatgggccatctttgccgtgatgactcagtggaaggcctgcgtttttacccaaatttatttatgacacagagctaagggttttgtatttaaaatcctttttgtccatatgcttgcgtcatgtagaggttgtatgacattgagctaagagataaaccccgatcaattgagaatttattggaacttcacagtgcaatgtaaatctcttttaatttctcactaaatatggtccaggaaatttatttagtatacgcataggaaaattcagaaaagtgaatgccaatatgaatttaaaatcatgctatagtgcagaaccctcagagtttaacttggaatatagtggattttaacttgatcctcaaatctaatcattttataaagaagggaatttagttttgcagagaataaaaagagaagttgcatgttcagacaggttagattattattttggtgtaactgaaattcactgattgcacatgacaatgttgggacaaaatatactgcagcatgctatatgaggctcctccccagggcttttagaagcagtcatagacatgtcttcaacataccaaataaaatacctttaaaaatgaaataattttatttgacacatatatttatatatattctatctagtttctctttgttttttttaagtgatgatttcatgactggcatttaaagaatgcaactgtgtcattttgtttccaaatgctgtggattttgaaactgaactagagagctgtatagacatgcccagagttatgattacaaatttaggaggtagacggctcaggaattccctgggattgttgtgctggtggaatggcagagggaacttcacaggaaccttagtgttcttttacctcaaagccacagacaggaaatagaaagtggaaaagtaatatctccttttcttttccataaggagtttcaacactgaactttaaaaagtctatcatattccagcaatattttttctttgtcctttatgttgtaagttgtgtggaaaaactacttcggtaagaaatgttactgagataacaacaactggctaatactgcatgtagattgcttaggttttaaagtgactgcctgacttcacatgttattgctacagcctccagtatgttcgcattatctcaaactcagggaccccacaggacaggagacaccctttctgaaactgagttggaagtgaaagggtggtgatggttttggccaagcctgcgggagggaaagtattgtattgggagcacccttgggaccaggaagagggatgcccaggttcacactctgggacccctaagacattgtcagtgggtaaggtggagggccactgccagaggctgctgcagtgccctctgggaagtgccagggaccctcagctgcagacccaggggatcccaatcccttatctctgcctgaaaagtggctattgctgcttcgtatcctccagtgtcacaggaatgctgtgcctgagacatcccactttagtttttgttttccaaacctgtcactgactcttcattgtggtgacagatcctctggttcccccattgctcagcctcaggtttattttgagggtaactcagtgtctgactgcccaagtcttttaggggttagttggaccattgtgtaagcttgtttgtatgtctcacctctttctggttggtacttactgtctcacactgctctggcaaacttgtacacacacacacactctctctctctctcacctggctaaggcttttaaaattatgaagataaataatctgtttcaccagctggagtgagttgcaaggaagattgctggagctactcaatctagcgctaatggtttggattcattactgcaaacctacataatttaacatatttgtttactttagtgtgacaactgatgaaaaaaaatggagcaatctgaattgtataaaataacttaagaaggaagaaaagtgatatataaatatattttgcaaatgtcacattaatttaaaaatgagtatgattgattttatttttaaagtgggcattcttcactgtttcgagacctttgtatgtatttgtgtatttttatctttttttttcaggccattattataaggtgttattttggccctctaatgtagaagttatgtttaaatacaaccaatcaggccctaagtgcaaaaaagttctgtcttggtgcttatcactggtataattattatttttttgttttcctaactttgctcttaggagcatgagcctctttgtagctttatggtaatgcaatatttctggtcatttactgtcaaaaaatttttttacattgtgttagtgaagactgtgttttcagggttaaatgattggtatcaatgtatatagagtaaaattattgcaaaatttaaaaatgatttttcttggcattctttttaaatactctgaaacatatatgcaaatgagaaacctttaatcatactaaagccagttatgttaagaatttttcctttggattttataattaagagttgcttataaatacttatgacattgagctcttactgttttagttgtcttaaaagaatgggacatgtcatgaactggtttctttttttaaaaaattcttgatgtgaattccactgttacctgaccatgtatattcagatgaatgtactctttcttgttccttgttaccagattaatctgagagaatgtggattcatcctgtcatctttctcatactcaaatacttaaaatggttcttttgcccaaaagtctcagagtcttcattttggtacagtggagtcacaacttgtaaggtggttaggttttaaagaccgtgcctaaggacaaaattgagcatgctcagaatggtccttgaaaatctcctaaattaccaataaatttctctttgtagtcttaaagtttaaatccctgtggagtgatatgtaggtatgaatatattatgcttatattaagtacaaaaatacaaactgcatatcaagagattcttatagcattaataatttccatgcatgtgtctttttccagtaggtatggttgaatttatgtaaatttattgctaatcccatcccttacgatctagagtataagctgcgcaagggcagaagtttttatctggtttgttcatggatgtattctaagagctgagaacagggcctggacacaataagcattcaataaatatttactgaatgaatgaactcctacctatattcctatttataatttggctccactttatcctactttagctcccattcaattcaataaaaaaaacatttttttgaacacataaaaaacaaacacaaaaacaaacaaaaaaacaaaagaaagaaagcaaaagacagag

SEQ ID NO: 348391 - DNA, 4910 bp, Homo sapiens
gtgggtacataggtgtatatatttctggggtatatgggatattttgatacaggcatacactgtataataatcacatcagggtaaatgaggtatccgttacctcaagcatttatcctttgtgttacaatataatcttaaagggaaaaaaagagcagcacaggtagtactgactgcagctgtacagaaacaatgcgtgccataaatattcatttgaaagagaggggttatgattatttacaatcattagcgaatgtagcaacattctgggcactgacaagaaaactgccacaaacatgcaggcataatgcacaataagcaagtccaagctgtggtcggggctccctcgcgtccctgtaagctctgaatttagaatggggtggaccgcctgctgatcaagggttctgaaaggccggcggctaatggaccgccagggggcgctccacgcacgtctccacgtccccgggcgcacctcgcagccgcgcccgctcgctgccaggccgctccctccgtccctcacccgccccgactcgcttccgtcccgtccgacgctagggggcgccgcaggctgcctggcgcgctgctagcgggcctcggagggccggggctgggtggcagcggccatggaccgcttcgtttggaccagcggcctcctggagatcaacgagaccctggtgatccagcagcgcggggtgcgaatctacgatggcgaggagaagataaaatttgatgctgggactctccttcttagtacacaccgactgatttggagagatcagaaaaatcatgagtgttgcatggccattctcctttcccaaattgtgttcattgaagaacaggcggctggaattgggaagagtgccaaaatagtggttcatcttcacccagctcctcctaacaaagaacctggcccattccagagtagtaagaactcctacatcaaactctccttcaaagaacatggccagattgagttttacaggcgtttatcagaggaaatgacacaaagaagatgggagaatatgccagtttcccagtcattacaaacaaatagaggaccccagccaggaagaataagggctgtaggaattgtaggtattgaaaggaaactggaagaaaaaagaaaagaaactgacaaaaacatttctgaggcctttgaagacctcagcaaactaatgatcaaggctaaggaaatggtggaattatcaaaatcaattgctaataaaattaaagacaaacaaggtgacatcacagaagatgagaccatcaggtttaaatcctacttgctgagcatgggaatagctaacccagttaccagagaaacctacggctcaggcacacagtaccacatgcagctggccaaacaactggctggaatattgcaggtgcctttagaggaacgagggggaataatgtcactcacggaggtgtactgcttagtaaaccgagctcgaggaatggaattgctctcaccagaagatttagtgaatgcgtgcaagatgctggaagcactgaaattacctctcaggctccgtgtgtttgacagtggcgtcatggtaattgagcttcagtctcacaaggaagaggaaatggtggcctcggccctggagacagtttcagaaaagggatccctaacatcagaagagtttgctaagcttgtgggaatgtctgtcctcctagccaaagaaaggttgctgcttgcagagaagatgggccatctttgccgtgatgactcagtggaaggcctgcgtttttacccaaatttatttatgacacagagctaagggttttgtatttaaaatcctttttgtccatatgcttgcgtcatgtagaggttgtatgacattgagctaagagataaaccccgatcaattgagaatttattggaacttcacagtgcaatgtaaatctcttttaatttctcactaaatatggtccaggaaatttatttagtatacgcataggaaaattcagaaaagtgaatgccaatatgaatttaaaatcatgctatagtgcagaaccctcagagtttaacttggaatatagtggattttaacttgatcctcaaatctaatcattttataaagaagggaatttagttttgcagagaataaaaagagaagttgcatgttcagacaggttagattattattttggtgtaactgaaattcactgattgcacatgacaatgttgggacaaaatatactgcagcatgctatatgaggctcctccccagggcttttagaagcagtcatagacatgtcttcaacataccaaataaaatacctttaaaaatgaaataattttatttgacacatatatttatatatattctatctagtttctctttgttttttttaagtgatgatttcatgactggcatttaaagaatgcaactgtgtcattttgtttccaaatgctgtggattttgaaactgaactagagagctgtatagacatgcccagagttatgattacaaatttaggaggtagacggctcaggaattccctgggattgttgtgctggtggaatggcagagggaacttcacaggaaccttagtgttcttttacctcaaagccacagacaggaaatagaaagtggaaaagtaatatctccttttcttttccataaggagtttcaacactgaactttaaaaagtctatcatattccagcaatattttttctttgtcctttatgttgtaagttgtgtggaaaaactacttcggtaagaaatgttactgagataacaacaactggctaatactgcatgtagattgcttaggttttaaagtgactgcctgacttcacatgttattgctacagcctccagtatgttcgcattatctcaaactcagggaccccacaggacaggagacaccctttctgaaactgagttggaagtgaaagggtggtgatggttttggccaagcctgcgggagggaaagtattgtattgggagcacccttgggaccaggaagagggatgcccaggttcacactctgggacccctaagacattgtcagtgggtaaggtggagggccactgccagaggctgctgcagtgccctctgggaagtgccagggaccctcagctgcagacccaggggatcccaatcccttatctctgcctgaaaagtggctattgctgcttcgtatcctccagtgtcacaggaatgctgtgcctgagacatcccactttagtttttgttttccaaacctgtcactgactcttcattgtggtgacagatcctctggttcccccattgctcagcctcaggtttattttgagggtaactcagtgtctgactgcccaagtcttttaggggttagttggaccattgtgtaagcttgtttgtatgtctcacctctttctggttggtacttactgtctcacactgctctggcaaacttgtacacacacacacactctctctctctctcacctggctaaggcttttaaaattatgaagataaataatctgtttcaccagctggagtgagttgcaaggaagattgctggagctactcaatctagcgctaatggtttggattcattactgcaaacctacataatttaacatatttgtttactttagtgtgacaactgatgaaaaaaaatggagcaatctgaattgtataaaataacttaagaaggaagaaaagtgatatataaatatattttgcaaatgtcacattaatttaaaaatgagtatgattgattttatttttaaagtgggcattcttcactgtttcgagacctttgtatgtatttgtgtatttttatctttttttttcaggccattattataaggtgttattttggccctctaatgtagaagttatgtttaaatacaaccaatcaggccctaagtgcaaaaaagttctgtcttggtgcttatcactggtataattattatttttttgttttcctaactttgctcttaggagcatgagcctctttgtagctttatggtaatgcaatatttctggtcatttactgtcaaaaaatttttttacattgtgttagtgaagactgtgttttcagggttaaatgattggtatcaatgtatatagagtaaaattattgcaaaatttaaaaatgatttttcttggcattctttttaaatactctgaaacatatatgcaaatgagaaacctttaatcatactaaagccagttatgttaagaatttttcctttggattttataattaagagttgcttataaatacttatgacattgagctcttactgttttagttgtcttaaaagaatgggacatgtcatgaactggtttctttttttaaaaaattcttgatgtgaattccactgttacctgaccatgtatattcagatgaatgtactctttcttgttccttgttaccagattaatctgagagaatgtggattcatcctgtcatctttctcatactcaaatacttaaaatggttcttttgcccaaaagtctcagagtcttcattttggtacagtggagtcacaacttgtaaggtggttaggttttaaagaccgtgcctaaggacaaaattgagcatgctcagaatggtccttgaaaatctcctaaattaccaataaatttctctttgtagtcttaaagtttaaatccctgtggagtgatatgtaggtatgaatatattatgcttatattaagtacaaaaatacaaactgcatatcaagagattcttatagcattaataatttccatgcatgtgtctttttccagtaggtatggttgaatttatgtaaatttattgctaatcccatcccttacgatctagagtataagctgcgcaagggcagaagtttttatctggtttgttcatggatgtattctaagagctgagaacagggcctggacacaataagcattcaataaatatttactgaatgaatg

SEQ ID NO: 348392 - DNA, 5007 bp, Homo sapiens
gtgggtacataggtgtatatatttctggggtatatgggatattttgatacaggcatacactgtataataatcacatcagggtaaatgaggtatccgttacctcaagcatttatcctttgtgttacaatataatcttaaagggaaaaaaagagcagcacaggtagtactgactgcagctgtacagaaacaatgcgtgccataaatattcatttgaaagagaggggttatgattatttacaatcattagcgaatgtagcaacattctgggcactgacaagaaaactgccacaaacatgcaggcataatgcacaataagcaagtccaagctgtggtcggggctccctcgcgtccctgtaagctctgaatttagaatggggtggaccgcctgctgatcaagggttctgaaaggccggcggctaatggaccgccagggggcgctccacgcacgtctccacgtccccgggcgcacctcgcagccgcgcccgctcgctgccaggccgctccctccgtccctcacccgccccgactcgcttccgtcccgtccgacgctagggggcgccgcaggctgcctggcgcgctgctagcgggcctcggagggccggggctgggtggcagcggccatggaccgcttcgtttggaccagcggcctcctggagatcaacgagaccctggtgatccagcagcgcggggtgcgaatctacgatggcgaggagaagataaaatttgatgctgggactctccttcttagtacacaccgactgatttggagagatcagaaaaatcatgagtgttgcatggccattctcctttcccaaattgtgttcattgaagaacaggcggctggaattgggaagagtgccaaaatagtggttcatcttcacccagctcctcctaacaaagaacctggcccattccagagtagtaagaactcctacatcaaactctccttcaaagaacatggccagattgagttttacaggcgtttatcagaggaaatgacacaaagaagatgggagaatatgccagtttcccagtcattacaaacaaatagaggaccccagccaggaagaataagggctgtaggaattgtaggtattgaaaggaaactggaagaaaaaagaaaagaaactgacaaaaacatttctgaggcctttgaagacctcagcaaactaatgatcaaggctaaggaaatggtggaattatcaaaatcaattgctaataaaattaaagacaaacaaggtgacatcacagaagatgagaccatcaggtttaaatcctacttgctgagcatgggaatagctaacccagttaccagagaaacctacggctcaggcacacagtaccacatgcagctggccaaacaactggctggaatattgcaggtgcctttagaggaacgagggggaataatgtcactcacggaggtgtactgcttagtaaaccgagctcgaggaatggaattgctctcaccagaagatttagtgaatgcgtgcaagatgctggaagcactgaaattacctctcaggctccgtgtgtttgacagtggcgtcatggtaattgagcttcagtctcacaaggaagaggaaatggtggcctcggccctggagacagtttcagaaaagggatccctaacatcagaagagtttgctaagcttgtgggaatgtctgtcctcctagccaaagaaaggttgctgcttgcagagaagatgggccatctttgccgtgatgactcagtggaaggcctgcgtttttacccaaatttatttatgacacagagctaagggttttgtatttaaaatcctttttgtccatatgcttgcgtcatgtagaggttgtatgacattgagctaagagataaaccccgatcaattgagaatttattggaacttcacagtgcaatgtaaatctcttttaatttctcactaaatatggtccaggaaatttatttagtatacgcataggaaaattcagaaaagtgaatgccaatatgaatttaaaatcatgctatagtgcagaaccctcagagtttaacttggaatatagtggattttaacttgatcctcaaatctaatcattttataaagaagggaatttagttttgcagagaataaaaagagaagttgcatgttcagacaggttagattattattttggtgtaactgaaattcactgattgcacatgacaatgttgggacaaaatatactgcagcatgctatatgaggctcctccccagggcttttagaagcagtcatagacatgtcttcaacataccaaataaaatacctttaaaaatgaaataattttatttgacacatatatttatatatattctatctagtttctctttgttttttttaagtgatgatttcatgactggcatttaaagaatgcaactgtgtcattttgtttccaaatgctgtggattttgaaactgaactagagagctgtatagacatgcccagagttatgattacaaatttaggaggtagacggctcaggaattccctgggattgttgtgctggtggaatggcagagggaacttcacaggaaccttagtgttcttttacctcaaagccacagacaggaaatagaaagtggaaaagtaatatctccttttcttttccataaggagtttcaacactgaactttaaaaagtctatcatattccagcaatattttttctttgtcctttatgttgtaagttgtgtggaaaaactacttcggtaagaaatgttactgagataacaacaactggctaatactgcatgtagattgcttaggttttaaagtgactgcctgacttcacatgttattgctacagcctccagtatgttcgcattatctcaaactcagggaccccacaggacaggagacaccctttctgaaactgagttggaagtgaaagggtggtgatggttttggccaagcctgcgggagggaaagtattgtattgggagcacccttgggaccaggaagagggatgcccaggttcacactctgggacccctaagacattgtcagtgggtaaggtggagggccactgccagaggctgctgcagtgccctctgggaagtgccagggaccctcagctgcagacccaggggatcccaatcccttatctctgcctgagacatcccactttagtttttgttttccaaacctgtcactgactcttcattgtggtgacagatcctctggttcccccattgctcagcctcaggtttattttgagggtaactcagtgtctgactgcccaagtcttttaggggttagttggaccattgtgtaagcttgtttgtatgtctcacctctttctggttggtacttactgtctcacactgctctggcaaacttgtacacacacacacactctctctctctctcacctggctaaggcttttaaaattatgaagataaataatctgtttcaccagctggagtgagttgcaaggaagattgctggagctactcaatctagcgctaatggtttggattcattactgcaaacctacataatttaacatatttgtttactttagtgtgacaactgatgaaaaaaaatggagcaatctgaattgtataaaataacttaagaaggaagaaaagtgatatataaatatattttgcaaatgtcacattaatttaaaaatgagtatgattgattttatttttaaagtgggcattcttcactgtttcgagacctttgtatgtatttgtgtatttttatctttttttttcaggccattattataaggtgttattttggccctctaatgtagaagttatgtttaaatacaaccaatcaggccctaagtgcaaaaaagttctgtcttggtgcttatcactggtataattattatttttttgttttcctaactttgctcttaggagcatgagcctctttgtagctttatggtaatgcaatatttctggtcatttactgtcaaaaaatttttttacattgtgttagtgaagactgtgttttcagggttaaatgattggtatcaatgtatatagagtaaaattattgcaaaatttaaaaatgatttttcttggcattctttttaaatactctgaaacatatatgcaaatgagaaacctttaatcatactaaagccagttatgttaagaatttttcctttggattttataattaagagttgcttataaatacttatgacattgagctcttactgttttagttgtcttaaaagaatgggacatgtcatgaactggtttctttttttaaaaaattcttgatgtgaattccactgttacctgaccatgtatattcagatgaatgtactctttcttgttccttgttaccagattaatctgagagaatgtggattcatcctgtcatctttctcatactcaaatacttaaaatggttcttttgcccaaaagtctcagagtcttcattttggtacagtggagtcacaacttgtaaggtggttaggttttaaagaccgtgcctaaggacaaaattgagcatgctcagaatggtccttgaaaatctcctaaattaccaataaatttctctttgtagtcttaaagtttaaatccctgtggagtgatatgtaggtatgaatatattatgcttatattaagtacaaaaatacaaactgcatatcaagagattcttatagcattaataatttccatgcatgtgtctttttccagtaggtatggttgaatttatgtaaatttattgctaatcccatcccttacgatctagagtataagctgcgcaagggcagaagtttttatctggtttgttcatggatgtattctaagagctgagaacagggcctggacacaataagcattcaataaatatttactgaatgaatgaactcctacctatattcctatttataatttggctccactttatcctactttagctcccattcaattcaataaaaaaaacatttttttgaacacataaaaaacaaacacaaaaacaaacaaaaaaacaaaagaaagaaagcaaaagacagag

SEQ ID NO: 348393 - DNA, 5006 bp, Homo sapiens
gtgggtacataggtgtatatatttctggggtatatgggatattttgatacaggcatacactgtataataatcacatcagggtaaatgaggtatccgttacctcaagcatttatcctttgtgttacaatataatcttaaagggaaaaaaagagcagcacaggtagtactgactgcagctgtacagaaacaatgcgtgccataaatattcatttgaaagagaggggttatgattatttacaatcattagcgaatgtagcaacattctgggcactgacaagaaaactgccacaaacatgcaggcataatgcacaataagcaagtccaagctgtggtcggggctccctcgcgtccctgtaagctctgaatttagaatggggtggaccgcctgctgatcaagggttctgaaaggccggcggctaatggaccgccagggggcgctccacgcacgtctccacgtccccgggcgcacctcgcagccgcgcccgctcgctgccaggccgctccctccgtccctcacccgccccgactcgcttccgtcccgtccgacgctagggggcgccgcaggctgcctggcgcgctgctagcgggcctcggagggccggggctgggtggcagcggccatggaccgcttcgtttggaccagcggcctcctggagatcaacgagaccctggtgatccagcagcgcggggtgcgaatctacgatggcgaggagaagataaaatttgatgctgggactctccttcttagtacacaccgactgatttggagagatcagaaaaatcatgagtgttgcatggccattctcctttcccaaattgtgttcattgaagaacaggcggctggaattgggaagagttccagagtagtaagaactcctacatcaaactctccttcaaagaacatggccagattgagttttacaggcgtttatcagaggaaatgacacaaagaagatgggagaatatgccagtttcccagtcattacaaacaaatagaggaccccagccaggaagaataagggctgtaggaattgtaggtattgaaaggaaactggaagaaaaaagaaaagaaactgacaaaaacatttctgaggcctttgaagacctcagcaaactaatgatcaaggctaaggaaatggtggaattatcaaaatcaattgctaataaaattaaagacaaacaaggtgacatcacagaagatgagaccatcaggtttaaatcctacttgctgagcatgggaatagctaacccagttaccagagaaacctacggctcaggcacacagtaccacatgcagctggccaaacaactggctggaatattgcaggtgcctttagaggaacgagggggaataatgtcactcacggaggtgtactgcttagtaaaccgagctcgaggaatggaattgctctcaccagaagatttagtgaatgcgtgcaagatgctggaagcactgaaattacctctcaggctccgtgtgtttgacagtggcgtcatggtaattgagcttcagtctcacaaggaagaggaaatggtggcctcggccctggagacagtttcagaaaagggatccctaacatcagaagagtttgctaagcttgtgggaatgtctgtcctcctagccaaagaaaggttgctgcttgcagagaagatgggccatctttgccgtgatgactcagtggaaggcctgcgtttttacccaaatttatttatgacacagagctaagggttttgtatttaaaatcctttttgtccatatgcttgcgtcatgtagaggttgtatgacattgagctaagagataaaccccgatcaattgagaatttattggaacttcacagtgcaatgtaaatctcttttaatttctcactaaatatggtccaggaaatttatttagtatacgcataggaaaattcagaaaagtgaatgccaatatgaatttaaaatcatgctatagtgcagaaccctcagagtttaacttggaatatagtggattttaacttgatcctcaaatctaatcattttataaagaagggaatttagttttgcagagaataaaaagagaagttgcatgttcagacaggttagattattattttggtgtaactgaaattcactgattgcacatgacaatgttgggacaaaatatactgcagcatgctatatgaggctcctccccagggcttttagaagcagtcatagacatgtcttcaacataccaaataaaatacctttaaaaatgaaataattttatttgacacatatatttatatatattctatctagtttctctttgttttttttaagtgatgatttcatgactggcatttaaagaatgcaactgtgtcattttgtttccaaatgctgtggattttgaaactgaactagagagctgtatagacatgcccagagttatgattacaaatttaggaggtagacggctcaggaattccctgggattgttgtgctggtggaatggcagagggaacttcacaggaaccttagtgttcttttacctcaaagccacagacaggaaatagaaagtggaaaagtaatatctccttttcttttccataaggagtttcaacactgaactttaaaaagtctatcatattccagcaatattttttctttgtcctttatgttgtaagttgtgtggaaaaactacttcggtaagaaatgttactgagataacaacaactggctaatactgcatgtagattgcttaggttttaaagtgactgcctgacttcacatgttattgctacagcctccagtatgttcgcattatctcaaactcagggaccccacaggacaggagacaccctttctgaaactgagttggaagtgaaagggtggtgatggttttggccaagcctgcgggagggaaagtattgtattgggagcacccttgggaccaggaagagggatgcccaggttcacactctgggacccctaagacattgtcagtgggtaaggtggagggccactgccagaggctgctgcagtgccctctgggaagtgccagggaccctcagctgcagacccaggggatcccaatcccttatctctgcctgaaaagtggctattgctgcttcgtatcctccagtgtcacaggaatgctgtgcctgagacatcccactttagtttttgttttccaaacctgtcactgactcttcattgtggtgacagatcctctggttcccccattgctcagcctcaggtttattttgagggtaactcagtgtctgactgcccaagtcttttaggggttagttggaccattgtgtaagcttgtttgtatgtctcacctctttctggttggtacttactgtctcacactgctctggcaaacttgtacacacacacacactctctctctctctcacctggctaaggcttttaaaattatgaagataaataatctgtttcaccagctggagtgagttgcaaggaagattgctggagctactcaatctagcgctaatggtttggattcattactgcaaacctacataatttaacatatttgtttactttagtgtgacaactgatgaaaaaaaatggagcaatctgaattgtataaaataacttaagaaggaagaaaagtgatatataaatatattttgcaaatgtcacattaatttaaaaatgagtatgattgattttatttttaaagtgggcattcttcactgtttcgagacctttgtatgtatttgtgtatttttatctttttttttcaggccattattataaggtgttattttggccctctaatgtagaagttatgtttaaatacaaccaatcaggccctaagtgcaaaaaagttctgtcttggtgcttatcactggtataattattatttttttgttttcctaactttgctcttaggagcatgagcctctttgtagctttatggtaatgcaatatttctggtcatttactgtcaaaaaatttttttacattgtgttagtgaagactgtgttttcagggttaaatgattggtatcaatgtatatagagtaaaattattgcaaaatttaaaaatgatttttcttggcattctttttaaatactctgaaacatatatgcaaatgagaaacctttaatcatactaaagccagttatgttaagaatttttcctttggattttataattaagagttgcttataaatacttatgacattgagctcttactgttttagttgtcttaaaagaatgggacatgtcatgaactggtttctttttttaaaaaattcttgatgtgaattccactgttacctgaccatgtatattcagatgaatgtactctttcttgttccttgttaccagattaatctgagagaatgtggattcatcctgtcatctttctcatactcaaatacttaaaatggttcttttgcccaaaagtctcagagtcttcattttggtacagtggagtcacaacttgtaaggtggttaggttttaaagaccgtgcctaaggacaaaattgagcatgctcagaatggtccttgaaaatctcctaaattaccaataaatttctctttgtagtcttaaagtttaaatccctgtggagtgatatgtaggtatgaatatattatgcttatattaagtacaaaaatacaaactgcatatcaagagattcttatagcattaataatttccatgcatgtgtctttttccagtaggtatggttgaatttatgtaaatttattgctaatcccatcccttacgatctagagtataagctgcgcaagggcagaagtttttatctggtttgttcatggatgtattctaagagctgagaacagggcctggacacaataagcattcaataaatatttactgaatgaatgaactcctacctatattcctatttataatttggctccactttatcctactttagctcccattcaattcaataaaaaaaacatttttttgaacacataaaaaacaaacacaaaaacaaacaaaaaaacaaaagaaagaaagcaaaagacagag

SEQ ID NO: 348394 - DNA, 4090 bp, Homo sapiens
gtgggtacataggtgtatatatttctggggtatatgggatattttgatacaggcatacactgtataataatcacatcagggtaaatgaggtatccgttacctcaagcatttatcctttgtgttacaatataatcttaaagggaaaaaaagagcagcacaggtagtactgactgcagctgtacagaaacaatgcgtgccataaatattcatttgaaagagaggggttatgattatttacaatcattagcgaatgtagcaacattctgggcactgacaagaaaactgccacaaacatgcaggcataatgcacaataagcaagtccaagctgtggtcggggctccctcgcgtccctgtaagctctgaatttagaatggggtggaccgcctgctgatcaagggttctgaaaggccggcggctaatggaccgccagggggcgctccacgcacgtctccacgtccccgggcgcacctcgcagccgcgcccgctcgctgccaggccgctccctccgtccctcacccgccccgactcgcttccgtcccgtccgacgctagggggcgccgcaggctgcctggcgcgctgctagcgggcctcggagggccggggctgggtggcagcggccatggaccgcttcgtttggaccagcggcctcctggagatcaacgagaccctggtgatccagcagcgcggggtgcgaatctacgatggcgaggagaagataaaatttgatgctgggactctccttcttagtacacaccgactgatttggagagatcagaaaaatcatgagtgttgcatggccattctcctttcccaaattgtgttcattgaagaacaggcggctggaattgggaagagtgccaaaatagtggttcatcttcacccagctcctcctaacaaagaacctggcccattccagagtagtaagaactcctacatcaaactctccttcaaagaacatggccagattgagttttacaggcgtttatcagaggaaatgacacaaagaagatgggagaatatgccagtttcccagtcattacaaacaaatagaggaccccagccaggaagaataagggctgtaggaattgtaggtattgaaaggaaactggaagaaaaaagaaaagaaactgacaaaaacatttctgaggcctttgaagacctcagcaaactaatgatcaaggctaaggaaatggtggaattatcaaaatcaattgctaataaaattaaagacaaacaaggtgacatcacagaagatgagaccatcaggtttaaatcctacttgctgagcatgggaatagctaacccagttaccagagaaacctacggctcaggcacacagtaccacatgcagctggccaaacaactggctggaatattgcaggtgcctttagaggaacgagggggaataatgtcactcacggaggtgtactgcttagtaaaccgagctcgaggaatggaattgctctcaccagaagatttagtgaatgcgtgcaagatgctggaagcactgaaattacctctcaggctccgtgtgtttgacagtggcgtcatggtaattgagcttcagtctcacaaggaagaggaaatggtggcctcggccctggagacagtttcagaaaagggatccctaacatcagaagagtttgctaagcttgtgggaatgtctgtcctcctagccaaagaaaggttgctgcttgcagagaagatgggccatctttgccgtgatgactcagtggaaggcctgcgtttttacccaaatttatttatgacacagagctaagggttttgtatttaaaatcctttttgtccatatgcttgcgtcatgtagaggttgtatgacattgagctaagagataaaccccgatcaattgagaatttattggaacttcacagtgcaatgtaaatctcttttaatttctcactaaatatggtccaggaaatttatttagtatacgcataggaaaattcagaaaagtgaatgccaatatgaatttaaaatcatgctatagtgcagaaccctcagagtttaacttggaatatagtggattttaacttgatcctcaaatctaatcattttataaagaagggaatttagttttgcagagaataaaaagagaagttgcatgttcagacaggttagattattattttggtgtaactgaaattcactgattgcacatgacaatgttgggacaaaatatactgcagcatgctatatgaggctcctccccagggcttttagaagcagtcatagacatgtcttcaacataccaaataaaatacctttaaaaatgaaataattttatttgacacatatatttatatatattctatctagtttctctttgttttttttaagtgatgatttcatgactggcatttaaagaatgcaactgtgtcattttgtttccaaatgctgtggattttgaaactgaactagagagctgtatagacatgcccagagttatgattacaaatttaggaggtagacggctcaggaattccctgggattgttgtgctggtggaatggcagagggaacttcacaggaaccttagtgttcttttacctcaaagccacagacaggaaatagaaagtggaaaagtaatatctccttttcttttccataaggagtttcaacactgaactttaaaaagtctatcatattccagcaatattttttctttgtcctttatgttgtaagttgtgtggaaaaactacttcggtaagaaatgttactgagataacaacaactggctaatactgcatgtagattgcttaggttttaaagtgactgcctgacttcacatgttattgctacagcctccagtatgttcgcattatctcaaactcagggaccccacaggacaggagacaccctttctgaaactgagttggaagtgaaagggtggtgatggttttggccaagcctgcgggagggaaagtattgtattgggagcacccttgggaccaggaagagggatgcccaggttcacactctgggacccctaagacattgtcagtgggtaaggtggagggccactgccagaggctgctgcagtgccctctgggaagtgccagggaccctcagctgcagacccaggggatcccaatcccttatctctgcctgaaaagtggctattgctgcttcgtatcctccagtgtcacaggaatgctgtgcctgagacatcccactttagtttttgttttccaaacctgtcactgactcttcattgtggtgacagatcctctggttcccccattgctcagcctcaggtttattttgagggtaactcagtgtctgactgcccaagtcttttaggggttagttggaccattgtgtaagcttgtttgtatgtctcacctctttctggttggtacttactgtctcacactgctctggcaaacttgtacacacacacacactctctctctctctcacctggctaaggcttttaaaattatgaagataaataatctgtttcaccagctggagtgagttgcaaggaagattgctggagctactcaatctagcgctaatggtttggattcattactgcaaacctacataatttaacatatttgtttactttagtgtgacaactgatgaaaaaaaatggagcaatctgaattgtataaaataacttaagaaggaagaaaagtgatatataaatatattttgcaaatgtcacattaatttaaaaatgagtatgattgattttatttttaaagtgggcattcttcactgtttcgagacctttgtatgtatttgtgtatttttatctttttttttcaggccattattataaggtgttattttggccctctaatgtagaagttatgtttaaatacaaccaatcaggccctaagtgcaaaaaagttctgtcttggtgcttatcactggtataattattatttttttgttttcctaactttgctcttaggagcatgagcctctttgtagctttatggtaatgcaatatttctggtcatttactgtcaaaattttttacctggtggcggacacggttcggccacagcgggccagtttcgggaatttcgcataaaaggttcggcttaaatccaattg

SEQ ID NO: 348395 - DNA, 3665 bp, Homo sapiens
actatgtctcttctgggtacttcaacttttgtaggattaagcattagttaaaatttagttatagtgtgaatgttctttggattttagtaggacattcagtaaattatttcttgcatatactggtatacattctgcctaccattagaacccagagtgtgtttaaattagtgtcctaaattaattacattttttttctgctgtgtgtttctattaggtttcagaaaagggatccctaacatcagaagagtttgctaagcttgtgggaatgtctgtcctcctagccaaagaaaggttgctgcttgcagagaagatgggccatctttgccgtgatgactcagtggaaggcctgcgtttttacccaaatttatttatgacacagagctaagggttttgtatttaaaatcctttttgtccatatgcttgcgtcatgtagaggttgtatgacattgagctaagagataaaccccgatcaattgagaatttattggaacttcacagtgcaatgtaaatctcttttaatttctcactaaatatggtccaggaaatttatttagtatacgcataggaaaattcagaaaagtgaatgccaatatgaatttaaaatcatgctatagtgcagaaccctcagagtttaacttggaatatagtggattttaacttgatcctcaaatctaatcattttataaagaagggaatttagttttgcagagaataaaaagagaagttgcatgttcagacaggttagattattattttggtgtaactgaaattcactgattgcacatgacaatgttgggacaaaatatactgcagcatgctatatgaggctcctccccagggcttttagaagcagtcatagacatgtcttcaacataccaaataaaatacctttaaaaatgaaataattttatttgacacatatatttatatatattctatctagtttctctttgttttttttaagtgatgatttcatgactggcatttaaagaatgcaactgtgtcattttgtttccaaatgctgtggattttgaaactgaactagagagctgtatagacatgcccagagttatgattacaaatttaggaggtagacggctcaggaattccctgggattgttgtgctggtggaatggcagagggaacttcacaggaaccttagtgttcttttacctcaaagccacagacaggaaatagaaagtggaaaagtaatatctccttttcttttccataaggagtttcaacactgaactttaaaaagtctatcatattccagcaatattttttctttgtcctttatgttgtaagttgtgtggaaaaactacttcggtaagaaatgttactgagataacaacaactggctaatactgcatgtagattgcttaggttttaaagtgactgcctgacttcacatgttattgctacagcctccagtatgttcgcattatctcaaactcagggaccccacaggacaggagacaccctttctgaaactgagttggaagtgaaagggtggtgatggttttggccaagcctgcgggagggaaagtattgtattgggagcacccttgggaccaggaagagggatgcccaggttcacactctgggacccctaagacattgtcagtgggtaaggtggagggccactgccagaggctgctgcagtgccctctgggaagtgccagggaccctcagctgcagacccaggggatcccaatcccttatctctgcctgaaaagtggctattgctgcttcgtatcctccagtgtcacaggaatgctgtgcctgagacatcccactttagtttttgttttccaaacctgtcactgactcttcattgtggtgacagatcctctggttcccccattgctcagcctcaggtttattttgagggtaactcagtgtctgactgcccaagtcttttaggggttagttggaccattgtgtaagcttgtttgtatgtctcacctctttctggttggtacttactgtctcacactgctctggcaaacttgtacacacacacacactctctctctctctcacctggctaaggcttttaaaattatgaagataaataatctgtttcaccagctggagtgagttgcaaggaagattgctggagctactcaatctagcgctaatggtttggattcattactgcaaacctacataatttaacatatttgtttactttagtgtgacaactgatgaaaaaaaatggagcaatctgaattgtataaaataacttaagaaggaagaaaagtgatatataaatatattttgcaaatgtcacattaatttaaaaatgagtatgattgattttatttttaaagtgggcattcttcactgtttcgagacctttgtatgtatttgtgtatttttatctttttttttcaggccattattataaggtgttattttggccctctaatgtagaagttatgtttaaatacaaccaatcaggccctaagtgcaaaaaagttctgtcttggtgcttatcactggtataattattatttttttgttttcctaactttgctcttaggagcatgagcctctttgtagctttatggtaatgcaatatttctggtcatttactgtcaaaaaatttttttacattgtgttagtgaagactgtgttttcagggttaaatgattggtatcaatgtatatagagtaaaattattgcaaaatttaaaaatgatttttcttggcattctttttaaatactctgaaacatatatgcaaatgagaaacctttaatcatactaaagccagttatgttaagaatttttcctttggattttataattaagagttgcttataaatacttatgacattgagctcttactgttttagttgtcttaaaagaatgggacatgtcatgaactggtttctttttttaaaaaattcttgatgtgaattccactgttacctgaccatgtatattcagatgaatgtactctttcttgttccttgttaccagattaatctgagagaatgtggattcatcctgtcatctttctcatactcaaatacttaaaatggttcttttgcccaaaagtctcagagtcttcattttggtacagtggagtcacaacttgtaaggtggttaggttttaaagaccgtgcctaaggacaaaattgagcatgctcagaatggtccttgaaaatctcctaaattaccaataaatttctctttgtagtcttaaagtttaaatccctgtggagtgatatgtaggtatgaatatattatgcttatattaagtacaaaaatacaaactgcatatcaagagattcttatagcattaataatttccatgcatgtgtctttttccagtaggtatggttgaatttatgtaaatttattgctaatcccatcccttacgatctagagtataagctgcgcaagggcagaagtttttatctggtttgttcatggatgtattctaagagctgagaacagggcctggacacaataagcattcaataaatatttactgaatgaatgaactcctacctatattcctatttataatttggctccactttatcctactttagctcccattcaattcaataaaaaaaacatttttttgaacacataaaaaacaaacacaaaaacaaacaaaaaaacaaaagaaagaaagcaaaagacagag

SEQ ID NO: 348396 - DNA, 967 bp, Homo sapiens
actatgtctcttctgggtacttcaacttttgtaggattaagcattagttaaaatttagttatagtgtgaatgttctttggattttagtaggacattcagtaaattatttcttgcatatactggtatacattctgcctaccattagaacccagagtgtgtttaaattagtgtcctaaattaattacattttttttctgctgtgtgtttctattaggtttcagaaaagggatccctaacatcagaagagtttgctaagcttgtgggaatgtctgtcctcctagccaaagaaagattaatctgagagaatgtggattcatcctgtcatctttctcatactcaaatacttaaaatggttcttttgcccaaaagtctcagagtcttcattttggtacagtggagtcacaacttgtaaggtggttaggttttaaagaccgtgcctaaggacaaaattgagcatgctcagaatggtccttgaaaatctcctaaattaccaataaatttctctttgtagtcttaaagtttaaatccctgtggagtgatatgtaggtatgaatatattatgcttatattaagtacaaaaatacaaactgcatatcaagagattcttatagcattaataatttccatgcatgtgtctttttccagtaggtatggttgaatttatgtaaatttattgctaatcccatcccttacgatctagagtataagctgcgcaagggcagaagtttttatctggtttgttcatggatgtattctaagagctgagaacagggcctggacacaataagcattcaataaatatttactgaatgaatgaactcctacctatattcctatttataatttggctccactttatcctactttagctcccattcaattcaataaaaaaaacatttttttgaacacataaaaaacaaacacaaaaacaaacaaaaaaacaaaagaaagaaagcaaaagacagag

SEQ ID NO: 348397 - DNA, 5903 bp, Homo sapiens
gtgggtacataggtgtatatatttctggggtatatgggatattttgatacaggcatacactgtataataatcacatcagggtaaatgaggtatccgttacctcaagcatttatcctttgtgttacaatataatcttaaagggaaaaaaagagcagcacaggtagtactgactgcagctgtacagaaacaatgcgtgccataaatattcatttgaaagagaggggttatgattatttacaatcattagcgaatgtagcaacattctgggcactgacaagaaaactgccacaaacatgcaggcataatgcacaataagcaagtccaagctgtggtcggggctccctcgcgtccctgtaagctctgaatttagaatggggtggaccgcctgctgatcaagggttctgaaaggccggcggctaatggaccgccagggggcgctccacgcacgtctccacgtccccgggcgcacctcgcagccgcgcccgctcgctgccaggccgctccctccgtccctcacccgccccgactcgcttccgtcccgtccgacgctagggggcgccgcaggctgcctggcgcgctgctagcgggcctcggagggccggggctgggtggcagcggccatggaccgcttcgtttggaccagcggcctcctggagatcaacgagaccctggtgatccagcagcgcggggtgcgaatctacgatggcgaggagaagataaaatttgatgctgggactctccttcttagtacacaccgactgatttggagagatcagaaaaatcatgagtgttgcatggccattctcctttcccaaattgtgttcattgaagaacaggcggctggaattgggaagagtgccaaaatagtggttcatcttcacccagctcctcctaacaaagaacctggcccattccagagtagtaagaactcctacatcaaactctccttcaaagaacatggccagattgagttttacaggcgtttatcagaggaaatgacacaaagaagatgggagaatatgccagtttcccagtcattacaaacaaatagaggaccccagccaggaagaataagggctgtaggaattgtaggtattgaaaggaaactggaagaaaaaagaaaagaaactgacaaaaacatttctgaggcctttgaagacctcagcaaactaatgatcaaggctaaggaaatggtggaattatcaaaatcaattgctaataaaattaaagacaaacaaggtgacatcacagaagatgagaccatcaggtttaaatcctacttgctgagcatgggaatagctaacccagttaccagagaaacctacggctcaggcacacagtaccacatgcagctggccaaacaactggctggaatattgcaggtgcctttagaggaacgagggggaataatgtcactcacggaggtgtactgcttagtaaaccgagctcgaggaatggaattgctctcaccagaagatttagtgaatgcgtgcaagatgctggaagcactgaaattacctctcaggctccgtgtgtttgacagtggcgtcatggtaattgagcttcagtctcacaaggaagaggaaatggtggcctcggccctggagacagtttcagaaaagggatccctaacatcagaagagtttgctaagcttgtgggaatgtctgtcctcctagccaaagaaaggttgctgcttgcagagaagatgggccatctttgccgtgatgactcagtggaaggcctgcgtttttacccaaatttatttatgacacagagctaagggttttgtatttaaaatcctttttgtccatatgcttgcgtcatgtagaggttgtatgacattgagctaagagataaaccccgatcaattgagaatttattggaacttcacagtgcaatgtaaatctcttttaatttctcactaaatatggtccaggaaatttatttagtatacgcataggaaaattcagaaaagtgaatgccaatatgaatttaaaatcatgctatagtgcagaaccctcagagtttaacttggaatatagtggattttaacttgatcctcaaatctaatcattttataaagaagggaatttagttttgcagagaataaaaagagaagttgcatgttcagacaggttagattattattttggtgtaactgaaattcactgattgcacatgacaatgttgggacaaaatatactgcagcatgctatatgaggctcctccccagggcttttagaagcagtcatagacatgtcttcaacataccaaataaaatacctttaaaaatgaaataattttatttgacacatatatttatatatattctatctagtttctctttgttttttttaagtgatgatttcatgactggcatttaaagaatgcaactgtgtcattttgtttccaaatgctgtggattttgaaactgaactagagagctgtatagacatgcccagagttatgattacaaatttaggaggtagacggctcaggaattccctgggattgttgtgctggtggaatggcagagggaacttcacaggaaccttagtgttcttttacctcaaagccacagacaggaaatagaaagtggaaaagtaatatctccttttcttttccataaggagtttcaacactgaactttaaaaagtctatcatattccagcaatattttttctttgtcctttatgttgtaagttgtgtggaaaaactacttcggtaagaaatgttactgagataacaacaactggctaatactgcatgtagattgcttaggttttaaagtgactgcctgacttcacatgttattgctacagcctccagtatgttcgcattatctcaaactcagggaccccacaggacaggagacaccctttctgaaactgagttggaagtgaaagggtggtgatggttttggccaagcctgcgggagggaaagtattgtattgggagcacccttgggaccaggaagagggatgcccaggttcacactctgggacccctaagacattgtcagtgggtaaggtggagggccactgccagaggctgctgcagtgccctctgggaagtgccagggaccctcagctgcagacccaggggatcccaatcccttatctctgcctgaaaagtggctattgctgcttcgtatcctccagtgtcacaggaatgctgtgcctgagacatcccactttagtttttgttttccaaacctgtcactgactcttcattgtggtgacagatcctctggttcccccattgctcagcctcaggtttattttgagggtaactcagtgtctgactgcccaagtcttttaggggttagttggaccattgtgtaagcttgtttgtatgtctcacctctttctggttggtacttactgtctcacactgctctggcaaacttgtacacacacacacactctctctctctctcacctggctaaggcttttaaaattatgaagataaataatctgtttcaccagctggagtgagttgcaaggaagattgctggagctactcaatctagcgctaatggtttggattcattactgcaaacctacataatttaacatatttgtttactttagtgtgacaactgatgaaaaaaaatggagcaatctgaattgtataaaataacttaagaaggaagaaaagtgatatataaatatattttgcaaatgtcacattaatttaaaaatgagtatgattgattttatttttaaagtgggcattcttcactgtttcgagacctttgtatgtatttgtgtatttttatctttttttttcaggccattattataaggtgttattttggccctctaatgtagaagttatgtttaaatacaaccaatcaggccctaagtgcaaaaaagttctgtcttggtgcttatcactggtataattattatttttttgttttcctaactttgctcttaggagcatgagcctctttgtagctttatggtaatgcaatatttctggtcatttactgtcaaaaaatttttttacattgtgttagtgaagactgtgttttcagggttaaatgattggtatcaatgtatatagagtaaaattattgcaaaatttaaaaatgatttttcttggcattctttttaaatactctgaaacatatatgcaaatgagaaacctttaatcatactaaagccagttatgttaagaatttttcctttggattttataattaagagttgcttataaatacttatgacattgagctcttactgttttagttgtcttaaaagaatgggacatgtcatgaactggtttctttttttaaaaaattcttgatgtgaattccactgttacctgaccatgtatattcagatgaatgtactctttcttgttccttgttaccagattaatctgagagaatgtggattcatcctgtcatctttctcatactcaaatacttaaaatggttcttttgcccaaaagtctcagagtcttcattttggtacagtggagtcacaacttgtaaggtggttaggttttaaagaccgtgcctaaggacaaaattgagcatgctcagaatggtccttgaaaatctcctaaattaccaataaatttctctttgtagtcttaaagtttaaatccctgtggagtgatatgtaggtatgaatatattatgcttatattaagtacaaaaatacaaactgcatatcaagagattcttatagcattaataatttccatgcatgtgtctttttccagtaggtatggttgaatttatgtaaatttattgctaatcccatcccttacgatctagagtataagctgcgcaagggcagaagtttttatctggtttgttcatggatgtattctaagagctgagaacagggcctggacacaataagcattcaataaatatttactgaatgaatgaactcctacctatattcctatttataatttggctccactttatcctactttagctcccattcaattcaataaaaaaaacatttttttgaacacataaaaaataaaagaaaaaaagaaaaaaaaaaaagaacaaaaataaacaaatggatggcgcaagtcccacaaaaatctacctccccgagggccacgagcagacacagccagacacaactcttgcgcacagcaaggggcgcccaatcagcacgtaacctttaataacagcaggcgaaccgcggacgcctccttcacacgacggctgaaggtgggcaaccaagcggcaacccacgaccttggatgggaagagacccacctactgcaggcagtgccgagaccaccacttcggggcaccgcatcgattcacacagaagtaggatgacacccgccgcaagtcaggcaacaatcagaaccgagccatacgccggtgtgatttacggggtggacccccacaaggacacatggtcccgccgcaaccagacaagaaagataagaccgcaagcgaacgccaaggaggcacgaagaaaccaaattagacccgcgccctcgagcgtaaataaaatccacgtacacagcgcaagccctgagaaaggtcgagaaaaaagagcacgacaaaggaaagcctccaaaccagaccgaaaaccagcacgacgagctagccacaggcgcaatcggagaaaggaaacaccaagtgacaggcgcacacagatagcatcgaacgacaaacagaacacgacgacaaagacgacgacggcagaaaagacaacccaagaaggaggaaacacaagaagagccataacaatgaaccaatccaccacagcaaacacaagaaaacagaacaaaagaagagagaacaaaaaaagaaagaaaacaccaacacagacaagacaagaaaaagaacaaaggaaacacacacacagaccccagacagaaaacaaagagaacaaaacgaggtagtac

SEQ ID NO: 348398 - DNA, 5629 bp, Homo sapiens
gtgggtacataggtgtatatatttctggggtatatgggatattttgatacaggcatacactgtataataatcacatcagggtaaatgaggtatccgttacctcaagcatttatcctttgtgttacaatataatcttaaagggaaaaaaagagcagcacaggtagtactgactgcagctgtacagaaacaatgcgtgccataaatattcatttgaaagagaggggttatgattatttacaatcattagcgaatgtagcaacattctgggcactgacaagaaaactgccacaaacatgcaggcataatgcacaataagcaagtccaagctgtggtcggggctccctcgcgtccctgtaagctctgaatttagaatggggtggaccgcctgctgatcaagggttctgaaaggccggcggctaatggaccgccagggggcgctccacgcacgtctccacgtccccgggcgcacctcgcagccgcgcccgctcgctgccaggccgctccctccgtccctcacccgccccgactcgcttccgtcccgtccgacgctagggggcgccgcaggctgcctggcgcgctgctagcgggcctcggagggccggggctgggtggcagcggccatggaccgcttcgtttggaccagcggcctcctggagatcaacgagaccctggtgatccagcagcgcggggtgcgaatctacgatggcgaggagaaggtagggcgtctgccaaccttcccaacgggctggcggaagggacccccggtgggcgcgcggcccggctcagcgcggcccgggtcggcgcggcccggtccccggcttagctcacggccctcggcggcccggcaggcctctgtgcggggtgcagcgctcttgcgctccccgccggtcggtagcacgtggcgtggggcgctcggctgcctccccagcgcgggtcccaactttggcacggttcccagcaggcgcggatcgcggccgcttccctccgcccggaatgcttccgggagcgcacagctgcagtgcccgggagaaggagcgctcgccgtctgcgggcgccgggcggcgatccggcagtcgacttccttggcgtggttccagaccccctgacgacaccaacctcggcgtcggcaccggacagccccgtttcgcctttctgtgaggagggcgcggtggccgtacagtccgtgccccagcggaagctttagcttggaccttatgcagtcggagggattagcatatctgggcagaggggtgagggattgcttcgaaaggatttcctaaagagataaaatttgatgctgggactctccttcttagtacacaccgactgatttggagagatcagaaaaatcatgagtgttgcatggccattctcctttcccaaattgtgttcattgaagaacaggcggctggaattgggaagagtgccaaaatagtggttcatcttcacccagctcctcctaacaaagaacctggcccattccagagtagtaagaactcctacatcaaactctccttcaaagaacatggccagattgagttttacaggcgtttatcagaggaaatgacacaaagaagatgggagaatatgccagtttcccagtcattacaaacaaatagaggaccccagccaggaagaataagggctgtaggaattgtaggtattgaaaggaaactggaagaaaaaagaaaagaaactgacaaaaacatttctgaggcctttgaagacctcagcaaactaatgatcaaggctaaggaaatggtggaattatcaaaatcaattgctaataaaattaaagacaaacaaggtgacatcacagaagatgagaccatcaggtttaaatcctacttgctgagcatgggaatagctaacccagttaccagagaaacctacggctcaggcacacagtaccacatgcagctggccaaacaactggctggaatattgcaggtgcctttagaggaacgagggggaataatgtcactcacggaggtgtactgcttagtaaaccgagctcgaggaatggaattgctctcaccagaagatttagtgaatgcgtgcaagatgctggaagcactgaaattacctctcaggctccgtgtgtttgacagtggcgtcatggtaattgagcttcagtctcacaaggaagaggaaatggtggcctcggccctggagacagtttcagaaaagggatccctaacatcagaagagtttgctaagcttgtgggaatgtctgtcctcctagccaaagaaaggttgctgcttgcagagaagatgggccatctttgccgtgatgactcagtggaaggcctgcgtttttacccaaatttatttatgacacagagctaagggttttgtatttaaaatcctttttgtccatatgcttgcgtcatgtagaggttgtatgacattgagctaagagataaaccccgatcaattgagaatttattggaacttcacagtgcaatgtaaatctcttttaatttctcactaaatatggtccaggaaatttatttagtatacgcataggaaaattcagaaaagtgaatgccaatatgaatttaaaatcatgctatagtgcagaaccctcagagtttaacttggaatatagtggattttaacttgatcctcaaatctaatcattttataaagaagggaatttagttttgcagagaataaaaagagaagttgcatgttcagacaggttagattattattttggtgtaactgaaattcactgattgcacatgacaatgttgggacaaaatatactgcagcatgctatatgaggctcctccccagggcttttagaagcagtcatagacatgtcttcaacataccaaataaaatacctttaaaaatgaaataattttatttgacacatatatttatatatattctatctagtttctctttgttttttttaagtgatgatttcatgactggcatttaaagaatgcaactgtgtcattttgtttccaaatgctgtggattttgaaactgaactagagagctgtatagacatgcccagagttatgattacaaatttaggaggtagacggctcaggaattccctgggattgttgtgctggtggaatggcagagggaacttcacaggaaccttagtgttcttttacctcaaagccacagacaggaaatagaaagtggaaaagtaatatctccttttcttttccataaggagtttcaacactgaactttaaaaagtctatcatattccagcaatattttttctttgtcctttatgttgtaagttgtgtggaaaaactacttcggtaagaaatgttactgagataacaacaactggctaatactgcatgtagattgcttaggttttaaagtgactgcctgacttcacatgttattgctacagcctccagtatgttcgcattatctcaaactcagggaccccacaggacaggagacaccctttctgaaactgagttggaagtgaaagggtggtgatggttttggccaagcctgcgggagggaaagtattgtattgggagcacccttgggaccaggaagagggatgcccaggttcacactctgggacccctaagacattgtcagtgggtaaggtggagggccactgccagaggctgctgcagtgccctctgggaagtgccagggaccctcagctgcagacccaggggatcccaatcccttatctctgcctgaaaagtggctattgctgcttcgtatcctccagtgtcacaggaatgctgtgcctgagacatcccactttagtttttgttttccaaacctgtcactgactcttcattgtggtgacagatcctctggttcccccattgctcagcctcaggtttattttgagggtaactcagtgtctgactgcccaagtcttttaggggttagttggaccattgtgtaagcttgtttgtatgtctcacctctttctggttggtacttactgtctcacactgctctggcaaacttgtacacacacacacactctctctctctctcacctggctaaggcttttaaaattatgaagataaataatctgtttcaccagctggagtgagttgcaaggaagattgctggagctactcaatctagcgctaatggtttggattcattactgcaaacctacataatttaacatatttgtttactttagtgtgacaactgatgaaaaaaaatggagcaatctgaattgtataaaataacttaagaaggaagaaaagtgatatataaatatattttgcaaatgtcacattaatttaaaaatgagtatgattgattttatttttaaagtgggcattcttcactgtttcgagacctttgtatgtatttgtgtatttttatctttttttttcaggccattattataaggtgttattttggccctctaatgtagaagttatgtttaaatacaaccaatcaggccctaagtgcaaaaaagttctgtcttggtgcttatcactggtataattattatttttttgttttcctaactttgctcttaggagcatgagcctctttgtagctttatggtaatgcaatatttctggtcatttactgtcaaaaaatttttttacattgtgttagtgaagactgtgttttcagggttaaatgattggtatcaatgtatatagagtaaaattattgcaaaatttaaaaatgatttttcttggcattctttttaaatactctgaaacatatatgcaaatgagaaacctttaatcatactaaagccagttatgttaagaatttttcctttggattttataattaagagttgcttataaatacttatgacattgagctcttactgttttagttgtcttaaaagaatgggacatgtcatgaactggtttctttttttaaaaaattcttgatgtgaattccactgttacctgaccatgtatattcagatgaatgtactctttcttgttccttgttaccagattaatctgagagaatgtggattcatcctgtcatctttctcatactcaaatacttaaaatggttcttttgcccaaaagtctcagagtcttcattttggtacagtggagtcacaacttgtaaggtggttaggttttaaagaccgtgcctaaggacaaaattgagcatgctcagaatggtccttgaaaatctcctaaattaccaataaatttctctttgtagtcttaaagtttaaatccctgtggagtgatatgtaggtatgaatatattatgcttatattaagtacaaaaatacaaactgcatatcaagagattcttatagcattaataatttccatgcatgtgtctttttccagtaggtatggttgaatttatgtaaatttattgctaatcccatcccttacgatctagagtataagctgcgcaagggcagaagtttttatctggtttgttcatggatgtattctaagagctgagaacagggcctggacacaataagcattcaataaatatttactgaatgaatgaactcctacctatattcctatttataatttggctccactttatcctactttagctcccattcaattcaataaaaaaaacatttttttgaacacataaaaaacaaacacaaaaacaaacaaaaaaacaaaagaaagaaagcaaaagacagag

SEQ ID NO: 348399 - DNA, 5043 bp, Homo sapiens
gtgggtacataggtgtatatatttctggggtatatgggatattttgatacaggcatacactgtataataatcacatcagggtaaatgaggtatccgttacctcaagcatttatcctttgtgttacaatataatcttaaagggaaaaaaagagcagcacaggtagtactgactgcagctgtacagaaacaatgcgtgccataaatattcatttgaaagagaggggttatgattatttacaatcattagcgaatgtagcaacattctgggcactgacaagaaaactgccacaaacatgcaggcataatgcacaataagcaagtccaagctgtggtcggggctccctcgcgtccctgtaagctctgaatttagaatggggtggaccgcctgctgatcaagggttctgaaaggccggcggctaatggaccgccagggggcgctccacgcacgtctccacgtccccgggcgcacctcgcagccgcgcccgctcgctgccaggccgctccctccgtccctcacccgccccgactcgcttccgtcccgtccgacgctagggggcgccgcaggctgcctggcgcgctgctagcgggcctcggagggccggggctgggtggcagcggccatggaccgcttcgtttggaccagcggcctcctggagatcaacgagaccctggtgatccagcagcgcggggtgcgaatctacgatggcgaggagaagataaaatttgatgctgggactctccttcttagtacacaccgactgatttggagagatcagaaaaatcatgagtgttgcatggccattctcctttcccaaattgtgttcattgaagaacaggcggctggaattgggaagagtgccaaaatagtggttcatcttcacccagctcctcctaacaaagaacctggcccattccagagtagtaagaactcctacatcaaactctccttcaaagaacatggccagattgagttttacaggcgtttatcagaggaaatgacacaaagaagatgggagaatatgccagtttcccagtcattacaaacaaatagaggaccccagccaggaagaataagggctgtaggaattgtaggtattgaaaggaaactggaagaaaaaagaaaagaaactgacaaaaacatttctgaggcctttgaagacctcagcaaactaatgatcaaggctaaggaaatggtggaattatcaaaatcaattgctaataaaattaaagacaaacaaggtgacatcacagaagatgagaccatcaggtttaaatcctacttgctgagcatgggaatagctaacccagttaccagagaaacctacggctcaggcacacagtaccacatgcagctggccaaacaactggctggaatattgcaggtgcctttagaggaacgagggggaataatgtcactcacggaggtgtactgcttagtaaaccgagctcgaggaatggaattgctctcaccagaagatttagtgaatgcgtgcaagatgctggaagcactgaaattacctctcagtggcgtcatggtaattgagcttcagtctcacaaggaagaggaaatggtggcctcggccctggagacagtttcagaaaagggatccctaacatcagaagagtttgctaagcttgtgggaatgtctgtcctcctagccaaagaaaggttgctgcttgcagagaagatgggccatctttgccgtgatgactcagtggaaggcctgcgtttttacccaaatttatttatgacacagagctaagggttttgtatttaaaatcctttttgtccatatgcttgcgtcatgtagaggttgtatgacattgagctaagagataaaccccgatcaattgagaatttattggaacttcacagtgcaatgtaaatctcttttaatttctcactaaatatggtccaggaaatttatttagtatacgcataggaaaattcagaaaagtgaatgccaatatgaatttaaaatcatgctatagtgcagaaccctcagagtttaacttggaatatagtggattttaacttgatcctcaaatctaatcattttataaagaagggaatttagttttgcagagaataaaaagagaagttgcatgttcagacaggttagattattattttggtgtaactgaaattcactgattgcacatgacaatgttgggacaaaatatactgcagcatgctatatgaggctcctccccagggcttttagaagcagtcatagacatgtcttcaacataccaaataaaatacctttaaaaatgaaataattttatttgacacatatatttatatatattctatctagtttctctttgttttttttaagtgatgatttcatgactggcatttaaagaatgcaactgtgtcattttgtttccaaatgctgtggattttgaaactgaactagagagctgtatagacatgcccagagttatgattacaaatttaggaggtagacggctcaggaattccctgggattgttgtgctggtggaatggcagagggaacttcacaggaaccttagtgttcttttacctcaaagccacagacaggaaatagaaagtggaaaagtaatatctccttttcttttccataaggagtttcaacactgaactttaaaaagtctatcatattccagcaatattttttctttgtcctttatgttgtaagttgtgtggaaaaactacttcggtaagaaatgttactgagataacaacaactggctaatactgcatgtagattgcttaggttttaaagtgactgcctgacttcacatgttattgctacagcctccagtatgttcgcattatctcaaactcagggaccccacaggacaggagacaccctttctgaaactgagttggaagtgaaagggtggtgatggttttggccaagcctgcgggagggaaagtattgtattgggagcacccttgggaccaggaagagggatgcccaggttcacactctgggacccctaagacattgtcagtgggtaaggtggagggccactgccagaggctgctgcagtgccctctgggaagtgccagggaccctcagctgcagacccaggggatcccaatcccttatctctgcctgaaaagtggctattgctgcttcgtatcctccagtgtcacaggaatgctgtgcctgagacatcccactttagtttttgttttccaaacctgtcactgactcttcattgtggtgacagatcctctggttcccccattgctcagcctcaggtttattttgagggtaactcagtgtctgactgcccaagtcttttaggggttagttggaccattgtgtaagcttgtttgtatgtctcacctctttctggttggtacttactgtctcacactgctctggcaaacttgtacacacacacacactctctctctctctcacctggctaaggcttttaaaattatgaagataaataatctgtttcaccagctggagtgagttgcaaggaagattgctggagctactcaatctagcgctaatggtttggattcattactgcaaacctacataatttaacatatttgtttactttagtgtgacaactgatgaaaaaaaatggagcaatctgaattgtataaaataacttaagaaggaagaaaagtgatatataaatatattttgcaaatgtcacattaatttaaaaatgagtatgattgattttatttttaaagtgggcattcttcactgtttcgagacctttgtatgtatttgtgtatttttatctttttttttcaggccattattataaggtgttattttggccctctaatgtagaagttatgtttaaatacaaccaatcaggccctaagtgcaaaaaagttctgtcttggtgcttatcactggtataattattatttttttgttttcctaactttgctcttaggagcatgagcctctttgtagctttatggtaatgcaatatttctggtcatttactgtcaaaaaatttttttacattgtgttagtgaagactgtgttttcagggttaaatgattggtatcaatgtatatagagtaaaattattgcaaaatttaaaaatgatttttcttggcattctttttaaatactctgaaacatatatgcaaatgagaaacctttaatcatactaaagccagttatgttaagaatttttcctttggattttataattaagagttgcttataaatacttatgacattgagctcttactgttttagttgtcttaaaagaatgggacatgtcatgaactggtttctttttttaaaaaattcttgatgtgaattccactgttacctgaccatgtatattcagatgaatgtactctttcttgttccttgttaccagattaatctgagagaatgtggattcatcctgtcatctttctcatactcaaatacttaaaatggttcttttgcccaaaagtctcagagtcttcattttggtacagtggagtcacaacttgtaaggtggttaggttttaaagaccgtgcctaaggacaaaattgagcatgctcagaatggtccttgaaaatctcctaaattaccaataaatttctctttgtagtcttaaagtttaaatccctgtggagtgatatgtaggtatgaatatattatgcttatattaagtacaaaaatacaaactgcatatcaagagattcttatagcattaataatttccatgcatgtgtctttttccagtaggtatggttgaatttatgtaaatttattgctaatcccatcccttacgatctagagtataagctgcgcaagggcagaagtttttatctggtttgttcatggatgtattctaagagctgagaacagggcctggacacaataagcattcaataaatatttactgaatgaatgaactcctacctatattcctatttataatttggctccactttatcctactttagctcccattcaattcaataaaaaaaacatttttttgaacacataaaaaacaaacacaaaaacaaacaaaaaaacaaaagaaagaaagcaaaagacagag

SEQ ID NO: 348400 - DNA, 1700 bp, Homo sapiens
  misc_feature (1479)..(1479): n is a, c, g, or t
  misc_feature (1699)..(1699): n is a, c, g, or t
gtgggtacataggtgtatatatttctggggtatatgggatattttgatacaggcatacactgtataataatcacatcagggtaaatgaggtatccgttacctcaagcatttatcctttgtgttacaatataatcttaaagggaaaaaaagagcagcacaggtagtactgactgcagctgtacagaaacaatgcgtgccataaatattcatttgaaagagaggggttatgattatttacaatcattagcgaatgtagcaacattctgggcactgacaagaaaactgccacaaacatgcaggcataatgcacaataagcaagtccaagctgtggtcggggctccctcgcgtccctgtaagctctgaatttagaatggggtggaccgcctgctgatcaagggttctgaaaggccggcggctaatggaccgccagggggcgctccacgcacgtctccacgtccccgggcgcacctcgcagccgcgcccgctcgctgccaggccgctccctccgtccctcacccgccccgactcgcttccgtcccgtccgacgctagggggcgccgcaggctgcctggcgcgctgctagcgggcctcggagggccggggctgggtggcagcggccatggaccgcttcgtttggaccagcggcctcctggagatcaacgagaccctggtgatccagcagcgcggggtgcgaatctacgatggcgaggagaagataaaatttgatgctgggactctccttcttagtacacaccgactgatttggagagatcagaaaaatcatgagtgttgcatggccattctcctttcccaaattgtgttcattgaagaacaggcggctggaattgggaagagtgccaaaatagtggttcatcttcacccagctcctcctaacaaagaacctggcccattccagagtagtaagaactcctacatcaaactctccttcaaagaacatggccagattgagttttacaggcgtttatcagaggaaatgacacaaagaagatgggagaatatgccagtttcccagtcattacaaacaaatagaggaccccagccaggaagaataagggctgtaggaattgtaggtattgaaaggaaactggaagaaaaaagaaaagaaactgacaaaaacatttctgaggcctttgaagacctcagcaaactaatgatcaaggctaaggaaatggtggaattatcaaaatcaattgctaataaaattaaagacaaacaaggtgacatcacagaagatgagaccatcaggtttaaatcctacttgctgagcatgggaatagctaacccagttaccagagaaacctacggctcaggcacacagtaccacatgcagctggccaaacaactggctggaatattgcaggtgcctttagagttgctctcaccagaagatttagtgaatgcgtgcaagatgctggaagcactgaaattacctctcagctcgtgtgtgacggggtcgntaatgaccttcgtctccaggaagaatggggccgccggaaggtcgaaaggcctacttgagagtgtagtggggagtggcccaaccagagggggtcggaaaggccttgccgggccgaggcgggtcccatttgacaacgggggtgaccggcggcgtgggggaggggacacaccaataattctctatatagaaacatcaccacgggaaaaataattaacactatnc

SEQ ID NO: 348401 - DNA, 470 bp, Homo sapiens
  misc_feature (421)..(421): n is a, c, g, or t
  misc_feature (455)..(455): n is a, c, g, or t
  misc_feature (464)..(464): n is a, c, g, or t
tctgcataacgcatttactaatattttctaaatgagcaatgtaggctaagaaaaaatcatgcataagtaaaagatccactcaaagtacaaggtaggtcaatagatcttaatgtaactgcatgtgaacaattcactaacatgattttattttttcacattgtaataatttttttaaaaaattaccacttgttgaatgttggtagagttttaaaaaaagaatatccaaaattatctgaaaaggctactaaaaatatttcttccttttccgactatatgcatatgctaggactgatttttgtatgacaatagattgagtgaagaagaagatatgaggcctgggagcagtggttctctgttggtccattaactacggggtggtttccaacacccttcaggggttgccatgaggtggcacaaagangctaagttggaactgtggatggcttcgctgggantctaggacngtggtt

SEQ ID NO: 348402 - DNA, 459 bp, Homo sapiens
ctccaccagggtcaaaaactgctttttcacgtcaaatggtgttggttttataattttatggaaactgaaggggactagctgaagttatttattactttccagcagctaataaatgttggtgtttaatagctgctgctctttaatatgggggtattgaataacttacataaaatatgttagcaaaacttgaaaaagttaaagcactgtccacttcttatggacttcttggccatttcctctcctttctcttcccctaaatgggaatggactgtaggtagacctcatgagtataagtctcagatgtccattatgttaccactggaaccatttagattagaagctgatcttcagtaaatatatttacattatccagtttgatcagataggtattatactacaacataaaacaaacagaagaatattatttatctcaaatatcaggtctttttaaaaaaaaaa

SEQ ID NO: 348403 - DNA, 618 bp, Homo sapiens
gactaattcactccagttcttgcactaattcactcactcgcttcctcccgtgaggagtttggagtggcgggctgagtaaatgaggcacccctgtcacgagtcctgtgaaggggtcggggaaatatcctgctttggtaacaacgacttacattcatacagcttctcacggtttgccagatgtttgcatattcattatctcatttgaccctccctcatcatcaccctgggacatacagaaggttctgtcatgggaggaggaggaacctccatgcttggccactgcctccctcccatgctgagtcctctccctgagtgggatgtcatgacgcagcccgtgtgtgcctatagcagaatgagatttcagcatagaatgactgacagcctaacaaccaggtaccttacttcttcttaaggaaaggcagagaataaaatctgtccagaggaaaatgactgttttatcactggtcatgagccttgatggcctcgtaagactcaaataacctaagctaaggccaagaacctgggcctgtgaggggagggttggaaggtgggcagggaatttgaactgcatgtatgttggataggtagcctctcggtggcttcatctgcagcactgcc

SEQ ID NO: 348404 - DNA, 180 bp, Homo sapiens
tggagagagaaggccatgctctctgccagaggtggagctgctgtccccaccccaccccccttggcactttcaagagcaggggtggccctggctgaggtctctgtggagcacatggtctgtgttgctggtcacctgtgcaagtagtgtgcagcggcctgagaaaatgaacaggcatagcca

SEQ ID NO: 348405 - DNA, 366 bp, Homo sapiens
tatattgtctcctgagcctaggataagctataattgattttctctaaacagtcctaagcactcaggcttaacttttcaagattcataactactaggactataaaataggagaagaaacttgaattgcaggagaaaaaaaatcctttgtaaaatggatctactctttttattgcattaagtatttacaaagaactaaattaagtaactgtgatttactgatgattaaagtttaaaaaaactgatcgggcaaaagaaaggatgaaatgaaaaatcgtgcaaaggaaaaagccagtttctcatgtaatgggagatgtcctttctgttggatctttgaagtctgattttcttcacaagaatccatcaagg

SEQ ID NO: 348406 - DNA, 425 bp, Homo sapiens
tgctcatctttatattccttagaattgagcagagtgtccatcccatggtaggcactcacgaaaatgtataaaataaaataaataaacataaaatcatctccttaagatccttcactttaacagatatgaaaactgaaggccgggcgcagtggctcaagcctgtaatcccagcactttgggaggccgaggcgggcggatcacgaggtcaggagatcgagaccatcctggctaacacagtgaaaccccgtctctactaaaaatattaaaaattagccgggcgtggtggcgggcgcctgtagtcccagctacttgggaggctgagccaggagaatggcgtgaacccaggaggtggaggttgcagtgagctaagatcgcgccactgcactccagcctgggtgacagagcaagactccgtctcaaaaaaa

SEQ ID NO: 348407 - DNA, 416 bp, Homo sapiens
agatgaggaaaatgaatatcgagatctgtgaatcccacccagtgccagccgccctgacatctttcctcttcatgtcacagaattgtcatgaggaccaatggcatcgggcagcagaaaacattgcatattccccaaaagaaagtggcccctgggctttcctttgcttccttcccagagtgagccatgctctggaagggatatttccatagctgtcctcttacagcatcagtaagcaccatgactttcaggagtacaggattgcacctttgacggctccaggcccacaaccgattgcattcctagaccacagggaagggcagcagatcactgcctcatctgcccagagctgtggaggcagcaaagggtgtttaacctctgctggtgaattgaaagcccaggagctggtgcagattcat

SEQ ID NO: 348408 - DNA, 503 bp, Homo sapiens
ctactagggaggatcacctgagcctgcgaggtcaaggctgcagtgagcctagatcacaccactgcactccagccggtgacagagcaagaccctgtctcaaaaaaaaaaaaaaaaaagtattaaaatataaaagttgggctatttctgtgtttataacacctttccttaatgagaggtgaatttataggctgtgtcttcaaaatgtataataattgaacccaatattaaatataataccagactcatttctcctctatttgagcatttatctctatgaactttaatctatagccatttaaactgctaatatttaaatatacccaaattatttcctgtaaaattatgggaaattattgttttttaatattttaattttttaacttgttctttttgaaataattttagacttaacaaaaatattgcaaaaatggtaccaaaaaaatccattacacctttcatccagattcctcaaatgctaacatcttacataattaccgtataat

SEQ ID NO: 348409 - DNA, 410 bp, Homo sapiens
atgaaccagaaaagagaaatcttgcactgattggaatatggcagccactcaccatctcccctgtctgctctcactcagtttatgtgacccaatgggaatggagaatctcaggcataaaaccaactgcttcgtgggttactctggaaaattctaaactgaagctttttgagaaaggcgacattacctcagaacttccacatgtagctactgtggagtttctgtttatgtgaatggatattttcaccagatattggaaacatgctgaagctggattccagtgcaataaaggcaactcatttagccattggcctgtgatactatgagaaatacagttaaattagacgaatgctccaccaggaattgtggccaaaataaatgatcattttttaaaaaagaaaaagataaagaca

SEQ ID NO: 348410 - DNA, 4407 bp, Homo sapiens
agtcgctctaccagtacctaagatggccgccggcccatccaccgtcgcgatcggtgtgaggaaagtgtcacgaacccggaattgcccgactccgtcatggcaggcgccgggggcgtggcttccggcggccacagcttgctagtcgccgcggcggggtcgagcgggggcggcagctgacaggcgctcctcccccgaccgcagcggctggttcccagcgaggcgggcggcccccagctcgcgtccccgagtcctagcccgcgaggcgccagggctgcgcctgggcatggaagaggggaagatggacgagaatgaatgggggtaccacggagagggcaataagagcctggtggtggcccacgcgcagcgctgcgtcgtgctgcggtttctgaagtttcctccaaataggaagaagacctcggaagagatatttcaacacctgcagaacatagtggactttgggaaaaatgtcatgaaggagtttttgggggagaactatgttcattatggggaggtcgttcagctacctttagagtttgtgaaacagctttgtttaaagatacaatctgaaagaccagagtctcgctgtgacaaggacctggatactctcagtggttacgctatgtgccttcctaatttaaccagactccaaacctaccgctttgcagagcaccggccgattctgtgtgtagagattaagccaaaatgtgggtttattcctttctcgagtgatgtcacgcatgagatgaagcataaggtctgtcgatactgcatgcaccagcacctcaaggtagcaactgggaagtggaagcagatcagcaaatactgtccccttgatctctactcaggaaacaaacagagaatgcactttgccttgaagagtttgctgcaggaggcacagaacaacttgaagatatttaagaatggtgagctgatttacggctgcaaagatgcccggagccccgtggctgactggagcgagcttgcacaccacctgaagccgttcttcttcccttccaacggcctggccagtgggccccactgcacaagggctgtgatcagggagctggtgcacgtgatcacacgggtgctgctgagtggctcggacaagggccgggcaggcaccctgagtccggggctcgggcctcagggcccgcgagtctgcgaagccagccctttcagtaggagccttcgctgccaaggaaaaaacaccccagagcgctcggggttaccgaagggctgtcttctgtacaaaaccctccaggtgcagatgttggacctgctggacatcgaaggcctctaccctctgtacaaccgggttgagcgatacctggaagagtttcccgaggagagaaaaaccttacaaatagatgggccttatgatgaagcattttaccagaagctgcttgacctttccactgaggatgacgggacagtggccttcgcgctaacgaaggtgcagcagtaccgcgtcgccatgactgccaaggactgctccatcatgattgcactgtctccctgtctgcaggatgccagctctgatcaaaggcctgtcgtcccttcatcgaggtccaggtttgccttttccgtgtctgtgctggaccttgacctcaagccctacgagagcattccccatcagtataaactggacggcaagatcgtcaactattattcaaagactgtacgtgccaaagacaacgccgtgatgtcgactcggttcaaggaaagcgaagattgcacattagttctccacaaggtctaactctttccctgcagtgtctttgaaacttgaacataatgtgaaggctgaatgatagagatattttctgttgtgttgggtgacctttggttgtgaatgtttttgcttttaaccccttttgaggtgggattgcctcttggagacatggaattgaagagcactagaaacaacttcctggacaaggaatgtaggaagtgagtgctgtgtcccaggaagctgctcacactcttaaaatggaagtgtccgttaagccctgggaagacgttctggatagttcttctttcccaaccagggctcatgtctgattctctaatgcgaaaagccttattctaagacccaaggtttggatctgctaccaccagactcctaacatagaaaacttgaattgtcacatacattttacagtttggacttttaagaaaacatggatactactggaacttcccccagctgagttacatggtcactttttcagtgcaagccacatatcaacacaggtttttaggtggttccctgctgcacagcgtgacctcgtggtcgcgcagatgccgattctgagcagtgtagactcagggtccctgtggaggtgctgaagcccacagttccacacagggcagcagggagcgcaaggctcaggtcaggatggacaccactcatgcgagcattgacctttttttttttgctttacaatttaatctttcacatgagggggagatgagctgttctttcccactaaaaattgctgctgtagaagttggaggtggagctgtgactggctgagctgctgtggccgggctgggcagtgtgccccaacagctcagtgctttcctgacactccagtgtctggggtggttgaggagcgagttctctcttcctcccagaccaagttcctccctcgggtttgccttgagacgtgttgcgtttttgggccccgtggcctctccctgttaggctgccacaggccctgcttctggaaggtgaacagctcctggctgctgccgagagggttctcgttggggtcaccaaagtgtgcccggctgctatgaaaaacgttgggaatcttggtttcagttttttattctatgctaggttgtacagacttatttatatcatcgttttgagggactaatggaggcttattgtaacatataatattagtgaaaccatggaattatatgaaaatgatacatgagaaataaggaaactattttgctgattgtaaatttttgtgggaaattttgtgataacttgagaattatacttgtttgaatcaaggcaactcttctagaatttattgttcaattctgtcatatttacttctaattctactctcagaggtgcaaaaagatacttatctaactggacacttttactgttttcttctcacttccaatgacaccgtctcatacacacgggtcctgtgtgctgggatgggggctttggtgaagtgcacggagctcacggacaagccgcaggctctgggaagcgtggaggtagtggccgttgagtactgtcttgacccaagggagttcactgttgctgggctggggctggggcagcctggtttgggatgattttgcccattgtcacggtgtgtggaggatgctgggtcctgggttcaagtgcacatgtgagggaaccccagtccgtgggaaggtgggctgggctccctaggtccttcagggctgcaagagttattgcctagcacagggcccagacagggctggactagacacgatgaaaacagcctgtatttgagggagaagagaaaacagatggagacccccactctgtctggtcttggctcccaccagcccgggctgtgaggagcccctgagccgcgggtgccactgctgtggatgcgtttctggcccgtcttggaaactgctgctgctgcgtagtcatgacggccctgactggtttgagacaacacgcgttcacagatcttaacaatgctaaatgggcgactgatgaggtcacggttcttaaggcacatccgggacgatcgatatagcacttaggctatgcaggggggtctttctttcataaaggacctcattccttgcgtcccagcccaggaacagtgctgtctttgctgtcttaggccattcttgttattaagctgacagcttcactttcttgtggaagaccaagaacagcatgaggacttgctgagactgcctcacggtgccaccatgcggaccggggggaggcagggagtgagggtgtggctcccctgggctactaaggacagtttaaagatgaggcgccataggcatccgtctccagagcccccaggaggcaggaaccaggataagggtggcttctcccagctgagtaatgtggccaccatgtccaaggtggactcggtgtgaggctgcagtgggtgggggatggatcctccccacacatctgaggacacacaaccacttggtacattttctcagatgttaagcttatttttataaaccgcattgtacgtgtcacttttatttggcattttatacttaactagctgtatttatttttcatgtcatgagagtttccatataatgtgccataactgcatagacagcacgtcttcagggtgtggtttctaagcagaaaatagcaaatgtttatattgaataaaattgcatgttcctccacgc

SEQ ID NO: 348411 - DNA, 1900 bp, Homo sapiens
tgtttatttttgtgaaagcgagagctatgccatctaaaacaatgcaaaccatatatgaaagtccaaagaaggaagaggagagagtgcctcacattctgctctgtagaggagacagttgtgagcattgtggtgcctgtccttcacctttctccctgcccgcgtcacacacatgtgcacatgtacagctttacgtatgtcgactctgacagtgtggtgtgtgttgagctgtccctggtcagtatggacagacccacatagcttggagcatgtgttgaagagtgtaaatgtcagagccagcgtaccgggtttgagtccctgccttgccattgacaagcagggcatgacagacaagtgatgtctgtgtctgttgcttgtctgtaaagtgggacgccggccgtgctgccctgttgggctgctgtgagggtggagcaagttaacacatgcacagcctgtagaagggtggccgtctgccgttgtctctggtggctgtatgatgttccggagggaatgtcgttctaagcgatgccttgctgaacaccccctgcgctctccttgcaggtgtcgagtgatactcacttgatactctgagtgtggccaacatgcggggctcaggtggcttactgcttttccttccaaaggccgactgtggtgaccttgctgaagacagatcatccgtctcagggtctggagtcggggtcccacactgcttgccgtgagaggtcagggggcggtgctggcctctgagcagccccgtggcactgagggctggcccaggtgctctcacagggcgacctcctgacgcccgtgctcaccgtggccctcgctcctaatcccaccctcaggttctgaggcaggaagcagttcccacacttggctactgggaaggaaggttgtgtgggggggcagaggcttcctgtgtgacctggagctgatctttcccgcccctgcaggtgcagcagtaccgcgtcgccatgactgccaaggactgctccatcatgattgcactgtctccctgtctgcaggatgccaggtgaggcccccactgcaaggcatgcagcctgggtctaacggggttttatggacagttggtgaattgttaataggatagttggtttccccatatttagagactccatggcggagtgacataacttccttggcctatgtgacatcatggggcttactaactctcgccctctagaagcttgtaattcagtcaaaagacagatttatggagaataacttaaaaggattgttagtacattgaaagttactgttttctaagaaaatactcccaagagctcagaaacaatgtggacagtgagctgcccattgcattccctcaaagaaagccagcccctgagatgtgtgggtacctgtggcccttgttcctcggtctcccacagtggcagcatggcgcacctgcctttttaccaccacagtcatttgaaagcctgtgaggcgcgcattcattctgcttcctcttctgaataaccagcctatgtgccgcccctctccctaatgtcactagttttgtccagtcccctctgtttctgggaattcgggatgaaactgataatctcatagtcgttagacagcatctccatcaccgatcttcaggggtgctaaaccctgcacccagtatttgcggaatgttccacattcttctaacatgtgttcctgggtcaagatgaccttggttgctggctgccagccactcactttcccggtgcttttgaactaaacagttcccaggattcctgttccctggcaggcacagaattgtttactttccaatatgaaatactgaggaacattatagggctaactgaagtagaaaaaaggttgttctatttagttgaaaactcctgttatcccctaaggaaatacctacagggct

SEQ ID NO: 348412 - DNA, 225 bp, Homo sapiens
accctccccagtgagagttccggccgtgggtcctctagcggagatgtttgtgtgatctgatgcaggaagtgttgttcccgctgggaggtgcaaatgaaaacagcttctggggccatttatgcctaattatcttgctgcactcattatcttgtagtcagtgatatgtctatttagaggtatgtgatttcttcctaaatatttttcctccttatttgtttattttac

SEQ ID NO: 348413 - DNA, 4998 bp, Homo sapiens
agtcgctctaccagtacctaagatggccgccggcccatccaccgtcgcgatcggtgtgaggaaagtgtcacgaacccggaattgcccgactccgtcatggcaggcgccgggggcgtggcttccggcggccacagcttgctagtcgccgcggcggggtcgagcgggggcggcagctgacaggcgctcctcccccgaccgcagcggctggttcccagcgaggcgggcggcccccagctcgcgtccccgagtcctagcccgcgaggcgccagggctgcgcctgggcatggaagaggggaagatggacgagaatgaatgggggtaccacggagagggcaataagagcctggtggtggcccacgcgcagcgctgcgtcgtgctgcggtttctgaagtttcctccaaataggaagaagacctcggaagagatatttcaacacctgcagaacatagtggactttgggaaaaatgtcatgaaggagtttttgggggagaactatgttcattatggggaggtcgttcagctacctttagagtttgtgaaacagctttgtttaaagatacaatctgaaagaccagagtctcgctgtgacaaggacctggatactctcagtggttacgctatgtgccttcctaatttaaccagactccaaacctaccgctttgcagagcaccggccgattctgtgtgtagagattaagccaaaatgtgggtttattcctttctcgagtgatgtcacgcatgagatgaagcataaggtctgtcgatactgcatgcaccagcacctcaaggtagcaactgggaagtggaagcagatcagcaaatactgtccccttgatctctactcaggaaacaaacagagaatgcactttgccttgaagagtttgctgcaggaggcacagaacaacttgaagatatttaagaatggtgagctgatttacggctgcaaagatgcccggagccccgtggctgactggagcgagcttgcacaccacctgaagccgttcttcttcccttccaacggcctggccagtgggccccactgcacaagggctgtgatcagggagctggtgcacgtgatcacacgggtgctgctgagtggctcggacaagggccgggcaggcaccctgagtccggggctcgggcctcagggcccgcgagtctgcgaagccagccctttcagtaggagccttcgctgccaaggaaaaaacaccccagagcgctcggggttaccgaagggctgtcttctgtacaaaaccctccaggtgcagatgttggacctgctggacatcgaaggcctctaccctctgtacaaccgggttgagcgatacctggaagagtttcccgaggagaggtgaggtcgggcggtccccctgttgggcagccctgagaggagactgtgggagtgggcagggtaagaatgcgcctcccaaggcacagcttcccaggaggatgaagcatgccggccacttcctaccccagtcctccgctcccaggtgcccaggcctgctctggaatgtagtgccttgtaaaggaggaacagggtcacttgtttctagaaaagaaagcacgtctgtgaccttgctaattcgaaaccccagcctctgtcctgggctttcactgcgggtcattggggtccacacccgcggtgtccagtcggggccaggatcctcttccttcctcgctggtcttccttgcatctctgacgcaggatgctacttgtcatgaacaggagaaggctcagcttcaaggctcgctggttctggtcttgctgagttctgttaaaaaccttgatgtttaacatgagggagatagatctgttatgtgtttttcaaaacaaaatgtgtgatgtttagtggtgctgggctttgtagactgttagcagtttaagaaacaacctccgtgcggctttgtcatcctgtttttattgtgctttcttcttcagaaaaaccttacaaatagatgggccttatgatgaagcattttaccagaagctgcttgacctttccactgaggatgacgggacagtggccttcgcgctaacgaaggtgcagcagtaccgcgtcgccatgactgccaaggactgctccatcatgattgcactgtctccctgtctgcaggatgccagctctgatcaaaggcctgtcgtcccttcatcgaggtccaggtttgccttttccgtgtctgtgctggaccttgacctcaagccctacgagagcattccccatcagtataaactggacggcaagatcgtcaactattattcaaagactgtacgtgccaaagacaacgccgtgatgtcgactcggttcaaggaaagcgaagattgcacattagttctccacaaggtctaactctttccctgcagtgtctttgaaacttgaacataatgtgaaggctgaatgatagagatattttctgttgtgttgggtgacctttggttgtgaatgtttttgcttttaaccccttttgaggtgggattgcctcttggagacatggaattgaagagcactagaaacaacttcctggacaaggaatgtaggaagtgagtgctgtgtcccaggaagctgctcacactcttaaaatggaagtgtccgttaagccctgggaagacgttctggatagttcttctttcccaaccagggctcatgtctgattctctaatgcgaaaagccttattctaagacccaaggtttggatctgctaccaccagactcctaacatagaaaacttgaattgtcacatacattttacagtttggacttttaagaaaacatggatactactggaacttcccccagctgagttacatggtcactttttcagtgcaagccacatatcaacacaggtttttaggtggttccctgctgcacagcgtgacctcgtggtcgcgcagatgccgattctgagcagtgtagactcagggtccctgtggaggtgctgaagcccacagttccacacagggcagcagggagcgcaaggctcaggtcaggatggacaccactcatgcgagcattgacctttttttttttgctttacaatttaatctttcacatgagggggagatgagctgttctttcccactaaaaattgctgctgtagaagttggaggtggagctgtgactggctgagctgctgtggccgggctgggcagtgtgccccaacagctcagtgctttcctgacactccagtgtctggggtggttgaggagcgagttctctcttcctcccagaccaagttcctccctcgggtttgccttgagacgtgttgcgtttttgggccccgtggcctctccctgttaggctgccacaggccctgcttctggaaggtgaacagctcctggctgctgccgagagggttctcgttggggtcaccaaagtgtgcccggctgctatgaaaaacgttgggaatcttggtttcagttttttattctatgctaggttgtacagacttatttatatcatcgttttgagggactaatggaggcttattgtaacatataatattagtgaaaccatggaattatatgaaaatgatacatgagaaataaggaaactattttgctgattgtaaatttttgtgggaaattttgtgataacttgagaattatacttgtttgaatcaaggcaactcttctagaatttattgttcaattctgtcatatttacttctaattctactctcagaggtgcaaaaagatacttatctaactggacacttttactgttttcttctcacttccaatgacaccgtctcatacacacgggtcctgtgtgctgggatgggggctttggtgaagtgcacggagctcacggacaagccgcaggctctgggaagcgtggaggtagtggccgttgagtactgtcttgacccaagggagttcactgttgctgggctggggctggggcagcctggtttgggatgattttgcccattgtcacggtgtgtggaggatgctgggtcctgggttcaagtgcacatgtgagggaaccccagtccgtgggaaggtgggctgggctccctaggtccttcagggctgcaagagttattgcctagcacagggcccagacagggctggactagacacgatgaaaacagcctgtatttgagggagaagagaaaacagatggagacccccactctgtctggtcttggctcccaccagcccgggctgtgaggagcccctgagccgcgggtgccactgctgtggatgcgtttctggcccgtcttggaaactgctgctgctgcgtagtcatgacggccctgactggtttgagacaacacgcgttcacagatcttaacaatgctaaatgggcgactgatgaggtcacggttcttaaggcacatccgggacgatcgatatagcacttaggctatgcaggggggtctttctttcataaaggacctcattccttgcgtcccagcccaggaacagtgctgtctttgctgtcttaggccattcttgttattaagctgacagcttcactttcttgtggaagaccaagaacagcatgaggacttgctgagactgcctcacggtgccaccatgcggaccggggggaggcagggagtgagggtgtggctcccctgggctactaaggacagtttaaagatgaggcgccataggcatccgtctccagagcccccaggaggcaggaaccaggataagggtggcttctcccagctgagtaatgtggccaccatgtccaaggtggactcggtgtgaggctgcagtgggtgggggatggatcctccccacacatctgaggacacacaaccacttggtacattttctcagatgttaagcttatttttataaaccgcattgtacgtgtcacttttatttggcattttatacttaactagctgtatttatttttcatgtcatgagagtttccatataatgtgccataactgcatagacagcacgtcttcagggtgtggtttctaagcagaaaatagcaaatgtttatattgaataaaattgcatgttcctccacgc

SEQ ID NO: 348414 - DNA, 3904 bp, Homo sapiens
tgtttatttttgtgaaagcgagagctatgccatctaaaacaatgcaaaccatatatgaaagtccaaagaaggaagaggagagagtgcctcacattctgctctgtagaggagacagttgtgagcattgtggtgcctgtccttcacctttctccctgcccgcgtcacacacatgtgcacatgtacagctttacgtatgtcgactctgacagtgtggtgtgtgttgagctgtccctggtcagtatggacagacccacatagcttggagcatgtgttgaagagtgtaaatgtcagagccagcgtaccgggtttgagtccctgccttgccattgacaagcagggcatgacagacaagtgatgtctgtgtctgttgcttgtctgtaaagtgggacgccggccgtgctgccctgttgggctgctgtgagggtggagcaagttaacacatgcacagcctgtagaagggtggccgtctgccgttgtctctggtggctgtatgatgttccggagggaatgtcgttctaagcgatgccttgctgaacaccccctgcgctctccttgcaggtgtcgagtgatactcacttgatactctgagtgtggccaacatgcggggctcaggtggcttactgcttttccttccaaaggccgactgtggtgaccttgctgaagacagatcatccgtctcagggtctggagtcggggtcccacactgcttgccgtgagaggtcagggggcggtgctggcctctgagcagccccgtggcactgagggctggcccaggtgctctcacagggcgacctcctgacgcccgtgctcaccgtggccctcgctcctaatcccaccctcaggttctgaggcaggaagcagttcccacacttggctactgggaaggaaggttgtgtgggggggcagaggcttcctgtgtgacctggagctgatctttcccgcccctgcaggtgcagcagtaccgcgtcgccatgactgccaaggactgctccatcatgattgcactgtctccctgtctgcaggatgccagctctgatcaaaggcctgtcgtcccttcatcgaggtccaggtttgccttttccgtgtctgtgctggaccttgacctcaagccctacgagagcattccccatcagtataaactggacggcaagatcgtcaactattattcaaagactgtacgtgccaaagacaacgccgtgatgtcgactcggttcaaggaaagcgaagattgcacattagttctccacaaggtctaactctttccctgcagtgtctttgaaacttgaacataatgtgaaggctgaatgatagagatattttctgttgtgttgggtgacctttggttgtgaatgtttttgcttttaaccccttttgaggtgggattgcctcttggagacatggaattgaagagcactagaaacaacttcctggacaaggaatgtaggaagtgagtgctgtgtcccaggaagctgctcacactcttaaaatggaagtgtccgttaagccctgggaagacgttctggatagttcttctttcccaaccagggctcatgtctgattctctaatgcgaaaagccttattctaagacccaaggtttggatctgctaccaccagactcctaacatagaaaacttgaattgtcacatacattttacagtttggacttttaagaaaacatggatactactggaacttcccccagctgagttacatggtcactttttcagtgcaagccacatatcaacacaggtttttaggtggttccctgctgcacagcgtgacctcgtggtcgcgcagatgccgattctgagcagtgtagactcagggtccctgtggaggtgctgaagcccacagttccacacagggcagcagggagcgcaaggctcaggtcaggatggacaccactcatgcgagcattgacctttttttttttgctttacaatttaatctttcacatgagggggagatgagctgttctttcccactaaaaattgctgctgtagaagttggaggtggagctgtgactggctgagctgctgtggccgggctgggcagtgtgccccaacagctcagtgctttcctgacactccagtgtctggggtggttgaggagcgagttctctcttcctcccagaccaagttcctccctcgggtttgccttgagacgtgttgcgtttttgggccccgtggcctctccctgttaggctgccacaggccctgcttctggaaggtgaacagctcctggctgctgccgagagggttctcgttggggtcaccaaagtgtgcccggctgctatgaaaaacgttgggaatcttggtttcagttttttattctatgctaggttgtacagacttatttatatcatcgttttgagggactaatggaggcttattgtaacatataatattagtgaaaccatggaattatatgaaaatgatacatgagaaataaggaaactattttgctgattgtaaatttttgtgggaaattttgtgataacttgagaattatacttgtttgaatcaaggcaactcttctagaatttattgttcaattctgtcatatttacttctaattctactctcagaggtgcaaaaagatacttatctaactggacacttttactgttttcttctcacttccaatgacaccgtctcatacacacgggtcctgtgtgctgggatgggggctttggtgaagtgcacggagctcacggacaagccgcaggctctgggaagcgtggaggtagtggccgttgagtactgtcttgacccaagggagttcactgttgctgggctggggctggggcagcctggtttgggatgattttgcccattgtcacggtgtgtggaggatgctgggtcctgggttcaagtgcacatgtgagggaaccccagtccgtgggaaggtgggctgggctccctaggtccttcagggctgcaagagttattgcctagcacagggcccagacagggctggactagacacgatgaaaacagcctgtatttgagggagaagagaaaacagatggagacccccactctgtctggtcttggctcccaccagcccgggctgtgaggagcccctgagccgcgggtgccactgctgtggatgcgtttctggcccgtcttggaaactgctgctgctgcgtagtcatgacggccctgactggtttgagacaacacgcgttcacagatcttaacaatgctaaatgggcgactgatgaggtcacggttcttaaggcacatccgggacgatcgatatagcacttaggctatgcaggggggtctttctttcataaaggacctcattccttgcgtcccagcccaggaacagtgctgtctttgctgtcttaggccattcttgttattaagctgacagcttcactttcttgtggaagaccaagaacagcatgaggacttgctgagactgcctcacggtgccaccatgcggaccggggggaggcagggagtgagggtgtggctcccctgggctactaaggacagtttaaagatgaggcgccataggcatccgtctccagagcccccaggaggcaggaaccaggataagggtggcttctcccagctgagtaatgtggccaccatgtccaaggtggactcggtgtgaggctgcagtgggtgggggatggatcctccccacacatctgaggacacacaaccacttggtacattttctcagatgttaagcttatttttataaaccgcattgtacgtgtcacttttatttggcattttatacttaactagctgtatttatttttcatgtcatgagagtttccatataatgtgccataactgcatagacagcacgtcttcagggtgtggtttctaagcagaaaatagcaaatgtttatattgaataaaattgcatgttcctccacgc

SEQ ID NO: 348415 - DNA, 4163 bp, Homo sapiens
cacgattccacaagcatagcatctgagtgaccctgggttgctcatgaccctggggtgctcgaccaaagccccaccagttgctggaatggtgagctgatttacggctgcaaagatgcccggagccccgtggctgactggagcgagcttgcacaccacctgaagccgttcttcttcccttccaacggcctggccagtgggccccactgcacaagggctgtgatcagggagctggtgcacgtgatcacacgggtgctgctgagtggctcggacaagggccgggcaggcaccctgagtccggggctcgggcctcagggcccgcgagtctgcgaagccagccctttcagtaggagccttcgctgccaaggaaaaaacaccccagagcgctcggggttaccgaagggctgtcttctgtacaaaaccctccaggtgcagatgttggacctgctggacatcgaaggcctctaccctctgtacaaccgggttgagcgatacctggaagagtttcccgaggagaggtgaggtcgggcggtccccctgttgggcagccctgagaggagactgtgggagtgggcagggtaagaatgcgcctcccaaggcacagcttcccaggaggatgaagcatgccggccacttcctaccccagtcctccgctcccaggtgcccaggcctgctctggaatgtagtgccttgtaaaggaggaacagggtcacttgtttctagaaaagaaagcacgtctgtgaccttgctaattcgaaaccccagcctctgtcctgggctttcactgcgggtcattggggtccacacccgcggtgtccagtcggggccaggatcctcttccttcctcgctggtcttccttgcatctctgacgcaggatgctacttgtcatgaacaggagaaggctcagcttcaaggctcgctggttctggtcttgctgagttctgttaaaaaccttgatgtttaacatgagggagatagatctgttatgtgtttttcaaaacaaaatgtgtgatgtttagtggtgctgggctttgtagactgttagcagtttaagaaacaacctccgtgcggctttgtcatcctgtttttattgtgctttcttcttcagaaaaaccttacaaatagatgggccttatgatgaagcattttaccagaagctgcttgacctttccactgaggatgacgggacagtggccttcgcgctaacgaaggtgcagcagtaccgcgtcgccatgactgccaaggactgctccatcatgattgcactgtctccctgtctgcaggatgccagctctgatcaaaggcctgtcgtcccttcatcgaggtccaggtttgccttttccgtgtctgtgctggaccttgacctcaagccctacgagagcattccccatcagtataaactggacggcaagatcgtcaactattattcaaagactgtacgtgccaaagacaacgccgtgatgtcgactcggttcaaggaaagcgaagattgcacattagttctccacaaggtctaactctttccctgcagtgtctttgaaacttgaacataatgtgaaggctgaatgatagagatattttctgttgtgttgggtgacctttggttgtgaatgtttttgcttttaaccccttttgaggtgggattgcctcttggagacatggaattgaagagcactagaaacaacttcctggacaaggaatgtaggaagtgagtgctgtgtcccaggaagctgctcacactcttaaaatggaagtgtccgttaagccctgggaagacgttctggatagttcttctttcccaaccagggctcatgtctgattctctaatgcgaaaagccttattctaagacccaaggtttggatctgctaccaccagactcctaacatagaaaacttgaattgtcacatacattttacagtttggacttttaagaaaacatggatactactggaacttcccccagctgagttacatggtcactttttcagtgcaagccacatatcaacacaggtttttaggtggttccctgctgcacagcgtgacctcgtggtcgcgcagatgccgattctgagcagtgtagactcagggtccctgtggaggtgctgaagcccacagttccacacagggcagcagggagcgcaaggctcaggtcaggatggacaccactcatgcgagcattgacctttttttttttgctttacaatttaatctttcacatgagggggagatgagctgttctttcccactaaaaattgctgctgtagaagttggaggtggagctgtgactggctgagctgctgtggccgggctgggcagtgtgccccaacagctcagtgctttcctgacactccagtgtctggggtggttgaggagcgagttctctcttcctcccagaccaagttcctccctcgggtttgccttgagacgtgttgcgtttttgggccccgtggcctctccctgttaggctgccacaggccctgcttctggaaggtgaacagctcctggctgctgccgagagggttctcgttggggtcaccaaagtgtgcccggctgctatgaaaaacgttgggaatcttggtttcagttttttattctatgctaggttgtacagacttatttatatcatcgttttgagggactaatggaggcttattgtaacatataatattagtgaaaccatggaattatatgaaaatgatacatgagaaataaggaaactattttgctgattgtaaatttttgtgggaaattttgtgataacttgagaattatacttgtttgaatcaaggcaactcttctagaatttattgttcaattctgtcatatttacttctaattctactctcagaggtgcaaaaagatacttatctaactggacacttttactgttttcttctcacttccaatgacaccgtctcatacacacgggtcctgtgtgctgggatgggggctttggtgaagtgcacggagctcacggacaagccgcaggctctgggaagcgtggaggtagtggccgttgagtactgtcttgacccaagggagttcactgttgctgggctggggctggggcagcctggtttgggatgattttgcccattgtcacggtgtgtggaggatgctgggtcctgggttcaagtgcacatgtgagggaaccccagtccgtgggaaggtgggctgggctccctaggtccttcagggctgcaagagttattgcctagcacagggcccagacagggctggactagacacgatgaaaacagcctgtatttgagggagaagagaaaacagatggagacccccactctgtctggtcttggctcccaccagcccgggctgtgaggagcccctgagccgcgggtgccactgctgtggatgcgtttctggcccgtcttggaaactgctgctgctgcgtagtcatgacggccctgactggtttgagacaacacgcgttcacagatcttaacaatgctaaatgggcgactgatgaggtcacggttcttaaggcacatccgggacgatcgatatagcacttaggctatgcaggggggtctttctttcataaaggacctcattccttgcgtcccagcccaggaacagtgctgtctttgctgtcttaggccattcttgttattaagctgacagcttcactttcttgtggaagaccaagaacagcatgaggacttgctgagactgcctcacggtgccaccatgcggaccggggggaggcagggagtgagggtgtggctcccctgggctactaaggacagtttaaagatgaggcgccataggcatccgtctccagagcccccaggaggcaggaaccaggataagggtggcttctcccagctgagtaatgtggccaccatgtccaaggtggactcggtgtgaggctgcagtgggtgggggatggatcctccccacacatctgaggacacacaaccacttggtacattttctcagatgttaagcttatttttataaaccgcattgtacgtgtcacttttatttggcattttatacttaactagctgtatttatttttcatgtcatgagagtttccatataatgtgccataactgcatagacagcacgtcttcagggtgtggtttctaagcagaaaatagcaaatgtttatattgaataaaattgcatgttcctccacgc

SEQ ID NO: 348416 - DNA, 570 bp, Homo sapiens
attatcttgtagtcagtgatatgtctatttagaggtatgtgatttcttcctaaatatttttcctccttatttgtttattttacagccaaaatgtgggtttattcctttctcgagtgatgtcacgcatgagatgaagcataaggtctgtcgatactgcatgcaccagcacctcaaggtgagagccaatgcccagctgtgggctactctagctgcacgctggggatctgggctgaggcatggacacacacagttttcagaagagtaaaagaaaatatggatatttttagttgacattttatttcacaaagtgattcatgttcaacttttttattttttaaatttagagacagggtctctgtcaccctgtcaggctggagtgcagtgatgcaatcatactcactgcagcctccacctcctggactcatgcagtccacctgccttggcctcccaaagtgctggtgtgagccactgcgcccggcccgtgttcaccagattcactcttttaaatatataattcagttttagtctcttcacaaggttgtacaatcaccacttctatctagttgctga

SEQ ID NO: 348417 - DNA, 500 bp, Homo sapiens
actcctgacctcatgatccacctgccttggcctcccaaagtgctgggataacaggtgtgagccacctcacctggcctaaaccacgttgttactgtgtgtgtcccacaatccccagggagacatgaggttttcatcaggtacagagatgccccctggaaccagggacaaggcggggcctgttttgggcagggatcatctcatctctctcactgaccttgctctgtgtgacccttgctctgttttccagagtctcgctgtgacaaggacctggatactctcagtggttacgctatgtgccttcctaatttaaccagactccaaacctaccgctttgcagagcaccggccgattctgtgtgtagagattaaggtgacctgtcgaggggcagatggtgtgggtaaaggggaaaggtcagtcttgggtagtaagtccaagagtcacgtgccttgggttccagttcccactgaagtgagtggtaggcacccttggctcctggaaac

SEQ ID NO: 348418 - DNA, 3541 bp, Homo sapiens
agtcgctctaccagtacctaagatggccgccggcccatccaccgtcgcgatcggtgtgaggaaagtgtcacgaacccggaattgcccgactccgtcatggcaggcgccgggggcgtggcttccggcggccacagcttgctagtcgccgcggcggggtcgagcgggggcggcagctgacaggcgctcctcccccgaccgcagcggctggttcccagcgaggcgggcggcccccagctcgcgtccccgagtcctagcccgcgaggcgccagggctgcgcctgggcatggaagaggggaagatggacgagaatgaatgggggtaccacggagagggcaataagagcctggtggtggcccacgcgcagcgctgcgtcgtgctgcggtttctgaagtttcctccaaataggaagaagacctcggaagagatatttcaacacctgcagaacatagtggactttgggaaaaatgtcatgaaggagtttttgggggagaactatgttcattatggggaggtcgttcagctacctttagagtttgtgaaacagctttgtttaaagatacaatctgaaagaccagagtctcgctgtgacaaggacctggatactctcagtggttacgctatgtgccttcctaatttaaccagactccaaacctaccgctttgcagagcaccggccgattctgtgtgtagagattaagccaaaatgtgggtttattcctttctcgagtgatgtcacgcatgagatgaagcataaggtctgtcgatactgcatgcaccagcacctcaaggtagcaactgggaagtggaagcagatcagcaaatactgtccccttgatctctactcaggaaacaaacagagaatgcactttgccttgaagagtttgctgcaggaggcacagaacaacttgaagatatttaagaatggtgagctgatttacggctgcaaagatgcccggagccccgtggctgactggagcgagcttgcacaccacctgaagccgttcttcttcccttccaacggcctggccagtgggccccactgcacaagggctgtgatcagggagctggtgcacgtgatcacacgggtgctgctgagtggctcggacaagggccgggcaggcaccctgagtccggggctcgggcctcagggcccgcgagtctgcgaagccagccctttcagtaggagccttcgctgccaaggaaaaaacaccccagagcgctcggggttaccgaagggctgtcttctgtacaaaaccctccaggtgcagatgttggacctgctggacatcgaaggcctctaccctctgtacaaccgggttgagcgatacctggaagagtttcccgaggagagaaaaaccttacaaatagatgggccttatgatgaagcattttaccagaagctgcttgacctttccactgaggatgacgggacagtggccttcgcgctaacgaaggtgcagcagtaccgcgtcgccatgactgccaaggactgctccatcatgattgcactgtctccctgtctgcaggatgccagctctgatcaaaggcctgtcgtcccttcatcgaggtccaggtttgccttttccgtgtctgtgctggaccttgacctcaagccctacgagagcattccccatcagtataaactggacggcaagatcgtcaactattattcaaagactgtacgtgccaaagacaacgccgtgatgtcgactcggttcaaggaaagcgaagattgcacattagttctccacaaggtctaactctttccctgcagtgtctttgaaacttgaacataatgtgaaggctgaatgatagagatattttctgttgtgttgggtgacctttggttgtgaatgtttttgcttttaaccccttttgaggtgggattgcctcttggagacatggaattgaagagcactagaaacaacttcctggacaaggaatgtaggaagtgagtgctgtgtcccaggaagctgctcacactcttaaaatggaagtgtccgttaagccctgggaagacgttctggatagttcttctttcccaaccagggctcatgtctgattctctaatgcgaaaagccttattctaagacccaaggtttggatctgctaccaccagactcctaacatagaaaacttgaattgtcacatacattttacagtttggacttttaagaaaacatggatactactggaacttcccccagctgagttacatggtcactttttcagtgcaagccacatatcaacacaggtttttaggtggttccctgctgcacagcgtgacctcgtggtcgcgcagatgccgattctgagcagtgtagactcagggtccctgtggaggtgctgaagcccacagttccacacagggcagcagggagcgcaaggctcaggtcaggatggacaccactcatgcgagcattgacctttttttttttgctttacaatttaatctttcacatgagggggagatgagctgttctttcccactaaaaattgctgctgtagaagttggaggtggagctgtgactggctgagctgctgtggccgggctgggcagtgtgccccaacagctcagtgctttcctgacactccagtgtctggggtggttgaggagcgagttctctcttcctcccagaccaagttcctccctcgggtttgccttgagacgtgttgcgtttttgggccccgtggcctctccctgttaggctgccacaggccctgcttctggaaggtgaacagctcctggctgctgccgagagggttctcgttggggtcaccaaagtgtgcccggctgctatgaaaaacgttgggaatcttggtttcagttttttattctatgctaggttgtacagacttatttatatcatcgttttgagggactaatggaggcttattgtaacatataatattagtgaaaccatggaattatatgaaaatgatacatgagaaataaggaaactattttgctgattgtaaatttttgtgggaaattttgtgataacttgagaattatacttgtttgaatcaaaaaaaaaaaaaaaaaaaaaaaaaaaaaaaaaaaaaaaaaaaaaaaaaaaaaaaaaaaaaaaaaaaaaaaaaaaacaaaagaagaagaagggggggggcgcggcctggaaagaatcatccacccggcgggaggagccccacacttgtacggagccaccaccgccgttttgttgaagaaggagggggggcgccccactcatgagaggagcgtcgtatttatcaaggcagcaggagcgggggggcgccgagcgtattaaaaagaacggtcggcagcgggagaaacaagaactagttggtacttggacaatctactttgtggggaaggagcagcacactctagaggggggggggagaaacattgttgagacaaaaccctccccagaagagttttcttgcccccgtgagggctatattaacctttggagggtctgtttgtgtggtaacccccgcgatagtatccgtgccgagaaaaattctcgccgccgaagtatgtgttaagaaaatatcaggga

SEQ ID NO: 348419 - DNA, 2994 bp, Homo sapiens
agtcgctctaccagtacctaagatggccgccggcccatccaccgtcgcgatcggtgtgaggaaagtgtcacgaacccggaattgcccgactccgtcatggcaggcgccgggggcgtggcttccggcggccacagcttgctagtcgccgcggcggggtcgagcgggggcggcagctgacaggcgctcctcccccgaccgcagcggctggttcccagcgaggcgggcggcccccagctcgcgtccccgagtcctagcccgcgaggcgccagggctgcgcctgggcatggaagaggggaagatggacgagaatgaatgggggtaccacggagagggcaataagagcctggtggtggcccacgcgcagcgctgcgtcgtgctgcggtttctgaagtttcctccaaataggaagaagacctcggaagagatatttcaacacctgcagaacatagtggactttgggaaaaatgtcatgaaggagtttttgggggagaactatgttcattatggggaggtcgttcagctacctttagagtttgtgaaacagctttgtttaaagatacaatctgaaagaccagagtctcgctgtgacaaggacctggatactctcagtggttacgctatgtgccttcctaatttaaccagactccaaacctaccgctttgcagagcaccggccgattctgtgtgtagagattaagccaaaatgtgggtttattcctttctcgagtgatgtcacgcatgagatgaagcataaggtctgtcgatactgcatgcaccagcacctcaaggtagcaactgggaagtggaagcagatcagcaaatactgtccccttgatctctactcaggaaacaaacagagaatgcactttgccttgaagagtttgctgcaggaggcacagaacaacttgaagatatttaagaatggtgagctgatttacggctgcaaagatgcccggagccccgtggctgactggagcgagcttgcacaccacctgaagccgttcttcttcccttccaacggcctggccagtgggccccactgcacaagggctgtgatcagggagctggtgcacgtgatcacacgggtgctgctgagtggctcggacaagggccgggcaggcaccctgagtccggggctcgggcctcagggcccgcgagtctgcgaagccagccctttcagtaggagccttcgctgccaaggaaaaaacaccccagagcgctcggggttaccgaagggctgtcttctgtacaaaaccctccaggtgcagatgttggacctgctggacatcgaaggcctctaccctctgtacaaccgggttgagcgatacctggaagagtttcccgaggagaggtgaggtcgggcggtccccctgttgggcagccctgagaggagactgtgggagtgggcagggtaagaatgcgcctcccaaggcacagcttcccaggaggatgaagcatgccggccacttcctaccccagtcctccgctcccaggtgcccaggcctgctctggaatgtagtgccttgtaaaggaggaacagggtcacttgtttctagaaaagaaagcacgtctgtgaccttgctaattcgaaaccccagcctctgtcctgggctttcactgcgggtcattggggtccacacccgcggtgtccagtcggggccaggatcctcttccttcctcgctggtcttccttgcatctctgacgcaggatgctacttgtcatgaacaggagaaggctcagcttcaaggctcgctggttctggtcttgctgagttctgttaaaaaccttgatgtttaacatgagggagatagatctgttatgtgtttttcaaaacaaaatgtgtgatgtttagtggtgctgggctttgtagactgttagcagtttaagaaacaacctccgtgcggctttgtcatcctgtttttattgtgctttcttcttcagaaaaaccttacaaatagatgggccttatgatgaagcattttaccagaagctgcttgacctttccactgaggatgacgggacagtggccttcgcgctaacgaaggtgcagcagtaccgcgtcgccatgactgccaaggactgctccatcatgattgcactgtctccctgtctgcaggatgccaggtgaggcccccactgcaaggcatgcagcctgggtctaacggggttttatggacagttggtgaattgttaataggatagttggtttccccatatttagagactccatggcggagtgacataacttccttggcctatgtgacatcatggggcttactaactctcgccctctagaagcttgtaattcagtcaaaagacagatttatggagaataacttaaaaggattgttagtacattgaaagttactgttttctaagaaaatactcccaagagctcagaaacaatgtggacagtgagctgcccattgcattccctcaaagaaagccagcccctgagatgtgtgggtacctgtggcccttgttcctcggtctcccacagtggcagcatggcgcacctgcctttttaccaccacagtcatttgaaagcctgtgaggcgcgcattcattctgcttcctcttctgaataaccagcctatgtgccgcccctctccctaatgtcactagttttgtccagtcccctctgtttctgggaattcgggatgaaactgataatctcatagtcgttagacagcatctccatcaccgatcttcaggggtgctaaaccctgcacccagtatttgcggaatgttccacattcttctaacatgtgttcctgggtcaagatgaccttggttgctggctgccagccactcactttcccggtgcttttgaactaaacagttcccaggattcctgttccctggcaggcacagaattgtttactttccaatatgaaatactgaggaacattatagggctaactgaagtagaaaaaaggttgttctatttagttgaaaactcctgttatcccctaaggaaatacctacagggct

SEQ ID NO: 348420 - DNA, 791 bp, Homo sapiens
aagcaatttatttacttatttaaaggctctgtcaggtattgcctaaggtaaaagtctgtattgtaagacagaaaacctctgcccaggacttcagtagctcagagagggaaaggcttgatatgtgtctgaaaagacaagttttagacagcaagaaaaaagagatccttcccatttcaactccttaccctcctctacccccaatgaaaacagaccttccttcgccttatccacaggctcctccaccaagccaaggccaggactcctgcaatcataggatggcaacaccacctctaaagcacagaacttcaggctttgcttcggaagtggcaccatggtctcttcattttccctttcttcaaggtcagaaaactgaagctgttaggagttttagtgttaagttccttccgaggatgttaattaggcttcaaactgttttgttctgagaaataaaaactaaactccagtcattcaagctaacagttgaggtgttctatggcttcaaaatcaagtaagatttgtaaatgaattgctaggtgcaaccattacttattatatgccacacaaacagtggagaaaattatggacaccaccatccaagtgattgagattattaattttaggtagcaggccaattcagacatgtccacttatcctcaatggcagggggcctctcacatcccctccctgtaacccagttcaatacttctgtctaaagtctagaatttcaatgttgaaaggagagcgtggttagtgagagaaaatccacaaagtttatcctgatgatcctttct

SEQ ID NO: 348421 - DNA, 994 bp, Homo sapiens
gagaaattcagaacctcaggcctaaacccaggcctactaaatcaggatctgcagtttctcacaatcttcaggtgatttctatggtcattaaagtttgaaaagctgcctcgaaacagtccttcctaaaactgaagtggaggtgccacaaaaatcatctggtaaattgtttaaagtaatcccaaatgcaactcaaatctacagaatcccaggtgaagctcagtaatctgtatttttatccttctccccaaataattctgatgtgcaggcaagtttgaaaaccactgctttaaagaaaatggatactccccttaccaagcagaaagtaggattttggaaactgatgcaagggaagcaaaaaagatgcctcaggaggcacgattacaacaggattgatgcaaacggaagctgaagcttaaccaaagacattaatatacgcccacaaaagaaaatgctaaggaagtcaagtggtctgcatgaattctgaagaaaaatggagaaccaaagaacaaaatttgtcaatgaacttccagcacagtctaggttaagggagtgaatttcttgactgaatggcacagactctgtaccacctgattggctgttaccttaatggaggaattatattacaatgtataggtactttaattagaatgacctggcagttactgaggcaaaattttccgctcctttgtattctgtaatacaagaaggatctacatggatgttctgttctctgaactgtctggatgaaccggtcaacggcactcatcataccttagtttttaaatctgcattgtggtcataatctgttatttaattaatttctcgtatttttaataaaaactttgcctatatatttagacagaaattgccttactttgctgaaatgctgagaaatcctagacagttttcaaggctgggctcaaatgtcacctctactaccctttgctgtgcctcctggcactgtgcttctgacactttgtacggtcctccatga

SEQ ID NO: 348422 - DNA, 2843 bp, Homo sapiens
ggcacgagggtaaggggccgtggagctggcctcggcctcggcatcgggagaggctggacttcctgtctctctgtgctgaatggctgcgatggcgcccgctctcactgacgcagcagctgaagcacaccatatccggttcaaactggctcccccatcctctaccttgtcccctggcagtgccgaaaataacggcaacgccaacatccttattgctgccaacggaaccaaaagaaaagccattgctgcagaggatcccagcctagatttccgaaataatcctaccaaggaagacttgggaaagctgcaaccactggtggcatcttatctctgctctgatgtaacatctgttccctcaaaggagtctttgaagttgcaaggggtcttcagcaagcagacagtccttaaatctcatcctctcttatctcagtcctatgaactccgagctgagctgttggggagacagccagttttggagttttccttagaaaatcttagaaccatgaatacgagtggtcagacagctctgccacaagcacctgtaaatgggttggctaagaaattgactaaaagttcaacacattctgatcatgacaattccacttccctcaatgggggaaaacgggctctcacttcatctgctcttcatgggggtgaaatgggaggatctgaatctggggacttgaaggggggtatgaccaattgcactcttccacatagaagccttgatgtagaacacacaactttgtatagcaataatagcactgcaaacaaatcctctgtcaattccatggaacagccggcacttcaaggaagcagtagattatcacctggtacagactccagctctaacttggggggtgtcaaattggagggtaaaaagtctcccctgtcttccattcttttcagtgctttagattctgacacaaggataacagctttactgcggcgacaggctgacattgagagccgtgcccgcagattacaaaagcgcttacaggttgtgcaagccaagcaggttgagaggcatatacaacatcagctgggtggatttttggagaagactttgagcaaactgccaaacttggaatccttgagaccacggagccagttgatgctgactcgaaaggctgaagctgccttgagaaaagctgccagtgagaccaccacttcagagggacttagcaactttctgaaaagcaattcaatttcagaagaattggagagatttacagctagtggcatagccaacttgaggtgcagtgaacaggcatttgattcagatgtcactgacagtagttcaggaggggagtctgatattgaagaggaagaactgaccagagctgatcccgagcagcgtcatgtacccctgagacgcaggtcagaatggaaatgggctgcagaccgggcagctattgtcagccgctggaactggcttcaggctcatgtttctgacttggaatatcgaattcgtcagcaaacagacatttacaaacagatacgtgctaataaggtttctgtgtggagacagtagaatataaaaataacaccttcgctgtctgggatgttggcagccacttcaaaatcagacctctgtggcagcattttttccagaacacaaaaggtgccagaagcccaggaagcacacatcaaggctcacttgccagcggggtgctgccaataaaatgtagtcacgtggaatttggaatgtggaaaggaggtagaagtcatcctttcctcccccatagcagcaggtgtgcaggctctggtggtcagctggactccatactcccccaccagtcaccagcctggggaccgtggggctgcaaggacctcagcagcggtttcccaagtttcctgacttcttccatcctctggaaatcagctgtggttcgtgagccacacatctccccacaccaagctcctccatacaagacctcggactgcatcacgtaaatgctttttcaggggcaaaatctagagaatctgaaatgagctatcagcttcccagtttgcacaattcatcaagaaattatgcggggtcaccggcacaaatgatgaggcatctcctggaagcttaacttcttatccatcccatctcttggacagatgatgccagttaattactttgaatgctcctccaccaagccaaggccaggactcctgcaatcataggatggcaacaccacctctaaagcacagaacttcaggctttgcttcggaagtggcaccatggtctcttcattttccctttcttcaaggcaagtttgaaaaccactgctttaaagaaaatggatactccccttaccaagcagaaagtaggattttggaaactgatgcaagggaagcaaaaaagatgcctcaggaggcacgattacaacaggattgatgcaaacggaagctgaagcttaaccaaagacattaatatacgcccacaaaagaaaatgctaaggaagtcaagtggtctgcatgaattctgaagaaaaatggagaaccaaagaacaaaatttgtcaatgaacttccagcacagtctaggttaagggagtgaatttcttgactgaatggcacagactctgtaccacctgattggctgttaccttaatggaggaattatattacaatgtataggtactttaattagaatgacctggcagttactgaggcaaaattttccgctcctttgtattctgtaatacaagaaggatctacatggatgttctgttctctgaactgtctggatgaaccggtcaacggcactcatcataccttagtttttaaatctgcattgtggtcataatctgttatttaattaatttctcgtatttttaataaaaactttgcctat

SEQ ID NO: 348423 - DNA, 1574 bp, Homo sapiens
ttcaccatgatagagggcgtcttgcattggttcacaatggcctgttgctttttagccttcagttggtttagggggaaattgctcaacctatgagacctgctcaaattcatactgttctggttttgctttggaattctttgtccagtaaattagctcttcatacaaatcccatgagtgcatggagaggaagtggggagagctgaagatgctagcattaagatgctagagaaacacgagacaattgatggagcaagatatctaaggaagtagaatattaagagtgagatagtgttgaaacactgaccttgggaagaaagaagaatgccgcttccattaagactgaaagagaggaggaagaggtggatattgtggaagtagagaggaagctcataccagacgacttggatcatctcagtcaagaaggggcaacagaagaatcttgggccaggacaaagcataggagggtgaagtggaaggtagcggtaccttgagtggcaacagaattcgattaaattacaatgggaaacatttttgaaaagctctttaaaagtctacttgggaaaaaaaagatgcggattcttatattgagtttggatacagctggaaaaaccaccatcttgtataaattgaagctgggggagactgtgcctgccgtccctacagtaggtttctgtgtggagacagtagaatataaaaataacaccttcgctgtctgggatgttggcagccacttcaaaatcagacctctgtggcagcattttttccagaacacaaaaggtgccagaagcccaggaagcacacatcaaggctcacttgccagcggggtgctgccaataaaatgtagtcacgtggaatttggaatgtggaaaggaggtagaagtcatcctttcctcccccatagcagcaggtgtgcaggctctggtggtcagctggactccatactcccccaccagtcaccagcctggggaccgtggggctgcaaggacctcagcagcggtttcccaagtttcctgacttcttccatcctctggaaatcagctgtgagctatcagcttcccagtttgcacaattcatcaagaaattatgcggggtcaccggcacaaatgatgaggcatctcctggaagcttaacttcttatccatcccatctcttggacagatgatgccagttaattactttgaatgtaagtattttatctaaaagcacttatgtgtctaaacagacttctacaaatcagtaccaaaatggtaaataattccacagaaatatgggcaaaagcttatcattatcaacaaatgagaagaaagaaaccctatgccaggtaacaccaaagctttggcccagtgccctctgttgaaacatcctaggctttttctttccactcctattacaactgatctgatttggccccttcacacctcactcctagattttgctagacctttctattttgtctccctgaattaagcttttccttttggacactttacatatggattctaaaacaatcctctgcatgtctacacttgcacataatgcaaaaaacaaaataaaataatcttcctgttttgatc

SEQ ID NO: 348424 - DNA, 716 bp, Homo sapiens
ggcactattaacttggcccggcccacatgtcccctcccggttggtgtgaacgctccgaggttagctcaaacctcggcgattttcccagctgattggccgtgcaaatagacaatccttttgcttttctgattggtcgcacatggcatcgggggtgggggacgtgggcgtgtctcgccagaattcgtttaactgtgatttgaagatgaacatggtattgccagagcttcatggcgtcgcctacggcgctccctccctcccaggcccttactcttctttgcattggccagatatgtcgtcactcacaaaacttcgagctcattggtgcaaaagctccaggaggcggtgggtgattggttggttgctgttcctgcccccacgcctgtcgtggtttagctgaactgagctgaaatcctaaaggccgcggagtcggcggtgttgtaggtagcggtaccttgagtggcaacaggtgagtctccggctgcagggatggggcggcagcactcaagacctggctggatctccacttcgtctgcgggccagaaactggagggcggcggtggctttcggaaagggattgggctccgctgttccttcttcgccctctgtagggccggagcagcgaggaaccgaaggaggcttcataggttccacgcagggccctctctttgctcttccaggggcgcacaagttgagaaggagcggcctggcagccgggg

SEQ ID NO: 348425 - DNA, 747 bp, Homo sapiens
gcctgcagaccgctcagctttcattccagtgaaaacattccagaaaaaactctgaatcaatcccaggtgtttctccaatcagctcaggatgattgtgtgttacctgctgcccagccagtgacacctctccaggcctctgacttagctaggtctccaccatgtgactccaccatagactccccaccttcttcttttgcaaagcctcagacacccaaacacctaccaaaagtgggtagggcaccaggacactccaagtgtaagtggggctctccagcacacctggatgtggaggtgtgatgcagagtggtggctgctcgtgacactcatttcacccctttctgtgcaggtcctatggactggacagttgggtaggaaccagaaggccaataggaaggaggacaaaagtgcccaactgaagggtaagcatggcagtgagtatggtatgcctagaataaagatggttgggattagaattgggtgacagtgattagtagtttcagaagtatctcttcccaattcaaaagtctcactttgggctgaaagtacagaggaagaaggtagacttttaagaagtctgaataagcccccaacttctggagtccctttctcaattcctgttgggagtgggaaatattataaattactctgggcattaaaaatagcttagtttaacctggattgcggagttaaaaaataacaaagactgcattggtcaaatctggacaatttgagcattcaaaagaataa

SEQ ID NO: 348426 - DNA, 516 bp, Homo sapiens
gcggccgcctactactactactgctcgaattcaagcttctaacgatgtacggggacatggtctcttcattttccctttcttcaaggtcagaaaactgaagctgttaggagttttagtgttaagttccttccgaggatgttaattaggcttcaaactgttttgttctgagaaataaaaactaaactccagtcattcaagctaacagttgaggtgttctatggcttcaaaatcaagtaagatttgtaaatgaattgctaggtgcaaccattacttattatatgccacacaaacagtggagaaaattatggacaccaccatccaagtgattgagattattaattttaggtagcaggccaattcagacatgtccacttatcctcaatggcagggggcctctcacatcccctccctgtaacccagttcaatacttctgtctaaagtctagaatttcaatgttgaaaggagagcgtggttagtgagagaaaatccacaaagtttatcctgatgatcctttct

SEQ ID NO: 348427 - DNA, 251 bp, Homo sapiens
gcggccgcctactactactactgctcgaattcaagcttctaacgatgtacggggacatgttggtcaggctggtcacgagctcctaacctcaagtgatcccaaagtgctgtgattacaggcgtgagccatcctgcctggcctttctggttaaaattctgtgaggtttgcataaaaggaatagagtaggggcccaaaaaccagtaagatgagaaaatagtgtttcctcagttctaggatccaggggaaaaaaa

SEQ ID NO: 348428 - DNA, 3754 bp, Homo sapiens
  misc_feature (1637)..(1637): n is a, c, g, or t
  misc_feature (1917)..(1917): n is a, c, g, or t
  misc_feature (2049)..(2049): n is a, c, g, or t
  misc_feature (2075)..(2075): n is a, c, g, or t
  misc_feature (3184)..(3184): n is a, c, g, or t
  misc_feature (3301)..(3301): n is a, c, g, or t
  misc_feature (3461)..(3461): n is a, c, g, or t
  misc_feature (3488)..(3488): n is a, c, g, or t
ggcactattaacttggcccggcccacatgtcccctcccggttggtgtgaacgctccgaggttagctcaaacctcggcgattttcccagctgattggccgtgcaaatagacaatccttttgcttttctgattggtcgcacatggcatcgggggtgggggacgtgggcgtgtctcgccagaattcgtttaactgtgatttgaagatgaacatggtattgccagagcttcatggcgtcgcctacggcgctccctccctcccaggcccttactcttctttgcattggccagatatgtcgtcactcacaaaacttcgagctcattggtgcaaaagctccaggaggcggtgggtgattggttggttgctgttcctgcccccacgcctgtcgtggtttagctgaactgagctgaaatcctaaaggccgcggagtcggcggtgttgtaggtagcggtaccttgagtggcaacagaattcgattaaattacaatgggaaacatttttgaaaagctctttaaaagtctacttgggaaaaaaaagatgcggattcttatattgagtttggatacagctggaaaaaccaccatcttgtataaattgaagctgggggagactgtgcctgccgtccctacagtaggtttctgtgtggagacagtagaatataaaaataacaccttcgctgtctgggatgttggcagccacttcaaaatcagacctctgtggcagcattttttccagaacacaaaaggtgccagaagcccaggaagcacacatcaaggctcacttgccagcggggtgctgccaataaaatgtagtcacgtggaatttggaatgtggaaaggaggtagaagtcatcctttcctcccccatagcagcaggtgtgcaggctctggtggtcagctggactccatactcccccaccagtcaccagcctggggaccgtggggctgcaaggacctcagcagcggtttcccaagtttcctgacttcttccatcctctggaaatcagctgtgcaatgaatcctccaatgtacctgactctcccttcgcgaagagcatcccctccatggcagaaatctgaaaatgcccctggggagacacatgcacaagacagttcgtgagccacacatctccccacaccaagctcctccatacaagacctcggactgcatcacgtaaatgctttttcaggggcaaaatctagagaatctgaaatggtgagcctttttcctttttttttttttttttgagatgaagtctcactctgttgcccaggctggagtgcagtgcagtggtgtgatcttggctcactgcaaactccacctcctggagtcaagtgattctcctgcctcagccttcagagtagctgggatcatagatgcccgtccccatgcctggttaatttttgtatttttagtagagacagggtttcaccatgttggccaggctggtctcgaacttctgagctcaagtgatccacccaccttggcctcccaaagtgctgagattacagcatgagacaccatgcccagctgtgagcctgtatcttaatcaaagtcctgagaataaccttgaagaagactcccttgcaatgagcaacaacagaagaagcaagggacctggaatctggcagacctgggttngaattctggctctgtcactttctggtgaagtgacttgagtaatgaacatgagcctttctgggtagcgtttacagcacaaagcaatttgaggaataaatgaaagagcacgtgtctagtgcctagcaatgcgctggacacagtgccggtgctcagccatcatgtcacaccagcactgaccggtgagcataaaccctggggatgcccagagctggtacagccaggagctccagaagcgtgggattctcagagggaagtggagctcactgctctacaggtcctnttcaagttagaaagtaagatacaatgcacacaaagccaaattgtcatcattcagctcctattacaggggaactaagagctgcattgaaaattatttgcaaagcttgtaagtggttctgccacttattagccntgtgaaccttagcaaattacctagcntctctgagtttcaacttcctcatctacaaaatagaaatgataataataaccgcatcgcaagagttgttggaaaaatgaaaatgaggtatcataggaggtaacatgtatggagcatttaccataggccaagcactgttctaagaacttcggacatgttatctcacttgtataagtacttaggtgcctacaacataaacagcacctggtaaattaagtattgaaaaaatgctatggggcagaggaagaaatgctaagcttctgtgagaagagaagacagcttgttacacaggtgaaaagaacaagctgcagctgagagaagaaaagtataagagttgctaggtgtgacaatctcaagacttttcaaccactacaaatttaaacagccaccctaaatcaccccaaaggacagactcgagttgttctttttgtctttaatgtttgcgcctctccgaatcagagaagaagctgccaggattccagtacataccaaaacatgatgacaataccctcaactgtgcaaacttttgtgcatctaccgctatgtaaaggaagctgatgtcagtagactggggggaacagtaaggcatgtttgtgaccgaagctcaatttgccatcacagtgtggccacacctacctcactaatattctaatagtgggataaataattcaatagggataaagcctggattttcctcttattctctcttagtgcttacattcttggcatgatatcgatgtgccatagacaagccaatatgtgagtgtactctatctgaataaagtatagcctttctacattgcaaagtcatccagtttctaaaattattgttagaaccaatgaagtgactaagagaattttaaaaaataagccatcagtctggacctgtgtataggaatgaaggagaagcactttaaagtcagggaaaaaatataaacatacttaacatttaggattatcaaccattgctgcttttccataaaccatttcattcatgatttcatctgtaagagatatgattattgcccccattcagtgagggactttgatagttagccgcctggtccttcttgcttggatgccctgcaaataaatgtcctcctttccccantgcaaaacctcgatatggttgtttgactttactgcgcttgggccagcagaatccagttaagtccactaataagctcttggcctgtctttgagatggatttcagattcaaaatagacngaccctatcaccctgctaacttggccagtcagtatttgtcaataacatagaggcttcattcaagagatttactgggttgtaactattggaacccagggatgatttcaggattttgtggggcctgagccttatctagtaaaaacattaaaaaaattatgantacaaaaatttccaggggccctcccangaccttggaagggcctgtgcaagtgagaagcctggaaggttaggctctattcatcatcgatcaaccacagctggggcctctttttttgtttgttttttataaacttgtgtaatgcagggaaatatattgtttcaacttacaaacaccacaaaatggtgtcatattggtcataaaattactggcaccttcccttggcatcttgcctttggaaggaaatgcagtgggcctatatgtcacatatgccaaatatgactgcagtgtagctt

SEQ ID NO: 348429 - DNA, 3360 bp, Homo sapiens
  misc_feature (1243)..(1243): n is a, c, g, or t
  misc_feature (1523)..(1523): n is a, c, g, or t
  misc_feature (1655)..(1655): n is a, c, g, or t
  misc_feature (1681)..(1681): n is a, c, g, or t
  misc_feature (2790)..(2790): n is a, c, g, or t
  misc_feature (2907)..(2907): n is a, c, g, or t
  misc_feature (3067)..(3067): n is a, c, g, or t
  misc_feature (3094)..(3094): n is a, c, g, or t
gcctgcagaccgctcagctttcattccagtgaaaacattccagaaaaaactctgaatcaatcccaggtgtttctccaatcagctcaggatgattgtgtgttacctgctgcccagccagtgacacctctccaggcctctgacttagctaggtctccaccatgtgactccaccatagactccccaccttcttcttttgcaaagcctcagacacccaaacacctaccaaaagtgggtagggcaccaggacactccaagtgtaagtggggctctccagcacacctggatgtggaggtgtgatgcagagtggtggctgctcgtgacactcatttcacccctttctgtgcaggtgtgccagaagcccaggaagcacacatcaaggctcacttgccagcggggtgctgccaataaaatgtagtcacgtggaatttggaatgtggaaaggaggtagaagtcatcctttcctcccccatagcagcaggtgtgcaggctctggtggtcagctggactccatactcccccaccagtcaccagcctggggaccgtggggctgcaaggacctcagcagcggtttcccaagtttcctgacttcttccatcctctggaaatcagctgtgcaatgaatcctccaatgtacctgactctcccttcgcgaagagcatcccctccatggcagaaatctgaaaatgcccctggggagacacatgcacaagacagttcgtgagccacacatctccccacaccaagctcctccatacaagacctcggactgcatcacgtaaatgctttttcaggggcaaaatctagagaatctgaaatggtgagcctttttcctttttttttttttttttgagatgaagtctcactctgttgcccaggctggagtgcagtgcagtggtgtgatcttggctcactgcaaactccacctcctggagtcaagtgattctcctgcctcagccttcagagtagctgggatcatagatgcccgtccccatgcctggttaatttttgtatttttagtagagacagggtttcaccatgttggccaggctggtctcgaacttctgagctcaagtgatccacccaccttggcctcccaaagtgctgagattacagcatgagacaccatgcccagctgtgagcctgtatcttaatcaaagtcctgagaataaccttgaagaagactcccttgcaatgagcaacaacagaagaagcaagggacctggaatctggcagacctgggttngaattctggctctgtcactttctggtgaagtgacttgagtaatgaacatgagcctttctgggtagcgtttacagcacaaagcaatttgaggaataaatgaaagagcacgtgtctagtgcctagcaatgcgctggacacagtgccggtgctcagccatcatgtcacaccagcactgaccggtgagcataaaccctggggatgcccagagctggtacagccaggagctccagaagcgtgggattctcagagggaagtggagctcactgctctacaggtcctnttcaagttagaaagtaagatacaatgcacacaaagccaaattgtcatcattcagctcctattacaggggaactaagagctgcattgaaaattatttgcaaagcttgtaagtggttctgccacttattagccntgtgaaccttagcaaattacctagcntctctgagtttcaacttcctcatctacaaaatagaaatgataataataaccgcatcgcaagagttgttggaaaaatgaaaatgaggtatcataggaggtaacatgtatggagcatttaccataggccaagcactgttctaagaacttcggacatgttatctcacttgtataagtacttaggtgcctacaacataaacagcacctggtaaattaagtattgaaaaaatgctatggggcagaggaagaaatgctaagcttctgtgagaagagaagacagcttgttacacaggtgaaaagaacaagctgcagctgagagaagaaaagtataagagttgctaggtgtgacaatctcaagacttttcaaccactacaaatttaaacagccaccctaaatcaccccaaaggacagactcgagttgttctttttgtctttaatgtttgcgcctctccgaatcagagaagaagctgccaggattccagtacataccaaaacatgatgacaataccctcaactgtgcaaacttttgtgcatctaccgctatgtaaaggaagctgatgtcagtagactggggggaacagtaaggcatgtttgtgaccgaagctcaatttgccatcacagtgtggccacacctacctcactaatattctaatagtgggataaataattcaatagggataaagcctggattttcctcttattctctcttagtgcttacattcttggcatgatatcgatgtgccatagacaagccaatatgtgagtgtactctatctgaataaagtatagcctttctacattgcaaagtcatccagtttctaaaattattgttagaaccaatgaagtgactaagagaattttaaaaaataagccatcagtctggacctgtgtataggaatgaaggagaagcactttaaagtcagggaaaaaatataaacatacttaacatttaggattatcaaccattgctgcttttccataaaccatttcattcatgatttcatctgtaagagatatgattattgcccccattcagtgagggactttgatagttagccgcctggtccttcttgcttggatgccctgcaaataaatgtcctcctttccccantgcaaaacctcgatatggttgtttgactttactgcgcttgggccagcagaatccagttaagtccactaataagctcttggcctgtctttgagatggatttcagattcaaaatagacngaccctatcaccctgctaacttggccagtcagtatttgtcaataacatagaggcttcattcaagagatttactgggttgtaactattggaacccagggatgatttcaggattttgtggggcctgagccttatctagtaaaaacattaaaaaaattatgantacaaaaatttccaggggccctcccangaccttggaagggcctgtgcaagtgagaagcctggaaggttaggctctattcatcatcgatcaaccacagctggggcctctttttttgtttgttttttataaacttgtgtaatgcagggaaatatattgtttcaacttacaaacaccacaaaatggtgtcatattggtcataaaattactggcaccttcccttggcatcttgcctttggaaggaaatgcagtgggcctatatgtcacatatgccaaatatgactgcagtgtagctt

SEQ ID NO: 348430 - DNA, 2081 bp, Homo sapiens
ggcactattaacttggcccggcccacatgtcccctcccggttggtgtgaacgctccgaggttagctcaaacctcggcgattttcccagctgattggccgtgcaaatagacaatccttttgcttttctgattggtcgcacatggcatcgggggtgggggacgtgggcgtgtctcgccagaattcgtttaactgtgatttgaagatgaacatggtattgccagagcttcatggcgtcgcctacggcgctccctccctcccaggcccttactcttctttgcattggccagatatgtcgtcactcacaaaacttcgagctcattggtgcaaaagctccaggaggcggtgggtgattggttggttgctgttcctgcccccacgcctgtcgtggtttagctgaactgagctgaaatcctaaaggccgcggagtcggcggtgttgtaggtagcggtaccttgagtggcaacagaattcgattaaattacaatgggaaacatttttgaaaagctctttaaaagtctacttgggaaaaaaaagatgcggattcttatattgagtttggatacagctggaaaaaccaccatcttgtataaattgaagctgggggagactgtgcctgccgtccctacagtaggtttctgtgtggagacagtagaatataaaaataacaccttcgctgtctgggatgttggcagccacttcaaaatcagacctctgtggcagcattttttccagaacacaaaaggtgccagaagcccaggaagcacacatcaaggctcacttgccagcggggtgctgccaataaaatgtagtcacgtggaatttggaatgtggaaaggaggtagaagtcatcctttcctcccccatagcagcaggtgtgcaggctctggtggtcagctggactccatactcccccaccagtcaccagcctggggaccgtggggctgcaaggacctcagcagcggtttcccaagtttcctgacttcttccatcctctggaaatcagctgtggtaaagtagcctgaaagccagtggtgcaaccccatccccacaaccttcaccacctctagcacctccagtgataagcactaattgcctatatacaacccttttttgtttgaaatatctagagtaatttctgttttcctatctggggtagtgtaacataagaagaaatatatatttggtctctgcccccagttcctaacacaaagctcctaaaacccttggaaattcctgaatgatggcggtgctaagagcattgtcctttgttaatttatcatttttcttttctcctaggtgttttttcctttttaaacttttcttttaggttagggggtacatatgcacgttcgttatatagctaaacttgtgtcatgggggtttgttgtacagattatttcatcacccaggtaccaagcctagtacccaatagttttttctgctcctctccctcctcccaccctccaccctcaggtagggcccagtgtctgttgtttatgagttctcatcattttgctcccacttaaaagaacatacagtatttggttttctgttcctgtcttagtttgctgaggataatggcctctagctccatctgtgttcctgcaaaagacatgatctcgctgttttttatggttgcacatcttttgttctaacatttggtccttaaacctggttcctgacacagagctcctaaatcccttggaattttctgggtgatagaagcgtcctttgttctcatgaggtgactcttggtgggctccttatttggggactggtcaccaaaaagacctatggttggaagcgttgtgctgtcagccccattccccatcctctggcgtggggagtagagctggagctcaatcatgcctacgtgataaagcctccagaaaactccttaaaagacaggacttggagagcttccgggttggcgaacacatccatgttccaggagagtggtgcaccccaactccacaaggacccttccaaacctcaccctgtgtatctcttcaactggcttcatcatttgtgtcctttaaaatatcctttgtaataaatcagcactagtaagaaaactgttt

SEQ ID NO: 348431 - DNA, 1587 bp, Homo sapiens
gcctgcagaccgctcagctttcattccagtgaaaacattccagaaaaaactctgaatcaatcccaggtgtttctccaatcagctcaggatgattgtgtgttacctgctgcccagccagtgacacctctccaggcctctgacttagctaggtctccaccatgtgactccaccatagactccccaccttcttcttttgcaaagcctcagacacccaaacacctaccaaaagtgggtagggcaccaggacactccaagtgtaagtggggctctccagcacacctggatgtggaggtgtgatgcagagtggtggctgctcgtgacactcatttcacccctttctgtgcaggtgtgccagaagcccaggaagcacacatcaaggctcacttgccagcggggtgctgccaataaaatgtagtcacgtggaatttggaatgtggaaaggaggtagaagtcatcctttcctcccccatagcagcaggtgtgcaggctctggtggtcagctggactccatactcccccaccagtcaccagcctggggaccgtggggctgcaaggacctcagcagcggtttcccaagtttcctgacttcttccatcctctggaaatcagctgtggttcgtgagccacacatctccccacaccaagctcctccatacaagacctcggactgcatcacgtaaatgctttttcaggggcaaaatctagagaatctgaaatgagctatcagcttcccagtttgcacaattcatcaagaaattatgcggggtcaccggcacaaatgatgaggcatctcctggaagcttaacttcttatccatcccatctcttggacagatgatgccagttaattactttgaatgcaagtttgaaaaccactgctttaaagaaaatggatactccccttaccaagcagaaagtaggattttggaaactgatgcaagggaagcaaaaaagatgcctcaggaggcacgattacaacaggattgatgcaaacggaagctgaagcttaaccaaagacattaatatacgcccacaaaagaaaatgctaaggaagtcaagtggtctgcatgaattctgaagaaaaatggagaaccaaagaacaaaatttgtcaatgaacttccagcacagtctaggttaagggagtgaatttcttgactgaatggcacagactctgtaccacctgattggctgttaccttaatggaggaattatattacaatgtataggtactttaattagaatgacctggcagttactgaggcaaaattttccgctcctttgtattctgtaatacaagaaggatctacatggatgttctgttctctgaactgtctggatgaaccggtcaacggcactcatcataccttagtttttaaatctgcattgtggtcataatctgttatttaattaatttctcgtatttttaataaaaactttgcctatatatttagacagaaattgccttactttgctgaaatgctgagaaatcctagacagttttcaaggctgggctcaaatgtcacctctactaccctttgctgtgcctcctggcactgtgcttctgacactttgtacggtcctccatga

SEQ ID NO: 348432 - DNA, 1553 bp, Homo sapiens
ggcactattaacttggcccggcccacatgtcccctcccggttggtgtgaacgctccgaggttagctcaaacctcggcgattttcccagctgattggccgtgcaaatagacaatccttttgcttttctgattggtcgcacatggcatcgggggtgggggacgtgggcgtgtctcgccagaattcgtttaactgtgatttgaagatgaacatggtattgccagagcttcatggcgtcgcctacggcgctccctccctcccaggcccttactcttctttgcattggccagatatgtcgtcactcacaaaacttcgagctcattggtgcaaaagctccaggaggcggtgggtgattggttggttgctgttcctgcccccacgcctgtcgtggtttagctgaactgagctgaaatcctaaaggccgcggagtcggcggtgttgtaggtagcggtaccttgagtggcaacagaattcgattaaattacaatgggaaacatttttgaaaagctctttaaaagtctacttgggaaaaaaaagatgcggattcttatattgagtttggatacagctggaaaaaccaccatcttgtataaattgaagctgggggagactgtgcctgccgtccctacagtaggtttctgtgtggagacagtagaatataaaaataacaccttcgctgtctgggatgttggcagccacttcaaaatcagacctctgtggcagcattttttccagaacacaaaagaaatgatgaggcatctcctggaagcttaacttcttatccatcccatctcttggacagatgatgccagttaattactttgaatgcaagtttgaaaaccactgctttaaagaaaatggatactccccttaccaagcagaaagtaggattttggaaactgatgcaagggaagcaaaaaagatgcctcaggaggcacgattacaacaggattgatgcaaacggaagctgaagcttaaccaaagacattaatatacgcccacaaaagaaaatgctaaggaagtcaagtggtctgcatgaattctgaagaaaaatggagaaccaaagaacaaaatttgtcaatgaacttccagcacagtctaggttaagggagtgaatttcttgactgaatggcacagactctgtaccacctgattggctgttaccttaatggaggaattatattacaatgtataggtactttaattagaatgacctggcagttactgaggcaaaattttccgctcctttgtattctgtaatacaagaaggatctacatggatgttctgttctctgaactgtctggatgaaccggtcaacggcactcatcataccttagtttttaaatctgcattgtggtcataatctgttatttaattaatttctcgtatttttaataaaaactttgcctatatatttagacagaaattgccttactttgctgaaatgctgagaaatcctagacagttttcaaggctgggctcaaatgtcacctctactaccctttgctgtgcctcctggcactgtgcttctgacactttgtacggtcctccatga

SEQ ID NO: 348433 - DNA, 1416 bp, Homo sapiens
gcctgcagaccgctcagctttcattccagtgaaaacattccagaaaaaactctgaatcaatcccaggtgtttctccaatcagctcaggatgattgtgtgttacctgctgcccagccagtgacacctctccaggcctctgacttagctaggtctccaccatgtgactccaccatagactccccaccttcttcttttgcaaagcctcagacacccaaacacctaccaaaagtgggtagggcaccaggacactccaagtgtaagtggggctctccagcacacctggatgtggaggtgtgatgcagagtggtggctgctcgtgacactcatttcacccctttctgtgcaggtgtgccagaagcccaggaagcacacatcaaggctcacttgccagcggggtgctgccaataaaatgtagtcacgtggaatttggaatgtggaaaggaggtagaagtcatcctttcctcccccatagcagcaggtgtgcaggctctggtggtcagctggactccatactcccccaccagtcaccagcctggggaccgtggggctgcaaggacctcagcagcggtttcccaagtttcctgacttcttccatcctctggaaatcagctgtggttcgtgagccacacatctccccacaccaagctcctccatacaagacctcggactgcatcacgtaaatgctttttcaggggcaaaatctagagaatctgaaatgagctatcagcttcccagtttgcacaattcatcaagaaattatgcggggtcaccggcacaaatgatgaggcatctcctggaagcttaacttcttatccatcccatctcttggacagatgatgccagttaattactttgaatgctcctccaccaagccaaggccaggactcctgcaatcataggatggcaacaccacctctaaagcacagaacttcaggctttgcttcggaagtggcaccatggtctcttcattttccctttcttcaaggtcagaaaactgaagctgttaggagttttagtgttaagttccttccgaggatgttaattaggcttcaaactgttttgttctgagaaataaaaactaaactccagtcattcaagctaacagttgaggtgttctatggcttcaaaatcaagtaagatttgtaaatgaattgctaggtgcaaccattacttattatatgccacacaaacagtggagaaaattatggacaccaccatccaagtgattgagattattaattttaggtagcaggccaattcagacatgtccacttatcctcaatggcagggggcctctcacatcccctccctgtaacccagttcaatacttctgtctaaagtctagaatttcaatgttgaaaggagagcgtggttagtgagagaaaatccacaaagtttatcctgatgatcctttct

SEQ ID NO: 348434 - DNA, 1551 bp, Homo sapiens
ttcaccatgatagagggcgtcttgcattggttcacaatggcctgttgctttttagccttcagttggtttagggggaaattgctcaacctatgagacctgctcaaattcatactgttctggttttgctttggaattctttgtccagtaaattagctcttcatacaaatcccatgagtgcatggagaggaagtggggagagctgaagatgctagcattaagatgctagagaaacacgagacaattgatggagcaagatatctaaggaagtagaatattaagagtgagatagtgttgaaacactgaccttgggaagaaagaagaatgccgcttccattaagactgaaagagaggaggaagaggtggatattgtggaagtagagaggaagctcataccagacgacttggatcatctcagtcaagaaggggcaacagaagaatcttgggccaggacaaagcataggagggtgaagtggaaggtagcggtaccttgagtggcaacagaattcgattaaattacaatgggaaacatttttgaaaagctctttaaaagtctacttgggaaaaaaaagatgcggattcttatattgagtttggatacagctggaaaaaccaccatcttgtataaattgaagctgggggagactgtgcctgccgtccctacagtaggtttctgtgtggagacagtagaatataaaaataacaccttcgctgtctgggatgttggcagccacttcaaaatcagacctctgtggcagcattttttccagaacacaaaagggtcttgctccattgaccaggctggagtgcagtggcgtgatcttggctcactgcaacgtcctcttcccaagctcagagctatcagcttcccagtttgcacaattcatcaagaaattatgcggggtcaccggcacaaatgatgaggcatctcctggaagcttaacttcttatccatcccatctcttggacagatgatgccagttaattactttgaatgctcctccaccaagccaaggccaggactcctgcaatcataggatggcaacaccacctctaaagcacagaacttcaggctttgcttcggaagtggcaccatggtctcttcattttccctttcttcaaggtcagaaaactgaagctgttaggagttttagtgttaagttccttccgaggatgttaattaggcttcaaactgttttgttctgagaaataaaaactaaactccagtcattcaagctaacagttgaggtgttctatggcttcaaaatcaagtaagatttgtaaatgaattgctaggtgcaaccattacttattatatgccacacaaacagtggagaaaattatggacaccaccatccaagtgattgagattattaattttaggtagcaggccaattcagacatgtccacttatcctcaatggcagggggcctctcacatcccctccctgtaacccagttcaatacttctgtctaaagtctagaatttcaatgttgaaaggagagcgtggttagtgagagaaaatccacaaagtttatcctgatgatcctttct

SEQ ID NO: 348435 - DNA, 404 bp, Homo sapiens
gggattacacgcctgcgccaccacacccagctaatttagtatttttagtagagatggggtttcaccatgttggtcaggctggtcacgagctcctaacctcaagtgatcccaaagtgctgtgattacaggcgtgagccatcctgcctggcctttctggttaaaattctgtgaggtttgcataaaaggaatagagtaggggcccaaaaaccagtaagatgagaaaatagtgtttcctcagttctaggatccaggggaaaaaaaaaagaaataaaagagaaaatactgtttcctgccacttaagaggaaggactcacatatcctaccttccatcagccttgaaggagacaagtgccctctctctcacacccggtggccttcccttcccctttcccagagcctccaag

SEQ ID NO: 348436 - DNA, 1193 bp, Homo sapiens
ggcactattaacttggcccggcccacatgtcccctcccggttggtgtgaacgctccgaggttagctcaaacctcggcgattttcccagctgattggccgtgcaaatagacaatccttttgcttttctgattggtcgcacatggcatcgggggtgggggacgtgggcgtgtctcgccagaattcgtttaactgtgatttgaagatgaacatggtattgccagagcttcatggcgtcgcctacggcgctccctccctcccaggcccttactcttctttgcattggccagatatgtcgtcactcacaaaacttcgagctcattggtgcaaaagctccaggaggcggtgggtgattggttggttgctgttcctgcccccacgcctgtcgtggtttagctgaactgagctgaaatcctaaaggccgcggagtcggcggtgttgtaggtagcggtaccttgagtggcaacagaattcgattaaattacaatgggaaacatttttgaaaagctctttaaaagtctacttgggaaaaaaaagatgcggattcttatattgagtttggatacagctggaaaaaccaccatcttgtataaattgaagctgggggagactgtgcctgccgtccctacagtaggtttctgtgtggagacagtagaatataaaaataacaccttcgctgtctgggatgttggcagccacttcaaaatcagacctctgtggcagcattttttccagaacacaaaagagctatcagcttcccagtttgcacaattcatcaagaaattatgcggggtcaccggcacaaatgatgaggcatctcctggaagcttaacttcttatccatcccatctcttggacagatgatgccagttaattactttgaataaatatgggcaaaagcttatcattatcaacaaatgagaagaaagaaaccctatgccaggtaacaccaaagctttggcccagtgccctctgttgaaacatcctaggctttttctttccactcctattacaactgatctgatttggccccttcacacctcactcctagattttgctagacctttctattttgtctccctgaattaagcttttccttttggacactttacatatggattctaaaacaatcctctgcatgtctacacttgcacataatgcaaaaaacaaaataaaataatcttcctgttttgatc

SEQ ID NO: 348437 - DNA, 919 bp, Homo sapiens
ggcactattaacttggcccggcccacatgtcccctcccggttggtgtgaacgctccgaggttagctcaaacctcggcgattttcccagctgattggccgtgcaaatagacaatccttttgcttttctgattggtcgcacatggcatcgggggtgggggacgtgggcgtgtctcgccagaattcgtttaactgtgatttgaagatgaacatggtattgccagagcttcatggcgtcgcctacggcgctccctccctcccaggcccttactcttctttgcattggccagatatgtcgtcactcacaaaacttcgagctcattggtgcaaaagctccaggaggcggtgggtgattggttggttgctgttcctgcccccacgcctgtcgtggtttagctgaactgagctgaaatcctaaaggccgcggagtcggcggtgttgtaggtagcggtaccttgagtggcaacagaattcgattaaattacaatgggaaacatttttgaaaagctctttaaaagtctacttgggaaaaaaaagatgcggattcttatattgagtttggatacagctggaaaaaccaccatcttgtataaattgaagctgggggagactgtgcctgccgtccctacagtaggtttctgtgtggagacagtagaatataaaaataacaccttcgctgtctgggatgttggcagccacttcaaaatcagacctctgtggcagcattttttccagaacacaaaaggtaaagattattcggtttgtagcctcgatactgtttctgtgaaatgtctctaaagacggatgcttgaagtgataccttctggtgctctgctctatttacactgtcagccatttcctctcttagggtctctttatacttactggggaggtttcttttgtgagacagagtcttgccctg

SEQ ID NO: 348438 - DNA, 3789 bp, Homo sapiens
  misc_feature (1672)..(1672): n is a, c, g, or t
  misc_feature (1952)..(1952): n is a, c, g, or t
  misc_feature (2084)..(2084): n is a, c, g, or t
  misc_feature (2110)..(2110): n is a, c, g, or t
  misc_feature (3219)..(3219): n is a, c, g, or t
  misc_feature (3336)..(3336): n is a, c, g, or t
  misc_feature (3496)..(3496): n is a, c, g, or t
  misc_feature (3523)..(3523): n is a, c, g, or t
ttcaccatgatagagggcgtcttgcattggttcacaatggcctgttgctttttagccttcagttggtttagggggaaattgctcaacctatgagacctgctcaaattcatactgttctggttttgctttggaattctttgtccagtaaattagctcttcatacaaatcccatgagtgcatggagaggaagtggggagagctgaagatgctagcattaagatgctagagaaacacgagacaattgatggagcaagatatctaaggaagtagaatattaagagtgagatagtgttgaaacactgaccttgggaagaaagaagaatgccgcttccattaagactgaaagagaggaggaagaggtggatattgtggaagtagagaggaagctcataccagacgacttggatcatctcagtcaagaaggggcaacagaagaatcttgggccaggacaaagcataggagggtgaagtggaaggtagcggtaccttgagtggcaacagaattcgattaaattacaatgggaaacatttttgaaaagctctttaaaagtctacttgggaaaaaaaagatgcggattcttatattgagtttggatacagctggaaaaaccaccatcttgtataaattgaagctgggggagactgtgcctgccgtccctacagtaggtttctgtgtggagacagtagaatataaaaataacaccttcgctgtctgggatgttggcagccacttcaaaatcagacctctgtggcagcattttttccagaacacaaaaggtgccagaagcccaggaagcacacatcaaggctcacttgccagcggggtgctgccaataaaatgtagtcacgtggaatttggaatgtggaaaggaggtagaagtcatcctttcctcccccatagcagcaggtgtgcaggctctggtggtcagctggactccatactcccccaccagtcaccagcctggggaccgtggggctgcaaggacctcagcagcggtttcccaagtttcctgacttcttccatcctctggaaatcagctgtgcaatgaatcctccaatgtacctgactctcccttcgcgaagagcatcccctccatggcagaaatctgaaaatgcccctggggagacacatgcacaagacagttcgtgagccacacatctccccacaccaagctcctccatacaagacctcggactgcatcacgtaaatgctttttcaggggcaaaatctagagaatctgaaatggtgagcctttttcctttttttttttttttttgagatgaagtctcactctgttgcccaggctggagtgcagtgcagtggtgtgatcttggctcactgcaaactccacctcctggagtcaagtgattctcctgcctcagccttcagagtagctgggatcatagatgcccgtccccatgcctggttaatttttgtatttttagtagagacagggtttcaccatgttggccaggctggtctcgaacttctgagctcaagtgatccacccaccttggcctcccaaagtgctgagattacagcatgagacaccatgcccagctgtgagcctgtatcttaatcaaagtcctgagaataaccttgaagaagactcccttgcaatgagcaacaacagaagaagcaagggacctggaatctggcagacctgggttngaattctggctctgtcactttctggtgaagtgacttgagtaatgaacatgagcctttctgggtagcgtttacagcacaaagcaatttgaggaataaatgaaagagcacgtgtctagtgcctagcaatgcgctggacacagtgccggtgctcagccatcatgtcacaccagcactgaccggtgagcataaaccctggggatgcccagagctggtacagccaggagctccagaagcgtgggattctcagagggaagtggagctcactgctctacaggtcctnttcaagttagaaagtaagatacaatgcacacaaagccaaattgtcatcattcagctcctattacaggggaactaagagctgcattgaaaattatttgcaaagcttgtaagtggttctgccacttattagccntgtgaaccttagcaaattacctagcntctctgagtttcaacttcctcatctacaaaatagaaatgataataataaccgcatcgcaagagttgttggaaaaatgaaaatgaggtatcataggaggtaacatgtatggagcatttaccataggccaagcactgttctaagaacttcggacatgttatctcacttgtataagtacttaggtgcctacaacataaacagcacctggtaaattaagtattgaaaaaatgctatggggcagaggaagaaatgctaagcttctgtgagaagagaagacagcttgttacacaggtgaaaagaacaagctgcagctgagagaagaaaagtataagagttgctaggtgtgacaatctcaagacttttcaaccactacaaatttaaacagccaccctaaatcaccccaaaggacagactcgagttgttctttttgtctttaatgtttgcgcctctccgaatcagagaagaagctgccaggattccagtacataccaaaacatgatgacaataccctcaactgtgcaaacttttgtgcatctaccgctatgtaaaggaagctgatgtcagtagactggggggaacagtaaggcatgtttgtgaccgaagctcaatttgccatcacagtgtggccacacctacctcactaatattctaatagtgggataaataattcaatagggataaagcctggattttcctcttattctctcttagtgcttacattcttggcatgatatcgatgtgccatagacaagccaatatgtgagtgtactctatctgaataaagtatagcctttctacattgcaaagtcatccagtttctaaaattattgttagaaccaatgaagtgactaagagaattttaaaaaataagccatcagtctggacctgtgtataggaatgaaggagaagcactttaaagtcagggaaaaaatataaacatacttaacatttaggattatcaaccattgctgcttttccataaaccatttcattcatgatttcatctgtaagagatatgattattgcccccattcagtgagggactttgatagttagccgcctggtccttcttgcttggatgccctgcaaataaatgtcctcctttccccantgcaaaacctcgatatggttgtttgactttactgcgcttgggccagcagaatccagttaagtccactaataagctcttggcctgtctttgagatggatttcagattcaaaatagacngaccctatcaccctgctaacttggccagtcagtatttgtcaataacatagaggcttcattcaagagatttactgggttgtaactattggaacccagggatgatttcaggattttgtggggcctgagccttatctagtaaaaacattaaaaaaattatgantacaaaaatttccaggggccctcccangaccttggaagggcctgtgcaagtgagaagcctggaaggttaggctctattcatcatcgatcaaccacagctggggcctctttttttgtttgttttttataaacttgtgtaatgcagggaaatatattgtttcaacttacaaacaccacaaaatggtgtcatattggtcataaaattactggcaccttcccttggcatcttgcctttggaaggaaatgcagtgggcctatatgtcacatatgccaaatatgactgcagtgtagctt

SEQ ID NO: 348439 - DNA, 1913 bp, Homo sapiens
ggcactattaacttggcccggcccacatgtcccctcccggttggtgtgaacgctccgaggttagctcaaacctcggcgattttcccagctgattggccgtgcaaatagacaatccttttgcttttctgattggtcgcacatggcatcgggggtgggggacgtgggcgtgtctcgccagaattcgtttaactgtgatttgaagatgaacatggtattgccagagcttcatggcgtcgcctacggcgctccctccctcccaggcccttactcttctttgcattggccagatatgtcgtcactcacaaaacttcgagctcattggtgcaaaagctccaggaggcggtgggtgattggttggttgctgttcctgcccccacgcctgtcgtggtttagctgaactgagctgaaatcctaaaggccgcggagtcggcggtgttgtaggtagcggtaccttgagtggcaacagaattcgattaaattacaatgggaaacatttttgaaaagctctttaaaagtctacttgggaaaaaaaagatgcggattcttatattgagtttggatacagctggaaaaaccaccatcttgtataaattgaagctgggggagactgtgcctgccgtccctacagtaggtttctgtgtggagacagtagaatataaaaataacaccttcgctgtctgggatgttggcagccacttcaaaatcagacctctgtggcagcattttttccagaacacaaaaggtgccagaagcccaggaagcacacatcaaggctcacttgccagcggggtgctgccaataaaatgtagtcacgtggaatttggaatgtggaaaggaggtagaagtcatcctttcctcccccatagcagcaggtgtgcaggctctggtggtcagctggactccatactcccccaccagtcaccagcctggggaccgtggggctgcaaggacctcagcagcggtttcccaagtttcctgacttcttccatcctctggaaatcagctgtggtaaagtagcctgaaagccagtggtgcaaccccatccccacaaccttcaccacctctagcacctccagtgataagcactaattgcctatatacaacccttttttgtttgaaatatctagagtaatttctgttttcctatctggggtagtgtaacataagaagaaatatatatttggtctctgcccccaaaaaaaaaaaaaaaaaaaaaaaaaaaaaaaaaaaaaaaaaaaaaaaaacaaaaaaaaaaaaaaaaaaaaaaaaaaaaaaaaaaaaaaaacaaaaccaaaaaaaaaaaaaaacaacaaaaaaaaagaacaacaacgagggacgggacgctgcgcggcagtcaggcacggcccgcaggacggcaggccacatacggagagcagcagacgcaggaggccctgtaaaggcgaaagacaagcagggggacacacagacgaggatgtcgtggatggacactgagcacaaaggcgcgaggtgcggcgagcacgcgagaaaaacggaaaaaaaacgcgcaacaagcgtaacaggagagaggataggagaagacgggaggagcgaagaaggaaccagctagtcgacgaccgccaggatcacagaaaggcagacggacagcggagacaccgatgagcaagagagacggaaaacgagtaatccaggggcacacacgagagcacgcgcgaacagggcgagagagacaaaaccgcaacagacaggcgagcgacgtagcctataggctaaaataacgaccagaagaccatgggggagactatgatgggacaactgagacaagcacagaaacaaagcgaagagacagaccaaaacagacacagcgtagcccacgaggcgaatgaggaaacacaataccacgggcggcgatggggtaggaacaaataggaaga

SEQ ID NO: 348440 - DNA, 2985 bp, Homo sapiens
atggcgaccgcgctgctggcgggagagaagctgcgggagctgatcctgccgggcgcgcaggacgacaaggcgggcgcgctggccgcgctgcttctgcagctgaagctggagctgccgttcgaccgggtggtcaccatcggcaccgtgctggtgcccatcctgctggtcaccctggtcttcaccaagaacttcgcagggtggacgctcttctctggctcctgggattggctgtgaggacaaaacataaaggaacccatttactgttacaccccgcacaacttcacgcgcgaccaggcgctgtacgcccgcggctactgctggacggagctgcgggacgcgctgcccggcgtggacgccagcctgtggccgtcgctgtttgagcacaagttcctgccctacgcgctgctggccttcgccgccatcatgtacgtgcccgcgctgggctgggagttcctggcctccacgcgcctcacctccgagctcaacttcctgctgcaggagatcgacaactgttaccaccgggcggccgagggccgcgcgcccaagatcgagaagcagatccagtccaagggcccgggcatcacggagcgcgagaagcgcgagatcatcgagaacgcggagaaggagaagagcccggagcagaacctgttcgagaagtacctggagcgccgcggccgcagcaacttcctggccaagctgtacctggcgcggcacgtgctgatcctgctgctgagcgccgtgcccatctcctacctgtgcacctactacgccacgcagaagcagaacgagttcacctgcgcgctgggcgcgtccccggacggggcggcaggtgcggggcccgcggtgcgcgtgagctgcaagctcccgtccgtgcaactgcagcgcatcatcgcgggcgtggacatcgtgctgctgtgcgtcatgaacctcatcatcctcgtcaacctcatccacctcttcatcttccgcaagagcaacttcatcttcgacaagctgcacaaggtgggcatcaagacgcgccggcagtggcgccgctcgcagttctgcgacatcaacatcctggccatgttctgcaacgagaaccgcgaccacatcaagtcgctcaaccggctggacttcatcaccaacgagagcgacctcatgtacgacaacgtggtccggcagctgctggcggcgctggcgcagtccaaccacgacgccacccccacggtgcgcgactcgggggtgcagaccgtggaccccagcgccaaccccgccgagcccgacggcgccgccgagccgcccgtggtcaagcggccgcgcaagaagatgaagtggatccccaccagcaacccgcttccgcagcccttcaaggagccgctggccatcatgcgcgtggagaacagcaaggcggagaagccgaagcccgcgcgcaggaagacggccacggacacgctgatcgcgccgctgctggaccgctccgcccaccactacaagggcggagggggcgacccgggccccggccccgcccctgcccccgccccgccgcccgcccctgacaagaagcacgcgcgccacttctccctggacgtgcacccctacatcctcggcaccaagaaggccaaggccgaggcggtgcccgccgccctgcccgcctcccggagccaggaggggggcttcctgtcccaggcggaggactgtgggctaggcctggccccggcgcccatcaaagatgctccgctccccgagaaggaaatcccgtaccccacagagccagcccgggcagggcttccctcggggggcccgttccacgtccgctcacctcccgccgcccctgctgtggcccctctgacaccagccagcctgggcaaggcggagcccctcaccatcctgagccgaaacgccacacacccgctgctgcacatcaacacgctatcctcatcgccaccttcgacgagccgagaacggtcgtgagtactgtggagttttgagggatggcaccgtccaggccgccgagagcccctctgcctgtgtcgtgtggcctggccagcctcccggtggacaccagccctgcgtggacgtggcctgtgcttcgcccgcactgcgcgcatccccaacctctgtccgcatgcctggggccttcgcccccacgtgctcgacaggggaacccgcccggacggcatcgccaggcactggctggggtggggaaaggtggcccagtggagccggtggccaggaaggctgaagcccgcttcccatgctcctgcatcaggtgcccagccgtgggtgggggccctgaggtgaagagtttatttttttagtccgtttcatcctggccccgggctgtggcgagacagcccaactcccccagcccagctcccccagcccagagccagggaagaggaaggtggggccagtcccaccagtggggtggccacgcccatggggtcacatgctcaggggtcaccccctgcagggacctgatgccctcgggtgggagggaccgaggtccaccctcgggtcaaaggtcaacgtgcactttctccttgtcgcctgacagacattttattttactaagactgctgtaccgaacaagcatatttatcatcaggagacaggatgggtttaaagcaggatggtgtgtgtgtgaacgggcatgagcagaggtgagcgtgagcgagcgggtgtgtatgtacgagtgtgcacgtgtgtgcgtgtgcacagagggtgtggtgccagcttgagtgggagtgtgtgagtgtgagcaggcgggcgagtgcgtgagtgcacgccagcgcgtggcccatgtatgaggagtgaaggggcccaacgcaataaccacgtcccccacccgggccccccgccgcggctgaggccacatggcttcctgtgggagccccggccggcacccggctggtcccaccccaaatacctcagccatggagaccatgtcatgcagaattaacaaggtagcaccgagcatatcaataaatattattctgataa

SEQ ID NO: 348441 - DNA, 321 bp, Homo sapiens
atggcgaccgcgctgctggcgggagagaagctgcgggagctgatcctgccgggcgcgcaggacgacaaggcgggcgcgctggccgcgctgcttctgcagctgaagctggagctgccgttcgaccgggtggtcaccatcggcaccgtgctggtgcccatcctgctggtcaccctggtcttcaccaagaacttcgcagggtggacgctcttctctggctcctgggattggctgtgaggacaaaacataagtaaataaaatatgccattttcttcactaaaaaaagaaataaaaaaaggaggtacaaaaaagtcgtatcgatgt

SEQ ID NO: 348442 - DNA, 454 bp, Homo sapiens
ggtggagcagatgaggaaactgaggtcggagtggcaagcaggacttggcttccccttgctgccgccatccggcagggagacagtgacaggcatgaggagttcgggtccaagtggggctccgcacagtgggggcagctcgccagacacgtggctcggtgtggggcccctgctttcatccaccttggaggaggccaggccgccccctgccccagagccaaggagccctccttcccatctccctgcggccctactggagtctgggtccagggttctggggcctctccccacccatgttggccacacatgcccagcaagggtggctgccagggatgggcccagctcaggacgggacacaaacctgtccctgttctcttccccagggtggacgctcttctctggctcctgggattggctgtgaggacaaaacataagtaaataaaatatgccattttct

SEQ ID NO: 348443 - DNA, 498 bp, Homo sapiens
cagcccggtttcttcagcccagcccgtgcgcctccccgccccagcccgtgtctcctctttgcccccagaggaacccatttactgttacaccccgcacaacttcacgcgcgaccaggcgctgtacgcccgcggctactgctggacggagctgcgggacgcgctgcccggcgtggacgccagcctgtggccgtcgctgtttgagcacaagttcctgccctacgcgctgctggccttcgccgccatcatgtacgtgcccgcgctgggctgggagttcctggcctccacgcgcctcacctccgagctcaacttcctgctgcaggagatcgacaactgttaccaccgggcggccgagggccgcgcgcccaagatcgagaagcagatccagtccaagggcccgggcatcacggagcgcgagaagcgcgagatcatcgagaacgcggagaaggagaagagcccggagcagaacctgttcgagaagtacctggagcgccgcggccg

SEQ ID NO: 348444 - DNA, 2934 bp, Homo sapiens
atggcgaccgcgctgctggcgggagagaagctgcgggagctgatcctgccgggcgcgcaggacgacaaggcgggcgcgctggccgcgctgcttctgcagctgaagctggagctgccgttcgaccgggtggtcaccatcggcaccgtgctggtgcccatcctgctggtcaccctggtcttcaccaagaacttcgcagaggaacccatttactgttacaccccgcacaacttcacgcgcgaccaggcgctgtacgcccgcggctactgctggacggagctgcgggacgcgctgcccggcgtggacgccagcctgtggccgtcgctgtttgagcacaagttcctgccctacgcgctgctggccttcgccgccatcatgtacgtgcccgcgctgggctgggagttcctggcctccacgcgcctcacctccgagctcaacttcctgctgcaggagatcgacaactgttaccaccgggcggccgagggccgcgcgcccaagatcgagaagcagatccagtccaagggcccgggcatcacggagcgcgagaagcgcgagatcatcgagaacgcggagaaggagaagagcccggagcagaacctgttcgagaagtacctggagcgccgcggccgcagcaacttcctggccaagctgtacctggcgcggcacgtgctgatcctgctgctgagcgccgtgcccatctcctacctgtgcacctactacgccacgcagaagcagaacgagttcacctgcgcgctgggcgcgtccccggacggggcggcaggtgcggggcccgcggtgcgcgtgagctgcaagctcccgtccgtgcaactgcagcgcatcatcgcgggcgtggacatcgtgctgctgtgcgtcatgaacctcatcatcctcgtcaacctcatccacctcttcatcttccgcaagagcaacttcatcttcgacaagctgcacaaggtgggcatcaagacgcgccggcagtggcgccgctcgcagttctgcgacatcaacatcctggccatgttctgcaacgagaaccgcgaccacatcaagtcgctcaaccggctggacttcatcaccaacgagagcgacctcatgtacgacaacgtggtccggcagctgctggcggcgctggcgcagtccaaccacgacgccacccccacggtgcgcgactcgggggtgcagaccgtggaccccagcgccaaccccgccgagcccgacggcgccgccgagccgcccgtggtcaagcggccgcgcaagaagatgaagtggatccccaccagcaacccgcttccgcagcccttcaaggagccgctggccatcatgcgcgtggagaacagcaaggcggagaagccgaagcccgcgcgcaggaagacggccacggacacgctgatcgcgccgctgctggaccgctccgcccaccactacaagggcggagggggcgacccgggccccggccccgcccctgcccccgccccgccgcccgcccctgacaagaagcacgcgcgccacttctccctggacgtgcacccctacatcctcggcaccaagaaggccaaggccgaggcggtgcccgccgccctgcccgcctcccggagccaggaggggggcttcctgtcccaggcggaggactgtgggctaggcctggccccggcgcccatcaaagatgctccgctccccgagaaggaaatcccgtaccccacagagccagcccgggcagggcttccctcggggggcccgttccacgtccgctcacctcccgccgcccctgctgtggcccctctgacaccagccagcctgggcaaggcggagcccctcaccatcctgagccgaaacgccacacacccgctgctgcacatcaacacgctatcctcatcgccaccttcgacgagccgagaacggtcgtgagtactgtggagttttgagggatggcaccgtccaggccgccgagagcccctctgcctgtgtcgtgtggcctggccagcctcccggtggacaccagccctgcgtggacgtggcctgtgcttcgcccgcactgcgcgcatccccaacctctgtccgcatgcctggggccttcgcccccacgtgctcgacaggggaacccgcccggacggcatcgccaggcactggctggggtggggaaaggtggcccagtggagccggtggccaggaaggctgaagcccgcttcccatgctcctgcatcaggtgcccagccgtgggtgggggccctgaggtgaagagtttatttttttagtccgtttcatcctggccccgggctgtggcgagacagcccaactcccccagcccagctcccccagcccagagccagggaagaggaaggtggggccagtcccaccagtggggtggccacgcccatggggtcacatgctcaggggtcaccccctgcagggacctgatgccctcgggtgggagggaccgaggtccaccctcgggtcaaaggtcaacgtgcactttctccttgtcgcctgacagacattttattttactaagactgctgtaccgaacaagcatatttatcatcaggagacaggatgggtttaaagcaggatggtgtgtgtgtgaacgggcatgagcagaggtgagcgtgagcgagcgggtgtgtatgtacgagtgtgcacgtgtgtgcgtgtgcacagagggtgtggtgccagcttgagtgggagtgtgtgagtgtgagcaggcgggcgagtgcgtgagtgcacgccagcgcgtggcccatgtatgaggagtgaaggggcccaacgcaataaccacgtcccccacccgggccccccgccgcggctgaggccacatggcttcctgtgggagccccggccggcacccggctggtcccaccccaaatacctcagccatggagaccatgtcatgcagaattaacaaggtagcaccgagcatatcaataaatattattctgataa

SEQ ID NO: 348445 - DNA, 2038 bp, Homo sapiens
atggcgaccgcgctgctggcgggagagaagctgcgggagctgatcctgccgggcgcgcaggacgacaaggcgggcgcgctggccgcgctgcttctgcagctgaagctggagctgccgttcgaccgggtggtcaccatcggcaccgtgctggtgcccatcctgctggtcaccctggtcttcaccaagaacttcgcagaggaacccatttactgttacaccccgcacaacttcacgcgcgaccaggcgctgtacgcccgcggctactgctggacggagctgcgggacgcgctgcccggcgtggacgccagcctgtggccgtcgctgtttgagcacaagttcctgccctacgcgctgctggccttcgccgccatcatgtacgtgcccgcgctgggctgggagttcctggcctccacgcgcctcacctccgagctcaacttcctgctgcaggagatcgacaactgttaccaccgggcggccgagggccgcgcgcccaagatcgagaagcagatccagtccaagggcccgggcatcacggagcgcgagaagcgcgagatcatcgagaacgcggagaaggagaagagcccggagcagaacctgttcgagaagtacctggagcgccgcggccgcagcaacttcctggccaagctgtacctggcgcggcacgtgctgatcctgctgctgagcgccgtgcccatctcctacctgtgcacctactacgccacgcagaagcagaacgagttcacctgcgcgctgggcgcgtccccggacggggcggcaggtgcggggcccgcggtgcgcgtgagctgcaagctcccgtccgtgcaactgcagcgcatcatcgcgggcgtggacatcgtgctgctgtgcgtcatgaacctcatcatcctcgtcaacctcatccacctcttcatcttccgcaagagcaacttcatcttcgacaagctgcacaaggtgggcatcaagacgcgccggcagtggcgccgctcgcagttctgcgacatcaacatcctggccatgttctgcaacgagaaccgcgaccacatcaagtcgctcaaccggctggacttcatcaccaacgagagcgacctcatgtacgacaacgtggtccggcagctgctggcggcgctggcgcagtccaaccacgacgccacccccacggtgcgcgactcgggggtgcagaccgtggaccccagcgccaaccccgccgagcccgacggcgccgccgagccgcccgtggtcaagcggccgcgcaagaagatgaagtggatccccaccagcaacccgttcccatgctcctgcatcaggtgcccagccgtgggtgggggccctgaggtgaagagtttatttttttagtccgtttcatcctggccccgggctgtggcgagacagcccaactcccccagcccagctcccccagcccagagccagggaagaggaaggtggggccagtcccaccagtggggtggccacgcccatggggtcacatgctcaggggtcaccccctgcagggacctgatgccctcgggtgggagggaccgaggtccaccctcgggtcaaaggtcaacgtgcactttctccttgtcgcctgacagacattttattttactaagactgctgtaccgaacaagcatatttatcatcaggagacaggatgggtttaaagcaggatggtgtgtgtgtgaacgggcatgagcagaggtgagcgtgagcgagcgggtgtgtatgtacgagtgtgcacgtgtgtgcgtgtgcacagagggtgtggtgccagcttgagtgggagtgtgtgagtgtgagcaggcgggcgagtgcgtgagtgcacgccagcgcgtggcccatgtatgaggagtgaaggggcccaacgcaataaccacgtcccccacccgggccccccgccgcggctgaggccacatggcttcctgtgggagccccggccggcacccggctggtcccaccccaaatacctcagccatggagaccatgtcatgcagaattaacaaggtagcaccgagcatatcaataaatattattctgataa

SEQ ID NO: 348446 - DNA, 488 bp, Homo sapiens
cctcctgagttcaagccattctcctgcctcagcctccctagtagctgggattagaggcacaagccaccatgcccctacttaatcaaggagaatatgggcttggagaggtctcatttccaggctaatgtcatagccaataaatggtggggttgcgttttggggccaccaccgcctgaccccaaggatccagcaataccgagcacagctgcctccctgatgactaaccctcaactctccccagctctgtgctccacttgtactcagctgtgtgcagttccctgaacaaccattccccaacgcccccacaccttggcccatattctcccctggccttggagggcctcccctttcttggtctggctgacacccacccatcttccaggactcagcccaaaatccctgctcccgaggaagcccactctgtgccacgctgtgagcacacccacatgtccctgaaatgtcctgggctccacactcccggggcactc

SEQ ID NO: 348447 - DNA, 549 bp, Homo sapiens
tcccagtcgaagcacctcctgtccgcccctcagcgcatgggtggcggtcacgtgcccagaacgtccggcgttcgccccgccctcccagtttccgcgcgcctctttggcagctggtcacatggtgagggtgggggtgagggggcctctctagcttgcggcctgtgtctatggtcgggccctctgcgtccagctgctccggaccgagctcgggtgtatggggccgtaggaaccggctccggggccccgataacgggccgcccccacagcaccccgggctggcgtgagggtctcccttgatctgagaatggctacctctcgatatgagccagtggctgaaattggtgtcggtgcctatgggacagtgtacaaggcccgtgatccccacagtggccactttgtggccctcaagagtgtgagagtccccaatggaggaggaggtggaggaggccttcccatcagcacagttcgtgaggtggctttactgaggcgactggaggcttttgagcatcccaatgttgtccggtgagaaggtggtggagggttgggcgt

SEQ ID NO: 348448 - DNA, 1561 bp, Homo sapiens
tcccagtcgaagcacctcctgtccgcccctcagcgcatgggtggcggtcacgtgcccagaacgtccggcgttcgccccgccctcccagtttccgcgcgcctctttggcagctggtcacatggtgagggtgggggtgagggggcctctctagcttgcggcctgtgtctatggtcgggccctctgcgtccagctgctccggaccgagctcgggtgtatggggccgtaggaaccggctccggggccccgataacgggccgcccccacagcaccccgggctggcgtgagggtctcccttgatctgagaatggctacctctcgatatgagccagtggctgaaattggtgtcggtgcctatgggacagtgtacaaggcccgtgatccccacagtggccactttgtggccctcaagagtgtgagagtccccaatggaggaggaggtggaggaggccttcccatcagcacagttcgtgaggtggctttactgaggcgactggaggcttttgagcatcccaatgttgtccggctgatggacgtctgtgccacatcccgaactgaccgggagatcaaggtaaccctggtgtttgagcatgtagaccaggacctaaggacatatctggacaaggcacccccaccaggcttgccagccgaaacgatcaaggatctgatgcgccagtttctaagaggcctagatttccttcatgccaattgcatcgttcaccgagatctgaagccagagaacattctggtgacaagtggtggaacagtcaagctggctgactttggcctggccagaatctacagctaccagatggcacttacacccgtggttgttacactctggtaccgagctcccgaagttcttctgcagtccacatatgcaacacctgtggacatgtggagtgttggctgtatctttgcagagatgtttcgtcgaaagcctctcttctgtggaaactctgaagccgaccagttgggcaaaatctttgacctgattgggctgcctccagaggatgactggcctcgagatgtatccctgccccgtggagcctttccccccagagggccccgcccagtgcagtcggtggtacctgagatggaggagtcgggagcacagctgctgctggaaatgctgacttttaacccacacaagcgaatctctgcctttcgagctctgcagcactcttatctacataaggatgaaggtaatccggagtgagcaatggagtggctgccatggaaggaagaaaagctgccatttcccttctggacactgagagggcaatctttgcctttatctctgaggctatggagggtcctcctccatctttctacagagattactttgctgccttaatgacattcccctcccacctctccttttgaggcttctccttctccttcccatttctctacactaaggggtatgttccctcttgtccctttccctacctttatatttggggtccttttttatacaggaaaaacaaaacaaagaaataatggtctttttttttttttttttctttcttttttttttcttttctttttttttttttttttt

SEQ ID NO: 348449 - DNA, 1865 bp, Homo sapiens
tcccagtcgaagcacctcctgtccgcccctcagcgcatgggtggcggtcacgtgcccagaacgtccggcgttcgccccgccctcccagtttccgcgcgcctctttggcagctggtcacatggtgagggtgggggtgagggggcctctctagcttgcggcctgtgtctatggtcgggccctctgcgtccagctgctccggaccgagctcgggtgtatggggccgtaggaaccggctccggggccccgataacgggccgcccccacagcaccccgggctggcgtgagggtctcccttgatctgagaatggctacctctcgatatgagccagtggctgaaattggtgtcggtgcctatgggacagtgtacaaggcccgtgatccccacagtggccactttgtggccctcaagagtgtgagagtccccaatggaggaggaggtggaggaggccttcccatcagcacagttcgtgaggtggctttactgaggcgactggaggcttttgagcatcccaatgttgtccggctgatggacgtctgtgccacatcccgaactgaccgggagatcaaggtaaccctggtgtttgagcatgtagaccaggacctaaggacatatctggacaaggcacccccaccaggcttgccagccgaaacgatcaaggatctgatgcgccagtttctaagaggcctagatttccttcatgccaattgcatcgttcaccgagatctgaagccagagaacattctggtgacaagtggtggaacagtcaagctggctgactttggcctggccagaatctacagctaccagatggcacttacacccgtggttgttacactctggtaccgagctcccgaagttcttctgcagtccacatatgcaacacctgtggacatgtggagtgttggctgtatctttgcagagatgtttcgtcgaaagcctctcttctgtggaaactctgaagccgaccagttgggcaaaatctttgacctgattgggctgcctccagaggatgactggcctcgagatgtatccctgccccgtggagcctttccccccagagggccccgcccagtgcagtcggtggtacctgagatggaggagtcgggagcacagctgctgctggaaatgctgacttttaacccacacaagcgaatctctgcctttcgagctctgcagcactcttatctacataaggatgaaggtaatccggagtgagcaatggagtggctgccatggaaggaagaaaagctgccatttcccttctggacactgagagggcaatctttgcctttatctctgaggctatggagggtcctcctccatctttctacagagattactttgctgccttaatgacattcccctcccacctctccttttgaggcttctccttctccttcccatttctctacactaaggggtatgttccctcttgtccctttccctacctttatatttggggtccttttttatacaggaaaaacaaaacaaagaaaaaaaaaaaaaaaaaaaaaaacactttttgggccgcctgggccctgaaaaaagtttttaaaacccttcggttggggccgcgggggcgccgcagttgggttacgcgtcacacctgtcgctcataagcggtgttccctaaggaaaagactccggcggccacaagagacatagcggcgcttgggtatttctctctcctccaatatattaaaaaaacccgccgcggcgggggacacacccgagacgcctgttcctgtgacaccaaactctcccaagatcggagcgctccacgaagaggggccaaatacgcggggatctcttttaacaacgggagctgctcccagggagacgctcgatttttaaaatttacgcg

SEQ ID NO: 348450 - DNA, 1584 bp, Homo sapiens
tcccagtcgaagcacctcctgtccgcccctcagcgcatgggtggcggtcacgtgcccagaacgtccggcgttcgccccgccctcccagtttccgcgcgcctctttggcagctggtcacatggtgagggtgggggtgagggggcctctctagcttgcggcctgtgtctatggtcgggccctctgcgtccagctgctccggaccgagctcgggtgtatggggccgtaggaaccggctccggggccccgataacgggccgcccccacagcaccccgggctggcgtgagggtctcccttgatctgagaatggctacctctcgatatgagccagtggctgaaattggtgtcggtgcctatgggacagtgtacaaggcccgtgatccccacagtggccactttgtggccctcaagagtgtgagagtccccaatggaggaggaggtggaggaggccttcccatcagcacagttcgtgaggtggctttactgaggcgactggaggcttttgagcatcccaatgttgtccggctgatggacgtctgtgccacatcccgaactgaccgggagatcaaggtaaccctggtgtttgagcatgtagaccaggacctaaggacatatctggacaaggcacccccaccaggcttgccagccgaaacgatcaaggatctgatgcgccagtttctaagaggcctagatttccttcatgccaattgcatcgttcaccgagatctgaagccagagaacattctggtgacaagtggtggaacagtcaagctggctgactttggcctggccagaatctacagctaccagatggcacttacacccgtggttgttacactctggtaccgagctcccgaagttcttctgcagtccacatatgcaacacctgtggacatgtggagtgttggctgtatctttgcagagatgtttcgtcgaaagcctctcttctgtggaaactctgaagccgaccagttgggcaaaatctttgacctgattgggctgcctccagaggatgactggcctcgagatgtatccctgccccgtggagcctttccccccagagggccccgcccagtgcagtcggtggtacctgagatggaggagtcgggagcacagctgctgctggaaatgctgacttttaacccacacaagcgaatctctgcctttcgagctctgcagcactcttatctacataaggatgaaggtaatccggagtgagcaatggagtggctgccatggaaggaagaaaagctgccatttccctgagggtcctcctccatctttctacagagattactttgctgccttaatgacattcccctcccacctctccttttgaggcttctccttctccttcccatttctctacactaaggggtatgttccctcttgtccctttccctacctttatatttggggtccttttttatacaggaaaaacaaaacaaagaaataatggtctttttttttttttttttttttttttttttttttttttttttttttttttttttttttttttttttttttttttttttttttgtgtgtgggggggagagagagaggggaggggggggggggagtga

SEQ ID NO: 348451 - DNA, 1587 bp, Homo sapiens
tcccagtcgaagcacctcctgtccgcccctcagcgcatgggtggcggtcacgtgcccagaacgtccggcgttcgccccgccctcccagtttccgcgcgcctctttggcagctggtcacatggtgagggtgggggtgagggggcctctctagcttgcggcctgtgtctatggtcgggccctctgcgtccagctgctccggaccgagctcgggtgtatggggccgtaggaaccggctccggggccccgataacgggccgcccccacagcaccccgggctggcgtgagggtctcccttgatctgagaatggctacctctcgatatgagccagtggctgaaattggtgtcggtgcctatgggacagtgtacaaggcccgtgatccccacagtggccactttgtggccctcaagagtgtgagagtccccaatggaggaggaggtggaggaggccttcccatcagcacagttcgtgaggtggctttactgaggcgactggaggcttttgagcatcccaatgttgtccggctgatggacgtctgtgccacatcccgaactgaccgggagatcaaggtaaccctggtgtttgagcatgtagaccaggacctaaggacatatctggacaaggcacccccaccaggcttgccagccgaaacgatcaaggatctgatgcgccagtttctaagaggcctagatttccttcatgccaattgcatcgttcaccgagatctgaagccagagaacattctggtgacaagtggtggaacagtcaagctggctgactttggcctggccagaatctacagctaccagatggcacttacacccgtggttgttacactctggtaccgagctcccgaagttcttctgcagtccacatatgcaacacctgtggacatgtggagtgttggctgtatctttgcagagatgtttcgtcgaaagcctctcttctgtggaaactctgaagccgaccagttgggcaaaatctttgatccctgccccgtggagcctttccccccagagggccccgcccagtgcagtcggtggtacctgagatggaggagtcgggagcacagctgctgctggaaatgctgacttttaacccacacaagcgaatctctgcctttcgagctctgcagcactcttatctacataaggatgaaggtaatccggagtgagcaatggagtggctgccatggaaggaagaaaagctgccatttcccttctggacactgagagggcaatctttgcctttatctctgaggctatggagggtcctcctccatctttctacagagattactttgctgccttaatgacattcccctcccacctctccttttgaggcttctccttctccttcccatttctctacactaaggggtatgttccctcttgtccctttccctacctttatatttggggtccttttttatacaggaaaaacaaaacaaagaaataatggtctttttttttttttttttttttttttttttttttttttttttttttttttttttttttttttttttttttttttttttttttgtgtgtgggggggagagagagaggggaggggggggggggagtga

SEQ ID NO: 348452 - DNA, 1632 bp, Homo sapiens
tcccagtcgaagcacctcctgtccgcccctcagcgcatgggtggcggtcacgtgcccagaacgtccggcgttcgccccgccctcccagtttccgcgcgcctctttggcagctggtcacatggtgagggtgggggtgagggggcctctctagcttgcggcctgtgtctatggtcgggccctctgcgtccagctgctccggaccgagctcgggtgtatggggccgtaggaaccggctccggggccccgataacgggccgcccccacagcaccccgggctggcgtgagggtctcccttgatctgagaatggctacctctcgatatgagccagtggctgaaattggtgtcggtgcctatgggacagtgtacaaggcccgtgatccccacagtggccactttgtggccctcaagagtgtgagagtccccaatggaggaggaggtggaggaggccttcccatcagcacagttcgtgaggtggctttactgaggcgactggaggcttttgagcatcccaatgttgtccggctgatggacgtctgtgccacatcccgaactgaccgggagatcaaggtaaccctggtgtttgagcatgtagaccaggacctaaggacatatctggacaaggcacccccaccaggcttgccagccgaaacgatcaaggatctgatgcgccagtttctaagaggcctagatttccttcatgccaattgcatcgttcaccgagatctgaagccagagaacattctggtgacaagtggtggaacagtcaagctggctgactttggcctggccagaatctacagctaccagatggcacttacacccgtggttgttacactctggtaccgagctcccgaagttcttctgcagtccacatatgcaacacctgtggacatgtggagtgttggctgtatctttgcagagatgtttcgtcgaaaaagcctctcttctgtggaaactctgaagccgaccagttgggcaaaatctttgacctgattgggctgcctccagaggatgactggcctcgagatgtatccctgccccgtggagcctttccccccagagggccccgcccagtgcagtcggtggtacctgagatggaggagtcgggagcacagctgctgctggaaatgctgacttttaacccacacaagcgaatctctgcctttcgagctctgcagcactcttatctacataaggatgaaggtaatccggagtgagcaatggagtggctgccatggaaggaagaaaagctgccatttcccttctggacactgagagggcaatctttgcctttatctctgaggctatggagggtcctcctccatctttctacagagattactttgctgccttaatgacattcccctcccacctctccttttgaggcttctccttctccttcccatttctctacactaaggggtatgttccctcttgtccctttccctacctttatatttggggtccttttttatacaggaaaaacaaaacaaagaaataatggtctttttttttttttttttttttttttttttttttttttttttttttttttttttttttttttttttttttttttttttttttgtgtgtgggggggagagagagaggggaggggggggggggagtga

SEQ ID NO: 348453 - DNA, 1516 bp, Homo sapiens
  misc_feature (15)..(15): n is a, c, g, or t
  misc_feature (19)..(19): n is a, c, g, or t
  misc_feature (26)..(26): n is a, c, g, or t
  misc_feature (82)..(82): n is a, c, g, or t
ggcgtgggtaccgcncccncgcgtangatatgtcacagggccggggctctcttggtgcggactgatgtcatggtccgggggncggaccgagctcgggtgtatggggccgtaggaaccggctccggggccccgataacgggccgcccccacagcaccccgggctggcgtgagggtctcccttgatctgagaatggctacctctcgatatgagccagtggctgaaattggtgtcggtgcctatgggacagtgtacaaggcccgtgatccccacagtggccactttgtggccctcaagagtgtgagagtccccaatggaggaggaggtggaggaggccttcccatcagcacagttcgtgaggtggctttactgaggcgactggaggcttttgagcatcccaatgttgtccggctgatggacgtctgtgccacatcccgaactgaccgggagatcaaggtaaccctggtgtttgagcatgtagaccaggacctaaggacatatctggacaaggcacccccaccaggcttgccagccgaaacgatcaaggatctgatgcgccagtttctaagaggcctagatttccttcatgccaattgcatcgttcaccgagatctgaagccagagaacattctggtgacaagtggtggaacagtcaagctggctgactttggcctggccagaatctacagctaccagatggcacttacacccgtggttgttacactctggtaccgagctcccgaagttcttctgcagtccacatatgcaacacctgtggacatgtggagtgttggctgtatctttgcagagatgtttcgtcgaaagcctctcttctgtggaaactctgaagccgaccagttgggcaaaatctttgacctgattgggctgcctccagaggatgactggcctcgagatgtatccctgccccgtggagcctttccccccagagggccccgcccagtgcagtcggtggtacctgagatggaggagtcgggagcacagctgctgctggaaatgctgacttttaacccacacaagcgaatctctgcctttcgagctctgcagcactcttatctacataaggatgaaggtaatccggagtgagcaatggagtggctgccatggaaggaagaaaagctgccatttcccttctggacactgagagggcaatctttgcctttatctctgaggctatggagggtcctcctccatctttctacagagattactttgctgccttaatgacattcccctcccacctctccttttgaggcttctccttctccttcccatttctctacactaaggggtatgttccctcttgtccctttccctacctttatatttggggtccttttttatacaggaaaaacaaaacaaagaaataatggtctttttttttttttttttttttttttttttttttttttttttttttttttttttttttttttttttttttttttttttttttgtgtgtgggggggagagagagaggggaggggggggggggagtga

SEQ ID NO: 348454 - DNA, 1451 bp, Homo sapiens
gtcccctgccagcccctcggcctcaccccattcccactccgtgtcctggggcccgcccagcctccttaggcgccgcgcctgctcgcggtctccgctgacaccccagggtctcccttgatctgagaatggctacctctcgatatgagccagtggctgaaattggtgtcggtgcctatgggacagtgtacaaggcccgtgatccccacagtggccactttgtggccctcaagagtgtgagagtccccaatggaggaggaggtggaggaggccttcccatcagcacagttcgtgaggtggctttactgaggcgactggaggcttttgagcatcccaatgttgtccggctgatggacgtctgtgccacatcccgaactgaccgggagatcaaggtaaccctggtgtttgagcatgtagaccaggacctaaggacatatctggacaaggcacccccaccaggcttgccagccgaaacgatcaaggatctgatgcgccagtttctaagaggcctagatttccttcatgccaattgcatcgttcaccgagatctgaagccagagaacattctggtgacaagtggtggaacagtcaagctggctgactttggcctggccagaatctacagctaccagatggcacttacacccgtggttgttacactctggtaccgagctcccgaagttcttctgcagtccacatatgcaacacctgtggacatgtggagtgttggctgtatctttgcagagatgtttcgtcgaaagcctctcttctgtggaaactctgaagccgaccagttgggcaaaatctttgacctgattgggctgcctccagaggatgactggcctcgagatgtatccctgccccgtggagcctttccccccagagggccccgcccagtgcagtcggtggtacctgagatggaggagtcgggagcacagctgctgctggaaatgctgacttttaacccacacaagcgaatctctgcctttcgagctctgcagcactcttatctacataaggatgaaggtaatccggagtgagcaatggagtggctgccatggaaggaagaaaagctgccatttcccttctggacactgagagggcaatctttgcctttatctctgaggctatggagggtcctcctccatctttctacagagattactttgctgccttaatgacattcccctcccacctctccttttgaggcttctccttctccttcccatttctctacactaaggggtatgttccctcttgtccctttccctacctttatatttggggtccttttttatacaggaaaaacaaaacaaagaaataatggtctttttttttttttttttttttttttttttttttttttttttttttttttttttttttttttttttttttttttttttttttgtgtgtgggggggagagagagaggggaggggggggggggagtga

SEQ ID NO: 348455 - DNA, 1260 bp, Homo sapiens
gcctcctccattggggaggaggtggaggaggccttcccatcagtaaagccacctcacgaactgtgctgatgggaaggccttcccatcagcacagttcgtgaggtggctttactgaggcgactggaggcttttgagcatcccaatgttgtccggctgatggacgtctgtgccacatcccgaactgaccgggagatcaaggtaaccctggtgtttgagcatgtagaccaggacctaaggacatatctggacaaggcacccccaccaggcttgccagccgaaacgatcaaggatctgatgcgccagtttctaagaggcctagatttccttcatgccaattgcatcgttcaccgagatctgaagccagagaacattctggtgacaagtggtggaacagtcaagctggctgactttggcctggccagaatctacagctaccagatggcacttacacccgtggttgttacactctggtaccgagctcccgaagttcttctgcagtccacatatgcaacacctgtggacatgtggagtgttggctgtatctttgcagagatgtttcgtcgaaagcctctcttctgtggaaactctgaagccgaccagttgggcaaaatctttgacctgattgggctgcctccagaggatgactggcctcgagatgtatccctgccccgtggagcctttccccccagagggccccgcccagtgcagtcggtggtacctgagatggaggagtcgggagcacagctgctgctggaaatgctgacttttaacccacacaagcgaatctctgcctttcgagctctgcagcactcttatctacataaggatgaaggtaatccggagtgagcaatggagtggctgccatggaaggaagaaaagctgccatttcccttctggacactgagagggcaatctttgcctttatctctgaggctatggagggtcctcctccatctttctacagagattactttgctgccttaatgacattcccctcccacctctccttttgaggcttctccttctccttcccatttctctacactaaggggtatgttccctcttgtccctttccctacctttatatttggggtccttttttatacaggaaaaacaaaacaaagaaataatggtctttttttttttttttttttttttttttttttttttttttttttttttttttttttttttttttttttttttttttttttttgtgtgtgggggggagagagagaggggaggggggggggggagtga

SEQ ID NO: 348456 - DNA, 1289 bp, Homo sapiens
aaaacatttaggctagtacgaggctggtgtgaattcggccgaggtagcttgcggcctgtgtctatggtcgggccctctgcgtccagctgctccggaccgagctcgggtgtatggggccgtaggaaccggctccggggccccgataacgggccgcccccacagcaccccgggctggcgtgaggctgatggacgtctgtgccacatcccgaactgaccgggagatcaaggtaaccctggtgtttgagcatgtagaccaggacctaaggacatatctggacaaggcacccccaccaggcttgccagccgaaacgatcaaggatctgatgcgccagtttctaagaggcctagatttccttcatgccaattgcatcgttcaccgagatctgaagccagagaacattctggtgacaagtggtggaacagtcaagctggctgactttggcctggccagaatctacagctaccagatggcacttacacccgtggttgttacactctggtaccgagctcccgaagttcttctgcagtccacatatgcaacacctgtggacatgtggagtgttggctgtatctttgcagagatgtttcgtcgaaagcctctcttctgtggaaactctgaagccgaccagttgggcaaaatctttgacctgattgggctgcctccagaggatgactggcctcgagatgtatccctgccccgtggagcctttccccccagagggccccgcccagtgcagtcggtggtacctgagatggaggagtcgggagcacagctgctgctggaaatgctgacttttaacccacacaagcgaatctctgcctttcgagctctgcagcactcttatctacataaggatgaaggtaatccggagtgagcaatggagtggctgccatggaaggaagaaaagctgccatttcccttctggacactgagagggcaatctttgcctttatctctgaggctatggagggtcctcctccatctttctacagagattactttgctgccttaatgacattcccctcccacctctccttttgaggcttctccttctccttcccatttctctacactaaggggtatgttccctcttgtccctttccctacctttatatttggggtccttttttatacaggaaaaacaaaacaaagaaataatggtctttttttttttttttttttttttttttttttttttttttttttttttttttttttttttttttttttttttttttttttttgtgtgtgggggggagagagagaggggaggggggggggggagtga

SEQ ID NO: 348457 - DNA, 1302 bp, Homo sapiens
aagtggggaccctgaggaaataatgagaggccatgttgggttaaaggggattgaaaagtgagcatttactctggtcaggctgatggacgtctgtgccacatcccgaactgaccgggagatcaaggtaaccctggtgtttgagcatgtagaccaggacctaaggacatatctggacaaggcacccccaccaggcttgccagccgaaacgatcaaggtgagtggggttggtaggcattgagaggtggattgggacctttgtagtagaaccttctgggatttcaggtatggtgcctagtttccagtgcatctgtacctcccctttgaaactaggatctgatgcgccagtttctaagaggcctagatttccttcatgccaattgcatcgttcaccgagatctgaagccagagaacattctggtgacaagtggtggaacagtcaagctggctgactttggcctggccagaatctacagctaccagatggcacttacacccgtggttgttacactctggtaccgagctcccgaagttcttctgcagtccacatatgcaacacctgtggacatgtggagtgttggctgtatctttgcagagatgtttcgtcgaaagcctctcttctgtggaaactctgaagccgaccagttgggcaaaatctttgacctgattgggctgcctccagaggatgactggcctcgagatgtatccctgccccgtggagcctttccccccagagggccccgcccagtgcagtcggtggtacctgagatggaggagtcgggagcacagctgctgctggaaatgctgacttttaacccacacaagcgaatctctgcctttcgagctctgcagcactcttatctacataaggatgaaggtaatccggagtgagcaatggagtggctgccatggaaggaagaaaagctgccatttcccttctggacactgagagggcaatctttgcctttatctctgaggctatggagggtcctcctccatctttctacagagattactttgctgccttaatgacattcccctcccacctctccttttgaggcttctccttctccttcccatttctctacactaaggggtatgttccctcttgtccctttccctacctttatatttggggtccttttttatacaggaaaaacaaaacaaagaaataatggtctttttttttttttttttttttttttttttttttttttttttttttttttttttttttttttttttttttttttttttttttgtgtgtgggggggagagagagaggggaggggggggggggagtga

SEQ ID NO: 348458 - DNA, 1458 bp, Homo sapiens
ctggggccccgaagttcctgatcgaccacacagtgccggcggcgctggcttgagcggtctcaccttggatcatgagaaatggttacactctcggatattagccattggataacattgttgtcggtgtctatgagagaacagtgtacattggccccagtagatcacccaacagtggccaacattagttgtgccctccacagagtgtgacgcagtccccaactggacgcgaggaagcgtgcgaaggacggctgttcccctagttagtcacaggtcttcgctgaagcgcttgcgcgtttgagtgttaggcgagctggaggcattccgagtcatccgcaagtggttgtgcgtgctgatggacgtctgtgccacatcccgaactgaccgggagatcaaggtaaccctggtgtttgagcatgtagaccaggacctaaggacatatctggacaaggcacccccaccaggcttgccagccgaaacgatcaaggatctgatgcgccagtttctaagaggcctagatttccttcatgccaattgcatcgttcaccgagatctgaagccagagaacattctggtgacaagtggtggaacagtcaagctggctgactttggcctggccagaatctacagctaccagatggcacttacacccgtggttgttacactctggtaccgagctcccgaagttcttctgcagtccacatatgcaacacctgtggacatgtggagtgttggctgtatctttgcagagatgtttcgtcgaaaaagcctctcttctgtggaaactctgaagccgaccagttgggcaaaatctttgacctgattgggctgcctccagaggatgactggcctcgagatgtatccctgccccgtggagcctttccccccagagggccccgcccagtgcagtcggtggtacctgagatggaggagtcgggagcacagctgctgctggaaatgctgacttttaacccacacaagcgaatctctgcctttcgagctctgcagcactcttatctacataaggatgaaggtaatccggagtgagcaatggagtggctgccatggaaggaagaaaagctgccatttcccttctggacactgagagggcaatctttgcctttatctctgaggctatggagggtcctcctccatctttctacagagattactttgctgccttaatgacattcccctcccacctctccttttgaggcttctccttctccttcccatttctctacactaaggggtatgttccctcttgtccctttccctacctttatatttggggtccttttttatacaggaaaaacaaaacaaagaaataatggtctttttttttttttttttttttttttttttttttttttttttttttttttttttttttttttttttttttttttttttttttgtgtgtgggggggagagagagaggggaggggggggggggagtga

SEQ ID NO: 348459 - DNA, 1517 bp, Homo sapiens
tcccagtcgaagcacctcctgtccgcccctcagcgcatgggtggcggtcacgtgcccagaacgtccggcgttcgccccgccctcccagtttccgcgcgcctctttggcagctggtcacatggtgagggtgggggtgagggggcctctctagcttgcggcctgtgtctatggtcgggccctctgcgtccagctgctccggaccgagctcgggtgtatggggccgtaggaaccggctccggggccccgataacgggccgcccccacagcaccccgggctggcgtgagggtctcccttgatctgagaatggctacctctcgatatgagccagtggctgaaattggtgtcggtgcctatgggacagtgtacaaggcccgtgatccccacagtggccactttgtggccctcaagagtgtgagagtccccaatggaggaggaggtggaggaggccttcccatcagcacagttcgtgaggtggctttactgaggcgactggaggcttttgagcatcccaatgttgtccggctgatggacgtctgtgccacatcccgaactgaccgggagatcaaggtaaccctggtgtttgagcatgtagaccaggacctaaggacatatctggacaaggcacccccaccaggcttgccagccgaaacgatcaaggatctgatgcgccagtttctaagaggcctagatttccttcatgccaattgcatcgttcaccgagatctgaagccagagaacattctggtgacaagtggtggaacagtcaagctggctgactttggcctggccagaatctacagctaccagatggcacttacacccgtggtcagtagaaagatggtaccaaaatgggttctggttgggagtaggagagtgattgcccgtagcaattgagaagtcatgtgcttcatgtgttcagtcaagcaagttgtgtttcatggtaacccatggggtccccatccattcttcctattccctttaggttgttacactctggtaccgagctcccgaagttcttctgcagtccacatatgcaacacctgtggacatgtggagtgttggctgtatctttgcagagatgtttcgtcgaaaaagtatgggacccacataccctggactaccttgaattccccaaatcgcttgttcataaaccacatccataccttgcccattctttttttttgagaccagggcttgctgtgttgcccaggctggattgcaatggcatgatcacagctcactgcagcttcaacctcctgggctcaagtgatcctcccatctcagcttcccaactagctgacactacaggcacgcacctccatgcttggctagtttgttaatatttttatagagatggggtctcagtatattgcccaggctggtcttgaactcttgcactcaagcaatcctcccacccctacctcccaaagtagcataagctactgcatctggccccattcttttacttgcgtactactaacttgcccatagcagaaagctctgaaatgttctggaa

SEQ ID NO: 348460 - DNA, 985 bp, Homo sapiens
cgatctcttgacctcatgatccacccacatcagactcccaaagtgctaggattacaggcgtgagccgctgcacctggcatttctttttttttaaaaaaagagacaaggtcttgcttgcccaggctgatctagaactcctgggctcaagcagtcctctcacctcagcatcccaaagtgctggaattgttggcctttattccctatacttcctattttgagccactaagcagtaaccattcaactaagatatctttgaaaatgactgctaccttatatcccttctcaccttaggcctctcttctgtggaaactctgaagccgaccagttgggcaaaatctttgacctgattgggctgcctccagaggatgactggcctcgagatgtatccctgccccgtggagcctttccccccagagggccccgcccagtgcagtcggtggtacctgagatggaggagtcgggagcacagctgctgctggaaatgctgacttttaacccacacaagcgaatctctgcctttcgagctctgcagcactcttatctacataaggatgaaggtaatccggagtgagcaatggagtggctgccatggaaggaagaaaagctgccatttcccttctggacactgagagggcaatctttgcctttatctctgaggctatggagggtcctcctccatctttctacagagattactttgctgccttaatgacattcccctcccacctctccttttgaggcttctccttctccttcccatttctctacactaaggggtatgttccctcttgtccctttccctacctttatatttggggtccttttttatacaggaaaaacaaaacaaagaaataatggtctttttttttttttttttttttttttttttttttttttttttttttttttttttttttttttttttttttttttttttttttgtgtgtgggggggagagagagaggggaggggggggggggagtga

SEQ ID NO: 348461 - DNA, 751 bp, Homo sapiens
tggtggcacacgcctgtaatctcagctacttgggaggctgagataggagaatcacttcaactcaggaggcggaggttgcagtgagctgagatcataccattgcactccagcctgggtgatagagcgagactccgtctcaaaaaaaaaaaaaaagaaaaaagaagaaagctcatcccaggtattgttgtgggtgggcagaagtctgttttcttcatggttttctgacctttgcctctcccctcaggaaatgctgacttttaacccacacaagcgaatctctgcctttcgagctctgcagcactcttatctacataaggatgaaggtaatccggagtgagcaatggagtggctgccatggaaggaagaaaagctgccatttcccttctggacactgagagggcaatctttgcctttatctctgaggctatggagggtcctcctccatctttctacagagattactttgctgccttaatgacattcccctcccacctctccttttgaggcttctccttctccttcccatttctctacactaaggggtatgttccctcttgtccctttccctacctttatatttggggtccttttttatacaggaaaaacaaaacaaagaaataatggtctttttttttttttttttttttttttttttttttttttttttttttttttttttttttttttttttttttttttttttttttgtgtgtgggggggagagagagaggggaggggggggggggagtga

SEQ ID NO: 348462 - DNA, 540 bp, Homo sapiens
attctagggtcttagggagcaccgctgctgtaggaaatgctgacttttaacccacacaagcgaatctctgcctttcgagctctgcagcactcttatctacataaggatgaaggtaatccggagtgagcaatggagtggctgccatggaaggaagaaaagctgccatttcccttctggacactgagagggcaatctttgcctttatctctgaggctatggagggtcctcctccatctttctacagagattactttgctgccttaatgacattcccctcccacctctccttttgaggcttctccttctccttcccatttctctacactaaggggtatgttccctcttgtccctttccctacctttatatttggggtccttttttatacaggaaaaacaaaacaaagaaataatggtctttttttttttttttttttttttttttttttttttttttttttttttttttttttttttttttttttttttttttttttttgtgtgtgggggggagagagagaggggaggggggggggggagtga

SEQ ID NO: 348463 - DNA, 1633 bp, Homo sapiens
tcccagtcgaagcacctcctgtccgcccctcagcgcatgggtggcggtcacgtgcccagaacgtccggcgttcgccccgccctcccagtttccgcgcgcctctttggcagctggtcacatggtgagggtgggggtgagggggcctctctagcttgcggcctgtgtctatggtcgggccctctgcgtccagctgctccggaccgagctcgggtgtatggggccgtaggaaccggctccggggccccgataacgggccgcccccacagcaccccgggctggcgtgagggtctcccttgatctgagaatggctacctctcgatatgagccagtggctgaaattggtgtcggtgcctatgggacagtgtacaaggcccgtgatccccacagtggccactttgtggccctcaagagtgtgagagtccccaatggaggaggaggtggaggaggccttcccatcagcacagttcgtgaggtggctttactgaggcgactggaggcttttgagcatcccaatgttgtccggctgatggacgtctgtgccacatcccgaactgaccgggagatcaaggtaaccctggtgtttgagcatgtagaccaggacctaaggacatatctggacaaggcacccccaccaggcttgccagccgaaacgatcaaggtgagtggggttggtaggcattgagaggtggattgggacctttgtagtagaaccttctgggatttcaggtatggtgcctagtttccagtgcatctgtacctcccctttgaaactaggatctgatgcgccagtttctaagaggcctagatttccttcatgccaattgcatcgttcaccgagatctgaagccagagaacattctggtgacaagtggtggaacagtcaagctggctgactttggcctggccagaatctacagctaccagatggcacttacacccgtggtcagtagaaagatggtaccaaaatgggttctggttgggagtaggagagtgattgcccgtagcaattgagaagtcatgtgcttcatgtgttcagtcaagcaagttgtgtttcatggtaacccatggggtccccatccattcttcctattccctttaggttgttacactctggtaccgagctcccgaagttcttctgcagtccacatatgcaacacctgtggacatgtggagtgttggctgtatctttgcagagatgtttcgtcgaaaaagtatgggacccacataccctggactaccttgaattccccaaatcgcttgttcataaaccacatccataccttgcccattctttttttttgagaccagggcttgctgtgttgcccaggctggattgcaatggcatgatcacagctcactgcagcttcaacctcctgggctcaagtgatcctcccatctcagcttcccaactagctgacactacaggcacgcacctccatgcttggctagtttgttaatatttttatagagatggggtctcagtatattgcccaggctggtcttgaactcttgcactcaagcaatcctcccacccctacctcccaaagtagcataagctactgcatctggccccattcttttacttgcgtactactaacttgcccatagcagaaagctctgaaatgttctggaa

SEQ ID NO: 348464 - DNA, 468 bp, Homo sapiens
cggcttatttttagactgcggatcatactatggcgttaggtcgtcctgtactgagcaatggagtggctgccatggaaggaagaaaagctgccatttcccttctggacactgagagggcaatctttgcctttatctctgaggctatggagggtcctcctccatctttctacagagattactttgctgccttaatgacattcccctcccacctctccttttgaggcttctccttctccttcccatttctctacactaaggggtatgttccctcttgtccctttccctacctttatatttggggtccttttttatacaggaaaaacaaaacaaagaaataatggtctttttttttttttttttttttttttttttttttttttttttttttttttttttttttttttttttttttttttttttttttgtgtgtgggggggagagagagaggggaggggggggggggagtga

SEQ ID NO: 348465 - DNA, 816 bp, Homo sapiens
tcccagtcgaagcacctcctgtccgcccctcagcgcatgggtggcggtcacgtgcccagaacgtccggcgttcgccccgccctcccagtttccgcgcgcctctttggcagctggtcacatggtgagggtgggggtgagggggcctctctagcttgcggcctgtgtctatggtcgggccctctgcgtccagctgctccggaccgagctcgggtgtatggggccgtaggaaccggctccggggccccgataacgggccgcccccacagcaccccgggctggcgtgagggtctcccttgatctgagaatggctacctctcgatatgagccagtggctgaaattggtgtcggtgcctatgggacagtgtacaaggcccgtgatccccacagtggccactttgtggccctcaagagtgtgagagtccccaatggaggaggaggtggaggaggccttcccatcagcacagttcgtgaggtggctttactgaggcgactggaggcttttgagcatcccaatgttgtccgccgtgatgagacgtctgtgcacacattaccgaactgaccggggagatcaagggtaacaccatggatgctcgtgagcaatgtagcaaccacggcaccttagagggacgatatctggcacaaggcacccccccacgcaaggactgtgcccaagcacgaacaacggaatcgacagggactcttgactggcgcccagtctatctacacgagcgcctagaattctccttcaagtggcccaatatgcactccgcttacacccgcagaactcttgacaggcccagcagaaccactccctgg

SEQ ID NO: 348466 - DNA, 679 bp, Homo sapiens
tcccagtcgaagcacctcctgtccgcccctcagcgcatgggtggcggtcacgtgcccagaacgtccggcgttcgccccgccctcccagtttccgcgcgcctctttggcagctggtcacatggtgagggtgggggtgagggggcctctctagcttgcggcctgtgtctatggtcgggccctctgcgtccagctgctccggaccgagctcgggtgtatggggccgtaggaaccggctccggggccccgataacgggccgcccccacagcaccccgggctggcgtgagggtctcccttgatctgagaatggctacctctcgatatgagccagtggctgaaattggtgtcggtgcctatgggacagtgtacaaggcccgtgatccccacagtggccactttgtggccctcaagagtgtgagagtctctccttttgaggcttctccttctccttcccatttctctacactaaggggtatgttccctcttgtccctttccctacctttatatttggggtccttttttatacaggaaaaacaaaacaaagaaataatggtctttttttttttttttttttttttttttttttttttttttttttttttttttttttttttttttttttttttttttttttttgtgtgtgggggggagagagagaggggaggggggggggggagtga

SEQ ID NO: 348467 - DNA, 1076 bp, Homo sapiens
aaaacatttaggctagtacgaggctggtgtgaattcggccgaggtagcttgcggcctgtgtctatggtcgggccctctgcgtccagctgctccggaccgagctcgggtgtatggggccgtaggaaccggctccggggccccgataacgggccgcccccacagcaccccgggctggcgtgaggtaagtgcagtcccttcccaggaatgagaaccagtgcccgcccccctcacagctttccacgcgttcgtttcgcgagctggttatggaagggtcgctcaagggcgggaagtggggcctttgtggtcatgggaaagtataattttagggactgaggtgtaggatcttcgatgcaaggcatgtgtcatgtgtgatctttgtgcggggcgcgattgtcccaaaggaaaaagcgttttctattgcagggcctcacgtggctggaggggttggtattgagtcattgtgttatctctggggccggccccaaggaagactgggagcgggggatgggatgctggtggtgttctttgcgctttttttttgggagtccctttgttgctgcaggctcataccatcctaactctgtaagcgacttttggtgataggagtctgtgattgtagggtctcccttgatctgagaatggctacctctcgatatgagccagtggctgaaattggtgtcggtgcctatgggacagtgtacaaggcccgtgatccccacagtggccactttgtggccctcaagagtgtgagagtgagggtcctcctccatctttctacagagattactttgctgccttaatgacattcccctcccacctctccttttgaggcttctccttctccttcccatttctctacactaaggggtatgttccctcttgtccctttccctacctttatatttggggtccttttttatacaggaaaaacaaaacaaagaaataatggtctttttttttttttttttttttttttttttttttttttttttttttttttttttttttttttttttttttttttttttttttgtgtgtgggggggagagagagaggggaggggggggggggagtga

SEQ ID NO: 348468 - DNA, 699 bp, Homo sapiens
ttctattctgagtcctctttctgctgaacccaggatggcaactggctctgcccatggggatgggaactggaggaccctcctgaccagagttctcctgtcccccacagcctgattgggctgcctccagaggatgactggcctcgagatgtatccctgccccgtggagcctttccccccagagggccccgcccagtgcagtcggtggtacctgagatggaggagtcgggagcacagctgctgctgggtactggagatggctgtgggcacagggaaagaaatagagactggggaaagaaatagagcagtatgcagggccctggccactgtggttaatgaaacttggttggtagatgggctgtagtttttattacagctgcaaatagccacccacagagaaggatatagaagagaacccatcctggctgggcacggtggctcacgcctgtaatcccagcactttgggaggccaaggtgggcgtatcacctgaggtcaggagttcgagaccagcctggccaacatggtgaaacctcgtctctactaaaagtacaaaaataagccgggggtggtggcacacgcctgtaatctcagctacttgggaggctgagataggagaatcacttcaactcaggaggcggaggttgcagtgagctgagatcataccattgcactccagcctgggtgatagagcgagactccgt

SEQ ID NO: 348469 - DNA, 1630 bp, Homo sapiens
tcccagtcgaagcacctcctgtccgcccctcagcgcatgggtggcggtcacgtgcccagaacgtccggcgttcgccccgccctcccagtttccgcgcgcctctttggcagctggtcacatggtgagggtgggggtgagggggcctctctagcttgcggcctgtgtctatggtcgggccctctgcgtccagctgctccggaccgagctcgggtgtatggggccgtaggaaccggctccggggccccgataacgggccgcccccacagcaccccgggctggcgtgagggtctcccttgatctgagaatggctacctctcgatatgagccagtggctgaaattggtgtcggtgcctatgggacagtgtacaaggcccgtgatccccacagtggccactttgtggccctcaagagtgtgagagtccccaatggaggaggaggtggaggaggccttcccatcagcacagttcgtgaggtggctttactgaggcgactggaggcttttgagcatcccaatgttgtccggctgatggacgtctgtgccacatcccgaactgaccgggagatcaaggtaaccctggtgtttgagcatgtagaccaggacctaaggacatatctggacaaggcacccccaccaggcttgccagccgaaacgatcaaggatctgatgcgccagtttctaagaggcctagatttccttcatgccaattgcatcgttcaccgagatctgaagccagagaacattctggtgacaagtggtggaacagtcaagctggctgactttggcctggccagaatctacagctaccagatggcacttacacccgtggttgttacactctggtaccgagctcccgaagttcttctgcagtccacatatgcaacacctgtggacatgtggagtgttggctgtatctttgcagagatgtttcgtcgaaagcctctcttctgtggaaactctgaagccgaccagttgggcaaaatctttgacctgattgggctgcctccagaggatgactggcctcgagatgtatccctgccccgtggagcctttccccccagagggccccgcccagtgcagtcggtggtacctgagatggaggagtcgggagcacagctgctgctggaaatgctgacttttaacccacacaagcgaatctctgcctttcgagctctgcagcactcttatctacataaggatgaaggtaatccggagtgagcaatggagtggctgccatggaaggaagaaaagctgccatttcccttctggacactgagagggcaatctttgcctttatctctgaggctatggagggtcctcctccatctttctacagagattactttgctgccttaatgacattcccctcccacctctccttttgaggcttctccttctccttcccatttctctacactaaggggtatgttccctcttgtccctttccctacctttatatttggggtccttttttatacaggaaaaacaaaacaaagaaataatggtctttttttttttttttttttttttttttttttttttttttttttttttttttttttttttttttttttttttttttttttttgtgtgtgggggggagagagagaggggaggggggggggggagtga

SEQ ID NO: 348470 - DNA, 1597 bp, Homo sapiens
tcccagtcgaagcacctcctgtccgcccctcagcgcatgggtggcggtcacgtgcccagaacgtccggcgttcgccccgccctcccagtttccgcgcgcctctttggcagctggtcacatggtgagggtgggggtgagggggcctctctagcttgcggcctgtgtctatggtcgggccctctgcgtccagctgctccggaccgagctcgggtgtatggggccgtaggaaccggctccggggccccgataacgggccgcccccacagcaccccgggctggcgtgagggtctcccttgatctgagaatggctacctctcgatatgagccagtggctgaaattggtgtcggtgcctatgggacagtgtacaaggcccgtgatccccacagtggccactttgtggccctcaagagtgtgagagtccccaatggaggaggaggtggaggaggccttcccatcagcacagttcgtgaggtggctttactgaggcgactggaggcttttgagcatcccaatgttgtccggctgatggacgtctgtgccacatcccgaactgaccgggagatcaaggtaaccctggtgtttgagcatgtagaccaggacctaaggacatatctggacaaggcacccccaccaggcttgccagccgaaacgatcaaggatctgatgcgccagtttctaagaggcctagatttccttcatgccaattgcatcgttcaccgagatctgaagccagagaacattctggtgacaagtggtggaacagtcaagctggctgactttggcctggccagaatctacagctaccagatggcacttacacccgtggttgttacactctggtaccgagctcccgaagttcttctgcagtccacatatgcaacacctgtggacatgtggagtgttggctgtatctttgcagagatgtttcgtcgaaagcctctcttctgtggaaactctgaagccgaccagttgggcaaaatctttgacctgattgggctgcctccagaggatgactggcctcgagatgtatccctgccccgtggagcctttccccccagagggccccgcccagtgcagtcggtggtacctgagatggaggagtcgggagcacagctgctgctggaaatgctgacttttaacccacacaagcgaatctctgcctttcgagctctgcagcactcttatctacataaggatgaaggtaatccggagtgagcaatggagtggctgccatggaaggaagaaaagctgccatttcccttctggacactgagagggcaatctttgcctttatctctgaggctatggagggtcctcctccatctttctacagagattactttgctgccttaatgacattcccctcccacctctccttttgaggcttctccttctccttcccatttctctacactaaggggtatgttccctcttgtccctttccctacctttatatttggggtccttttttatacaggaaaaacaaaacaaagaaaaaaaatcgggcaattgcggcgggaaaaggttgacggcagggaagggtccgacaatttgacagggatgcggccaaggagatatcgagcgtctgttacacaa

SEQ ID NO: 348471 - DNA, 1526 bp, Homo sapiens
aaaacatttaggctagtacgaggctggtgtgaattcggccgaggtagcttgcggcctgtgtctatggtcgggccctctgcgtccagctgctccggaccgagctcgggtgtatggggccgtaggaaccggctccggggccccgataacgggccgcccccacagcaccccgggctggcgtgagggtctcccttgatctgagaatggctacctctcgatatgagccagtggctgaaattggtgtcggtgcctatgggacagtgtacaaggcccgtgatccccacagtggccactttgtggccctcaagagtgtgagagtccccaatggaggaggaggtggaggaggccttcccatcagcacagttcgtgaggtggctttactgaggcgactggaggcttttgagcatcccaatgttgtccggctgatggacgtctgtgccacatcccgaactgaccgggagatcaaggtaaccctggtgtttgagcatgtagaccaggacctaaggacatatctggacaaggcacccccaccaggcttgccagccgaaacgatcaaggatctgatgcgccagtttctaagaggcctagatttccttcatgccaattgcatcgttcaccgagatctgaagccagagaacattctggtgacaagtggtggaacagtcaagctggctgactttggcctggccagaatctacagctaccagatggcacttacacccgtggttgttacactctggtaccgagctcccgaagttcttctgcagtccacatatgcaacacctgtggacatgtggagtgttggctgtatctttgcagagatgtttcgtcgaaagcctctcttctgtggaaactctgaagccgaccagttgggcaaaatctttgacctgattgggctgcctccagaggatgactggcctcgagatgtatccctgccccgtggagcctttccccccagagggccccgcccagtgcagtcggtggtacctgagatggaggagtcgggagcacagctgctgctggaaatgctgacttttaacccacacaagcgaatctctgcctttcgagctctgcagcactcttatctacataaggatgaaggtaatccggagtgagcaatggagtggctgccatggaaggaagaaaagctgccatttcccttctggacactgagagggcaatctttgcctttatctctgaggctatggagggtcctcctccatctttctacagagattactttgctgccttaatgacattcccctcccacctctccttttgaggcttctccttctccttcccatttctctacactaaggggtatgttccctcttgtccctttccctacctttatatttggggtccttttttatacaggaaaaacaaaacaaagaaataatggtctttttttttttttttttttttttttttttttttttttttttttttttttttttttttttttttttttttttttttttttttgtgtgtgggggggagagagagaggggaggggggggggggagtga

SEQ ID NO: 348472 - DNA, 1289 bp, Homo sapiens
tcccagtcgaagcacctcctgtccgcccctcagcgcatgggtggcggtcacgtgcccagaacgtccggcgttcgccccgccctcccagtttccgcgcgcctctttggcagctggtcacatggtgagggtgggggtgagggggcctctctagcttgcggcctgtgtctatggtcgggccctctgcgtccagctgctccggaccgagctcgggtgtatggggccgtaggaaccggctccggggccccgataacgggccgcccccacagcaccccgggctggcgtgagggtctcccttgatctgagaatggctacctctcgatatgagccagtggctgaaattggtgtcggtgcctatgggacagtgtacaaggcccgtgatccccacagtggccactttgtggccctcaagagtgtgagagtccccaatggaggaggaggtggaggaggccttcccatcagcacagttcgtgaggtggctttactgaggcgactggaggcttttgagcatcccaatgttgtccggctgatggacgtctgtgccacatcccgaactgaccgggagatcaaggtaaccctggtgtttgagcatgtagaccaggacctaaggacatatctggacaaggcacccccaccaggcttgccagccgaaacgatcaaggatctgatgcgccagtttctaagaggcctagatttccttcatgccaattgcatcgttcaccgagatctgaagccagagaacattctggtgacaagtggtggaacagtcaagctggctgactttggcctggccagaatctacagctaccagatggcacttacacccgtggttgttacactctggtaccgagctcccgaagttcttctgcagtccacatatgcaacacctgtggacatgtggagtgttggctgtatctttgcagagatgtttcgtcgaaagcctctcttctgtggaaactctgaagccgaccagttgggcaaaatctttgacctgattgggctgcctccagaggatgactggcctcgagatgtatccctgccccgtggagcctttccccccagagggccccgcccagtgcagtcggtggtacctgagatggaggagtcgggagcacagctgctgctggaaatgctgacttttaacccacacaagcgaatctctgcctttcgagctctgcagcactcttatctacataaggatgaaggtaatccggagtgagcaatggagtggctgccatggaaggaagaaaagctgccatttcccttcgacttctccccttctgtcgtcttct

SEQ ID NO: 348473 - DNA, 1443 bp, Homo sapiens
tcccagtcgaagcacctcctgtccgcccctcagcgcatgggtggcggtcacgtgcccagaacgtccggcgttcgccccgccctcccagtttccgcgcgcctctttggcagctggtcacatggtgagggtgggggtgagggggcctctctagcttgcggcctgtgtctatggtcgggccctctgcgtccagctgctccggaccgagctcgggtgtatggggccgtaggaaccggctccggggccccgataacgggccgcccccacagcaccccgggctggcgtgagggtctcccttgatctgagaatggctacctctcgatatgagccagtggctgaaattggtgtcggtgcctatgggacagtgtacaaggcccgtgatccccacagtggccactttgtggccctcaagagtgtgagagtccccaatggaggaggaggtggaggaggccttcccatcagcacagttcgtgaggtggctttactgaggcgactggaggcttttgagcatcccaatgttgtccggctgatggacgtctgtgccacatcccgaactgaccgggagatcaaggtaaccctggtgtttgagcatgtagaccaggacctaaggacatatctggacaaggcacccccaccaggcttgccagccgaaacgatcaaggatctgatgcgccagtttctaagaggcctagatttccttcatgccaattgcatcgttcaccgagatctgaagccagagaacattctggtgacaagtggtggaacagtcaagctggctgactttggcctggccagaatctacagctaccagatggcacttacacccgtggttgttacactctggtaccgagctcccgaagttcttctgcagtccacatatgcaacacctgtggacatgtggagtgttggctgtatctttgcagagatgtttcgtcgaaagaaatgctgacttttaacccacacaagcgaatctctgcctttcgagctctgcagcactcttatctacataaggatgaaggtaatccggagtgagcaatggagtggctgccatggaaggaagaaaagctgccatttcccttctggacactgagagggcaatctttgcctttatctctgaggctatggagggtcctcctccatctttctacagagattactttgctgccttaatgacattcccctcccacctctccttttgaggcttctccttctccttcccatttctctacactaaggggtatgttccctcttgtccctttccctacctttatatttggggtccttttttatacaggaaaaacaaaacaaagaaataatggtctttttttttttttttttttttttttttttttttttttttttttttttttttttttttttttttttttttttttttttttttgtgtgtgggggggagagagagaggggaggggggggggggagtga

SEQ ID NO: 348474 - DNA, 1789 bp, Homo sapiens
tcccagtcgaagcacctcctgtccgcccctcagcgcatgggtggcggtcacgtgcccagaacgtccggcgttcgccccgccctcccagtttccgcgcgcctctttggcagctggtcacatggtgagggtgggggtgagggggcctctctagcttgcggcctgtgtctatggtcgggccctctgcgtccagctgctccggaccgagctcgggtgtatggggccgtaggaaccggctccggggccccgataacgggccgcccccacagcaccccgggctggcgtgagggtctcccttgatctgagaatggctacctctcgatatgagccagtggctgaaattggtgtcggtgcctatgggacagtgtacaaggcccgtgatccccacagtggccactttgtggccctcaagagtgtgagagtccccaatggaggaggaggtggaggaggccttcccatcagcacagttcgtgaggtggctttactgaggcgactggaggcttttgagcatcccaatgttgtccggctgatggacgtctgtgccacatcccgaactgaccgggagatcaaggtaaccctggtgtttgagcatgtagaccaggacctaaggacatatctggacaaggcacccccaccaggcttgccagccgaaacgatcaaggatctgatgcgccagtttctaagaggcctagatttccttcatgccaattgcatcgttcaccgagatctgaagccagagaacattctggtgacaagtggtggaacagtcaagctggctgactttggcctggccagaatctacagctaccagatggcacttacacccgtggtcagtagaaagatggtaccaaaatgggttctggttgggagtaggagagtgattgcccgtagcaattgagaagtcatgtgcttcatgtgttcagtcaagcaagttgtgtttcatggtaacccatggggtccccatccattcttcctattccctttaggttgttacactctggtaccgagctcccgaagttcttctgcagtccacatatgcaacacctgtggacatgtggagtgttggctgtatctttgcagagatgtttcgtcgaaaaagcctctcttctgtggaaactctgaagccgaccagttgggcaaaatctttgacctgattgggctgcctccagaggatgactggcctcgagatgtatccctgccccgtggagcctttccccccagagggccccgcccagtgcagtcggtggtacctgagatggaggagtcgggagcacagctgctgctggaaatgctgacttttaacccacacaagcgaatctctgcctttcgagctctgcagcactcttatctacataaggatgaaggtaatccggagtgagcaatggagtggctgccatggaaggaagaaaagctgccatttcccttctggacactgagagggcaatctttgcctttatctctgaggctatggagggtcctcctccatctttctacagagattactttgctgccttaatgacattcccctcccacctctccttttgaggcttctccttctccttcccatttctctacactaaggggtatgttccctcttgtccctttccctacctttatatttggggtccttttttatacaggaaaaacaaaacaaagaaataatggtctttttttttttttttttttttttttttttttttttttttttttttttttttttttttttttttttttttttttttttttttgtgtgtgggggggagagagagaggggaggggggggggggagtga

SEQ ID NO: 348475 - DNA, 1964 bp, Homo sapiens
aaaacatttaggctagtacgaggctggtgtgaattcggccgaggtagcttgcggcctgtgtctatggtcgggccctctgcgtccagctgctccggaccgagctcgggtgtatggggccgtaggaaccggctccggggccccgataacgggccgcccccacagcaccccgggctggcgtgaggtaagtgcagtcccttcccaggaatgagaaccagtgcccgcccccctcacagctttccacgcgttcgtttcgcgagctggttatggaagggtcgctcaagggcgggaagtggggcctttgtggtcatgggaaagtataattttagggactgaggtgtaggatcttcgatgcaaggcatgtgtcatgtgtgatctttgtgcggggcgcgattgtcccaaaggaaaaagcgttttctattgcagggcctcacgtggctggaggggttggtattgagtcattgtgttatctctggggccggccccaaggaagactgggagcgggggatgggatgctggtggtgttctttgcgctttttttttgggagtccctttgttgctgcaggctcataccatcctaactctgtaagcgacttttggtgataggagtctgtgattgtagggtctcccttgatctgagaatggctacctctcgatatgagccagtggctgaaattggtgtcggtgcctatgggacagtgtacaaggcccgtgatccccacagtggccactttgtggccctcaagagtgtgagagtccccaatggaggaggaggtggaggaggccttcccatcagcacagttcgtgaggtggctttactgaggcgactggaggcttttgagcatcccaatgttgtccggctgatggacgtctgtgccacatcccgaactgaccgggagatcaaggtaaccctggtgtttgagcatgtagaccaggacctaaggacatatctggacaaggcacccccaccaggcttgccagccgaaacgatcaaggatctgatgcgccagtttctaagaggcctagatttccttcatgccaattgcatcgttcaccgagatctgaagccagagaacattctggtgacaagtggtggaacagtcaagctggctgactttggcctggccagaatctacagctaccagatggcacttacacccgtggttgttacactctggtaccgagctcccgaagttcttctgcagtccacatatgcaacacctgtggacatgtggagtgttggctgtatctttgcagagatgtttcgtcgaaagcctctcttctgtggaaactctgaagccgaccagttgggcaaaatctttgacctgattgggctgcctccagaggatgactggcctcgagatgtatccctgccccgtggagcctttccccccagagggccccgcccagtgcagtcggtggtacctgagatggaggagtcgggagcacagctgctgctggaaatgctgacttttaacccacacaagcgaatctctgcctttcgagctctgcagcactcttatctacataaggatgaaggtaatccggagtgagcaatggagtggctgccatggaaggaagaaaagctgccatttcccttctggacactgagagggcaatctttgcctttatctctgaggctatggagggtcctcctccatctttctacagagattactttgctgccttaatgacattcccctcccacctctccttttgaggcttctccttctccttcccatttctctacactaaggggtatgttccctcttgtccctttccctacctttatatttggggtccttttttatacaggaaaaacaaaacaaagaaataatggtctttttttttttttttttttttttttttttttttttttttttttttttttttttttttttttttttttttttttttttttttgtgtgtgggggggagagagagaggggaggggggggggggagtga

SEQ ID NO: 348476 - DNA, 1494 bp, Homo sapiens
tcccagtcgaagcacctcctgtccgcccctcagcgcatgggtggcggtcacgtgcccagaacgtccggcgttcgccccgccctcccagtttccgcgcgcctctttggcagctggtcacatggtgagggtgggggtgagggggcctctctagcttgcggcctgtgtctatggtcgggccctctgcgtccagctgctccggaccgagctcgggtgtatggggccgtaggaaccggctccggggccccgataacgggccgcccccacagcaccccgggctggcgtgagggtctcccttgatctgagaatggctacctctcgatatgagccagtggctgaaattggtgtcggtgcctatgggacagtgtacaaggcccgtgatccccacagtggccactttgtggccctcaagagtgtgagagtccccaatggaggaggaggtggaggaggccttcccatcagcacagttcgtgaggtggctttactgaggcgactggaggcttttgagcatcccaatgttgtccggatctgatgcgccagtttctaagaggcctagatttccttcatgccaattgcatcgttcaccgagatctgaagccagagaacattctggtgacaagtggtggaacagtcaagctggctgactttggcctggccagaatctacagctaccagatggcacttacacccgtggttgttacactctggtaccgagctcccgaagttcttctgcagtccacatatgcaacacctgtggacatgtggagtgttggctgtatctttgcagagatgtttcgtcgaaagcctctcttctgtggaaactctgaagccgaccagttgggcaaaatctttgacctgattgggctgcctccagaggatgactggcctcgagatgtatccctgccccgtggagcctttccccccagagggccccgcccagtgcagtcggtggtacctgagatggaggagtcgggagcacagctgctgctggaaatgctgacttttaacccacacaagcgaatctctgcctttcgagctctgcagcactcttatctacataaggatgaaggtaatccggagtgagcaatggagtggctgccatggaaggaagaaaagctgccatttcccttctggacactgagagggcaatctttgcctttatctctgaggctatggagggtcctcctccatctttctacagagattactttgctgccttaatgacattcccctcccacctctccttttgaggcttctccttctccttcccatttctctacactaaggggtatgttccctcttgtccctttccctacctttatatttggggtccttttttatacaggaaaaacaaaacaaagaaataatggtctttttttttttttttttttttttttttttttttttttttttttttttttttttttttttttttttttttttttttttttttgtgtgtgggggggagagagagaggggaggggggggggggagtga

SEQ ID NO: 348477 - DNA, 1264 bp, Homo sapiens
tcccagtcgaagcacctcctgtccgcccctcagcgcatgggtggcggtcacgtgcccagaacgtccggcgttcgccccgccctcccagtttccgcgcgcctctttggcagctggtcacatggtgagggtgggggtgagggggcctctctagcttgcggcctgtgtctatggtcgggccctctgcgtccagctgctccggaccgagctcgggtgtatggggccgtaggaaccggctccggggccccgataacgggccgcccccacagcaccccgggctggcgtgagggtctcccttgatctgagaatggctacctctcgatatgagccagtggctgaaattggtgtcggtgcctatgggacagtgtacaaggcccgtgatccccacagtggccactttgtggccctcaagagtgtgagagtccccaatggaggaggaggtggaggaggccttcccatcagcacagttcgtgaggtggctttactgaggcgactggaggcttttgagcatcccaatgttgtccggctgatggacgtctgtgccacatcccgaactgaccgggagatcaagaagcctctcttctgtggaaactctgaagccgaccagttgggcaaaatctttgacctgattgggctgcctccagaggatgactggcctcgagatgtatccctgccccgtggagcctttccccccagagggccccgcccagtgcagtcggtggtacctgagatggaggagtcgggagcacagctgctgctggaaatgctgacttttaacccacacaagcgaatctctgcctttcgagctctgcagcactcttatctacataaggatgaaggtaatccggagtgagcaatggagtggctgccatggaaggaagaaaagctgccatttcccttctggacactgagagggcaatctttgcctttatctctgaggctatggagggtcctcctccatctttctacagagattactttgctgccttaatgacattcccctcccacctctccttttgaggcttctccttctccttcccatttctctacactaaggggtatgttccctcttgtccctttccctacctttatatttggggtccttttttatacaggaaaaacaaaacaaagaaataatggtctttttttttttttttttttttttttttttttttttttttttttttttttttttttttttttttttttttttttttttttttgtgtgtgggggggagagagagaggggaggggggggggggagtga

SEQ ID NO: 348478 - DNA, 1253 bp, Homo sapiens
tcccagtcgaagcacctcctgtccgcccctcagcgcatgggtggcggtcacgtgcccagaacgtccggcgttcgccccgccctcccagtttccgcgcgcctctttggcagctggtcacatggtgagggtgggggtgagggggcctctctagcttgcggcctgtgtctatggtcgggccctctgcgtccagctgctccggaccgagctcgggtgtatggggccgtaggaaccggctccggggccccgataacgggccgcccccacagcaccccgggctggcgtgagggtctcccttgatctgagaatggctacctctcgatatgagccagtggctgaaattggtgtcggtgcctatgggacagtgtacaaggcccgtgatccccacagtggccactttgtggccctcaagagtgtgagagtccccaatggaggaggaggtggaggaggccttcccatcagcacagttcgtgaggtggctttactgaggcgactggaggcttttgagcatcccaatgttgtccggctgatggacgtctgtgccacatcccgaactgaccgggagatcaaggtaaccctggtgtttgagcatgtagaccaggacctaaggacatatctggacaaggcacccccaccaggcttgccagccgaaacgatcaaggatctgatgcgccagtttctaagaggcctagatttccttcatgccaattgcatcgttcaccgagatctgaagccagagaacattctggtgacaagtggtggaacagtcaagctggctgactttggcctggccagaatctacagctaccagatggcacttacacccgtggactactctcactgtggaaactctgacagccgaccaagtgggcaaaatctttgacctgatagggcctgcctaccagaaggattgacctgggcctcgagcatggtatcccctaggcgccagaggcgagccccttaccacccccaggaagggggccccggcgccagcgcacgtccggcaggcaccatgagatgcacgcgaccgcacgcgggacaccaacgcgcgaggcactcagggcacagcggcggaactctaacaacccgcaacagaaccaaaaaccgcgcgcacccacgaagacaccgcgaaccgacactaccccaccaaacacggcggcaaaggacacacccgcacgcgccacacggcagcgagcccgccagcgacggcccgaccacacgccaacggcccccacgccacggaacagacgaccccc

SEQ ID NO: 348479 - DNA, 979 bp, Homo sapiens
tcccagtcgaagcacctcctgtccgcccctcagcgcatgggtggcggtcacgtgcccagaacgtccggcgttcgccccgccctcccagtttccgcgcgcctctttggcagctggtcacatggtgagggtgggggtgagggggcctctctagcttgcggcctgtgtctatggtcgggccctctgcgtccagctgctccggaccgagctcgggtgtatggggccgtaggaaccggctccggggccccgataacgggccgcccccacagcaccccgggctggcgtgaggcctctcttctgtggaaactctgaagccgaccagttgggcaaaatctttgacctgattgggctgcctccagaggatgactggcctcgagatgtatccctgccccgtggagcctttccccccagagggccccgcccagtgcagtcggtggtacctgagatggaggagtcgggagcacagctgctgctggaaatgctgacttttaacccacacaagcgaatctctgcctttcgagctctgcagcactcttatctacataaggatgaaggtaatccggagtgagcaatggagtggctgccatggaaggaagaaaagctgccatttcccttctggacactgagagggcaatctttgcctttatctctgaggctatggagggtcctcctccatctttctacagagattactttgctgccttaatgacattcccctcccacctctccttttgaggcttctccttctccttcccatttctctacactaaggggtatgttccctcttgtccctttccctacctttatatttggggtccttttttatacaggaaaaacaaaacaaagaaataatggtctttttttttttttttttttttttttttttttttttttttttttttttttttttttttttttttttttttttttttttttttgtgtgtgggggggagagagagaggggaggggggggggggagtga

SEQ ID NO: 348480 - DNA, 983 bp, Homo sapiens
atatattatgcaccagtttacatactgctatatggcctatcgaacgacatagggtatcctcatcgagtactcatctgccgcatccatcttggtgactggtcgtcgtatacaccgtctgtgcatgtaggtagaacccgtggcagaatctacagctaccagatggcacttacacccgtggttgttacactctggtaccgagctcccgaagttcttctgcagtccacatatgcaacacctgtggacatgtggagtgttggctgtatctttgcagagatgtttcgtcgaaaaagcctctcttctgtggaaactctgaagccgaccagttgggcaaaatctttgacctgattgggctgcctccagaggatgactggcctcgagatgtatccctgccccgtggagcctttccccccagagggccccgcccagtgcagtcggtggtacctgagatggaggagtcgggagcacagctgctgctggaaatgctgacttttaacccacacaagcgaatctctgcctttcgagctctgcagcactcttatctacataaggatgaaggtaatccggagtgagcaatggagtggctgccatggaaggaagaaaagctgccatttcccttctggacactgagagggcaatctttgcctttatctctgaggctatggagggtcctcctccatctttctacagagattactttgctgccttaatgacattcccctcccacctctccttttgaggcttctccttctccttcccatttctctacactaaggggtatgttccctcttgtccctttccctacctttatatttggggtccttttttatacaggaaaaacaaaacaaagaaataatggtctttttttttttttttttttttttttttttttttttttttttttttttttttttttttttttttttttttttttttttttttgtgtgtgggggggagagagagaggggaggggggggggggagtga

SEQ ID NO: 348481 - DNA, 742 bp, Homo sapiens
tcccagtcgaagcacctcctgtccgcccctcagcgcatgggtggcggtcacgtgcccagaacgtccggcgttcgccccgccctcccagtttccgcgcgcctctttggcagctggtcacatggtgagggtgggggtgagggggcctctctagcttgcggcctgtgtctatggtcgggccctctgcgtccagctgctccggaccgagctcgggtgtatggggccgtaggaaccggctccggggccccgataacgggccgcccccacagcaccccgggctggcgtgagggtctcccttgatctgagaatggctacctctcgatatgagccagtggctgaaattggtgtcggtgcctatgggacagtgtacaaggcccgtgatccccacagtggccactttgtggccctcaagagtgtgagagtgagggtcctcctccatctttctacagagattactttgctgccttaatgacattcccctcccacctctccttttgaggcttctccttctccttcccatttctctacactaaggggtatgttccctcttgtccctttccctacctttatatttggggtccttttttatacaggaaaaacaaaacaaagaaataatggtctttttttttttttttttttttttttttttttttttttttttttttttttttttttttttttttttttttttttttttttttgtgtgtgggggggagagagagaggggaggggggggggggagtga

SEQ ID NO: 348482 - DNA, 467 bp, Homo sapiens
aaataagtttaatatattaaaaaaagacaacagagtaaacaagaagcactgaggcatgagacaacatgacatgcaaaagacagtaaagttgaactagtaacataatttctaatgtctccaaatgacgaaagtagcatacagctcttaaaactgacatgagaaagtgcatttagtgacttcagtctttggtggaagttcctagtgtatgaaatggaacagatgagaaaaggccttggttcccatgctgtgggaatagggaactggtgaagggctaagtatcagaggacgtgtaattcagataaatcactccgttggttacctggagggtgaatttgaggagaatgagactggaggcaggagcaaggcagtaccagtgcaggtgaagaaagaacataggtagaacttggccaccaattagaaaaggtgagaggaggagccaaggagagggaaacatgtgggatcacggc

SEQ ID NO: 348483 - DNA, 147 bp, Homo sapiens
ccataggagaatgactgggtttctcattaattgattagaaggtacattgttaaggtaacagctgctgtaacaaatcagcccaaataaataatggttcaaagacaatagttgttcttttgtttcactcctgataaatttaaaacaatg

SEQ ID NO: 348484 - DNA, 4166 bp, Homo sapiens
gaggactgcgagcacagcggcggccgggtggcgggggtgagtggggccagcggggctggacagcagcgggccccgggcgccgccgccgcgatccctccccgcgcccgccgagcacatcgccgccgccgagatgggccctccgcggcacccccaggccggcgagatagaagcgggcggtgcgggcggcgggcggcggctacaggtggaaatgagttctcaacagtttcctcggttaggagccccttctaccgggctgagccaggccccttctcagattgcaaacagtggttctgctggattgataaacccagctgctacagtcaatgatgaatctggtcgagattctgaagtcagtgccagggagcacatgagttccagcagctccctccagtcccgggaggagaagcaagagcctgttgtggtaaggccctatccacaggtgcagatgttgtcgacacaccatgctgtcgcatcagccacacctgttgcagtgacagccccgccagcacacctgacgccagcagtgccactttcattttcggagggacttatgaagccgcccccgaagcccaccatgcctagccgtcccattgctcctgctccaccttctaccctgtcacttccccccaaggttccagggcaggttaccgttaccatggagagtagcatccctcaagcttcagccattcctgtggcaacaatcagtggacaacagggccatcccagtaacctgcatcacatcatgactacaaatgtgcaaatgtctatcatccgcagcaatgctcctgggccccctcttcacattggagcttctcatttacctcgaggtgcagctgctgctgctgtgatgtccagttctaaagtaaccacagtcctgaggccgacctcacagctgccaaatgctgctactgctcagccagcagtacagcacatcattcaccaaccaatccagtctcggccacctgtgaccacctccaatgccatccctcctgctgtggtagcaactgtctcagccaccagagctcagtctccagtcatcactacgacagcggcgcatgctactgattcagcacttagtaggccaaccttgtctatccagcatcctccatctgcagcaatcagtattcagcgtcctgcccagtcacgagatgtcacaacaagaatcacactaccatctcaccctgcattagggacgccaaaacagcagcttcatacaatggctcagaaaacaatcttcagtactggcacgccagtggctgcagccacagtagcacctattttggcaaccaacaccattccttcagcgaccacagctggatctgtgtcacacacgcaagctcccacaagtaccattgttaccatgacagtaccctcccattcctcccatgctactgctgtgaccacctcaaacatcccagtcgccaaggtggtgccccagcagatcacgcacacttctcctcggatccagccagactaccctgccgagaggagtagcctgattcccatctccggacatcgggcctctcccaatcctgtggccatggaaacccgaagtgacaacagaccgtctgttcccgttcagttccaatattttttgccaacttaccccccttctgcatacccactggcggcacatacctacaccccaatcaccagttccgtgtccactatccgacagtatccagtttcagctcaggctccaaactctgccatcacagctcagactggtgttggggtagcgtctaccgtccacctaaaccccatgcagttgatgacagtggatgcatcgcatgctcgacatattcaagggatccagccagcacccatcagtacccagggtatccagccggcccccattgggaccccagggatacagcctgcaccacttggcacacagggaattcactcagcaaccccaatcaacacacaagggcttcagcctgcacctatgggtactcagcagcctcagcctgaaggaaagacttcagcagtggtgttggcagatggagccacaattgtggccaaccctattagcaatccattcagtgctgctccagcagcaacaaccgtggtgcagacccacagccagagtgctagcaccaacgctcccgcccagggctcatcgccacggccaagcatactccggaagaaacctgccacagatggaatggcagttcggaaaaccctcattcctcctcagcctcctgatgttgctagtcctcgagtggaaagctctatgcggagtacgtctgggtcacctaggcctgcaggtgccaaacccaagtctgaaatccacgtgtctatggccactccggtcactgtgtccatggagactgtatccaatcaaaataatgatcagcctaccattgccgtccctccaactgcccagcagcccccaccgaccattccaactatgattgcagcagccagtcccccgtcacaaccagccgttgccctttcaaccattcctggagcggtccccatcactccacccatcaccaccattgcagctgcaccacctccatcagtcactgtgggtggcagtctttcctccgtcttgggccctcccgttcctgaaattaaagtgaaagaagaagtagaaccaatggatatcatgaggccagtttctgcagttcctccactggctaccaacactgtgtctccatctcttgcattgctggcaaacaacttgtccatgcctacaagtgacctaccacctggtgcctccccaaggaaaaagcctcgaaagcaacagcatgtgatctcaacagaagaaggtgacatgatggagacaaacagcactgatgatgagaagtccactgccaagagtcttctggtgaaggctgagaagcgcaagtctcctcccaaggagtatattgatgaggaaggtgtgagatatgtcccagtgcgtccaagaccccccattactttgcttcgtcactatcggaacccctggaaagctgcttaccaccactttcagaggtacagtgacgtccgggtcaaagaggagaagaaagctatgctgcaggaaatagctaatcagaaaggagtatcctgtcgtgctcaaggctggaaagtccacctctgtgctgcccagttactacagctgacgaatctagaacatgatgtctatgaaagacttactaacctgcaggaagggattatcccaaagaaaaaagcagcaacagatgatgatctccaccgaataaacgaactgatacagggaaatatgcagaggtgtaaacttgtgatggatcaaatcagtgaagccagagactccatgcttaaggttttagatcataaagaccgtgtcctgaagctgcttaacaagaacgggactgtcaaaaaagtgtccaaattgaagcgaaaggaaaaagtctagacccagaacaatcaggagattggaagcaaatttatgaagaatgatggtgggggtggggggagggttttggttttttccaaagtggaacattgaaataaaggaagtgttccttagttcccgtgtgaaagcagaggaacccatgacatccaagggcgtgaaaggatcagagctgactggacatagtgagctgccttcttgcgttcgggtgcacccctgttaaacctgatctgtgtcataagtgactccggatgcatcagtgtccaccagttggaagcaatgacaaggatggctggctggtgtttttcagccttccggtttatagactgtatttatctagtggattcctgcaggccccatactgagcctggactgaaagtatccactcggaccatctgttatctctctacactgaaaataaaacctcttccacccaccccattcggttcttctgcctgaccttcaaatgcccatgttggccttttacagcagtgccacggcaccaagcgagctgccacatctcacactctaaagggtttgaactattagttcttgtcattttttaaaaaaaaccattcccaagtgaaattgttatatcgtctgtcttgcgtgtgtcagaactgggtttttgtggaggttcagagcaggcaacaccataagttgctctcagatccttgttctgaagtacattcttggttatctgtacttctgtagctggtgtgatgctgttaattgtatgtaccacacatctccagacgttaataaaggactcaaagaggtttttgta

SEQ ID NO: 348485 - DNA, 1667 bp, Homo sapiens
ctgctttaggaggtagcacttagtggaggtaaaggaggggagtaagcagcctggtgtcctcttggcttgcctctcctagatgaaaccattacctcaaataaaaaagttcttatggccaggtacggcagctcatgcctataatcccaacactttgggaggccatggcaggcaaattgcttgagcccaggagttcaagaccaacctgggcaacatagcaagacctcatctctacaaaaaatacaaaagtgagcccagcatgatggcgcacacctgtagtcccagctacttgggaggccgaagtgggagaatcatttgagcctaggaggcaggggttgcagtgacctgagattgtaccactgcacttcagcctgggtgacagagccagacactgtctcaaaaaaaaaataaaattcttgttaaaataatggcatttacactgctcgaacacaaatcatttacctttttaaacactgaaatacatgtatttttattttttatggttccagaggagaagaaagctatgctgcaggaaatagctaatcagaaaggagtatcctgtcgtgctcaaggctggaaagtccacctctgtgctgcccagttactacagctgacgaatctagaacatgatgtctatgaaagacttactaacctgcaggaagggattatcccaaagaaaaaagcagcaacagatgatgatctccaccgaataaacgaactgatacagggaaatatgcagaggtgtaaacttgtgatggatcaaatcagtgaagccagagactccatgcttaaggttttagatcataaagaccgtgtcctgaagctgcttaacaagaacgggactgtcaaaaaagtgtccaaattgaagcgaaaggaaaaagtctagacccagaacaatcaggagattggaagcaaatttatgaagaatgatggtgggggtggggggagggttttggttttttccaaagtggaacattgaaataaaggaagtgttccttagttcccgtgtgaaagcagaggaacccatgacatccaagggcgtgaaaggatcagagctgactggacatagtgagctgccttcttgcgttcgggtgcacccctgttaaacctgatctgtgtcataagtgactccggatgcatcagtgtccaccagttggaagcaatgacaaggatggctggctggtgtttttcagccttccggtttatagactgtatttatctagtggattcctgcaggccccatactgagcctggactgaaagtatccactcggaccatctgttatctctctacactgaaaataaaacctcttccacccaccccattcggttcttctgcctgaccttcaaatgcccatgttggccttttacagcagtgccacggcaccaagcgagctgccacatctcacactctaaagggtttgaactattagttcttgtcattttttaaaaaaaaccattcccaagtgaaattgttatatcgtctgtcttgcgtgtgtcagaactgggtttttgtggaggttcagagcaggcaacaccataagttgctctcagatccttgttctgaagtacattcttggttatctgtacttctgtagctggtgtgatgctgttaattgtatgtaccacacatctccagacgttaataaaggactcaaagaggtttttgta

SEQ ID NO: 348486 - DNA, 3951 bp, Homo sapiens
gaggactgcgagcacagcggcggccgggtggcgggggtgagtggggccagcggggctggacagcagcgggccccgggcgccgccgccgcgatccctccccgcgcccgccgagcacatcgccgccgccgagatgggccctccgcggcacccccaggccggcgagatagaagcgggcggtgcgggcggcgggcggcggctacaggtggaaatgagttctcaacagtttcctcggttaggagccccttctaccgggctgagccaggccccttctcagattgcaaacagtggttctgctggattgataaacccagctgctacagtcaatgatgaatctggtcgagattctgaagtcagtgccagggagcacatgagttccagcagctccctccagtcccgggaggagaagcaagagcctgttgtggtaaggccctatccacaggtgcagatgttgtcgacacaccatgctgtcgcatcagccacacctgttgcagtgacagccccgccagcacacctgacgccagcagtgccactttcattttcggagggacttatgaagccgcccccgaagcccaccatgcctagccgtcccattgctcctgctccaccttctaccctgtcacttccccccaaggttccagggcaggttaccgttaccatggagagtagcatccctcaagcttcagccattcctgtggcaacaatcagtggacaacagggccatcccagtaacctgcatcacatcatgactacaaatgtgcaaatgtctatcatccgcagcaatgctcctgggccccctcttcacattggagcttctcatttacctcgaggtgcagctgctgctgctgtgatgtccagttctaaagtaaccacagtcctgaggccgacctcacagctgccaaatgctgctactgctcagccagcagtacagcacatcattcaccaaccaatccagtctcggccacctgtgaccacctccaatgccatccctcctgctgtggtagcaactgtctcagccaccagagctcagtctccagtcatcactacgacagcggcgcatgctactgattcagcacttagtaggccaaccttgtctatccagcatcctccatctgcagcaatcagtattcagcgtcctgcccagtcacgagatgtcacaacaagaatcacactaccatctcaccctgcattagggacgccaaaacagcagcttcatacaatggctcagaaaacaatcttcagtactggcacgccagtggctgcagccacagtagcacctattttggcaaccaacaccattccttcagcgaccacagctggatctgtgtcacacacgcaagctcccacaagtaccattgttaccatgacagtaccctcccattcctcccatgctactgctgtgaccacctcaaacatcccagtcgccaaggtggtgccccagcagatcacgcacacttctcctcggatccagccagactaccctgccgagaggagtagcctgattcccatctccggacatcgggcctctcccaatcctgtggccatggaaacccgaagtgacaacagaccgtctgttcccgttcagttccaatattttttgccaacttaccccccttctgcatacccactggcggcacatacctacaccccaatcaccagttccgtgtccactatccgacagtatccagtttcagctcaggctccaaactctgccatcacagctcagactggtgttggggtagcgtctaccgtccacctaaaccccatgcagttgatgacagtggatgcatcgcatgctcgacatattcaagggatccagccagcacccatcagtacccagggtatccagccggcccccattgggaccccagggatacagcctgcaccacttggcacacagggaattcactcagcaaccccaatcaacacacaagggcttcagcctgcacctatgggtactcagcagcctcagcctgaaggaaagacttcagcagtggtgttggcagatggagccacaattgtggccaaccctattagcaatccattcagtgctgctccagcagcaacaaccgtggtgcagacccacagccagagtgctagcaccaacgctcccgcccagggctcatcgccacggccaagcatactccggaagaaacctgccacagatggaatggcagttcggaaaaccctcattcctcctcagcctcctgatgttgctagtcctcgagtggaaagctctatgcggagtacgtctgggtcacctaggcctgcaggtgccaaacccaagtctgaaatccacgtgtctatggccactccggtcactgtgtccatggagactgtatccaatcaaaataatgatcagcctaccattgccgtccctccaactgcccagcagcccccaccgaccattccaactatgattgcagcagccagtcccccgtcacaaccagccgttgccctttcaaccattcctggagcggtccccatcactccacccatcaccaccattgcagctgcaccacctccatcagtcactgtgggtggcagtctttcctccgtcttgggccctcccgttcctgaaattaaagtgaaagaagaagtagaaccaatggatatcatgaggccagtttctgcagttcctccactggctaccaacactgtgtctccatctcttgcattgctggcaaacaacttgtccatgcctacaagtgacctaccacctggtgcctccccaaggaaaaagcctcgaaagcaacagcatgtgatctcaacagaagaaggtgacatgatggagacaaacagcactgatgatgagaagtccactgccaagagtcttctggtgaaggctgagaagcgcaagtctcctcccaaggagtatattgatgaggaaggtgtgagatatgtcccagtgcgtccaagaccccccattactttgcttcgtcactatcggaacccctggaaagctgcttaccaccactttcagaggtacagtgacgtccgggtcaaagaggagaagaaagctatgctgcaggaaatagctaatcagaaaggagtatcctgtcgtgctcaaggctggaaagtccacctctgtgctgcccagttactacagctgacgaatctagaacatgatgtctatgaaagacttactaacctgcaggaagggattatcccaaagaaaaaagcagcaacagatgatgatctccaccgaataaacgaactgatacagggaaatatgcagaggtgtaaacttgtgatggatcaaatcagtgaagccagagactccatgcttaaggttttagatcataaagaccgtgtcctgaagctgcttaacaagaacgggactgtcaaaaaagtgtccaaattgaagcgaaaggaaaaagtctagacccagaacaatcaggagattggaagcaaatttatgaagaatgatggtgggggtggggggagggttttggttttttccaaagtggaacattgaaataaaggaagtgttccttagttcccgtgtgaaagcagaggaacccatgacatccaagggcgtgaaaggatcagagctgactggacatagtgagctgccttcttgcgttcgggtgcacccctgttaaacctgatctgtgtcataagtgactccggatgcatcagtgtccaccagttggaagcaatgacaaggatggctggctggtgtttttcagccttccggtttatagactgtatttatctagtggattcctgcaggccccatactgagcctggactgaaagtatccactcggaccatctgttatctctctacactgaaaataaaacctcttccacccaccccattcggttcttctgcctgaccttcaaatgcccatgttggccttttacagcagtgccacggcaccaagcgagctgccacatctcacactgggtaaagtaaacacacactgtaagtaagcagggatcctctagc

SEQ ID NO: 348487 - DNA, 954 bp, Homo sapiens
ccagttacaacagctgttgtccagttacaacagctaaaaaggaatgctattctgatatgtgtgataccatggatgagccttgaaaacataccaagtgcaataagccagacacacacacacatgcacacacacacacacaaaaccaaatattgtatgattctccttacctgagggtccagaaaaagcaaattcatagagatagaaaatagaagttacaagggggtggggggagggttttggttttttccaaagtggaacattgaaataaaggaagtgttccttagttcccgtgtgaaagcagaggaacccatgacatccaagggcgtgaaaggatcagagctgactggacatagtgagctgccttcttgcgttcgggtgcacccctgttaaacctgatctgtgtcataagtgactccggatgcatcagtgtccaccagttggaagcaatgacaaggatggctggctggtgtttttcagccttccggtttatagactgtatttatctagtggattcctgcaggccccatactgagcctggactgaaagtatccactcggaccatctgttatctctctacactgaaaataaaacctcttccacccaccccattcggttcttctgcctgaccttcaaatgcccatgttggccttttacagcagtgccacggcaccaagcgagctgccacatctcacactctaaagggtttgaactattagttcttgtcattttttaaaaaaaaccattcccaagtgaaattgttatatcgtctgtcttgcgtgtgtcagaactgggtttttgtggaggttcagagcaggcaacaccataagttgctctcagatccttgttctgaagtacattcttggttatctgtacttctgtagctggtgtgatgctgttaattgtatgtaccacacatctccagacgttaataaaggactcaaagaggtttttgta

SEQ ID NO: 348488 - DNA, 392 bp, Homo sapiens
acagccagagtgctagcaccaacgctcccgcccagggctcatcgccacggccaagcatactccggaagaaacctgccacagatgggtgagtagacctggtagtgccgaatgacacctctggttctggatataactggtatacataataggcactcttatctaatgctggtatcaaactcatctctcattttctgtggtgtgttaaaatttcctccaaaacaacttgaccacaggattattcagtagagccttacccagctgagactgtaagatcttaacaaatcctggagtcagtgaggtgttagtttgtaagcatctgttgcatactgctttaattctctctagttctggaacttcaatcatagaacttttaaagtagtttataagtaact

SEQ ID NO: 348489 - DNA, 330 bp, Homo sapiens
ccaagatcacgccacttcactccagcatgggtaacagagtgagaccctgtctcaaaatttttttaaaattaaaaatttaaaaaaaggaaatagagtataaattgtgcagtgtgctggacagaaataattggacaaatactcatcctctgagatgttgtagatgaaggcagtttttttcttatttgctacatgtgcttttcttttgtgttttagtgccaaacccaagtctgaaatccacgtgtctatggccactccggtcactgtgtccatggagactgtatccaatcaaaataatgatcagcctaccattgccgtccctccaactgccca

SEQ ID NO: 348490 - DNA, 4061 bp, Homo sapiens
gaggactgcgagcacagcggcggccgggtggcgggggtgagtggggccagcggggctggacagcagcgggccccgggcgccgccgccgcgatccctccccgcgcccgccgagcacatcgccgccgccgagatgggccctccgcggcacccccaggccggcgagatagaagcgggcggtgcgggcggcgggcggcggctacaggtggaaatgagttctcaacagtttcctcggttaggagccccttctaccgggctgagccaggccccttctcagattgcaaacagtggttctgctggattgataaacccagctgctacagtcaatgatgaatctggtcgagattctgaagtcagtgccagggagcacatgagttccagcagctccctccagtcccgggaggagaagcaagagcctgttgtggtaaggccctatccacaggtgcagatgttgtcgacacaccatgctgtcgcatcagccacacctgttgcagtgacagccccgccagcacacctgacgccagcagtgccactttcattttcggagggacttatgaagccgcccccgaagcccaccatgcctagccgtcccattgctcctgctccaccttctaccctgtcacttccccccaaggttccagggcaggttaccgttaccatggagagtagcatccctcaagcttcagccattcctgtggcaacaatcagtggacaacagggccatcccagtaacctgcatcacatcatgactacaaatgtgcaaatgtctatcatccgcagcaatgctcctgggccccctcttcacattggagcttctcatttacctcgaggtgcagctgctgctgctgtgatgtccagttctaaagtaaccacagtcctgaggccgacctcacagctgccaaatgctgctactgctcagccagcagtacagcacatcattcaccaaccaatccagtctcggccacctgtgaccacctccaatgccatccctcctgctgtggtagcaactgtctcagccaccagagctcagtctccagtcatcactacgacagcggcgcatgctactgattcagcacttagtaggccaaccttgtctatccagcatcctccatctgcagcaatcagtattcagcgtcctgcccagtcacgagatgtcacaacaagaatcacactaccatctcaccctgcattagggacgccaaaacagcagcttcatacaatggctcagaaaacaatcttcagtactggcacgccagtggctgcagccacagtagcacctattttggcaaccaacaccattccttcagcgaccacagctggatctgtgtcacacacgcaagctcccacaagtaccattgttaccatgacagtaccctcccattcctcccatgctactgctgtgaccacctcaaacatcccagtcgccaaggtggtgccccagcagatcacgcacacttctcctcggatccagccagactaccctgccgagaggagtagcctgattcccatctccggacatcgggcctctcccaatcctgtggccatggaaacccgaagtgacaacagaccgtctgttcccgttcagttccaatattttttgccaacttaccccccttctgcatacccactggcggcacatacctacaccccaatcaccagttccgtgtccactatccgacagtatccagtttcagctcaggctccaaactctgccatcacagctcagactggtgttggggtagcgtctaccgtccacctaaaccccatgcagttgatgacagtggatgcatcgcatgctcgacatattcaagggatccagccagcacccatcagtacccagggtatccagccggcccccattgggaccccagggatacagcctgcaccacttggcacacagggaattcactcagcaaccccaatcaacacacaagggcttcagcctgcacctatgggtactcagcagcctcagcctgaaggaaagacttcagcagtggtgttggcagatggagccacaattgtggccaaccctattagcaatccattcagtgctgctccagcagcaacaaccgtggtgcagacccacagccagagtgctagcaccaacgctcccgcccagggctcatcgccacggccaagcatactccggaagaaacctgccacagatggtgccaaacccaagtctgaaatccacgtgtctatggccactccggtcactgtgtccatggagactgtatccaatcaaaataatgatcagcctaccattgccgtccctccaactgcccagcagcccccaccgaccattccaactatgattgcagcagccagtcccccgtcacaaccagccgttgccctttcaaccattcctggagcggtccccatcactccacccatcaccaccattgcagctgcaccacctccatcagtcactgtgggtggcagtctttcctccgtcttgggccctcccgttcctgaaattaaagtgaaagaagaagtagaaccaatggatatcatgaggccagtttctgcagttcctccactggctaccaacactgtgtctccatctcttgcattgctggcaaacaacttgtccatgcctacaagtgacctaccacctggtgcctccccaaggaaaaagcctcgaaagcaacagcatgtgatctcaacagaagaaggtgacatgatggagacaaacagcactgatgatgagaagtccactgccaagagtcttctggtgaaggctgagaagcgcaagtctcctcccaaggagtatattgatgaggaaggtgtgagatatgtcccagtgcgtccaagaccccccattactttgcttcgtcactatcggaacccctggaaagctgcttaccaccactttcagaggtacagtgacgtccgggtcaaagaggagaagaaagctatgctgcaggaaatagctaatcagaaaggagtatcctgtcgtgctcaaggctggaaagtccacctctgtgctgcccagttactacagctgacgaatctagaacatgatgtctatgaaagacttactaacctgcaggaagggattatcccaaagaaaaaagcagcaacagatgatgatctccaccgaataaacgaactgatacagggaaatatgcagaggtgtaaacttgtgatggatcaaatcagtgaagccagagactccatgcttaaggttttagatcataaagaccgtgtcctgaagctgcttaacaagaacgggactgtcaaaaaagtgtccaaattgaagcgaaaggaaaaagtctagacccagaacaatcaggagattggaagcaaatttatgaagaatgatggtgggggtggggggagggttttggttttttccaaagtggaacattgaaataaaggaagtgttccttagttcccgtgtgaaagcagaggaacccatgacatccaagggcgtgaaaggatcagagctgactggacatagtgagctgccttcttgcgttcgggtgcacccctgttaaacctgatctgtgtcataagtgactccggatgcatcagtgtccaccagttggaagcaatgacaaggatggctggctggtgtttttcagccttccggtttatagactgtatttatctagtggattcctgcaggccccatactgagcctggactgaaagtatccactcggaccatctgttatctctctacactgaaaataaaacctcttccacccaccccattcggttcttctgcctgaccttcaaatgcccatgttggccttttacagcagtgccacggcaccaagcgagctgccacatctcacactctaaagggtttgaactattagttcttgtcattttttaaaaaaaaccattcccaagtgaaattgttatatcgtctgtcttgcgtgtgtcagaactgggtttttgtggaggttcagagcaggcaacaccataagttgctctcagatccttgttctgaagtacattcttggttatctgtacttctgtagctggtgtgatgctgttaattgtatgtaccacacatctccagacgttaataaaggactcaaagaggtttttgta

SEQ ID NO: 348491 - DNA, 1235 bp, Homo sapiens
  misc_feature (14)..(14): n is a, c, g, or t
  misc_feature (26)..(26): n is a, c, g, or t
gggcagcccccatncttgtcgcctanggatccctgaaactctcccaccacttcaaggtcagtgcgtccgggcaaaggagaagaaagctatgctgcaggaaatagctaatcagaaaggagtatcctgtcgtgctcaaggctggaaagtccacctctgtgctgcccagttactacagctgacgaatctagaacatgatgtctatgaaagacttactaacctgcaggaagggattatcccaaagaaaaaagcagcaacagatgatgatctccaccgaataaacgaactgatacagggaaatatgcagaggtgtaaacttgtgatggatcaaatcagtgaagccagagactccatgcttaaggttttagatcataaagaccgtgtcctgaagctgcttaacaagaacgggactgtcaaaaaagtgtccaaattgaagcgaaaggaaaaagtctagacccagaacaatcaggagattggaagcaaatttatgaagaatgatggtgggggtggggggagggttttggttttttccaaagtggaacattgaaataaaggaagtgttccttagttcccgtgtgaaagcagaggaacccatgacatccaagggcgtgaaaggatcagagctgactggacatagtgagctgccttcttgcgttcgggtgcacccctgttaaacctgatctgtgtcataagtgactccggatgcatcagtgtccaccagttggaagcaatgacaaggatggctggctggtgtttttcagccttccggtttatagactgtatttatctagtggattcctgcaggccccatactgagcctggactgaaagtatccactcggaccatctgttatctctctacactgaaaataaaacctcttccacccaccccattcggttcttctgcctgaccttcaaatgcccatgttggccttttacagcagtgccacggcaccaagcgagctgccacatctcacactctaaagggtttgaactattagttcttgtcattttttaaaaaaaaccattcccaagtgaaattgttatatcgtctgtcttgcgtgtgtcagaactgggtttttgtggaggttcagagcaggcaacaccataagttgctctcagatccttgttctgaagtacattcttggttatctgtacttctgtagctggtgtgatgctgttaattgtatgtaccacacatctccagacgttaataaaggactcaaagaggtttttgta

SEQ ID NO: 348492 - DNA, 732 bp, Homo sapiens
cgcttccggagctcggcgggcggcgtcagcggaacgggcggcttccggccgcggcgtaaacaaggccgtggactgcaggaggcggggcagacgggctgcaagagggagccggcccgacgcggaccgcttccctgcagtgccccgagtcccgggcccgcgccgccgccgcccggctccgctcgcggcccctctgtctgcaggcgtgccccggcggcggcggagagccgtcctcggccgaggaggctgggaaacgcgagcgcaggcggcagagaggcctcaacgccgtccctttcgccaccgccttttccttgcctcgcgccgctgtgcatttctctccttttcctttgtttttttggcccctcgcgggtgtgggcattgttggttagcaaaagtgcagcctcaagatggctgatggcaacgaggatctgcgggctgacgacttgcctgggccagccttcgagagctatgagtccatggagcttgcctgccccgctgagcgcagcggccacgtagccgtcagcgacgggcgccacatgttcgtctggggcggctacaaggtcagtgagtggccgggccgcgacggacgtcgctcggctgtgactcgggtctgcgttcgcggccaggcggggaggccagagcgggccgccgagggcgctccccgcctgcgtcgcgcgccccacctcagactctgcccgttggttgttttttttttgcgcgcgggaatcttccttc

SEQ ID NO: 348493 - DNA, 569 bp, Homo sapiens
ggaagtgttctagaggatcccggtgttccctgtctcaaaaaaacaaacaaaaagaatgcaatagacacagaaaaaccattcagtaacatttaactcatcgttattaaaaataactttcaaaaaggtgtccttcaacaacccaaaggaaacatcccgcaatgataaaatcttagaaacagttcctgtaatggaattaacaaagatatacacgattactacttctatgaaacattatatttttgcttttcagtcactgcaaaaaaaaacatggggaaaataaaaagatattaagactagaagaaaagccataatttgcagacgatatgactgcctacagatgaagtattaaaattagtaagtgctctataagattgcccattacttgatcaacatgaaagttgtcttcccatgtaccagcaagtaacagctaggaaatgaaagtttcaaaaataggtagggcgcagtggctcaagtctgtaatcccaacactttgggaggctgaggcgggtggacctcttgacctctggagttcgagactagcctgtgcaacatgccaaaccccgtctctc

SEQ ID NO: 348494 - DNA, 1882 bp, Homo sapiens
cgcttccggagctcggcgggcggcgtcagcggaacgggcggcttccggccgcggcgtaaacaaggccgtggactgcaggaggcggggcagacgggctgcaagagggagccggcccgacgcggaccgcttccctgcagtgccccgagtcccgggcccgcgccgccgccgcccggctccgctcgcggcccctctgtctgcaggcgtgccccggcggcggcggagagccgtcctcggccgaggaggctgggaaacgcgagcgcaggcggcagagaggcctcaacgccgtccctttcgccaccgccttttccttgcctcgcgccgctgtgcatttctctccttttcctttgtttttttggcccctcgcgggtgtgggcattgttggttagcaaaagtgcagcctcaagatggctgatggcaacgaggatctgcgggctgacgacttgcctgggccagccttcgagagctatgagtccatggagcttgcctgccccgctgagcgcagcggccacgtagccgtcagcgacgggcgccacatgttcgtctggggcggctacaagagtaatcaagtcagaggattatatgacttttatctgcctagagaagaactatggatctacaacatggagactggaagatggaaaaaaatcaacactgaaggtgatgttcctccttctatgtcaggaagctgtgctgtgtgtgtagacagggtgctgtacttgtttggaggacaccattcaagaggcaataccaataagttctacatgctggattcaaggtctacagacagagtgttacagtgggaaagaattgattgccaaggaattcctccatcatcaaaggacaaacttggtgtctgggtatataaaaacaagttaatattttttggagggtatggatatttgcctgaagataaagtattgggaacttttgaattcgatgaaacatctttttggaattcaagtcatccaagaggatggaatgatcatgtacatattttagatactgaaacatttacctggagccagcctataactactggtaaagcaccttcacctcgtgctgcccatgcctgtgcaactgtcggaaatagaggcttcgtgtttggaggcagatatcgagtaagtattcaaacgacttcaatgacttgcttttgaattcttcaaaatgataacttaattatccttttttaggatgctagaatgaatgatcttcactatcttaatctggatacatgggagtggaatgaattaattccacaaggcatatgcccagttggtcgatcttggcactcactaacaccagtttcttcagatcatctttttctctttggaggatttaccactgataaacagccactaagtgatgcctggacttactgcatcagtaaaaatgaatggatacaatttaatcatccatataccgaaaaaccaaggttatggcacacagcttgtgccagcgatgaaggagaagtaattgtttttggtggatgtgccaacaacttgcttgtccatcacagagctgcacacagtaatgaaatactaatattttcagttcaaccaaaatctcttgtacggctaagcttagaagcagtcatttgctttaaagaaatgttagccaactcatggaactgccttccaaaacacttacttcacagtgttaatcagaggtttggtagtaacaacacttctggatcttaaggcttcataaataatgcctatgatcaccttgcatggacagcaatcctgtaaacatcacagagtggcatcatttgtataattatatgcattgttgtagtttgcacctgttggttttaatgtgcatgtgaatggcctagagaacctatttttgtgtctaaagtttacaataaatgtatttaacacca

SEQ ID NO: 348495 - DNA, 1829 bp, Homo sapiens
cgcttccggagctcggcgggcggcgtcagcggaacgggcggcttccggccgcggcgtaaacaaggccgtggactgcaggaggcggggcagacgggctgcaagagggagccggcccgacgcggaccgcttccctgcagtgccccgagtcccgggcccgcgccgccgccgcccggctccgctcgcggcccctctgtctgcaggcgtgccccggcggcggcggagagccgtcctcggccgaggaggctgggaaacgcgagcgcaggcggcagagaggcctcaacgccgtccctttcgccaccgccttttccttgcctcgcgccgctgtgcatttctctccttttcctttgtttttttggcccctcgcgggtgtgggcattgttggttagcaaaagtgcagcctcaagatggctgatggcaacgaggatctgcgggctgacgacttgcctgggccagccttcgagagctatgagtccatggagcttgcctgccccgctgagcgcagcggccacgtagccgtcagcgacgggcgccacatgttcgtctggggcggctacaagagtaatcaagtcagaggattatatgacttttatctgcctagagaagaactatggatctacaacatggagactggaagatggaaaaaaatcaacactgaaggtgatgttcctccttctatgtcaggaagctgtgctgtgtgtgtagacagggtgctgtacttgtttggaggacaccattcaagaggcaataccaataagttctacatgctggattcaaggtctacagacagagtgttacagtgggaaagaattgattgccaaggaattcctccatcatcaaaggacaaacttggtgtctgggtatataaaaacaagttaatattttttggagggtatggatatttgcctgaagataaagtattgggaacttttgaattcgatgaaacatctttttggaattcaagtcatccaagaggatggaatgatcatgtacatattttagatactgaaacatttacctggagccagcctataactactggtaaagcaccttcacctcgtgctgcccatgcctgtgcaactgtcggaaatagaggcttcgtgtttggaggcagatatcgagtaagtattcaaacgacttcaatgacttgcttttgaattcttctatcttaatctggatacatgggagtggaatgaattaattccacaaggcatatgcccagttggtcgatcttggcactcactaacaccagtttcttcagatcatctttttctctttggaggatttaccactgataaacagccactaagtgatgcctggacttactgcatcagtaaaaatgaatggatacaatttaatcatccatataccgaaaaaccaaggttatggcacacagcttgtgccagcgatgaaggagaagtaattgtttttggtggatgtgccaacaacttgcttgtccatcacagagctgcacacagtaatgaaatactaatattttcagttcaaccaaaatctcttgtacggctaagcttagaagcagtcatttgctttaaagaaatgttagccaactcatggaactgccttccaaaacacttacttcacagtgttaatcagaggtttggtagtaacaacacttctggatcttaaggcttcataaataatgcctatgatcaccttgcatggacagcaatcctgtaaacatcacagagtggcatcatttgtataattatatgcattgttgtagtttgcacctgttggttttaatgtgcatgtgaatggcctagagaacctatttttgtgtctaaagtttacaataaatgtatttaacacca

SEQ ID NO: 348496 - DNA, 2668 bp, Homo sapiens
  misc_feature (1356)..(1356): n is a, c, g, or t
cgcttccggagctcggcgggcggcgtcagcggaacgggcggcttccggccgcggcgtaaacaaggccgtggactgcaggaggcggggcagacgggctgcaagagggagccggcccgacgcggaccgcttccctgcagtgccccgagtcccgggcccgcgccgccgccgcccggctccgctcgcggcccctctgtctgcaggcgtgccccggcggcggcggagagccgtcctcggccgaggaggctgggaaacgcgagcgcaggcggcagagaggcctcaacgccgtccctttcgccaccgccttttccttgcctcgcgccgctgtgcatttctctccttttcctttgtttttttggcccctcgcgggtgtgggcattgttggttagcaaaagtgcagcctcaagatggctgatggcaacgaggatctgcgggctgacgacttgcctgggccagccttcgagagctatgagtccatggagcttgcctgccccgctgagcgcagcggccacgtagccgtcagcgacgggcgccacatgttcgtctggggcggctacaagagtaatcaagtcagaggattatatgacttttatctgcctagagaagaactatggatctacaacatggagactggaagatggaaaaaaatcaacactgaaggtgatgttcctccttctatgtcaggaagctgtgctgtgtgtgtagacagggtgctgtacttgtttggaggacaccattcaagaggcaataccaataagttctacatgctggattcaaggtctacagacagagtgttacagtgggaaagaattgattgccaaggaattcctccatcatcaaaggacaaacttggtgtctgggtatataaaaacaagttaatattttttggagggtatggatatttgcctgaagataaagtattgggaacttttgaattcgatgaaacatctttttggaattcaagtcatccaagaggatggaatgatcatgtacatattttagatactgaaacatttacctggagccagcctataactactggtaaagcaccttcacctcgtgctgcccatgcctgtgcaactgtcggaaatagaggcttcgtgtttggaggcagatatcgagtaagtattcaaacgacttcaatgacttgcttttgaattcttcaaaatgataacttaattatccttttttaggatgctagaatgaatgatcttcactatcttaatctggatacatgggagtggaatgaattgtaggtatcactttagatacatttttccaaaattcagattgtttttaccctatattccctactattggtatataatgtccttgcttaacttttctttaactatgaanttaaataaacataattactaggtccttaaggaatgaattttatttttgtgtttccagttcctgtaactatgtgcctagtacatagcatgtgctcagtgtttgttgaaaggaaaaggtctgaagttgattctatcgtcaaagaaaatatttcagtataaagcatgtagtttataccaagaagcctttttaaacttaaggtctcttttttcataacatgtacatataaattttaaaagaaaacttaaaaatacagtagctgcttctaaatgcagatattgtaacttagctattattttcagaattccacaaggcatatgcccagttggtcgatcttggcactcactaacaccagtttcttcagatcatctttttctctttggaggatttaccactgataaacagccactaagtaagtccttgaaaaatatgataatgaaatcatcatatatcatccatatctaatagctgaaaatgagtctattagagactgatgagacggcttatagggttggttggaaggtttgaaattaattttgatcctgtaacatagctgtaattgtactatatggcatacttctgttcaataaagaacctggagcacttaagagccctgctgaagggctacaacatgcaaagggcttacttggctaattgcaggtgggggaaaaaaaagaaaatatactctctgtatctgctcatgatctattacctttcttgccaaagctgtgccctttaaatgtcaatgtcatattgacagactaacatacttcatttctttgcttgaatcaggtgatgcctggacttactgcatcagtaaaaatgaatggatacaatttaatcatccatataccgaaaaaccaaggttatggcacacagcttgtgccagcgatgaaggagaagtaattgtttttggtggatgtgccaacaacttgcttgtccatcacagagctgcacacagtaatgaaatactaatattttcagttcaaccaaaatctcttgtacggctaagcttagaagcagtcatttgctttaaagaaatgttagccaactcatggaactgccttccaaaacacttacttcacagtgttaatcagaggtttggtagtaacaacacttctggatcttaaggcttcataaataatgcctatgatcaccttgcatggacagcaatcctgtaaacatcacagagtggcatcatttgtataattatatgcattgttgtagtttgcacctgttggttttaatgtgcatgtgaatggcctagagaacctatttttgtgtctaaagtttacaataaatgtatttaacacca

SEQ ID NO: 348497 - DNA, 1523 bp, Homo sapiens
acctccagggctgctgtcatgtcaccctggtgctcacaaagccaactcactcccacccccgttgttgccattggagcgttattccggggaaggccctgttaatgttgcttgggcggtgcattcggaagggttggggtgtgaaaggtgacggtgtgtgatatcactcagacgcgttatgaggacggcctacgaggacttcaccctctggagctgggaaccgctgcccacttacagggaggccgaggtgtaggaaaactggaattccaaaagagtaatcaagtcagaggattatatgacttttatctgcctagagaagaactatggatctacaacatggagactggaagatggaaaaaaatcaacactgaaggtgatgttcctccttctatgtcaggaagctgtgctgtgtgtgtagacagggtgctgtacttgtttggaggacaccattcaagaggcaataccaataagttctacatgctggattcaaggtctacagacagagtgttacagtgggaaagaattgattgccaaggaattcctccatcatcaaaggacaaacttggtgtctgggtatataaaaacaagttaatattttttggagggtatggatatttgcctgaagataaagtattgggaacttttgaattcgatgaaacatctttttggaattcaagtcatccaagaggatggaatgatcatgtacatattttagatactgaaacatttacctggagccagcctataactactggtaaagcaccttcacctcgtgctgcccatgcctgtgcaactgtcggaaatagaggcttcgtgtttggaggcagatatcgagatgctagaatgaatgatcttcactatcttaatctggatacatgggagtggaatgaattaattccacaaggcatatgcccagttggtcgatcttggcactcactaacaccagtttcttcagatcatctttttctctttggaggatttaccactgataaacagccactaagtgatgcctggacttactgcatcagtaaaaatgaatggatacaatttaatcatccatataccgaaaaaccaaggttatggcacacagcttgtgccagcgatgaaggagaagtaattgtttttggtggatgtgccaacaacttgcttgtccatcacagagctgcacacagtaatgaaatactaatattttcagttcaaccaaaatctcttgtacggctaagcttagaagcagtcatttgctttaaagaaatgttagccaactcatggaactgccttccaaaacacttacttcacagtgttaatcagaggtttggtagtaacaacacttctggatcttaaggcttcataaataatgcctatgatcaccttgcatggacagcaatcctgtaaacatcacagagtggcatcatttgtataattatatgcattgttgtagtttgcacctgttggttttaatgtgcatgtgaatggcctagagaacctatttttgtgtctaaagtttacaataaatgtatttaacacca

SEQ ID NO: 348498 - DNA, 1283 bp, Homo sapiens
cacatgttcacacctctggggcggctacagagtaatcaagtcagaggattatatgacttttatctgcctagagaagaactatggatctacaacatggagactggaagatggaaaaaaatcaacactgaaggtgatgttcctccttctatgtcaggaagctgtgctgtgtgtgtagacagggtgctgtacttgtttggaggacaccattcaagaggcaataccaataagttctacatgctggattcaaggtctacagacagagtgttacagtgggaaagaattgattgccaaggaattcctccatcatcaaaggacaaacttggtgtctgggtatataaaaacaagttaatattttttggagggtatggatatttgcctgaagataaagtattgggaacttttgaattcgatgaaacatctttttggaattcaagtcatccaagaggatggaatgatcatgtacatattttagatactgaaacatttacctggagccagcctataactactggtaaagcaccttcacctcgtgctgcccatgcctgtgcaactgtcggaaatagaggcttcgtgtttggaggcagatatcgagatgctagaatgaatgatcttcactatcttaatctggatacatgggagtggaatgaattaattccacaaggcatatgcccagttggtcgatcttggcactcactaacaccagtttcttcagatcatctttttctctttggaggatttaccactgataaacagccactaagtgatgcctggacttactgcatcagtaaaaatgaatggatacaatttaatcatccatataccgaaaaaccaaggttatggcacacagcttgtgccagcgatgaaggagaagtaattgtttttggtggatgtgccaacaacttgcttgtccatcacagagctgcacacagtaatgaaatactaatattttcagttcaaccaaaatctcttgtacggctaagcttagaagcagtcatttgctttaaagaaatgttagccaactcatggaactgccttccaaaacacttacttcacagtgttaatcagaggtttggtagtaacaacacttctggatcttaaggcttcataaataatgcctatgatcaccttgcatggacagcaatcctgtaaacatcacagagtggcatcatttgtataattatatgcattgttgtagtttgcacctgttggttttaatgtgcatgtgaatggcctagagaacctatttttgtgtctaaagtttacaataaatgtatttaacacca

SEQ ID NO: 348499 - DNA, 1875 bp, Homo sapiens
cgcttccggagctcggcgggcggcgtcagcggaacgggcggcttccggccgcggcgtaaacaaggccgtggactgcaggaggcggggcagacgggctgcaagagggagccggcccgacgcggaccgcttccctgcagtgccccgagtcccgggcccgcgccgccgccgcccggctccgctcgcggcccctctgtctgcaggcgtgccccggcggcggcggagagccgtcctcggccgaggaggctgggaaacgcgagcgcaggcggcagagaggcctcaacgccgtccctttcgccaccgccttttccttgcctcgcgccgctgtgcatttctctccttttcctttgtttttttggcccctcgcgggtgtgggcattgttggttagcaaaagtgcagcctcaagatggctgatggcaacgaggatctgcgggctgacgacttgcctgggccagccttcgagagctatgagtccatggagcttgcctgccccgctgagcgcagcggccacgtagccgtcagcgacgggcgccacatgttcgtctggggcggctacaagagtaatcaagtcagaggattatatgacttttatctgcctagagaagaactatggatctacaacatggagactggaagatggaaaaaaatcaacactgaaggtgatgttcctccttctatgtcaggaagctgtgctgtgtgtgtagacagggtgctgtacttgtttggaggacaccattcaagaggcaataccaataagttctacatgctggattcaaggtctacagacagagtgttacagtgggaaagaattgattgccaaggaattcctccatcatcaaaggacaaacttggtgtctgggtatataaaaacaagttaatattttttggagggtatggatatttgcctgaagataaagtattgggaacttttgaattcgatgaaacatctttttggaattcaagtcatccaagaggatggaatgatcatgtacatattttagatactgaaacatttacctggagccagcctataactactggtaaagcaccttcacctcgtgctgcccatgcctgtgcaactgtcggaaatagaggcttcgtgtttggaggcagatatcgagatgctagaatgaatgatcttcactatcttaatctggatacatgggagtggaatgaattaattccacaaggcatatgcccagttggtcgatcttggcactcactaacaccagtttcttcagatcatctttttctctttggaggatttaccactgataaacagccactaagtgatgcctggacttactgcatcagtaaaaatgaatggatacaatttaatcatccatataccgaaaaaccaaggttatggcacacagcttgtgccagcgatgaaggagaagtaattgtttttggtggatgtgccaacaacttgcttgtccatcacagagctgcacacagtaatgaaatactaatattttcagttcaaccaaaatctcttgtacggctaagcttagaagcagtcatttgctttaaagaaatgttagccaactcatggaactgccttccaaaacacttacttcacagtgttaatcagaggtttggtagtaacaacacttctggatcttaaggcttcataaataatgcctatgatcaccttgcatggacagcaatcctgtaaacatcacagagtggcatcatttgtataattatatgcattgttgtagtttgcacctgttggttttaatgtgcatgtgaatggcctagagaacctatttttgtgtctaaagtttacaataaatgtatttaacaccagtagctgtcctctattaaagtaaagtaatggttgggctttttaccctgaaaaaaagttgctacat

SEQ ID NO: 348500 - DNA, 2268 bp, Homo sapiens
cgcttccggagctcggcgggcggcgtcagcggaacgggcggcttccggccgcggcgtaaacaaggccgtggactgcaggaggcggggcagacgggctgcaagagggagccggcccgacgcggaccgcttccctgcagtgccccgagtcccgggcccgcgccgccgccgcccggctccgctcgcggcccctctgtctgcaggcgtgccccggcggcggcggagagccgtcctcggccgaggaggctgggaaacgcgagcgcaggcggcagagaggcctcaacgccgtccctttcgccaccgccttttccttgcctcgcgccgctgtgcatttctctccttttcctttgtttttttggcccctcgcgggtgtgggcattgttggttagcaaaagtgcagcctcaagatggctgatggcaacgaggatctgcgggctgacgacttgcctgggccagccttcgagagctatgagtccatggagcttgcctgccccgctgagcgcagcggccacgtagccgtcagcgacgggcgccacatgttcgtctggggcggctacaagagtaatcaagtcagaggattatatgacttttatctgcctagagaagaactatggatctacaacatggagactggaagatggaaaaaaatcaacactgaaggtgatgttcctccttctatgtcaggaagctgtgctgtgtgtgtagacagggtgctgtacttgtttggaggacaccattcaagaggcaataccaataagttctacatgctggattcaaggtctacagacagagtgttacagtgggaaagaattgattgccaaggaattcctccatcatcaaaggacaaacttggtgtctgggtatataaaaacaagttaatattttttggagggtatggatatttgcctgaagataaagtattgggaacttttgaattcgatgaaacatctttttggaattcaagtcatccaagaggatggaatgatcatgtacatattttagatactgaaacatttacctggagccagcctataactactggtaaagcaccttcacctcgtgctgcccatgcctgtgcaactgtcggaaatagaggcttcgtgtttggaggcagatatcgagatgctagaatgaatgatcttcactatcttaatctggatacatgggagtggaatgaattaattccacaaggcatatgcccagttggtcgatcttggcactcactaacaccagtttcttcagatcatctttttctctttggaggatttaccactgataaacagccactaagtgatgcctggacttactgcatcagtaaaaatgaatggatacaatttaatcatccatataccgaaaaaccaaggttatggcacacagcttgtgccagcgatgaaggagaagtaattgtttttggtggatgtgccaacaacttgcttgtccatcacagagctgcacacagtaatgaaatactaatattttcagttcaaccaaaatctcttgtacggctaagcttagaagcagtcatttgctttaaagaaatgttagccaactcatggaactgccttccaaaacacttacttcacagtgttaatcagaggtttggtagtaacaacacttctggatcttaaggcttcataaataatgcctatgatcaccttgcatggacagcaatcctgtaaacatcacagagtggcatcatttgtataattatatgcattgttgtagtttgcacctgttggttttaatgtgcatgtgaatggcctagagaacctatttttgtgtctaaagtttacaataaatgtatttaacaccaaaaaaaaaaaataaaaaaaaaaataaaaaaaaaaaaaaaaaaaagaaaaagaagaaaaaaaagaaagaaaggaaagaaagaggaaaatagaaagaagagaaaacagacggaggacagtggagagaatcagaagaagaggaccgctaggtgagagatagtagtaagaggagtaggagacaagaaaatggagatagaagggacgcgaaaaacaacagaaacgataagagaaagaaaggcgaacaaaaaaaagacagaacagaagaaaataacagaacaagaaaagagagagaaagaacaaagaagaaacgagcagagaaaacgaagcagaagcaaagaagtaggaaaaacaaaagagagagaaagaaagaaaacaagagaagaaaagaggaggaagcaaacacaaagaaaaaaaaaaagaagaaagagacaaaaagacaaagaaacagagagagaacaag

SEQ ID NO: 348501 - DNA, 2045 bp, Homo sapiens
cgcttccggagctcggcgggcggcgtcagcggaacgggcggcttccggccgcggcgtaaacaaggccgtggactgcaggaggcggggcagacgggctgcaagagggagccggcccgacgcggaccgcttccctgcagtgccccgagtcccgggcccgcgccgccgccgcccggctccgctcgcggcccctctgtctgcaggcgtgccccggcggcggcggagagccgtcctcggccgaggaggctgggaaacgcgagcgcaggcggcagagaggcctcaacgccgtccctttcgccaccgccttttccttgcctcgcgccgctgtgcatttctctccttttcctttgtttttttggcccctcgcgggtgtgggcattgttggttagcaaaagtgcagcctcaagatggctgatggcaacgaggatctgcgggctgacgacttgcctgggccagccttcgagagctatgagtccatggagcttgcctgccccgctgagcgcagcggccacgtagccgtcagcgacgggcgccacatgttcgtctggggcggctacaagagtaatcaagtcagaggattatatgacttttatctgcctagagaagaactatggatctacaacatggagactggaagatggaaaaaaatcaacactgaaggtgatgttcctccttctatgtcaggaagctgtgctgtgtgtgtagacagggtgctgtacttgtttggaggacaccattcaagaggcaataccaataagttctacatgctggattcaaggtctacagacagagtgttacagtgggaaagaattgattgccaaggaattcctccatcatcaaaggacaaacttggtgtctgggtatataaaaacaagttaatattttttggagggtatggatatttgcctgaagataaagtattgggaacttttgaattcgatgaaacatctttttggaattcaagtcatccaagaggatggaatgatcatgtacatattttagatactgaaacatttacctggagccagcctataactactggtaaagcaccttcacctcgtgctgcccatgcctgtgcaactgtcggaaatagaggcttcgtgtttggaggcagatatcgagatgctagaatgaatgatcttcactatcttaatctggatacatgggagtggaatgaattaattccacaaggcatatgcccagttggtcgatcttggcactcactaacaccagtttcttcagatcatctttttctctttggaggatttaccactgataaacagccactaagtgatgcctggacttactgcatcagtaaaaatgaatggatacaatttaatcatccatataccgaaaaaccaaggttatggcacacagcttgtgccagcgatgaaggagaagtaattgtttttggtggatgtgccaacaacttgcttgtccatcacagagctgcacacagtaatgaaatactaatattttcagttcaaccaaaatctcttgtacggtaagtaactttgtacttggcacttagattatttaaaattgtgtttcctaagacttagcactctcgaaaaactaggtttatggattatttaagggcaataaaacttcattgctataaccagttcctatgaaaatctttgaagaaagaaagagggatgttttatgtagtttttcaagtgaatgtacttccaaacagtaaagtgaaattacttttctctttccttgtccactttcaggctaagcttagaagcagtcatttgctttaaagaaatgttagccaactcatggaactgccttccaaaacacttacttcacagtgttaatcagaggtttggtagtaacaacacttctggatcttaaggcttcataaataatgcctatgatcaccttgcatggacagcaatcctgtaaacatcacagagtggcatcatttgtataattatatgcattgttgtagtttgcacctgttggttttaatgtgcatgtgaatggcctagagaacctatttttgtgtctaaagtttacaataaatgtatttaacacca

SEQ ID NO: 348502 - DNA, 1814 bp, Homo sapiens
cgcttccggagctcggcgggcggcgtcagcggaacgggcggcttccggccgcggcgtaaacaaggccgtggactgcaggaggcggggcagacgggctgcaagagggagccggcccgacgcggaccgcttccctgcagtgccccgagtcccgggcccgcgccgccgccgcccggctccgctcgcggcccctctgtctgcaggcgtgccccggcggcggcggagagccgtcctcggccgaggaggctgggaaacgcgagcgcaggcggcagagaggcctcaacgccgtccctttcgccaccgccttttccttgcctcgcgccgctgtgcatttctctccttttcctttgtttttttggcccctcgcgggtgtgggcattgttggttagcaaaagtgcagcctcaagatggctgatggcaacgaggatctgcgggctgacgacttgcctgggccagccttcgagagctatgagtccatggagcttgcctgccccgctgagcgcagcggccacgtagccgtcagcgacgggcgccacatgttcgtctggggcggctacaagagtaatcaagtcagaggattatatgacttttatctgcctagagaagaactatggatctacaacatggagactggaagatggaaaaaaatcaacactgaaggtgatgttcctccttctatgtcaggaagctgtgctgtgtgtgtagacagggtgctgtacttgtttggaggacaccattcaagaggcaataccaataagttctacatgctggattcaaggtctacagacagagtgttacagtgggaaagaattgattgccaaggaattcctccatcatcaaaggacaaacttggtgtctgggtatataaaaacaagttaatattttttggagggtatggatatttgcctgaagataaagtattgggaacttttgaattcgatgaaacatctttttggaattcaagtcatccaagaggatggaatgatcatgtacatattttagatactgaaacatttacctggagccagcctataactactggtaaagcaccttcacctcgtgctgcccatgcctgtgcaactgtcggaaatagaggcttcgtgtttggaggcagatatcgagatgctagaatgaatgatcttcactatcttaatctggatacatgggagtggaatgaattaattccacaaggcatatgcccagttggtcgatcttggcactcactaacaccagtttcttcagatcatctttttctctttggaggatttaccactgataaacagccactaagtgatgcctggacttactgcatcagtaaaaatgaatggatacaatttaatcatccatataccgaaaaaccaaggttatggcacacagcttgtgccagcgatgaaggagaagtaattgtttttggtggatgtgccaacaacttgcttgtccatcacagagctgcacacagtaatgaaatactaatattttcagttcaaccaaaatctcttgtacgttacatttaagagaaagaaggcccaggagcagtggttcacgcctataatcctaggactctggaaggctcaggctgaggcgggtggatcgcttgagcccaggagttcaagaccagcctaagcaacatggagaaacaccatctctacaaaaaatataaaagttagctgggtatagtgggtgcctgtagtcccagctactcggaagactgagggggggaggatcacctgagcccaggaggtagacgttgtggagagccatgatcctgtcactgcactgggtgacaccagcctgggtgacagagaccctgtctcaaa

SEQ ID NO: 348503 - DNA, 1820 bp, Homo sapiens
cgcttccggagctcggcgggcggcgtcagcggaacgggcggcttccggccgcggcgtaaacaaggccgtggactgcaggaggcggggcagacgggctgcaagagggagccggcccgacgcggaccgcttccctgcagtgccccgagtcccgggcccgcgccgccgccgcccggctccgctcgcggcccctctgtctgcaggcgtgccccggcggcggcggagagccgtcctcggccgaggaggctgggaaacgcgagcgcaggcggcagagaggcctcaacgccgtccctttcgccaccgccttttccttgcctcgcgccgctgtgcatttctctccttttcctttgtttttttggcccctcgcgggtgtgggcattgttggttagcaaaagtgcagcctcaagatggctgatggcaacgaggatctgcgggctgacgacttgcctgggccagccttcgagagctatgagtccatggagcttgcctgccccgctgagcgcagcggccacgtagccgtcagcgacgggcgccacatgttcgtctggggcggctacaagagtaatcaagtcagaggattatatgacttttatctgcctagagaagaactatggatctacaacatggagactggaagatggaaaaaaatcaacactgaaggtgatgttcctccttctatgtcaggaagctgtgctgtgtgtgtagacagggtgctgtacttgtttggaggacaccattcaagaggcaataccaataagttctacatgctggattcaaggtctacagacagagtgttacagtgggaaagaattgattgccaaggaattcctccatcatcaaaggacaaacttggtgtctgggtatataaaaacaagttaatattttttggagggtatggatatttgcctgaagataaagtattgggaacttttgaattcgatgaaacatctttttggaattcaagtcatccaagaggatggaatgatcatgtacatattttagatactgaaacatttacctggagccagcctataactactggtaaagcaccttcacctcgtgctgcccatgcctgtgcaactgtcggaaatagaggcttcgtgtttggaggcagatatcgagatgctagaatgaatgatcttcactatcttaatctggatacatgggagtggaatgaattaattccacaaggcatatgcccagttggtcgatcttggcactcactaacaccagtttcttcagatcatctttttctctttggaggatttaccactgataaacagccactaagtgatgcctggacttactgcatcagtaaaaatgaatggatacaatttaatcatccatataccgaaaaaccaaggttatggcacacagcttgtgccagcgatgaaggagaagtaattgtttttggtggatgtgccaacaacttgcttgtccatcacagagctgcacacagtaatgaaatactaatattttcagttcaaccaaaatctcttgtacgtcactgcaaaaaaaaacatggggaaaataaaaagatattaagactagaagaaaagccataatttgcagacgatatgactgcctacagatgaagtattaaaattagtaagtgctctataagattgcccattacttgatcaacatgaaagttgtcttcccatgtaccagcaagtaacagctaggaaatgaaagtttcaaaaataggtagggcgcagtggctcaagtctgtaatcccaacactttgggaggctgaggcgggtggacctcttgacctctggagttcgagactagcctgtgcaacatgccaaaccccgtctctc

SEQ ID NO: 348504 - DNA, 547 bp, Homo sapiens
tctagaggatcccggctgcacaaagtgatgcctggacttactgcatcagtaaaaatgaatggatacaatttaatcatccatataccgaaaaaccaaggttatggcacacagcttgtgccagcgatgaaggagaagtaattgtttttggtggatgtgccaacaacttgcttgtccatcacagagctgcacacagtaatgaaatactaatattttcagttcaaccaaaatctcttgtacggctaagcttagaagcagtcatttgctttaaagaaatgttagccaactcatggaactgccttccaaaacacttacttcacagtgttaatcagaggtttggtagtaacaacacttctggatcttaaggcttcataaataatgcctatgatcaccttgcatggacagcaatcctgtaaacatcacagagtggcatcatttgtataattatatgcattgttgtagtttgcacctgttggttttaatgtgcatgtgaatggcctagagaacctatttttgtgtctaaagtttacaataaatgtatttaacacca

SEQ ID NO: 348505 - DNA, 1107 bp, Homo sapiens
tacatggggaaaaaacaagaactgtcaattagacttgcagtagcactgtataacaaagatgaagaaatcaaatcatccaaaaaaagcttattaaacactgataattttctcttgttaatctcagaacaaaatgctaaaggaaatgatacagtcaaaattcatgttcaaagcctgcattttttccccaagtatctaaaccaagtatagtcatgcaagtaagacttcatttgcacaaatgatctctccataaaactaccaggctttctgagactttatagtttactcaagcagggctttcaccatccctcagacgttctgtgtaaggccagttggccctacctatggaagaagaaggcatatacttcttatttcccatacgatttttattgctaacaaagacctagagaacagatcgttcagttcaaactcctcattgcataaatgagaacgaccagagagagaaaataatatccagataaaatagatattgattgatctgcttttgctactttcccttaagattttacttctcgccatgatgttttggtctgaactaccttaagatcgctagtctttatttcatagctctattctgtagtataaaatggccaactggtgttctgggtggcttcaaactcgtttttgttttaaatgcaggttatggcacacagcttgtgccagcgatgaaggagaagtaattgtttttggtggatgtgccaacaacttgcttgtccatcacagagctgcacacagtaatgaaatactaatattttcagttcaaccaaaatctcttgtacggctaagcttagaagcagtcatttgctttaaagaaatgttagccaactcatggaactgccttccaaaacacttacttcacagtgttaatcagaggtttggtagtaacaacacttctggatcttaaggcttcataaataatgcctatgatcaccttgcatggacagcaatcctgtaaacatcacagagtggcatcatttgtataattatatgcattgttgtagtttgcacctgttggttttaatgtgcatgtgaatggcctagagaacctatttttgtgtctaaagtttacaataaatgtatttaacacca

SEQ ID NO: 348506 - DNA, 1426 bp, Homo sapiens
tacatggggaaaaaacaagaactgtcaattagacttgcagtagcactgtataacaaagatgaagaaatcaaatcatccaaaaaaagcttattaaacactgataattttctcttgttaatctcagaacaaaatgctaaaggaaatgatacagtcaaaattcatgttcaaagcctgcattttttccccaagtatctaaaccaagtatagtcatgcaagtaagacttcatttgcacaaatgatctctccataaaactaccaggctttctgagactttatagtttactcaagcagggctttcaccatccctcagacgttctgtgtaaggccagttggccctacctatggaagaagaaggcatatacttcttatttcccatacgatttttattgctaacaaagacctagagaacagatcgttcagttcaaactcctcattgcataaatgagaacgaccagagagagaaaataatatccagataaaatagatattgattgatctgcttttgctactttcccttaagattttacttctcgccatgatgttttggtctgaactaccttaagatcgctagtctttatttcatagctctattctgtagtataaaatggccaactggtgttctgggtggcttcaaactcgtttttgttttaaatgcaggttatggcacacagcttgtgccagcgatgaaggagaagtaattgtttttggtggatgtgccaacaacttgcttgtccatcacagagctgtaagtatactaccttcacattattactgaaacttacttgcaaagcatttgcttttaaatgtgttcttcctatttatttttcaggcacacagtaatgaaatactaatattttcagttcaaccaaaatctcttgtacggtaagtaactttgtacttggcacttagattatttaaaattgtgtttcctaagacttagcactctcgaaaaactaggtttatggattatttaagggcaataaaacttcattgctataaccagttcctatgaaaatctttgaagaaagaaagagggatgttttatgtagtttttcaagtgaatgtacttccaaacagtaaagtgaaattacttttctctttccttgtccactttcaggctaagcttagaagcagtcatttgctttaaagaaatgttagccaactcatggaactgccttccaaaacacttacttcacagtgttaatcagaggtttggtagtaacaacacttctggatcttaaggcttcataaataatgcctatgatcaccttgcatggacagcaatcctgtaaacatcacagagtggcatcatttgtataattatatgcattgttgtagtttgcacctgttggttttaatgtgcatgtgaatggcctagagaacctatttttgtgtctaaagtttacaataaatgtatttaacacca

SEQ ID NO: 348507 - DNA, 1166 bp, Homo sapiens
cgcttccggagctcggcgggcggcgtcagcggaacgggcggcttccggccgcggcgtaaacaaggccgtggactgcaggaggcggggcagacgggctgcaagagggagccggcccgacgcggaccgcttccctgcagtgccccgagtcccgggcccgcgccgccgccgcccggctccgctcgcggcccctctgtctgcaggcgtgccccggcggcggcggagagccgtcctcggccgaggaggctgggaaacgcgagcgcaggcggcagagaggcctcaacgccgtccctttcgccaccgccttttccttgcctcgcgccgctgtgcatttctctccttttcctttgtttttttggcccctcgcgggtgtgggcattgttggttagcaaaagtgcagcctcaagatggctgatggcaacgaggatctgcgggctgacgacttgcctgggccagccttcgagagctatgagtccatggagcttgcctgccccgctgagcgcagcggccacgtagccgtcagcgacgggcgccacatgttcgtctggggcggctacaagagtaatcaagtcagaggattatatgacttttatctgcctagagaagaactatggatctacaacatggagactggaagatggaaaaaaatcaacactgaaggtgatgttcctccttctatgtcaggaagctgtgctgtgtgtgtagacagggtgctgtacttgtttggaggacaccattcaagaggcaataccaataaggttagtgtttctaaggattatggcttgaggcatttttattcttattatctttcaaacaactgcaaatttctaaggttagccccagacttatttgtgtcacagttaaaaatgatgtgtacttgattatgatatgaatgtgcattttagtattttgtgtgccaatctgtatttacctaggcattatgtaaaatcaacttttgttggtaacctgtgtgcagtaacttcctgggtggtttttctttgtgctttttgcagctacttgttctcttagaaccttaaatgttagatgaacattagtaataaaattgcagacaaaatgaagacaagatgtaatggagggaagggtaaaaatgagcaggcaaccagtcagaaagctgtaaggataaattaaaactgacaaaactttacatg

SEQ ID NO: 348508 - DNA, 1810 bp, Homo sapiens
cgcttccggagctcggcgggcggcgtcagcggaacgggcggcttccggccgcggcgtaaacaaggccgtggactgcaggaggcggggcagacgggctgcaagagggagccggcccgacgcggaccgcttccctgcagtgccccgagtcccgggcccgcgccgccgccgcccggctccgctcgcggcccctctgtctgcaggcgtgccccggcggcggcggagagccgtcctcggccgaggaggctgggaaacgcgagcgcaggcggcagagaggcctcaacgccgtccctttcgccaccgccttttccttgcctcgcgccgctgtgcatttctctccttttcctttgtttttttggcccctcgcgggtgtgggcattgttggttagcaaaagtgcagcctcaagatggctgatggcaacgaggatctgcgggctgacgacttgcctgggccagccttcgagagctatgagtccatggagcttgcctgccccgctgagcgcagcggccacgtagccgtcagcgacgggcgccacatgttcgtctggggcggctacaagagtaatcaagtcagaggattatatgacttttatctgcctagagaagaactatggatctacaacatggagactggaagatggaaaaaaatcaacactgaaggtgatgttcctccttctatgtcaggaagctgtgctgtgtgtgtagacagggtgctgtacttgtttggaggacaccattcaagaggcaataccaataagttctacatgctggattcaaggtctacagacagagtgttacagtgggaaagaattgattgccaaggaattcctccatcatcaaaggacaaacttggtgtctgggtatataaaaacaagttaatattttttggagggtatggatatttgcctgaagataaagtattgggaacttttgaattcgatgaaacatctttttggaattcaagtcatccaagaggatggaatgatcatgtacatattttagatactgaaacatttacctggagccagcctataactactggtaaagcaccttcacctcgtgctgcccatgcctgtgcaactgtcggaaatagaggcttcgtgtttggaggcagatatcgagatgctagaatgaatgatcttcactatcttaatctggatacatgggagtggaatgaattaattccacaaggcatatgcccagttggtcgatcttggcactcactaacaccagtttcttcagatcatctttttctctttggaggatttaccactgataaacagccactaagtgatgcctggacttactgcatcagtaaaaatgaatggatacaatttaatcatccatataccgaaaaaccaaggttatggcacacagcttgtgccagcgatgaaggagaagtaattgtttttggtggatgtgccaacaacttgcttgtccatcacagagctgcacacagtaatgaaatactaatattttcagttcaaccaaaatctcttgtacggctaagcttagaagcagtcatttgctttaaagaaatgttagccaactcatggaactgccttccaaaacacttacttcacagtgttaatcagaggtttggtagtaacaacacttctggatcttaaggcttcataaataatgcctatgatcaccttgcatggacagcaatcctgtaaacatcacagagtggcatcatttgtataattatatgcattgttgtagtttgcacctgttggttttaatgtgcatgtgaatggcctagagaacctatttttgtgtctaaagtttacaataaatgtatttaacacca

SEQ ID NO: 348509 - DNA, 658 bp, Homo sapiens
gagctcgagacctccatatgtcgtctggggcggctacaagagtctcatgagtaatcaagtcagaggattatatgacttttatctgcctagagaagaactatggatctacaacatggagactggaagatggaaaaaaatcaacactgaaggtgatgttcctccttctatgtcaggaagctgtgctgtgtgtgtagacagggtgctgtacttgtttggaggacaccattcaagaggcaataccaataaggttagtgtttctaaggattatggcttgaggcatttttattcttattatctttcaaacaactgcaaatttctaaggttagccccagacttatttgtgtcacagttaaaaatgatgtgtacttgattatgatatgaatgtgcattttagtattttgtgtgccaatctgtatttacctaggcattatgtaaaatcaacttttgttggtaacctgtgtgcagtaacttcctgggtggtttttctttgtgctttttgcagctacttgttctcttagaaccttaaatgttagatgaacattagtaataaaattgcagacaaaatgaagacaagatgtaatggagggaagggtaaaaatgagcaggcaaccagtcagaaagctgtaaggataaattaaaactgacaaaactttacatg

SEQ ID NO: 348510 - DNA, 2288 bp, Homo sapiens
  misc_feature (1356)..(1356): n is a, c, g, or t
cgcttccggagctcggcgggcggcgtcagcggaacgggcggcttccggccgcggcgtaaacaaggccgtggactgcaggaggcggggcagacgggctgcaagagggagccggcccgacgcggaccgcttccctgcagtgccccgagtcccgggcccgcgccgccgccgcccggctccgctcgcggcccctctgtctgcaggcgtgccccggcggcggcggagagccgtcctcggccgaggaggctgggaaacgcgagcgcaggcggcagagaggcctcaacgccgtccctttcgccaccgccttttccttgcctcgcgccgctgtgcatttctctccttttcctttgtttttttggcccctcgcgggtgtgggcattgttggttagcaaaagtgcagcctcaagatggctgatggcaacgaggatctgcgggctgacgacttgcctgggccagccttcgagagctatgagtccatggagcttgcctgccccgctgagcgcagcggccacgtagccgtcagcgacgggcgccacatgttcgtctggggcggctacaagagtaatcaagtcagaggattatatgacttttatctgcctagagaagaactatggatctacaacatggagactggaagatggaaaaaaatcaacactgaaggtgatgttcctccttctatgtcaggaagctgtgctgtgtgtgtagacagggtgctgtacttgtttggaggacaccattcaagaggcaataccaataagttctacatgctggattcaaggtctacagacagagtgttacagtgggaaagaattgattgccaaggaattcctccatcatcaaaggacaaacttggtgtctgggtatataaaaacaagttaatattttttggagggtatggatatttgcctgaagataaagtattgggaacttttgaattcgatgaaacatctttttggaattcaagtcatccaagaggatggaatgatcatgtacatattttagatactgaaacatttacctggagccagcctataactactggtaaagcaccttcacctcgtgctgcccatgcctgtgcaactgtcggaaatagaggcttcgtgtttggaggcagatatcgagtaagtattcaaacgacttcaatgacttgcttttgaattcttcaaaatgataacttaattatccttttttaggatgctagaatgaatgatcttcactatcttaatctggatacatgggagtggaatgaattgtaggtatcactttagatacatttttccaaaattcagattgtttttaccctatattccctactattggtatataatgtccttgcttaacttttctttaactatgaanttaaataaacataattactaggtccttaaggaatgaattttatttttgtgtttccagttcctgtaactatgtgcctagtacatagcatgtgctcagtgtttgttgaaaggaaaaggtctgaagttgattctatcgtcaaagaaaatatttcagtataaagcatgtagtttataccaagaagcctttttaaacttaaggtctcttttttcataacatgtacatataaattttaaaagaaaacttaaaaatacagtagctgcttctaaatgcagatattgtaacttagctattattttcagaattccacaaggcatatgcccagttggtcgatcttggcactcactaacaccagtttcttcagatcatctttttctctttggaggatttaccactgataaacagccactaagtgatgcctggacttactgcatcagtaaaaatgaatggatacaatttaatcatccatataccgaaaaaccaaggttatggcacacagcttgtgccagcgatgaaggagaagtaattgtttttggtggatgtgccaacaacttgcttgtccatcacagagctgcacacagtaatgaaatactaatattttcagttcaaccaaaatctcttgtacggctaagcttagaagcagtcatttgctttaaagaaatgttagccaactcatggaactgccttccaaaacacttacttcacagtgttaatcagaggtttggtagtaacaacacttctggatcttaaggcttcataaataatgcctatgatcaccttgcatggacagcaatcctgtaaacatcacagagtggcatcatttgtataattatatgcattgttgtagtttgcacctgttggttttaatgtgcatgtgaatggcctagagaacctatttttgtgtctaaagtttacaataaatgtatttaacacca

SEQ ID NO: 348511 - DNA, 1729 bp, Homo sapiens
cgcttccggagctcggcgggcggcgtcagcggaacgggcggcttccggccgcggcgtaaacaaggccgtggactgcaggaggcggggcagacgggctgcaagagggagccggcccgacgcggaccgcttccctgcagtgccccgagtcctcggccgaggaggctgggaaacgcgagcgcaggcggcagagaggcctcaacgccgtccctttcgccaccgccttttccttgcctcgcgccgctgtgcatttctctccttttcctttgtttttttggcccctcgcgggtgtgggcattgttggttagcaaaagtgcagcctcaagatggctgatggcaacgaggatctgcgggctgacgacttgcctgggccagccttcgagagctatgagtccatggagcttgcctgccccgctgagcgcagcggccacgtagccgtcagcgacgggcgccacatgttcgtctggggcggctacaagagtaatcaagtcagaggattatatgacttttatctgcctagagaagaactatggatctacaacatggagactggaagatggaaaaaaatcaacactgaaggtgatgttcctccttctatgtcaggaagctgtgctgtgtgtgtagacagggtgctgtacttgtttggaggacaccattcaagaggcaataccaataagttctacatgctggattcaaggtctacagacagagtgttacagtgggaaagaattgattgccaaggaattcctccatcatcaaaggacaaacttggtgtctgggtatataaaaacaagttaatattttttggagggtatggatatttgcctgaagataaagtattgggaacttttgaattcgatgaaacatctttttggaattcaagtcatccaagaggatggaatgatcatgtacatattttagatactgaaacatttacctggagccagcctataactactggtaaagcaccttcacctcgtgctgcccatgcctgtgcaactgtcggaaatagaggcttcgtgtttggaggcagatatcgagatgctagaatgaatgatcttcactatcttaatctggatacatgggagtggaatgaattaattccacaaggcatatgcccagttggtcgatcttggcactcactaacaccagtttcttcagatcatctttttctctttggaggatttaccactgataaacagccactaagtgatgcctggacttactgcatcagtaaaaatgaatggatacaatttaatcatccatataccgaaaaaccaaggttatggcacacagcttgtgccagcgatgaaggagaagtaattgtttttggtggatgtgccaacaacttgcttgtccatcacagagctgcacacagtaatgaaatactaatattttcagttcaaccaaaatctcttgtacggctaagcttagaagcagtcatttgctttaaagaaatgttagccaactcatggaactgccttccaaaacacttacttcacagtgttaatcagaggtttggtagtaacaacacttctggatcttaaggcttcataaataatgcctatgatcaccttgcatggacagcaatcctgtaaacatcacagagtggcatcatttgtataattatatgcattgttgtagtttgcacctgttggttttaatgtgcatgtgaatggcctagagaacctatttttgtgtctaaagtttacaataaatgtatttaacacca

SEQ ID NO: 348512 - DNA, 1708 bp, Homo sapiens
aggactcggagatcaggctggccaggtggcaaatcccatgtctagtaaaaatacaaaaattagccaggcgtgatggcgagtgcgtgcagtcccagctacttaggaggctgaggcaggagaatcacttgaacccaggaggtggacattgcagtgagccagccaagattgcgccactgcactccatcctgagcaatagagacttggactaaaaaaaaaaaagttcccagagatctcttcttgtcctattgcaactgctgtatcaaaattctgaattaagagctatctatgttgagctttaccttgagtgtgtggcatgggtgggggaggattgtgcactgtaatacctatttttcatactaattatgaaattagtatctcaagatcgatttaaaaaatacagtagtgcctctttaaaataccagtttttatatttacaattttttttattcttagagagtaatcaagtcagaggattatatgacttttatctgcctagagaagaactatggatctacaacatggagactggaagatggaaaaaaatcaacactgaaggtgatgttcctccttctatgtcaggaagctgtgctgtgtgtgtagacagggtgctgtacttgtttggaggacaccattcaagaggcaataccaataagttctacatgctggattcaaggtctacagacagagtgttacagtgggaaagaattgattgccaaggaattcctccatcatcaaaggacaaacttggtgtctgggtatataaaaacaagttaatattttttggagggtatggatatttgcctgaagataaagtattgggaacttttgaattcgatgaaacatctttttggaattcaagtcatccaagaggatggaatgatcatgtacatattttagatactgaaacatttacctggagccagcctataactactggtaaagcaccttcacctcgtgctgcccatgcctgtgcaactgtcggaaatagaggcttcgtgtttggaggcagatatcgagatgctagaatgaatgatcttcactatcttaatctggatacatgggagtggaatgaattaattccacaaggcatatgcccagttggtcgatcttggcactcactaacaccagtttcttcagatcatctttttctctttggaggatttaccactgataaacagccactaagtgatgcctggacttactgcatcagtaaaaatgaatggatacaatttaatcatccatataccgaaaaaccaaggttatggcacacagcttgtgccagcgatgaaggagaagtaattgtttttggtggatgtgccaacaacttgcttgtccatcacagagctgcacacagtaatgaaatactaatattttcagttcaaccaaaatctcttgtacggctaagcttagaagcagtcatttgctttaaagaaatgttagccaactcatggaactgccttccaaaacacttacttcacagtgttaatcagaggtttggtagtaacaacacttctggatcttaaggcttcataaataatgcctatgatcaccttgcatggacagcaatcctgtaaacatcacagagtggcatcatttgtataattatatgcattgttgtagtttgcacctgttggttttaatgtgcatgtgaatggcctagagaacctatttttgtgtctaaagtttacaataaatgtatttaacacca

SEQ ID NO: 348513 - DNA, 1290 bp, Homo sapiens
catctgaggtgctctagccgatcgctgatttacgcagagtaatcaagtcagaggattatatgacttttatctgcctagagaagaactatggatctacaacatggagactggaagatggaaaaaaatcaacactgaaggtgatgttcctccttctatgtcaggaagctgtgctgtgtgtgtagacagggtgctgtacttgtttggaggacaccattcaagaggcaataccaataagttctacatgctggattcaaggtctacagacagagtgttacagtgggaaagaattgattgccaaggaattcctccatcatcaaaggacaaacttggtgtctgggtatataaaaacaagttaatattttttggagggtatggatatttgcctgaagataaagtattgggaacttttgaattcgatgaaacatctttttggaattcaagtcatccaagaggatggaatgatcatgtacatattttagatactgaaacatttacctggagccagcctataactactggtaaagcaccttcacctcgtgctgcccatgcctgtgcaactgtcggaaatagaggcttcgtgtttggaggcagatatcgagatgctagaatgaatgatcttcactatcttaatctggatacatgggagtggaatgaattaattccacaaggcatatgcccagttggtcgatcttggcactcactaacaccagtttcttcagatcatctttttctctttggaggatttaccactgataaacagccactaagtgatgcctggacttactgcatcagtaaaaatgaatggatacaatttaatcatccatataccgaaaaaccaaggttatggcacacagcttgtgccagcgatgaaggagaagtaattgtttttggtggatgtgccaacaacttgcttgtccatcacagagctgcacacagtaatgaaatactaatattttcagttcaaccaaaatctcttgtacggctaagcttagaagcagtcatttgctttaaagaaatgttagccaactcatggaactgccttccaaaacacttacttcacagtgttaatcagaggtttggtagtaacaacacttctggatcttaaggcttcataaataatgcctatgatcaccttgcatggacagcaatcctgtaaacatcacagagtggcatcatttgtataattatatgcattgttgtagtttgcacctgttggttttaatgtgcatgtgaatggcctagagaacctatttttgtgtctaaagtttacaataaatgtatttaacacca

SEQ ID NO: 348514 - DNA, 2813 bp, Homo sapiens
  misc_feature (1356)..(1356): n is a, c, g, or t
  misc_feature (2375)..(2375): n is a, c, g, or t
cgcttccggagctcggcgggcggcgtcagcggaacgggcggcttccggccgcggcgtaaacaaggccgtggactgcaggaggcggggcagacgggctgcaagagggagccggcccgacgcggaccgcttccctgcagtgccccgagtcccgggcccgcgccgccgccgcccggctccgctcgcggcccctctgtctgcaggcgtgccccggcggcggcggagagccgtcctcggccgaggaggctgggaaacgcgagcgcaggcggcagagaggcctcaacgccgtccctttcgccaccgccttttccttgcctcgcgccgctgtgcatttctctccttttcctttgtttttttggcccctcgcgggtgtgggcattgttggttagcaaaagtgcagcctcaagatggctgatggcaacgaggatctgcgggctgacgacttgcctgggccagccttcgagagctatgagtccatggagcttgcctgccccgctgagcgcagcggccacgtagccgtcagcgacgggcgccacatgttcgtctggggcggctacaagagtaatcaagtcagaggattatatgacttttatctgcctagagaagaactatggatctacaacatggagactggaagatggaaaaaaatcaacactgaaggtgatgttcctccttctatgtcaggaagctgtgctgtgtgtgtagacagggtgctgtacttgtttggaggacaccattcaagaggcaataccaataagttctacatgctggattcaaggtctacagacagagtgttacagtgggaaagaattgattgccaaggaattcctccatcatcaaaggacaaacttggtgtctgggtatataaaaacaagttaatattttttggagggtatggatatttgcctgaagataaagtattgggaacttttgaattcgatgaaacatctttttggaattcaagtcatccaagaggatggaatgatcatgtacatattttagatactgaaacatttacctggagccagcctataactactggtaaagcaccttcacctcgtgctgcccatgcctgtgcaactgtcggaaatagaggcttcgtgtttggaggcagatatcgagtaagtattcaaacgacttcaatgacttgcttttgaattcttcaaaatgataacttaattatccttttttaggatgctagaatgaatgatcttcactatcttaatctggatacatgggagtggaatgaattgtaggtatcactttagatacatttttccaaaattcagattgtttttaccctatattccctactattggtatataatgtccttgcttaacttttctttaactatgaanttaaataaacataattactaggtccttaaggaatgaattttatttttgtgtttccagttcctgtaactatgtgcctagtacatagcatgtgctcagtgtttgttgaaaggaaaaggtctgaagttgattctatcgtcaaagaaaatatttcagtataaagcatgtagtttataccaagaagcctttttaaacttaaggtctcttttttcataacatgtacatataaattttaaaagaaaacttaaaaatacagtagctgcttctaaatgcagatattgtaacttagctattattttcagaattccacaaggcatatgcccagttggtcgatcttggcactcactaacaccagtttcttcagatcatctttttctctttggaggatttaccactgataaacagccactaagtaagtccttgaaaaatatgataatgaaatcatcatatatcatccatatctaatagctgaaaatgagtctattagagactgatgagacggcttatagggttggttggaaggtttgaaattaattttgatcctgtaacatagctgtaattgtactatatggcatacttctgttcaataaagaacctggagcacttaagagccctgctgaagggctacaacatgcaaagggcttacttggctaattgcaggtgggggaaaaaaaagaaaatatactctctgtatctgctcatgatctattacctttcttgccaaagctgtgccctttaaatgtcaatgtcatattgacagactaacatacttcatttctttgcttgaatcaggtgatgcctggacttactgcatcagtaaaaatgaatggatacaatttaatcatccatataccgaaaaaccaaggtatttaaaagcaattcatatactgaatatgcataagacataagaattgaggttttggctgcattatatccagcattcttatttataaaaatctcagcattcactaaggtttgaaatacttctcaaagaaaagaaaaccaatgttatcctagtatcnaatgatctcctttccgtcatctgtgcatgaagagtagggctggatttttatttttgcttcttccttctgttataaaattgacacatagttaaaatatacaatcaagcttttcacttcaatgagttgaactgcatctaagtttattaaaaatgagggtcggccaggcgtggtggctcatgccggtaatcccagcactttaggaggctgaggcaggtggatcacctgaggtcaggagttccagcctggccaacatggtgaaaccccgtctctagtaaaaatgcaaaattagctgggcgtggtggcgtatgcctgtataatcccagctacttgagaggctgaggcaggacaattgcctgaaccaggaaggcagaggttgcagtgagctgagatcgtaccattgcgctccagcttgggcaacaagagtgaaactctgtctcc

SEQ ID NO: 348515 - DNA, 2129 bp, Homo sapiens
cgcttccggagctcggcgggcggcgtcagcggaacgggcggcttccggccgcggcgtaaacaaggccgtggactgcaggaggcggggcagacgggctgcaagagggagccggcccgacgcggaccgcttccctgcagtgccccgagtcccgggcccgcgccgccgccgcccggctccgctcgcggcccctctgtctgcaggcgtgccccggcggcggcggagagccgtcctcggccgaggaggctgggaaacgcgagcgcaggcggcagagaggcctcaacgccgtccctttcgccaccgccttttccttgcctcgcgccgctgtgcatttctctccttttcctttgtttttttggcccctcgcgggtgtgggcattgttggttagcaaaagtgcagcctcaagatggctgatggcaacgaggatctgcgggctgacgacttgcctgggccagccttcgagagctatgagtccatggagcttgcctgccccgctgagcgcagcggccacgtagccgtcagcgacgggcgccacatgttcgtctggggcggctacaagagtaatcaagtcagaggattatatgacttttatctgcctagagaagaactatggatctacaacatggagactggaagatggaaaaaaatcaacactgaaggtgatgttcctccttctatgtcaggaagctgtgctgtgtgtgtagacagggtgctgtacttgtttggaggacaccattcaagaggcaataccaataagttctacatgctggattcaaggtctacagacagagtgttacagtgggaaagaattgattgccaaggaattcctccatcatcaaaggacaaacttggtgtctgggtatataaaaacaagttaatattttttggagggtatggatatttgcctgaagataaagtattgggaacttttgaattcgatgaaacatctttttggaattcaagtcatccaagaggatggaatgatcatgtacatattttagatactgaaacatttacctggagccagcctataactactggtaaagcaccttcacctcgtgctgcccatgcctgtgcaactgtcggaaatagaggcttcgtgtttggaggcagatatcgagatgctagaatgaatgatcttcactatcttaatctggatacatgggagtggaatgaattaattccacaaggcatatgcccagttggtcgatcttggcactcactaacaccagtttcttcagatcatctttttctctttggaggatttaccactgataaacagccactaagtgatgcctggacttactgcatcagtaaaaatgaatggatacaatttaatcatccatataccgaaaaaccaaggttatggcacacagcttgtgccagcgatgaaggagaagtaattgtttttggtggatgtgccaacaacttgcttgtccatcacagagctgtaagtatactaccttcacattattactgaaacttacttgcaaagcatttgcttttaaatgtgttcttcctatttatttttcaggcacacagtaatgaaatactaatattttcagttcaaccaaaatctcttgtacggtaagtaactttgtacttggcacttagattatttaaaattgtgtttcctaagacttagcactctcgaaaaactaggtttatggattatttaagggcaataaaacttcattgctataaccagttcctatgaaaatctttgaagaaagaaagagggatgttttatgtagtttttcaagtgaatgtacttccaaacagtaaagtgaaattacttttctctttccttgtccactttcaggctaagcttagaagcagtcatttgctttaaagaaatgttagccaactcatggaactgccttccaaaacacttacttcacagtgttaatcagaggtttggtagtaacaacacttctggatcttaaggcttcataaataatgcctatgatcaccttgcatggacagcaatcctgtaaacatcacagagtggcatcatttgtataattatatgcattgttgtagtttgcacctgttggttttaatgtgcatgtgaatggcctagagaacctatttttgtgtctaaagtttacaataaatgtatttaacacca

SEQ ID NO: 348516 - DNA, 1647 bp, Homo sapiens
cgcttccggagctcggcgggcggcgtcagcggaacgggcggcttccggccgcggcgtaaacaaggccgtggactgcaggaggcggggcagacgggctgcaagagggagccggcccgacgcggaccgcttccctgcagtgccccgagtcccgggcccgcgccgccgccgcccggctccgctcgcggcccctctgtctgcaggcgtgccccggcggcggcggagagccgtcctcggccgaggaggctgggaaacgcgagcgcaggcggcagagaggcctcaacgccgtccctttcgccaccgccttttccttgcctcgcgccgctgtgcatttctctccttttcctttgtttttttggcccctcgcgggtgtgggcattgttggttagcaaaagtgcagcctcaagatggctgatggcaacgaggatctgcgggctgacgacttgcctgggccagccttcgagagctatgagtccatggagcttgcctgccccgctgagcgcagcggccacgtagccgtcagcgacgggcgccacatgttcgtctggggcggctacaagagtaatcaagtcagaggattatatgacttttatctgcctagagaagaactatggatctacaacatggagactggaagatggaaaaaaatcaacactgaaggtgatgttcctccttctatgtcaggaagctgtgctgtgtgtgtagacagggtgctgtacttgtttggaggacaccattcaagaggcaataccaataagttctacatgctggattcaaggtctacagacagagtgttacagtgggaaagaattgattgccaaggaattcctccatcatcaaaggacaaacttggtgtctgggtatataaaaacaagttaatattttttggagggtatggatatttgcctgaagataaagtattgggaacttttgaattcgatgaaacatctttttggaattcaagtcatccaagaggatggaatgatcatgtacatattttagatactgaaacatttacctggagccagcctataactactggtaaagcaccttcacctcgtgctgcccatgcctgtgcaactgtcggaaatagaggcttcgtgtttggaggcagatatcgagatgctagaatgaatgatcttcactatcttaatctggatacatgggagtggaatgaattaattccacaaggcatatgcccagttggtcgatcttggcactcactaacaccagtttcttcagatcatctttttctctttggaggatttaccactgataaacagccactaagtgatgcctggacttactgcatcagtaaaaatgaatggatacaatttaatcatccatataccgaaaaaccaaggttatggcacacagcttgtgccagcgatgaaggagaagtaattgtttttggtggatgtgccaacaacttgcttgtccatcacagagctgcacacagtaatgaaatactaatattttcagttcaaccaaaatctcttgtacgtcagggaacctgaacagagggaccagctggagctgtggcagaggaatataaattgtgaagatttcatggacatttaccagttcccaaacaatactttcacaattctacgcctgtctacttaatctctatcctgcaagaatagtgga

SEQ ID NO: 348517 - DNA, 443 bp, Homo sapiens
taaattactttcaatgccaatcaaaagacagattgccagaatggaaaataaacaaaaactcggaatccattccactatgctgtctacaggagattcactttaggtctaaggacttacctcagggcaagtgaaaagatcgaaaaatgtattccagacaaatgtactgtggcttatgcctgtaattccagcactttgcaaggccaaggcaagaggatcacttgaggccaggccaggagttagagagcagcctgagcaacacagtgagacactgtctctaaaaaacaaacaacagcaacaaaaagccagacatggtggaaaatgcctataatcccagctacatatgaagctgagatacggagagtgcttgagccttggagttcgaggttacagtgagttacgatcatggcactacactatagcctgggtgacagggtgagatcatg

SEQ ID NO: 348518 - DNA, 528 bp, Homo sapiens
gtgaaaggtatgtctcacatggcggcagacaagagaagagagagaagcaaaagcagaacccccttataaaaccatcagaacgtgtgagacttactcactaccatgagaacagtatgggagagaccactcctgtgattcaattatctcccatggggtcccttgcacaacacgtgggaactatgggagctataattcaagttgagatttaggtggggacacagccaaaccatatcaaggggacagatactaagggaggcagaaagaccagctggtcacaggagggctctatgaaataatgaggcttgtgctcaggaaggagcagatgcaggagagaggggcagataacgagacgcaggatcacaagatctggtgactgcttggctacaagagacgagtgggcaggagaaacccatgggccacgcaggtttctggtttgcagactgggtggaagggacagtgaggccaggggttctaagcgaggaaagaataaggtattatgagcagtgagagagtcaattcagtgttaga

SEQ ID NO: 348519 - DNA, 429 bp, Homo sapiens
ctcattgttcaattcccacctatgagtgagaatatgcggtgtttggttttttgttcttgcgatagtttactgagaagctgggtgaataatctgaacgtaaggttacaggtcggcagaagtcaggcagtcatgagtgggggcagtacttttcagagtacatttgggactagatatcacagagtgtagtgctttgcttaatttcctttttaaatatcaactttttaatgaattccattccagtagtttgtattattttcttacacatggttttttgtgagagctgatagaaaccttaatcttttcaggtatttttggttagagatgttatttctgtatttctttattgtttgatatttatttttactatataatgtatctattttctctttatttagagcctaaatgttgataaatgtaaccctttcattt

SEQ ID NO: 348520 - DNA, 1488 bp, Homo sapiens
ctctcccctgtgtcccaactggggcccccttagctttcaatctaaccaccctttccagacagtctctgcttctccctccctgtggtcccctctcagccacactctgctgcaggcgagagaagcaggtccctggcctgaccctcaatgacctctttcctccccgctctctaaatacaggctcagaggaggaactcgaggagctgtgtgaacaggctgtgtgagatgttcaggcctagctccaaccaagagtgtgctccagatgtgtttgggccctacctggcacagagtcctgctcctgggaaaggaaaggaccacagcaaacaccattctttttgccgtacttcctagaagcactggaagaggactggtgatggtggagggtgagagggtgccgtttcctgctccagctccagaccttgtctgcagaaaacatctgcagtgcagcaaatccatgtccagccaggcaaccagctgctgcctgtggcgtgtgtgggctggatcccttgaaggctgagtttttgagggcagaaagctagctatgggtagccaggtgttacaaaggtgctgctccttctccaacccctacttggtttccctcaccccaagcctcatgttcataccagccagtgggttcagcagaacgcatgacaccttatcacctccctccttgggtgagctctgaacaccagctttggcccctccacagtaaggctgctacatcaggggcaaccctggctctatcattttccttttttgccaaaaggaccagtagcataggtgagccctgagcactaaaaggaggggtccctgaagctttcccactatagtgtggagttctgtccctgaggtgggtacagcagccttggttcctctgggggttgagaataagaatagtggggagggaaaaactcctccttgaagatttcctgtctcagagtcccagagaggtagaaaggaggaatttctgctggactttatctgggcagaggaaggatggaatgaaggtagaaaaggcagaattacagctgagcggggacaacaaagagttcttctctgggaaaagttttgtcttagagcaaggatggaaaatggggacaacaaaggaaaagcaaagtgtgacccttgggtttggacagcccagaggcccagctccccagtataagccatacaggccagggacccacaggagagtggattagagcacaagtctggcctcactgagtggacaagagctgatgggcctcatcagggtgacattcaccccagggcagcctgaccactcttggcccctcaggcattatcccatttggaatgtgaatgtggtggcaaagtgggcagaggaccccacctgggaacctttttccctcagttagtggggagactagcacctaggtacccacatgggtatttatatctgaaccagacagacgcttgaatcaggcactatgttaagaaatatatttatttgctaatatatttatccacaaa

SEQ ID NO: 348521 - DNA, 3374 bp, Homo sapiens
aaaaaaaaaaaactttagagaaaggaagggccaaaactacgacttggctttctgaaacggaagcataaatgttcttttcctccatttgtctggatctgagaacctgcatttggtattagctagtggaagcagtatgtatggttgaagtgcattgctgcagctggtagcatgagtggtggccaccagctgcagctggctgccctctggccctggctgctgatggctaccctgcaggcaggctttggacgcacaggactggtactggcagcagcggtggagtctgaaagatcagcagaacagaaagctgttatcagagtgatccccttgaaaatggaccccacaggaaaactgaatctcactttggaaggtgtgtttgctggtgttgctgaaataactccagcagaaggaaaattaatgcagtcccacccactgtacctgtgcaatgccagtgatgacgacaatctggagcctggattcatcagcatcgtcaagctggagagtcctcgacgggccccccgcccctgcctgtcactggctagcaaggctcggatggcgggtgagcgaggagccagtgctgtcctctttgacatcactgaggatcgagctgctgctgagcagctgcagcagccgctggggctgacctggccagtggtgttgatctggggtaatgacgctgagaagctgatggagtttgtgtacaagaaccaaaaggcccatgtgaggattgagctgaaggagcccccggcctggccagattatgatgtgtggatcctaatgacagtggtgggcaccatctttgtgatcatcctggcttcggtgctgcgcatccggtgccgcccccgccacagcaggccggatccgcttcagcagagaacagcctgggccatcagccagctggccaccaggaggtaccaggccagctgcaggcaggcccggggtgagtggccagactcagggagcagctgcagctcagcccctgtgtgtgccatctgtctggaggagttctctgaggggcaggagctacgggtcatttcctgcctccatgagttccatcgtaactgtgtggacccctggttacatcagcatcggacttgccccctctgcatgttcaacatcacagagggagattcattttcccagtccctgggaccctctcgatcttaccaagaaccaggtcgaagactccacctcattcgccagcatcccggccatgcccactaccacctccctgctgcctacctgttgggcccttcccggagtgcagtggctcggcccccacgacctggtcccttcctgccatcccaggagccaggcatgggccctcggcatcaccgcttccccagagctgcacatccccgggctccaggagagcagcagcgcctggcaggagcccagcacccctatgcacaaggctggggactgagccacctccaatccacctcacagcaccctgctgcttgcccagtgcccctacgccgggccaggccccctgacagcagtggatctggagaaagctattgcacagaacgcagtgggtacctggcagatgggccagccagtgactccagctcagggccctgtcatggctcttccagtgactctgtggtcaactgcacggacatcagcctacagggggtccatggcagcagttctactttctgcagctccctaagcagtgactttgaccccctagtgtactgcagccctaaaggggatccccagcgagtggacatgcagcctagtgtgacctctcggcctcgttccttggactcggtggtgcccacaggggaaacccaggtttccagccatgtccactaccaccgccaccggcaccaccactacaaaaagcggttccagtggcatggcaggaagcctggcccagaaaccggagtcccccagtccaggcctcctattcctcggacacagccccagccagagccaccttctcctgatcagcaagtcaccggatccaactcagcagccccttcggggcggctctctaacccacagtgccccagggccctccctgagccagcccctggcccagttgacgcctccagcatctgccccagtaccagcagtctgttcaacttgcaaaaatccagcctctctgcccgacacccacagaggaaaaggcgggggggtccctccgagcccacccctggctctcggccccaggatgcaactgtgcacccagcttgccagatttttccccattacacccccagtgtggcatatccttggtccccagaggcacaccccttgatctgtggacctccaggcctggacaagaggctgctaccagaaaccccaggcccctgttactcaaattcacagccagtgtggttgtgcctgactcctcgccagcccctggaaccacatccacctggggaggggccttctgaatggagttctgacaccgcagagggcaggccatgcccttatccgcactgccaggtgctgtcggcccagcctggctcagaggaggaactcgaggagctgtgtgaacaggctgtgtgagatgttcaggcctagctccaaccaagagtgtgctccagatgtgtttgggccctacctggcacagagtcctgctcctgggaaaggaaaggaccacagcaaacaccattctttttgccgtacttcctagaagcactggaagaggactggtgatggtggagggtgagagggtgccgtttcctgctccagctccagaccttgtctgcagaaaacatctgcagtgcagcaaatccatgtccagccaggcaaccagctgctgcctgtggcgtgtgtgggctggatcccttgaaggctgagtttttgagggcagaaagctagctatgggtagccaggtgttacaaaggtgctgctccttctccaacccctacttggtttccctcaccccaagcctcatgttcataccagccagtgggttcagcagaacgcatgacaccttatcacctccctccttgggtgagctctgaacaccagctttggcccctccacagtaaggctgctacatcaggggcaaccctggctctatcattttccttttttgccaaaaggaccagtagcataggtgagccctgagcactaaaaggaggggtccctgaagctttcccactatagtgtggagttctgtccctgaggtgggtacagcagccttggttcctctgggggttgagaataagaatagtggggagggaaaaactcctccttgaagatttcctgtctcagagtcccagagaggtagaaaggaggaatttctgctggactttatctgggcagaggaaggatggaatgaaggtagaaaaggcattttggaggcagcctgtcaggtcctggctctggcatcccagaagagccggaattcggga

SEQ ID NO: 348522 - DNA, 855 bp, Homo sapiens
aaaaaaaaaaaactttagagaaaggaagggccaaaactacgacttggctttctgaaacggaagcataaatgttcttttcctccatttgtctggatctgagaacctgcatttggtattagctagtggaagcagtatgtatggttgaagtgcattgctgcagctggtagcatgagtggtggccaccagctgcagctggctgccctctggccctggctgctgatggctaccctgcaggcaggctttggacgcacaggactggtactggcagcagcggtggagtctgaaagatcagcagaacagaaagctgttatcagagtgatccccttgaaaatggaccccacaggaaaactgaatctcactttggaaggtgtgtttgctggtgttgctgaaataactccagcagaaggaaaattaatgcagtcccacccactgtacctgtgcaatgccagtgatgacgacaatctggagcctggattcatcagcatcgtcaagctggagagtcctcgacgggccccccgcccctgcctgtcactggctagcaaggctcggatggcgggtgagcgaggagccagtgctgtcctctttgacatcactgaggatcgagctgctgctgagcagctgcagcagccgctggggctgacctggccagtggtgttgatctggggtaatgacgctgagaagctgatggagtttgtgtacaagaaccaaaaggcccatgtgaggattgagctgaaggagcccccggcctggccagattatgatgtgtggatcctaatgacagtggtgggcaccatctttgtgatcatcctggcttcggtgctgcgcatccgaagcagtgccgggggtcctctgcga

SEQ ID NO: 348523 - DNA, 3787 bp, Homo sapiens
aaaaaaaaaaaactttagagaaaggaagggccaaaactacgacttggctttctgaaacggaagcataaatgttcttttcctccatttgtctggatctgagaacctgcatttggtattagctagtggaagcagtatgtatggttgaagtgcattgctgcagctggtagcatgagtggtggccaccagctgcagctggctgccctctggccctggctgctgatggctaccctgcaggcaggctttggacgcacaggactggtactggcagcagcggtggagtctgaaagatcagcagaacagaaagctgttatcagagtgatccccttgaaaatggaccccacaggaaaactgaatctcactttggaaggtgtgtttgctggtgttgctgaaataactccagcagaaggaaaattaatgcagtcccacccactgtacctgtgcaatgccagtgatgacgacaatctggagcctggattcatcagcatcgtcaagctggagagtcctcgacgggccccccgcccctgcctgtcactggctagcaaggctcggatggcgggtgagcgaggagccagtgctgtcctctttgacatcactgaggatcgagctgctgctgagcagctgcagcagccgctggggctgacctggccagtggtgttgatctggggtaatgacgctgagaagctgatggagtttgtgtacaagaaccaaaaggcccatgtgaggattgagctgaaggagcccccggcctggccagattatgatgtgtggatcctaatgacagtggtgggcaccatctttgtgatcatcctggcttcggtgctgcgcatccggtgccgcccccgccacagcaggccggatccgcttcagcagagaacagcctgggccatcagccagctggccaccaggaggtaccaggccagctgcaggcaggcccggggtgagtggccagactcagggagcagctgcagctcagcccctgtgtgtgccatctgtctggaggagttctctgaggggcaggagctacgggtcatttcctgcctccatgagttccatcgtaactgtgtggacccctggttacatcagcatcggacttgccccctctgcatgttcaacatcacagagggagattcattttcccagtccctgggaccctctcgatcttaccaagaaccaggtcgaagactccacctcattcgccagcatcccggccatgcccactaccacctccctgctgcctacctgttgggcccttcccggagtgcagtggctcggcccccacgacctggtcccttcctgccatcccaggagccaggcatgggccctcggcatcaccgcttccccagagctgcacatccccgggctccaggagagcagcagcgcctggcaggagcccagcacccctatgcacaaggctggggactgagccacctccaatccacctcacagcaccctgctgcttgcccagtgcccctacgccgggccaggccccctgacagcagtggatctggagaaagctattgcacagaacgcagtgggtacctggcagatgggccagccagtgactccagctcagggccctgtcatggctcttccagtgactctgtggtcaactgcacggacatcagcctacagggggtccatggcagcagttctactttctgcagctccctaagcagtgactttgaccccctagtgtactgcagccctaaaggggatccccagcgagtggacatgcagcctagtgtgacctctcggcctcgttccttggactcggtggtgcccacaggggaaacccaggtttccagccatgtccactaccaccgccaccggcaccaccactacaaaaagcggttccagtggcatggcaggaagcctggcccagaaaccggagtcccccagtccaggcctcctattcctcggacacagccccagccagagccaccttctcctgatcagcaagtcaccggatccaactcagcagccccttcggggcggctctctaacccacagtgccccagggccctccctgagccagcccctggcccagttgacgcctccagcatctgccccagtaccagcagtctgttcaacttgcaaaaatccagcctctctgcccgacacccacagaggaaaaggcgggggggtccctccgagcccacccctggctctcggccccaggatgcaactgtgcacccagcttgccagatttttccccattacacccccagtgtggcatatccttggtccccagaggcacaccccttgatctgtggacctccaggcctggacaagaggctgctaccagaaaccccaggcccctgttactcaaattcacagccagtgtggttgtgcctgactcctcgccagcccctggaaccacatccacctggggaggggccttctgaatggagttctgacaccgcagagggcaggccatgcccttatccgcactgccaggtgctgtcggcccagcctggctcagaggaggaactcgaggagctgtgtgaacaggctgtgtgagatgttcaggcctagctccaaccaagagtgtgctccagatgtgtttgggccctacctggcacagagtcctgctcctgggaaaggaaaggaccacagcaaacaccattctttttgccgtacttcctagaagcactggaagaggactggtgatggtggagggtgagagggtgccgtttcctgctccagctccagaccttgtctgcagaaaacatctgcagtgcagcaaatccatgtccagccaggcaaccagctgctgcctgtggcgtgtgtgggctggatcccttgaaggctgagtttttgagggcagaaagctagctatgggtagccaggtgttacaaaggtgctgctccttctccaacccctacttggtttccctcaccccaagcctcatgttcataccagccagtgggttcagcagaacgcatgacaccttatcacctccctccttgggtgagctctgaacaccagctttggcccctccacagtaaggctgctacatcaggggcaaccctggctctatcattttccttttttgccaaaaggaccagtagcataggtgagccctgagcactaaaaggaggggtccctgaagctttcccactatagtgtggagttctgtccctgaggtgggtacagcagccttggttcctctgggggttgagaataagaatagtggggagggaaaaactcctccttgaagatttcctgtctcagagtcccagagaggtagaaaggaggaatttctgctggactttatctgggcagaggaaggatggaatgaaggtagaaaaggcagaattacagctgagcggggacaacaaagagttcttctctgggaaaagttttgtcttagagcaaggatggaaaatggggacaacaaaggaaaagcaaagtgtgacccttgggtttggacagcccagaggcccagctccccagtataagccatacaggccagggacccacaggagagtggattagagcacaagtctggcctcactgagtggacaagagctgatgggcctcatcagggtgacattcaccccagggcagcctgaccactcttggcccctcaggcattatcccatttggaatgtgaatgtggtggcaaagtgggcagaggaccccacctgggaacctttttccctcagttagtggggagactagcacctaggtacccacatgggtatttatatctgaaccagacagacgcttgaatcaggcactatgttaagaaatatatttatttgctaatatatttatccacaaa

SEQ ID NO: 348524 - DNA, 3733 bp, Homo sapiens
aaaaaaaaaaaactttagagaaaggaagggccaaaactacgacttggctttctgaaacggaagcataaatgttcttttcctccatttgtctggatctgagaacctgcatttggtattagctagtggaagcagtatgtatggttgaagtgcattgctgcagctggtagcatgagtggtggccaccagctgcagctggctgccctctggccctggctgctgatggctaccctgcaggcaggctttggacgcacaggactggtactggcagcagcggtggagtctgaaagatcagcagaacagaaagctgttatcagagtgatccccttgaaaatggaccccacaggaaaactgaatctcactttggaaggtgtgtttgctggtgttgctgaaataactccagcagaaggaaaattaatgcagtcccacccactgtacctgtgcaatgccagtgatgacgacaatctggagcctggattcatcagcatcgtcaagctggagagtcctcgacgggccccccgcccctgcctgtcactggctagcaaggctcggatggcgggtgagcgaggagccagtgctgtcctctttgacatcactgaggatcgagctgctgctgagcagctgcagcagccgctggggctgacctggccagtggtgttgatctggggtaatgacgctgagaagctgatggagtttgtgtacaagaaccaaaaggcccatgtgaggattgagctgaaggagcccccggcctggccagattatgatgtgtggatcctaatgacagtggtgggcaccatctttgtgatcatcctggcttcggtgctgcgcatccggtgccgcccccgccacagcaggccggatccgcttcagcagagaacagcctgggccatcagccagctggccaccaggaggtaccaggccagctgcaggcaggcccggggtgagtggccagactcagggagcagctgcagctcagcccctgtgtgtgccatctgtctggaggagttctctgaggggcaggagctacgggtcatttcctgcctccatgagttccatcgtaactgtgtggacccctggttacatcagcatcggacttgccccctctgcatgttcaacatcacagagggagattcattttcccagtccctgggaccctctcgatcttaccaagaaccaggtcgaagactccacctcattcgccagcatcccggccatgcccactaccacctccctgctgcctacctgttgggcccttcccggagtgcagtggctcggcccccacgacctggtcccttcctgccatcccaggagccaggcatgggccctcggcatcaccgcttccccagagctgcacatccccgggctccaggagagcagcagcgcctggcaggagcccagcacccctatgcacaaggctggggactgagccacctccaatccacctcacagcaccctgctgcttgcccagtgcccctacgccgggccaggccccctgacagcagtggatctggagaaagctattgcacagaacgcagtgggtacctggcagatgggccagccagtgactccagctcagggccctgtcatggctcttccagtgactctgtggtcaactgcacggacatcagcctacagggggtccatggcagcagttctactttctgcagctccctaagcagtgactttgaccccctagtgtactgcagccctaaaggggatccccagcgagtggacatgcagcctagtgtgacctctcggcctcgttccttggactcggtggtgcccacaggggaaacccaggtttccagccatgtccactaccaccgccaccggcaccaccactacaaaaagcggttccagtggcatggcaggaagcctggcccagaaaccggagtcccccagtccaggcctcctattcctcggacacagccccagccagagccaccttctcctgatcagcaagtcaccggatccaactcagcagccccttcggggcggctctctaacccacagtgccccagggccctccctgagccagcccctggcccagttgacgcctccagcatctgccccagtaccagcagtctgttcaacttgcaaaaatccagcctctctgcccgacacccacagaggaaaaggcgggggggtccctccgagcccacccctggctctcggccccaggatgcaactgtgcacccagcttgccagatttttccccattacacccccagtgtggcatatccttggtccccagaggcacaccccttgatctgtggacctccaggcctggacaagaggctgctaccagaaaccccaggcccctgttactcaaattcacagccagtgtggttgtgcctgactcctcgccagcccctggaaccacatccacctggggaggggccttctgaatggagttctgacaccgcagagggcaggccatgcccttatccgcactgccaggtgctgtcggcccagcctggctcagaggaggaactcgaggagctgtgtgaacaggctgtgtgagatgttcaggcctagctccaaccaagagtgtgctccagatgtgtttgggccctacctggcacagagtcctgctcctgggaaaggaaaggaccacagcaaacaccattctttttgccgtacttcctagaagcactggaagaggactggtgatggtggagggtgagagggtgccgtttcctgctccagctccagaccttgtctgcagaaaacatctgcagtgcagcaaatccatgtccagccaggcaaccagctgctgcctgtggcgtgtgtgggctggatcccttgaaggctgagtttttgagggcagaaagctagctatgggtagccaggtgttacaaaggtgctgctccttctccaacccctacttggtttccctcaccccaagcctcatgttcataccagccagtgggttcagcagaacgcatgacaccttatcacctccctccttgggtgagctctgaacaccagctttggcccctccacagtaaggctgctacatcaggggcaaccctggctctatcattttccttttttgccaaaaggaccagtagcataggtgagccctgagcactaaaaggaggggtccctgaagctttcccactatagtgtggagttctgtccctgaggtgggtacagcagccttggttcctctgggggttgagaataagaatagtggggagggaaaaactcctccttgaagatttcctgtctcagagtcccagagaggtagaaaggaggaatttctgctggactttatctgggcagaggaaggatggaatgaaggtagaaaaggcagaattacagctgagcggggacaacaaagagttcttctctgggaaaagttttgtcttagagcaaggatggaaaggcccagctccccagtataagccatacaggccagggacccacaggagagtggattagagcacaagtctggcctcactgagtggacaagagctgatgggcctcatcagggtgacattcaccccagggcagcctgaccactcttggcccctcaggcattatcccatttggaatgtgaatgtggtggcaaagtgggcagaggaccccacctgggaacctttttccctcagttagtggggagactagcacctaggtacccacatgggtatttatatctgaaccagacagacgcttgaatcaggcactatgttaagaaatatatttatttgctaatatatttatccacaaa

SEQ ID NO: 348525 - DNA, 3032 bp, Homo sapiens
aaaaaaaaaaaactttagagaaaggaagggccaaaactacgacttggctttctgaaacggaagcataaatgttcttttcctccatttgtctggatctgagaacctgcatttggtattagctagtggaagcagtatgtatggttgaagtgcattgctgcagctggtagcatgagtggtggccaccagctgcagctggctgccctctggccctggctgctgatggctaccctgcaggcaggctttggacgcacaggactggtactggcagcagcggtggagtctgaaagatcagcagaacagaaagctgttatcagagtgatccccttgaaaatggaccccacaggaaaactgaatctcactttggaaggtgtgtttgctggtgttgctgaaataactccagcagaaggaaaattaatgcagtcccacccactgtacctgtgcaatgccagtgatgacgacaatctggagcctggattcatcagcatcgtcaagctggagagtcctcgacgggccccccgcccctgcctgtcactggctagcaaggctcggatggcgggtgagcgaggagccagtgctgtcctctttgacatcactgaggatcgagctgctgctgagcagctgcagcagccgctggggctgacctggccagtggtgttgatctggggtaatgacgctgagaagctgatggagtttgtgtacaagaaccaaaaggcccatgtgaggattgagctgaaggagcccccggcctggccagattatgatgtgtggatcctaatgacagtggtgggcaccatctttgtgatcatcctggcttcggtgctgcgcatccggtgccgcccccgccacagcaggccggatccgcttcagcagagaacagcctgggccatcagccagctggccaccaggaggtaccaggccagctgcaggcaggcccggggtgagtggccagactcagggagcagctgcagctcagcccctgtgtgtgccatctgtctggaggagttctctgaggggcaggagctacgggtcatttcctgcctccatgagttccatcgtaactgtgtggacccctggttacatcagcatcggacttgccccctctgcatgttcaacatcacagagggagattcattttcccagtccctgggaccctctcgatcttaccaagaaccaggtcgaagactccacctcattcgccagcatcccggccatgcccactaccacctccctgctgcctacctgttgggcccttcccggagtgcagtggctcggcccccacgacctggtcccttcctgccatcccaggagccaggcatgggccctcggcatcaccgcttccccagagctgcacatccccgggctccaggagagcagcagcgcctggcaggagcccagcacccctatgcacaaggctggggactgagccacctccaatccacctcacagcaccctgctgcttgcccagtgcccctacgccgggccaggccccctgacagcagtggatctggagaaagctattgcacagaacgcagtgggtacctggcagatgggccagccagtgactccagctcagggccctgtcatggctcttccagtgactctgtggtcaactgcacggacatcagcctacagggggtccatggcagcagttctactttctgcagctccctaagcagtgactttgaccccctagtgtactgcagccctaaaggggatccccagcgagtggacatgcagcctagtgtgacctctcggcctcgttccttggactcggtggtgcccacaggggaaacccaggtttccagccatgtccactaccaccgccaccggcaccaccactacaaaaagcggttccagtggcatggcaggaagcctggcccagaaaccggagtcccccagtccaggcctcctattcctcggacacagccccagccagagccaccttctcctgatcagcaagtcaccggatccaactcagcagccccttcggggcggctctctaacccacagtgccccagggccctccctgagccagcccctggcccagttgacgcctccagcatctgccccagtaccagcagtctgttcaacttgcaaaaatccagcctctctgcccgacacccacagaggaaaaggcgggggggtccctccgagcccacccctggctctcggccccaggatgcaactgtgcacccagcttgccagatttttccccattacacccccagtgtggcatatccttggtccccagaggcacaccccttgatctgtggacctccaggcctggacaagaggctgctaccagaaaccccaggcccctgttactcaaattcacagccagtgtggttgtgcctgactcctcgccagcccctggaaccacatccacctggggaggggccttctgaatggagttctgacaccgcagagggcaggccatgcccttatccgcactgccaggtgctgtcggcccagcctggtgagttttcagagggaagtgggtgtggtagggagaggagactacagctgaatatttcaggacaggtgaagtcagccaacaaagggttgatggaagctgagaaggatacagcagagatgacaaccaaaatacttaaccatcgggacagcgtatcatgctggctagagtgcaggaacaccccacctctgccaggtgctacccctttagttggcagatcacagggaggtcccagggaggtgctggtgtggctgaggcatcagaaaggcacttggaaggccgggtgtgatggctcatgcctgtaatcccagaactttgggaggcctaggtgggtggatcccttgaggccaggagttcaagaccaacctggccaacatggtgaaaccctatctctactaaaaatacaaaaattagccgggtatggtggcgggcacttataatcccagctactcaggaggctgaggcaggagaatcgcgtgaacctaagaggcggaagttgcagtgagccaagatggcgccactgcactccagcctgggtaacagggtgagactccatctc

SEQ ID NO: 348526 - DNA, 875 bp, Homo sapiens
aaaaaaaaaaaactttagagaaaggaagggccaaaactacgacttggctttctgaaacggaagcataaatgttcttttcctccatttgtctggatctgagaacctgcatttggtattagctagtggaagcagtatgtatggttgaagtgcattgctgcagctggtagcatgagtggtggccaccagctgcagctggctgccctctggccctggctgctgatggctaccctgcaggcaggctttggacgcacaggactggtactggcagcagcggtggagtctgaaagatcagcagaacagaaagctgttatcagagtgatccccttgaaaatggaccccacaggaaaactgaatctcactttggaaggtgtgtttgctggtgttgctgaaataactccagcagaaggaaaattaatgcagtcccacccactgtacctgtgcaatgccagtgatgacgacaatctggagcctggattcatcagcatcgtcaagctggagagtcctcgacgggccccccgcccctgcctgtcactggctagcaaggctcggatggcgggtgagcgaggagccagtgctgtcctctttgacatcactgaggatcgagctgctgctgagcagctgcagcagccgctggggctgacctggccagtggtgttgatctggggtaatgacgctgagaagctgatggagtttgtgtacaagaaccaaaaggcccatgtgaggattgagctgaaggagcccccggcctgggtaagcacactagacctccagaccttgccctgcacttagccctactttgtcctgtggcaactcccaccaaaagcccttagactcctggagctgcgagagatcctggaaaccctctagtccaactt

SEQ ID NO: 348527 - DNA, 1260 bp, Homo sapiens
gtactattgcggccgccctctgctgcgcctgaagagagaggcgactctacaagcctcacagcatgcactgttactaaaaagacgatgcgtcctcctggacctgagatctgtgtgatcgtgggaaagcgacgaaaaacgaacaaaggaacagtaaatggagtaacttggctagaatatggcagtaactacaaggcatgttctgctctggcacgaagacaacccacctgaggcaccagacacatgagtgaagccatcttggacatcccagtcacagccaaactcactcctgagtgcatctgcatgatgaacccagcaatccccaccatggagcaaaggatccatccagtcaacccaaagaatcgtgaaaaataataaattgttgttttaaagttaaaatcagtttgggaatagcttgttatgcaacaatacataattaatacactggtctcccactttcaagtttgattaactttcagctatttttcacatagcaggcagagtgattccattaaaacatatatcagataatgtcactgcactaagtaaactctacaaggactctcatctccctcagagtaaaggtcacagttgttacaaggccctacgtaatgtggccctcaccaccactccattacctttttcttatctactatttgctaactttgctttgtcctcttttctgttctgaaacaggctaggcatggtcctgcctcaaggcctttgcaccacctactctgtctgcttggattgttcttcccacagatttcttgctcccttcttccttcatgaagaaatgtcatgaaatgtccttccttcatgaaatgtcaccttctcatttgaggccttctgtagtaccccaaagaatggtccccaaagatgtccacatccttatgcccagaacctgtgaatgtgttatcttaatggcaaaagtgactttgcaaatgtgattatatttaaggatcttaaggaggagattatcctggattatccaggagggcccaatgtaatcacaagggcccttataagtgaaagggggaggcaacagagagaaggagatgtcataatgaaaacagatccaagtgatgagattgctggctggggtggaggtggaggggggtacaatccaaggaatgcaagaagcctctaaaagctaggaaatgtcaggacacaaattctcccctagaacctgaggaagaaacccaggtttatggacactgattttaacccaataagtcccttttctgactgctgacctccaaa

SEQ ID NO: 348528 - DNA, 1299 bp, Homo sapiens
cgggccagggatgtgagaaagaagcgagccctcgagtttcctcggggcatgtgggaaggtttttttcaggatccaggcagaaccttacagagctgggagttttttaactttccattcctggcagtgacgccaggagctttaagtgatggaaatatgcgagtcaatcagtggatggtgaacaaaggaacagtaaatggagtaacttggctagaatatggcagtaactacaaggcatgttctgctctggcacgaagacaacccacctgaggcaccagacacatgagtgaagccatcttggacatcccagtcacagccaaactcactcctgagtgcatctgcatgatgaacccagcaatccccaccatggagcaaaggatccatccagtcaacccaaagaatcgtgaaaaataataaattgttgttttaaagttaaaatcagtttgggaatagcttgttatgcaacaatacataattaatacactggtctcccactttcaagtttgattaactttcagctatttttcacatagcaggcagagtgattccattaaaacatatatcagataatgtcactgcactaagtaaactctacaaggactctcatctccctcagagtaaaggtcacagttgttacaaggccctacgtaatgtggccctcaccaccactccattacctttttcttatctactatttgctaactttgctttgtcctcttttctgttctgaaacaggctaggcatggtcctgcctcaaggcctttgcaccacctactctgtctgcttggattgttcttcccacagatttcttgctcccttcttccttcatgaagaaatgtcatgaaatgtccttccttcatgaaatgtcaccttctcatttgaggccttctgtagtaccccaaagaatggtccccaaagatgtccacatccttatgcccagaacctgtgaatgtgttatcttaatggcaaaagtgactttgcaaatgtgattatatttaaggatcttaaggaggagattatcctggattatccaggagggcccaatgtaatcacaagggcccttataagtgaaagggggaggcaacagagagaaggagatgtcataatgaaaacagatccaagtgatgagattgctggctggggtggaggtggaggggggtacaatccaaggaatgcaagaagcctctaaaagctaggaaatgtcaggacacaaattctcccctagaacctgaggaagaaacccaggtttatggacactgattttaacccaataagtcccttttctgactgctgacctccaaa

SEQ ID NO: 348529 - DNA, 1326 bp, Homo sapiens
cgggccagggatgtgagaaagaagcgagccctcgagtttcctcggggcatgtgggaaggtttttttcaggatccaggcagaaccttacagagctgggagttttttaactttccattcctggcagtgacgccaggagctttaagtgatggaaatatgcgagtcaatcagtggatggtggctctcccaaacaaaatgatagacaggaacaaaggaacagtaaatggagtaacttggctagaatatggcagtaactacaaggcatgttctgctctggcacgaagacaacccacctgaggcaccagacacatgagtgaagccatcttggacatcccagtcacagccaaactcactcctgagtgcatctgcatgatgaacccagcaatccccaccatggagcaaaggatccatccagtcaacccaaagaatcgtgaaaaataataaattgttgttttaaagttaaaatcagtttgggaatagcttgttatgcaacaatacataattaatacactggtctcccactttcaagtttgattaactttcagctatttttcacatagcaggcagagtgattccattaaaacatatatcagataatgtcactgcactaagtaaactctacaaggactctcatctccctcagagtaaaggtcacagttgttacaaggccctacgtaatgtggccctcaccaccactccattacctttttcttatctactatttgctaactttgctttgtcctcttttctgttctgaaacaggctaggcatggtcctgcctcaaggcctttgcaccacctactctgtctgcttggattgttcttcccacagatttcttgctcccttcttccttcatgaagaaatgtcatgaaatgtccttccttcatgaaatgtcaccttctcatttgaggccttctgtagtaccccaaagaatggtccccaaagatgtccacatccttatgcccagaacctgtgaatgtgttatcttaatggcaaaagtgactttgcaaatgtgattatatttaaggatcttaaggaggagattatcctggattatccaggagggcccaatgtaatcacaagggcccttataagtgaaagggggaggcaacagagagaaggagatgtcataatgaaaacagatccaagtgatgagattgctggctggggtggaggtggaggggggtacaatccaaggaatgcaagaagcctctaaaagctaggaaatgtcaggacacaaattctcccctagaacctgaggaagaaacccaggtttatggacactgattttaacccaataagtcccttttctgactgctgacctccaaa

SEQ ID NO: 348530 - DNA, 1382 bp, Homo sapiens
gtactattgcggccgccctctgctgcgcctgaagagagaggcgactctacaagcctcacagcatgcactgttactaaaaagacgatgcgtcctcctggacctgagatctgtgtgatcgtgggaaagcgacgaaaaacgaacaaaggaacagtaaatggagtaacttggctagaatatggcagtaactacaaggcatgttctgctctggcacgaagatgcagtctcgctctgtcacccaggctggagtgcaatggcacgatcttggctcactgcaacctctgcctcccaggttcaagcgattcttctgcctcagcctcctgagtagctgggattacagacaacccacctgaggcaccagacacatgagtgaagccatcttggacatcccagtcacagccaaactcactcctgagtgcatctgcatgatgaacccagcaatccccaccatggagcaaaggatccatccagtcaacccaaagaatcgtgaaaaataataaattgttgttttaaagttaaaatcagtttgggaatagcttgttatgcaacaatacataattaatacactggtctcccactttcaagtttgattaactttcagctatttttcacatagcaggcagagtgattccattaaaacatatatcagataatgtcactgcactaagtaaactctacaaggactctcatctccctcagagtaaaggtcacagttgttacaaggccctacgtaatgtggccctcaccaccactccattacctttttcttatctactatttgctaactttgctttgtcctcttttctgttctgaaacaggctaggcatggtcctgcctcaaggcctttgcaccacctactctgtctgcttggattgttcttcccacagatttcttgctcccttcttccttcatgaagaaatgtcatgaaatgtccttccttcatgaaatgtcaccttctcatttgaggccttctgtagtaccccaaagaatggtccccaaagatgtccacatccttatgcccagaacctgtgaatgtgttatcttaatggcaaaagtgactttgcaaatgtgattatatttaaggatcttaaggaggagattatcctggattatccaggagggcccaatgtaatcacaagggcccttataagtgaaagggggaggcaacagagagaaggagatgtcataatgaaaacagatccaagtgatgagattgctggctggggtggaggtggaggggggtacaatccaaggaatgcaagaagcctctaaaagctaggaaatgtcaggacacaaattctcccctagaacctgaggaagaaacccaggtttatggacactgattttaacccaataagtcccttttctgactgctgacctccaaa

SEQ ID NO: 348531 - DNA, 1182 bp, Homo sapiens
gtactattgcggccgccctctgctgcgcctgaagagagaggcgactctacaagcctcacagcatgcactgttactaaaaagacgatgcgtcctcctggacctgagatctgtgtgatcgtgggaaagcgacgaaaaacacaacccacctgaggcaccagacacatgagtgaagccatcttggacatcccagtcacagccaaactcactcctgagtgcatctgcatgatgaacccagcaatccccaccatggagcaaaggatccatccagtcaacccaaagaatcgtgaaaaataataaattgttgttttaaagttaaaatcagtttgggaatagcttgttatgcaacaatacataattaatacactggtctcccactttcaagtttgattaactttcagctatttttcacatagcaggcagagtgattccattaaaacatatatcagataatgtcactgcactaagtaaactctacaaggactctcatctccctcagagtaaaggtcacagttgttacaaggccctacgtaatgtggccctcaccaccactccattacctttttcttatctactatttgctaactttgctttgtcctcttttctgttctgaaacaggctaggcatggtcctgcctcaaggcctttgcaccacctactctgtctgcttggattgttcttcccacagatttcttgctcccttcttccttcatgaagaaatgtcatgaaatgtccttccttcatgaaatgtcaccttctcatttgaggccttctgtagtaccccaaagaatggtccccaaagatgtccacatccttatgcccagaacctgtgaatgtgttatcttaatggcaaaagtgactttgcaaatgtgattatatttaaggatcttaaggaggagattatcctggattatccaggagggcccaatgtaatcacaagggcccttataagtgaaagggggaggcaacagagagaaggagatgtcataatgaaaacagatccaagtgatgagattgctggctggggtggaggtggaggggggtacaatccaaggaatgcaagaagcctctaaaagctaggaaatgtcaggacacaaattctcccctagaacctgaggaagaaacccaggtttatggacactgattttaacccaataagtcccttttctgactgctgacctccaaa

SEQ ID NO: 348532 - DNA, 356 bp, Homo sapiens
gtactattgcggccgccctctgctgcgcctgaagagagaggcgactctacaagcctcacagcatgcactgttactaaaaagacgatgcgtcctcctggacctgagatctgtgtgatcgtgggaaagcgacgaaaaacgaacaaaggaacagtaaatggagtaacttggctagaatatggcagtaactacaaggcatgttctgctctggcacgaaggaaaggctatatgaagacagagcaagaaggtagttatctacaagccaggaagagagtcctcaccaaaacacaaccatgctggtaccctgatcttcaacttccagtcttgagctgttgagaaaataaacttttattgtttaa

SEQ ID NO: 348533 - DNA, 448 bp, Homo sapiens
gtactattgcggccgccctctgctgcgcctgaagagagaggcgactctacaagcctcacagcatgcactgttactaaaaagacgatgcgtcctcctggacctgagatctgtgtgatcgtgggaaagcgacgaaaaacgaacaaaggaacagtaaatggagtaacttggctagaatatggcagtaactacaaggcatgttctgctctggcacgaaggtaaccaccactcatacctctccagccctgtgaatacgtcaattgactaagcagattccttgaggataaagtaggctcctggggaccttgcttgttgggctacttgctttgtggatgttaaacagataattctcatgagtttgagtgacgtctgatctaccagtattccccctactctgattagaaatgacttgaccatgccaaaaagaataaaagacagctctgatacaaat

SEQ ID NO: 348534 - DNA, 434 bp, Homo sapiens
gcggccgcggtgaagcgcggagggcggcgcgggcaccggggccgggccggggctgcagccgcagcggccatgggggccctgacgagccggcagcacgcgggcgtggaggaggtggacatcccgtctaattccgtgtaccgctacccgcccaagtccggaagctattttgccagccacttcattatgggaggagagaagtttgactcaactcatcctgaaggttacctgtttggagagaacagcgatctgaactttctggggaacagaccagttgtggtatggctgtaatcagtttactcctacttggagcttaagtggccaattcaaaaaatgtaacaaaaataagtttgcagttgcttgttcagcagtttgtagcttggtctgagttgagagagatgcactagaagacaaactgcagcctccttggttgtatg

SEQ ID NO: 348535 - DNA, 4764 bp, Homo sapiens
tgcaatcccggcacgcgcaagtccggaagctattttgccagccacttcattatgggaggagagaagtttgactcaactcatcctgaaggttacctgtttggagagaacagcgatctgaactttctggggaacagaccagttgtgtttccttacgccgccccacctccccaagaacccgtgaagactctgagaagcctggtcaatatccgaaaggacacactgaggctcgtcaaatgtgctgaggaagtgaagagccctggagaagaggccagtaaagctaaagtccactacaatgttgagttcacctttgacacagatgctcgggtagccatcaccatctattaccaggccacggaagagttccagaatggtattgccagctacattcccaaagacaacagcctccagtcggagactgtgcagtacaagcgaggagtgtgtcagcagttctgcctgccctcccacaccgtggatccctccgagtgggccgaagaggagcttggctttgatttagaccgagaagtttaccctctagtggtacatgccgtggtggatgaaggagacgagtattttggccattgccatgtactgctgggtacttttgagaagcacacagatggaactttctgtgtcaagcccctcaaacagaaacaagtagtagacggggtcagctacctccttcaggagatctatggaattgaaaacaagtacaacacacaagattctaaggtggctgaagacgaagtgagtgataacagtgccgagtgtgtggtgtgtctctcggatgtccgggacaccttgattctgccctgtcgccacctctgcctctgtaacacctgtgcagacacgctgcgctaccaggccaacaactgccccatctgccgactgcccttccgggcactgcttcagatccgagccatgaggaaaaaattgggccccttgtccccaaccagctttaaccccatcatctcatcccagacatctgactctgaagagcatccatcctcagagaatattccaccaggctatgaagtagtatctcttctggaggccctcaacgggcccctcaccccgtccccagcagttcctccacttcacgtgcttggagatggccacctctcaggaatgctcccttcatatggcagtgatggccacctgccccccgtcaggacgatctcgcctcttgaccgcctgtctgacagcagcagtcagggactcaaactcaaaaagagtctctccaaatccacttcccaaaactcttccgtgctgcatgaagaggaagatgagcattcctgcagcgagtcggagacacagctctctcagagaccgtcggttcagcatctcggagaggaatgtggtgtgactccagaaagtgagaatctcaccttgtcgtcatctggagctattgaccagtcgtcttgcacagggacgcctctgtcatccactatttcctccccagaaggccctgccagcagcagcttggcccagtctgtcatgtccatggcatcctcccagatcagcactgacaccgtctcctccatgtctggctcctacatcgcccctggcactgaagaggagggagaggctctctcttccccccagcctgccagcagggccccctcagaagaaggagaggggctgccagcggagtctccagacagcaactttgctggcctcccagctggagagcaggatgcagagggaaatgatgttatagaggaagaggatggatcacccacgcaggaaggccagaggacgtgcgcatttctaggtatggagtgtgacaataacaatgactttgacatcgcaagcgtgaaagcactggacaataagctgtgctctgaggtctgcttacctggtgcctggcaggctgatgacaatgccgtcagtcggaatgcccagcgccggcgcttgtcatccagcagcctggaggactctgagacgaggccctgtgtgtggggccctttggctgtctgagccccagcctctgcacttgggctcccctcctgccctgcattccatccatcctcactcagctgctgcctactgggcatcctcagcaagatgctggagactttttaccctcctgtgacagctgttacaacctgtaaccacaatccctcacctctcagagggaactggaaccctcctttctccgtgtgacctaaagccactcaatgaactgcagctcacgagaccttttgcagggactctggaatgtcctcacggtatattgatgttcaggtggagctggggtccatgggctaatttcttacacatcttttttctccttagggggtagaacaagaaggcttagagtttggcagctttgttacaaacatccctctggcatttcctggtctctggcacatcataaccaattggaaacctgcagtttggggtagggctggaggatcgctcctgtggaaagggagagccatactgcacggacgtagcgtttccctctacaagcactaggagcacctttctcaaggacaagaaatggtagcaaccaaaaggttggttgaaggaaacaatccttccttctggtggcagagccagtcttctgggcctcacatgcctgtgcggttaagaaggagctcttggccgggcgcggtggctcacgcctgtaatcccagcactttgggaggccgaggcgggtggatcatgagatcaggagatcgagaccatcctggctaacacggcgaaaccccgtctctactaaaaatacaaaaaattagctgggcatggttgcaggcgcctgtagtcccagctacttgggaggctgaggcaggagaatggcctgaacccgggaggcggagcttgcagtgagccgagatcgcgccaatgcactccagcctgggcgacagagaaaaaaaaaaaaaaagaaggagcccttgaatctgagaatcccccagttaagatgatttcccttaaggagcatttctcctgatcaggtgcattcagggaggcctgcaactccatcctaaggtgacatttcaagaaacacatgtgttgaccacctctgtgtgccaagcactgggtgaggagtggtcgtatattaccataattcatcctcactcaattgggaggtggcattcttgtccctgttgcccccatctctacccccttttgttaatggttgagagaaatgtggaccagtgattctcagtttggtgcccaggtccccaaaggaagtgatggagagccttgagctaagttcaggcagcagcatgtggccagcagcagtgtgctgggagcagaggttggaatcagggctcagggccttcacttcaagggccctccccagctactcgggaggctgaggcaggagaatcgcttgaactcaggaggtggaggttgcggtgagccaagatcgtgccactgcactccagcctgggctacaagattgaaaagatcgaaactctgtctcaaacaaaaaaaaaaaaattcaaggctgtttccaaggcagcctcaaaaagagcctggtgcccagggggtccttcgtttctgtgtggctgcagaggccaggagtgcagtgactgtctcactgcctagtggttgtggctcacatcctgccctgatggagaggggggcctgtcgtccaaccctctctgaaaaactgcagtagactttaccatttcaggccccacctaatgttctttccttccttccccctacattcttcccgcccctttcatagttaagatgcataagctgagcaataaccccacttcctgatttccctgaaatatgagcccagaagcagcaggtgacagggagcttcccttaccctggggtggtggcacacagaccacctcctgtcctgtcccctgcaggtagtattcacagtgtggtgttacctgggaggagggaggaaggagctgagatgaaggagattcaggtaaacagtagccacagtggccaggacccccttcctgaggatccctgtccttcctcgcagcaggtgcttagtcctctcctagggagaagcacggaaagattcctcaaggcctcagtcccatgtccaaggcatacctaggttagaaatgtcctttacttgtttctcagttactatttctcctcttcctccctccccctgccttctcttggctgtcatttagctctctggcccacagaaatactccatccaaggagctggtcctcagtcagcctgatgaggacaggtcagtggccaacccttttgccccagtccttcatctggagacagtcacatagtcacgtcaacagttcacccaaagagaagaggtggggcctggcttctcccacagggcacagcctaactatggagacccagggctccttcctgctgcactaggcctgtgctctccctattgccttcaggtggtgtgatcccggcttcctcacagagcccttttttccttctgcccagctccatcccaccagagtttctacccccgctgaggcatctcctgggcacagaccaccacactctaagccggctggcctgggagttagggtcctgcccacctcacctgggagttggggtcctgcccacctggagtttagcacgctggtcgctcactttgctttggtctgcacacctggtgtgtgcatgtgtatactgcttgtgccatctgtgtacccctctccctggagtacacttgtggtcacactacagtggggacatcaagaatgcaatatttatggattgctgcatgattcttaaaaatgaataaaactgtttacaagggaaggagagctaactgcaaagtgaaaata

SEQ ID NO: 348536 - DNA, 3255 bp, Homo sapiens
gcggccgcggtgaagcgcggagggcggcgcgggcaccggggccgggccggggctgcagccgcagcggccatgggggccctgacgagccggcagcacgcgggcgtggaggaggtggacatcccgtctaattccgtgtaccgctacccgcccaagtccggaagctattttgccagccacttcattatgggaggagagaagtttgactcaactcatcctgaaggttacctgtttggagagaacagcgatctgaactttctggggaacagaccagttgtgtttccttacgccgccccacctccccaagaacccgtgaagactctgagaagcctggtcaatatccgaaaggacacactgaggctcgtcaaatgtgctgaggaagtgaagagccctggagaagaggccagtaaagctaaagtccactacaatgttgagttcacctttgacacagatgctcgggtagccatcaccatctattaccaggccacggaagagttccagaatggtattgccagctacattcccaaagacaacagcctccagtcggagactgtgcagtacaagcgaggagtgtgtcagcagttctgcctgccctcccacaccgtggatccctccgagtgggccgaagaggagcttggctttgatttagaccgagaagtttaccctctagtggtacatgccgtggtggatgaaggagacgagtattttggccattgccatgtactgctgggtacttttgagaagcacacagatggaactttctgtgtcaagcccctcaaacagaaacaagtagtagacggggtcagctacctccttcaggagatctatggaattgaaaacaagtacaacacacaagattctaaggtggctgaagacgaagtgagtgataacagtgccgagtgtgtggtgtgtctctcggatgtccgggacaccttgattctgccctgtcgccacctctgcctctgtaacacctgtgcagacacgctgcgctaccaggccaacaactgccccatctgccgactgcccttccgggcactgcttcagatccgagccatgaggaaaaaattgggccccttgtccccaaccagctttaaccccatcatctcatcccagacatctgactctgaagagcatccatcctcagagaatattccaccaggctatgaagtagtatctcttctggaggccctcaacgggcccctcaccccgtctctactaaaaatacaaaaaattagctgggcatggttgcaggcgcctgtagtcccagctacttgggaggctgaggcaggagaatggcctgaacccgggaggcggagcttgcagtgagccgagatcgcgccaatgcactccagcctgggcgacagagaaaaaaaaaaaaaaagaaggagcccttgaatctgagaatcccccagttaagatgatttcccttaaggagcatttctcctgatcaggtgcattcagggaggcctgcaactccatcctaaggtgacatttcaagaaacacatgtgttgaccacctctgtgtgccaagcactgggtgaggagtggtcgtatattaccataattcatcctcactcaattgggaggtggcattcttgtccctgttgcccccatctctacccccttttgttaatggttgagagaaatgtggaccagtgattctcagtttggtgcccaggtccccaaaggaagtgatggagagccttgagctaagttcaggcagcagcatgtggccagcagcagtgtgctgggagcagaggttggaatcagggctcagggccttcacttcaagggccctccccagctactcgggaggctgaggcaggagaatcgcttgaactcaggaggtggaggttgcggtgagccaagatcgtgccactgcactccagcctgggctacaagattgaaaagatcgaaactctgtctcaaacaaaaaaaaaaaaattcaaggctgtttccaaggcagcctcaaaaagagcctggtgcccagggggtccttcgtttctgtgtggctgcagaggccaggagtgcagtgactgtctcactgcctagtggttgtggctcacatcctgccctgatggagaggggggcctgtcgtccaaccctctctgaaaaactgcagtagactttaccatttcaggccccacctaatgttctttccttccttccccctacattcttcccgcccctttcatagttaagatgcataagctgagcaataaccccacttcctgatttccctgaaatatgagcccagaagcagcaggtgacagggagcttcccttaccctggggtggtggcacacagaccacctcctgtcctgtcccctgcaggtagtattcacagtgtggtgttacctgggaggagggaggaaggagctgagatgaaggagattcaggtaaacagtagccacagtggccaggacccccttcctgaggatccctgtccttcctcgcagcaggtgcttagtcctctcctagggagaagcacggaaagattcctcaaggcctcagtcccatgtccaaggcatacctaggttagaaatgtcctttacttgtttctcagttactatttctcctcttcctccctccccctgccttctcttggctgtcatttagctctctggcccacagaaatactccatccaaggagctggtcctcagtcagcctgatgaggacaggtcagtggccaacccttttgccccagtccttcatctggagacagtcacatagtcacgtcaacagttcacccaaagagaagaggtggggcctggcttctcccacagggcacagcctaactatggagacccagggctccttcctgctgcactaggcctgtgctctccctattgccttcaggtggtgtgatcccggcttcctcacagagcccttttttccttctgcccagctccatcccaccagagtttctacccccgctgaggcatctcctgggcacagaccaccacactctaagccggctggcctgggagttagggtcctgcccacctcacctgggagttggggtcctgcccacctggagtttagcacgctggtcgctcactttgctttggtctgcacacctggtgtgtgcatgtgtatactgcttgtgccatctgtgtacccctctccctggagtacacttgtggtcacactacagtggggacatcaagaatgcaatatttatggattgctgcatgattcttaaaaatgaataaaactgtttacaagggaaggagagctaactgcaaagtgaaaata

SEQ ID NO: 348537 - DNA, 4178 bp, Homo sapiens
ggaaaatgacaaagtccaatgtcaatgcagattttgttcgtaattattacttatcttagctcttcagccacgctgccttgtcagtaaagtatgggacaggaagggctttgtgccattggctacatttctttctccttggccaggtggctgaagacgaagtgagtgataacagtgccgagtgtgtggtgtgtctctcggatgtccgggacaccttgattctgccctgtcgccacctctgcctctgtaacacctgtgcagacacgctgcgctaccaggccaacaactgccccatctgccgactgcccttccgggcactgcttcagatccgagccatgaggaaaaaattgggccccttgtccccaaccagctttaaccccatcatctcatcccagacatctgactctgaagagcatccatcctcagagaatattccaccaggctatgaagtagtatctcttctggaggccctcaacgggcccctcaccccgtccccagcagttcctccacttcacgtgcttggagatggccacctctcaggaatgctcccttcatatggcagtgatggccacctgccccccgtcaggacgatctcgcctcttgaccgcctgtctgacagcagcagtcagggactcaaactcaaaaagagtctctccaaatccacttcccaaaactcttccgtgctgcatgaagaggaagatgagcattcctgcagcgagtcggagacacagctctctcagagaccgtcggttcagcatctcggagaggaatgtggtgtgactccagaaagtgagaatctcaccttgtcgtcatctggagctattgaccagtcgtcttgcacagggacgcctctgtcatccactatttcctccccagaaggccctgccagcagcagcttggcccagtctgtcatgtccatggcatcctcccagatcagcactgacaccgtctcctccatgtctggctcctacatcgcccctggcactgaagaggagggagaggctctctcttccccccagcctgccagcagggccccctcagaagaaggagaggggctgccagcggagtctccagacagcaactttgctggcctcccagctggagagcaggatgcagagggaaatgatgttatagaggaagaggatggatcacccacgcaggaaggccagaggacgtgcgcatttctaggtatggagtgtgacaataacaatgactttgacatcgcaagcgtgaaagcactggacaataagctgtgctctgaggtctgcttacctggtgcctggcaggctgatgacaatgccgtcagtcggaatgcccagcgccggcgcttgtcatccagcagcctggaggactctgagacgaggccctgtgtgtggggccctttggctgtctgagccccagcctctgcacttgggctcccctcctgccctgcattccatccatcctcactcagctgctgcctactgggcatcctcagcaagatgctggagactttttaccctcctgtgacagctgttacaacctgtaaccacaatccctcacctctcagagggaactggaaccctcctttctccgtgtgacctaaagccactcaatgaactgcagctcacgagaccttttgcagggactctggaatgtcctcacggtatattgatgttcaggtggagctggggtccatgggctaatttcttacacatcttttttctccttagggggtagaacaagaaggcttagagtttggcagctttgttacaaacatccctctggcatttcctggtctctggcacatcataaccaattggaaacctgcagtttggggtagggctggaggatcgctcctgtggaaagggagagccatactgcacggacgtagcgtttccctctacaagcactaggagcacctttctcaaggacaagaaatggtagcaaccaaaaggttggttgaaggaaacaatccttccttctggtggcagagccagtcttctgggcctcacatgcctgtgcggttaagaaggagctcttggccgggcgcggtggctcacgcctgtaatcccagcactttgggaggccgaggcgggtggatcatgagatcaggagatcgagaccatcctggctaacacggcgaaaccccgtctctactaaaaatacaaaaaattagctgggcatggttgcaggcgcctgtagtcccagctacttgggaggctgaggcaggagaatggcctgaacccgggaggcggagcttgcagtgagccgagatcgcgccaatgcactccagcctgggcgacagagaaaaaaaaaaaaaaagaaggagcccttgaatctgagaatcccccagttaagatgatttcccttaaggagcatttctcctgatcaggtgcattcagggaggcctgcaactccatcctaaggtgacatttcaagaaacacatgtgttgaccacctctgtgtgccaagcactgggtgaggagtggtcgtatattaccataattcatcctcactcaattgggaggtggcattcttgtccctgttgcccccatctctacccccttttgttaatggttgagagaaatgtggaccagtgattctcagtttggtgcccaggtccccaaaggaagtgatggagagccttgagctaagttcaggcagcagcatgtggccagcagcagtgtgctgggagcagaggttggaatcagggctcagggccttcacttcaagggccctccccagctactcgggaggctgaggcaggagaatcgcttgaactcaggaggtggaggttgcggtgagccaagatcgtgccactgcactccagcctgggctacaagattgaaaagatcgaaactctgtctcaaacaaaaaaaaaaaaattcaaggctgtttccaaggcagcctcaaaaagagcctggtgcccagggggtccttcgtttctgtgtggctgcagaggccaggagtgcagtgactgtctcactgcctagtggttgtggctcacatcctgccctgatggagaggggggcctgtcgtccaaccctctctgaaaaactgcagtagactttaccatttcaggccccacctaatgttctttccttccttccccctacattcttcccgcccctttcatagttaagatgcataagctgagcaataaccccacttcctgatttccctgaaatatgagcccagaagcagcaggtgacagggagcttcccttaccctggggtggtggcacacagaccacctcctgtcctgtcccctgcaggtagtattcacagtgtggtgttacctgggaggagggaggaaggagctgagatgaaggagattcaggtaaacagtagccacagtggccaggacccccttcctgaggatccctgtccttcctcgcagcaggtgcttagtcctctcctagggagaagcacggaaagattcctcaaggcctcagtcccatgtccaaggcatacctaggttagaaatgtcctttacttgtttctcagttactatttctcctcttcctccctccccctgccttctcttggctgtcatttagctctctggcccacagaaatactccatccaaggagctggtcctcagtcagcctgatgaggacaggtcagtggccaacccttttgccccagtccttcatctggagacagtcacatagtcacgtcaacagttcacccaaagagaagaggtggggcctggcttctcccacagggcacagcctaactatggagacccagggctccttcctgctgcactaggcctgtgctctccctattgccttcaggtggtgtgatcccggcttcctcacagagcccttttttccttctgcccagctccatcccaccagagtttctacccccgctgaggcatctcctgggcacagaccaccacactctaagccggctggcctgggagttagggtcctgcccacctcacctgggagttggggtcctgcccacctggagtttagcacgctggtcgctcactttgctttggtctgcacacctggtgtgtgcatgtgtatactgcttgtgccatctgtgtacccctctccctggagtacacttgtggtcacactacagtggggacatcaagaatgcaatatttatggattgctgcatgattcttaaaaatgaataaaactgtttacaagggaaggagagctaactgcaaagtgaaaata

SEQ ID NO: 348538 - DNA, 1156 bp, Homo sapiens
gcggccgcggtgaagcgcggagggcggcgcgggcaccggggccgggccggggctgcagccgcagcggccatgggggccctgacgagccggcagcacgcgggcgtggaggaggtggacatcccgtctaattccgtgtaccgctacccgcccaagtccggaagctattttgccagccacttcattatgggaggagagaagtttgactcaactcatcctgaaggttacctgtttggagagaacagcgatctgaactttctggggaacagaccagttgtgtttccttacgccgccccacctccccaagaacccgtgaagactctgagaagcctggtcaatatccgaaaggacacactgaggctcgtcaaatgtgctgaggaagtgaagagccctggagaagaggccagtaaagctaaagtccactacaatgttgagttcacctttgacacagatgctcgggtagccatcaccatctattaccaggccacggaagagttccagaatggtattgccagctacattcccaaagacaacagcctccagtcggagactgtgcagtacaagcgaggagtgtgtcagcagttctgcctgccctcccacaccgtggatccctccgagtgggccgaagaggagcttggctttgatttagaccgagaagtttaccctctagtggtacatgccgtggtggatgaaggagacgagtattttggccattgccatgtactgctgggtacttttgagaagcacacagatggaactttctgtgtcaagcccctcaaacagaaacaagtagtagacggggtcagctacctccttcaggagatctatggaattgaaaacaagtacaacacacaagattctaagcacactctaagccggctggcctgggagttagggtcctgcccacctcacctgggagttggggtcctgcccacctggagtttagcacgctggtcgctcactttgctttggtctgcacacctggtgtgtgcatgtgtatactgcttgtgccatctgtgtacccctctccctggagtacacttgtggtcacactacagtggggacatcaagaatgcaatatttatggattgctgcatgattcttaaaaatgaataaaactgtttacaagggaaggagagctaactgcaaagtgaaaata

SEQ ID NO: 348539 - DNA, 4781 bp, Homo sapiens
aacttttattaaaataaaaacaaaagtgccaaatgcacaatggtgtagtggtagcactatgagataccagaagtaacctgaatgcccagcaacatgggtcatgaagcactctgtgatcattcagaatgaagaggtagacctatgcttatgatcattcagagaagcccacaatatattgctaatttttttaaaggtaaattttaaaatattgatatgctactctgcaaatgctgagtctctggttttctagatgtgctgaggaagtgaagagccctggagaagaggccagtaaagctaaagtccactacaatgttgagttcacctttgacacagatgctcgggtagccatcaccatctattaccaggccacggaagagttccagaatggtattgccagctacattcccaaagacaacagcctccagtcggagactgtgcagtacaagcgaggagtgtgtcagcagttctgcctgccctcccacaccgtggatccctccgagtgggccgaagaggagcttggctttgatttagaccgagaagtttaccctctagtggtacatgccgtggtggatgaaggagacgagtattttggccattgccatgtactgctgggtacttttgagaagcacacagatggaactttctgtgtcaagcccctcaaacagaaacaagtagtagacggggtcagctacctccttcaggagatctatggaattgaaaacaagtacaacacacaagattctaaggtggctgaagacgaagtgagtgataacagtgccgagtgtgtggtgtgtctctcggatgtccgggacaccttgattctgccctgtcgccacctctgcctctgtaacacctgtgcagacacgctgcgctaccaggccaacaactgccccatctgccgactgcccttccgggcactgcttcagatccgagccatgaggaaaaaattgggccccttgtccccaaccagctttaaccccatcatctcatcccagacatctgactctgaagagcatccatcctcagagaatattccaccaggctatgaagtagtatctcttctggaggccctcaacgggcccctcaccccgtccccagcagttcctccacttcacgtgcttggagatggccacctctcaggaatgctcccttcatatggcagtgatggccacctgccccccgtcaggacgatctcgcctcttgaccgcctgtctgacagcagcagtcagggactcaaactcaaaaagagtctctccaaatccacttcccaaaactcttccgtgctgcatgaagaggaagatgagcattcctgcagcgagtcggagacacagctctctcagagaccgtcggttcagcatctcggagaggaatgtggtgtgactccagaaagtgagaatctcaccttgtcgtcatctggagctattgaccagtcgtcttgcacagggacgcctctgtcatccactatttcctccccagaaggccctgccagcagcagcttggcccagtctgtcatgtccatggcatcctcccagatcagcactgacaccgtctcctccatgtctggctcctacatcgcccctggcactgaagaggagggagaggctctctcttccccccagcctgccagcagggccccctcagaagaaggagaggggctgccagcggagtctccagacagcaactttgctggcctcccagctggagagcaggatgcagagggaaatgatgttatagaggaagaggatggatcacccacgcaggaaggccagaggacgtgcgcatttctaggtatggagtgtgacaataacaatgactttgacatcgcaagcgtgaaagcactggacaataagctgtgctctgaggtctgcttacctggtgcctggcaggctgatgacaatgccgtcagtcggaatgcccagcgccggcgcttgtcatccagcagcctggaggactctgagacgaggccctgtgtgtggggccctttggctgtctgagccccagcctctgcacttgggctcccctcctgccctgcattccatccatcctcactcagctgctgcctactgggcatcctcagcaagatgctggagactttttaccctcctgtgacagctgttacaacctgtaaccacaatccctcacctctcagagggaactggaaccctcctttctccgtgtgacctaaagccactcaatgaactgcagctcacgagaccttttgcagggactctggaatgtcctcacggtatattgatgttcaggtggagctggggtccatgggctaatttcttacacatcttttttctccttagggggtagaacaagaaggcttagagtttggcagctttgttacaaacatccctctggcatttcctggtctctggcacatcataaccaattggaaacctgcagtttggggtagggctggaggatcgctcctgtggaaagggagagccatactgcacggacgtagcgtttccctctacaagcactaggagcacctttctcaaggacaagaaatggtagcaaccaaaaggttggttgaaggaaacaatccttccttctggtggcagagccagtcttctgggcctcacatgcctgtgcggttaagaaggagctcttggccgggcgcggtggctcacgcctgtaatcccagcactttgggaggccgaggcgggtggatcatgagatcaggagatcgagaccatcctggctaacacggcgaaaccccgtctctactaaaaatacaaaaaattagctgggcatggttgcaggcgcctgtagtcccagctacttgggaggctgaggcaggagaatggcctgaacccgggaggcggagcttgcagtgagccgagatcgcgccaatgcactccagcctgggcgacagagaaaaaaaaaaaaaaagaaggagcccttgaatctgagaatcccccagttaagatgatttcccttaaggagcatttctcctgatcaggtgcattcagggaggcctgcaactccatcctaaggtgacatttcaagaaacacatgtgttgaccacctctgtgtgccaagcactgggtgaggagtggtcgtatattaccataattcatcctcactcaattgggaggtggcattcttgtccctgttgcccccatctctacccccttttgttaatggttgagagaaatgtggaccagtgattctcagtttggtgcccaggtccccaaaggaagtgatggagagccttgagctaagttcaggcagcagcatgtggccagcagcagtgtgctgggagcagaggttggaatcagggctcagggccttcacttcaagggccctccccagctactcgggaggctgaggcaggagaatcgcttgaactcaggaggtggaggttgcggtgagccaagatcgtgccactgcactccagcctgggctacaagattgaaaagatcgaaactctgtctcaaacaaaaaaaaaaaaattcaaggctgtttccaaggcagcctcaaaaagagcctggtgcccagggggtccttcgtttctgtgtggctgcagaggccaggagtgcagtgactgtctcactgcctagtggttgtggctcacatcctgccctgatggagaggggggcctgtcgtccaaccctctctgaaaaactgcagtagactttaccatttcaggccccacctaatgttctttccttccttccccctacattcttcccgcccctttcatagttaagatgcataagctgagcaataaccccacttcctgatttccctgaaatatgagcccagaagcagcaggtgacagggagcttcccttaccctggggtggtggcacacagaccacctcctgtcctgtcccctgcaggtagtattcacagtgtggtgttacctgggaggagggaggaaggagctgagatgaaggagattcaggtaaacagtagccacagtggccaggacccccttcctgaggatccctgtccttcctcgcagcaggtgcttagtcctctcctagggagaagcacggaaagattcctcaaggcctcagtcccatgtccaaggcatacctaggttagaaatgtcctttacttgtttctcagttactatttctcctcttcctccctccccctgccttctcttggctgtcatttagctctctggcccacagaaatactccatccaaggagctggtcctcagtcagcctgatgaggacaggtcagtggccaacccttttgccccagtccttcatctggagacagtcacatagtcacgtcaacagttcacccaaagagaagaggtggggcctggcttctcccacagggcacagcctaactatggagacccagggctccttcctgctgcactaggcctgtgctctccctattgccttcaggtggtgtgatcccggcttcctcacagagcccttttttccttctgcccagctccatcccaccagagtttctacccccgctgaggcatctcctgggcacagaccaccacactctaagccggctggcctgggagttagggtcctgcccacctcacctgggagttggggtcctgcccacctggagtttagcacgctggtcgctcactttgctttggtctgcacacctggtgtgtgcatgtgtatactgcttgtgccatctgtgtacccctctccctggagtacacttgtggtcacactacagtggggacatcaagaatgcaatatttatggattgctgcatgattcttaaaaatgaataaaactgtttacaagggaaggagagctaactgcaaagtgaaaata

SEQ ID NO: 348540 - DNA, 4896 bp, Homo sapiens
gcggccgcggtgaagcgcggagggcggcgcgggcaccggggccgggccggggctgcagccgcagcggccatgggggccctgacgagccggcagcacgcgggcgtggaggaggtggacatcccgtctaattccgtgtaccgctacccgcccaagtccggaagctattttgccagccacttcattatgggaggagagaagtttgactcaactcatcctgaaggttacctgtttggagagaacagcgatctgaactttctggggaacagaccagttgtgtttccttacgccgccccacctccccaagaacccgtgaagactctgagaagcctggtcaatatccgaaaggacacactgaggctcgtcaaatgtgctgaggaagtgaagagccctggagaagaggccagtaaagctaaagtccactacaatgttgagttcacctttgacacagatgctcgggtagccatcaccatctattaccaggccacggaagagttccagaatggtattgccagctacattcccaaagacaacagcctccagtcggagactgtgcagtacaagcgaggagtgtgtcagcagttctgcctgccctcccacaccgtggatccctccgagtgggccgaagaggagcttggctttgatttagaccgagaagtttaccctctagtggtacatgccgtggtggatgaaggagacgagtattttggccattgccatgtactgctgggtacttttgagaagcacacagatggaactttctgtgtcaagcccctcaaacagaaacaagtagtagacggggtcagctacctccttcaggagatctatggaattgaaaacaagtacaacacacaagattctaaggtggctgaagacgaagtgagtgataacagtgccgagtgtgtggtgtgtctctcggatgtccgggacaccttgattctgccctgtcgccacctctgcctctgtaacacctgtgcagacacgctgcgctaccaggccaacaactgccccatctgccgactgcccttccgggcactgcttcagatccgagccatgaggaaaaaattgggccccttgtccccaaccagctttaaccccatcatctcatcccagacatctgactctgaagagcatccatcctcagagaatattccaccaggctatgaagtagtatctcttctggaggccctcaacgggcccctcaccccgtccccagcagttcctccacttcacgtgcttggagatggccacctctcaggaatgctcccttcatatggcagtgatggccacctgccccccgtcaggacgatctcgcctcttgaccgcctgtctgacagcagcagtcagggactcaaactcaaaaagagtctctccaaatccacttcccaaaactcttccgtgctgcatgaagaggaagatgagcattcctgcagcgagtcggagacacagctctctcagagaccgtcggttcagcatctcggagaggaatgtggtgtgactccagaaagtgagaatctcaccttgtcgtcatctggagctattgaccagtcgtcttgcacagggacgcctctgtcatccactatttcctccccagaaggccctgccagcagcagcttggcccagtctgtcatgtccatggcatcctcccagatcagcactgacaccgtctcctccatgtctggctcctacatcgcccctggcactgaagaggagggagaggctctctcttccccccagcctgccagcagggccccctcagaagaaggagaggggctgccagcggagtctccagacagcaactttgctggcctcccagctggagagcaggatgcagagggaaatgatgttatagaggaagaggatggatcacccacgcaggaaggccagaggacgtgcgcatttctaggtatggagtgtgacaataacaatgactttgacatcgcaagcgtgaaagcactggacaataagctgtgctctgaggtctgcttacctggtgcctggcaggctgatgacaatgccgtcagtcggaatgcccagcgccggcgcttgtcatccagcagcctggaggactctgagacgaggccctgtgtgtggggccctttggctgtctgagccccagcctctgcacttgggctcccctcctgccctgcattccatccatcctcactcagctgctgcctactgggcatcctcagcaagatgctggagactttttaccctcctgtgacagctgttacaacctgtaaccacaatccctcacctctcagagggaactggaaccctcctttctccgtgtgacctaaagccactcaatgaactgcagctcacgagaccttttgcagggactctggaatgtcctcacggtatattgatgttcaggtggagctggggtccatgggctaatttcttacacatcttttttctccttagggggtagaacaagaaggcttagagtttggcagctttgttacaaacatccctctggcatttcctggtctctggcacatcataaccaattggaaacctgcagtttggggtagggctggaggatcgctcctgtggaaagggagagccatactgcacggacgtagcgtttccctctacaagcactaggagcacctttctcaaggacaagaaatggtagcaaccaaaaggttggttgaaggaaacaatccttccttctggtggcagagccagtcttctgggcctcacatgcctgtgcggttaagaaggagctcttggccgggcgcggtggctcacgcctgtaatcccagcactttgggaggccgaggcgggtggatcatgagatcaggagatcgagaccatcctggctaacacggcgaaaccccgtctctactaaaaatacaaaaaattagctgggcatggttgcaggcgcctgtagtcccagctacttgggaggctgaggcaggagaatggcctgaacccgggaggcggagcttgcagtgagccgagatcgcgccaatgcactccagcctgggcgacagagaaaaaaaaaaaaaaagaaggagcccttgaatctgagaatcccccagttaagatgatttcccttaaggagcatttctcctgatcaggtgcattcagggaggcctgcaactccatcctaaggtgacatttcaagaaacacatgtgttgaccacctctgtgtgccaagcactgggtgaggagtggtcgtatattaccataattcatcctcactcaattgggaggtggcattcttgtccctgttgcccccatctctacccccttttgttaatggttgagagaaatgtggaccagtgattctcagtttggtgcccaggtccccaaaggaagtgatggagagccttgagctaagttcaggcagcagcatgtggccagcagcagtgtgctgggagcagaggttggaatcagggctcagggccttcacttcaagggccctccccagctactcgggaggctgaggcaggagaatcgcttgaactcaggaggtggaggttgcggtgagccaagatcgtgccactgcactccagcctgggctacaagattgaaaagatcgaaactctgtctcaaacaaaaaaaaaaaaattcaaggctgtttccaaggcagcctcaaaaagagcctggtgcccagggggtccttcgtttctgtgtggctgcagaggccaggagtgcagtgactgtctcactgcctagtggttgtggctcacatcctgccctgatggagaggggggcctgtcgtccaaccctctctgaaaaactgcagtagactttaccatttcaggccccacctaatgttctttccttccttccccctacattcttcccgcccctttcatagttaagatgcataagctgagcaataaccccacttcctgatttccctgaaatatgagcccagaagcagcaggtgacagggagcttcccttaccctggggtggtggcacacagaccacctcctgtcctgtcccctgcaggtagtattcacagtgtggtgttacctgggaggagggaggaaggagctgagatgaaggagattcaggtaaacagtagccacagtggccaggacccccttcctgaggatccctgtccttcctcgcagcaggtgcttagtcctctcctagggagaagcacggaaagattcctcaaggcctcagtcccatgtccaaggcatacctaggttagaaatgtcctttacttgtttctcagttactatttctcctcttcctccctccccctgccttctcttggctgtcatttagctctctggcccacagaaatactccatccaaggagctggtcctcagtcagcctgatgaggacaggtcagtggccaacccttttgccccagtccttcatctggagacagtcacatagtcacgtcaacagttcacccaaagagaagaggtggggcctggcttctcccacagggcacagcctaactatggagacccagggctccttcctgctgcactaggcctgtgctctccctattgccttcaggtggtgtgatcccggcttcctcacagagcccttttttccttctgcccagctccatcccaccagagtttctacccccgctgaggcatctcctgggcacagaccaccacactctaagccggctggcctgggagttagggtcctgcccacctcacctgggagttggggtcctgcccacctggagtttagcacgctggtcgctcactttgctttggtctgcacacctggtgtgtgcatgtgtatactgcttgtgccatctgtgtacccctctccctggagtacacttgtggtcacactacagtggggacatcaagaatgcaatatttatggattgctgcatgattcttaaaaatgaataaaactgtttacaagggaaggagagctaactgcaaagtgaaaata

SEQ ID NO: 348541 - DNA, 4168 bp, Homo sapiens
  misc_feature (36)..(36): n is a, c, g, or t
tagtcgggtatctagaggatcccgtcaggcactganagccagccctcaaacagaaacagtagtagacggggtcagctacctccttcaggagatctatggaattgaaaacaagtacaacacacaagattctaaggtggctgaagacgaagtgagtgataacagtgccgagtgtgtggtgtgtctctcggatgtccgggacaccttgattctgccctgtcgccacctctgcctctgtaacacctgtgcagacacgctgcgctaccaggccaacaactgccccatctgccgactgcccttccgggcactgcttcagatccgagccatgaggaaaaaattgggccccttgtccccaaccagctttaaccccatcatctcatcccagacatctgactctgaagagcatccatcctcagagaatattccaccaggctatgaagtagtatctcttctggaggccctcaacgggcccctcaccccgtccccagcagttcctccacttcacgtgcttggagatggccacctctcaggaatgctcccttcatatggcagtgatggccacctgccccccgtcaggacgatctcgcctcttgaccgcctgtctgacagcagcagtcagggactcaaactcaaaaagagtctctccaaatccacttcccaaaactcttccgtgctgcatgaagaggaagatgagcattcctgcagcgagtcggagacacagctctctcagagaccgtcggttcagcatctcggagaggaatgtggtgtgactccagaaagtgagaatctcaccttgtcgtcatctggagctattgaccagtcgtcttgcacagggacgcctctgtcatccactatttcctccccagaaggccctgccagcagcagcttggcccagtctgtcatgtccatggcatcctcccagatcagcactgacaccgtctcctccatgtctggctcctacatcgcccctggcactgaagaggagggagaggctctctcttccccccagcctgccagcagggccccctcagaagaaggagaggggctgccagcggagtctccagacagcaactttgctggcctcccagctggagagcaggatgcagagggaaatgatgttatagaggaagaggatggatcacccacgcaggaaggccagaggacgtgcgcatttctaggtatggagtgtgacaataacaatgactttgacatcgcaagcgtgaaagcactggacaataagctgtgctctgaggtctgcttacctggtgcctggcaggctgatgacaatgccgtcagtcggaatgcccagcgccggcgcttgtcatccagcagcctggaggactctgagacgaggccctgtgtgtggggccctttggctgtctgagccccagcctctgcacttgggctcccctcctgccctgcattccatccatcctcactcagctgctgcctactgggcatcctcagcaagatgctggagactttttaccctcctgtgacagctgttacaacctgtaaccacaatccctcacctctcagagggaactggaaccctcctttctccgtgtgacctaaagccactcaatgaactgcagctcacgagaccttttgcagggactctggaatgtcctcacggtatattgatgttcaggtggagctggggtccatgggctaatttcttacacatcttttttctccttagggggtagaacaagaaggcttagagtttggcagctttgttacaaacatccctctggcatttcctggtctctggcacatcataaccaattggaaacctgcagtttggggtagggctggaggatcgctcctgtggaaagggagagccatactgcacggacgtagcgtttccctctacaagcactaggagcacctttctcaaggacaagaaatggtagcaaccaaaaggttggttgaaggaaacaatccttccttctggtggcagagccagtcttctgggcctcacatgcctgtgcggttaagaaggagctcttggccgggcgcggtggctcacgcctgtaatcccagcactttgggaggccgaggcgggtggatcatgagatcaggagatcgagaccatcctggctaacacggcgaaaccccgtctctactaaaaatacaaaaaattagctgggcatggttgcaggcgcctgtagtcccagctacttgggaggctgaggcaggagaatggcctgaacccgggaggcggagcttgcagtgagccgagatcgcgccaatgcactccagcctgggcgacagagaaaaaaaaaaaaaaagaaggagcccttgaatctgagaatcccccagttaagatgatttcccttaaggagcatttctcctgatcaggtgcattcagggaggcctgcaactccatcctaaggtgacatttcaagaaacacatgtgttgaccacctctgtgtgccaagcactgggtgaggagtggtcgtatattaccataattcatcctcactcaattgggaggtggcattcttgtccctgttgcccccatctctacccccttttgttaatggttgagagaaatgtggaccagtgattctcagtttggtgcccaggtccccaaaggaagtgatggagagccttgagctaagttcaggcagcagcatgtggccagcagcagtgtgctgggagcagaggttggaatcagggctcagggccttcacttcaagggccctccccagctactcgggaggctgaggcaggagaatcgcttgaactcaggaggtggaggttgcggtgagccaagatcgtgccactgcactccagcctgggctacaagattgaaaagatcgaaactctgtctcaaacaaaaaaaaaaaaattcaaggctgtttccaaggcagcctcaaaaagagcctggtgcccagggggtccttcgtttctgtgtggctgcagaggccaggagtgcagtgactgtctcactgcctagtggttgtggctcacatcctgccctgatggagaggggggcctgtcgtccaaccctctctgaaaaactgcagtagactttaccatttcaggccccacctaatgttctttccttccttccccctacattcttcccgcccctttcatagttaagatgcataagctgagcaataaccccacttcctgatttccctgaaatatgagcccagaagcagcaggtgacagggagcttcccttaccctggggtggtggcacacagaccacctcctgtcctgtcccctgcaggtagtattcacagtgtggtgttacctgggaggagggaggaaggagctgagatgaaggagattcaggtaaacagtagccacagtggccaggacccccttcctgaggatccctgtccttcctcgcagcaggtgcttagtcctctcctagggagaagcacggaaagattcctcaaggcctcagtcccatgtccaaggcatacctaggttagaaatgtcctttacttgtttctcagttactatttctcctcttcctccctccccctgccttctcttggctgtcatttagctctctggcccacagaaatactccatccaaggagctggtcctcagtcagcctgatgaggacaggtcagtggccaacccttttgccccagtccttcatctggagacagtcacatagtcacgtcaacagttcacccaaagagaagaggtggggcctggcttctcccacagggcacagcctaactatggagacccagggctccttcctgctgcactaggcctgtgctctccctattgccttcaggtggtgtgatcccggcttcctcacagagcccttttttccttctgcccagctccatcccaccagagtttctacccccgctgaggcatctcctgggcacagaccaccacactctaagccggctggcctgggagttagggtcctgcccacctcacctgggagttggggtcctgcccacctggagtttagcacgctggtcgctcactttgctttggtctgcacacctggtgtgtgcatgtgtatactgcttgtgccatctgtgtacccctctccctggagtacacttgtggtcacactacagtggggacatcaagaatgcaatatttatggattgctgcatgattcttaaaaatgaataaaactgtttacaagggaaggagagctaactgcaaagtgaaaata

SEQ ID NO: 348542 - DNA, 3080 bp, Homo sapiens
gcggccgcggtgaagcgcggagggcggcgcgggcaccggggccgggccggggctgcagccgcagcggccatgggggccctgacgagccggcagcacgcgggcgtggaggaggtggacatcccgtctaattccgtgtaccgctacccgcccaagtccggaagctattttgccagccacttcattatgggaggagagaagtttgactcaactcatcctgaaggttacctgtttggagagaacagcgatctgaactttctggggaacagaccagttgtgtttccttacgccgccccacctccccaagaacccgtgaagactctgagaagcctggtcaatatccgaaaggacacactgaggctcgtcaaatgtgctgaggaagtgaagagccctggagaagaggccagtaaagctaaagtccactacaatgttgagttcacctttgacacagatgctcgggtagccatcaccatctattaccaggccacggaagagttccagaatggtattgccagctacattcccaaagacaacagcctccagtcggagactgtgcagtacaagcgaggagtgtgtcagcagttctgcctgccctcccacaccgtggatccctccgagtgggccgaagaggagcttggctttgatttagaccgagaagtttaccctctagtggtacatgccgtggtggatgaaggagacgagtattttggccattgccatgtactgctgggtacttttgagaagcacacagatggaactttctgtgtcaagcccctcaaacagaaacaagtagtagacggggtcagctacctccttcaggagatctatggaattgaaaacaagtacaacacacaagattctaaggtggctgaagacgaagtgagtgataacagtgccgagtgtgtggtgtgtctctcggatgtccgggacaccttgattctgccctgtcgccacctctgcctctgtaacacctgtgcagacacgctgcgctaccaggccaacaactgccccatctgccgactgcccttccgggcactgcttcagatccgagccatgaggaaaaaattgggccccttgtccccaaccagctttaaccccatcatctcatcccagacatctgactctgaagagcatccatcctcagagaatattccaccaggctatgaagtagtatctcttctggaggccctcaacgggcccctcaccccgtccccagcagttcctccacttcacgtgcttggagatggccacctctcaggaatgctcccttcatatggcagtgatggccacctgccccccgtcaggacgatctcgcctcttgaccgcctgtctgacagcagcagtcagggactcaaactcaaaaagagtctctccaaatccacttcccaaaactcttccgtgctgcatgaagaggaagatgagcattcctgcagcgagtcggagacacagctctctcagagaccgtcggttcagcatctcggagaggaatgtggtgtgactccagaaagtgagaatctcaccttgtcgtcatctggagctattgaccagtcgtcttgcacagggacgcctctgtcatccactatttcctccccagaaggccctgccagcagcagcttggcccagtctgtcatgtccatggcatcctcccagatcagcactgacaccgtctcctccatgtctggctcctacatcgcccctggcactgaagaggagggagaggctctctcttccccccagcctgccagcagggccccctcagaagaaggagaggggctgccagcggagtctccagacagcaactttgctggcctcccagctggagagcaggatgcagagggaaatgatgttatagaggaagaggatggatcacccacgcaggaaggccagaggacgtgcgcatttctaggtatggagtgtgacaataacaatgactttgacatcgcaagcgtgaaagcactggacaataagctgtgctctgaggtctgcttacctggtgcctggcaggctgatgacaatgccgtcagtcggaatgcccagcgccggcgcttgtcatccagcagcctggaggactctgagacgaggccctgtgtgtggggccctttggctgtctgagccccagcctctgcacttgggctcccctcctgccctgcattccatccatcctcactcagctgctgcctactgggcatcctcagcaagatgctggagactttttaccctcctgtgacagctgttacaacctgtaaccacaatccctcacctctcagagggaactggaaccctcctttctccgtgtgacctaaagccactcaatgaactgcagctcacgagaccttttgcagggactctggaatgtcctcacggtatattgatgttcaggtggagctggggtccatgggctaatttcttacacatcttttttctccttagggggtagaacaagaaggcttagagtttggcagctttgttacaaacatccctctggcatttcctggtctctggcacatcataaccaattggaaacctgcagtttggggtagggctggaggatcgctcctgtggaaagggagagccatactgcacggacgtagcgtttccctctacaagcactaggagcacctttctcaaggacaagaaatggtagcaaccaaaaggttggttgaaggaaacaatccttccttctggtggtgtgatcccggcttcctcacagagcccttttttccttctgcccagctccatcccaccagagtttctacccccgctgaggcatctcctgggcacagaccaccacactctaagccggctggcctgggagttagggtcctgcccacctcacctgggagttggggtcctgcccacctggagtttagcacgctggtcgctcactttgctttggtctgcacacctggtgtgtgcatgtgtatactgcttgtgccatctgtgtacccctctccctggagtacacttgtggtcacactacagtggggacatcaagaatgcaatatttatggattgctgcatgattcttaaaaatgaataaaactgtttacaagggaaggagagctaactgcaaagtgaaaata

SEQ ID NO: 348543 - DNA, 1583 bp, Homo sapiens
gcggccgcggtgaagcgcggagggcggcgcgggcaccggggccgggccggggctgcagccgcagcggccatgggggccctgacgagccggcagcacgcgggcgtggaggaggtggacatcccgtctaattccgtgtaccgctacccgcccaagtccggaagctattttgccagccacttcattatgggaggagagaagtttgactcaactcatcctgaaggttacctgtttggagagaacagcgatctgaactttctggggaacagaccagttgtgtttccttacgccgccccacctccccaagaacccgtgaagactctgagaagcctggtcaatatccgaaaggacacactgaggctcgtcaaatgtgctgaggaagtgaagagccctggagaagaggccagtaaagctaaagtccactacaatgttgagttcacctttgacacagatgctcgggtagccatcaccatctattaccaggccacggaagagttccagaatggtattgccagctacattcccaaagacaacagcctccagtcggagactgtgcagtacaagcgaggagtgtgtcagcagttctgcctgccctcccacaccgtggatccctccgagtgggccgaagaggagcttggctttgatttagaccgagaagtttaccctctagtggtacatgccgtggtggatgaaggagacgagtattttggccattgccatgtactgctgggtacttttgagaagcacacagatggaactttctgtgtcaagcccctcaaacagaaacaagtagtagacggggtcagctacctccttcaggagatctatggaattgaaaacaagtacaacacacaagattctaaggtggctgaagacgaagtgagtgataacagtgccgagtgtgtggtgtgtctctcggatgtccgggacaccttgattctgccctgtcgccacctctgcctctgtaacacctgtgcagacacgctgcgctaccaggccaacaactgccccatctgccgactgcccttccgggcactgcttcagatccgagccatgaggaaaaaattgggccccttgtccccaaccagctttaaccccatcatctcatcccagacatctgactctgaagagcatccatcctcagagaatattccaccaggctatgaagtagtatctcttctggaggccctcaacgggcccctcaccccgtccccagcagttcctccacttcacgtgcttggagatggccacctctcaggaatgctcccttcatatggcagtgatggccacctgccccccgtcaggacgatctgatcagatcggactaaaggctcagctggccctgccatccttccagaggattcctctgcaactctaggcaagacaccagcttcctgggctctttatcctcatctgtgaaacttgcatgggtgcagcgaggtttcaaaccagtgtgataagtgttggcctcacacctggaccaggggatgctgggagagcaggcgcaattgttataacagaaacactgatgtgaccgaagccagtgcacacagcaggaaactgcctgtgttgaactgtctccagct

SEQ ID NO: 348544 - DNA, 1191 bp, Homo sapiens
gcggccgcggtgaagcgcggagggcggcgcgggcaccggggccgggccggggctgcagccgcagcggccatgggggccctgacgagccggcagcacgcgggcgtggaggaggtggacatcccgtctaattccgtgtaccgctacccgcccaagtccggaagctattttgccagccacttcattatgggaggagagaagtttgactcaactcatcctgaaggttacctgtttggagagaacagcgatctgaactttctggggaacagaccagttgtgtttccttacgccgccccacctccccaagaacccgtgaagactctgagaagcctggtcaatatccgaaaggacacactgaggctcgtcaaatgtgctgaggaagtgaagagccctggagaagaggccagtaaagctaaagtccactacaatgttgagttcacctttgacacagatgctcgggtagccatcaccatctattaccaggccacggaagagttccagaatggtattgccagctacattcccaaagacaacagcctccagtcggagactgtgcagtacaagcgaggagtgtgtcagcagttctgcctgccctcccacaccgtggatccctccgagtgggccgaagaggagcttggctttgatttagaccgagaagtttaccctctagtggtacatgccgtggtggatgaaggagacgagtattttggccattgccatgtactgctgggtacttttgagaagcacacagatggaactttctgtgtcaagcccctcaaacagaaacaagtagtaagtatttgaagaccacagactgttagtattagggtccttccttccttttattctttcctttcttcttctctctccctctttttttatttttgttttactttttgctctctccttttcctctttttttttttttaatcaaagaagaaaagaaaaaaagggagtgcttttgaatgttacaagctattacaaacgacttgggtggcctgaaaggaatgctgatttttgaggtcttcattgttccagaagtgttggtgttgagggagcctttatctgagcaaaggacttgagaaatgaaagaacaagatttatttcccaacattgggtttagggagaactctttttatttaaaatgccagagtgagaaacatttcaagcgaaaggataaagcattagggtcca

SEQ ID NO: 348545 - DNA, 2715 bp, Homo sapiens
gctgcggcccgaggacgcgacgcgagcccagttccggcgaggaggccgcgccagtgacagcgatggcggcggagtcggcgctccaagttgtggagaagctgcaggcgcgcctggccgcgaacccggaccctaagaagctattgaaatatttgaagaaactctccaccctgcctattacagtagacattcttgcggagactggggttgggaaaacagtaaatagcttgcgaaaacacgagcatgttggaagctttgccagggacctagtggcccagtggaagaagctggttcctgtggaacgaaatgctgagcctgatgaacaggactttgagaagagcaattcccgaaagcgccctcgggatgccctgcagaaggaggaggagatggagggggactaccaagaaacctggaaagccacggggagccgatcctatagccctgaccacaggcagaagaaacataggaaactctcggagctcgagagacctcacaaagtgtctcacggtcatgagaggagagatgagagaaagaggtgtcacagaatgtcaccaacttactcttcagaccctgagtcttctgattatggccatgttcaatcccctccatcttgtaccagtcctcatcagatgtacgtcgaccactacagatccctggaggaggaccaggagcccattgtttcacaccagaagcctgggaaaggccacagcaatgcctttcaggacagactcggggccagccaagaacgacacctgggtgaaccccatgggaaaggggttgtgagtcaaaacaaggagcacaaatcttcccacaaggacaaacgccccgtggatgccaagagtgatgagaaggcctctgtggtgagcagagagaaatcacacaaggccctctccaaagaggagaaccgaaggccaccctcaggggacaatgcaagggagaaaccgccctctagtggcgtaaagaaagagaaggacagagagggcagcagcctgaagaagaagtgtttgcctccctcagaggccgcttcagacaaccacctgaaaaagccaaagcacagagacccagagaaagccaaattggacaaaagcaagcaaggtctggacagctttgacacaggaaaaggagcaggagacctgttgcccaaggtaaaagagaagggttctaacaacctaaagactccagaagggaaagtcaaaactaatttggatagaaagtcactgggctccctccctaaagttgaggagacagatatggaggatgaattcgagcagccaaccatgtcttttgaaatcctacctcagctatgaccagccccggaagaaaaagaaaaagattgtgaaaacttcagccacggcacttggagataaaggacttaaaaaaaatgactctaaaagcactggtaaaaacttggactcagttcagaaattacccaaggtgaacaaaaccaagtcagagaagccggctggagctgatttagccaagctgagaaaggtgcctgatgtgttgccagtgttgccagacctcccgttacccgcgatacaggccaattaccgtccactgccttccctcgagctgatatcctccttccagccaaagcgaaaagcgttctcttcaccccaggaagaagaagaagctggatttactgggcgcagaatgaattccaagatgcaggtgtattctggttccaagtgtgcctatctccctaaaatgatgaccttgcaccagcaatgcatccgagtacttaaaaacaacatcgattcaatctttgaagtgggaggagtcccatactctgttcttgaacccgttttggagaggtgtacacctgatcagctgtatcgcatagaggaatacaatcatgtattaattgaagaaacagatcaattatggaaagttcattgtcaccgagactttaaggaagaaagacccgaagagtatgagtcgtggcgagagatgtacctgcggcttcaggacgcccgagagcagcggctacgagtactaacaaagaatatccagttcgcacatgccaataagcccaaaggccgacaagcaaagatggcctttgtcaactctgtggccaagccacctcgtgacgtccggaggaggcaggaaaagtttggaacgggaggagcagctgtccctgagaaaatcaagatcaagccagccccgtaccccatgggaagcagccatgcttccgccagtagcatcagctttaaccccagccctgaggagccggcctatgatggcccaagcaccagcagtgcccacttggcaccagtggtcagcagcactgtttcctatgatcctaggaaacccactgtgaagaaaattgccccaatgatggccaagacaattaaagctttcaagaacagattctcccgacgataaactgaggacttgccttggaaatggaatctggggaggcaggaatacaaggacagtgggggttggggaatggaattctacaggagactggagtcttgctttgtggatccttttggtctccgagtcctgcagtctgcaggtgctgcccctgggaacctgcgtgccacagccccgcctccctgcctggagcacactttagaattctgaagatgtgaagcctctgtctcactgaggattttaaaggtcaattatacttttgttgttcattagcatctttgtaaactataagacgtagttttaattaataaatattgcccccagattgtatttatatta

SEQ ID NO: 348546 - DNA, 3476 bp, Homo sapiens
gctgcggcccgaggacgcgacgcgagcccagttccggcgaggaggccgcgccagtgacagcgatggcggcggagtcggcgctccaagttgtggagaagctgcaggcgcgcctggccgcgaacccggaccctaagaagctattgaaatatttgaagaaactctccaccctgcctattacagtagacattcttgcggagactggggttgggaaaacagtaaatagcttgcgaaaacacgagcatgttggaagctttgccagggacctagtggcccagtggaagaagctggttcctgtggaacgaaatgctgagcctgatgaacaggactttgagaagagcaattcccgaaagcgccctcgggatgccctgcagaaggaggaggagatggagggggactaccaagaaacctggaaagccacggggagccgatcctatagccctgaccacaggcagaagaaacataggaaactctcggagctcgagagacctcacaaagtgtctcacggtcatgagaggagagatgagagaaagaggtgtcacagaatgtcaccaacttactcttcagaccctgagtcttctgattatggccatgttcaatcccctccatcttgtaccagtcctcatcagatgtacgtcgaccactacagatccctggaggaggaccaggagcccattgtttcacaccagaagcctgggaaaggccacagcaatgcctttcaggacagactcggggccagccaagaacgacacctgggtgaaccccatgggaaaggggttgtgagtcaaaacaaggagcacaaatcttcccacaaggacaaacgccccgtggatgccaagagtgatgagaaggcctctgtggtgagcagagagaaatcacacaaggccctctccaaagaggagaaccgaaggccaccctcaggggacaatgcaagggagaaaccgccctctagtggcgtaaagaaagagaaggacagagagggcagcagcctgaagaagaagtgtttgcctccctcagaggccgcttcagacaaccacctgaaaaagccaaagcacagagacccagagaaagccaaattggacaaaagcaagcaaggtctggacagctttgacacaggaaaaggagcaggagacctgttgcccaaggtaaaagagaagggttctaacaacctaaagactccagaagggaaagtcaaaactaatttggatagaaagtcactgggctccctccctaaagttgaggagacagatatggaggatgaattcgagcagccaaccatgtcttttgaaatcctacctcagctatgaccagccccggaagaaaaagaaaaagattgtgaaaacttcagccacggcacttggagataaaggacttaaaaaaaatgactctaaaagcactggtaaaaacttggactcagttcagaaattacccaaggtgaacaaaaccaagtcagagaagccggctggagctgatttagccaagctgagaaaggtgcctgatgtgttgccagtgttgccagacctcccgttacccgcgatacaggccaattaccgtccactgccttccctcgagctgatatcctccttccagccaaagcgaaaagcgttctcttcaccccaggaagaagaagaagctggatttactgggcgcagaatgaattccaagatgcaggtgtattctggttccaagtgtgcctatctccctaaaatgatgaccttgcaccagcaatgcatccgagtacttaaaaacaacatcgattcaatctttgaagtgggaggagtcccatactctgttcttgaacccgttttggagaggtgtacacctgatcagctgtatcgcatagaggaatacaatcatgtattaattgaagaaacagatcaattatggaaagttcattgtcaccgagactttaaggaagaaagacccgaagagtatgagtcgtggcgagagatgtacctgcggcttcaggacgcccgagagcagcggctacgagtactaacaaagaatatccagttcgcacatgccaataagcccaaaggccgacaagcaaagatggcctttgtcaactctgtggccaagccacctcgtgacgtccggaggaggcaggaaaagtttggaacgggaggagcagctgtccctgagaaaatcaagatcaagccagccccgtaccccatgggaagcagccatgcttccgccagtagcatcagctttaaccccagccctgaggagccggcctatgatggcccaagcaccagcagtgcccacttggcaccagtggtcagcagcactgtttcctatgatcctaggaaacccactgtgaagaaaattgccccaatgatggccaagacaattaaagctttcaagaacagattctcccgacgataaactgaggacttgccttggaaatggaatctggggaggcaggaatacaaggacagtgggggttggggaatggaattctacaggagactggagtcttgctttgtggatccttttggtctccgagtcctgcagtctgcaggtgctgcccctgggaacctgcgtgccacagccccgcctccctgcctggagcacactttagaattctgaagatgtgaagcctctgtctcactgaggattttaaaggtcaattatacttttgttgttcattagcatctttgtaaactataagacgtagttttaattaataaatattgcccccagattgtatttatattatcccccaggtttgtttttgttttttgtcctctaccacacatttagccttttatcttccaggtccttattaaaatcagatgaaagcctagtgaaagccagtctcctgccccagctcagctctgtgtggactctggtccagacagaggactgggcatctccagagcctgcacagtacctgctgcacgtagggcaaggaatgagcactagaccgcctgtccccaagggagcctcagtggggcgacagggtgctcggcggactccacctcaggccctccccactgttgctgtgcattcctgtgcaggtgcatctctttcttactaactggtatttattaagggaggtgctctgtaggtctggagcctttccctcatcctttttgcgagtccccacctttttgtttttttttttttctttgaggctcactagaggacgcagaaccttgggagattgatttgcacagaactccccacctcccacttttacaatttccagtttctgattgaaaattttagggtttctccccactgcccttccctatctttccttcctcagacctgaggaaaacccccgggggttttgtgccctgaggactttcgacctttacattccggctttatctttggttctggaatccttggaacgcagggtaagcggccagcctttggacacgcgggccggcttggaaggacactttctggcaaccctggtgttgaccgaatggtgcaggttccctcgtgtagggacttggcgcacctcggtg

SEQ ID NO: 348547 - DNA, 2815 bp, Homo sapiens
aacgctgcggagcctggactcgcggtctggtccgcgcctctcggagacgcggttactactctccggctggatatcagagcgtggacctttcgctttctcagtgaatccctttcaaaacagaataaagcctcgcgtcacctaagcatactcctgaaaacttaggttggaattgaaaaagaggcgggggcccggggttggaagtcgcagctaggtttccttttggccattaataggaagctattgaaatatttgaagaaactctccaccctgcctattacagtagacattcttgcggagactggggttgggaaaacagtaaatagcttgcgaaaacacgagcatgttggaagctttgccagggacctagtggcccagtggaagaagctggttcctgtggaacgaaatgctgagcctgatgaacaggactttgagaagagcaattcccgaaagcgccctcgggatgccctgcagaaggaggaggagatggagggggactaccaagaaacctggaaagccacggggagccgatcctatagccctgaccacaggcagaagaaacataggaaactctcggagctcgagagacctcacaaagtgtctcacggtcatgagaggagagatgagagaaagaggtgtcacagaatgtcaccaacttactcttcagaccctgagtcttctgattatggccatgttcaatcccctccatcttgtaccagtcctcatcagatgtacgtcgaccactacagatccctggaggaggaccaggagcccattgtttcacaccagaagcctgggaaaggccacagcaatgcctttcaggacagactcggggccagccaagaacgacacctgggtgaaccccatgggaaaggggttgtgagtcaaaacaaggagcacaaatcttcccacaaggacaaacgccccgtggatgccaagagtgatgagaaggcctctgtggtgagcagagagaaatcacacaaggccctctccaaagaggagaaccgaaggccaccctcaggggacaatgcaagggagaaaccgccctctagtggcgtaaagaaagagaaggacagagagggcagcagcctgaagaagaagtgtttgcctccctcagaggccgcttcagacaaccacctgaaaaagccaaagcacagagacccagagaaagccaaattggacaaaagcaagcaaggtctggacagctttgacacaggaaaaggagcaggagacctgttgcccaaggtaaaagagaagggttctaacaacctaaagactccagaagggaaagtcaaaactaatttggatagaaagtcactgggctccctccctaaagttgaggagacagatatggaggatgaattcgagcagccaaccatgtcttttgaaatcctacctcagctatgaccagccccggaagaaaaagaaaaagattgtgaaaacttcagccacggcacttggagataaaggacttaaaaaaaatgactctaaaagcactggtaaaaacttggactcagttcagaaattacccaaggtgaacaaaaccaagtcagagaagccggctggagctgatttagccaagctgagaaaggtgcctgatgtgttgccagtgttgccagacctcccgttacccgcgatacaggccaattaccgtccactgccttccctcgagctgatatcctccttccagccaaagcgaaaagcgttctcttcaccccaggaagaagaagaagctggatttactgggcgcagaatgaattccaagatgcaggtgtattctggttccaagtgtgcctatctccctaaaatgatgaccttgcaccagcaatgcatccgagtacttaaaaacaacatcgattcaatctttgaagtgggaggagtcccatactctgttcttgaacccgttttggagaggtgtacacctgatcagctgtatcgcatagaggaatacaatcatgtattaattgaagaaacagatcaattatggaaagttcattgtcaccgagactttaaggaagaaagacccgaagagtatgagtcgtggcgagagatgtacctgcggcttcaggacgcccgagagcagcggctacgagtactaacaaagaatatccagttcgcacatgccaataagcccaaaggccgacaagcaaagatggcctttgtcaactctgtggccaagccacctcgtgacgtccggaggaggcaggaaaagtttggaacgggaggagcagctgtccctgagaaaatcaagatcaagccagccccgtaccccatgggaagcagccatgcttccgccagtagcatcagctttaaccccagccctgaggagccggcctatgatggcccaagcaccagcagtgcccacttggcaccagtggtcagcagcactgtttcctatgatcctaggaaacccactgtgaagaaaattgccccaatgatggccaagacaattaaagctttcaagaacagattctcccgacgataaactgaggacttgccttggaaatggaatctggggaggcaggaatacaaggacagtgggggttggggaatggaattctacaggagactggagtcttgctttgtggatccttttggtctccgagtcctgcagtctgcaggtgctgcccctgggaacctgcgtgccacagccccgcctccctgcctggagcacactttagaattctgaagatgtgaagcctctgtctcactgaggattttaaaggtcaattatacttttgttgttcattagcatctttgtaaactataagacgtagttttaattaataaatattgcccccagattgtatttatatta

SEQ ID NO: 348548 - DNA, 1707 bp, Homo sapiens
gctgcggcccgaggacgcgacgcgagcccagttccggcgaggaggccgcgccagtgacagcgatggcggcggagtcggcgctccaagttgtggagaagctgcaggcgcgcctggccgcgaacccggaccctaagaagctattgaaatatttgaagaaactctccaccctgcctattacagtagacattcttgcggagactggggttgggaaaacagtaaatagcttgcgaaaacacgagcatgttggaagctttgccagggacctagtggcccagtggaagaagctggttcctgtggaacgaaatgctgagcctgatgaacaggactttgagaagagcaattcccgaaagcgccctcgggatgccctgcagaaggaggaggagatggagggggactaccaagaaacctggaaagccacggggagccgatcctatagccctgaccacaggcagaagaaacataggaaactctcggagctcgagagacctcacaaagtgtctcacggtcatgagaggagagatgagagaaagaggtgtcacagaatgtcaccaacttactcttcagaccctgagtcttctgattatggccatgttcaatcccctccatcttgtaccagtcctcatcagatgtacgtcgaccactacagatccctggaggaggaccaggagcccattgtttcacaccagaagcctgggaaaggccacagcaatgcctttcaggacagactcggggccagccaagaacgacacctgggtgaaccccatgggaaaggggttgtgagtcaaaacaaggagcacaaatcttcccacaaggacaaacgccccgtggatgccaagagtgatgagaaggcctctgtggtgagcagagagaaatcacacaaggccctctccaaagaggagaaccgaaggccaccctcaggggacaatgcaagggagaaaccgccctctagtggcgtaaagaaagagaaggacagagagggcagcagcctgaagaagaagtgtttgcctccctcagaggccgcttcagacaaccacctgaaaaagccaaagcacagagacccagagaaagccaaattggacaaaagcaagcaaggtctggacagctttgacacaggaaaaggagcaggagacctgttgcccaaggtaaaagagaagggttctaacaacctaaagactccagaagggaaagtcaaaactaatttggatagaaagtcactgggctccctccctaaagttgaggagacagatatggaggatgaattcgagcagccaaccatgtcttttgaaatcctacctcagctatgaccagccccggaagaaaaagaaaaagattgtgaaaacttcagccacggcacttggagataaaggacttaaaaaaaatgactctaaaagcactggtaaaaacttggactcagttcagaaattacccaaggtgaacaaaaccaagtcagagaagccggctggagctgatttagccaagctgagaaaggtgcctgatgtgttgccagtgttgccagacctcccgttacccgcgaggatccggagtgtctgtgagaaggcatgatggagaatcccaaggtcgagagcttaaagaacgcaggtggagggggattggagaatgccactcagtaagggaagggagaaatgtttcgctggatcgcagaaagtattcattgtagaaagtcctgggaaagcttgtatctgaggt

SEQ ID NO: 348549 - DNA, 571 bp, Homo sapiens
ccctccctaaagttgaggagacagatatggaggatgaattcgagcagccaaccatgtcttttgaaatcctacctcagctatgaccagccccggaagaaaaagaaaaagattgtgaaaacttcagccacggcacttggagataaaggacttaaaaaaaatgactctaaaagcactggtaaaaacttggactcagttcagaaattacccaaggtgaacaaaaccaagtcagagaagccggctggagctgatttagccaagctgagaaaggtaaccccttcagccccttggtggcttcccacccagagcacctggccctgcagagctcagaggattgccctgccactgttttccttagcttgcttttggggggcatgttgaatttcagtgtgcagtaatttcctctgggcttcactggttgtcagggtatatggtaccgcaaataagaattttctgcattattctcttgtgatgggctcatctgtatttatttcctgactgaggtggtgtcagacatgactgtggccccctccaacctggatcttcctgtgcaagatgtccagttaatgctccc

SEQ ID NO: 348550 - DNA, 421 bp, Homo sapiens
agactgattcagaactgtatgcaaagctcttatcttagtgcctaacacctgccctaatcactcttgttattaaagttctgaacttggtacgctttgctactgtgtgtcattagagatttggggcatagacacaaagtaatttagtgttaagatttgcagggtatgttgtaggaaggaagtattgcttgttgagtttctcaaagtagaaagccttatttctttagaaaaacgttagcctagttccagacccctctaacaattactttgtcaaattttaggagactggggttgggaaaacagtaaatagcttgcgaaaacacgagcatgttggaagctttgccagggacctagtggcccagtggaagaagctggttcctgtggaacggtaagaacatttctctttaggtttgttcaatttcat

SEQ ID NO: 348551 - DNA, 2647 bp, Homo sapiens
tgtatatgagatatttgatctttgcatcttgtggttaaactcaccatttctcatttgggttttcccagttttaagatttgagtatctttaagcataacctacttatcttcttcttaagaccttgttgtttctaactctgcatcttcacttctttggtgagttcagattctgtgactttgtccctcaagaagcaagatttagacctactttgtctgctttttcttttattttagaaatgctgagcctgatgaacaggactttgagaagagcaattcccgaaagcgccctcgggatgccctgcagaaggaggaggagatggagggggactaccaagaaacctggaaagccacggggagccgatcctatagccctgaccacaggcagaagaaacataggaaactctcggagctcgagagacctcacaaagtgtctcacggtcatgagaggagagatgagagaaagaggtgtcacagaatgtcaccaacttactcttcagaccctgagtcttctgattatggccatgttcaatcccctccatcttgtaccagtcctcatcagatgtacgtcgaccactacagatccctggaggaggaccaggagcccattgtttcacaccagaagcctgggaaaggccacagcaatgcctttcaggacagactcggggccagccaagaacgacacctgggtgaaccccatgggaaaggggttgtgagtcaaaacaaggagcacaaatcttcccacaaggacaaacgccccgtggatgccaagagtgatgagaaggcctctgtggtgagcagagagaaatcacacaaggccctctccaaagaggagaaccgaaggccaccctcaggggacaatgcaagggagaaaccgccctctagtggcgtaaagaaagagaaggacagagagggcagcagcctgaagaagaagtgtttgcctccctcagaggccgcttcagacaaccacctgaaaaagccaaagcacagagacccagagaaagccaaattggacaaaagcaagcaaggtctggacagctttgacacaggaaaaggagcaggagacctgttgcccaaggtaaaagagaagggttctaacaacctaaagactccagaagggaaagtcaaaactaatttggatagaaagtcactgggctccctccctaaagttgaggagacagatatggaggatgaattcgagcagccaaccatgtcttttgaaatcctacctcagctatgaccagccccggaagaaaaagaaaaagattgtgaaaacttcagccacggcacttggagataaaggacttaaaaaaaatgactctaaaagcactggtaaaaacttggactcagttcagaaattacccaaggtgaacaaaaccaagtcagagaagccggctggagctgatttagccaagctgagaaaggtgcctgatgtgttgccagtgttgccagacctcccgttacccgcgatacaggccaattaccgtccactgccttccctcgagctgatatcctccttccagccaaagcgaaaagcgttctcttcaccccaggaagaagaagaagctggatttactgggcgcagaatgaattccaagatgcaggtgtattctggttccaagtgtgcctatctccctaaaatgatgaccttgcaccagcaatgcatccgagtacttaaaaacaacatcgattcaatctttgaagtgggaggagtcccatactctgttcttgaacccgttttggagaggtgtacacctgatcagctgtatcgcatagaggaatacaatcatgtattaattgaagaaacagatcaattatggaaagttcattgtcaccgagactttaaggaagaaagacccgaagagtatgagtcgtggcgagagatgtacctgcggcttcaggacgcccgagagcagcggctacgagtactaacaaagaatatccagttcgcacatgccaataagcccaaaggccgacaagcaaagatggcctttgtcaactctgtggccaagccacctcgtgacgtccggaggaggcaggaaaagtttggaacgggaggagcagctgtccctgagaaaatcaagatcaagccagccccgtaccccatgggaagcagccatgcttccgccagtagcatcagctttaaccccagccctgaggagccggcctatgatggcccaagcaccagcagtgcccacttggcaccagtggtcagcagcactgtttcctatgatcctaggaaacccactgtgaagaaaattgccccaatgatggccaagacaattaaagctttcaagaacagattctcccgacgataaactgaggacttgccttggaaatggaatctggggaggcaggaatacaaggacagtgggggttggggaatggaattctacaggagactggagtcttgctttgtggatccttttggtctccgagtcctgcagtctgcaggtgctgcccctgggaacctgcgtgccacagccccgcctccctgcctggagcacactttagaattctgaagatgtgaagcctctgtctcactgaggattttaaaggtcaattatacttttgttgttcattagcatctttgtaaactataagacgtagttttaattaataaatattgcccccagattgtatttatatta

SEQ ID NO: 348552 - DNA, 719 bp, Homo sapiens
gtggcgttctagacgatcccttataggtcgcaggactgatgatctcctcgatcacgtctccaggtgaccaggcccaggacctcgtagaaggggtcgccttcaccctcgttgttcaccttcgtgcacgatggccaggtgggacttccctgtgtgggggaggacactcatggaacagcttgctgggccccccccagtttgattcatctcccctggtataggcccaccaaggacacggctaacgttcatgctcctacaacgtgccaggcacagagccacactcttttctaggtttttacttaagactccctgcgaacctatgatcataaattgccccaatgatggccaagacaattaaagctttcaagaacagattctcccgacgataaactgaggacttgccttggaaatggaatctggggaggcaggaatacaaggacagtgggggttggggaatggaattctacaggagactggagtcttgctttgtggatccttttggtctccgagtcctgcagtctgcaggtgctgcccctgggaacctgcgtgccacagccccgcctccctgcctggagcacactttagaattctgaagatgtgaagcctctgtctcactgaggattttaaaggtcaattatacttttgttgttcattagcatctttgtaaactataagacgtagttttaattaataaatattgcccccagattgtatttatatta

SEQ ID NO: 348553 - DNA, 269 bp, Homo sapiens
tatactgtaggattcatgtcagcatcctattcctcctcttaaggaacggctggtctcccttaaccatggtggtctgagagaatggcattttcacagcagggtttctttttggtgttacagttctttgctgtccatgttgttcttgatcactgcagggtagtctgacctgggctgtttgctcctgccttacacctgtataatgacatggaatgttctctgtttctgtatgatgcatgctctgatactgtggtgtctgagtggatttgttc

SEQ ID NO: 348554 - DNA, 289 bp, Homo sapiens
cccctttcttccatggaacaccattttttcttgaagaatgattgaaggacaaacttgttttcatacttgggtgttgacaggcattttcttgcaaataaacaagtaaacctgtcacagcaagtacaactgacattatttactgctaatcataaaattcaagctttcaagcaaaaatagaaattttggaaaactcacatatattatcaggtgcttgacagagcacacagtaggataatgaacttcattttcccagttcgttttgttttgttttgttttgagctggagtctg

SEQ ID NO: 348555 - DNA, 557 bp, Homo sapiens
tgctagaggtccctcaacaaaacaaattaggatattttcctccaatgtccaatgagctatcactgaaggacagcactccacagtgggagcccttagatccaatgctggaatttcctttatgtaagaaccttcatttctccacaatcaactttgatcaagttgctatgtctggaacaaagctctcagataattgtttatatacagtctcaaagtcatcagtctaggacatgagaggttcagcagtgaggataaaggaagaacttggtcaagcagactggggctgctgggtagtaggataagacaggttaaggcagaagagaactttcaaaacgtctacagagcagacaggatgtggctcaaagggttaccagagttgacctcttgcggctagtctctatattctccttcaaacaagccttgaccaaaggatgggccctcatttcataagcctgctagacaggagagttcaggaaaagagctgaattcttgggagctcaggacacagacccctggcttcactcttcattgctgatgttcctcaagaagagataggcatc

SEQ ID NO: 348556 - DNA, 425 bp, Homo sapiens
ggaatgatttttttcccttaatttttcaaataagtttttcccagactgttagaagaagatgatgatggtttgaccacttgggtggtgagattgggaaggattattgttctttattaaggaatatactatttattaagtaaatagtacttgttttactattttttaagcaggagaaaatttgtgaatggaagcaaaaaagccactttattttcagcctgaataagaaattaacctttgatgtcatgaaattctcttcccataaaattgataaataggaaggacaaacaagttctttttaaaaccaaaaaagaaagaatagcaaaatagaatttgttcttctttcttcatggctaggtagtctggtctgattcatagacctaaaaaagtcacataaaaacaacccaagaagtaaaagtaagcagaaa

SEQ ID NO: 348557 - DNA, 686 bp, Homo sapiens
tgtagagatggagtcttgctatgttgtccaggcaggtctcctgggctcatgcgctcctcctgacttggcctcctaaagtgctaggattagaggcgtgagttgttgagaccctcccatcctccaacttttatctcacaatctattgtgcctcctttggggacagacagtggcttcctggatggacagtggcttcccctcaggtacctggggaatttgggggcctcctccccacttaagaccagattagaaaagagagactccacctcacattctagagcgccatccccacaaatgaacaaatgagtgaatgggatgcctgttgaaaaggcaggatatagacagcctgggttcaattttagcttcaccacctcccagctgtgtgacctcagctgatttgcatgacctgtctgagcctcagcatccccaccctgtaaaatgggaatccacacagcatcccctagcccaaaggagcagggagggttgtgagaggctcgtgggtgaaaagcacagagcagagcatgggccccagtgagccctgatccatgaggtctgctagcataataattattctttccatgtgctgcacagagtggccccggaggccttagcagaaataacagaagctcccggccctttaccgtggtgatgatggtcctgaccactcattgtgggagggtgctatgggg

SEQ ID NO: 348558 - DNA, 352 bp, Homo sapiens
aacatggggagggattaacaagagatggcattaagaccttggataataaacctagttgcatctgctggtcatggtagagctgctgtggtcccttgcagcccacagtggccctgcctggaaacctcaagcaggatgtgcatcttctgcctgcctactgatctccatcacttggagtaccccaaaggcctctttttcacctcacttgcccagctgtcctagcggcataggatggttgtgtggtagaccagaggcctgttgtgtatatttttgttgggttatagccacccctgtgtatctacatgcacaagggcagagttgtagttgtggcagaagctgtagcctacaaagcctg

SEQ ID NO: 348559 - DNA, 995 bp, Homo sapiens
ctcttggagggaagctgtgttgagagaggaggctgggaagagggggacgtcctccttcaacttctttcaagttcgtatccctgagcccctgagggatccagtggcattctgggagaatgtcactgcggagtcagtgtgtagcagtttgtacttgcaacagaagcagctttagaagtacattaaaagagcccttgcggaagatgaaagtttgctgagcagatggaatgggagaatgctcttcaattcctgacaaaattatgggcagactgtttgctgacgaagcaatgctggggtgaaaacaacacggctagaagctcattctgaaatggggagcactgaaattttggaaaaggagaccccagaaaatctcagtaatggtaccagcagcaatgtggaagcagccaaaaggttggccaaacgcctttatcagctggacagattcaaaagatcagatgttgcaaaacaccttggcaagaacaacgaatttagcaaactagttgcagaagaatatctgaagttttttgattttacaggaatgacgctggatcagtcactcagagtctcgctctgtcacccaggctggagtgcagtagcaccatcttggctcactgcaacctccacctcccaggttcaagcagttctcctgaatcagcctcccgaataactgggactacaggtatttctttaaagcattctctcttgtgggagaaactcaagaacgagagagagttttaatacacttctccaatagatatttttattgtaacccagataccattgcttcacaagatggagtccattgccttacctgtgcaataatgcttcttaataccgatctacatggccacgtaagtgtggatttgtgaaacttagatccaaaacatgtcgggcttatctctgcttttatgttcaaacacatttattttctgcctccccgtttcccattctctacatggttcccatggcaggtgaataaaaagaaatctttgaaaaaa

SEQ ID NO: 348560 - DNA, 664 bp, Homo sapiens
gaaaggagaatcttaactctacttggagaacatttttatatgactttaacctaacagtaatgtgtctttggaggctcatatttacttgtctcccattgtaagcaatgcttgtctggatatccttgtactatgtatagatcactaattattgctgtagtgcaaagccctagaagccgatttgttgtatcaaaagacattgtttgaaggctttacatatctactaccaaactgtcctccagagaggtaagaacaacttatcaacagtggagtccagttctgtgcattgaggttctttctataaattattcttatccattttttgtttcttaaaacaggactaattgtacctagcacagtactgttttcataggttctgagtgtatcctattagtgataataaggtggagtccaacagtgaaaagcgaattcatgcttttttttcttgtatctttctttagatggagtccattgccttacctgtgcaataatgcttcttaataccgatctacatggccacgtaagtgtggatttgtgaaacttagatccaaaacatgtcgggcttatctctgcttttatgttcaaacacatttattttctgcctccccgtttcccattctctacatggttcccatggcaggtgaataaaaagaaatctttgaaaaaa

SEQ ID NO: 348561 - DNA, 7511 bp, Homo sapiens
ctcttggagggaagctgtgttgagagaggaggctgggaagagggggacgtcctccttcaacttctttcaagttcgtatccctgagcccctgagggatccagtggcattctgggagaatgtcactgcggagtcagtgtgtagcagtttgtacttgcaacagaagcagctttagaagtacattaaaagagcccttgcggaagatgaaagtttgctgagcagatggaatgggagaatgctcttcaattcctgacaaaattatgggcagactgtttgctgacgaagcaatgctggggtgaaaacaacacggctagaagctcattctgaaatggggagcactgaaattttggaaaaggagaccccagaaaatctcagtaatggtaccagcagcaatgtggaagcagccaaaaggttggccaaacgcctttatcagctggacagattcaaaagatcagatgttgcaaaacaccttggcaagaacaacgaatttagcaaactagttgcagaagaatatctgaagttttttgattttacaggaatgacgctggatcagtcactcaggtatttctttaaagcattctctcttgtgggagaaactcaagaacgagagagagttttaatacacttctccaatagatatttttattgtaacccagataccattgcttcacaagatggagtccattgccttacctgtgcaataatgcttcttaataccgatctacatggccacaatattggaaagaagatgacctgtcaggagttcattgcaaatctgcaaggggtaaatgagggtgttgatttctccaaggatctgctgaaagctctgtacaactcaatcaagaatgagaagcttgaatgggcagtagatgatgaagagaaaaaaaagtctccctcagaaagtactgaggagaaagctaacggaacacatccaaagaccatcagtcgtattggaagtactactaacccatttttggacattcctcatgatccaaatgctgctgtgtacaaaagtggattcttggctcggaaaattcatgcagatatggatggaaagaagactccaagaggaaaacgaggatggaaaaccttttatgctgtactgaagggaacagttctttacttgcaaaaggatgaatacaagccagaaaaggccttgtctgaagaggacttgaaaaacgctgtgagtgtgcaccacgcattggcatccaaggccacggactatgagaagaaaccaaacgtgtttaaacttaaaactgccgactggagggtcttgctttttcaaactcagagcccagaggaaatgcaagggtggataaacaaaatcaattgtgtggcagctgtattttctgcaccaccatttccagcagcaatcggctctcagaagaagtttagccgcccacttctgcctgccactacaacaaaactgtctcaggaggagcaactgaagtcacatgaaagtaagctgaagcagatcaccaccgagctggccgagcaccgctcatatccccccgacaagaaggtcaaagccaaggacgtcgatgagtacaaactgaaagaccactatctggagtttgagaaaacccgctatgaaatgtatgtcagcattctcaaggaaggaggcaaagagctactgagtaacgatgaaagcgaggctgcaggactgaagaagtcgcactcgagtccttcgctgaacccggatacttctccaatcactgccaaagtcaagcgtaacgtgtcagagaggaaggatcaccgacctgaaacaccaagcattaagcaaaaagttacttagagtccatctgcggccaggaagtgctggtcatggagcaaaatagggtttttcaagatctttctggtaatccgtgaatatatttaaaaaaaaaaaagtctgtgacaaaacggtgcattagtaattttttctattgtatatttttgttagtttctgtacagattgtctttgctcttgatttcttttgctttgatgatttttgcaacttgatagctaatgcaccttttctgtgaggaggaggggatcgtgatttcagaatgaattatgtatcccttctcttttggttttctcttgtttgcagtctgctcagttgttttatgtattctcatatcaactgttaaacttttttttaaggttaaagaatttaatccattgtgaaacacttaactggacaaactgtagttttagtaaattctagctggagttaatatacgcctttatatgtgaaatcttgcccagtcacagaggtagaattgagcactcacagatgctccagtaagaatcacagtgctgggaatctagttgctccaatatgaggcagcttcatgtgcagcttagcacttgttgttgagatcggaccctgctggaagcagggaaaagaagcgtgaagatcgtaggattgagaacttagggaagcacattagcttgcttgaagtgctgattccatttcagccaagcaagggaaagaggaagtggagtcattttgcctttgaaggctgaggaaagattgatacccagttaattttgtttgctaaaggatgggggcaataatcggcccttgaggagctgcagcagtaggcatgtgctcagtctgcaggaattgttacctcactcccacagggtctagactagaaatccatcatctctatcgttgatatccttccatccaggaatagatttttcttactctacatatgtgtgtgtgcgtgcgtgtgtgtgcgtgtgtgggcatggggttgtgtcctggttgtgatattgaggtcttccttcctaacaaattaatactaaaatgaaacagcttttcttgtgtccttaagacaaaataaggaaggaaaacgtagctgcagttgtccacgatggatattggttctttaaaatatatctgaaagtagtagtcagaatgaattatggttggaaaactgaggaatcttctggttgcaggtgcaaagtgactttgtttattcttgtctcagtctccttgatagccacttcactctgctactactcaactttctcctaaaaatacttcatctattttcagtcctttctttctgtctactcaaaatggttctattaactttgcagtcatgagcttgttccagttacagtccctttgaagttcagggtgataaacagaatattcttctgtagaggaagagaaaggagtgaaagtttagcccactgagacctagagctttgtgatttcctaaccttgaaactctgtaatccctaaagttaaaatctccgcaagtggcacaacttcagaactaatagtatcactttgatttttctttttcctcccttagaaagtttctctagttctatagtttatttgttgaaggtactatgaccaaagaatcagctgctctacaggaatagcatggttccagtgaattagagaaaacctgctgtaaagccatggtagtgtctaagtggtatgttattatgatgtactagcatttatttacagaattatttattaacgtttacttccttcccctctgtaaatgtccatgactattgcccagagaaggcttacccctctctagggttgcagttgctttctttgtaataagtattttgccacacctgtaaaaaaaaaaaacctcacttttaactctctgccttgtttgggtaaaggcagtaactaagtttatgtttcagaactgcaaaacaaacaggatagttaccaatatggcccatgtgtcagattgatttttgtagcctctcactgaatccaacatatccacaagcaagttatctgtctttctacctgataatctaaattatcaggatatttgttttctgcctaaatgtttatactaagccgaggggagagaggtacctagaccatgtcatctacgagcttcagtaactaaagaaaaaggaacttccctgagtggcttgaatgtgtttgcccacagtctatatctatgtatatagaatgtctgtatgtattttacttatttaatatacattgaatggtaccttgctacagtatttctgacatttagagtagtgttgaaatactcggctagcatcagcaccactatagcactgtccgtgtcatatgagtcactaatattaactccagggacttctggataggctaatagatcattggatacgaagggctcttttgaagcttcagtataccatgtttgcatagtttatctttaaaaacaactttaaaggttcttttgtgagccaggatctcagactgccgtagcatgatgctgtccatctttagcgcatgggctgagaacacctcttccctgaggcttctgaaggttgctgtctgtcatgagtgcatgaaggaggccaagagtttatgctatgggaggaaacagtcactgatttgcctagattctgagagtctggcccatagccaaccacattttcctttgggataatttatttcctgtggcatctagccagaagaaattgaggatgtttcctttcacagctgctccaagcctgttgcccaattcacggtacaagggagcaccccttccctttcctctgaaggtacgccacccacctccgtcgcccacctcagcgcccaggagccttgggacttccttccatatgataaatcattcttcttcacgtcaatacacttcatattaatttctagtacagaaaatcttgacagctatcagaatgccttggtcatagtgttgttggcaaaattgaccatacaggtggcccatgtataaaatctgaattttaggggtttgtccccacctcgcatgctggcttttacagggaggtgtctgggattcctcattagcaatcaaaacttaattactgggatgcagagtccttactttatcgccagcccgtaggcatttctgaagtgcacttttttgaaacatcattttgctaactctcagcagtgtctaattaaactgagcaatacttttgtgaattttaattaatctcagcaaaaccatgatgggagagagtcctctgatggaaatgtagtccctggattatgtgtaacctttttattgctcttagatgcagaggatagaaagcattttttggtgcagtggtcttgtggcaaacacaagaccctctatgcgtctccaactgttatcctaatctagaaaatgaggactggcccctgggcaaaagtgacatgaggaatttactctggaagaggaaaatctgggtggctttccaaggctaagataggtttgtatttcaccctgtggccaagctacagaacttctgagattgtggaagaatttttgcaaccagcagggaaagaggcctcttactgcctaaacacaaagttacactgagcttttctactgtcctttgcctattgctccctctatcatgtaaagatctgggaaggatgagaggcagggcctgcttgtcatgagctgcactcttttctttttaactaatcattgacaattggaagaaaattgacgttaaagaagtttctccattgtcttactaacaaaaccttttgggtttcattaattgtccttgaaattgagttcctttggcatttttccttgcagtcatcagttaagcatgttgcatcctgaattcacagaagtttagctttgcaggtttgaatctctgtaatttaactcccgtggacttggtcgagttttcagcaggttgggagccacctctcttcatttcagcagtgagtcatcccttgacttttcaaatgacagaattttttccaattgtaaaattagcactgtaaaacaaagaaccaaagtggcatcctaagagttgttaaacctgaagtctagtttatgaggaattgtccaagttggagtttaaatagtatctgcttttgtctcaaagcatctaagttattctgacagaaaatggtaagtcagctttgcaggcagatgcgcctctgggcctcctaccttgctccacagctttctggccatcttgtctcccaggccatgccactgctctgccacatgtcagcaaatttctttccaccagtcttatagcatcttacatgatcaaatcatcacagaataaccccgtgatagattattgatagcaatagagaggggcggctttgtcactgatttttctctcagattccttttccatctctcatccataaaggaaggactgaaatccaaaggcattctccttttgtacctacagtatccagaacccacgtgggcagccttctgcttatgacaataattggcccattgcatgcagagagaatgtcttcatagagagaatgtcattaaatacttgaatctgcatgacagtttgacttgaatgcaacagcaggaaaattttgcaagttacataattgtatatacagtaggttttcttaagtctcttcggttcatcctttgtaatttgtgtgtgtatctgtagtattgcaggcttttggagactattcttacaggcagtatgtcagtcatcaaagaaaatgctgtcacctgccattgttgtatttgtgggtatttatagttgtatgtatgtaaatgcatcagtgtgtagattgcatatcagtgtatggtacatgtacatcaaaattatttttgtccttaatcagtgtgatatgaaaagcaagtacaacctcataggactgattatataatgaagttgttgagagtatatatagtggtattgttttattaaacttaaactcaaataatattttgattaaaatttttaataagactttatgctagaaaattctttgagctttgaatcaccagggcaaaaatgactttcaactaaccttgtgaatcttttgcagtgtactgtgtgcaataccaagggcatagctccctgtaatttgggaaatacagaaagaaaaaaaaaaaaaaaaaaaaggcagcctgtgcagtcttagtaactttagtattaagagcacttaaagtcaaactgacaattttgggcttattacaaaatgtgatgctttaaagcacacgttctttattgttgttgtaattagtccataaaaaatatagctttcggaagaattaaatacccaccatatcatttatgtatttgtgtatgttttacgggagatcaaaccactctcgtggtgccgcatccgtactcgcttgacttggaagaaatatcacaagcactaaagtatatcagggcatcccaggattgggtactgtatcctaggtttgcagttgcagaaattagcatctagtgtcacaggtaaaagaatttcaggaccaggtttaaactttattttaaatatttttatacttaggtctctttttcctgcctctccccaaagaagagccactggccttagttgtttgagcttactgcttatattatagagtgtaaataggtaactagagactaaaattttattaaccagcatgtttggtatatttaaagcagtgactgagtgtgtttgagtgagtggctgagtgcagtgtcttttgtttaaacacactgcctcgtgtctttgtagctgattcagagagtttgaattgtggggtgggagactaacttcagctccagg

SEQ ID NO: 348562 - DNA, 7346 bp, Homo sapiens
tcggcagtcactgaacttgggagctgaagaatactggacggggcttcggagaggaaggatggtccaggcgcaccccagggttgcgatgggctcttcttggtgtctgtatggttgctgcaatgctggggtgaaaacaacacggctagaagctcattctgaaatggggagcactgaaattttggaaaaggagaccccagaaaatctcagtaatggtaccagcagcaatgtggaagcagccaaaaggttggccaaacgcctttatcagctggacagattcaaaagatcagatgttgcaaaacaccttggcaagaacaacgaatttagcaaactagttgcagaagaatatctgaagttttttgattttacaggaatgacgctggatcagtcactcaggtatttctttaaagcattctctcttgtgggagaaactcaagaacgagagagagttttaatacacttctccaatagatatttttattgtaacccagataccattgcttcacaagatggagtccattgccttacctgtgcaataatgcttcttaataccgatctacatggccacaatattggaaagaagatgacctgtcaggagttcattgcaaatctgcaaggggtaaatgagggtgttgatttctccaaggatctgctgaaagctctgtacaactcaatcaagaatgagaagcttgaatgggcagtagatgatgaagagaaaaaaaagtctccctcagaaagtactgaggagaaagctaacggaacacatccaaagaccatcagtcgtattggaagtactactaacccatttttggacattcctcatgatccaaatgctgctgtgtacaaaagtggattcttggctcggaaaattcatgcagatatggatggaaagaagactccaagaggaaaacgaggatggaaaaccttttatgctgtactgaagggaacagttctttacttgcaaaaggatgaatacaagccagaaaaggccttgtctgaagaggacttgaaaaacgctgtgagtgtgcaccacgcattggcatccaaggccacggactatgagaagaaaccaaacgtgtttaaacttaaaactgccgactggagggtcttgctttttcaaactcagagcccagaggaaatgcaagggtggataaacaaaatcaattgtgtggcagctgtattttctgcaccaccatttccagcagcaatcggctctcagaagaagtttagccgcccacttctgcctgccactacaacaaaactgtctcaggaggagcaactgaagtcacatgaaagtaagctgaagcagatcaccaccgagctggccgagcaccgctcatatccccccgacaagaaggtcaaagccaaggacgtcgatgagtacaaactgaaagaccactatctggagtttgagaaaacccgctatgaaatgtatgtcagcattctcaaggaaggaggcaaagagctactgagtaacgatgaaagcgaggctgcaggactgaagaagtcgcactcgagtccttcgctgaacccggatacttctccaatcactgccaaagtcaagcgtaacgtgtcagagaggaaggatcaccgacctgaaacaccaagcattaagcaaaaagttacttagagtccatctgcggccaggaagtgctggtcatggagcaaaatagggtttttcaagatctttctggtaatccgtgaatatatttaaaaaaaaaaaagtctgtgacaaaacggtgcattagtaattttttctattgtatatttttgttagtttctgtacagattgtctttgctcttgatttcttttgctttgatgatttttgcaacttgatagctaatgcaccttttctgtgaggaggaggggatcgtgatttcagaatgaattatgtatcccttctcttttggttttctcttgtttgcagtctgctcagttgttttatgtattctcatatcaactgttaaacttttttttaaggttaaagaatttaatccattgtgaaacacttaactggacaaactgtagttttagtaaattctagctggagttaatatacgcctttatatgtgaaatcttgcccagtcacagaggtagaattgagcactcacagatgctccagtaagaatcacagtgctgggaatctagttgctccaatatgaggcagcttcatgtgcagcttagcacttgttgttgagatcggaccctgctggaagcagggaaaagaagcgtgaagatcgtaggattgagaacttagggaagcacattagcttgcttgaagtgctgattccatttcagccaagcaagggaaagaggaagtggagtcattttgcctttgaaggctgaggaaagattgatacccagttaattttgtttgctaaaggatgggggcaataatcggcccttgaggagctgcagcagtaggcatgtgctcagtctgcaggaattgttacctcactcccacagggtctagactagaaatccatcatctctatcgttgatatccttccatccaggaatagatttttcttactctacatatgtgtgtgtgcgtgcgtgtgtgtgcgtgtgtgggcatggggttgtgtcctggttgtgatattgaggtcttccttcctaacaaattaatactaaaatgaaacagcttttcttgtgtccttaagacaaaataaggaaggaaaacgtagctgcagttgtccacgatggatattggttctttaaaatatatctgaaagtagtagtcagaatgaattatggttggaaaactgaggaatcttctggttgcaggtgcaaagtgactttgtttattcttgtctcagtctccttgatagccacttcactctgctactactcaactttctcctaaaaatacttcatctattttcagtcctttctttctgtctactcaaaatggttctattaactttgcagtcatgagcttgttccagttacagtccctttgaagttcagggtgataaacagaatattcttctgtagaggaagagaaaggagtgaaagtttagcccactgagacctagagctttgtgatttcctaaccttgaaactctgtaatccctaaagttaaaatctccgcaagtggcacaacttcagaactaatagtatcactttgatttttctttttcctcccttagaaagtttctctagttctatagtttatttgttgaaggtactatgaccaaagaatcagctgctctacaggaatagcatggttccagtgaattagagaaaacctgctgtaaagccatggtagtgtctaagtggtatgttattatgatgtactagcatttatttacagaattatttattaacgtttacttccttcccctctgtaaatgtccatgactattgcccagagaaggcttacccctctctagggttgcagttgctttctttgtaataagtattttgccacacctgtaaaaaaaaaaaacctcacttttaactctctgccttgtttgggtaaaggcagtaactaagtttatgtttcagaactgcaaaacaaacaggatagttaccaatatggcccatgtgtcagattgatttttgtagcctctcactgaatccaacatatccacaagcaagttatctgtctttctacctgataatctaaattatcaggatatttgttttctgcctaaatgtttatactaagccgaggggagagaggtacctagaccatgtcatctacgagcttcagtaactaaagaaaaaggaacttccctgagtggcttgaatgtgtttgcccacagtctatatctatgtatatagaatgtctgtatgtattttacttatttaatatacattgaatggtaccttgctacagtatttctgacatttagagtagtgttgaaatactcggctagcatcagcaccactatagcactgtccgtgtcatatgagtcactaatattaactccagggacttctggataggctaatagatcattggatacgaagggctcttttgaagcttcagtataccatgtttgcatagtttatctttaaaaacaactttaaaggttcttttgtgagccaggatctcagactgccgtagcatgatgctgtccatctttagcgcatgggctgagaacacctcttccctgaggcttctgaaggttgctgtctgtcatgagtgcatgaaggaggccaagagtttatgctatgggaggaaacagtcactgatttgcctagattctgagagtctggcccatagccaaccacattttcctttgggataatttatttcctgtggcatctagccagaagaaattgaggatgtttcctttcacagctgctccaagcctgttgcccaattcacggtacaagggagcaccccttccctttcctctgaaggtacgccacccacctccgtcgcccacctcagcgcccaggagccttgggacttccttccatatgataaatcattcttcttcacgtcaatacacttcatattaatttctagtacagaaaatcttgacagctatcagaatgccttggtcatagtgttgttggcaaaattgaccatacaggtggcccatgtataaaatctgaattttaggggtttgtccccacctcgcatgctggcttttacagggaggtgtctgggattcctcattagcaatcaaaacttaattactgggatgcagagtccttactttatcgccagcccgtaggcatttctgaagtgcacttttttgaaacatcattttgctaactctcagcagtgtctaattaaactgagcaatacttttgtgaattttaattaatctcagcaaaaccatgatgggagagagtcctctgatggaaatgtagtccctggattatgtgtaacctttttattgctcttagatgcagaggatagaaagcattttttggtgcagtggtcttgtggcaaacacaagaccctctatgcgtctccaactgttatcctaatctagaaaatgaggactggcccctgggcaaaagtgacatgaggaatttactctggaagaggaaaatctgggtggctttccaaggctaagataggtttgtatttcaccctgtggccaagctacagaacttctgagattgtggaagaatttttgcaaccagcagggaaagaggcctcttactgcctaaacacaaagttacactgagcttttctactgtcctttgcctattgctccctctatcatgtaaagatctgggaaggatgagaggcagggcctgcttgtcatgagctgcactcttttctttttaactaatcattgacaattggaagaaaattgacgttaaagaagtttctccattgtcttactaacaaaaccttttgggtttcattaattgtccttgaaattgagttcctttggcatttttccttgcagtcatcagttaagcatgttgcatcctgaattcacagaagtttagctttgcaggtttgaatctctgtaatttaactcccgtggacttggtcgagttttcagcaggttgggagccacctctcttcatttcagcagtgagtcatcccttgacttttcaaatgacagaattttttccaattgtaaaattagcactgtaaaacaaagaaccaaagtggcatcctaagagttgttaaacctgaagtctagtttatgaggaattgtccaagttggagtttaaatagtatctgcttttgtctcaaagcatctaagttattctgacagaaaatggtaagtcagctttgcaggcagatgcgcctctgggcctcctaccttgctccacagctttctggccatcttgtctcccaggccatgccactgctctgccacatgtcagcaaatttctttccaccagtcttatagcatcttacatgatcaaatcatcacagaataaccccgtgatagattattgatagcaatagagaggggcggctttgtcactgatttttctctcagattccttttccatctctcatccataaaggaaggactgaaatccaaaggcattctccttttgtacctacagtatccagaacccacgtgggcagccttctgcttatgacaataattggcccattgcatgcagagagaatgtcttcatagagagaatgtcattaaatacttgaatctgcatgacagtttgacttgaatgcaacagcaggaaaattttgcaagttacataattgtatatacagtaggttttcttaagtctcttcggttcatcctttgtaatttgtgtgtgtatctgtagtattgcaggcttttggagactattcttacaggcagtatgtcagtcatcaaagaaaatgctgtcacctgccattgttgtatttgtgggtatttatagttgtatgtatgtaaatgcatcagtgtgtagattgcatatcagtgtatggtacatgtacatcaaaattatttttgtccttaatcagtgtgatatgaaaagcaagtacaacctcataggactgattatataatgaagttgttgagagtatatatagtggtattgttttattaaacttaaactcaaataatattttgattaaaatttttaataagactttatgctagaaaattctttgagctttgaatcaccagggcaaaaatgactttcaactaaccttgtgaatcttttgcagtgtactgtgtgcaataccaagggcatagctccctgtaatttgggaaatacagaaagaaaaaaaaaaaaaaaaaaaaggcagcctgtgcagtcttagtaactttagtattaagagcacttaaagtcaaactgacaattttgggcttattacaaaatgtgatgctttaaagcacacgttctttattgttgttgtaattagtccataaaaaatatagctttcggaagaattaaatacccaccatatcatttatgtatttgtgtatgttttacgggagatcaaaccactctcgtggtgccgcatccgtactcgcttgacttggaagaaatatcacaagcactaaagtatatcagggcatcccaggattgggtactgtatcctaggtttgcagttgcagaaattagcatctagtgtcacaggtaaaagaatttcaggaccaggtttaaactttattttaaatatttttatacttaggtctctttttcctgcctctccccaaagaagagccactggccttagttgtttgagcttactgcttatattatagagtgtaaataggtaactagagactaaaattttattaaccagcatgtttggtatatttaaagcagtgactgagtgtgtttgagtgagtggctgagtgcagtgtcttttgtttaaacacactgcctcgtgtctttgtagctgattcagagagtttgaattgtggggtgggagactaacttcagctccagg

SEQ ID NO: 348563 - DNA, 7339 bp, Homo sapiens
cggccgcggcgtaggcgcacgtccggcgggctcctggagcctggaggaggccgaggggaccatgtccgggaggcgcttccacctctccaccaccgaccgcgtcatcaaagcaatgctggggtgaaaacaacacggctagaagctcattctgaaatggggagcactgaaattttggaaaaggagaccccagaaaatctcagtaatggtaccagcagcaatgtggaagcagccaaaaggttggccaaacgcctttatcagctggacagattcaaaagatcagatgttgcaaaacaccttggcaagaacaacgaatttagcaaactagttgcagaagaatatctgaagttttttgattttacaggaatgacgctggatcagtcactcaggtatttctttaaagcattctctcttgtgggagaaactcaagaacgagagagagttttaatacacttctccaatagatatttttattgtaacccagataccattgcttcacaagatggagtccattgccttacctgtgcaataatgcttcttaataccgatctacatggccacaatattggaaagaagatgacctgtcaggagttcattgcaaatctgcaaggggtaaatgagggtgttgatttctccaaggatctgctgaaagctctgtacaactcaatcaagaatgagaagcttgaatgggcagtagatgatgaagagaaaaaaaagtctccctcagaaagtactgaggagaaagctaacggaacacatccaaagaccatcagtcgtattggaagtactactaacccatttttggacattcctcatgatccaaatgctgctgtgtacaaaagtggattcttggctcggaaaattcatgcagatatggatggaaagaagactccaagaggaaaacgaggatggaaaaccttttatgctgtactgaagggaacagttctttacttgcaaaaggatgaatacaagccagaaaaggccttgtctgaagaggacttgaaaaacgctgtgagtgtgcaccacgcattggcatccaaggccacggactatgagaagaaaccaaacgtgtttaaacttaaaactgccgactggagggtcttgctttttcaaactcagagcccagaggaaatgcaagggtggataaacaaaatcaattgtgtggcagctgtattttctgcaccaccatttccagcagcaatcggctctcagaagaagtttagccgcccacttctgcctgccactacaacaaaactgtctcaggaggagcaactgaagtcacatgaaagtaagctgaagcagatcaccaccgagctggccgagcaccgctcatatccccccgacaagaaggtcaaagccaaggacgtcgatgagtacaaactgaaagaccactatctggagtttgagaaaacccgctatgaaatgtatgtcagcattctcaaggaaggaggcaaagagctactgagtaacgatgaaagcgaggctgcaggactgaagaagtcgcactcgagtccttcgctgaacccggatacttctccaatcactgccaaagtcaagcgtaacgtgtcagagaggaaggatcaccgacctgaaacaccaagcattaagcaaaaagttacttagagtccatctgcggccaggaagtgctggtcatggagcaaaatagggtttttcaagatctttctggtaatccgtgaatatatttaaaaaaaaaaaagtctgtgacaaaacggtgcattagtaattttttctattgtatatttttgttagtttctgtacagattgtctttgctcttgatttcttttgctttgatgatttttgcaacttgatagctaatgcaccttttctgtgaggaggaggggatcgtgatttcagaatgaattatgtatcccttctcttttggttttctcttgtttgcagtctgctcagttgttttatgtattctcatatcaactgttaaacttttttttaaggttaaagaatttaatccattgtgaaacacttaactggacaaactgtagttttagtaaattctagctggagttaatatacgcctttatatgtgaaatcttgcccagtcacagaggtagaattgagcactcacagatgctccagtaagaatcacagtgctgggaatctagttgctccaatatgaggcagcttcatgtgcagcttagcacttgttgttgagatcggaccctgctggaagcagggaaaagaagcgtgaagatcgtaggattgagaacttagggaagcacattagcttgcttgaagtgctgattccatttcagccaagcaagggaaagaggaagtggagtcattttgcctttgaaggctgaggaaagattgatacccagttaattttgtttgctaaaggatgggggcaataatcggcccttgaggagctgcagcagtaggcatgtgctcagtctgcaggaattgttacctcactcccacagggtctagactagaaatccatcatctctatcgttgatatccttccatccaggaatagatttttcttactctacatatgtgtgtgtgcgtgcgtgtgtgtgcgtgtgtgggcatggggttgtgtcctggttgtgatattgaggtcttccttcctaacaaattaatactaaaatgaaacagcttttcttgtgtccttaagacaaaataaggaaggaaaacgtagctgcagttgtccacgatggatattggttctttaaaatatatctgaaagtagtagtcagaatgaattatggttggaaaactgaggaatcttctggttgcaggtgcaaagtgactttgtttattcttgtctcagtctccttgatagccacttcactctgctactactcaactttctcctaaaaatacttcatctattttcagtcctttctttctgtctactcaaaatggttctattaactttgcagtcatgagcttgttccagttacagtccctttgaagttcagggtgataaacagaatattcttctgtagaggaagagaaaggagtgaaagtttagcccactgagacctagagctttgtgatttcctaaccttgaaactctgtaatccctaaagttaaaatctccgcaagtggcacaacttcagaactaatagtatcactttgatttttctttttcctcccttagaaagtttctctagttctatagtttatttgttgaaggtactatgaccaaagaatcagctgctctacaggaatagcatggttccagtgaattagagaaaacctgctgtaaagccatggtagtgtctaagtggtatgttattatgatgtactagcatttatttacagaattatttattaacgtttacttccttcccctctgtaaatgtccatgactattgcccagagaaggcttacccctctctagggttgcagttgctttctttgtaataagtattttgccacacctgtaaaaaaaaaaaacctcacttttaactctctgccttgtttgggtaaaggcagtaactaagtttatgtttcagaactgcaaaacaaacaggatagttaccaatatggcccatgtgtcagattgatttttgtagcctctcactgaatccaacatatccacaagcaagttatctgtctttctacctgataatctaaattatcaggatatttgttttctgcctaaatgtttatactaagccgaggggagagaggtacctagaccatgtcatctacgagcttcagtaactaaagaaaaaggaacttccctgagtggcttgaatgtgtttgcccacagtctatatctatgtatatagaatgtctgtatgtattttacttatttaatatacattgaatggtaccttgctacagtatttctgacatttagagtagtgttgaaatactcggctagcatcagcaccactatagcactgtccgtgtcatatgagtcactaatattaactccagggacttctggataggctaatagatcattggatacgaagggctcttttgaagcttcagtataccatgtttgcatagtttatctttaaaaacaactttaaaggttcttttgtgagccaggatctcagactgccgtagcatgatgctgtccatctttagcgcatgggctgagaacacctcttccctgaggcttctgaaggttgctgtctgtcatgagtgcatgaaggaggccaagagtttatgctatgggaggaaacagtcactgatttgcctagattctgagagtctggcccatagccaaccacattttcctttgggataatttatttcctgtggcatctagccagaagaaattgaggatgtttcctttcacagctgctccaagcctgttgcccaattcacggtacaagggagcaccccttccctttcctctgaaggtacgccacccacctccgtcgcccacctcagcgcccaggagccttgggacttccttccatatgataaatcattcttcttcacgtcaatacacttcatattaatttctagtacagaaaatcttgacagctatcagaatgccttggtcatagtgttgttggcaaaattgaccatacaggtggcccatgtataaaatctgaattttaggggtttgtccccacctcgcatgctggcttttacagggaggtgtctgggattcctcattagcaatcaaaacttaattactgggatgcagagtccttactttatcgccagcccgtaggcatttctgaagtgcacttttttgaaacatcattttgctaactctcagcagtgtctaattaaactgagcaatacttttgtgaattttaattaatctcagcaaaaccatgatgggagagagtcctctgatggaaatgtagtccctggattatgtgtaacctttttattgctcttagatgcagaggatagaaagcattttttggtgcagtggtcttgtggcaaacacaagaccctctatgcgtctccaactgttatcctaatctagaaaatgaggactggcccctgggcaaaagtgacatgaggaatttactctggaagaggaaaatctgggtggctttccaaggctaagataggtttgtatttcaccctgtggccaagctacagaacttctgagattgtggaagaatttttgcaaccagcagggaaagaggcctcttactgcctaaacacaaagttacactgagcttttctactgtcctttgcctattgctccctctatcatgtaaagatctgggaaggatgagaggcagggcctgcttgtcatgagctgcactcttttctttttaactaatcattgacaattggaagaaaattgacgttaaagaagtttctccattgtcttactaacaaaaccttttgggtttcattaattgtccttgaaattgagttcctttggcatttttccttgcagtcatcagttaagcatgttgcatcctgaattcacagaagtttagctttgcaggtttgaatctctgtaatttaactcccgtggacttggtcgagttttcagcaggttgggagccacctctcttcatttcagcagtgagtcatcccttgacttttcaaatgacagaattttttccaattgtaaaattagcactgtaaaacaaagaaccaaagtggcatcctaagagttgttaaacctgaagtctagtttatgaggaattgtccaagttggagtttaaatagtatctgcttttgtctcaaagcatctaagttattctgacagaaaatggtaagtcagctttgcaggcagatgcgcctctgggcctcctaccttgctccacagctttctggccatcttgtctcccaggccatgccactgctctgccacatgtcagcaaatttctttccaccagtcttatagcatcttacatgatcaaatcatcacagaataaccccgtgatagattattgatagcaatagagaggggcggctttgtcactgatttttctctcagattccttttccatctctcatccataaaggaaggactgaaatccaaaggcattctccttttgtacctacagtatccagaacccacgtgggcagccttctgcttatgacaataattggcccattgcatgcagagagaatgtcttcatagagagaatgtcattaaatacttgaatctgcatgacagtttgacttgaatgcaacagcaggaaaattttgcaagttacataattgtatatacagtaggttttcttaagtctcttcggttcatcctttgtaatttgtgtgtgtatctgtagtattgcaggcttttggagactattcttacaggcagtatgtcagtcatcaaagaaaatgctgtcacctgccattgttgtatttgtgggtatttatagttgtatgtatgtaaatgcatcagtgtgtagattgcatatcagtgtatggtacatgtacatcaaaattatttttgtccttaatcagtgtgatatgaaaagcaagtacaacctcataggactgattatataatgaagttgttgagagtatatatagtggtattgttttattaaacttaaactcaaataatattttgattaaaatttttaataagactttatgctagaaaattctttgagctttgaatcaccagggcaaaaatgactttcaactaaccttgtgaatcttttgcagtgtactgtgtgcaataccaagggcatagctccctgtaatttgggaaatacagaaagaaaaaaaaaaaaaaaaaaaaggcagcctgtgcagtcttagtaactttagtattaagagcacttaaagtcaaactgacaattttgggcttattacaaaatgtgatgctttaaagcacacgttctttattgttgttgtaattagtccataaaaaatatagctttcggaagaattaaatacccaccatatcatttatgtatttgtgtatgttttacgggagatcaaaccactctcgtggtgccgcatccgtactcgcttgacttggaagaaatatcacaagcactaaagtatatcagggcatcccaggattgggtactgtatcctaggtttgcagttgcagaaattagcatctagtgtcacaggtaaaagaatttcaggaccaggtttaaactttattttaaatatttttatacttaggtctctttttcctgcctctccccaaagaagagccactggccttagttgtttgagcttactgcttatattatagagtgtaaataggtaactagagactaaaattttattaaccagcatgtttggtatatttaaagcagtgactgagtgtgtttgagtgagtggctgagtgcagtgtcttttgtttaaacacactgcctcgtgtctttgtagctgattcagagagtttgaattgtggggtgggagactaacttcagctccagg

SEQ ID NO: 348564 - DNA, 7405 bp, Homo sapiens
tcggcagtcactgaacttgggagctgaagaatactggacggggcttcggagaggaaggatggtccaggcgcaccccagggttgcgatgggctcttcttggtgtctgtatggttgctgcaatgctggggtgaaaacaacacggctagaagctcattctgaaatggggagcactgaaattttggaaaaggagaccccagaaaatctcagtaatggtaccagcagcaatgtggaagcagccaaaaggttggccaaacgcctttatcagctggacagattcaaaagatcagatgttgcaaaacaccttggcaagaacaacgaatttagcaaactagttgcagaagaatatctgaagttttttgattttacaggaatgacgctggatcagtcactcaggtatttctttaaagcattctctcttgtgggagaaactcaagaacgagagagagttttaatacacttctccaatagatatttttattgtaacccagataccattgcttcacaagatggagtccattgccttacctgtgcaataatgcttcttaataccgatctacatggccaccggtggtggcttttgcagccgtagccaagattaaggctcaggatctttgaggcaagaaggaagaggagctgctaagacagctggacaacctgaaggtagacctgtcccagataatattggaaagaagatgacctgtcaggagttcattgcaaatctgcaaggggtaaatgagggtgttgatttctccaaggatctgctgaaagctctgtacaactcaatcaagaatgagaagcttgaatgggcagtagatgatgaagagaaaaaaaagtctccctcagaaagtactgaggagaaagctaacggaacacatccaaagaccatcagtcgtattggaagtactactaacccatttttggacattcctcatgatccaaatgctgctgtgtacaaaagtggattcttggctcggaaaattcatgcagatatggatggaaagaagactccaagaggaaaacgaggatggaaaaccttttatgctgtactgaagggaacagttctttacttgcaaaaggatgaatacaagccagaaaaggccttgtctgaagaggacttgaaaaacgctgtgagtgtgcaccacgcattggcatccaaggccacggactatgagaagaaaccaaacgtgtttaaacttaaaactgccgactggagggtcttgctttttcaaactcagagcccagaggaaatgcaagggtggataaacaaaatcaattgtgtggcagctgtattttctgcaccaccatttccagcagcaatcggctctcagaagaagtttagccgcccacttctgcctgccactacaacaaaactgtctcaggaggagcaactgaagtcacatgaaagtaagctgaagcagatcaccaccgagctggccgagcaccgctcatatccccccgacaagaaggtcaaagccaaggacgtcgatgagtacaaactgaaagaccactatctggagtttgagaaaacccgctatgaaatgtatgtcagcattctcaaggaaggaggcaaagagctactgagtaacgatgaaagcgaggctgcaggactgaagaagtcgcactcgagtccttcgctgaacccggatacttctccaatcactgccaaagtcaagcgtaacgtgtcagagaggaaggatcaccgacctgaaacaccaagcattaagcaaaaagttacttagagtccatctgcggccaggaagtgctggtcatggagcaaaatagggtttttcaagatctttctggtaatccgtgaatatatttaaaaaaaaaaaagtctgtgacagattgtctttgctcttgatttcttttgctttgatgatttttgcaacttgatagctaatgcaccttttctgtgaggaggaggggatcgtgatttcagaatgaattatgtatcccttctcttttggttttctcttgtttgcagtctgctcagttgttttatgtattctcatatcaactgttaaacttttttttaaggttaaagaatttaatccattgtgaaacacttaactggacaaactgtagttttagtaaattctagctggagttaatatacgcctttatatgtgaaatcttgcccagtcacagaggtagaattgagcactcacagatgctccagtaagaatcacagtgctgggaatctagttgctccaatatgaggcagcttcatgtgcagcttagcacttgttgttgagatcggaccctgctggaagcagggaaaagaagcgtgaagatcgtaggattgagaacttagggaagcacattagcttgcttgaagtgctgattccatttcagccaagcaagggaaagaggaagtggagtcattttgcctttgaaggctgaggaaagattgatacccagttaattttgtttgctaaaggatgggggcaataatcggcccttgaggagctgcagcagtaggcatgtgctcagtctgcaggaattgttacctcactcccacagggtctagactagaaatccatcatctctatcgttgatatccttccatccaggaatagatttttcttactctacatatgtgtgtgtgcgtgcgtgtgtgtgcgtgtgtgggcatggggttgtgtcctggttgtgatattgaggtcttccttcctaacaaattaatactaaaatgaaacagcttttcttgtgtccttaagacaaaataaggaaggaaaacgtagctgcagttgtccacgatggatattggttctttaaaatatatctgaaagtagtagtcagaatgaattatggttggaaaactgaggaatcttctggttgcaggtgcaaagtgactttgtttattcttgtctcagtctccttgatagccacttcactctgctactactcaactttctcctaaaaatacttcatctattttcagtcctttctttctgtctactcaaaatggttctattaactttgcagtcatgagcttgttccagttacagtccctttgaagttcagggtgataaacagaatattcttctgtagaggaagagaaaggagtgaaagtttagcccactgagacctagagctttgtgatttcctaaccttgaaactctgtaatccctaaagttaaaatctccgcaagtggcacaacttcagaactaatagtatcactttgatttttctttttcctcccttagaaagtttctctagttctatagtttatttgttgaaggtactatgaccaaagaatcagctgctctacaggaatagcatggttccagtgaattagagaaaacctgctgtaaagccatggtagtgtctaagtggtatgttattatgatgtactagcatttatttacagaattatttattaacgtttacttccttcccctctgtaaatgtccatgactattgcccagagaaggcttacccctctctagggttgcagttgctttctttgtaataagtattttgccacacctgtaaaaaaaaaaaacctcacttttaactctctgccttgtttgggtaaaggcagtaactaagtttatgtttcagaactgcaaaacaaacaggatagttaccaatatggcccatgtgtcagattgatttttgtagcctctcactgaatccaacatatccacaagcaagttatctgtctttctacctgataatctaaattatcaggatatttgttttctgcctaaatgtttatactaagccgaggggagagaggtacctagaccatgtcatctacgagcttcagtaactaaagaaaaaggaacttccctgagtggcttgaatgtgtttgcccacagtctatatctatgtatatagaatgtctgtatgtattttacttatttaatatacattgaatggtaccttgctacagtatttctgacatttagagtagtgttgaaatactcggctagcatcagcaccactatagcactgtccgtgtcatatgagtcactaatattaactccagggacttctggataggctaatagatcattggatacgaagggctcttttgaagcttcagtataccatgtttgcatagtttatctttaaaaacaactttaaaggttcttttgtgagccaggatctcagactgccgtagcatgatgctgtccatctttagcgcatgggctgagaacacctcttccctgaggcttctgaaggttgctgtctgtcatgagtgcatgaaggaggccaagagtttatgctatgggaggaaacagtcactgatttgcctagattctgagagtctggcccatagccaaccacattttcctttgggataatttatttcctgtggcatctagccagaagaaattgaggatgtttcctttcacagctgctccaagcctgttgcccaattcacggtacaagggagcaccccttccctttcctctgaaggtacgccacccacctccgtcgcccacctcagcgcccaggagccttgggacttccttccatatgataaatcattcttcttcacgtcaatacacttcatattaatttctagtacagaaaatcttgacagctatcagaatgccttggtcatagtgttgttggcaaaattgaccatacaggtggcccatgtataaaatctgaattttaggggtttgtccccacctcgcatgctggcttttacagggaggtgtctgggattcctcattagcaatcaaaacttaattactgggatgcagagtccttactttatcgccagcccgtaggcatttctgaagtgcacttttttgaaacatcattttgctaactctcagcagtgtctaattaaactgagcaatacttttgtgaattttaattaatctcagcaaaaccatgatgggagagagtcctctgatggaaatgtagtccctggattatgtgtaacctttttattgctcttagatgcagaggatagaaagcattttttggtgcagtggtcttgtggcaaacacaagaccctctatgcgtctccaactgttatcctaatctagaaaatgaggactggcccctgggcaaaagtgacatgaggaatttactctggaagaggaaaatctgggtggctttccaaggctaagataggtttgtatttcaccctgtggccaagctacagaacttctgagattgtggaagaatttttgcaaccagcagggaaagaggcctcttactgcctaaacacaaagttacactgagcttttctactgtcctttgcctattgctccctctatcatgtaaagatctgggaaggatgagaggcagggcctgcttgtcatgagctgcactcttttctttttaactaatcattgacaattggaagaaaattgacgttaaagaagtttctccattgtcttactaacaaaaccttttgggtttcattaattgtccttgaaattgagttcctttggcatttttccttgcagtcatcagttaagcatgttgcatcctgaattcacagaagtttagctttgcaggtttgaatctctgtaatttaactcccgtggacttggtcgagttttcagcaggttgggagccacctctcttcatttcagcagtgagtcatcccttgacttttcaaatgacagaattttttccaattgtaaaattagcactgtaaaacaaagaaccaaagtggcatcctaagagttgttaaacctgaagtctagtttatgaggaattgtccaagttggagtttaaatagtatctgcttttgtctcaaagcatctaagttattctgacagaaaatggtaagtcagctttgcaggcagatgcgcctctgggcctcctaccttgctccacagctttctggccatcttgtctcccaggccatgccactgctctgccacatgtcagcaaatttctttccaccagtcttatagcatcttacatgatcaaatcatcacagaataaccccgtgatagattattgatagcaatagagaggggcggctttgtcactgatttttctctcagattccttttccatctctcatccataaaggaaggactgaaatccaaaggcattctccttttgtacctacagtatccagaacccacgtgggcagccttctgcttatgacaataattggcccattgcatgcagagagaatgtcttcatagagagaatgtcattaaatacttgaatctgcatgacagtttgacttgaatgcaacagcaggaaaattttgcaagttacataattgtatatacagtaggttttcttaagtctcttcggttcatcctttgtaatttgtgtgtgtatctgtagtattgcaggcttttggagactattcttacaggcagtatgtcagtcatcaaagaaaatgctgtcacctgccattgttgtatttgtgggtatttatagttgtatgtatgtaaatgcatcagtgtgtagattgcatatcagtgtatggtacatgtacatcaaaattatttttgtccttaatcagtgtgatatgaaaagcaagtacaacctcataggactgattatataatgaagttgttgagagtatatatagtggtattgttttattaaacttaaactcaaataatattttgattaaaatttttaataagactttatgctagaaaattctttgagctttgaatcaccagggcaaaaatgactttcaactaaccttgtgaatcttttgcagtgtactgtgtgcaataccaagggcatagctccctgtaatttgggaaatacagaaagaaaaaaaaaaaaaaaaaaaaggcagcctgtgcagtcttagtaactttagtattaagagcacttaaagtcaaactgacaattttgggcttattacaaaatgtgatgctttaaagcacacgttctttattgttgttgtaattagtccataaaaaatatagctttcggaagaattaaatacccaccatatcatttatgtatttgtgtatgttttacgggagatcaaaccactctcgtggtgccgcatccgtactcgcttgacttggaagaaatatcacaagcactaaagtatatcagggcatcccaggattgggtactgtatcctaggtttgcagttgcagaaattagcatctagtgtcacaggtaaaagaatttcaggaccaggtttaaactttattttaaatatttttatacttaggtctctttttcctgcctctccccaaagaagagccactggccttagttgtttgagcttactgcttatattatagagtgtaaataggtaactagagactaaaattttattaaccagcatgtttggtatatttaaagcagtgactgagtgtgtttgagtgagtggctgagtgcagtgtcttttgtttaaacacactgcctcgtgtctttgtagctgattcagagagtttgaattgtggggtgggagactaacttcagctccagg

SEQ ID NO: 348565 - DNA, 7017 bp, Homo sapiens
cagtgacgtgagctgtgcctggaacaatcagactcgctgcaaacagggtagttgaagatgctgggggaggcagcctggtgcttcttaagctaacgcggatcacggcgctcaggagctgctcaggcacaaccccgcagagttcctccagcgtgagagccttggaacggttggaaagtgcctttttatttctctaaaccccttccttagttgaccttcgaaaatgattggcgtgaatagtgtccagagtgccagcaaggtacgggtgaggacctcaggttccgtgaaatactcccgggaggattctatccggcggcagtctcacaggtcaaagtccatgaaaatttccaactcctcagagttttctgctaaggagaacaaggctctgtacaactcaatcaagaatgagaagcttgaatgggcagtagatgatgaagagaaaaaaaagtctccctcagaaagtactgaggagaaagctaacggaacacatccaaagaccatcagtcgtattggaagtactactaacccatttttggacattcctcatgatccaaatgctgctgtgtacaaaagtggattcttggctcggaaaattcatgcagatatggatggaaagaagactccaagaggaaaacgaggatggaaaaccttttatgctgtactgaagggaacagttctttacttgcaaaaggatgaatacaagccagaaaaggccttgtctgaagaggacttgaaaaacgctgtgagtgtgcaccacgcattggcatccaaggccacggactatgagaagaaaccaaacgtgtttaaacttaaaactgccgactggagggtcttgctttttcaaactcagagcccagaggaaatgcaagggtggataaacaaaatcaattgtgtggcagctgtattttctgcaccaccatttccagcagcaatcggctctcagaagaagtttagccgcccacttctgcctgccactacaacaaaactgtctcaggaggagcaactgaagtcacatgaaagtaagctgaagcagatcaccaccgagctggccgagcaccgctcatatccccccgacaagaaggtcaaagccaaggacgtcgatgagtacaaactgaaagaccactatctggagtttgagaaaacccgctatgaaatgtatgtcagcattctcaaggaaggaggcaaagagctactgagtaacgatgaaagcgaggctgcaggactgaagaagtcgcactcgagtccttcgctgaacccggatacttctccaatcactgccaaagtcaagcgtaacgtgtcagagaggaaggatcaccgacctgaaacaccaagcattaagcaaaaagttacttagagtccatctgcggccaggaagtgctggtcatggagcaaaatagggtttttcaagatctttctggtaatccgtgaatatatttaaaaaaaaaaaagtctgtgacagattgtctttgctcttgatttcttttgctttgatgatttttgcaacttgatagctaatgcaccttttctgtgaggaggaggggatcgtgatttcagaatgaattatgtatcccttctcttttggttttctcttgtttgcagtctgctcagttgttttatgtattctcatatcaactgttaaacttttttttaaggttaaagaatttaatccattgtgaaacacttaactggacaaactgtagttttagtaaattctagctggagttaatatacgcctttatatgtgaaatcttgcccagtcacagaggtagaattgagcactcacagatgctccagtaagaatcacagtgctgggaatctagttgctccaatatgaggcagcttcatgtgcagcttagcacttgttgttgagatcggaccctgctggaagcagggaaaagaagcgtgaagatcgtaggattgagaacttagggaagcacattagcttgcttgaagtgctgattccatttcagccaagcaagggaaagaggaagtggagtcattttgcctttgaaggctgaggaaagattgatacccagttaattttgtttgctaaaggatgggggcaataatcggcccttgaggagctgcagcagtaggcatgtgctcagtctgcaggaattgttacctcactcccacagggtctagactagaaatccatcatctctatcgttgatatccttccatccaggaatagatttttcttactctacatatgtgtgtgtgcgtgcgtgtgtgtgcgtgtgtgggcatggggttgtgtcctggttgtgatattgaggtcttccttcctaacaaattaatactaaaatgaaacagcttttcttgtgtccttaagacaaaataaggaaggaaaacgtagctgcagttgtccacgatggatattggttctttaaaatatatctgaaagtagtagtcagaatgaattatggttggaaaactgaggaatcttctggttgcaggtgcaaagtgactttgtttattcttgtctcagtctccttgatagccacttcactctgctactactcaactttctcctaaaaatacttcatctattttcagtcctttctttctgtctactcaaaatggttctattaactttgcagtcatgagcttgttccagttacagtccctttgaagttcagggtgataaacagaatattcttctgtagaggaagagaaaggagtgaaagtttagcccactgagacctagagctttgtgatttcctaaccttgaaactctgtaatccctaaagttaaaatctccgcaagtggcacaacttcagaactaatagtatcactttgatttttctttttcctcccttagaaagtttctctagttctatagtttatttgttgaaggtactatgaccaaagaatcagctgctctacaggaatagcatggttccagtgaattagagaaaacctgctgtaaagccatggtagtgtctaagtggtatgttattatgatgtactagcatttatttacagaattatttattaacgtttacttccttcccctctgtaaatgtccatgactattgcccagagaaggcttacccctctctagggttgcagttgctttctttgtaataagtattttgccacacctgtaaaaaaaaaaaacctcacttttaactctctgccttgtttgggtaaaggcagtaactaagtttatgtttcagaactgcaaaacaaacaggatagttaccaatatggcccatgtgtcagattgatttttgtagcctctcactgaatccaacatatccacaagcaagttatctgtctttctacctgataatctaaattatcaggatatttgttttctgcctaaatgtttatactaagccgaggggagagaggtacctagaccatgtcatctacgagcttcagtaactaaagaaaaaggaacttccctgagtggcttgaatgtgtttgcccacagtctatatctatgtatatagaatgtctgtatgtattttacttatttaatatacattgaatggtaccttgctacagtatttctgacatttagagtagtgttgaaatactcggctagcatcagcaccactatagcactgtccgtgtcatatgagtcactaatattaactccagggacttctggataggctaatagatcattggatacgaagggctcttttgaagcttcagtataccatgtttgcatagtttatctttaaaaacaactttaaaggttcttttgtgagccaggatctcagactgccgtagcatgatgctgtccatctttagcgcatgggctgagaacacctcttccctgaggcttctgaaggttgctgtctgtcatgagtgcatgaaggaggccaagagtttatgctatgggaggaaacagtcactgatttgcctagattctgagagtctggcccatagccaaccacattttcctttgggataatttatttcctgtggcatctagccagaagaaattgaggatgtttcctttcacagctgctccaagcctgttgcccaattcacggtacaagggagcaccccttccctttcctctgaaggtacgccacccacctccgtcgcccacctcagcgcccaggagccttgggacttccttccatatgataaatcattcttcttcacgtcaatacacttcatattaatttctagtacagaaaatcttgacagctatcagaatgccttggtcatagtgttgttggcaaaattgaccatacaggtggcccatgtataaaatctgaattttaggggtttgtccccacctcgcatgctggcttttacagggaggtgtctgggattcctcattagcaatcaaaacttaattactgggatgcagagtccttactttatcgccagcccgtaggcatttctgaagtgcacttttttgaaacatcattttgctaactctcagcagtgtctaattaaactgagcaatacttttgtgaattttaattaatctcagcaaaaccatgatgggagagagtcctctgatggaaatgtagtccctggattatgtgtaacctttttattgctcttagatgcagaggatagaaagcattttttggtgcagtggtcttgtggcaaacacaagaccctctatgcgtctccaactgttatcctaatctagaaaatgaggactggcccctgggcaaaagtgacatgaggaatttactctggaagaggaaaatctgggtggctttccaaggctaagataggtttgtatttcaccctgtggccaagctacagaacttctgagattgtggaagaatttttgcaaccagcagggaaagaggcctcttactgcctaaacacaaagttacactgagcttttctactgtcctttgcctattgctccctctatcatgtaaagatctgggaaggatgagaggcagggcctgcttgtcatgagctgcactcttttctttttaactaatcattgacaattggaagaaaattgacgttaaagaagtttctccattgtcttactaacaaaaccttttgggtttcattaattgtccttgaaattgagttcctttggcatttttccttgcagtcatcagttaagcatgttgcatcctgaattcacagaagtttagctttgcaggtttgaatctctgtaatttaactcccgtggacttggtcgagttttcagcaggttgggagccacctctcttcatttcagcagtgagtcatcccttgacttttcaaatgacagaattttttccaattgtaaaattagcactgtaaaacaaagaaccaaagtggcatcctaagagttgttaaacctgaagtctagtttatgaggaattgtccaagttggagtttaaatagtatctgcttttgtctcaaagcatctaagttattctgacagaaaatggtaagtcagctttgcaggcagatgcgcctctgggcctcctaccttgctccacagctttctggccatcttgtctcccaggccatgccactgctctgccacatgtcagcaaatttctttccaccagtcttatagcatcttacatgatcaaatcatcacagaataaccccgtgatagattattgatagcaatagagaggggcggctttgtcactgatttttctctcagattccttttccatctctcatccataaaggaaggactgaaatccaaaggcattctccttttgtacctacagtatccagaacccacgtgggcagccttctgcttatgacaataattggcccattgcatgcagagagaatgtcttcatagagagaatgtcattaaatacttgaatctgcatgacagtttgacttgaatgcaacagcaggaaaattttgcaagttacataattgtatatacagtaggttttcttaagtctcttcggttcatcctttgtaatttgtgtgtgtatctgtagtattgcaggcttttggagactattcttacaggcagtatgtcagtcatcaaagaaaatgctgtcacctgccattgttgtatttgtgggtatttatagttgtatgtatgtaaatgcatcagtgtgtagattgcatatcagtgtatggtacatgtacatcaaaattatttttgtccttaatcagtgtgatatgaaaagcaagtacaacctcataggactgattatataatgaagttgttgagagtatatatagtggtattgttttattaaacttaaactcaaataatattttgattaaaatttttaataagactttatgctagaaaattctttgagctttgaatcaccagggcaaaaatgactttcaactaaccttgtgaatcttttgcagtgtactgtgtgcaataccaagggcatagctccctgtaatttgggaaatacagaaagaaaaaaaaaaaaaaaaaaaaggcagcctgtgcagtcttagtaactttagtattaagagcacttaaagtcaaactgacaattttgggcttattacaaaatgtgatgctttaaagcacacgttctttattgttgttgtaattagtccataaaaaatatagctttcggaagaattaaatacccaccatatcatttatgtatttgtgtatgttttacgggagatcaaaccactctcgtggtgccgcatccgtactcgcttgacttggaagaaatatcacaagcactaaagtatatcagggcatcccaggattgggtactgtatcctaggtttgcagttgcagaaattagcatctagtgtcacaggtaaaagaatttcaggaccaggtttaaactttattttaaatatttttatacttaggtctctttttcctgcctctccccaaagaagagccactggccttagttgtttgagcttactgcttatattatagagtgtaaataggtaactagagactaaaattttattaaccagcatgtttggtatatttaaagcagtgactgagtgtgtttgagtgagtggctgagtgcagtgtcttttgtttaaacacactgcctcgtgtctttgtagctgattcagagagtttgaattgtggggtgggagactaacttcagctccagg

SEQ ID NO: 348566 - DNA, 6231 bp, Homo sapiens
ccgcacgtaggaagtggttacactaatagtagcgactggagggtctgctattcaaactcagagcccagaggaaatgcaagggtggataaacaaaatcaattgtgtggcagctgtattttctgcaccaccatttccagcagcaatcggctctcagaagaagtttagccgcccacttctgcctgccactacaacaaaactgtctcaggaggagcaactgaagtcacatgaaagtaagctgaagcagatcaccaccgagctggccgagcaccgctcatatccccccgacaagaaggtcaaagccaaggacgtcgatgagtacaaactgaaagaccactatctggagtttgagaaaacccgctatgaaatgtatgtcagcattctcaaggaaggaggcaaagagctactgagtaacgatgaaagcgaggctgcaggactgaagaagtcgcactcgagtccttcgctgaacccggatacttctccaatcactgccaaagtcaagcgtaacgtgtcagagaggaaggatcaccgacctgaaacaccaagcattaagcaaaaagttacttagagtccatctgcggccaggaagtgctggtcatggagcaaaatagggtttttcaagatctttctggtaatccgtgaatatatttaaaaaaaaaaaagtctgtgacagattgtctttgctcttgatttcttttgctttgatgatttttgcaacttgatagctaatgcaccttttctgtgaggaggaggggatcgtgatttcagaatgaattatgtatcccttctcttttggttttctcttgtttgcagtctgctcagttgttttatgtattctcatatcaactgttaaacttttttttaaggttaaagaatttaatccattgtgaaacacttaactggacaaactgtagttttagtaaattctagctggagttaatatacgcctttatatgtgaaatcttgcccagtcacagaggtagaattgagcactcacagatgctccagtaagaatcacagtgctgggaatctagttgctccaatatgaggcagcttcatgtgcagcttagcacttgttgttgagatcggaccctgctggaagcagggaaaagaagcgtgaagatcgtaggattgagaacttagggaagcacattagcttgcttgaagtgctgattccatttcagccaagcaagggaaagaggaagtggagtcattttgcctttgaaggctgaggaaagattgatacccagttaattttgtttgctaaaggatgggggcaataatcggcccttgaggagctgcagcagtaggcatgtgctcagtctgcaggaattgttacctcactcccacagggtctagactagaaatccatcatctctatcgttgatatccttccatccaggaatagatttttcttactctacatatgtgtgtgtgcgtgcgtgtgtgtgcgtgtgtgggcatggggttgtgtcctggttgtgatattgaggtcttccttcctaacaaattaatactaaaatgaaacagcttttcttgtgtccttaagacaaaataaggaaggaaaacgtagctgcagttgtccacgatggatattggttctttaaaatatatctgaaagtagtagtcagaatgaattatggttggaaaactgaggaatcttctggttgcaggtgcaaagtgactttgtttattcttgtctcagtctccttgatagccacttcactctgctactactcaactttctcctaaaaatacttcatctattttcagtcctttctttctgtctactcaaaatggttctattaactttgcagtcatgagcttgttccagttacagtccctttgaagttcagggtgataaacagaatattcttctgtagaggaagagaaaggagtgaaagtttagcccactgagacctagagctttgtgatttcctaaccttgaaactctgtaatccctaaagttaaaatctccgcaagtggcacaacttcagaactaatagtatcactttgatttttctttttcctcccttagaaagtttctctagttctatagtttatttgttgaaggtactatgaccaaagaatcagctgctctacaggaatagcatggttccagtgaattagagaaaacctgctgtaaagccatggtagtgtctaagtggtatgttattatgatgtactagcatttatttacagaattatttattaacgtttacttccttcccctctgtaaatgtccatgactattgcccagagaaggcttacccctctctagggttgcagttgctttctttgtaataagtattttgccacacctgtaaaaaaaaaaaacctcacttttaactctctgccttgtttgggtaaaggcagtaactaagtttatgtttcagaactgcaaaacaaacaggatagttaccaatatggcccatgtgtcagattgatttttgtagcctctcactgaatccaacatatccacaagcaagttatctgtctttctacctgataatctaaattatcaggatatttgttttctgcctaaatgtttatactaagccgaggggagagaggtacctagaccatgtcatctacgagcttcagtaactaaagaaaaaggaacttccctgagtggcttgaatgtgtttgcccacagtctatatctatgtatatagaatgtctgtatgtattttacttatttaatatacattgaatggtaccttgctacagtatttctgacatttagagtagtgttgaaatactcggctagcatcagcaccactatagcactgtccgtgtcatatgagtcactaatattaactccagggacttctggataggctaatagatcattggatacgaagggctcttttgaagcttcagtataccatgtttgcatagtttatctttaaaaacaactttaaaggttcttttgtgagccaggatctcagactgccgtagcatgatgctgtccatctttagcgcatgggctgagaacacctcttccctgaggcttctgaaggttgctgtctgtcatgagtgcatgaaggaggccaagagtttatgctatgggaggaaacagtcactgatttgcctagattctgagagtctggcccatagccaaccacattttcctttgggataatttatttcctgtggcatctagccagaagaaattgaggatgtttcctttcacagctgctccaagcctgttgcccaattcacggtacaagggagcaccccttccctttcctctgaaggtacgccacccacctccgtcgcccacctcagcgcccaggagccttgggacttccttccatatgataaatcattcttcttcacgtcaatacacttcatattaatttctagtacagaaaatcttgacagctatcagaatgccttggtcatagtgttgttggcaaaattgaccatacaggtggcccatgtataaaatctgaattttaggggtttgtccccacctcgcatgctggcttttacagggaggtgtctgggattcctcattagcaatcaaaacttaattactgggatgcagagtccttactttatcgccagcccgtaggcatttctgaagtgcacttttttgaaacatcattttgctaactctcagcagtgtctaattaaactgagcaatacttttgtgaattttaattaatctcagcaaaaccatgatgggagagagtcctctgatggaaatgtagtccctggattatgtgtaacctttttattgctcttagatgcagaggatagaaagcattttttggtgcagtggtcttgtggcaaacacaagaccctctatgcgtctccaactgttatcctaatctagaaaatgaggactggcccctgggcaaaagtgacatgaggaatttactctggaagaggaaaatctgggtggctttccaaggctaagataggtttgtatttcaccctgtggccaagctacagaacttctgagattgtggaagaatttttgcaaccagcagggaaagaggcctcttactgcctaaacacaaagttacactgagcttttctactgtcctttgcctattgctccctctatcatgtaaagatctgggaaggatgagaggcagggcctgcttgtcatgagctgcactcttttctttttaactaatcattgacaattggaagaaaattgacgttaaagaagtttctccattgtcttactaacaaaaccttttgggtttcattaattgtccttgaaattgagttcctttggcatttttccttgcagtcatcagttaagcatgttgcatcctgaattcacagaagtttagctttgcaggtttgaatctctgtaatttaactcccgtggacttggtcgagttttcagcaggttgggagccacctctcttcatttcagcagtgagtcatcccttgacttttcaaatgacagaattttttccaattgtaaaattagcactgtaaaacaaagaaccaaagtggcatcctaagagttgttaaacctgaagtctagtttatgaggaattgtccaagttggagtttaaatagtatctgcttttgtctcaaagcatctaagttattctgacagaaaatggtaagtcagctttgcaggcagatgcgcctctgggcctcctaccttgctccacagctttctggccatcttgtctcccaggccatgccactgctctgccacatgtcagcaaatttctttccaccagtcttatagcatcttacatgatcaaatcatcacagaataaccccgtgatagattattgatagcaatagagaggggcggctttgtcactgatttttctctcagattccttttccatctctcatccataaaggaaggactgaaatccaaaggcattctccttttgtacctacagtatccagaacccacgtgggcagccttctgcttatgacaataattggcccattgcatgcagagagaatgtcttcatagagagaatgtcattaaatacttgaatctgcatgacagtttgacttgaatgcaacagcaggaaaattttgcaagttacataattgtatatacagtaggttttcttaagtctcttcggttcatcctttgtaatttgtgtgtgtatctgtagtattgcaggcttttggagactattcttacaggcagtatgtcagtcatcaaagaaaatgctgtcacctgccattgttgtatttgtgggtatttatagttgtatgtatgtaaatgcatcagtgtgtagattgcatatcagtgtatggtacatgtacatcaaaattatttttgtccttaatcagtgtgatatgaaaagcaagtacaacctcataggactgattatataatgaagttgttgagagtatatatagtggtattgttttattaaacttaaactcaaataatattttgattaaaatttttaataagactttatgctagaaaattctttgagctttgaatcaccagggcaaaaatgactttcaactaaccttgtgaatcttttgcagtgtactgtgtgcaataccaagggcatagctccctgtaatttgggaaatacagaaagaaaaaaaaaaaaaaaaaaaaggcagcctgtgcagtcttagtaactttagtattaagagcacttaaagtcaaactgacaattttgggcttattacaaaatgtgatgctttaaagcacacgttctttattgttgttgtaattagtccataaaaaatatagctttcggaagaattaaatacccaccatatcatttatgtatttgtgtatgttttacgggagatcaaaccactctcgtggtgccgcatccgtactcgcttgacttggaagaaatatcacaagcactaaagtatatcagggcatcccaggattgggtactgtatcctaggtttgcagttgcagaaattagcatctagtgtcacaggtaaaagaatttcaggaccaggtttaaactttattttaaatatttttatacttaggtctctttttcctgcctctccccaaagaagagccactggccttagttgtttgagcttactgcttatattatagagtgtaaataggtaactagagactaaaattttattaaccagcatgtttggtatatttaaagcagtgactgagtgtgtttgagtgagtggctgagtgcagtgtcttttgtttaaacacactgcctcgtgtctttgtagctgattcagagagtttgaattgtggggtgggagactaacttcagctccagg

SEQ ID NO: 348567 - DNA, 6553 bp, Homo sapiens
tcggcagtcactgaacttgggagctgaagaatactggacggggcttcggagaggaaggatggtccaggcgcaccccagggttgcgatgggctcttcttggtgtctgtatggttgctgcaatgctggggtgaaaacaacacggctagaagctcattctgaaatggggagcactgaaattttggaaaaggagaccccagaaaatctcagtaatggtaccagcagcaatgtggaagcagccaaaaggttggccaaacgcctttatcagctggacagattcaaaagatcagatgttgcaaaacaccttggcaagaacaacgaatttagcaaactagttgcagaagaatatctgaagttttttgattttacaggaatgacgctggatcagtcactcaggtatttctttaaagcattctctcttgtgggagaaactcaagaacgagagagagttttaatacacttctccaatagatatttttattgtaacccagataccattgcttcacaagatggagtccattgccttacctgtgcaataatgcttcttaataccgatctacatggccaccggtggtggcttttgcagccgtagccaagattaaggctcaggatctttgaggcaagaaggaagaggagctgctaagacagctggacaacctgaaggtagacctgtcccagataatattggaaagaagatgacctgtcaggagttcattgcaaatctgcaaggggtaaatgagggtgttgatttctccaaggatctgctgaaagctctgtacaactcaatcaagaatgagaagcttgaatgggcagtagatgatgaagagaaaaaaaagtctccctcagaaagtactgaggagaaagctaacggaacacatccaaagaccatcagtcgtattggaagtactactaacccatttttggacattcctcatgatccaaatgctgctgtgtacaaaagtggattcttggctcggaaaattcatgcagatatggatggaaagaagactccaagaggaaaacgaggatggaaaaccttttatgctgtactgaagggaacagttctttacttgcaaaaggatgaatacaagccagaaaaggccttgtctgaagaggacttgaaaaacgctgtgagtgtgcaccacgcattggcatccaaggccacggactatgagaagaaaccaaacgtgtttaaacttaaaactgccgactggagggtcttgctttttcaaactcagagcccagaggaaatgcaagggtggataaacaaaatcaattgtgtggcagctgtattttctgcaccaccatttccagcagcaatcggctctcagaagaagtttagccgcccacttctgcctgccactacaacaaaactgtctcaggaggagcaactgaagtcacatgaaagtaagctgaagcagatcaccaccgagctggccgagcaccgctcatatccccccgacaagaaggtcaaagccaaggacgtcgatgagtacaaactgaaagaccactatctggagtttgagaaaacccgctatgaaatgtatgtcagcattctcaaggaaggaggcaaagagctactgagtaacgatgaaagcgaggctgcaggactgaagaagtcgcactcgagtccttcgctgaacccggatacttctccaatcactgccaaagtcaagcgtaacgtgtcagagaggaaggatcaccgacctgaaacaccaagcattaagcaaaaagttacttagagtccatctgcggccaggaagtgctggtcatggagcaaaatagggtttttcaagatctttctggtaatccgtgaatatatttaaaaaaaaaaaagtctgtgacagattgtctttgctcttgatttcttttgctttgatgatttttgcaacttgatagctaatgcaccttttctgtgaggaggaggggatcgtgatttcagaatgaattatgtatcccttctcttttggttttctcttgtttgcagtctgctcagttgttttatgtattctcatatcaactgttaaacttttttttaaggttaaagaatttaatccattgtgaaacacttaactggacaaactgtagttttagtaaattctagctggagttaatatacgcctttatatgtgaaatcttgcccagtcacagaggtagaattgagcactcacagatgctccagtaagaatcacagtgctgggaatctagttgctccaatatgaggcagcttcatgtgcagcttagcacttgttgttgagatcggaccctgctggaagcagggaaaagaagcgtgaagatcgtaggattgagaacttagggaagcacattagcttgcttgaagtgctgattccatttcagccaagcaagggaaagaggaagtggagtcattttgcctttgaaggctgaggaaagattgatacccagttaattttgtttgctaaaggatgggggcaataatcggcccttgaggagctgcagcagtaggcatgtgctcagtctgcaggaattgttacctcactcccacagggtctagactagaaatccatcatctctatcgttgatatccttccatccaggaatagatttttcttactctacatatgtgtgtgtgcgtgcgtgtgtgtgcgtgtgtgggcatggggttgtgtcctggttgtgatattgaggtcttccttcctaacaaattaatactaaaatgaaacagcttttcttgtgtccttaagacaaaataaggaaggaaaacgtagctgcagttgtccacgatggatattggttctttaaaatatatctgaaagtagtagtcagaatgaattatggttggaaaactgaggaatcttctggttgcaggtgcaaagtgactttgtttattcttgtctcagtctccttgatagccacttcactctgctactactcaactttctcctaaaaatacttcatctattttcagtcctttctttctgtctactcaaaatggttctattaactttgcagtcatgagcttgttccagttacagtccctttgaagttcagggtgataaacagaatattcttctgtagaggaagagaaaggagtgaaagtttagcccactgagacctagagctttgtgatttcctaaccttgaaactctgtaatccctaaagttaaaatctccgcaagtggcacaacttcagaactaatagtatcactttgatttttctttttcctcccttagaaagtttctctagttctatagtttatttgttgaaggtactatgaccaaagaatcagctgctctacaggaatagcatggttccagtgaattagagaaaacctgctgtaaagccatggtagtgtctaagtggtatgttattatgatgtactagcatttatttacagaattatttattaacgtttacttccttcccctctgtaaatgtccatgactattgcccagagaaggcttacccctctctagggttgcagttgctttctttgtaataagtattttgccacacctgtaaaaaaaaaaaacctcacttttaactctctgccttgtttgggtaaaggcagtaactaagtttatgtttcagaactgcaaaacaaacaggatagttaccaatatggcccatgtgtcagattgatttttgtagcctctcactgaatccaacatatccacaagcaagttatctgtctttctacctgataatctaaattatcaggatatttgttttctgcctaaatgtttatactaagccgaggggagagaggtacctagaccatgtcatctacgagcttcagtaactaaagaaaaaggaacttccctgagtggcttgaatgtgtttgcccacagtctatatctatgtatatagaatgtctgtatgtattttacttatttaatatacattgaatggtaccttgctacagtatttctgacatttagagtagtgttgaaatactcggctagcatcagcaccactatagcactgtccgtgtcatatgagtcactaatattaactccagggacttctggataggctaatagatcattggatacgaagggctcttttgaagcttcagtataccatgtttgcatagtttatctttaaaaacaactttaaaggttcttttgtgagccaggatctcagactgccgtagcatgatgctgtccatctttagcgcatgggctgagaacacctcttccctgaggcttctgaaggttgctgtctgtcatgagtgcatgaaggaggccaagagtttatgctatgggaggaaacagtcactgatttgcctagattctgagagtctggcccatagccaaccacattttcctttgggataatttatttcctgtggcatctagccagaagaaattgaggatgtttcctttcacagctgctccaagcctgttgcccaattcacggtacaagggagcaccccttccctttcctctgaaggtacgccacccacctccgtcgcccacctcagcgcccaggagccttgggacttccttccatatgataaatcattcttcttcacgtcaatacacttcatattaatttctagtacagaaaatcttgacagctatcagaatgccttggtcatagtgttgttggcaaaattgaccatacaggtggcccatgtataaaatctgaattttaggggtttgtccccacctcgcatgctggcttttacagggaggtgtctgggattcctcattagcaatcaaaacttaattactgggatgcagagtccttactttatcgccagcccgtaggcatttctgaagtgcacttttttgaaacatcattttgctaactctcagcagtgtctaattaaactgagcaatacttttgtgaattttaattaatctcagcaaaaccatgatgggagagagtcctctgatggaaatgtagtccctggattatgtgtaacctttttattgctcttagatgcagaggatagaaagcattttttggtgcagtggtcttgtggcaaacacaagaccctctatgcgtctccaactgttatcctaatctagaaaatgaggactggcccctgggcaaaagtgacatgaggaatttactctggaagaggaaaatctgggtggctttccaaggctaagataggtttgtatttcaccctgtggccaagctacagaacttctgagattgtggaagaatttttgcaaccagcagggaaagaggcctcttactgcctaaacacaaagttacactgagcttttctactgtcctttgcctattgctccctctatcatgtaaagatctgggaaggatgagaggcagggcctgcttgtcatgagctgcactcttttctttttaactaatcattgacaattggaagaaaattgacgttaaagaagtttctccattgtcttactaacaaaaccttttgggtttcattaattgtccttgaaattgagttcctttggcatttttccttgcagtcatcagttaagcatgttgcatcctgaattcacagaagtttagctttgcaggtttgaatctctgtaatttaactcccgtggacttggtcgagttttcagcaggttgggagccacctctcttcatttcagcagtgagtcatcccttgacttttcaaatgacagaattttttccaattgtaaaattagcactgtaaaacaaagaaccaaagtggcatcctaagagttgttaaacctgaagtctagtttatgaggaattgtccaagttggagtttaaatagtatctgcttttgtctcaaagcatctaagttattctgacagaaaatggtaagtcagctttgcaggcagatgcgcctctgggcctcctaccttgctccacagctttctggccatcttgtctcccaggccatgccactgctctgccacatgtcagcaaatttctttccaccagtcttatagcatcttacatgatcaaatcatcacagaataaccccgtgatagattattgatagcaatagagaggggcggctttgtcactgatttttctctcagattccttttccatctctcatccataaaggaaggactgaaatccaaaggcattctccttttgtacctacagtatccagaacccacgtgggcagccttctgcttatgacaataattggcccattgcatgcagagagaatgtcttcatagagagaatgtcattaaatacttgaatctgcatgacagtttgacttgaatgcaacagcaggaaaattttgcaagttacataattgtatatacagtaggttttcttaagtctcttcggttcatcctttgtaatttgtgtgtgtatctgtagtattgcaggcttttggagactattcttacaggcagtatgtcagtcatcaaagaaaatgctgtcacctgccattgttgtatttgtgggtatttatagttgtatgtatgtaaatgcatcagtgtgtagattgcatatcagtgtatggtacatgtacatcaaaattatttttgtccttaatcagtgtgatatgaaaagcaagtacaacctcataggactgattatataatgaagttgttgagagtctccgtcgaactgggtaccgagctcg

SEQ ID NO: 348568 - DNA, 705 bp, Homo sapiens
cggccgcggcgtaggcgcacgtccggcgggctcctggagcctggaggaggccgaggggaccatgtccgggaggcgcttccacctctccaccaccgaccgcgtcatcaaagcaatgctggggtgaaaacaacacggctagaagctcattctgaaatggggagcactgaaattttggaaaaggagaccccagaaaatctcagtaatggtaccagcagcaatgtggaagcagccaaaaggttggccaaacgcctttatcagctggacagattcaaaagatcagatgttgcaaaacaccttggcaagaacaacgaatttagcaaactagttgcagaagaatatctgaagttttttgattttacaggaatgacgctggatcagtcactcaggtatttctttaaagcattctctcttgtgggagaaactcaagaacgagagagagttttaatacacttctccaatagatatttttattgtaacccagataccattgcttcacaagatggagtccattgccttacctgtgcaataatgcttcttaataccgatctacatggccacgtaagtgtggatttgtgaaacttagatccaaaacatgtcgggcttatctctgcttttatgttcaaacacatttattttctgcctccccgtttcccattctctacatggttcccatggcaggtgaataaaaagaaatctttgaaaaaa

SEQ ID NO: 348569 - DNA, 1319 bp, Homo sapiens
ctcttggagggaagctgtgttgagagaggaggctgggaagagggggacgtcctccttcaacttctttcaagttcgtatccctgagcccctgagggatccagtggcattctgggagaatgtcactgcggagtcagtgtgtagcagtttgtacttgcaacagaagcagctttagaagtacattaaaagagcccttgcggaagatgaaagtttgctgagcagatggaatgggagaatgctcttcaattcctgacaaaattatgggcagactgtttgctgacgaagcaatgctggggtgaaaacaacacggctagaagctcattctgaaatggggagcactgaaattttggaaaaggagaccccagaaaatctcagtaatggtaccagcagcaatgtggaagcagccaaaaggttggccaaacgcctttatcagctggacagattcaaaagatcagatgttgcaaaacaccttggcaagaacaacgaatttagcaaactagttgcagaagaatatctgaagttttttgattttacaggaatgacgctggatcagtcactcagagtctcgctctgtcacccaggctggagtgcagtagcaccatcttggctcactgcaacctccacctcccaggttcaagcagttctcctgaatcagcctcccgaataactgggactacaggaaaatgaatctacattgtcaagtgagggtcatctggattcatctcaaataaacagtgctcttagtgactccgagtagaataatgtgtggtttttgatacacttcctataatttaaagatatttttatacataaactaattccattatgtaaggaataaattacttatatctcccaatttcctcctcctataacaaattaatattaaaatgtgataacagacacaattaacagaaatctcctgtgcacaaagcaatgcaatccatagtggctttaatagagatgacagtcatgtaacaaaatgacagaagcaccctgatgcgtgtagagttttaaaacatagcctttatgatgatgtattgagtcttaagcggtctttgttttttttaaatctgaccttttaaaattggctacttgacacttggtcataatgaggaaattacctaccttcccaaggctttcttgatgtactgaccactctgttatcaccctgtcatcttttaagtggacattttttttttcttttgaaacggagtctcactctgtcgcctaggctggagtgtagtggcgcgacctcagcttactgcaacctccgcctcctgggttcaagcgattcctgcctcagcttcctgagtagctgggat

SEQ ID NO: 348570 - DNA, 370 bp, Homo sapiens
atctggtagccagcaactccaagttgacattctgtcagaatctagaacaaatgagaactaaaattctaacttaatttcttatctacataagacagtctctgtagttgcctctcatgtgcccagtaagtgcccaagtaatttgtcagtttgggaaatgaagcgaagtcttcaacagccattcacactctccaggtgggtaatacacaagtgtgctgcacacgtgcattttgaacagttttctgactaccgttgttctctggctttgccttcagaaaacccgctatgaaatgtatgtcagcattctcaaggaaggaggcaaagagctactgagtaacgatgaaagcgaggctgcaggactgaagaagtcgca

SEQ ID NO: 348571 - DNA, 219 bp, Homo sapiens
ctgttttagtgaattaaagtcattcagcacaggggattttttaaagtatgctgtgctttgttattgacttgttttttttttgaacgctaaatggcatcacgatttcctgcaggaggagcaactgaagtcacatgaaagtaagctgaagcagatcaccaccgagctggccgagcaccgctcatatccccccgacaagaaggtcaaagccaaggacgtcga

SEQ ID NO: 348572 - DNA, 624 bp, Homo sapiens
tcggcagtcactgaacttgggagctgaagaatactggacggggcttcggagaggaaggatggtccaggcgcaccccagggttgcgatgggctcttcttggtgtctgtatggttgctgcaatgctggggtgaaaacaacacggctagaagctcattctgaaatggggagcactgaaattttggaaaaggagaccccagaaaatctcagtaatggtaccagcagcaatgtggaagcagccaaaaggttggccaaacgcctttatcagctggacagattcaaaagatcagatgttgcaaaacaccttggcaagaacaacgaatttagcaaactagttgcagaagaatatctgaagttttttgattttacaggaatgacgctggatcagtcactcaggtatttctttaaagcattctctcttgtgggagaaactcaagaacgagagagagttttaatacacttctccaatagatatttttattgtaacccagataccattgcttcacaagatggagtccattgccttacctgtgcaataatgcttcttaataccgatctacatggccacaatgatcagtgagtcagaggagtacaatcaacagataaaagcaacttcagctagtcaag

SEQ ID NO: 348573 - DNA, 6567 bp, Homo sapiens
  misc_feature (6550)..(6550): n is a, c, g, or t
tcggcagtcactgaacttgggagctgaagaatactggacggggcttcggagaggaaggatggtccaggcgcaccccagggttgcgatgggctcttcttggtgtctgtatggttgctgcaatgctggggtgaaaacaacacggctagaagctcattctgaaatggggagcactgaaattttggaaaaggagaccccagaaaatctcagtaatggtaccagcagcaatgtggaagcagccaaaaggttggccaaacgcctttatcagctggacagattcaaaagatcagatgttgcaaaacaccttggcaagaacaacgaatttagcaaactagttgcagaagaatatctgaagttttttgattttacaggaatgacgctggatcagtcactcaggtatttctttaaagcattctctcttgtgggagaaactcaagaacgagagagagttttaatacacttctccaatagatatttttattgtaacccagataccattgcttcacaagatggagtccattgccttacctgtgcaataatgcttcttaataccgatctacatggccaccggtggtggcttttgcagccgtagccaagattaaggctcaggatctttgaggcaagaaggaagaggagctgctaagacagctggacaacctgaaggtagacctgtcccagataatattggaaagaagatgacctgtcaggagttcattgcaaatctgcaaggggtaaatgagggtgttgatttctccaaggatctgctgaaagctctgtacaactcaatcaagaatgagaagcttgaatgggcagtagatgatgaagagaaaaaaaagtctccctcagaaagtactgaggagaaagctaacggaacacatccaaagaccatcagtcgtattggaagtactactaacccatttttggacattcctcatgatccaaatgctgctgtgtacaaaagtggattcttggctcggaaaattcatgcagatatggatggaaagaagactccaagaggaaaacgaggatggaaaaccttttatgctgtactgaagggaacagttctttacttgcaaaaggatgaatacaagccagaaaaggccttgtctgaagaggacttgaaaaacgctgtgagtgtgcaccacgcattggcatccaaggccacggactatgagaagaaaccaaacgtgtttaaacttaaaactgccgactggagggtcttgctttttcaaactcagagcccagaggaaatgcaagggtggataaacaaaatcaattgtgtggcagctgtattttctgcaccaccatttccagcagcaatcggctctcagaagaagtttagccgcccacttctgcctgccactacaacaaaactgtctcaggaggagcaactgaagtcacatgaaagtaagctgaagcagatcaccaccgagctggccgagcaccgctcatatccccccgacaagaaggtcaaagccaaggacgtcgatgagtacaaactgaaagaccactatctggagtttgagaaaacccgctatgaaatgtatgtcagcattctcaaggaaggaggcaaagagctactgagtaacgatgaaagcgaggctgcaggactgaagaagtcgcactcgagtccttcgctgaacccggatacttctccaatcactgccaaagtcaagcgtaacgtgtcagagaggaaggatcaccgacctgaaacaccaagcattaagcaaaaagttacttagagtccatctgcggccaggaagtgctggtcatggagcaaaatagggtttttcaagatctttctggtaatccgtgaatatatttaaaaaaaaaaaagtctgtgacagattgtctttgctcttgatttcttttgctttgatgatttttgcaacttgatagctaatgcaccttttctgtgaggaggaggggatcgtgatttcagaatgaattatgtatcccttctcttttggttttctcttgtttgcagtctgctcagttgttttatgtattctcatatcaactgttaaacttttttttaaggttaaagaatttaatccattgtgaaacacttaactggacaaactgtagttttagtaaattctagctggagttaatatacgcctttatatgtgaaatcttgcccagtcacagaggtagaattgagcactcacagatgctccagtaagaatcacagtgctgggaatctagttgctccaatatgaggcagcttcatgtgcagcttagcacttgttgttgagatcggaccctgctggaagcagggaaaagaagcgtgaagatcgtaggattgagaacttagggaagcacattagcttgcttgaagtgctgattccatttcagccaagcaagggaaagaggaagtggagtcattttgcctttgaaggctgaggaaagattgatacccagttaattttgtttgctaaaggatgggggcaataatcggcccttgaggagctgcagcagtaggcatgtgctcagtctgcaggaattgttacctcactcccacagggtctagactagaaatccatcatctctatcgttgatatccttccatccaggaatagatttttcttactctacatatgtgtgtgtgcgtgcgtgtgtgtgcgtgtgtgggcatggggttgtgtcctggttgtgatattgaggtcttccttcctaacaaattaatactaaaatgaaacagcttttcttgtgtccttaagacaaaataaggaaggaaaacgtagctgcagttgtccacgatggatattggttctttaaaatatatctgaaagtagtagtcagaatgaattatggttggaaaactgaggaatcttctggttgcaggtgcaaagtgactttgtttattcttgtctcagtctccttgatagccacttcactctgctactactcaactttctcctaaaaatacttcatctattttcagtcctttctttctgtctactcaaaatggttctattaactttgcagtcatgagcttgttccagttacagtccctttgaagttcagggtgataaacagaatattcttctgtagaggaagagaaaggagtgaaagtttagcccactgagacctagagctttgtgatttcctaaccttgaaactctgtaatccctaaagttaaaatctccgcaagtggcacaacttcagaactaatagtatcactttgatttttctttttcctcccttagaaagtttctctagttctatagtttatttgttgaaggtactatgaccaaagaatcagctgctctacaggaatagcatggttccagtgaattagagaaaacctgctgtaaagccatggtagtgtctaagtggtatgttattatgatgtactagcatttatttacagaattatttattaacgtttacttccttcccctctgtaaatgtccatgactattgcccagagaaggcttacccctctctagggttgcagttgctttctttgtaataagtattttgccacacctgtaaaaaaaaaaaacctcacttttaactctctgccttgtttgggtaaaggcagtaactaagtttatgtttcagaactgcaaaacaaacaggatagttaccaatatggcccatgtgtcagattgatttttgtagcctctcactgaatccaacatatccacaagcaagttatctgtctttctacctgataatctaaattatcaggatatttgttttctgcctaaatgtttatactaagccgaggggagagaggtacctagaccatgtcatctacgagcttcagtaactaaagaaaaaggaacttccctgagtggcttgaatgtgtttgcccacagtctatatctatgtatatagaatgtctgtatgtattttacttatttaatatacattgaatggtaccttgctacagtatttctgacatttagagtagtgttgaaatactcggctagcatcagcaccactatagcactgtccgtgtcatatgagtcactaatattaactccagggacttctggataggctaatagatcattggatacgaagggctcttttgaagcttcagtataccatgtttgcatagtttatctttaaaaacaactttaaaggttcttttgtgagccaggatctcagactgccgtagcatgatgctgtccatctttagcgcatgggctgagaacacctcttccctgaggcttctgaaggttgctgtctgtcatgagtgcatgaaggaggccaagagtttatgctatgggaggaaacagtcactgatttgcctagattctgagagtctggcccatagccaaccacattttcctttgggataatttatttcctgtggcatctagccagaagaaattgaggatgtttcctttcacagctgctccaagcctgttgcccaattcacggtacaagggagcaccccttccctttcctctgaaggtacgccacccacctccgtcgcccacctcagcgcccaggagccttgggacttccttccatatgataaatcattcttcttcacgtcaatacacttcatattaatttctagtacagaaaatcttgacagctatcagaatgccttggtcatagtgttgttggcaaaattgaccatacaggtggcccatgtataaaatctgaattttaggggtttgtccccacctcgcatgctggcttttacagggaggtgtctgggattcctcattagcaatcaaaacttaattactgggatgcagagtccttactttatcgccagcccgtaggcatttctgaagtgcacttttttgaaacatcattttgctaactctcagcagtgtctaattaaactgagcaatacttttgtgaattttaattaatctcagcaaaaccatgatgggagagagtcctctgatggaaatgtagtccctggattatgtgtaacctttttattgctcttagatgcagaggatagaaagcattttttggtgcagtggtcttgtggcaaacacaagaccctctatgcgtctccaactgttatcctaatctagaaaatgaggactggcccctgggcaaaagtgacatgaggaatttactctggaagaggaaaatctgggtggctttccaaggctaagataggtttgtatttcaccctgtggccaagctacagaacttctgagattgtggaagaatttttgcaaccagcagggaaagaggcctcttactgcctaaacacaaagttacactgagcttttctactgtcctttgcctattgctccctctatcatgtaaagatctgggaaggatgagaggcagggcctgcttgtcatgagctgcactcttttctttttaactaatcattgacaattggaagaaaattgacgttaaagaagtttctccattgtcttactaacaaaaccttttgggtttcattaattgtccttgaaattgagttcctttggcatttttccttgcagtcatcagttaagcatgttgcatcctgaattcacagaagtttagctttgcaggtttgaatctctgtaatttaactcccgtggacttggtcgagttttcagcaggttgggagccacctctcttcatttcagcagtgagtcatcccttgacttttcaaatgacagaattttttccaattgtaaaattagcactgtaaaacaaagaaccaaagtggcatcctaagagttgttaaacctgaagtctagtttatgaggaattgtccaagttggagtttaaatagtatctgcttttgtctcaaagcatctaagttattctgacagaaaatggtaagtcagctttgcaggcagatgcgcctctgggcctcctaccttgctccacagctttctggccatcttgtctcccaggccatgccactgctctgccacatgtcagcaaatttctttccaccagtcttatagcatcttacatgatcaaatcatcacagaataaccccgtgatagattattgatagcaatagagaggggcggctttgtcactgatttttctctcagattccttttccatctctcatccataaaggaaggactgaaatccaaaggcattctccttttgtacctacagtatccagaacccacgtgggcagccttctgcttatgacaataattggcccattgcatgcagagagaatgtcttcatagagagaatgtcattaaatacttgaatctgcatgacagtttgacttgaatgcaacagcaggaaaattttgcaagttacataattgtatatacagtaggttttcttaagtctcttcggttcatcctttgtaatttgtgtgtgtatctgtagtattgcaggcttttggagactattcttacaggcagtatgtcagtcatcaaagaaaatgctgtcacctgccattgttgtatttgtgggtatttatagttgtatgtatgtaaatgcatcagtgtgtagattgcatatcagtgtatggtacatgtacatcaaaattattttccccctaaaccattgtaaaaaaaaaaccaacccctcccctaaatttcatataataaaacaaaccgcccagaggtatatatactggtatttttttatnaaccttaaactaaatta

SEQ ID NO: 348574 - DNA, 962 bp, Homo sapiens
ctcttggagggaagctgtgttgagagaggaggctgggaagagggggacgtcctccttcaacttctttcaagttcgtatccctgagcccctgagggatccagtggcattctgggagaatgtcactgcggagtcagtgtgtagcagtttgtacttgcaacagaagcagctttagaagtacattaaaagagcccttgcggaagatgaaagtttgctgagcagatggaatgggagaatgctcttcaattcctgacaaaattatgggcagactgtttgctgacgaagcaatgctggggtgaaaacaacacggctagaagctcattctgaaatggggagcactgaaattttggaaaaggagaccccagaaaatctcagtaatggtaccagcagcaatgtggaagcagccaaaaggttggccaaacgcctttatcagctggacagattcaaaagatcagatgttgcaaaacaccttggcaagaacaacgaatttagcaaactagttgcagaagaatatctgaagttttttgattttacaggaatgacgctggatcagtcactcaggtatttctttaaagcattctctcttgtgggagaaactcaagaacgagagagagttttaatacacttctccaatagatatttttattgtaacccagataccattgcttcacaagatggagtccattgccttacctgtgcaataatgcttcttaataccgatctacatggccacaatattggaaagaagatgacctgtcaggagttcattgcaaatctgcaaggggtaaatgagggtgttgatttctccaaggatctgctgaaagtgttgtgggattggagaagatgctgaaaccaaatgggcacctgtcctcagagatcacagactactgagaaatattggaggtgtctttctccataaaataaacagttattccatgttgaaataaaagtataagccaaattct

SEQ ID NO: 348575 - DNA, 7462 bp, Homo sapiens
cattatactcagagcctgatagctattttagctttgaaatgcccctcactccaatgatacaacagcgcattaaagaaggtggtcagttcttggagaggacatcaggatatcctgagtgtgtctgcagatggtggcatcgtgatgggctattctagtggcgtcaccaatgggctgaatgatgccagcgactccatctacacgaaaggcaccccggagattgctttctggggaagcaatgctggggtgaaaacaacacggctagaagctcattctgaaatggggagcactgaaattttggaaaaggagaccccagaaaatctcagtaatggtaccagcagcaatgtggaagcagccaaaaggttggccaaacgcctttatcagctggacagattcaaaagatcagatgttgcaaaacaccttggcaagaacaacgaatttagcaaactagttgcagaagaatatctgaagttttttgattttacaggaatgacgctggatcagtcactcaggtatttctttaaagcattctctcttgtgggagaaactcaagaacgagagagagttttaatacacttctccaatagatatttttattgtaacccagataccattgcttcacaagatggagtccattgccttacctgtgcaataatgcttcttaataccgatctacatggccacaatattggaaagaagatgacctgtcaggagttcattgcaaatctgcaaggggtaaatgagggtgttgatttctccaaggatctgctgaaagctctgtacaactcaatcaagaatgagaagcttgaatgggcagtagatgatgaagagaaaaaaaagtctccctcagaaagtactgaggagaaagctaacggaacacatccaaagaccatcagtcgtattggaagtactactaacccatttttggacattcctcatgatccaaatgctgctgtgtacaaaagtggattcttggctcggaaaattcatgcagatatggatggaaagaagactccaagaggaaaacgaggatggaaaaccttttatgctgtactgaagggaacagttctttacttgcaaaaggatgaatacaagccagaaaaggccttgtctgaagaggacttgaaaaacgctgtgagtgtgcaccacgcattggcatccaaggccacggactatgagaagaaaccaaacgtgtttaaacttaaaactgccgactggagggtcttgctttttcaaactcagagcccagaggaaatgcaagggtggataaacaaaatcaattgtgtggcagctgtattttctgcaccaccatttccagcagcaatcggctctcagaagaagtttagccgcccacttctgcctgccactacaacaaaactgtctcaggaggagcaactgaagtcacatgaaagtaagctgaagcagatcaccaccgagctggccgagcaccgctcatatccccccgacaagaaggtcaaagccaaggacgtcgatgagtacaaactgaaagaccactatctggagtttgagaaaacccgctatgaaatgtatgtcagcattctcaaggaaggaggcaaagagctactgagtaacgatgaaagcgaggctgcaggactgaagaagtcgcactcgagtccttcgctgaacccggatacttctccaatcactgccaaagtcaagcgtaacgtgtcagagaggaaggatcaccgacctgaaacaccaagcattaagcaaaaagttacttagagtccatctgcggccaggaagtgctggtcatggagcaaaatagggtttttcaagatctttctggtaatccgtgaatatatttaaaaaaaaaaaagtctgtgacaaaacggtgcattagtaattttttctattgtatatttttgttagtttctgtacagattgtctttgctcttgatttcttttgctttgatgatttttgcaacttgatagctaatgcaccttttctgtgaggaggaggggatcgtgatttcagaatgaattatgtatcccttctcttttggttttctcttgtttgcagtctgctcagttgttttatgtattctcatatcaactgttaaacttttttttaaggttaaagaatttaatccattgtgaaacacttaactggacaaactgtagttttagtaaattctagctggagttaatatacgcctttatatgtgaaatcttgcccagtcacagaggtagaattgagcactcacagatgctccagtaagaatcacagtgctgggaatctagttgctccaatatgaggcagcttcatgtgcagcttagcacttgttgttgagatcggaccctgctggaagcagggaaaagaagcgtgaagatcgtaggattgagaacttagggaagcacattagcttgcttgaagtgctgattccatttcagccaagcaagggaaagaggaagtggagtcattttgcctttgaaggctgaggaaagattgatacccagttaattttgtttgctaaaggatgggggcaataatcggcccttgaggagctgcagcagtaggcatgtgctcagtctgcaggaattgttacctcactcccacagggtctagactagaaatccatcatctctatcgttgatatccttccatccaggaatagatttttcttactctacatatgtgtgtgtgcgtgcgtgtgtgtgcgtgtgtgggcatggggttgtgtcctggttgtgatattgaggtcttccttcctaacaaattaatactaaaatgaaacagcttttcttgtgtccttaagacaaaataaggaaggaaaacgtagctgcagttgtccacgatggatattggttctttaaaatatatctgaaagtagtagtcagaatgaattatggttggaaaactgaggaatcttctggttgcaggtgcaaagtgactttgtttattcttgtctcagtctccttgatagccacttcactctgctactactcaactttctcctaaaaatacttcatctattttcagtcctttctttctgtctactcaaaatggttctattaactttgcagtcatgagcttgttccagttacagtccctttgaagttcagggtgataaacagaatattcttctgtagaggaagagaaaggagtgaaagtttagcccactgagacctagagctttgtgatttcctaaccttgaaactctgtaatccctaaagttaaaatctccgcaagtggcacaacttcagaactaatagtatcactttgatttttctttttcctcccttagaaagtttctctagttctatagtttatttgttgaaggtactatgaccaaagaatcagctgctctacaggaatagcatggttccagtgaattagagaaaacctgctgtaaagccatggtagtgtctaagtggtatgttattatgatgtactagcatttatttacagaattatttattaacgtttacttccttcccctctgtaaatgtccatgactattgcccagagaaggcttacccctctctagggttgcagttgctttctttgtaataagtattttgccacacctgtaaaaaaaaaaaacctcacttttaactctctgccttgtttgggtaaaggcagtaactaagtttatgtttcagaactgcaaaacaaacaggatagttaccaatatggcccatgtgtcagattgatttttgtagcctctcactgaatccaacatatccacaagcaagttatctgtctttctacctgataatctaaattatcaggatatttgttttctgcctaaatgtttatactaagccgaggggagagaggtacctagaccatgtcatctacgagcttcagtaactaaagaaaaaggaacttccctgagtggcttgaatgtgtttgcccacagtctatatctatgtatatagaatgtctgtatgtattttacttatttaatatacattgaatggtaccttgctacagtatttctgacatttagagtagtgttgaaatactcggctagcatcagcaccactatagcactgtccgtgtcatatgagtcactaatattaactccagggacttctggataggctaatagatcattggatacgaagggctcttttgaagcttcagtataccatgtttgcatagtttatctttaaaaacaactttaaaggttcttttgtgagccaggatctcagactgccgtagcatgatgctgtccatctttagcgcatgggctgagaacacctcttccctgaggcttctgaaggttgctgtctgtcatgagtgcatgaaggaggccaagagtttatgctatgggaggaaacagtcactgatttgcctagattctgagagtctggcccatagccaaccacattttcctttgggataatttatttcctgtggcatctagccagaagaaattgaggatgtttcctttcacagctgctccaagcctgttgcccaattcacggtacaagggagcaccccttccctttcctctgaaggtacgccacccacctccgtcgcccacctcagcgcccaggagccttgggacttccttccatatgataaatcattcttcttcacgtcaatacacttcatattaatttctagtacagaaaatcttgacagctatcagaatgccttggtcatagtgttgttggcaaaattgaccatacaggtggcccatgtataaaatctgaattttaggggtttgtccccacctcgcatgctggcttttacagggaggtgtctgggattcctcattagcaatcaaaacttaattactgggatgcagagtccttactttatcgccagcccgtaggcatttctgaagtgcacttttttgaaacatcattttgctaactctcagcagtgtctaattaaactgagcaatacttttgtgaattttaattaatctcagcaaaaccatgatgggagagagtcctctgatggaaatgtagtccctggattatgtgtaacctttttattgctcttagatgcagaggatagaaagcattttttggtgcagtggtcttgtggcaaacacaagaccctctatgcgtctccaactgttatcctaatctagaaaatgaggactggcccctgggcaaaagtgacatgaggaatttactctggaagaggaaaatctgggtggctttccaaggctaagataggtttgtatttcaccctgtggccaagctacagaacttctgagattgtggaagaatttttgcaaccagcagggaaagaggcctcttactgcctaaacacaaagttacactgagcttttctactgtcctttgcctattgctccctctatcatgtaaagatctgggaaggatgagaggcagggcctgcttgtcatgagctgcactcttttctttttaactaatcattgacaattggaagaaaattgacgttaaagaagtttctccattgtcttactaacaaaaccttttgggtttcattaattgtccttgaaattgagttcctttggcatttttccttgcagtcatcagttaagcatgttgcatcctgaattcacagaagtttagctttgcaggtttgaatctctgtaatttaactcccgtggacttggtcgagttttcagcaggttgggagccacctctcttcatttcagcagtgagtcatcccttgacttttcaaatgacagaattttttccaattgtaaaattagcactgtaaaacaaagaaccaaagtggcatcctaagagttgttaaacctgaagtctagtttatgaggaattgtccaagttggagtttaaatagtatctgcttttgtctcaaagcatctaagttattctgacagaaaatggtaagtcagctttgcaggcagatgcgcctctgggcctcctaccttgctccacagctttctggccatcttgtctcccaggccatgccactgctctgccacatgtcagcaaatttctttccaccagtcttatagcatcttacatgatcaaatcatcacagaataaccccgtgatagattattgatagcaatagagaggggcggctttgtcactgatttttctctcagattccttttccatctctcatccataaaggaaggactgaaatccaaaggcattctccttttgtacctacagtatccagaacccacgtgggcagccttctgcttatgacaataattggcccattgcatgcagagagaatgtcttcatagagagaatgtcattaaatacttgaatctgcatgacagtttgacttgaatgcaacagcaggaaaattttgcaagttacataattgtatatacagtaggttttcttaagtctcttcggttcatcctttgtaatttgtgtgtgtatctgtagtattgcaggcttttggagactattcttacaggcagtatgtcagtcatcaaagaaaatgctgtcacctgccattgttgtatttgtgggtatttatagttgtatgtatgtaaatgcatcagtgtgtagattgcatatcagtgtatggtacatgtacatcaaaattatttttgtccttaatcagtgtgatatgaaaagcaagtacaacctcataggactgattatataatgaagttgttgagagtatatatagtggtattgttttattaaacttaaactcaaataatattttgattaaaatttttaataagactttatgctagaaaattctttgagctttgaatcaccagggcaaaaatgactttcaactaaccttgtgaatcttttgcagtgtactgtgtgcaataccaagggcatagctccctgtaatttgggaaatacagaaagaaaaaaaaaaaaaaaaaaaaggcagcctgtgcagtcttagtaactttagtattaagagcacttaaagtcaaactgacaattttgggcttattacaaaatgtgatgctttaaagcacacgttctttattgttgttgtaattagtccataaaaaatatagctttcggaagaattaaatacccaccatatcatttatgtatttgtgtatgttttacgggagatcaaaccactctcgtggtgccgcatccgtactcgcttgacttggaagaaatatcacaagcactaaagtatatcagggcatcccaggattgggtactgtatcctaggtttgcagttgcagaaattagcatctagtgtcacaggtaaaagaatttcaggaccaggtttaaactttattttaaatatttttatacttaggtctctttttcctgcctctccccaaagaagagccactggccttagttgtttgagcttactgcttatattatagagtgtaaataggtaactagagactaaaattttattaaccagcatgtttggtatatttaaagcagtgactgagtgtgtttgagtgagtggctgagtgcagtgtcttttgtttaaacacactgcctcgtgtctttgtagctgattcagagagtttgaattgtggggtgggagactaacttcagctccagg

SEQ ID NO: 348576 - DNA, 1853 bp, Homo sapiens
ccatccaataacttccaaggtatttatgactcatttagggctccatcaaataaaatgactaacaggatctatcataaagccacaccagccttatgttctcatctcaaaaatgctgtgacagctttttggctgctttaaccataagaaaaatgattggtggatgattttattagcccaggcttttaaaaactttcatctaggccacgtgcggtggctcacgcctttaatcccagcactttgggaggctgaggcagatggatcgcctgaggttgggagttcgagaccagcctggccagcatggtgaaaccctgtctctactaaaaatacaaaaattagccaggtgtggtggcgcacacctgtagtcccagctactcgggaggctgaggcaggagaattggttgaacccaggaggcggaggttgcagtgagcagagatcgtgccactgcactccagcctgggtggacagagcaagactccgtctcaaagaaacaaacaaaaaattaaaagggatagaatataatgaaatatattttgaacttaaattatattctatatgtgtatcttcctaggcaaaagctgtaatttccagagagaccattaggaacaggtagtatctatttttctccattatttatttctagaaactcataaaatggattgtatttttctataagaacaaaatattaattaaggtatagatgactgaccaagggcttaatcaaataaaatgactaacagcatctatcataaagccacacaagccttatgttctcatctcaaaaatgctgtgacagctttttggctgctttaaccataagaaaaatgattggtggatgattttattagcccaggcttttaaaaactttcatctaggccacgtgcggtggctcatgcctgtaatcccggcactttgggaggcctgagtggatggatcacttgaggtcaggagttcaggaccagcctggccaacatgatgaaaccctgtctctactaaatatacaaaaattagttgggtgttatggtgcatgcctgtaatcccagctactcgggaggctgaggcaggagaattgcttgaactcgggaggtggagattgcagtaagccgagatcgtgccactgcactccagcctgggtgatagagcaagactgtctcaaaaaagaaaaaaaagaaaaaattttaatttaatccttctgtagaaacaggcattcagaaccattccattgatcttaataaagctgctctttactgtttctagtcaaaaatgagacttcgatcaaaccataagattttatactgcagatagtcagcttcaccaaagccgcagaggaaacatgtcgagatcaggcttcctgcttgatagtctcttgactaccattaaaacgaatattgggaggtcatgaaagtcattggtaggccattagcattgatatctttaaaacatctaccctaaaccatctgctatggacccataataagaggcctgttgtatatgaaattgtctagaattcaggtgcaggtctttgccggttaagtaagggagcaacacgtaaaatgggagaggagtggggtgtactcacttgcctcctcttttgtcctgatttaaccagcatttttcaaccctgggaaaatttgcagaatctaagttgattgtaatgattttgagctgcagcagctttaactcttaccctttttccacatagttatggtgtttgagttggaaagaaacaactataggtagctacacgtacataattatctctttattcacaaagggtatagtaaaattgattgtaaataactttctaagtgccaatattcaaaacttttggattaaaatgtatttttcaccgtga

SEQ ID NO: 348577 - DNA, 1914 bp, Homo sapiens
ccatccaataacttccaaggtatttatgactcatttagggctccatcaaataaaatgactaacaggatctatcataaagccacaccagccttatgttctcatctcaaaaatgctgtgacagctttttggctgctttaaccataagaaaaatgattggtggatgattttattagcccaggcttttaaaaactttcatctaggccacgtgcggtggctcacgcctttaatcccagcactttgggaggctgaggcagatggatcgcctgaggttgggagttcgagaccagcctggccagcatggtgaaaccctgtctctactaaaaatacaaaaattagccaggtgtggtggcgcacacctgtagtcccagctactcgggaggctgaggcaggagaattggttgaacccaggaggcggaggttgcagtgagcagagatcgtgccactgcactccagcctgggtggacagagcaagactccgtctcaaagaaacaaacaaaaaattaaaagggatagaatataatgaaatatattttgaacttaaattatattctatatgtgtatcttcctaggcaaaagctgtaatttccagagagaccattaggaacaggtagtatctatttttctccattatttatttctagaaactcataaaatggattgtatttttctataagaacaaaatattaattaaggtatagatgactgaccaagggcttaatcaaataaaatgactaacagcatctatcataaagccacacaagccttatgttctcatctcaaaaatgctgtgacagctttttggctgctttaaccataagaaaaatgattggtggatgattttattagcccaggcttttaaaaactttcatctaggccacgtgcggtggctcatgcctgtaatcccggcactttgggaggcctgagtggatggatcacttgaggtcaggagttcaggaccagcctggccaacatgatgaaaccctgtctctactaaatatacaaaaattagttgggtgttatggtgcatgcctgtaatcccagctactcgggaggctgaggcaggagaattgcttgaactcgggaggtggagattgcagtaagccgagatcgtgccactgcactccagcctgggtgatagagcaagactgtctcaaaaaagaaaaaaaagaaaaaattttaatttaatccttctgtagaaacaggcattcagaaccattccattgatcttaataaagctgctctttactgtttctagtcaaaaatgagacttcgatcaaaccataagattttatactgcagatagtcagcttcaccaaagccgcagaggaaacatgtcgagatcaggcttcctgcttgatagtctcttgactaccattaaaacgaatattgggaggtcatgaaagtcattggtaggccattagcattgatatctttaaaacatctaccctaaaccatctgctatggacccataataagaggcctgttgtatatgaaattgtctagaattcaggtgcaggtctttgccggttaagtaagggagcaacacgtaaaatgggagaggagtggggtgtactcacttgcctcctcttttgtcctgatttaaccagcatttttcaaccctgggaaaatttgcagaatctaagttgattgtaatgattttgagctgcagcagctttaactcttaccctttttccacatagttatggtgtttgagttggaaagaaacaactataggtagctacacgtacataattatctctttattcacaaagggtatagtaaaattgattgtaaataactttctaagtgccaatattcaaaacttttggattaaaatgtatttttcaccgtgaaaaaaaatttggatgtatttatttcatttaaacaatttaaatggggctctttaaccaaaaa

SEQ ID NO: 348578 - DNA, 1003 bp, Homo sapiens
cggggtaaaaacaaggaagcagggatgaggagtcacaatgggatgcactcgggggatcgtttgggaggcctgagtggatggatcacttgaggtcaggagttcaggaccagcctggccaacatgatgaaaccctgtctctactaaatatacaaaaattagttgggtgttatggtgcatgcctgtaatcccagctactcgggaggctgaggcaggagaattgcttgaactcgggaggtggagattgcagtaagccgagatcgtgccactgcactccagcctgggtgatagagcaagactgtctcaaaaaagaaaaaaaagaaaaaattttaatttaatccttctgtagaaacaggcattcagaaccattccattgatcttaataaagctgctctttactgtttctagtcaaaaatgagacttcgatcaaaccataagattttatactgcagatagtcagcttcaccaaagccgcagaggaaacatgtcgagatcaggcttcctgcttgatagtctcttgactaccattaaaacgaatattgggaggtcatgaaagtcattggtaggccattagcattgatatctttaaaacatctaccctaaaccatctgctatggacccataataagaggcctgttgtatatgaaattgtctagaattcaggtgcaggtctttgccggttaagtaagggagcaacacgtaaaatgggagaggagtggggtgtactcacttgcctcctcttttgtcctgatttaaccagcatttttcaaccctgggaaaatttgcagaatctaagttgattgtaatgattttgagctgcagcagctttaactcttaccctttttccacatagttatggtgtttgagttggaaagaaacaactataggtagctacacgtacataattatctctttattcacaaagggtatagtaaaattgattgtaaataactttctaagtgccaatattcaaaacttttggattaaaatgtatttttcaccgtga

SEQ ID NO: 348579 - DNA, 1043 bp, Homo sapiens
ccatccaataacttccaaggtatttatgactcatttagggctccatcaaataaaatgactaacaggatctatcataaagccacaccagccttatgttctcatctcaaaaatgctgtgacagctttttggctgctttaaccataagaaaaatgattggtggatgattttattagcccaggcttttaaaaactttcatctaggccacgtgcggtggctcacgcctttaatcccagcactttgggaggctgaggcagatggatcgcctgaggttgggagttcgagaccagcctggccagcatggtgaaaccctgtctctactaaaaatacaaaaattagccaggtgtggtggcgcacacctgtagtcccagctactcgggaggctgaggcaggagaattggttgaacccaggaggcggaggttgcagtgagcagagatcgtgccactgcactccagcctgggtggacagagcaagactccgtctcaaagaaacaaacaaaaaattaaaagggatagaatataatgaaatatattttgaacttaaattatattctatatgtgtatcttcctaggcaaaagctgtaatttccagagagaccattaggaacagactgcctgcgctgctgacttaaggccccaacaccaaacacagaagcaacagccttacacagagtgttcagcaagctccaacaattgtgtaagcagcccaagctgacagagatagaaacaacacaaggacccatcagcagacgaatggatgatcaaaacgtgcttgcaggggaatcactgaaatggggacaggccataaaaggacaaccagaagagtggcttcagcaaaggcatcgtttttcagagcaagctagagaatcctgccagcgtcctcaggcagggcccctgggcacagaggttaggcaagggagtgtcccagcatgttgatgccctgagcatcagaataatgccatagaggagcttccaaagagttcatttcaggttttgtaagccgaacatttctaggcaaataaaatttgattttgtgaaaaaagctt

SEQ ID NO: 348580 - DNA, 1307 bp, Homo sapiens
ccatccaataacttccaaggtatttatgactcatttagggctccatcaaataaaatgactaacaggatctatcataaagccacaccagccttatgttctcatctcaaaaatgctgtgacagctttttggctgctttaaccataagaaaaatgattggtggatgattttattagcccaggcttttaaaaactttcatctaggccacgtgcggtggctcacgcctttaatcccagcactttgggaggctgaggcagatggatcgcctgaggttgggagttcgagaccagcctggccagcatggtgaaaccctgtctctactaaaaatacaaaaattagccaggtgtggtggcgcacacctgtagtcccagctactcgggaggctgaggcaggagaattggttgaacccaggaggcggaggttgcagtgagcagagatcgtgccactgcactccagcctgggtggacagagcaagactccgtctcaaagaaacaaacaaaaaattaaaagggatagaatataatgaaatatattttgaacttaaattatattctatatgtgtatcttcctaggcaaaagctgtaatttccagagagaccattaggaacagactgcctgcgctgctgacttaaggccccaacaccaaacacagaagcaacagccttacacagagtgttcagcaagctccaacaattgtgtaagcagcccaagctgacagagatagaaacaacacaaggacccatcagcagacgaatggatgatcaaaacgtgataggaaaaatgaggcctaaagaagttaagaaaataccatggaaatgtcactgctgaactgccatacgtaggatccgaaagaaattggaactgtataatgatgactgcacaagataccaaatcagaagaggttccatttccaagttctgattcataagagcttccaaagtagagccggtacatattgaattttgattcatctggaaggatctcggacatctctaaagaaacaagggactgatctaagccacattctccatctccagctgaatcgtcagagccactgctatggttaagaaagaccattgaagacagacttaggtcactatcagagctggaacttccatcctaaaatacacaaaaggacaaccagtttaaagatgtaaacaattttagtctcagaaataaataataacatagatagcattctattagagcaatacaagaaacttagaagcatttttcaaagagctcattaattctctaacggttttgaggcacatggtaaaaatttaactattaaaattataaagacaaga

SEQ ID NO: 348581 - DNA, 1276 bp, Homo sapiens
ccatccaataacttccaaggtatttatgactcatttagggctccatcaaataaaatgactaacaggatctatcataaagccacaccagccttatgttctcatctcaaaaatgctgtgacagctttttggctgctttaaccataagaaaaatgattggtggatgattttattagcccaggcttttaaaaactttcatctaggccacgtgcggtggctcacgcctttaatcccagcactttgggaggctgaggcagatggatcgcctgaggttgggagttcgagaccagcctggccagcatggtgaaaccctgtctctactaaaaatacaaaaattagccaggtgtggtggcgcacacctgtagtcccagctactcgggaggctgaggcaggagaattggttgaacccaggaggcggaggttgcagtgagcagagatcgtgccactgcactccagcctgggtggacagagcaagactccgtctcaaagaaacaaacaaaaaattaaaagggatagaatataatgaaatatattttgaacttaaattatattctatatgtgtatcttcctaggcaaaagctgtaatttccagagagaccattaggaacagactgcctgcgctgctgacttaaggccccaacaccaaacacagaagcaacagccttacacagagtgttcagcaagctccaacaattgtgtaagcagcccaagctgacagagatagaaacaacacaaggacccatcagcagacgaatggatgatcaaaacgtggttcactgatacctgtgttatagaaccaccatcaagtgaaaattgccataacacaggaactgtataatgatgactgcacaagataccaaatcagaagaggttccatttccaagttctgattcataagagcttccaaagtagagccggtacatattgaattttgattcatctggaaggatctcggacatctctaaagaaacaagggactgatctaagccacattctccatctccagctgaatcgtcagagccactgctatggttaagaaagaccattgaagacagacttaggtcactatcagagctggaacttccatcctaaaatacacaaaaggacaaccagtttaaagatgtaaacaattttagtctcagaaataaataataacatagatagcattctattagagcaatacaagaaacttagaagcatttttcaaagagctcattaattctctaacggttttgaggcacatggtaaaaatttaactattaaaattataaagacaaga

SEQ ID NO: 348582 - DNA, 595 bp, Homo sapiens
ttgctcttgggttctcagcatccagaactgtgagaaatgaatgtgtgttgtttaaaccactcaggctacggtattttgttgcagcagcccaagctgacagagatagaaacaacacaaggacccatcagcagacgaatggatgatcaaaacgtggtgaggtcgtgcagtgggatattattcagccgtagaaggaatgaaattctgatacatgctataatgatgaaccttgaaaacatgttaatggaaataagccaaacttaaaaggacaaatattgtataattccacttatatgagttagttacctagaataggcaaattatgtcatagatacagaacattagaggttaccagggttgtgggaagaggggtattgtgggtacaaattttcggtttggagtgattttgaaaaaattctggaaatgggtagtgacagtagtcaacatgatgaatgtacttaatgacactaaattgtacacttaaaaatggttaatactgggctggcgcagtggctcatggctgtaaatcccagaactttgggaggccaagacaggcggatcatgaggtcaggagattgagaccattctggctaacatg

SEQ ID NO: 348583 - DNA, 1359 bp, Homo sapiens
atcttgtgatgtatatctgggattgtccgaaaattatgaaatgaaagttgcatcacacttcatgaaacctcttgcggttgggctacttgaaagtgactttgaccttgtatagaaaggtatgtcatcaccaacccgccctatgagtttgagctcgtgccgacggacctgatcttctgcttaatgcagtttgaccacaatgccggccagtcccgggccagcctgtcccattcctcccactcgtcgcagtcctccagcaagaagagctcctctgttcactccatcccatccacagcaaaccgacagaaccggcccaagtccagggagtcccgggacaaacagaaaaaagaaatggtttacagatgaaccggataatgcctatcccagaaacattcaaatcaagcccatgagtacccacatggctaaccagatcaaccaatataaatccacaagcagcttgattccaccaatcagagaagttgaagatgaatgttgactcccaggagaccagaactatttttttaaagcctgacaaacttcataaatggtgatgtgacttttcttcttacatgctgaatcactggtggaaacgttaggataagcaagaattgccagaaaataaagtagacagatctttctctttgtctgccttgaatattgcttccatgtattttggaaaagaaaatgatttcatttataaatgaacatactaaaatagtcatgtatagcctctagcattttaaattatttttatttattagaaagaaaatatattttttcttttcattgtcaaatatcttccctatatctaaacaatgcaaaatctaaatgaataagtggtcagactccttaatgtgtttttctcttctttctctctttttctttgaggagaatgatggtcaccaccacaattaattgtaattaagggaaatgaattattaaaacaattttaaaatggccaatgatgtatacatgtattttagtaaatccagaaaagaagactaaggggacaggtgaatacctgctcctcgcctggatgggtgtgtattttgatctgcattgacaccagctcttaataaatggaaacttatttattttcacagttgaaagtcatatttttgtagttctagttttcattctgtagttctcacccctttgttcatatttttaaagggaagaccttctgctgcttttctacaattggcagatcaggtttgtctggccaactaaggacaccaggagggttgtgggcacacctgggatgtggaagctgaggaccagatgcacacaaggcattgctctgtttgctgttctagtggtagagactcctacgtgctgttatgcttctcattttatatttcc

SEQ ID NO: 348584 - DNA, 4098 bp, Homo sapiens
attccggggtgtttggggtggcgctggcggcgggaggagctcccccgaagcccctgcaccggctgcccgttgctagctatggcaaatggtggcggcggcggcggcggcagcagcggcggcggcggcggcggcggaggcagcagtcttagaatgagtagcaatatccacgcgaaccatctcagcctagacgcgtcctcctcctcctcctcctcctcttcctcttcttcttcttcctcctcctcttcctcctcgtcctcggtccacgagcccaagatggatgcgctcatcatcccggtgaccatggaggtgccgtgcgacagccggggccaacgcatgtggtgggctttcctggcctcctccatggtgactttcttcgggggcctcttcatcatcttgctctggcggacgctcaagtacctgtggaccgtgtgctgccactgcgggggcaagacgaaggaggcccagaagattaacaatggctcaagccaggcggatggcactctcaaaccagtggatgaaaaagaggaggcagtggccgccgaggtcggctggatgacctccgtgaaggactgggcgggggtgatgatatccgcccagacactgactggcagagtcctggttgtcttagtctttgctctcagcatcggtgcacttgtaatatacttcatagattcatcaaacccaatagaatcctgccagaatttctacaaagatttcacattacagatcgacatggctttcaacgtgttcttccttctctacttcggcttgcggtttattgcagccaacgataaattgtggttctggctggaagtgaactctgtagtggatttcttcacggtgccccccgtgtttgtgtctgtgtacttaaacagaagttggcttggtttgagatttttaagagctctgagactgatacagttttcagaaattttgcagtttctgaatattcttaaaacaagtaattccatcaagctggtgaatctgctctccatatttatcagcacgtggctgactgcagccgggttcatccatttggtggagaattcaggggacccatgggaaaatttccaaaacaaccaggctctcacctactgggaatgtgtctatttactcatggtcacaatgtccaccgttggttatggggatgtttatgcaaaaaccacacttgggcgcctcttcatggtcttcttcatcctcgggggactggccatgtttgccagctacgtccctgaaatcatagagttaataggaaaccgcaagaaatacgggggctcctatagtgcggttagtggaagaaagcacattgtggtctgcggacacatcactctggagagtgtttccaacttcctgaaggactttctgcacaaggaccgggatgacgtcaatgtggagatcgtttttcttcacaacatctcccccaacctggagcttgaagctctgttcaaacgacattttactcaggtggaattttatcagggttccgtcctcaatccacatgatcttgcaagagtcaagatagagtcagcagatgcatgcctgatccttgccaacaagtactgcgctgacccggatgcggaggatgcctcgaatatcatgagagtaatctccataaagaactaccatccgaagataagaatcatcactcaaatgctgcagtatcacaacaaggcccatctgctaaacatcccgagctggaattggaaagaaggtgatgacgcaatctgcctcgcagagttgaagttgggcttcatagcccagagctgcctggctcaaggcctctccaccatgcttgccaacctcttctccatgaggtcattcataaagattgaggaagacacatggcagaaatactacttggaaggagtctcaaatgaaatgtacacagaatatctctccagtgccttcgtgggtctgtccttccctactgtttgtgagctgtgttttgtgaagctcaagctcctaatgatagccattgagtacaagtctgccaaccgagagagccgtatattaattaatcctggaaaccatcttaagatccaagaaggtactttaggatttttcatcgcaagtgatgccaaagaagttaaaagggcatttttttactgcaaggcctgtcatgatgacatcacagatcccaaaagaataaaaaaatgtggctgcaaacggcttgaagatgagcagccgtcaacactatcaccaaaaaaaaagcaacggaatggaggcatgcggaactcacccaacacctcgcctaagctgatgaggcatgaccccttgttaattcctggcaatgatcagattgacaacatggactccaatgtgaagaagtacgactctactgggatgtttcactggtgtgcacccaaggagatagagaaagtcatcctgactcgaagtgaagctgccatgaccgtcctgagtggccatgtcgtggtctgcatctttggcgacgtcagctcagccctgatcggcctccggaacctggtgatgccgctccgtgccagcaactttcattaccatgagctcaagcacattgtgtttgtgggctctattgagtacctcaagcgggaatgggagacgcttcataacttccccaaagtgtccatattgcctggtacgccattaagtcgggctgatttaagggctgtcaacatcaacctctgtgacatgtgcgttatcctgtcagccaatcagaataatattgatgatacttcgctgcaggacaaggaatgcatcttggcgtcactcaacatcaaatctatgcagtttgatgacagcatcggagtcttgcaggctaattcccaagggttcacacctccaggaatggatagatcctctccagataacagcccagtgcacgggatgttacgtcaaccatccatcacaactggggtcaacatccccatcatcactgaactagtgaacgatactaatgttcagtttttggaccaagacgatgatgatgaccctgatacagaactgtacctcacgcagccctttgcctgtgggacagcatttgccgtcagtgtcctggactcactcatgagcgcgacgtacttcaatgacaatatcctcaccctgatacggaccctggtgaccggaggagccacgccggagctggaggctctgattgctgaggaaaacgcccttagaggtggctacagcaccccgcagacactggccaatagggaccgctgccgcgtggcccagttagctctgctcgatgggccatttgcggacttaggggatggtggttgttatggtgatctgttctgcaaagctctgaaaacatataatatgctttgttttggaatttaccggctgagagatgctcacctcagcacccccagtcagtgcacaaagaggtatgtcatcaccaacccgccctatgagtttgagctcgtgccgacggacctgatcttctgcttaatgcagtttgaccacaatgccggccagtcccgggccagcctgtcccattcctcccactcgtcgcagtcctccagcaagaagagctcctctgttcactccatcccatccacagcaaaccgacagaaccggcccaagtccagggagtcccgggacaaacagaagtacgtgcaggaagagcggctttgatatgtgtatccaccgccactgtgtgaaactgtatctgccactcatttccccagttggtgtttccaacaaagtaactttccctgttttcccctgtagtccccccctttttttttacacatatttgcatatgtatgatagtgtgcatgtggttgtcatttttatttcaccaccataaaacccttgagcacaacagcaaataagcagacggaccaaaagttatttatgattctgggggaaaaataacccaaaggcatgctccagacataaatagctcactgcaggaacgagttcacagattagaagggagcacttgtgatcaacgtcagttaggcagagcaagtttatttaatgtaaaagaaaagttgattctgatttatcaggattatcagggtgctttgggttttgattttgttgttgttgttgttttcctttctttctttttttgtcgacgcggccgcgaatttagtagtagtaggcggccgc

SEQ ID NO: 348585 - DNA, 6195 bp, Homo sapiens
attccggggtgtttggggtggcgctggcggcgggaggagctcccccgaagcccctgcaccggctgcccgttgctagctatggcaaatggtggcggcggcggcggcggcagcagcggcggcggcggcggcggcggaggcagcagtcttagaatgagtagcaatatccacgcgaaccatctcagcctagacgcgtcctcctcctcctcctcctcctcttcctcttcttcttcttcctcctcctcttcctcctcgtcctcggtccacgagcccaagatggatgcgctcatcatcccggtgaccatggaggtgccgtgcgacagccggggccaacgcatgtggtgggctttcctggcctcctccatggtgactttcttcgggggcctcttcatcatcttgctctggcggacgctcaagtacctgtggaccgtgtgctgccactgcgggggcaagacgaaggaggcccagaagattaacaatggctcaagccaggcggatggcactctcaaaccagtggatgaaaaagaggaggcagtggccgccgaggtcggctggatgacctccgtgaaggactgggcgggggtgatgatatccgcccagacactgactggcagagtcctggttgtcttagtctttgctctcagcatcggtgcacttgtaatatacttcatagattcatcaaacccaatagaatcctgccagaatttctacaaagatttcacattacagatcgacatggctttcaacgtgttcttccttctctacttcggcttgcggtttattgcagccaacgataaattgtggttctggctggaagtgaactctgtagtggatttcttcacggtgccccccgtgtttgtgtctgtgtacttaaacagaagttggcttggtttgagatttttaagagctctgagactgatacagttttcagaaattttgcagtttctgaatattcttaaaacaagtaattccatcaagctggtgaatctgctctccatatttatcagcacgtggctgactgcagccgggttcatccatttggtggagaattcaggggacccatgggaaaatttccaaaacaaccaggctctcacctactgggaatgtgtctatttactcatggtcacaatgtccaccgttggttatggggatgtttatgcaaaaaccacacttgggcgcctcttcatggtcttcttcatcctcgggggactggccatgtttgccagctacgtccctgaaatcatagagttaataggaaaccgcaagaaatacgggggctcctatagtgcggttagtggaagaaagcacattgtggtctgcggacacatcactctggagagtgtttccaacttcctgaaggactttctgcacaaggaccgggatgacgtcaatgtggagatcgtttttcttcacaacatctcccccaacctggagcttgaagctctgttcaaacgacattttactcaggtggaattttatcagggttccgtcctcaatccacatgatcttgcaagagtcaagatagagtcagcagatgcatgcctgatccttgccaacaagtactgcgctgacccggatgcggaggatgcctcgaatatcatgagagtaatctccataaagaactaccatccgaagataagaatcatcactcaaatgctgcagtatcacaacaaggcccatctgctaaacatcccgagctggaattggaaagaaggtgatgacgcaatctgcctcgcagagttgaagttgggcttcatagcccagagctgcctggctcaaggcctctccaccatgcttgccaacctcttctccatgaggtcattcataaagattgaggaagacacatggcagaaatactacttggaaggagtctcaaatgaaatgtacacagaatatctctccagtgccttcgtgggtctgtccttccctactgtttgtgagctgtgttttgtgaagctcaagctcctaatgatagccattgagtacaagtctgccaaccgagagagccgtatattaattaatcctggaaaccatcttaagatccaagaaggtactttaggatttttcatcgcaagtgatgccaaagaagttaaaagggcatttttttactgcaaggcctgtcatgatgacatcacagatcccaaaagaataaaaaaatgtggctgcaaacggcccaagatgtccatctacaagagaatgagacgggcatgttgttttgattgcggacgttctgagcgtgactgctcatgcatgtcaggccgtgtgcgtggtaacgtggacacccttgagagagccttcccactttcttctgtctctgttaatgattgctccaccagtttccgtgcctttgaagatgagcagccgtcaacactatcaccaaaaaaaaagcaacggaatggaggcatgcggaactcacccaacacctcgcctaagctgatgaggcatgaccccttgttaattcctggcaatgatcagattgacaacatggactccaatgtgaagaagtacgactctactgggatgtttcactggtgtgcacccaaggagatagagaaagtcatcctgactcgaagtgaagctgccatgaccgtcctgagtggccatgtcgtggtctgcatctttggcgacgtcagctcagccctgatcggcctccggaacctggtgatgccgctccgtgccagcaactttcattaccatgagctcaagcacattgtgtttgtgggctctattgagtacctcaagcgggaatgggagacgcttcataacttccccaaagtgtccatattgcctggtacgccattaagtcgggctgatttaagggctgtcaacatcaacctctgtgacatgtgcgttatcctgtcagccaatcagaataatattgatgatacttcgctgcaggacaaggaatgcatcttggcgtcactcaacatcaaatctatgcagtttgatgacagcatcggagtcttgcaggctaattcccaagggttcacacctccaggaatggatagatcctctccagataacagcccagtgcacgggatgttacgtcaaccatccatcacaactggggtcaacatccccatcatcactgaactagtgaacgatactaatgttcagtttttggaccaagacgatgatgatgaccctgatacagaactgtacctcacgcagccctttgcctgtgggacagcatttgccgtcagtgtcctggactcactcatgagcgcgacgtacttcaatgacaatatcctcaccctgatacggaccctggtgaccggaggagccacgccggagctggaggctctgattgctgaggaaaacgcccttagaggtggctacagcaccccgcagacactggccaatagggaccgctgccgcgtggcccagttagctctgctcgatgggccatttgcggacttaggggatggtggttgttatggtgatctgttctgcaaagctctgaaaacatataatatgctttgttttggaatttaccggctgagagatgctcacctcagcacccccagtcagtgcacaaagaggtatgtcatcaccaacccgccctatgagtttgagctcgtgccgacggacctgatcttctgcttaatgcagtttgaccacaatgccggccagtcccgggccagcctgtcccattcctcccactcgtcgcagtcctccagcaagaagagctcctctgttcactccatcccatccacagcaaaccgacagaaccggcccaagtccagggagtcccgggacaaacagaagtacgtgcaggaagagcggctttgatatgtgtatccaccgccactgtgtgaaactgtatctgccactcatttccccagttggtgtttccaacaaagtaactttccctgttttcccctgtagtccccccctttttttttacacatatttgcatatgtatgatagtgtgcatgtggttgtcatttttatttcaccaccataaaacccttgagcacaacagcaaataagcagacggaccaaaagttatttatgattctgggggaaaaataacccaaaggcatgctccagacataaatagctcactgcaggaacgagttcacagattagaagggagcacttgtgatcaacgtcagttaggcagagcaagtttatttaatgtaaaagaaaagttgattctgatttatcaggattatcagggtgctttgggttttgattttgttgttgttgttgttttcctttctttctttttttatacacacaataagttagcacatgtttatttgaaacaagcaaccaaacagcaatgaaaacatattgattgtttccagtctctgggccgaagtattgcgaagcatttgaaaagctttcacgatttgtgtagatgattatgaaggacctgcttgttgcaagagaacatcagtgatttttttagttactcaccaaggccttttgtcccagagccagttccctctgggagttcttatgaacatttctcaccttaatatggaggagagaatagtattccaatcatggatgtatcaaattctagtcatttagtttaagtgaaaagaggtttgattgcatattaaattgttattctgtctccttatgttgccatatgaatagctattttttttctttcacttttgacatttgggatgaaaagccatatgtatcataaatatcagatgtaagtcattaaaaactgccttcctgggacttttacatcttttaaaaggtgaattacttaccttatgtacagaataaataatgctcaggaaagagcaagtatttttccatgcattctcaggggatctttttactcccctttgtttgattagttagggccccaatgccaggtaggaggaagggctggggcaatggtagagtgagaggaagacaaacccagctgcagatcatgcttttctaggagccgacatgctaaataaattagaatgtaggaggatcagccacagttgactcaacaaagacaaaagccagccaccaccttcaactgttggcacagctgtgcggtgctggctgtcccaatgcagaaagctggtgggaaggaattcctcatcatcactttctttaatgtagccaatttaggcagggtaatgacggcaatagagagctgctccttgtcattatgagacgtgggataagaagagtgcaacagtgagccaaacacattttggtatagttatttttttcttcttttgttttctttctttttttaacacttagtaagcatgagaggagaggtagaaaaatacccttttttcaacatatagttgtcagatgctttgtgcatgcaaatcatgctttaggcagtgcggtatttcttaaaaactggccaattcaccataaccaatttcccttatggatggactaggctggtatatacatatttgaaaagttttacttcaaagaattccatcgaatagaataggggtaaaagggaggaggaaaacatgtcacagctgtaccatctctaaaaaggtgtttttatggtgaatgttttggatttagattttggatcccccgtcccctcaagcatgatagttttggatatttgcttgctgtgtgaattgacaagcacttttactgacaaatggtgaggctcagtcagaacctccaccctcccccacaccaaagacaggggcagcgtagtattcaaaccagtattgtggtggggaataattgtatacatgtaaattatcaagccctatgagtggaagaattttttcaaattatttttgtctctctatatattgatttatattatgtataactatctctttatataaactatatataattatatatatataactatataattatatatatataactatatatataactatatatatgtatcccctagtattggatcatgaagagctcttcatgcattctttgcaaaggaggttataaagttacgccctcagaacatttataactataagaatgtgccagttaaagtgctcaacaggaaatatgacagtttaaaagcattgtaaaactcacatagcttacttctctctctaaagtgcaacaaggatgaatagaatgggccaaggtatgacaattaatggttctgcatgacctagccactgctgggggttttcttctataacgttgtccttgtgaaaacttttgtgaaattaaaaaaaaaggagttacaaattttattctgttattggtttg

SEQ ID NO: 348586 - DNA, 2772 bp, Homo sapiens
atcttgtgatgtatatctgggattgtccgaaaattatgaaatgaaagttgcatcacacttcatgaaacctcttgcggttgggctacttgaaagtgactttgaccttgtatagaaaggtatgtcatcaccaacccgccctatgagtttgagctcgtgccgacggacctgatcttctgcttaatgcagtttgaccacaatgccggccagtcccgggccagcctgtcccattcctcccactcgtcgcagtcctccagcaagaagagctcctctgttcactccatcccatccacagcaaaccgacagaaccggcccaagtccagggagtcccgggacaaacagaagtacgtgcaggaagagcggctttgatatgtgtatccaccgccactgtgtgaaactgtatctgccactcatttccccagttggtgtttccaacaaagtaactttccctgttttcccctgtagtccccccctttttttttacacatatttgcatatgtatgatagtgtgcatgtggttgtcatttttatttcaccaccataaaacccttgagcacaacagcaaataagcagacggaccaaaagttatttatgattctgggggaaaaataacccaaaggcatgctccagacataaatagctcactgcaggaacgagttcacagattagaagggagcacttgtgatcaacgtcagttaggcagagcaagtttatttaatgtaaaagaaaagttgattctgatttatcaggattatcagggtgctttgggttttgattttgttgttgttgttgttttcctttctttctttttttatacacacaataagttagcacatgtttatttgaaacaagcaaccaaacagcaatgaaaacatattgattgtttccagtctctgggccgaagtattgcgaagcatttgaaaagctttcacgatttgtgtagatgattatgaaggacctgcttgttgcaagagaacatcagtgatttttttagttactcaccaaggccttttgtcccagagccagttccctctgggagttcttatgaacatttctcaccttaatatggaggagagaatagtattccaatcatggatgtatcaaattctagtcatttagtttaagtgaaaagaggtttgattgcatattaaattgttattctgtctccttatgttgccatatgaatagctattttttttctttcacttttgacatttgggatgaaaagccatatgtatcataaatatcagatgtaagtcattaaaaactgccttcctgggacttttacatcttttaaaaggtgaattacttaccttatgtacagaataaataatgctcaggaaagagcaagtatttttccatgcattctcaggggatctttttactcccctttgtttgattagttagggccccaatgccaggtaggaggaagggctggggcaatggtagagtgagaggaagacaaacccagctgcagatcatgcttttctaggagccgacatgctaaataaattagaatgtaggaggatcagccacagttgactcaacaaagacaaaagccagccaccaccttcaactgttggcacagctgtgcggtgctggctgtcccaatgcagaaagctggtgggaaggaattcctcatcatcactttctttaatgtagccaatttaggcagggtaatgacggcaatagagagctgctccttgtcattatgagacgtgggataagaagagtgcaacagtgagccaaacacattttggtatagttatttttttcttcttttgttttctttctttttttaacacttagtaagcatgagaggagaggtagaaaaatacccttttttcaacatatagttgtcagatgctttgtgcatgcaaatcatgctttaggcagtgcggtatttcttaaaaactggccaattcaccataaccaatttcccttatggatggactaggctggtatatacatatttgaaaagttttacttcaaagaattccatcgaatagaataggggtaaaagggaggaggaaaacatgtcacagctgtaccatctctaaaaaggtgtttttatggtgaatgttttggatttagattttggatcccccgtcccctcaagcatgatagttttggatatttgcttgctgtgtgaattgacaagcacttttactgacaaatggtgaggctcagtcagaacctccaccctcccccacaccaaagacaggggcagcgtagtattcaaaccagtattgtggtggggaataattgtatacatgtaaattatcaagccctatgagtggaagaattttttcaaattatttttgtctctctatatattgatttatattatgtataactatctctttatataaactatatataattatatatatataactatataattatatatatataactatatatataactatatatatgtatcccctagtattggatcatgaagagctcttcatgcattctttgcaaaggaggttataaagttacgccctcagaacatttataactataagaatgtgccagttaaagtgctcaacaggaaatatgacagtttaaaagcattgtaaaactcacatagcttacttctctctctaaagtgcaacaaggatgaatagaatgggccaaggtatgacaattaatggttctgcatgacctagccactgctgggggttttcttctataacgttgtccttgtgaaaacttttgtgaaattaaaaaaaaaggagttacaaattttattctgttattggtttg

SEQ ID NO: 348587 - DNA, 3230 bp, Homo sapiens
attccggggtgtttggggtggcgctggcggcgggaggagctcccccgaagcccctgcaccggctgcccgttgctagctatggcaaatggtggcggcggcggcggcggcagcagcggcggcggcggcggcggcggaggcagcagtcttagaatgagtagcaatatccacgcgaaccatctcagcctagacgcgtcctcctcctcctcctcctcctcttcctcttcttcttcttcctcctcctcttcctcctcgtcctcggtccacgagcccaagatggatgcgctcatcatcccggtgaccatggaggtgccgtgcgacagccggggccaacgcatgtggtgggctttcctggcctcctccatggtgactttcttcgggggcctcttcatcatcttgctctggcggacgctcaagtacctgtggaccgtgtgctgccactgcgggggcaagacgaaggaggcccagaagattaacaatggctcaagccaggcggatggcactctcaaaccagtggatgaaaaagaggaggcagtggccgccgaggtcggctggatgacctccgtgaaggactgggcgggggtgatgatatccgcccagacactgactggcagagtcctggttgtcttagtctttgctctcagcatcggtgcacttgtaatatacttcatagattcatcaaacccaatagaatcctgccagaatttctacaaagatttcacattacagatcgacatggctttcaacgtgttcttccttctctacttcggcttgcggtttattgcagccaacgataaattgtggttctggctggaagtgaactctgtagtggatttcttcacggtgccccccgtgtttgtgtctgtgtacttaaacagaagttggcttggtttgagatttttaagagctctgagactgatacagttttcagaaattttgcagtttctgaatattcttaaaacaagtaattccatcaagctggtgaatctgctctccatatttatcagcacgtggctgactgcagccgggttcatccatttggtggagaattcaggggacccatgggaaaatttccaaaacaaccaggctctcacctactgggaatgtgtctatttactcatggtcacaatgtccaccgttggttatggggatgtttatgcaaaaaccacacttgggcgcctcttcatggtcttcttcatcctcgggggactggccatgtttgccagctacgtccctgaaatcatagagttaataggaaaccgcaagaaatacgggggctcctatagtgcggttagtggaagaaagcacattgtggtctgcggacacatcactctggagagtgtttccaacttcctgaaggactttctgcacaaggaccgggatgacgtcaatgtggagatcgtttttcttcacaacatctcccccaacctggagcttgaagctctgttcaaacgacattttactcaggtggaattttatcagggttccgtcctcaatccacatgatcttgcaagagtcaagatagagtcagcagatgcatgcctgatccttgccaacaagtactgcgctgacccggatgcggaggatgcctcgaatatcatgagagtaatctccataaagaactaccatccgaagataagaatcatcactcaaatgctgcagtatcacaacaaggcccatctgctaaacatcccgagctggaattggaaagaaggtgatgacgcaatctgcctcgcagagttgaagttgggcttcatagcccagagctgcctggctcaaggcctctccaccatgcttgccaacctcttctccatgaggtcattcataaagattgaggaagacacatggcagaaatactacttggaaggagtctcaaatgaaatgtacacagaatatctctccagtgccttcgtgggtctgtccttccctactgtttgtgagctgtgttttgtgaagctcaagctcctaatgatagccattgagtacaagtctgccaaccgagagagccgtatattaattaatcctggaaaccatcttaagatccaagaaggtactttaggatttttcatcgcaagtgatgccaaagaagttaaaagggcatttttttactgcaaggcctgtcatgatgacatcacagatcccaaaagaataaaaaaatgtggctgcaaacggcccaagatgtccatctacaagagaatgagacgggcatgttgttttgattgcggacgttctgagcgtgactgctcatgcatgtcaggccgtgtgcgtggtaacgtggacacccttgagagagccttcccactttcttctgtctctgttaatgattgctccaccagtttccgtgcctttgaagatgagcagccgtcaacactatcaccaaaaaaaaagcaacggaatggaggcatgcggaactcacccaacacctcgcctaagctgatgaggcatgaccccttgttaattcctggcaatgatcagattgacaacatggactccaatgtgaagaagtacgactctactgggatgtttcactggtgtgcacccaaggagatagagaaagtcatcctgactcgaagtgaagctgccatgaccgtcctgagtggccatgtcgtggtctgcatctttggcgacgtcagctcagccctgatcggcctccggaacctggtgatgccgctccgtgccagcaactttcattaccatgagctcaagcacattgtgtttgtgggctctattgagtacctcaagcgggaatgggagacgcttcataacttccccaaagtgtccatattgcctgtaagtccaaggtcacattattgatgccttttcttcttttcattcacaaaagaaaatcccggatggatataatagttgtagctttgatcatgcctgtgcttcttcatctgggtatgggcctgaggactcagcacttcccctatgctctgtcaaggaaaatccaaaccctgggagaccttattaaaaggaatttgcagccaagttcagtccctcatcagggatgaagtttagcttgtatcaagtatattaaccatatcagcgtctaaacactctcactcctgcctatacaaaacctagagcattgttatattatgatgtttatagtaaggatttgcttacagaactatttatagcattatacttatggcatttttaatgcttgaagaaacattgatctgtgccaccttctgtttttaactaaataaatgcagatgcggccagtt

SEQ ID NO: 348588 - DNA, 2199 bp, Homo sapiens
  misc_feature (2166)..(2166): n is a, c, g, or t
attccggggtgtttggggtggcgctggcggcgggaggagctcccccgaagcccctgcaccggctgcccgttgctagctatggcaaatggtggcggcggcggcggcggcagcagcggcggcggcggcggcggcggaggcagcagtcttagaatgagtagcaatatccacgcgaaccatctcagcctagacgcgtcctcctcctcctcctcctcctcttcctcttcttcttcttcctcctcctcttcctcctcgtcctcggtccacgagcccaagatggatgcgctcatcatcccggtgaccatggaggtgccgtgcgacagccggggccaacgcatgtggtgggctttcctggcctcctccatggtgactttcttcgggggcctcttcatcatcttgctctggcggacgctcaagtacctgtggaccgtgtgctgccactgcgggggcaagacgaaggaggcccagaagattaacaatggctcaagccaggcggatggcactctcaaaccagtggatgaaaaagaggaggcagtggccgccgaggtcggctggatgacctccgtgaaggactgggcgggggtgatgatatccgcccagacactgactggcagagtcctggttgtcttagtctttgctctcagcatcggtgcacttgtaatatacttcatagattcatcaaacccaatagaatcctgccagaatttctacaaagatttcacattacagatcgacatggctttcaacgtgttcttccttctctacttcggcttgcggtttattgcagccaacgataaattgtggttctggctggaagtgaactctgtagtggatttcttcacggtgccccccgtgtttgtgtctgtgtacttaaacagaagttggcttggtttgagatttttaagagctctgagactgatacagttttcagaaattttgcagtttctgaatattcttaaaacaagtaattccatcaagctggtgaatctgctctccatatttatcagcacgtggctgactgcagccgggttcatccatttggtggagaattcaggggacccatgggaaaatttccaaaacaaccaggctctcacctactgggaatgtgtctatttactcatggtcacaatgtccaccgttggttatggggatgtttatgcaaaaaccacacttgggcgcctcttcatggtcttcttcatcctcgggggactggccatgtttgccagctacgtccctgaaatcatagagttaataggaaaccgcaagaaatacgggggctcctatagtgcggttagtggaagaaagcacattgtggtctgcggacacatcactctggagagtgtttccaacttcctgaaggactttctgcacaaggaccgggatgacgtcaatgtggagatcgtttttcttcacaacatctcccccaacctggagcttgaagctctgttcaaacgacattttactcaggtggaattttatcagggttccgtcctcaatccacatgatcttgcaagagtcaagatagagtcagcagatgcatgcctgatccttgccaacaagtactgcgctgacccggatgcggaggatgcctcgaatatcatgagagtaatctccataaagaactaccatccgaagataagaatcatcactcaaatgctgcagtatcacaacaaggcccatctgctaaacatcccgagctggaattggaaagaaggtgatgacgcaatctgcctcgcagagttgaagttgggcttcatagcccagagctgcctggctcaaggcctctccaccatgcttgccaacctcttctccatgaggtcattcataaagattgaggaagacacatggcagaaatactacttggaaggagtctcaaatgaaatgtacacagaatatctctccagtgccttcgtgggtctgtccttccctactgtttgtgagctgtgttttgtgaagctcaagctcctaatgatagccattgagtacaagtctgccaaccgagagagccgtatattaattaatcctggaaaccatcttaagatccaagaaggtactttaggatttttcatcgcaagtgatgccaaagaagttaaaagggcatttttttactgcaaggcctgtcatgatgacatcacagatcccaaaagaataaaaaccgatgcgaacgtncactttcccaccctcaccaccacacccgtcgac

SEQ ID NO: 348589 - DNA, 2453 bp, Homo sapiens
attccggggtgtttggggtggcgctggcggcgggaggagctcccccgaagcccctgcaccggctgcccgttgctagctatggcaaatggtggcggcggcggcggcggcagcagcggcggcggcggcggcggcggaggcagcagtcttagaatgagtagcaatatccacgcgaaccatctcagcctagacgcgtcctcctcctcctcctcctcctcttcctcttcttcttcttcctcctcctcttcctcctcgtcctcggtccacgagcccaagatggatgcgctcatcatcccggtgaccatggaggtgccgtgcgacagccggggccaacgcatgtggtgggctttcctggcctcctccatggtgactttcttcgggggcctcttcatcatcttgctctggcggacgctcaagtacctgtggaccgtgtgctgccactgcgggggcaagacgaaggaggcccagaagattaacaatggctcaagccaggcggatggcactctcaaaccagtggatgaaaaagaggaggcagtggccgccgaggtcggctggatgacctccgtgaaggactgggcgggggtgatgatatccgcccagacactgactggcagagtcctggttgtcttagtctttgctctcagcatcggtgcacttgtaatatacttcatagattcatcaaacccaatagaatcctgccagaatttctacaaagatttcacattacagatcgacatggctttcaacgtgttcttccttctctacttcggcttgcggtttattgcagccaacgataaattgtggttctggctggaagtgaactctgtagtggatttcttcacggtgccccccgtgtttgtgtctgtgtacttaaacagaagttggcttggtttgagatttttaagagctctgagactgatacagttttcagaaattttgcagtttctgaatattcttaaaacaagtaattccatcaagctggtgaatctgctctccatatttatcagcacgtggctgactgcagccgggttcatccatttggtggagaattcaggggacccatgggaaaatttccaaaacaaccaggctctcacctactgggaatgtgtctatttactcatggtcacaatgtccaccgttggttatggggatgtttatgcaaaaaccacacttgggcgcctcttcatggtcttcttcatcctcgggggactggccatgtttgccagctacgtccctgaaatcatagagttaataggaaaccgcaagaaatacgggggctcctatagtgcggttagtggaagaaagcacattgtggtctgcggacacatcactctggagagtgtttccaacttcctgaaggactttctgcacaaggaccgggatgacgtcaatgtggagatcgtttttcttcacaacatctcccccaacctggagcttgaagctctgttcaaacgacattttactcaggtggaattttatcagggttccgtcctcaatccacatgatcttgcaagagtcaagatagagtcagcagatgcatgcctgatccttgccaacaagtactgcgctgacccggatgcggaggatgcctcgaatatcatgagagtaatctccataaagaactaccatccgaagataagaatcatcactcaaatgctgcagtatcacaacaaggcccatctgctaaacatcccgagctggaattggaaagaaggtgatgacgcaatctgcctcgcagagttgaagttgggcttcatagcccagagctgcctggctcaaggcctctccaccatgcttgccaacctcttctccatgaggtcattcataaagattgaggaagacacatggcagaaatactacttggaaggagtctcaaatgaaatgtacacagaatatctctccagtgccttcgtgggtctgtccttccctactgtttgtgagctgtgttttgtgaagctcaagctcctaatgatagccattgagtacaagtctgccaaccgagagagccgtatattaattaatcctggaaaccatcttaagatccaagaaggtactttaggatttttcatcgcaagtgatgccaaagaagttaaaagacctcctcaactctgtctccctttggctgcccagaaaaggtgctttcagagtgacaagcttgatatttttatttgactgagaaacgacatacttctgccccctcaaatatatatttgaccagactgtgggaattttggtgttgtatttaacttccccaccaagggcccagggctcattgcccacatgtccccacgagtagcatcaaaggctgttctcaaaaatgaaagacgaatgagcagacacagtgtgtcacatcagcaacttttttcccagtttctttgtaaatggaagtttatgaaaaggagcactaactcaaatcacagaatcctgtgtttgaaataaatggtcttgcaacaaac

SEQ ID NO: 348590 - DNA, 2315 bp, Homo sapiens
  misc_feature (1947)..(1947): n is a, c, g, or t
  misc_feature (2020)..(2020): n is a, c, g, or t
  misc_feature (2078)..(2078): n is a, c, g, or t
  misc_feature (2112)..(2112): n is a, c, g, or t
  misc_feature (2216)..(2216): n is a, c, g, or t
attccggggtgtttggggtggcgctggcggcgggaggagctcccccgaagcccctgcaccggctgcccgttgctagctatggcaaatggtggcggcggcggcggcggcagcagcggcggcggcggcggcggcggaggcagcagtcttagaatgagtagcaatatccacgcgaaccatctcagcctagacgcgtcctcctcctcctcctcctcctcttcctcttcttcttcttcctcctcctcttcctcctcgtcctcggtccacgagcccaagatggatgcgctcatcatcccggtgaccatggaggtgccgtgcgacagccggggccaacgcatgtggtgggctttcctggcctcctccatggtgactttcttcgggggcctcttcatcatcttgctctggcggacgctcaagtacctgtggaccgtgtgctgccactgcgggggcaagacgaaggaggcccagaagattaacaatggctcaagccaggcggatggcactctcaaaccagtggatgaaaaagaggaggcagtggccgccgaggtcggctggatgacctccgtgaaggactgggcgggggtgatgatatccgcccagacactgactggcagagtcctggttgtcttagtctttgctctcagcatcggtgcacttgtaatatacttcatagattcatcaaacccaatagaatcctgccagaatttctacaaagatttcacattacagatcgacatggctttcaacgtgttcttccttctctacttcggcttgcggtttattgcagccaacgataaattgtggttctggctggaagtgaactctgtagtggatttcttcacggtgccccccgtgtttgtgtctgtgtacttaaacagaagttggcttggtttgagatttttaagagctctgagactgatacagttttcagaaattttgcagtttctgaatattcttaaaacaagtaattccatcaagctggtgaatctgctctccatatttatcagcacgtggctgactgcagccgggttcatccatttggtggagaattcaggggacccatgggaaaatttccaaaacaaccaggctctcacctactgggaatgtgtctatttactcatggtcacaatgtccaccgttggttatggggatgtttatgcaaaaaccacacttgggcgcctcttcatggtcttcttcatcctcgggggactggccatgtttgccagctacgtccctgaaatcatagagttaataggaaaccgcaagaaatacgggggctcctatagtgcggttagtggaagaaagcacattgtggtctgcggacacatcactctggagagtgtttccaacttcctgaaggactttctgcacaaggaccgggatgacgtcaatgtggagatcgtttttcttcacaacatctcccccaacctggagcttgaagctctgttcaaacgacattttactcaggtggaattttatcagggttccgtcctcaatccacatgatcttgcaagagtcaagatagagtcagcagatgcatgcctgatccttgccaacaagtactgcgctgacccggatgcggaggatgcctcgaatatcatgagagtaatctccataaagaactaccatccgaagataagaatcatcactcaaatgctgcagtatcacaacaaggcccatctgctaaacatcccgagctggaattggaaagaaggtgatgacgcaatctgcctcgcagagttgaagttgggcttcatagcccagagctgcctggctcaaggcctctccaccatgcttgccaacctcttctccatgaggtcattcataaagattgaggaagacacatggcagaaatactacttggaaggagtctcaaatgaaatgtacacagaatatctctccagtgccttcgtgggtctgtccttccctactgtttgtgagctgtgtttngtgaagctcaagctcctaatgatagcaaaaactgaacagctagtattttttcagaattgcaaaaacttctttnggggagggagtgaatgactgcagtagaaaagtttgagtcccttttatgaaaggtttgnccaattacaagaaaatatcgcatcaagaattgtnagaccatatatgaaactgaagttaactatatcaacctaatacaatgaaactctgaggttaaagtattcagtggccatccagataatcataagagaaagtgaaanataataaataatctattttcagaactttgtaacctaatagaagacataattcaaaacatgtaagctacaaagaatgtacttgagcaaagaccccaaaag

SEQ ID NO: 348591 - DNA, 889 bp, Homo sapiens
  misc_feature (1)..(1): n is a, c, g, or t
  misc_feature (847)..(847): n is a, c, g, or t
ntatattagtttactttaactactgtgcatgtcaggcagaaactaaaaattattattcctgcgcccagattcagggattactgggagcacttcctctatatatgacccttacggctcgcgacacgtcaatcatatataccaatacaatctccacgcacctcagacaatcctcactgaaaccacacatacttatcatcttaccgcctatatatcatacttattattatctttctagtgttctcatattgtgctttccacatggggcacaaatcataatataaaataattctatagtccctctaccaaatgaccccatcagaacgttcagaaactagtaccttgcgcatgacatctcagatcatttaactactcacatcatcaccagctatcgttgatctaaaccatgagatctggtatgatatactcctcaactcaattacttatcaacaacgcctactaatatatcatccgaccaaccgaacccccacgtcgtaattgttttgtatatcttgtaccctaacctccacctttcccgcctccccttttcaccacgcataataggtaaaacactttaagcccgattcctagcacaaagtcttgtcccccctatcccttctctggctctttcaatcaagctctggtggttttcttccagggcatggcccatgggaccaagcacatggtgtgtggagctgtgctctgcttcctcgtgttgatgtaacatgggctttggcagggccccaccacagatggggccccttgacatgcgtatgttttgattttgtggtgcctgcatggtaactagagctgtctgtcaaggaaattaataaatgctgacgcggccgtnaccattctcttcttatcaccctatacatttgtattgactata

SEQ ID NO: 348592 - DNA, 342 bp, Homo sapiens
agataccaagaaaagttgtaatttggatgtcggctgtcatgactttagggtgtttgcttaaaggacttttccctcactttctctccttccccagacgtacttcaatgacaatatcctcaccctgatacggaccctggtgaccggaggagccacgccggagctggaggctctgattgctgaggaaaacgcccttagaggtggctacagcaccccgcagacactggccaatagggaccgctgccgcgtggcccagttagctctgctcgatgggccatttgcggacttaggggtgagtccacagcaccgaggtcacctgagcttgctgtttgggaaaagcttgat

SEQ ID NO: 348593 - DNA, 810 bp, Homo sapiens
tatattaattaatcctggaaaccatcttaagatccaagaaggtactttaggatttttcatcgcaagtgatgccaaagaagttaaaaggtaagagtttattttcaactggctttctttctggcccggctgtagacaccttgacccacggaagtaggcaggcttccataaccccaaaactccttaacatgtctatggccatcaactggtgtaagaaaaacttccacggactccagttcatgtagtgaattccacatctttgaatgagaataataaaattttagaactaggaagcctagttacctgctcatttattttgtgagggagaaaatgggggctcagagagctgaatgactgctcgaggtcatcctgattcctgatgattcagaacaacataacaagacaactggctccttatctagtgctctttacttaatattatctgggaaatttacttgagaattatcagttttctactactctccctgccaaatagaatttcaaaaggttgggattaatttcagatggaatatgaaactggctctatttctatttgtggcctcctaggtaagtggctgaagttgtcagcttcaattgttaagccactgtaagtgcagcacaggatttcactggcctacatgtttcatgacatttttattcgtatccttaaacctgtttaagcagcctaggaattcacagggccctttgcagcacaacatggaatattattgtatttgattctatcttatgaacttggagaaatttactagcagaaaatgtgatgcaaatgttcagacaggtcattcagctcaa

SEQ ID NO: 348594 - DNA, 399 bp, Homo sapiens
gattcaaagctattcaatgttaaaattgtttggaacttttctaaaagaaatttcactatggattaatttccattttcttttctccttattgtttggccagtcaaggttgcagctagatcacgctattccaaagatccatttgagttcaagaaggagactcccaattctcggcttgtgaccgagccaggtgaaggaagactgggacccattcccatttttaataactaccctgcagccctcaacattctactttaccatgctgagctcagttgaagaagagcgatgcactactgtggatttcagcttgcacttagcttgttgggcagcaaaataccaaaagggaaaaccgtaaaaaacgattaataataattaaaacgacctcacccccaaactggcagc

SEQ ID NO: 348595 - DNA, 6021 bp, Homo sapiens
attccggggtgtttggggtggcgctggcggcgggaggagctcccccgaagcccctgcaccggctgcccgttgctagctatggcaaatggtggcggcggcggcggcggcagcagcggcggcggcggcggcggcggaggcagcagtcttagaatgagtagcaatatccacgcgaaccatctcagcctagacgcgtcctcctcctcctcctcctcctcttcctcttcttcttcttcctcctcctcttcctcctcgtcctcggtccacgagcccaagatggatgcgctcatcatcccggtgaccatggaggtgccgtgcgacagccggggccaacgcatgtggtgggctttcctggcctcctccatggtgactttcttcgggggcctcttcatcatcttgctctggcggacgctcaagtacctgtggaccgtgtgctgccactgcgggggcaagacgaaggaggcccagaagattaacaatggctcaagccaggcggatggcactctcaaaccagtggatgaaaaagaggaggcagtggccgccgaggtcggctggatgacctccgtgaaggactgggcgggggtgatgatatccgcccagacactgactggcagagtcctggttgtcttagtctttgctctcagcatcggtgcacttgtaatatacttcatagattcatcaaacccaatagaatcctgccagaatttctacaaagatttcacattacagatcgacatggctttcaacgtgttcttccttctctacttcggcttgcggtttattgcagccaacgataaattgtggttctggctggaagtgaactctgtagtggatttcttcacggtgccccccgtgtttgtgtctgtgtacttaaacagaagttggcttggtttgagatttttaagagctctgagactgatacagttttcagaaattttgcagtttctgaatattcttaaaacaagtaattccatcaagctggtgaatctgctctccatatttatcagcacgtggctgactgcagccgggttcatccatttggtggagaattcaggggacccatgggaaaatttccaaaacaaccaggctctcacctactgggaatgtgtctatttactcatggtcacaatgtccaccgttggttatggggatgtttatgcaaaaaccacacttgggcgcctcttcatggtcttcttcatcctcgggggactggccatgtttgccagctacgtccctgaaatcatagagttaataggaaaccgcaagaaatacgggggctcctatagtgcggttagtggaagaaagcacattgtggtctgcggacacatcactctggagagtgtttccaacttcctgaaggactttctgcacaaggaccgggatgacgtcaatgtggagatcgtttttcttcacaacatctcccccaacctggagcttgaagctctgttcaaacgacattttactcaggtggaattttatcagggttccgtcctcaatccacatgatcttgcaagagtcaagatagagtcagcagatgcatgcctgatccttgccaacaagtactgcgctgacccggatgcggaggatgcctcgaatatcatgagagtaatctccataaagaactaccatccgaagataagaatcatcactcaaatgctgcagtatcacaacaaggcccatctgctaaacatcccgagctggaattggaaagaaggtgatgacgcaatctgcctcgcagagttgaagttgggcttcatagcccagagctgcctggctcaaggcctctccaccatgcttgccaacctcttctccatgaggtcattcataaagattgaggaagacacatggcagaaatactacttggaaggagtctcaaatgaaatgtacacagaatatctctccagtgccttcgtgggtctgtccttccctactgtttgtgagctgtgttttgtgaagctcaagctcctaatgatagccattgagtacaagtctgccaaccgagagagccgtatattaattaatcctggaaaccatcttaagatccaagaaggtactttaggatttttcatcgcaagtgatgccaaagaagttaaaagggcatttttttactgcaaggcctgtcatgatgacatcacagatcccaaaagaataaaaaaatgtggctgcaaacggcttgaagatgagcagccgtcaacactatcaccaaaaaaaaagcaacggaatggaggcatgcggaactcacccaacacctcgcctaagctgatgaggcatgaccccttgttaattcctggcaatgatcagattgacaacatggactccaatgtgaagaagtacgactctactgggatgtttcactggtgtgcacccaaggagatagagaaagtcatcctgactcgaagtgaagctgccatgaccgtcctgagtggccatgtcgtggtctgcatctttggcgacgtcagctcagccctgatcggcctccggaacctggtgatgccgctccgtgccagcaactttcattaccatgagctcaagcacattgtgtttgtgggctctattgagtacctcaagcgggaatgggagacgcttcataacttccccaaagtgtccatattgcctggtacgccattaagtcgggctgatttaagggctgtcaacatcaacctctgtgacatgtgcgttatcctgtcagccaatcagaataatattgatgatacttcgctgcaggacaaggaatgcatcttggcgtcactcaacatcaaatctatgcagtttgatgacagcatcggagtcttgcaggctaattcccaagggttcacacctccaggaatggatagatcctctccagataacagcccagtgcacgggatgttacgtcaaccatccatcacaactggggtcaacatccccatcatcactgaactagtgaacgatactaatgttcagtttttggaccaagacgatgatgatgaccctgatacagaactgtacctcacgcagccctttgcctgtgggacagcatttgccgtcagtgtcctggactcactcatgagcgcgacgtacttcaatgacaatatcctcaccctgatacggaccctggtgaccggaggagccacgccggagctggaggctctgattgctgaggaaaacgcccttagaggtggctacagcaccccgcagacactggccaatagggaccgctgccgcgtggcccagttagctctgctcgatgggccatttgcggacttaggggatggtggttgttatggtgatctgttctgcaaagctctgaaaacatataatatgctttgttttggaatttaccggctgagagatgctcacctcagcacccccagtcagtgcacaaagaggtatgtcatcaccaacccgccctatgagtttgagctcgtgccgacggacctgatcttctgcttaatgcagtttgaccacaatgccggccagtcccgggccagcctgtcccattcctcccactcgtcgcagtcctccagcaagaagagctcctctgttcactccatcccatccacagcaaaccgacagaaccggcccaagtccagggagtcccgggacaaacagaagtacgtgcaggaagagcggctttgatatgtgtatccaccgccactgtgtgaaactgtatctgccactcatttccccagttggtgtttccaacaaagtaactttccctgttttcccctgtagtccccccctttttttttacacatatttgcatatgtatgatagtgtgcatgtggttgtcatttttatttcaccaccataaaacccttgagcacaacagcaaataagcagacggaccaaaagttatttatgattctgggggaaaaataacccaaaggcatgctccagacataaatagctcactgcaggaacgagttcacagattagaagggagcacttgtgatcaacgtcagttaggcagagcaagtttatttaatgtaaaagaaaagttgattctgatttatcaggattatcagggtgctttgggttttgattttgttgttgttgttgttttcctttctttctttttttatacacacaataagttagcacatgtttatttgaaacaagcaaccaaacagcaatgaaaacatattgattgtttccagtctctgggccgaagtattgcgaagcatttgaaaagctttcacgatttgtgtagatgattatgaaggacctgcttgttgcaagagaacatcagtgatttttttagttactcaccaaggccttttgtcccagagccagttccctctgggagttcttatgaacatttctcaccttaatatggaggagagaatagtattccaatcatggatgtatcaaattctagtcatttagtttaagtgaaaagaggtttgattgcatattaaattgttattctgtctccttatgttgccatatgaatagctattttttttctttcacttttgacatttgggatgaaaagccatatgtatcataaatatcagatgtaagtcattaaaaactgccttcctgggacttttacatcttttaaaaggtgaattacttaccttatgtacagaataaataatgctcaggaaagagcaagtatttttccatgcattctcaggggatctttttactcccctttgtttgattagttagggccccaatgccaggtaggaggaagggctggggcaatggtagagtgagaggaagacaaacccagctgcagatcatgcttttctaggagccgacatgctaaataaattagaatgtaggaggatcagccacagttgactcaacaaagacaaaagccagccaccaccttcaactgttggcacagctgtgcggtgctggctgtcccaatgcagaaagctggtgggaaggaattcctcatcatcactttctttaatgtagccaatttaggcagggtaatgacggcaatagagagctgctccttgtcattatgagacgtgggataagaagagtgcaacagtgagccaaacacattttggtatagttatttttttcttcttttgttttctttctttttttaacacttagtaagcatgagaggagaggtagaaaaatacccttttttcaacatatagttgtcagatgctttgtgcatgcaaatcatgctttaggcagtgcggtatttcttaaaaactggccaattcaccataaccaatttcccttatggatggactaggctggtatatacatatttgaaaagttttacttcaaagaattccatcgaatagaataggggtaaaagggaggaggaaaacatgtcacagctgtaccatctctaaaaaggtgtttttatggtgaatgttttggatttagattttggatcccccgtcccctcaagcatgatagttttggatatttgcttgctgtgtgaattgacaagcacttttactgacaaatggtgaggctcagtcagaacctccaccctcccccacaccaaagacaggggcagcgtagtattcaaaccagtattgtggtggggaataattgtatacatgtaaattatcaagccctatgagtggaagaattttttcaaattatttttgtctctctatatattgatttatattatgtataactatctctttatataaactatatataattatatatatataactatataattatatatatataactatatatataactatatatatgtatcccctagtattggatcatgaagagctcttcatgcattctttgcaaaggaggttataaagttacgccctcagaacatttataactataagaatgtgccagttaaagtgctcaacaggaaatatgacagtttaaaagcattgtaaaactcacatagcttacttctctctctaaagtgcaacaaggatgaatagaatgggccaaggtatgacaattaatggttctgcatgacctagccactgctgggggttttcttctataacgttgtccttgtgaaaacttttgtgaaattaaaaaaaaaggagttacaaattttattctgttattggtttg

SEQ ID NO: 348596 - DNA, 4133 bp, Homo sapiens
  misc_feature (3747)..(3747): n is a, c, g, or t
  misc_feature (4121)..(4121): n is a, c, g, or t
attccggggtgtttggggtggcgctggcggcgggaggagctcccccgaagcccctgcaccggctgcccgttgctagctatggcaaatggtggcggcggcggcggcggcagcagcggcggcggcggcggcggcggaggcagcagtcttagaatgagtagcaatatccacgcgaaccatctcagcctagacgcgtcctcctcctcctcctcctcctcttcctcttcttcttcttcctcctcctcttcctcctcgtcctcggtccacgagcccaagatggatgcgctcatcatcccggtgaccatggaggtgccgtgcgacagccggggccaacgcatgtggtgggctttcctggcctcctccatggtgactttcttcgggggcctcttcatcatcttgctctggcggacgctcaagtacctgtggaccgtgtgctgccactgcgggggcaagacgaaggaggcccagaagattaacaatggctcaagccaggcggatggcactctcaaaccagtggatgaaaaagaggaggcagtggccgccgaggtcggctggatgacctccgtgaaggactgggcgggggtgatgatatccgcccagacactgactggcagagtcctggttgtcttagtctttgctctcagcatcggtgcacttgtaatatacttcatagattcatcaaacccaatagaatcctgccagaatttctacaaagatttcacattacagatcgacatggctttcaacgtgttcttccttctctacttcggcttgcggtttattgcagccaacgataaattgtggttctggctggaagtgaactctgtagtggatttcttcacggtgccccccgtgtttgtgtctgtgtacttaaacagaagttggcttggtttgagatttttaagagctctgagactgatacagttttcagaaattttgcagtttctgaatattcttaaaacaagtaattccatcaagctggtgaatctgctctccatatttatcagcacgtggctgactgcagccgggttcatccatttggtggagaattcaggggacccatgggaaaatttccaaaacaaccaggctctcacctactgggaatgtgtctatttactcatggtcacaatgtccaccgttggttatggggatgtttatgcaaaaaccacacttgggcgcctcttcatggtcttcttcatcctcgggggactggccatgtttgccagctacgtccctgaaatcatagagttaataggaaaccgcaagaaatacgggggctcctatagtgcggttagtggaagaaagcacattgtggtctgcggacacatcactctggagagtgtttccaacttcctgaaggactttctgcacaaggaccgggatgacgtcaatgtggagatcgtttttcttcacaacatctcccccaacctggagcttgaagctctgttcaaacgacattttactcaggtggaattttatcagggttccgtcctcaatccacatgatcttgcaagagtcaagatagagtcagcagatgcatgcctgatccttgccaacaagtactgcgctgacccggatgcggaggatgcctcgaatatcatgagagtaatctccataaagaactaccatccgaagataagaatcatcactcaaatgctgcagtatcacaacaaggcccatctgctaaacatcccgagctggaattggaaagaaggtgatgacgcaatctgcctcgcagagttgaagttgggcttcatagcccagagctgcctggctcaaggcctctccaccatgcttgccaacctcttctccatgaggtcattcataaagattgaggaagacacatggcagaaatactacttggaaggagtctcaaatgaaatgtacacagaatatctctccagtgccttcgtgggtctgtccttccctactgtttgtgagctgtgttttgtgaagctcaagctcctaatgatagccattgagtacaagtctgccaaccgagagagccgtatattaattaatcctggaaaccatcttaagatccaagaaggtactttaggatttttcatcgcaagtgatgccaaagaagttaaaagggcatttttttactgcaaggcctgtcatgatgacatcacagatcccaaaagaataaaaaaatgtggctgcaaacggctcaaggttgcagctagatcacgctattccaaagatccatttgagttcaagaaggagactcccaattctcggcttgtgaccgagccagttgaagatgagcagccgtcaacactatcaccaaaaaaaaagcaacggaatggaggcatgcggaactcacccaacacctcgcctaagctgatgaggcatgaccccttgttaattcctggcaatgatcagattgacaacatggactccaatgtgaagaagtacgactctactgggatgtttcactggtgtgcacccaaggagatagagaaagtcatcctgactcgaagtgaagctgccatgaccgtcctgagtggccatgtcgtggtctgcatctttggcgacgtcagctcagccctgatcggcctccggaacctggtgatgccgctccgtgccagcaactttcattaccatgagctcaagcacattgtgtttgtgggctctattgagtacctcaagcgggaatgggagacgcttcataacttccccaaagtgtccatattgcctggtacgccattaagtcgggctgatttaagggctgtcaacatcaacctctgtgacatgtgcgttatcctgtcagccaatcagaataatattgatgatacttcgctgcaggacaaggaatgcatcttggcgtcactcaacatcaaatctatgcagtttgatgacagcatcggagtcttgcaggctaattcccaagggttcacacctccaggaatggatagatcctctccagataacagcccagtgcacgggatgttacgtcaaccatccatcacaactggggtcaacatccccatcatcactgaactagtgaacgatactaatgttcagtttttggaccaagacgatgatgatgaccctgatacagaactgtacctcacgcagccctttgcctgtgggacagcatttgccgtcagtgtcctggactcactcatgagcgcgacgtacttcaatgacaatatcctcaccctgatacggaccctggtgaccggaggagccacgccggagctggaggctctgattgctgaggaaaacgcccttagaggtggctacagcaccccgcagacactggccaatagggaccgctgccgcgtggcccagttagctctgctcgatgggccatttgcggacttaggggatggtggttgttatggtgatctgttctgcaaagctctgaaaacatataatatgctttgttttggaatttaccggctgagagatgctcacctcagcacccccagtcagtgcacaaagaggtatgtcatcaccaacccgccctatgagtttgagctcgtgccgacggacctgatcttctgcttaatgcagtttgaccacaatgccggccagtcccgggccagcctgtcccattcctcccactcgtcgcagtcctccagcaagaagagctcctctgttcactccatcccatccacagcaaaccgacagaaccggcccaagtccagggagtcccgggacaaacagaagtacgtgcaggaagagcggctttgatatgtcttccttcacttcccccattgccaccccccaatcccagtncccccatcggtctgttcacatctctgtgttcatcttggcaagacctactcaatcaagtgatgatgccagttgataaacttccctggaaaacatttacagctattccatttggcaaacttgcttctctgtcaatatttcatcctcctttaaaccaggagggttattaatggcaaaagcattggtcttctttatgcttgatcagtatgactcaaattaaaagtgttctgctgtgtatatcaactcagtagcccacacccagttatctgggagctgatggttcagtcactgtattacccaaatctttcctgccagctgcctttcagacatttgttaaatcccaaccagagaccgggcagatagagagaagtaaatcngaagtgcgtttt

SEQ ID NO: 348597 - DNA, 4782 bp, Homo sapiens
attccggggtgtttggggtggcgctggcggcgggaggagctcccccgaagcccctgcaccggctgcccgttgctagctatggcaaatggtggcggcggcggcggcggcagcagcggcggcggcggcggcggcggaggcagcagtcttagaatgagtagcaatatccacgcgaaccatctcagcctagacgcgtcctcctcctcctcctcctcctcttcctcttcttcttcttcctcctcctcttcctcctcgtcctcggtccacgagcccaagatggatgcgctcatcatcccggtgaccatggaggtgccgtgcgacagccggggccaacgcatgtggtgggctttcctggcctcctccatggtgactttcttcgggggcctcttcatcatcttgctctggcggacgctcaagtacctgtggaccgtgtgctgccactgcgggggcaagacgaaggaggcccagaagattaacaatggctcaagccaggcggatggcactctcaaaccagtggatgaaaaagaggaggcagtggccgccgaggtcggctggatgacctccgtgaaggactgggcgggggtgatgatatccgcccagacactgactggcagagtcctggttgtcttagtctttgctctcagcatcggtgcacttgtaatatacttcatagattcatcaaacccaatagaatcctgccagaatttctacaaagatttcacattacagatcgacatggctttcaacgtgttcttccttctctacttcggcttgcggtttattgcagccaacgataaattgtggttctggctggaagtgaactctgtagtggatttcttcacggtgccccccgtgtttgtgtctgtgtacttaaacagaagttggcttggtttgagatttttaagagctctgagactgatacagttttcagaaattttgcagtttctgaatattcttaaaacaagtaattccatcaagctggtgaatctgctctccatatttatcagcacgtggctgactgcagccgggttcatccatttggtggagaattcaggggacccatgggaaaatttccaaaacaaccaggctctcacctactgggaatgtgtctatttactcatggtcacaatgtccaccgttggttatggggatgtttatgcaaaaaccacacttgggcgcctcttcatggtcttcttcatcctcgggggactggccatgtttgccagctacgtccctgaaatcatagagttaataggaaaccgcaagaaatacgggggctcctatagtgcggttagtggaagaaagcacattgtggtctgcggacacatcactctggagagtgtttccaacttcctgaaggactttctgcacaaggaccgggatgacgtcaatgtggagatcgtttttcttcacaacatctcccccaacctggagcttgaagctctgttcaaacgacattttactcaggtggaattttatcagggttccgtcctcaatccacatgatcttgcaagagtcaagatagagtcagcagatgcatgcctgatccttgccaacaagtactgcgctgacccggatgcggaggatgcctcgaatatcatgagagtaatctccataaagaactaccatccgaagataagaatcatcactcaaatgctgcagtatcacaacaaggcccatctgctaaacatcccgagctggaattggaaagaaggtgatgacgcaatctgcctcgcagagttgaagttgggcttcatagcccagagctgcctggctcaaggcctctccaccatgcttgccaacctcttctccatgaggtcattcataaagattgaggaagacacatggcagaaatactacttggaaggagtctcaaatgaaatgtacacagaatatctctccagtgccttcgtgggtctgtccttccctactgtttgtgagctgtgttttgtgaagctcaagctcctaatgatagccattgagtacaagtctgccaaccgagagagccgtatattaattaatcctggaaaccatcttaagatccaagaaggtactttaggatttttcatcgcaagtgatgccaaagaagttaaaagggcatttttttactgcaaggcctgtcatgatgacatcacagatcccaaaagaataaaaaaatgtggctgcaaacggcccaagatgtccatctacaagagaatgagacgggcatgttgttttgattgcggacgttctgagcgtgactgctcatgcatgtcaggccgtgtgcgtggtaacgtggacacccttgagagagccttcccactttcttctgtctctgttaatgattgctccaccagtttccgtgcctttgaagatgagcagccgtcaacactatcaccaaaaaaaaagcaacggaatggaggcatgcggaactcacccaacacctcgcctaagctgatgaggcatgaccccttgttaattcctggcaatgatcagattgacaacatggactccaatgtgaagaagtacgactctactgggatgtttcactggtgtgcacccaaggagatagagaaagtcatcctgactcgaagtgaagctgccatgaccgtcctgagtggccatgtcgtggtctgcatctttggcgacgtcagctcagccctgatcggcctccggaacctggtgatgccgctccgtgccagcaactttcattaccatgagctcaagcacattgtgtttgtgggctctattgagtacctcaagcgggaatgggagacgcttcataacttccccaaagtgtccatattgcctggtacgccattaagtcgggctgatttaagggctgtcaacatcaacctctgtgacatgtgcgttatcctgtcagccaatcagaataatattgatgatacttcgctgcaggacaaggaatgcatcttggcgtcactcaacatcaaatctatgcagtttgatgacagcatcggagtcttgcaggctaattcccaagggttcacacctccaggaatggatagatcctctccagataacagcccagtgcacgggatgttacgtcaaccatccatcacaactggggtcaacatccccatcatcactgaactagtgaacgatactaatgttcagtttttggaccaagacgatgatgatgaccctgatacagaactgtacctcacgcagccctttgcctgtgggacagcatttgccgtcagtgtcctggactcactcatgagcgcgacgtacttcaatgacaatatcctcaccctgatacggaccctggtgaccggaggagccacgccggagctggaggctctgattgctgaggaaaacgcccttagaggtggctacagcaccccgcagacactggccaatagggaccgctgccgcgtggcccagttagctctgctcgatgggccatttgcggacttaggggatggtggttgttatggtgatctgttctgcaaagctctgaaaacatataatatgctttgttttggaatttaccggctgagagatgctcacctcagcacccccagtcagtgcacaaagaggtatgtcatcaccaacccgccctatgagtttgagctcgtgccgacggacctgatcttctgcttaatgcagtttgaccacaatgccggccagtcccgggccagcctgtcccattcctcccactcgtcgcagtcctccagcaagaagagctcctctgttcactccatcccatccacagcaaaccgacagaaccggcccaagtccagggagtcccgggacaaacagaaaaaagaaatggtttacagatgaaccggataatgcctatcccagaaacattcaaatcaagcccatgagtacccacatggctaaccagatcaaccaatataaatccacaagcagcttgattccaccaatcagagaagttgaagatgaatgttgactcccaggagaccagaactatttttttaaagcctgacaaacttcataaatggtgatgtgacttttcttcttacatgctgaatcactggtggaaacgttaggataagcaagaattgccagaaaataaagtagacagatctttctctttgtctgccttgaatattgcttccatgtattttggaaaagaaaatgatttcatttataaatgaacatactaaaatagtcatgtatagcctctagcattttaaattatttttatttattagaaagaaaatatattttttcttttcattgtcaaatatcttccctatatctaaacaatgcaaaatctaaatgaataagtggtcagactccttaatgtgtttttctcttctttctctctttttctttgaggagaatgatggtcaccaccacaattaattgtaattaagggaaatgaattattaaaacaattttaaaatggccaatgatgtatacatgtattttagtaaatccagaaaagaagactaaggggacaggtgaatacctgctcctcgcctggatgggtgtgtattttgatctgcattgacaccagctcttaataaatggaaacttatttattttcacagttgaaagtcatatttttgtagttctagttttcattctgtagttctcacccctttgttcatatttttaaagggaagaccttctgctgcttttctacaattggcagatcaggtttgtctggccaactaaggacaccaggagggttgtgggcacacctgggatgtggaagctgaggaccagatgcacacaaggcattgctctgtttgctgttctagtggtagagactcctacgtgctgttatgcttctcattttatatttcc

SEQ ID NO: 348598 - DNA, 2596 bp, Homo sapiens
attccggggtgtttggggtggcgctggcggcgggaggagctcccccgaagcccctgcaccggctgcccgttgctagctatggcaaatggtggcggcggcggcggcggcagcagcggcggcggcggcggcggcggaggcagcagtcttagaatgagtagcaatatccacgcgaaccatctcagcctagacgcgtcctcctcctcctcctcctcctcttcctcttcttcttcttcctcctcctcttcctcctcgtcctcggtccacgagcccaagatggatgcgctcatcatcccggtgaccatggaggtgccgtgcgacagccggggccaacgcatgtggtgggctttcctggcctcctccatggtgactttcttcgggggcctcttcatcatcttgctctggcggacgctcaagtacctgtggaccgtgtgctgccactgcgggggcaagacgaaggaggcccagaagattaacaatggctcaagccaggcggatggcactctcaaaccagtggatgaaaaagaggaggcagtggccgccgaggtcggctggatgacctccgtgaaggactgggcgggggtgatgatatccgcccagacactgactggcagagtcctggttgtcttagtctttgctctcagcatcggtgcacttgtaatatacttcatagattcatcaaacccaatagaatcctgccagaatttctacaaagatttcacattacagatcgacatggctttcaacgtgttcttccttctctacttcggcttgcggtttattgcagccaacgataaattgtggttctggctggaagtgaactctgtagtggatttcttcacggtgccccccgtgtttgtgtctgtgtacttaaacagaagttggcttggtttgagatttttaagagctctgagactgatacagttttcagaaattttgcagtttctgaatattcttaaaacaagtaattccatcaagctggtgaatctgctctccatatttatcagcacgtggctgactgcagccgggttcatccatttggtggagaattcaggggacccatgggaaaatttccaaaacaaccaggctctcacctactgggaatgtgtctatttactcatggtcacaatgtccaccgttggttatggggatgtttatgcaaaaaccacacttgggcgcctcttcatggtcttcttcatcctcgggggactggccatgtttgccagctacgtccctgaaatcatagagttaataggaaaccgcaagaaatacgggggctcctatagtgcggttagtggaagaaagcacattgtggtctgcggacacatcactctggagagtgtttccaacttcctgaaggactttctgcacaaggaccgggatgacgtcaatgtggagatcgtttttcttcacaacatctcccccaacctggagcttgaagctctgttcaaacgacattttactcaggtggaattttatcagggttccgtcctcaatccacatgatcttgcaagagtcaagatagagtcagcagatgcatgcctgatccttgccaacaagtactgcgctgacccggatgcggaggatgcctcgaatatcatgagagtaatctccataaagaactaccatccgaagataagaatcatcactcaaatgctgcagtatcacaacaaggcccatctgctaaacatcccgagctggaattggaaagaaggtgatgacgcaatctgcctcgcagagttgaagttgggcttcatagcccagagctgcctggctcaaggcctctccaccatgcttgccaacctcttctccatgaggtcattcataaagattgaggaagacacatggcagaaatactacttggaaggagtctcaaatgaaatgtacacagaatatctctccagtgccttcgtgggtctgtccttccctactgtttgtgagctgtgttttgtgaagctcaagctcctaatgatagccattgagtacaagtctgccaaccgagagagccgtatattaattaatcctggaaaccatcttaagatccaagaaggtactttaggatttttcatcgcaagtgatgccaaagaagttaaaagggcatttttttactgcaaggcctgtcatgatgacatcacagatcccaaaagaataaaaaaatgtggctgcaaacggcgacagtggccggttctcaggatactcatcctgacagcttctaccaccaggcagtgaatgcttcctcttacctccatggtggagggcagatgtggccagttagctcctcatcttccatcctcctccactatctcaggcgacagatgccagggccagcccgccttccacttgagctttcttgtcaaggctctgccttgagcccaaatcctgacctttactgtatgaaataaagtactgatgaacaagcagaggtttgaattagagcaggcttggagcaaatgtcaagtccgtctctgcctctttcctccacctgcaccaggagcctcgattagacccagtgtggagtttgcagcgccttaggctttatgggtctggggagacataacttattaacaaagagttattaaatttttatcaattttacaac

SEQ ID NO: 348599 - DNA, 2289 bp, Homo sapiens
  misc_feature (2247)..(2247): n is a, c, g, or t
attccggggtgtttggggtggcgctggcggcgggaggagctcccccgaagcccctgcaccggctgcccgttgctagctatggcaaatggtggcggcggcggcggcggcagcagcggcggcggcggcggcggcggaggcagcagtcttagaatgagtagcaatatccacgcgaaccatctcagcctagacgcgtcctcctcctcctcctcctcctcttcctcttcttcttcttcctcctcctcttcctcctcgtcctcggtccacgagcccaagatggatgcgctcatcatcccggtgaccatggaggtgccgtgcgacagccggggccaacgcatgtggtgggctttcctggcctcctccatggtgactttcttcgggggcctcttcatcatcttgctctggcggacgctcaagtacctgtggaccgtgtgctgccactgcgggggcaagacgaaggaggcccagaagattaacaatggctcaagccaggcggatggcactctcaaaccagtggatgaaaaagaggaggcagtggccgccgaggtcggctggatgacctccgtgaaggactgggcgggggtgatgatatccgcccagacactgactggcagagtcctggttgtcttagtctttgctctcagcatcggtgcacttgtaatatacttcatagattcatcaaacccaatagaatcctgccagaatttctacaaagatttcacattacagatcgacatggctttcaacgtgttcttccttctctacttcggcttgcggtttattgcagccaacgataaattgtggttctggctggaagtgaactctgtagtggatttcttcacggtgccccccgtgtttgtgtctgtgtacttaaacagaagttggcttggtttgagatttttaagagctctgagactgatacagttttcagaaattttgcagtttctgaatattcttaaaacaagtaattccatcaagctggtgaatctgctctccatatttatcagcacgtggctgactgcagccgggttcatccatttggtggagaattcaggggacccatgggaaaatttccaaaacaaccaggctctcacctactgggaatgtgtctatttactcatggtcacaatgtccaccgttggttatggggatgtttatgcaaaaaccacacttgggcgcctcttcatggtcttcttcatcctcgggggactggccatgtttgccagctacgtccctgaaatcatagagttaataggaaaccgcaagaaatacgggggctcctatagtgcggttagtggaagaaagcacattgtggtctgcggacacatcactctggagagtgtttccaacttcctgaaggactttctgcacaaggaccgggatgacgtcaatgtggagatcgtttttcttcacaacatctcccccaacctggagcttgaagctctgttcaaacgacattttactcaggtggaattttatcagggttccgtcctcaatccacatgatcttgcaagagtcaagatagagtcagcagatgcatgcctgatccttgccaacaagtactgcgctgacccggatgcggaggatgcctcgaatatcatgagagtaatctccataaagaactaccatccgaagataagaatcatcactcaaatgctgcagtatcacaacaaggcccatctgctaaacatcccgagctggaattggaaagaaggtgatgacgcaatctgcctcgcagagttgaagttgggcttcatagcccagagctgcctggctcaaggcctctccaccatgcttgccaacctcttctccatgaggtcattcataaaggtatcttctttaatccaggctgctctcatcctgcatgggtggaactgaatggaggtggcagggaggtctgtgtagctgtgtttagagacgagaccctgaagccagatgtagccacgtgtctcccagggatcttatgttcaacatgaaaagcccagactcaggataaaggactgtcaccacgagaacttctctggctctttcaatcaagctctggtggttttcttccagggcatggcccatgggaccaagcacatggtgtgtggagctgtgctctgcttcctcgtgttgatgtaacatgggctttggcagggccccaccacagatggggccccttgacatgcgtatgttttgattttgtggtgcctgcatggtaactagagctgtctgtcaaggaaattaataaatgctgacgcggccgtnaccattctcttcttatcaccctatacatttgtattgactata

SEQ ID NO: 348600 - DNA, 2289 bp, Homo sapiens
attccggggtgtttggggtggcgctggcggcgggaggagctcccccgaagcccctgcaccggctgcccgttgctagctatggcaaatggtggcggcggcggcggcggcagcagcggcggcggcggcggcggcggaggcagcagtcttagaatgagtagcaatatccacgcgaaccatctcagcctagacgcgtcctcctcctcctcctcctcctcttcctcttcttcttcttcctcctcctcttcctcctcgtcctcggtccacgagcccaagatggatgcgctcatcatcccggtgaccatggaggtgccgtgcgacagccggggccaacgcatgtggtgggctttcctggcctcctccatggtgactttcttcgggggcctcttcatcatcttgctctggcggacgctcaagtacctgtggaccgtgtgctgccactgcgggggcaagacgaaggaggcccagaagattaacaatggctcaagccaggcggatggcactctcaaaccagtggatgaaaaagaggaggcagtggccgccgaggtcggctggatgacctccgtgaaggactgggcgggggtgatgatatccgcccagacactgactggcagagtcctggttgtcttagtctttgctctcagcatcggtgcacttgtaatatacttcatagattcatcaaacccaatagaatcctgccagaatttctacaaagatttcacattacagatcgacatggctttcaacgtgttcttccttctctacttcggcttgcggtttattgcagccaacgataaattgtggttctggctggaagtgaactctgtagtggatttcttcacggtgccccccgtgtttgtgtctgtgtacttaaacagaagttggcttggtttgagatttttaagagctctgagactgatacagttttcagaaattttgcagtttctgaatattcttaaaacaagtaattccatcaagctggtgaatctgctctccatatttatcagcacgtggctgactgcagccgggttcatccatttggtggagaattcaggggacccatgggaaaatttccaaaacaaccaggctctcacctactgggaatgtgtctatttactcatggtcacaatgtccaccgttggttatggggatgtttatgcaaaaaccacacttgggcgcctcttcatggtcttcttcatcctcgggggactggccatgtttgccagctacgtccctgaaatcatagagttaataggaaaccgcaagaaatacgggggctcctatagtgcggttagtggaagaaagcacattgtggtctgcggacacatcactctggagagtgtttccaacttcctgaaggactttctgcacaaggaccgggatgacgtcaatgtggagatcgtttttcttcacaacatctcccccaacctggagcttgaagctctgttcaaacgacattttactcaggtggaattttatcagggttccgtcctcaatccacatgatcttgcaagagtcaagatagagtcagcagatgcatgcctgatccttgccaacaagtactgcgctgacccggatgcggaggatgcctcgaatatcatgagagtaatctccataaagaactaccatccgaagataagaatcatcactcaaatgctgcagtatcacaacaaggcccatctgctaaacatcccgagctggaattggaaagaaggtgatgacgcaatctgcctcgcagagttgaagttgggcttcatagcccagagctgcctggctcaaggcctctccaccatgcttgccaacctcttctccatgaggtcattcataaagctgtaatcacatatggattcttttatatgggtcttggcatggactgaacaaagagaaaggcagcacagaaagattacataacatatacacagagtccggtgcccagcgaggatggggcccgagaagcggcaatggtcaggacttaatgcgaaaatccagtagaagctgacactcaccctggcccttctcggctggcaggatatagtcactgatgtgaaataagagccatcttattgaacaagcctctggccaagcatcagtctgagctctttcagagataattggcctttaattaattgcatgcattcctgagtccacctgggtatccacagactgggtctactctgcctccccactcttccaaatttttgactttggttttttgagtgccatccactgttagtgattgttacatgaaaatcgcaaagtcctatgtaagccataaggaataaaatatcagat

SEQ ID NO: 348601 - DNA, 356 bp, Homo sapiens
gctgaggcaggagaattgtttgaacctgggaggcagaggttgcagtgatctgagatcgcgccattgcactccatcctgggcaacaagagtgaaactctgtcttggaaaaaagaaaaaaaaaaagataactgtccaacaatgctgtggttgtttttttcatttgttttcgttaaagtttgttatggtgctaggattattataagaagtgggaacaatagctaatatttattgagtgtcaactatttgccaggctcagggctaagccctttacactcattatctcatttagccctgctgcaagcctgtgattcacgcgctttcattatctctgtgctaatgaggaggaaagtgaggtt

SEQ ID NO: 348602 - DNA, 503 bp, Homo sapiens
tgtgcccccgcctggctgcgctcaccgtggcatcctgcccggcgtagtggctgatgacccgggagccccctggatgccggcgggtgaactcgctgatgttgtacaccttacggtcgatcactagccaccgctcctcgcaccctgagcgctgggccacctcgtcccagtttctcccgtacatcccagtccagccccagcctctggagttatctttctacaccatggatctgatcacagtacacctgctttacggatgtccaagcctcctccatggacctaccctggctggtactgtgctgggagccgctggggaccccaggccctggccggtccacgcttctcagccaccctacacaggccacccatacgtgctcccttttagggcctgaaccttcaaagcctctgtgagatactccctggttctgcctttcagctatcactccctgctccgagctccacaccctttacaaatgttcattaaagttatctatatggtatgttaa

SEQ ID NO: 348603 - DNA, 2158 bp, Homo sapiens
agtcctgcgatttcgggtgtagagggagcaggggcctgcggggacctggtgtgggtggagtggggacaagcggtggagaagggtacgccagggtcgctgagagactctgttctccctggagggactggttgccatgagagcagccgtctgaggggacgcagcctgcactacgcgccccaagaggctgtgcgtggcgagcaggtcacgtgacgggagcgcgggctttggaaggcggctgaacgtcaggccacccgccgctaagctgagaagggagagcgagcttaggaccgcctgcccggggcaaccccgaaccaagctttagccgccgaggccgcgtgtcccaaaggccagtcatccctcctctgtgttgccatgggaattcaaggcctggccaaactaattgctgatgtggcccccagtgccatccgggagaatgacatcaagagctactttggccgtaaggtggccattgatgcctctatgagcatttatcagttcctgattgctgttcgccagggtggggatgtgctgcagaatgaggagggtgagaccaccagccacctgatgggcatgttctaccgcaccattcgcatgatggagaacggcatcaagcccgtgtatgtctttgatggcaagccgccacagctcaagtcaggcgagctggccaaacgcagtgagcggcgggctgaggcagagaagcagctgcagcaggctcaggctgctggggccgagcaggaggtggaaaaattcactaagcggctggtgaaggtcactaagcagcacaatgatgagtgcaaacatctgctgagcctcatgggcatcccttatcttgatgcacccagtgaggcagaggccagctgtgctgccctggtgaaggctggcaaagtctatgctgcggctaccgaggacatggactgcctcaccttcggcagccctgtgctaatgcgacacctgactgccagtgaagccaaaaagctgccaatccaggaattccacctgagccggattctgcaggagctgggcctgaaccaggaacagtttgtggatctgtgcatcctgctaggcagtgactactgtgagagtatccggggtattgggcccaagcgggctgtggacctcatccagaagcacaagagcatcgaggagatcgtgcggcgacttgaccccaacaagtaccctgtgccagaaaattggctccacaaggaggctcaccagctcttcttggaacctgaggtgctggacccagagtctgtggagctgaagtggagcgagccaaatgaagaagagctgatcaagttcatgtgtggtgaaaagcagttctctgaggagcgaatccgcagtggggtcaagaggctgagtaagagccgccaaggcagcacccagggccgcctggatgatttcttcaaggtgaccggctcactctcttcagctaagcgcaaggagccagaacccaagggatccactaagaagaaggcaaagactggggcagcagggaagtttaaaaggggaaaataaatgtgtttccccattatacctccttcaccccagaatatttgccgtcttgtacccttaagagctacagctagagaaaccttcacggggtggagagaggattctaaggcttttctagcgtgacccttttcagtagtgctagtcccttttttacttgatcttaatggcaagaaggccacagaggtacttttccttttttagctcaggaaaatatgtcaggctcaaaccacttctcaggcagtttaatggacactaagtccattgttacatgaaagtgatagatagcaacaagttttggagaagagagagggagataaaagggggagacaaaagatgtacagaaatgatttcctggctggccaactggtggccagtgggaggtgatggtggacctagactgtgcttttctgtcttgttcagccttgacccaccttgagagagagccaccaggaaggcgcatcttagcagatgggaggaactgctgagagaagatgggcagaaagctggagcccctggagttggctgtgtctgtcttgtttattgctatatgccttggcacctaacaatgcctagcataccataaatggccctatatctgtgtgtctaatgaatgaactatgagtgaaatactatctgtgatgtaaag

SEQ ID NO: 348604 - DNA, 1734 bp, Homo sapiens
agtcctgcgatttcgggtgtagagggagcaggggcctgcggggacctggtgtgggtggagtggggacaagcggtggagaagggtacgccagggtcgctgagagactctgttctccctggagggactggttgccatgagagcagccgtctgaggggacgcagcctgcactacgcgccccaagaggctgtgcgtggcgagcaggtcacgtgacgggagcgcgggctttggaaggcggctgaacgtcaggccacccgccgctaagctgagaagggagagcgagcttaggaccgcctgcccggggcaaccccgaaccaagctttagccgccgaggccgcgtgtcccaaaggccagtcatccctcctctgtgttgccatgggaattcaaggcctggccaaactaattgctgatgtggcccccagtgccatccgggagaatgacatcaagagctactttggccgtaaggtggccattgatgcctctatgagcatttatcagttcctgattgctgttcgccagggtggggatgtgctgcagaatgaggagggtgagaccaccagccacctgatgggcatgttctaccgcaccattcgcatgatggagaacggcatcaagcccgtgtatgtctttgatggcaagccgccacagctcaagtcaggcgagctggccaaacgcagtgagcggcgggctgaggcagagaagcagctgcagcaggctcaggctgctggggccgagcaggaggtggaaaaattcactaagcggctggtgaaggtcactaagcagcacaatgatgagtgcaaacatctgctgagcctcatgggcatcccttatcttgatgcacccagtgaggcagaggccagctgtgctgccctggtgaaggctggcaaagtctatgctgcggctaccgaggacatggactgcctcaccttcggcagccctgtgctaatgcgacacctgactgccagtgaagccaaaaagctgccaatccaggaattccacctgagccggattctgcaggagctgggcctgaaccaggaacagtttgtggatctgtgcatcctgctaggcagtgactactgtgagagtatccggggtattgggcccaagcgggctgtggacctcatccagaagcacaagagcatcgaggagatcgtgcggcgacttgaccccaacaagtaccctgtgccagaaaattggctccacaaggaggctcaccagctcttcttggaacctgaggtgctggacccagagtctgtggagctgaagtggagcgagccaaatgaagaagagctgatcaagttcatgtgtggtgaaaagcagttctctgaggagcgaatccgcagtggggtcaagaggctgagtaagagccgccaaggcagcacccagggccgcctggatgatttctccttgacccaccttgagagagagccaccaggaaggcgcatcttagcagatgggaggaactgctgagagaagatgggcagaaagctggagcccctggagttggctgtgtctgtgtttgtgactgattactggctgtgtcttgggtgggcagaaactcgaacttgctatgtaatttgtgtctagttattcagaggagtaagatggtgatgttcacctggcaatcagctgagttgagactttggaataagacactggttttcatgcgctgtttttgttttaaagttatgaagaaaaaagtcaataaaattctaaaagtaaaaaaaaaaacatgtt

SEQ ID NO: 348605 - DNA, 2111 bp, Homo sapiens
agtcctgcgatttcgggtgtagagggagcaggggcctgcggggacctggtgtgggtggagtggggacaagcggtggagaagggtacgccagggtcgctgagagactctgttctccctggagggactggttgccatgagagcagccgtctgaggggacgcagcctgcactacgcgccccaagaggctgtgcgtggcgagcaggtcacgtgacgggagcgcgggctttggaaggcggctgaacgtcaggccacccgccgctaagctgagaagggagagcgagcttaggaccgcctgcccggggcaaccccgaaccaagctttagccgccgaggccgcgtgtcccaaaggccagtcatccctcctctgtgttgccatgggaattcaaggcctggccaaactaattgctgatgtggcccccagtgccatccgggagaatgacatcaagagctactttggccgtaaggtggccattgatgcctctatgagcatttatcagttcctgattgctgttcgccagggtggggatgtgctgcagaatgaggagggtgagaccaccagccacctgatgggcatgttctaccgcaccattcgcatgatggagaacggcatcaagcccgtgtatgtctttgatggcaagccgccacagctcaagtcaggcgagctggccaaacgcagtgagcggcgggctgaggcagagaagcagctgcagcaggctcaggctgctggggccgagcaggaggtggaaaaattcactaagcggctggtgaaggtcactaagcagcacaatgatgagtgcaaacatctgctgagcctcatgggcatcccttatcttgatgcacccagtgaggcagaggccagctgtgctgccctggtgaaggctggcaaagtctatgctgcggctaccgaggacatggactgcctcaccttcggcagccctgtgctaatgcgacacctgactgccagtgaagccaaaaagctgccaatccaggaattccacctgagccggattctgcaggagctgggcctgaaccaggaacagtttgtggatctgtgcatcctgctaggcagtgactactgtgaggtgctggacccagagtctgtggagctgaagtggagcgagccaaatgaagaagagctgatcaagttcatgtgtggtgaaaagcagttctctgaggagcgaatccgcagtggggtcaagaggctgagtaagagccgccaaggcagcacccagggccgcctggatgatttcttcaaggtgaccggctcactctcttcagctaagcgcaaggagccagaacccaagggatccactaagaagaaggcaaagactggggcagcagggaagtttaaaaggggaaaataaatgtgtttccccattatacctccttcaccccagaatatttgccgtcttgtacccttaagagctacagctagagaaaccttcacggggtggagagaggattctaaggcttttctagcgtgacccttttcagtagtgctagtcccttttttacttgatcttaatggcaagaaggccacagaggtacttttccttttttagctcaggaaaatatgtcaggctcaaaccacttctcaggcagtttaatggacactaagtccattgttacatgaaagtgatagatagcaacaagttttggagaagagagagggagataaaagggggagacaaaagatgtacagaaatgatttcctggctggccaactggtggccagtgggaggtgatggtggacctagactgtgcttttctgtcttgttcagccttgacccaccttgagagagagccaccaggaaggcgcatcttagcagatgggaggaactgctgagagaagatgggcagaaagctggagcccctggagttggctgtgtctgtgtttgtgactgattactggctgtgtcttgggtgggcagaaactcgaacttgctatgtaatttgtgtctagttattcagaggagtaagatggtgatgttcacctggcaatcagctgagttgagactttggaataagacactggttttcatgcgctgtttttgttttaaagttatgaagaaaaaagtcaataaaattctaaaagtaaaaaaaaaaacatgtt

SEQ ID NO: 348606 - DNA, 2446 bp, Homo sapiens
agtcctgcgatttcgggtgtagagggagcaggggcctgcggggacctggtgtgggtggagtggggacaagcggtggagaagggtacgccagggtcgctgagagactctgttctccctggagggactggttgccatgagagcagccgtctgaggggacgcagcctgcactacgcgccccaagaggctgtgcgtggcgagcaggtcacgtgacgggagcgcgggctttggaaggcggctgaacgtcaggccacccgccgctaagctgagaagggagagcgagcttaggaccgcctgcccggggcaaccccgaaccaagctttagccgccgaggccgcgtgtcccaaaggccaggtgagaccccatgggaagcgcctccgggagcgacggggtccgcttggcgctgggggccgtggggagccggggtctggagtgcgcgggattcgcagtcaagaggtcccgccacttttccccctgtgagccttgggccagtcgcgtaagctccgagcctctctttcctccattgtagaaaagcgtcatccctcctctgtgttgccatgggaattcaaggcctggccaaactaattgctgatgtggcccccagtgccatccgggagaatgacatcaagagctactttggccgtaaggtggccattgatgcctctatgagcatttatcagttcctgattgctgttcgccagggtggggatgtgctgcagaatgaggagggtgagaccaccagccacctgatgggcatgttctaccgcaccattcgcatgatggagaacggcatcaagcccgtgtatgtctttgatggcaagccgccacagctcaagtcaggcgagctggccaaacgcagtgagcggcgggctgaggcagagaagcagctgcagcaggctcaggctgctggggccgagcaggaggtggaaaaattcactaagcggctggtgaaggtcactaagcagcacaatgatgagtgcaaacatctgctgagcctcatgggcatcccttatcttgatgcacccagtgaggcagaggccagctgtgctgccctggtgaaggctggcaaagtctatgctgcggctaccgaggacatggactgcctcaccttcggcagccctgtgctaatgcgacacctgactgccagtgaagccaaaaagctgccaatccaggaattccacctgagccggattctgcaggagctgggcctgaaccaggaacagtttgtggatctgtgcatcctgctaggcagtgactactgtgagagtatccggggtattgggcccaagcgggctgtggacctcatccagaagcacaagagcatcgaggagatcgtgcggcgacttgaccccaacaagtaccctgtgccagaaaattggctccacaaggaggctcaccagctcttcttggaacctgaggtgctggacccagagtctgtggagctgaagtggagcgagccaaatgaagaagagctgatcaagttcatgtgtggtgaaaagcagttctctgaggagcgaatccgcagtggggtcaagaggctgagtaagagccgccaaggcagcacccagggccgcctggatgatttcttcaaggtgaccggctcactctcttcagctaagcgcaaggagccagaacccaagggatccactaagaagaaggcaaagactggggcagcagggaagtttaaaaggggaaaataaatgtgtttccccattatacctccttcaccccagaatatttgccgtcttgtacccttaagagctacagctagagaaaccttcacggggtggagagaggattctaaggcttttctagcgtgacccttttcagtagtgctagtcccttttttacttgatcttaatggcaagaaggccacagaggtacttttccttttttagctcaggaaaatatgtcaggctcaaaccacttctcaggcagtttaatggacactaagtccattgttacatgaaagtgatagatagcaacaagttttggagaagagagagggagataaaagggggagacaaaagatgtacagaaatgatttcctggctggccaactggtggccagtgggaggtgatggtggacctagactgtgcttttctgtcttgttcagccttgacccaccttgagagagagccaccaggaaggcgcatcttagcagatgggaggaactgctgagagaagatgggcagaaagctggagcccctggagttggctgtgtctgtgtttgtgactgattactggctgtgtcttgggtgggcagaaactcgaacttgctatgtaatttgtgtctagttattcagaggagtaagatggtgatgttcacctggcaatcagctgagttgagactttggaataagacactggttttcatgcgctgtttttgttttaaagttatgaagaaaaaagtcaataaaattctaaaagtaaaaaaaaaaacatgtt

SEQ ID NO: 348607 - DNA, 2211 bp, Homo sapiens
agtcctgcgatttcgggtgtagagggagcaggggcctgcggggacctggtgtgggtggagtggggacaagcggtggagaagggtacgccagggtcgctgagagactctgttctccctggagggactggttgccatgagagcagccgtctgaggggacgcagcctgcactacgcgccccaagaggctgtgcgtggcgagcaggtcacgtgacgggagcgcgggctttggaaggcggctgaacgtcaggccacccgccgctaagctgagaagggagagcgagcttaggaccgcctgcccggggcaaccccgaaccaagctttagccgccgaggccgcgtgtcccaaaggccagtcatccctcctctgtgttgccatgggaattcaaggcctggccaaactaattgctgatgtggcccccagtgccatccgggagaatgacatcaagagctactttggccgtaaggtggccattgatgcctctatgagcatttatcagttcctgattgctgttcgccagggtggggatgtgctgcagaatgaggagggtgagaccaccagccacctgatgggcatgttctaccgcaccattcgcatgatggagaacggcatcaagcccgtgtatgtctttgatggcaagccgccacagctcaagtcaggcgagctggccaaacgcagtgagcggcgggctgaggcagagaagcagctgcagcaggctcaggctgctggggccgagcaggaggtggaaaaattcactaagcggctggtgaaggtcactaagcagcacaatgatgagtgcaaacatctgctgagcctcatgggcatcccttatcttgatgcacccagtgaggcagaggccagctgtgctgccctggtgaaggctggcaaagttaatgcgacacctgactgccagtgaagccaaaaagctgccaatccaggaattccacctgagccggattctgcaggagctgggcctgaaccaggaacagtttgtggatctgtgcatcctgctaggcagtgactactgtgagagtatccggggtattgggcccaagcgggctgtggacctcatccagaagcacaagagcatcgaggagatcgtgcggcgacttgaccccaacaagtaccctgtgccagaaaattggctccacaaggaggctcaccagctcttcttggaacctgaggtgctggacccagagtctgtggagctgaagtggagcgagccaaatgaagaagagctgatcaagttcatgtgtggtgaaaagcagttctctgaggagcgaatccgcagtggggtcaagaggctgagtaagagccgccaaggcagcacccagggccgcctggatgatttcttcaaggtgaccggctcactctcttcagctaagcgcaaggagccagaacccaagggatccactaagaagaaggcaaagactggggcagcagggaagtttaaaaggggaaaataaatgtgtttccccattatacctccttcaccccagaatatttgccgtcttgtacccttaagagctacagctagagaaaccttcacggggtggagagaggattctaaggcttttctagcgtgacccttttcagtagtgctagtcccttttttacttgatcttaatggcaagaaggccacagaggtacttttccttttttagctcaggaaaatatgtcaggctcaaaccacttctcaggcagtttaatggacactaagtccattgttacatgaaagtgatagatagcaacaagttttggagaagagagagggagataaaagggggagacaaaagatgtacagaaatgatttcctggctggccaactggtggccagtgggaggtgatggtggacctagactgtgcttttctgtcttgttcagccttgacccaccttgagagagagccaccaggaaggcgcatcttagcagatgggaggaactgctgagagaagatgggcagaaagctggagcccctggagttggctgtgtctgtgtttgtgactgattactggctgtgtcttgggtgggcagaaactcgaacttgctatgtaatttgtgtctagttattcagaggagtaagatggtgatgttcacctggcaatcagctgagttgagactttggaataagacactggttttcatgcgctgtttttgttttaaagttatgaagaaaaaagtcaataaaattctaaaagtaaaaaaaaaaacatgtt

SEQ ID NO: 348608 - DNA, 1241 bp, Homo sapiens
ctctgaaagtcgatctgacatagtgatgcatgcttggaatgtggcggccattgtacaagtatccggggtattgggcccaagcgggctgtggacctcatccagaagcacaagagcatcgaggagatcgtgcggcgacttgaccccaacaagtaccctgtgccagaaaattggctccacaaggaggctcaccagctcttcttggaacctgaggtgctggacccagagtctgtggagctgaagtggagcgagccaaatgaagaagagctgatcaagttcatgtgtggtgaaaagcagttctctgaggagcgaatccgcagtggggtcaagaggctgagtaagagccgccaaggcagcacccagggccgcctggatgatttcttcaaggtgaccggctcactctcttcagctaagcgcaaggagccagaacccaagggatccactaagaagaaggcaaagactggggcagcagggaagtttaaaaggggaaaataaatgtgtttccccattatacctccttcaccccagaatatttgccgtcttgtacccttaagagctacagctagagaaaccttcacggggtggagagaggattctaaggcttttctagcgtgacccttttcagtagtgctagtcccttttttacttgatcttaatggcaagaaggccacagaggtacttttccttttttagctcaggaaaatatgtcaggctcaaaccacttctcaggcagtttaatggacactaagtccattgttacatgaaagtgatagatagcaacaagttttggagaagagagagggagataaaagggggagacaaaagatgtacagaaatgatttcctggctggccaactggtggccagtgggaggtgatggtggacctagactgtgcttttctgtcttgttcagccttgacccaccttgagagagagccaccaggaaggcgcatcttagcagatgggaggaactgctgagagaagatgggcagaaagctggagcccctggagttggctgtgtctgtgtttgtgactgattactggctgtgtcttgggtgggcagaaactcgaacttgctatgtaatttgtgtctagttattcagaggagtaagatggtgatgttcacctggcaatcagctgagttgagactttggaataagacactggttttcatgcgctgtttttgttttaaagttatgaagaaaaaagtcaataaaattctaaaagtaaaaaaaaaaacatgtt

SEQ ID NO: 348609 - DNA, 1335 bp, Homo sapiens
  misc_feature (32)..(33): n is a, c, g, or t
  misc_feature (96)..(96): n is a, c, g, or t
  misc_feature (126)..(126): n is a, c, g, or t
  misc_feature (133)..(133): n is a, c, g, or t
  misc_feature (142)..(142): n is a, c, g, or t
  misc_feature (156)..(157): n is a, c, g, or t
aaaggtcaagttgtacaaacagcagtgtttgnntaaaacggacggccatgtaaccttcataacgtgtccttaacgggtagctgaagtgcctggtgntgtgctgaaacttcctgtgcaccgcagtgnacgaagncgatactgnacggtcagcagtcnnggtgcgcgtcagtagttactggagcgctcgcagagcaagatagcaccgtgatgtcgcagatgagattcgggcgtccactaaggcgtaggggcttcatcggcagcctacgttacttgtgtagacctagcaggttggctgtgatcctcgagcaggtttctgtcggtagtcatgtagaggtggagcgagccaaatgaagaagagctgatcaagttcatgtgtggtgaaaagcagttctctgaggagcgaatccgcagtggggtcaagaggctgagtaagagccgccaaggcagcacccagggccgcctggatgatttcttcaaggtgaccggctcactctcttcagctaagcgcaaggagccagaacccaagggatccactaagaagaaggcaaagactggggcagcagggaagtttaaaaggggaaaataaatgtgtttccccattatacctccttcaccccagaatatttgccgtcttgtacccttaagagctacagctagagaaaccttcacggggtggagagaggattctaaggcttttctagcgtgacccttttcagtagtgctagtcccttttttacttgatcttaatggcaagaaggccacagaggtacttttccttttttagctcaggaaaatatgtcaggctcaaaccacttctcaggcagtttaatggacactaagtccattgttacatgaaagtgatagatagcaacaagttttggagaagagagagggagataaaagggggagacaaaagatgtacagaaatgatttcctggctggccaactggtggccagtgggaggtgatggtggacctagactgtgcttttctgtcttgttcagccttgacccaccttgagagagagccaccaggaaggcgcatcttagcagatgggaggaactgctgagagaagatgggcagaaagctggagcccctggagttggctgtgtctgtgtttgtgactgattactggctgtgtcttgggtgggcagaaactcgaacttgctatgtaatttgtgtctagttattcagaggagtaagatggtgatgttcacctggcaatcagctgagttgagactttggaataagacactggttttcatgcgctgtttttgttttaaagttatgaagaaaaaagtcaataaaattctaaaagtaaaaaaaaaaacatgtt

SEQ ID NO: 348610 - DNA, 395 bp, Homo sapiens
tttttgttgtgtggaatttagttgaaggcatgaagttggtgagataacaccagttataacctttctcctttcctccgtctctgacttgcctttcttttttagtcatccctcctctgtgttgccatgggaattcaaggcctggccaaactaattgctgatgtggcccccagtgccatccgggagaatgacatcaagagctactttggccgtaaggtggccattgatgcctctatgagcatttatcagttcctgattgctgttcgccagggtggggatgtgctgcagaatgaggagggtgagaccaccagccacctgatgggcatgttctaccgcaccattcgcatgatggagaacggcatcaagcccgtgtatgtctttgatggcaagccgccaca

SEQ ID NO: 348611 - DNA, 407 bp, Homo sapiens
aaaagatgtacagaaatgatttcctggctggccaactggtggccagtgggaggtgatggtggacctagactgtgcttttctgtcttgttcagccttgacccaccttgagagagagccaccaggaaggcgcatcttagcagatgggaggaactgctgagagaagatgggcagaaagctggagcccctggagttggctgtgtctgtgtttgtgactgattactggctgtgtcttgggtgggcagaaactcgaacttgctatgtaatttgtgtctagttattcagaggagtaagatggtgatgttcacctggcaatcagctgagttgagactttggaataagacactggttttcatgcgctgtttttgttttaaagttatgaagaaaaaagtcaataaaattctaaaagt

SEQ ID NO: 348612 - DNA, 182 bp, Homo sapiens
caccgctcctcgcaccctgagcgctgggccacctcgtcccaggtgaagtagcgcggggtaggtccctgagccgcggtctcggcggccaccgggtcgggggccatagctggcctggcgacgccgcgcgccgggccagcaggggctgtcaggcgcgtgctcggggtccgcgggctccaggagtg

SEQ ID NO: 348613 - DNA, 2264 bp, Homo sapiens
agtcctgcgatttcgggtgtagagggagcaggggcctgcggggacctggtgtgggtggagtggggacaagcggtggagaagggtacgccagggtcgctgagagactctgttctccctggagggactggttgccatgagagcagccgtctgaggggacgcagcctgcactacgcgccccaagaggctgtgcgtggcgagcaggtcacgtgacgggagcgcgggctttggaaggcggctgaacgtcaggccacccgccgctaagctgagaagggagagcgagcttaggaccgcctgcccggggcaaccccgaaccaagctttagccgccgaggccgcgtgtcccaaaggccagtcatccctcctctgtgttgccatgggaattcaaggcctggccaaactaattgctgatgtggcccccagtgccatccgggagaatgacatcaagagctactttggccgtaaggtggccattgatgcctctatgagcatttatcagttcctgattgctgttcgccagggtggggatgtgctgcagaatgaggagggtgagaccaccagccacctgatgggcatgttctaccgcaccattcgcatgatggagaacggcatcaagcccgtgtatgtctttgatggcaagccgccacagctcaagtcaggcgagctggccaaacgcagtgagcggcgggctgaggcagagaagcagctgcagcaggctcaggctgctggggccgagcaggaggtggaaaaattcactaagcggctggtgaaggtcactaagcagcacaatgatgagtgcaaacatctgctgagcctcatgggcatcccttatcttgatgcacccagtgaggcagaggccagctgtgctgccctggtgaaggctggcaaagtctatgctgcggctaccgaggacatggactgcctcaccttcggcagccctgtgctaatgcgacacctgactgccagtgaagccaaaaagctgccaatccaggaattccacctgagccggattctgcaggagctgggcctgaaccaggaacagtttgtggatctgtgcatcctgctaggcagtgactactgtgagagtatccggggtattgggcccaagcgggctgtggacctcatccagaagcacaagagcatcgaggagatcgtgcggcgacttgaccccaacaagtaccctgtgccagaaaattggctccacaaggaggctcaccagctcttcttggaacctgaggtgctggacccagagtctgtggagctgaagtggagcgagccaaatgaagaagagctgatcaagttcatgtgtggtgaaaagcagttctctgaggagcgaatccgcagtggggtcaagaggctgagtaagagccgccaaggcagcacccagggccgcctggatgatttcttcaaggtgaccggctcactctcttcagctaagcgcaaggagccagaacccaagggatccactaagaagaaggcaaagactggggcagcagggaagtttaaaaggggaaaataaatgtgtttccccattatacctccttcaccccagaatatttgccgtcttgtacccttaagagctacagctagagaaaccttcacggggtggagagaggattctaaggcttttctagcgtgacccttttcagtagtgctagtcccttttttacttgatcttaatggcaagaaggccacagaggtacttttccttttttagctcaggaaaatatgtcaggctcaaaccacttctcaggcagtttaatggacactaagtccattgttacatgaaagtgatagatagcaacaagttttggagaagagagagggagataaaagggggagacaaaagatgtacagaaatgatttcctggctggccaactggtggccagtgggaggtgatggtggacctagactgtgcttttctgtcttgttcagccttgacccaccttgagagagagccaccaggaaggcgcatcttagcagatgggaggaactgctgagagaagatgggcagaaagctggagcccctggagttggctgtgtctgtgtttgtgactgattactggctgtgtcttgggtgggcagaaactcgaacttgctatgtaatttgtgtctagttattcagaggagtaagatggtgatgttcacctggcaatcagctgagttgagactttggaataagacactggttttcatgcgctgtttttgttttaaagttatgaagaaaaaagtcaataaaattctaaaagtaaaaaaaaaaacatgtt

SEQ ID NO: 348614 - DNA, 687 bp, Homo sapiens
agtcctgcgatttcgggtgtagagggagcaggggcctgcggggacctggtgtgggtggagtggggacaagcggtggagaagggtacgccagggtcgctgagagactctgttctccctggagggactggttgccatgagagcagccgtctgaggggacgcagcctgcactacgcgccccaagaggctgtgcgtggcgagcaggtcacgtgacgggagcgcgggctttggaaggcggctgaacgtcaggccacccgccgctaagctgagaagggagagcgagcttaggaccgcctgcccggggcaaccccgaaccaagctttagccgccgaggccgcgtgtcccaaaggccagtttctcccgtacatcccagtccagccccagcctctggagttatctttctacaccatggatctgatcacagtacacctgctttacggatgtccaagcctcctccatggacctaccctggctggtactgtgctgggagccgctggggaccccaggccctggccggtccacgcttctcagccaccctacacaggccacccatacgtgctcccttttagggcctgaaccttcaaagcctctgtgagatactccctggttctgcctttcagctatcactccctgctccgagctccacaccctttacaaatgttcattaaagttatctatatggtatgttaa

SEQ ID NO: 348615 - DNA, 2188 bp, Homo sapiens
agtcctgcgatttcgggtgtagagggagcaggggcctgcggggacctggtgtgggtggagtggggacaagcggtggagaagggtacgccagggtcgctgagagactctgttctccctggagggactggttgccatgagagcagccgtctgaggggacgcagcctgcactacgcgccccaagaggctgtgcgtggcgagcaggtcacgtgacgggagcgcgggctttggaaggcggctgaacgtcaggccacccgccgctaagctgagaagggagagcgagcttaggaccgcctgcccggggcaaccccgaaccaagctttagccgccgaggccgcgtgtcccaaaggccagtcatccctcctctgtgttgccatgggaattcaaggcctggccaaactaattgctgatgtggcccccagtgccatccgggagaatgacatcaagagctactttggccgtaaggtggccattgatgcctctatgagcatttatcagttcctgattgctgttcgccagggtggggatgtgctgcagaatgaggagggtgagaccaccagccacctgatgggcatgttctaccgcaccattcgcatgatggagaacggcatcaagcccgtgtatgtctttgatggcaagccgccacagctcaagtcaggcgagctggccaaacgcagtgagcggcgggctgaggcagagaagcagctgcagcaggctcaggctgctggggccgagcaggaggtggaaaaattcactaagcggctggtgaaggtcactaagcagcacaatgatgagtgcaaacatctgctgagcctcatgggcatcccttatcttgatgcacccagtgaggcagaggccagctgtgctgccctggtgaaggctggcaaagtctatgctgcggctaccgaggacatggactgcctcaccttcggcagccctgtgctaatgcgacacctgactgccagtgaagccaaaaagctgccaatccaggaattccacctgagccggattctgcaggagctgggcctgaaccaggaacagtttgtggatctgtgcatcctgctaggcagtgactactgtgaggacttgaccccaacaagtaccctgtgccagaaaattggctccacaaggaggctcaccagctcttcttggaacctgaggtgctggacccagagtctgtggagctgaagtggagcgagccaaatgaagaagagctgatcaagttcatgtgtggtgaaaagcagttctctgaggagcgaatccgcagtggggtcaagaggctgagtaagagccgccaaggcagcacccagggccgcctggatgatttcttcaaggtgaccggctcactctcttcagctaagcgcaaggagccagaacccaagggatccactaagaagaaggcaaagactggggcagcagggaagtttaaaaggggaaaataaatgtgtttccccattatacctccttcaccccagaatatttgccgtcttgtacccttaagagctacagctagagaaaccttcacggggtggagagaggattctaaggcttttctagcgtgacccttttcagtagtgctagtcccttttttacttgatcttaatggcaagaaggccacagaggtacttttccttttttagctcaggaaaatatgtcaggctcaaaccacttctcaggcagtttaatggacactaagtccattgttacatgaaagtgatagatagcaacaagttttggagaagagagagggagataaaagggggagacaaaagatgtacagaaatgatttcctggctggccaactggtggccagtgggaggtgatggtggacctagactgtgcttttctgtcttgttcagccttgacccaccttgagagagagccaccaggaaggcgcatcttagcagatgggaggaactgctgagagaagatgggcagaaagctggagcccctggagttggctgtgtctgtgtttgtgactgattactggctgtgtcttgggtgggcagaaactcgaacttgctatgtaatttgtgtctagttattcagaggagtaagatggtgatgttcacctggcaatcagctgagttgagactttggaataagacactggttttcatgcgctgtttttgttttaaagttatgaagaaaaaagtcaataaaattctaaaagtaaaaaaaaaaacatgtt

SEQ ID NO: 348616 - DNA, 2000 bp, Homo sapiens
gtaagcctggtgaatcggacgagggagcttaggacgtcgccggagcaccgaacaagcttagccgcgaggccggtgtccaaaggccagtcatccctcctctgtgttgccatgggaattcaaggcctggccaaactaattgctgatgtggcccccagtgccatccgggagaatgacatcaagagctactttggccgtaaggtggccattgatgcctctatgagcatttatcagttcctgattgctgttcgccagggtggggatgtgctgcagaatgaggagggtgagaccaccagccacctgatgggcatgttctaccgcaccattcgcatgatggagaacggcatcaagcccgtgtatgtctttgatggcaagccgccacagctcaagtcaggcgagctggccaaacgcagtgagcggcgggctgaggcagagaagcagctgcagcaggctcaggctgctggggccgagcaggaggtggaaaaattcactaagcggctggtgaaggtcactaagcagcacaatgatgagtgcaaacatctgctgagcctcatgggcatcccttatcttgatgcacccagtgaggcagaggccagctgtgctgccctggtgaaggctggcaaagtctatgctgcggctaccgaggacatggactgcctcaccttcggcagccctgtgctaatgcgacacctgactgccagtgaagccaaaaagctgccaatccaggaattccacctgagccggattctgcaggagctgggcctgaaccaggaacagtttgtggatctgtgcatcctgctaggcagtgactactgtgagagtatccggggtattgggcccaagcgggctgtggacctcatccagaagcacaagagcatcgaggagatcgtgcggcgacttgaccccaacaagtaccctgtgccagaaaattggctccacaaggaggctcaccagctcttcttggaacctgaggtgctggacccagagtctgtggagctgaagtggagcgagccaaatgaagaagagctgatcaagttcatgtgtggtgaaaagcagttctctgaggagcgaatccgcagtggggtcaagaggctgagtaagagccgccaaggcagcacccagggccgcctggatgatttcttcaaggtgaccggctcactctcttcagctaagcgcaaggagccagaacccaagggatccactaagaagaaggcaaagactggggcagcagggaagtttaaaaggggaaaataaatgtgtttccccattatacctccttcaccccagaatatttgccgtcttgtacccttaagagctacagctagagaaaccttcacggggtggagagaggattctaaggcttttctagcgtgacccttttcagtagtgctagtcccttttttacttgatcttaatggcaagaaggccacagaggtacttttccttttttagctcaggaaaatatgtcaggctcaaaccacttctcaggcagtttaatggacactaagtccattgttacatgaaagtgatagatagcaacaagttttggagaagagagagggagataaaagggggagacaaaagatgtacagaaatgatttcctggctggccaactggtggccagtgggaggtgatggtggacctagactgtgcttttctgtcttgttcagccttgacccaccttgagagagagccaccaggaaggcgcatcttagcagatgggaggaactgctgagagaagatgggcagaaagctggagcccctggagttggctgtgtctgtgtttgtgactgattactggctgtgtcttgggtgggcagaaactcgaacttgctatgtaatttgtgtctagttattcagaggagtaagatggtgatgttcacctggcaatcagctgagttgagactttggaataagacactggttttcatgcgctgtttttgttttaaagttatgaagaaaaaagtcaataaaattctaaaagtaaaaaaaaaaacatgtt

SEQ ID NO: 348617 - DNA, 2099 bp, Homo sapiens
agtcctgcgatttcgggtgtagagggagcaggggcctgcggggacctggtgtgggtggagtggggacaagcggtggagaagggtacgccagggtcgctgagagactctgttctccctggagggactggttgccatgagagcagccgtctgaggggacgcagcctgcactacgcgccccaagaggctgtgcgtggcgagcaggtcacgtgacgggagcgcgggctttggaaggcggctgaacgtcaggccacccgccgctaagctgagaagggagagcgagcttaggaccgcctgcccggggcaaccccgaaccaagctttagccgccgaggccgcgtgtcccaaaggccagggtggggatgtgctgcagaatgaggagggtgagaccaccagccacctgatgggcatgttctaccgcaccattcgcatgatggagaacggcatcaagcccgtgtatgtctttgatggcaagccgccacagctcaagtcaggcgagctggccaaacgcagtgagcggcgggctgaggcagagaagcagctgcagcaggctcaggctgctggggccgagcaggaggtggaaaaattcactaagcggctggtgaaggtcactaagcagcacaatgatgagtgcaaacatctgctgagcctcatgggcatcccttatcttgatgcacccagtgaggcagaggccagctgtgctgccctggtgaaggctggcaaagtctatgctgcggctaccgaggacatggactgcctcaccttcggcagccctgtgctaatgcgacacctgactgccagtgaagccaaaaagctgccaatccaggaattccacctgagccggattctgcaggagctgggcctgaaccaggaacagtttgtggatctgtgcatcctgctaggcagtgactactgtgagagtatccggggtattgggcccaagcgggctgtggacctcatccagaagcacaagagcatcgaggagatcgtgcggcgacttgaccccaacaagtaccctgtgccagaaaattggctccacaaggaggctcaccagctcttcttggaacctgaggtgctggacccagagtctgtggagctgaagtggagcgagccaaatgaagaagagctgatcaagttcatgtgtggtgaaaagcagttctctgaggagcgaatccgcagtggggtcaagaggctgagtaagagccgccaaggcagcacccagggccgcctggatgatttcttcaaggtgaccggctcactctcttcagctaagcgcaaggagccagaacccaagggatccactaagaagaaggcaaagactggggcagcagggaagtttaaaaggggaaaataaatgtgtttccccattatacctccttcaccccagaatatttgccgtcttgtacccttaagagctacagctagagaaaccttcacggggtggagagaggattctaaggcttttctagcgtgacccttttcagtagtgctagtcccttttttacttgatcttaatggcaagaaggccacagaggtacttttccttttttagctcaggaaaatatgtcaggctcaaaccacttctcaggcagtttaatggacactaagtccattgttacatgaaagtgatagatagcaacaagttttggagaagagagagggagataaaagggggagacaaaagatgtacagaaatgatttcctggctggccaactggtggccagtgggaggtgatggtggacctagactgtgcttttctgtcttgttcagccttgacccaccttgagagagagccaccaggaaggcgcatcttagcagatgggaggaactgctgagagaagatgggcagaaagctggagcccctggagttggctgtgtctgtgtttgtgactgattactggctgtgtcttgggtgggcagaaactcgaacttgctatgtaatttgtgtctagttattcagaggagtaagatggtgatgttcacctggcaatcagctgagttgagactttggaataagacactggttttcatgcgctgtttttgttttaaagttatgaagaaaaaagtcaataaaattctaaaagtaaaaaaaaaaacatgtt

SEQ ID NO: 348618 - DNA, 1990 bp, Homo sapiens
agtcctgcgatttcgggtgtagagggagcaggggcctgcggggacctggtgtgggtggagtggggacaagcggtggagaagggtacgccagggtcgctgagagactctgttctccctggagggactggttgccatgagagcagccgtctgaggggacgcagcctgcactacgcgccccaagaggctgtgcgtggcgagcaggtcacgtgacgggagcgcgggctttggaaggcggctgaacgtcaggccacccgccgctaagctgagaagggagagcgagcttaggaccgcctgcccggggcaaccccgaaccaagctttagccgccgaggccgcgtgtcccaaaggccagtcatccctcctctgtgttgccatgggaattcaaggcctggccaaagcagtgagcggcgggctgaggcagagaagcagctgcagcaggctcaggctgctggggccgagcaggaggtggaaaaattcactaagcggctggtgaaggtcactaagcagcacaatgatgagtgcaaacatctgctgagcctcatgggcatcccttatcttgatgcacccagtgaggcagaggccagctgtgctgccctggtgaaggctggcaaagtctatgctgcggctaccgaggacatggactgcctcaccttcggcagccctgtgctaatgcgacacctgactgccagtgaagccaaaaagctgccaatccaggaattccacctgagccggattctgcaggagctgggcctgaaccaggaacagtttgtggatctgtgcatcctgctaggcagtgactactgtgagagtatccggggtattgggcccaagcgggctgtggacctcatccagaagcacaagagcatcgaggagatcgtgcggcgacttgaccccaacaagtaccctgtgccagaaaattggctccacaaggaggctcaccagctcttcttggaacctgaggtgctggacccagagtctgtggagctgaagtggagcgagccaaatgaagaagagctgatcaagttcatgtgtggtgaaaagcagttctctgaggagcgaatccgcagtggggtcaagaggctgagtaagagccgccaaggcagcacccagggccgcctggatgatttcttcaaggtgaccggctcactctcttcagctaagcgcaaggagccagaacccaagggatccactaagaagaaggcaaagactggggcagcagggaagtttaaaaggggaaaataaatgtgtttccccattatacctccttcaccccagaatatttgccgtcttgtacccttaagagctacagctagagaaaccttcacggggtggagagaggattctaaggcttttctagcgtgacccttttcagtagtgctagtcccttttttacttgatcttaatggcaagaaggccacagaggtacttttccttttttagctcaggaaaatatgtcaggctcaaaccacttctcaggcagtttaatggacactaagtccattgttacatgaaagtgatagatagcaacaagttttggagaagagagagggagataaaagggggagacaaaagatgtacagaaatgatttcctggctggccaactggtggccagtgggaggtgatggtggacctagactgtgcttttctgtcttgttcagccttgacccaccttgagagagagccaccaggaaggcgcatcttagcagatgggaggaactgctgagagaagatgggcagaaagctggagcccctggagttggctgtgtctgtgtttgtgactgattactggctgtgtcttgggtgggcagaaactcgaacttgctatgtaatttgtgtctagttattcagaggagtaagatggtgatgttcacctggcaatcagctgagttgagactttggaataagacactggttttcatgcgctgtttttgttttaaagttatgaagaaaaaagtcaataaaattctaaaagtaaaaaaaaaaacatgtt

SEQ ID NO: 348619 - DNA, 1653 bp, Homo sapiens
agtcctgcgatttcgggtgtagagggagcaggggcctgcggggacctggtgtgggtggagtggggacaagcggtggagaagggtacgccagggtcgctgagagactctgttctccctggagggactggttgccatgagagcagccgtctgaggggacgcagcctgcactacgcgccccaagaggctgtgcgtggcgagcaggtcacgtgacgggagcgcgggctttggaaggcggctgaacgtcaggccacccgccgctaagctgagaagggagagcgagcttaggaccgcctgcccggggcaaccccgaaccaagctttagccgccgaggccgcgtgtcccaaaggccagtcatccctcctctgtgttgccatgggaattcaaggcctggccaaactaattgctgatgtggcccccagtgccatccgggagaatgacatcaagagctactttggccgtaaggtggccattgatgcctctatgagcatttatcagttcctgattgctgttcgccagggtggggatgtgctgcagaatgaggagggtgagaccaccagccacctgatgggcatgttctaccgcaccattcgcatgatggagaacggcatcaagcccgtgtatgtctttgatggcaagccgccacagctcaagtcaggcgagctggccaaacgcagtgagcggcgggctgaggcagagaagcagctgcagcaggctcaggctgctggggccgagcaggaggtggaaaaattcactaagcggctggtgaaggtcactaagcagcacaatgatgatcaaggtgaccggctcactctcttcagctaagcgcaaggagccagaacccaagggatccactaagaagaaggcaaagactggggcagcagggaagtttaaaaggggaaaataaatgtgtttccccattatacctccttcaccccagaatatttgccgtcttgtacccttaagagctacagctagagaaaccttcacggggtggagagaggattctaaggcttttctagcgtgacccttttcagtagtgctagtcccttttttacttgatcttaatggcaagaaggccacagaggtacttttccttttttagctcaggaaaatatgtcaggctcaaaccacttctcaggcagtttaatggacactaagtccattgttacatgaaagtgatagatagcaacaagttttggagaagagagagggagataaaagggggagacaaaagatgtacagaaatgatttcctggctggccaactggtggccagtgggaggtgatggtggacctagactgtgcttttctgtcttgttcagccttgacccaccttgagagagagccaccaggaaggcgcatcttagcagatgggaggaactgctgagagaagatgggcagaaagctggagcccctggagttggctgtgtctgtgtttgtgactgattactggctgtgtcttgggtgggcagaaactcgaacttgctatgtaatttgtgtctagttattcagaggagtaagatggtgatgttcacctggcaatcagctgagttgagactttggaataagacactggttttcatgcgctgtttttgttttaaagttatgaagaaaaaagtcaataaaattctaaaagtaaaaaaaaaaacatgtt

SEQ ID NO: 348620 - DNA, 762 bp, Homo sapiens
aatgaatgattgcttcctgtcaactgggaaaggaggaagaaaaccatgaaattgaaaacaaacgtgtttagcagtaagattcctatccgctgggttcatgacccatgttctgactagttatcacaattgaatttatctcaaggacacatgagaggaaaccgttggtatgtggggggtggctggagaggaatgatgatagaggaggaaagtacttgtagtgtgactttcctcagagtcaagagaaggaagtgcttgcagcaataaaagtatttaaatataaactgaagaacacctctggttcttgtttttggtagatggagaaacccagagcagagctgaagaggtgtcatctgctctccagatggagtcagctgacaactcagaagcagaaaccaggtcttctgactctgggcaaatgttagatgctccctttagtagcaggaagacctgggtggaaatcctgatttggagtgtggtttgttgggcttcaacagttcacttgtctggtttctcctaaaagacatttgatttcacagatgtttaatttcttttgggaaaggaaactggacttcattgtcaagcttgagagaagagccaggcttaccatttctcctttctttctgagttttagcaaaggaagtctcaagctcttcaggtaaagagatgaggaccaggaaatgggtggtggtaaaggagtagtttagctcagtagtaggtaaacaagaaagagaaaaaaattcaaaggaatgaaaaattcctcag

SEQ ID NO: 348621 - DNA, 2282 bp, Homo sapiens
acaactggcctgaccttcaaaggccttcacagctcctgccttcatgttaccgtctactatgttcctcgtgcaccttccactcagcacaaacaggctgcactgcctccgaaacacatcacttgaatcctacctctgctcctttgtccatctgaatcaccctctccacatttctgaccgtgtaatcctgatctcacttcatgaggcagttcgcttctcttttgcatttagctttccccggggtacactgtcaatagcctactgtctgatgtcatcagtcagcacttcatcagaggcaattatgtccacagagcttttggctaattactgtcactcctctttacatgtgtgcatatgcatatcatctttccctaatgagactggaaatcatgattcattccctggagcagtggtttccataagtgaccaacccacagaccagtgcaaactggctgcaaaagagcttcctctgaggaacttattagaatgcagattctttgactgcatgggagaggaggatctcataaatctgggtgtaataggcacagaacgttaggtgtaatatgggcgggactctggactcagcatatccaacaagctgctggctgattccgacgatgccgatgaattgccaggttgggaactgctgcccccagagaacctagcagagagctctgtacgtggtaggtgctcactcccctattgtttgggtgtatgcctcctgataatgaacttgatcgtaactttattgttgtattatgcctgtattgtttccttaagtgaaggaagaatgcttttgagtacctaataggtggcaagctctgtgcctacttacatacatgaactattccttttaataacctttggaaataaagtggcatttccattgggcattagaaatctgaagactttcgtttacagctgttgcaacagcagaactagaattcgacctccgacatttctgctcaccagagggcatgaactgctggtttgtacctggcttgcagataccttctttgggcagcacaatgttcaaaattaaaaaaactaccaacacttctaaactggatactttgtatcaatatctgggtttctggcttctcttcacgggaaaaaaacaaacaaacaaaaaggtttggtgaacactggggcccacattcctgcagggcaacagtcacatggagactttagatgggcacgtgcccagaacacactagagtccccatcgctccccattctcttacattctgttcccaactaggttcttataggcctgggtttgtgcctgttgcacacttatctactctcttgcttcccactggtcaggaagtctggcaaacttaaaaggcctctttttgttgctctcttctgtatggatctctcatcatagaggtgtgtgcatttctgactttgtgatttcaatactaaggaagctgtcggcagattatcaaggaaaacggggatcgctgctccccaacgtacacattctggtgtgccccagtaaaattctatattcagcctccaaactagctgggaaaaatgtggcaaatcatctacttgctccaattcaatggtgtttagaagtaggaagtcactgtgagcaatgccaccaagtggtggagagactccatgcagaatcgccaccttcagccagagaggctgggaggccgaagacctctctcaatgcacagggccattcagaaactagaaacaaaatgcttgctcatctccctaggccactccttccgaggctttttgagacggggtctcactgtcacccaggccggagtgcagtggcacaatcaaggctcactgcagcctcaaccttctgggttcaagcgatcctcccacttcagcctttcaagtggctgggatgactacaggcatgggccaccacagccagctgattttttttttctttttagtagaaatgaggtctcgccatgttgctcagactggtcttgaaccaacacatctttagctttttaaaagacagccttggccagccatggcagctcacacttgtaatcactgcactttcggaagctgaggtgggcagatagcttgagccgaggagttcgagaccagcctgggcaacgtggtgaaaccccatctctacaaaaaatacaaaaattagctgggtgtgatggtgcacatctgtggtcccagctgctggggaggctgaggtgggaggattgcttgggcctgggaggtcgaggctgcagtgagctgtgattacctcactgcattccagcctgggcaacagagaaccctgtctctattta

SEQ ID NO: 348622 - DNA, 1695 bp, Homo sapiens
cccgcgccccgccccgcgcagcgctgggccagggacgcacccccaccgcgtcgtaggaaaattacctggtgtggggggtggggcggaaggcacctcctatactccgactccgcctgggccacccgcccctcaccctcggcctgacccagcctctccgtgcctcccctagccgcctcctcccagcagtcccccaggagcgagctgcgagatgccccaaatcggacccctccccagttggaaaaaaaacgactcctgacctttcccagcctcctcggtccgctgaggaacccgcagccccgggcctcgagcagactgctgggactgcggggcggccgggcgcggggccagaggcggggcggggcgggtcgggtcgggggcctttaagaggcgcggtcgccgggaccgacacagacgcggacagcgccgggactcgccgccccgggactcgcgcagcccgcagcgctccggctcctcctctcgcgaccgccctccgcagcgatggacggagacggtgacccagagagcgtgggccagcccgaggaggcaagcccggaggagcagccagaggaggcgagtgctgaggaggagcggccggaggaccagcaggaggaggaggcggcggccgccgccgcgtacctggacgagctgcccgagccgctgctgctgcgcgtgctggccgcactgccggccgccgagctggtgcaggcctgccgcctggtgtgcctgcgctggaaggagctggtggacggcgccccgctgtggctgctcaagtgccagcaggaggggctggtgcccgagggcggcgtggaggaggagcgcgaccactggcagcagttctacttcctgagcaagcggcgccgcaaccttctgcgtaacccgtgtggggaagaggacttggaaggctggtgtgacgtggagcatggtggggacggctggagggtggaggagctgcctggagacagtggggtggagttcacccacgatgagagcgtcaagaagtacttcgcctcctcctttgagtggtgtcgcaaagcacaggtcattgacctgcaggctgagggctactgggaggagctgctggacacgactcagccggccatcgtggtgaaggactggtactcgggccgcagcgacgctggttgcctctacgagctcaccgttaagctactgtccgagcacgagaacgtgctggctgagttcagcagcgggcaggtggcagtgccccaagacagtgacggcgggggctggatggagatctcccacaccttcaccgactacgggccgggcgtccgcttcgtccgcttcgagcacggggggcaggactccgtctactggaagggctggttcggggcccgggtgaccaacagcagcgtgtgggtagaaccctgagcgaccctgcctccgctctcccccagctgcctggaggggcaaaggtcgagggtagataggccttaacttagtccatagcgtcctcaccttccccaagccacacatcctcctcccatcccttgctccgatcccagcccctgagcagggagagagaagttttgttggcataggtttgcttaggtagccggcttctagaatgtagatccgtgagggcgtgagcttggactggacccactgctgattccctgcacctagcacagtgcttgccacaaagtgggctctcaataaatattatttgtccaagga

SEQ ID NO: 348623 - DNA, 1731 bp, Homo sapiens
cccgcgccccgccccgcgcagcgctgggccagggacgcacccccaccgcgtcgtaggaaaattacctggtgtggggggtggggcggaaggcacctcctatactccgactccgcctgggccacccgcccctcaccctcggcctgacccagcctctccgtgcctcccctagccgcctcctcccagcagtcccccaggagcgagctgcgagatgccccaaatcggacccctccccagttggaaaaaaaacgactcctgacctttcccagcctcctcggtccgctgaggaacccgcagccccgggcctcgagcagactgctgggactgcggggcggccgggcgcggggccagaggcggggcggggcgggtcgggtcgggggcctttaagaggcgcggtcgccgggaccgacacagacgcggacagcgccgggactcgccgccccgggactcgcgcagcccgcagcgctccggctcctcctctcgcgaccgccctccgcagcgatggacggagacggtgacccagagagcgtgggccagcccgaggaggcaagcccggaggagcagccagaggaggcgagtgctgaggaggagcggccggaggaccagcaggaggaggaggcggcggccgccgccgcgtacctggacgagctgcccgagccgctgctgctgcgcgtgctggccgcactgccggccgccgagctggtgcaggcctgccgcctggtgtgcctgcgctggaaggagctggtggacggcgccccgctgtggctgctcaagtgccagcaggaggggctggtgcccgagggcggcgtggaggaggagcgcgaccactggcagcagttctacttcctgagcaagcggcgccgcaaccttctgcgtaacccgtgtggggaagaggacttggaaggctggtgtgacgtggagcatggtggggacggctggagggtggaggagctgcctggagacagtggggtggagttcacccacgatgagagcgtcaagaagtacttcgcctcctcctttgagtggtgtcgcaaagcacaggtcattgacctgcaggctgagggctactgggaggagctgctggacacgactcagccggccatcgtggtgaaggactggtactcgggccgcagcgacgctggttgcctctacgagctcaccgttaagctactgtccgagcacgagaacgtgctggctgagttcagcagcgggcaggtggcagtgccccaagacagtgacggcgggggctggatggagatctcccacaccttcaccgactacgggccgggcgtccgcttcgtccgcttcgagcacggggggcaggactccgtctactggaagggctggttcggggcccgggtgaccaacagcagcgtgtgggtagaaccctgagcgaccctgcctccgctctcccccagctgcctggaggggcaaaggtcgagggtagataggccttaacttagtccatagcgtcctcaccttccccaagccacacatcctcctcccatcccttgctccgatcccagcccctgagcagggagagagaagttttgttggcataggtttgcttaggtagccggcttctagaatgtagatccgtgagggcgtgagcttggactggacccactgctgattccctgcacctagcacagtgcttgccacaaagtgggctctcaataaatattatttgtccaaggaaggaatgaatgaaaaaatggataaacactgctccct

SEQ ID NO: 348624 - DNA, 1321 bp, Homo sapiens
aggcctcatccctgctctgccatttatctcgggagagcatggtgcctctcccagcctgtttccttctctgtaaatggatgccttacctccaggggtcactggggcggtccaaggagcttgggacacatcaggtactttaataaaagagagcgtgggccagcccgaggaggcaagcccggaggagcagccagaggaggcgagtgctgaggaggagcggccggaggaccagcaggaggaggaggcggcggccgccgccgcgtacctggacgagctgcccgagccgctgctgctgcgcgtgctggccgcactgccggccgccgagctggtgcaggcctgccgcctggtgtgcctgcgctggaaggagctggtggacggcgccccgctgtggctgctcaagtgccagcaggaggggctggtgcccgagggcggcgtggaggaggagcgcgaccactggcagcagttctacttcctgagcaagcggcgccgcaaccttctgcgtaacccgtgtggggaagaggacttggaaggctggtgtgacgtggagcatggtggggacggctggagggtggaggagctgcctggagacagtggggtggagttcacccacgatgagagcgtcaagaagtacttcgcctcctcctttgagtggtgtcgcaaagcacaggtcattgacctgcaggctgagggctactgggaggagctgctggacacgactcagccggccatcgtggtgaaggactggtactcgggccgcagcgacgctggttgcctctacgagctcaccgttaagctactgtccgagcacgagaacgtgctggctgagttcagcagcgggcaggtggcagtgccccaagacagtgacggcgggggctggatggagatctcccacaccttcaccgactacgggccgggcgtccgcttcgtccgcttcgagcacggggggcaggactccgtctactggaagggctggttcggggcccgggtgaccaacagcagcgtgtgggtagaaccctgagcgaccctgcctccgctctcccccagctgcctggaggggcaaaggtcgagggtagataggccttaacttagtccatagcgtcctcaccttccccaagccacacatcctcctcccatcccttgctccgatcccagcccctgagcagggagagagaagttttgttggcataggtttgcttaggtagccggcttctagaatgtagatccgtgagggcgtgagcttggactggacccactgctgattccctgcacctagcacagtgcttgccacaaagtgggctctcaataaatattatttgtccaagga

SEQ ID NO: 348625 - DNA, 1674 bp, Homo sapiens
cccgcgccccgccccgcgcagcgctgggccagggacgcacccccaccgcgtcgtaggaaaattacctggtgtggggggtggggcggaaggcacctcctatactccgactccgcctgggccacccgcccctcaccctcggcctgacccagcctctccgtgcctcccctagccgcctcctcccagcagtcccccaggagcgagctgcgagatgccccaaatcggacccctccccagttggaaaaaaaacgactcctgacctttcccagcctcctcggtccgctgaggaacccgcagccccgggcctcgagcagactgctgggactgcggggcggccgggcgcggggccagaggcggggcggggcgggtcgggtcgggggcctttaagaggcgcggtcgccgggaccgacacagacgcggacagcgccgggactcgccgccccgggactcgcgcagcccgcagcgctccggctcctcctctcgcgaccgccctccgcagcgatggacggagacggtgacccagagagcgtgggccagcccgaggaggcaagcccggaggagcagccagaggaggcgagtgctgaggaggagcggccggaggaccagcaggaggaggaggcggcggccgccgccgcgtacctggacgagctgcccgagccgctgctgctgcgcgtgctggccgcactgccggccgccgagctggtgcaggcctgccgcctggtgtgcctgcgctggaaggagctggtggacggcgccccgctgtggctgctcaagtgccagcaggaggggctggtgcccgagggcggcgtggaggaggagcgcgaccactggcagcagttctacttcctgagcaagcggcgccgcaaccttctgcgtaacccgtgtggggaagaggacttggaaggctggtgtgacgtggagcatggtggggacggctggagggtggaggagctgcctggagacagtggggtggagttcacccacgatgagagcgtcaagaagtggtgtcgcaaagcacaggtcattgacctgcaggctgagggctactgggaggagctgctggacacgactcagccggccatcgtggtgaaggactggtactcgggccgcagcgacgctggttgcctctacgagctcaccgttaagctactgtccgagcacgagaacgtgctggctgagttcagcagcgggcaggtggcagtgccccaagacagtgacggcgggggctggatggagatctcccacaccttcaccgactacgggccgggcgtccgcttcgtccgcttcgagcacggggggcaggactccgtctactggaagggctggttcggggcccgggtgaccaacagcagcgtgtgggtagaaccctgagcgaccctgcctccgctctcccccagctgcctggaggggcaaaggtcgagggtagataggccttaacttagtccatagcgtcctcaccttccccaagccacacatcctcctcccatcccttgctccgatcccagcccctgagcagggagagagaagttttgttggcataggtttgcttaggtagccggcttctagaatgtagatccgtgagggcgtgagcttggactggacccactgctgattccctgcacctagcacagtgcttgccacaaagtgggctctcaataaatattatttgtccaagga

SEQ ID NO: 348626 - DNA, 1367 bp, Homo sapiens
cccgcgccccgccccgcgcagcgctgggccagggacgcacccccaccgcgtcgtaggaaaattacctggtgtggggggtggggcggaaggcacctcctatactccgactccgcctgggccacccgcccctcaccctcggcctgacccagcctctccgtgcctcccctagccgcctcctcccagcagtcccccaggagcgagctgcgagatgccccaaatcggacccctccccagttggaaaaaaaacgactcctgacctttcccagcctcctcggtccgctgaggaacccgcagccccgggcctcgagcagactgctgggactgcggggcggccgggcgcggggccagaggcggggcggggcgggtcgggtcgggggcctttaagaggcgcggtcgccgggaccgacacagacgcggacagcgccgggactcgccgccccgggactcgcgcagcccgcagcgctccggctcctcctctcgcgaccgccctccgcagcgatggacggagacggtgacccagagagcgtgggccagcccgaggaggcaagcccggaggagcagccagaggaggcgagtgctgaggaggagcggccggaggaccagcaggaggaggaggcggcggccgccgccgcgtacctggacgagctgcccgagccgctgctgctgcgcgtgctggccgcactgccggccgccgagctggtgcaggcctgccgcctggtgtgcctgcgctggaaggagctggtggacggcgccccgctgtggctgctcaagtgccagcaggaggggctggtgcccgagggcggcgtggaggaggagcgcgaccactggcagcagttctacttcctgagcaagcggcgccgcaaccttctgcgtaacccgtgtggggaagaggacttggaaggctggtgtgacgtggagcatggtggggacggctggagggtggaggagctgcctggagacagtggggtggagttcacccacgatgagagcgtcaagaagtacttcgcctcctcctttgagtggtgtcgcaaagcacaggtcattgacctgcaggctgagggctactgggaggagctgctggacacgactcagccggccatcgtggtgaaggactggtgagagggtcctggggtggcatggggctgggaggagcggggtaaggcagaggggagagccagctggggaaccccccgcctgggggtgctgcctccccactgcaggggttgaggccacgtgggccacgggtctgcaaaggttgacaacttccgtgtttgcaggagaacctggaaacccacctcccctcctgagttttaaatgttggcaaatatatgcacatatatatgtttgtatatatgtaatgtatatat

SEQ ID NO: 348627 - DNA, 1381 bp, Homo sapiens
acgccagcgaagccctagaggcggtctccaaagagcacgtctctctgctatcttggtctggcgggaggccttgagaggcgactggcaaggagagagaactcctgggtcccatttagccaggaagtagcaccagaggacccccacattcccgcctcccagcttcctgaggggatcagctataccctggactctggggcccactccagagagcgtgggccagcccgaggaggcaagcccggaggagcagccagaggaggcgagtgctgaggaggagcggccggaggaccagcaggaggaggaggcggcggccgccgccgcgtacctggacgagctgcccgagccgctgctgctgcgcgtgctggccgcactgccggccgccgagctggtgcaggcctgccgcctggtgtgcctgcgctggaaggagctggtggacggcgccccgctgtggctgctcaagtgccagcaggaggggctggtgcccgagggcggcgtggaggaggagcgcgaccactggcagcagttctacttcctgagcaagcggcgccgcaaccttctgcgtaacccgtgtggggaagaggacttggaaggctggtgtgacgtggagcatggtggggacggctggagggtggaggagctgcctggagacagtggggtggagttcacccacgatgagagcgtcaagaagtacttcgcctcctcctttgagtggtgtcgcaaagcacaggtcattgacctgcaggctgagggctactgggaggagctgctggacacgactcagccggccatcgtggtgaaggactggtactcgggccgcagcgacgctggttgcctctacgagctcaccgttaagctactgtccgagcacgagaacgtgctggctgagttcagcagcgggcaggtggcagtgccccaagacagtgacggcgggggctggatggagatctcccacaccttcaccgactacgggccgggcgtccgcttcgtccgcttcgagcacggggggcaggactccgtctactggaagggctggttcggggcccgggtgaccaacagcagcgtgtgggtagaaccctgagcgaccctgcctccgctctcccccagctgcctggaggggcaaaggtcgagggtagataggccttaacttagtccatagcgtcctcaccttccccaagccacacatcctcctcccatcccttgctccgatcccagcccctgagcagggagagagaagttttgttggcataggtttgcttaggtagccggcttctagaatgtagatccgtgagggcgtgagcttggactggacccactgctgattccctgcacctagcacagtgcttgccacaaagtgggctctcaataaatattatttgtccaagga

SEQ ID NO: 348628 - DNA, 1518 bp, Homo sapiens
cccgcgccccgccccgcgcagcgctgggccagggacgcacccccaccgcgtcgtaggaaaattacctggtgtggggggtggggcggaaggcacctcctatactccgactccgcctgggccacccgcccctcaccctcggcctgacccagcctctccgtgcctcccctagccgcctcctcccagcagtcccccaggagcgagctgcgagatgccccaaatcggacccctccccagttggaaaaaaaacgactcctgacctttcccagcctcctcggtccgctgaggaacccgcagccccgggcctcgagcagactgctgggactgcggggcggccgggcgcggggccagaggcggggcggggcgggtcgggtcgggggcctttaagaggcgcggtcgccgggaccgacacagacgcggacagcgccgggactcgccgccccgggactcgcgcagcccgcagcgctccggctcctcctctcgcgaccgccctccgcagcgatggacggagacggtgacccagagagcgtgggccagcccgaggaggcaagcccggaggagcagccagaggaggcgagtgctgaggaggagcggccggaggaccagcaggaggaggaggcggcggccgccgccgcgtacctggacgagctgcccgagccgctgctgctgcgcgtgctggccgcactgccggccgccgagctggtgcaggcctgccgcctggtgtgcctgcgctggaaggagctggtggacggcgccccgctgtggctgctcaagtgccagcaggaggggctggtgcccgagggcggcgtggaggaggagcgcgaccactggcagcagttctacttcctgagcaagcggcgccgcaaccttctgcgtaacccgtgtggggaagaggacttggaaggctggtgtgacgtggagcatggtggggacggctggagggtggaggagctgcctggagacagtggggtggagttcacccacgatgagagcgtcaagaagtacttcgcctcctcctttgagtggtgtcgcaaagcacaggtcattgacctgcaggctgagggctactgggaggagctgctggacacgactcagccggccatcgtggtgaaggactggtactcgggccgcagcgacgctggttgcctctacgagctcaccgttaagctactgtccgagcacgagaacgtgctggctgagttcagcagcgggcaggtggcagtgccccaagacagtgacggcgggggctggatggagcgtcctcaccttccccaagccacacatcctcctcccatcccttgctccgatcccagcccctgagcagggagagagaagttttgttggcataggtttgcttaggtagccggcttctagaatgtagatccgtgagggcgtgagcttggactggacccactgctgattccctgcacctagcacagtgcttgccacaaagtgggctctcaataaatattatttgtccaaggaaggaatgaatgaaaaaatggataaacactgctccct

SEQ ID NO: 348629 - DNA, 1012 bp, Homo sapiens
  misc_feature (1)..(1): n is a, c, g, or t
  misc_feature (12)..(12): n is a, c, g, or t
  misc_feature (14)..(14): n is a, c, g, or t
nctaaataaccntnattaaagggaagtagcttgcggtcatattctccttcttctgctggtggacggcgccccgctgtggctgctcaagtgccagcaggaggggctggtgcccgagggcggcgtggaggaggagcgcgaccactggcagcagttctacttcctgagcaagcggcgccgcaaccttctgcgtaacccgtgtggggaagaggacttggaaggctggtgtgacgtggagcatggtggggacggctggagggtggaggagctgcctggagacagtggggtggagttcacccacgatgagagcgtcaagaagtacttcgcctcctcctttgagtggtgtcgcaaagcacaggtcattgacctgcaggctgagggctactgggaggagctgctggacacgactcagccggccatcgtggtgaaggactggtactcgggccgcagcgacgctggttgcctctacgagctcaccgttaagctactgtccgagcacgagaacgtgctggctgagttcagcagcgggcaggtggcagtgccccaagacagtgacggcgggggctggatggagatctcccacaccttcaccgactacgggccgggcgtccgcttcgtccgcttcgagcacggggggcaggactccgtctactggaagggctggttcggggcccgggtgaccaacagcagcgtgtgggtagaaccctgagcgaccctgcctccgctctcccccagctgcctggaggggcaaaggtcgagggtagataggccttaacttagtccatagcgtcctcaccttccccaagccacacatcctcctcccatcccttgctccgatcccagcccctgagcagggagagagaagttttgttggcataggtttgcttaggtagccggcttctagaatgtagatccgtgagggcgtgagcttggactggacccactgctgattccctgcacctagcacagtgcttgccacaaagtgggctctcaataaatattatttgtccaagga

SEQ ID NO: 348630 - DNA, 1312 bp, Homo sapiens
gaaaatgatattatctattttaccttgcagccttgttttaaagtttagtggtaatagctatgaagtgtctggtattgggcaatcatagaaaactggtagctcttaatattaaatgtttttcttttttagttataagggtaaattaaccacggttgctccaatgggcagctggttgatccaactaatttaccatttagactttatggccactagggatttattcttttacatgatttactaatgttttaagccgagcaaatttttgcattagggaaatatgtttgtattggagaagtaaatgaggttttatttaactttatttaaaatatgtgctaatttataacttttcttcatgttatcttaataaagacttgataaagaaggaaatggatataaaatattgaacttgtaagtattttgacagagtacattacttcttctcattaaagtaggtagacgaacagaggttggcaaactatgttgggtcagctgctggttttgtaaataagattgtattagaacacagccactctcatctatttacaaattgtctatggccattttagcactgcagaggcagagctgaattgcaataccatgtggcccagaagcctaaaatatttactatctgtacctttaaaaaaaagtgttacttagaaattttttgagtaagtatatgttcttaagaattatgtattaaacattgtttaatattttgttttgaattggcattttactaagagattcaatttctgaggctataaaaagaattttacataacaacaatcttgaagggaatctaagcaaagaaatctcatttcatcaattgagagacaagagtgtggcctcaagccaaacaacttggaatccaatcccatctccatcattactagttttgagatcttgaacaagttccttacatttctgtgccaattttctcgtctgtatattggggataataataggatttctctcataggattattatgaggattaaatgagtagaagttgtaaagtgcttggaacaatgtctgatacacaacaggaggtgctcactatatttagccattatcataatcatcatcatttaaatggaaacaaaatccctggtttctaataaattgtggatactcaataaataatagctgaatctgaatatgaacagtgattattacagaaaattgggatgatttaattgaagggtttgcatatttagtgtaaggactgcacttgagttctgatgacatctttccataagggaatacatattttctttcatcttcctctcccactgccacactggtctttctca

SEQ ID NO: 348631 - DNA, 1081 bp, Homo sapiens
agcgagttttgagtgtcaaatttgcacttaatttgtttttggtactgtcataaggactgtagcatacacagcatactacaactgtaactttttacgaaaatatacattttttgaagatgacttcagaaactgagggagagagacccacttgagactaggcagcaaacagtgaagaagaaatgagcaacatggtgtgcaggagcaaagtttcctactgtatatctctactctaagtgtacaatgcctataaatggaaagtatgctttcttggctttcctttagcctattttccaagcaagaactattgttgttggtaatttaggtgcatggaatagtaagttgaagtcttgaattcttatttaataataatacacttaatacattgtcagtgtttaattttgtcttcccattgttcttattcctgctagttttcacaaatagaaaacttacattgaaggggaaaattgccttaatgataattgtgggtgtgttttttcctctatcttttatttttaggtgcagttttcttggttattttttgcaggagctatccctgtatttttttcattttttattgtaactctcctatgccattataataattgggatcctgtgatggtgggaatcagaagaatatttgcttttatatgcagaaaacatcgaattcagagagttccagaagacagcgaacagtgtgagagtctcatttctatgcacagtgtttctcaggaggatggagctagttagctgtctgttgtctgtagcccagcttgataatggaactatacagcgaagagacaatctctggcaagtttttgtagaaaaaatgtttcagtgcctagtctgaaaaataacagtttgagttctttgaaactctaaaatatatttttctcatacctgttttcttcattttcataatgaagcactttgctatgtagctgtgtacatatcactacagttataggaagtttcagtctacagtccatccaaaggaccaacctgccttacacatctcaaggaattcagctgttgaaatcatttgaactaatcaaggaataaatcctaatgttctgggacttta

SEQ ID NO: 348632 - DNA, 3052 bp, Homo sapiens
gagccctcgctcggcgaccagagcctcgcattacttcccctagctccgccaagcctcgctgcatacgcgaccgcgcgcagtccgccgtcgcgcccctatgacgtcacccgcgcgccaccgcttccgggctggggactgggggcggggccgcgcggagggcaagccgggggcggggccggggccagagcagatctccgggcctccgcggccatagctgactgtgccgtcccttcccctcacccgctccacgccctcctgggccgagtggagttgggtggtgtcgggagcctctccctgaggggcaccgcgtcttcaggagctgggcctccagtgcggcgcgatgtcaggcgcggtgacagctctgtgagtccgaggccgcggccgtggcgctgggcggctgcggggcctgaccggtccgctcatggtgccgccacgacgccatcgcggggcaggaaggccaggggtgctgagttcttcacctccttttagactgagatctgccaagttttccggcattgctcttgaggatctcagaagggctcttaagacaagactgcaaatggtgtgtgtatttgtcatgaaccgaatgaattcccagaacagtggtttcactcagcgcaggcgaatggctcttgggattgttattcttctgcttgttgatgtgatatgggttgcttcctctgaacttacttcgtatgtttttacccagtacaacaaaccattcttcagcacctttgcaaaaacatctatgtttgttttgtaccttttgggctttattatttggaagccatggagacaacagtgtacaagaggacttcgcggaaagcatgctgctttttttgcagatgctgaaggttactttgctgcttgcacaacagatacaactatgaatagttctttgagtgaacctctgtatgtgcctgtgaaattccatgatcttccaagtgaaaaacctgagagcacaaacattgatactgaaaaaacccccaaaaagtctcgtgtgaggttcagtaatatcatggagattcgacagcttccgtcaagtcatgcattggaagcaaagttgtctcgcatgtcatatcctgtgaaagaacaagaatccatactgaaaactgtggggaaacttactgcaactcaagtagcgaaaattagcttttttttttgctttgtgtggtttttggcaaatttgtcatatcaagaagcactttcagacacacaagttgctatagttaatattttatcttcaacttccggactttttaccttaatccttgctgcagtatttccaagtaacagtggagatagatttaccctttctaaactattagctgtaattttaagcattggaggcgttgtactggtaaacctggcagggtctgaaaaacctgctggaagagacacagtaggttccatttggtctcttgctggagccatgctctatgctgtctatattgttatgattaagagaaaagtagatagagaagacaagttggatattccaatgttctttggttttgtaggtttgtttaatctgctgctcttatggccaggtttctttttacttcattatactggatttgaggacttcgagtttcccaataaagtagtattaatgtgcattatcattaatggccttattggaacagtactctcagagttcctgtggttgtggggctgctttcttacctcatcattgataggcacacttgcactaagccttacaatacctctgtccataatagctgacatgtgtatgcaaaaggtgcagttttcttggttattttttgcaggagctatccctgtatttttttcattttttattgtaactctcctatgccattataataattgggatcctgtgatggtgggaatcagaagaatatttgcttttatatgcagaaaacatcgaattcagagagttccagaagacagcgaacagtgtgagagtctcatttctatgcacagtgtttctcaggaggatggagctagttagctgtctgttgtctgtagcccagcttgataatggaactatacagcgaagagacaatctctggcaagtttttgtagaaaaaatgtttcagtgcctagtctgaaaaataacagtttgagttctttgaaactctaaaatatatttttctcatacctgttttcttcattttcataatgaagcactttgctatgtagctgtgtacatatcactacagttataggaagtttcagtctacagtccatccaaaggaccaacctgccttacacatctcaaggaattcagctgttgaaatcatttgaactaatcaaggaataaatcctaatgttctgggactttattttcacatgttaaatgctggaatatattatgaaaatgttttcaagaaatcacttaagtgttcatagaccagtatttctgacaggtaaaatgctaaaataagctacctgtaataagtgtggattatatttttgggttttgtagaatattgcaaattaaccacacaaaaaatgtttaatttatgcaacaagcatgtttgtgcaaatttcatgggactttaaaaagaataagtatttgagaaaatatctggttcacttacactacatttactgtattattcttttatagcattaggtgccttgtattttaaatctgtgacaaaccatggcaaatttttaaaggggaagtattattataaaatgaagaaatatgtatttctaaaggctatattgctgtaaacttaattgataaagctctgtttaatttagagttttgaagaaatagtctcccttcaattaagaaattttcataatggaatgatttaaattgaagtgacaaagagtattattaaaatacaatgtttatacgtgtaaaaaaaaaaaaaaaaaaaaattatttttacgttgttagatatggggagtagtgtgattgaggtggagtagattaggcgtaggtagaagtagaggttaaggagggtgatggtggctatgatggtggggatgatgaggctattgttttttgtgaattcttcgataatggcccatttgggcaaaaagccggttagcg

SEQ ID NO: 348633 - DNA, 2894 bp, Homo sapiens
gagccctcgctcggcgaccagagcctcgcattacttcccctagctccgccaagcctcgctgcatacgcgaccgcgcgcagtccgccgtcgcgcccctatgacgtcacccgcgcgccaccgcttccgggctggggactgggggcggggccgcgcggagggcaagccgggggcggggccggggccagagcagatctccgggcctccgcggccatagctgactgtgccgtcccttcccctcacccgctccacgccctcctgggccgagtggagttgggtggtgtcgggagcctctccctgaggggcaccgcgtcttcaggagctgggcctccagtgcggcgcgatgtcaggcgcggtgacagctctgtgagtccgaggccgcggccgtggcgctgggcggctgcggggcctgaccggtccgctcatggtgccgccacgacgccatcgcggggcaggaaggccaggggtgctgagttcttcacctccttttagactgagatctgccaagttttccggcattgctcttgaggatctcagaagggctcttaagacaagactgcaaatggtgtgtgtatttgtcatgaaccgaatgaattcccagaacagtggtttcactcagcgcaggcgaatggctcttgggattgttattcttctgcttgttgatgtgatatgggttgcttcctctgaacttacttcgtatgtttttacccagtacaacaaaccattcttcagcacctttgcaaaaacatctatgtttgttttgtaccttttgggctttattatttggaagccatggagacaacagtgtacaagaggacttcgcggaaagcatgctgctttttttgcagatgctgaaggttactttgctgcttgcacaacagatacaactatgaatagttctttgagtgaacctctgtatgtgcctgtgaaattccatgatcttccaagtgaaaaacctgagagcacaaacattgatactgaaaaaacccccaaaaagtctcgtgtgaggttcagtaatatcatggagattcgacagcttccgtcaagtcatgcattggaagcaaagttgtctcgcatgtcatatcctgtgaaagaacaagaatccatactgaaaactgtggggaaacttactgcaactcaagtagcgaaaattagcttttttttttgctttgtgtggtttttggcaaatttgtcatatcaagaagcactttcagacacacaagttgctatagttaatattttatcttcaacttccggactttttaccttaatccttgctgcagtatttccaagtaacagtggagatagatttaccctttctaaactattagctgtaattttaagacttgataaagaaggaaatggatataaaatattgaacttcattggaggcgttgtactggtaaacctggcagggtctgaaaaacctgctggaagagacacagtaggttccatttggtctcttgctggagccatgctctatgctgtctatattgttatgattaagagaaaagtagatagagaagacaagttggatattccaatgttctttggttttgtaggtttgtttaatctgctgctcttatggccaggtttctttttacttcattatactggatttgaggacttcgagtttcccaataaagtagtattaatgtgcattatcattaatggccttattggaacagtactctcagagttcctgtggttgtggggctgctttcttacctcatcattgataggcacacttgcactaagccttacaatacctctgtccataatagctgacatgtgtatgcaaaaggtgcagttttcttggttattttttgcaggagctatccctgtatttttttcattttttattgtaactctcctatgccattataataattgggatcctgtgatggtgggaatcagaagaatatttgcttttatatgcagaaaacatcgaattcagagagttccagaagacagcgaacagtgtgagagtctcatttctatgcacagtgtttctcaggaggatggagctagttagctgtctgttgtctgtagcccagcttgataatggaactatacagcgaagagacaatctctggcaagtttttgtagaaaaaatgtttcagtgcctagtctgaaaaataacagtttgagttctttgaaactctaaaatatatttttctcatacctgttttcttcattttcataatgaagcactttgctatgtagctgtgtacatatcactacagttataggaagtttcagtctacagtccatccaaaggaccaacctgccttacacatctcaaggaattcagctgttgaaatcatttgaactaatcaaggaataaatcctaatgttctgggactttattttcacatgttaaatgctggaatatattatgaaaatgttttcaagaaatcacttaagtgttcatagaccagtatttctgacaggtaaaatgctaaaataagctacctgtaataagtgtggattatatttttgggttttgtagaatattgcaaattaaccacacaaaaaatgtttaatttatgcaacaagcatgtttgtgcaaatttcatgggactttaaaaagaataagtatttgagaaaatatctggttcacttacactacatttactgtattattcttttatagcattaggtgccttgtattttaaatctgtgacaaaccatggcaaatttttaaaggggaagtattattataaaatgaagaaatatgtatttctaaaggctatattgctgtaaacttaattgataaagctctgtttaatttagagttttgaagaaatagtctcccttcaattaagaaattttcataatggaatgatttaaattgaagtgacaaagagtattattaaaatacaatgtttatacgt

SEQ ID NO: 348634 - DNA, 4423 bp, Homo sapiens
gagccctcgctcggcgaccagagcctcgcattacttcccctagctccgccaagcctcgctgcatacgcgaccgcgcgcagtccgccgtcgcgcccctatgacgtcacccgcgcgccaccgcttccgggctggggactgggggcggggccgcgcggagggcaagccgggggcggggccggggccagagcagatctccgggcctccgcggccatagctgactgtgccgtcccttcccctcacccgctccacgccctcctgggccgagtggagttgggtggtgtcgggagcctctccctgaggggcaccgcgtcttcaggagctgggcctccagtgcggcgcgatgtcaggcgcggtgacagctctgtgagtccgaggccgcggccgtggcgctgggcggctgcggggcctgaccggtccgctcatggtgccgccacgacgccatcgcggggcaggaaggccaggggtgctgagttcttcacctccttttagactgagatctgccaagttttccggcattgctcttgaggatctcagaagggctcttaagacaagactgcaaatggtgtgtgtatttgtcatgaaccgaatgaattcccagaacagtggtttcactcagcgcaggcgaatggctcttgggattgttattcttctgcttgttgatgtgatatgggttgcttcctctgaacttacttcgtatgtttttacccagtacaacaaaccattcttcagcacctttgcaaaaacatctatgtttgttttgtaccttttgggctttattatttggaagccatggagacaacagtgtacaagaggacttcgcggaaagcatgctgctttttttgcagatgctgaaggttactttgctgcttgcacaacagatacaactatgaatagttctttgagtgaacctctgtatgtgcctgtgaaattccatgatcttccaagtgaaaaacctgagagcacaaacattgatactgaaaaaacccccaaaaagtctcgtgtgaggttcagtaatatcatggagattcgacagcttccgtcaagtcatgcattggaagcaaagttgtctcgcatgtcatatcctgtgaaagaacaagaatccatactgaaaactgtggggaaacttactgcaactcaagtagcgaaaattagcttttttttttgctttgtgtggtttttggcaaatttgtcatatcaagaagcactttcagacacacaagttgctatagttaatattttatcttcaacttccggactttttaccttaatccttgctgcagtatttccaagtaacagtggagatagatttaccctttctaaactattagctgtaattttaagcattggaggcgttgtactggtaaacctggcagggtctgaaaaacctgctggaagagacacagtaggttccatttggtctcttgctggagccatgctctatgctgtctatattgttatgattaagagaaaagtagatagagaagacaagttggatattccaatgttctttggttttgtaggtttgtttaatctgctgctcttatggccaggtttctttttacttcattatactggatttgaggacttcgagtttcccaataaagtagtattaatgtgcattatcattaatggccttattggaacagtactctcagagttcctgtggttgtggggctgctttcttacctcatcattgataggcacacttgcactaagccttacaatacctctgtccataatagctgacatgtgtatgcaaaaggtgcagttttcttggttattttttgcaggagctatccctgtatttttttcattttttattgtaactctcctatgccattataataattgggatcctgtgatggtgggaatcagaagaatatttgcttttatatgcagaaaacatcgaattcagagagttccagaagacagcgaacagtgtgagagtctcatttctatgcacagtgtttctcaggaggatggagctagttagctgtctgttgtctgtagcccagcttgataatggaactatacagcgaagagacaatctctggcaagtttttgtagaaaaaatgtttcagtgcctagtctgaaaaataacagtttgagttctttgaaactctaaaatatatttttctcatacctgttttcttcattttcataatgaagcactttgctatgtagctgtgtacatatcactacagttataggaagtttcagtctacagtccatccaaaggaccaacctgccttacacatctcaaggaattcagctgttgaaatcatttgaactaatcaaggaataaatcctaatgttctgggactttattttcacatgttaaatgctggaatatattatgaaaatgttttcaagaaatcacttaagtgttcatagaccagtatttctgacaggtaaaatgctaaaataagctacctgtaataagtgtggattatatttttgggttttgtagaatattgcaaattaaccacacaaaaaatgtttaatttatgcaacaagcatgtttgtgcaaatttcatgggactttaaaaagaataagtatttgagaaaatatctggttcacttacactacatttactgtattattcttttatagcattaggtgccttgtattttaaatctgtgacaaaccatggcaaatttttaaaggggaagtattattataaaatgaagaaatatgtatttctaaaggctatattgctgtaaacttaattgataaagctctgtttaatttagagttttgaagaaatagtctcccttcaattaagaaattttcataatggaatgatttaaattgaagtgacaaagagtattattaaaatacaatgtttatacgtctatttgtgtattgtagatgtatcaagtgatttctaatttttttcacatatgaatgtgccagattactctagaactagatgtctcttctttaaataattttagttttcctgaataaatttgtaatggttaaagtaccaagtaagtaaggcgagaagggattctgtttttaaaatcacatcagaacttttcctctactaagattataaattaaatgtaaaatactcctaattgcaattcttaaacttaggccttacatgtacttattatgcaactgctcctggactctattcaccatagatatcagtaaacgtatgtcccaggattcacaggcttttgattaatcaatattcttttcaagtttgctgtgaagagtttagttctcttcaaaatttcttaactaatctgatttttaagaattctctttgcagtgtttagcttcctattcacattcttaaaattgctttggtgttaccatgagtctaaaatgaagtttagccttccttttgtttcattctgagaacttctatattatattacctttaaaaattgtttatgatattaaatttaaaatacaaacagctctctttttttttttttttttttttaatcatccagcccaaagtggcaaaaacagctcttttctcatttggcaccaccaataacgcaagttaaaaataatgttgagtttattatacttttgacctgtttagctcaacagggtgaaggcatgtaaagaatgtggacttctgaggaattttcttttaaaaagaacataatgaagtaacattttaattactcaaggactacttttggttgaagtttataatctagatacctctactttttgtttttgctgttcgacagttcacaaagaccttcagcaatttacagggtaaaatcgttgaagtagtggaggtgaaactgaaatttaaaattattctgtaaatactatagggaaagaggctgagcttagaatcttttggttgttcatgtgttctgtgctcttatcatcacacaggtcatgtgttgttactcaggattctggaagtactaagccgtagttaacaggctggatagatcttcagccaatcttctttcattatactgctgcttttctgtttcttaaaaaacaaaaatcaatgaacaacttctttagaaggaagcaccactgttcaattggttaactgaaagtatgaatcactgccgctttgcttgcccacctgtttgctttttctcacaggttttatttatctgaatgattgttgcatttgaatactgtagccatggtgagtgagcagttgaagacttcctttctgcaccttcatagttaagggttcatcttctcaagaaataaagttgtgctgggttgtttcaattctgtagatcacctagaaactaggtaacaaggcccttggatcacaatgagcacattgcaggtctttggaaatgctgggaaggggttacattcaagtaactgctgacgtccttcctctctgtcagacccatgttggcctgtaattatatttttctgaatctaaaaacaaatagaaatttctgatatcttttc

SEQ ID NO: 348635 - DNA, 3048 bp, Homo sapiens
gagccctcgctcggcgaccagagcctcgcattacttcccctagctccgccaagcctcgctgcatacgcgaccgcgcgcagtccgccgtcgcgcccctatgacgtcacccgcgcgccaccgcttccgggctggggactgggggcggggccgcgcggagggcaagccgggggcggggccggggccagagcagatctccgggcctccgcggccatagctgactgtgccgtcccttcccctcacccgctccacgccctcctgggccgagtggagttgggtggtgtcgggagcctctccctgaggggcaccgcgtcttcaggagctgggcctccagtgcggcgcgatgtcaggcgcggtgacagctctgtgagtccgaggccgcggccgtggcgctgggcggctgcggggcctgaccggtccgctcatggtgccgccacgacgccatcgcggggcaggaaggccaggggtgctgagttcttcacctccttttagactgagatctgccaagttttccggcattgctcttgaggatctcagaagggctcttaagacaagactgcaaatggtgtgtgtatttgtcatgaaccgaatgaattcccagaacagtggtttcactcagcgcaggcgaatggctcttgggattgttattcttctgcttgttgatgtgatatgggttgcttcctctgaacttacttcgtatgtttttacccagtacaacaaaccattcttcagcacctttgcaaaaacatctatgtttgttttgtaccttttgggctttattatttggaagccatggagacaacagtgtacaagaggacttcgcggaaagcatgctgctttttttgcagatgctgaaggttactttgctgcttgcacaacagatacaactatgaatagttctttgagtgaacctctgtatgtgcctgtgaaattccatgatcttccaagtgaaaaacctgagagcacaaacattgatactgaaaaaacccccaaaaagtctcgtgtgaggttcagtaatatcatggagattcgacagcttccgtcaagtcatgcattggaagcaaagttgtctcgcatgtcatatcctgtgaaagaacaagaatccatactgaaaactgtggggaaacttactgcaactcaagtagcgaaaattagcttttttttttgctttgtgtggtttttggcaaatttgtcatatcaagaagcactttcagacacacaagttgctatagttaatattttatcttcaacttccggactttttaccttaatccttgctgcagtatttccaagtaacagtggagatagatttaccctttctaaactattagctgtaattttaagcattggaggcgttgtactggtaaacctggcagggtctgaaaaacctgctggaagagacacagtaggttccatttggtctcttgctggagccatgctctatgctgtctatattgttatgattaagagaaaagtagatagagaagacaagttggatattccaatgttctttggttttgtaggtttgtttaatctgctgctcttatggccaggtttctttttacttcattatactggatttgaggacttcgagtttcccaataaagtagtattaatgtgcattatcattaatggccttattggaacagtactctcagagttcctgtggttgtggggctgctttcttacctcatcattgataggcacacttgcactaagccttacaatacctctgtccataatagctgacatgtgtatgcaaaaggtgcagttttcttggttattttttgcaggagctatccctgtatttttttcattttttattgtaactctcctatgccattataataattgggatcctgtgatggtgggaatcagaagaatatttgcttttatatgcagaaaacatcgaattcagagagttccagaagacagcgaacagtgtgagagtctcatttctatgcacagtgtttctcaggaggatggagctagttagctgtctgttgtctgtagcccagcttgataatggaactatacagcgaagagacaatctctggcaagtttttgtagaaaaaatgtttcagtgcctagtctgaaaaataacagtttgagttctttgaaactctaaaatatatttttctcatacctgttttcttcattttcataatgaagcactttgctatgtagctgtgtacatatcactacagttataggaagtttcagtctacagtccatccaaaggaccaacctgccttacacatctcaaggaattcagctgttgaaatcatttgaactaatcaaggaataaatcctaatgttctgggactttattttcacatgttaaatgctggaatatattatgaaaatgttttcaagaaatcacttaagtgttcatagaccagtatttctgacaggtaaaatgctaaaataagctacctgtaataagtgtggattatatttttgggttttgtagaatattgcaaattaaccacacaaaaaatgtttaatttatgcaacaagcatgtttgtgcaaatttcatgggactttaaaaagaataagtatttgagaaaatatctggttcacttacactacatttactgtattattcttttatagcattaggtgccttgtattttaaatctgtgacaaaccatggcaaatttttaaaggggaagtattattataaaatgaagaaatatgtatttctaaaggctatattgctgtaaacttaattgataaagctctgtttaatttagagttttgaagaaatagtctcccttcaattaagaaattttcataatggaatgatttaaattgaagtgacaaagagtattattaaaatacaatgtttatacgtgtaaaaaaaaaaaaaaaaaaaaaaaaaaaaaaaaaaaaaaaaaaaaaaaccttgtggcccgcttgggcccatccgatttttagcctgggccagctttttccttgcgcccgaatttgggcctcattggcccatttccccttatggggggccgtttaccattcaattgcccgcgttttaacaccgtcggaccggg

SEQ ID NO: 348636 - DNA, 3860 bp, Homo sapiens
gagccctcgctcggcgaccagagcctcgcattacttcccctagctccgccaagcctcgctgcatacgcgaccgcgcgcagtccgccgtcgcgcccctatgacgtcacccgcgcgccaccgcttccgggctggggactgggggcggggccgcgcggagggcaagccgggggcggggccggggccagagcagatctccgggcctccgcggccatagctgactgtgccgtcccttcccctcacccgctccacgccctcctgggccgagtggagttgggtggtgtcgggagcctctccctgaggggcaccgcgtcttcaggagctgggcctccagtgcggcgcgatgtcaggcgcggtgacagctctgtgagtccgaggccgcggccgtggcgctgggcggctgcggggcctgaccggtccgctcatggtgccgccacgacgccatcgcggggcaggaaggccaggggtgctgagttcttcacctccttttagactgagatctgccaagttttccggcattgctcttgaggatctcagaagggctcttaagacaagactgcaaatggtgtgtgtatttgtcatgaaccgaatgaattcccagaacagtggtttcactcagcgcaggcgaatggctcttgggattgttattcttctgcttgttgatgtgatatgggttgcttcctctgaacttacttcgtatgtttttacccagtacaacaaaccattcttcagcacctttgcaaaaacatctatgtttgttttgtaccttttgggctttattatttggaagccatggagacaacagtgtacaagaggacttcgcggaaagcatgctgctttttttgcagatgctgaaggttactttgctgcttgcacaacagatacaactatgaatagttctttgagtgaacctctgtatgtgcctgtgaaattccatgatcttccaagtgaaaaacctgagagcacaaacattgatactgaaaaaacccccaaaaagtctcgtgtgaggttcagtaatatcatggagattcgacagcttccgtcaagtcatgcattggaagcaaagttgtctcgcatgtcatatcctgtgaaagaacaagaatccatactgaaaactgtggggaaacttactgcaactcaagtagcgaaaattagcttttttttttgctttgtgtggtttttggcaaatttgtcatatcaagaagcactttcagacacacaagttgctatagttaatattttatcttcaacttccggactttttaccttaatccttgctgcagtatttccaagtaacagtggagatagatttaccctttctaaactattagctgtaattttaagcattggaggcgttgtactggtaaacctggcagggtctgaaaaacctgctggaagagacacagtaggttccatttggtctcttgctggagccatgctctatgctgtctatattgttatgattaagagaaaagtagatagagaagacaagttggatattccaatgttctttggttttgtaggtttgtttaatctgctgctcttatggccaggtttctttttacttcattatactggatttgaggacttcgagtttcccaataaagtagtattaatgtgcattatcattaatggccttattggaacagtactctcagagttcctgtggttgtggggctgctttcttacctcatcattgataggcacacttgcactaagccttacaatacctctgtccataatagctgacatgtgtatgcaaaaggtgcagttttcttggttattttttgcaggagctatccctgtatttttttcattttttattgtaactctcctatgccattataataattgggatcctgtgatggtgggaatcagaagaatatttgcttttatatgcagaaaacatcgaattcagagagttccagaagacagcgaacagtgtgagagtctcatttctatgcacagtgtttctcaggaggatggagctagttagctgtctgttgtctgtagcccagcttgataatggaactatacagcgaagagacaatctctggcaagtttttgtagaaaaaatgtttcagtgcctagtctgaaaaataacagtttgagttctttgaaactctaaaatatatttttctcatacctgttttcttcattttcataatgaagcactttgctatgtagctgtgtacatatcactacagttataggaagtttcagtctacagtccatccaaaggaccaacctgccttacacatctcaaggaattcagctgttgaaatcatttgaactaatcaaggaataaatcctaatgttctgggactttattttcacatgttaaatgctggaatatattatgaaaatgttttcaagaaatcacttaagtgttcatagaccagtatttctgacaggtaaaatgctaaaataagctacctgtaataagtgtggattatatttttgggttttgtagaatattgcaaattaaccacacaaaaaatgtttaatttatgcaacaagcatgtttgtgcaaatttcatgggactttaaaaagaataagtatttgagaaaatatctggttcacttacactacatttactgtattattcttttatagcattaggtgccttgtattttaaatctgtgacaaaccatggcaaatttttaaaggggaagtattattataaaatgaagaaatatgtatttctaaaggctatattgctgtaaacttaattgataaagctctgtttaatttagagttttgaagaaatagtctcccttcaattaagaaattttcataatggaatgatttaaattgaagtgacaaagagtattattaaaatacaatgtttatacgtctatttgtgtattgtagatgtatcaagtgatttctaatttttttcacatatgaatgtgccagattactctagaactagatgtctcttctttaaataattttagttttcctgaataaatttgtaatggttaaagtaccaagtaagtaaggcgagaagggattctgtttttaaaatcacatcagaacttttcctctactaagattataaattaaatgtaaaatactcctaattgcaattcttaaacttaggccttacatgtacttattatgcaactgctcctggactctattcaccatagatatcagtaaacgtatgtcccaggattcacaggcttttgattaatcaatattcttttcaagtttgctgtgaagagtttagttctcttcaaaatttcttaactaatctgatttttaagaattctctttgcagtgtttagcttcctattcacattcttaaaattgctttggtgttaccatgagtctaaaatgaagtttagccttccttttgtttcattctgagaacttctatattatattacctttaaaaattgtttatgatattaaatttaaaatacaaacaaaaaaaaaaaaaaaaaaaaaaaaaaaaaaaaaaaaaaaaaaaaaaaaaaaaaaaggggggggggggtaaaaaatatccccggggggggcccattgggcccccttttttttaaaagggggcgcccaaaagggggggaataaaagggggggggggggtaaaggtcgggcgggggaaaaacttctgctattgggaacttcttcggggaaagacccccctttgctggcggggggacctctatgggcgaccaccccccagaaaatataagagaccccggggaaaaaaaacttcggtgtttatggtcacccacagcttatgccgcgggaaaattggtcccgtttttttcgatatagggcggtcttaattcagataaaagagaacaaacacaaaataaacagagaacaaaagtgcgcaaagaatatgcaaaca

SEQ ID NO: 348637 - DNA, 2457 bp, Homo sapiens
gagccctcgctcggcgaccagagcctcgcattacttcccctagctccgccaagcctcgctgcatacgcgaccgcgcgcagtccgccgtcgcgcccctatgacgtcacccgcgcgccaccgcttccgggctggggactgggggcggggccgcgcggagggcaagccgggggcggggccggggccagagcagatctccgggcctccgcggccatagctgactgtgccgtcccttcccctcacccgctccacgccctcctgggccgagtggagttgggtggtgtcgggagcctctccctgaggggcaccgcgtcttcaggagctgggcctccagtgcggcgcgatgtcaggcgcggtgacagctctgtgagtccgaggccgcggccgtggcgctgggcggctgcggggcctgaccggtccgctcatggtgccgccacgacgccatcgcggggcaggaaggccaggggtgctgagttcttcacctccttttagactgagatctgccaagttttccggcattgctcttgaggatctcagaagggctcttaagacaagactgcaaatggtgtgtgtatttgtcatgaaccgaatgaattcccagaacagtggtttcactcagcgcaggcgaatggctcttgggattgttattcttctgcttgttgatgtgatatgggttgcttcctctgaacttacttcgtatgtttttacccagtacaacaaaccattcttcagcacctttgcaaaaacatctatgtttgttttgtaccttttgggctttattatttggaagccatggagacaacagtgtacaagaggacttcgcggaaagcatgctgctttttttgcagatgctgaaggttactttgctgcttgcacaacagatacaactatgaatagttctttgagtgaacctctgtatgtgcctgtgaaattccatgatcttccaagtgaaaaacctgagagcacaaacattgatactgaaaaaacccccaaaaagtctcgtgtgaggttcagtaatatcatggagattcgacagcttccgtcaagtcatgcattggaagcaaagttgtctcgcatgtcatatcctgtgaaagaacaagaatccatactgaaaactgtggggaaacttactgcaactcaagtagcgaaaattagcttttttttttgctttgtgtggtttttggcaaatttgtcatatcaagaagcactttcagacacacaagttgctatagttaatattttatcttcaacttccggactttttaccttaatccttgctgcagtatttccaagtaacagtggagatagatttaccctttctaaactattagctgtaattttaagcattggaggcgttgtactggtaaacctggcagggtctgaaaaacctgctggaagagacacagtaggttccatttggtctcttgctggagccatgctctatgctgtctatattgttatgattaagagaaaagtagatagagaagacaagttggatattccaatgttctttggttttgtaggtttgtttaatctgctgctcttatggccaggtttctttttacttcattatactggatttgaggacttcgagtttcccaataaagtagtattaatgtgcattatcattaatggccttattggaacagtactctcagagttcctgtggttgtggggctgctttcttacctcatcattgataggcacacttgcactaagccttacaatacctctgtccataatagctgacatgtgtatgcaaaaggtgcagttttcttggttattttttgcaggagctatccctgtatttttttcattttttattgtaactctcctatgccattataataattgggatcctgtgatggtgggaatcagaagaatatttgcttttatatgcagaaaacatcgaattcagagagttccagaagacagcgaacagtgtgagagtctcatttctatgcacagtgtttctcaggaggatggagctagttagctgtctgttgtctgtagcccaggtttgtatgtgagctgggtttagtattgaataaggttcttatctgtgtaatattcaaaggattgattttctataattagttgtttgagaggcaatacagccttagaggctaaaggggctaaagcctggactccagttccgtcttctccacatactagctgtgtggccctgtgcaaggttcttaatctcttgatgctccagctttcttatttgtgaaatgggattacagtagaacctcccttatgagggtgttaaaatagtaaatacttggtaaatataaagtatgtataatagtgcctgactcaaatgatcagaaagttttaactcatttttattcatgctaagggtcattttatttaataatatgctttagaaaaatattttttctctgatgataaaagaaaaatgtaatattctggcgtacaatatactggttggaaaat

SEQ ID NO: 348638 - DNA, 1609 bp, Homo sapiens
agcgagttttgagtgtcaaatttgcacttaatttgtttttggtactgtcataaggactgtagcatacacagcatactacaactgtaactttttacgaaaatatacattttttgaagatgacttcagaaactgagggagagagacccacttgagactaggcagcaaacagtgaagaagaaatgagcaacatggtgtgcaggagcaaagtttcctactgtatatctctactctaagtgtacaatgcctataaatggaaagtatgctttcttggctttcctttagcctattttccaagcaagaactattgttgttggtaatttaggtgcatggaatagtaagttgaagtcttgaattcttatttaataataatacacttaatacattgtcagtgtttaattttgtcttcccattgttcttattcctgctagttttcacaaatagaaaacttacattgaaggggaaaattgccttaatgataattgtgggtgtgttttttcctctatcttttatttttaggtgcagttttcttggttattttttgcaggagctatccctgtatttttttcattttttattgtaactctcctatgccattataataattgggatcctgtgatggtgggaatcagaagaatatttgcttttatatgcagaaaacatcgaattcagagagttccagaagacagcgaacagtgtgagagtctcatttctatgcacagtgtttctcaggaggatggagctagttagctgtctgttgtctgtagcccagcttgataatggaactatacagcgaagagacaatctctggcaagtttttgtagaaaaaatgtttcagtgcctagtctgaaaaataacagtttgagttctttgaaactctaaaatatatttttctcatacctgttttcttcattttcataatgaagcactttgctatgtagctgtgtacatatcactacagttataggaagtttcagtctacagtccatccaaaggaccaacctgccttacacatctcaaggaattcagctgttgaaatcatttgaactaatcaaggaataaatcctaatgttctgggactttattttcacatgttaaatgctggaatatattatgaaaatgttttcaagaaatcacttaagtgttcatagaccagtatttctgacaggtaaaatgctaaaataagctacctgtaataagtgtggattatatttttgggttttgtagaatattgcaaattaaccacacaaaaaatgtttaatttatgcaacaagcatgtttgtgcaaatttcatgggactttaaaaagaataagtatttgagaaaatatctggttcacttacactacatttactgtattattcttttatagcattaggtgccttgtattttaaatctgtgacaaaccatggcaaatttttaaaggggaagtattattataaaatgaagaaatatgtatttctaaaggctatattgctgtaaacttaattgataaagctctgtttaatttagagttttgaagaaatagtctcccttcaattaagaaattttcataatggaatgatttaaattgaagtgacaaagagtattattaaaatacaatgtttatacgt

SEQ ID NO: 348639 - DNA, 2864 bp, Homo sapiens
gagccctcgctcggcgaccagagcctcgcattacttcccctagctccgccaagcctcgctgcatacgcgaccgcgcgcagtccgccgtcgcgcccctatgacgtcacccgcgcgccaccgcttccgggctggggactgggggcggggccgcgcggagggcaagccgggggcggggccggggccagagcagatctccgggcctccgcggccatagctgactgtgccgtcccttcccctcacccgctccacgccctcctgggccgagtggagttgggtggtgtcgggagcctctccctgaggggcaccgcgtcttcaggagctgggcctccagtgcggcgcgatgtcaggcgcggtgacagctctgtgagtccgaggccgcggccgtggcgctgggcggctgcggggcctgaccggtccgctcatggtgccgccacgacgccatcgcggggcaggaaggccaggggtgctgagttcttcacctccttttagactgagatctgccaagttttccggcattgctcttgaggatctcagaagggctcttaagacaagactgcaaatggtgtgtgtatttgtcatgaaccgaatgaattcccagaacagtggtttcactcagcgcaggcgaatggctcttgggattgttattcttctgcttgttgatgtgatatgggttgcttcctctgaacttacttcgtatgtttttacccagtacaacaaaccattcttcagcacctttgcaaaaacatctatgtttgttttgtaccttttgggctttattatttggaagccatggagacaacagtgtacaagaggacttcgcggaaagcatgctgctttttttgcagatgctgaaggttactttgctgcttgcacaacagatacaactatgaatagttctttgagtgaacctctgtatgtgcctgtgaaattccatgatcttccaagtgaaaaacctgagagcacaaacattgatactgaaaaaacccccaaaaagtctcgtgtgaggttcagtaatatcatggagattcgacagcttccgtcaagtcatgcattggaagcaaagttgtctcgcatgtcatatcctgtgaaagaacaagaatccatactgaaaactgtggggaaacttactgcaactcaagtagcgaaaattagcttttttttttgctttgtgtggtttttggcaaatttgtcatatcaagaagcactttcagacacacaagttgctatagttaatattttatcttcaacttccggactttttaccttaatccttgctgcagtatttccaagtaacagtggagatagatttaccctttctaaactattagctgtaattttaagcattggaggcgttgtactggtaaacctggcagggtctgaaaaacctgctggaagagacacagtaggttccatttggtctcttgctggagccatgctctatgctgtctatattgttatgattaagagaaaagtagatagagaagacaagttggatattccaatgttctttggttttgtaggtttgtttaatctgctgctcttatggccaggtttctttttacttcattatactggatttgaggacttcgagtttcccaataaagtagtattaatgtgcattatcattaatggccttattggaacagtactctcagagttcctgtggttgtggggctgctttcttacctcatcattgataggcacacttgcactaagccttacaatacctctgtccataatagctgacatgtgtatgcaaaaggtgcagttttcttggttattttttgcaggagctatccctgtatttttttcattttttattgtaactctcctatgccattataataattgggatcctgtgatggtgggaatcagaagaatatttgcttttatatgcagaaaacatcgaattcagagatggaatcttgctctgtcgcccaagctggagtgcagtggcgagatctcgggtcactgcaacctctacctcctgggctcaagcgattctcctgcctcagcctcccgagtagctgggactacaggcgcacgccaccacacccagctaatttttgtatttttagtagagacggggtttcaccatgttggtcaggatggtctcgatctcttgaactcgtgatccgccctccttggcttcccaaagtgctgggattataggcgtgagccaccgcgcccggcccacagcatcatttttcaagggtctctagggtgaccaggtgtccgggtttgccaaggacagtcccagtttctacctgctgtcctaggacaatcatgaatagtgcccctttcagtttcaaaagtgtcatagtttagacattaaattacctgaccacccttatatgccccatgtttcttaacatctaggctgctgacaaaattcacattttctgactgtcagtctagtgttctctatactagactgatacggatccacaaaggaagcaatattggccaacaattaatcttcagtctttggattagtgagaggtgacaacgtgctggcagccgtcacagccctcgctcactctccccgcctcctctgcctggtttcccagtttgacggcacttgaggagcccttcagcccgccgctgcactgtgggagccccttcctgggctggccgaggccggaggcggctcccccagcttgcggggaggtgtggagggagaggcgagggcgggaacaggggctgcgcgcggtgcttgcgggccagcgcgagttctgggtgggtgtgggctcggcgggccccgcactcggagcggccggcaggccctgccggccccgggcaatgaggggcttagcacccgggccagcggctgcggagggtgtgccgggtcccccagcagtgcc

SEQ ID NO: 348640 - DNA, 2083 bp, Homo sapiens
gagccctcgctcggcgaccagagcctcgcattacttcccctagctccgccaagcctcgctgcatacgcgaccgcgcgcagtccgccgtcgcgcccctatgacgtcacccgcgcgccaccgcttccgggctggggactgggggcggggccgcgcggagggcaagccgggggcggggccggggccagagcagatctccgggcctccgcggccatagctgactgtgccgtcccttcccctcacccgctccacgccctcctgggccgagtggagttgggtggtgtcgggagcctctccctgaggggcaccgcgtcttcaggagctgggcctccagtgcggcgcgatgtcaggcgcggtgacagctctgtgagtccgaggccgcggccgtggcgctgggcggctgcggggcctgaccggtccgctcatggtgccgccacgacgccatcgcggggcaggaaggccaggggtgctgagttcttcacctccttttagactgagatctgccaagttttccggcattgctcttgaggatctcagaagggctcttaagacaagactgcaaatggtgtgtgtatttgtcatgaaccgaatgaattcccagaacagtggtttcactcagcgcaggcgaatggctcttgggattgttattcttctgcttgttgatgtgatatgggttgcttcctctgaacttacttcgtatgtttttacccagtacaacaaaccattcttcagcacctttgcaaaaacatctatgtttgttttgtaccttttgggctttattatttggaagccatggagacaacagtgtacaagaggacttcgcggaaagcatgctgctttttttgcagatgctgaaggttactttgctgcttgcacaacagatacaactatgaatagttctttgagtgaacctctgtatgtgcctgtgaaattccatgatcttccaagtgaaaaacctgagagcacaaacattgatactgaaaaaacccccaaaaagtctcgtgtgaggttcagtaatatcatggagattcgacagcttccgtcaagtcatgcattggaagcaaagttgtctcgcatgtcatatcctgtgaaagaacaagaatccatactgaaaactgtggggaaacttactgcaactcaagtagcgaaaattagcttttttttttgctttgtggtaggtcttttatgatatgtttgcatatgatgtttgaaacttgaattttaagactgtatacataccaacaatataggattgaagtgtgagacaattaggttgtttaatcatgactttaaactctgctatttgataccggtaggaagttagggtatcaaaattaataaatgcttgatatacctcaaagagttagaattcattaagtcctataacacttcagctatttacatatatacacaaacttacaaacacacacaggttgggaagttcttcagaatttagcattgcctcatgctcaaaattatgaatagagttattttacactgtgatatatgtatatacaaaggctagtaaatatccagataagagtttactgtatgcattgatttttttcaaataagtgttttgcagttttatattcatataaatgaggttaagtattattttgtcaagtactcagtatatttctacagaatttctggttgtattatttatagtttctttttaaagatagaaactgaaaactgtgcttaagatttcacatagaataatgatggagtaaataaagtattgttattttgggctaagctgggattagagacttgtctgagttagaactctaacatgtagaatttaaaaaatgaatttctgtgatattttatgtgtacatcattggaagtagcctaatccaaggttttttaaatatgagcctttaagattcaaatttgtactgagcatcttaaacccctaaacaatgaaatgctaatgtcaatgttattagcctgattataaaatttttttaatgtcatgattttgcctttcatactcattaaaatagcccatttttctccattccctggctctactaataacactattctttatagcagatttaaagatatgtgcagataa

SEQ ID NO: 348641 - DNA, 959 bp, Homo sapiens
gtcacattcataagttcttagtactccaaatttgagtatccagttattaagtatgtatacagtgaaaataggtatttcaattttaagataatttgctttttaaaatgtaaactatagaaaactaaaactgtgaaattataatctaatcacatttctgtggtttctgtttttagcttgataatggaactatacagcgaagagacaatctctggcaagtttttgtagaaaaaatgtttcagtgcctagtctgaaaaataacagtttgagttctttgaaactcttatgtagctgtgtacatatcactacagttataggaagtttcagtctacagtccatccaaaggaccaacctgccttacacatctcaaggaattcagctgttgaaatcatttgaactaatcaaggaataaatcctaatgttctgggactttattttcacatgttaaatgctggaatatattatgaaaatgttttcaagaaatcacttaagtgttcatagaccagtatttctgacaggtaaaatgctaaaataagctacctgtaataagtgtggattatatttttgggttttgtagaatattgcaaattaaccacacaaaaaatgtttaatttatgcaacaagcatgtttgtgcaaatttcatgggactttaaaaagaataagtatttgagaaaatatctggttcacttacactacatttactgtattattcttttatagcattaggtgccttgtattttaaatctgtgacaaaccatggcaaatttttaaaggggaagtattattataaaatgaagaaatatgtatttctaaaggctatattgctgtaaacttaattgataaagctctgtttaatttagagttttgaagaaatagtctcccttcaattaagaaattttcataatggaatgatttaaattgaagtgacaaagagtattattaaaatacaatgtttatacgt

SEQ ID NO: 348642 - DNA, 468 bp, Homo sapiens
caaaaaacgctaacttgggacaagttcttgggaaattttatcctagtgttggttctgccactgacttgcatcctgtccacatagcttcaggcaatggaataaataaggtttgaggttccttttcagctctaaagctttccttaattactgcttttttttttcttaagagttccagaagacagcgaacagtgtgagagtctcatttctatgcacagtgtttctcaggaggatggagctagttagctgtctgttgtctgtagcccaggtttgtatgtgagctgggtttagtattgaataaggttcttatctgtgtaatattcaaaggattgattttctataattagttgtttgagaggcaatacagccttagaggctaaaggggctaaagcctggactccagttccgtcttctccacatactagctgtgtggccctgtgcaaggttcttaatctcttgatgctccagctt

SEQ ID NO: 348643 - DNA, 2490 bp, Homo sapiens
gagccctcgctcggcgaccagagcctcgcattacttcccctagctccgccaagcctcgctgcatacgcgaccgcgcgcagtccgccgtcgcgcccctatgacgtcacccgcgcgccaccgcttccgggctggggactgggggcggggccgcgcggagggcaagccgggggcggggccggggccagagcagatctccgggcctccgcggccatagctgactgtgccgtcccttcccctcacccgctccacgccctcctgggccgagtggagttgggtggtgtcgggagcctctccctgaggggcaccgcgtcttcaggagctgggcctccagtgcggcgcgatgtcaggcgcggtgacagctctgtgagtccgaggccgcggccgtggcgctgggcggctgcggggcctgaccggtccgctcatggtgccgccacgacgccatcgcggggcaggaaggccaggtaggcaggcagggaagggccccgacatcaccggagcccaaaccgagacggagtgcccaccagcagcaccacctcctgccctcggtggcagcaggagcgccttgaccgaaaccgtgaaggtctctaggggcggagggagcgggagctgacaggggcgcccgagccctgcgcccaccgctggcaattgaggaagccgtgcgtgcgccctcgcctcggctccccggggaggcgtcgctgccttaactgtcttccccgctccaaaacagaaggatgatttcttttcccagctgtttcttttaaaatgactggatgttttgatagaggtgggtggaggagcatggagaatccttttcttttaccacttgaagagattggaaaggtgccttcaagacccacagcaaatcacttactctccgataaccaaattccactccagcagatcagggacagaaaagacacttttagaaacagtgtctagacgctgtccccagggatggattcctctggatggagaggggtgctgagttcttcacctccttttagactgagatctgccaagttttccggcattgctcttgaggatctcagaagggctcttaagacaagactgcaaatggtgtgtgtatttgtcatgaaccgaatgaattcccagaacagtggtttcactcagcgcaggcgaatggctcttgggattgttattcttctgcttgttgatgtgatatgggttgcttcctctgaacttacttcgtatgtttttacccagtacaacaaaccattcttcagcacctttgcaaaaacatctatgtttgttttgtaccttttgggctttattatttggaagccatggagacaacagtgtacaagaggacttcgcggaaagcatgctgctttttttgcagatgctgaaggttactttgctgcttgcacaacagatacaactatgaatagttctttgagtgaacctctgtatgtgcctgtgaaattccatgatcttccaagtgaaaaacctgagagcacaaacattgatactgaaaaaacccccaaaaagtctcgtgtgaggttcagtaatatcatggagattcgacagcttccgtcaagtcatgcattggaagcaaagttgtctcgcatgtcatatcctgtgaaagaacaagaatccatactgaaaactgtggggaaacttactgcaactcaagtagcgaaaattagcttttttttttgctttgtggtaggtcttttatgatatgtttgcatatgatgtttgaaacttgaattttaagactgtatacataccaacaatataggattgaagtgtgagacaattaggttgtttaatcatgactttaaactctgctatttgataccggtaggaagttagggtatcaaaattaataaatgcttgatatacctcaaagagttagaattcattaagtcctataacacttcagctatttacatatatacacaaacttacaaacacacacaggttgggaagttcttcagaatttagcattgcctcatgctcaaaattatgaatagagttattttacactgtgatatatgtatatacaaaggctagtaaatatccagataagagtttactgtatgcattgatttttttcaaataagtgttttgcagttttatattcatataaatgaggttaagtattattttgtcaagtactcagtatatttctacagaatttctggttgtattatttatagtttctttttaaagatagaaactgaaaactgtgcttaagatttcacatagaataatgatggagtaaataaagtattgttattttgggctaagctgggattagagacttgtctgagttagaactctaacatgtagaatttaaaaaatgaatttctgtgatattttatgtgtacatcattggaagtagcctaatccaaggttttttaaatatgagcctttaagattcaaatttgtactgagcatcttaaacccctaaacaatgaaatgctaatgtcaatgttattagcctgattataaaatttttttaat

SEQ ID NO: 348644 - DNA, 2855 bp, Homo sapiens
gagccctcgctcggcgaccagagcctcgcattacttcccctagctccgccaagcctcgctgcatacgcgaccgcgcgcagtccgccgtcgcgcccctatgacgtcacccgcgcgccaccgcttccgggctggggactgggggcggggccgcgcggagggcaagccgggggcggggccggggccagagcagatctccgggcctccgcggccatagctgactgtgccgtcccttcccctcacccgctccacgccctcctgggccgagtggagttgggtggtgtcgggagcctctccctgaggggcaccgcgtcttcaggagctgggcctccagtgcggcgcgatgtcaggcgcggtgacagctctgtgagtccgaggccgcggccgtggcgctgggcggctgcggggcctgaccggtccgctcatggtgccgccacgacgccatcgcggggcaggaaggccaggggtgctgagttcttcacctccttttagactgagatctgccaagttttccggcattgctcttgaggatctcagaagggctcttaagacaagactgcaaatggtgtgtgtatttgtcatgaaccgaatgaattcccagaacagtggtttcactcagcgcaggcgaatggctcttgggattgttattcttctgcttgttgatgtgatatgggttgcttcctctgaacttacttcgtatgtttttacccagtacaacaaaccattcttcagcacctttgcaaaaacatctatgtttgttttgtaccttttgggctttattatttggaagccatggagacaacagtgtacaagaggacttcgcggaaagcatgctgctttttttgcagatgctgaaggttactttgctgcttgcacaacagatacaactatgaatagttctttgagtgaacctctgtatgtgcctgtgaaattccatgatcttccaagtgaaaaacctgagagcacaaacattgatactgaaaaaacccccaaaaagtctcgtgtgaggttcagtaatatcatggagattcgacagcttccgtcaagtcatgcattggaagcaaagttgtctcgcatgtcatatcctgtgaaagaacaagaatccatactgaaaactgtggggaaacttactgcaactcaagtagcgaaaattagcttttttttttgctttgtgtggtttttggcaaatttgtcatatcaagaagcactttcagacacacaagttgctatagttaatattttatcttcaacttccggactttttaccttaatccttgctgcagtatttccaagtaacagtggagatagatttaccctttctaaactattagctgtaattttaagcattggaggcgttgtactggtaaacctggcagggtctgaaaaacctgctggaagagacacagtaggttccatttggtctcttgctggagccatgctctatgctgtctatattgttatgattaagagaaaagtagatagagaagacaagttggatattccaatgttctttggttttgtaggtttgtttaatctgctgctcttatggccaggtttctttttacttcattatactggatttgaggacttcgagtttcccaataaagtagtattaatgtgcattatcattaatggccttattggaacagtactctcagagttcctgtggttgtggggctgctttcttacctcatcattgataggcacacttgcactaagccttacaatacctctgtccataatagctgacatgtgtatgcaaaaggtgcagttttcttggttattttttgcaggagctatccctgtatttttttcattttttattgtaactctcctatgccattataataattgggatcctgtgatggtgggaatcagaagaatatttgcttttatatgcagaaaacatcgaattcagagagttccagaagacagcgaacagtgtgagagtctcatttctatgcacagtgtttctcaggaggatggagctagttagctgtctgttgtctgtagcccagcttgataatggaactatacagcgaagagacaatctctggcaagtttttgtagaaaaaatgtttcagtgcctagtctgaaaaataacagtttgagttctttgaaactctaaaatatatttttctcatacctgttttcttcattttcataatgaagcactttgctatgtagctgtgtacatatcactacagttataggaagtttcagtctacagtccatccaaaggaccaacctgccttacacatctcaaggaattcagctgttgaaatcatttgaactaatcaaggaataaatcctaatgttctgggactttattttcacatgttaaatgctggaatatattatgaaaatgttttcaagaaatcacttaagtgttcatagaccagtatttctgacaggtaaaatgctaaaataagctacctgtaataagtgtggattatatttttgggttttgtagaatattgcaaattaaccacacaaaaaatgtttaatttatgcaacaagcatgtttgtgcaaatttcatgggactttaaaaagaataagtatttgagaaaatatctggttcacttacactacatttactgtattattcttttatagcattaggtgccttgtattttaaatctgtgacaaaccatggcaaatttttaaaggggaagtattattataaaatgaagaaatatgtatttctaaaggctatattgctgtaaacttaattgataaagctctgtttaatttagagttttgaagaaatagtctcccttcaattaagaaattttcataatggaatgatttaaattgaagtgacaaagagtattattaaaatacaatgtttatacgt

SEQ ID NO: 348645 - DNA, 3567 bp, Homo sapiens
gagccctcgctcggcgaccagagcctcgcattacttcccctagctccgccaagcctcgctgcatacgcgaccgcgcgcagtccgccgtcgcgcccctatgacgtcacccgcgcgccaccgcttccgggctggggactgggggcggggccgcgcggagggcaagccgggggcggggccggggccagagcagatctccgggcctccgcggccatagctgactgtgccgtcccttcccctcacccgctccacgccctcctgggccgagtggagttgggtggtgtcgggagcctctccctgaggggcaccgcgtcttcaggagctgggcctccagtgcggcgcgatgtcaggcgcggtgacagctctgtgagtccgaggccgcggccgtggcgctgggcggctgcggggcctgaccggtccgctcatggtgccgccacgacgccatcgcggggcaggaaggccaggtaggcaggcagggaagggccccgacatcaccggagcccaaaccgagacggagtgcccaccagcagcaccacctcctgccctcggtggcagcaggagcgccttgaccgaaaccgtgaaggtctctaggggcggagggagcgggagctgacaggggcgcccgagccctgcgcccaccgctggcaattgaggaagccgtgcgtgcgccctcgcctcggctccccggggaggcgtcgctgccttaactgtcttccccgctccaaaacagaaggatgatttcttttcccagctgtttcttttaaaatgactggatgttttgatagaggtgggtggaggagcatggagaatccttttcttttaccacttgaagagattggaaaggtgccttcaagacccacagcaaatcacttactctccgataaccaaattccactccagcagatcagggacagaaaagacacttttagaaacagtgtctagacgctgtccccagggatggattcctctggatggagaggggtgctgagttcttcacctccttttagactgagatctgccaagttttccggcattgctcttgaggatctcagaagggctcttaagacaagactgcaaatggtgtgtgtatttgtcatgaaccgaatgaattcccagaacagtggtttcactcagcgcaggcgaatggctcttgggattgttattcttctgcttgttgatgtgatatgggttgcttcctctgaacttacttcgtatgtttttacccagtacaacaaaccattcttcagcacctttgcaaaaacatctatgtttgttttgtaccttttgggctttattatttggaagccatggagacaacagtgtacaagaggacttcgcggaaagcatgctgctttttttgcagatgctgaaggttactttgctgcttgcacaacagatacaactatgaatagttctttgagtgaacctctgtatgtgcctgtgaaattccatgatcttccaagtgaaaaacctgagagcacaaacattgatactgaaaaaacccccaaaaagtctcgtgtgaggttcagtaatatcatggagattcgacagcttccgtcaagtcatgcattggaagcaaagttgtctcgcatgtcatatcctgtgaaagaacaagaatccatactgaaaactgtggggaaacttactgcaactcaagtagcgaaaattagcttttttttttgctttgtgtggtttttggcaaatttgtcatatcaagaagcactttcagacacacaagttgctatagttaatattttatcttcaacttccggactttttaccttaatccttgctgcagtatttccaagtaacagtggagatagatttaccctttctaaactattagctgtaattttaagcattggaggcgttgtactggtaaacctggcagggtctgaaaaacctgctggaagagacacagtaggttccatttggtctcttgctggagccatgctctatgctgtctatattgttatgattaagagaaaagtagatagagaagacaagttggatattccaatgttctttggttttgtaggtttgtttaatctgctgctcttatggccaggtttctttttacttcattatactggatttgaggacttcgagtttcccaataaagtagtattaatgtgcattatcattaatggccttattggaacagtactctcagagttcctgtggttgtggggctgctttcttacctcatcattgataggcacacttgcactaagccttacaatacctctgtccataatagctgacatgtgtatgcaaaaggtgcagttttcttggttattttttgcaggagctatccctgtatttttttcattttttattgtaactctcctatgccattataataattgggatcctgtgatggtgggaatcagaagaatatttgcttttatatgcagaaaacatcgaattcagagagttccagaagacagcgaacagtgtgagagtctcatttctatgcacagtgtttctcaggaggatggagctagttagctgtctgttgtctgtagcccagcttgataatggaactatacagcgaagagacaatctctggcaagtttttgtagaaaaaatgtttcagtgcctagtctgaaaaataacagtttgagttctttgaaactctaaaatatatttttctcatacctgttttcttcattttcataatgaagcactttgctatgtagctgtgtacatatcactacagttataggaagtttcagtctacagtccatccaaaggaccaacctgccttacacatctcaaggaattcagctgttgaaatcatttgaactaatcaaggaataaatcctaatgttctgggactttattttcacatgttaaatgctggaatatattatgaaaatgttttcaagaaatcacttaagtgttcatagaccagtatttctgacaggtaaaatgctaaaataagctacctgtaataagtgtggattatatttttgggttttgtagaatattgcaaattaaccacacaaaaaatgtttaatttatgcaacaagcatgtttgtgcaaatttcatgggactttaaaaagaataagtatttgagaaaatatctggttcacttacactacatttactgtattattcttttatagcattaggtgccttgtattttaaatctgtgacaaaccatggcaaatttttaaaggggaagtattattataaaatgaagaaatatgtatttctaaaggctatattgctgtaaacttaattgataaagctctgtttaatttagagttttgaagaaatagtctcccttcaattaagaaattttcataatggaatgatttaaattgaagtgacaaagagtattattaaaatacaatgtttatacgtgtaaaaaaaaaaaaaaaaaaaaattatttttacgttgttagatatggggagtagtgtgattgaggtggagtagattaggcgtaggtagaagtagaggttaaggagggtgatggtggctatgatggtggggatgatgaggctattgttttttgtgaattcttcgataatggcccatttgggcaaaaagccggttagcg

SEQ ID NO: 348646 - DNA, 4368 bp, Homo sapiens
gagccctcgctcggcgaccagagcctcgcattacttcccctagctccgccaagcctcgctgcatacgcgaccgcgcgcagtccgccgtcgcgcccctatgacgtcacccgcgcgccaccgcttccgggctggggactgggggcggggccgcgcggagggcaagccgggggcggggccggggccagagcagatctccgggcctccgcggccatagctgactgtgccgtcccttcccctcacccgctccacgccctcctgggccgagtggagttgggtggtgtcgggagcctctccctgaggggcaccgcgtcttcaggagctgggcctccagtgcggcgcgatgtcaggcgcggtgacagctctgtgagtccgaggccgcggccgtggcgctgggcggctgcggggcctgaccggtccgctcatggtgccgccacgacgccatcgcggggcaggaaggccaggggtgctgagttcttcacctccttttagactgagatctgccaagttttccggcattgctcttgaggatctcagaagggctcttaagacaagactgcaaatggtgtgtgtatttgtcatgaaccgaatgaattcccagaacagtggtttcactcagcgcaggcgaatggctcttgggattgttattcttctgcttgttgatgtgatatgggttgcttcctctgaacttacttcgtatgtttttacccagtacaacaaaccattcttcagcacctttgcaaaaacatctatgtttgttttgtaccttttgggctttattatttggaagccatggagacaacagtgtacaagaggacttcgcggaaagcatgctgctttttttgcagatgctgaaggttactttgctgcttgcacaacagatacaactatgaatagttctttgagtgaacctctgtatgtgcctgtgaaattccatgatcttccaagtgaaaaacctgagagcacaaacattgatactgaaaaaacccccaaaaagtctcgtgtgaggttcagtaatatcatggagattcgacagcttccgtcaagtcatgcattggaagcaaagttgtctcgcatgtcatatcctgtgaaagaacaagaatccatactgaaaactgtggggaaacttactgcaactcaagtagcgaaaattagcttttttttttgctttgtgtggtttttggcaaatttgtcatatcaagaagcactttcagacacacaagttgctatagttaatattttatcttcaacttccggactttttaccttaatccttgctgcagtatttccaagtaacagtggagatagatttaccctttctaaactattagctgtaattttaagcattggaggcgttgtactggtaaacctggcagggtctgaaaaacctgctggaagagacacagtaggttccatttggtctcttgctggagccatgctctatgctgtctatattgttatgattaagagaaaagtagatagagaagacaagttggatattccaatgttctttggttttgtaggtttgtttaatctgctgctcttatggccaggtttctttttacttcattatactggatttgaggacttcgagtttcccaataaagtagtattaatgtgcattatcattaatggccttattggaacagtactctcagagttcctgtggttgtggggctgctttcttacctcatcattgataggcacacttgcactaagccttacaatacctctgtccataatagctgacatgtgtatgcaaaaggtgcagttttcttggttattttttgcaggagctatccctgtatttttttcattttttattgtaactctcctatgccattataataattgggatcctgtgatggtgggaatcagaagaatatttgcttttatatgcagaaaacatcgaattcagagagttccagaagacagcgaacagtgtgagagtctcatttctatgcacagtgtttctcaggaggatggagctagttagctgtctgttgtctgtagcccagcttgataatggaactatacagcgaagagacaatctctggcaagtttttgtagaaaaaatgtttcagtgcctagtctgaaaaataacagtttgagttctttgaaactctaaaatatatttttctcatacctgttttcttcattttcataatgaagcactttgctatgtagctgtgtacatatcactacagttataggaagtttcagtctacagtccatccaaaggaccaacctgccttacacatctcaaggaattcagctgttgaaatcatttgaactaatcaaggaataaatcctaatgttctgggactttattttcacatgttaaatgctggaatatattatgaaaatgttttcaagaaatcacttaagtgttcatagaccagtatttctgacaggtaaaatgctaaaataagctacctgtaataagtgtggattatatttttgggttttgtagaatattgcaaattaaccacacaaaaaatgtttaatttatgcaacaagcatgtttgtgcaaatttcatgggactttaaaaagaataagtatttgagaaaatatctggttcacttacactacatttactgtattattcttttatagcattaggtgccttgtattttaaatctgtgacaaaccatggcaaatttttaaaggggaagtattattataaaatgaagaaatatgtatttctaaaggctatattgctgtaaacttaattgataaagctctgtttaatttagagttttgaagaaatagtctcccttcaattaagaaattttcataatggaatgatttaaattgaagtgacaaagagtattattaaaatacaatgtttatacgtctatttgtgtattgtagatgtatcaagtgatttctaatttttttcacatatgaatgtgccagattactctagaactagatgtctcttctttaaataattttagttttcctgaataaatttgtaatggttaaagtaccaagtaagtaaggcgagaagggattctgtttttaaaatcacatcagaacttttcctctactaagattataaattaaatgtaaaatactcctaattgcaattcttaaacttaggccttacatgtacttattatgcaactgctcctggactctattcaccatagatatcagtaaacgtatgtcccaggattcacaggcttttgattaatcaatattcttttcaagtttgctgtgaagagtttagttctttcctattcacattcttaaaattgctttggtgttaccatgagtctaaaatgaagtttagccttccttttgtttcattctgagaacttctatattatattacctttaaaaattgtttatgatattaaatttaaaatacaaacagctctctttttttttttttttttttttaatcatccagcccaaagtggcaaaaacagctcttttctcatttggcaccaccaataacgcaagttaaaaataatgttgagtttattatacttttgacctgtttagctcaacagggtgaaggcatgtaaagaatgtggacttctgaggaattttcttttaaaaagaacataatgaagtaacattttaattactcaaggactacttttggttgaagtttataatctagatacctctactttttgtttttgctgttcgacagttcacaaagaccttcagcaatttacagggtaaaatcgttgaagtagtggaggtgaaactgaaatttaaaattattctgtaaatactatagggaaagaggctgagcttagaatcttttggttgttcatgtgttctgtgctcttatcatcacacaggtcatgtgttgttactcaggattctggaagtactaagccgtagttaacaggctggatagatcttcagccaatcttctttcattatactgctgcttttctgtttcttaaaaaacaaaaatcaatgaacaacttctttagaaggaagcaccactgttcaattggttaactgaaagtatgaatcactgccgctttgcttgcccacctgtttgctttttctcacaggttttatttatctgaatgattgttgcatttgaatactgtagccatggtgagtgagcagttgaagacttcctttctgcaccttcatagttaagggttcatcttctcaagaaataaagttgtgctgggttgtttcaattctgtagatcacctagaaactaggtaacaaggcccttggatcacaatgagcacattgcaggtctttggaaatgctgggaaggggttacattcaagtaactgctgacgtccttcctctctgtcagacccatgttggcctgtaattatatttttctgaatctaaaaacaaatagaaatttctgatatcttttc

SEQ ID NO: 348647 - DNA, 2327 bp, Homo sapiens
gagccctcgctcggcgaccagagcctcgcattacttcccctagctccgccaagcctcgctgcatacgcgaccgcgcgcagtccgccgtcgcgcccctatgacgtcacccgcgcgccaccgcttccgggctggggactgggggcggggccgcgcggagggcaagccgggggcggggccggggccagagcagatctccgggcctccgcggccatagctgactgtgccgtcccttcccctcacccgctccacgccctcctgggccgagtggagttgggtggtgtcgggagcctctccctgaggggcaccgcgtcttcaggagctgggcctccagtgcggcgcgatgtcaggcgcggtgacagctctgtgagtccgaggccgcggccgtggcgctgggcggctgcggggcctgaccggtccgctcatggtgccgccacgacgccatcgcggggcaggaaggccaggggtgctgagttcttcacctccttttagactgagatctgccaagttttccggcattgctcttgaggatctcagaagggctcttaagacaagactgcaaatggtgtgtgtatttgtcatgaaccgaatgaattcccagaacagtggtttcactcagcgcaggcgaatggctcttgggattgttattcttctgcttgttgatgtgatatgggttgcttcctctgaacttacttcgtatgtttttacccagtacaacaaaccattcttcagcacctttgcaaaaacatctatgtttgttttgtaccttttgggctttattatttggaagccatggagacaacagtgtacaagaggacttcgcggaaagcatgctgctttttttgcagatgctgaaggttactttgctgcttgcacaacagatacaactatgaatagttctttgagtgaacctctgtatgtgcctgtgaaattccatgatcttccaagtgaaaaacctgagagcacaaacattgatactgaaaaaacccccaaaaagtctcgtgtgaggttcagtaatatcatggagattcgacagcttccgtcaagtcatgcattggaagcaaagttgtctcgcatgtcatatcctgtgaaagaacaagaatccatactgaaaactgtggggaaacttactgcaactcaagtagcgaaaattagcttttttttttgctttgtgtggtttttggcaaatttgtcatatcaagaagcactttcagacacacaagttgctatagttaatattttatcttcaacttccggactttttaccttaatccttgctgcagtatttccaagtaacagtggagatagatttaccctttctaaactattagctgtaattttaagcattggaggcgttgtactggtaaacctggcagggtctgaaaaacctgctggaagagacacagtaggttccatttggtctcttgctggagccatgctctatgctgtctatattgttatgattaagagaaaagtagatagagaagacaagttggatattccaatgttctttggttttgtaggtttgtttaatctgctgctcttatggccaggtttctttttacttcattatactggatttgaggacttcgagtttcccaataaagtagtattaatgtgcattatcattaatggccttattggaacagtactctcagagttcctgtggttgtggggctgctttcttacctcatcattgataggcacacttgcactaagccttacaatacctctgtccataatagctgacatgtgtatgcaaaaggtgcagttttcttggttattttttgcaggagctatccctgtatttttttcattttttattgtaactctcctatgccattataataattgggatcctgtgatggtgggaatcagaagaatatttgcttttatatgcagaaaacatcgaattcagagagttccagaagacagcgaacagtgtgagagtctcatttctatgcacagtgtttctcaggaggatggagctagttagctgtctgttgtctgtagcccagcttgataatggaactatacagcgaagagacaatctctggcaagtttttgtagaaaaaatgtttcagtgcctagtctgaaaaataacagtttgagttctttgaaactctaaaatatatttttctcatacctgttttcttcattttcataatgaagcactttgctatgtagctgtgtacatatcactacagttataggaagtttcagtctacagtccatccaaaggaccaacctgccttacacatctcaaggaattcagctgttgaaatcatttgaactaatcaaggaataaatcctaatgttctgggacttta

SEQ ID NO: 348648 - DNA, 1996 bp, Homo sapiens
gagccctcgctcggcgaccagagcctcgcattacttcccctagctccgccaagcctcgctgcatacgcgaccgcgcgcagtccgccgtcgcgcccctatgacgtcacccgcgcgccaccgcttccgggctggggactgggggcggggccgcgcggagggcaagccgggggcggggccggggccagagcagatctccgggcctccgcggccatagctgactgtgccgtcccttcccctcacccgctccacgccctcctgggccgagtggagttgggtggtgtcgggagcctctccctgaggggcaccgcgtcttcaggagctgggcctccagtgcggcgcgatgtcaggcgcggtgacagctctgtgagtccgaggccgcggccgtggcgctgggcggctgcggggcctgaccggtccgctcatggtgccgccacgacgccatcgcggggcaggaaggccaggggtgctgagttcttcacctccttttagactgagatctgccaagttttccggcattgctcttgaggatctcagaagggctcttaagacaagactgcaaatggtgtgtgtatttgtcatgaaccgaatgaattcccagaacagtggtttcactcagcgcaggcgaatggctcttgggattgttattcttctgcttgttgatgtgatatgggttgcttcctctgaacttacttcgtatgtttttacccagtacaacaaaccattcttcagcacctttgcaaaaacatctatgtttgttttgtaccttttgggctttattatttggaagccatggagacaacagtgtacaagaggacttcgcggaaagcatgctgctttttttgcagatgctgaaggttactttgctgcttgcacaacagatacaactatgaatagttctttgagtgaacctctgtatgtgcctgtgaaattccatgatcttccaagtgaaaaacctgagagcacaaacattgatactgaaaaaacccccaaaaagtctcgtgtgaggttcagtaatatcatggagattcgacagcttccgtcaagtcatgcattggaagcaaagttgtctcgcatgtcatatcctgtgaaagaacaagaatccatactgaaaactgtggggaaacttactgcaactcaagtagcgaaaattagcttttttttttgctttgtgtggtttttggcaaatttgtcatatcaagaagcactttcagacacacaagttgctatagttaatattttatcttcaacttccggactttttaccttaatccttgctgcagtatttccaagtaacagtggagatagatttaccctttctaaactattagctgtaattttaagcattggaggcgttgtactggtaaacctggcagggtctgaaaaacctgctggaagagacacagtaggttccatttggtctcttgctggagccatgctctatgctgtctatattgttatgattaagagaaaagtagatagagaagacaagttggatattccaatgttctttggttttgtaggtttgtttaatctgctgctcttatggccaggtttctttttacttcattatactggatttgaggacttcgagtttcccaataaagtagtattaatgtgcattatcattaatggccttattggaacagtactctcagagttcctgtggttgtggggctgctttcttacctcatcattgataggcacacttgcactaagccttacaatacctctgtccataatagctgacatgtgtatgcaaaaggtgcagttttcttggttattttttgcaggagctatccctgtatttttttcattttttattgtaactctcctatgccattataataattgggatcctgtgatggtgggaatcagaagaatatttgcttttatatgcagaaaacatcgaattcagagcttgttaatggaactttacagcggagagacaatttttggcaagttttggagaaaaaatggttcagggcctaatctgaaa

SEQ ID NO: 348649 - DNA, 2284 bp, Homo sapiens
gagccctcgctcggcgaccagagcctcgcattacttcccctagctccgccaagcctcgctgcatacgcgaccgcgcgcagtccgccgtcgcgcccctatgacgtcacccgcgcgccaccgcttccgggctggggactgggggcggggccgcgcggagggcaagccgggggcggggccggggccagagcagatctccgggcctccgcggccatagctgactgtgccgtcccttcccctcacccgctccacgccctcctgggccgagtggagttgggtggtgtcgggagcctctccctgaggggcaccgcgtcttcaggagctgggcctccagtgcggcgcgatgtcaggcgcggtgacagctctgtgagtccgaggccgcggccgtggcgctgggcggctgcggggcctgaccggtccgctcatggtgccgccacgacgccatcgcggggcaggaaggccaggggtgctgagttcttcacctccttttagactgagatctgccaagttttccggcattgctcttgaggatctcagaagggctcttaagacaagactgcaaatggtgtgtgtatttgtcatgaaccgaatgaattcccagaacagtggtttcactcagcgcaggcgaatggctcttgggattgttattcttctgcttgttgatgtgatatgggttgcttcctctgaacttacttcgtatgtttttacccagtacaacaaaccattcttcagcacctttgcaaaaacatctatgtttgttttgtaccttttgggctttattatttggaagccatggagacaacagtgtacaagaggacttcgcggaaagcatgctgctttttttgcagatgctgaaggttactttgctgcttgcacaacagatacaactatgaatagttctttgagtgaacctctgtatgtgcctgtgaaattccatgatcttccaagtgaaaaacctgagagcacaaacattgatactgaaaaaacccccaaaaagtctcgtgtgaggttcagtaatatcatggagattcgacagcttccgtcaagtcatgcattggaagcaaagttgtctcgcatgtcatatcctgtgaaagaacaagaatccatactgaaaactgtggggaaacttactgcaactcaagtagcgaaaattagcttttttttttgctttgtgtggtttttggcaaatttgtcatatcaagaagcactttcagacacacaagttgctatagttaatattttatcttcaacttccggactttttaccttaatccttgctgcagtatttccaagtaacagtggagatagatttaccctttctaaactattagctgtaattttaagacttgataaagaaggaaatggatataaaatattgaacttgtaagtattttgacagagtacattacttcttctcattaaagtaggtagacgaacagaggttggcaaactatgttgggtcagctgctggttttgtaaataagattgtattagaacacagccactctcatctatttacaaattgtctatggccattttagcactgcagaggcagagctgaattgcaataccatgtggcccagaagcctaaaatatttactatctgtacctttaaaaaaaagtgttacttagaaattttttgagtaagtatatgttcttaagaattatgtattaaacattgtttaatattttgttttgaattggcattttactaagagattcaatttctgaggctataaaaagaattttacataacaacaatcttgaagggaatctaagcaaagaaatctcatttcatcaattgagagacaagagtgtggcctcaagccaaacaacttggaatccaatcccatctccatcattactagttttgagatcttgaacaagttccttacatttctgtgccaattttctcgtctgtatattggggataataataggatttctctcataggattattatgaggattaaatgagtagaagttgtaaagtgcttggaacaatgtctgatacacaacaggaggtgctcactatatttagccattatcataatcatcatcatttaaatggaaacaaaatccctggtttctaataaattgtggatactcaataaataatagctgaatctgaatatgaacagtgattattacagaaaattgggatgatttaattgaagggtttgcatatttagtgtaaggactgcacttgagttctgatgacatctttccataagggaatacatattttctttcatcttcctctcccactgccacactggtctttctca

SEQ ID NO: 348650 - DNA, 1471 bp, Homo sapiens
ctccacggtgcgcggctgtggcacagacttctggaaggctggctgagtggaatgcagggaagagggcagtacctgggaaaggacccacccatcttcctgctgctgtaactgctgagccactcgcagtcgcaggatccgctgccaccacgtctgccaggcccatctcaggtgccactccctgagctttggggacagttggcagagaaggcctcttgtgctcacgctcccccgcagtccccagcccttctgcctttctcccccgacactgctgcaccagagtgaaagggctatggcaagggggtgtcatctgaggagtattaagaatgcagattcctgggcctgtcccccaaggttttggagtcagtagactccagaatctgctgttgccatagccccatatgtgtgaattctgcaactagccaaggctagttcctttcaattccatttaaaaaacaaaaaccagcaggtgtggtggctcatggcgtaatgggcctgcccaatgctttgggaggccaaggcaggtagatcgcttgagcccaggagtttgagacaagccctggcaacatagtgagatcccatttctacaaaaaaaaaaattagccgggtgtggtggcacacgcctgtagtctcagctactcaggtggctgaggtgggaggatcgtttgagccctggaggttgaggctgcagtgagctgtgatcgcaccactgcactctggcctgggcgacagagtgagacactgtctgagaacaaaaaacgactgaaaaaaaaaatcaccttagctttttctcttagaatcttctctaaaatgtattctttgtggcattctgaaataggattcatgatgatgcctgttgatcttagggacactacctcacctgccagtatctttggggctgtgtccttcaaggacatgtccccagactgctgtgcagtgtcattttttgtgtttggtttggtggtggcttcttcccccttgctaggctatcaacctcttatcaccacttgttggtgtcagaactaactgcttctggtctggagagggactgaccgatgcctttgggtagagagaattatgaaagaaattttggtatttttctactttatattttctgaggtttctgtaataagcatatttcacttttccaataagaaaaaaaaaaaacttggcctggcgcggtggctcacacctgtaatcccagcactttgggaagtcgaggtgggaggatcacttgagttcaggagttcgagaccagcttgggcaatatggtgaaaccccgtctctactaaaaatacaaaaattagccaggcgtggtggcgtgcacttgtagtcccagctactcaggaagctgaggcgggagaatcacttgaacccgggaggcagaggttgcagtgagctgagatcactcctctgcttcagcctgggcaattgagccagactctgtctcaaaaataaacaaaaaaacttgaca

SEQ ID NO: 348651 - DNA, 4456 bp, Homo sapiens
gccttcttcctgtgtggaaatacagcgcctccggcttgaacctgccactcaggtgtcttgatgtgtcgggggtgtggctgcctgccccctgatgctccctgccccaccctgtgcagtaggaacccagccatggtgaacgaagccagaggaaacagcagcctcaacccctgcttggagggcagtgccagcagtggcagtgagagctccaaagatagttcgagatgttccaccccgggcctggaccccgagcggcatgagagactccgggagaagatgaggcggcgattggaatctggtgacaagtggttctccctggaattcttccctcctcgaactgctgagggagctgtcaatctcatctcaaggtttgaccggatggcagcaggtggccccctctacatagacgtgacctggcacccagcaggtgaccctggctcagacaaggagacctcctccatgatgatcgccagcaccgccgtgaactactgtggcctggagaccatcctgcacatgacctgctgccgtcagcgcctggaggagatcacgggccatctgcacaaagctaagcagctgggcctgaagaacatcatggcgctgcggggagacccaataggtgaccagtgggaagaggaggagggaggcttcaactacgcagtggacctggtgaagcacatccgaagtgagtttggtgactactttgacatctgtgtggcaggttaccccaaaggccaccccgaagcagggagctttgaggctgacctgaagcacttgaaggagaaggtgtctgcgggagccgatttcatcatcacgcagcttttctttgaggctgacacattcttccgctttgtgaaggcatgcaccgacatgggcatcacttgccccatcgtccccgggatctttcccatccagggctaccactcccttcggcagcttgtgaagctgtccaagctggaggtgccacaggagatcaaggacgtgattgagccaatcaaagacaacgatgctgccatccgcaactatggcatcgagctggccgtgagcctgtgccaggagcttctggccagtggcttggtgccaggcctccacttctacaccctcaaccgcgagatggctaccacagaggtgctgaagcgcctggggatgtggactgaggaccccaggcgtcccctaccctgggctctcagtgcccaccccaagcgccgagaggaagatgtacgtcccatcttctgggcctccagaccaaagagttacatctaccgtacccaggagtgggacgagttccctaacggccgctggggcaattcctcttcccctgcctttggggagctgaaggactactacctcttctacctgaagagcaagtcccccaaggaggagctgctgaagatgtggggggaggagctgaccagtgaagcaagtgtctttgaagtctttgttctttacctctcgggagaaccaaaccggaatggtcacaaagtgacttgcctgccctggaacgatgagcccctggcggctgagaccagcctgctgaaggaggagctgctgcgggtgaaccgccagggcatcctcaccatcaactcacagcccaacatcaacgggaagccgtcctccgaccccatcgtgggctggggccccagcgggggctatgtcttccagaaggcctacttagagtttttcacttcccgcgagacagcggaagcacttctgcaagtgctgaagaagtacgagctccgggttaattaccaccttgtcaatgtgaagggtgaaaacatcaccaatgcccctgaactgcagccgaatgctgtcacttggggcatcttccctgggcgagagatcatccagcccaccgtagtggatcccgtcagcttcatgttctggaaggacgaggcctttgccctgtggattgagcggtggggaaagctgtatgaggaggagtccccgtcccgcaccatcatccagtacatccacgacaactacttcctggtcaacctggtggacaatgacttcccactggacaactgcctctggcaggtggtggaagacacattggagcttctcaacaggcccacccagaatgcgagagaaacggaggctccatgaccctgcgtcctgacgccctgcgttggagccactcctgtcccgccttcctcctccacagtgctgcttctcttgggaactccactctccttcgtgtctctcccaccccggcctccactcccccacctgacaatggcagctagactggagtgaggcttccaggctcttcctggacctgagtcggccccacatgggaacctagtactctctgctctagccaggagtctgtgctcttttggtggggagcacttgcgtcctgcagaggaccacagtgggtggcacctcctgagaaggcgaggagagtggttgttgccaactaagccctcgaaccaaggcagcctccagagccagcctgggactcccagtgaacttacccttggagcccgtgcagtacaggcaaaacacgcaagggcatcaggcactggtggcatcgtagaagagatgtggcaaagtgctgtacccttccacctcctagaggtgggcagctgggccccacctacttgtgactgaaggggcacaccactgccctgcctgcccacttagccgtccatggcaccagccccctggatgggcattgggctgacacctaccatgctgctttttggcacagttgtctattctgagccttgagagaaaaagtgccccttaagggttgaaggcagtctgaacccttgtgcttggtggggctcgtggccttccccttttgcctggctgtggaggcctgatgctgccccgttccctgtcagaggctaagatgagatttgccagctgggatttcttcgctgctctagctggcaggacacatcccggcctcttccacccattcccccatgtggctgaagacattccaacaatggggtgggcccataatagttagccctcagtcagttcccggagcacagccctgggagggggctatttctctccccactgaaaacatttcaaagctgagttacttgtctgaggcctcatccctcggaagccgtctgactccagagtctgagcccccggctagtaccctatagagagggggctctccaaaggggctgctggggcatgtgtgcctgtggcagaaaagaggagaccctggaattcagcaccctgggtgccattcccagcgtttagtttctagaggcctcagtttctccatcagcttatgggatccttgtctttactgacaagaatggaatagaaatgtaaaagtactctgaaaagcaattgccctgtaacttatctagaaagaaaagaccctgagactccagaatctgctgttgccatagccccatatgtgtgaattctgcaactagccaaggctagttcctttcaattccatttaaaaaacaaaaaccagcaggtgtggtggctcatggcgtaatgggcctgcccaatgctttgggaggccaaggcaggtagatcgcttgagcccaggagtttgagacaagccctggcaacatagtgagatcccatttctacaaaaaaaaaaattagccgggtgtggtggcacacgcctgtagtctcagctactcaggtggctgaggtgggaggatcgtttgagccctggaggttgaggctgcagtgagctgtgatcgcaccactgcactctggcctgggcgacagagtgagacactgtctgagaacaaaaaacgactgaaaaaaaaaatcaccttagctttttctcttagaatcttctctaaaatgtattctttgtggcattctgaaataggattcatgatgatgcctgttgatcttagggacactacctcacctgccagtatctttggggctgtgtccttcaaggacatgtccccagactgctgtgcagtgtcattttttgtgtttggtttggtggtggcttcttcccccttgctaggctatcaacctcttatcaccacttgttggtgtcagaactaactgcttctggtctggagagggactgaccgatgcctttgggtagagagaattatgaaagaaattttggtatttttctactttatattttctgaggtttctgtaataagcatatttcacttttccaataagaaaaaaaaaaaacttggcctggcgcggtggctcacacctgtaatcccagcactttgggaagtcgaggtgggaggatcacttgagttcaggagttcgagaccagcttgggcaatatggtgaaaccccgtctctactaaaaatacaaaaattagccaggcgtggtggcgtgcacttgtagtcccagctactcaggaagctgaggcgggagaatcacttgaacccgggaggcagaggttgcagtgagctgagatcactcctctgcttcagcctgggcaattgagccagactctgtctcaaaaataaacaaaaaaacttgaca

SEQ ID NO: 348652 - DNA, 4267 bp, Homo sapiens
gccttcttcctgtgtggaaatacagcgcctccggcttgaacctgccactcaggtgtcttgatgtgtcgggggtgtggctgcctgccccctgatgctccctgccccaccctgtgcagtaggaacccagccatggtgaacgaagccagaggaaacagcagcctcaacccctgcttggagggcagtgccagcagtggcagtgagagctccaaagatagttcgagatgttccaccccgggcctggaccccgagcggcatgagagactccgggagaagatgaggcggcgattggaatctggtgacaagtggttctccctggaattcttccctcctcgaactgctgagggagctgtcaatctcatctcaaggtttgaccggatggcagcaggtggccccctctacatagacgtgacctggcacccagcaggtgaccctggctcagacaaggagacctcctccatgatgatcgccagcaccgccgtgaactactgtggcctggagaccatcctgcacatgacctgctgccgtcagcgcctggaggagatcacgggccatctgcacaaagctaagcagctgggcctgaagaacatcatggcgctgcggggagacccaataggtgaccagtgggaagaggaggagggaggcttcaactacgcagtggacctggtgaagcacatccgaagtgagtttggtgactactttgacatctgtgtggcaggttaccccaaaggccaccccgaagcagggagctttgaggctgacctgaagcacttgaaggagaaggtgtctgcgggagccgatttcatcatcacgcagcttttctttgaggctgacacattcttccgctttgtgaaggcatgcaccgacatgggcatcacttgccccatcgtccccgggatctttcccatccagggctaccactcccttcggcagcttgtgaagctgtccaagctggaggtgccacaggagatcaaggacgtgattgagccaatcaaagacaacgatgctgccatccgcaactatggcatcgagctggccgtgagcctgtgccaggagcttctggccagtggcttggtgccaggcctccacttctacaccctcaaccgcgagatggctaccacagaggtgctgaagcgcctggggatgtggactgaggaccccaggcgtcccctaccctgggctctcagtgcccaccccaagcgccgagaggaagatgtacgtcccatcttctgggcctccagaccaaagagttacatctaccgtacccaggagtgggacgagttccctaacggccgctggggcaattcctcttcccctgcctttggggagctgaaggactactacctcttctacctgaagagcaagtcccccaaggaggagctgctgaagatgtggggggaggagctgaccagtgaagcaagtgtctttgaagtctttgttctttacctctcgggagaaccaaaccggaatggtcacaaagtgacttgcctgccctggaacgatgagcccctggcggctgagaccagcctgctgaaggaggagctgctgcgggtgaaccgccagggcatcctcaccatcaactcacagcccaacatcaacgggaagccgtcctccgaccccatcgtgggctggggccccagcgggggctatgtcttccagaaggcctacttagagtttttcacttcccgcgagacagcggaagcacttctgcaagtgctgaagaagtacgagctccgggttaattaccaccttgtcaatgtgaagggtgaaaacatcaccaatgcccctgaactgcagccgaatgctgtcacttggggcatcttccctgggcgagagatcatccagcccaccgtagtggatcccgtcagcttcatgttctggaaggacgaggcctttgccctgtggattgagcggtggggaaagctgtatgaggaggagtccccgtcccgcaccatcatccagtacatccacgacaactacttcctggtcaacctggtggacaatgacttcccactggacaactgcctctggcaggtggtggaagacacattggagcttctcaacaggcccacccagaatgcgagagaaacggaggctccatgaccctgcgtcctgacgccctgcgttggagccactcctgtcccgccttcctcctccacagtgctgcttctcttgggaactccactctccttcgtgtctctcccaccccggcctccactcccccacctgacaatggcagctagactggagtgaggcttccaggctcttcctggacctgagtcggccccacatgggaacctagtactctctgctctagccaggagtctgtgctcttttggtggggagcacttgcgtcctgcagaggaccacagtgggtggcacctcctgagaaggcgaggagagtggttgttgccaactaagccctcgaaccaaggcagcctccagagccagcctgggactcccagtgaacttacccttggagcccgtgcagtacaggcaaaacacgcaagggcatcaggcactggtggcatcgtagaagagatgtggcaaagtgctgtacccttccacctcctagaggtgggcagctgggccccacctacttgtgactgaaggggcacaccactgccctgcctgcccacttagccgtccatggcaccagccccctggatgggcattgggctgacacctaccatgctgctttttggcacagttgtctattctgagccttgagagaaaaagtgccccttaagggttgaaggcagtctgaacccttgtgcttggtggggctcgtggccttccccttttgcctggctgtggaggcctgatgctgccccgttccctgtcagaggctaagatgagatttgccagctgggatttcttcgctgctctagctggcaggacacatcccggcctcttccacccattcccccatgtggctgaagacattccaacaatggggtgggcccataatagttagccctcagtcagttcccggagcacagccctgggagggggctatttctctccccactgaaaacatttcaaagctcagtttctccatcagcttatgggatccttgtctttactgacaagaatggaatagaaatgtaaaagtactctgaaaagcaattgccctgtaacttatctagaaagaaaagaccctgagactccagaatctgctgttgccatagccccatatgtgtgaattctgcaactagccaaggctagttcctttcaattccatttaaaaaacaaaaaccagcaggtgtggtggctcatggcgtaatgggcctgcccaatgctttgggaggccaaggcaggtagatcgcttgagcccaggagtttgagacaagccctggcaacatagtgagatcccatttctacaaaaaaaaaaattagccgggtgtggtggcacacgcctgtagtctcagctactcaggtggctgaggtgggaggatcgtttgagccctggaggttgaggctgcagtgagctgtgatcgcaccactgcactctggcctgggcgacagagtgagacactgtctgagaacaaaaaacgactgaaaaaaaaaatcaccttagctttttctcttagaatcttctctaaaatgtattctttgtggcattctgaaataggattcatgatgatgcctgttgatcttagggacactacctcacctgccagtatctttggggctgtgtccttcaaggacatgtccccagactgctgtgcagtgtcattttttgtgtttggtttggtggtggcttcttcccccttgctaggctatcaacctcttatcaccacttgttggtgtcagaactaactgcttctggtctggagagggactgaccgatgcctttgggtagagagaattatgaaagaaattttggtatttttctactttatattttctgaggtttctgtaataagcatatttcacttttccaataagaaaaaaaaaaaacttggcctggcgcggtggctcacacctgtaatcccagcactttgggaagtcgaggtgggaggatcacttgagttcaggagttcgagaccagcttgggcaatatggtgaaaccccgtctctactaaaaatacaaaaattagccaggcgtggtggcgtgcacttgtagtcccagctactcaggaagctgaggcgggagaatcacttgaacccgggaggcagaggttgcagtgagctgagatcactcctctgcttcagcctgggcaattgagccagactctgtctcaaaaataaacaaaaaaacttgaca

SEQ ID NO: 348653 - DNA, 4437 bp, Homo sapiens
cacctgcgccgcgccccttcactgcgttccccgcccctgcagcggccacagtggtgcggccggcggccgagcgttctgagtcacccgggactggaggtaggaacccagccatggtgaacgaagccagaggaaacagcagcctcaacccctgcttggagggcagtgccagcagtggcagtgagagctccaaagatagttcgagatgttccaccccgggcctggaccccgagcggcatgagagactccgggagaagatgaggcggcgattggaatctggtgacaagtggttctccctggaattcttccctcctcgaactgctgagggagctgtcaatctcatctcaaggtttgaccggatggcagcaggtggccccctctacatagacgtgacctggcacccagcaggtgaccctggctcagacaaggagacctcctccatgatgatcgccagcaccgccgtgaactactgtggcctggagaccatcctgcacatgacctgctgccgtcagcgcctggaggagatcacgggccatctgcacaaagctaagcagctgggcctgaagaacatcatggcgctgcggggagacccaataggtgaccagtgggaagaggaggagggaggcttcaactacgcagtggacctggtgaagcacatccgaagtgagtttggtgactactttgacatctgtgtggcaggttaccccaaaggccaccccgaagcagggagctttgaggctgacctgaagcacttgaaggagaaggtgtctgcgggagccgatttcatcatcacgcagcttttctttgaggctgacacattcttccgctttgtgaaggcatgcaccgacatgggcatcacttgccccatcgtccccgggatctttcccatccagggctaccactcccttcggcagcttgtgaagctgtccaagctggaggtgccacaggagatcaaggacgtgattgagccaatcaaagacaacgatgctgccatccgcaactatggcatcgagctggccgtgagcctgtgccaggagcttctggccagtggcttggtgccaggcctccacttctacaccctcaaccgcgagatggctaccacagaggtgctgaagcgcctggggatgtggactgaggaccccaggcgtcccctaccctgggctctcagtgcccaccccaagcgccgagaggaagatgtacgtcccatcttctgggcctccagaccaaagagttacatctaccgtacccaggagtgggacgagttccctaacggccgctggggcaattcctcttcccctgcctttggggagctgaaggactactacctcttctacctgaagagcaagtcccccaaggaggagctgctgaagatgtggggggaggagctgaccagtgaagcaagtgtctttgaagtctttgttctttacctctcgggagaaccaaaccggaatggtcacaaagtgacttgcctgccctggaacgatgagcccctggcggctgagaccagcctgctgaaggaggagctgctgcgggtgaaccgccagggcatcctcaccatcaactcacagcccaacatcaacgggaagccgtcctccgaccccatcgtgggctggggccccagcgggggctatgtcttccagaaggcctacttagagtttttcacttcccgcgagacagcggaagcacttctgcaagtgctgaagaagtacgagctccgggttaattaccaccttgtcaatgtgaagggtgaaaacatcaccaatgcccctgaactgcagccgaatgctgtcacttggggcatcttccctgggcgagagatcatccagcccaccgtagtggatcccgtcagcttcatgttctggaaggacgaggcctttgccctgtggattgagcggtggggaaagctgtatgaggaggagtccccgtcccgcaccatcatccagtacatccacgacaactacttcctggtcaacctggtggacaatgacttcccactggacaactgcctctggcaggtggtggaagacacattggagcttctcaacaggcccacccagaatgcgagagaaacggaggctccatgaccctgcgtcctgacgccctgcgttggagccactcctgtcccgccttcctcctccacagtgctgcttctcttgggaactccactctccttcgtgtctctcccaccccggcctccactcccccacctgacaatggcagctagactggagtgaggcttccaggctcttcctggacctgagtcggccccacatgggaacctagtactctctgctctagccaggagtctgtgctcttttggtggggagcacttgcgtcctgcagaggaccacagtgggtggcacctcctgagaaggcgaggagagtggttgttgccaactaagccctcgaaccaaggcagcctccagagccagcctgggactcccagtgaacttacccttggagcccgtgcagtacaggcaaaacacgcaagggcatcaggcactggtggcatcgtagaagagatgtggcaaagtgctgtacccttccacctcctagaggtgggcagctgggccccacctacttgtgactgaaggggcacaccactgccctgcctgcccacttagccgtccatggcaccagccccctggatgggcattgggctgacacctaccatgctgctttttggcacagttgtctattctgagccttgagagaaaaagtgccccttaagggttgaaggcagtctgaacccttgtgcttggtggggctcgtggccttccccttttgcctggctgtggaggcctgatgctgccccgttccctgtcagaggctaagatgagatttgccagctgggatttcttcgctgctctagctggcaggacacatcccggcctcttccacccattcccccatgtggctgaagacattccaacaatggggtgggcccataatagttagccctcagtcagttcccggagcacagccctgggagggggctatttctctccccactgaaaacatttcaaagctgagttacttgtctgaggcctcatccctcggaagccgtctgactccagagtctgagcccccggctagtaccctatagagagggggctctccaaaggggctgctggggcatgtgtgcctgtggcagaaaagaggagaccctggaattcagcaccctgggtgccattcccagcgtttagtttctagaggcctcagtttctccatcagcttatgggatccttgtctttactgacaagaatggaatagaaatgtaaaagtactctgaaaagcaattgccctgtaacttatctagaaagaaaagaccctgagactccagaatctgctgttgccatagccccatatgtgtgaattctgcaactagccaaggctagttcctttcaattccatttaaaaaacaaaaaccagcaggtgtggtggctcatggcgtaatgggcctgcccaatgctttgggaggccaaggcaggtagatcgcttgagcccaggagtttgagacaagccctggcaacatagtgagatcccatttctacaaaaaaaaaaattagccgggtgtggtggcacacgcctgtagtctcagctactcaggtggctgaggtgggaggatcgtttgagccctggaggttgaggctgcagtgagctgtgatcgcaccactgcactctggcctgggcgacagagtgagacactgtctgagaacaaaaaacgactgaaaaaaaaaatcaccttagctttttctcttagaatcttctctaaaatgtattctttgtggcattctgaaataggattcatgatgatgcctgttgatcttagggacactacctcacctgccagtatctttggggctgtgtccttcaaggacatgtccccagactgctgtgcagtgtcattttttgtgtttggtttggtggtggcttcttcccccttgctaggctatcaacctcttatcaccacttgttggtgtcagaactaactgcttctggtctggagagggactgaccgatgcctttgggtagagagaattatgaaagaaattttggtatttttctactttatattttctgaggtttctgtaataagcatatttcacttttccaataagaaaaaaaaaaaacttggcctggcgcggtggctcacacctgtaatcccagcactttgggaagtcgaggtgggaggatcacttgagttcaggagttcgagaccagcttgggcaatatggtgaaaccccgtctctactaaaaatacaaaaattagccaggcgtggtggcgtgcacttgtagtcccagctactcaggaagctgaggcgggagaatcacttgaacccgggaggcagaggttgcagtgagctgagatcactcctctgcttcagcctgggcaattgagccagactctgtctcaaaaataaacaaaaaaacttgaca

SEQ ID NO: 348654 - DNA, 4376 bp, Homo sapiens
cacctgcgccgcgccccttcactgcgttccccgcccctgcagcggccacagtggtgcggccggcggccgagcgttctgagtcacccgggactggaggtaggaacccagccatggtgaacgaagccagaggaaacagcagcctcaacccctgcttggagggcagtgccagcagtggcagtgagagctccaaagatagttcgagatgttccaccccgggcctggaccccgagcggcatgagagactccgggagaagatgaggcggcgattggaatctggtgacaagtggttctccctggaattcttccctcctcgaactgctgagggagctgtcaatctcatctcaaggtttgaccggatggcagcaggtggccccctctacatagacgtgacctggcacccagcaggtgaccctggctcagacaaggagacctcctccatgatgatcgccagcaccgccgtgaactactgtggcctggagaccatcctgcacatgacctgctgccgtcagcgcctggaggagatcacgggccatctgcacaaagctaagcagctgggcctgaagaacatcatggcgctgcggggagacccaataggtgaccagtgggaagaggaggagggaggcttcaactacgcagtggacctggtgaagcacatccgaagtgagtttggtgactactttgacatctgtgtggcaggttaccccaaaggccaccccgaagcagggagctttgaggctgacctgaagcacttgaaggagaaggtgtctgcgggagccgatttcatcatcacgcagcttttctttgaggctgacacattcttccgctttgtgaaggcatgcaccgacatgggcatcacttgccccatcgtccccgggatctttcccatccagggctaccactcccttcggcagcttgtgaagctgtccaagctggaggtgccacaggagatcaaggacgtgattgagccaatcaaagacaacgatgctgccatccgcaactatggcatcgagctggccgtgagcctgtgccaggagcttctggccagtggcttggtgccaggcctccacttctacaccctcaaccgcgagatggctaccacagaggtgctgaagcgcctggggatgtggactgaggaccccaggcgtcccctaccctgggctctcagtgcccaccccaagcgccgagaggaagatgtacgtcccatcttctgggcctccagaccaaagagttacatctaccgtacccaggagtgggacgagttccctaacggccgctgagcaagtcccccaaggaggagctgctgaagatgtggggggaggagctgaccagtgaagcaagtgtctttgaagtctttgttctttacctctcgggagaaccaaaccggaatggtcacaaagtgacttgcctgccctggaacgatgagcccctggcggctgagaccagcctgctgaaggaggagctgctgcgggtgaaccgccagggcatcctcaccatcaactcacagcccaacatcaacgggaagccgtcctccgaccccatcgtgggctggggccccagcgggggctatgtcttccagaaggcctacttagagtttttcacttcccgcgagacagcggaagcacttctgcaagtgctgaagaagtacgagctccgggttaattaccaccttgtcaatgtgaagggtgaaaacatcaccaatgcccctgaactgcagccgaatgctgtcacttggggcatcttccctgggcgagagatcatccagcccaccgtagtggatcccgtcagcttcatgttctggaaggacgaggcctttgccctgtggattgagcggtggggaaagctgtatgaggaggagtccccgtcccgcaccatcatccagtacatccacgacaactacttcctggtcaacctggtggacaatgacttcccactggacaactgcctctggcaggtggtggaagacacattggagcttctcaacaggcccacccagaatgcgagagaaacggaggctccatgaccctgcgtcctgacgccctgcgttggagccactcctgtcccgccttcctcctccacagtgctgcttctcttgggaactccactctccttcgtgtctctcccaccccggcctccactcccccacctgacaatggcagctagactggagtgaggcttccaggctcttcctggacctgagtcggccccacatgggaacctagtactctctgctctagccaggagtctgtgctcttttggtggggagcacttgcgtcctgcagaggaccacagtgggtggcacctcctgagaaggcgaggagagtggttgttgccaactaagccctcgaaccaaggcagcctccagagccagcctgggactcccagtgaacttacccttggagcccgtgcagtacaggcaaaacacgcaagggcatcaggcactggtggcatcgtagaagagatgtggcaaagtgctgtacccttccacctcctagaggtgggcagctgggccccacctacttgtgactgaaggggcacaccactgccctgcctgcccacttagccgtccatggcaccagccccctggatgggcattgggctgacacctaccatgctgctttttggcacagttgtctattctgagccttgagagaaaaagtgccccttaagggttgaaggcagtctgaacccttgtgcttggtggggctcgtggccttccccttttgcctggctgtggaggcctgatgctgccccgttccctgtcagaggctaagatgagatttgccagctgggatttcttcgctgctctagctggcaggacacatcccggcctcttccacccattcccccatgtggctgaagacattccaacaatggggtgggcccataatagttagccctcagtcagttcccggagcacagccctgggagggggctatttctctccccactgaaaacatttcaaagctgagttacttgtctgaggcctcatccctcggaagccgtctgactccagagtctgagcccccggctagtaccctatagagagggggctctccaaaggggctgctggggcatgtgtgcctgtggcagaaaagaggagaccctggaattcagcaccctgggtgccattcccagcgtttagtttctagaggcctcagtttctccatcagcttatgggatccttgtctttactgacaagaatggaatagaaatgtaaaagtactctgaaaagcaattgccctgtaacttatctagaaagaaaagaccctgagactccagaatctgctgttgccatagccccatatgtgtgaattctgcaactagccaaggctagttcctttcaattccatttaaaaaacaaaaaccagcaggtgtggtggctcatggcgtaatgggcctgcccaatgctttgggaggccaaggcaggtagatcgcttgagcccaggagtttgagacaagccctggcaacatagtgagatcccatttctacaaaaaaaaaaattagccgggtgtggtggcacacgcctgtagtctcagctactcaggtggctgaggtgggaggatcgtttgagccctggaggttgaggctgcagtgagctgtgatcgcaccactgcactctggcctgggcgacagagtgagacactgtctgagaacaaaaaacgactgaaaaaaaaaatcaccttagctttttctcttagaatcttctctaaaatgtattctttgtggcattctgaaataggattcatgatgatgcctgttgatcttagggacactacctcacctgccagtatctttggggctgtgtccttcaaggacatgtccccagactgctgtgcagtgtcattttttgtgtttggtttggtggtggcttcttcccccttgctaggctatcaacctcttatcaccacttgttggtgtcagaactaactgcttctggtctggagagggactgaccgatgcctttgggtagagagaattatgaaagaaattttggtatttttctactttatattttctgaggtttctgtaataagcatatttcacttttccaataagaaaaaaaaaaaacttggcctggcgcggtggctcacacctgtaatcccagcactttgggaagtcgaggtgggaggatcacttgagttcaggagttcgagaccagcttgggcaatatggtgaaaccccgtctctactaaaaatacaaaaattagccaggcgtggtggcgtgcacttgtagtcccagctactcaggaagctgaggcgggagaatcacttgaacccgggaggcagaggttgcagtgagctgagatcactcctctgcttcagcctgggcaattgagccagactctgtctcaaaaataaacaaaaaaacttgaca

SEQ ID NO: 348655 - DNA, 239 bp, Homo sapiens
cgtcagcttcatgttctggaaggtaaaggagccgggggcaagcttgccccgcccacctggaaaaccgtggggagggattgggaccaagtcccaagcgtgtactgaaggccacactggacccagccttcagggcacacccagctctgactcacccatgtcactgctgacgcagggtgtttatttctgggcaggggtgggaagtgatactggcagtgggccttgttctattccgggaaatg

SEQ ID NO: 348656 - DNA, 283 bp, Homo sapiens
cttccagggactcgcagtcctgggtgtcggggctaggtagagggaacagaaagggtctctggaggttgggtgagacccagtgactatgacctccaccaaccctgcagacccaataggtgaccagtgggaagaggaggagggaggcttcaactacgcagtggacctggtgaagcacatccgaagtgagtttggtgactactttgacatctgtgtggcaggtgagtggctggatcatcctggtggcggggatggagctagggaggctgagatgcccagagagcct

SEQ ID NO: 348657 - DNA, 764 bp, Homo sapiens
gctgcggggctgtgacttccccatcctgtgccctcccctccatgctgtggacatggcaaagggagaagggtaagttgggagacctccacctggaagggcttagggaggcaaagacaggctgggtctttgttgggggccgtgagagggactcagggtgccaaacctgatggtcgccccagccagctcaccgtctctcccaggtgacttgcctgccctggaacgatgagcccctggcggctgagaccagcctgctgaaggaggagctgctgcgggtgaaccgccagggcatcctcaccatcaactcacagcccaacatcaacgggaagccgtcctccgaccccatcgtgggctggggccccagcgggggctatgtcttccagaaggtgtggtagggaggcacggggtgcccccctctcttgaccggcacccgtgggttccccagagcttagggcagagcagcctgcctctcctgggctcttaaattttgaatgagcatggattggagcggatgggagctcatgctttaagtcagatagacctggctgggcacggaacccggccagcactttgggaggccaaggcgggtggatcacttgagcccaggagttcgagaccagcctgggcaacatggtgaaacccattctctacaaaaaatacaaaaatgaccgaggcatggtggtgtacacctgtagtcccaggtacttagggggctggggtgagaggatcgcttgagtccgagaggttgaggctccagtaagccatat

SEQ ID NO: 348658 - DNA, 3099 bp, Homo sapiens
ctccacggtgcgcggctgtggcacagacttctggaaggctggctgagtggaatgcagggaagagggcagtacctgggaaaggacccacccatcttcctgctgctgtaactgctgagccactcgcagtcgcaggatccgctgccaccacgtctgccaggcccatctcaggtgccactccctgagctttggggacagttggcagagaaggcctcttgtgctcacgctcccccgcagtccccagcccttctgcctttctcccccgacactgctgcaccagagtgaaagggctatggcaagggggtgtcatctgaggagtattaagaatgcagattcctgggcctgtcccccaaggttttggagtcagtaggtccaagggccatacttttgagaggggtttgggttaagtatgaggtgaaatgggagatggtcagtgtggagaggggtgcacccactcaccagggtccgcaccagctgctctgccccttgggcatccacccagtgctgccatgccactgccaggcacctggcctgctgggaaccccgcagcccgtgaagcagtgcctcgaggcaccggcgctgcaggtacttcctcctgatggccaagagcatcgtgacccttcagggccagaaggagggcagagccatgggcctgggcctgcttttccaggatcctgcaggaacgagcactggccagagagggcccagctgtagccatggctcaggcaagcccctcagcccttgcccccatccctcggacccaccaaactgcacacacagctcctcttaccgtagcctccgtttatgggccttgctttgggctttgcaggctctgggctcagggctggagtgcgctcttggtccctggtccctcgtccacaggggcaggcctgggacccagctactctgtccaggccactgtggccagagctggaaggcagggcagagggaatgttccctgcaccctggaaaggggagttgagtcacaagaggttaaggtgggtccaggaaggcagctgctcttagtgcccgcctaggagttgagtacagtgaggagggtggaggaaggtgctgagcttagccttgtgccctgcccccatctccccaggcctccagcctctcccggctgcctgccgcccaaagagaaatcacaggggcggggcaggaatgcaaagtgttttctcagaacagctgaaacattccgaagagggaatggatggggagaatggtcaatacacataagaccgtgtcccaaggagctgatttccaggcccctgaggactggagaccgcttcacccctgcacttcagacaccgtttgtcccccggggcaaggtctccttactctgagcccaggccgttccccttggcttcctccgtccacccaggctgcactgcagtgatggcgcgggaggcaccagctctgtggcctgtgtccagcagctgcgggtctgaaggaatagccagagaggagcacctgaaccccatgggcttggacttcctggggccccgctgggatttcttcgctgctctagctggcaggacacatcccggcctcttccacccattcccccatgtggctgaagacattccaacaatggggtgggcccataatagttagccctcagtcagttcccggagcacagccctgggagggggctatttctctccccactgaaaacatttcaaagctgagttacttgtctgaggcctcatccctcggaagccgtctgactccagagtctgagcccccggctagtaccctatagagagggggctctccaaaggggctgctggggcatgtgtgcctgtggcagaaaagaggagaccctggaattcagcaccctgggtgccattcccagcgtttagtttctagaggcctcagtttctccatcagcttatgggatccttgtctttactgacaagaatggaatagaaatgtaaaagtactctgaaaagcaattgccctgtaacttatctagaaagaaaagaccctgagactccagaatctgctgttgccatagccccatatgtgtgaattctgcaactagccaaggctagttcctttcaattccatttaaaaaacaaaaaccagcaggtgtggtggctcatggcgtaatgggcctgcccaatgctttgggaggccaaggcaggtagatcgcttgagcccaggagtttgagacaagccctggcaacatagtgagatcccatttctacaaaaaaaaaaattagccgggtgtggtggcacacgcctgtagtctcagctactcaggtggctgaggtgggaggatcgtttgagccctggaggttgaggctgcagtgagctgtgatcgcaccactgcactctggcctgggcgacagagtgagacactgtctgagaacaaaaaacgactgaaaaaaaaaatcaccttagctttttctcttagaatcttctctaaaatgtattctttgtggcattctgaaataggattcatgatgatgcctgttgatcttagggacactacctcacctgccagtatctttggggctgtgtccttcaaggacatgtccccagactgctgtgcagtgtcattttttgtgtttggtttggtggtggcttcttcccccttgctaggctatcaacctcttatcaccacttgttggtgtcagaactaactgcttctggtctggagagggactgaccgatgcctttgggtagagagaattatgaaagaaattttggtatttttctactttatattttctgaggtttctgtaataagcatatttcacttttccaataagaaaaaaaaaaaacttggcctggcgcggtggctcacacctgtaatcccagcactttgggaagtcgaggtgggaggatcacttgagttcaggagttcgagaccagcttgggcaatatggtgaaaccccgtctctactaaaaatacaaaaattagccaggcgtggtggcgtgcacttgtagtcccagctactcaggaagctgaggcgggagaatcacttgaacccgggaggcagaggttgcagtgagctgagatcactcctctgcttcagcctgggcaattgagccagactctgtctcaaaaataaacaaaaaaacttgaca

SEQ ID NO: 348659 - DNA, 2901 bp, Homo sapiens
gccttcttcctgtgtggaaatacagcgcctccggcttgaacctgccactcaggtgtcttgatgtgtcgggggtgtggctgcctgccccctgatgctccctgccccaccctgtgcagtaggaacccagccatggtgaacgaagccagaggaaacagcagcctcaacccctgcttggagggcagtgccagcagtggcagtgagagctccaaagatagttcgagatgttccaccccgggcctggaccccgagcggcatgagagactccgggagaagatgaggcggcgattggaatctggtgacaagtggttctccctggaattcttccctcctcgaactgctgagggagctgtcaatctcatctcaaggtttgaccggatggcagcaggtggccccctctacatagacgtgacctggcacccagcaggtgaccctggctcagacaaggagacctcctccatgatgatcgccagcaccgccgtgaactactgtggcctggagaccatcctgcacatgacctgctgccgtcagcgcctggaggagatcacgggccatctgcacaaagctaagcagctgggcctgaagaacatcatggcgctgcggggagacccaataggtgaccagtgggaagaggaggagggaggcttcaactacgcagtggacctggtgaagcacatccgaagtgagtttggtgactactttgacatctgtgtggcaggttaccccaaaggccaccccgaagcagggagctttgaggctgacctgaagcacttgaaggagaaggtgtctgcgggagccgatttcatcatcacgcagcttttctttgaggctgacacattcttccgctttgtgaaggcatgcaccgacatgggcatcacttgccccatcgtccccgggatctttcccatccagggctaccactcccttcggcagcttgtgaagctgtccaagctggaggtgccacaggagatcaaggacgtgattgagccaatcaaagacaacgatgctgccatccgcaactatggcatcgagctggccgtgagcctgtgccaggagcttctggccagtggcttggtgccaggcctccacttctacaccctcaaccgcgagatggctaccacagaggtgctgaagcgcctggggatgtggactgaggaccccaggcgtcccctaccctgggctctcagtgcccaccccaagcgccgagaggaagatgtacgtcccatcttctgggcctccagaccaaagagttacatctaccgtacccaggagtgggacgagttccctaacggccgctggggcaattcctcttcccctgcctttggggagctgaaggactactacctcttctacctgaagagcaagtcccccaaggaggagctgctgaagatgtggggggaggagctgaccagtgaagcaagtgtctttgaagtctttgttctttacctctcgggagaaccaaaccggaatggtcacaaagtgacttgcctgccctggaacgatgagcccctggcggctgagaccagcctgctgaaggaggagctgctgcgggtgaaccgccagggcatcctcaccatcaactcacagcccaacatcaacgggaagccgtcctccgaccccatcgtgggctggggccccagcgggggctatgtcttccagaaggcctacttagagtttttcacttcccgcgagacagcggaagcacttctgcaagtgctgaagaagtacgagctccgggttaattaccaccttgtcaatgtgaagggtgaaaacatcaccaatgcccctgaactgcagccgaatgctgtcacttggggcatcttccctgggcgagagatcatccagcccaccgtagtggatcccgtcagcttcatgttctggaaggacgaggcctttgccctgtggattgagcggtggggaaagctgtatgaggaggagtccccgtcccgcaccatcatccagtacatccacgacaactacttcctggtcaacctggtggacaatgacttcccactggacaactgcctctggcaggtggtggaagacacattggagcttctcaacaggcccacccagaatgcgagagaaacggaggctccatgaccctgcgtcctgacgccctgcgttggagccactcctgtcccgccttcctcctccacagtgctgcttctcttgggaactccactctccttcgtgtctctcccaccccggcctccactcccccacctgacaatggcagctagactggagtgaggcttccaggctcttcctggacctgagtcggccccacatgggaacctagtactctctgctctagccaggagtctgtgctcttttggtggggagcacttgcgtcctgcagaggaccacagtgggtggcacctcctgagaaggcgaggagagtggttgttgccaactaagccctcgaaccaaggcagcctccagagccagcctgggactcccagtgaacttacccttggagcccgtgcagtacaggcaaaacacgcaagggcatcaggcactggtggcatcgtagaagagatgtggcaaagtgctgtacccttccacctcctagaggtgggcagctgggccccacctacttgtgactgaaggggcacaccactgccctgcctgcccacttagccgtccatggcaccagccccctggatgggcattgggctgacacctaccatgctgctttttggcacagttgtctattctgagccttgagagaaaaagtgccccttaagggttgaaggcagtctgaacccttgtgcttggtggggctcgtggccttccccttttgcctggctgtggaggcctgatgctgccccgttccctgtcagaggctaagatgagatttgccagcacaggggccccagatctgcctgggcctgtgcagca

SEQ ID NO: 348660 - DNA, 1205 bp, Homo sapiens
cacctgcgccgcgccccttcactgcgttccccgcccctgcagcggccacagtggtgcggccggcggccgagcgttctgagtcacccgggactggaggtaggaacccagccatggtgaacgaagccagaggaaacagcagcctcaacccctgcttggagggcagtgccagcagtggcagtgagagctccaaagatagttcgagatgttccaccccgggcctggaccccgagcggcatgagagactccgggagaagatgaggcggcgattggaatctggtgacaagtggttctccctggaattcttccctcctcgaactgctgagggagctgtcaatctcatctcaaggtttgaccggatggcagcaggtggccccctctacatagacgtgacctggcacccagcaggtgaccctggctcagacaaggagacctcctccatgatgatcgccagcaccgccgtgaactactgtggcctggagaccatcctgcacatgacctgctgccgtcagcgcctggaggagatcacgggccatctgcacaaagctaagcagctgggcctgaagaacatcatggcgctgcggggaggtgtggagccagcactcccctacactctgggttctggctttcccggaggccacttggtagcctgaacttggttcctgaaatggtcctttacttcttcctgggccccacgctgaggatccgcaggatcccatccccgccagtagtgtcagtaggcattgtgggtagtgagtcatcctgggcaccacacacaggcagccacctcttccacctcttgacctcgacataggagttccgtcaggaatgcagtcgcggcctgataaccctctgccttgcctacaccactgcatcgattgctggctgcacccagcacttggcccaatcacagagtaacagagtatccaggagtgagaatagccggtcaggcctctggtgcccgctgttgtcaggccacctaagagtgggaagagggagcctgatgggtgggatcctatggcctcgtgctccctaccacaagaccccttcacttgagatgagtagaaaattctcccaggaggcaggagccccaaggccgtgggatgggagagggtggcaggcatgcccaggtagaagtagggaagggctctccaatcctccaggcacggtgagaagcagcggtggtctcctattctccaccgccagca

SEQ ID NO: 348661 - DNA, 280 bp, Homo sapiens
ggaggagtcaggggcagaatttacaggaatggcctcctgggcatgtggtggcactgccctctgtcaggagtgtgccctgacctctgggcacccctctgccaggggcaattcctcttcccctgcctttggggagctgaaggactactacctcttctacctgaagagcaagtcccccaaggaggagctgctgaagatgtggggggaggagctgaccagtgaagcaagtgtctttgaagtctttgttctttacctctcgggagaaccaaaccggaatggtcac

SEQ ID NO: 348662 - DNA, 474 bp, Homo sapiens
agtagtcctgataccttaggtgtctgcgaaagggcgtctggcagggctggggttggtgacaggcacctgtctctcccacaggcctacttagagtttttcacttcccgcgagacagcggaagcacttctgcaagtgctgaagaagtacgagctccgggttaattaccaccttgtcaatgtgaaggtaggccaggccccagggttcccacagagtaccaggcccttcgttgagcaaacacccagcacctagcctgggctaggcattgtgcaagacagagagatacaggcagaactggggccctgctcttaaggagctcccagcctagagtgagggaggcagatcaatgtgtgaccaccagccagtgtaagtgggaaaatcaagttcaggagaggatgctgtcgggtccagaggagggatatctcacctgggaggccagggaaggcttctcagagggtcatctgtgggaatcactga

SEQ ID NO: 348663 - DNA, 5562 bp, Homo sapiens
gggctggcattgcagtgcgggccgtgcgggctgcgcgggcgcggggaggcgcgggcggcaaactgcgggcacccggcaccccgcagccagtaccgggcggaggcgtcagagccgcgcaccgcggacgagcaggcccaggcatccagtaccctgctgactctgacatgcccccagcctcccccagctctgcagggagccctggtgccagagaccttctcccatttctccctatgggtgcctgacctgagggcagagacatctgagtgtgtataagcacagcaggacaccaggacctggcctgaagacatttcctctcctcccctctggatttctcagagactgttctgcgatgaccacagcaaggtaccggcccacctgggacctggccctcgacccgctggtgtcttgcaagctctgtcttggggagtacccagtggagcagatgacaaccatagcccagtgccaatgcatcttctgtactctgtgcctgaaacagtatgttgagctcttgatcaaagaaggattagaaaccgcaattagctgcccagatgctgcctgccctaaacagggccacctacaggagaacgagattgagtgcatggttgcagctgaaattatgcaaagatataaaaagctacaatttgaaagagaggtgctgtttgatccctgtcggacttggtgcccggcgtccacctgccaagctgtgtgtcagctccaggacgtggggctgcagaccccccagccagtgcagtgcaaagcctgccgtatggaattctgctccacctgcaaagccagctggcaccctggccagggctgcccggagaccatgccgatcaccttcctccccggggagaccagtgctgctttcaaaatggaagaagatgacgcgcccatcaagcgctgccccaagtgcaaagtctacatcgagcgagacgaaggctgcgcgcagatgatgtgcaagaactgcaagcacgccttctgctggtactgcctggagtctctggacgatgatttccttctgatacactacgataagggaccctgccggaacaagctgggccactcccgggcatctgtgatctggcatcggacacaggttgtgggcatttttgcaggatttgggctgctgctcttggtggcctcacctttcctactcctggccactccctttgtactttgctgcaagtgcaagtgcagtaaaggtgacgacgacccgttacccacctagaggaagcgcgatgctggaacacatccctgcctccgggaagtgtggctctcccccaaccctccccaccgtccccccttcactaaacatctttcttgccttatgtgccccattgagcttcacagtgtcaggctggacgccgtgatttcagggacctatgtcacaatgttcgctgaggccccaggtgtggtggggaggggaggcaggtgtgggtagcgcacatccccacagatcaatctctgcagatgacagggaggtgctgtgagaagtgcaccaggcagctttctctctgtggtagactaggcatgtctggggatggcctaagagactttctgctccttggcttctagatggcaccatgttgtcagagaagtcttttaaggactgccactctcttcagacagaatctgattattccagcttgagagaagcactctgtttatgacaactgtttttattactaatggcatttagtaaaatcctttttagaaggtattttttttccaactgagtagtgaaaatcaacaaggtgcatataaaccatcctatgcctttcttgaaatgtgcattttaagaagttatagttaaacgacttttcaggagatttagaaagccttatgcactctttgtgtttttcttgaaacttgctgtagtaactttttgaacgctgtaagctgtgtactgttataagtgtgcttcctatattgttgcatttccttgataatattgacgtgtttaaaggaacatctcatctccattagatttgccttttgttgttttctctctttggtgattcagctcagctcatgggcctcatcccttctctcccaggtagcagaaaacgctttttattgcattcaatcccactgctttgctcggcaatggttctcctccgaattgctgccgtctggcctctggcctcagtcttcagatagacagtaagaagaaagcagcctcattgatccgcagatgtaggggcctcttggcagaggctggaggactctgggggctagggaagagcctgccagattttcacatttttaaaatgttctagtcattttgagaaatcatatatcttacacagttccaagtcctgttgctaaccgttttgctcttgttggggaaaagaacctcccatttcacttcgttttaacgtggggattttaccacttgatcttttacagggctgtctgtgaccatttccatggcagcaggatgcagggattaataaggacacatacacattattccaccaattgactttgaaaagtggagaaagtgtattctttaaagagaatttacttctaaaagccacaggtgcttttacaaagcaaactgcattgaatttaaaacttctaaaaataacaggcaaatattgtagctatattacagtgggattttaaaaatcttgttaaacattctataaagaagtaaaacaaaatccttttatctcagttatttgcccatcacaagcacatttttaaaatgttgctttgtgtgtgtttgacttctgcatttgagtatcagtctcaggtcctagtttactttccctggttggaaatttatttcttatttcctaacattgaattcgttagaaaaaacagcgtcacctcactcttcacctgtcatgttgattttccttatgaacccgaagccatttagaaaatccctgtgtgtcaaaattacattcaaaaagctctccttgtaattgcaagtttagtaactcagtaagaacatgcctgcgactccctttctggatggaacctgggctgtggctctctgtcgtttgtggtgctgtgatggtgtctactgttagaatagcttttctggaggtgggtggcaactccacgcgggagtcattggctgggcttgagccctcagcctgtgatatgtggatgcagctgtccagccactgccctttaacatgcccagcacacatgggaggcctgtggccctgtgcccagtggcccacaggacacgcctccaccatatgctcatccttcctgcctgaaattgctgctgcccatcgcatgagcccacacagtagcacccccgtccttaggatgagagtcagagcctttggaaaggctgcatccccagggctagagctcagatgaccttatttctagagggacaggctgttctgttggaagagtctctggcccagtcatgcacatctgtagccccagccatccttgtgccttcacctctgatgtgtttcacaagcacgtagttcaacccagatagggaccacagagattctggggccagccaggggcagtcaaattagcacctactggctctgactttttgtatgaagcatgcctcagtttcctcattttgatctagatataaaattaaaattgtccatttcctatataaataccagcaagatcactctgagatacataaactcgcatttccttctgttttagtaaggagtgccagacttatctttgatgggaatacagtatgaaccctgcttgatgtaaaatggaaatagcacacaggcagatggccctgggtttggactttgatcttgccatcattccccagtaaaacctggggagttctgcgttgagtggacggacttattcctgtgaagcggcataatttgtctccattgaaaaatggcattcactcttacagatggtgttcactgcaagccccagaagcatatggcatgtgttcactaagaggcctttaatcctggggagtaaggggcgaaggcccttagacaaccatggctgctgtactgccgcccagggtgggtggccagtgaggactggccttagcccagtggacctgtggcttctctgaggcccttgagtaactgaccacatttggaggttttgctggaaatgcctgacctctcagtctggctctgctgtgtagtccatagcccagccagatgagcttgcagcctcataggaggtcagcaccttgcaaagatgcagtcaccatagatgtccacgtagcagagactgacttaggatctgagataaagcatcggattgcaggaataactgtccaaattagttcttcctcctcaactcataggagtagctgtggacagaggaaccaacatctgccacctctggcattttctttctttttttttctttttgagacggagtttcgcttttgtcccccaagctggagtacaatgacaggatctcggctcactgcaagctctgcctcccgggttcaagcgattctcctgcctcagcctcccaagtagctgggattacaggcacccaccacctcacccagctaatttttgtattttcagtagagacggggtttcaccatgttggccaggctactctcaaactcctgacctcaggtgatctgcccacctcggcttcccaaagtgctggaattacaggcctgagccaccccacccggcctattttcttaaaggggaacaaatgatcttgacaacatattattccataaaaccagtttagggcacaggccagttcctgattagaacacaggacctgtgggagggactatcagagatgcaaaaattacttcaagatgagtttattgttttcatttgtattgcaaaagttagaagtcattttacaaattaaaaaaacatttttttcttggtagtctttaaaaattaggggattgaaaggatccaggatgggctttgtgtgtgtgtctcagattctcatttattagtgagcacacctgtgtatatatataaatcacaaggagatcatcaagggaaaacattttgcatgtgtaaagcttcatgaagttctctttaaaaaataccaaagcttgtttatttctgataattaacctaagcccttatgaaaataaacaaaatgaagggattatgacaggtattaccaaaaacaccaaaaggaacaaaggggcctgcgttaaaacctaattgctaatgcttcacaactaggagagcatgccgtcttgatgtttaaaaaacccagggtctccacccttcctttgatttgtgcaattctgtcttccacagttccggagccttcagtgaggggtagctacatgccccatgcctgccctttctttccttctttgctcactttactatgggtgtattttaatcttgtataaaaatatgcatgaatgagtcatgcacatgtatacgttatgtatttgacaagtggtggtgaaacaaaatcaaaacagatttgatttgtgtttttgaaatgtcagtacattttgtgccactaacactgtgatgtataaaagagctgtttgaatgccttttaatgttgtgttttgtactctggaatcatatggaaaaagtttgatttgtaatttcaatacatattttaaatgta

SEQ ID NO: 348664 - DNA, 634 bp, Homo sapiens
gggctggcattgcagtgcgggccgtgcgggctgcgcgggcgcggggaggcgcgggcggcaaactgcgggcacccggcaccccgcagccagtaccgggcggaggcgtcagagccgcgcaccgcggacgagcaggcccaggcatccagtaccctgctgactctgacatgcccccagcctcccccagctctgcagggagccctggtgccagagaccttctcccatttctccctatgggtgcctgacctgagggcagagacatctgagtgtgtataagcacagcaggacaccaggacctggcctgaagacatttcctctcctcccctctggatttctcagagaggtgctgtttgatccctgtcggacttggtgcccggcgtccacctgccaagctgtgtgtcagctccaggacgtggggctgcagaccccccagccagtgcagtgcaaagcctgccgtatggaattctgctccacctgcaaagccagctggcaccctggccagggctgcccggagaccatgccgatcaccttcctccccggggagaccaggtaccctttgtacacaagctgccaccaaaggcatggctgtgggccaggagaagcaggcatgctttcttcctaaaagtgctgttacagt

SEQ ID NO: 348665 - DNA, 703 bp, Homo sapiens
acctccacttatagcggctgcataagcttaactgcgcagagctatactgctttttgaaatactaacttgcaagttcagcaacagctaagaaaacaatcctagacttggaaattgaaagattggaagagaagtggagggattcctttggaaccctttacgtacgtatgtgtaaggaattgtaggcatccagtaccctgctgactctgacatgcccccagcctcccccagctctgcagggagccctggtgccagagaccttctcccatttctccctatgggtgcctgacctgagggcagagacatctgagtgtgtataagcacagcaggacaccaggacctggcctgaagacatttcctctcctcccctctggatttctcagaggttgcccacctctgtgtcaatgcagcctgctcttaatgactccagctctctaggctggacgcagtggctcacaccggtaatcccagcactttgggaggctgaagccggtggatcacctgaggtcaggagcttgagaccagcctggccaacatggtgaaactccgtgtcttctaaaaaaatacaaaaattagagcggcatggtggcgggcgcctgtaatcccagctactcgggaggctgaggcaggagaattgcttgaacccaggaggtggaggttgcagtgagccaagatcgtgccactgcattgcagtctgggaaacaag

SEQ ID NO: 348666 - DNA, 249 bp, Homo sapiens
gggctggcattgcagtgcgggccgtgcgggctgcgcgggcgcggggaggcgcgggcggcaaactgcgggcacccggcaccccgcagccagtaccgggcggaggcgtcagagccgcgcaccgcggacgagcaggcccaggtagagtgacgcgcgtcccctttgtgtccgcatcgcccgggccggccgcggagcggggagggcgggacgcggcgctgcgcggccggccttggggctcggggcttgcggccg

SEQ ID NO: 348667 - DNA, 5606 bp, Homo sapiens
acctccacttatagcggctgcataagcttaactgcgcagagctatactgctttttgaaatactaacttgcaagttcagcaacagctaagaaaacaatcctagacttggaaattgaaagattggaagagaagtggagggattcctttggaaccctttacgtacgtatgtgtaaggaattgtaggcatccagtaccctgctgactctgacatgcccccagcctcccccagctctgcagggagccctggtgccagagaccttctcccatttctccctatgggtgcctgacctgagggcagagacatctgagtgtgtataagcacagcaggacaccaggacctggcctgaagacatttcctctcctcccctctggatttctcagagactgttctgcgatgaccacagcaaggtaccggcccacctgggacctggccctcgacccgctggtgtcttgcaagctctgtcttggggagtacccagtggagcagatgacaaccatagcccagtgccaatgcatcttctgtactctgtgcctgaaacagtatgttgagctcttgatcaaagaaggattagaaaccgcaattagctgcccagatgctgcctgccctaaacagggccacctacaggagaacgagattgagtgcatggttgcagctgaaattatgcaaagatataaaaagctacaatttgaaagagaggtgctgtttgatccctgtcggacttggtgcccggcgtccacctgccaagctgtgtgtcagctccaggacgtggggctgcagaccccccagccagtgcagtgcaaagcctgccgtatggaattctgctccacctgcaaagccagctggcaccctggccagggctgcccggagaccatgccgatcaccttcctccccggggagaccagtgctgctttcaaaatggaagaagatgacgcgcccatcaagcgctgccccaagtgcaaagtctacatcgagcgagacgaaggctgcgcgcagatgatgtgcaagaactgcaagcacgccttctgctggtactgcctggagtctctggacgatgatttccttctgatacactacgataagggaccctgccggaacaagctgggccactcccgggcatctgtgatctggcatcggacacaggttgtgggcatttttgcaggatttgggctgctgctcttggtggcctcacctttcctactcctggccactccctttgtactttgctgcaagtgcaagtgcagtaaaggtgacgacgacccgttacccacctagaggaagcgcgatgctggaacacatccctgcctccgggaagtgtggctctcccccaaccctccccaccgtccccccttcactaaacatctttcttgccttatgtgccccattgagcttcacagtgtcaggctggacgccgtgatttcagggacctatgtcacaatgttcgctgaggccccaggtgtggtggggaggggaggcaggtgtgggtagcgcacatccccacagatcaatctctgcagatgacagggaggtgctgtgagaagtgcaccaggcagctttctctctgtggtagactaggcatgtctggggatggcctaagagactttctgctccttggcttctagatggcaccatgttgtcagagaagtcttttaaggactgccactctcttcagacagaatctgattattccagcttgagagaagcactctgtttatgacaactgtttttattactaatggcatttagtaaaatcctttttagaaggtattttttttccaactgagtagtgaaaatcaacaaggtgcatataaaccatcctatgcctttcttgaaatgtgcattttaagaagttatagttaaacgacttttcaggagatttagaaagccttatgcactctttgtgtttttcttgaaacttgctgtagtaactttttgaacgctgtaagctgtgtactgttataagtgtgcttcctatattgttgcatttccttgataatattgacgtgtttaaaggaacatctcatctccattagatttgccttttgttgttttctctctttggtgattcagctcagctcatgggcctcatcccttctctcccaggtagcagaaaacgctttttattgcattcaatcccactgctttgctcggcaatggttctcctccgaattgctgccgtctggcctctggcctcagtcttcagatagacagtaagaagaaagcagcctcattgatccgcagatgtaggggcctcttggcagaggctggaggactctgggggctagggaagagcctgccagattttcacatttttaaaatgttctagtcattttgagaaatcatatatcttacacagttccaagtcctgttgctaaccgttttgctcttgttggggaaaagaacctcccatttcacttcgttttaacgtggggattttaccacttgatcttttacagggctgtctgtgaccatttccatggcagcaggatgcagggattaataaggacacatacacattattccaccaattgactttgaaaagtggagaaagtgtattctttaaagagaatttacttctaaaagccacaggtgcttttacaaagcaaactgcattgaatttaaaacttctaaaaataacaggcaaatattgtagctatattacagtgggattttaaaaatcttgttaaacattctataaagaagtaaaacaaaatccttttatctcagttatttgcccatcacaagcacatttttaaaatgttgctttgtgtgtgtttgacttctgcatttgagtatcagtctcaggtcctagtttactttccctggttggaaatttatttcttatttcctaacattgaattcgttagaaaaaacagcgtcacctcactcttcacctgtcatgttgattttccttatgaacccgaagccatttagaaaatccctgtgtgtcaaaattacattcaaaaagctctccttgtaattgcaagtttagtaactcagtaagaacatgcctgcgactccctttctggatggaacctgggctgtggctctctgtcgtttgtggtgctgtgatggtgtctactgttagaatagcttttctggaggtgggtggcaactccacgcgggagtcattggctgggcttgagccctcagcctgtgatatgtggatgcagctgtccagccactgccctttaacatgcccagcacacatgggaggcctgtggccctgtgcccagtggcccacaggacacgcctccaccatatgctcatccttcctgcctgaaattgctgctgcccatcgcatgagcccacacagtagcacccccgtccttaggatgagagtcagagcctttggaaaggctgcatccccagggctagagctcagatgaccttatttctagagggacaggctgttctgttggaagagtctctggcccagtcatgcacatctgtagccccagccatccttgtgccttcacctctgatgtgtttcacaagcacgtagttcaacccagatagggaccacagagattctggggccagccaggggcagtcaaattagcacctactggctctgactttttgtatgaagcatgcctcagtttcctcattttgatctagatataaaattaaaattgtccatttcctatataaataccagcaagatcactctgagatacataaactcgcatttccttctgttttagtaaggagtgccagacttatctttgatgggaatacagtatgaaccctgcttgatgtaaaatggaaatagcacacaggcagatggccctgggtttggactttgatcttgccatcattccccagtaaaacctggggagttctgcgttgagtggacggacttattcctgtgaagcggcataatttgtctccattgaaaaatggcattcactcttacagatggtgttcactgcaagccccagaagcatatggcatgtgttcactaagaggcctttaatcctggggagtaaggggcgaaggcccttagacaaccatggctgctgtactgccgcccagggtgggtggccagtgaggactggccttagcccagtggacctgtggcttctctgaggcccttgagtaactgaccacatttggaggttttgctggaaatgcctgacctctcagtctggctctgctgtgtagtccatagcccagccagatgagcttgcagcctcataggaggtcagcaccttgcaaagatgcagtcaccatagatgtccacgtagcagagactgacttaggatctgagataaagcatcggattgcaggaataactgtccaaattagttcttcctcctcaactcataggagtagctgtggacagaggaaccaacatctgccacctctggcattttctttctttttttttctttttgagacggagtttcgcttttgtcccccaagctggagtacaatgacaggatctcggctcactgcaagctctgcctcccgggttcaagcgattctcctgcctcagcctcccaagtagctgggattacaggcacccaccacctcacccagctaatttttgtattttcagtagagacggggtttcaccatgttggccaggctactctcaaactcctgacctcaggtgatctgcccacctcggcttcccaaagtgctggaattacaggcctgagccaccccacccggcctattttcttaaaggggaacaaatgatcttgacaacatattattccataaaaccagtttagggcacaggccagttcctgattagaacacaggacctgtgggagggactatcagagatgcaaaaattacttcaagatgagtttattgttttcatttgtattgcaaaagttagaagtcattttacaaattaaaaaaacatttttttcttggtagtctttaaaaattaggggattgaaaggatccaggatgggctttgtgtgtgtgtctcagattctcatttattagtgagcacacctgtgtatatatataaatcacaaggagatcatcaagggaaaacattttgcatgtgtaaagcttcatgaagttctctttaaaaaataccaaagcttgtttatttctgataattaacctaagcccttatgaaaataaacaaaatgaagggattatgacaggtattaccaaaaacaccaaaaggaacaaaggggcctgcgttaaaacctaattgctaatgcttcacaactaggagagcatgccgtcttgatgtttaaaaaacccagggtctccacccttcctttgatttgtgcaattctgtcttccacagttccggagccttcagtgaggggtagctacatgccccatgcctgccctttctttccttctttgctcactttactatgggtgtattttaatcttgtataaaaatatgcatgaatgagtcatgcacatgtatacgttatgtatttgacaagtggtggtgaaacaaaatcaaaacagatttgatttgtgtttttgaaatgtcagtacattttgtgccactaacactgtgatgtataaaagagctgtttgaatgccttttaatgttgtgttttgtactctggaatcatatggaaaaagtttgatttgtaatttcaatacatattttaaatgta

SEQ ID NO: 348668 - DNA, 5636 bp, Homo sapiens
gttttgcttacttcaggctttaagcagtgcccccaagtaggtaaggtaggtagtgagtaattgcctggtaagtgaggcaccctgagtgaggaatgccaaatacagttgggttctcagcagggagatcatgggcattttgtctgagcaagcttgggttcacattgaggctctgggtactatttgtgtaagttggcaacttcctcctttgctgactcagttttcacatatgaaaaatggaacagtcatacctttcttgtaaaaatgctctaaggcttcagtgaaagactgagagatcagcctcccttgctgcctttcatcttgcttttagaattcttggctcttgtgtttgctgaggttttgtgccgggatctaacccatagccttagctttgtgattgagcatacagtccctggcacagaatgggtaccccataaatagttgttgaatgaataaaacctcaaaacctcaaatgtgttggttgctgtggactacacagtgggtttcttcagcattaaggaggtaaagatgtttatagacacttctctgtttttctttcagtgcctgaaacagtatgttgagctcttgatcaaagaaggattagaaaccgcaattagctgcccagatgctgcctgccctaaacagggccacctacaggagaacgagattgagtgcatggttgcagctgaaattatgcaaagatataaaaagctacaatttgaaagagaggtgctgtttgatccctgtcggacttggtgcccggcgtccacctgccaagctgtgtgtcagctccaggacgtggggctgcagaccccccagccagtgcagtgcaaagcctgccgtatggaattctgctccacctgcaaagccagctggcaccctggccagggctgcccggagaccatgccgatcaccttcctccccggggagaccagtgctgctttcaaaatggaagaagatgacgcgcccatcaagcgctgccccaagtgcaaagtctacatcgagcgagacgaaggctgcgcgcagatgatgtgcaagaactgcaagcacgccttctgctggtactgcctggagtctctggacgatgatttccttctgatacactacgataagggaccctgccggaacaagctgggccactcccgggcatctgtgatctggcatcggacacaggttgtgggcatttttgcaggatttgggctgctgctcttggtggcctcacctttcctactcctggccactccctttgtactttgctgcaagtgcaagtgcagtaaaggtgacgacgacccgttacccacctagaggaagcgcgatgctggaacacatccctgcctccgggaagtgtggctctcccccaaccctccccaccgtccccccttcactaaacatctttcttgccttatgtgccccattgagcttcacagtgtcaggctggacgccgtgatttcagggacctatgtcacaatgttcgctgaggccccaggtgtggtggggaggggaggcaggtgtgggtagcgcacatccccacagatcaatctctgcagatgacagggaggtgctgtgagaagtgcaccaggcagctttctctctgtggtagactaggcatgtctggggatggcctaagagactttctgctccttggcttctagatggcaccatgttgtcagagaagtcttttaaggactgccactctcttcagacagaatctgattattccagcttgagagaagcactctgtttatgacaactgtttttattactaatggcatttagtaaaatcctttttagaaggtattttttttccaactgagtagtgaaaatcaacaaggtgcatataaaccatcctatgcctttcttgaaatgtgcattttaagaagttatagttaaacgacttttcaggagatttagaaagccttatgcactctttgtgtttttcttgaaacttgctgtagtaactttttgaacgctgtaagctgtgtactgttataagtgtgcttcctatattgttgcatttccttgataatattgacgtgtttaaaggaacatctcatctccattagatttgccttttgttgttttctctctttggtgattcagctcagctcatgggcctcatcccttctctcccaggtagcagaaaacgctttttattgcattcaatcccactgctttgctcggcaatggttctcctccgaattgctgccgtctggcctctggcctcagtcttcagatagacagtaagaagaaagcagcctcattgatccgcagatgtaggggcctcttggcagaggctggaggactctgggggctagggaagagcctgccagattttcacatttttaaaatgttctagtcattttgagaaatcatatatcttacacagttccaagtcctgttgctaaccgttttgctcttgttggggaaaagaacctcccatttcacttcgttttaacgtggggattttaccacttgatcttttacagggctgtctgtgaccatttccatggcagcaggatgcagggattaataaggacacatacacattattccaccaattgactttgaaaagtggagaaagtgtattctttaaagagaatttacttctaaaagccacaggtgcttttacaaagcaaactgcattgaatttaaaacttctaaaaataacaggcaaatattgtagctatattacagtgggattttaaaaatcttgttaaacattctataaagaagtaaaacaaaatccttttatctcagttatttgcccatcacaagcacatttttaaaatgttgctttgtgtgtgtttgacttctgcatttgagtatcagtctcaggtcctagtttactttccctggttggaaatttatttcttatttcctaacattgaattcgttagaaaaaacagcgtcacctcactcttcacctgtcatgttgattttccttatgaacccgaagccatttagaaaatccctgtgtgtcaaaattacattcaaaaagctctccttgtaattgcaagtttagtaactcagtaagaacatgcctgcgactccctttctggatggaacctgggctgtggctctctgtcgtttgtggtgctgtgatggtgtctactgttagaatagcttttctggaggtgggtggcaactccacgcgggagtcattggctgggcttgagccctcagcctgtgatatgtggatgcagctgtccagccactgccctttaacatgcccagcacacatgggaggcctgtggccctgtgcccagtggcccacaggacacgcctccaccatatgctcatccttcctgcctgaaattgctgctgcccatcgcatgagcccacacagtagcacccccgtccttaggatgagagtcagagcctttggaaaggctgcatccccagggctagagctcagatgaccttatttctagagggacaggctgttctgttggaagagtctctggcccagtcatgcacatctgtagccccagccatccttgtgccttcacctctgatgtgtttcacaagcacgtagttcaacccagatagggaccacagagattctggggccagccaggggcagtcaaattagcacctactggctctgactttttgtatgaagcatgcctcagtttcctcattttgatctagatataaaattaaaattgtccatttcctatataaataccagcaagatcactctgagatacataaactcgcatttccttctgttttagtaaggagtgccagacttatctttgatgggaatacagtatgaaccctgcttgatgtaaaatggaaatagcacacaggcagatggccctgggtttggactttgatcttgccatcattccccagtaaaacctggggagttctgcgttgagtggacggacttattcctgtgaagcggcataatttgtctccattgaaaaatggcattcactcttacagatggtgttcactgcaagccccagaagcatatggcatgtgttcactaagaggcctttaatcctggggagtaaggggcgaaggcccttagacaaccatggctgctgtactgccgcccagggtgggtggccagtgaggactggccttagcccagtggacctgtggcttctctgaggcccttgagtaactgaccacatttggaggttttgctggaaatgcctgacctctcagtctggctctgctgtgtagtccatagcccagccagatgagcttgcagcctcataggaggtcagcaccttgcaaagatgcagtcaccatagatgtccacgtagcagagactgacttaggatctgagataaagcatcggattgcaggaataactgtccaaattagttcttcctcctcaactcataggagtagctgtggacagaggaaccaacatctgccacctctggcattttctttctttttttttctttttgagacggagtttcgcttttgtcccccaagctggagtacaatgacaggatctcggctcactgcaagctctgcctcccgggttcaagcgattctcctgcctcagcctcccaagtagctgggattacaggcacccaccacctcacccagctaatttttgtattttcagtagagacggggtttcaccatgttggccaggctactctcaaactcctgacctcaggtgatctgcccacctcggcttcccaaagtgctggaattacaggcctgagccaccccacccggcctattttcttaaaggggaacaaatgatcttgacaacatattattccataaaaccagtttagggcacaggccagttcctgattagaacacaggacctgtgggagggactatcagagatgcaaaaattacttcaagatgagtttattgttttcatttgtattgcaaaagttagaagtcattttacaaattaaaaaaacatttttttcttggtagtctttaaaaattaggggattgaaaggatccaggatgggctttgtgtgtgtgtctcagattctcatttattagtgagcacacctgtgtatatatataaatcacaaggagatcatcaagggaaaacattttgcatgtgtaaagcttcatgaagttctctttaaaaaataccaaagcttgtttatttctgataattaacctaagcccttatgaaaataaacaaaatgaagggattatgacaggtattaccaaaaacaccaaaaggaacaaaggggcctgcgttaaaacctaattgctaatgcttcacaactaggagagcatgccgtcttgatgtttaaaaaacccagggtctccacccttcctttgatttgtgcaattctgtcttccacagttccggagccttcagtgaggggtagctacatgccccatgcctgccctttctttccttctttgctcactttactatgggtgtattttaatcttgtataaaaatatgcatgaatgagtcatgcacatgtatacgttatgtatttgacaagtggtggtgaaacaaaatcaaaacagatttgatttgtgtttttgaaatgtcagtacattttgtgccactaacactgtgatgtataaaagagctgtttgaatgccttttaatgttgtgttttgtactctggaatcatatggaaaaagtttgatttgtaatttcaatacatattttaaatgta

SEQ ID NO: 348669 - DNA, 817 bp, Homo sapiens
gggctggcattgcagtgcgggccgtgcgggctgcgcgggcgcggggaggcgcgggcggcaaactgcgggcacccggcaccccgcagccagtaccgggcggaggcgtcagagccgcgcaccgcggacgagcaggcccaggcatccagtaccctgctgactctgacatgcccccagcctcccccagctctgcagggagccctggtgccagagaccttctcccatttctccctatgggtgcctgacctgagggcagagacatctgagtgtgtataagcacagcaggacaccaggacctggcctgaagacatttcctctcctcccctctggatttctcagagacagtctcgctgtgtcgcctaggctggagtgcagtggcatgatctcggctcactgcaaactctgcttcccgggttcacatcattctcctgcctcagcctccccagcagctgggactacaggcgcacactgccacgcccggctaatttttgtatttttagtagagacggggtttcaccatgttagccaggatggtctcgatctcctgaccttgtgatccacctgcctcagcctcccaaagtgctgggattacaggcgtaagccaccgcgcctggccaaatcttttataaaattataccttcaggctatgtgggtataaggtgtatatggagcaaaagtgaatttcatgtttaaacttgggtcctgatatggtttggctttgtgtcctcacccaaatctcatcttgtagctcccataattcccatgtgttgtaggaaggacccagtggaagatgattgaatcatgggggcgggtctttccc

SEQ ID NO: 348670 - DNA, 5416 bp, Homo sapiens
gggctggcattgcagtgcgggccgtgcgggctgcgcgggcgcggggaggcgcgggcggcaaactgcgggcacccggcaccccgcagccagtaccgggcggaggcgtcagagccgcgcaccgcggacgagcaggcccaggcatccagtaccctgctgactctgacatgcccccagcctcccccagctctgcagggagccctggtgccagagaccttctcccatttctccctatgggtgcctgacctgagggcagagacatctgagtgtgtataagcacagcaggacaccaggacctggcctgaagacatttcctctcctcccctctggatttctcagagtgcctgaaacagtatgttgagctcttgatcaaagaaggattagaaaccgcaattagctgcccagatgctgcctgccctaaacagggccacctacaggagaacgagattgagtgcatggttgcagctgaaattatgcaaagatataaaaagctacaatttgaaagagaggtgctgtttgatccctgtcggacttggtgcccggcgtccacctgccaagctgtgtgtcagctccaggacgtggggctgcagaccccccagccagtgcagtgcaaagcctgccgtatggaattctgctccacctgcaaagccagctggcaccctggccagggctgcccggagaccatgccgatcaccttcctccccggggagaccagtgctgctttcaaaatggaagaagatgacgcgcccatcaagcgctgccccaagtgcaaagtctacatcgagcgagacgaaggctgcgcgcagatgatgtgcaagaactgcaagcacgccttctgctggtactgcctggagtctctggacgatgatttccttctgatacactacgataagggaccctgccggaacaagctgggccactcccgggcatctgtgatctggcatcggacacaggttgtgggcatttttgcaggatttgggctgctgctcttggtggcctcacctttcctactcctggccactccctttgtactttgctgcaagtgcaagtgcagtaaaggtgacgacgacccgttacccacctagaggaagcgcgatgctggaacacatccctgcctccgggaagtgtggctctcccccaaccctccccaccgtccccccttcactaaacatctttcttgccttatgtgccccattgagcttcacagtgtcaggctggacgccgtgatttcagggacctatgtcacaatgttcgctgaggccccaggtgtggtggggaggggaggcaggtgtgggtagcgcacatccccacagatcaatctctgcagatgacagggaggtgctgtgagaagtgcaccaggcagctttctctctgtggtagactaggcatgtctggggatggcctaagagactttctgctccttggcttctagatggcaccatgttgtcagagaagtcttttaaggactgccactctcttcagacagaatctgattattccagcttgagagaagcactctgtttatgacaactgtttttattactaatggcatttagtaaaatcctttttagaaggtattttttttccaactgagtagtgaaaatcaacaaggtgcatataaaccatcctatgcctttcttgaaatgtgcattttaagaagttatagttaaacgacttttcaggagatttagaaagccttatgcactctttgtgtttttcttgaaacttgctgtagtaactttttgaacgctgtaagctgtgtactgttataagtgtgcttcctatattgttgcatttccttgataatattgacgtgtttaaaggaacatctcatctccattagatttgccttttgttgttttctctctttggtgattcagctcagctcatgggcctcatcccttctctcccaggtagcagaaaacgctttttattgcattcaatcccactgctttgctcggcaatggttctcctccgaattgctgccgtctggcctctggcctcagtcttcagatagacagtaagaagaaagcagcctcattgatccgcagatgtaggggcctcttggcagaggctggaggactctgggggctagggaagagcctgccagattttcacatttttaaaatgttctagtcattttgagaaatcatatatcttacacagttccaagtcctgttgctaaccgttttgctcttgttggggaaaagaacctcccatttcacttcgttttaacgtggggattttaccacttgatcttttacagggctgtctgtgaccatttccatggcagcaggatgcagggattaataaggacacatacacattattccaccaattgactttgaaaagtggagaaagtgtattctttaaagagaatttacttctaaaagccacaggtgcttttacaaagcaaactgcattgaatttaaaacttctaaaaataacaggcaaatattgtagctatattacagtgggattttaaaaatcttgttaaacattctataaagaagtaaaacaaaatccttttatctcagttatttgcccatcacaagcacatttttaaaatgttgctttgtgtgtgtttgacttctgcatttgagtatcagtctcaggtcctagtttactttccctggttggaaatttatttcttatttcctaacattgaattcgttagaaaaaacagcgtcacctcactcttcacctgtcatgttgattttccttatgaacccgaagccatttagaaaatccctgtgtgtcaaaattacattcaaaaagctctccttgtaattgcaagtttagtaactcagtaagaacatgcctgcgactccctttctggatggaacctgggctgtggctctctgtcgtttgtggtgctgtgatggtgtctactgttagaatagcttttctggaggtgggtggcaactccacgcgggagtcattggctgggcttgagccctcagcctgtgatatgtggatgcagctgtccagccactgccctttaacatgcccagcacacatgggaggcctgtggccctgtgcccagtggcccacaggacacgcctccaccatatgctcatccttcctgcctgaaattgctgctgcccatcgcatgagcccacacagtagcacccccgtccttaggatgagagtcagagcctttggaaaggctgcatccccagggctagagctcagatgaccttatttctagagggacaggctgttctgttggaagagtctctggcccagtcatgcacatctgtagccccagccatccttgtgccttcacctctgatgtgtttcacaagcacgtagttcaacccagatagggaccacagagattctggggccagccaggggcagtcaaattagcacctactggctctgactttttgtatgaagcatgcctcagtttcctcattttgatctagatataaaattaaaattgtccatttcctatataaataccagcaagatcactctgagatacataaactcgcatttccttctgttttagtaaggagtgccagacttatctttgatgggaatacagtatgaaccctgcttgatgtaaaatggaaatagcacacaggcagatggccctgggtttggactttgatcttgccatcattccccagtaaaacctggggagttctgcgttgagtggacggacttattcctgtgaagcggcataatttgtctccattgaaaaatggcattcactcttacagatggtgttcactgcaagccccagaagcatatggcatgtgttcactaagaggcctttaatcctggggagtaaggggcgaaggcccttagacaaccatggctgctgtactgccgcccagggtgggtggccagtgaggactggccttagcccagtggacctgtggcttctctgaggcccttgagtaactgaccacatttggaggttttgctggaaatgcctgacctctcagtctggctctgctgtgtagtccatagcccagccagatgagcttgcagcctcataggaggtcagcaccttgcaaagatgcagtcaccatagatgtccacgtagcagagactgacttaggatctgagataaagcatcggattgcaggaataactgtccaaattagttcttcctcctcaactcataggagtagctgtggacagaggaaccaacatctgccacctctggcattttctttctttttttttctttttgagacggagtttcgcttttgtcccccaagctggagtacaatgacaggatctcggctcactgcaagctctgcctcccgggttcaagcgattctcctgcctcagcctcccaagtagctgggattacaggcacccaccacctcacccagctaatttttgtattttcagtagagacggggtttcaccatgttggccaggctactctcaaactcctgacctcaggtgatctgcccacctcggcttcccaaagtgctggaattacaggcctgagccaccccacccggcctattttcttaaaggggaacaaatgatcttgacaacatattattccataaaaccagtttagggcacaggccagttcctgattagaacacaggacctgtgggagggactatcagagatgcaaaaattacttcaagatgagtttattgttttcatttgtattgcaaaagttagaagtcattttacaaattaaaaaaacatttttttcttggtagtctttaaaaattaggggattgaaaggatccaggatgggctttgtgtgtgtgtctcagattctcatttattagtgagcacacctgtgtatatatataaatcacaaggagatcatcaagggaaaacattttgcatgtgtaaagcttcatgaagttctctttaaaaaataccaaagcttgtttatttctgataattaacctaagcccttatgaaaataaacaaaatgaagggattatgacaggtattaccaaaaacaccaaaaggaacaaaggggcctgcgttaaaacctaattgctaatgcttcacaactaggagagcatgccgtcttgatgtttaaaaaacccagggtctccacccttcctttgatttgtgcaattctgtcttccacagttccggagccttcagtgaggggtagctacatgccccatgcctgccctttctttccttctttgctcactttactatgggtgtattttaatcttgtataaaaatatgcatgaatgagtcatgcacatgtatacgttatgtatttgacaagtggtggtgaaacaaaatcaaaacagatttgatttgtgtttttgaaatgtcagtacattttgtgccactaacactgtgatgtataaaagagctgtttgaatgccttttaatgttgtgttttgtactctggaatcatatggaaaaagtttgatttgtaatttcaatacatattttaaatgta

SEQ ID NO: 348671 - DNA, 5690 bp, Homo sapiens
gttttgcttacttcaggctttaagcagtgcccccaagtaggtaaggtaggtagtgagtaattgcctggtaagtgaggcaccctgagtgaggaatgccaaatacagttgggttctcagcagggagatcatgggcattttgtctgagcaagcttgggttcacattgaggctctgggtactatttgtgtaagttggcaacttcctcctttgctgactcagttttcacatatgaaaaatggaacagtcatacctttcttgtaaaaatgctctaaggcttcagtgaaagactgagagataaaatatttaatgcagtgcctgcatcttataggcatttgagaaatattacctcccagcctcccttgctgcctttcatcttgcttttagaattcttggctcttgtgtttgctgaggttttgtgccgggatctaacccatagccttagctttgtgattgagcatacagtccctggcacagaatgggtaccccataaatagttgttgaatgaataaaacctcaaaacctcaaatgtgttggttgctgtggactacacagtgggtttcttcagcattaaggaggtaaagatgtttatagacacttctctgtttttctttcagtgcctgaaacagtatgttgagctcttgatcaaagaaggattagaaaccgcaattagctgcccagatgctgcctgccctaaacagggccacctacaggagaacgagattgagtgcatggttgcagctgaaattatgcaaagatataaaaagctacaatttgaaagagaggtgctgtttgatccctgtcggacttggtgcccggcgtccacctgccaagctgtgtgtcagctccaggacgtggggctgcagaccccccagccagtgcagtgcaaagcctgccgtatggaattctgctccacctgcaaagccagctggcaccctggccagggctgcccggagaccatgccgatcaccttcctccccggggagaccagtgctgctttcaaaatggaagaagatgacgcgcccatcaagcgctgccccaagtgcaaagtctacatcgagcgagacgaaggctgcgcgcagatgatgtgcaagaactgcaagcacgccttctgctggtactgcctggagtctctggacgatgatttccttctgatacactacgataagggaccctgccggaacaagctgggccactcccgggcatctgtgatctggcatcggacacaggttgtgggcatttttgcaggatttgggctgctgctcttggtggcctcacctttcctactcctggccactccctttgtactttgctgcaagtgcaagtgcagtaaaggtgacgacgacccgttacccacctagaggaagcgcgatgctggaacacatccctgcctccgggaagtgtggctctcccccaaccctccccaccgtccccccttcactaaacatctttcttgccttatgtgccccattgagcttcacagtgtcaggctggacgccgtgatttcagggacctatgtcacaatgttcgctgaggccccaggtgtggtggggaggggaggcaggtgtgggtagcgcacatccccacagatcaatctctgcagatgacagggaggtgctgtgagaagtgcaccaggcagctttctctctgtggtagactaggcatgtctggggatggcctaagagactttctgctccttggcttctagatggcaccatgttgtcagagaagtcttttaaggactgccactctcttcagacagaatctgattattccagcttgagagaagcactctgtttatgacaactgtttttattactaatggcatttagtaaaatcctttttagaaggtattttttttccaactgagtagtgaaaatcaacaaggtgcatataaaccatcctatgcctttcttgaaatgtgcattttaagaagttatagttaaacgacttttcaggagatttagaaagccttatgcactctttgtgtttttcttgaaacttgctgtagtaactttttgaacgctgtaagctgtgtactgttataagtgtgcttcctatattgttgcatttccttgataatattgacgtgtttaaaggaacatctcatctccattagatttgccttttgttgttttctctctttggtgattcagctcagctcatgggcctcatcccttctctcccaggtagcagaaaacgctttttattgcattcaatcccactgctttgctcggcaatggttctcctccgaattgctgccgtctggcctctggcctcagtcttcagatagacagtaagaagaaagcagcctcattgatccgcagatgtaggggcctcttggcagaggctggaggactctgggggctagggaagagcctgccagattttcacatttttaaaatgttctagtcattttgagaaatcatatatcttacacagttccaagtcctgttgctaaccgttttgctcttgttggggaaaagaacctcccatttcacttcgttttaacgtggggattttaccacttgatcttttacagggctgtctgtgaccatttccatggcagcaggatgcagggattaataaggacacatacacattattccaccaattgactttgaaaagtggagaaagtgtattctttaaagagaatttacttctaaaagccacaggtgcttttacaaagcaaactgcattgaatttaaaacttctaaaaataacaggcaaatattgtagctatattacagtgggattttaaaaatcttgttaaacattctataaagaagtaaaacaaaatccttttatctcagttatttgcccatcacaagcacatttttaaaatgttgctttgtgtgtgtttgacttctgcatttgagtatcagtctcaggtcctagtttactttccctggttggaaatttatttcttatttcctaacattgaattcgttagaaaaaacagcgtcacctcactcttcacctgtcatgttgattttccttatgaacccgaagccatttagaaaatccctgtgtgtcaaaattacattcaaaaagctctccttgtaattgcaagtttagtaactcagtaagaacatgcctgcgactccctttctggatggaacctgggctgtggctctctgtcgtttgtggtgctgtgatggtgtctactgttagaatagcttttctggaggtgggtggcaactccacgcgggagtcattggctgggcttgagccctcagcctgtgatatgtggatgcagctgtccagccactgccctttaacatgcccagcacacatgggaggcctgtggccctgtgcccagtggcccacaggacacgcctccaccatatgctcatccttcctgcctgaaattgctgctgcccatcgcatgagcccacacagtagcacccccgtccttaggatgagagtcagagcctttggaaaggctgcatccccagggctagagctcagatgaccttatttctagagggacaggctgttctgttggaagagtctctggcccagtcatgcacatctgtagccccagccatccttgtgccttcacctctgatgtgtttcacaagcacgtagttcaacccagatagggaccacagagattctggggccagccaggggcagtcaaattagcacctactggctctgactttttgtatgaagcatgcctcagtttcctcattttgatctagatataaaattaaaattgtccatttcctatataaataccagcaagatcactctgagatacataaactcgcatttccttctgttttagtaaggagtgccagacttatctttgatgggaatacagtatgaaccctgcttgatgtaaaatggaaatagcacacaggcagatggccctgggtttggactttgatcttgccatcattccccagtaaaacctggggagttctgcgttgagtggacggacttattcctgtgaagcggcataatttgtctccattgaaaaatggcattcactcttacagatggtgttcactgcaagccccagaagcatatggcatgtgttcactaagaggcctttaatcctggggagtaaggggcgaaggcccttagacaaccatggctgctgtactgccgcccagggtgggtggccagtgaggactggccttagcccagtggacctgtggcttctctgaggcccttgagtaactgaccacatttggaggttttgctggaaatgcctgacctctcagtctggctctgctgtgtagtccatagcccagccagatgagcttgcagcctcataggaggtcagcaccttgcaaagatgcagtcaccatagatgtccacgtagcagagactgacttaggatctgagataaagcatcggattgcaggaataactgtccaaattagttcttcctcctcaactcataggagtagctgtggacagaggaaccaacatctgccacctctggcattttctttctttttttttctttttgagacggagtttcgcttttgtcccccaagctggagtacaatgacaggatctcggctcactgcaagctctgcctcccgggttcaagcgattctcctgcctcagcctcccaagtagctgggattacaggcacccaccacctcacccagctaatttttgtattttcagtagagacggggtttcaccatgttggccaggctactctcaaactcctgacctcaggtgatctgcccacctcggcttcccaaagtgctggaattacaggcctgagccaccccacccggcctattttcttaaaggggaacaaatgatcttgacaacatattattccataaaaccagtttagggcacaggccagttcctgattagaacacaggacctgtgggagggactatcagagatgcaaaaattacttcaagatgagtttattgttttcatttgtattgcaaaagttagaagtcattttacaaattaaaaaaacatttttttcttggtagtctttaaaaattaggggattgaaaggatccaggatgggctttgtgtgtgtgtctcagattctcatttattagtgagcacacctgtgtatatatataaatcacaaggagatcatcaagggaaaacattttgcatgtgtaaagcttcatgaagttctctttaaaaaataccaaagcttgtttatttctgataattaacctaagcccttatgaaaataaacaaaatgaagggattatgacaggtattaccaaaaacaccaaaaggaacaaaggggcctgcgttaaaacctaattgctaatgcttcacaactaggagagcatgccgtcttgatgtttaaaaaacccagggtctccacccttcctttgatttgtgcaattctgtcttccacagttccggagccttcagtgaggggtagctacatgccccatgcctgccctttctttccttctttgctcactttactatgggtgtattttaatcttgtataaaaatatgcatgaatgagtcatgcacatgtatacgttatgtatttgacaagtggtggtgaaacaaaatcaaaacagatttgatttgtgtttttgaaatgtcagtacattttgtgccactaacactgtgatgtataaaagagctgtttgaatgccttttaatgttgtgttttgtactctggaatcatatggaaaaagtttgatttgtaatttcaatacatattttaaatgta

SEQ ID NO: 348672 - DNA, 5647 bp, Homo sapiens
gggctggcattgcagtgcgggccgtgcgggctgcgcgggcgcggggaggcgcgggcggcaaactgcgggcacccggcaccccgcagccagtaccgggcggaggcgtcagagccgcgcaccgcggacgagcaggcccaggcatccagtaccctgctgactctgacatgcccccagcctcccccagctctgcagggagccctggtgccagagaccttctcccatttctccctatgggtgcctgacctgagggcagagacatctgagtgtgtataagcacagcaggacaccaggacctggcctgaagacatttcctctcctcccctctggatttctcagagactgttctgcgatgaccacagcaaggtaccggcccacctgggacctggccctcgacccgctggtgtcttgcaagctctgtcttggggagtacccagtggagcagatgacaaccatagcccagtgccaatgcatcttctgtactctgtgcctgaaacagtatgttgagctcttgatcaaagaaggattagaaaccgcaattagctgcccagatgctgcctgccctaaacagggccacctacaggagaacgagattgagtgcatggttgcagctgaaattatgcaaagatataaaaagctacaatttgaaagagaggtgctgtttgatccctgtcggacttggtgcccggcgtccacctgccaagctgtgtgtcagctccaggacgtggggctgcagaccccccagccagtgcagtgcaaagcctgccgtatggaattctgctccacctgcaaagccagctggcaccctggccagggctgcccggagaccatgccgatcaccttcctccccggggagaccagtgctgctttcaaaatggaagaagatgacgcgcccatcaagcgctgccccaagtgcaaagtctacatcgagcgagacgaaggctgcgcgcagatgatgtgcaagaactgcaagcacgccttctgctggtactgcctggagtctctggacgatgatttccttctgatacactacgataagggaccctgccggaacaagctgggccactcccgggcatctgtgatctggcatcggacacaggttgtgggcatttttgcaggatttgggctgctgctcttggtggcctcacctttcctactcctggccactccctttgtactttgctgcaagtgcaagtgcagtaaaggtgacgacgacccgttacccacctagaggaagcgcgatgctggaacacatccctgcctccgggaagtgtggctctcccccaaccctccccaccgtccccccttcactaaacatctttcttgccttatgtgccccattgagcttcacagtgtcaggctggacgccgtgatttcagggacctatgtcacaatgttcgctgaggccccaggtgtggtggggaggggaggcaggtgtgggtagcgcacatccccacagatcaatctctgcagatgacagggaggtgctgtgagaagtgcaccaggcagctttctctctgtggtagactaggcatgtctggggatggcctaagagactttctgctccttggcttctagatggcaccatgttgtcagagaagtcttttaaggactgccactctcttcagacagaatctgattattccagcttgagagaagcactctgtttatgacaactgtttttattactaatggcatttagtaaaatcctttttagaaggtattttttttccaactgagtagtgaaaatcaacaaggtgcatataaaccatcctatgcctttcttgaaatgtgcattttaagaagttatagttaaacgacttttcaggagatttagaaagccttatgcactctttgtgtttttcttgaaacttgctgtagtaactttttgaacgctgtaagctgtgtactgttataagtgtgcttcctatattgttgcatttccttgataatattgacgtgtttaaaggaacatctcatctccattagatttgccttttgttgttttctctctttggtgattcagctcagctcatgggcctcatcccttctctcccaggtagcagaaaacgctttttattgcattcaatcccactgctttgctcggcaatggttctcctccgaattgctgccgtctggcctctggcctcagtcttcagatagacagtaagaagaaagcagcctcattgatccgcagatgtaggggcctcttggcagaggctggaggactctgggggctagggaagagcctgccagattttcacatttttaaaatgttctagtcattttgagaaatcatatatcttacacagttccaagtcctgttgctaaccgttttgctcttgttggggaaaagaacctcccatttcacttcgttttaacgtggggattttaccacttgatcttttacagggctgtctgtgaccatttccatggcagcaggatgcagggattaataaggacacatacacattattccaccaattgactttgaaaagtggagaaagtgtattctttaaagagaatttacttctaaaagccacaggtgcttttacaaagcaaactgcattgaatttaaaacttctaaaaataacaggcaaatattgtagctatattacagtgggattttaaaaatcttgttaaacattctataaagaagtaaaacaaaatccttttatctcagttatttgcccatcacaagcacatttttaaaatgttgctttgtgtgtgtttgacttctgcatttgagtatcagtctcaggtcctagtttactttccctggttggaaatttatttcttatttcctaacattgaattcgttagaaaaaacagcgtcacctcactcttcacctgtcatgttgattttccttatgaacccgaagccatttagaaaatccctgtgtgtcaaaattacattcaaaaagctctccttgtaattgcaagtttagtaactcagtaagaacatgcctgcgactccctttctggatggaacctgggctgtggctctctgtcgtttgtggtgctgtgatggtgtctactgttagaatagcttttctggaggtgggtggcaactccacgcgggagtcattggctgggcttgagccctcagcctgtgatatgtggatgcagctgtccagccactgccctttaacatgcccagcacacatgggaggcctgtggccctgtgcccagtggcccacaggacacgcctccaccatatgctcatccttcctgcctgaaattgctgctgcccatcgcatgagcccacacagtagcacccccgtccttaggatgagagtcagagcctttggaaaggctgcatccccagggctagagctcagatgaccttatttctagagggacaggctgttctgttggaagagtctctggcccagtcatgcacatctgtagccccagccatccttgtgccttcacctctgatgtgtttcacaagcacgtagttcaacccagatagggaccacagagattctggggccagccaggggcagtcaaattagcacctactggctctgactttttgtatgaagcatgcctcagtttcctcattttgatctagatataaaattaaaattgtccatttcctatataaataccagcaagatcactctgagatacataaactcgcatttccttctgttttagtaaggagtgccagacttatctttgatgggaatacagtatgaaccctgcttgatgtaaaatggaaatagcacacaggcagatggccctgggtttggactttgatcttgccatcattccccagtaaaacctggggagttctgcgttgagtggacggacttattcctgtgaagcggcataatttgtctccattgaaaaatggcattcactcttacagatggtgttcactgcaagccccagaagcatatggcatgtgttcactaagaggcctttaatcctggggagtaaggggcgaaggcccttagacaaccatggctgctgtactgccgcccagggtgggtggccagtgaggactggccttagcccagtggacctgtggcttctctgaggcccttgagtaactgaccacatttggaggttttgctggaaatgcctgacctctcagtctggctctgctgtgtagtccatagcccagccagatgagcttgcagcctcataggaggtcagcaccttgcaaagatgcagtcaccatagatgtccacgtagcagagactgacttaggatctgagataaagcatcggattgcaggaataactgtccaaattagttcttcctcctcaactcataggagtagctgtggacagaggaaccaacatctgccacctctggcattttctttctttttttttctttttgagacggagtttcgcttttgtcccccaagctggagtacaatgacaggatctcggctcactgcaagctctgcctcccgggttcaagcgattctcctgcctcagcctcccaagtagctgggattacaggcacccaccacctcacccagctaatttttgtattttcagtagagacggggtttcaccatgttggccaggctactctcaaactcctgacctcaggtgatctgcccacctcggcttcccaaagtgctggaattacaggcctgagccaccccacccggcctattttcttaaaggggaacaaatgatcttgacaacatattattccataaaaccagtttagggcacaggccagttcctgattagaacacaggacctgtgggagggactatcagagatgcaaaaattacttcaagatgagtttattgttttcatttgtattgcaaaagttagaagtcattttacaaattaaaaaaacatttttttcttggtagtctttaaaaattaggggattgaaaggatccaggatgggctttgtgtgtgtgtctcagattctcatttattagtgagcacacctgtgtatatatataaatcacaaggagatcatcaagggaaaacattttgcatgtgtaaagcttcatgaagttctctttaaaaaataccaaagcttgtttatttctgataattaacctaagcccttatgaaaataaacaaaatgaagggattatgacaggtattaccaaaaacaccaaaaggaacaaaggggcctgcgttaaaacctaattgctaatgcttcacaactaggagagcatgccgtcttgatgtttaaaaaacccagggtctccacccttcctttgatttgtgcaattctgtcttccacagttccggagccttcagtgaggggtagctacatgccccatgcctgccctttctttccttctttgctcactttactatgggtgtattttaatcttgtataaaaatatgcatgaatgagtcatgcacatgtatacgttatgtatttgacaagtggtggtgaaacaaaatcaaaacagatttgatttgtgtttttgaaatgtcagtacattttgtgccactaacactgtgatgtataaaagagctgtttgaatgccttttaatgttgtgttttgtactctggaatcatatggaaaaagtttgatttgtaatttcaatacatattttaaatgtattgtgtcttacgtagtttgtccccccctttagcagggattcctttttaaagctattttggctggaatacaggtgacttttgtaaa

SEQ ID NO: 348673 - DNA, 4821 bp, Homo sapiens
gggctggcattgcagtgcgggccgtgcgggctgcgcgggcgcggggaggcgcgggcggcaaactgcgggcacccggcaccccgcagccagtaccgggcggaggcgtcagagccgcgcaccgcggacgagcaggcccaggcatccagtaccctgctgactctgacatgcccccagcctcccccagctctgcagggagccctggtgccagagaccttctcccatttctccctatgggtgcctgacctgagggcagagacatctgagtgtgtataagcacagcaggacaccaggacctggcctgaagacatttcctctcctcccctctggatttctcagagactgttctgcgatgaccacagcaaggtaccggcccacctgggacctggccctcgacccgctggtgtcttgcaagctctgtcttggggagtacccagtggagcagatgacaaccatagcccagtgccaatgcatcttctgtactctgtgcctgaaacagtatgttgagctcttgatcaaagaaggattagaaaccgcaattagctgcccagatgctgcctgccctaaacagggccacctacaggagaacgagattgagtgcatggttgcagctgaaattatgcaaagatataaaaagctacaatttgaaagagaggtgctgtttgatccctgtcggacttggtgcccggcgtccacctgccaagctgtgtgtcagctccaggacgtggggctgcagaccccccagccagtgcagtgcaaagcctgccgtatggaattctgctccacctgcaaagccagctggcaccctggccagggctgcccggagaccatgccgatcaccttcctccccggggagaccagtgctgctttcaaaatggaagaagatgacgcgcccatcaagcgctgccccaagtgcaaagtctacatcgagcgagacgaaggctgcgcgcagatgatgtgcaagaactgcaagcacgccttctgctggtactgcctggagtctctggacgatgatttccttctgatacactacgataagggaccctgccggaacaagctgggccactcccgggcatctgtgatctggcatcggacacaggttgtgggcatttttgcaggatttgggctgctgctcttggtggcctcacctttcctactcctggccactccctttgtactttgctgcaagtgcaagtgcagtaaaggtgacgacgacccgttacccacctagaggaagcgcgatgctggaacacatccctgcctccgggaagtgtggctctcccccaaccctccccaccgtccccccttcactaaacatctttcttgccttatgtgccccattgagcttcacagtgtcaggctggacgccgtgatttcagggacctatgtcacaatgttcgctgaggccccaggtgtggtggggaggggaggcaggtgtgggtagcgcacatccccacagatcaatctctgcagatgacagggaggtgctgtgagaagtgcaccaggcagctttctctctgtggtagactaggcatgtctggggatggcctaagagactttctgctccttggcttctagatggcaccatgttgtcagagaagtcttttaaggactgccactctcttcagacagaatctgattattccagcttgagagaagcactctgtttatgacaactgtttttattactaatggcatttagtaaaatcctttttagaaggtattttttttccaactgagtagtgaaaatcaacaaggtgcatataaaccatcctatgcctttcttgaaatgtgcattttaagaagttatagttaaacgacttttcaggagatttagaaagccttatgcactctttgtgtttttcttgaaacttgctgtagtaactttttgaacgctgtaagctgtgtactgttataagtgtgcttcctatattgttgcatttccttgataatattgacgtgtttaaaggaacatctcatctccattagatttgccttttgttgttttctctctttggtgattcagctcagctcatgggcctcatcccttctctcccaggtagcagaaaacgctttttattgcattcaatcccactgctttgctcggcaatggttctcctccgaattgctgccgtctggcctctggcctcagtcttcagatagacagtaagaagaaagcagcctcattgatccgcagatgtaggggcctcttggcagaggctggaggactctgggggctagggaagagcctgccagattttcacatttttaaaatgttctagtcattttgagaaatcatatatcttacacagttccaagtcctgttgctaaccgttttgctcttgttggggaaaagaacctcccatttcacttcgttttaacgtggggattttaccacttgatcttttacagggctgtctgtgaccatttccatggcagcaggatgcagggattaataaggacacatacacattattccaccaattgactttgaaaagtggagaaagtgtattctttaaagagaatttacttctaaaagccacaggtgcttttacaaagcaaactgcattgaatttaaaacttctaaaaataacaggcaaatattgtagctatattacagtgggattttaaaaatcttgttaaacattctataaagaagtaaaacaaaatccttttatctcagttatttgcccatcacaagcacatttttaaaatgttgctttgtgtgtgtttgacttctgcatttgagtatcagtctcaggtcctagtttactttccctggttggaaatttatttcttatttcctaacattgaattcgttagaaaaaacagcgtcacctcactcttcacctgtcatgttgattttccttatgaacccgaagccatttagaaaatccctgtgtgtcaaaattacattcaaaaagctctccttgtaattgcaagtttagtaactcagtaagaacatgcctgcgactccctttctggatggaacctgggctgtggctctctgtcgtttgtggtgctgtgatggtgtctactgttagaatagcttttctggaggtgggtggcaactccacgcgggagtcattggctgggcttgagccctcagcctgtgatatgtggatgcagctgtccagccactgccctttaacatgcccagcacacatgggaggcctgtggccctgtgcccagtggcccacaggacacgcctccaccatatgctcatccttcctgcctgaaattgctgctgcccatcgcatgagcccacacagtagcacccccgtccttaggatgagagtcagagcctttggaaaggctgcatccccagggctagagctcagatgaccttatttctagagggacaggctgttctgttggaagagtctctggcccagtcatgcacatctgtagccccagccatccttgtgccttcacctctgatgtgtttcacaagcacgtagttcaacccagatagggaccacagagattctggggccagccaggggcagtcaaattagcacctactggctctgactttttgtatgaagcatgcctcagtttcctcattttgatctagatataaaattaaaattgtccatttcctatataaataccagcaagatcactctgagatacataaactcgcatttccttctgttttagtaaggagtgccagacttatctttgatgggaatacagtatgaaccctgcttgatgtaaaatggaaatagcacacaggcagatggccctgggtttggactttgatcttgccatcattccccagtaaaacctggggagttctgcgttgagtggacggacttattcctgtgaagcggcataatttgtctccattgaaaaatggcattcactcttacagatggtgttcactgcaagccccagaagcatatggcatgtgttcactaagaggcctttaatcctggggagtaaggggcgaaggcccttagacaaccatggctgctgtactgccgcccagggtgggtggccagtgaggactggccttagcccagtggacctgtggcttctctgaggcccttgagtaactgaccacatttggaggttttgctggaaatgcctgacctctcagtctggctctgctgtgtagtccatagcccagccagatgagcttgcagcctcataggaggtcagcaccttgcaaagatgcagtcaccatagatgtccacgtagcagagactgacttaggatctgagataaagcatcggattgcaggaataactgtccaaattagttcttcctcctcaactcataggagtagctgtggacagaggaaccaacatctgccacctctggcattttctttctttttttttctttttgagacggagtttcgcttttgtcccccaagctggagtacaatgacaggatctcggctcactgcaagctctgcctcccgggttcaagcgattctcctgcctcagcctcccaagtagctgggattacaggcacccaccacctcacccagctaatttttgtattttcagtagagacggggtttcaccatgttggccaggctactctcaaactcctgacctcaggtgatctgcccacctcggcttcccaaagtgctggaattacaggcctgagccaccccacccggcctattttcttaaaggggaacaaatgatcttgacaacatattattccataaaaccagtttagggcacaggccagttcctgattagaacacaggacctgtgggagggactatcagagatgcaaaaattacttcaagatgatgaacctggaacatcgtatggacattcggcgtgtgcagggtaccgagct

SEQ ID NO: 348674 - DNA, 2894 bp, Homo sapiens
gatccactcctcattcagccctcccatgggcctggcatgtagccgagcaccctggagagggcagactaagaagacatggtccgtccctgcctgtgaggagttcaggtctctgaggaggaggaagcagtgaaactgggctttacacatggcctgagaacagcttaggcctgaacataaggaacagcttggagtggaggggacacagaggaaccctcactatcatgcatgccaacccaaccactgcctgccctttcccttctggatttagctcgtgtctccaggctcctagtcctgtaatccagggacccatcagcgagggattcagggaagcagaggcagctctccaggaaggaggaaaatccctgcctcttccagagagactcccccattgctgtctcttgtgtgtgtcatgcacaaggaaggcttggttgtgtgccaggataaggggcacaagggcctcgggtgtggccagagaccccatgcttaagcttttatggtataggtcaggctgcaggggtttgagggcctcagttgtatatcagaatcttcagagcactgcgatgttcaggggtgagtcaggtctgtagatgtgcacggggtcttctgaagggtcagtttctgtaatcactttcaggtgtgtcagggccttgtgcagtaacagtgcacacagaagttagtgtttctgtgggctaagggttgtagctctgtatcaggattctgggagtgggtctggatttctggtgtgtggacttaagaagctgtgtcagacttgggggaggggcgttcatgtataactgggttcacataggccaagactcccaggtgcattttaggcagagcctcaggtgtgttagaggtcccaggggcagagaggctataggtgctgtcagaggccttggggacatttagggcagagcctcgagtgacaggtcctgggacagtgggagccaagggcaagtgctagagttgcagtgaatttagagcaaagcctcagctaagtgacacatcccagggcagtaggggatctatctaggttcgtgctgggcctcaggtaagtgacaggccttaggacaatgggggctgtggcatgcgtcaggttacctgccttgatatgggatcgtgacaggcccctccctatgtgcaggagacaagcagcccaagaaacaggagaaaaacccagtgttggtgtccccagagtttgtggatgaagctctgtgtgcgtgcgaggagtaccttagcaacttggcccacatggacatcgacaaggacctggaggccccgctgtacctcacccccgagggctggtccctcttcctccagcgctactaccaagtggtccacgaaggggcagaactcaggcacctcgacactcaggtccagcgctgtgaggacatcctgcagcagctgcaggccgtggtaccccagatagacatggaaggggatcgcaacatctggatcgtgaagccaggagccaagtcccgcggacgaggcatcatgtgcatggaccacctggaggagatgctgaagctggtgaacggcaaccccgtggtgatgaaggacggcaagtgggtggtgcagaagtatattgagcggcccctcctcatctttggcaccaagtttgacctcagacagtggttcctggtaactgactggaacccacttaccgtgtggttctaccgcgacagctatatccgcttttccacgcagcccttctccctgaagaacctggacaactcagtgcacctgtgcaacaactccatccagaagcacctggagaactcatgccatcggcatccactgcttccgccagaaccacatgtggtctagccagaggttccaggcccacctgcaggagatgggtgccccaaatgcttggtccaccatcatcgtgcctggcatgaaggatgctgtgatccacgcacttcagacctcccaggacaccgtgcagtgtcggaaggccagctttgagctctatggcgctgacttcgtgttcggggaggacttccagccctggctgattgagatcaacgccagccccacgatggcaccctccacagcagtcactgcccggctctgtgctggcgtgcaagctgacaccctgcgcgtggtcattgaccggatgctggaccgcaactgtgacacaggagcctttgagctcatctataagcagcccgtcaccacttccccagcctccacaccaaggcccagctgccttctccccatgtactccgacaccagggccaggtcctcagacgacagcacagcaagctggtgggcactaaggccctgtcgaccacaggcaaggccttgaggactctacccacggctaaggtcttcatttccctcccaccgaaccttgatttcaaggtggcacccagcatcctgaagccaagaaaggtgggcctcgacctgtgactcacacccagtggacagtgctgagcacggggtcagggctggagggcacaggcagagggcagctcccaggctggctggcaccccaagggaagagctggtctccctcagaagccccttcctccacagacttctgatcatctccctcttctcccctcctttcacaccgaggctcctgctctcctgtgcctccgaggcccccagctggaagtgccttgttgcctctgccctttgaagtcggaacaattcctagcacctgtcggaaggtcaaggccaaaggcaaattcaaggccagactgtgacaaacccagggctgaggcctgccccatgaagaggctgagccccctgaaacccctgccccttgttggtacattccagaggcgcaggggcctgggggatatgaagctagggaagcccctgcttcgattccccactgcccttgtcctggatccaacaccaaataaaaagaaacaagtgaagta

SEQ ID NO: 348675 - DNA, 2740 bp, Homo sapiens
cccgggagaggaggcggcgacgcggaggggcgcgggatcaggggccctgggagggcgagcgcggcgaggggcgcatgcagggccccgacgcgccactgctcctgagcgcgagggagctggggcccgggcgccggggctcggcctcctggtaccgccaggagggcggcgcggtgtgcaactggctgcggaagccgcagccgctcgagccacgcaccagtttcccctcggcgcgccgctccgagttccgtccacccaggaggctgccatgggccggccctgcctccgcccagtccgaggagggtcacgcaggcggcagatgccaggcgggcagccccgcccctgcgcgccgcctcagcggcgccttcaagacgctggtcccaggcacccacgcccagggcgcctcggatacccaccccctcggccccccgcacaccccggtcctcgatgacccctctccgcaggatggtttcccggtcctctggcgaggatcctccaaggcgtctcacatgaaccggctcagaaacgccaaaatctacgtggagagagctgtcaagcagaagaagatctttacaatccaaggctgctacccggtgatccggtgtctcttgcgccggaggggctgggtggagaagaagatggtccatcgctcaggccccaccctgctgccaccccagaaggatctggatagctcagcgatgggtgacagtgacaccactgaggatgaggatgaagatgaggacgaggagttccagccatcacagctgttcgacttcgatgatttactgaaatttgatgacctagatggaacacatgctctgatggtgggtctatgtctcaatctccggaatttgccgtggtttgatgaggttgatgccaactccttcttcccacgctgctactgcctgggggctgaggatgacaaaaaagccttcatagaggacttctggctgactgctgcccgcaacgttctcaagctggtggtgaagtctgagtggaagtcataccctattcaggcagtagaggaagaggcctcaggagacaagcagcccaagaaacaggagaaaaacccagtgttggtgtccccagagtttgtggatgaagctctgtgtgcgtgcgaggagtaccttagcaacttggcccacatggacatcgacaaggacctggaggccccgctgtacctcacccccgagggctggtccctcttcctccagcgctactaccaagtggtccacgaaggggcagaactcaggcacctcgacactcaggtccagcgctgtgaggacatcctgcagcagctgcaggccgtggtaccccagatagacatggaaggggatcgcaacatctggatcgtgaagccaggagccaagtcccgcggacgaggcatcatgtgcatggaccacctggaggagatgctgaagctggtgaacggcaaccccgtggtgatgaaggacggcaagtgggtggtgcagaagtatattgagcggcccctcctcatctttggcaccaagtttgacctcagacagtggttcctggtaactgactggaacccacttaccgtgtggttctaccgcgacagctatatccgcttttccacgcagcccttctccctgaagaacctggacaactcagtgcacctgtgcaacaactccatccagaagcacctggagaactcatgccatcggcatccactgcttccgccagaaccacatgtggtctagccagaggttccaggcccacctgcaggagatgggtgccccaaatgcttggtccaccatcatcgtgcctggcatgaaggatgctgtgatccacgcacttcagacctcccaggacaccgtgcagtgtcggaaggccagctttgagctctatggcgctgacttcgtgttcggggaggacttccagccctggctgattgagatcaacgccagccccacgatggcaccctccacagcagtcactgcccggctctgtgctggcgtgcaagctgacaccctgcgcgtggtcattgaccggatgctggaccgcaactgtgacacaggagcctttgagctcatctataagcagcctgctgtggaggtgcctcaatatgtgggcatccggctcctggtagagggcttcaccatcaagaagcccatggcgatgtgtcatcggcggatgggggtccgccagcagtccctctgctgacccagcgaggctctggggaagcccgtcaccacttccccagcctccacaccaaggcccagctgccttctccccatgtactccgacaccagggccaggtcctcagacgacagcacagcaagctggtgggcactaaggccctgtcgaccacaggcaaggccttgaggactctacccacggctaaggtcttcatttccctcccaccgaaccttgatttcaaggtggcacccagcatcctgaagccaagaaaggctcctgctctcctgtgcctccgaggcccccagctggaagtgccttgttgcctctgccctttgaagtcggaacaattcctagcacctgtcggaaggtcaaggccaaaggcaaattcaaggccagactgtgacaaacccagggctgaggcctgccccatgaagaggctgagccccctgaaacccctgccccttgttggtacattccagaggcgcaggggcctgggggatatgaagctagggaagcccctgcttcgattccccactgcccttgtcctggatccaacaccaaataaaaagaaacaagtgaagta

SEQ ID NO: 348676 - DNA, 2006 bp, Homo sapiens
  misc_feature (1503)..(1503): n is a, c, g, or t
ggggagtcagcgagggcgagcctactggagtttgccgggggtgggaagaaggtgggcctcgagcaaagccgctagaggtggggtgcgggtggtcggcctcaggcgagccccggggcacagcccggggcgggaggcggagcttggcggccgagatctccgcgctgcagttagccccgccgagcgccaggagctgcgggtaggaggggcgagagaaaggatgggggtacagaaccggaagaaacgaagggctcgtccgcttcggcttgtcctaatttggtgcccaatctgaagctgggctgtaccattgcatacctgggggaggctgtggcaaaggtgacaagaaggccgaaggcacaaagggaagctgcacccattcctggaggagcttaaatagtgactcgagtgcaagaatttaaaaataccgagacagccctaggtggaaaacttccggaaggcccaagcgttcgtaagggctctctaccccgctcggagcatagatggtaccgtccggaagtccgggcggagaccgtagctgcgcttctcgcgaaagggcaggcatcgcggggctggccacttccgtacttccgctttccggcccagccagcgcccgcgatgactgccactctccgcccctacctgagtgccgtgcgggccacattgcaggctgccctctgcctggagaacttctcctcccaggttgtggaacgacacaacaagccggaagtggaagtcaggagtagcaaagagctcctgttacaacctgtgaccatcagcaggaatgagaaggaaaaggttctgattgagggctccatcaactctgtccgggtcagcattgctgtgaaacaggctgatgagatcgagaagattttgtgccacaattgaatagtgcagggtggcccagggctgcttccaggacttgcctgtcctccctgagtttggatgggagagacacaagggcctggacctcagttttctgttctctgccccagctcagtgcacctgtgcaacaactccatccagaagcacctggagaactcatgccatcggcatccactgcttccgccagaaccacatgtggtctagccagaggttccaggcccacctgcaggagatgggtgccccaaatgcttggtccaccatcatcgtgcctggcatgaaggatgctgtgatccacgcacttcagacctcccaggacaccgtgcagtgtcggaaggccagctttgagctctatggcgctgacttcgtgttcggggaggacttccagccctggctgattgagatcaacgccagccccacgatggcaccctccacagcagtcactgcccggctctgtgctggcgtgcaagctgacaccctgcgcgtggtcattgaccggatgctggaccgcaactgtgacacaggagcctttgagctcatctataagcagggcccagctcctaacatgcaggtgtcaccagagagaaatgcaccactgtgcccagcaccatagctctggctcagagngtttgcctgagaaagcagcagacagaaaacagaaggtgcgagttgctcccgaaggaactgacttcatgtgcaacagagctcggagaagtccaaggctaagcacactctccagaacagtggaggttgtgctgaaaggcaactgggaggcgacggagagcctgggaggtgcgggctacactggaggccagcaagtctgccagagagaaacagaaaaaaagacaggtgggaagagctctcctggggtcagaacaaagcttaatatcttctttgacaaagaacgtaacatcaaaatagccaactatgggtttagttcaacatttgcaaagagagacaacactgaaaagggaacgtttgatgggactctcccttatgcaggcccagaactcttcttgggccatggataccaatgccctgccatcaacgtttggagccttggcatcatcgtatgcaaaatggtggctggggccctgccattttatgagcagaactgtaaggatatactg

SEQ ID NO: 348677 - DNA, 772 bp, Homo sapiens
ctcagcctcccgagtggctgggactacaggcgcccgccatcacgcctggctagttttttgtatttttagtagagacggggtttcactgtgttggccgggatggtctcgatctcctgacctcatgatccatccacctcagcctcccaaagtgctgggattacaggcgtcagccaccgtgaccagcctgaaacaggagcaagttctaaactcaggctctagagtcagaaaagtgtagagtcaggttctggatccaaaatggggcaagtcatgatcaggttctggaaccagaacaggcctcaagcctaggggctgagcagggtatcccctggcctgggagcagaggacttctggctgactgctgcccgcaacgttctcaagctggtggtgaagtctgagtggaagtcataccctattcaggcagtagaggaagaggcctcaggtaagtactgtggttacctccactctcccacccatttatcctccgaggcccccagctggaagtgccttgttgcctctgccctttgaagtcggaacaattcctagcacctgtcggaaggtcaaggccaaaggcaaattcaaggccagactgtgacaaacccagggctgaggcctgccccatgaagaggctgagccccctgaaacccctgccccttgttggtacattccagaggcgcaggggcctgggggatatgaagctagggaagcccctgcttcgattccccactgcccttgtcctggatccaacaccaaataaaaagaaacaagtgaagta

SEQ ID NO: 348678 - DNA, 813 bp, Homo sapiens
gatccactcctcattcagccctcccatgggcctggcatgtagccgagcaccctggagagggcagactaagaagacatggtccgtccctgcctgtgaggagttcaggtctctgaggaggaggaagcagtgaaactgggctttacacatggcctgagaacagcttaggcctgaacataaggaacagcttggagtggaggggacacagaggaaccctcactatcatgcatgccaacccaaccactgcctgccctttcccttctggatttagctcgtgtctccaggctcctagtcctgtaatccagggacccatcagcgagggattcagggaagcagaggcagctctccaggaaggaggaaaatccctgcctcttccagagagactcccccattgctgtctcttgtgtgtgtcatgcacaaggaaggcttggttgtgtgccaggataaggggcacaagggcctcgggtgtggccagagaccccatgcttaagcttttatggtataggtcaggctgcaggggtttgagggcctcagttgtatatcagaatcttcagagctctgccctttgaagtcggaacaattcctagcacctgtcggaaggtcaaggccaaaggcaaattcaaggccagactgtgacaaacccagggctgaggcctgccccatgaagaggctgagccccctgaaacccctgccccttgttggtacattccagaggcgcaggggcctgggggatatgaagctagggaagcccctgcttcgattccccactgcccttgtcctggatccaacaccaaataaaaagaaacaagtgaagta

SEQ ID NO: 348679 - DNA, 519 bp, Homo sapiens
ttggtctggcccatattgtgtatctgctaccctggtgacctaagcatgtcacacagatatcgatatttgtggttctggccctagaagaatgtggtggggcccaggcctctgtcctttttgtccttcccagtagggccccatctcaagttgaatagtgcagggtggcccagggctgcttccaggacttgcctgtcctccctgagtttggatgggagagacacaagggcctggacctcagttttctgttctctgccccagctcagtgcacctgtgcaacaactccatccagaagcacctggagaactcatgccatcggcatccactgcttccgccagaaaccacaaatatcgtttttttctggcaaaatgagacaaacttcctttaaatttgggcataaacaggtgatgaatgaaaatgcaaggcgggtcatgatcatatttaatagcctacagtaaatacacggaaaggtggggtcagtgcccggagaggagaaaggtggagccagaaccacaaatatcg

SEQ ID NO: 348680 - DNA, 776 bp, Homo sapiens
cctttcccatttgtgtagtctgggcaggttaggatttccggggtggcttgaaggtggggccggaggcttgggagggacctatggatatctgcagggagggcgtgaccaaggctgcctggatgacggcgggggatggtggaatatatctccccctgccctctccacctgcatgtcccaggtccagccctgcccaagttctatcatttccccacagcgaaggggcagaactcaggcacctcgacactcaggtccagcgctgtgaggacatcctgcagcagctgcaggccgtggtaccccagatagacatggaaggggatcgcaacatctggatcgtgaagccaggagccaagtcccgcggacgaggcatcatgtgcatggaccacctggaggagatgctgaagctggtgaacggcaaccccgtggtgatgaaggacggcaagtgggtggtgcagaagtatattgagcggcccctcctcatctttggcaccaagtttgacctcagacagtggttcctggtaactgactggaacccacttaccgtgtggttctaccgcgacagctatatccgcttttccacgcagcccttctccctgaagaacctggacaagtgagcccctctgctcgcctcccacgagctccctgcctagttggggagctggcaagcaaacaggcgattacagtgcaggggactcgcgcagcagcgctaggctccacacacagactgcaggcaggcaggccctcatcctgccagctgtccttgcatccaacagattttt

SEQ ID NO: 348681 - DNA, 533 bp, Homo sapiens
ggggagtcagcgagggcgagcctactggagtttgccgggggtgggaagaaggtgggcctcgagcaaagccgctagaggtggggtgcgggtggtcggcctcaggcgagccccggggcacagcccggggcgggaggcggagcttggcggccgagatctccgcgctgcagttagccccgccgagcgccaggagctgcggactgccactctccgcccctacctgagtgccgtgcgggccacattgcaggctgccctctgcctggagaacttctcctcccaggttgtggaacgacacaacaagccggaagtggaagtcaggagtagcaaagagctcctgttacaacctgtgaccatcagcaggaatgagaaggaaaaggttctgattgagggctccatcaactctgtccgggtcagcattgctgtgaaacaggctgatgagatcgagaagattttgtgccacaagttcatgcgcttcatgatgatgcgagcagagaacttctttatccttcgaaggaagcctgtggaggtgagaccct

SEQ ID NO: 348682 - DNA, 1676 bp, Homo sapiens
gtgtttccatgaataccttccacaagggacacaggcttgaccttaggggctgatatggagccccactcctggtgtactggttgggctcaatttcttgggcaacagagggtataagctagggctatttgataaaggggaaaagtgcctgatggttgttataaagtggaagaataatggggtagagaatgggtttgagttcacgggctttttttcccctattaatagacaagtgtgtttttttttttttcttctgtgttcgtccgcagtggccaagttgaatgatgctgcccggggctctgccagaaccacaaatatcgcgatatttgtggttctggccctagaagaatgtggtggggcccaggcctctgtcctttttgtccttcccagtagggccccatctcaagttgaatagtgcagggtggcccagggctgcttccaggacttgcctgtcctccctgagtttggatgggagagacacaagggcctggacctcagttttctgttctctgccccagctcagtgcacctgtgcaacaactccatccagaagcacctggagaactcatgccatcggcatccactgcttccgccagaaccacatgtggtctagccagaggttccaggcccacctgcaggagatgggtgccccaaatgcttggtccaccatcatcgtgcctggcatgaaggatgctgtgatccacgcacttcagacctcccaggacaccgtgcagtgtcggaaggccagctttgagctctatggcgctgacttcgtgttcggggaggacttccagccctggctgattgagatcaacgccagccccacgatggcaccctccacagcagtcactgcccggctctgtgctggcgtgcaagctgacaccctgcgcgtggtcattgaccggatgctggaccgcaactgtgacacaggagcctttgagctcatctataagcagcccgtcaccacttccccagcctccacaccaaggcccagctgccttctccccatgtactccgacaccagggccaggtcctcagacgacagcacagcaagctggtgggcactaaggccctgtcgaccacaggcaaggccttgaggactctacccacggctaaggtcttcatttccctcccaccgaaccttgatttcaaggtggcacccagcatcctgaagccaagaaaggtgggcctcgacctgtgactcacacccagtggacagtgctgagcacggggtcagggctggagggcacaggcagagggcagctcccaggctggctggcaccccaagggaagagctggtctccctcagaagccccttcctccacagacttctgatcatctccctcttctcccctcctttcacaccgaggctcctgctctcctgtgcctccgaggcccccagctggaagtgccttgttgcctctgccctttgaagtcggaacaattcctagcacctgtcggaaggtcaaggccaaaggcaaattcaaggccagactgtgacaaacccagggctgaggcctgccccatgaagaggctgagccccctgaaacccctgccccttgttggtacattccagaggcgcaggggcctgggggatatgaagctagggaagcccctgcttcgattccccactgcccttgtcctggatccaacaccaaataaaaagaaacaagtgaagta

SEQ ID NO: 348683 - DNA, 1504 bp, Homo sapiens
ctaagcgttttgagctgcattgctgcgtgcttgatgcttgtcccttttgatcgtggtgatttagagggtgaactcactggaacggggatgcttgcatgtgtaatcttactaagagctaatagaaaggccagaaccacaaatatcgcgatatttgtggttctggccctagaagaatgtggtggggcccaggcctctgtcctttttgtccttcccagtagggccccatctcaagttgaatagtgcagggtggcccagggctgcttccaggacttgcctgtcctccctgagtttggatgggagagacacaagggcctggacctcagttttctgttctctgccccagctcagtgcacctgtgcaacaactccatccagaagcacctggagaactcatgccatcggcatccactgcttccgccagaaccacatgtggtctagccagaggttccaggcccacctgcaggagatgggtgccccaaatgcttggtccaccatcatcgtgcctggcatgaaggatgctgtgatccacgcacttcagacctcccaggacaccgtgcagtgtcggaaggccagctttgagctctatggcgctgacttcgtgttcggggaggacttccagccctggctgattgagatcaacgccagccccacgatggcaccctccacagcagtcactgcccggctctgtgctggcgtgcaagctgacaccctgcgcgtggtcattgaccggatgctggaccgcaactgtgacacaggagcctttgagctcatctataagcagcccgtcaccacttccccagcctccacaccaaggcccagctgccttctccccatgtactccgacaccagggccaggtcctcagacgacagcacagcaagctggtgggcactaaggccctgtcgaccacaggcaaggccttgaggactctacccacggctaaggtcttcatttccctcccaccgaaccttgatttcaaggtggcacccagcatcctgaagccaagaaaggtgggcctcgacctgtgactcacacccagtggacagtgctgagcacggggtcagggctggagggcacaggcagagggcagctcccaggctggctggcaccccaagggaagagctggtctccctcagaagccccttcctccacagacttctgatcatctccctcttctcccctcctttcacaccgaggctcctgctctcctgtgcctccgaggcccccagctggaagtgccttgttgcctctgccctttgaagtcggaacaattcctagcacctgtcggaaggtcaaggccaaaggcaaattcaaggccagactgtgacaaacccagggctgaggcctgccccatgaagaggctgagccccctgaaacccctgccccttgttggtacattccagaggcgcaggggcctgggggatatgaagctagggaagcccctgcttcgattccccactgcccttgtcctggatccaacaccaaataaaaagaaacaagtgaagta

SEQ ID NO: 348684 - DNA, 1457 bp, Homo sapiens
tacagcgcttataaagtcaggaggcaaagacaggcttatagctgatgtactcagtatgagctaacattatggtatggctgccagaaccacaaatatcgcgatatttgtggttctggccctagaagaatgtggtggggcccaggcctctgtcctttttgtccttcccagtagggccccatctcaagttgaatagtgcagggtggcccagggctgcttccaggacttgcctgtcctccctgagtttggatgggagagacacaagggcctggacctcagttttctgttctctgccccagctcagtgcacctgtgcaacaactccatccagaagcacctggagaactcatgccatcggcatccactgcttccgccagaaccacatgtggtctagccagaggttccaggcccacctgcaggagatgggtgccccaaatgcttggtccaccatcatcgtgcctggcatgaaggatgctgtgatccacgcacttcagacctcccaggacaccgtgcagtgtcggaaggccagctttgagctctatggcgctgacttcgtgttcggggaggacttccagccctggctgattgagatcaacgccagccccacgatggcaccctccacagcagtcactgcccggctctgtgctggcgtgcaagctgacaccctgcgcgtggtcattgaccggatgctggaccgcaactgtgacacaggagcctttgagctcatctataagcagcccgtcaccacttccccagcctccacaccaaggcccagctgccttctccccatgtactccgacaccagggccaggtcctcagacgacagcacagcaagctggtgggcactaaggccctgtcgaccacaggcaaggccttgaggactctacccacggctaaggtcttcatttccctcccaccgaaccttgatttcaaggtggcacccagcatcctgaagccaagaaaggtgggcctcgacctgtgactcacacccagtggacagtgctgagcacggggtcagggctggagggcacaggcagagggcagctcccaggctggctggcaccccaagggaagagctggtctccctcagaagccccttcctccacagacttctgatcatctccctcttctcccctcctttcacaccgaggctcctgctctcctgtgcctccgaggcccccagctggaagtgccttgttgcctctgccctttgaagtcggaacaattcctagcacctgtcggaaggtcaaggccaaaggcaaattcaaggccagactgtgacaaacccagggctgaggcctgccccatgaagaggctgagccccctgaaacccctgccccttgttggtacattccagaggcgcaggggcctgggggatatgaagctagggaagcccctgcttcgattccccactgcccttgtcctggatccaacaccaaataaaaagaaacaagtgaagta

SEQ ID NO: 348685 - DNA, 1817 bp, Homo sapiens
gtgtttccatgaataccttccacaagggacacaggcttgaccttaggggctgatatggagccccactcctggtgtactggttgggctcaatttcttgggcaacagagggtataagctagggctatttgataaaggggaaaagtgcctgatggttgttataaagtggaagaataatggggtagagaatgggtttgagttcacgggctttttttcccctattaatagacaagtgtgtttttttttttttcttctgtgttcgtccgcagtggccaagttgaatgatgctgcccggggctctgccagaaccacaaatatcgcgatatttgtggttctggccctagaagaatgtggtggggcccaggcctctgtcctttttgtccttcccagtagggccccatctcaagttgaatagtgcagggtggcccagggctgcttccaggacttgcctgtcctccctgagtttggatgggagagacacaagggcctggacctcagttttctgttctctgccccagctcagtgcacctgtgcaacaactccatccagaagcacctggagaactcatgccatcggcatccactgcttccgccagaaccacatgtggtctagccagaggttccaggcccacctgcaggagatgggtgccccaaatgcttggtccaccatcatcgtgcctggcatgaaggatgctgtgatccacgcacttcagacctcccaggacaccgtgcagtgtcggaaggccagctttgagctctatggcgctgacttcgtgttcggggaggacttccagccctggctgattgagatcaacgccagccccacgatggcaccctccacagcagtcactgcccggctctgtgctggcgtgcaagctgacaccctgcgcgtggtcattgaccggatgctggaccgcaactgtgacacaggagcctttgagctcatctataagcagcctgctgtggaggtgcctcaatatgtgggcatccggctcctggtagagggcttcaccatcaagaagcccatggcgatgtgtcatcggcggatgggggtccgccagcagtccctctgctgacccagcgaggctctggggaagcccgtcaccacttccccagcctccacaccaaggcccagctgccttctccccatgtactccgacaccagggccaggtcctcagacgacagcacagcaagctggtgggcactaaggccctgtcgaccacaggcaaggccttgaggactctacccacggctaaggtcttcatttccctcccaccgaaccttgatttcaaggtggcacccagcatcctgaagccaagaaaggtgggcctcgacctgtgactcacacccagtggacagtgctgagcacggggtcagggctggagggcacaggcagagggcagctcccaggctggctggcaccccaagggaagagctggtctccctcagaagccccttcctccacagacttctgatcatctccctcttctcccctcctttcacaccgaggctcctgctctcctgtgcctccgaggcccccagctggaagtgccttgttgcctctgccctttgaagtcggaacaattcctagcacctgtcggaaggtcaaggccaaaggcaaattcaaggccagactgtgacaaacccagggctgaggcctgccccatgaagaggctgagccccctgaaacccctgccccttgttggtacattccagaggcgcaggggcctgggggatatgaagctagggaagcccctgcttcgattccccactgcccttgtcctggatccaacaccaaataaaaagaaacaagtgaagta

SEQ ID NO: 348686 - DNA, 1490 bp, Homo sapiens
gtgtttccatgaataccttccacaagggacacaggcttgaccttaggggctgatatggagccccactcctggtgtactggttgggctcaatttcttgggcaacagagggtataagctagggctatttgataaaggggaaaagtgcctgatggttgttataaagtggaagaataatggggtagagaatgggtttgagttcacgggctttttttcccctattaatagacaagtgtgtttttttttttttcttctgtgttcgtccgcagtggccaagttgaatgatgctgcccggggctctgccagaaccacaaatatcgcgatatttgtggttctggccctagaagaatgtggtggggcccaggcctctgtcctttttgtccttcccagtagggccccatctcaagttgaatagtgcagggtggcccagggctgcttccaggacttgcctgtcctccctgagtttggatgggagagacacaagggcctggacctcagttttctgttctctgccccagctcagtgcacctgtgcaacaactccatccagaagcacctggagaactcatgccatcggcatccactgcttccgccagaaccacatgtggtctagccagaggttccaggcccacctgcaggagatgggtgccccaaatgcttggtccaccatcatcgtgcctggcatgaaggatgctgtgatccacgcacttcagacctcccaggacaccgtgcagtgtcggaaggccagctttgagctctatggcgctgacttcgtgttcggggaggacttccagccctggctgattgagatcaacgccagccccacgatggcaccctccacagcagtcactgcccggctctgtgctggcgtgcaagctgacaccctgcgcgtggtcattgaccggatgctggaccgcaactgtgacacaggagcctttgagctcatctataagcagcccgtcaccacttccccagcctccacaccaaggcccagctgccttctccccatgtactccgacaccagggccaggtcctcagacgacagcacagcaagctggtgggcactaaggccctgtcgaccacaggcaaggccttgaggactctacccacggctaaggtcttcatttccctcccaccgaaccttgatttcaaggtggcacccagcatcctgaagccaagaaaggctcctgctctcctgtgcctccgaggcccccagctggaagtgccttgttgcctctgccctttgaagtcggaacaattcctagcacctgtcggaaggtcaaggccaaaggcaaattcaaggccagactgtgacaaacccagggctgaggcctgccccatgaagaggctgagccccctgaaacccctgccccttgttggtacattccagaggcgcaggggcctgggggatatgaagctagggaagcccctgcttcgattccccactgcccttgtcctggatccaacaccaaataaaaagaaacaagtgaagta

SEQ ID NO: 348687 - DNA, 1263 bp, Homo sapiens
gtgtttccatgaataccttccacaagggacacaggcttgaccttaggggctgatatggagccccactcctggtgtactggttgggctcaatttcttgggcaacagagggtataagctagggctatttgataaaggggaaaagtgcctgatggttgttataaagtggaagaataatggggtagagaatgggtttgagttcacgggctttttttcccctattaatagacaagtgtgtttttttttttttcttctgtgttcgtccgcagtggccaagttgaatgatgctgcccggggctctgccagaaccacaaatatcgcgatatttgtggttctggccctagaagaatgtggtggggcccaggcctctgtcctttttgtccttcccagtagggccccatctcaagttgaatagtgcagggtggcccagggctgcttccaggacttgcctgtcctccctgagtttggatgggagagacacaagggcctggacctcagttttctgttctctgccccagctcagtgcacctgtgcaacaactccatccagaagcacctggagaactcatgccatcggcatccactgcttccgccagaaccacatgtggtctagccagaggttccaggcccacctgcaggagatgggtgccccaaatgcttggtccaccatcatcgtgcctggcatgaaggatgctgtgatccacgcacttcagacctcccaggacaccgtgcagtgtcggaaggccagctttgagctctatggcgctgacttcgtgttcggggaggacttccagccctggctgattgagatcaacgccagccccacgatggcaccctccacagcagtcactgcccggctctgtgctggcgtgcaagctgacaccctgcgcgtggtcattgaccggatgctggaccgcaactgtgacacaggagcctttgagctcatctataagcaggctcctgctctcctgtgcctccgaggcccccagctggaagtgccttgttgcctctgccctttgaagtcggaacaattcctagcacctgtcggaaggtcaaggccaaaggcaaattcaaggccagactgtgacaaacccagggctgaggcctgccccatgaagaggctgagccccctgaaacccctgccccttgttggtacattccagaggcgcaggggcctgggggatatgaagctagggaagcccctgcttcgattccccactgcccttgtcctggatccaacaccaaataaaaagaaacaagtgaagta

SEQ ID NO: 348688 - DNA, 1532 bp, Homo sapiens
  misc_feature (1029)..(1029): n is a, c, g, or t
gtgtttccatgaataccttccacaagggacacaggcttgaccttaggggctgatatggagccccactcctggtgtactggttgggctcaatttcttgggcaacagagggtataagctagggctatttgataaaggggaaaagtgcctgatggttgttataaagtggaagaataatggggtagagaatgggtttgagttcacgggctttttttcccctattaatagacaagtgtgtttttttttttttcttctgtgttcgtccgcagtggccaagttgaatgatgctgcccggggctctgccagaaccacaaatatcgcgatatttgtggttctggccctagaagaatgtggtggggcccaggcctctgtcctttttgtccttcccagtagggccccatctcaagttgaatagtgcagggtggcccagggctgcttccaggacttgcctgtcctccctgagtttggatgggagagacacaagggcctggacctcagttttctgttctctgccccagctcagtgcacctgtgcaacaactccatccagaagcacctggagaactcatgccatcggcatccactgcttccgccagaaccacatgtggtctagccagaggttccaggcccacctgcaggagatgggtgccccaaatgcttggtccaccatcatcgtgcctggcatgaaggatgctgtgatccacgcacttcagacctcccaggacaccgtgcagtgtcggaaggccagctttgagctctatggcgctgacttcgtgttcggggaggacttccagccctggctgattgagatcaacgccagccccacgatggcaccctccacagcagtcactgcccggctctgtgctggcgtgcaagctgacaccctgcgcgtggtcattgaccggatgctggaccgcaactgtgacacaggagcctttgagctcatctataagcagggcccagctcctaacatgcaggtgtcaccagagagaaatgcaccactgtgcccagcaccatagctctggctcagagngtttgcctgagaaagcagcagacagaaaacagaaggtgcgagttgctcccgaaggaactgacttcatgtgcaacagagctcggagaagtccaaggctaagcacactctccagaacagtggaggttgtgctgaaaggcaactgggaggcgacggagagcctgggaggtgcgggctacactggaggccagcaagtctgccagagagaaacagaaaaaaagacaggtgggaagagctctcctggggtcagaacaaagcttaatatcttctttgacaaagaacgtaacatcaaaatagccaactatgggtttagttcaacatttgcaaagagagacaacactgaaaagggaacgtttgatgggactctcccttatgcaggcccagaactcttcttgggccatggataccaatgccctgccatcaacgtttggagccttggcatcatcgtatgcaaaatggtggctggggccctgccattttatgagcagaactgtaaggatatactg

SEQ ID NO: 348689 - DNA, 1184 bp, Homo sapiens
gtgtttccatgaataccttccacaagggacacaggcttgaccttaggggctgatatggagccccactcctggtgtactggttgggctcaatttcttgggcaacagagggtataagctagggctatttgataaaggggaaaagtgcctgatggttgttataaagtggaagaataatggggtagagaatgggtttgagttcacgggctttttttcccctattaatagacaagtgtgtttttttttttttcttctgtgttcgtccgcagtggccaagttgaatgatgctgcccggggctctgccagaaccacaaatatcgcgatatttgtggttctggccctagaagaatgtggtggggcccaggcctctgtcctttttgtccttcccagtagggccccatctcaagttgaatagtgcagggtggcccagggctgcttccaggacttgcctgtcctccctgagtttggatgggagagacacaagggcctggacctcagttttctgttctctgccccagctcagtgcacctgtgcaacaactccatccagaagcacctggagaactcatgccatcggcatccactgcttccgccagaaccacatgtggtctagccagaggttccaggcccacctgcaggagatgggtgccccaaatgcttggtccaccatcatcgtgcctggcatgaaggatgctgtgatccacgcacttcagacctcccaggacaccgtgcagtgtcggaaggccagctttgagctctatggcgctgacttcgtgttcggggaggacttccagccctggctgattgagatcaacgccagccccacgatggcaccctccacagcagtcactgcccggctctgtgctggcgtgcaagctgacaccctgcgcgtggtcattgaccggatgctggaccgcaactgtgacacaggagcctttgagctcatctataagcaggtgaggaggttgggcccaggcaggaccccagagagtctgcaccctcttccaggcagccctgcagtggagcataggactctgcagtcagacccagtttaagacccagattcaagtcctggtcctgctaaggtgacctcacttccttgagcctcagtttcctgatctttgaaatggggatattattaccatctttctcatgggaatgggagaataaaatgaattcatgtatgag

SEQ ID NO: 348690 - DNA, 2416 bp, Homo sapiens
ttgctattgtcattattaccatgcatatttatttctctacttatttatagtctgtttatttctcctaatggaatataaaaatttcctgatggcagagtccataactgtctggttcacctttatatcccctatgtctggcacttatgcaatacttattgaagaagtatccttctctcacattgcagcagaagaagatctttacaatccaaggctgctacccggtgatccggtgtctcttgcgccggaggggctgggtggagaagaagatggtccatcgctcaggccccaccctgctgccaccccagaaggatctggatagctcagcgatgggtgacagtgacaccactgaggatgaggatgaagatgaggacgaggagttccagccatcacagctgttcgacttcgatgatttactgaaatttgatgacctagatggaacacatgctctgatggtgggtctatgtctcaatctccggaatttgccgtggtttgatgaggttgatgccaactccttcttcccacgctgctactgcctgggggctgaggatgacaaaaaagccttcatagaggacttctggctgactgctgcccgcaacgttctcaagctggtggtgaagtctgagtggaagtcataccctattcaggcagtagaggaagaggcctcaggagacaagcagcccaagaaacaggagaaaaacccagtgttggtgtccccagagtttgtggatgaagctctgtgtgcgtgcgaggagtaccttagcaacttggcccacatggacatcgacaaggacctggaggccccgctgtacctcacccccgagggctggtccctcttcctccagcgctactaccaagtggtccacgaaggggcagaactcaggcacctcgacactcaggtccagcgctgtgaggacatcctgcagcagctgcaggccgtggtaccccagatagacatggaaggggatcgcaacatctggatcgtgaagccaggagccaagtcccgcggacgaggcatcatgtgcatggaccacctggaggagatgctgaagctggtgaacggcaaccccgtggtgatgaaggacggcaagtgggtggtgcagaagtatattgagcggcccctcctcatctttggcaccaagtttgacctcagacagtggttcctggtaactgactggaacccacttaccgtgtggttctaccgcgacagctatatccgcttttccacgcagcccttctccctgaagaacctggacaactcagtgcacctgtgcaacaactccatccagaagcacctggagaactcatgccatcggcatccactgcttccgccagaaccacatgtggtctagccagaggttccaggcccacctgcaggagatgggtgccccaaatgcttggtccaccatcatcgtgcctggcatgaaggatgctgtgatccacgcacttcagacctcccaggacaccgtgcagtgtcggaaggccagctttgagctctatggcgctgacttcgtgttcggggaggacttccagccctggctgattgagatcaacgccagccccacgatggcaccctccacagcagtcactgcccggctctgtgctggcgtgcaagctgacaccctgcgcgtggtcattgaccggatgctggaccgcaactgtgacacaggagcctttgagctcatctataagcagcccgtcaccacttccccagcctccacaccaaggcccagctgccttctccccatgtactccgacaccagggccaggtcctcagacgacagcacagcaagctggtgggcactaaggccctgtcgaccacaggcaaggccttgaggactctacccacggctaaggtcttcatttccctcccaccgaaccttgatttcaaggtggcacccagcatcctgaagccaagaaaggtgggcctcgacctgtgactcacacccagtggacagtgctgagcacggggtcagggctggagggcacaggcagagggcagctcccaggctggctggcaccccaagggaagagctggtctccctcagaagccccttcctccacagacttctgatcatctccctcttctcccctcctttcacaccgaggctcctgctctcctgtgcctccgaggcccccagctggaagtgccttgttgcctctgccctttgaagtcggaacaattcctagcacctgtcggaaggtcaaggccaaaggcaaattcaaggccagactgtgacaaacccagggctgaggcctgccccatgaagaggctgagccccctgaaacccctgccccttgttggtacattccagaggcgcaggggcctgggggatatgaagctagggaagcccctgcttcgattccccactgcccttgtcctggatccaacaccaaataaaaagaaacaagtgaagta

SEQ ID NO: 348691 - DNA, 2189 bp, Homo sapiens
ctcagcctcccgagtggctgggactacaggcgcccgccatcacgcctggctagttttttgtatttttagtagagacggggtttcactgtgttggccgggatggtctcgatctcctgacctcatgatccatccacctcagcctcccaaagtgctgggattacaggcgtcagccaccgtgaccagcctgaaacaggagcaagttctaaactcaggctctagagtcagaaaagtgtagagtcaggttctggatccaaaatggggcaagtcatgatcaggttctggaaccagaacaggcctcaagcctaggggctgagcagggtatcccctggcctgggagcagaggacttctggctgactgctgcccgcaacgttctcaagctggtggtgaagtctgagtggaagtcataccctattcaggcagtagaggaagaggcctcaggagacaagcagcccaagaaacaggagaaaaacccagtgttggtgtccccagagtttgtggatgaagctctgtgtgcgtgcgaggagtaccttagcaacttggcccacatggacatcgacaaggacctggaggccccgctgtacctcacccccgagggctggtccctcttcctccagcgctactaccaagtggtccacgaaggggcagaactcaggcacctcgacactcaggtccagcgctgtgaggacatcctgcagcagctgcaggccgtggtaccccagatagacatggaaggggatcgcaacatctggatcgtgaagccaggagccaagtcccgcggacgaggcatcatgtgcatggaccacctggaggagatgctgaagctggtgaacggcaaccccgtggtgatgaaggacggcaagtgggtggtgcagaagtatattgagcggcccctcctcatctttggcaccaagtttgacctcagacagtggttcctggtaactgactggaacccacttaccgtgtggttctaccgcgacagctatatccgcttttccacgcagcccttctccctgaagaacctggacaactcagtgcacctgtgcaacaactccatccagaagcacctggagaactcatgccatcggcatccactgcttccgccagaaccacatgtggtctagccagaggttccaggcccacctgcaggagatgggtgccccaaatgcttggtccaccatcatcgtgcctggcatgaaggatgctgtgatccacgcacttcagacctcccaggacaccgtgcagtgtcggaaggccagctttgagctctatggcgctgacttcgtgttcggggaggacttccagccctggctgattgagatcaacgccagccccacgatggcaccctccacagcagtcactgcccggctctgtgctggcgtgcaagctgacaccctgcgcgtggtcattgaccggatgctggaccgcaactgtgacacaggagcctttgagctcatctataagcagcccgtcaccacttccccagcctccacaccaaggcccagctgccttctccccatgtactccgacaccagggccaggtcctcagacgacagcacagcaagctggtgggcactaaggccctgtcgaccacaggcaaggccttgaggactctacccacggctaaggtcttcatttccctcccaccgaaccttgatttcaaggtggcacccagcatcctgaagccaagaaaggtgggcctcgacctgtgactcacacccagtggacagtgctgagcacggggtcagggctggagggcacaggcagagggcagctcccaggctggctggcaccccaagggaagagctggtctccctcagaagccccttcctccacagacttctgatcatctccctcttctcccctcctttcacaccgaggctcctgctctcctgtgcctccgaggcccccagctggaagtgccttgttgcctctgccctttgaagtcggaacaattcctagcacctgtcggaaggtcaaggccaaaggcaaattcaaggccagactgtgacaaacccagggctgaggcctgccccatgaagaggctgagccccctgaaacccctgccccttgttggtacattccagaggcgcaggggcctgggggatatgaagctagggaagcccctgcttcgattccccactgcccttgtcctggatccaacaccaaataaaaagaaacaagtgaagta

SEQ ID NO: 348692 - DNA, 2189 bp, Homo sapiens
cccgggagaggaggcggcgacgcggaggggcgcgggatcaggggccctgggagggcgagcgcggcgaggggcgcatgcagggccccgacgcgccactgctcctgagcgcgagggagctggggcccgggcgccggggctcggcctcctggtaccgccaggagggcggcgcggtgtgcaactggctgcggaagccgcagccgctcgagccacgcaccagtttcccctcggcgcgccgctccgagttccgtccacccaggaggctgccatgggccggccctgcctccgcccagtccgaggagggtcacgcaggcggcagatgccaggcgggcagccccgcccctgcgcgccgcctcagcggcgccttcaagacgctggtcccaggcacccacgcccagggcgcctcggatacccaccccctcggccccccgcacaccccggtcctcgatgacccctctccgcaggatggtttcccggtcctctggcgaggatcctccaaggcgtctcacatgaaccggctcagaaacgccaaaatctacgtggagagagctgtcaagcagaagaagatctttacaatccaaggctgctacccggtgatccggtgtctcttgcgccggaggggctgggtggagaagaagatggtccatcgctcaggccccaccctgctgccaccccagaaggatctggatagctcagcgatgggtgacagtgacaccactgaggatgaggatgaagatgaggacgaggagttccagccatcacagctgttcgacttcgatgatttactgaaatttgatgacctagatggaacacatgctctgatgcgaaggggcagaactcaggcacctcgacactcaggtccagcgctgtgaggacatcctgcagcagctgcaggccgtggtaccccagatagacatggaaggggatcgcaacatctggatcgtgaagccaggagccaagtcccgcggacgaggcatcatgtgcatggaccacctggaggagatgctgaagctggtgaacggcaaccccgtggtgatgaaggacggcaagtgggtggtgcagaagtatattgagcggcccctcctcatctttggcaccaagtttgacctcagacagtggttcctggtaactgactggaacccacttaccgtgtggttctaccgcgacagctatatccgcttttccacgcagcccttctccctgaagaacctggacaactcagtgcacctgtgcaacaactccatccagaagcacctggagaactcatgccatcggcatccactgcttccgccagaaccacatgtggtctagccagaggttccaggcccacctgcaggagatgggtgccccaaatgcttggtccaccatcatcgtgcctggcatgaaggatgctgtgatccacgcacttcagacctcccaggacaccgtgcagtgtcggaaggccagctttgagctctatggcgctgacttcgtgttcggggaggacttccagccctggctgattgagatcaacgccagccccacgatggcaccctccacagcagtcactgcccggctctgtgctggcgtgcaagctgacaccctgcgcgtggtcattgaccggatgctggaccgcaactgtgacacaggagcctttgagctcatctataagcagcccgtcaccacttccccagcctccacaccaaggcccagctgccttctccccatgtactccgacaccagggccaggtcctcagacgacagcacagcaagctggtgggcactaaggccctgtcgaccacaggcaaggccttgaggactctacccacggctaaggtcttcatttccctcccaccgaaccttgatttcaaggtggcacccagcatcctgaagccaagaaaggctcctgctctcctgtgcctccgaggcccccagctggaagtgccttgttgcctctgccctttgaagtcggaacaattcctagcacctgtcggaaggtcaaggccaaaggcaaattcaaggccagactgtgacaaacccagggctgaggcctgccccatgaagaggctgagccccctgaaacccctgccccttgttggtacattccagaggcgcaggggcctgggggatatgaagctagggaagcccctgcttcgattccccactgcccttgtcctggatccaacaccaaataaaaagaaacaagtgaagta

SEQ ID NO: 348693 - DNA, 1469 bp, Homo sapiens
tgggagaatggaatagcaggtagatagatgggtaggtggatctgtggaaggataggtaggcagggagtggatagatggatggggactgaggagatgctgaagctggtgaacggcaaccccgtggtgatgaaggacggcaagtgggtggtgcagaagtatattgagcggcccctcctcatctttggcaccaagtttgacctcagacagtggttcctggtaactgactggaacccacttaccgtgtggttctaccgcgacagctatatccgcttttccacgcagcccttctccctgaagaacctggacaactcagtgcacctgtgcaacaactccatccagaagcacctggagaactcatgccatcggcatccactgcttccgccagaaccacatgtggtctagccagaggttccaggcccacctgcaggagatgggtgccccaaatgcttggtccaccatcatcgtgcctggcatgaaggatgctgtgatccacgcacttcagacctcccaggacaccgtgcagtgtcggaaggccagctttgagctctatggcgctgacttcgtgttcggggaggacttccagccctggctgattgagatcaacgccagccccacgatggcaccctccacagcagtcactgcccggctctgtgctggcgtgcaagctgacaccctgcgcgtggtcattgaccggatgctggaccgcaactgtgacacaggagcctttgagctcatctataagcagcccgtcaccacttccccagcctccacaccaaggcccagctgccttctccccatgtactccgacaccagggccaggtcctcagacgacagcacagcaagctggtgggcactaaggccctgtcgaccacaggcaaggccttgaggactctacccacggctaaggtcttcatttccctcccaccgaaccttgatttcaaggtggcacccagcatcctgaagccaagaaaggtgggcctcgacctgtgactcacacccagtggacagtgctgagcacggggtcagggctggagggcacaggcagagggcagctcccaggctggctggcaccccaagggaagagctggtctccctcagaagccccttcctccacagacttctgatcatctccctcttctcccctcctttcacaccgaggctcctgctctcctgtgcctccgaggcccccagctggaagtgccttgttgcctctgccctttgaagtcggaacaattcctagcacctgtcggaaggtcaaggccaaaggcaaattcaaggccagactgtgacaaacccagggctgaggcctgccccatgaagaggctgagccccctgaaacccctgccccttgttggtacattccagaggcgcaggggcctgggggatatgaagctagggaagcccctgcttcgattccccactgcccttgtcctggatccaacaccaaataaaaagaaacaagtgaagta

SEQ ID NO: 348694 - DNA, 1075 bp, Homo sapiens
cctggagctctgtgactctaggtactgactcagaggtgggctttccatttctcagctcagaaacgcctctttgaccaggtgcctcagaaagtaattccacccatctctactctgggtcccgctgggccaaggattccagtaccactgactgagtgggccttgtctcctcttcttgcccacagcctgctgtggaggtgcctcaatatgtgggcatccggctcctggtagagggcttcaccatcaagaagcccatggcgatgtgtcatcggcggatgggggtccgccagcagtccctctgctgacccagcgaggctctggggaaggcaaggactcggggacccctacccacagcccgtcaccacttccccagcctccacaccaaggcccagctgccttctccccatgtactccgacaccagggccaggtcctcagacgacagcacagcaagctggtgggcactaaggccctgtcgaccacaggcaaggccttgaggactctacccacggctaaggtcttcatttccctcccaccgaaccttgatttcaaggtggcacccagcatcctgaagccaagaaaggtgggcctcgacctgtgactcacacccagtggacagtgctgagcacggggtcagggctggagggcacaggcagagggcagctcccaggctggctggcaccccaagggaagagctggtctccctcagaagccccttcctccacagacttctgatcatctccctcttctcccctcctttcacaccgaggctcctgctctcctgtgcctccgaggcccccagctggaagtgccttgttgcctctgccctttgaagtcggaacaattcctagcacctgtcggaaggtcaaggccaaaggcaaattcaaggccagactgtgacaaacccagggctgaggcctgccccatgaagaggctgagccccctgaaacccctgccccttgttggtacattccagaggcgcaggggcctgggggatatgaagctagggaagcccctgcttcgattccccactgcccttgtcctggatccaacaccaaataaaaagaaacaagtgaagta

SEQ ID NO: 348695 - DNA, 1644 bp, Homo sapiens
gatccactcctcattcagccctcccatgggcctggcatgtagccgagcaccctggagagggcagactaagaagacatggtccgtccctgcctgtgaggagttcaggtctctgaggaggaggaagcagtgaaactgggctttacacatggcctgagaacagcttaggcctgaacataaggaacagcttggagtggaggggacacagaggaaccctcactatcatgcatgccaacccaaccactgcctgccctttcccttctggatttagctcgtgtctccaggctcctagtcctgtaatccagggacccatcagcgagggattcagggaagcagaggcagctctccaggaaggaggaaaatccctgcctcttccagagagactcccccattgctgtctcttgtgtgtgtcatgcacaaggaaggcttggttgtgtgccaggataaggggcacaagggcctcgggtgtggccagagaccccatgcttaagcttttatggtataggtcaggctgcaggggtttgagggcctcagttgtatatcagaatcttcagagcactgcgatgttcaggggtgagtcaggtctgtagatgtgcacggggtcttctgaagggtcagtttctgtaatcactttcaggtgtgtcagggccttgtgcagtaacagtgcacacagaagttagtgtttctgtgggctaagggttgtagctctgtatcaggattctgggagtgggtctggatttctggtgtgtggacttaagaagctgtgtcagacttgggggaggggcgttcatgtataactgggttcacataggccaagactcccaggtgcattttaggcagagcctcaggtgtgttagaggtcccaggggcagagaggctataggtgctgtcagaggccttggggacatttagggcagagcctcgagtgacaggtcctgggacagtgggagccaagggcaagtgctagagttgcagtgaatttagagcaaagcctcagctaagtgacacatcccagggcagtaggggatctatctaggttcgtgctgggcctcaggtaagtgacaggccttaggacaatgggggctgtggcatgcgtcaggttacctgccttgatatgggatcgtgacaggcccctccctatgtgcaggagacaagcagcccaagaaacaggagaaaaacccagtgttggtgtccccagagtttgtggatgaagctctgtgtgcgtgcgaggagtaccttagcaacttggcccacatggacatcgacaaggacctggaggccccgctgtacctcacccccgagggctggtccctcttcctccagcgctactaccaagtggtccagtgagtcccctgcagctgggactttgggctgtgggcaggtgcttagggatagaccctttctgtctcgtgcagcccctaccccttccccaagcctcccgctcgtttaccccgctgttctgctcaggaaccctcgaggactcccactgcctccgtgatagggtctgggccacttttcttggttcttggcatagcatagtcactaagagcatggactgtgccaccaaatggacagcacattacccaaagtgtgtgttgtgtggatgttaattctacaggaagtaaatagattttatgaaaaaaaaaa

SEQ ID NO: 348696 - DNA, 1800 bp, Homo sapiens
gatccactcctcattcagccctcccatgggcctggcatgtagccgagcaccctggagagggcagactaagaagacatggtccgtccctgcctgtgaggagttcaggtctctgaggaggaggaagcagtgaaactgggctttacacatggcctgagaacagcttaggcctgaacataaggaacagcttggagtggaggggacacagaggaaccctcactatcatgcatgccaacccaaccactgcctgccctttcccttctggatttagctcgtgtctccaggctcctagtcctgtaatccagggacccatcagcgagggattcagggaagcagaggcagctctccaggaaggaggaaaatccctgcctcttccagagagactcccccattgctgtctcttgtgtgtgtcatgcacaaggaaggcttggttgtgtgccaggataaggggcacaagggcctcgggtgtggccagagaccccatgcttaagcttttatggtataggtcaggctgcaggggtttgagggcctcagttgtatatcagaatcttcagagcactgcgatgttcaggggtgagtcaggtctgtagatgtgcacggggtcttctgaagggtcagtttctgtaatcactttcaggtgtgtcagggccttgtgcagtaacagtgcacacagaagttagtgtttctgtgggctaagggttgtagctctgtatcaggattctgggagtgggtctggatttctggtgtgtggacttaagaagctgtgtcagacttgggggaggggcgttcatgtataactgggttcacataggccaagactcccaggtgcattttaggcagagcctcaggtgtgttagaggtcccaggggcagagaggctataggtgctgtcagaggccttggggacatttagggcagagcctcgagtgacaggtcctgggacagtgggagccaagggcaagtgctagagttgcagtgaatttagagcaaagcctcagctaagtgacacatcccagggcagtaggggatctatctaggttcgtgctgggcctcaggtaagtgacaggccttaggacaatgggggctgtggcatgcgtcaggttacctgccttgatatgggatcgtgacaggcccctccctatgtgcaggagacaagcagcccaagaaacaggagaaaaacccagtgttggtgtccccagagtttgtggatgaagctctgtgtgcgtgcgaggagtaccttagcaacttggcccacatggacatcgacaaggacctggaggccccgctgtacctcacccccgagggctggtccctcttcctccagcgctactaccaagtggtccacgaaggggcagaactcaggcacctcgacactcaggtccagcgctgtgaggacatcctgcagcagctgcaggccgtggtaccccagatagacatggaaggggatcgcaacatctggatcgtgaagccaggagccaagtcccgcggacgaggcatcatgtgcatggaccacctggaggagatgctgaagctggtgaacggcaaccccgtggtgatgaaggacggcaagtgggtggtgcagaagtatattgagcggcccctcctcatctttggcaccaagtttgacctcagacagtggttcctggtaactgactggaacccacttaccgtgtggttctaccgcgacagctatatggaaaccaaagcggagatgctgtccgcttacaaaacttaactatagggttagggccccaggttctgggttgacaaatatcaagacgttgcagcatctccgctttggaaa

SEQ ID NO: 348697 - DNA, 999 bp, Homo sapiens
ttgctattgtcattattaccatgcatatttatttctctacttatttatagtctgtttatttctcctaatggaatataaaaatttcctgatggcagagtccataactgtctggttcacctttatatcccctatgtctggcacttatgcaatacttattgaagaagtatccttctctcacattgcagcagaagaagatctttacaatccaaggctgctacccggtgatccggtgtctcttgcgccggaggggctgggtggagaagaagatggtccatcgctcaggccccaccctgctgccaccccagaaggatctggatagctcagcgatgggtgacagtgacaccactgaggatgaggatgaagatgaggacgaggagttccagccatcacagctgttcgacttcgatgatttactgaaatttgatgacctagatggaacacatgctctgatggtgggtctatgtctcaatctccggaatttgccgtggtttgatgaggttgatgccaactccttcttcccacgctgctactgcctgggggctgaggatgacaaaaaagccttcatagaggacttctggctgactgctgcccgcaacgttctcaagctggtggtgaagtctgagtggaagtcataccctattcaggcagtagaggaagaggcctcaggtaagtactgtggttacctccactctcccacccatttatcctccgaggcccccagctggaagtgccttgttgcctctgccctttgaagtcggaacaattcctagcacctgtcggaaggtcaaggccaaaggcaaattcaaggccagactgtgacaaacccagggctgaggcctgccccatgaagaggctgagccccctgaaacccctgccccttgttggtacattccagaggcgcaggggcctgggggatatgaagctagggaagcccctgcttcgattccccactgcccttgtcctggatccaacaccaaataaaaagaaacaagtgaagta

SEQ ID NO: 348698 - DNA, 1408 bp, Homo sapiens
gatccactcctcattcagccctcccatgggcctggcatgtagccgagcaccctggagagggcagactaagaagacatggtccgtccctgcctgtgaggagttcaggtctctgaggaggaggaagcagtgaaactgggctttacacatggcctgagaacagcttaggcctgaacataaggaacagcttggagtggaggggacacagaggaaccctcactatcatgcatgccaacccaaccactgcctgccctttcccttctggatttagctcgtgtctccaggctcctagtcctgtaatccagggacccatcagcgagggattcagggaagcagaggcagctctccaggaaggaggaaaatccctgcctcttccagagagactcccccattgctgtctcttgtgtgtgtcatgcacaaggaaggcttggttgtgtgccaggataaggggcacaagggcctcgggtgtggccagagaccccatgcttaagcttttatggtataggtcaggctgcaggggtttgagggcctcagttgtatatcagaatcttcagagcactgcgatgttcaggggtgagtcaggtctgtagatgtgcacggggtcttctgaagggtcagtttctgtaatcactttcaggtgtgtcagggccttgtgcagtaacagtgcacacagaagttagtgtttctgtgggctaagggttgtagctctgtatcaggattctgggagtgggtctggatttctggtgtgtggacttaagaagctgtgtcagacttgggggaggggcgttcatgtataactgggttcacataggccaagactcccaggtgcattttaggcagagcctcaggtgtgttagaggtcccaggggcagagaggctataggtgctgtcagaggccttggggacatttagggcagagcctcgagtgacaggtcctgggacagtgggagccaagggcaagtgctagagttgcagtgaatttagagcaaagcctcagctaagtgacacatcccagggcagtaggggatctatctaggttcgtgctgggcctcaggtaagtgacaggccttaggacaatgggggctgtggcatgcgtcaggttacctgccttgatatgggatcgtgacaggcccctccctatgtgcaggagacaagcagcccaagaaacaggagaaaaacccagtgttggtgtccccagagtttgtggatgaagctctgtgtgcgtgcgaggagtaccttagcaacttggcccacatggacatcgacaaggacctggaggccccgctgtacctcacccccgagggctggtccctcttcctccagcgctactaccaagtggtccacccctgcttcgattccccactgcccttgtcctggatccaacaccaaataaaaagaaacaagtgaagta

SEQ ID NO: 348699 - DNA, 867 bp, Homo sapiens
ctcagcctcccgagtggctgggactacaggcgcccgccatcacgcctggctagttttttgtatttttagtagagacggggtttcactgtgttggccgggatggtctcgatctcctgacctcatgatccatccacctcagcctcccaaagtgctgggattacaggcgtcagccaccgtgaccagcctgaaacaggagcaagttctaaactcaggctctagagtcagaaaagtgtagagtcaggttctggatccaaaatggggcaagtcatgatcaggttctggaaccagaacaggcctcaagcctaggggctgagcagggtatcccctggcctgggagcagaggacttctggctgactgctgcccgcaacgttctcaagctggtggtgaagtctgagtggaagtcataccctattcaggcagtagaggaagaggcctcaggtaagtactgtggttacctccactctcccacccatttatcctccacccatccgcccttccacctatctgcccttctacctatctattcatccacgcacctactggttcatccacacatctgtgtatgattcacatctacccatctatccatccatccaccagccatccatccactcatccacccacgtattcacccactctctgatctaccgattcacccacccacccttccactcatccttccatcctcccacctgtcacccattgttaatctcttcattcatctacctgatgtcagctccatactccccatccatctatccactccctgcctacctatccttccacagatccacctacccatctatctacctgctattccattctcccatctactacctatctgttcttcaggccatccactcatc

SEQ ID NO: 348700 - DNA, 781 bp, Homo sapiens
ctcagcctcccgagtggctgggactacaggcgcccgccatcacgcctggctagttttttgtatttttagtagagacggggtttcactgtgttggccgggatggtctcgatctcctgacctcatgatccatccacctcagcctcccaaagtgctgggattacaggcgtcagccaccgtgaccagcctgaaacaggagcaagttctaaactcaggctctagagtcagaaaagtgtagagtcaggttctggatccaaaatggggcaagtcatgatcaggttctggaaccagaacaggcctcaagcctaggggctgagcagggtatcccctggcctgggagcagaggacttctggctgactgctgcccgcaacgttctcaagctggtggtgaagtctgagtggaagtcataccctattcaggcagtagaggaagaggcctcaggtaagtactgtggttacctccactctcccacccatttatcctccacccatccgcccttccacctatctgcccttctacctatctattcatccacgcacctactggttcatccacacatctgtgtatgattcacatctacccatctatccatccatccaccagccatccatccactcatccacccacgtattcacccactctctgatctaccgattcacccacccacccttccactcatccttccatcctcccacctgtcacccattgttaatctcttcattcatctacctgatgtcagctccatactccagcctgggtgacagatcaaggatctgtctcaaa

SEQ ID NO: 348701 - DNA, 1243 bp, Homo sapiens
ttgctattgtcattattaccatgcatatttatttctctacttatttatagtctgtttatttctcctaatggaatataaaaatttcctgatggcagagtccataactgtctggttcacctttatatcccctatgtctggcacttatgcaatacttattgaagaagtatccttctctcacattgcagcagaagaagatctttacaatccaaggctgctacccggtgatccggtgtctcttgcgccggaggggctgggtggagaagaagatggtccatcgctcaggccccaccctgctgccaccccagaaggatctggatagctcagcgatgggtgacagtgacaccactgaggatgaggatgaagatgaggacgaggagttccagccatcacagctgttcgacttcgatgatttactgaaatttgatgacctagatggaacacatgctctgatggtgaggccctgggggccaagatgatacagggactgcctgcttagagggagggcattggtgtccagctgggtgacctcagacaagtcctttctttctctgggccacagtttccctatctgtagtaaaaactgcttctttaaaggctggatagagctggacatggtggctcatgcctgtggtcccagctactcaggaggccaaggtgggaggataacttgaggctaggagttcaagaccagcctgggcaacatagtgagactcagtctctacaaaaaaaggtagaaaaacattatccgggtgtggtggcatgtacctgtagtcccagctactcgggaggctaaggtgggaggatcacttgaacctgggaattacaggctgcagtgagctatgatcgcaccattgcactccaacctgggcagcaaagcaagactctatctctaaaaaagaaataagtgaataaaggctagataggcccacagagtggggagggacacagcagggctgtgtcccatctggcctgggattcagagctctgctaggtcataccagatgccagcacagccgccatgcatggtaactcccccttcaaataaaaaccccatagttccccttccccgctgcccttggtaagtgaaggcaggaaggaaggtcttaaaaagctctggaagagacggagcggggtggcttatacctgtaatcccagcactttttgggaggccgaggcgggcagattccttgaggtcaggagttcgagaccagcctggccaacgtggtgaaaacccatctctact

SEQ ID NO: 348702 - DNA, 903 bp, Homo sapiens
ttgctattgtcattattaccatgcatatttatttctctacttatttatagtctgtttatttctcctaatggaatataaaaatttcctgatggcagagtccataactgtctggttcacctttatatcccctatgtctggcacttatgcaatacttattgaagaagtatccttctctcacattgcagcagaagaagatctttacaatccaaggctgctacccggtgatccggtgtctcttgcgccggaggggctgggtggagaagaagatggtccatcgctcaggccccaccctgctgccaccccagaaggatctggatagctcagcgatgggtgacagtgacaccactgaggatgaggatgaagatgaggacgaggagttccagccatcacagctgttcgacttcgatgatttactgaaatttgatgacctagatggaacacatgctctgatggtgggtctatgtctcaatctccggaatttgccgtggtttgatgaggttgatgccaactccttcttcccacgctgctactgcctgggggctgaggatgacaaaaaagccttcataggtaaggagacccccagccctatgcctgaacctcaggctgacagagcagggctgaagctctggctcatattggagagaaacaggcctctcttcatgccctcatctgcctgccccagcagatttccctttccaccctcaatccttatccttccctaatgtgccctcccttaataagcctcttagcttggtcaactctgacctccagaaaagcttgggtagcttggcttatattctagagcaggttctaaaagttggtcagtcccttgagtttggaatccagaacagattccaggcttatatcaagttccatttgttgaattgggttccaaaaaaggct

SEQ ID NO: 348703 - DNA, 474 bp, Homo sapiens
tcggatacccaccccctcggccccccgcacaccccggtcctcgatgacccctctccgcaggatggtgaggcccgtgcggcccgctcgctctggcctacagcggctgcgaggacgacaagacgctggggtggagggactgggggtcgggagaagagcggctgagggtgggcatctggatgaaggcaggaggaagaaaagaggcgtggctatgggcggccagaaaagatcctaggccgagaccctaggcccagcctcagtgtaccccgcccctattccgcatctttctgcaggtttcccggtcctctggcgaggatcctccaaggcgtctcacatgaaccggctcagaaacgccaaaatctacgtggagagagctgtcaaggtcagaggaggggcaggggcgcttagaaagggccctgggagcggctcagcctgtctccctgcgctgttttcttatatccttaaaaaacaaaagca

SEQ ID NO: 348704 - DNA, 483 bp, Homo sapiens
ctaattccatgagaaaggtctatggcaagggatacaatgttgagcgggtacagacaaaagggcggcttccaagacggcaggcaaacacacaggatgagagggtctccaaaaaaacccccttcctccacagacttctgatcatctccctcttctcccctcctttcacaccgaggctcctgctctcctgtgcctccgaggcccccagctggaagtgccttgttgcctctgccctttgaagtcggaacaattcctagcacctgtcggaaggtcaaggccaaaggcaaattcaaggccagactgtgacaaacccagggctgaggcctgccccatgaagaggctgagccccctgaaacccctgccccttgttggtacattccagaggcgcaggggcctgggggatatgaagctagggaagcccctgcttcgattccccactgcccttgtcctggatccaacaccaaataaaaagaaacaagtgaagta

SEQ ID NO: 348705 - DNA, 505 bp, Homo sapiens
tccaaggatcagatgataaaccactacgcccgggctggctcctttaccacaaaggtgggtctatgtctcaatctccggaatttgccgtggtttgatgaggttgatgccaactccttcttcccacgctgctactgcctgggggctgaggatgacaaaaaagccttcataggtaaggagacccccagccctatgcctgaacctcaggctgacagagcagggctgaagctctggctcatattggagagaaacaggcctctcttcatgccctcatctgcctgccccagcagatttccctttccaccctcaatccttatccttccctaatgtgccctcccttaataagcctcttagcttggtcaactctgacctccagaaaagcttgggtagcttggcttatattctagagcaggttctaaaagttggtcagtcccttgagtttggaatccagaacagattccaggcttatatcaagttccatttgttgaattgggttccaaaaaaggct

SEQ ID NO: 348706 - DNA, 1532 bp, Homo sapiens
gcagctccgtaccccgatatttgtggttctggctacggatctggggaggggggaaatgccatcaaggatcacagttcttcatcacgggaaccctgggaatcggtgtcccggcttacacctgatacaggctccgagtctaaggtggggaaggaaggccagaaccacaaatatcgcgatatttgtggttctggccctagaagaatgtggtggggcccaggcctctgtcctttttgtccttcccagtagggccccatctcaagttgaatagtgcagggtggcccagggctgcttccaggacttgcctgtcctccctgagtttggatgggagagacacaagggcctggacctcagttttctgttctctgccccagctcagtgcacctgtgcaacaactccatccagaagcacctggagaactcatgccatcggcatccactgcttccgccagaaccacatgtggtctagccagaggttccaggcccacctgcaggagatgggtgccccaaatgcttggtccaccatcatcgtgcctggcatgaaggatgctgtgatccacgcacttcagacctcccaggacaccgtgcagtgtcggaaggccagctttgagctctatggcgctgacttcgtgttcggggaggacttccagccctggctgattgagatcaacgccagccccacgatggcaccctccacagcagtcactgcccggctctgtgctggcgtgcaagctgacaccctgcgcgtggtcattgaccggatgctggaccgcaactgtgacacaggagcctttgagctcatctataagcagcccgtcaccacttccccagcctccacaccaaggcccagctgccttctccccatgtactccgacaccagggccaggtcctcagacgacagcacagcaagctggtgggcactaaggccctgtcgaccacaggcaaggccttgaggactctacccacggctaaggtcttcatttccctcccaccgaaccttgatttcaaggtggcacccagcatcctgaagccaagaaaggtgggcctcgacctgtgactcacacccagtggacagtgctgagcacggggtcagggctggagggcacaggcagagggcagctcccaggctggctggcaccccaagggaagagctggtctccctcagaagccccttcctccacagacttctgatcatctccctcttctcccctcctttcacaccgaggctcctgctctcctgtgcctccgaggcccccagctggaagtgccttgttgcctctgccctttgaagtcggaacaattcctagcacctgtcggaaggtcaaggccaaaggcaaattcaaggccagactgtgacaaacccagggctgaggcctgccccatgaagaggctgagccccctgaaacccctgccccttgttggtacattccagaggcgcaggggcctgggggatatgaagctagggaagcccctgcttcgattccccactgcccttgtcctggatccaacaccaaataaaaagaaacaagtgaagta

SEQ ID NO: 348707 - DNA, 1845 bp, Homo sapiens
gtgtttccatgaataccttccacaagggacacaggcttgaccttaggggctgatatggagccccactcctggtgtactggttgggctcaatttcttgggcaacagagggtataagctagggctatttgataaaggggaaaagtgcctgatggttgttataaagtggaagaataatggggtagagaatgggtttgagttcacgggctttttttcccctattaatagacaagtgtgtttttttttttttcttctgtgttcgtccgcagtggccaagttgaatgatgctgcccggggctctgccagaaccacaaatatcgcgatatttgtggttctggccctagaagaatgtggtggggcccaggcctctgtcctttttgtccttcccagtagggccccatctcaagttgaatagtgcagggtggcccagggctgcttccaggacttgcctgtcctccctgagtttggatgggagagacacaagggcctggacctcagttttctgttctctgccccagctcagtgcacctgtgcaacaactccatccagaagcacctggagaactcatgccatcggcatccactgcttccgccagaaccacatgtggtctagccagaggttccaggcccacctgcaggagatgggtgccccaaatgcttggtccaccatcatcgtgcctggcatgaaggatgctgtgatccacgcacttcagacctcccaggacaccgtgcagtgtcggaaggccagctttgagctctatggcgctgacttcgtgttcggggaggacttccagccctggctgattgagatcaacgccagccccacgatggcaccctccacagcagtcactgcccggctctgtgctggcgtgcaagctgacaccctgcgcgtggtcattgaccggatgctggaccgcaactgtgacacaggagcctttgagctcatctataagcagcctgctgtggaggtgcctcaatatgtgggcatccggctcctggtagagggcttcaccatcaagaagcccatggcgatgtgtcatcggcggatgggggtccgccagcagtccctctgctgacccagcgaggctctggggaaggcaaggactcggggacccctacccacagcccgtcaccacttccccagcctccacaccaaggcccagctgccttctccccatgtactccgacaccagggccaggtcctcagacgacagcacagcaagctggtgggcactaaggccctgtcgaccacaggcaaggccttgaggactctacccacggctaaggtcttcatttccctcccaccgaaccttgatttcaaggtggcacccagcatcctgaagccaagaaaggtgggcctcgacctgtgactcacacccagtggacagtgctgagcacggggtcagggctggagggcacaggcagagggcagctcccaggctggctggcaccccaagggaagagctggtctccctcagaagccccttcctccacagacttctgatcatctccctcttctcccctcctttcacaccgaggctcctgctctcctgtgcctccgaggcccccagctggaagtgccttgttgcctctgccctttgaagtcggaacaattcctagcacctgtcggaaggtcaaggccaaaggcaaattcaaggccagactgtgacaaacccagggctgaggcctgccccatgaagaggctgagccccctgaaacccctgccccttgttggtacattccagaggcgcaggggcctgggggatatgaagctagggaagcccctgcttcgattccccactgcccttgtcctggatccaacaccaaataaaaagaaacaagtgaagta

SEQ ID NO: 348708 - DNA, 2579 bp, Homo sapiens
gtgtttccatgaataccttccacaagggacacaggcttgaccttaggggctgatatggagccccactcctggtgtactggttgggctcaatttcttgggcaacagagggtataagctagggctatttgataaaggggaaaagtgcctgatggttgttataaagtggaagaataatggggtagagaatgggtttgagttcacgggctttttttcccctattaatagacaagtgtgtttttttttttttcttctgtgttcgtccgcagtggccaagttgaatgatgctgcccggggctctgccagaaccacaaatatcgcgatatttgtggttctggccctagaagaatgtggtggggcccaggcctctgtcctttttgtccttcccagtagggccccatctcaagttgaatagtgcagggtggcccagggctgcttccaggacttgcctgtcctccctgagtttggatgggagagacacaagggcctggacctcagttttctgttctctgccccagctcagtgcacctgtgcaacaactccatccagaagcacctggagaactcatgccatcggcatccactgcttccgccagaaccacatgtggtctagccagaggttccaggcccacctgcaggagatgggtgccccaaatgcttggtccaccatcatcgtgcctggcatgaaggatgctgtgatccacgcacttcagacctcccaggacaccgtgcagtgtcggaaggccagctttgagctctatggcgctgacttcgtgttcggggaggacttccagccctggctgattgagatcaacgccagccccacgatggcaccctccacagcagtcactgcccggctctgtgctggcgtgcaagctgacaccctgcgcgtggtcattgaccggatgctggaccgcaactgtgacacaggagcctttgagctcatctataagcagcccgtcaccacttccccagcctccacaccaaggcccagctgccttctccccatgtactccgacaccagggccaggtcctcagacgacagcacagcaagctggtgggcactaaggccctgtcgaccacaggcaaggccttgaggactctacccacggctaaggtcttcatttccctcccaccgaaccttgatttcaaggtggcacccagcatcctgaagccaagaaaggtgggcctcgacctgtgactcacacccagtggacagtgctgagcacggggtcagggctggagggcacaggcagagggcagctcccaggctggctggcaccccaagggaagagctggtctccctcagaagccccttcctccacagacttctgatcatctccctcttctcccctcctttcacaccgaggctcctgctctcctgtgcctccgaggcccccagctggaagtgccttgttgcctctgccctttgaagtcggaacaattcctagcacctgtcggaaggtcaaggccaaaggcaaattcaaggccagactgtgacaaacccagggctgaggcctgccccatgaagaggctgagccccctgaaacccctgccccttgttggtacattccagaggcgcaggggcctgggggatatgaagctagggaagcccctgcttcgattccccactgcccttgtcctggatccaacaccaaataaaaagaaacaagtgaagtatttggggcttgactccattgctgttggagggtcaagagtggatggggcgaggccgtgtaccccagggtccacagcaagagcctgaggccatcagcagctcctccgtgcagcgaggcccagaattcccacctaaggacagacatggggcttcctatttagggactcccccagcatctccgatccaggggtggggagcgtgagccttcactttacagatgaagaaactgagtctgaaagaggaggcatggcttacccaagatcacgtggcagtgagtcgacgcagggacatattgccagaactgccgagcactgggagccccccaaccccagagaacaagccaagctagcagaatgacacctaccgggcataggaacgttaatgccatgagacaagggaaggaattggccttgcctaaacctcagcccttctgcagagggcatgggtctatcccttcttcagcaaggggccaaggtcacctaaaaatgaaacatccaataagccacacccacctgaagaaaagtgtggcactgcttagttgtagtgggttgaactgtggtcccctgaaaagagatgtctacttggaccctgtgaatgtgaccttatgtgggaaaagagtctttgtagctgggtatggtggctcacacctgttatcccagcactttgagaggccaaggggcaggagatcgcttgagcccacaagttcaagaccagtctgggcaacatggtgaaaccgtttctacagaaaattagctgggtgtggtggcacacacctgtagtcctagctactcgggaggcctaggtgggaggattacctgagcctgggaagatcaaaactgtggtgagctgtgatcacgccactgcgctctgagcctgggagacagagtgaaaccctaaatcaaaaa

SEQ ID NO: 348709 - DNA, 1474 bp, Homo sapiens
gtgtttccatgaataccttccacaagggacacaggcttgaccttaggggctgatatggagccccactcctggtgtactggttgggctcaatttcttgggcaacagagggtataagctagggctatttgataaaggggaaaagtgcctgatggttgttataaagtggaagaataatggggtagagaatgggtttgagttcacgggctttttttcccctattaatagacaagtgtgtttttttttttttcttctgtgttcgtccgcagtggccaagttgaatgatgctgcccggggctctgccagaaccacaaatatcgcgatatttgtggttctggccctagaagaatgtggtggggcccaggcctctgtcctttttgtccttcccagtagggccccatctcaagttgaatagtgcagggtggcccagggctgcttccaggacttgcctgtcctccctgagtttggatgggagagacacaagggcctggacctcagttttctgttctctgccccagctcagtgcacctgtgcaacaactccatccagaagcacctggagaactcatgccatcggcatccactgcttccgccagaaccacatgtggtctagccagaggttccaggcccacctgcaggagatgggtgccccaaatgcttggtccaccatcatcgtgcctggcatgaaggatgctgtgatccacgcacttcagacctcccaggacaccgtgcagtgtcggaaggccagctttgagctctatggcgctgacttcgtgttcggggaggacttccagccctggctgattgagatcaacgccagccccacgatggcaccctccacagcagtcactgcccggctctgtgctggcgtgcaagctgacaccctgcgcgtggtcattgaccggatgctggaccgcaactgtgacacaggagcctttgagctcatctataagcagcccgtcaccacttccccagcctccacaccaaggcccagctgccttctccccatgtactccgacaccagggccaggtcctcagacgacagcacagcaagctggtgggcactaaggccctgtcgaccacaggcaaggccttgaggactctacccacggctaaggtcttcatttccctcccaccgaaccttgatttcaaggtggcacccagcatcctgaagccaagaaaggctcctgctctcctgtgcctccgaggcccccagctggaagtgccttgttgcctctgccctttgaagtcggaacaattcctagcacctgtcggaaggtcaaggccaaaggcaaattcaaggccagactgtgacaaacccagggctgaggcctgccccatgaagaggctgagccccctgaaacccctgccccttgttggatccaggacaagggcagtggggaatcgaagcaggggcttccctagcttcatatcccccaggcccctgcgcctctggaatgtaccaacaagggtcgacg

SEQ ID NO: 348710 - DNA, 1554 bp, Homo sapiens
agcacacaggttagatgacttccctaaggtctcacaactagtgtggagatggcgcttgaacacgtcctggcgatgacggggccatacccttacccaccctcttatcttccagacactgggatggttaactgagactatgcacaaagcacttactactgcggcccccgtaactagcgccctcagagcagccctgagagataagagtggttctggccctagaagaatgtggtggggcccaggcctctgtcctttttgtccttcccagtagggccccatctcaagttgaatagtgcagggtggcccagggctgcttccaggacttgcctgtcctccctgagtttggatgggagagacacaagggcctggacctcagttttctgttctctgccccagctcagtgcacctgtgcaacaactccatccagaagcacctggagaactcatgccatcggcatccactgcttccgccagaaccacatgtggtctagccagaggttccaggcccacctgcaggagatgggtgccccaaatgcttggtccaccatcatcgtgcctggcatgaaggatgctgtgatccacgcacttcagacctcccaggacaccgtgcagtgtcggaaggccagctttgagctctatggcgctgacttcgtgttcggggaggacttccagccctggctgattgagatcaacgccagccccacgatggcaccctccacagcagtcactgcccggctctgtgctggcgtgcaagctgacaccctgcgcgtggtcattgaccggatgctggaccgcaactgtgacacaggagcctttgagctcatctataagcagcccgtcaccacttccccagcctccacaccaaggcccagctgccttctccccatgtactccgacaccagggccaggtcctcagacgacagcacagcaagctggtgggcactaaggccctgtcgaccacaggcaaggccttgaggactctacccacggctaaggtcttcatttccctcccaccgaaccttgatttcaaggtggcacccagcatcctgaagccaagaaaggtgggcctcgacctgtgactcacacccagtggacagtgctgagcacggggtcagggctggagggcacaggcagagggcagctcccaggctggctggcaccccaagggaagagctggtctccctcagaagccccttcctccacagacttctgatcatctccctcttctcccctcctttcacaccgaggctcctgctctcctgtgcctccgaggcccccagctggaagtgccttgttgcctctgccctttgaagtcggaacaattcctagcacctgtcggaaggtcaaggccaaaggcaaattcaaggccagactgtgacaaacccagggctgaggcctgccccatgaagaggctgagccccctgaaacccctgccccttgttggtacattccagaggcgcaggggcctgggggatatgaagctagggaagcccctgcttcgattccccactgcccttgtcctggatccaacaccaaataaaaagaaacaagtgaagta

SEQ ID NO: 348711 - DNA, 2375 bp, Homo sapiens
cccgggagaggaggcggcgacgcggaggggcgcgggatcaggggccctgggagggcgagcgcggcgaggggcgcatgcagggccccgacgcgccactgctcctgagcgcgagggagctggggcccgggcgccggggctcggcctcctggtaccgccaggagggcggcgcggtgtgcaactggctgcggaagccgcagccgctcgagccacgcaccagtttcccctcggcgcgccgctccgagttccgtccacccaggaggctgccatgggccggccctgcctccgcccagtccgaggagggtcacgcaggcggcagatgccaggcgggcagccccgcccctgcgcgccgcctcagcggcgccttcaagacgctggtcccaggcacccacgcccagggcgcctcggatacccaccccctcggccccccgcacaccccggtcctcgatgacccctctccgcaggatggtttcccggtcctctggcgaggatcctccaaggcgtctcacatgaaccggctcagaaacgccaaaatctacgtggagagagctgtcaagcagaagaagatctttacaatccaaggctgctacccggtgatccggtgtctcttgcgccggaggggctgggtggagaagaagatggtccatcgctcaggccccaccctgctgccaccccagaaggatctggatagctcagcgatgggtgacagtgacaccactgaggatgaggatgaagatgaggacgaggagttccagccatcacagctgttcgacttcgatgatttactgaaatttgatgacctagatggaacacatgctctgatgcgaaggggcagaactcaggcacctcgacactcaggtccagcgctgtgaggacatcctgcagcagctgcaggccgtggtaccccagatagacatggaaggggatcgcaacatctggatcgtgaagccaggagccaagtcccgcggacgaggcatcatgtgcatggaccacctggaggagatgctgaagctggtgaacggcaaccccgtggtgatgaaggacggcaagtgggtggtgcagaagtatattgagcggcccctcctcatctttggcaccaagtttgacctcagacagtggttcctggtaactgactggaacccacttaccgtgtggttctaccgcgacagctatatccgcttttccacgcagcccttctccctgaagaacctggacaactcagtgcacctgtgcaacaactccatccagaagcacctggagaactcatgccatcggcatccactgcttccgccagaaccacatgtggtctagccagaggttccaggcccacctgcaggagatgggtgccccaaatgcttggtccaccatcatcgtgcctggcatgaaggatgctgtgatccacgcacttcagacctcccaggacaccgtgcagtgtcggaaggccagctttgagctctatggcgctgacttcgtgttcggggaggacttccagccctggctgattgagatcaacgccagccccacgatggcaccctccacagcagtcactgcccggctctgtgctggcgtgcaagctgacaccctgcgcgtggtcattgaccggatgctggaccgcaactgtgacacaggagcctttgagctcatctataagcagcccgtcaccacttccccagcctccacaccaaggcccagctgccttctccccatgtactccgacaccagggccaggtcctcagacgacagcacagcaagctggtgggcactaaggccctgtcgaccacaggcaaggccttgaggactctacccacggctaaggtcttcatttccctcccaccgaaccttgatttcaaggtggcacccagcatcctgaagccaagaaaggtgggcctcgacctgtgactcacacccagtggacagtgctgagcacggggtcagggctggagggcacaggcagagggcagctcccaggctggctggcaccccaagggaagagctggtctccctcagaagccccttcctccacagacttctgatcatctccctcttctcccctcctttcacaccgaggctcctgctctcctgtgcctccgaggcccccagctggaagtgccttgttgcctctgccctttgaagtcggaacaattcctagcacctgtcggaaggtcaaggccaaaggcaaattcaaggccagactgtgacaaacccagggctgaggcctgccccatgaagaggctgagccccctgaaacccctgccccttgttggtacattccagaggcgcaggggcctgggggatatgaagctagggaagcccctgcttcgattccccactgcccttgtcctggatccaacaccaaataaaaagaaacaagtgaagta

SEQ ID NO: 348712 - DNA, 2150 bp, Homo sapiens
ggggagtcagcgagggcgagcctactggagtttgccgggggtgggaagaaggtgggcctcgagcaaagccgctagaggtggggtgcgggtggtcggcctcaggcgagccccggggcacagcccggggcgggaggcggagcttggcggccgagatctccgcgctgcagttagccccgccgagcgccaggagctgcgggtaggaggggcgagagaaaggatgggggtacagaaccggaagaaacgaagggctcgtccgcttcggcttgtcctaatttggtgcccaatctgaagctgggctgtaccattgcatacctgggggaggctgtggcaaaggtgacaagaaggccgaaggcacaaagggaagctgcacccattcctggaggagcttaaatagtgactcgagtgcaagaatttaaaaataccgagacagccctaggtggaaaacttccggaaggcccaagcgttcgtaagggctctctaccccgctcggagcatagatggtaccgtccggaagtccgggcggagaccgtagctgcgcttctcgcgaaagggcaggcatcgcggggctggccacttccgtacttccgctttccggcccagccagcgcccgcgatgactgccactctccgcccctacctgagtgccgtgcgggccacattgcaggctgccctctgcctggagaacttctcctcccaggttgtggaacgacacaacaagccggaagtggaagtcaggagtagcaaagagctcctgttacaacctgtgaccatcagcaggaatgagaaggaaaaggttctgattgagggctccatcaactctgtccgggtcagcattgctgtgaaacaggctgatgagatcgagaagattttgtgccacaattgaatagtgcagggtggcccagggctgcttccaggacttgcctgtcctccctgagtttggatgggagagacacaagggcctggacctcagttttctgttctctgccccagctcagtgcacctgtgcaacaactccatccagaagcacctggagaactcatgccatcggcatccactgcttccgccagaaccacatgtggtctagccagaggttccaggcccacctgcaggagatgggtgccccaaatgcttggtccaccatcatcgtgcctggcatgaaggatgctgtgatccacgcacttcagacctcccaggacaccgtgcagtgtcggaaggccagctttgagctctatggcgctgacttcgtgttcggggaggacttccagccctggctgattgagatcaacgccagccccacgatggcaccctccacagcagtcactgcccggctctgtgctggcgtgcaagctgacaccctgcgcgtggtcattgaccggatgctggaccgcaactgtgacacaggagcctttgagctcatctataagcagcccgtcaccacttccccagcctccacaccaaggcccagctgccttctccccatgtactccgacaccagggccaggtcctcagacgacagcacagcaagctggtgggcactaaggccctgtcgaccacaggcaaggccttgaggactctacccacggctaaggtcttcatttccctcccaccgaaccttgatttcaaggtggcacccagcatcctgaagccaagaaaggtgggcctcgacctgtgactcacacccagtggacagtgctgagcacggggtcagggctggagggcacaggcagagggcagctcccaggctggctggcaccccaagggaagagctggtctccctcagaagccccttcctccacagacttctgatcatctccctcttctcccctcctttcacaccgaggctcctgctctcctgtgcctccgaggcccccagctggaagtgccttgttgcctctgccctttgaagtcggaacaattcctagcacctgtcggaaggtcaaggccaaaggcaaattcaaggccagactgtgacaaacccagggctgaggcctgccccatgaagaggctgagccccctgaaacccctgccccttgttggtacattccagaggcgcaggggcctgggggatatgaagctagggaagcccctgcttcgattccccactgcccttgtcctggatccaacaccaaataaaaagaaacaagtgaagta

SEQ ID NO: 348713 - DNA, 1301 bp, Homo sapiens
aaataagccacgaaccacaaatatcgaggtgatccgtctgacaatcgacttgcacgacgagtctatgcttgtcattgctcatctgtggaatgaagagacacacaagggcctggacctcagttttctgttctctgccccagctcagtgcacctgtgcaacaactccatccagaagcacctggagaactcatgccatcggcatccactgcttccgccagaaccacatgtggtctagccagaggttccaggcccacctgcaggagatgggtgccccaaatgcttggtccaccatcatcgtgcctggcatgaaggatgctgtgatccacgcacttcagacctcccaggacaccgtgcagtgtcggaaggccagctttgagctctatggcgctgacttcgtgttcggggaggacttccagccctggctgattgagatcaacgccagccccacgatggcaccctccacagcagtcactgcccggctctgtgctggcgtgcaagctgacaccctgcgcgtggtcattgaccggatgctggaccgcaactgtgacacaggagcctttgagctcatctataagcagcccgtcaccacttccccagcctccacaccaaggcccagctgccttctccccatgtactccgacaccagggccaggtcctcagacgacagcacagcaagctggtgggcactaaggccctgtcgaccacaggcaaggccttgaggactctacccacggctaaggtcttcatttccctcccaccgaaccttgatttcaaggtggcacccagcatcctgaagccaagaaaggtgggcctcgacctgtgactcacacccagtggacagtgctgagcacggggtcagggctggagggcacaggcagagggcagctcccaggctggctggcaccccaagggaagagctggtctccctcagaagccccttcctccacagacttctgatcatctccctcttctcccctcctttcacaccgaggctcctgctctcctgtgcctccgaggcccccagctggaagtgccttgttgcctctgccctttgaagtcggaacaattcctagcacctgtcggaaggtcaaggccaaaggcaaattcaaggccagactgtgacaaacccagggctgaggcctgccccatgaagaggctgagccccctgaaacccctgccccttgttggtacattccagaggcgcaggggcctgggggatatgaagctagggaagcccctgcttcgattccccactgcccttgtcctggatccaacaccaaataaaaagaaacaagtgaagta

SEQ ID NO: 348714 - DNA, 1233 bp, Homo sapiens
gatccactcctcattcagccctcccatgggcctggcatgtagccgagcaccctggagagggcagactaagaagacatggtccgtccctgcctgtgaggagttcaggtctctgaggaggaggaagcagtgaaactgggctttacacatggcctgagaacagcttaggcctgaacataaggaacagcttggagtggaggggacacagaggaaccctcactatcatgcatgccaacccaaccactgcctgccctttcccttctggatttagctcgtgtctccaggctcctagtcctgtaatccagggacccatcagcgagggattcagggaagcagaggcagctctccaggaaggaggaaaatccctgcctcttccagagagactcccccattgctgtctcttgtgtgtgtcatgcacaaggaaggcttggttgtgtgccaggataaggggcacaagggcctcgggtgtggccagagaccccatgcttaagcttttatggtataggtcaggctgcaggggtttgagggcctcagttgtatatcagaatcttcagagcactgcgatgttcaggggtgagtcaggtctgtagatgtgcacggggtcttctgaagggtcagtttctgtaatcactttcaggtgtgtcagggccttgtgcagtaacagtgcacacagaagttagtgtttctgtgggctaagggttgtagctctgtatcaggattctgggagtgggtctggatttctggtgtgtggacttaagaagctgtgtcagacttgggggaggggcgttcatgtataactgggttcactaaggccctgtcgaccacaggcaaggccttgaggactctacccacggctaaggtcttcatttccctcccaccgaaccttgatttcaaggtggcacccagcatcctgaagccaagaaaggctcctgctctcctgtgcctccgaggcccccagctggaagtgccttgttgcctctgccctttgaagtcggaacaattcctagcacctgtcggaaggtcaaggccaaaggcaaattcaaggccagactgtgacaaacccagggctgaggcctgccccatgaagaggctgagccccctgaaacccctgccccttgttggtacattccagaggcgcaggggcctgggggatatgaagctagggaagcccctgcttcgattccccactgcccttgtcctggatccaacaccaaataaaaagaaacaagtgaagta

SEQ ID NO: 348715 - DNA, 1868 bp, Homo sapiens
gatccactcctcattcagccctcccatgggcctggcatgtagccgagcaccctggagagggcagactaagaagacatggtccgtccctgcctgtgaggagttcaggtctctgaggaggaggaagcagtgaaactgggctttacacatggcctgagaacagcttaggcctgaacataaggaacagcttggagtggaggggacacagaggaaccctcactatcatgcatgccaacccaaccactgcctgccctttcccttctggatttagctcgtgtctccaggctcctagtcctgtaatccagggacccatcagcgagggattcagggaagcagaggcagctctccaggaaggaggaaaatccctgcctcttccagagagactcccccattgctgtctcttgtgtgtgtcatgcacaaggaaggcttggttgtgtgccaggataaggggcacaagggcctcgggtgtggccagagaccccatgcttaagcttttatggtataggtcaggctgcaggggtttgagggcctcagttgtatatcagaatcttcagagcactgcgatgttcaggggtgagtcaggtctgtagatgtgcacggggtcttctgaagggtcagtttctgtaatcactttcaggtgtgtcagggccttgtgcagtaacagtgcacacagaagttagtgtttctgtgggctaagggttgtagctctgtatcaggattctgggagtgggtctggatttctggtgtgtggacttaagaagctgtgtcagacttgggggaggggcgttcatgtataactgggttcacataggccaagactcccaggtgcattttaggcagagcctcaggtgtgttagaggtcccaggggcagagaggctataggtgctgtcagaggccttggggacatttagggcagagcctcgagtgacaggtcctgggacagtgggagccaagggcaagtgctagagttgcagtgaatttagagcaaagcctcagctaagtgacacatcccagggcagtaggggatctatctaggttcgtgctgggcctcaggtaagtgacaggccttaggacaatgggggctgtggcatgcgtcaggttacctgccttgatatgggatcgtgacaggcccctccctatgtgcaggagacaagcagcccaagaaacaggagaaaaacccagtgttggtgtccccagagtttgtggatgaagctctgtgtgcgtgcgaggagtaccttagcaacttggcccacatggacatcgacaaggacctggaggccccgctgtacctcacccccgagggctggtccctcttcctccagcgctactaccaagtggtccacgaaggggcagaactcaggcacctcgacactcaggtccagcgctgtgaggacatcctgcagcagctgcaggccgtggtaccccagatagacatggaaggggatcgcaacatctggatcgtgaagccaggagccaagtcccgcggacgaggcatcatgtgcatggaccacctggaggagatgctgaagctggtgaacggcaaccccgtggtgatgaaggacggcaagtgggtggtgcagaagtatattgagcggcccctcctcatctttggcaccaagtttgacctcagacagtggttcctggtaactgactggaacccacttaccgtgtggttctaccgcgacagctatattgttatacgccggccaatcgctatcctacgccgatgaagaaacacgacagctctggcaaccagtgcaaccaatccagccagagacgacacatggagaatcacaccaccgcaatcacgcgcttacgtccatgacacacagcggtaaagccaggcgtacagcccacccgcaggatcagt

SEQ ID NO: 348716 - DNA, 1506 bp, Homo sapiens
gatccactcctcattcagccctcccatgggcctggcatgtagccgagcaccctggagagggcagactaagaagacatggtccgtccctgcctgtgaggagttcaggtctctgaggaggaggaagcagtgaaactgggctttacacatggcctgagaacagcttaggcctgaacataaggaacagcttggagtggaggggacacagaggaaccctcactatcatgcatgccaacccaaccactgcctgccctttcccttctggatttagctcgtgtctccaggctcctagtcctgtaatccagggacccatcagcgagggattcagggaagcagaggcagctctccaggaaggaggaaaatccctgcctcttccagagagactcccccattgctgtctcttgtgtgtgtcatgcacaaggaaggcttggttgtgtgccaggataaggggcacaagggcctcgggtgtggccagagaccccatgcttaagcttttatggtataggtcaggctgcaggggtttgagggcctcagttgtatatcagaatcttcagagcactgcgatgttcaggggtgagtcaggtctgtagatgtgcacggggtcttctgaagggtcagtttctgtaatcactttcaggtgtgtcagggccttgtgcagtaacagtgcacacagaagttagtgtttctgtgggctaagggttgtagctctgtatcaggattctgggagtgggtctggatttctggtgtgtggacttaagaagctgtgtcagacttgggggaggggcgttcatgtataactgggttcacataggccaagactcccaggtgcattttaggcagagcctcaggtgtgttagaggtcccaggggcagagaggctataggtgctgtcagaggccttggggacatttagggcagagcctcgagtgacaggtcctgggacagtgggagccaagggcaagtgctagagttgcagtgaatttagagcaaagcctcagctaagtgacacatcccagggcagtaggggatctatctaggttcgtgctgggcctcaggtaagtgacaggccttaggacaatgggggctgtggcatgcgtcaggttacctgccttgatatgggatcgtgacaggcccctccctatgtgcaggagacaagcagcccaagaaacaggagaaaaacccagtgttggtgtccccagagtttgtggatgaagctctgtgtgcgtgcgaggagtaccttagcaacttggcccacatggacatcgacaaggacctggaggccccgctgtacctcacccccgagggctggtccctcttcctccagcgctactaccaagtggtccacgaaggggcagaactcaggcacctcgacactcaggtccagcgctgtgaggacatcctgcagcagctgcaggccgtggtaccccagatagacatggaaggggatcctggagaacatctcgctgtcggtgaagaagttgcagagctattttgctgcatgtgaggatga

SEQ ID NO: 348717 - DNA, 959 bp, Homo sapiens
ttgctattgtcattattaccatgcatatttatttctctacttatttatagtctgtttatttctcctaatggaatataaaaatttcctgatggcagagtccataactgtctggttcacctttatatcccctatgtctggcacttatgcaatacttattgaagaagtatccttctctcacattgcagcagaagaagatctttacaatccaaggctgctacccggtgatccggtgtctcttgcgccggaggggctgggtggagaagaagatggtccatcgctcaggccccaccctgctgccaccccagaaggatctggatagctcagcgatgggtgacagtgacaccactgaggatgaggatgaagatgaggacgaggagttccagccatcacagctgttcgacttcgatgatttactgaaatttgatgacctagatggaacacatgctctgatggtgaggccctgggggccaagatgatacagggactgcctgcttagagggagggcattggtgtccagctgggtgacctcagacaagtcctttctttctctgggccacagtttccctatctgtagtaaaaactgcttctttaaaggctggatagagctggacatggtggctcatgcctgtggtcccagctactcaggaggccaaggtgggaggataacttgaggctaggagttcaagaccagcctggctcactgcaacctccacctcccgggttcaagcgattctcctgcctcagcctcccaagtagctgggattacaggtatgcaccaccatagccagctaatttttgtatttttagtagagacggggttttgccatgattgtaaatttcctgatgtctccccagccatattgaactgtgagtcaattaaacctcttcccttaataaattacccagtctcaggtatgtctcaataaagagcatgtgaaattagaaatgatttgccctga

SEQ ID NO: 348718 - DNA, 471 bp, Homo sapiens
aggctggcttgctctctgcccacctgtgccctggaggaagagaaatcttcttgacttacacaaagatgatgtgtgggctagaggccaccttggaagcatcctctccttcctgttcacccaccctgctcagcagggcagggagaggctgccttaggccctgctacccacactggcctctgtgtttctgtctcctcctgtctccccagtcccgcatggtccagaatgagatcccctacttcatctggaccactcggcgggatgtgctcgactgtcgcttcctctccaaggatcagatgataaaccactacgcccgggctggctcctttaccacaaaggtgggctccctagaggagcaggcagggcagcttccgaccccctgcccttgggctggcagctctcctccctgctcaccttgttagtaagaggaagttctcaggacaaggggaagtatacaattcagaaaatttggag

SEQ ID NO: 348719 - DNA, 445 bp, Homo sapiens
acaatccttcatcatcaaacagagacagttgccaaagatacagtgttttccttttcattctatcttttgaggagaggggcccctctgtgtaacctgtgaagactagtttccttgacgatgctgctcccttcctctctaatccatccctttcccccttacgccaaccctcctgatgaaccttttccccagaggagtctctttggggaccagggtatgcctcccatgcatgttgtcttctaacagcttgtgttgactcctaactaagctggctgatttcattacaaccagctcacaccttggttgcagtgatttctgtggccttatttatataaccatatatctcatcactctttatattgtgtatttaagtaccactccttttttaaaactaaaaatctaacagcatttattctccagaagaccaaccaacttgttcatttccatt

SEQ ID NO: 348720 - DNA, 196 bp, Homo sapiens
gaaaatcgtaaatccagaatcctctgatgaacatttcctttgagtgtcatgttggcactcaaaaagttttagattttttagcatcttggatttcagatttttggatttaagatgctcaatttatactactactgataataaattcactaacagttattgagtgttcactataaacttcacatcaaacctgtactct

SEQ ID NO: 348721 - DNA, 406 bp, Homo sapiens
ttattttttgtttgtgtattttaaattctaactttaacgtgaccctgagaggcattaggattttaaaaagcgagtgagaaggacccatgaattcactcttgatgatttggcttttgtttcttttgacctgtctccactgccaggtgaaatcaagctaacagaatcatttcaatagttcccttcttgttaaatgtttttaatttctcaatctagagctgaagaaattgattttccatttattccttccttttttcctcttttgttagttgtagtgcgtatcattgctactgtatacaaaatatacatgtatttaaaacacaccaaatcctccctaaaagataaaattcttgttttaagtttttttttgtttgtttgtctgttttaagacagggtctcgttttgttgc

SEQ ID NO: 348722 - DNA, 919 bp, Homo sapiens
ctgacatcagagaccctgggcggggttgaggttctcttgcatatcttttttgacaaaagacaaacaattccttctcaaattgcactgcaaagaataagaaaatataatccccttggatttattctctgctttcagtctaaaggagaaaaagctccccaggattcctaaataacagagaagtttgtagtgtaggaagaatctagaagttgggatggagagaaatgtgggaaagtcttacttttaaagagacattccctaaagaggggtaagaagttctgaaacagtgacgtaccagtgaccatgaatgtttcagagaaggtcagatttgcagtgtgtgtcttagagaaaggctaaatctcaacccagaggaagcatgtcttctgtctcaagccccctgcatgctgtttgtcttgcagtatctgaacacagtcattccttacgagaagaaagcctctcctccctcagtggaagacctgcagatgctgacaaacattctctttgccatgaaggaggataatgagaaggtgcctactttgctaacggactacattttaaaagtgctctgccctacctaaccttgccctttggagcagcctcgctgcaggaggtcactgagcaagagtcattccatcacagggactgcatgagaccatgtaacctccgacatgtatttaaacgtgtatagcttaacctggattaaacacgagcaagcgcgcggggtcctttgccgttggcttctagtgctagtaatcattggatgcatgatggggcagggccggtgatggtgcctcccccttgctggtgtcaggagaggggaaggcagccgctttcaccgctcattatgtagtctggctacagccctcaaaaacagcttatactcttaagactaattttgaaataaaaccttcatttaattaaa

SEQ ID NO: 348723 - DNA, 962 bp, Homo sapiens
  misc_feature (505)..(505): n is a, c, g, or t
aaggagaggggaagttgagcttctgttcagctgaggaggatggatacctgctggggcctggtgctgaagttctctttgccatgaaggaggataatgagaaggtgcctactttgctaacggactacattttaaaagtgctctgccctacctaaccttgccctttggagcagcctcgctgcaggaggtcactgagcaagagtcattccatcacagggactgcatgagaccatgtaacctccgacatgtatttaaacgtgtatagcttaacctggattaaacacgagcaagcgcgcggggtcctttgccgttggcttctagtgctagtaatcattggatgcatgatggggcagggccggtgatggtgcctcccccttgctggtgtcaggagaggggaaggcagccgctttcaccgctcattatgtagtctggctacagccctcaaaaacagcttatactcttaagactaattttgaaataaaaccttcatttaattaaaaaacacaanaacaaaaaaaaaaaaaaaaaaaaaaaaagaaaaaaaatcaaaaaaaaaaaaaaaaaaaaaaaaaaaaaaaaaaaagaaggggggggggggcgaaaaaaaaccccccgggggggggggcacaaaaagtagagcccccccggactttgtctaaggaaagaggggcccacaaaaaggacgagggcacaaaactaaacagacgacgcagccgccggccgatcataaacaaacgacgaggcgcagaagagaaaaatactcagacgagtgagatacactagaggacaagaaacccacccgccagaggaggagagcaaacatagagggaccgaccccaccccaaagaaagtagacccccagagagacgaaaaaaagacgaggggttacacgcggccaccaccagaacaaactcaagaggcgggaagaaacaaactgccgcccggcgatgtacagaaactaccag

SEQ ID NO: 348724 - DNA, 1750 bp, Homo sapiens
gggtggggtggaggcgggagcggagccgggcgccgccggagctgcgcggggagcgctcgctggctggctggctggctggctctccgctgcgctgcgctgcgctccggccgctcccgcggcccgtggatgggggtgtccggctgagccccgggatccgcctccctccgccaggacccgcacagataaactcatcctgaaagtcgctgttgttctcctgctgagcaagaatggaggccccactggtgagtctggatgaagagtttgaggaccttcgaccctcctgctcggaggacccggaggagaagccccagtgtttctatggttcatctccccaccatctcgaggacccctccctctccgagcttgagaatttttcttccgaaataatcagcttcaagtccatggaggacctcgtaaatgaatttgatgagaagctcaatgtctgctttcggaactacaacgccaagaccgagaacctagctcccgtgaagaaccagttacagatccaagaggaggaggagacccttcaggacgaggaggtttgggatgctctgacagacaattacatcccttcactctcagaagactggagggatccaaacatcgaggctctgaatggcaactgctctgacactgagatccatgagaaagaagaggaagagttcaatgagaagagtgaaaatgattccggtatcaacgaggagcctctgctcacagcagatcaggtaattgaggagattgaggaaatgatgcagaactccccagaccctgaggaagaagaggaggttctggaagaagaggatggaggagaaacttcctcccaggcagactcggtcctcctgcaggagatgcaggcattgacacagaccttcaacaacaactggtcctatgaagggctgaggcacatgtctgggtctgagctgaccgagctgctggaccaggtggagggtgccatccgtgacttctcggaggagctggtgcagcagctggcccgccgggacgagctggagtttgagaaggaagtgaagaactcctttatcacggtgcttattgaggttcagaacaagcagaaggagcagcgagaactgatgaaaaagaggcggaaagagaaagggctgagcctgcagagcagccggatagagaagggaaaccagatgcctctcaagcgcttcagcatggaaggcatctccaacattctgcagagtggcatccgccagacctttggctcctcaggaactgacaaacagtatctgaacacagtcattccttacgagaagaaagcctctcctccctcagtggaagacctgcagatgctgacaaacattctctttgccatgaaggaggataatgagaaggtgcctactttgctaacggactacattttaaaagtgctctgccctacctaaccttgccctttggagcagcctcgctgcaggaggtcactgagcaagagtcattccatcacagggactgcatgagaccatgtaacctccgacatgtatttaaacgtgtatagcttaacctggattaaacacgagcaagcgcgcggggtcctttgccgttggcttctagtgctagtaatcattggatgcatgatggggcagggccggtgatggtgcctcccccttgctggtgtcaggagaggggaaggcagccgctttcaccgctcattatgtagtctggctacagccctcaaaaacagcttatactcttaagactaattttgaaataaaaccttcatttaattaaa

SEQ ID NO: 348725 - DNA, 1805 bp, Homo sapiens
gggtggggtggaggcgggagcggagccgggcgccgccggagctgcgcggggagcgctcgctggctggctggctggctggctctccgctgcgctgcgctgcgctccggccgctcccgcggcccgtggatgggggtgtccggctgagccccgggatccgcctccctccgccaggacccgcacagataaactcatcctgaaagtcgctgttgttctcctgctgagcaagaatggaggccccactggtgagtctggatgaagagtttgaggaccttcgaccctcctgctcggaggacccggaggagaagccccagtgtttctatggttcatctccccaccatctcgaggacccctccctctccgagcttgagaatttttcttccgaaataatcagcttcaagtccatggaggacctcgtaaatgaatttgatgagaagctcaatgtctgctttcggaactacaacgccaagaccgagaacctagctcccgtgaagaaccagttacagatccaagaggaggaggagacccttcaggacgaggagtaagaagtcttaattgccctctcctgcttcagtcgagagccctgtagtccttgtctccttgacatagtgctggtttctgtctataggtttatgggctattactttcattttcgtgttgccagcggagcagtgccctggtacttgctgtcatagctctatatatgtccctttacagtcccctgaggagaactttcttaaattgaaaccttagaggaatgaaggttttcctagatacaaaatggaatttcaggagcacagtaaatttcagggtctgtctatcttaagctttctttatatcagtggaaatccagcgagatattagaaataaaggccagaaaaaattaattaaccatgatggatgaatctatgttattggactaatttgcttcaagaaacaccagaattttgaaaatcccgaatttttgacagcccctcaggcctggagagttatctacagatgttaggatatgtccacataagaaagcatctaaactgaactgagagcacagcgggctaccctggacaaagtaaaggtggaaactaggtgatgtggcctttgagtatgcagattcctggtatcacttgctcgctactttctagggtcttaatagtagtcaagaaaagggatctgagaaaagtactctttcaggagggactagaaagagaagggggtgatatgttacacaaattaaagaaggatgtcttaggcatttagtaaaaattcagtggttccccgctatcctcgggggatgtgtttttttgttttgttttgttttgtttttttttgagatgaagtttcattctatcgcccaggctggagtgcaatggcacaattttggctcactgcaacctccacctcccaggttcaagctattctcctgcctcagcctcctgagtagctgggactacaggtgtgcgccaccatgcccgactaatttttgtattttgagtagagatgggagtttcaccatgttggccaggctggtctcgaactcctgacctggtgatttgcccgccttggcctcccaaagtgctgggattacaggcgtgagtcaccacacctggcccatggtgggggatatgttttaagacccccagttaatgcctgaaaccgctgctagtaccaaaccctaatgttttttcctgtatgtacgtacatatgataaagttcagtttataagttaggcacagtaagagactaacaacagctcacagccaaatagagcaattataacaatatattgtaataaaaattatgtggatgtg

SEQ ID NO: 348726 - DNA, 1663 bp, Homo sapiens
gggtggggtggaggcgggagcggagccgggcgccgccggagctgcgcggggagcgctcgctggctggctggctggctggctctccgctgcgctgcgctgcgctccggccgctcccgcggcccgtggatgggggtgtccggctgagccccgggatccgcctccctccgccaggacccgcacagataaactcatcctgaaagtcgctgttgttctcctgctgagcaagaatggaggccccactggtgagtctggatgaagagtttgaggaccttcgaccctcctgctcggaggacccggaggagaagccccagtgtttctatggttcatctccccaccatctcgaggacccctccctctccgagcttgagaatttttcttccgaaataatcagcttcaagtccatggaggacctcgtaaatgaatttgatgagaagctcaatgtctgctttcggaactacaacgccaagaccgagaacctagctcccgtgaagaaccagttacagatccaagaggaggaggagacccttcaggacgaggaggtttgggatgctctgacagacaattacatcccttcactctcagaagactggagggatccaaacatcgaggctctgaatggcaactgctctgacactgaggtaattgaggagattgaggaaatgatgcagaactccccagaccctgaggaagaagaggaggttctggaagaagaggatggaggagaaacttcctcccaggcagactcggtcctcctgcaggagatgcaggcattgacacagaccttcaacaacaactggtcctatgaagggctgaggcacatgtctgggtctgagctgaccgagctgctggaccaggtggagggtgccatccgtgacttctcggaggagctggtgcagcagctggcccgccgggacgagctggagtttgagaaggaagtgaagaactcctttatcacggtgcttattgaggttcagaacaagcagaaggagcagcgagaactgatgaaaaagaggcggaaagagaaagggctgagcctgcagagcagccggatagagaagggaaaccagatgcctctcaagcgcttcagcatggaaggcatctccaacattctgcagagtggcatccgccagacctttggctcctcaggaactgacaaacagtatctgaacacagtcattccttacgagaagaaagcctctcctccctcagtggaagacctgcagatgctgacaaacattctctttgccatgaaggaggataatgagaaggtgcctactttgctaacggactacattttaaaagtgctctgccctacctaaccttgccctttggagcagcctcgctgcaggaggtcactgagcaagagtcattccatcacagggactgcatgagaccatgtaacctccgacatgtatttaaacgtgtatagcttaacctggattaaacacgagcaagcgcgcggggtcctttgccgttggcttctagtgctagtaatcattggatgcatgatggggcagggccggtgatggtgcctcccccttgctggtgtcaggagaggggaaggcagccgctttcaccgctcattatgtagtctggctacagccctcaaaaacagcttatactcttaagactaattttgaaataaaaccttcatttaattaaa

SEQ ID NO: 348727 - DNA, 1228 bp, Homo sapiens
  misc_feature (6)..(6): n is a, c, g, or t
tgctcngaggactgttgacatccaagcttcctttgtttttttttcctgtccttctctcacctcctaaagtagacttcatttttcctaacaggattagacagtcaaggagtggcttactaccaaacatcgaggctctgaatggcaactgctctgacactgacatccatgagaaagaagaggaagagttcaatgagaagagtgaggtaattgaggagattgaggaaatgatgcagaactccccagaccctgaggaagaagaggaggttctggaagaagaggatggaggagaaacttcctcccaggcagactcggtcctcctgcaggagatgcaggcattgacacagaccttcaacaacaactggtcctatgaagggctgaggcacatgtctgggtctgagctgaccgagctgctggaccaggtggagggtgccatccgtgacttctcggaggagctggtgcagcagctggcccgccgggacgagctggagtttgagaaggaagtgaagaactcctttatcacggtgcttattgaggttcagaacaagcagaaggagcagcgagaactgatgaaaaagaggcggaaagagaaagggctgagcctgcagagcagccggatagagaagggaaaccagatgcctctcaagcgcttcagcatggaaggcatctccaacattctgcagagtggcatccgccagacctttggctcctcaggaactgacaaacagtatctgaacacagtcattccttacgagaagaaagcctctcctccctcagtggaagacctgcagatgctgacaaacattctctttgccatgaaggaggataatgagaaggtgcctactttgctaacggactacattttaaaagtgctctgccctacctaaccttgccctttggagcagcctcgctgcaggaggtcactgagcaagagtcattccatcacagggactgcatgagaccatgtaacctccgacatgtatttaaacgtgtatagcttaacctggattaaacacgagcaagcgcgcggggtcctttgccgttggcttctagtgctagtaatcattggatgcatgatggggcagggccggtgatggtgcctcccccttgctggtgtcaggagaggggaaggcagccgctttcaccgctcattatgtagtctggctacagccctcaaaaacagcttatactcttaagactaattttgaaataaaaccttcatttaattaaa

SEQ ID NO: 348728 - DNA, 1494 bp, Homo sapiens
gggtggggtggaggcgggagcggagccgggcgccgccggagctgcgcggggagcgctcgctggctggctggctggctggctctccgctgcgctgcgctgcgctccggccgctcccgcggcccgtggatgggggtgtccggctgagccccgggatccgcctccctccgccaggacccgcacagataaactcatcctgaaagtcgctgttgttctcctgctgagcaagaatggaggccccactggtgagtctggatgaagagtttgaggaccttcgaccctcctgctcggaggacccggaggagaagccccagtgtttctatggttcatctccccaccatctcgaggacccctccctctccgagcttgagaatttttcttccgaaataatcagcttcaagtccatggaggacctcgtaaatgaatttgatgagaagctcaatgtctgctttcggaactacaacgccaagaccgagaacctagctcccgtgaagaaccagttacagatccaagaggaggaggagacccttcaggacgaggaggtttgggatgctctgacagacaattacatcccttcactctcagaagactggagggatccaaacatcgaggctctgaatggcaactgctctgacactgagggctgaggcacatgtctgggtctgagctgaccgagctgctggaccaggtggagggtgccatccgtgacttctcggaggagctggtgcagcagctggcccgccgggacgagctggagtttgagaaggaagtgaagaactcctttatcacggtgcttattgaggttcagaacaagcagaaggagcagcgagaactgatgaaaaagaggcggaaagagaaagggctgagcctgcagagcagccggatagagaagggaaaccagatgcctctcaagcgcttcagcatggaaggcatctccaacattctgcagagtggcatccgccagacctttggctcctcaggaactgacaaacagtatctgaacacagtcattccttacgagaagaaagcctctcctccctcagtggaagacctgcagatgctgacaaacattctctttgccatgaaggaggataatgagaaggtgcctactttgctaacggactacattttaaaagtgctctgccctacctaaccttgccctttggagcagcctcgctgcaggaggtcactgagcaagagtcattccatcacagggactgcatgagaccatgtaacctccgacatgtatttaaacgtgtatagcttaacctggattaaacacgagcaagcgcgcggggtcctttgccgttggcttctagtgctagtaatcattggatgcatgatggggcagggccggtgatggtgcctcccccttgctggtgtcaggagaggggaaggcagccgctttcaccgctcattatgtagtctggctacagccctcaaaaacagcttatactcttaagactaattttgaaataaaaccttcatttaattaaa

SEQ ID NO: 348729 - DNA, 2216 bp, Homo sapiens
  misc_feature (1759)..(1759): n is a, c, g, or t
gggtggggtggaggcgggagcggagccgggcgccgccggagctgcgcggggagcgctcgctggctggctggctggctggctctccgctgcgctgcgctgcgctccggccgctcccgcggcccgtggatgggggtgtccggctgagccccgggatccgcctccctccgccaggacccgcacagataaactcatcctgaaagtcgctgttgttctcctgctgagcaagaatggaggccccactggtgagtctggatgaagagtttgaggaccttcgaccctcctgctcggaggacccggaggagaagccccagtgtttctatggttcatctccccaccatctcgaggacccctccctctccgagcttgagaatttttcttccgaaataatcagcttcaagtccatggaggacctcgtaaatgaatttgatgagaagctcaatgtctgctttcggaactacaacgccaagaccgagaacctagctcccgtgaagaaccagttacagatccaagaggaggaggagacccttcaggacgaggaggtttgggatgctctgacagacaattacatcccttcactctcagaagactggagggatccaaacatcgaggctctgaatggcaactgctctgacactgagatccatgagaaagaagaggaagagttcaatgagaagagtgaaaatgattccggtatcaacgaggagcctctgctcacagcagatcaggtaattgaggagattgaggaaatgatgcagaactccccagaccctgaggaagaagaggaggttctggaagaagaggatggaggagaaacttcctcccaggcagactcggtcctcctgcaggagatgcaggcattgacacagaccttcaacaacaactggtcctatgaagggctgaggcacatgtctgggtctgagctgaccgagctgctggaccaggtggagggtgccatccgtgacttctcggaggagctggtgcagcagctggcccgccgggacgagctggagtttgagaaggaagtgaagaactcctttatcacggtgcttattgaggttcagaacaagcagaaggagcagcgagaactgatgaaaaagaggcggaaagagaaagggctgagcctgcagagcagccggatagagaagggaaaccagatgcctctcaagcgcttcagcatggaaggcatctccaacattctgcagagtggcatccgccagacctttggctcctcaggaactgacaaacagtatctgaacacagtcattccttacgagaagaaagcctctcctccctcagtggaagacctgcagatgctgacaaacattctctttgccatgaaggaggataatgagaaggtgcctactttgctaacggactacattttaaaagtgctctgccctacctaaccttgccctttggagcagcctcgctgcaggaggtcactgagcaagagtcattccatcacagggactgcatgagaccatgtaacctccgacatgtatttaaacgtgtatagcttaacctggattaaacacgagcaagcgcgcggggtcctttgccgttggcttctagtgctagtaatcattggatgcatgatggggcagggccggtgatggtgcctcccccttgctggtgtcaggagaggggaaggcagccgctttcaccgctcattatgtagtctggctacagccctcaaaaacagcttatactcttaagactaattttgaaataaaaccttcatttaattaaaaaacacaanaacaaaaaaaaaaaaaaaaaaaaaaaaagaaaaaaaatcaaaaaaaaaaaaaaaaaaaaaaaaaaaaaaaaaaaagaaggggggggggggcgaaaaaaaaccccccgggggggggggcacaaaaagtagagcccccccggactttgtctaaggaaagaggggcccacaaaaaggacgagggcacaaaactaaacagacgacgcagccgccggccgatcataaacaaacgacgaggcgcagaagagaaaaatactcagacgagtgagatacactagaggacaagaaacccacccgccagaggaggagagcaaacatagagggaccgaccccaccccaaagaaagtagacccccagagagacgaaaaaaagacgaggggttacacgcggccaccaccagaacaaactcaagaggcgggaagaaacaaactgccgcccggcgatgtacagaaactaccag

SEQ ID NO: 348730 - DNA, 1687 bp, Homo sapiens
gggtggggtggaggcgggagcggagccgggcgccgccggagctgcgcggggagcgctcgctggctggctggctggctggctctccgctgcgctgcgctgcgctccggccgctcccgcggcccgtggatgggggtgtccggctgagccccgggatccgcctccctccgccaggacccgcacagataaactcatcctgaaagtcgctgttgttctcctgctgagcaagaatggaggccccactggtgagtctggatgaagagtttgaggaccttcgaccctcctgctcggaggacccggaggagaagccccagtgtttctatggttcatctccccaccatctcgaggacccctccctctccgagcttgagaatttttcttccgaaataatcagcttcaagtccatggaggacctcgtaaatgaatttgatgagaagctcaatgtctgctttcggaactacaacgccaagaccgagaacctagctcccgtgaagaaccagttacagatccaagaggaggaggagacccttcaggacgaggaggtttgggatgctctgacagacaattacatcccttcactctcagaagactggagggatccaaacatcgaggctctgaatggcaactgctctgacactgagatccatgagaaagaagaggaagagttcaatgagaagagtgaaaatgattccggtatcaacgaggagcctctgctcacagcagatcaggtaattgaggagattgaggaaatgatgcagaactccccagaccctgaggaagaagaggaggttctggaagaagaggatggaggagaaacttcctcccaggcagactcggtcctcctgcaggagatgcaggcattgacacagaccttcaacaacaactggtcctatgaagggctgaggcacatgtctgggtctgagctgaccgagctgctggaccaggtggagggtgccatccgtgacttctcggaggagctggtgcagcagctggcccgccgggacgagctggagtttgagaaggaagtgaagaactcctttatcacggtgcttattgaggttcagaacaagcagaaggagcagcgagaactgatgaaaaagaggcggaaagagaaagggctgagcctgcagagcagccggatagagaagggaaaccagatgcctctcaagcgcttcagcatggaaggcatctccaacattctgcagagtggcatccgccagacctttggctcctcaggaactgacaaacaggtacgcgtagtctccctgctccaagctctcttcctagactcctgcagcttggcctccccagcaacgcagggggacagtgactcaccagaattatcccagcatttatttagggggttaggggtcctaacacttttttctcctcttaaggaggaacagagaatatctttttaaaaggcaaactttttttttttttttttttttgagctctagtgttctaggacatgggcaagacttaaaactcaacactgcttgtaggtctaagaattaagttgttttaaggatgaaatgcattaagagggagtccatttgatgatagatcccatcctagagtttagttaactttccaccacactggatcacctgccaagccattcccactaagactgcctctgcagcttcccagctctggttggaacccatgctgtggctttttgttggct

SEQ ID NO: 348731 - DNA, 821 bp, Homo sapiens
ctgacatcagagaccctgggcggggttgaggttctcttgcatatcttttttgacaaaagacaaacaattccttctcaaattgcactgcaaagaataagaaaatataatccccttggatttattctctgctttcagtctaaaggagaaaaagctccccaggattcctaaataacagagaagtttgtagtgtaggaagaatctagaagttgggatggagagaaatgtgggaaagtcttacttttaaagagacattccctaaagaggggtaagaagttctgaaacagtgacgtaccagtgaccatgaatgtttcagagaagtatctgaacacagtcattccttacgagaagaaagcctctcctccctcagtggaagacctgcagatgctgacaaacattctctttgccatgaaggaggataatgagaaggtgcctactttgctaacggactacattttaaaagtgctctgccctacctaaccttgccctttggagcagcctcgctgcaggaggtcactgagcaagagtcattccatcacagggactgcatgagaccatgtaacctccgacatgtatttaaacgtgtatagcttaacctggattaaacacgagcaagcgcgcggggtcctttgccgttggcttctagtgctagtaatcattggatgcatgatggggcagggccggtgatggtgcctcccccttgctggtgtcaggagaggggaaggcagccgctttcaccgctcattatgtagtctggctacagccctcaaaaacagcttatactcttaagactaattttgaaataaaaccttcatttaattaaa

SEQ ID NO: 348732 - DNA, 496 bp, Homo sapiens
aaggagaggggaagttgagcttctgttcagctgaggaggatggatacctgctggggcctggtgctgaagttctctttgccatgaaggaggataatgagaaggtgcctactttgctaacggactacattttaaaagtgctctgccctacctaaccttgccctttggagcagcctcgctgcaggaggtcactgagcaagagtcattccatcacagggactgcatgagaccatgtaacctccgacatgtatttaaacgtgtatagcttaacctggattaaacacgagcaagcgcgcggggtcctttgccgttggcttctagtgctagtaatcattggatgcatgatggggcagggccggtgatggtgcctcccccttgctggtgtcaggagaggggaaggcagccgctttcaccgctcattatgtagtctggctacagccctcaaaaacagcttatactcttaagactaattttgaaataaaaccttcatttaattaaa

SEQ ID NO: 348733 - DNA, 797 bp, Homo sapiens
  misc_feature (729)..(730): n is a, c, g, or t
gggtggggtggaggcgggagcggagccgggcgccgccggagctgcgcggggagcgctcgctggctggctggctggctggctctccgctgcgctgcgctgcgctccggccgctcccgcggcccgtggatgggggtgtccggctgagccccgggatccgcctccctccgccaggacccgcacagataaactcatcctgaaagtcgctgttgttctcctgctgagcaagaatggaggccccactggtgagtctggatgaagagtttgaggaccttcgaccctcctgctcggaggacccggaggagaagccccagtgtttctatggttcatctccccaccatctcgaggacccctccctctccgagcttgagaatttttcttccgaaataatcagcttcaagtccatggaggacctcgtaaatgaatttgatgagaagctcaatgtctgctttcggaactacaacgccaagaccgagaacctagctcccgtgaagaaccagttacagatccaagaggaggaggagacccttcaggacgaggaggtttgggatgctctgacagacaattacatcccttcactctcagaagactggagggatccaaacatcgaggctctgaatggcaactgctctgacactgagatccatgagaaagaagaggaagagttcaatgagaagagtgaaaatgattccggtatcaacgaggagcctctgctcacagcagatcagattnnggtgattgaggaaatgatgcagaactccccagttctggtttagctgttagagctatccactatcctg

SEQ ID NO: 348734 - DNA, 1701 bp, Homo sapiens
cgggagagcgattgttttactacagacgggcgggagaagggaccggggcggctgcgcggtggcggggcgcgctgccgtcgggtgggccccgggctctggaatgcggggagcagtgtttgacggcgtcgaggagataaactcatcctgaaagtcgctgttgttctcctgctgagcaagaatggaggccccactggtgagtctggatgaagagtttgaggaccttcgaccctcctgctcggaggacccggaggagaagccccagtgtttctatggttcatctccccaccatctcgaggacccctccctctccgagcttgagaatttttcttccgaaataatcagcttcaagtccatggaggacctcgtaaatgaatttgatgagaagctcaatgtctgctttcggaactacaacgccaagaccgagaacctagctcccgtgaagaaccagttacagatccaagaggaggaggagacccttcaggacgaggaggtttgggatgctctgacagacaattacatcccttcactctcagaagactggagggatccaaacatcgaggctctgaatggcaactgctctgacactgagatccatgagaaagaagaggaagagttcaatgagaagagtgaaaatgattccggtatcaacgaggagcctctgctcacagcagatcaggtaattgaggagattgaggaaatgatgcagaactccccagaccctgaggaagaagaggaggttctggaagaagaggatggaggagaaacttcctcccaggcagactcggtcctcctgcaggagatgcaggcattgacacagaccttcaacaacaactggtcctatgaagggctgaggcacatgtctgggtctgagctgaccgagctgctggaccaggtggagggtgccatccgtgacttctcggaggagctggtgcagcagctggcccgccgggacgagctggagtttgagaaggaagtgaagaactcctttatcacggtgcttattgaggttcagaacaagcagaaggagcagcgagaactgatgaaaaagaggcggaaagagaaagggctgagcctgcagagcagccggatagagaagggaaaccagatgcctctcaagcgcttcagcatggaaggcatctccaacattctgcagagtggcatccgccagacctttggctcctcaggaactgacaaacagtatctgaacacagtcattccttacgagaagaaagcctctcctccctcagtggaagacctgcagatgctgacaaacattctctttgccatgaaggaggataatgagaaggtgcctactttgctaacggactacattttaaaagtgctctgccctacctaaccttgccctttggagcagcctcgctgcaggaggtcactgagcaagagtcattccatcacagggactgcatgagaccatgtaacctccgacatgtatttaaacgtgtatagcttaacctggattaaacacgagcaagcgcgcggggtcctttgccgttggcttctagtgctagtaatcattggatgcatgatggggcagggccggtgatggtgcctcccccttgctggtgtcaggagaggggaaggcagccgctttcaccgctcattatgtagtctggctacagccctcaaaaacagcttatactcttaagactaattttgaaataaaaccttcatttaattaaa

SEQ ID NO: 348735 - DNA, 1080 bp, Homo sapiens
aatgcccctctagcagagaacagagttagcactctctcgtgtaccttcttcaggtgtaattgaggagattgaggaaatgatgcagaactccccagaccctgaggaagaagaggaggttctggaagaagaggatggaggagaaacttcctcccaggcagactcggtcctcctgcaggagatgcaggcattgacacagaccttcaacaacaactggtcctatgaagggctgaggcacatgtctgggtctgagctgaccgagctgctggaccaggtggagggtgccatccgtgacttctcggaggagctggtgcagcagctggcccgccgggacgagctggagtttgagaaggaagtgaagaactcctttatcacggtgcttattgaggttcagaacaagcagaaggagcagcgagaactgatgaaaaagaggcggaaagagaaagggctgagcctgcagagcagccggatagagaagggaaaccagatgcctctcaagcgcttcagcatggaaggcatctccaacattctgcagagtggcatccgccagacctttggctcctcaggaactgacaaacagtatctgaacacagtcattccttacgagaagaaagcctctcctccctcagtggaagacctgcagatgctgacaaacattctctttgccatgaaggaggataatgagaaggtgcctactttgctaacggactacattttaaaagtgctctgccctacctaaccttgccctttggagcagcctcgctgcaggaggtcactgagcaagagtcattccatcacagggactgcatgagaccatgtaacctccgacatgtatttaaacgtgtatagcttaacctggattaaacacgagcaagcgcgcggggtcctttgccgttggcttctagtgctagtaatcattggatgcatgatggggcagggccggtgatggtgcctcccccttgctggtgtcaggagaggggaaggcagccgctttcaccgctcattatgtagtctggctacagccctcaaaaacagcttatactcttaagactaattttgaaataaaaccttcatttaattaaa

SEQ ID NO: 348736 - DNA, 1581 bp, Homo sapiens
gggtggggtggaggcgggagcggagccgggcgccgccggagctgcgcggggagcgctcgctggctggctggctggctggctctccgctgcgctgcgctgcgctccggccgctcccgcggcccgtggatgggggtgtccggctgagccccgggatccgcctccctccgccaggacccgcacagataaactcatcctgaaagtcgctgttgttctcctgctgagcaagaatggaggccccactggtgagtctggatgaagagtttgaggaccttcgaccctcctgctcggaggacccggaggagaagccccagtgtttctatggttcatctccccaccatctcgaggacccctccctctccgagcttgagaatttttcttccgaaataatcagcttcaagtccatggaggacctcgtaaatgaatttgatgagaagctcaatgtctgctttcggaactacaacgccaagaccgagaacctagctcccgtgaagaaccagttacagatccaagaggaggaggagacccttcaggacgaggaggtttgggatgctctgacagacaattacatcccttcactctcagaagactggagggatccaaacatcgaggctctgaatggcaactgctctgacactgagatccatgagaaagaagaggaagagttcaatgagaagagtgaaaatgattccggtatcaacgaggagcctctgctcacagcagatcagggctgaggcacatgtctgggtctgagctgaccgagctgctggaccaggtggagggtgccatccgtgacttctcggaggagctggtgcagcagctggcccgccgggacgagctggagtttgagaaggaagtgaagaactcctttatcacggtgcttattgaggttcagaacaagcagaaggagcagcgagaactgatgaaaaagaggcggaaagagaaagggctgagcctgcagagcagccggatagagaagggaaaccagatgcctctcaagcgcttcagcatggaaggcatctccaacattctgcagagtggcatccgccagacctttggctcctcaggaactgacaaacagtatctgaacacagtcattccttacgagaagaaagcctctcctccctcagtggaagacctgcagatgctgacaaacattctctttgccatgaaggaggataatgagaaggtgcctactttgctaacggactacattttaaaagtgctctgccctacctaaccttgccctttggagcagcctcgctgcaggaggtcactgagcaagagtcattccatcacagggactgcatgagaccatgtaacctccgacatgtatttaaacgtgtatagcttaacctggattaaacacgagcaagcgcgcggggtcctttgccgttggcttctagtgctagtaatcattggatgcatgatggggcagggccggtgatggtgcctcccccttgctggtgtcaggagaggggaaggcagccgctttcaccgctcattatgtagtctggctacagccctcaaaaacagcttatactcttaagactaattttgaaataaaaccttcatttaattaaa

SEQ ID NO: 348737 - DNA, 731 bp, Homo sapiens
gtctctgtaagccagtgtcttacacttactgtctagtcacagaaccctggggcgttatctgggacagcctggtagctgagaggtccctgggtgtggtgacagtgtagcaagaagcatttgcccttcttgagtctctctcccccacagcgcttcagcatggaaggcatctccaacattctgcagagtggcatccgccagacctttggctcctcaggaactgacaaacagtatctgaacacagtcattccttacgagaagaaagcctctcctccctcagtggaagacctgcagatgctgacaaacattctctttgccatgaaggaggataatgagaaggtgcctactttgctaacggactacattttaaaagtgctctgccctacctaaccttgccctttggagcagcctcgctgcaggaggtcactgagcaagagtcattccatcacagggactgcatgagaccatgtaacctccgacatgtatttaaacgtgtatagcttaacctggattaaacacgagcaagcgcgcggggtcctttgccgttggcttctagtgctagtaatcattggatgcatgatggggcagggccggtgatggtgcctcccccttgctggtgtcaggagaggggaaggcagccgctttcaccgctcattatgtagtctggctacagccctcaaaaacagcttatactcttaagactaattttgaaataaaaccttcatttaattaaa

SEQ ID NO: 348738 - DNA, 1151 bp, Homo sapiens
gggtggggtggaggcgggagcggagccgggcgccgccggagctgcgcggggagcgctcgctggctggctggctggctggctctccgctgcgctgcgctgcgctccggccgctcccgcggcccgtggatgggggtgtccggctgagccccgggatccgcctccctccgccaggacccgcacagataaactcatcctgaaagtcgctgttgttctcctgctgagcaagaatggaggccccactggtgagtctggatgaagagtttgaggaccttcgaccctcctgctcggaggacccggaggagaagccccagtgtttctatggttcatctccccaccatctcgaggacccctccctctccgagcttgagaatttttcttccgaaataatcagcttcaagtccatggaggacctcgtaaatgaatttgatgagaagctcaatgtctgctttcggaactacaacgccaagaccgagaacctagctcccgtgaagaaccagttacagatccaagaggaggaggagacccttcaggacgaggaggtttgggatgctctgacagacaattacatcccttcactctcagaagactggagggatccaaacatcgaggctctgaatggcaactgctctgacactgagatccatgagaaagaagaggaagagttcaatgagaagagtgaaaatgattccggtatcaacgaggagcctctgctcacagcagatcaggtaattgaggagattgaggaaatgatgcagaactccccagaccctgaggaagaagaggaggttctggaagaagaggatggaggagaaacttcctcccaggcagactcggtcctcctgcaggagatgcaggcattgacacagaccttcaacaacaactggtcctatgaaggtgagggccctgggcgctgggctggccgaggaggaagcacctgctcggggccaggctctgggctgtgtgctttgtacatggctaatagaaccctgactgcctcagagcagagccttgcagatctaggtggtcagcaatacctttcttactcggcatcaggagagaagtttgcatttttgagaaaagaacaaggtagtcgagcaaaatttaaatgttaaaactaaccaaagaacaagactaaggcagaataagcagaa

SEQ ID NO: 348739 - DNA, 598 bp, Homo sapiens
aggtgcatcttggcatctgcacaatgctgtgcatactcgggtactatttcgtatttagattcttgttcacaaagcatcaagtcctatttccttaaaacatttgtttcttgcttttttttttaacctattatcatactttgaggattttgagatccttacgttttgtattcccaggtagttgaactaaaattcggtgggaaagacatccctgtcaccagcgccaaccggattgcgtacatccacttggtggcagactacaggctgaacaggcagatccgccagcactgcctggctttccgccagggccttgccaatgtcgtcagcctcgagtggctccgaatgtttgatcagcaagaaattcaggtaccctacctgctgactttctgggacacgcttgtcacaggaaatgaacaggctttcttaaaatttacctcaaatgttattatttgaacttttttccttaggtattaatttctggtgcacaagttcccataagcctagaggacctaaaatcctttacaaactattcaggtatgttatcactgctagttattgtttctgaaaatgttgcaggtggtcatatttccaaagtaatttt

SEQ ID NO: 348740 - DNA, 1157 bp, Homo sapiens
accccatcctgtgggcacggccttgtttggaaatagggtccaatagctgcgaggccttgtttggaaatagggtccaatagctgcgaggcgtgagttcatgtggttttcagtctcgcagtgtgtgatcatttgccgtagccaccttgggagactaacaaacctgcagttcctgaaggattcaccatccttctgttgaggaggagcatttgttggcttctgtctcacaagaaggatctgtctcttcataattccacgatttcgctcctaggtggtctgttccagagttctctgcatgcttagtgcgtgcattgaatgcctgcacgggatcctggagcacagtacctgcccactgaatatcagcttccatcttcggtactatgaggagaaaatacctgctctcttaggattgggtttaatatcaagttgagcatatggctctttgtttgtagaaggcttgtatattcgatgctaacgttgtcactgttctcttttgaaggctctctatgagaacatgctggtggagctgccctttgcaggcttctttctttccaagttgcttggaaccagtgccgacgtggacattcaccacctcgcctccctagaccctgaggtgtataagaatttgctctttctgaagagctacgaagacgatgtggaggagcttgggctgaacttcactgtggtgaacaatgacctgggagaggcgcaggtgaggggtcaggaggaggattcacatacctgtatagcaagtagcagcatctccttgtgtgtggaagtccatttgtgttacagcgtttgacttccgcacattttagttagaatgactgtggctgtgagttagacgtcgaagcatatagctccaaagcaccttagccctggcgtctgagctgagtgcagttcctgctcccacgcatgaagcctgttcctgcccggcagcccctcctgcggagctccactctcgaggctgcggcccaggcttgctgcttgtctggctcttcccggtgctgggggtggccgttcagcagcttcccggcaggaccccttgcttagtcctcactccttgcccgctcagagccacctcagctgctccagcactgtctagggggtgtgttcattacccatctggttacttttgttacttatatcctttttaaaaa

SEQ ID NO: 348741 - DNA, 891 bp, Homo sapiens
gtgggtgatctagaggatcccgtggatgaggaagtactagagaaatgtccagcaccaattctgttcaagtgtgatcaggtcaaagtgtgtgctagagcacaggggagttctgaaccaggattgcccccgacaggtcactcagctctatgtgccagcatccagacatgtgtggaggttccggcggatggggaggataggcccgctgcagtccaccctggacggtgagttctctaggacacagggttactgaggtatgaattacatgctgtcaaattcactcctttaatctacagatctgttatttttcataaacttatacagccatgtcactcccagcaggagctaccatgtagaaaagtttcatcacccacaaaattgcctctagctccattgcggccacctcttcagcagccacccatttctgttttgtcctgtcactttgccttttgcaaaaggcctccaaagggaaccatgctgtgtagtctgctcctggctccttttggtcagcacgctgcatttgagggtgctgtgtgggttgattgttccctctgttgctcagcagtattccagtgtggggatgcaccacagtttgtgaatccattcattggttgaaagacatttggttattttttctgtctctgggaatacgagtacagctgctataaacatctatgtacaggtttttctgtgaacatacattttgtttgacatggagtaagtttcactgggagtaagaatcctgagacatttggcaagtttatgtttaacttgatgagaagctgcagaactgtgttccagggtggctgcacggctttgcattcagaccagcaatgaatgagagcctctgttgttcccagtcctcatcagcacttacagttgtcatttaaaaaa

SEQ ID NO: 348742 - DNA, 5115 bp, Homo sapiens
agttccaggtgcaagcgccgggtttgctgcccgctgggcgcccctgcagcggcccgagctgtggccggcgtggatgaggggcaggcgaggcagggccgcccctccagtattgccgcccctcccgccccagggcagggctgggagggtacagcccgggggcgggctcgggtcgcctcccggccgccgcgtcctcgctgccccggctgcttccgcggcggcgctgcccgcacatgggctaggctgccaggatgttcagcttcgaaggcgacttcaagacgcggcccaaggtgtcccttggcggcgcgagcaggaaggaggaaaaggcttctcttttacatcgtactcaggaagaaagaagaaagagagaggaagaaaggcgaaggttgaaaaatgcaataattatccagtcatttattcgaggctatagagacagaaaacagcaatattccatccaaagaagtgcatttgatcgctgtgctaccttgtcacagtccgggggcgcttttcccattgctaatggccccaaccttacccttttggtaaggcagcttctgtttttttacaaacaaaatgaagactcaaaacgtttgatatggctgtatcagaacttaattaaacacagctctctgtttgtcaagcagttggatggatctgagagacttacatgcttatttcagataaaaagattgatgagcctctgttgcaggttgctgcaaaactgtaatgatgacagtttgaatgttgcacttccaatgagaatgcttgaagtattttcgtctgagaatacttacttgcctgttttacaagatgctagctatgtggtgtcagtgattgaacaaattttgcactacatgattcacaatgggtattataggtctctatatttgttgattaacagcaagcttccatcaagtattgaatattctgatttatctcgagttcctatagcaaaaattttgctagagaatgttctaaaaccattgcactttacttacaactcctgtccggaaggtgcgaggcaacaagtttttacagccttcacagaggagtttctggcagcaccttttacagatcagatttttcatttcatcattccggcgcttgcagatgcgcagaccgttttcccttacgagccctttctgaatgcactgttgttaatagagagtagatgttcaagaaagagtggtggagcaccctggcttttctatttcgttttaactgttggcgaaaattatttgggggccctctctgaggaagggctgctggtgtatttgcgggtgctgcagaccttcctctctcagttaccagtctctcctgccagcgcgagctgtcacgactcagccagtgactctgaggaggagagtgaagaagccgacaagccctcaagcccggaggatggcagactgtcagtatcatacataacagaggaatgcctgaagaagctggacacaaagcagcagaccaacaccctgctcaacctggtgtggagggactctgcgagcgaggaggtcttcaccaccatggcctccgtctgccacacgctgatggtgcagcaccgcatgatggtacccaaagtcaggcttctctacagtttagcctttaatgccaggtttctgagacatctttggtttctaatatcttccatgtcaacacggatgatcacagggtctatggtaccgttgcttcaggtgatatccaggggttctcctatgtcttttgaagattctagtcgaatcatcccactcttttacctttttagctccttgtttagtcattcactaatttccatacatgataacgaattcttcggtgatcccatagaagttgtaggtcaaagacaatcatcaatgatgccttttactttagaagagctgataatgttgtctcgatgccttcgagatgcatgcctggggatcatcaagttggcttatccagaaaccaagccagaagttcgagaagaatatattacagcatttcagagtattggagttactactagctctgaaatgcaacaatgcatacagatggaacagaaaagatggattcagttatttaaggttatcaccaatctagtgaaaatgttgaagtccagagacacgaggagaaatttttgtcctccaaaccactggctgtcagaacaagaagatattaaagcagataaggtcactcagctctatgtgccagcatccagacatgtgtggaggttccggcggatggggaggataggcccgctgcagtccaccctggacgtgggtttggagtccccgccgctgtctgtgtctgaggaaagacagcttgctgtcctgacagagttgccttttgtggttccatttgaggaacgagtaaagatctttcagaggttgatttatgcagataagcaagaagttcaaggagatggtccatttctggatggaattaatgtcacaataagaagaaattacatttatgaagatgcttatgacaaactttctccagaaaatgagcctgatttgaaaaagcggatccgtgtgcacttgctcaatgcccatggcctggatgaagctggcattgatggtggtggtattttcagagagtttttaaatgaactactgaagtcaggatttaaccccaaccaggggttctttaagactactaatgaagggcttctgtaccccaacccggctgctcagatgcttgtgggagattcttttgccagacattactacttcctaggcagaatgcttggaaaggctctctatgagaacatgctggtggagctgccctttgcaggcttctttctttccaagttgcttggaaccagtgccgacgtggacattcaccacctcgcctccctagaccctgaggtgtataagaatttgctctttctgaagagctacgaagacgatgtggaggagcttgggctgaacttcactgtggtgaacaatgacctgggagaggcgcaggtagttgaactaaaattcggtgggaaagacatccctgtcaccagcgccaaccggattgcgtacatccacttggtggcagactacaggctgaacaggcagatccgccagcactgcctggctttccgccagggccttgccaatgtcgtcagcctcgagtggctccgaatgtttgatcagcaagaaattcaggtattaatttctggtgcacaagttcccataagcctagaggacctaaaatcctttacaaactattcaggaggctattctgcagaccatcctgttattaaggtcttctggagagttgtggaagggttcactgatgaagaaaagcgcaaactgctgaagtttgtaacaagctgctctcgaccccctctcttggggtttaaggagttgtatcccgcattttgtattcacaacggaggctccgaccttgagcggctccccacagccagcacctgcatgaacctgctgaagctccccgagttctatgacgagacacttttgcgaagtaaacttctctatgcgattgaatgtgccgctggctttgagctgagctgaagctgatgctggggtcagacccctacagagaaccagtgcttccttcgtcagcagcgcctccccagacccacgaggatactcacactgcacgcctgaggctctcctaagctccttctttcattctgccattcctccctcccttccttttttaaatgatttttattacggtgtggtcacttatttagatggacattgcttttcaaataacttaaaataacacgttatgtgccatgtggctactttagtaatattgccaagaagagcacagtttttacactagtggcatctcagtgaaattaaccaaagatgaagctttggctttgctggtgagatcagagccctcctgagcaggcagcgccactccagggttcagacagggctgcacaggcggcagagatacagggtctgagggctgagacgccatggggccgctgctgcttatgtggttggattgtttacaagcctcattattaaaactgaaggcattttttttttctgctgcctttcccaaagtggttaggtttggaaaagagatgatgatggtaatattttatttgtgctttttaagccatttccccaaatgggactagcatgcttgttttcagtataccgtggcctgcctcatgatggtttggagatactgtctgtggatgtgaggtggggacttcattcattgtcctatttctatctccactttgtgcctggagagctttcaggggaggtggaggaggagggtctgccaagctactgcaacatctgtcacccactatacccagttacttgggggaggacagacactgtggtgtcattaaagttgtttgaaccaaagtggcggctgcatctttgtcccgatgctagccgtgccggtctcccatcatccgctcgccctcctttcccctgggctgcgcccacttgtcttcctggatatttgggggtgactcgccatgcttggcaccctctgcttcctggtgctgctctgactcgaagacgggacagtccctggtgcacatccagggaagaggagcgtcggtagttcttgcagtaggcactttatcaggacctgacctgttgctgggtgattttagtctctacaaacagaaagcgtttcaaagcgtcagctgtgggagcagagtgaccctttgctgatgctggggggaggggatctaaatcctcatttatctcttctatgtctagtattttactgtcactggaggctctgtgggctgtcatagttaattgaccataattagcaatatacttttaaagtgggaaagctgaatgacacttttaagacaatgaacattatcaaaacaaaatgtataatttcttaatttgaataataaattaagcgtttaaatgctatttgtagtcttgatatacagaaataaaataattagggttggtcttttttattttaggttgttttatgttgaatgttctatatcttattagttaatttgtatattttattagtattttggaaatagcatatctgagactgaagagaaattgacaattcacttatttgtggtttttttctcagctattctgagcttatttatttatttgtatgttctaatggctaaacatttacattaaatgttttttttcccaa

SEQ ID NO: 348743 - DNA, 5087 bp, Homo sapiens
  misc_feature (5060)..(5060): n is a, c, g, or t
agttccaggtgcaagcgccgggtttgctgcccgctgggcgcccctgcagcggcccgagctgtggccggcgtggatgaggggcaggcgaggcagggccgcccctccagtattgccgcccctcccgccccagggcagggctgggagggtacagcccgggggcgggctcgggtcgcctcccggccgccgcgtcctcgctgccccgggccgggcgggcgggcgccgagagcctcccagcccgccccgtgccccgcccgcccggctgcttccgcggcggcgctgcccgcacatgggctaggctgccaggatgttcagcttcgaaggcgacttcaagacgcggcccaaggtgtcccttggcggcgcgagcaggaaggaggaaaaggcttctcttttacatcgtactcaggaagaaagaagaaagagagaggaagaaaggcgaaggttgaaaaatgcaataattatccagtcatttattcgaggctatagagacagaaaacagcaatattccatccaaagaagtgcatttgatcgctgtgctaccttgtcacagtccgggggcgcttttcccattgctaatggccccaaccttacccttttggtaaggcagcttctgtttttttacaaacaaaatgaagactcaaaacgtttgatatggctgtatcagaacttaattaaacacagctctctgtttgtcaagcagttggatggatctgagagacttacatgcttatttcagataaaaagattgatgagcctctgttgcaggttgctgcaaaactgtaatgatgacagtttgaatgttgcacttccaatgagaatgcttgaagtattttcgtctgagaatacttacttgcctgttttacaagatgctagctatgtggtgtcagtgattgaacaaattttgcactacatgattcacaatgggtattataggtctctatatttgttgattaacagcaagcttccatcaagtattgaatattctgatttatctcgagttcctatagcaaaaattttgctagagaatgttctaaaaccattgcactttacttacaactcctgtccggaaggtgcgaggcaacaagtttttacagccttcacagaggagtttctggcagcaccttttacagatcagatttttcatttcatcattccggcgcttgcagatgcgcagaccgttttcccttacgagccctttctgaatgcactgttgttaatagagagtagatgttcaagaaagagtggtggagcaccctggcttttctatttcgttttaactgttggcgaaaattatttgggggccctctctgaggaagggctgctggtgtatttgcgggtgctgcagaccttcctctctcagttaccagtctctcctgccagcgcgagctgtcacgactcagccagtgactctgaggaggagagtgaagaagccgacaagccctcaagcccggaggatggcagactgtcagtatcatacataacagaggaatgcctgaagaagctggacacaaagcagcagaccaacaccctgctcaacctggtgtggagggactctgcgagcgaggaggtcttcaccaccatggcctccgtctgccacacgctgatggtgcagcaccgcatgatggtacccaaagtcaggcttctctacagtttagcctttaatgccaggtttctgagacatctttggtttctaatatcttccatgtcaacacggatgatcacagggtctatggtaccgttgcttcaggtgatatccaggggttctcctatgtcttttgaagattctagtcgaatcatcccactcttttacctttttagctccttgtttagtcattcactaatttccatacatgataacgaattcttcggtgatcccatagaagttgtaggtcaaagacaatcatcaatgatgccttttactttagaagagctgataatgttgtctcgatgccttcgagatgcatgcctggggatcatcaagttggcttatccagaaaccaagccagaagttcgagaagaatatattacagcatttcagagtattggagttactactagctctgaaatgcaacaatgcatacagatggaacagaaaagatggattcagttatttaaggttatcaccaatctagtgaaaatgttgaagtccagagacacgaggagaaatttttgtcctccaaaccactggctgtcagaacaagaagatattaaagcagataaggtcactcagctctatgtgccagcatccagacatgtgtggaggttccggcggatggggaggataggcccgctgcagtccaccctggacgtgggtttggagtccccgccgctgtctgtgtctgaggaaagacagcttgctgtcctgacagagttgccttttgtggttccatttgaggaacgagtaaagatctttcagaggttgatttatgcagataagcaagaagttcaaggagatggtccatttctggatggaattaatgtcacaataagaagaaattacatttatgaagatgcttatgacaaactttctccagaaaatgagcctgatttgaaaaagcggatccgtgtgcacttgctcaatgcccatggcctggatgaagctggcattgatggtggtggtattttcagagagtttttaaatgaactactgaagtcaggatttaaccccaaccaggggttctttaagactactaatgaagggcttctgtaccccaacccggctgctcagatgcttgtgggagattcttttgccagacattactacttcctaggcagaatgcttggaaaggctctctatgagaacatgctggtggagctgccctttgcaggcttctttctttccaagttgcttggaaccagtgccgacgtggacattcaccacctcgcctccctagaccctgaggtgtataagaatttgctctttctgaagagctacgaagacgatgtggaggagcttgggctgaacttcactgtggtgaacaatgacctgggagaggcgcaggtagttgaactaaaattcggtgggaaagacatccctgtcaccagcgccaaccggattgcgtacatccacttggtggcagactacaggctgaacaggcagatccgccagcactgcctggctttccgccagggccttgccaatgtcgtcagcctcgagtggctccgaatgtttgatcagcaagaaattcaggtattaatttctggtgcacaagttcccataagcctagaggacctaaaatcctttacaaactattcaggaggctattctgcagaccatcctgttattaaggtcttctggagagttgtggaagggttcactgatgaagaaaagcgcaaactgctgaagtttgtaacaagctgctctcgaccccctctcttggggtttaaggagttgtatcccgcattttgtattcacaacggaggctccgaccttgagcggctccccacagccagcacctgcatgaacctgctgaagctccccgagttctatgacgagacacttttgcgaagtaaacttctctatgcgattgaatgtgccgctggctttgagctgagctgaagctgatgctggggtcagacccctacagagaaccagtgcttccttcgtcagcagcgcctccccagacccacgaggatactcacactgcacgcctgaggctctcctaagctccttctttcattctgccattcctccctcccttccttttttaaatgatttttattacggtgtggtcacttatttagatggacattgcttttcaaataacttaaaataacacgttatgtgccatgtggctactttagtaatattgccaagaagagcacagtttttacactagtggcatctcagtgaaattaaccaaagatgaagctttggctttgctggtgagatcagagccctcctgagcaggcagcgccactccagggttcagacagggctgcacaggcggcagagatacagggtctgagggctgagacgccatggggccgctgctgcttatgtggttggattgtttacaagcctcattattaaaactgaaggcattttttttttctgctgcctttcccaaagtggttaggtttggaaaagagatgatgatggtaatattttatttgtgctttttaagccatttccccaaatgggactagcatgcttgttttcagtataccgtggcctgcctcatgatggtttggagatactgtctgtggatgtgaggtggggacttcattcattgtcctatttctatctccactttgtgcctggagagctttcaggggaggtggaggaggagggtctgccaagctactgcaacatctgtcacccactatacccagttacttgggggaggacagacactgtggtgtcattaaagttgtttgaaccaaagtggcggctgcatctttgtcccgatgctagccgtgccggtctcccatcatccgctcgccctcctttcccctgggctgcgcccacttgtcttcctggatatttgggggtgactcgccatgcttggcaccctctgcttcctggtgctgctctgactcgaagacgggacagtccctggtgcacatccagggaagaggagcgtcggtagttcttgcagtaggcactttatcaggacctgacctgttgctgggtgattttagtctctacaaacagaaagcgtttcaaagcgtcagctgtgggagcagagtgaccctttgctgatgctggggggaggggatctaaatcctcatttatctcttctatgtctagtattttactgtcactggaggctctgtgggctgtcatagttaattgaccataattagcaatatacttttaaagtgggaaagctgaatgacacttttaagacaatgaacattatcaaaacaaaatgtataatttcttaatttgaataataaattaagcgtttaaatgctatttgtagtcttgatatacagaaataaaataattagggttggtcttttttattttaggttgttttatgttgaatgttctatatcttattagttaatttgtatattttattagtattttggaaatagcatatctgagaccccgnaggggtcctctagagtcgccacacgcg

SEQ ID NO: 348744 - DNA, 3045 bp, Homo sapiens
gagttatccccacctcctaccccacgacgaggagaaatttttgtcctccaaaccactggctgtcagaacaagaagatattaaagcagataaggtcactcagctctatgtgccagcatccagacatgtgtggaggttccggcggatggggaggataggcccgctgcagtccaccctggacgtgggtttggagtccccgccgctgtctgtgtctgaggaaagacagcttgctgtcctgacagagttgccttttgtggttccatttgaggaacgagtaaagatctttcagaggttgatttatgcagataagcaagaagttcaaggagatggtccatttctggatggaattaatgtcacaataagaagaaattacatttatgaagatgcttatgacaaactttctccagaaaatgagcctgatttgaaaaagcggatccgtgtgcacttgctcaatgcccatggcctggatgaagctggcattgatggtggtggtattttcagagagtttttaaatgaactactgaagtcaggatttaaccccaaccaggggttctttaagactactaatgaagggcttctgtaccccaacccggctgctcagatgcttgtgggagattcttttgccagacattactacttcctaggcagaatgcttggaaaggctctctatgagaacatgctggtggagctgccctttgcaggcttctttctttccaagttgcttggaaccagtgccgacgtggacattcaccacctcgcctccctagaccctgaggtgtataagaatttgctctttctgaagagctacgaagacgatgtggaggagcttgggctgaacttcactgtggtgaacaatgacctgggagaggcgcaggtagttgaactaaaattcggtgggaaagacatccctgtcaccagcgccaaccggattgcgtacatccacttggtggcagactacaggctgaacaggcagatccgccagcactgcctggctttccgccagggccttgccaatgtcgtcagcctcgagtggctccgaatgtttgatcagcaagaaattcaggtattaatttctggtgcacaagttcccataagcctagaggacctaaaatcctttacaaactattcaggaggctattctgcagaccatcctgttattaaggtcttctggagagttgtggaagggttcactgatgaagaaaagcgcaaactgctgaagtttgtaacaagctgctctcgaccccctctcttggggtttaaggagttgtatcccgcattttgtattcacaacggaggctccgaccttgagcggctccccacagccagcacctgcatgaacctgctgaagctccccgagttctatgacgagacacttttgcgaagtaaacttctctatgcgattgaatgtgccgctggctttgagctgagctgaagctgatgctggggtcagacccctacagagaaccagtgcttccttcgtcagcagcgcctccccagacccacgaggatactcacactgcacgcctgaggctctcctaagctccttctttcattctgccattcctccctcccttccttttttaaatgatttttattacggtgtggtcacttatttagatggacattgcttttcaaataacttaaaataacacgttatgtgccatgtggctactttagtaatattgccaagaagagcacagtttttacactagtggcatctcagtgaaattaaccaaagatgaagctttggctttgctggtgagatcagagccctcctgagcaggcagcgccactccagggttcagacagggctgcacaggcggcagagatacagggtctgagggctgagacgccatggggccgctgctgcttatgtggttggattgtttacaagcctcattattaaaactgaaggcattttttttttctgctgcctttcccaaagtggttaggtttggaaaagagatgatgatggtaatattttatttgtgctttttaagccatttccccaaatgggactagcatgcttgttttcagtataccgtggcctgcctcatgatggtttggagatactgtctgtggatgtgaggtggggacttcattcattgtcctatttctatctccactttgtgcctggagagctttcaggggaggtggaggaggagggtctgccaagctactgcaacatctgtcacccactatacccagttacttgggggaggacagacactgtggtgtcattaaagttgtttgaaccaaagtggcggctgcatctttgtcccgatgctagccgtgccggtctcccatcatccgctcgccctcctttcccctgggctgcgcccacttgtcttcctggatatttgggggtgactcgccatgcttggcaccctctgcttcctggtgctgctctgactcgaagacgggacagtccctggtgcacatccagggaagaggagcgtcggtagttcttgcagtaggcactttatcaggacctgacctgttgctgggtgattttagtctctacaaacagaaagcgtttcaaagcgtcagctgtgggagcagagtgaccctttgctgatgctggggggaggggatctaaatcctcatttatctcttctatgtctagtattttactgtcactggaggctctgtgggctgtcatagttaattgaccataattagcaatatacttttaaagtgggaaagctgaatgacacttttaagacaatgaacattatcaaaacaaaatgtataatttcttaatttgaataataaattaagcgtttaaatgctatttgtagtcttgatatacagaaataaaataattagggttggtcttttttattttaggttgttttatgttgaatgttctatatcttattagttaatttgtatattttattagtattttggaaatagcatatctgagactgaagagaaattgacaattcacttatttgtggtttttttctcagctattctgagcttatttatttatttgtatgttctaatggctaaacatttacattaaatgttttttttcccaa

SEQ ID NO: 348745 - DNA, 5266 bp, Homo sapiens
  misc_feature (4934)..(4934): n is a, c, g, or t
agttccaggtgcaagcgccgggtttgctgcccgctgggcgcccctgcagcggcccgagctgtggccggcgtggatgaggggcaggcgaggcagggccgcccctccagtattgccgcccctcccgccccagggcagggctgggagggtacagcccgggggcgggctcgggtcgcctcccggccgccgcgtcctcgctgccccgggccgggcgggcgggcgccgagagcctcccagcccgccccgtgccccgcccgcccggctgcttccgcggcggcgctgcccgcacatgggctaggctgccaggatgttcagcttcgaaggcgacttcaagacgcggcccaaggtgtcccttggcggcgcgagcaggaaggaggaaaaggcttctcttttacatcgtactcaggaagaaagaagaaagagagaggaagaaaggcgaaggttgaaaaatgcaataattatccagtcatttattcgaggctatagagacagaaaacagcaatattccatccaaagaagtgcatttgatcgctgtgctaccttgtcacagtccgggggcgcttttcccattgctaatggccccaaccttacccttttggtaaggcagcttctgtttttttacaaacaaaatgaagactcaaaacgtttgatatggctgtatcagaacttaattaaacacagctctctgtttgtcaagcagttggatggatctgagagacttacatgcttatttcagataaaaagattgatgagcctctgttgcaggttgctgcaaaactgtaatgatgacagtttgaatgttgcacttccaatgagaatgcttgaagtattttcgtctgagaatacttacttgcctgttttacaagatgctagctatgtggtgtcagtgattgaacaaattttgcactacatgattcacaatgggtattataggtctctatatttgttgattaacagcaagcttccatcaagtattgaatattctgatttatctcgagttcctatagcaaaaattttgctagagaatgttctaaaaccattgcactttacttacaactcctgtccggaaggtgcgaggcaacaagtttttacagccttcacagaggagtttctggcagcaccttttacagatcagatttttcatttcatcattccggcgcttgcagatgcgcagaccgttttcccttacgagccctttctgaatgcactgttgttaatagagagtagatgttcaagaaagagtggtggagcaccctggcttttctatttcgttttaactgttggcgaaaattatttgggggccctctctgaggaagggctgctggtgtatttgcgggtgctgcagaccttcctctctcagttaccagtctctcctgccagcgcgagctgtcacgactcagccagtgactctgaggaggagagtgaagaagccgacaagccctcaagcccggaggatggcagactgtcagtatcatacataacagaggaatgcctgaagaagctggacacaaagcagcagaccaacaccctgctcaacctggtgtggagggactctgcgagcgaggaggtcttcaccaccatggcctccgtctgccacacgctgatggtgcagcaccgcatgatggtacccaaagtcaggcttctctacagtttagcctttaatgccaggtttctgagacatctttggtttctaatatcttccatgtcaacacggatgatcacagggtctatggtaccgttgcttcaggtgatatccaggggttctcctatgtcttttgaagattctagtcgaatcatcccactcttttacctttttagctccttgtttagtcattcactaatttccatacatgataacgaattcttcggtgatcccatagaagttgtaggtcaaagacaatcatcaatgatgccttttactttagaagagctgataatgttgtctcgatgccttcgagatgcatgcctggggatcatcaagttggcttatccagaaaccaagccagaagttcgagaagaatatattacagcatttcagagtattggagttactactagctctgaaatgcaacaatgcatacagatggaacagaaaagatggattcagttatttaaggttatcaccaatctagtgaaaatgttgaagtccagagacacgaggagaaatttttgtcctccaaaccactggctgtcagaacaagaagatattaaagcagataaggtcactcagctctatgtgccagcatccagacatgtgtggaggttccggcggatggggaggataggcccgctgcagtccaccctggacgtgggtttggagtccccgccgctgtctgtgtctgaggaaagacagcttgctgtcctgacagagttgccttttgtggttccatttgaggaacgagtaaagatctttcagaggttgatttatgcagataagcaagaagttcaaggagatggtccatttctggatggaattaatgtcacaataagaagaaattacatttatgaagatgcttatgacaaactttctccagaaaatgagcctgatttgaaaaagcggatccgtgtgcacttgctcaatgcccatggcctggatgaagctggcattgatggtggtggtattttcagagagtttttaaatgaactactgaagtcaggatttaaccccaaccaggggttctttaagactactaatgaagggcttctgtaccccaacccggctgctcagatgcttgtgggagattcttttgccagacattactacttcctaggcagaatgcttggaaaggctctctatgagaacatgctggtggagctgccctttgcaggcttctttctttccaagttgcttggaaccagtgccgacgtggacattcaccacctcgcctccctagaccctgaggtgtataagaatttgctctttctgaagagctacgaagacgatgtggaggagcttgggctgaacttcactgtggtgaacaatgacctgggagaggcgcaggtagttgaactaaaattcggtgggaaagacatccctgtcaccagcgccaaccggattgcgtacatccacttggtggcagactacaggctgaacaggcagatccgccagcactgcctggctttccgccagggccttgccaatgtcgtcagcctcgagtggctccgaatgtttgatcagcaagaaattcaggtattaatttctggtgcacaagttcccataagcctagaggacctaaaatcctttacaaactattcaggaggctattctgcagaccatcctgttattaaggtcttctggagagttgtggaagggttcactgatgaagaaaagcgcaaactgctgaagtttgtaacaagctgctctcgaccccctctcttggggtttaaggagttgtatcccgcattttgtattcacaacggaggctccgaccttgagcggctccccacagccagcacctgcatgaacctgctgaagctccccgagttctatgacgagacacttttgcgaagtaaacttctctatgcgattgaatgtgccgctggctttgagctgagctgaagctgatgctggggtcagacccctacagagaaccagtgcttccttcgtcagcagcgcctccccagacccacgaggatactcacactgcacgcctgaggctctcctaagctccttctttcattctgccattcctccctcccttccttttttaaatgatttttattacggtgtggtcacttatttagatggacattgcttttcaaataacttaaaataacacgttatgtgccatgtggctactttagtaatattgccaagaagagcacagtttttacactagtggcatctcagtgaaattaaccaaagatgaagctttggctttgctggtgagatcagagccctcctgagcaggcagcgccactccagggttcagacagggctgcacaggcggcagagatacagggtctgagggctgagacgccatggggccgctgctgcttatgtggttggattgtttacaagcctcattattaaaactgaaggcattttttttttctgctgcctttcccaaagtggttaggtttggaaaagagatgatgatggtaatattttatttgtgctttttaagccatttccccaaatgggactagcatgcttgttttcagtataccgtggcctgcctcatgatggtttggagatactgtctgtggatgtgaggtggggacttcattcattgtcctatttctatctccactttgtgcctggagagctttcaggggaggtggaggaggagggtctgccaagctactgcaacatctgtcacccactatacccagttacttgggggaggacagacactgtggtgtcattaaagttgtttgaaccaaagtggcggctgcatctttgtcccgatgctagccgtgccggtctcccatcatccgctcgccctcctttcccctgggctgcgcccacttgtcttcctggatatttgggggtgactcgccatgcttggcaccctctgcttcctggtgctgctctgactcgaagacgggacagtccctggtgcacatccagggaagaggagcgtcggtagttcttgcagtaggcactttatcaggacctgacctgttgctgggtgattttagtctctacaaacagaaagcgtttcaaagcgtcagctgtgggagcagagtgaccctttgctgatgctggggggaggggatctaaatcctcatttatctcttctatgtctagtattttactgtcactggaggctctgtgggctgtcatagttaattgaccataattagcaatatacttttaaagtgggaaagctgaatgacacttttaagacaatgaacattatcaaaacaaaatgtataatttcttaatttgaataataaattaagcgtttaaatgctaaaaaaaaaaaaaaaanaaaaaaaaaaaaaaaaaaaaaaaaaaaaaaaaaaaaaaaaaaaaaaaaggaaaaaaaaaaaaaaaaaaaaaaaaaaaaaacttgtggcccgcttgggccaaatcaattttaaactagaccaagttaatcattgcgcccgaaattggagctaattggccaaattccccttatagggagccgtttaaaaattaattggccgacgtttaaaaacttcgaaactggaaaaaccttgggtttaccaaactaaatcgctttgcagaaaatccccttttgacaagttggcgtaataccaaaaaggcccgaacctcgcctttccagttgcccacccttgg

SEQ ID NO: 348746 - DNA, 5070 bp, Homo sapiens
agttccaggtgcaagcgccgggtttgctgcccgctgggcgcccctgcagcggcccgagctgtggccggcgtggatgaggggcaggcgaggcagggccgcccctccagtattgccgcccctcccgccccagggcagggctgggagggtacagcccgggggcgggctcgggtcgcctcccggccgccgcgtcctcgctgccccgggccgggcgggcgggcgccgagagcctcccagcccgccccgtgccccgcccgcccggctgcttccgcggcggcgctgcccgcacatgggctaggctgccaggatgttcagcttcgaaggcgacttcaagacgcggcccaaggtgtcccttggcggcgcgagcaggaaggaggaaaaggcttctcttttacatcgtactcaggaagaaagaagaaagagagaggaagaaaggcgaaggttgaaaaatgcaataattatccagtcatttattcgaggctatagagacagaaaacagcaatattccatccaaagaagtgcatttgatcgctgtgctaccttgtcacagtccgggggcgcttttcccattgctaatggccccaaccttacccttttggtaaggcagcttctgtttttttacaaacaaaatgaagactcaaaacgtttgatatggctgtatcagaacttaattaaacacagctctctgtttgtcaagcagttggatggatctgagagacttacatgcttatttcagataaaaagattgatgagcctctgttgcaggttgctgcaaaactgtaatgatgacagtttgaatgttgcacttccaatgagaatgcttgaagtattttcgtctgagaatacttacttgcctgttttacaagatgctagctatgtggtgtcagtgattgaacaaattttgcactacatgattcacaatgggtattataggtctctatatttgttgattaacagcaagcttccatcaagtattgaatattctgatttatctcgagttcctatagcaaaaattttgctagagaatgttctaaaaccattgcactttacttacaactcctgtccggaaggtgcgaggcaacaagtttttacagccttcacagaggagtttctggcagcaccttttacagatcagatttttcatttcatcattccggcgcttgcagatgcgcagaccgttttcccttacgagccctttctgaatgcactgttgttaatagagagtagatgttcaagaaagagtggtggagcaccctggcttttctatttcgttttaactgttggcgaaaattatttgggggccctctctgaggaagggctgctggtgtatttgcgggtgctgcagaccttcctctctcagttaccagtctctcctgccagcgcgagctgtcacgactcagccagtgactctgaggaggagagtgaagaagccgacaagccctcaagcccggaggatggcagactgtcagtatcatacataacagaggaatgcctgaagaagctggacacaaagcagcagaccaacaccctgctcaacctggtgtggagggactctgcgagcgaggaggtcttcaccaccatggcctccgtctgccacacgctgatggtgcagcaccgcatgatggtacccaaagtcaggcttctctacagtttagcctttaatgccaggtttctgagacatctttggtttctaatatcttccatgtcaacacggatgatcacagggtctatggtaccgttgcttcaggtgatatccaggggttctcctatgtcttttgaagattctagtcgaatcatcccactcttttacctttttagctccttgtttagtcattcactaatttccatacatgataacgaattcttcggtgatcccatagaagttgtaggtcaaagacaatcatcaatgatgccttttactttagaagagctgataatgttgtctcgatgccttcgagatgcatgcctggggatcatcaagttggcttatccagaaaccaagccagaagttcgagaagaatatattacagcatttcagagtattggagttactactagctctgaaatgcaacaatgcatacagatggaacagaaaagatggattcagttatttaaggttatcaccaatctagtgaaaatgttgaagtccagagacacgaggagaaatttttgtcctccaaaccactggctgtcagaacaagaagatattaaagcagataaggtcactcagctctatgtgccagcatccagacatgtgtggaggttccggcggatggggaggataggcccgctgcagtccaccctggacgtgggtttggagtccccgccgctgtctgtgtctgaggaaagacagcttgctgtcctgacagagttgccttttgtggttccatttgaggaacgagtaaagatctttcagaggttgatttatgcagataagcaagaagttcaaggagatggtccatttctggatggaattaatgtcacaataagaagaaattacatttatgaagatgcttatgacaaactttctccagaaaatgagcctgatttgaaaaagcggatccgtgtgcacttgctcaatgcccatggcctggatgaagctggcattgatggtggtggtattttcagagagtttttaaatgaactactgaagtcaggatttaaccccaaccaggggttctttaagactactaatgaagggcttctgtaccccaacccggctgctcagatgcttgtgggagattcttttgccagacattactacttcctaggcagaatgcttggaaaggctctctatgagaacatgctggtggagctgccctttgcaggcttctttctttccaagttgcttggaaccagtgccgacgtggacattcaccacctcgcctccctagaccctgaggtgtataagaatttgctctttctgaagagctacgaagacgatgtggaggagcttgggctgaacttcactgtggtgaacaatgacctgggagaggcgcaggtagttgaactaaaattcggtgggaaagacatccctgtcaccagcgccaaccggattgcgtacatccacttggtggcagactacaggctgaacaggcagatccgccagcactgcctggctttccgccagggccttgccaatgtcgtcagcctcgagtggctccgaatgtttgatcagcaagaaattcaggtattaatttctggtgcacaagttcccataagcctagaggacctaaaatcctttacaaactattcaggaggctattctgcagaccatcctgttattaaggtcttctggagagttgtggaagggttcactgatgaagaaaagcgcaaactgctgaagtttgtaacaagctgctctcgaccccctctcttggggtttaaggagttgtatcccgcattttgtattcacaacggaggctccgaccttgagcggctccccacagccagcacctgcatgaacctgctgaagctccccgagttctatgacgagacacttttgcgaagtaaacttctctatgcgattgaatgtgccgctggctttgagctgagctgaagctgatgctggggtcagacccctacagagaaccagtgcttccttttttaaatgatttttattacggtgtggtcacttatttagatggacattgcttttcaaataacttaaaataacacgttatgtgccatgtggctactttagtaatattgccaagaagagcacagtttttacactagtggcatctcagtgaaattaaccaaagatgaagctttggctttgctggtgagatcagagccctcctgagcaggcagcgccactccagggttcagacagggctgcacaggcggcagagatacagggtctgagggctgagacgccatggggccgctgctgcttatgtggttggattgtttacaagcctcattattaaaactgaaggcattttttttttctgctgcctttcccaaagtggttaggtttggaaaagagatgatgatggtaatattttatttgtgctttttaagccatttccccaaatgggactagcatgcttgttttcagtataccgtggcctgcctcatgatggtttggagatactgtctgtggatgtgaggtggggacttcattcattgtcctatttctatctccactttgtgcctggagagctttcaggggaggtggaggaggagggtctgccaagctactgcaacatctgtcacccactatacccagttacttgggggaggacagacactgtggtgtcattaaagttgtttgaaccaaagtggcggctgcatctttgtcccgatgctagccgtgccggtctcccatcatccgctcgccctcctttcccctgggctgcgcccacttgtcttcctggatatttgggggtgactcgccatgcttggcaccctctgcttcctggtgctgctctgactcgaagacgggacagtccctggtgcacatccagggaagaggagcgtcggtagttcttgcagtaggcactttatcaggacctgacctgttgctgggtgattttagtctctacaaacagaaagcgtttcaaagcgtcagctgtgggagcagagtgaccctttgctgatgctggggggaggggatctaaatcctcatttatctcttctatgtctagtattttactgtcactggaggctctgtgggctgtcatagttaattgaccataattagcaatatacttttaaagtgggaaagctgaatgacacttttaagacaatgaacattatcaaaacaaaatgtataatttcttaatttgaataataaattaagcgtttaaatgctatttgtagtcttgatatacagaaataaaataattagggttggtcttttttattttaggttgttttatgttgaatgttctatatcttattagttaatttgtatattttattagtattttggaaatagcatatctgagactgaagagaaattgacaattcacttatttgtggtttttttctcagctattctgagcttatttatttatttgtatgttctaatggctaaacatttacattaaatgttttttttcccaa

SEQ ID NO: 348747 - DNA, 4929 bp, Homo sapiens
agttccaggtgcaagcgccgggtttgctgcccgctgggcgcccctgcagcggcccgagctgtggccggcgtggatgaggggcaggcgaggcagggccgcccctccagtattgccgcccctcccgccccagggcagggctgggagggtacagcccgggggcgggctcgggtcgcctcccggccgccgcgtcctcgctgccccgggccgggcgggcgggcgccgagagcctcccagcccgccccgtgccccgcccgcccggctgcttccgcggcggcgctgcccgcacatgggctaggctgccaggatgttcagcttcgaaggcgacttcaagacgcggcccaaggtgtcccttggcggcgcgagcaggaaggaggaaaaggcttctcttttacatcgtactcaggaagaaagaagaaagagagaggaagaaaggcgaaggttgaaaaatgcaataattatccagtcatttattcgaggctatagagacagaaaacagcaatattccatccaaagaagtgcatttgatcgctgtgctaccttgtcacagtccgggggcgcttttcccattgctaatggccccaaccttacccttttggtaaggcagcttctgtttttttacaaacaaaatgaagactcaaaacgtttgatatggctgtatcagaacttaattaaacacagctctctgtttgtcaagcagttggatggatctgagagacttacatgcttatttcagataaaaagattgatgagcctctgttgcaggttgctgcaaaactgtaatgatgacagtttgaatgttgcacttccaatgagaatgcttgaagtattttcgtctgagaatacttacttgcctgttttacaagatgctagctatgtggtgtcagtgattgaacaaattttgcactacatgattcacaatgggtattataggtctctatatttgttgattaacagcaagcttccatcaagtattgaatattctgatttatctcgagttcctatagcaaaaattttgctagagaatgttctaaaaccattgcactttacttacaactcctgtccggaaggtgcgaggcaacaagtttttacagccttcacagaggagtttctggcagcaccttttacagatcagatttttcatttcatcattccggcgcttgcagatgcgcagaccgttttcccttacgagccctttctgaatgcactgttgttaatagagagtagatgttcaagaaagagtggtggagcaccctggcttttctatttcgttttaactgttggcgaaaattatttgggggccctctctgaggaagggctgctggtgtatttgcgggtgctgcagaccttcctctctcagttaccagtctctcctgccagcgcgagctgtcacgactcagccagtgactctgaggaggagagtgaagaagccgacaagccctcaagcccggaggatggcagactgtcagtatcatacataacagaggaatgcctgaagaagctggacacaaagcagcagaccaacaccctgctcaacctggtgtggagggactctgcgagcgaggaggtcttcaccaccatggcctccgtctgccacacgctgatggtgcagcaccgcatgatggtacccaaagtcaggcttctctacagtttagcctttaatgccaggtttctgagacatctttggtttctaatatcttccatgtcaacacggatgatcacagggtctatggtaccgttgcttcaggtgatatccaggggttctcctatgtcttttgaagattctagtcgaatcatcccactcttttacctttttagctccttgtttagtcattcactaatttccatacatgataacgaattcttcggtgatcccatagaagttgtaggtcaaagacaatcatcaatgatgccttttactttagaagagctgataatgttgtctcgatgccttcgagatgcatgcctggggatcatcaagttggcttatccagaaaccaagccagaagttcgagaagaatatattacagcatttcagagtattggagttactactagctctgaaatgcaacaatgcatacagatggaacagaaaagatggattcagttatttaaggttatcaccaatctagtgaaaatgttgaagtccagagacacgaggagaaatttttgtcctccaaaccactggctgtcagaacaagaagatattaaagcagataaggtcactcagctctatgtgccagcatccagacatgtgtggaggttccggcggatggggaggataggcccgctgcagtccaccctggacgtgggtttggagtccccgccgctgtctgtgtctgaggaaagacagcttgctgtcctgacagagttgccttttgtggttccatttgaggaacgagtaaagatctttcagaggttgatttatgcagataagcaagaagttcaaggagatggtccatttctggatggaattaatgtcacaataagaagaaattacatttatgaagatgcttatgacaaactttctccagaaaatgagcctgatttgaaaaagcggatccgtgtgcacttgctcaatgcccatggcctggatgaagctggcattgatggtggtggtattttcagagagtttttaaatgaactactgaagtcaggatttaaccccaaccaggggttctttaagactactaatgaagggcttctgtaccccaacccggctgctcagatgcttgtgggagattcttttgccagacattactacttcctaggcagaatgcttggaaaggctctctatgagaacatgctggtggagctgccctttgcaggcttctttctttccaagttgcttggaaccagtgccgacgtggacattcaccacctcgcctccctagaccctgaggtgtataagaatttgctctttctgaagagctacgaagacgatgtggaggagcttgggctgaacttcactgtggtgaacaatgacctgggagaggcgcaggtagttgaactaaaattcggtgggaaagacatccctgtcaccagcgccaaccggattgcgtacatccacttggtggcagactacaggctgaacaggcagatccgccagcactgcctggctttccgccagggccttgccaatgtcgtcagcctcgagtggctccgaatgtttgatcagcaagaaattcaggtattaatttctggtgcacaagttcccataagcctagaggacctaaaatcctttacaaactattcaggaggctattctgcagaccatcctgttattaaggtcttctggagagttgtggaagggttcactgatgaagaaaagcgcaaactgctgaagtttgtaacaagctgctctcgaccccctctcttggggtttaaggagttgtatcccgcattttgtattcacaacggaggctccgaccttgagcggctccccacagccagcacctgcatgaacctgctgaagctccccgagttctatgacgagacacttttgcgaagtaaacttctctatgcgattgaatgtgccgctggctttgagctgagctgaagctgatgctggggtcagacccctacagagaaccagtgcttccttcgtcagcagcgcctccccagacccacgaggatactcacactgcacgcctgaggctctcctaagctccttctttcattctgccattcctccctcccttccttttttaaatgatttttattacggtgtggtcacttatttagatggacattgcttttcaaataacttaaaataacacgttatgtgccatgtggctactttagtaatattgccaagaagagcacagtttttacactagtggcatctcagtgaaattaaccaaagatgaagctttggctttgctggtgagatcagagccctcctgagcaggcagcgccactccagggttcagacagggctgcacaggcggcagagatacagggtctgagggctgagacgccatggggccgctgctgcttatgtggttggattgtttacaagcctcattattaaaactgaaggcattttttttttctgctgcctttcccaaagtggttaggtttggaaaagagatgatgatggtaatattttatttgtgctttttaagccatttccccaaatgggactagcatgcttgttttcagtataccgtggcctgcctcatgatggtttggagatactgtctgtggatgtgaggtggggacttcattcattgtcctatttctatctccactttgtgcctggagagctttcaggggaggtggaggaggagggtctgccaagctactgcaacatctgtcacccactatacccagttacttgggggaggacagacactgtggtgtcattaaagttgtttgaaccaaagtggcggctgcatctttgtcccgatgctagccgtgccggtctcccatcatccgctcgccctcctttcccctgggctgcgcccacttgtcttcctggatatttgggggtgactcgccatgcttggcaccctctgcttcctggtgctgctctgactcgaagacgggacagtccctggtgcacatccagggaagaggagcgtcggtagttcttgcagtaggcactttatcaggacctgacctgttgctgggtgattttagtctctacaaacagaaagcgtttcaaagcgtcagctgtgggagcagagtgaccctttgctgatgctggggggaggggatctaaatcctcatttatctcttctatgtctagtattttactgtcactggaggctctgtgggctgtcatcgtcctccccccctcccatctctccttcctggcccgtccctggcccaaagcacgcggtagggacggtggacgtcggcgggtcttagtgtatgatttttttgtttggatcataaagtatgcgtttgcatgctaaaaaaaaaaaa

SEQ ID NO: 348748 - DNA, 2347 bp, Homo sapiens
aggtgcatcttggcatctgcacaatgctgtgcatactcgggtactatttcgtatttagattcttgttcacaaagcatcaagtcctatttccttaaaacatttgtttcttgcttttttttttaacctattatcatactttgaggattttgagatccttacgttttgtattcccaggtagttgaactaaaattcggtgggaaagacatccctgtcaccagcgccaaccggattgcgtacatccacttggtggcagactacaggctgaacaggcagatccgccagcactgcctggctttccgccagggccttgccaatgtcgtcagcctcgagtggctccgaatgtttgatcagcaagaaattcaggtattaatttctggtgcacaagttcccataagcctagaggacctaaaatcctttacaaactattcaggaggctattctgcagaccatcctgttattaaggtcttctggagagttgtggaagggttcactgatgaagaaaagcgcaaactgctgaagtttgtaacaagctgctctcgaccccctctcttggggtttaaggagttgtatcccgcattttgtattcacaacggaggctccgaccttgagcggctccccacagccagcacctgcatgaacctgctgaagctccccgagttctatgacgagacacttttgcgaagtaaacttctctatgcgattgaatgtgccgctggctttgagctgagctgaagctgatgctggggtcagacccctacagagaaccagtgcttccttcgtcagcagcgcctccccagacccacgaggatactcacactgcacgcctgaggctctcctaagctccttctttcattctgccattcctccctcccttccttttttaaatgatttttattacggtgtggtcacttatttagatggacattgcttttcaaataacttaaaataacacgttatgtgccatgtggctactttagtaatattgccaagaagagcacagtttttacactagtggcatctcagtgaaattaaccaaagatgaagctttggctttgctggtgagatcagagccctcctgagcaggcagcgccactccagggttcagacagggctgcacaggcggcagagatacagggtctgagggctgagacgccatggggccgctgctgcttatgtggttggattgtttacaagcctcattattaaaactgaaggcattttttttttctgctgcctttcccaaagtggttaggtttggaaaagagatgatgatggtaatattttatttgtgctttttaagccatttccccaaatgggactagcatgcttgttttcagtataccgtggcctgcctcatgatggtttggagatactgtctgtggatgtgaggtggggacttcattcattgtcctatttctatctccactttgtgcctggagagctttcaggggaggtggaggaggagggtctgccaagctactgcaacatctgtcacccactatacccagttacttgggggaggacagacactgtggtgtcattaaagttgtttgaaccaaagtggcggctgcatctttgtcccgatgctagccgtgccggtctcccatcatccgctcgccctcctttcccctgggctgcgcccacttgtcttcctggatatttgggggtgactcgccatgcttggcaccctctgcttcctggtgctgctctgactcgaagacgggacagtccctggtgcacatccagggaagaggagcgtcggtagttcttgcagtaggcactttatcaggacctgacctgttgctgggtgattttagtctctacaaacagaaagcgtttcaaagcgtcagctgtgggagcagagtgaccctttgctgatgctggggggaggggatctaaatcctcatttatctcttctatgtctagtattttactgtcactggaggctctgtgggctgtcatagttaattgaccataattagcaatatacttttaaagtgggaaagctgaatgacacttttaagacaatgaacattatcaaaacaaaatgtataatttcttaatttgaataataaattaagcgtttaaatgctatttgtagtcttgatatacagaaataaaataattagggttggtcttttttattttaggttgttttatgttgaatgttctatatcttattagttaatttgtatattttattagtattttggaaatagcatatctgagactgaagagaaattgacaattcacttatttgtggtttttttctcagctattctgagcttatttatttatttgtatgttctaatggctaaacatttacattaaatgttttttttcccaa

SEQ ID NO: 348749 - DNA, 2448 bp, Homo sapiens
aggtgcatcttggcatctgcacaatgctgtgcatactcgggtactatttcgtatttagattcttgttcacaaagcatcaagtcctatttccttaaaacatttgtttcttgcttttttttttaacctattatcatactttgaggattttgagatccttacgttttgtattcccaggtagttgaactaaaattcggtgggaaagacatccctgtcaccagcgccaaccggattgcgtacatccacttggtggcagactacaggctgaacaggcagatccgccagcactgcctggctttccgccagggccttgccaatgtcgtcagcctcgagtggctccgaatgtttgatcagcaagaaattcaggtaccctacctgctgactttctgggacacgcttgtcacaggaaatgaacaggctttcttaaaatttacctcaaatgttattatttgaacttttttccttaggtattaatttctggtgcacaagttcccataagcctagaggacctaaaatcctttacaaactattcaggaggctattctgcagaccatcctgttattaaggtcttctggagagttgtggaagggttcactgatgaagaaaagcgcaaactgctgaagtttgtaacaagctgctctcgaccccctctcttggggtttaaggagttgtatcccgcattttgtattcacaacggaggctccgaccttgagcggctccccacagccagcacctgcatgaacctgctgaagctccccgagttctatgacgagacacttttgcgaagtaaacttctctatgcgattgaatgtgccgctggctttgagctgagctgaagctgatgctggggtcagacccctacagagaaccagtgcttccttcgtcagcagcgcctccccagacccacgaggatactcacactgcacgcctgaggctctcctaagctccttctttcattctgccattcctccctcccttccttttttaaatgatttttattacggtgtggtcacttatttagatggacattgcttttcaaataacttaaaataacacgttatgtgccatgtggctactttagtaatattgccaagaagagcacagtttttacactagtggcatctcagtgaaattaaccaaagatgaagctttggctttgctggtgagatcagagccctcctgagcaggcagcgccactccagggttcagacagggctgcacaggcggcagagatacagggtctgagggctgagacgccatggggccgctgctgcttatgtggttggattgtttacaagcctcattattaaaactgaaggcattttttttttctgctgcctttcccaaagtggttaggtttggaaaagagatgatgatggtaatattttatttgtgctttttaagccatttccccaaatgggactagcatgcttgttttcagtataccgtggcctgcctcatgatggtttggagatactgtctgtggatgtgaggtggggacttcattcattgtcctatttctatctccactttgtgcctggagagctttcaggggaggtggaggaggagggtctgccaagctactgcaacatctgtcacccactatacccagttacttgggggaggacagacactgtggtgtcattaaagttgtttgaaccaaagtggcggctgcatctttgtcccgatgctagccgtgccggtctcccatcatccgctcgccctcctttcccctgggctgcgcccacttgtcttcctggatatttgggggtgactcgccatgcttggcaccctctgcttcctggtgctgctctgactcgaagacgggacagtccctggtgcacatccagggaagaggagcgtcggtagttcttgcagtaggcactttatcaggacctgacctgttgctgggtgattttagtctctacaaacagaaagcgtttcaaagcgtcagctgtgggagcagagtgaccctttgctgatgctggggggaggggatctaaatcctcatttatctcttctatgtctagtattttactgtcactggaggctctgtgggctgtcatagttaattgaccataattagcaatatacttttaaagtgggaaagctgaatgacacttttaagacaatgaacattatcaaaacaaaatgtataatttcttaatttgaataataaattaagcgtttaaatgctatttgtagtcttgatatacagaaataaaataattagggttggtcttttttattttaggttgttttatgttgaatgttctatatcttattagttaatttgtatattttattagtattttggaaatagcatatctgagactgaagagaaattgacaattcacttatttgtggtttttttctcagctattctgagcttatttatttatttgtatgttctaatggctaaacatttacattaaatgttttttttcccaa

SEQ ID NO: 348750 - DNA, 1837 bp, Homo sapiens
  misc_feature (15)..(15): n is a, c, g, or t
gccgtcggggaggcntctctattggcagtccgagcgccgacgcaatttcaggagttgtatcccgcattttgtattcacaacggaggctccgaccttgagcggctccccacagccagcacctgcatgaacctgctgaagctccccgagttctatgacgagacacttttgcgaagtaaacttctctatgcgattgaatgtgccgctggctttgagctgagctgaagctgatgctggggtcagacccctacagagaaccagtgcttccttcgtcagcagcgcctccccagacccacgaggatactcacactgcacgcctgaggctctcctaagctccttctttcattctgccattcctccctcccttccttttttaaatgatttttattacggtgtggtcacttatttagatggacattgcttttcaaataacttaaaataacacgttatgtgccatgtggctactttagtaatattgccaagaagagcacagtttttacactagtggcatctcagtgaaattaaccaaagatgaagctttggctttgctggtgagatcagagccctcctgagcaggcagcgccactccagggttcagacagggctgcacaggcggcagagatacagggtctgagggctgagacgccatggggccgctgctgcttatgtggttggattgtttacaagcctcattattaaaactgaaggcattttttttttctgctgcctttcccaaagtggttaggtttggaaaagagatgatgatggtaatattttatttgtgctttttaagccatttccccaaatgggactagcatgcttgttttcagtataccgtggcctgcctcatgatggtttggagatactgtctgtggatgtgaggtggggacttcattcattgtcctatttctatctccactttgtgcctggagagctttcaggggaggtggaggaggagggtctgccaagctactgcaacatctgtcacccactatacccagttacttgggggaggacagacactgtggtgtcattaaagttgtttgaaccaaagtggcggctgcatctttgtcccgatgctagccgtgccggtctcccatcatccgctcgccctcctttcccctgggctgcgcccacttgtcttcctggatatttgggggtgactcgccatgcttggcaccctctgcttcctggtgctgctctgactcgaagacgggacagtccctggtgcacatccagggaagaggagcgtcggtagttcttgcagtaggcactttatcaggacctgacctgttgctgggtgattttagtctctacaaacagaaagcgtttcaaagcgtcagctgtgggagcagagtgaccctttgctgatgctggggggaggggatctaaatcctcatttatctcttctatgtctagtattttactgtcactggaggctctgtgggctgtcatagttaattgaccataattagcaatatacttttaaagtgggaaagctgaatgacacttttaagacaatgaacattatcaaaacaaaatgtataatttcttaatttgaataataaattaagcgtttaaatgctatttgtagtcttgatatacagaaataaaataattagggttggtcttttttattttaggttgttttatgttgaatgttctatatcttattagttaatttgtatattttattagtattttggaaatagcatatctgagactgaagagaaattgacaattcacttatttgtggtttttttctcagctattctgagcttatttatttatttgtatgttctaatggctaaacatttacattaaatgttttttttcccaa

SEQ ID NO: 348751 - DNA, 965 bp, Homo sapiens
aggaaaagcctgcgcgttatcgggtatgtgcaccagaaactgtcactcgtctggcgagtcgtgagcaacaccaggaggaggagggtctgccaagctactgcaacatctgtcacccactatacccagttacttgggggaggacagacactgtggtgtcattaaagttgtttgaaccaaagtggcggctgcatctttgtcccgatgctagccgtgccggtctcccatcatccgctcgccctcctttcccctgggctgcgcccacttgtcttcctggatatttgggggtgactcgccatgcttggcaccctctgcttcctggtgctgctctgactcgaagacgggacagtccctggtgcacatccagggaagaggagcgtcggtagttcttgcagtaggcactttatcaggacctgacctgttgctgggtgattttagtctctacaaacagaaagcgtttcaaagcgtcagctgtgggagcagagtgaccctttgctgatgctggggggaggggatctaaatcctcatttatctcttctatgtctagtattttactgtcactggaggctctgtgggctgtcatagttaattgaccataattagcaatatacttttaaagtgggaaagctgaatgacacttttaagacaatgaacattatcaaaacaaaatgtataatttcttaatttgaataataaattaagcgtttaaatgctatttgtagtcttgatatacagaaataaaataattagggttggtcttttttattttaggttgttttatgttgaatgttctatatcttattagttaatttgtatattttattagtattttggaaatagcatatctgagactgaagagaaattgacaattcacttatttgtggtttttttctcagctattctgagcttatttatttatttgtatgttctaatggctaaacatttacattaaatgttttttttcccaa

SEQ ID NO: 348752 - DNA, 2479 bp, Homo sapiens
agttccaggtgcaagcgccgggtttgctgcccgctgggcgcccctgcagcggcccgagctgtggccggcgtggatgaggggcaggcgaggcagggccgcccctccagtattgccgcccctcccgccccagggcagggctgggagggtacagcccgggggcgggctcgggtcgcctcccggccgccgcgtcctcgctgccccgggccgggcgggcgggcgccgagagcctcccagcccgccccgtgccccgcccgcccggctgcttccgcggcggcgctgcccgcacatgggctaggctgccaggatgttcagcttcgaaggcgacttcaagacgcggcccaaggtgtcccttggcggcgcgagcaggaaggaggaaaaggcttctcttttacatcgtactcaggaagaaagaagaaagagagaggaagaaaggcgaaggttgaaaaatgcaataattatccagtcatttattcgaggctatagagacagaaaacagcaatattccatccaaagaagtgcatttgatcgctgtgctaccttgtcacagtccgggggcgcttttcccattgctaatggccccaaccttacccttttggtaaggcagcttctgtttttttacaaacaaaatgaagactcaaaacgtttgatatggctgtatcagaacttaattaaacacagctctctgtttgtcaagcagttggatggatctgagagacttacatgcttatttcagataaaaagattgatgagcctctgttgcaggttgctgcaaaactgtaatgatgacagtttgaatgttgcacttccaatgagaatgcttgaagtattttcgtctgagaatacttacttgcctgttttacaagatgctagctatgtggtgtcagtgattgaacaaattttgcactacatgattcacaatgggtattataggtctctatatttgttgattaacagcaagcttccatcaagtattgaatattctgatttatctcgagttcctatagcaaaaattttgctagagaatgttctaaaaccattgcactttacttacaactcctgtccggaaggtgcgaggcaacaagtttttacagccttcacagaggagtttctggcagcaccttttacagatcagatttttcatttcatcattccggcgcttgcagatgcgcagaccgttttcccttacgagccctttctgaatgcactgttgttaatagagagtagatgttcaagaaagagtggtggagcaccctggcttttctatttcgttttaactgttggcgaaaattatttgggggccctctctgaggaagggctgctggtgtatttgcgggtgctgcagaccttcctctctcagttaccagtctctcctgccagcgcgagctgtcacgactcagccagtgactctgaggaggagagtgaagaagccgacaagccctcaagcccggaggatggcagactgtcagtatcatacataacagaggaatgcctgaagaagctggacacaaagcagcagaccaacaccctgctcaacctggtgtggagggactctgcgagcgaggaggtcttcaccaccatggcctccgtctgccacacgctgatggtgcagcaccgcatgatggtacccaaagtcaggcttctctacagtttagcctttaatgccaggtttctgagacatctttggtttctaatatcttccatgtcaacacggatgatcacagggtctatggtaccgttgcttcaggtgatatccaggggttctcctatgtcttttgaagattctagtcgaatcatcccactcttttacctttttagctccttgtttagtcattcactaatttccatacatgataacgaattcttcggtgatcccatagaagttgtaggtcaaagacaatcatcaatgatgccttttactttagaagagctgataatgttgtctcgatgccttcgagatgcatgcctggggatcatcaagttggcttatccagaaaccaagccagaagttcgagaagaatatattacagcatttcagagtattggagttactactagctctgaaatgcaacaatgcatacagatggaacagaaaagatggattcagttatttaaggttatcaccaatctagtgaaaatgttgaagtccagagacacgaggagaaatttttgtcctccaaaccactggctgtcagaacaagaagatattaaagcagataaggtgttattgaaagatctttttaatatttatcattaaaaaatacattcagcttgtgtctttctggagagaagaattaagcactttaaaattatttattttatgactcatatgactaaatagtaatgataaaccttattactaactcttacgccaacttcttaatggaacatatagcagtatcattgacttaaaatgatattctgagttattaatcctcaattttcctttttaacctgagattatattaaagccttaatgatt

SEQ ID NO: 348753 - DNA, 3446 bp, Homo sapiens
agttccaggtgcaagcgccgggtttgctgcccgctgggcgcccctgcagcggcccgagctgtggccggcgtggatgaggggcaggcgaggcagggccgcccctccagtattgccgcccctcccgccccagggcagggctgggagggtacagcccgggggcgggctcgggtcgcctcccggccgccgcgtcctcgctgccccgggccgggcgggcgggcgccgagagcctcccagcccgccccgtgccccgcccgcccggctgcttccgcggcggcgctgcccgcacatgggctaggctgccaggatgttcagcttcgaaggcgacttcaagacgcggcccaaggtgtcccttggcggcgcgagcaggaaggaggaaaaggcttctcttttacatcgtactcaggaagaaagaagaaagagagaggaagaaaggcgaaggttgaaaaatgcaataattatccagtcatttattcgaggctatagagacagaaaacagcaatattccatccaaagaagtgcatttgatcgctgtgctaccttgtcacagtccgggggcgcttttcccattgctaatggccccaaccttacccttttggtaaggcagcttctgtttttttacaaacaaaatgaagactcaaaacgtttgatatggctgtatcagaacttaattaaacacagctctctgtttgtcaagcagttggatggatctgagagacttacatgcttatttcagataaaaagattgatgagcctctgttgcaggttgctgcaaaactgtaatgatgacagtttgaatgttgcacttccaatgagaatgcttgaagtattttcgtctgagaatacttacttgcctgttttacaagatgctagctatgtggtgtcagtgattgaacaaattttgcactacatgattcacaatgggtattataggtctctatatttgttgattaacagcaagcttccatcaagtattgaatattctgatttatctcgagttcctatagcaaaaattttgctagagaatgttctaaaaccattgcactttacttacaactcctgtccggaaggtgcgaggcaacaagtttttacagccttcacagaggagtttctggcagcaccttttacagatcagatttttcatttcatcattccggcgcttgcagatgcgcagaccgttttcccttacgagccctttctgaatgcactgttgttaatagagagtagatgttcaagaaagagtggtggagcaccctggcttttctatttcgttttaactgttggcgaaaattatttgggggccctctctgaggaagggctgctggtgtatttgcgggtgctgcagaccttcctctctcagttaccagtctctcctgccagcgcgagctgtcacgactcagccagtgactctgaggaggagagtgaagaagccgacaagccctcaagcccggaggatggcagactgtcagtatcatacataacagaggaatgcctgaagaagctggacacaaagcagcagaccaacaccctgctcaacctggtgtggagggactctgcgagcgaggaggtcttcaccaccatggcctccgtctgccacacgctgatggtgcagcaccgcatgatggtacccaaagtcaggcttctctacagtttagcctttaatgccaggtttctgagacatctttggtttctaatatcttccatgtcaacacggatgatcacagggtctatggtaccgttgcttcaggtgatatccaggggttctcctatgtcttttgaagattctagtcgaatcatcccactcttttacctttttagctccttgtttagtcattcactaatttccatacatgataacgaattcttcggtgatcccatagaagttgtaggtcaaagacaatcatcaatgatgccttttactttagaagagctgataatgttgtctcgatgccttcgagatgcatgcctggggatcatcaagttggcttatccagaaaccaagccagaagttcgagaagaatatattacagcatttcagagtattggagttactactagctctgaaatgcaacaatgcatacagatggaacagaaaagatggattcagttatttaaggttatcaccaatctagtgaaaatgttgaagtccagagacacgaggagaaatttttgtcctccaaaccactggctgtcagaacaagaagatattaaagcagataaggtcactcagctctatgtgccagcatccagacatgtgtggaggttccggcggatggggaggataggcccgctgcagtccaccctggacgtgggtttggagtccccgccgctgtctgtgtctgaggaaagacagcttgctgtcctgacagagttgccttttgtggttccatttgaggaacgagtaaagatctttcagaggttgatttatgcagataagcaagaagttcaaggagatggtccatttctggatggaattaatgtcacaataagaagaaattacatttatgaagatgcttatgacaaactttctccagaaaatgagcctgatttgaaaaagcggatccgtgtgcacttgctcaatgcccatggcctggatgaagctggcattgatggtggtggtattttcagagagtttttaaatgaactactgaagtcaggatttaaccccaaccaggggttctttaagactactaatgaagggcttctgtaccccaacccggctgctcagatgcttgtgggagattcttttgccagacattactacttcctaggcagaatgcttggaaaggctctctatgagaacatgctggtggagctgccctttgcaggcttctttctttccaagttgcttggaaccagtgccgacgtggacattcaccacctcgcctccctagaccctgaggtgtataagaatttgctctttctgaagagctacgaagacgatgtggaggagcttgggctgaacttcactgtggtgaacaatgacctgggagaggcgcaggtgaggggtcaggaggaggattcacatacctgtatagcaagtagcagcatctccttgtgtgtggaagtccatttgtgttacagcgtttgacttccgcacattttagttagaatgactgtggctgtgagttagacgtcgaagcatatagctccaaagcaccttagccctggcgtctgagctgagtgcagttcctgctcccacgcatgaagcctgttcctgcccggcagcccctcctgcggagctccactctcgaggctgcggcccaggcttgctgcttgtctggctcttcccggtgctgggggtggccgttcagcagcttcccggcaggaccccttgcttagtcctcactccttgcccgctcagagccacctcagctgctccagcactgtctagggggtgtgttcattacccatctggttacttttgttacttatatcctttttaaaaa

SEQ ID NO: 348754 - DNA, 3358 bp, Homo sapiens
agttccaggtgcaagcgccgggtttgctgcccgctgggcgcccctgcagcggcccgagctgtggccggcgtggatgaggggcaggcgaggcagggccgcccctccagtattgccgcccctcccgccccagggcagggctgggagggtacagcccgggggcgggctcgggtcgcctcccggccgccgcgtcctcgctgccccgggccgggcgggcgggcgccgagagcctcccagcccgccccgtgccccgcccgcccggctgcttccgcggcggcgctgcccgcacatgggctaggctgccaggatgttcagcttcgaaggcgacttcaagacgcggcccaaggtgtcccttggcggcgcgagcaggaaggaggaaaaggcttctcttttacatcgtactcaggaagaaagaagaaagagagaggaagaaaggcgaaggttgaaaaatgcaataattatccagtcatttattcgaggctatagagacagaaaacagcaatattccatccaaagaagtgcatttgatcgctgtgctaccttgtcacagtccgggggcgcttttcccattgctaatggccccaaccttacccttttggtaaggcagcttctgtttttttacaaacaaaatgaagactcaaaacgtttgatatggctgtatcagaacttaattaaacacagctctctgtttgtcaagcagttggatggatctgagagacttacatgcttatttcagataaaaagattgatgagcctctgttgcaggttgctgcaaaactgtaatgatgacagtttgaatgttgcacttccaatgagaatgcttgaagtattttcgtctgagaatacttacttgcctgttttacaagatgctagctatgtggtgtcagtgattgaacaaattttgcactacatgattcacaatgggtattataggtctctatatttgttgattaacagcaagcttccatcaagtattgaatattctgatttatctcgagttcctatagcaaaaattttgctagagaatgttctaaaaccattgcactttacttacaactcctgtccggaaggtgcgaggcaacaagtttttacagccttcacagaggagtttctggcagcaccttttacagatcagatttttcatttcatcattccggcgcttgcagatgcgcagaccgttttcccttacgagccctttctgaatgcactgttgttaatagagagtagatgttcaagaaagagtggtggagcaccctggcttttctatttcgttttaactgttggcgaaaattatttgggggccctctctgaggaagggctgctggtgtatttgcgggtgctgcagaccttcctctctcagttaccagtctctcctgccagcgcgagctgtcacgactcagccagtgactctgaggaggagagtgaagaagccgacaagccctcaagcccggaggatggcagactgtcagtatcatacataacagaggaatgcctgaagaagctggacacaaagcagcagaccaacaccctgctcaacctggtgtggagggactctgcgagcgaggaggtcttcaccaccatggcctccgtctgccacacgctgatggtgcagcaccgcatgatggtacccaaagtcaggcttctctacagtttagcctttaatgccaggtttctgagacatctttggtttctaatatcttccatgtcaacacggatgatcacagggtctatggtaccgttgcttcaggtgatatccaggggttctcctatgtcttttgaagattctagtcgaatcatcccactcttttacctttttagctccttgtttagtcattcactaatttccatacatgataacgaattcttcggtgatcccatagaagttgtaggtcaaagacaatcatcaatgatgccttttactttagaagagctgataatgttgtctcgatgccttcgagatgcatgcctggggatcatcaagttggcttatccagaaaccaagccagaagttcgagaagaatatattacagcatttcagagtattggagttactactagctctgaaatgcaacaatgcatacagatggaacagaaaagatggattcagttatttaaggttatcaccaatctagtgaaaatgttgaagtccagagacacgaggagaaatttttgtcctccaaaccactggctgtcagaacaagaagatattaaagcagataaggtcactcagctctatgtgccagcatccagacatgtgtggaggttccggcggatggggaggataggcccgctgcagtccaccctggacgtgggtttggagtccccgccgctgtctgtgtctgaggaaagacagcttgctgtcctgacagagttgccttttgtggttccatttgaggaacgagtaaagatctttcagaggttgatttatgcagataagcaagaagttcaaggagatggtccatttctggatggaattaatgtcacaataagaagaaattacatttatgaagatgcttatgacaaactttctccagaaaatgagcctgatttgaaaaagcggatccgtgtgcacttgctcaatgcccatggcctggatgaagctggcattgatggtggtggtattttcagagagtttttaaatgaactactgaagtcaggatttaaccccaaccaggggttctttaagactactaatgaagggcttctgtaccccaacccggctgctcagatgcttgtgggagattcttttgccagacattactacttcctaggcagaatgcttggaaaggtaaagtaaccttcatataaaaatagacctcggaccaaaagatgttgacattttatgtttatgtgtggttgttatccaggtttaccataaaatactgtttgttttaaatttggatgctaaatgttgcaaaagcactgcacgaaacaaatttgtatggttgtaagtaggtgctatggtttgaatgtcccctccaaactcatgttgaaacttgatccccagtgtgccagtattcagaggtggaatctttaagaggtgattagatcatgtgagctcggccgtcatgaatggatgagtggtttattgtgggaagggccctggtgactttttacaggagggagcccctagctttgtgatgccctgtgccgcctccggactctgcagagtccccaccaatgagaagacctcaccaggggctgcctctggaccatggtctggcttcagtatagaagattagttttatatatcagtcaaggttctgtcaagagccaacgataaagagtagctagaaatcattaaaatgggaaatcaattggggggggtaaaaaacttttgacttgggggaacacggttcgt

SEQ ID NO: 348755 - DNA, 2213 bp, Homo sapiens
agttccaggtgcaagcgccgggtttgctgcccgctgggcgcccctgcagcggcccgagctgtggccggcgtggatgaggggcaggcgaggcagggccgcccctccagtattgccgcccctcccgccccagggcagggctgggagggtacagcccgggggcgggctcgggtcgcctcccggccgccgcgtcctcgctgccccgggccgggcgggcgggcgccgagagcctcccagcccgccccgtgccccgcccgcccggctgcttccgcggcggcgctgcccgcacatgggctaggctgccaggatgttcagcttcgaaggcgacttcaagacgcggcccaaggtgtcccttggcggcgcgagcaggaaggaggaaaaggcttctcttttacatcgtactcaggaagaaagaagaaagagagaggaagaaaggcgaaggttgaaaaatgcaataattatccagtcatttattcgaggctatagagacagaaaacagcaatattccatccaaagaagtgcatttgatcgctgtgctaccttgtcacagtccgggggcgcttttcccattgctaatggccccaaccttacccttttggtaaggcagcttctgtttttttacaaacaaaatgaagactcaaaacgtttgatatggctgtatcagaacttaattaaacacagctctctgtttgtcaagcagttggatggatctgagagacttacatgcttatttcagataaaaagattgatgagcctctgttgcaggttgctgcaaaactgtaatgatgacagtttgaatgttgcacttccaatgagaatgcttgaagtattttcgtctgagaatacttacttgcctgttttacaagatgctagctatgtggtgtcagtgattgaacaaattttgcactacatgattcacaatgggtattataggtctctatatttgttgattaacagcaagcttccatcaagtattgaatattctgatttatctcgagttcctatagcaaaaattttgctagagaatgttctaaaaccattgcactttacttacaactcctgtccggaaggtgcgaggcaacaagtttttacagccttcacagaggagtttctggcagcaccttttacagatcagatttttcatttcatcattccggcgcttgcagatgcgcagaccgttttcccttacgagccctttctgaatgcactgttgttaatagagagtagatgttcaagaaagagtggtggagcaccctggcttttctatttcgttttaactgttggcgaaaattatttgggggccctctctgaggaagggctgctggtgtatttgcgggtgctgcagaccttcctctctcagttaccagtctctcctgccagcgcgagctgtcacgactcagccagtgactctgaggaggagagtgaagaagccgacaagccctcaagcccggaggatggcagactgtcagtatcatacataacagaggaatgcctgaagaagctggacacaaagcagcagaccaacaccctgctcaacctggtgtggagggactctgcgagcgaggaggtcttcaccaccatggcctccgtctgccacacgctgatggtgcagcaccgcatgatggtacccaaagtcaggcttctctacagtttagcctttaatgccaggtttctgagacatctttggtttctaatatcttccatgtcaacacggatgatcacagggtctatggtaccgttgcttcaggtgatatccaggggttctcctatgtcttttgaagattctagtcgaatcatcccactcttttacctttttagctccttgtttagtcattcactaatttccatacatgataacgaattcttcggtgatcccatagaagttgtaggtcaaagacaatcatcaatgatgccttttactttagaagagctgataatgttgtctcgatgccttcgagatgcatgcctggggatcatcaagttggcttatccagaaaccaagccagaagttcgagaagaatatattacagcatttcagagtattggagttactactagctctgaaatgcaacaatgcatacagatggaacagaaaagatggattcagttatttaaggtatagagtatatgtatttttttgtttactgacattgaaaaatgtacaaacttttgtcttgactcgttgcagaggaataaaaatgcaggtttgtttcaga

SEQ ID NO: 348756 - DNA, 1517 bp, Homo sapiens
gccaggtgcagtggcacacacctgtaatcccagcactttgggatgctgaggcgggtggatcacttgaggtcaggagttcaagaccagcctggccaacgttgtgaaaccccatctctacaaaaagtacaaaaattaaccaggcgtgatggtatacacctgtagtcccagctactcaggaggctgaggtgggaggatcgcttgaaaccagaaggtggaggtcgcagtgggctgaggtcgcaccactgcattccagcctgggtgacggagtgagaccgtgtatcaaaaaataaaaaattgtaaggaccaaaaataagggatgagaggaactgacagatgaaaaataacttgagaaaatatactgtgtctgttttatttgaatactgcctcaaccaaattgaaaaaaaaactagaaagtgaatttttgataataataacttaatttttaaagtgatctattttgcttcataaagcaattatattattttactatgtttagatattatgcaccatcaaataaaacaattagagatttctttggggcatattagaaaacatagttaactgtaaaagtatgaaaggacagctagcatgagagaggacctgaaaaggtaaagcaaaaggggacatgaaggtatgaggtcagagagagggcccagcccacggtagagaaatgtccagcaccaattctgttcaagtgtgatcaggtcaaagtgtgtgctagagcacaggggagttctgaaccaggattgcccccgacaggtcactcagctctatgtgccagcatccagacatgtgtggaggttccggcggatggggaggataggcccgctgcagtccaccctggacggtgagttctctaggacacagggttactgaggtatgaattacatgctgtcaaattcactcctttaatctacagatctgttatttttcataaacttatacagccatgtcactcccagcaggagctaccatgtagaaaagtttcatcacccacaaaattgcctctagctccattgcggccacctcttcagcagccacccatttctgttttgtcctgtcactttgccttttgcaaaaggcctccaaagggaaccatgctgtgtagtctgctcctggctccttttggtcagcacgctgcatttgagggtgctgtgtgggttgattgttccctctgttgctcagcagtattccagtgtggggatgcaccacagtttgtgaatccattcattggttgaaagacatttggttattttttctgtctctgggaatacgagtacagctgctataaacatctatgtacaggtttttctgtgaacatacattttgtttgacatggagtaagtttcactgggagtaagaatcctgagacatttggcaagtttatgtttaacttgatgagaagctgcagaactgtgttccagggtggctgcacggctttgcattcagaccagcaatgaatgagagcctctgttgttcccagtcctcatcagcacttacagttgtcatttaaaaaa

SEQ ID NO: 348757 - DNA, 5171 bp, Homo sapiens
agttccaggtgcaagcgccgggtttgctgcccgctgggcgcccctgcagcggcccgagctgtggccggcgtggatgaggggcaggcgaggcagggccgcccctccagtattgccgcccctcccgccccagggcagggctgggagggtacagcccgggggcgggctcgggtcgcctcccggccgccgcgtcctcgctgccccgggccgggcgggcgggcgccgagagcctcccagcccgccccgtgccccgcccgcccggctgcttccgcggcggcgctgcccgcacatgggctaggctgccaggatgttcagcttcgaaggcgacttcaagacgcggcccaaggtgtcccttggcggcgcgagcaggaaggaggaaaaggcttctcttttacatcgtactcaggaagaaagaagaaagagagaggaagaaaggcgaaggttgaaaaatgcaataattatccagtcatttattcgaggctatagagacagaaaacagcaatattccatccaaagaagtgcatttgatcgctgtgctaccttgtcacagtccgggggcgcttttcccattgctaatggccccaaccttacccttttggtaaggcagcttctgtttttttacaaacaaaatgaagactcaaaacgtttgatatggctgtatcagaacttaattaaacacagctctctgtttgtcaagcagttggatggatctgagagacttacatgcttatttcagataaaaagattgatgagcctctgttgcaggttgctgcaaaactgtaatgatgacagtttgaatgttgcacttccaatgagaatgcttgaagtattttcgtctgagaatacttacttgcctgttttacaagatgctagctatgtggtgtcagtgattgaacaaattttgcactacatgattcacaatgggtattataggtctctatatttgttgattaacagcaagcttccatcaagtattgaatattctgatttatctcgagttcctatagcaaaaattttgctagagaatgttctaaaaccattgcactttacttacaactcctgtccggaaggtgcgaggcaacaagtttttacagccttcacagaggagtttctggcagcaccttttacagatcagatttttcatttcatcattccggcgcttgcagatgcgcagaccgttttcccttacgagccctttctgaatgcactgttgttaatagagagtagatgttcaagaaagagtggtggagcaccctggcttttctatttcgttttaactgttggcgaaaattatttgggggccctctctgaggaagggctgctggtgtatttgcgggtgctgcagaccttcctctctcagttaccagtctctcctgccagcgcgagctgtcacgactcagccagtgactctgaggaggagagtgaagaagccgacaagccctcaagcccggaggatggcagactgtcagtatcatacataacagaggaatgcctgaagaagctggacacaaagcagcagaccaacaccctgctcaacctggtgtggagggactctgcgagcgaggaggtcttcaccaccatggcctccgtctgccacacgctgatggtgcagcaccgcatgatggtacccaaagtcaggcttctctacagtttagcctttaatgccaggtttctgagacatctttggtttctaatatcttccatgtcaacacggatgatcacagggtctatggtaccgttgcttcaggtgatatccaggggttctcctatgtcttttgaagattctagtcgaatcatcccactcttttacctttttagctccttgtttagtcattcactaatttccatacatgataacgaattcttcggtgatcccatagaagttgtaggtcaaagacaatcatcaatgatgccttttactttagaagagctgataatgttgtctcgatgccttcgagatgcatgcctggggatcatcaagttggcttatccagaaaccaagccagaagttcgagaagaatatattacagcatttcagagtattggagttactactagctctgaaatgcaacaatgcatacagatggaacagaaaagatggattcagttatttaaggttatcaccaatctagtgaaaatgttgaagtccagagacacgaggagaaatttttgtcctccaaaccactggctgtcagaacaagaagatattaaagcagataaggtcactcagctctatgtgccagcatccagacatgtgtggaggttccggcggatggggaggataggcccgctgcagtccaccctggacgtgggtttggagtccccgccgctgtctgtgtctgaggaaagacagcttgctgtcctgacagagttgccttttgtggttccatttgaggaacgagtaaagatctttcagaggttgatttatgcagataagcaagaagttcaaggagatggtccatttctggatggaattaatgtcacaataagaagaaattacatttatgaagatgcttatgacaaactttctccagaaaatgagcctgatttgaaaaagcggatccgtgtgcacttgctcaatgcccatggcctggatgaagctggcattgatggtggtggtattttcagagagtttttaaatgaactactgaagtcaggatttaaccccaaccaggggttctttaagactactaatgaagggcttctgtaccccaacccggctgctcagatgcttgtgggagattcttttgccagacattactacttcctaggcagaatgcttggaaaggctctctatgagaacatgctggtggagctgccctttgcaggcttctttctttccaagttgcttggaaccagtgccgacgtggacattcaccacctcgcctccctagaccctgaggtgtataagaatttgctctttctgaagagctacgaagacgatgtggaggagcttgggctgaacttcactgtggtgaacaatgacctgggagaggcgcaggtagttgaactaaaattcggtgggaaagacatccctgtcaccagcgccaaccggattgcgtacatccacttggtggcagactacaggctgaacaggcagatccgccagcactgcctggctttccgccagggccttgccaatgtcgtcagcctcgagtggctccgaatgtttgatcagcaagaaattcaggtattaatttctggtgcacaagttcccataagcctagaggacctaaaatcctttacaaactattcaggaggctattctgcagaccatcctgttattaaggtcttctggagagttgtggaagggttcactgatgaagaaaagcgcaaactgctgaagtttgtaacaagctgctctcgaccccctctcttggggtttaaggagttgtatcccgcattttgtattcacaacggaggctccgaccttgagcggctccccacagccagcacctgcatgaacctgctgaagctccccgagttctatgacgagacacttttgcgaagtaaacttctctatgcgattgaatgtgccgctggctttgagctgagctgaagctgatgctggggtcagacccctacagagaaccagtgcttccttcgtcagcagcgcctccccagacccacgaggatactcacactgcacgcctgaggctctcctaagctccttctttcattctgccattcctccctcccttccttttttaaatgatttttattacggtgtggtcacttatttagatggacattgcttttcaaataacttaaaataacacgttatgtgccatgtggctactttagtaatattgccaagaagagcacagtttttacactagtggcatctcagtgaaattaaccaaagatgaagctttggctttgctggtgagatcagagccctcctgagcaggcagcgccactccagggttcagacagggctgcacaggcggcagagatacagggtctgagggctgagacgccatggggccgctgctgcttatgtggttggattgtttacaagcctcattattaaaactgaaggcattttttttttctgctgcctttcccaaagtggttaggtttggaaaagagatgatgatggtaatattttatttgtgctttttaagccatttccccaaatgggactagcatgcttgttttcagtataccgtggcctgcctcatgatggtttggagatactgtctgtggatgtgaggtggggacttcattcattgtcctatttctatctccactttgtgcctggagagctttcaggggaggtggaggaggagggtctgccaagctactgcaacatctgtcacccactatacccagttacttgggggaggacagacactgtggtgtcattaaagttgtttgaaccaaagtggcggctgcatctttgtcccgatgctagccgtgccggtctcccatcatccgctcgccctcctttcccctgggctgcgcccacttgtcttcctggatatttgggggtgactcgccatgcttggcaccctctgcttcctggtgctgctctgactcgaagacgggacagtccctggtgcacatccagggaagaggagcgtcggtagttcttgcagtaggcactttatcaggacctgacctgttgctgggtgattttagtctctacaaacagaaagcgtttcaaagcgtcagctgtgggagcagagtgaccctttgctgatgctggggggaggggatctaaatcctcatttatctcttctatgtctagtattttactgtcactggaggctctgtgggctgtcatagttaattgaccataattagcaatatacttttaaagtgggaaagctgaatgacacttttaagacaatgaacattatcaaaacaaaatgtataatttcttaatttgaataataaattaagcgtttaaatgctatttgtagtcttgatatacagaaataaaataattagggttggtcttttttattttaggttgttttatgttgaatgttctatatcttattagttaatttgtatattttattagtattttggaaatagcatatctgagactgaagagaaattgacaattcacttatttgtggtttttttctcagctattctgagcttatttatttatttgtatgttctaatggctaaacatttacattaaatgttttttttcccaa

SEQ ID NO: 348758 - DNA, 5841 bp, Homo sapiens
  misc_feature (5187)..(5187): n is a, c, g, or t
agttccaggtgcaagcgccgggtttgctgcccgctgggcgcccctgcagcggcccgagctgtggccggcgtggatgaggggcaggcgaggcagggccgcccctccagtattgccgcccctcccgccccagggcagggctgggagggtacagcccgggggcgggctcgggtcgcctcccggccgccgcgtcctcgctgccccgggccgggcgggcgggcgccgagagcctcccagcccgccccgtgccccgcccgcccggctgcttccgcggcggcgctgcccgcacatgggctaggctgccaggatgttcagcttcgaaggcgacttcaagacgcggcccaaggtgtcccttggcggcgcgagcaggaaggaggaaaaggcttctcttttacatcgtactcaggaagaaagaagaaagagagaggaagaaaggcgaaggttgaaaaatgcaataattatccagtcatttattcgaggctatagagacagaaaacagcaatattccatccaaagaagtgcatttgatcgctgtgctaccttgtcacagtccgggggcgcttttcccattgctaatggccccaaccttacccttttggtaaggcagcttctgtttttttacaaacaaaatgaagactcaaaacgtttgatatggctgtatcagaacttaattaaacacagctctctgtttgtcaagcagttggatggatctgagagacttacatgcttatttcagataaaaagattgatgagcctctgttgcaggttgctgcaaaactgtaatgatgacagtttgaatgttgcacttccaatgagaatgcttgaagtattttcgtctgagaatacttacttgcctgttttacaagatgctagctatgtggtgtcagtgattgaacaaattttgcactacatgattcacaatgggtattataggtctctatatttgttgattaacagcaagcttccatcaagtattgaatattctgatttatctcgagttcctatagcaaaaattttgctagagaatgttctaaaaccattgcactttacttacaactcctgtccggaaggtgcgaggcaacaagtttttacagccttcacagaggagtttctggcagcaccttttacagatcagatttttcatttcatcattccggcgcttgcagatgcgcagaccgttttcccttacgagccctttctgaatgcactgttgttaatagagagtagatgttcaagaaagagtggtggagcaccctggcttttctatttcgttttaactgttggcgaaaattatttgggggccctctctgaggaagggctgctggtgtatttgcgggtgctgcagaccttcctctctcagttaccagtctctcctgccagcgcgagctgtcacgactcagccagtgactctgaggaggagagtgaagaagccgacaagccctcaagcccggaggatggcagactgtcagtatcatacataacagaggaatgcctgaagaagctggacacaaagcagcagaccaacaccctgctcaacctggtgtggagggactctgcgagcgaggaggtcttcaccaccatggcctccgtctgccacacgctgatggtgcagcaccgcatgatggtacccaaagtcaggcttctctacagtttagcctttaatgccaggtttctgagacatctttggtttctaatatcttccatgtcaacacggatgatcacagggtctatggtaccgttgcttcaggtgatatccaggggttctcctatgtcttttgaagattctagtcgaatcatcccactcttttacctttttagctccttgtttagtcattcactaatttccatacatgataacgaattcttcggtgatcccatagaagttgtaggtcaaagacaatcatcaatgatgccttttactttagaagagctgataatgttgtctcgatgccttcgagatgcatgcctggggatcatcaagttggcttatccagaaaccaagccagaagttcgagaagaatatattacagcatttcagagtattggagttactactagctctgaaatgcaacaatgcatacagatggaacagaaaagatggattcagttatttaaggttatcaccaatctagtgaaaatgttgaagtccagagacacgaggagaaatttttgtcctccaaaccactggctgtcagaacaagaagatattaaagcagataaggtcactcagctctatgtgccagcatccagacatgtgtggaggttccggcggatggggaggataggcccgctgcagtccaccctggacgtgggtttggagtccccgccgctgtctgtgtctgaggaaagacagcttgctgtcctgacagagttgccttttgtggttccatttgaggaacgagtaaagatctttcagaggttgatttatgcagataagcaagaagttcaaggagatggtccatttctggatggaattaatgtcacaataagaagaaattacatttatgaagatgcttatgacaaactttctccagaaaatgagcctgatttgaaaaagcggatccgtgtgcacttgctcaatgcccatggcctggatgaagctggcattgatggtggtggtattttcagagagtttttaaatgaactactgaagtcaggatttaaccccaaccaggggttctttaagactactaatgaagggcttctgtaccccaacccggctgctcagatgcttgtgggagattcttttgccagacattactacttcctaggcagaatgcttggaaaggctctctatgagaacatgctggtggagctgccctttgcaggcttctttctttccaagttgcttggaaccagtgccgacgtggacattcaccacctcgcctccctagaccctgaggtgtataagaatttgctctttctgaagagctacgaagacgatgtggaggagcttgggctgaacttcactgtggtgaacaatgacctgggagaggcgcaggtagttgaactaaaattcggtgggaaagacatccctgtcaccagcgccaaccggattgcgtacatccacttggtggcagactacaggctgaacaggcagatccgccagcactgcctggctttccgccagggccttgccaatgtcgtcagcctcgagtggctccgaatgtttgatcagcaagaaattcaggtattaatttctggtgcacaagttcccataagcctagaggacctaaaatcctttacaaactattcaggaggctattctgcagaccatcctgttattaaggtcttctggagagttgtggaagggttcactgatgaagaaaagcgcaaactgctgaagtttgtaacaagctgctctcgaccccctctcttggggtttaaggagttgtatcccgcattttgtattcacaacggaggctccgaccttgagcggctccccacagccagcacctgcatgaacctgctgaagctccccgagttctatgacgagacacttttgcgaagtaaacttctctatgcgattgaatgtgccgctggctttgagctgagctgaagctgatgctggggtcagacccctacagagaaccagtgcttccttcgtcagcagcgcctccccagacccacgaggatactcacactgcacgcctgaggctctcctaagctccttctttcattctgccattcctccctcccttccttttttaaatgatttttattacggtgtggtcacttatttagatggacattgcttttcaaataacttaaaataacacgttatgtgccatgtggctactttagtaatattgccaagaagagcacagtttttacactagtggcatctcagtgaaattaaccaaagatgaagctttggctttgctggtgagatcagagccctcctgagcaggcagcgccactccagggttcagacagggctgcacaggcggcagagatacagggtctgagggctgagacgccatggggccgctgctgcttatgtggttggattgtttacaagcctcattattaaaactgaaggcattttttttttctgctgcctttcccaaagtggttaggtttggaaaagagatgatgatggtaatattttatttgtgctttttaagccatttccccaaatgggactagcatgcttgttttcagtataccgtggcctgcctcatgatggtttggagatactgtctgtggatgtgaggtggggacttcattcattgtcctatttctatctccactttgtgcctggagagctttcaggggaggtggaggaggagggtctgccaagctactgcaacatctgtcacccactatacccagttacttgggggaggacagacactgtggtgtcattaaagttgtttgaaccaaagtggcggctgcatctttgtcccgatgctagccgtgccggtctcccatcatccgctcgccctcctttcccctgggctgcgcccacttgtcttcctggatatttgggggtgactcgccatgcttggcaccctctgcttcctggtgctgctctgactcgaagacgggacagtccctggtgcacatccagggaagaggagcgtcggtagttcttgcagtaggcactttatcaggacctgacctgttgctgggtgattttagtctctacaaacagaaagcgtttcaaagcgtcagctgtgggagcagagtgaccctttgctgatgctggggggaggggatctaaatcctcatttatctcttctatgtctagtattttactgtcactggaggctctgtgggctgtcatagttaattgaccataattagcaatatacttttaaagtgggaaagctgaatgacacttttaagacaatgaacattatcaaaacaaaatgtataatttcttaatttgaataataaattaagcgtttaaatgctatttgtagtcttgatatacagaaataaaataattagggttggtcttttttattttaggttgttttatgttgaatgttctatatcttattagttaatttgtatattttattagtattttggaaatagcatatctgagactgaagagaaattgacaattcacttatttgtggtttttttctcagctattctgagcttatttatttatttgtatgttctaatggctaaacatttacattaaatgttttttttcccaaaaaaaaaaaaaaaaanaaaaaaaaaaaaaaaaaaaaaaaaaaaaaaaaggggggggcaaaaaaagggggggggagggggcacaccaagtcctgcgcggcagaccagcccataatctgtgtgaaagaacaagggcccccctatagaggagaaagcgtctaaccacagaaatgagcggacgcgtgccactatatcaaaaacacccggtgcgcacgccggtaacacaacgtgccgacaccgagagcaacaacgtgacacgcgaccaccaccacttcggagaggcgacaccccaactactgcagcgcagcacaccaaagacgacaaaacccaccccgagggaaactcacacccccagacgtacaaacaagctaccacacaagccccacttaccaacagcaacacaaaataggaccgaagaaaaaaccgcccacaagaatcatacccgagacacggctccacaaggccactgtaaaacaagcacgcccagacccacgcacagcaacgaacagccgccaccgcaacgccacgccgaacaacaaagaacaacacaaaggaccagcaacaccaacaagaacaacgccaaccaccagacaccccacgccaaaccaccagtcaaaacacaccaagcacacccacccaccaaacaaaaggcaacgacaaacagacgaccac

SEQ ID NO: 348759 - DNA, 4918 bp, Homo sapiens
agttccaggtgcaagcgccgggtttgctgcccgctgggcgcccctgcagcggcccgagctgtggccggcgtggatgaggggcaggcgaggcagggccgcccctccagtattgccgcccctcccgccccagggcagggctgggagggtacagcccgggggcgggctcgggtcgcctcccggccgccgcgtcctcgctgccccgggccgggcgggcgggcgccgagagcctcccagcccgccccgtgccccgcccgcccggctgcttccgcggcggcgctgcccgcacatgggctaggctgccaggatgttcagcttcgaaggcgacttcaagacgcggcccaaggtgtcccttggcggcgcgagcaggaaggaggaaaaggcttctcttttacatcgtactcaggaagaaagaagaaagagagaggaagaaaggcgaaggttgaaaaatgcaataattatccagtcatttattcgaggctatagagacagaaaacagcaatattccatccaaagaagtgcatttgatcgctgtgctaccttgtcacagtccgggggcgcttttcccattgctaatggccccaaccttacccttttggtaaggcagcttctgtttttttacaaacaaaatgaagactcaaaacgtttgatatggctgtatcagaacttaattaaacacagctctctgtttgtcaagcagttggatggatctgagagacttacatgcttatttcagataaaaagattgatgagcctctgttgcaggttgctgcaaaactgtaatgatgacagtttgaatgttgcacttccaatgagaatgcttgaagtattttcgtctgagaatacttacttgcctgttttacaagatgctagctatgtggtgtcagtgattgaacaaattttgcactacatgattcacaatgggtattataggtctctatatttgttgattaacagcaagcttccatcaagtattgaatattctgatttatctcgagttcctatagcaaaaattttgctagagaatgttctaaaaccattgcactttacttacaactcctgtccggaaggtgcgaggcaacaagtttttacagccttcacagaggagtttctggcagcaccttttacagatcagatttttcatttcatcattccggcgcttgcagatgcgcagaccgttttcccttacgagccctttctgaatgcactgttgttaatagagagtagatgttcaagaaagagtggtggagcaccctggcttttctatttcgttttaactgttggcgaaaattatttgggggccctctctgaggaagggctgctggtgtatttgcgggtgctgcagaccttcctctctcagttaccagtctctcctgccagcgcgagctgtcacgactcagccagtgactctgaggaggagagtgaagaagccgacaagccctcaagcccggaggatggcagactgtcagtatcatacataacagaggaatgcctgaagaagctggacacaaagcagcagaccaacaccctgctcaacctggtgtggagggactctgcgagcgaggaggtcttcaccaccatggcctccgtctgccacacgctgatggtgcagcaccgcatgatggtacccaaagtcaggcttctctacagtttagcctttaatgccaggtttctgagacatctttggtttctaatatcttccatgtcaacacggatgatcacagggtctatggtaccgttgcttcaggtgatatccaggggttctcctatgtcttttgaagattctagtcgaatcatcccactcttttacctttttagctccttgtttagtcattcactaatttccatacatgataacgaattcttcggtgatcccatagaagttgtaggtcaaagacaatcatcaatgatgccttttactttagaagagctgataatgttgtctcgatgccttcgagatgcatgcctggggatcatcaagttggcttatccagaaaccaagccagaagttcgagaagaatatattacagcatttcagagtattggagttactactagctctgaaatgcaacaatgcatacagatggaacagaaaagatggattcagttatttaaggttatcaccaatctagtgaaaatgttgaagtccagagacacgaggagaaatttttgtcctccaaaccactggctgtcagaacaagaagatattaaagcagataaggtcactcagctctatgtgccagcatccagacatgtgtggaggttccggcggatggggaggataggcccgctgcagtccaccctggacgtgggtttggagtccccgccgctgtctgtgtctgaggaaagacagcttgctgtcctgacagagttgccttttgtggttccatttgaggaacgagtaaagatctttcagaggttgatttatgcagataagcaagaagttcaaggagatggtccatttctggatggaattaatgtcacaataagaagaaattacatttatgaagatgcttatgacaaactttctccagaaaatgagcctgatttgaaaaagcggatccgtgtgcacttgctcaatgcccatggcctggatgaagctggcattgatggtggtggtattttcagagagtttttaaatgaactactgaagtcaggatttaaccccaaccaggggttctttaagactactaatgaagggcttctgtaccccaacccggctgctcagatgcttgtgggagattcttttgccagacattactacttcctaggcagaatgcttggaaaggctctctatgagaacatgctggtggagctgccctttgcaggcttctttctttccaagttgcttggaaccagtgccgacgtggacattcaccacctcgcctccctagaccctgaggtgtataagaatttgctctttctgaagagctacgaagacgatgtggaggagcttgggctgaacttcactgtggtgaacaatgacctgggagaggcgcaggtagttgaactaaaattcggtgggaaagacatccctgtcaccagcgccaaccggattgcgtacatccacttggtggcagactacaggctgaacaggcagatccgccagcactgcctggctttccgccagggccttgccaatgtcgtcagcctcgagtggctccgaatgtttgatcagcaagaaattcaggtattaatttctggtgcacaagttcccataagcctagaggacctaaaatcctttacaaactattcaggaggctattctgcagaccatcctgttattaaggtcttctggagagttgtggaagggttcactgatgaagaaaagcgcaaactgctgaagtttgtaacaagctgctctcgaccccctctcttggggtttaaggagttgtatcccgcattttgtattcacaacggaggctccgaccttgagcggctccccacagccagcacctgcatgaacctgctgaagctccccgagttctatgacgagacacttttgcgaagtaaacttctctatgcgattgaatgtgccgctggctttgagctgagctgaagctgatgctggggtcagacccctacagagaaccagtgcttccttcgtcagcagcgcctccccagacccacgaggatactcacactgcacgcctgaggctctcctaagctccttctttcattctgccattcctccctcccttccttttttaaatgatttttattacggtgtggtcacttatttagatggacattgcttttcaaataacttaaaataacacgttatgtgccatgtggctactttagtaatattgccaagaagagcacagtttttacactagtggcatctcagtgaaattaaccaaagatgaagctttggctttgctggtgagatcagagccctcctgagcaggcagcgccactccagggttcagacagggctgcacaggcggcagagatacagggtctgagggctgagacgccatggggccgctgctgcttatgtggttggattgtttacaagcctcattattaaaactgaaggcattttttttttctgctgcctttcccaaagtggttaggtttggaaaagagatgatgatggtaatattttatttgtgctttttaagccatttccccaaatgggactagcatgcttgttttcagtataccgtggcctgcctcatgatggtttggagatactgtctgtggatgtgaggtggggacttcattcattgtcctatttctatctccactttgtgcctggagagctttcaggggaggtggaggaggagggtctgccaagctactgcaacatctgtcacccactatacccagttacttgggggaggacagacactgtggtgtcattaaagttgtttgaaccaaagtggcggctgcatctttgtcccgatgctagccgtgccggtctcccatcatccgctcgccctcctttcccctgggctgcgcccacttgtcttcctggatatttgggggtgactcgccatgcttggcaccctctgcttcctggtgctgctctgactcgaagacgggacagtccctggtgcacatccagggaagaggagcgtcggtagttcttgcagtaggcactttatcaggacctgacctgttgctgggtgattttagtctctacaaacagaaagcgtttcaaagcgtcagctgtgggagcagagtgaccctttgctgatgctggggggaggggatctaaatcctcatttatctcttctatgtctagtattttactgtcactggaggctctgtgggctgtcatagttaattgaccataattagcaatatacttttaaagtgggaaagctgaatgacacttttaagacaatgaacattatcaaaacaaaatgtataatttcttaatttgaataataaattaagcgtttaaatgcta

SEQ ID NO: 348760 - DNA, 3712 bp, Homo sapiens
gccaggtgcagtggcacacacctgtaatcccagcactttgggatgctgaggcgggtggatcacttgaggtcaggagttcaagaccagcctggccaacgttgtgaaaccccatctctacaaaaagtacaaaaattaaccaggcgtgatggtatacacctgtagtcccagctactcaggaggctgaggtgggaggatcgcttgaaaccagaaggtggaggtcgcagtgggctgaggtcgcaccactgcattccagcctgggtgacggagtgagaccgtgtatcaaaaaataaaaaattgtaaggaccaaaaataagggatgagaggaactgacagatgaaaaataacttgagaaaatatactgtgtctgttttatttgaatactgcctcaaccaaattgaaaaaaaaactagaaagtgaatttttgataataataacttaatttttaaagtgatctattttgcttcataaagcaattatattattttactatgtttagatattatgcaccatcaaataaaacaattagagatttctttggggcatattagaaaacatagttaactgtaaaagtatgaaaggacagctagcatgagagaggacctgaaaaggtaaagcaaaaggggacatgaaggtatgaggtcagagagagggcccagcccacggtagagaaatgtccagcaccaattctgttcaagtgtgatcaggtcaaagtgtgtgctagagcacaggggagttctgaaccaggattgcccccgacaggtcactcagctctatgtgccagcatccagacatgtgtggaggttccggcggatggggaggataggcccgctgcagtccaccctggacgtgggtttggagtccccgccgctgtctgtgtctgaggaaagacagcttgctgtcctgacagagttgccttttgtggttccatttgaggaacgagtaaagatctttcagaggttgatttatgcagataagcaagaagttcaaggagatggtccatttctggatggaattaatgtcacaataagaagaaattacatttatgaagatgcttatgacaaactttctccagaaaatgagcctgatttgaaaaagcggatccgtgtgcacttgctcaatgcccatggcctggatgaagctggcattgatggtggtggtattttcagagagtttttaaatgaactactgaagtcaggatttaaccccaaccaggggttctttaagactactaatgaagggcttctgtaccccaacccggctgctcagatgcttgtgggagattcttttgccagacattactacttcctaggcagaatgcttggaaaggctctctatgagaacatgctggtggagctgccctttgcaggcttctttctttccaagttgcttggaaccagtgccgacgtggacattcaccacctcgcctccctagaccctgaggtgtataagaatttgctctttctgaagagctacgaagacgatgtggaggagcttgggctgaacttcactgtggtgaacaatgacctgggagaggcgcaggtagttgaactaaaattcggtgggaaagacatccctgtcaccagcgccaaccggattgcgtacatccacttggtggcagactacaggctgaacaggcagatccgccagcactgcctggctttccgccagggccttgccaatgtcgtcagcctcgagtggctccgaatgtttgatcagcaagaaattcaggtattaatttctggtgcacaagttcccataagcctagaggacctaaaatcctttacaaactattcaggaggctattctgcagaccatcctgttattaaggtcttctggagagttgtggaagggttcactgatgaagaaaagcgcaaactgctgaagtttgtaacaagctgctctcgaccccctctcttggggtttaaggagttgtatcccgcattttgtattcacaacggaggctccgaccttgagcggctccccacagccagcacctgcatgaacctgctgaagctccccgagttctatgacgagacacttttgcgaagtaaacttctctatgcgattgaatgtgccgctggctttgagctgagctgaagctgatgctggggtcagacccctacagagaaccagtgcttccttcgtcagcagcgcctccccagacccacgaggatactcacactgcacgcctgaggctctcctaagctccttctttcattctgccattcctccctcccttccttttttaaatgatttttattacggtgtggtcacttatttagatggacattgcttttcaaataacttaaaataacacgttatgtgccatgtggctactttagtaatattgccaagaagagcacagtttttacactagtggcatctcagtgaaattaaccaaagatgaagctttggctttgctggtgagatcagagccctcctgagcaggcagcgccactccagggttcagacagggctgcacaggcggcagagatacagggtctgagggctgagacgccatggggccgctgctgcttatgtggttggattgtttacaagcctcattattaaaactgaaggcattttttttttctgctgcctttcccaaagtggttaggtttggaaaagagatgatgatggtaatattttatttgtgctttttaagccatttccccaaatgggactagcatgcttgttttcagtataccgtggcctgcctcatgatggtttggagatactgtctgtggatgtgaggtggggacttcattcattgtcctatttctatctccactttgtgcctggagagctttcaggggaggtggaggaggagggtctgccaagctactgcaacatctgtcacccactatacccagttacttgggggaggacagacactgtggtgtcattaaagttgtttgaaccaaagtggcggctgcatctttgtcccgatgctagccgtgccggtctcccatcatccgctcgccctcctttcccctgggctgcgcccacttgtcttcctggatatttgggggtgactcgccatgcttggcaccctctgcttcctggtgctgctctgactcgaagacgggacagtccctggtgcacatccagggaagaggagcgtcggtagttcttgcagtaggcactttatcaggacctgacctgttgctgggtgattttagtctctacaaacagaaagcgtttcaaagcgtcagctgtgggagcagagtgaccctttgctgatgctggggggaggggatctaaatcctcatttatctcttctatgtctagtattttactgtcactggaggctctgtgggctgtcatagttaattgaccataattagcaatatacttttaaagtgggaaagctgaatgacacttttaagacaatgaacattatcaaaacaaaatgtataatttcttaatttgaataataaattaagcgtttaaatgctatttgtagtcttgatatacagaaataaaataattagggttggtcttttttattttaggttgttttatgttgaatgttctatatcttattagttaatttgtatattttattagtattttggaaatagcatatctgagactgaagagaaattgacaattcacttatttgtggtttttttctcagctattctgagcttatttatttatttgtatgttctaatggctaaacatttacattaaatgttttttttcccaa

SEQ ID NO: 348761 - DNA, 2882 bp, Homo sapiens
accccatcctgtgggcacggccttgtttggaaatagggtccaatagctgcgaggccttgtttggaaatagggtccaatagctgcgaggcgtgagttcatgtggttttcagtctcgcagtgtgtgatcatttgccgtagccaccttgggagactaacaaacctgcagttcctgaaggattcaccatccttctgttgaggaggagcatttgttggcttctgtctcacaagaaggatctgtctcttcataattccacgatttcgctcctaggtggtctgttccagagttctctgcatgcttagtgcgtgcattgaatgcctgcacgggatcctggagcacagtacctgcccactgaatatcagcttccatcttcggtactatgaggagaaaatacctgctctcttaggattgggtttaatatcaagttgagcatatggctctttgtttgtagaaggcttgtatattcgatgctaacgttgtcactgttctcttttgaaggctctctatgagaacatgctggtggagctgccctttgcaggcttctttctttccaagttgcttggaaccagtgccgacgtggacattcaccacctcgcctccctagaccctgaggtgtataagaatttgctctttctgaagagctacgaagacgatgtggaggagcttgggctgaacttcactgtggtgaacaatgacctgggagaggcgcaggtagttgaactaaaattcggtgggaaagacatccctgtcaccagcgccaaccggattgcgtacatccacttggtggcagactacaggctgaacaggcagatccgccagcactgcctggctttccgccagggccttgccaatgtcgtcagcctcgagtggctccgaatgtttgatcagcaagaaattcaggtattaatttctggtgcacaagttcccataagcctagaggacctaaaatcctttacaaactattcaggaggctattctgcagaccatcctgttattaaggtcttctggagagttgtggaagggttcactgatgaagaaaagcgcaaactgctgaagtttgtaacaagctgctctcgaccccctctcttggggtttaaggagttgtatcccgcattttgtattcacaacggaggctccgaccttgagcggctccccacagccagcacctgcatgaacctgctgaagctccccgagttctatgacgagacacttttgcgaagtaaacttctctatgcgattgaatgtgccgctggctttgagctgagctgaagctgatgctggggtcagacccctacagagaaccagtgcttccttcgtcagcagcgcctccccagacccacgaggatactcacactgcacgcctgaggctctcctaagctccttctttcattctgccattcctccctcccttccttttttaaatgatttttattacggtgtggtcacttatttagatggacattgcttttcaaataacttaaaataacacgttatgtgccatgtggctactttagtaatattgccaagaagagcacagtttttacactagtggcatctcagtgaaattaaccaaagatgaagctttggctttgctggtgagatcagagccctcctgagcaggcagcgccactccagggttcagacagggctgcacaggcggcagagatacagggtctgagggctgagacgccatggggccgctgctgcttatgtggttggattgtttacaagcctcattattaaaactgaaggcattttttttttctgctgcctttcccaaagtggttaggtttggaaaagagatgatgatggtaatattttatttgtgctttttaagccatttccccaaatgggactagcatgcttgttttcagtataccgtggcctgcctcatgatggtttggagatactgtctgtggatgtgaggtggggacttcattcattgtcctatttctatctccactttgtgcctggagagctttcaggggaggtggaggaggagggtctgccaagctactgcaacatctgtcacccactatacccagttacttgggggaggacagacactgtggtgtcattaaagttgtttgaaccaaagtggcggctgcatctttgtcccgatgctagccgtgccggtctcccatcatccgctcgccctcctttcccctgggctgcgcccacttgtcttcctggatatttgggggtgactcgccatgcttggcaccctctgcttcctggtgctgctctgactcgaagacgggacagtccctggtgcacatccagggaagaggagcgtcggtagttcttgcagtaggcactttatcaggacctgacctgttgctgggtgattttagtctctacaaacagaaagcgtttcaaagcgtcagctgtgggagcagagtgaccctttgctgatgctggggggaggggatctaaatcctcatttatctcttctatgtctagtattttactgtcactggaggctctgtgggctgtcatagttaattgaccataattagcaatatacttttaaagtgggaaagctgaatgacacttttaagacaatgaacattatcaaaacaaaatgtataatttcttaatttgaataataaattaagcgtttaaatgctatttgtagtcttgatatacagaaataaaataattagggttggtcttttttattttaggttgttttatgttgaatgttctatatcttattagttaatttgtatattttattagtattttggaaatagcatatctgagactgaagagaaattgacaattcacttatttgtggtttttttctcagctattctgagcttatttatttatttgtatgttctaatggctaaacatttacattaaatgttttttttcccaa

SEQ ID NO: 348762 - DNA, 4805 bp, Homo sapiens
agttccaggtgcaagcgccgggtttgctgcccgctgggcgcccctgcagcggcccgagctgtggccggcgtggatgaggggcaggcgaggcagggccgcccctccagtattgccgcccctcccgccccagggcagggctgggagggtacagcccgggggcgggctcgggtcgcctcccggccgccgcgtcctcgctgccccgggccgggcgggcgggcgccgagagcctcccagcccgccccgtgccccgcccgcccggctgcttccgcggcggcgctgcccgcacatgggctaggctgccaggatgttcagcttcgaaggcgacttcaagacgcggcccaaggtgtcccttggcggcgcgagcaggaaggaggaaaaggcttctcttttacatcgtactcaggaagaaagaagaaagagagaggaagaaaggcgaaggttgaaaaatgcaataattatccagtcatttattcgaggctatagagacagaaaacagcaatattccatccaaagaagtgcatttgatcgctgtgctaccttgtcacagtccgggggcgcttttcccattgctaatggccccaaccttacccttttggtaaggcagcttctgtttttttacaaacaaaatgaagactcaaaacgtttgatatggctgtatcagaacttaattaaacacagctctctgtttgtcaagcagttggatggatctgagagacttacatgcttatttcagataaaaagattgatgagcctctgttgcaggttgctgcaaaactgtaatgatgacagtttgaatgttgcacttccaatgagaatgcttgaagtattttcgtctgagaatacttacttgcctgttttacaagatgctagctatgtggtgtcagtgattgaacaaattttgcactacatgattcacaatgggtattataggtctctatatttgttgattaacagcaagcttccatcaagtattgaatattctgatttatctcgagttcctatagcaaaaattttgctagagaatgttctaaaaccattgcactttacttacaactcctgtccggaaggtgcgaggcaacaagtttttacagccttcacagaggagtttctggcagcaccttttacagatcagatttttcatttcatcattccggcgcttgcagatgcgcagaccgttttcccttacgagccctttctgaatgcactgttgttaatagagagtagatgttcaagaaagagtggtggagcaccctggcttttctatttcgttttaactgttggcgaaaattatttgggggccctctctgaggaagggctgctggtgtatttgcgggtgctgcagaccttcctctctcagttaccagtctctcctgccagcgcgagctgtcacgactcagccagtgactctgaggaggagagtgaagaagccgacaagccctcaagcccggaggatggcagactgtcagtatcatacataacagaggaatgcctgaagaagctggacacaaagcagcagaccaacaccctgctcaacctggtgtggagggactctgcgagcgaggaggtcttcaccaccatggcctccgtctgccacacgctgatggtgcagcaccgcatgatggtacccaaagtcaggcttctctacagtttagcctttaatgccaggtttctgagacatctttggtttctaatatcttccatgtcaacacggatgatcacagggtctatggtaccgttgcttcaggtgatatccaggggttctcctatgtcttttgaagattctagtcgaatcatcccactcttttacctttttagctccttgtttagtcattcactaatttccatacatgataacgaattcttcggtgatcccatagaagttgtaggtcaaagacaatcatcaatgatgccttttactttagaagagctgataatgttgtctcgatgccttcgagatgcatgcctggggatcatcaagttggcttatccagaaaccaagccagaagttcgagaagaatatattacagcatttcagagtattggagttactactagctctgaaatgcaacaatgcatacagatggaacagaaaagatggattcagttatttaaggttatcaccaatctagtgaaaatgttgaagtccagagacacgaggagaaatttttgtcctccaaaccactggctgtcagaacaagaagatattaaagcagataaggtcactcagctctatgtgccagcatccagacatgtgtggaggttccggcggatggggaggataggcccgctgcagtccaccctggacgtgggtttggagtccccgccgctgtctgtgtctgaggaaagacagcttgctgtcctgacagagttgccttttgtggttccatttgaggaacgagtaaagatctttcagaggttgatttatgcagataagcaagaagttcaaggagatggtccatttctggatggaattaatgtcacaataagaagaaattacatttatgaagatgcttatgacaaactttctccagaaaatgagcctgatttgaaaaagcggatccgtgtgcacttgctcaatgcccatggcctggatgaagctggcattgatggtggtggtattttcagagagtttttaaatgaactactgaagtcaggatttaaccccaaccaggggttctttaagactactaatgaagggcttctgtaccccaacccggctgctcagatgcttgtgggagattcttttgccagacattactacttcctaggcagaatgcttggaaaggctctctatgagaacatgctggtggagctgccctttgcaggcttctttctttccaagttgcttggaaccagtgccgacgtggacattcaccacctcgcctccctagaccctgaggtgtataagaatttgctctttctgaagagctacgaagacgatgtggaggagcttgggctgaacttcactgtggtgaacaatgacctgggagaggcgcaggtagttgaactaaaattcggtgggaaagacatccctgtcaccagcgccaaccggattgcgtacatccacttggtggcagactacaggctgaacaggcagatccgccagcactgcctggctttccgccagggccttgccaatgtcgtcagcctcgagtggctccgaatgtttgatcagcaagaaattcaggtattaatttctggtgcacaagttcccataagcctagaggacctaaaatcctttacaaactattcaggaggctattctgcagaccatcctgttattaaggtcttctggagagttgtggaagggttcactgatgaagaaaagcgcaaactgctgaagtttgtaacaagctgctctcgaccccctctcttggggtttaaggagttgtatcccgcattttgtattcacaacggaggctccgaccttgagcggctccccacagccagcacctgcatgaacctgctgaagctccccgagttctatgacgagacacttttgcgaagtaaacttctctatgcgattgaatgtgccgctggctttgagctgagctgaagctgatgctggggtcagacccctacagagaaccagtgcttccttcgtcagcagcgcctccccagacccacgaggatactcacactgcacgcctgaggctctcctaagctccttctttcattctgccattcctccctcccttccttttttaaatgatttttattacggtgtggtcacttatttagatggacattgcttttcaaataacttaaaataacacgttatgtgccatgtggctactttagtaatattgccaagaagagcacagtttttacactagtggcatctcagtgaaattaaccaaagatgaagctttggctttgctggtgagatcagagccctcctgagcaggcagcgccactccagggttcagacagggctgcacaggcggcagagatacagggtctgagggctgagacgccatggggccgctgctgcttatgtggttggattgtttacaagcctcattattaaaactgaaggcattttttttttctgctgcctttcccaaagtggttaggtttggaaaagagatgatgatggtaatattttatttgtgctttttaagccatttccccaaatgggactagcatgcttgttttcagtataccgtggcctgcctcatgatggtttggagatactgtctgtggatgtgaggtggggacttcattcattgtcctatttctatctccactttgtgcctggagagctttcaggggaggtggaggaggagggtctgccaagctactgcaacatctgtcacccactatacccagttacttgggggaggacagacactgtggtgtcattaaagttgtttgaaccaaagtggcggctgcatctttgtcccgatgctagccgtgccggtctcccatcatccgctcgccctcctttcccctgggctgcgcccacttgtcttcctggatatttgggggtgactcgccatgcttggcaccctctgcttcctggtgctgctctgactcgaagacgggacagtccctggtgcacatccagggaagaggagcgtcggtagttcttgcagtaggcactttatcaggacctgacctgttgctgggtgctggatgcggttcttggctgcctgctcctggggtggagaaccgattgtcccgggattcactgaagtctttgtaactgcaaggaccgtcttccaacccgtataattgaccaggcataatggctggactgcttggaagacacagacattcagcttctgccccaactttcaagc

SEQ ID NO: 348763 - DNA, 4382 bp, Homo sapiens
agttccaggtgcaagcgccgggtttgctgcccgctgggcgcccctgcagcggcccgagctgtggccggcgtggatgaggggcaggcgaggcagggccgcccctccagtattgccgcccctcccgccccagggcagggctgggagggtacagcccgggggcgggctcgggtcgcctcccggccgccgcgtcctcgctgccccgggccgggcgggcgggcgccgagagcctcccagcccgccccgtgccccgcccgcccggctgcttccgcggcggcgctgcccgcacatgggctaggctgccaggatgttcagcttcgaaggcgacttcaagacgcggcccaaggtgtcccttggcggcgcgagcaggaaggaggaaaaggcttctcttttacatcgtactcaggaagaaagaagaaagagagaggaagaaaggcgaaggttgaaaaatgcaataattatccagtcatttattcgaggctatagagacagaaaacagcaatattccatccaaagaagtgcatttgatcgctgtgctaccttgtcacagtccgggggcgcttttcccattgctaatggccccaaccttacccttttggtaaggcagcttctgtttttttacaaacaaaatgaagactcaaaacgtttgatatggctgtatcagaacttaattaaacacagctctctgtttgtcaagcagttggatggatctgagagacttacatgcttatttcagataaaaagattgatgagcctctgttgcaggttgctgcaaaactgtaatgatgacagtttgaatgttgcacttccaatgagaatgcttgaagtattttcgtctgagaatacttacttgcctgttttacaagatgctagctatgtggtgtcagtgattgaacaaattttgcactacatgattcacaatgggtattataggtctctatatttgttgattaacagcaagcttccatcaagtattgaatattctgatttatctcgagttcctatagcaaaaattttgctagagaatgttctaaaaccattgcactttacttacaactcctgtccggaaggtgcgaggcaacaagtttttacagccttcacagaggagtttctggcagcaccttttacagatcagatttttcatttcatcattccggcgcttgcagatgcgcagaccgttttcccttacgagccctttctgaatgcactgttgttaatagagagtagatgttcaagaaagagtggtggagcaccctggcttttctatttcgttttaactgttggcgaaaattatttgggggccctctctgaggaagggctgctggtgtatttgcgggtgctgcagaccttcctctctcagttaccagtctctcctgccagcgcgagctgtcacgactcagccagtgactctgaggaggagagtgaagaagccgacaagccctcaagcccggaggatggcagactgtcagtatcatacataacagaggaatgcctgaagaagctggacacaaagcagcagaccaacaccctgctcaacctggtgtggagggactctgcgagcgaggaggtcttcaccaccatggcctccgtctgccacacgctgatggtgcagcaccgcatgatggtacccaaagtcaggcttctctacagtttagcctttaatgccaggtttctgagacatctttggtttctaatatcttccatgtcaacacggatgatcacagggtctatggtaccgttgcttcaggtgatatccaggggttctcctatgtcttttgaagattctagtcgaatcatcccactcttttacctttttagctccttgtttagtcattcactaatttccatacatgataacgaattcttcggtgatcccatagaagttgtaggtcaaagacaatcatcaatgatgccttttactttagaagagctgataatgttgtctcgatgccttcgagatgcatgcctggggatcatcaagttggcttatccagaaaccaagccagaagttcgagaagaatatattacagcatttcagagtattggagttactactagctctgaaatgcaacaatgcatacagatggaacagaaaagatggattcagttatttaaggttatcaccaatctagtgaaaatgttgaagtccagagacacgaggagaaatttttgtcctccaaaccactggctgtcagaacaagaagatattaaagcagataaggtcactcagctctatgtgccagcatccagacatgtgtggaggttccggcggatggggaggataggcccgctgcagtccaccctggacgtgggtttggagtccccgccgctgtctgtgtctgaggaaagacagcttgctgtcctgacagagttgccttttgtggttccatttgaggaacgagtaaagatctttcagaggttgatttatgcagataagcaagaagttcaaggagatggtccatttctggatggaattaatgtcacaataagaagaaattacatttatgaagatgcttatgacaaactttctccagaaaatgagcctgatttgaaaaagcggatccgtgtgcacttgctcaatgcccatggcctggatgaagctggcattgatggtggtggtattttcagagagtttttaaatgaactactgaagtcaggatttaaccccaaccaggggttctttaagactactaatgaagggcttctgtaccccaacccggctgctcagatgcttgtgggagattcttttgccagacattactacttcctaggcagaatgcttggaaaggctctctatgagaacatgctggtggagctgccctttgcaggcttctttctttccaagttgcttggaaccagtgccgacgtggacattcaccacctcgcctccctagaccctgaggtgtataagaatttgctctttctgaagagctacgaagacgatgtggaggagcttgggctgaacttcactgtggtgaacaatgacctgggagaggcgcaggtagttgaactaaaattcggtgggaaagacatccctgtcaccagcgccaaccggattgcgtacatccacttggtggcagactacaggctgaacaggcagatccgccagcactgcctggctttccgccagggccttgccaatgtcgtcagcctcgagtggctccgaatgtttgatcagcaagaaattcaggtattaatttctggtgcacaagttcccataagcctagaggacctaaaatcctttacaaactattcaggaggctattctgcagaccatcctgttattaaggtcttctggagagttgtggaagggttcactgatgaagaaaagcgcaaactgctgaagtttgtaacaagctgctctcgaccccctctcttggggtttaaggagttgtatcccgcattttgtattcacaacggaggctccgaccttgagcggctccccacagccagcacctgcatgaacctgctgaagctccccgagttctatgacgagacacttttgcgaagtaaacttctctatgcgattgaatgtgccgctggctttgagctgagctgaagctgatgctggggtcagacccctacagagaaccagtgcttccttcgtcagcagcgcctccccagacccacgaggatactcacactgcacgcctgaggctctcctaagctccttctttcattctgccattcctccctcccttccttttttaaatgatttttattacggtgtggtcacttatttagatggacattgcttttcaaataacttaaaataacacgttatgtgccatgtggctactttagtaatattgccaagaagagcacagtttttacactagtggcatctcagtgaaattaaccaaagatgaagctttggctttgctggtgagatcagagccctcctgagcaggcagcgccactccagggttcagacagggctgcacaggcggcagagatacagggtctgagggctgagacgccatggggccgctgctgcttatgtggttggattgtttacaagcctcattattaaaactgaaggcattttttttttctgctgcctttcccaaagtggttaggtttggaaaagagatgatgatggtaatattttatttgtgctttttaagccatttccccaaatgggactagcatgcttgttttcagtataccgtggcctgcctcatgatggtttggagatactgtctgtggatgtgaggtggggacttcattcattgtcctatttctatctccactttgtgcctggagagctttcaggggaggtggaggaggagggtctgccaagctactgcaacatctgtcacccactatacccagttacttgggggaggacagacactgtggtgtcattaaagttgtttgaacca

SEQ ID NO: 348764 - DNA, 3992 bp, Homo sapiens
agttccaggtgcaagcgccgggtttgctgcccgctgggcgcccctgcagcggcccgagctgtggccggcgtggatgaggggcaggcgaggcagggccgcccctccagtattgccgcccctcccgccccagggcagggctgggagggtacagcccgggggcgggctcgggtcgcctcccggccgccgcgtcctcgctgccccgggccgggcgggcgggcgccgagagcctcccagcccgccccgtgccccgcccgcccggctgcttccgcggcggcgctgcccgcacatgggctaggctgccaggatgttcagcttcgaaggcgacttcaagacgcggcccaaggtgtcccttggcggcgcgagcaggaaggaggaaaaggcttctcttttacatcgtactcaggaagaaagaagaaagagagaggaagaaaggcgaaggttgaaaaatgcaataattatccagtcatttattcgaggctatagagacagaaaacagcaatattccatccaaagaagtgcatttgatcgctgtgctaccttgtcacagtccgggggcgcttttcccattgctaatggccccaaccttacccttttggtaaggcagcttctgtttttttacaaacaaaatgaagactcaaaacgtttgatatggctgtatcagaacttaattaaacacagctctctgtttgtcaagcagttggatggatctgagagacttacatgcttatttcagataaaaagattgatgagcctctgttgcaggttgctgcaaaactgtaatgatgacagtttgaatgttgcacttccaatgagaatgcttgaagtattttcgtctgagaatacttacttgcctgttttacaagatgctagctatgtggtgtcagtgattgaacaaattttgcactacatgattcacaatgggtattataggtctctatatttgttgattaacagcaagcttccatcaagtattgaatattctgatttatctcgagttcctatagcaaaaattttgctagagaatgttctaaaaccattgcactttacttacaactcctgtccggaaggtgcgaggcaacaagtttttacagccttcacagaggagtttctggcagcaccttttacagatcagatttttcatttcatcattccggcgcttgcagatgcgcagaccgttttcccttacgagccctttctgaatgcactgttgttaatagagagtagatgttcaagaaagagtggtggagcaccctggcttttctatttcgttttaactgttggcgaaaattatttgggggccctctctgaggaagggctgctggtgtatttgcgggtgctgcagaccttcctctctcagttaccagtctctcctgccagcgcgagctgtcacgactcagccagtgactctgaggaggagagtgaagaagccgacaagccctcaagcccggaggatggcagactgtcagtatcatacataacagaggaatgcctgaagaagctggacacaaagcagcagaccaacaccctgctcaacctggtgtggagggactctgcgagcgaggaggtcttcaccaccatggcctccgtctgccacacgctgatggtgcagcaccgcatgatggtacccaaagtcaggcttctctacagtttagcctttaatgccaggtttctgagacatctttggtttctaatatcttccatgtcaacacggatgatcacagggtctatggtaccgttgcttcaggtgatatccaggggttctcctatgtcttttgaagattctagtcgaatcatcccactcttttacctttttagctccttgtttagtcattcactaatttccatacatgataacgaattcttcggtgatcccatagaagttgtaggtcaaagacaatcatcaatgatgccttttactttagaagagctgataatgttgtctcgatgccttcgagatgcatgcctggggatcatcaagttggcttatccagaaaccaagccagaagttcgagaagaatatattacagcatttcagagtattggagttactactagctctgaaatgcaacaatgcatacagatggaacagaaaagatggattcagttatttaaggttatcaccaatctagtgaaaatgttgaagtccagagacacgaggagaaatttttgtcctccaaaccactggctgtcagaacaagaagatattaaagcagataaggtcactcagctctatgtgccagcatccagacatgtgtggaggttccggcggatggggaggataggcccgctgcagtccaccctggacgtgggtttggagtccccgccgctgtctgtgtctgaggaaagacagcttgctgtcctgacagagttgccttttgtggttccatttgaggaacgagtaaagatctttcagaggttgatttatgcagataagcaagaagttcaaggagatggtccatttctggatggaattaatgtcacaataagaagaaattacatttatgaagatgcttatgacaaactttctccagaaaatgagcctgatttgaaaaagcggatccgtgtgcacttgctcaatgcccatggcctggatgaagctggcattgatggtggtggtattttcagagagtttttaaatgaactactgaagtcaggatttaaccccaaccaggggttctttaagactactaatgaagggcttctgtaccccaacccggctgctcagatgcttgtgggagattcttttgccagacattactacttcctaggcagaatgcttggaaaggctctctatgagaacatgctggtggagctgccctttgcaggcttctttctttccaagttgcttggaaccagtgccgacgtggacattcaccacctcgcctccctagaccctgaggtgtataagaatttgctctttctgaagagctacgaagacgatgtggaggagcttgggctgaacttcactgtggtgaacaatgacctgggagaggcgcaggtagttgaactaaaattcggtgggaaagacatccctgtcaccagcgccaaccggattgcgtacatccacttggtggcagactacaggctgaacaggcagatccgccagcactgcctggctttccgccagggccttgccaatgtcgtcagcctcgagtggctccgaatgtttgatcagcaagaaattcaggtattaatttctggtgcacaagttcccataagcctagaggacctaaaatcctttacaaactattcaggaggctattctgcagaccatcctgttattaaggtcttctggagagttgtggaagggttcactgatgaagaaaagcgcaaactgctgaagtttgtaacaagctgctctcgaccccctctcttggggtttaaggagttgtatcccgcattttgtattcacaacggaggctccgaccttgagcggctccccacagccagcacctgcatgaacctgctgaagctccccgagttctatgacgagacacttttgcgaagtaaacttctctatgcgattgaatgtgccgctggctttgagctgagctgaagctgatgctggggtcagacccctacagagaaccagtgcttccttcgtcagcagcgcctccccagacccacgaggatactcacactgcacgcctgaggctctcctaagctccttctttcattctgccattcctccctcccttccttttttaaatgatttttattacggtgtggtcacttatttagatggacattgcttttcaaataacttaaaataacacgttatgtgccatgtggctactttagtaatattgccaagaagagcacagtttttacactagtggcatctcagtgaaattaaccaaagatgaagctttggctttgctggtgagatcagagccctcctgagcaggcagcgccactccaagcattcagaagatgaacgggatacatctagaatcaagctatcacgaatcacggtgtcactgccgtctcac

SEQ ID NO: 348765 - DNA, 3422 bp, Homo sapiens
agttccaggtgcaagcgccgggtttgctgcccgctgggcgcccctgcagcggcccgagctgtggccggcgtggatgaggggcaggcgaggcagggccgcccctccagtattgccgcccctcccgccccagggcagggctgggagggtacagcccgggggcgggctcgggtcgcctcccggccgccgcgtcctcgctgccccgggccgggcgggcgggcgccgagagcctcccagcccgccccgtgccccgcccgcccggctgcttccgcggcggcgctgcccgcacatgggctaggctgccaggatgttcagcttcgaaggcgacttcaagacgcggcccaaggtgtcccttggcggcgcgagcaggaaggaggaaaaggcttctcttttacatcgtactcaggaagaaagaagaaagagagaggaagaaaggcgaaggttgaaaaatgcaataattatccagtcatttattcgaggctatagagacagaaaacagcaatattccatccaaagaagtgcatttgatcgctgtgctaccttgtcacagtccgggggcgcttttcccattgctaatggccccaaccttacccttttggtaaggcagcttctgtttttttacaaacaaaatgaagactcaaaacgtttgatatggctgtatcagaacttaattaaacacagctctctgtttgtcaagcagttggatggatctgagagacttacatgcttatttcagataaaaagattgatgagcctctgttgcaggttgctgcaaaactgtaatgatgacagtttgaatgttgcacttccaatgagaatgcttgaagtattttcgtctgagaatacttacttgcctgttttacaagatgctagctatgtggtgtcagtgattgaacaaattttgcactacatgattcacaatgggtattataggtctctatatttgttgattaacagcaagcttccatcaagtattgaatattctgatttatctcgagttcctatagcaaaaattttgctagagaatgttctaaaaccattgcactttacttacaactcctgtccggaaggtgcgaggcaacaagtttttacagccttcacagaggagtttctggcagcaccttttacagatcagatttttcatttcatcattccggcgcttgcagatgcgcagaccgttttcccttacgagccctttctgaatgcactgttgttaatagagagtagatgttcaagaaagagtggtggagcaccctggcttttctatttcgttttaactgttggcgaaaattatttgggggccctctctgaggaagggctgctggtgtatttgcgggtgctgcagaccttcctctctcagttaccagtctctcctgccagcgcgagctgtcacgactcagccagtgactctgaggaggagagtgaagaagccgacaagccctcaagcccggaggatggcagactgtcagtatcatacataacagaggaatgcctgaagaagctggacacaaagcagcagaccaacaccctgctcaacctggtgtggagggactctgcgagcgaggaggtcttcaccaccatggcctccgtctgccacacgctgatggtgcagcaccgcatgatggtacccaaagtcaggcttctctacagtttagcctttaatgccaggtttctgagacatctttggtttctaatatcttccatgtcaacacggatgatcacagggtctatggtaccgttgcttcaggtgatatccaggggttctcctatgtcttttgaagattctagtcgaatcatcccactcttttacctttttagctccttgtttagtcattcactaatttccatacatgataacgaattcttcggtgatcccatagaagttgtaggtcaaagacaatcatcaatgatgccttttactttagaagagctgataatgttgtctcgatgccttcgagatgcatgcctggggatcatcaagttggcttatccagaaaccaagccagaagttcgagaagaatatattacagcatttcagagtattggagttactactagctctgaaatgcaacaatgcatacagatggaacagaaaagatggattcagttatttaaggttatcaccaatctagtgaaaatgttgaagtccagagacacgaggagaaatttttgtcctccaaaccactggctgtcagaacaagaagatattaaagcagataaggtcactcagctctatgtgccagcatccagacatgtgtggaggttccggcggatggggaggataggcccgctgcagtccaccctggacgtgggtttggagtccccgccgctgtctgtgtctgaggaaagacagcttgctgtcctgacagagttgccttttgtggttccatttgaggaacgagtaaagatctttcagaggttgatttatgcagataagcaagaagttcaaggagatggtccatttctggatggaattaatgtcacaataagaagaaattacatttatgaagatgcttatgacaaactttctccagaaaatgagcctgatttgaaaaagcggatccgtgtgcacttgctcaatgcccatggcctggatgaagctggcattgatggtggtggtattttcagagagtttttaaatgaactactgaagtcaggatttaaccccaaccaggggttctttaagactactaatgaagggcttctgtaccccaacccggctgctcagatgcttgtgggagattcttttgccagacattactacttcctaggcagaatgcttggaaaggctctctatgagaacatgctggtggagctgccctttgcaggcttctttctttccaagttgcttggaaccagtgccgacgtggacattcaccacctcgcctccctagaccctgaggtgtataagaatttgctctttctgaagagctacgaagacgatgtggaggagcttgggctgaacttcactgtggtgaacaatgacctgggagaggcgcaggtagttgaactaaaattcggtgggaaagacatccctgtcaccagcgccaaccggattgcgtacatccacttggtggcagactacaggctgaacaggcagatccgccagcactgcctggctttccgccagggccttgccaatgtcgtcagcctcgagtggctccgaatgtttgatcagcaagaaattcaggtaccctacctgctgactttctgggacacgcttgtcacaggaaatgaacaggctttcttaaaatttacctcaaatgttattatttgaacttttttccttaggtattaatttctggtgcacaagttcccataagcctagaggacctaaaatcctttacaaactattcaggtatgttatcactgctagttattgtttctgaaaatgttgcaggtggtcatatttccaaagtaatttt

SEQ ID NO: 348766 - DNA, 3080 bp, Homo sapiens
  misc_feature (3073)..(3073): n is a, c, g, or t
agttccaggtgcaagcgccgggtttgctgcccgctgggcgcccctgcagcggcccgagctgtggccggcgtggatgaggggcaggcgaggcagggccgcccctccagtattgccgcccctcccgccccagggcagggctgggagggtacagcccgggggcgggctcgggtcgcctcccggccgccgcgtcctcgctgccccgggccgggcgggcgggcgccgagagcctcccagcccgccccgtgccccgcccgcccggctgcttccgcggcggcgctgcccgcacatgggctaggctgccaggatgttcagcttcgaaggcgacttcaagacgcggcccaaggtgtcccttggcggcgcgagcaggaaggaggaaaaggcttctcttttacatcgtactcaggaagaaagaagaaagagagaggaagaaaggcgaaggttgaaaaatgcaataattatccagtcatttattcgaggctatagagacagaaaacagcaatattccatccaaagaagtgcatttgatcgctgtgctaccttgtcacagtccgggggcgcttttcccattgctaatggccccaaccttacccttttggtaaggcagcttctgtttttttacaaacaaaatgaagactcaaaacgtttgatatggctgtatcagaacttaattaaacacagctctctgtttgtcaagcagttggatggatctgagagacttacatgcttatttcagataaaaagattgatgagcctctgttgcaggttgctgcaaaactgtaatgatgacagtttgaatgttgcacttccaatgagaatgcttgaagtattttcgtctgagaatacttacttgcctgttttacaagatgctagctatgtggtgtcagtgattgaacaaattttgcactacatgattcacaatgggtattataggtctctatatttgttgattaacagcaagcttccatcaagtattgaatattctgatttatctcgagttcctatagcaaaaattttgctagagaatgttctaaaaccattgcactttacttacaactcctgtccggaaggtgcgaggcaacaagtttttacagccttcacagaggagtttctggcagcaccttttacagatcagatttttcatttcatcattccggcgcttgcagatgcgcagaccgttttcccttacgagccctttctgaatgcactgttgttaatagagagtagatgttcaagaaagagtggtggagcaccctggcttttctatttcgttttaactgttggcgaaaattatttgggggccctctctgaggaagggctgctggtgtatttgcgggtgctgcagaccttcctctctcagttaccagtctctcctgccagcgcgagctgtcacgactcagccagtgactctgaggaggagagtgaagaagccgacaagccctcaagcccggaggatggcagactgtcagtatcatacataacagaggaatgcctgaagaagctggacacaaagcagcagaccaacaccctgctcaacctggtgtggagggactctgcgagcgaggaggtcttcaccaccatggcctccgtctgccacacgctgatggtgcagcaccgcatgatggtacccaaagtcaggcttctctacagtttagcctttaatgccaggtttctgagacatctttggtttctaatatcttccatgtcaacacggatgatcacagggtctatggtaccgttgcttcaggtgatatccaggggttctcctatgtcttttgaagattctagtcgaatcatcccactcttttacctttttagctccttgtttagtcattcactaatttccatacatgataacgaattcttcggtgatcccatagaagttgtaggtcaaagacaatcatcaatgatgccttttactttagaagagctgataatgttgtctcgatgccttcgagatgcatgcctggggatcatcaagttggcttatccagaaaccaagccagaagttcgagaagaatatattacagcatttcagagtattggagttactactagctctgaaatgcaacaatgcatacagatggaacagaaaagatggattcagttatttaaggttatcaccaatctagtgaaaatgttgaagtccagagacacgaggagaaatttttgtcctccaaaccactggctgtcagaacaagaagatattaaagcagataaggtcactcagctctatgtgccagcatccagacatgtgtggaggttccggcggatggggaggataggcccgctgcagtccaccctggacgtgggtttggagtccccgccgctgtctgtgtctgaggaaagacagcttgctgtcctgacagagttgccttttgtggttccatttgaggaacgagtaaagatctttcagaggttgatttatgcagataagcaagaagttcaaggagatggtccatttctggatggaattaatgtcacaataagaagaaattacatttatgaagatgcttatgacaaactttctccagaaaatgagcctgatttgaaaaagcggatccgtgtgcacttgctcaatgcccatggcctggatgaagctggcattgatggtggtggtattttcagagagtttttaaatgaactactgaagtcaggatttaaccccaaccaggggttctttaagactactaatgaagggcttctgtaccccaacccggctgctcagatgcttgtgggagattcttttgccagacattactacttcctaggcagaatgcttggaaaggctctctatgagaacatgctggtggagctgccctttgcaggcttctttctttccaagttgcttggaaccagtgccgacgtggacattcaccacctcgcctccctagaccctgaggtgtataagaatttgctctttctgaagagctacgaagacgatgtggaggagcttgggctgaacttcactgtggtgaacaatgacctgggagaggcgcaggtaaaagacctctacacggtgggaatcggtgcccagtccatagaaatggtcgtattggagcttaattctagccanagatagc

SEQ ID NO: 348767 - DNA, 2976 bp, Homo sapiens
agttccaggtgcaagcgccgggtttgctgcccgctgggcgcccctgcagcggcccgagctgtggccggcgtggatgaggggcaggcgaggcagggccgcccctccagtattgccgcccctcccgccccagggcagggctgggagggtacagcccgggggcgggctcgggtcgcctcccggccgccgcgtcctcgctgccccgggccgggcgggcgggcgccgagagcctcccagcccgccccgtgccccgcccgcccggctgcttccgcggcggcgctgcccgcacatgggctaggctgccaggatgttcagcttcgaaggcgacttcaagacgcggcccaaggtgtcccttggcggcgcgagcaggaaggaggaaaaggcttctcttttacatcgtactcaggaagaaagaagaaagagagaggaagaaaggcgaaggttgaaaaatgcaataattatccagtcatttattcgaggctatagagacagaaaacagcaatattccatccaaagaagtgcatttgatcgctgtgctaccttgtcacagtccgggggcgcttttcccattgctaatggccccaaccttacccttttggtaaggcagcttctgtttttttacaaacaaaatgaagactcaaaacgtttgatatggctgtatcagaacttaattaaacacagctctctgtttgtcaagcagttggatggatctgagagacttacatgcttatttcagataaaaagattgatgagcctctgttgcaggttgctgcaaaactgtaatgatgacagtttgaatgttgcacttccaatgagaatgcttgaagtattttcgtctgagaatacttacttgcctgttttacaagatgctagctatgtggtgtcagtgattgaacaaattttgcactacatgattcacaatgggtattataggtctctatatttgttgattaacagcaagcttccatcaagtattgaatattctgatttatctcgagttcctatagcaaaaattttgctagagaatgttctaaaaccattgcactttacttacaactcctgtccggaaggtgcgaggcaacaagtttttacagccttcacagaggagtttctggcagcaccttttacagatcagatttttcatttcatcattccggcgcttgcagatgcgcagaccgttttcccttacgagccctttctgaatgcactgttgttaatagagagtagatgttcaagaaagagtggtggagcaccctggcttttctatttcgttttaactgttggcgaaaattatttgggggccctctctgaggaagggctgctggtgtatttgcgggtgctgcagaccttcctctctcagttaccagtctctcctgccagcgcgagctgtcacgactcagccagtgactctgaggaggagagtgaagaagccgacaagccctcaagcccggaggatggcagactgtcagtatcatacataacagaggaatgcctgaagaagctggacacaaagcagcagaccaacaccctgctcaacctggtgtggagggactctgcgagcgaggaggtcttcaccaccatggcctccgtctgccacacgctgatggtgcagcaccgcatgatggtacccaaagtcaggcttctctacagtttagcctttaatgccaggtttctgagacatctttggtttctaatatcttccatgtcaacacggatgatcacagggtctatggtaccgttgcttcaggtgatatccaggggttctcctatgtcttttgaagattctagtcgaatcatcccactcttttacctttttagctccttgtttagtcattcactaatttccatacatgataacgaattcttcggtgatcccatagaagttgtaggtcaaagacaatcatcaatgatgccttttactttagaagagctgataatgttgtctcgatgccttcgagatgcatgcctggggatcatcaagttggcttatccagaaaccaagccagaagttcgagaagaatatattacagcatttcagagtattggagttactactagctctgaaatgcaacaatgcatacagatggaacagaaaagatggattcagttatttaaggttatcaccaatctagtgaaaatgttgaagtccagagacacgaggagaaatttttgtcctccaaaccactggctgtcagaacaagaagatattaaagcagataaggtcactcagctctatgtgccagcatccagacatgtgtggaggttccggcggatggggaggataggcccgctgcagtccaccctggacggtgagttctctaggacacagggttactgaggtatgaattacatgctgtcaaattcactcctttaatctacagatctgttatttttcataaacttatacagccatgtcactcccagcaggagctaccatgtagaaaagtttcatcacccacaaaattgcctctagctccattgcggccacctcttcagcagccacccatttctgttttgtcctgtcactttgccttttgcaaaaggcctccaaagggaaccatgctgtgtagtctgctcctggctccttttggtcagcacgctgcatttgagggtgctgtgtgggttgattgttccctctgttgctcagcagtattccagtgtggggatgcaccacagtttgtgaatccattcattggttgaaagacatttggttattttttctgtctctgggaatacgagtacagctgctataaacatctatgtacaggtttttctgtgaacatacattttgtttgacatggagtaagtttcactgggagtaagaatcctgagacatttggcaagtttatgtttaacttgatgagaagctgcagaactgtgttccagggtggctgcacggctttgcattcagaccagcaatgaatgagagcctctgttgttcccagtcctcatcagcacttacagttgtcatttaaaaaa

SEQ ID NO: 348768 - DNA, 337 bp, Homo sapiens
cgccctaaggacactgtgtgggctgttgcaggtcctcctgaccaggacgcgacttccctgaggcggaggaggagctgaggacgaacaaggactgggctgggtccagctggtgggcgtagggctggccagtgccttggcctttaacctgcagcgtcctgggtctctttggcccagccagtcgtgaggactgtggcccaggatgctgccgaacagtgagggtgcccattgtggactggaatccagctagctattcctcattcgagaccccatagaaccccacaaacatgattggggttgacatggattttgaatattaaagttacatgagatttctgaa

SEQ ID NO: 348769 - DNA, 407 bp, Homo sapiens
aaaatggtaccactggggaaaacttgccaagggatctcactgtattattcttatatgactgagtgcaaatctacagtcttctcaaaaattttaattaaaaattcgaggagaatatgttgggaagaaacaatataaggggcaaagtggaagacagaattgaaatgtcatttctgagagatgacgagcactaatagattagaaagtaagagaacactgggatccaaggtgggcaaggacattgattgcaacattgggagccggagccattggaagtctttgagtaggagactgtcactataagaccagatgcctaataatcccaaaggggctctacacctctgaaattgcataccttgaagaagagtcatcagaagtgtgcacaacagagtgtggtggagtcagagacc

SEQ ID NO: 348770 - DNA, 653 bp, Homo sapiens
ttagaaactgcaatttgaagtgaaactacgtatatggaaaccagttttcccataggctaattgatacaaacaagattaagtttctgtggcatatttctgttcacaaaaacaccaccaaacttttaagtaaagaccaaaacacttctagcattaaacgttgaaataaatgtgagccatacctatatttaagaaagattaatgcaacgtgagataattcttacccacttattccacctggtcacaggtggtcagagcctatcctaggagctcagggcacacggcgggcaccagtcctggacagggtgccatcccatcacagggcacactcacactcacacccgcacccatgtccttagactgggaccaggtaaatgcgttaataaacctaatgtgcccagctttgtctgggaggaaacccaggtacccagagagaaaaaccaccagacagtggcccggttgggaatggatttttcttatcaactgtgtaactaaatgatggtcaatgaaacgatgttatttgaggatgtgctgtatactaaaatatatggaattctatttggtttgtgtgttagtaacccctggggatggattcagatgatctgaaaattccttattgaggctgtgcatggtggctcacacctgtattcccagca

SEQ ID NO: 348771 - DNA, 404 bp, Homo sapiens
ctaagccttctgggccacgccaacaggttcctctagttgccggcgagaactactagccgacgaattccagcttcggcggcggcagggcgaggccttctggataacagagttcacgcactgaggttgctgttggatccgagggggttagactacaactcccagggggaaacgggcgggaccgcctcctggcacgatgggagatgtagttcgttctgcccccacttttcgctagcccgggctcgccagggactctcagaatcgcagagtcgtcatctctgctgttgctaaactggatgcctcattccaatttacgacgtcactgaaccgaaacgcgggagcaaccctgagccttttaagacccgtcctcggccgagtcgctaaccagcgggtaccttgcctatgtt

SEQ ID NO: 348772 - DNA, 1720 bp, Homo sapiens
ctaagccttctgggccacgccaacaggttcctctagttgccggcgagaactactagccgacgaattccagcttcggcggcggcagggcgaggccttctggataacagagttcacgcactgaggttgctgttggatccgagggggttagactacaactcccagggggaaacgggcgggaccgcctcctggcacgatgggagatgtagttcgttctgcccccacttttcgctagcccgggctcgccagggactctcagaatcgcagagtcgtcatctctgctgttgctaaactggatgcctcattccaatttacgacgtcactgaaccgaaacgcgggagcaaccctgagcctttccggaacccagtggggggggggggggggggggacccagacaggtgacccggaagtagaagtggcccttgcaggcaagagtgctggagggcggcagcggcgaccggagcggtaggagcagcaatttatccgtgtgcagccccaaactggaaagaagatgctaattaaagtgaagacgctgaccggaaaggagattgagattgacattgaacctacagacaaggtggagcgaatcaaggagcgtgtggaggagaaagagggaatccccccacaacagcagaggctcatctacagtggcaagcagatgaatgatgagaagacagcagctgattacaagattttaggtggttcagtccttcacctggtgttggctctgagaggaggaggtggtcttaggcagtgatggaccctccattttacctctttaccctgtcgctcataatgaggcatcatatatcctctcactctctgggacaccatagccactgccccctcccctggatgcccagtaatgtatgtctactggtgggagactgtgaggatcccaggattcagtattcctggcccagagggcccttgctggctactgggtgttagtttgcagtcctgtgtgcttccctctcttatgactgtgtccctggttgtcaataaaatatttcctggcctcctggaaaaaaaaaaaaaaaaaaaaaaaaaaaaaaaaaaaaaaaaagaaaaaaaaaaaaaaaaaaaaaaaaaaaaaaaaaaagaaaaaaaaaaaaaaagaaataaaaaaagaaaataaaagaaaaaagaaaaaaagaaaaaaaaaaaaaagggggggggggaagtaaggggtctctacagaggcgacgacaccaaaaccaacaacaaccacccccacacgtctgaaaaacaaaagaagggcgaccacaaccaagcatactaacataaacctcaaagacgccagcggtgaggtaaaaaacaacgtggttgcgggaaagacagccactctcatagatattagtagaagaacccaacacaacacggcggaggacaaaaaccaaacggacacccccacaaaacgaaagtggccccagaggaaaaaaaccccagcgtggagtcggggaaaaccaaccaccatctgccctcgggcagcgcaaaagggccggagcaaaacatacaaacgtgcccccccccacaaccagcaccggggaacgagacggcaagcaggaccaacggccgcacggaaacgcggcgcgatgcaacgagccaaccgaccacactagcaacaagagacatgcgcggacaccagaggaagcgcaggcaaagacgagcaagcaagacggagcgagagcgaagctcagagccacgagcaccgagccaggtc

SEQ ID NO: 348773 - DNA, 1153 bp, Homo sapiens
  misc_feature (1082)..(1082): n is a, c, g, or t
  misc_feature (1086)..(1087): n is a, c, g, or t
  misc_feature (1093)..(1093): n is a, c, g, or t
  misc_feature (1096)..(1096): n is a, c, g, or t
  misc_feature (1102)..(1102): n is a, c, g, or t
ctaagccttctgggccacgccaacaggttcctctagttgccggcgagaactactagccgacgaattccagcttcggcggcggcagggcgaggccttctggataacagagttcacgcactgaggttgctgttggatccgagggggttagactacaactcccagggggaaacgggcgggaccgcctcctggcacgatgggagatgtagttcgttctgcccccacttttcgctagcccgggctcgccagggactctcagaatcgcagagtcgtcatctctgctgttgctaaactggatgcctcattccaatttacgacgtcactgaaccgaaacgcgggagcaaccctgagcctttccggaacccagtggggggggggggggggggggacccagacaggtgacccggaagtagaagtggcccttgcaggcaagagtgctggagggcggcagcggcgaccggagcggtaggagcagcaatttatccgtgtgcagccccaaactggaaagaagatgctaattaaagtgaagacgctgaccggaaaggagattgagattgacattgaacctacagacaaggtggagcgaatcaaggagcgtgtggaggagaaagagggaatccccccacaacagcagaggctcatctacagtggcaagcagatgaatgatgagaagacagcagctgattacaagattttaggtggttcagtccttcacctggtgttggctctgagaggaggaggtggtcttaggcagtgatggaccctccattttacctctttaccctgtcgctcataatgaggcatcatatatcctctcactctctgggacaccatagccactgccccctcccctggatgcccagtaatgtatgtctactggtgggagactgtgaggatcccaggattcagtattcctggcccagagggcccttgctggctactgggtgttagtttgcagtcctgtgtgcttccctctcttatgactgtgtccctggttgtcaataaaatatttcctggcacaaaaaaaaaaaaaaaaaaaaaaaaaaaccccgggggcatatattgcgggggggggaaaaaagggntttnnaagggnccntgggtnaaaggtttccggaccccctttttttttccaagggggaaaatggggggccca

SEQ ID NO: 348774 - DNA, 1271 bp, Homo sapiens
ctaagccttctgggccacgccaacaggttcctctagttgccggcgagaactactagccgacgaattccagcttcggcggcggcagggcgaggccttctggataacagagttcacgcactgaggttgctgttggatccgagggggttagactacaactcccagggggaaacgggcgggaccgcctcctggcacgatgggagatgtagttcgttctgcccccacttttcgctagcccgggctcgccagggactctcagaatcgcagagtcgtcatctctgctgttgctaaactggatgcctcattccaatttacgacgtcactgaaccgaaacgcgggagcaaccctgagcctttccggaacccagtggggggggggggggggggggacccagacaggtgacccggaagtagaagtggcccttgcaggcaagagtgctggagggcggcagcggcgaccggagcggtaggagcagcaatttatccgtgtgcagccccaaactggaaagaagatgctaattaaagtgaagacgctgaccggaaaggagattgagattgacattgaacctacagacaaggtggagcgaatcaaggagcgtgtggaggagaaagagggaatccccccacaacagcagaggctcatctacagtggcaagcagatgaatgatgagaagacagcagctgattacaagattttaggtggttcagtccttcacctggtgttggctctgagaggaggaggtggtcttaggcagtgatggaccctccattttacctctttaccctgtcgctcataatgaggcatcatatatcctctcactctctgggacaccatagccactgccccctcccctggatgcccagtaatgtatgtctactggtgggagactgtgaggatcccaggattcagtattcctggcccagagggcccttgctggctactgggtgttagtttgcagtcctgtgtgcttccctctcttatgactgtgtccctggttgtcaataaaatatttcctggcaaaacaaaaaaaaaaaaaaaaaaaatcaaaacaaaaaaataaaactaaaaaaacacacaaaacaaaaacacaacagcgaaccaacctacgaaaccacaccagagcaatcattaccactctcggcgcggagaggagacgacgcctcgaggcccgcctagagaggagcgggcggcgatgcagagaagatgaagaggggaggcaccgcgcgccgcggggaaatacggggcgtgcgatcgatcggagggaagggaagccg

SEQ ID NO: 348775 - DNA, 1430 bp, Homo sapiens
  misc_feature (1025)..(1025): n is a, c, g, or t
  misc_feature (1032)..(1032): n is a, c, g, or t
  misc_feature (1038)..(1038): n is a, c, g, or t
ctaagccttctgggccacgccaacaggttcctctagttgccggcgagaactactagccgacgaattccagcttcggcggcggcagggcgaggccttctggataacagagttcacgcactgaggttgctgttggatccgagggggttagactacaactcccagggggaaacgggcgggaccgcctcctggcacgatgggagatgtagttcgttctgcccccacttttcgctagcccgggctcgccagggactctcagaatcgcagagtcgtcatctctgctgttgctaaactggatgcctcattccaatttacgacgtcactgaaccgaaacgcgggagcaaccctgagcctttccggaacccagtggggggggggggggggggggacccagacaggtgacccggaagtagaagtggcccttgcaggcaagagtgctggagggcggcagcggcgaccggagcggtaggagcagcaatttatccgtgtgcagccccaaactggaaagaagatgctaattaaagtgaagacgctgaccggaaaggagattgagattgacattgaacctacagacaaggtggagcgaatcaaggagcgtgtggaggagaaagagggaatccccccacaacagcagaggctcatctacagtggcaagcagatgaatgatgagaagacagcagctgattacaagattttaggtggttcagtccttcacctggtgttggctctgagaggaggaggtggtcttaggcagtgatggaccctccattttacctctttaccctgtcgctcataatgaggcatcatatatcctctcactctctgggacaccatagccactgccccctcccctggatgcccagtaatgtatgtctactggtgggagactgtgaggatcccaggattcagtattcctggcccagagggcccttgctggctactgggtgttagtttgcagtcctgtgtgcttccctctcttatgactgtgtccctggttgtcaataaaatatttcctggcaaaaaaaaanaaaaaanaaaaanaaaaaaaaaaaaaaaaaaaaaaaaaaaaaaaaaaaaaaaaaaaaaaaacacaacaaacgaaaaacaaaaaaaaaaacagggggggccgagaaaaaaacacagacgccaggagcccaacccagcaacaccactcaccctgacaacaagaagggcacccaccaagaagcacgaacaccaaacgacaagcgccgcacaagcaacaaatcgaacaggatcggaagacaacacagaacagcagccaggaagagcgagacaacaacgaagcgggatgagaaaaaagcgaaccaaaacacagacagcaatcgggcaggacacaaaacgaacagcgaacgacggacaacacaccacgcgaccgcgcggaaagcaagaacacgagacgccgtcacacaacg

SEQ ID NO: 348776 - DNA, 978 bp, Homo sapiens
  misc_feature (907)..(907): n is a, c, g, or t
  misc_feature (911)..(912): n is a, c, g, or t
  misc_feature (918)..(918): n is a, c, g, or t
  misc_feature (921)..(921): n is a, c, g, or t
  misc_feature (927)..(927): n is a, c, g, or t
cccagaatggggtcgcttttgtcgggtctcactgtattcgaacccccgcagtcatagagaaggcctagcagcggcttgactcccccgtctctcagattcttggagtaagcgctgctctccattcttcattcccagggtacctgcttctcccagtccctaacgtaggtcgcctccgagcacagccctaaaatcggggcctcccaagggctagactatgagcctttactggtggttgccaaggtgtggtatctcacccgtcctacaggaaccaaagcggggagtgtgttcagtcagtacctgcctttctgagcctggcatcctggaccagcctcacttccttggctgaggcagacgctgaccggaaaggagattgagattgacattgaacctacagacaaggtggagcgaatcaaggagcgtgtggaggagaaagagggaatccccccacaacagcagaggctcatctacagtggcaagcagatgaatgatgagaagacagcagctgattacaagattttaggtggttcagtccttcacctggtgttggctctgagaggaggaggtggtcttaggcagtgatggaccctccattttacctctttaccctgtcgctcataatgaggcatcatatatcctctcactctctgggacaccatagccactgccccctcccctggatgcccagtaatgtatgtctactggtgggagactgtgaggatcccaggattcagtattcctggcccagagggcccttgctggctactgggtgttagtttgcagtcctgtgtgcttccctctcttatgactgtgtccctggttgtcaataaaatatttcctggcacaaaaaaaaaaaaaaaaaaaaaaaaaaaccccgggggcatatattgcgggggggggaaaaaagggntttnnaagggnccntgggtnaaaggtttccggaccccctttttttttccaagggggaaaatggggggccca

SEQ ID NO: 348777 - DNA, 1369 bp, Homo sapiens
  misc_feature (1298)..(1298): n is a, c, g, or t
  misc_feature (1302)..(1303): n is a, c, g, or t
  misc_feature (1309)..(1309): n is a, c, g, or t
  misc_feature (1312)..(1312): n is a, c, g, or t
  misc_feature (1318)..(1318): n is a, c, g, or t
ctaagccttctgggccacgccaacaggttcctctagttgccggcgagaactactagccgacgaattccagcttcggcggcggcagggcgaggccttctggataacagagttcacgcactgaggttgctgttggatccgagggggttagactacaactcccagggggaaacgggcgggaccgcctcctggcacgatgggagatgtagttcgttctgcccccacttttcgctagcccgggctcgccagggactctcagaatcgcagagtcgtcatctctgctgttgctaaactggatgcctcattccaatttacgacgtcactgaaccgaaacgcgggagcaaccctgagcctttccggaacccagtggggggggggggggggggggacccagacaggtgacccggaagtagaagtggcccttgcaggcaagagtgctggagggcggcagcggcgaccggagcggtaggagcagcaatttatccgtgtgcagccccaaactggaaagaagatgctaattaaagtgaagggtacctgcttctcccagtccctaacgtaggtcgcctccgagcacagccctaaaatcggggcctcccaagggctagactatgagcctttactggtggttgccaaggtgtggtatctcacccgtcctacaggaaccaaagcggggagtgtgttcagtcagtacctgcctttctgagcctggcatcctggaccagcctcacttccttggctgaggcagacgctgaccggaaaggagattgagattgacattgaacctacagacaaggtggagcgaatcaaggagcgtgtggaggagaaagagggaatccccccacaacagcagaggctcatctacagtggcaagcagatgaatgatgagaagacagcagctgattacaagattttaggtggttcagtccttcacctggtgttggctctgagaggaggaggtggtcttaggcagtgatggaccctccattttacctctttaccctgtcgctcataatgaggcatcatatatcctctcactctctgggacaccatagccactgccccctcccctggatgcccagtaatgtatgtctactggtgggagactgtgaggatcccaggattcagtattcctggcccagagggcccttgctggctactgggtgttagtttgcagtcctgtgtgcttccctctcttatgactgtgtccctggttgtcaataaaatatttcctggcacaaaaaaaaaaaaaaaaaaaaaaaaaaaccccgggggcatatattgcgggggggggaaaaaagggntttnnaagggnccntgggtnaaaggtttccggaccccctttttttttccaagggggaaaatggggggccca

SEQ ID NO: 348778 - DNA, 1239 bp, Homo sapiens
  misc_feature (1168)..(1168): n is a, c, g, or t
  misc_feature (1172)..(1173): n is a, c, g, or t
  misc_feature (1179)..(1179): n is a, c, g, or t
  misc_feature (1182)..(1182): n is a, c, g, or t
  misc_feature (1188)..(1188): n is a, c, g, or t
ctaagccttctgggccacgccaacaggttcctctagttgccggcgagaactactagccgacgaattccagcttcggcggcggcagggcgaggccttctggataacagagttcacgcactgaggttgctgttggatccgagggggttagactacaactcccagggggaaacgggcgggaccgcctcctggcacgatgggagatgtagttcgttctgcccccacttttcgctagcccgggctcgccagggactctcagaatcgcagagtcgtcatctctgctgttgctaaactggatgcctcattccaatttacgacgtcactgaaccgaaacgcgggagcaaccctgagcctttccggaacccagtggggggggggggggggggggacccagacaggtgacccggaagtagaagtggcccttgcaggcaagagtgctggagggcggcagcggcgaccggagcggtaggagcagcaatttatccgtgtgcagccccaaactggaaagaagatgctaattaaagtgaaggaaccaaagcggggagtgtgttcagtcagtacctgcctttctgagcctggcatcctggaccagcctcacttccttggctgaggcagacgctgaccggaaaggagattgagattgacattgaacctacagacaaggtggagcgaatcaaggagcgtgtggaggagaaagagggaatccccccacaacagcagaggctcatctacagtggcaagcagatgaatgatgagaagacagcagctgattacaagattttaggtggttcagtccttcacctggtgttggctctgagaggaggaggtggtcttaggcagtgatggaccctccattttacctctttaccctgtcgctcataatgaggcatcatatatcctctcactctctgggacaccatagccactgccccctcccctggatgcccagtaatgtatgtctactggtgggagactgtgaggatcccaggattcagtattcctggcccagagggcccttgctggctactgggtgttagtttgcagtcctgtgtgcttccctctcttatgactgtgtccctggttgtcaataaaatatttcctggcacaaaaaaaaaaaaaaaaaaaaaaaaaaaccccgggggcatatattgcgggggggggaaaaaagggntttnnaagggnccntgggtnaaaggtttccggaccccctttttttttccaagggggaaaatggggggccca

SEQ ID NO: 348779 - DNA, 1798 bp, Homo sapiens
  misc_feature (1727)..(1727): n is a, c, g, or t
  misc_feature (1731)..(1732): n is a, c, g, or t
  misc_feature (1738)..(1738): n is a, c, g, or t
  misc_feature (1741)..(1741): n is a, c, g, or t
  misc_feature (1747)..(1747): n is a, c, g, or t
ctaagccttctgggccacgccaacaggttcctctagttgccggcgagaactactagccgacgaattccagcttcggcggcggcagggcgaggccttctggataacagagttcacgcactgaggttgctgttggatccgagggggttagactacaactcccagggggaaacgggcgggaccgcctcctggcacgatgggagatgtagttcgttctgcccccacttttcgctagcccgggctcgccagggactctcagaatcgcagagtcgtcatctctgctgttgctaaactggatgcctcattccaatttacgacgtcactgaaccgaaacgcgggagcaaccctgagcctttccggaacccagtggggggggggggggggggggacccagacaggtgacccggaagtagaagtggcccttgcaggcaagagtgctggagggcggcagcggcgaccggagcggtaggagcagcaatttatccgtgtgcagccccaaactggaaagaagatgctaattaaagtgaagggtacctgcttctcccagtccctaacgtaggtcgcctccgagcacagccctaaaatcggggcctcccaagggctagactatgagcctttactggtggttgccaaggtgtggtatctcacccgtcctacaggaaccaaagcggggagtgtgttcagtcagtacctgcctttctgagcctggcatcctggaccagcctcacttccttggctgaggcaggttctcactctgtcgcccaggcttagggtgcagtggtgccatcacagcttactgcagcctcgacctctcaggcccaagcaattctcccatctgagcctcctgagtagctgggactacaggcgtgtgctaccaccatacccagccaattgttttatttttttgtagagatgcggtctcatcgtgttgcccacgctagtctaaaacttctggggtcaagtgatcttcccacctcatcttcctaaagtgctgggattacagccgtgagctaccatatctgacccctttttgaattattattatttttggtgctgctgagaatatgcatcttttagaaggcagtagatcccaaagaccaacataggatgttttacctagaagacaaattgtacattgggctttaaggactcatgaaaccattgcctgtttcagacgctgaccggaaaggagattgagattgacattgaacctacagacaaggtggagcgaatcaaggagcgtgtggaggagaaagagggaatccccccacaacagcagaggctcatctacagtggcaagcagatgaatgatgagaagacagcagctgattacaagattttaggtggttcagtccttcacctggtgttggctctgagaggaggaggtggtcttaggcagtgatggaccctccattttacctctttaccctgtcgctcataatgaggcatcatatatcctctcactctctgggacaccatagccactgccccctcccctggatgcccagtaatgtatgtctactggtgggagactgtgaggatcccaggattcagtattcctggcccagagggcccttgctggctactgggtgttagtttgcagtcctgtgtgcttccctctcttatgactgtgtccctggttgtcaataaaatatttcctggcacaaaaaaaaaaaaaaaaaaaaaaaaaaaccccgggggcatatattgcgggggggggaaaaaagggntttnnaagggnccntgggtnaaaggtttccggaccccctttttttttccaagggggaaaatggggggccca

SEQ ID NO: 348780 - DNA, 916 bp, Homo sapiens
  misc_feature (845)..(845): n is a, c, g, or t
  misc_feature (849)..(850): n is a, c, g, or t
  misc_feature (856)..(856): n is a, c, g, or t
  misc_feature (859)..(859): n is a, c, g, or t
  misc_feature (865)..(865): n is a, c, g, or t
taatgccaatattctcactgattttgggggactgatgttggaagatgactcatggaattaagaggatcagatggttcaaagaatcttgccctatcaaagttgtttacagcctaaaaatatttgataaatgaaggtatgttcaaagccttctcattctccaaagcagtgctgctgagaatatgcatcttttagaaggcagtagatcccaaagaccaacataggatgttttacctagaagacaaattgtacattgggctttaaggactcatgaaaccattgcctgtttcagacgctgaccggaaaggagattgagattgacattgaacctacagacaaggtggagcgaatcaaggagcgtgtggaggagaaagagggaatccccccacaacagcagaggctcatctacagtggcaagcagatgaatgatgagaagacagcagctgattacaagattttaggtggttcagtccttcacctggtgttggctctgagaggaggaggtggtcttaggcagtgatggaccctccattttacctctttaccctgtcgctcataatgaggcatcatatatcctctcactctctgggacaccatagccactgccccctcccctggatgcccagtaatgtatgtctactggtgggagactgtgaggatcccaggattcagtattcctggcccagagggcccttgctggctactgggtgttagtttgcagtcctgtgtgcttccctctcttatgactgtgtccctggttgtcaataaaatatttcctggcacaaaaaaaaaaaaaaaaaaaaaaaaaaaccccgggggcatatattgcgggggggggaaaaaagggntttnnaagggnccntgggtnaaaggtttccggaccccctttttttttccaagggggaaaatggggggccca

SEQ ID NO: 348781 - DNA, 1090 bp, Homo sapiens
  misc_feature (1019)..(1019): n is a, c, g, or t
  misc_feature (1023)..(1024): n is a, c, g, or t
  misc_feature (1030)..(1030): n is a, c, g, or t
  misc_feature (1033)..(1033): n is a, c, g, or t
  misc_feature (1039)..(1039): n is a, c, g, or t
ctaagccttctgggccacgccaacaggttcctctagttgccggcgagaactactagccgacgaattccagcttcggcggcggcagggcgaggccttctggataacagagttcacgcactgaggttgctgttggatccgagggggttagactacaactcccagggggaaacgggcgggaccgcctcctggcacgatgggagatgtagttcgttctgcccccacttttcgctagcccgggctcgccagggactctcagaatcgcagagtcgtcatctctgctgttgctaaactggatgcctcattccaatttacgacgtcactgaaccgaaacgcgggagcaaccctgagcctttccggaacccagtggggggggggggggggggggacccagacaggtgacccggaagtagaagtggcccttgcaggcaagagtgctggagggcggcagcggcgaccggagcagacgctgaccggaaaggagattgagattgacattgaacctacagacaaggtggagcgaatcaaggagcgtgtggaggagaaagagggaatccccccacaacagcagaggctcatctacagtggcaagcagatgaatgatgagaagacagcagctgattacaagattttaggtggttcagtccttcacctggtgttggctctgagaggaggaggtggtcttaggcagtgatggaccctccattttacctctttaccctgtcgctcataatgaggcatcatatatcctctcactctctgggacaccatagccactgccccctcccctggatgcccagtaatgtatgtctactggtgggagactgtgaggatcccaggattcagtattcctggcccagagggcccttgctggctactgggtgttagtttgcagtcctgtgtgcttccctctcttatgactgtgtccctggttgtcaataaaatatttcctggcacaaaaaaaaaaaaaaaaaaaaaaaaaaaccccgggggcatatattgcgggggggggaaaaaagggntttnnaagggnccntgggtnaaaggtttccggaccccctttttttttccaagggggaaaatggggggccca

SEQ ID NO: 348782 - DNA, 1397 bp, Homo sapiens
ctaagccttctgggccacgccaacaggttcctctagttgccggcgagaactactagccgacgaattccagcttcggcggcggcagggcgaggccttctggataacagagttcacgcactgaggttgctgttggatccgagggggttagactacaactcccagggggaaacgggcgggaccgcctcctggcacgatgggagatgtagttcgttctgcccccacttttcgctagcccgggctcgccagggactctcagaatcgcagagtcgtcatctctgctgttgctaaactggatgcctcattccaatttacgacgtcactgaaccgaaacgcgggagcaaccctgagcctttccggaacccagtggggggggggggggggggggacccagacaggtgacccggaagtagaagtggcccttgcaggcaagagtgctggagggcggcagcggcgaccggagcggtaggagcagcaatttatccgtgtgcagccccaaactggaaagaagatgctaattaaagtgaagacgctgaccggaaaggagattgagattgacattgaacctacagacaaggtggagcgaatcaaggagcgtgtggaggagaaagagggaatccccccacaacagcagaggctcatctacagtggcaagcagatgaatgatgagaagacagcagctgattacaagattttaggtggttcagtccttcacctggtgttggctctgagaggaggaggtggtcttaggcagtgatggaccctccattttacctctttaccctgtcgctcataatgaggcatcatatatcctctcactctctgggacaccatagccactgccccctcccctggatgcccagtaatgtatgtctactggtgggagactgtgaggatcccaggattcagtattcctggcccagagggcccttgctggctactgggtgttagtttgcagtcctgtgtgcttccctctcttatgactgtgtccctggttgccaggaaatatttcctggctcctggaaaacaaaaaacaacaaaaacacaaaaaaaaaagaacagcgcgagagtaaaacaccaataacaagttgccctcccacagcagggtggtgctcatatctccacactggtgggtcaaagggcggtaacccacaacattggggggggccctatctaccacgttggtgctccaagcagctaattttgtgtacaaaccacggcttttgacacatttgcgggtccaaaagaagtccaacagaatttcacgagcgtcgcgaggacaacatcgcgcaagcagtcacgtgtccggacacactgcaagctgctcagatgctcgacagtaatgcgtacacaagcgatagaatccgataaaagttgctgaataaacccacggagatctt

SEQ ID NO: 348783 - DNA, 1100 bp, Homo sapiens
  misc_feature (1029)..(1029): n is a, c, g, or t
  misc_feature (1033)..(1034): n is a, c, g, or t
  misc_feature (1040)..(1040): n is a, c, g, or t
  misc_feature (1043)..(1043): n is a, c, g, or t
  misc_feature (1049)..(1049): n is a, c, g, or t
ctaagccttctgggccacgccaacaggttcctctagttgccggcgagaactactagccgacgaattccagcttcggcggcggcagggcgaggccttctggataacagagttcacgcactgaggttgctgttggatccgagggggttagactacaactcccagggggaaacgggcgggaccgcctcctggcacgatgggagatgtagttcgttctgcccccacttttcgctagcccgggctcgccagggactctcagaatcgcagagtcgtcatctctgctgttgctaaactggatgcctcattccaatttacgacgtcactgaaccgaaacgcgggagcaaccctgagcctttccggaacccagtggggggggggggggggggggacccagacaggtgacccggaagtagaagtggcccttgcaggcaagagtgctggagggcggcagcggcgaccggagcggtaggagcagcaatttatccgtgtgcagccccaaactggaaagaagatgctaattaaagtgaagacgctgaccggaaaggagattgagattgacattgaacctacagacaaggtggagcgaatcaaggagcgtgtggaggagaaagagggaatccccccacaacagcagaggctcatctacagtggcaagcagatgaatgatgagaagacagcagctgattacaagattttaggtggttcagtccttcacctggtgttggctctgagaggaggaggtggtcttaggcagtgatggaccctccattttacctctttaccctgtcgctcataatgaggcatcatatatcctctcactctctgggacaccatagccactgccccctcccctggatgcccatggcccagagggcccttgctggctactgggtgttagtttgcagtcctgtgtgcttccctctcttatgactgtgtccctggttgtcaataaaatatttcctggcacaaaaaaaaaaaaaaaaaaaaaaaaaaaccccgggggcatatattgcgggggggggaaaaaagggntttnnaagggnccntgggtnaaaggtttccggaccccctttttttttccaagggggaaaatggggggccca

SEQ ID NO: 348784 - DNA, 897 bp, Homo sapiens
ctaagccttctgggccacgccaacaggttcctctagttgccggcgagaactactagccgacgaattccagcttcggcggcggcagggcgaggccttctggataacagagttcacgcactgaggttgctgttggatccgagggggttagactacaactcccagggggaaacgggcgggaccgcctcctggcacgatgggagatgtagttcgttctgcccccacttttcgctagcccgggctcgccagggactctcagaatcgcagagtcgtcatctctgctgttgctaaactggatgcctcattccaatttacgacgtcactgaaccgaaacgcgggagcaaccctgagcctttccggaacccagtggggggggggggggggggggacccagacaggtgacccggaagtagaagtggcccttgcaggcaagagtgctggagggcggcagcggcgaccggagcggtaggagcagcaatttatccgtgtgcagccccaaactggaaagaagatgctaattaaagtgaagacgctgaccggaaaggagattgagattgacattgaacctacagacaaggtggagcgaatcaaggagcgtgtggaggagaaagagggaatccccccacaacagcagaggctcatctacagtggcaagcagatgaatgatgagaagacagcagctgattacaagattttaggtggttcagtccttcacctggtgttggctctgagaggaggaggtggtcttaggcagtgatggaccctccattttacctctttaccctgtcgctcataatgaggcatcatatatcctctcactctctgggacaccatagccactgccccctcccctggatgcccagtaatgtatgtcttcggtctttgggatcctctagaaca

SEQ ID NO: 348785 - DNA, 1794 bp, Homo sapiens
ctaagccttctgggccacgccaacaggttcctctagttgccggcgagaactactagccgacgaattccagcttcggcggcggcagggcgaggccttctggataacagagttcacgcactgaggttgctgttggatccgagggggttagactacaactcccagggggaaacgggcgggaccgcctcctggcacgatgggagatgtagttcgttctgcccccacttttcgctagcccgggctcgccagggactctcagaatcgcagagtcgtcatctctgctgttgctaaactggatgcctcattccaatttacgacgtcactgaaccgaaacgcgggagcaaccctgagcctttccggaacccagtggggggggggggggggggggacccagacaggtgacccggaagtagaagtggcccttgcaggcaagagtgctggagggcggcagcggcgaccggagcggtaggagcagcaatttatccgtgtgcagccccaaactggaaagaagatgctaattaaagtgaagacgctgaccggaaaggagattgagattgacattgaacctacagacaaggtggagcgaatcaaggagcgtgtggaggagaaagagggaatccccccacaacagcagaggctcatctacagtggcaagcagatgtgagtttggagtgagaatgacagcatggcgatcttatgtgaagatgagaagaggagagggggcacgtactgaggaatgatgagaagacagcagctgattacaagattttaggtggttcagtccttcacctggtgttggctctgagaggaggaggtggtcttaggcagtgatggaccctccattttacctctttaccctgtcgctcataatgaggcatcatatatcctctcactctctgggacaccatagccactgccccctcccctggatgcccagtaatgtatgtctactggtgggagactgtgaggatcccaggattcagtattcctggcccagagggcccttgctggctactgggtgttagtttgcagtcctgtgtgcttccctctcttatgactgtgtccctggttgtcaataaaatatttcctggcctcctggaaaaaaaaaaaaaaaaaaaaaaaaaaaaaaaaaaaaaaaaagaaaaaaaaaaaaaaaaaaaaaaaaaaaaaaaaaaagaaaaaaaaaaaaaaagaaataaaaaaagaaaataaaagaaaaaagaaaaaaagaaaaaaaaaaaaaagggggggggggaagtaaggggtctctacagaggcgacgacaccaaaaccaacaacaaccacccccacacgtctgaaaaacaaaagaagggcgaccacaaccaagcatactaacataaacctcaaagacgccagcggtgaggtaaaaaacaacgtggttgcgggaaagacagccactctcatagatattagtagaagaacccaacacaacacggcggaggacaaaaaccaaacggacacccccacaaaacgaaagtggccccagaggaaaaaaaccccagcgtggagtcggggaaaaccaaccaccatctgccctcgggcagcgcaaaagggccggagcaaaacatacaaacgtgcccccccccacaaccagcaccggggaacgagacggcaagcaggaccaacggccgcacggaaacgcggcgcgatgcaacgagccaaccgaccacactagcaacaagagacatgcgcggacaccagaggaagcgcaggcaaagacgagcaagcaagacggagcgagagcgaagctcagagccacgagcaccgagccaggtc

SEQ ID NO: 348786 - DNA, 997 bp, Homo sapiens
ctaagccttctgggccacgccaacaggttcctctagttgccggcgagaactactagccgacgaattccagcttcggcggcggcagggcgaggccttctggataacagagttcacgcactgaggttgctgttggatccgagggggttagactacaactcccagggggaaacgggcgggaccgcctcctggcacgatgggagatgtagttcgttctgcccccacttttcgctagcccgggctcgccagggactctcagaatcgcagagtcgtcatctctgctgttgctaaactggatgcctcattccaatttacgacgtcactgaaccgaaacgcgggagcaaccctgagcctttccggaacccagtggggggggggggggggggggacccagacaggtgacccggaagtagaagtggcccttgcaggcaagagtgctggagggcggcagcggcgaccggagcggtaggagcagcaatttatccgtgtgcagccccaaactggaaagaagatgctaattaaagtgaagacgctgaccggaaaggagattgagattgacattgaacctacagacaaggtggagcgaatcaaggagcgtgtggaggagaaagagggaatccccccacaacagcagaggctcatctacagtggcaagcagatgaatgatgagaagacagcagctgattacaagatgctcagctagatgggctggtgtggttgggtcaaggccccaacaccatggctgccagcttccaggctggacaaagcagggggctacttctcccttccctcggttccagtcttccctttaaaagcctgtggcatttttcctccttctccctaactttagaaatgttgtacttggctattttgattagggaagagggatgtggtctctgatctctgttgtcttcttgggtctttggggttgaagggatggggaaggcaggccagaagggaatggagacattcgagccccctcaggagtgatgcgatctgt

SEQ ID NO: 348787 - DNA, 893 bp, Homo sapiens
ctaagccttctgggccacgccaacaggttcctctagttgccggcgagaactactagccgacgaattccagcttcggcggcggcagggcgaggccttctggataacagagttcacgcactgaggttgctgttggatccgagggggttagactacaactcccagggggaaacgggcgggaccgcctcctggcacgatgggagatgtagttcgttctgcccccacttttcgctagcccgggctcgccagggactctcagaatcgcagagtcgtcatctctgctgttgctaaactggatgcctcattccaatttacgacgtcactgaaccgaaacgcgggagcaaccctgagcctttccggaacccagtggggggggggggggggggggacccagacaggtgacccggaagtagaagtggcccttgcaggcaagagtgctggagggcggcagcggcgaccggagcggtaggagcagcaatttatccgtgtgcagccccaaactggaaagaagatgctaattaaagtgaagacgctgaccggaaaggagattgagattgacattgaacctacagacaaggtggagcgaatcaaggagcgtgtggaggagaaagagggaatccccccacaacagcagaggctcatctacagtggcaagcagatgtgagtttggagtgagaatgacagcatggcgatcttatgtgaagatgagaagaggagagggggcacgtactgaggtggatcaggggtgcctcttgtttttggtgcctaagactctttggcaatctggtgaagcctctaagccccttctcagaataagattttttcaggcataaaacaaaatatatagaattaaaggaaaactaattatattgaaatagttattaaaatactaaaac

SEQ ID NO: 348788 - DNA, 763 bp, Homo sapiens
ctaagccttctgggccacgccaacaggttcctctagttgccggcgagaactactagccgacgaattccagcttcggcggcggcagggcgaggccttctggataacagagttcacgcactgaggttgctgttggatccgagggggttagactacaactcccagggggaaacgggcgggaccgcctcctggcacgatgggagatgtagttcgttctgcccccacttttcgctagcccgggctcgccagggactctcagaatcgcagagtcgtcatctctgctgttgctaaactggatgcctcattccaatttacgacgtcactgaaccgaaacgcgggagcaaccctgagcctttccggaacccagtggggggggggggggggggggacccagacaggtgacccggaagtagaagtggcccttgcaggcaagagtgctggagggcggcagcggcgaccggagcggtaggagcagcaatttatccgtgtgcagccccaaactggaaagaagatgctaattaaagtgaaatgatgagaagacagcagctgattacaagattttaggtggttcagtccttcacctggtgttggctctgagaggaggaggtggtcttaggcagtgatggaccctccattttacctctttaccctgtcgctcataatgaggcatcatatatcctctcactctctgggacaccatagccactgccccctcccctggatgcccagtaatgtatgtcttcggtctttgggatcctctagaaca

SEQ ID NO: 348789 - DNA, 156 bp, Homo sapiens
cccagaatggggtcgcttttgtcgggtctcactgtattcgaacccccgcagtcatagagaaggcctagcagcggcttgactcccccgtctctcagattcttggagtaagcgctgctctccattcttcattcccaggcgtacctgcattctcccagc

SEQ ID NO: 348790 - DNA, 1478 bp, Homo sapiens
  misc_feature (1073)..(1073): n is a, c, g, or t
  misc_feature (1080)..(1080): n is a, c, g, or t
  misc_feature (1086)..(1086): n is a, c, g, or t
ctaagccttctgggccacgccaacaggttcctctagttgccggcgagaactactagccgacgaattccagcttcggcggcggcagggcgaggccttctggataacagagttcacgcactgaggttgctgttggatccgagggggttagactacaactcccagggggaaacgggcgggaccgcctcctggcacgatgggagatgtagttcgttctgcccccacttttcgctagcccgggctcgccagggactctcagaatcgcagagtcgtcatctctgctgttgctaaactggatgcctcattccaatttacgacgtcactgaaccgaaacgcgggagcaaccctgagcctttccggaacccagtggggggggggggggggggggacccagacaggtgacccggaagtagaagtggcccttgcaggcaagagtgctggagggcggcagcggcgaccggagcggtaggagcagcaatttatccgtgtgcagccccaaactggaaagaagatgctaattaaagtgaagacgctgaccggaaaggagattgagattgacattgaacctacagacaaggtggagcgaatcaaggagcgtgtggaggagaaagagggaatccccccacaacagcagaggctcatctacagtggcaagcagatgaatgatgagaagacagcagctgattacaagattttaggtggttcagtccttcacctggtgttggctctgagaggaggaggtggtcttaggcagtgatggaccctccattttacctctttaccctgtcgctcataatgaggcatcatatatcctctcactctctgggacaccatagccactgccccctcccctggatgcccagtaatgtatgtctactggtgggagactgtgaggatcccaggattcagtattcctggcccagagggcccttgctggctactgggtgttagtttgcagtcctgtgtgcttccctctcttatgactgtgtccctggttgtcaataaaatatttcctggcctcctggaaaaaaaaaaaaaaaaaaaaaaaaaaaaaaaaaaaaaaaaaaaaaaaaaanaaaaaanaaaaanaaaaaaaaaaaaaaaaaaaaaaaaaaaaaaaaaaaaaaaaaaaaaaaacacaacaaacgaaaaacaaaaaaaaaaacagggggggccgagaaaaaaacacagacgccaggagcccaacccagcaacaccactcaccctgacaacaagaagggcacccaccaagaagcacgaacaccaaacgacaagcgccgcacaagcaacaaatcgaacaggatcggaagacaacacagaacagcagccaggaagagcgagacaacaacgaagcgggatgagaaaaaagcgaaccaaaacacagacagcaatcgggcaggacacaaaacgaacagcgaacgacggacaacacaccacgcgaccgcgcggaaagcaagaacacgagacgccgtcacacaacg

SEQ ID NO: 348791 - DNA, 218 bp, Homo sapiens
aaccaaagcggggagtgtgttcagtcagtacctgcctttctgagcctggcatcctggaccagcctcacttccttggctgaggccaggttagttaccgctgccctagttcttgctactagccatggtttccttcatctgcatctctcaactcccgtggtggttcttcaccaatttccagccctcgttagtcctatctgctgtttcctcttttgtgcctt

SEQ ID NO: 348792 - DNA, 438 bp, Homo sapiens
accactgccaagaaaaagatcttttcatatccccccgtcctctcttcacttggatggcagttgagtctctgaaagagattcatcccgaaggtcttttaagtgaagagaggcaaagcttagcttagtatttcctttctgaagagcacatacccctgtgtaaaattgaggagcaacagccttaaatggaagcagctgtgattccccgcccctgtgaaggggctgtggccctgcagatgccacggctgtggatgcgtagagcttgggtaccctccctggcttcatggctgacctgctgtgtgaccttgggcaagtcagatttcctctctgtttgccatctgcaaaatatggatacagacccgtgctccctcctggttttactgaggtactgtgagagccagtgaaatcacggttatgggatgctcagcattctgctgcaga

SEQ ID NO: 348793 - DNA, 594 bp, Homo sapiens
ggaataaataaaatgcctgggacatcatcgttaagtggcatctgatgcataagcagtgccctaggaatggggttgcctgccttggtctctaaaggatgggttcaaaaggcaagagcagcacacaagaagatagcttcaagcaggagaaaaagcttggcccagggcccaaaggggatacgacccttcagcaaactgacatgctgaaagctgccctatggagaggctcatgtggcaaggaacagagggtggcttctggccaacacccagtgaggaactcaggccctcagtcaaacagcctgcaaggaactgaaccctgccaataaccctgggttgaaagcttccctttggagaagaactgagggctgtctctggtcaatagcactgaggaactgaatccagcaaacaattatgtgaagaaacttggaagcttgtcctcccctctagttgagctttgagatgactgccgccctagtggacaccttgattgaagccttatgagaaaccctaagccagagaacccaattaagctacgcttacattcctaacacagagaaaatatgagctaataaatgttgtttcaaaccactaaaaatt

SEQ ID NO: 348794 - DNA, 728 bp, Homo sapiens
tgttcaggctgctgggtgacatttctatgtctccccttcaacggtgaaatatttcagtggttgtccatcacctatgggagtctgacatggcataatcaggccactggggcattgctagttgtgctgtccctgatattcaccgtggtaggcagtttctgaaatggctcccagtgatctccaactcctgaaattcacactctgtgtaatcccctccctttgagtgtgggctagacctggtggccaaagtgataggatttcacttctgatgttaggctatgaaaggctgtgaccgctctctctgcctcttctctctcacttgaagcaaactgacatgctgaaagctgccctatggagaggctcatgtggcaaggaacagagggtggcttctggccaacacccagtgaggaactcaggccctcagtcaaacagcctgcaaggaactgaaccctgccaataaccctgggttgaaagcttccctttggagaagaactgagggctgtctctggtcaatagcactgaggaactgaatccagcaaacaattatgtgaagaaacttggaagcttgtcctcccctctagttgagctttgagatgactgccgccctagtggacaccttgattgaagccttatgagaaaccctaagccagagaacccaattaagctacgcttacattcctaacacagagaaaatatgagctaataaatgttgtttcaaaccactaaaaatt

SEQ ID NO: 348795 - DNA, 570 bp, Homo sapiens
ggaataaataaaatgcctgggacatcatcgttaagtggcatctgatgcataagcagtgccctaggaatggggttgcctgccttggtctctaaaggatgggttcaaaaggcaagagcagcacacaagaagatagcttcaagcaggagaaaaagcttggcccagggcccaaaggggatacgacccttcagcaaactgacatgctgaaagctgccctatggagaggctcatgtggcaaggaacagagggtggcttctggccaacacccagtgaggaactcaggccctcagtcaaacagcctgcaaggaactgaaccctgccaataaccgctgagctctgaaacttctcctggcagttcaagagagcgatggagggaatgctggggcacatctaaataaagcctccaagtgggagttcctgctcagctatgcatgagctctttgtgacttcatctcccagcctacaacttgtgaaataagcacgacttcactcagagcacagccagaaacatacaaactttccaaaaatatttgaatgttgacagcaaaatgtcttgcattccagtgaataatt

SEQ ID NO: 348796 - DNA, 540 bp, Homo sapiens
ggaataaataaaatgcctgggacatcatcgttaagtggcatctgatgcataagcagtgccctaggaatggggttgcctgccttggtctctaaaggatgggttcaaaaggcaagagcagcacacaagaagatagcttcaagcaggagaaaaagcttggcccagggcccaaaggggatacgacccttcagcaaactgacatgctgaaagctgccctatggagaggctcatgtggcaaggaacagagggtggcttctggccaacacccagtgaggaactcaggccctcagtcaaacagcctgcaaggaactgaaccctgccaataacccactgaggaactgaatccagcaaacaattatgtgaagaaacttggaagcttgtcctcccctctagttgagctttgagatgactgccgccctagtggacaccttgattgaagccttatgagaaaccctaagccagagaacccaattaagctacgcttacattcctaacacagagaaaatatgagctaataaatgttgtttcaaaccactaaaaatt

SEQ ID NO: 348797 - DNA, 472 bp, Homo sapiens
tgggcaactgcaacaatgagcagtttgtgtctgtgcctgcatccatccttccatcctgtactccagcagcagccagggtggtctttcaaaaatgcaaagctgataatgttactcccctgctgtaaaccttccagcggtttcctattgccttcagaataaaatacgaatcatctggcctccatctatctctccaggctcatcctctctcaattttccatatccttcaggctgagctctgaaacttctcctggcagttcaagagagcgatggagggaatgctggggcacatctaaataaagcctccaagtgggagttcctgctcagctatgcatgagctctttgtgacttcatctcccagcctacaacttgtgaaataagcacgacttcactcagagcacagccagaaacatacaaactttccaaaaatatttgaatgttgacagcaaaatgtcttgcattccagtgaataatt

SEQ ID NO: 348798 - DNA, 569 bp, Homo sapiens
tgggcaactgcaacaatgagcagtttgtgtctgtgcctgcatccatccttccatcctgtactccagcagcagccagggtggtctttcaaaaatgcaaagctgataatgttactcccctgctgtaaaccttccagcggtttcctattgccttcagaataaaatacgaatcatctggcctccatctatctctccaggctcatcctctctcaattttccatatccttcagtatcctgttgggacagacagatgaagaaccagagaccagagagtttaagtagcttgccaaaggtcacacagcagtgtaagcagtacgggtgattcttaagcccacattgtttgacttccgagacatatcagaaaactacgtcaaagaacacgcacaactcagacctatttccagtggcctatgcagaagagctaccctgcttgaatggaaaccccttaagatacactattctcaaaaacctaagtgcttagcctggcttatggaggaggcaatgcaatctaccacaagatgattaagacaacaatgaacttaagtcccagccactgctggagaatatcaaaa

SEQ ID NO: 348799 - DNA, 975 bp, Homo sapiens
ggaataaataaaatgcctgggacatcatcgttaagtggcatctgatgcataagcagtgccctaggaatggggttgcctgccttggtctctaaaggatgggttcaaaaggcaagagcagcacacaagaagatagcttcaagcaggagaaaaagcttggcccagggcccaaaggggatacgacccttcagcaaactgacatgctgaaagctgccctatggagaggctcatgtggcaaggaacagagggtggcttctggccaacacccagtgaggaactcaggccctcagtcaaacagcctgcaaggaactgaaccctgccaataaccgcagtgtcagcccccggccaatgaccaccatggacctccctgtagttgaacaaagttgggtttgctgactggtggcagtgagggagaatgcacaccacagggagctgtgcagtgtctcagtaagaagccaggagccatcccgtgaggccgttactgcaaacaagctgaaaatcctgctttgtttcttttggacacaacatgctttccttcagcttcagtagacgatgaggccagcaccacatgggctagatgtacatgagatgtgagcaaccacacttcccctctgacggggacagacagcatcacagtatcctgttgggacagacagatgaagaaccagagaccagagagtttaagtagcttgccaaaggtcacacagcagtgtaagcagtacgggtgattcttaagcccacattgtttgacttccgagacatatcagaaaactacgtcaaagaacacgcacaactcagacctatttccagtggcctatgcagaagagctaccctgcttgaatggaaaccccttaagatacactattctcaaaaacctaagtgcttagcctggcttatggaggaggcaatgcaatctaccacaagatgattaagacaacaatgaacttaagtcccagccactgctggagaatatcaaaa

SEQ ID NO: 348800 - DNA, 878 bp, Homo sapiens
ggaataaataaaatgcctgggacatcatcgttaagtggcatctgatgcataagcagtgccctaggaatggggttgcctgccttggtctctaaaggatgggttcaaaaggcaagagcagcacacaagaagatagcttcaagcaggagaaaaagcttggcccagggcccaaaggggatacgacccttcagcaaactgacatgctgaaagctgccctatggagaggctcatgtggcaaggaacagagggtggcttctggccaacacccagtgaggaactcaggccctcagtcaaacagcctgcaaggaactgaaccctgccaataaccgcagtgtcagcccccggccaatgaccaccatggacctccctgtagttgaacaaagttgggtttgctgactggtggcagtgagggagaatgcacaccacagggagctgtgcagtgtctcagtaagaagccaggagccatcccgtgaggccgttactgcaaacaagctgaaaatcctgctttgtttcttttggacacaacatgctttccttcagcttcagtagacgatgaggccagcaccacatgggctagatgtacatgagatgtgagcaaccacacttcccctctgacggggacagacagcatcacaggctgagctctgaaacttctcctggcagttcaagagagcgatggagggaatgctggggcacatctaaataaagcctccaagtgggagttcctgctcagctatgcatgagctctttgtgacttcatctcccagcctacaacttgtgaaataagcacgacttcactcagagcacagccagaaacatacaaactttccaaaaatatttgaatgttgacagcaaaatgtcttgcattccagtgaataatt

SEQ ID NO: 348801 - DNA, 469 bp, Homo sapiens
taaatttctttctcttctggtattcatgtccttgtgcagtcccctccctttgtgtgtgggctggacctagtgatttgcttctaaagaatagaatacagaaaaagtgatagaatgtcacttctcatatcaggttataaaagactgtcacttctgtcttatcctctctctctggctctactctctggcttgctctgatgaagcagctgggttgaaagcttccctttggagaagaactgagggctgtctctggtcaatagcactgaggaactgaatccagcaaacaattatgtgaagaaacttggaagcttgtcctcccctctagttgagctttgagatgactgccgccctagtggacaccttgattgaagccttatgagaaaccctaagccagagaacccaattaagctacgcttacattcctaacacagagaaaatatgagctaataaatgttgtttcaaaccactaaaa

SEQ ID NO: 348802 - DNA, 998 bp, Homo sapiens
aagagaagagtcctccaagcagcagggaagcaagtgcaaaggtccttgcagaagcgagcttggcatattagagggacagagggaggccggagcaactggagggtcttcagagactatcaagtgccaacaaggggattacccctctgcccctctaaaggattgcaagaaagaagacaccaaatccatggcattttttcccttaggaaagaagggagataatgagaagcctccacttgcaaactgacatgctgaaagctgccctatggagaggctcatgtggcaaggaacagagggtggcttctggccaacacccagtgaggaactcaggccctcagtcaaacagcctgcaaggaactgaaccctgccaataaccgcagtgtcagcccccggccaatgaccaccatggacctccctgtagttgaacaaagttgggtttgctgactggtggcagtgagggagaatgcacaccacagggagctgtgcagtgtctcagtaagaagccaggagccatcccgtgaggccgttactgcaaacaagctgaaaatcctgctttgtttcttttggacacaacatgctttccttcagcttcagtagacgatgaggccagcaccacatgggctagatgtacatgagatgtgagcaaccacacttcccctctgacggggacagacagcatcacaggacatgaagttctaagaggttcagtgacttgtctaagattaaacagctatgaatggagaactggaggcaaatgctgagctctgaaacttctcctggcagttcaagagagcgatggagggaatgctggggcacatctaaataaagcctccaagtgggagttcctgctcagctatgcatgagctctttgtgacttcatctcccagcctacaacttgtgaaataagcacgacttcactcagagcacagccagaaacatacaaactttccaaaaatatttgaatgttgacagcaaaatgtcttgcattccagtgaataatt

SEQ ID NO: 348803 - DNA, 1148 bp, Homo sapiens
agaacgagatcctgtttcaaaaaaaaaaaaaagaaagaaaaagaaaaaagaaaataacaaaactgcttagctgctattactactttattcacagcaatctgtgccctaacacaaaataacattttaaaaaatcattgccttttccacctcaaacctaggtctcctaattgtcactagtggcattaatcaaccacatttagcatttcttcacatctgtacacatgtattcctgaaacatatactttttctatgctctggatccattattcgtaccctgaatgatgaaaaatattctagaaaactaggaggcctatttaaaactatactctttatgtctttactcatttttagaagtctacacttaatagatatgcctttccttaaaggcttctactccaaagatttaattattaaaaccgcaacgtatgctaacacctgagccctttaaatcatgcttattgtcacctccctaagagctgtctatagtactcaaattattttctttccagtcctgggacaaccctgcttttcaactttaactcaaatcaacaaaaacagccccctccgagctaattcaattgaatgtcttgcaatcagtattattttcactaaatttttttatctccaaaaatattattcccataactattccccaaatgactatgccactctacctaaaactcttagctcatgctttaactaccttaagtttcattataacattagaactcaactaataacataaaatcttaaatttgaatcctcatacatacacaaattttccaaccttctaggtttcttcccaacagttgttcatggtttatcaccatacctaaacttttcaacaaacctaaacatagcaccagttttagtagatatgactagaaaaagtcactctaaaaatcatttctaacttccaaatgatagtttcaataaccatctcctaatgaaagtattttcttctccttccttatctcacttttactggctatactcctagctatctaatttcccagagtaatctcagtaacaataaagataccaacaaataaagatcaactggccacagccatgagtcggccttcataactatataatgctgttatacctacagaaacttcctgaagacgttcaaactcttcaccctc

SEQ ID NO: 348804 - DNA, 1672 bp, Homo sapiens
gtaggtgggtgtggtgggagcctctgcaatcccagcattcccttcgtgccgctaccaagatggcggcgcccatcttgcggtccttttcctggggccggtggtctggtaccctaaatctctcagtattgttgcccttggggctgcgtaaggcccactcgggcgctcaggggttactggcagcgcagaaggctcgaggtctgttcaaggacttcttcccggagacggggacgaaaatagagctcccagagctcttcgaccgtggcacggcgagttttccccaaaccatttactgtggcttcgaccccacggcagactcgcttcatgtgggtcatctacttgcgctgctgggcctgtttcatttgcagcgagcgggccacaacgtgatcgcgctggtgggaggcgccacggcgcgcctgggagacccgagcggccgtaccaaggaacgcgaggcgctggagacagagcgcgtgcgagccaacgcgcgagctctgcgcctagggcttgaggccctggcggctaatcaccagcagcttttcactgatgggcgctcctggggcagcttcactgtgctggacaactcggcctggtaccagaagcagcacctggtggacttcctggcggcagtggggggtcacttccgcatggggacgctgctgagccggcagagcgtgcagctgcggctcaagagccccgagggcatgagcttggccgagttcttttaccaggtgctccaggcctatgacttctattacctcttccagcgttatggatgcagggtccagctgggcggatctgatcaactaggcaacatcatgtccggatatgagttcatcaacaagttgactggagaagatgtatttggaatcaccgttcctctaattacaagtacaactggagcaaagctgggaaagtctgctggcaacgctgtttggctaaacagagataagacatctccatttgaattgtatcaattctttgtcaggcaaccggacgattcagtggaaaggtacctgaagctgttcactttcctgccccttccagagattgatcatatcatgcagctgcatgtcaaagagccagaaaggcggggtcctcagaaacgactggcagcagaagtaacaaagcttgttcatggacgagaaggattggattctgctaaaaggtgtacacaagccctttatcacagtagcatagatgcactggaggtcatgtctgatcaggagttaaaagagttgtttaaagaagctccattttctgaattttttctcgatcctggaacaagtgtcctagatacttgccgcaaagcaaatgccattccagatggtccccgagggtatcgaatgataacagaaggcggagtcagcataaatcaccaacaagtaacaaatcctgagagtgttttaattgttggacaacatattctcaagaatggactttccttacttaaaataggaaaaagaaatttctacattataaaatggcttcagttgtgatgaaaagtccttctggttgtccaaataaacttacccatcattcattctcaagacctctgaagggttggctccagaacttagacctttgcttatgcaaatcagaaaaacagaatggactaggactcagtgtgagtaacttcattatttttatgggccggttaataaatatttgtttaata

SEQ ID NO: 348805 - DNA, 1207 bp, Homo sapiens
acagcacgcgctaacaatatgcaatatgtaatgaaagattctaaggatgttatatcctttaatctaataaacttacttctacaaatttatcctcagtgtttacttggacacaaagccccaaagacagatgcaggtagtccatcacagcttatatgtgtatataacagaaaacaaactatccagtagtaggagactggcctaacaaatgagggtatatctaaaaagtaaaatactatgcaaatcttcagactgataatgtatgagacagaaagttatttgttacatgatttgagaaatgattccaagataggtatagcatctgatttttaaagacatgtagtataggcatctatgtgttgtagatgcatacaaaaatgcctaggtcaatgccaaattttaggaattatctcaggttggtgaaattaagagtggtttttttttccattttcagagatagggtctctttttttagcgccatctgcttgcagtgctgcctcttgctcctccccaccaccactgctgccctgagtcactgcctgcacagctccagccgcctggcttctcatagtagccactgatatttggagttcttacaacatggcagacattgacaacctgcctagctagggtagttaaaagaggagtgaatgctctcaaaaacctgcaagttaaaggtgcacagatagaagccaaattctatgaggaagttcacgatcttgaaaggaagtatgctgttctctatcagcctctatttgataagcaatctgagattactaatacaatttatgaacctacagaggaagaatgtgaatggaaaccagatgaagaagatgagatttcagaggagttgaaagaaaaggccaagactgaagatgagaaaaacgatgaagaaaaagaagaccccaaaggaattcctgaattttggttacctgtttttaagaatgttgacttgctcagtgatatgcttcagaaacatgatgaacctattctgaagcatgtgaaagataccaaagtgaagttctcagatgctggcctgcctatgagttttgtcttagaatttcaatttgaacccagtaaatattttacaaatgaagtgctgacaaagacatataggatgaggttagaaccagaaccagatgattctgatcacttttcctttgatggacaagaaattatgggttgtacagggggccagatagattggaaa

SEQ ID NO: 348806 - DNA, 505 bp, Homo sapiens
acagcacgcgctaacaatatgcaatatgtaatgaaagattctaaggatgttatatcctttaatctaataaacttacttctacaaatttatcctcagtgtttacttggacacaaagccccaaagacagatgcaggtagtccatcacagcttatatgtgtatataacagaaaacaaactatccagtagtaggagactggcctaacaaatgagggtatatctaaaaagtaaaatactatgcaaatcttcagactgataatgtatgagacagaaagttatttgttacatgatttgagaaatgattccaagataggtatagcatctgatttttaaagacatgtagtataggcatctatgtgttgtagatgcatacaaaaatgcctaggtcaatgccaaattttaggaattatctcaggttggtgaaattaagagtggtttttttttccattttcagagatagggtctctttttttagcgccatgctgtcccacactgcgatcgaagtgtg

SEQ ID NO: 348807 - DNA, 2001 bp, Homo sapiens
gtaggtgggtgtggtgggagcctctgcaatcccagcattcccttcgtgccgctaccaagatggcggcgcccatcttgcggtccttttcctggggccggtggtctggtaccctaaatctctcagtattgttgcccttggggctgcgtaaggcccactcgggcgctcaggggttactggcagcgcagaaggctcgaggtctgttcaaggacttcttcccggagacggggacgaaaatagagctcccagagctcttcgaccgtggcacggcgagttttccccaaaccatttactgtggcttcgaccccacggcagactcgcttcatgtgggtcatctacttgcgctgctgggcctgtttcatttgcagcgagcgggccacaacgtgatcgcgctggtgggaggcgccacggcgcgcctgggagacccgagcggccgtaccaaggaacgcgaggcgctggagacagagcgcgtgcgagccaacgcgcgagctctgcgcctagggcttgaggccctggcggctaatcaccagcagcttttcactgatgggcgctcctggggcagcttcactgtgctggacaactcggcctggtaccagaagcagcacctggtggacttcctggcggcagtggggggtcacttccgcatggggacgctgctgagccggcagagcgtgcagctgcggctcaagagccccgagggcatgagcttggccgagttcttttaccaggtgctccaggcctatgacttctattacctcttccagcgttatggatgcagggtccagctgggcggatctgatcaactaggcaacatcatgtccggatatgagttcatcaacaagttgactggagaagatgtatttggaatcaccgttcctctaattacaagtacaactggagcaaagctgggaaagtctgctggcaacgctgtttggctaaacagagataagacatctccatttgaattgtatcaattctttgtcaggcaaccggacgattcagtggaaaggtacctgaagctgttcactttcctgccccttccagagattgatcatatcatgcagctgcatgtcaaagagccagaaaggcggggtcctcagaaacgactggcagcagaagtaacaaagcttgttcatggacgagaaggattggattctgctaaaaggtgtacacaagccctttatcacagtagcatagatgcactggaggtcatgtctgatcaggagttaaaagagttgtttaaagaagctccattttctgaattttttctcgatcctggaacaagtgtcctagatacttgccgcaaagcaaatgccattccagatggtccccgagggtatcgaatgataacagaaggcggagtcagcataaatcaccaacaagtaacaaatcctgagagtgttttaattgttggacaacatattctcaagaatggactttccttacttaaaataggaaaaagaaatttctacattataaaatggcttcagttgtgatgaaaagtccttctggttgtccaaataaacttacccatcattcattctcaagacctctgaagggttggctccagaacttagacctttgcttatgcaaatcagaaaaacagaatggactaggactcagtgtgagtaacttcattatttttatgggccggttaataaatatttgtttaataatgggatgttttattttctgatgtacaaagcttgattaccatagaaaaccatgattttcagggttaatctctttttaaaattatacttcagaagagaaagaaatgctgctttcctatcttacccttcctgctctcctttttgtagtgatgaggaacaatgaaaaagaggtagtgtaaggaattgtgaggctgggcatggtgtaagtgctccactttagagagtgtaccttaattactactgtatttgcaaattaagggaaatttaggtcatcatttgattttcggaaatctaaaaggaactgaccatcattaccaagtctttctatata

SEQ ID NO: 348808 - DNA, 2377 bp, Homo sapiens
gtaggtgggtgtggtgggagcctctgcaatcccagcattcccttcgtgccgctaccaagatggcggcgcccatcttgcggtccttttcctggggccggtggtctggtaccctaaatctctcagtattgttgcccttggggctgcgtaaggcccactcgggcgctcaggggttactggcagcgcagaaggctcgaggtctgttcaaggacttcttcccggagacggggacgaaaatagagctcccagagctcttcgaccgtggcacggcgagttttccccaaaccatttactgtggcttcgaccccacggcagactcgcttcatgtgggtcatctacttgcgctgctgggcctgtttcatttgcagcgagcgggccacaacgtgatcgcgctggtgggaggcgccacggcgcgcctgggagacccgagcggccgtaccaaggaacgcgaggcgctggagacagagcgcgtgcgagccaacgcgcgagctctgcgcctagggcttgaggccctggcggctaatcaccagcagcttttcactgatgggcgctcctggggcagcttcactgtgctggacaactcggcctggtaccagaagcagcacctggtggacttcctggcggcagtggggggtcacttccgcatggggacgctgctgagccggcagagcgtgcagctgcggctcaagagccccgagggcatgagcttggccgagttcttttaccaggtgctccaggcctatgacttctattacctcttccagcgttatggatgcagggtccagctgggcggatctgatcaactaggcaacatcatgtccggatatgagttcatcaacaagttgactggagaagatgtatttggaatcaccgttcctctaattacaagtacaactggagcaaagctgggaaagtctgctggcaacgctgtttggctaaacagagataagacatctccatttgaattgtatcaattctttgtcaggcaaccggacgattcagtggaaaggtacctgaagctgttcactttcctgccccttccagagattgatcatatcatgcagctgcatgtcaaagagccagaaaggcggggtcctcagaaacgactggcagcagaagtaacaaagcttgttcatggacgagaaggattggattctgctaaaaggtgtacacaagccctttatcacagtagcatagatgcactggaggtcatgtctgatcaggagttaaaagagttgtttaaagaagctccattttctgaattttttctcgatcctggaacaagtgtcctagatacttgccgcaaagcaaatgccattccagatggtccccgagggtatcgaatgataacagaaggcggagtcagcataaatcaccaacaagtaacaaatcctgagagtgttttaattgttggacaacatattctcaagaatggactttccttacttaaaataggaaaaagaaatttctacattataaaatggcttcagttgtgatgaaaagtccttctggttgtccaaataaacttacccatcattcattctcaagacctctgaagggttggctccagaacttagacctttgcttatgcaaatcagaaaaacagaatggactaggactcagtagatagggtctctttttttagcgccatctgcttgcagtgctgcctcttgctcctccccaccaccactgctgccctgagtcactgcctgcacagctccagccgcctggcttctcatagtagccactgatatttggagttcttacaacatggcagacattgacaacctgcctagctagggtagttaaaagaggagtgaatgctctcaaaaacctgcaagttaaaggtgcacagatagaagccaaattctatgaggaagttcacgatcttgaaaggaagtatgctgttctctatcagcctctatttgataagcaatctgagattactaatacaatttatgaacctacagaggaagaatgtgaatggaaaccagatgaagaagatgagatttcagaggagttgaaagaaaaggccaagactgaagatgagaaaaacgatgaagaaaaagaagaccccaaaggaattcctgaattttggttacctgtttttaagaatgttgacttgctcagtgatatgcttcagaaacatgatgaacctattctgaagcatgtgaaagataccaaagtgaagttctcagatgctggcctgcctatgagttttgtcttagaatttcaatttgaacccagtaaatattttacaaatgaagtgctgacaaagacatataggatgaggttagaaccagaaccagatgattctgatcacttttcctttgatggacaagaaattatgggttgtacagggggccagatagattggaaa

SEQ ID NO: 348809 - DNA, 2014 bp, Homo sapiens
  misc_feature (1987)..(1988): n is a, c, g, or t
gtaggtgggtgtggtgggagcctctgcaatcccagcattcccttcgtgccgctaccaagatggcggcgcccatcttgcggtccttttcctggggccggtggtctggtaccctaaatctctcagtattgttgcccttggggctgcgtaaggcccactcgggcgctcaggggttactggcagcgcagaaggctcgaggtctgttcaaggacttcttcccggagacggggacgaaaatagagctcccagagctcttcgaccgtggcacggcgagttttccccaaaccatttactgtggcttcgaccccacggcagactcgcttcatgtgggtcatctacttgcgctgctgggcctgtttcatttgcagcgagcgggccacaacgtgatcgcgctggtgggaggcgccacggcgcgcctgggagacccgagcggccgtaccaaggaacgcgaggcgctggagacagagcgcgtgcgagccaacgcgcgagctctgcgcctagggcttgaggccctggcggctaatcaccagcagcttttcactgatgggcgctcctggggcagcttcactgtgctggacaactcggcctggtaccagaagcagcacctggtggacttcctggcggcagtggggggtcacttccgcatggggacgctgctgagccggcagagcgtgcagctgcggctcaagagccccgagggcatgagcttggccgagttcttttaccaggtgctccaggcctatgacttctattacctcttccagcgttatggatgcagggtccagctgggcggatctgatcaactaggcaacatcatgtccggatatgagttcatcaacaagttgactggagaagatgtatttggaatcaccgttcctctaattacaagtacaactggagcaaagctgggaaagtctgctggcaacgctgtttggctaaacagagataagacatctccatttgaattgtatcaattctttgtcaggcaaccggacgattcagtggaaaggtacctgaagctgttcactttcctgccccttccagagattgatcatatcatgcagctgcatgtcaaagagccagaaaggcggggtcctcagaaacgactggcagcagaagtaacaaagcttgttcatggacgagaaggattggattctgctaaaaggtgtacacaagccctttatcacagtagcatagatgcactggaggtcatgtctgatcaggagttaaaagagttgtttaaagaagctccattttctgaattttttctcgatcctggaacaagtgtcctagatacttgccgcaaagcaaatgccattccagatggtccccgagggtatcgaatgataacagaaggcggagtcagcataaatcaccaacaagtaacaaatcctgagagtgttttaattgttggacaacatattctcaagaatggactttccttacttaaaataggaaaaagaaatttctacattataaaatggcttcagttgtgatgaaaagtccttctggttgtccaaataaacttacccatcattcattctcaagacctctgaagggttggctccagaacttagacctttgcttatgcaaatcagaaaaacagaatggactaggactcagtagatagggtctctttttttagcgccattgcctgcacagctccagccgcctggcttctcatagtagccactgatatttggagttcttacaacatggcagacattgacaacctgcctagctagggtagttaaaagaggagtgaatgctctcaaaaacctgcaagttaaaggtgcacagatagaagccaaattctatgaggagtccacactgaaccggagagtggtgcgtgactaacggcatgatcaccggggtggcgacctgaaacaaatgggaccatggcaattaaccgatgacccaaggttagaagatggaaggacacgagagacaatgcagagaagcaaacgaaatacctggtcccatactggcnngggacagaccccgcgcacaggggccc

SEQ ID NO: 348810 - DNA, 1535 bp, Homo sapiens
  misc_feature (147)..(147): n is a, c, g, or t
tcaggcccggtgcccagagcccaggaggaggcagtggccaggaaggcacaggcctgagaagtctgcggctgagctgggagcaaatcccccaccccctacctgggggacagggcaagtgagacctggtgagggtggctcagcaggcanggaaggagaggtgtctgtgcgtcctgcacccacatctttctctgtcccctccttgccctgtctggaggctgctagactcctatcttctgaattctatagtgcctgggtctcagcgcagtgccgatggtggcccgtccttgtggttcctctctacctggggaaataaggtgcagcggccatggctacagcaagacccccctggatgtgggtgctctgtgctctgatcacagccttgcttctgggggtcacagagcatgttctcgccaacaatgatgtttcctgtgaccacccctctaacaccgtgccctctgggagcaaccaggacctgggagctggggccggggaagacgcccggtcggatgacagcagcagccgcatcatcaatggatccgactgcgatatgcacacccagccgtggcaggccgcgctgttgctaaggcccaaccagctctactgcggggcggtgttggtgcatccacagtggctgctcacggccgcccactgcaggaagaaagttttcagagtccgtctcggccactactccctgtcaccagtttatgaatctgggcagcagatgttccagggggtcaaatccatcccccaccctggctactcccaccctggccactctaacgacctcatgctcatcaaactgaacagaagaattcgtcccactaaagatgtcagacccatcaacgtctcctctcattgtccctctgctgggacaaagtgcttggtgtctggctgggggacaaccaagagcccccaagtgcacttccctaaggtcctccagtgcttgaatatcagcgtgctaagtcagaaaaggtgcgaggatgcttacccgagacagatagatgacaccatgttctgcgccggtgacaaagcaggtagagactcctgccagggtgattctggggggcctgtggtctgcaatggctccctgcagggactcgtgtcctggggagattacccttgtgcccggcccaacagaccgggtgtctacacgaacctctgcaagttcaccaagtggatccaggaaaccatccaggccaactcctgagtcatcccaggactcagcacaccggcatccccacctgctgcagggacagccctgacactcctttcagaccctcattccttcccagagatgttgagaatgttcatctctccagcccctgaccccatgtctcctggactcagggtctgcttcccccacattgggctgaccgtgtctctctagttgaaccctgggaacaatttccaaaactgtccagggcgggggttgcgtctcaatctccctggggcactttcatcctcaagctcagggcccatcccttctctgcagctctgacccaaatttagtcccagaaataaactgagaagtggaa

SEQ ID NO: 348811 - DNA, 1400 bp, Homo sapiens
tcaggcccggtgcccagagcccaggaggaggcagtggccaggaaggcacaggcctgagaagtctgcggctgagctgggagcaaatcccccaccccctacctgggggacaggtgcctgggtctcagcgcagtgccgatggtggcccgtccttgtggttcctctctacctggggaaataaggtgcagcggccatggctacagcaagacccccctggatgtgggtgctctgtgctctgatcacagccttgcttctgggggtcacagagcatgttctcgccaacaatgatgtttcctgtgaccacccctctaacaccgtgccctctgggagcaaccaggacctgggagctggggccggggaagacgcccggtcggatgacagcagcagccgcatcatcaatggatccgactgcgatatgcacacccagccgtggcaggccgcgctgttgctaaggcccaaccagctctactgcggggcggtgttggtgcatccacagtggctgctcacggccgcccactgcaggaagaaagttttcagagtccgtctcggccactactccctgtcaccagtttatgaatctgggcagcagatgttccagggggtcaaatccatcccccaccctggctactcccaccctggccactctaacgacctcatgctcatcaaactgaacagaagaattcgtcccactaaagatgtcagacccatcaacgtctcctctcattgtccctctgctgggacaaagtgcttggtgtctggctgggggacaaccaagagcccccaagtgcacttccctaaggtcctccagtgcttgaatatcagcgtgctaagtcagaaaaggtgcgaggatgcttacccgagacagatagatgacaccatgttctgcgccggtgacaaagcaggtagagactcctgccagggtgattctggggggcctgtggtctgcaatggctccctgcagggactcgtgtcctggggagattacccttgtgcccggcccaacagaccgggtgtctacacgaacctctgcaagttcaccaagtggatccaggaaaccatccaggccaactcctgagtcatcccaggactcagcacaccggcatccccacctgctgcagggacagccctgacactcctttcagaccctcattccttcccagagatgttgagaatgttcatctctccagcccctgaccccatgtctcctggactcagggtctgcttcccccacattgggctgaccgtgtctctctagttgaaccctgggaacaatttccaaaactgtccagggcgggggttgcgtctcaatctccctggggcactttcatcctcaagctcagggcccatcccttctctgcagctctgacccaaatttagtcccagaaataaactgagaagtggaa

SEQ ID NO: 348812 - DNA, 1384 bp, Homo sapiens
  misc_feature (147)..(147): n is a, c, g, or t
tcaggcccggtgcccagagcccaggaggaggcagtggccaggaaggcacaggcctgagaagtctgcggctgagctgggagcaaatcccccaccccctacctgggggacagggcaagtgagacctggtgagggtggctcagcaggcanggaaggagaggtgtctgtgcagcggccatggctacagcaagacccccctggatgtgggtgctctgtgctctgatcacagccttgcttctgggggtcacagagcatgttctcgccaacaatgatgtttcctgtgaccacccctctaacaccgtgccctctgggagcaaccaggacctgggagctggggccggggaagacgcccggtcggatgacagcagcagccgcatcatcaatggatccgactgcgatatgcacacccagccgtggcaggccgcgctgttgctaaggcccaaccagctctactgcggggcggtgttggtgcatccacagtggctgctcacggccgcccactgcaggaagaaagttttcagagtccgtctcggccactactccctgtcaccagtttatgaatctgggcagcagatgttccagggggtcaaatccatcccccaccctggctactcccaccctggccactctaacgacctcatgctcatcaaactgaacagaagaattcgtcccactaaagatgtcagacccatcaacgtctcctctcattgtccctctgctgggacaaagtgcttggtgtctggctgggggacaaccaagagcccccaagtgcacttccctaaggtcctccagtgcttgaatatcagcgtgctaagtcagaaaaggtgcgaggatgcttacccgagacagatagatgacaccatgttctgcgccggtgacaaagcaggtagagactcctgccagggtgattctggggggcctgtggtctgcaatggctccctgcagggactcgtgtcctggggagattacccttgtgcccggcccaacagaccgggtgtctacacgaacctctgcaagttcaccaagtggatccaggaaaccatccaggccaactcctgagtcatcccaggactcagcacaccggcatccccacctgctgcagggacagccctgacactcctttcagaccctcattccttcccagagatgttgagaatgttcatctctccagcccctgaccccatgtctcctggactcagggtctgcttcccccacattgggctgaccgtgtctctctagttgaaccctgggaacaatttccaaaactgtccagggcgggggttgcgtctcaatctccctggggcactttcatcctcaagctcagggcccatcccttctctgcagctctgacccaaatttagtcccagaaataaactgagaagtggaa

SEQ ID NO: 348813 - DNA, 1778 bp, Homo sapiens
  misc_feature (147)..(147): n is a, c, g, or t
  misc_feature (1611)..(1611): n is a, c, g, or t
  misc_feature (1778)..(1778): n is a, c, g, or t
tcaggcccggtgcccagagcccaggaggaggcagtggccaggaaggcacaggcctgagaagtctgcggctgagctgggagcaaatcccccaccccctacctgggggacagggcaagtgagacctggtgagggtggctcagcaggcanggaaggagaggtgtctgtgcgtcctgcacccacatctttctctgtcccctccttgccctgtctggaggctgctagactcctatcttctgaattctatagtgcctgggtctcagcgcagtgccgatggtggcccgtccttgtggttcctctctacctggggaaataaggtgcagcggccatggctacagcaagacccccctggatgtgggtgctctgtgctctgatcacagccttgcttctgggggtcacagagcatgttctcgccaacaatgatgtttcctgtgaccacccctctaacaccgtgccctctgggagcaaccaggacctgggagctggggccggggaagacgcccggtcggatgacagcagcagccgcatcatcaatggatccgactgcgatatgcacacccagccgtggcaggccgcgctgttgctaaggcccaaccagctctactgcggggcggtgttggtgcatccacagtggctgctcacggccgcccactgcaggaagaaagttttcagagtccgtctcggccactactccctgtcaccagtttatgaatctgggcagcagatgttccagggggtcaaatccatcccccaccctggctactcccaccctggccactctaacgacctcatgctcatcaaactgaacagaagaattcgtcccactaaagatgtcagacccatcaacgtctcctctcattgtccctctgctgggacaaagtgcttggtgtctggctgggggacaaccaagagcccccaagtgcacttccctaaggtcctccagtgcttgaatatcagcgtgctaagtcagaaaaggtgcgaggatgcttacccgagacagatagatgacaccatgttctgcgccggtgacaaagcaggtagagactcctgccagggtgattctggggggcctgtggtctgcaatggctccctgcagggactcgtgtcctggggagattacccttgtgcccggcccaacagaccgggtgtctacacgaacctctgcaagttcaccaagtggatccaggaaaccatccaggccaactcctgagtcatcccaggactcagcacaccggcatccccacctgctgcagggacagccctgacactcctttcagaccctcattccttcccagagatgttgagaatgttcatctctccagcccctgaccccatgtctcctggactcagggtctgcttcccccacattgggctgaccgtgtctctctagttgaaccctgggaacaatttccaaaactgtccagggcgggggttgcgtctcaatctccctggggcactttcatcctcaagctcagggcccatcccttctctgcagctctgacccaaatttagtcccagaaataaactgagaagtggaaacacaaaacaaaaaatcgggggctctaatggggggggggaaaagagttaggaaggccctgtcttagctggtccggnaccagttctgtccaagggggaatggcggtccttaaggagcgttacatcgtaacgtgcgattctctgggtgcgtgcgcagggagcgaaagggaaagcaaagatgaagcagcaacaaatagataacagaacgcagaccaggcgaagagagacaagagggaagcaaagan

SEQ ID NO: 348814 - DNA, 1332 bp, Homo sapiens
tcaggcccggtgcccagagcccaggaggaggcagtggccaggaaggcacaggcctgagaagtctgcggctgagctgggagcaaatcccccaccccctacctgggggacagggtgcagcggccatggctacagcaagacccccctggatgtgggtgctctgtgctctgatcacagccttgcttctgggggtcacagagcatgttctcgccaacaatgatgtttcctgtgaccacccctctaacaccgtgccctctgggagcaaccaggacctgggagctggggccggggaagacgcccggtcggatgacagcagcagccgcatcatcaatggatccgactgcgatatgcacacccagccgtggcaggccgcgctgttgctaaggcccaaccagctctactgcggggcggtgttggtgcatccacagtggctgctcacggccgcccactgcaggaagaaagttttcagagtccgtctcggccactactccctgtcaccagtttatgaatctgggcagcagatgttccagggggtcaaatccatcccccaccctggctactcccaccctggccactctaacgacctcatgctcatcaaactgaacagaagaattcgtcccactaaagatgtcagacccatcaacgtctcctctcattgtccctctgctgggacaaagtgcttggtgtctggctgggggacaaccaagagcccccaagtgcacttccctaaggtcctccagtgcttgaatatcagcgtgctaagtcagaaaaggtgcgaggatgcttacccgagacagatagatgacaccatgttctgcgccggtgacaaagcaggtagagactcctgccagggtgattctggggggcctgtggtctgcaatggctccctgcagggactcgtgtcctggggagattacccttgtgcccggcccaacagaccgggtgtctacacgaacctctgcaagttcaccaagtggatccaggaaaccatccaggccaactcctgagtcatcccaggactcagcacaccggcatccccacctgctgcagggacagccctgacactcctttcagaccctcattccttcccagagatgttgagaatgttcatctctccagcccctgaccccatgtctcctggactcagggtctgcttcccccacattgggctgaccgtgtctctctagttgaaccctgggaacaatttccaaaactgtccagggcgggggttgcgtctcaatctccctggggcactttcatcctcaagctcagggcccatcccttctctgcagctctgacccaaatttagtcccagaaataaactgagaagtggaa

SEQ ID NO: 348815 - DNA, 427 bp, Homo sapiens
aggttgtactagtttacactccaccaacagtgtagaagtgttcgcttttcaccacatccactctaacatgtattttttttttattatggtcattcttgcgggagtgaggtggtatctcattgtggttttgatttgcatttccctgatcattagtgacgttgagcattttttcatgtcagccatttgtatatcttcttttgagaattatctgttcccatccttagcccactttttgatgggattgtttcgttcttgcggatttgagttctttgtagattctgggcattagtcctttgtcaggtgtatagattgtgaagattttctcccactctatgggttgcctgtttattttgctgattatgtctttcactgtgcagaagctttgtagtgtaattaagtcccatctatctttgttcttgttggattt

SEQ ID NO: 348816 - DNA, 711 bp, Homo sapiens
cattaatacaaaatcgacttctaatagcaagaagattgtaacttaataagaatattgacatatgcatgctttgttaatttatttgaattacatagatatgaacatgagagattttaagcatacattcttatatcatgttcttaaaatagattctattaaaattatgatctattatctatctatagtttaatctctttactatacaaaatataagctttcttgaaagcataataagtgagatttcgttaaattgacaacagtagtaggcagttctcagtgagcctaaggcagaaccttccttgtcaggtgaaacggtgctgctaaacatggagtgaccttcatagaagtcataaatatagtagcagctttctaaagtatagcatgtaatttaatcctttattaagtattgttaacaactttcataccctgtatttatttaaagcaacacttacaatctcaggcaatattattattaaccaatatgcctttaatattaaagtaagagatacttgtatatacaaacttcaaattctatgcataacatttcaaaaaccttgcaacattttaaaaatataatagattcatcaagctgtccaaattcatatagtgacaaataactgagattatgacccaaactttttatttttttattggttatattgttttattggtacactctacaactgttttgaaatagaatttgaatacgaa

SEQ ID NO: 348817 - DNA, 428 bp, Homo sapiens
  misc_feature (27)..(27): n is a, c, g, or t
ccacgagctcgtgccgaattcggcacnagtctcctgtggtgtcccttccctctcccatgtgctcggtgttcagtggtgtatatttcttctcccagacatggggcacacgccccaagggacatgatcctctccttagtcttagctcatggggctctttataaggagttggggggtagaggcaggaaatgggaaccgagctgaagcagaggctgagttagggggctagaggacagtgctcctggccacccagcctctgctgagaaccattcctgggattagagctgcctttcccagggaaaaagtgtcgtctccccgaccctcccgtgggccctgtggtgtgatgctgtgtctgtatattctatacaaaggtacttgtcctttccctttgtaaactacatttgacatggattaaaccagtataaacagtt

SEQ ID NO: 348818 - DNA, 2226 bp, Homo sapiens
ttaagaactgccatgacacagagtctccccacttgcgcttctcagatgcagatggcaaggaatatgactttgggacacagctgccatctagctcccccggttcactaaaggttgatgacactgggaagaagatttttgctgtctctggcctcatttctgatcgggaagcctcatcgtagcccagaggatcggaatgacagatgtaagaagaaagcagcggcattgttcgacagccaggccccaatttgccccatctgccaggtcctgctgaggcccagtgagctgcaggagcatatggagcaggaactggagcagctagcccaactgccctcgagcaagaattcccttctgaaggatgccatggctccaggcaccccaaagtccctcctgttgtctgcttccatcaagagggaaggagagtctccaacggcatcaccccactcatctgccaccgatgacctccaccattcagacagataccagacctttctgcgagtacgagccaaccggcagacccgactgaatgctcggattgggaaaatgaaacggaggaagcaagatgaagggcagagggaaggctcctgcatggctgaggatgatgctgtggacatcgagcatgagaacaacaaccgctttgaggagtatgagtggtgtggacagaagcggatacgggccaccactctcctggaaggtggcttccgaggctctggcttcatcatgtgcagcggcaaagagaacccggacagtgatgctgacttggatgtggatggggatgacactctggagtatgggaagccacaatacacagaggctgatgtcatcccctgcacaggcgaggagcctggtgaagccaaggagagagaggcacttcggggcgcagtcctaaatggcggccctcccagcacgcgcatcacacctgagttctctaaatgggccagtgatgagatgccatccaccagcaatggtgaaagcagcaagcaggaggccatgcagaagacctgcaagaacagcgacatcgagaaaatcaccgaagattcagctgtgaccacgtttgaggctctgaaggctcgggtcagagaacttgaacggcagctatctcgtggggaccgttacaaatgcctcatctgcatggactcgtactcgatgcccctaacgtccatccagtgttggcacgtgcactgcgaggagtgctggctgcggaccctgggtgccaagaagctctgccctcagtgcaacacgatcacagcgcccggagacctgcggaggatctacttgtgagctatctgccccaggcaggcctcgcctccagcagccccacctgcccccagcctctgtgacagtgaccgtctccctttgtacatacttgcacacaggttccccatgtacatacatgcacatactcaaacatgcgtacacacacacacatttacacacgcaggactctggagccagagtagaggctgtggcccaggcactacctgctggctcccacctatggtttgggggccatacctgttccagctctgttcccagggtggggcagggaggtgggggttgggggagtagtggggcacggctcctaagatccagcccccatactgacagacggacagacagacatgcaaacaccagactgaagcacatgtaatatagaccgtgtatgtttacaatgttgtgtataaatgggacaactcctcgccctctacctgtcccctccccctttggttgtatgattttcttcttttttaagaacccctggaagcagcgcctccttcagggttggctgggagctcggcccatccacctcttggggtacctgcctctctctctcctgtggtgtcccttccctctcccatgtgctcggtgttcagtggtgtatatttcttctcccagacatggggcacacgccccaagggacatgatcctctccttagtcttagctcatggggctctttataaggagttggggggtagaggcaggaaatgggaaccgagctgaagcagaggctgagttagggggctagaggacagtgctcctggccacccagcctctgctgagaaccattcctgggattagagctgcctttcccagggaaaaagtgtcgtctccccgaccctcccgtgggccctgtggtgtgatgctgtgtctgtatattctatacaaaggtacttgtcctttccctttgtaaactacatttgacatggattaaaccagtataaacagtt

SEQ ID NO: 348819 - DNA, 881 bp, Homo sapiens
  misc_feature (763)..(763): n is a, c, g, or t
  misc_feature (768)..(768): n is a, c, g, or t
  misc_feature (774)..(774): n is a, c, g, or t
ggcggcagatcacgtgattagggccaacatggccgccgccgccgcttggagctgaagtgccgccgccgccgggcagccacggggaatccgcccgcatcgccgccctcgccggccgggcggccgtggggcccagagcgccggaggccagggctggggcggcaccgcgcagcggccacggggtcccgttagagcagcgcccggcggctatgccgagagcccggagcggccggaggagcagaggggccggcgggagggaggagtaacctttctgcgagtacgagccaaccggcagacccgactgaatgctcggattgggaaaatgaaacggaggaagcaagatgaagggcagagggaaggctcctgcatggctgaggatgatgctgtggacatcgagcatgagaacaacaaccgctttgaggagtatgagtggtgtggacagaagcggatacgggccaccactctcctggaaggtggcttccgaggctctggcttcatcatgtgcagcggcaaagagaacccggacagtgatgctgacttggatgtggatggggatgacactctggagtatgggaagccacaatacacagaggctgatgtcatcccctgcacaggcgaggagcctggtgaagccaaggagagagaggcacttcggggcgcagtcctaaatggcggccctcccagcacgcgcatcacacctgagttctctaaatgggccagtgatgagatgccatccacaggcaatggtgaagcacgcacagccagngggcntgcggnaagacctgagaaacagcgactcggaaatccccgagcattccgtgtgacccgctggggctcgagggtcggtcgacactgacggggtatccgtgggaccgaaatgccat

SEQ ID NO: 348820 - DNA, 974 bp, Homo sapiens
caagagtgaaattggcagcagcagcctgttctgaacacctgtgggggtagggagaggttcccaacatctgtctcagctggaggatggggtcagggtcagagtgaatggctcagaccagaggcagaggccttttctttggcaaacaaagtgtgtcgtgctgtccatcctgcctcactggccagcggaacagaaagctgctgcccggctgggagctgggatctgataaggaaagttgtatcctgagagatttctctaggccaccagctaactaggacctaatagagcagtgtcgccagtgtttagccagtactgctggggtgtgctgtgtggcaccagccatcagcctggccagctctgctgggtgatgctgagatcacaacagtgagtcaaacttgggacccttgcagcttccactctggtgagggacagtgacaataggtggtaataaatatgattttggagttacacaggattctgggtggacaccagggaagggacacctgtgtataagaacgtgggaagccccatctgccacgcagagcaccatgaggatagggatcagatcttgaagctctctattctcaacatggagccaaacagaggatgagcccaataaaggttgaaagaatggcattgaggtgagagttctttcctttagcagggatttagagagcagctgctctgtgtgggcactgtgagttaatggtaggaggcatggttgggctgagtcagacttgccaaaggagaagcagaggctgagttagggggctagaggacagtgctcctggccacccagcctctgctgagaaccattcctgggattagagctgcctttcccagggaaaaagtgtcgtctccccgaccctcccgtgggccctgtggtgtgatgctgtgtctgtatattctatacaaaggtacttgtcctttccctttgtaaactacatttgacatggattaaaccagtataaacagtt

SEQ ID NO: 348821 - DNA, 1654 bp, Homo sapiens
caagagtgaaattggcagcagcagcctgttctgaacacctgtgggggtagggagaggttcccaacatctgtctcagctggaggatggggtcagggtcagagtgaatggctcagaccagaggcagaggccttttctttggcaaacaaagtgtgtcgtgctgtccatcctgcctcactggccagcggaacagaaagctgctgcccggctgggagctgggatctgataaggaaagttgtatcctgagagatttctctaggccaccagctaactaggacctaatagagcagtgtcgccagtgtttagccagtactgctggggtgtgctgtgtggcaccagccatcagcctggccagctctgctgggtgatgctgagatcacaacagtgagtcaaacttgggacccttgcagcttccactctggtgagggacagtgacaataggtggtaataaatatgattttggagttacacaggattctgggtggacaccagggaagggacacctgtgtataagaacgtgggaagccccatctgccacgcagagcaccatgaggatagggatcagatcttgaagctctctattctcaacatggagccaaacagaggatgagcccaataaaggttgaaagaatggcattgaggtgagagttctttcctttagcagggatttagagagcagctgctctgtgtgggcactgtgagttaatggtaggaggcatggttgggctgagtcagacttgccaaaggagcaggcatgtatattgtagaccaggagggagaaggttctaggcagagagcaggaggtgcggaggcatgggggcatgagaaagcacaggatttgggagaccacagtagctctgtttaatggagtatgagtcctgggccaggcatggtgggcagtaagactacagagaaaaggacttcaggctacagggctgctttctgcgttgagaagctggggcttttcctggcagctttggggtaccctgttttctctgctttgccatggagccatattgggctcacatgtggtgccagggttctctgctttccacttataaggcagggctaggcagggccaggccgagcagaagatgtgaggccagctgctgagctgcgtgtacttggggaaggggggttggcaggacttgggtgccgcaagctgtaagtgaacctgatagctacattctgattgatggtggagtttgtctcccaaactgtcagagggtttatggaggtgccactcacccacaaggcgggaattgcttgtcaggacacctggccgtgtacaggagacagagctgtaacttggtgttttctcagcttaatggccctgctgctgacctgacctgcctgctgcctcaagtgtgtcagtgcctcagggtagagggcaaatgaggactgtcagggagaggtggattgcaggctgtgcctggcatctttccttcccgatgctgcttgcctttgggattggtggtgtctttgtgagaccagagactggtggggtagaagggagaaggatcaagactcagtgtttttcagggcttgaaaaatggagaacattccagatggagtgaatagcatgagcaggggtcttaagagcagcatatacaggctatgtttgtggtttggtgagcagcctgtgtgtgcacatgct

SEQ ID NO: 348822 - DNA, 526 bp, Homo sapiens
tggtttgtctttgctcactggatttttattaaacactgcaaatagaaaggtatgggtagaccttgcaccagctgcagccaaagagtggacttactcactggcttagttagcaccagtctcctccccaggtgctcttggcaaagcccagtccccaaaggagcaggaggtatttcaagatgagggccagatcaggcactgaataaaaaggccaatggctggcaagaggtcaggatgtgtcagctccactgggaccctgggggctgcagtgaccgtctgcttgttctgtgctttgttttcggtttccccgtgcagctcggattgggaaaatgaaacggaggaagcaagatgaagggcaggtatgtcccctgtgcaaccgccccctggcaggatcggagcaggagatgagtaggcatgtggagcattgcctttctaaggtagaggggccatcaccacccaccttccttcccgctcccttcccccgacactagctgctgactgcccctgaatctgtgggctcttggggtct

SEQ ID NO: 348823 - DNA, 2005 bp, Homo sapiens
ggcggcagatcacgtgattagggccaacatggccgccgccgccgcttggagctgaagtgccgccgccgccgggcagccacggggaatccgcccgcatcgccgccctcgccggccgggcggccgtggggcccagagcgccggaggccagggctggggcggcaccgcgcagcggccacggggtcccgttagagcagcgcccggcggctatgccgagagcccggagcggccggaggagcagaggggccggcgggagggaggagtaacctttctgcgagtacgagccaaccggcagacccgactgaatgctcggattgggaaaatgaaacggaggaagcaagatgaagggcagagggaaggctcctgcatggctgaggatgatgctgtggacatcgagcatgagaacaacaaccgctttgaggagtatgagtggtgtggacagaagcggatacgggccaccactctcctggaaggtggcttccgaggctctggcttcatcatgtgcagcggcaaagagaacccggacagtgatgctgacttggatgtggatggggatgacactctggagtatgggaagccacaatacacagaggctgatgtcatcccctgcacaggcgaggagcctggtgaagccaaggagagagaggcacttcggggcgcagtcctaaatggcggccctcccagcacgcgcatcacacctgagttctctaaatgggccagtgatgagatgccatccaccagcaatggtgaaagcagcaagcaggaggccatgcagaagacctgcaagaacagcgacatcgagaaaatcaccgaagattcagctgtgaccacgtttgaggctctgaaggctcgggtcagagaacttgaacggcagctatctcgtggggaccgttacaaatgcctcatctgcatggactcgtactcgatgcccctaacgtccatccagtgttggcacgtgcactgcgaggagtgctggctgcggaccctgggtgccaagaagctctgccctcagtgcaacacgatcacagcgcccggagacctgcggaggatctacttgtgagctatctgccccaggcaggcctcgcctccagcagccccacctgcccccagcctctgtgacagtgaccgtctccctttgtacatacttgcacacaggttccccatgtacatacatgcacatactcaaacatgcgtacacacacacacatttacacacgcaggactctggagccagagtagaggctgtggcccaggcactacctgctggctcccacctatggtttgggggccatacctgttccagctctgttcccagggtggggcagggaggtgggggttgggggagtagtggggcacggctcctaagatccagcccccatactgacagacggacagacagacatgcaaacaccagactgaagcacatgtaatatagaccgtgtatgtttacaatgttgtgtataaatgggacaactcctcgccctctacctgtcccctccccctttggttgtatgattttcttcttttttaagaacccctggaagcagcgcctccttcagggttggctgggagctcggcccatccacctcttggggtacctgcctctctctctcctgtggtgtcccttccctctcccatgtgctcggtgttcagtggtgtatatttcttctcccagacatggggcacacgccccaagggacatgatcctctccttagtcttagctcatggggctctttataaggagttggggggtagaggcaggaaatgggaaccgagctgaagcagaggctgagttagggggctagaggacagtgctcctggccacccagcctctgctgagaaccattcctgggattagagctgcctttcccagggaaaaagtgtcgtctccccgaccctcccgtgggccctgtggtgtgatgctgtgtctgtatattctatacaaaggtacttgtcctttccctttgtaaactacatttgacatggattaaaccagtataaacagtt

SEQ ID NO: 348824 - DNA, 2567 bp, Homo sapiens
tggggcgggggccaggactgcaggccgcgcctgacgctctcttttcttttcttgcatctgcccgcgatcttctcccagacctttctgcgagtacgagccaaccggcagacccgactgaatgctcggattgggaaaatgaaacggaggaagcaagatgaagggcagagggaaggctcctgcatggctgaggatgatgctgtggacatcgagcatgagaacaacaaccgctttgaggagtatgagtggtgtggacagaagcggatacgggccaccactctcctggaaggtggcttccgaggctctggcttcatcatgtgcagcggcaaagagaacccggacagtgatgctgacttggatgtggatggggatgacactctggagtatgggaagccacaatacacagaggctgatgtcatcccctgcacaggcgaggagcctggtgaagccaaggagagagaggcacttcggggcgcagtcctaaatggcggccctcccagcacgcgcatcacacctgagttctctaaatgggccagtgatgagatgccatccaccagcaatggtgaaagcagcaagcaggaggccatgcagaagacctgcaagaacagcgacatcgagaaaatcaccgaagattcagctgtgaccacgtttgaggctctgaaggctcgggtcagagaacttgaacggcagctatctcgtggggaccgttacaaatgcctcatctgcatggactcgtactcgatgcccctaacgtccatccagtgttggcacgtgcactgcgaggagtgctggctgcggaccctggtgaggtggcatgggggtcggggaatgggaggccgctccgggcactgcccagatgtctgtgcttatgcctgagcctgcctgggggaagtggggagcatggcgcaaaggagaacagagccaggagccaggatatttacccgcaggatatttacccccaggctcgctgcctctcctccccaactgcaggtttaggaacttctccccctccatgagttcactgcattctcccttccccgccccggtccccgaaggcccactgcatcacacagactggtgaggcctggggtcaggaggaggctggctgtaggtaaacaggaccagggccttggcccctccccctcccattactaagctccttctgctcctgcccctgttcttcgctcaggagcagccattaaaatgtcgcccggagacagtaataaaaggctcggacgtgggctctgtgtcctgatcaaaggccgcgtgtaatctcgttagggctgcggctgccacagctggacccagccttgttctcattactggggctcctgctgcggggctggccaggcggtttgatcctggcgtccccccaacacaggagcgtgcctgcctgctcacagaagctgcctatgcgtccccagcctgggctgacaggaccaaggtctcagcacacactggtgcagagagacatggctgcaggcccaggtgctcacatgcgcacacatggctcattgtgtagaccagagccctccctgttctccctgcagggtgccaagaagctctgccctcagtgcaacacgatcacagcgcccggagacctgcggaggatctacttgtgagctatctgccccaggcaggcctcgcctccagcagccccacctgcccccagcctctgtgacagtgaccgtctccctttgtacatacttgcacacaggttccccatgtacatacatgcacatactcaaacatgcgtacacacacacacatttacacacgcaggactctggagccagagtagaggctgtggcccaggcactacctgctggctcccacctatggtttgggggccatacctgttccagctctgttcccagggtggggcagggaggtgggggttgggggagtagtggggcacggctcctaagatccagcccccatactgacagacggacagacagacatgcaaacaccagactgaagcacatgtaatatagaccgtgtatgtttacaatgttgtgtataaatgggacaactcctcgccctctacctgtcccctccccctttggttgtatgattttcttcttttttaagaacccctggaagcagcgcctccttcagggttggctgggagctcggcccatccacctcttggggtacctgcctctctctctcctgtggtgtcccttccctctcccatgtgctcggtgttcagtggtgtatatttcttctcccagacatggggcacacgccccaagggacatgatcctctccttagtcttagctcatggggctctttataaggagttggggggtagaggcaggaaatgggaaccgagctgaagcagaggctgagttagggggctagaggacagtgctcctggccacccagcctctgctgagaaccattcctgggattagagctgcctttcccagggaaaaagtgtcgtctccccgaccctcccgtgggccctgtggtgtgatgctgtgtctgtatattctatacaaaggtacttgtcctttccctttgtaaactacatttgacatggattaaaccagtataaacagtt

SEQ ID NO: 348825 - DNA, 2049 bp, Homo sapiens
ggcggcagatcacgtgattagggccaacatggccgccgccgccgcttggagctgaagtgccgccgccgccgggcagccacggggaatccgcccgcatcgccgccctcgccggccgggcggccgtggggcccagagcgccggaggccagggctggggcggcaccgcgcagcggccacggggtcccgttagagcagcgcccggcggctatgccgagagcccggagcggccggaggagcagaggggccggcgggagggaggagtaacctttctgcgagtacgagccaaccggcagacccgactgaatgctcggattgggaaaatgaaacggaggaagcaagatgaagggcagagggaaggctcctgcatggctgaggatgatgctgtggacatcgagcatgagaacaacaaccgctttgaggagtatgagtggtgtggacagaagcggatacgggccaccactctcctggaaggtggcttccgaggctctggcttcatcatgtgcagcggcaaagagaacccggacagtgatgctgacttggatgtggatggggatgacactctggagtatgggaagccacaatacacagaggctgatgtcatcccctgcacaggcgaggagcctggtgaagccaaggagagagaggcacttcggggcgcagtcctaaatggcggccctcccagcacgcgcatcacacctgagttctctaaatgggccagtgatgagatgccatccaccagcaatggtgaaagcagcaagcaggaggccatgcagaagacctgcaagaacagcgacatcgagaaaatcaccgaagattcagctgtgaccacgtttgaggctctgaaggctcgggtcagagaacttgaacggcagctatctcgtggggaccgttacaaatgcctcatctgcatggactcgtactcgatgcccctaacgtccatccagtgttggcacgtgcactgcgaggagtgctggctgcggaccctgggtgccaagaagctctgccctcagtgcaacacgatcacagcgcccggagacctgcggaggatctacttgtgagctatctgccccaggcaggcctcgcctccagcagccccacctgcccccagcctctgtgacagtgaccgtctccctttgtacatacttgcacacaggttccccatgtacatacatgcacatactcaaacatgcgtacacacacacacatttacacacgcaggactctggagccagagtagaggctgtggcccaggcactacctgctggctcccacctatggtttgggggccatacctgttccagctctgttcccagggtggggcagggaggtgggggttgggggagtagtggggcacggctcctaagatccagcccccatactgacagacggacagacagacatgcaaacaccagactgaagcacatgtaatatagaccgtgtatgtttacaatgttgtgtataaatgggacaactcctcgccctctacctgtcccctccccctttggttgtatgattttcttcttttttaagaacccctggaagcagcgcctccttcagggttggctgggagctcggcccatccacctcttggggtacctgcctctctctctcctgtggtgtcccttccctctcccatgtgctcggtgttcagtggtgtatatttcttctcccagacatggggcacacgccccaagggacatgatcctctccttagtcttagctcatggggctctttataaggagttggggggtagaggcaggaaatgggaaccgagctgaagcagaggctgagttagggggctagaggacagtgctcctggccacccagcctctgctgagaaccattcctgggattagagctgcctttcccagggaaaaagtgtcgtctccccgaccctcccgtgggccctgtggtgtgatgctgtgtctgtatattctatacaaaggtacttgtcctttccctttgtaaactacatttgacatggattaaaccagtataaacagttaaaaaaaaaaaaaaaatccgagggctccatgcgggggggggaaa

SEQ ID NO: 348826 - DNA, 2012 bp, Homo sapiens
tggtttgtctttgctcactggatttttattaaacactgcaaatagaaaggtatgggtagaccttgcaccagctgcagccaaagagtggacttactcactggcttagttagcaccagtctcctccccaggtgctcttggcaaagcccagtccccaaaggagcaggaggtatttcaagatgagggccagatcaggcactgaataaaaaggccaatggctggcaagaggtcaggatgtgtcagctccactgggaccctgggggctgcagtgaccgtctgcttgttctgtgctttgttttcggtttccccgtgcagctcggattgggaaaatgaaacggaggaagcaagatgaagggcagagggaaggctcctgcatggctgaggatgatgctgtggacatcgagcatgagaacaacaaccgctttgaggagtatgagtggtgtggacagaagcggatacgggccaccactctcctggaaggtggcttccgaggctctggcttcatcatgtgcagcggcaaagagaacccggacagtgatgctgacttggatgtggatggggatgacactctggagtatgggaagccacaatacacagaggctgatgtcatcccctgcacaggcgaggagcctggtgaagccaaggagagagaggcacttcggggcgcagtcctaaatggcggccctcccagcacgcgcatcacacctgagttctctaaatgggccagtgatgagatgccatccaccagcaatggtgaaagcagcaagcaggaggccatgcagaagacctgcaagaacagcgacatcgagaaaatcaccgaagattcagctgtgaccacgtttgaggctctgaaggctcgggtcagagaacttgaacggcagctatctcgtggggaccgttacaaatgcctcatctgcatggactcgtactcgatgcccctaacgtccatccagtgttggcacgtgcactgcgaggagtgctggctgcggaccctgggtgccaagaagctctgccctcagtgcaacacgatcacagcgcccggagacctgcggaggatctacttgtgagctatctgccccaggcaggcctcgcctccagcagccccacctgcccccagcctctgtgacagtgaccgtctccctttgtacatacttgcacacaggttccccatgtacatacatgcacatactcaaacatgcgtacacacacacacatttacacacgcaggactctggagccagagtagaggctgtggcccaggcactacctgctggctcccacctatggtttgggggccatacctgttccagctctgttcccagggtggggcagggaggtgggggttgggggagtagtggggcacggctcctaagatccagcccccatactgacagacggacagacagacatgcaaacaccagactgaagcacatgtaatatagaccgtgtatgtttacaatgttgtgtataaatgggacaactcctcgccctctacctgtcccctccccctttggttgtatgattttcttcttttttaagaacccctggaagcagcgcctccttcagggttggctgggagctcggcccatccacctcttggggtacctgcctctctctctcctgtggtgtcccttccctctcccatgtgctcggtgttcagtggtgtatatttcttctcccagacatggggcacacgccccaagggacatgatcctctccttagtcttagctcatggggctctttataaggagttggggggtagaggcaggaaatgggaaccgagctgaagcagaggctgagttagggggctagaggacagtgctcctggccacccagcctctgctgagaaccattcctgggattagagctgcctttcccagggaaaaagtgtcgtctccccgaccctcccgtgggccctgtggtgtgatgctgtgtctgtatattctatacaaaggtacttgtcctttccctttgtaaactacatttgacatggattaaaccagtataaacagtt

SEQ ID NO: 348827 - DNA, 2304 bp, Homo sapiens
ttaagaactgccatgacacagagtctccccacttgcgcttctcagatgcagatggcaaggaatatgactttgggacacagctgccatctagctcccccggttcactaaaggttgatgacactgggaagaagatttttgctgtctctggcctcatttctgatcgggaagcctcatcgtagcccagaggatcggaatgacagatgtaagaagaaagcagcggcattgttcgacagccaggccccaatttgccccatctgccaggtcctgctgaggcccagtgagctgcaggagcatatggagcaggaactggagcagctagcccaactgccctcgagcaagaattcccttctgaaggatgccatggctccaggcaccccaaagtccctcctgttgtctgcttccatcaagagggaaggagagtctccaacggcatcaccccactcatctgccaccgatgacctccaccattcagacagataccagacctttctgcgagtacgagccaaccggcagacccgactgaatgctcggattgggaaaatgaaacggaggaagcaagatgaagggcaggtatgtcccctgtgcaaccgccccctggcaggatcggagcaggagatgagtaggcatgtggagcattgcctttctaagagggaaggctcctgcatggctgaggatgatgctgtggacatcgagcatgagaacaacaaccgctttgaggagtatgagtggtgtggacagaagcggatacgggccaccactctcctggaaggtggcttccgaggctctggcttcatcatgtgcagcggcaaagagaacccggacagtgatgctgacttggatgtggatggggatgacactctggagtatgggaagccacaatacacagaggctgatgtcatcccctgcacaggcgaggagcctggtgaagccaaggagagagaggcacttcggggcgcagtcctaaatggcggccctcccagcacgcgcatcacacctgagttctctaaatgggccagtgatgagatgccatccaccagcaatggtgaaagcagcaagcaggaggccatgcagaagacctgcaagaacagcgacatcgagaaaatcaccgaagattcagctgtgaccacgtttgaggctctgaaggctcgggtcagagaacttgaacggcagctatctcgtggggaccgttacaaatgcctcatctgcatggactcgtactcgatgcccctaacgtccatccagtgttggcacgtgcactgcgaggagtgctggctgcggaccctgggtgccaagaagctctgccctcagtgcaacacgatcacagcgcccggagacctgcggaggatctacttgtgagctatctgccccaggcaggcctcgcctccagcagccccacctgcccccagcctctgtgacagtgaccgtctccctttgtacatacttgcacacaggttccccatgtacatacatgcacatactcaaacatgcgtacacacacacacatttacacacgcaggactctggagccagagtagaggctgtggcccaggcactacctgctggctcccacctatggtttgggggccatacctgttccagctctgttcccagggtggggcagggaggtgggggttgggggagtagtggggcacggctcctaagatccagcccccatactgacagacggacagacagacatgcaaacaccagactgaagcacatgtaatatagaccgtgtatgtttacaatgttgtgtataaatgggacaactcctcgccctctacctgtcccctccccctttggttgtatgattttcttcttttttaagaacccctggaagcagcgcctccttcagggttggctgggagctcggcccatccacctcttggggtacctgcctctctctctcctgtggtgtcccttccctctcccatgtgctcggtgttcagtggtgtatatttcttctcccagacatggggcacacgccccaagggacatgatcctctccttagtcttagctcatggggctctttataaggagttggggggtagaggcaggaaatgggaaccgagctgaagcagaggctgagttagggggctagaggacagtgctcctggccacccagcctctgctgagaaccattcctgggattagagctgcctttcccagggaaaaagtgtcgtctccccgaccctcccgtgggccctgtggtgtgatgctgtgtctgtatattctatacaaaggtacttgtcctttccctttgtaaactacatttgacatggattaaaccagtataaacagtt

SEQ ID NO: 348828 - DNA, 1591 bp, Homo sapiens
aaaagccacgctggtacggccctggatgttaaggatcgggccaccactctcctggaaggtggcttccggctctggcttcatcatgtgcagcggcaaagagaacccggacagtgatgctgacttggatgtggatggggatgacactctggagtatgggaagccacaatacacagaggctgatgtcatcccctgcacaggcgaggagcctggtgaagccaaggagagagaggcacttcggggcgcagtcctaaatggcggccctcccagcacgcgcatcacacctgagttctctaaatgggccagtgatgagatgccatccaccagcaatggtgaaagcagcaagcaggaggccatgcagaagacctgcaagaacagcgacatcgagaaaatcaccgaagattcagctgtgaccacgtttgaggctctgaaggctcgggtcagagaacttgaacggcagctatctcgtggggaccgttacaaatgcctcatctgcatggactcgtactcgatgcccctaacgtccatccagtgttggcacgtgcactgcgaggagtgctggctgcggaccctgggtgccaagaagctctgccctcagtgcaacacgatcacagcgcccggagacctgcggaggatctacttgtgagctatctgccccaggcaggcctcgcctccagcagccccacctgcccccagcctctgtgacagtgaccgtctccctttgtacatacttgcacacaggttccccatgtacatacatgcacatactcaaacatgcgtacacacacacacatttacacacgcaggactctggagccagagtagaggctgtggcccaggcactacctgctggctcccacctatggtttgggggccatacctgttccagctctgttcccagggtggggcagggaggtgggggttgggggagtagtggggcacggctcctaagatccagcccccatactgacagacggacagacagacatgcaaacaccagactgaagcacatgtaatatagaccgtgtatgtttacaatgttgtgtataaatgggacaactcctcgccctctacctgtcccctccccctttggttgtatgattttcttcttttttaagaacccctggaagcagcgcctccttcagggttggctgggagctcggcccatccacctcttggggtacctgcctctctctctcctgtggtgtcccttccctctcccatgtgctcggtgttcagtggtgtatatttcttctcccagacatggggcacacgccccaagggacatgatcctctccttagtcttagctcatggggctctttataaggagttggggggtagaggcaggaaatgggaaccgagctgaagcagaggctgagttagggggctagaggacagtgctcctggccacccagcctctgctgagaaccattcctgggattagagctgcctttcccagggaaaaagtgtcgtctccccgaccctcccgtgggccctgtggtgtgatgctgtgtctgtatattctatacaaaggtacttgtcctttccctttgtaaactacatttgacatggattaaaccagtataaacagtt

SEQ ID NO: 348829 - DNA, 1613 bp, Homo sapiens
tcccgggtgcatgatgtggaatcgagtgagataagtttgaggagttgagtgtgtgaagaagggatagggcacatctctggaagtggttcggctctggcttcatcatgtgcagcggcaaagagaacccggacagtgatgctgacttggatgtggatggggatgacactctggagtatgggaagccacaatacacagaggctgatgtcatcccctgcacaggcgaggagcctggtgaagccaaggagagagaggcacttcggggcgcagtcctaaatggcggccctcccagcacgcgcatcacacctgagttctctaaatgggccagtgatgagatgccatccaccagcaatggtgaaagcagcaagcaggaggccatgcagaagacctgcaagaacagcgacatcgagaaaatcaccgaagattcagctgtgaccacgtttgaggctctgaaggctcgggtcagagaacttgaacggcagctatctcgtggggaccgttacaaatgcctcatctgcatggactcgtactcgatgcccctaacgtccatccagtgttggcacgtgcactgcgaggagtgctggctgcggaccctgggtgccaagaagctctgccctcagtgcaacacgatcacagcgcccggagacctgcggaggatctacttgtgagctatctgccccaggcaggcctcgcctccagcagccccacctgcccccagcctctgtgacagtgaccgtctccctttgtacatacttgcacacaggttccccatgtacatacatgcacatactcaaacatgcgtacacacacacacatttacacacgcaggactctggagccagagtagaggctgtggcccaggcactacctgctggctcccacctatggtttgggggccatacctgttccagctctgttcccagggtggggcagggaggtgggggttgggggagtagtggggcacggctcctaagatccagcccccatactgacagacggacagacagacatgcaaacaccagactgaagcacatgtaatatagaccgtgtatgtttacaatgttgtgtataaatgggacaactcctcgccctctacctgtcccctccccctttggttgtatgattttcttcttttttaagaacccctggaagcagcgcctccttcagggttggctgggagctcggcccatccacctcttggggtacctgcctctctctctcctgtggtgtcccttccctctcccatgtgctcggtgttcagtggtgtatatttcttctcccagacatggggcacacgccccaagggacatgatcctctccttagtcttagctcatggggctctttataaggagttggggggtagaggcaggaaatgggaaccgagctgaagcagaggctgagttagggggctagaggacagtgctcctggccacccagcctctgctgagaaccattcctgggattagagctgcctttcccagggaaaaagtgtcgtctccccgaccctcccgtgggccctgtggtgtgatgctgtgtctgtatattctatacaaaggtacttgtcctttccctttgtaaactacatttgacatggattaaaccagtataaacagtt

SEQ ID NO: 348830 - DNA, 1818 bp, Homo sapiens
gatgcacctcaggggtcagccacttgcgtggcccatggcctggcctccgctcagcctggttgccttcatggactgctttgagaagtaggtgtgcatgcctgtcctccctcgtctgtcccttcttaatccctttataactgcacttgtccaggaatctgggctgagtgaggtggagatgaataattaatgtcaggcgcttcagacaccaaatatttgaacagctgcctggtgtttttgctggcaaggacctagcggccaaaatcaggatgttggccgggggtcccactctgtggctctgattggccttagccagcctgttctctcctctgatggacttgtcaggctggataatggggcataggggatgacactctggagtatgggaagccacaatacacagaggctgatgtcatcccctgcacaggcgaggagcctggtgaagccaaggagagagaggcacttcggggcgcagtcctaaatggcggccctcccagcacgcgcatcacacctgagttctctaaatgggccagtgatgagatgccatccaccagcaatggtgaaagcagcaagcaggaggccatgcagaagacctgcaagaacagcgacatcgagaaaatcaccgaagattcagctgtgaccacgtttgaggctctgaaggctcgggtcagagaacttgaacggcagctatctcgtggggaccgttacaaatgcctcatctgcatggactcgtactcgatgcccctaacgtccatccagtgttggcacgtgcactgcgaggagtgctggctgcggaccctgggtgccaagaagctctgccctcagtgcaacacgatcacagcgcccggagacctgcggaggatctacttgtgagctatctgccccaggcaggcctcgcctccagcagccccacctgcccccagcctctgtgacagtgaccgtctccctttgtacatacttgcacacaggttccccatgtacatacatgcacatactcaaacatgcgtacacacacacacatttacacacgcaggactctggagccagagtagaggctgtggcccaggcactacctgctggctcccacctatggtttgggggccatacctgttccagctctgttcccagggtggggcagggaggtgggggttgggggagtagtggggcacggctcctaagatccagcccccatactgacagacggacagacagacatgcaaacaccagactgaagcacatgtaatatagaccgtgtatgtttacaatgttgtgtataaatgggacaactcctcgccctctacctgtcccctccccctttggttgtatgattttcttcttttttaagaacccctggaagcagcgcctccttcagggttggctgggagctcggcccatccacctcttggggtacctgcctctctctctcctgtggtgtcccttccctctcccatgtgctcggtgttcagtggtgtatatttcttctcccagacatggggcacacgccccaagggacatgatcctctccttagtcttagctcatggggctctttataaggagttggggggtagaggcaggaaatgggaaccgagctgaagcagaggctgagttagggggctagaggacagtgctcctggccacccagcctctgctgagaaccattcctgggattagagctgcctttcccagggaaaaagtgtcgtctccccgaccctcccgtgggccctgtggtgtgatgctgtgtctgtatattctatacaaaggtacttgtcctttccctttgtaaactacatttgacatggattaaaccagtataaacagtt

SEQ ID NO: 348831 - DNA, 2040 bp, Homo sapiens
tggtttgtctttgctcactggatttttattaaacactgcaaatagaaaggtatgggtagaccttgcaccagctgcagccaaagagtggacttactcactggcttagttagcaccagtctcctccccaggtgctcttggcaaagcccagtccccaaaggagcaggaggtatttcaagatgagggccagatcaggcactgaataaaaaggccaatggctggcaagaggtcaggatgtgtcagctccactgggaccctgggggctgcagtgaccgtctgcttgttctgtgctttgttttcggtttccccgtgcagctcggattgggaaaatgaaacggaggaagcaagatgaagggcaggtatgtcccctgtgcaaccgccccctggcaggatcggagcaggagatgagtaggcatgtggagcattgcctttctaagagggaaggctcctgcatggctgaggatgatgctgtggacatcgagcatgagaacaacaaccgctttgaggagtatgagtggtgtggacagaagcggatacgggccaccactctcctggaaggtggcttccgaggctctggcttcatcatgtgcagcggcaaagagaacccggacagtgatgctgacttggatgtggatggggatgacactctggagtatgggaagccacaccaaggagagagaggcacttcggggcgcagtcctaaatggcggccctcccagcacgcgcatcacacctgagttctctaaatgggccagtgatgagatgccatccaccagcaatggtgaaagcagcaagcaggaggccatgcagaagacctgcaagaacagcgacatcgagaaaatcaccgaagattcagctgtgaccacgtttgaggctctgaaggctcgggtcagagaacttgaacggcagctatctcgtggggaccgttacaaatgcctcatctgcatggactcgtactcgatgcccctaacgtccatccagtgttggcacgtgcactgcgaggagtgctggctgcggaccctgggtgccaagaagctctgccctcagtgcaacacgatcacagcgcccggagacctgcggaggatctacttgtgagctatctgccccaggcaggcctcgcctccagcagccccacctgcccccagcctctgtgacagtgaccgtctccctttgtacatacttgcacacaggttccccatgtacatacatgcacatactcaaacatgcgtacacacacacacatttacacacgcaggactctggagccagagtagaggctgtggcccaggcactacctgctggctcccacctatggtttgggggccatacctgttccagctctgttcccagggtggggcagggaggtgggggttgggggagtagtggggcacggctcctaagatccagcccccatactgacagacggacagacagacatgcaaacaccagactgaagcacatgtaatatagaccgtgtatgtttacaatgttgtgtataaatgggacaactcctcgccctctacctgtcccctccccctttggttgtatgattttcttcttttttaagaacccctggaagcagcgcctccttcagggttggctgggagctcggcccatccacctcttggggtacctgcctctctctctcctgtggtgtcccttccctctcccatgtgctcggtgttcagtggtgtatatttcttctcccagacatggggcacacgccccaagggacatgatcctctccttagtcttagctcatggggctctttataaggagttggggggtagaggcaggaaatgggaaccgagctgaagcagaggctgagttagggggctagaggacagtgctcctggccacccagcctctgctgagaaccattcctgggattagagctgcctttcccagggaaaaagtgtcgtctccccgaccctcccgtgggccctgtggtgtgatgctgtgtctgtatattctatacaaaggtacttgtcctttccctttgtaaactacatttgacatggattaaaccagtataaacagtt

SEQ ID NO: 348832 - DNA, 1511 bp, Homo sapiens
ggcggcagatcacgtgattagggccaacatggccgccgccgccgcttggagctgaagtgccgccgccgccgggcagccacggggaatccgcccgcatcgccgccctcgccggccgggcggccgtggggcccagagcgccggaggccagggctggggcggcaccgcgcagcggccacggggtcccgttagagcagcgcccggcggctatgccgagagcccggagcggccggaggagcagaggggccggcgggagggaggagtaacctttctgcgagtacgagccaaccggcagacccgactgaatgctcggattgggaaaatgaaacggaggaagcaagatgaagggcagagggaaggctcctgcatggctgaggatgatgctgtggacatcgagcatgagaacaacaaccgctttgaggagtatgagtggtgtggacagaagcggatacgggccaccactctcctggaaggtggcttccgaggctctggcttcatcatgtgcagcggcaaagagaacccggacagtgatgctgacttggatgtggatggggatgacactctggagtatgggaagccacaatacacagaggctgatgtcatcccctgcacaggcgaggagcctggtgaagccaaggagagagaggcacttcggggcgcagtcctaaatggcggccctcccagcacgcgcatcacacctgagttctctaaatgggccagtgatgagatgccatccaccagcaatggtgaaagcagcaagcaggaggccatgcagaagacctgcaagaacagcgacatcgagaaaatcaccgaagattcagctgtgaccacgtttgaggctctgaaggctcgggtcagagaacttgaacggcagctatctcgtggggaccgttacaaatgcctcatctgcatggactcgtactcgatgcccctaacgtccatccagtgttggcacgtgcactgcgaggagtgctggctgcggaccctgggtgccaagaagctctgccctcagtgcaacacgatcacagcgcccggagacctgcggaggatctacttgtgagctatctgccccaggcaggcctcgcctccagcagccccacctgcccccagcctctgtgacagtgaccgtctccctttgtacatacttgcacacaggttccccatgtacatacatgcacatactcaaacatgcgtacacacacacacatttacacacgcaggactctggagccagagtagaggctgtggcccaggcactacctgctggctcccacctatggtttgggggccatacctgttccagctctgttcccagggtggggcagggaggtgggggttgggggagtagtggggcacggctcctaagatccagcccccatactgacagacggacagacagacatgcaaacaccagactgaagcacatgtaatatagaccgtgtatgtttacaaaggtacttgtcctttccctttgtaaactacatttgacatggattaaaccagtataaacagtt

SEQ ID NO: 348833 - DNA, 1504 bp, Homo sapiens
ggcggcagatcacgtgattagggccaacatggccgccgccgccgcttggagctgaagtgccgccgccgccgggcagccacggggaatccgcccgcatcgccgccctcgccggccgggcggccgtggggcccagagcgccggaggccagggctggggcggcaccgcgcagcggccacggggtcccgttagagcagcgcccggcggctatgccgagagcccggagcggccggaggagcagaggggccggcgggagggaggagtaacctttctgcgagtacgagccaaccggcagacccgactgaatgctcggattgggaaaatgaaacggaggaagcaagatgaagggcagagggaaggctcctgcatggctgaggatgatgctgtggacatcgagcatgagaacaacaaccgctttgaggagtatgagtggtgtggacagaagcggatacgggccaccactctcctggaaggtggcttccgaggctctggcttcatcatgtgcagcggcaaagagaacccggacagtgatgctgacttggatgtggatggggatgacactctggagtatgggaagccacaatacacagaggctgatgtcatcccctgcacaggcgaggagcctggtgaagccaaggagagagaggcacttcggggcgcagtcctaaatggcggccctcccagcacgcgcatcacacctgagttctctaaatgggccagtgatgagatgccatccaccagcaatggtgaaagcagcaagcaggaggccatgcagaagacctgcaagaacagcgacatcgagaaaatcaccgaagattcagctgtgaccacgtttgaggctctgaaggctcgggtcagagaacttgaacggcagctatctcgtggggaccgttacaaatgcctcatctgcatggactcgtactcgatgcccctaacgtccatccagtgttggcacgtgcactgcgaggagtgctggctgcggaccctgggtgccaagaagctctgccctcagtgcaacacgatcacagcgcccggagacctgcggaggatctacttgtgagctatctgccccaggcaggcctcgcctccagcagccccacctgcccccagcctctgtgacagtgaccgtctccctttgtacatacttgcacacaggttccccatgtacatacatgcacatactcaaacatgcgtacacacacacacatttacacacgcaggactctggagccagagtagaggctgtggcccaggcactacctgctggctcccacctatggtttgggggccatacctgttccagctctgttcccagggtggggcaggagttgcgtggggcgctatgggccgggctagatccccctatggggcggcgccgcttgcgccgcacgcttgttacgggtggccgtgtgcgtggcacctcgcactgtccctgtggttccttaaccgcggcttgtgggggcactggtgtctcggctccaggggtgtccagctcgcactcgtaagg

SEQ ID NO: 348834 - DNA, 377 bp, Homo sapiens
cttctgaaggatgccatggctccaggcaccccaaaggtaggtggccaattacatgttttcctcctgcccatactaacctaggcctacccagaactggttcctcctgagaaaaaggagcttttctagtatcctcaactatctccagcttttctaatatcctcaactatctccaggtcttgaacatcatcctgaggcctagggctgcgccgtgtgtgtgtgtaagtgtgtgtggtctgtgcatgagtgagagtatgctcatctgacttcctcctcttccagccaggagaggggtcagagccaagaatggcctgggagatgtgggtgacccagacactaagggtgagaagactcaaaggaagaaagtgagctatagcaga

SEQ ID NO: 348835 - DNA, 1161 bp, Homo sapiens
ggcggcagatcacgtgattagggccaacatggccgccgccgccgcttggagctgaagtgccgccgccgccgggcagccacggggaatccgcccgcatcgccgccctcgccggccgggcggccgtggggcccagagcgccggaggccagggctggggcggcaccgcgcagcggccacggggtcccgttagagcagcgcccggcggctatgccgagagcccggagcggccggaggagcagaggggccggcgggagggaggagtaacctttctgcgagtacgagccaaccggcagacccgactgaatgctcggattgggaaaatgaaacggaggaagcaagatgaagggcaggtatgtcccctgtgcaaccgccccctggcaggatcggagcaggagatgagtaggcatgtggagcattgcctttctaagagggaaggctcctgcatggctgaggatgatgctgtggacatcgagcatgagaacaacaaccgctttgaggagtatgagtggtgtggacagaagcggatacgggccaccactctcctggaaggtggcttccgaggctctggcttcatcatgtgcagcggcaaagagaacccggacagtgatgctgacttggatgtggatggggatgacactctggagtatgggaagccacaatacacagaggctgatgtcatcccctgcacaggcgaggagcctggtgaagccaaggagagagaggcacttcggggcgcagtcctaaatggcggccctcccagcacgcgcatcacacctgagttctctaaatgggccagtgatgagatgccatccaccagcaatggtgaaagcagcaagcaggaggccatgcagaagacctgcaagaacagcgacatcgagaaatcaccgacgaattcaaggctgttaaccaccgcatcggaggcgcctctgaaacggggctcggggctaacagaagcaaccctttagcacggcgcacctactctctcgtgggcaccgcgtacaacaggtgcgcaacgctaggcatgggcctcgacaacatgaagtagcccataaggtcatcctcagcgtttgtcacgtgcaccatccagcagctacactgcgttgtagtcccccgttgtcgccaaacagcgaccacgagtacacagtacagtcagcgcgcagtc

SEQ ID NO: 348836 - DNA, 979 bp, Homo sapiens
gggtaccccccttgcgtgttcatagggaaggctcctgcatggctgaggatgatgctgtggacatcgagcatgagaacaacaaccgctttgaggagtatgagtggtgtggacagaagcggatacgggccaccactctcctggaaggtggcttccgaggtacaagcagctgacacgtagacattggcactctggtgccaggcctctgctgggtatccatctgctggaagccaagaggccgaggctggtggctggtcatccatccgttccaccacgtggggactgctgctggtggggctcctttgtgaccgtgctgcctgcctgtgatgtgcatattaaaatggatgtatttgggtggggaaatggaattgtgaggctgcaagctaggagtgacgaaggggggctctcagcttcgggtgatgcattgaaggtgacagccaagccgcgttagcacctgcataaaatattaaagggacggttatgcatttatcactccatccctcttaaggctgataaatgagaatccagcaacctgctgtacacctccagcactgggggccctgagggcttccaggcaaacacattggattttcctcctcctcctcttcagccctatgtcagggaaatcagttacagaggagagtgagttatggcaaaatttgacctcccatgagcttcattggtgaatctaattttagctctgatcccatcccttctccctgggcgccctctgccctgaagcaagaggggcctgggcccagctgctccctccttcccttgggctctccccagttgctacaaaggagtgtgcagggccctgcccatctccagtgccctcccagctccttggaagagcaaggcttgacaccccccaccaggtcagacagcagaattggttgggtgcccagggttagtgacttgttaaactccccagccttgggcaggggaaaaggggagctgtctgcctcttggcctccagctc

SEQ ID NO: 348837 - DNA, 2775 bp, Homo sapiens
ggcggcagatcacgtgattagggccaacatggccgccgccgccgcttggagctgaagtgccgccgccgccgggcagccacggggaatccgcccgcatcgccgccctcgccggccgggcggccgtggggcccagagcgccggaggccagggctggggcggcaccgcgcagcggccacggggtcccgttagagcagcgcccggcggctatgccgagagcccggagcggccggaggagcagaggggccggcgggagggaggagtacatctgcccgcgatcttctcccagacctttctgcgagtacgagccaaccggcagacccgactgaatgctcggattgggaaaatgaaacggaggaagcaagatgaagggcagagggaaggctcctgcatggctgaggatgatgctgtggacatcgagcatgagaacaacaaccgctttgaggagtatgagtggtgtggacagaagcggatacgggccaccactctcctggaaggtggcttccgaggctctggcttcatcatgtgcagcggcaaagagaacccggacagtgatgctgacttggatgtggatggggatgacactctggagtatgggaagccacaatacacagaggctgatgtcatcccctgcacaggcgaggagcctggtgaagccaaggagagagaggcacttcggggcgcagtcctaaatggcggccctcccagcacgcgcatcacacctgagttctctaaatgggccagtgatgagatgccatccaccagcaatggtgaaagcagcaagcaggaggccatgcagaagacctgcaagaacagcgacatcgagaaaatcaccgaagattcagctgtgaccacgtttgaggctctgaaggctcgggtcagagaacttgaacggcagctatctcgtggggaccgttacaaatgcctcatctgcatggactcgtactcgatgcccctaacgtccatccagtgttggcacgtgcactgcgaggagtgctggctgcggaccctggtgaggtggcatgggggtcggggaatgggaggccgctccgggcactgcccagatgtctgtgcttatgcctgagcctgcctgggggaagtggggagcatggcgcaaaggagaacagagccaggagccaggatatttacccgcaggatatttacccccaggctcgctgcctctcctccccaactgcaggtttaggaacttctccccctccatgagttcactgcattctcccttccccgccccggtccccgaaggcccactgcatcacacagactggtgaggcctggggtcaggaggaggctggctgtaggtaaacaggaccagggccttggcccctccccctcccattactaagctccttctgctcctgcccctgttcttcgctcaggagcagccattaaaatgtcgcccggagacagtaataaaaggctcggacgtgggctctgtgtcctgatcaaaggccgcgtgtaatctcgttagggctgcggctgccacagctggacccagccttgttctcattactggggctcctgctgcggggctggccaggcggtttgatcctggcgtccccccaacacaggagcgtgcctgcctgctcacagaagctgcctatgcgtccccagcctgggctgacaggaccaaggtctcagcacacactggtgcagagagacatggctgcaggcccaggtgctcacatgcgcacacatggctcattgtgtagaccagagccctccctgttctccctgcagggtgccaagaagctctgccctcagtgcaacacgatcacagcgcccggagacctgcggaggatctacttgtgagctatctgccccaggcaggcctcgcctccagcagccccacctgcccccagcctctgtgacagtgaccgtctccctttgtacatacttgcacacaggttccccatgtacatacatgcacatactcaaacatgcgtacacacacacacatttacacacgcaggactctggagccagagtagaggctgtggcccaggcactacctgctggctcccacctatggtttgggggccatacctgttccagctctgttcccagggtggggcagggaggtgggggttgggggagtagtggggcacggctcctaagatccagcccccatactgacagacggacagacagacatgcaaacaccagactgaagcacatgtaatatagaccgtgtatgtttacaatgttgtgtataaatgggacaactcctcgccctctacctgtcccctccccctttggttgtatgattttcttcttttttaagaacccctggaagcagcgcctccttcagggttggctgggagctcggcccatccacctcttggggtacctgcctctctctctcctgtggtgtcccttccctctcccatgtgctcggtgttcagtggtgtatatttcttctcccagacatggggcacacgccccaagggacatgatcctctccttagtcttagctcatggggctctttataaggagttggggggtagaggcaggaaatgggaaccgagctgaagcagaggctgagttagggggctagaggacagtgctcctggccacccagcctctgctgagaaccattcctgggattagagctgcctttcccagggaaaaagtgtcgtctccccgaccctcccgtgggccctgtggtgtgatgctgtgtctgtatattctatacaaaggtacttgtcctttccctttgtaaactacatttgacatggattaaaccagtataaacagtt

SEQ ID NO: 348838 - DNA, 2083 bp, Homo sapiens
ggcggcagatcacgtgattagggccaacatggccgccgccgccgcttggagctgaagtgccgccgccgccgggcagccacggggaatccgcccgcatcgccgccctcgccggccgggcggccgtggggcccagagcgccggaggccagggctggggcggcaccgcgcagcggccacggggtcccgttagagcagcgcccggcggctatgccgagagcccggagcggccggaggagcagaggggccggcgggagggaggagtaacctttctgcgagtacgagccaaccggcagacccgactgaatgctcggattgggaaaatgaaacggaggaagcaagatgaagggcaggtatgtcccctgtgcaaccgccccctggcaggatcggagcaggagatgagtaggcatgtggagcattgcctttctaagagggaaggctcctgcatggctgaggatgatgctgtggacatcgagcatgagaacaacaaccgctttgaggagtatgagtggtgtggacagaagcggatacgggccaccactctcctggaaggtggcttccgaggctctggcttcatcatgtgcagcggcaaagagaacccggacagtgatgctgacttggatgtggatggggatgacactctggagtatgggaagccacaatacacagaggctgatgtcatcccctgcacaggcgaggagcctggtgaagccaaggagagagaggcacttcggggcgcagtcctaaatggcggccctcccagcacgcgcatcacacctgagttctctaaatgggccagtgatgagatgccatccaccagcaatggtgaaagcagcaagcaggaggccatgcagaagacctgcaagaacagcgacatcgagaaaatcaccgaagattcagctgtgaccacgtttgaggctctgaaggctcgggtcagagaacttgaacggcagctatctcgtggggaccgttacaaatgcctcatctgcatggactcgtactcgatgcccctaacgtccatccagtgttggcacgtgcactgcgaggagtgctggctgcggaccctgggtgccaagaagctctgccctcagtgcaacacgatcacagcgcccggagacctgcggaggatctacttgtgagctatctgccccaggcaggcctcgcctccagcagccccacctgcccccagcctctgtgacagtgaccgtctccctttgtacatacttgcacacaggttccccatgtacatacatgcacatactcaaacatgcgtacacacacacacatttacacacgcaggactctggagccagagtagaggctgtggcccaggcactacctgctggctcccacctatggtttgggggccatacctgttccagctctgttcccagggtggggcagggaggtgggggttgggggagtagtggggcacggctcctaagatccagcccccatactgacagacggacagacagacatgcaaacaccagactgaagcacatgtaatatagaccgtgtatgtttacaatgttgtgtataaatgggacaactcctcgccctctacctgtcccctccccctttggttgtatgattttcttcttttttaagaacccctggaagcagcgcctccttcagggttggctgggagctcggcccatccacctcttggggtacctgcctctctctctcctgtggtgtcccttccctctcccatgtgctcggtgttcagtggtgtatatttcttctcccagacatggggcacacgccccaagggacatgatcctctccttagtcttagctcatggggctctttataaggagttggggggtagaggcaggaaatgggaaccgagctgaagcagaggctgagttagggggctagaggacagtgctcctggccacccagcctctgctgagaaccattcctgggattagagctgcctttcccagggaaaaagtgtcgtctccccgaccctcccgtgggccctgtggtgtgatgctgtgtctgtatattctatacaaaggtacttgtcctttccctttgtaaactacatttgacatggattaaaccagtataaacagtt

SEQ ID NO: 348839 - DNA, 2090 bp, Homo sapiens
tggtttgtctttgctcactggatttttattaaacactgcaaatagaaaggtatgggtagaccttgcaccagctgcagccaaagagtggacttactcactggcttagttagcaccagtctcctccccaggtgctcttggcaaagcccagtccccaaaggagcaggaggtatttcaagatgagggccagatcaggcactgaataaaaaggccaatggctggcaagaggtcaggatgtgtcagctccactgggaccctgggggctgcagtgaccgtctgcttgttctgtgctttgttttcggtttccccgtgcagctcggattgggaaaatgaaacggaggaagcaagatgaagggcaggtatgtcccctgtgcaaccgccccctggcaggatcggagcaggagatgagtaggcatgtggagcattgcctttctaagagggaaggctcctgcatggctgaggatgatgctgtggacatcgagcatgagaacaacaaccgctttgaggagtatgagtggtgtggacagaagcggatacgggccaccactctcctggaaggtggcttccgaggctctggcttcatcatgtgcagcggcaaagagaacccggacagtgatgctgacttggatgtggatggggatgacactctggagtatgggaagccacaatacacagaggctgatgtcatcccctgcacaggcgaggagcctggtgaagccaaggagagagaggcacttcggggcgcagtcctaaatggcggccctcccagcacgcgcatcacacctgagttctctaaatgggccagtgatgagatgccatccaccagcaatggtgaaagcagcaagcaggaggccatgcagaagacctgcaagaacagcgacatcgagaaaatcaccgaagattcagctgtgaccacgtttgaggctctgaaggctcgggtcagagaacttgaacggcagctatctcgtggggaccgttacaaatgcctcatctgcatggactcgtactcgatgcccctaacgtccatccagtgttggcacgtgcactgcgaggagtgctggctgcggaccctgggtgccaagaagctctgccctcagtgcaacacgatcacagcgcccggagacctgcggaggatctacttgtgagctatctgccccaggcaggcctcgcctccagcagccccacctgcccccagcctctgtgacagtgaccgtctccctttgtacatacttgcacacaggttccccatgtacatacatgcacatactcaaacatgcgtacacacacacacatttacacacgcaggactctggagccagagtagaggctgtggcccaggcactacctgctggctcccacctatggtttgggggccatacctgttccagctctgttcccagggtggggcagggaggtgggggttgggggagtagtggggcacggctcctaagatccagcccccatactgacagacggacagacagacatgcaaacaccagactgaagcacatgtaatatagaccgtgtatgtttacaatgttgtgtataaatgggacaactcctcgccctctacctgtcccctccccctttggttgtatgattttcttcttttttaagaacccctggaagcagcgcctccttcagggttggctgggagctcggcccatccacctcttggggtacctgcctctctctctcctgtggtgtcccttccctctcccatgtgctcggtgttcagtggtgtatatttcttctcccagacatggggcacacgccccaagggacatgatcctctccttagtcttagctcatggggctctttataaggagttggggggtagaggcaggaaatgggaaccgagctgaagcagaggctgagttagggggctagaggacagtgctcctggccacccagcctctgctgagaaccattcctgggattagagctgcctttcccagggaaaaagtgtcgtctccccgaccctcccgtgggccctgtggtgtgatgctgtgtctgtatattctatacaaaggtacttgtcctttccctttgtaaactacatttgacatggattaaaccagtataaacagtt

SEQ ID NO: 348840 - DNA, 1643 bp, Homo sapiens
ggtgaccttttcaggaggaattagattgcctgccaagaccggttagagggagtgataacgccagctgaagaagctgcccagcagacttcagagagaaggaggcagaggcaggatgagcaggctctggcttcatcatgtgcagcggcaaagagaacccggacagtgatgctgacttggatgtggatggggatgacactctggagtatgggaagccacaatacacagaggctgatgtcatcccctgcacaggcgaggagcctggtgaagccaaggagagagaggcacttcggggcgcagtcctaaatggcggccctcccagcacgcgcatcacacctgagttctctaaatgggccagtgatgagatgccatccaccagcaatggtgaaagcagcaagcaggaggccatgcagaagacctgcaagaacagcgacatcgagaaaatcaccgaagattcagctgtgaccacgtttgaggctctgaaggctcgggtcagagaacttgaacggcagctatctcgtggggaccgttacaaatgcctcatctgcatggactcgtactcgatgcccctaacgtccatccagtgttggcacgtgcactgcgaggagtgctggctgcggaccctgggtgccaagaagctctgccctcagtgcaacacgatcacagcgcccggagacctgcggaggatctacttgtgagctatctgccccaggcaggcctcgcctccagcagccccacctgcccccagcctctgtgacagtgaccgtctccctttgtacatacttgcacacaggttccccatgtacatacatgcacatactcaaacatgcgtacacacacacacatttacacacgcaggactctggagccagagtagaggctgtggcccaggcactacctgctggctcccacctatggtttgggggccatacctgttccagctctgttcccagggtggggcagggaggtgggggttgggggagtagtggggcacggctcctaagatccagcccccatactgacagacggacagacagacatgcaaacaccagactgaagcacatgtaatatagaccgtgtatgtttacaatgttgtgtataaatgggacaactcctcgccctctacctgtcccctccccctttggttgtatgattttcttcttttttaagaacccctggaagcagcgcctccttcagggttggctgggagctcggcccatccacctcttggggtacctgcctctctctctcctgtggtgtcccttccctctcccatgtgctcggtgttcagtggtgtatatttcttctcccagacatggggcacacgccccaagggacatgatcctctccttagtcttagctcatggggctctttataaggagttggggggtagaggcaggaaatgggaaccgagctgaagcagaggctgagttagggggctagaggacagtgctcctggccacccagcctctgctgagaaccattcctgggattagagctgcctttcccagggaaaaagtgtcgtctccccgaccctcccgtgggccctgtggtgtgatgctgtgtctgtatattctatacaaaggtacttgtcctttccctttgtaaactacatttgacatggattaaaccagtataaacagtt

SEQ ID NO: 348841 - DNA, 1605 bp, Homo sapiens
gttgtttggttgagttgagacacaacggtgaggagtgagtgggtggagaacggtacggcacactctcctggaagtgggtgcggctctggcttcatcatgtgcagcggcaaagagaacccggacagtgatgctgacttggatgtggatggggatgacactctggagtatgggaagccacaatacacagaggctgatgtcatcccctgcacaggcgaggagcctggtgaagccaaggagagagaggcacttcggggcgcagtcctaaatggcggccctcccagcacgcgcatcacacctgagttctctaaatgggccagtgatgagatgccatccaccagcaatggtgaaagcagcaagcaggaggccatgcagaagacctgcaagaacagcgacatcgagaaaatcaccgaagattcagctgtgaccacgtttgaggctctgaaggctcgggtcagagaacttgaacggcagctatctcgtggggaccgttacaaatgcctcatctgcatggactcgtactcgatgcccctaacgtccatccagtgttggcacgtgcactgcgaggagtgctggctgcggaccctgggtgccaagaagctctgccctcagtgcaacacgatcacagcgcccggagacctgcggaggatctacttgtgagctatctgccccaggcaggcctcgcctccagcagccccacctgcccccagcctctgtgacagtgaccgtctccctttgtacatacttgcacacaggttccccatgtacatacatgcacatactcaaacatgcgtacacacacacacatttacacacgcaggactctggagccagagtagaggctgtggcccaggcactacctgctggctcccacctatggtttgggggccatacctgttccagctctgttcccagggtggggcagggaggtgggggttgggggagtagtggggcacggctcctaagatccagcccccatactgacagacggacagacagacatgcaaacaccagactgaagcacatgtaatatagaccgtgtatgtttacaatgttgtgtataaatgggacaactcctcgccctctacctgtcccctccccctttggttgtatgattttcttcttttttaagaacccctggaagcagcgcctccttcagggttggctgggagctcggcccatccacctcttggggtacctgcctctctctctcctgtggtgtcccttccctctcccatgtgctcggtgttcagtggtgtatatttcttctcccagacatggggcacacgccccaagggacatgatcctctccttagtcttagctcatggggctctttataaggagttggggggtagaggcaggaaatgggaaccgagctgaagcagaggctgagttagggggctagaggacagtgctcctggccacccagcctctgctgagaaccattcctgggattagagctgcctttcccagggaaaaagtgtcgtctccccgaccctcccgtgggccctgtggtgtgatgctgtgtctgtatattctatacaaaggtacttgtcctttccctttgtaaactacatttgacatggattaaaccagtataaacagtt

SEQ ID NO: 348842 - DNA, 2194 bp, Homo sapiens
ggcggcagatcacgtgattagggccaacatggccgccgccgccgcttggagctgaagtgccgccgccgccgggcagccacggggaatccgcccgcatcgccgccctcgccggccgggcggccgtggggcccagagcgccggaggccagggctggggcggcaccgcgcagcggccacggggtcccgttagagcagcgcccggcggctatgccgagagcccggagcggccggaggagcagaggggccggcgggagggaggagtaacctttctgcgagtacgagccaaccggcagacccgactgaatgctcggattgggaaaatgaaacggaggaagcaagatgaagggcagagggaaggctcctgcatggctgaggatgatgctgtggacatcgagcatgagaacaacaaccgctttgaggagtatgagtggtgtggacagaagcggatacgggccaccactctcctggaaggtggcttccgaggctctggcttcatcatgtgcagcggcaaagagaacccggacagtgatgctgacttggatgtggatggggatgacactctggagtatgggaagccacaatacacagaggctgatgtcatcccctgcacaggcgaggagcctggtgaagccaaggagagagaggcacttcggggcgcagtcctaaatggcggccctcccagcacgcgcatcacacctgagttctctaaatgggccagtgatgagatgccatccaccagcaatggtgaaagcagcaagcaggaggccatgcagaagacctgcaagaacagcgacatcgagaaaatcaccgaagattcagctgtgaccacgtttgaggctctgaaggctcgggtcagagaacttgaacggcagctatctcgtggggaccgttacaaatgcctcatctgcatggactcgtactcgatgcccctaacgtccatccagtgttggcacgtgcactgcgaggagtgctggctgcggaccctgggtgccaagaagctctgccctcagtgcaacacgatcacagcgcccggagacctgcggaggatctacttgtgagctatctgccccaggcaggcctcgcctccagcagccccacctgcccccagcctctgtgacagtgaccgtctccctttgtacatacttgcacacaggttccccatgtacatacatgcacatactcaaacatgcgtacacacacacacatttacacacgcaggactctggagccagagtagaggctgtggcccaggcactacctgctggctcccacctatggtttgggggccatacctgttccagctctgttcccagggtggggcagggaggtgggggttgggggagtagtggggcacggctcctaagatccagcccccatactgacagacggacagacagacatgcaaacaccagactgaagcacatgtaatatagaccgtgtatgtttacaatgttgtgtataaatgggacaactcctcgccctctacctgtcccctccccctttggttgtatgattttcttcttttttaagaacccctggaagcagcgcctccttcagggttggctgggagctcggcccatccacctcttggggtacctgcctctctctctcctgtggtgtcccttccctctcccatgtgctcggtgttcagtggtgtatatttcttctcccagacatggggcacacgccccaagggacatgatcctctccttagtcttagctcatggggctctttataaggagttggggggtagaggcaggaaatgggaaccgagctgaagcagaggctgagttagggggctagaggacagtgctcctggccacccagcctctgctgagaaccattcctgggattagagctgcctttcccagggaaaaagtgtcgtctccccgaccctcccgtgggccctgtggtgtgatgctgtgtctgtatattctatacaaaggtacttgtcctttccctttgtaaactacatttgacatggattaaaccagtataaacagttaaaaaaaacaaaaaaaaacttccgaagggcctcaaaatacacggagcgtgcggacaacacacggactcggcaaggcgaccaggggcccaaagaggatacatggaccacactatcccgggacaaaggcgacactcgcccgaccccctatagagagcccaatcaatcagaaagcccaggaaactcataata

SEQ ID NO: 348843 - DNA, 1621 bp, Homo sapiens
ggcggcagatcacgtgattagggccaacatggccgccgccgccgcttggagctgaagtgccgccgccgccgggcagccacggggaatccgcccgcatcgccgccctcgccggccgggcggccgtggggcccagagcgccggaggccagggctggggcggcaccgcgcagcggccacggggtcccgttagagcagcgcccggcggctatgccgagagcccggagcggccggaggagcagaggggccggcgggagggaggagtaacctttctgcgagtacgagccaaccggcagacccgactgaatgctcggattgggaaaatgaaacggaggaagcaagatgaagggcagagggaaggctcctgcatggctgaggatgatgctgtggacatcgagcatgagaacaacaaccgctttgaggagtatgagtggtgtggacagaagcggatacgggccaccactctcctggaaggtggcttccgaggctctggcttcatcatgtgcagcggcaaagagaacccggacagtgatgctgacttggatgtggatggggatgacactctggagtatgggaagccacaatacacagaggctgatgtcatcccctgcacaggcgaggagcctggtgaagccaaggagagagaggcacttcggggcgcagtcctaaatggcggccctcccagcacgcgcatcacacctgagttctctaaatgggccagtgatgagatgccatccaccagcaatggtgaaagcagcaagcaggaggccatgcagaagacctgcaagaacagcgacatcgagaaaatcaccgaagattcagctgtgaccacgtttgaggctctgaaggctcgggtcagagaacttgaacggcagctatctcgtggggaccgttacaaatgcctcatctgcatggactcgtactcgatgcccctaacgtccatccagtgttggcacgtgcactgcgaggagtgctggctgcggaccctgggtgccaagaagctctgccctcagtgcaacacgatcacagcgcccggagacctgcggaggatctacttgtgagctatctgccccaggcaggcctcgcctccagcagccccacctgcccccagcctctgtgacagtgaccgtctccctttgtacatacttgcacacaggttccccatgtacatacatgcacatactcaaacatgcgtacacacacacacatttacacacgcaggactctggagccagagtagaggctgtggcccaggcactacctgctggctcccacctatggtttgggggccatacctgttccagctctgttcccagggtggggcagggaggtgggggttgggggagtagtggggcacggctcctaagatccagcccccatactgacagacggacagaaagcagaggctgagttagggggctagaggacagtgctcctggccacccagcctctgctgagaaccattcctgggattagagctgcctttcccagggaaaaagtgtcgtctccccgaccctcccgtgggccctgtggtgtgatgctgtgtctgtatattctatacaaaggtacttgtcctttccctttgtaaactacatttgacatggattaaaccagtataaacagtt

SEQ ID NO: 348844 - DNA, 1390 bp, Homo sapiens
tggtttgtctttgctcactggatttttattaaacactgcaaatagaaaggtatgggtagaccttgcaccagctgcagccaaagagtggacttactcactggcttagttagcaccagtctcctccccaggtgctcttggcaaagcccagtccccaaaggagcaggaggtatttcaagatgagggccagatcaggcactgaataaaaaggccaatggctggcaagaggtcaggatgtgtcagctccactgggaccctgggggctgcagtgaccgtctgcttgttctgtgctttgttttcggtttccccgtgcagctcggattgggaaaatgaaacggaggaagcaagatgaagggcaggtatgtcccctgtgcaaccgccccctggcaggatcggagcaggagatgagtaggcatgtggagcattgcctttctaagagggaaggctcctgcatggctgaggatgatgctgtggacatcgagcatgagaacaacaaccgctttgaggagtatgagtggtgtggacagaagcggatacgggccaccactctcctggaaggtggcttccgaggtacaagcagctgacacgtagacattggcactctggtgccaggcctctgctgggtatccatctgctggaagccaagaggccgaggctggtggctggtcatccatccgttccaccacgtggggactgctgctggtggggctcctttgtgaccgtgctgcctgcctgtgatgtgcatattaaaatggatgtatttgggtggggaaatggaattgtgaggctgcaagctaggagtgacgaaggggggctctcagcttcgggtgatgcattgaaggtgacagccaagccgcgttagcacctgcataaaatattaaagggacggttatgcatttatcactccatccctcttaaggctgataaatgagaatccagcaacctgctgtacacctccagcactgggggccctgagggcttccaggcaaacacattggattttcctcctcctcctcttcagccctatgtcagggaaatcagttacagaggagagtgagttatggcaaaatttgacctcccatgagcttcattggtgaatctaattttagctctgatcccatcccttctccctgggcgccctctgccctgaagcaagaggggcctgggcccagctgctccctccttcccttgggctctccccagttgctacaaaggagtgtgcagggccctgcccatctccagtgccctcccagctccttggaagagcaaggcttgacaccccccaccaggtcagacagcagaattggttgggtgcccagggttagtgacttgttaaactccccagccttgggcaggggaaaaggggagctgtctgcctcttggcctccagctc

SEQ ID NO: 348845 - DNA, 2607 bp, Homo sapiens
aggctcctagtcccgcctccaggccccttcccgcgtcgcgacgcacgctgccccggaaggccgcggcgctgtagtgcggcgtgggagccccaggttctttagtggaagaacgcgaagcgaggatgagtgatccgtggaggcagtaacaggcgcggcgagggagaagtgattcccgaagaatcaaggctgggccggacccggtggcctggcaacagggtaataagagaaatgaagccaacaggtacagacccaaggatcttatctatagctgctgaagttgcaaaaagccctgagcagaatgtccctgttatactgttgaagttaaaagaaataataaacatcacacctttaggaagctcagagttgaagaaaatcaaacaagatatatattgttatgatctcattcaatattgcctcttggtcctcagtcaagattattctcgaatccagggtggttggactacaatttcccagcttacacagatattaagccattgctgtgtgggcttggagccaggagaagatgcagaggaattttacaatgaattacttccatcagctgcagaaaattttctagttttggggagacaattacaaacatgttttatcaatgcagctaaggctgaagaaaaagatgaattactacactttttccaaattgtgactgattctctcttctggcttttgggaggccatgttgaacttattcagaatgtactacaaagtgatcatttcttacatttactgcaagctgacaatgtccaaataggatctgcagtcatgatgatgctacagaatatattacagatcaacagtggtgatttactcagaataggaagaaaagccctgtattcaattttagatgaagttattttcaagcttttttcaactcctagtccagttataagaagtactgctacaaaactcctactgttgatggctgaatcccatcaggaaattttgattttactgagacaaagtacctgctacaaaggactcagacgtctactaagtaaacaggaaactgggactgaattcagtcaagaacttagacagcttgttggccttttaagcccaatggtctatcaggaagtagaagagcagaaactacatcaagcagcatgcttgattcaagcctattggaagggttttcagacaagaaagagattaaagaagcttccatctgctgtgattgctttgcagaggagtttcagatccaaacgatcaaagatgttgctggagataaataggcagaaggaagaagaggacctcaaattacaattgcaacttcaaagacagagagccatgagactttcccgagaattgcagctgagtatgctcgaaatagttcatccaggtcaggtggagaaacactatcgggaaatggaagagaaatcagcactgattatccagaaacattggagagggtacagggaaaggaaaaattttcaccaacagaggcagtctctcatagagtataaagcagctgtcacacttcaaagagcagcgcttaaattcctagcgaagtgccgtaagaaaaagaaactatttgctccttggcgaggactccaagaactcactgatgcacgccgagttgaactgaagaaacgagtggatgactatgtcagaagacatttgggctctccaatgtcagatgtggtcagtagggagctccatgcccaagctcaagaacgactgcaacactactttatgggcagggccctagaagagcgagcccagcagcacagagaagctctgatagcacagatcagcaccaacgttgaacagctaatgaaggcaccaagtctgaaggaggcagaagggaaagaacctgagctcttcctaagtagatccaggcctgtggcagccaaggccaagcaggcccatctcacaaccctgaagcacatacaagcaccctggtggaagaagcttggagaagaatctggagatgagattgatgttccaaaggatgagcttagtatagaattagaaaatttattcattggtggaaccaaaccaccttagtgagtaaccctaagaattgacacaaatctcatattttaggagattatattggttctgcctctggcatgctggtagactagggccatcctaacttattattttccagaggttctcctccagacaagacctgcagtaagcaaagagttatattctacctctctctcaattttctttttcttttctctgtatcctcatccttagccacacacagatttgtgtggcttttattgtagaactaaacttagcatagtgttctgttgtttacatgaagtgtgtttttctttggtttcttctgttttccaactaaatatttttttctaaataaatattttcaacaattgatttgaaaaatttgtcaggattatttcaacttttcacatttgttatctgaaattcctatttcctgttaacataggaggtgtgtgcagactttattaatgtgaggaaaagaaatgctcaattgaaggacatttccctgttttctataaagcaatggttgaactcattttctattttgttatttctaaaaggaactgcataccaaaaaaatgcattctttctattaaactgtgagaactacat

SEQ ID NO: 348846 - DNA, 1970 bp, Homo sapiens
aggctcctagtcccgcctccaggccccttcccgcgtcgcgacgcacgctgccccggaaggccgcggcgctgtagtgcggcgtgggagccccaggttctttagtggaagaacgcgaagcgaggatgagtgatccgtggaggcagtaacaggcgcggcgagggagaagtgattcccgaagaatcaaggctgggccggacccggtggcctggcaacagggtaataagagaaatgaagccaacaggtacagacccaaggatcttatctatagctgctgaagttgcaaaaagccctgagcagaatgtccctgttatactgttgaagttaaaagaaataataaacatcacacctttaggaagctcagagttgaagaaaatcaaacaagatatatattgttatgatctcattcaatattgcctcttggtcctcagtcaagattattctcgaatccagggtggttggactacaatttcccagcttacacagatattaagccattgctgtgtgggcttggagccaggagaagatgcagaggaattttacaatgaattacttccatcagctgcagaaaattttctagttttggggagacaattacaaacatgttttatcaatgcagctaaggctgaagaaaaagatgaattactacactttttccaaattgtgactgattctctcttctggcttttgggaggccatgttgaacttattcagaatgtactacaaagtgatcatttcttacatttactgcaagctgacaatgtccaaataggatctgcagtcatgatgatgctacagaatatattacagatcaacagcagatccaaacgatcaaagatgttgctggagataaataggcagaaggaagaagaggacctcaaattacaattgcaacttcaaagacagagagccatgagactttcccgagaattgcagctgagtatgctcgaaatagttcatccaggtcaggtggagaaacactatcgggaaatggaagagaaatcagcactgattatccagaaacattggagagggtacagggaaaggaaaaattttcaccaacagaggcagtctctcatagagtataaagcagctgtcacacttcaaagagcagcgcttaaattcctagcgaagtgccgtaagaaaaagaaactatttgctccttggcgaggactccaagaactcactgatgcacgccgagttgaactgaagaaacgagtggatgactatgtcagaagacatttgggctctccaatgtcagatgtggtcagtagggagctccatgcccaagctcaagaacgactgcaacactactttatgggcagggccctagaagagcgagcccagcagcacagagaagctctgatagcacagatcagcaccaacgttgaacagctaatgaaggcaccaagtctgaaggaggcagaagggaaagaacctgagctcttcctaagtagatccaggcctgtggcagccaaggccaagcaggcccatctcacaaccctgaagcacatacaagcaccctggtggaagaagcttggagaagaatctggagatgagattgatgttccaaaggatgagcttagtatagaattagaaaatttattcattggtggaaccaaaccaccttagtgagtaaccctaagaattgacacaaatctcatattttaggagattatattggttctgcctctggcatgctggtagactagggccatcctaacttattattttccagaggttctcctccagacaagacctgcagtaagcaaagagttatattctacctctctctcaattttctttttcttttctctgtatcctcatccttagccacacacagatttgtgtggcttttattgtagaactaaacttagcatagtgttctgttgtttacatgaagtgtgtttttctttggtttcttctgttttccaactaaatatttttttctaaataaatattttcaacaattg

SEQ ID NO: 348847 - DNA, 2557 bp, Homo sapiens
tcatcgctgtctggaacagcgatgactgagtgcggcgccccaggttctttagtggaagaacgcgaagcgaggatgagtgatccgtggaggcagtaacaggcgcggcgagggagaagtgattcccgaagaatcaaggctgggccggacccggtggcctggcaacagggtaataagagaaatgaagccaacaggtacagacccaaggatcttatctatagctgctgaagttgcaaaaagccctgagcagaatgtccctgttatactgttgaagttaaaagaaataataaacatcacacctttaggaagctcagagttgaagaaaatcaaacaagatatatattgttatgatctcattcaatattgcctcttggtcctcagtcaagattattctcgaatccagggtggttggactacaatttcccagcttacacagatattaagccattgctgtgtgggcttggagccaggagaagatgcagaggaattttacaatgaattacttccatcagctgcagaaaattttctagttttggggagacaattacaaacatgttttatcaatgcagctaaggctgaagaaaaagatgaattactacactttttccaaattgtgactgattctctcttctggcttttgggaggccatgttgaacttattcagaatgtactacaaagtgatcatttcttacatttactgcaagctgacaatgtccaaataggatctgcagtcatgatgatgctacagaatatattacagatcaacagtggtgatttactcagaataggaagaaaagccctgtattcaattttagatgaagttattttcaagcttttttcaactcctagtccagttataagaagtactgctacaaaactcctactgttgatggctgaatcccatcaggaaattttgattttactgagacaaagtacctgctacaaaggactcagacgtctactaagtaaacaggaaactgggactgaattcagtcaagaacttagacagcttgttggccttttaagcccaatggtctatcaggaagtagaagagcagaaactacatcaagcagcatgcttgattcaagcctattggaagggttttcagacaagaaagagattaaagaagcttccatctgctgtgattgctttgcagaggagtttcagatccaaacgatcaaagatgttgctggagataaataggcagaaggaagaagaggacctcaaattacaattgcaacttcaaagacagagagccatgagactttcccgagaattgcagctgagtatgctcgaaatagttcatccaggtcaggtggagaaacactatcgggaaatggaagagaaatcagcactgattatccagaaacattggagagggtacagggaaaggaaaaattttcaccaacagaggcagtctctcatagagtataaagcagctgtcacacttcaaagagcagcgcttaaattcctagcgaagtgccgtaagaaaaagaaactatttgctccttggcgaggactccaagaactcactgatgcacgccgagttgaactgaagaaacgagtggatgactatgtcagaagacatttgggctctccaatgtcagatgtggtcagtagggagctccatgcccaagctcaagaacgactgcaacactactttatgggcagggccctagaagagcgagcccagcagcacagagaagctctgatagcacagatcagcaccaacgttgaacagctaatgaaggcaccaagtctgaaggaggcagaagggaaagaacctgagctcttcctaagtagatccaggcctgtggcagccaaggccaagcaggcccatctcacaaccctgaagcacatacaagcaccctggtggaagaagcttggagaagaatctggagatgagattgatgttccaaaggatgagcttagtatagaattagaaaatttattcattggtggaaccaaaccaccttagtgagtaaccctaagaattgacacaaatctcatattttaggagattatattggttctgcctctggcatgctggtagactagggccatcctaacttattattttccagaggttctcctccagacaagacctgcagtaagcaaagagttatattctacctctctctcaattttctttttcttttctctgtatcctcatccttagccacacacagatttgtgtggcttttattgtagaactaaacttagcatagtgttctgttgtttacatgaagtgtgtttttctttggtttcttctgttttccaactaaatatttttttctaaataaatattttcaacaattgatttgaaaaatttgtcaggattatttcaacttttcacatttgttatctgaaattcctatttcctgttaacataggaggtgtgtgcagactttattaatgtgaggaaaagaaatgctcaattgaaggacatttccctgttttctataaagcaatggttgaactcattttctattttgttatttctaaaaggaactgcataccaaaaaaatgcattctttctattaaactgtgagaactacat

SEQ ID NO: 348848 - DNA, 2444 bp, Homo sapiens
aggctcctagtcccgcctccaggccccttcccgcgtcgcgacgcacgctgccccggaaggccgcggcgctgtagtgcggcgtgggagccccaggttctttagtggaagaacgcgaagcgaggatgagtgatccgtggaggcagtaacaggcgcggcgagggagaagtgattcccgaagaatcaaggctgggccggacccggtggcctggcaacagggtaataagagaaatgaagccaacaggtacagacccaaggatcttatctatagctgctgaagttgcaaaaagccctgagcagaatgtccctgttatactgttgaagttaaaagccattgctgtgtgggcttggagccaggagaagatgcagaggaattttacaatgaattacttccatcagctgcagaaaattttctagttttggggagacaattacaaacatgttttatcaatgcagctaaggctgaagaaaaagatgaattactacactttttccaaattgtgactgattctctcttctggcttttgggaggccatgttgaacttattcagaatgtactacaaagtgatcatttcttacatttactgcaagctgacaatgtccaaataggatctgcagtcatgatgatgctacagaatatattacagatcaacagtggtgatttactcagaataggaagaaaagccctgtattcaattttagatgaagttattttcaagcttttttcaactcctagtccagttataagaagtactgctacaaaactcctactgttgatggctgaatcccatcaggaaattttgattttactgagacaaagtacctgctacaaaggactcagacgtctactaagtaaacaggaaactgggactgaattcagtcaagaacttagacagcttgttggccttttaagcccaatggtctatcaggaagtagaagagcagaaactacatcaagcagcatgcttgattcaagcctattggaagggttttcagacaagaaagagattaaagaagcttccatctgctgtgattgctttgcagaggagtttcagatccaaacgatcaaagatgttgctggagataaataggcagaaggaagaagaggacctcaaattacaattgcaacttcaaagacagagagccatgagactttcccgagaattgcagctgagtatgctcgaaatagttcatccaggtcaggtggagaaacactatcgggaaatggaagagaaatcagcactgattatccagaaacattggagagggtacagggaaaggaaaaattttcaccaacagaggcagtctctcatagagtataaagcagctgtcacacttcaaagagcagcgcttaaattcctagcgaagtgccgtaagaaaaagaaactatttgctccttggcgaggactccaagaactcactgatgcacgccgagttgaactgaagaaacgagtggatgactatgtcagaagacatttgggctctccaatgtcagatgtggtcagtagggagctccatgcccaagctcaagaacgactgcaacactactttatgggcagggccctagaagagcgagcccagcagcacagagaagctctgatagcacagatcagcaccaacgttgaacagctaatgaaggcaccaagtctgaaggaggcagaagggaaagaacctgagctcttcctaagtagatccaggcctgtggcagccaaggccaagcaggcccatctcacaaccctgaagcacatacaagcaccctggtggaagaagcttggagaagaatctggagatgagattgatgttccaaaggatgagcttagtatagaattagaaaatttattcattggtggaaccaaaccaccttagtgagtaaccctaagaattgacacaaatctcatattttaggagattatattggttctgcctctggcatgctggtagactagggccatcctaacttattattttccagaggttctcctccagacaagacctgcagtaagcaaagagttatattctacctctctctcaattttctttttcttttctctgtatcctcatccttagccacacacagatttgtgtggcttttattgtagaactaaacttagcatagtgttctgttgtttacatgaagtgtgtttttctttggtttcttctgttttccaactaaatatttttttctaaataaatattttcaacaattgatttgaaaaatttgtcaggattatttcaacttttcacatttgttatctgaaattcctatttcctgttaacataggaggtgtgtgcagactttattaatgtgaggaaaagaaatgctcaattgaaggacatttccctgttttctataaagcaatggttgaactcattttctattttgttatttctaaaaggaactgcataccaaaaaaatgcattctttctattaaactgtgagaactacat

SEQ ID NO: 348849 - DNA, 3275 bp, Homo sapiens
tgtgttgaaggtcagtgcttcactaggagggctcacaggactcagaatatagtgtacttacagctatgatttattacagtgaagggaaataaagcaaaatcagcaaagggaaaaagcatattgggggaaatcaggtacaaacttctgagttctctcccagtggagttacgtaggatatgcttaattcctccagcaaccagctatgacaacatgtttgaagtgttgtctaccaaggaagctcaactagacactcagtgatcagaatttttattggaggatggccacataggcaccctctgtataggtactctcgactggcatgtaccagaattctaagactcctggaaggaaggcgggtattcagcatgaaccacattgtttttcataaacagttttaggcacagggagccactcttaccagagaatggcagaaaccctcctgaaatctaagttctagatgccagtcaaaggccaaccttgtaagcacacctttgaaagtatagtagtcttaggcctgtcatgttagctcttttttgcagttcttcttgtgtgattaaaggaagttaattcctatcctagaattattgtgcagattagagagagaatgtgaagctcctatcacagttcctgactcttagtgagtgcacaataaacaatacctgctatagctgttacatgtgaggtataggaatcttgagctcttttacactggttagaaaaaccagttttctataaggaagaaatgaaaaaatctacattctgcctctcaaacaaggcaagaaaagctgtttttatttatattgaaattatatttcaaacattatttaggtagtgaacatttcctggctttttgacctttattctctgattctgttaaaatataggtaataagagaaatgaagccaacaggtacagacccaaggatcttatctatagctgctgaagttgcaaaaagccctgagcagaatgtccctgttatactgttgaagttaaaagaaataataaacatcacacctttaggaagctcagagttgaagaaaatcaaacaagatatatattgttatgatctcattcaatattgcctcttggtcctcagtcaagattattctcgaatccagggtggttggactacaatttcccagcttacacagatattaagccattgctgtgtgggcttggagccaggagaagatgcagaggaattttacaatgaattacttccatcagctgcagaaaattttctagttttggggagacaattacaaacatgttttatcaatgcagctaaggctgaagaaaaagatgaattactacactttttccaaattgtgactgattctctcttctggcttttgggaggccatgttgaacttattcagaatgtactacaaagtgatcatttcttacatttactgcaagctgacaatgtccaaataggatctgcagtcatgatgatgctacagaatatattacagatcaacagtggtgatttactcagaataggaagaaaagccctgtattcaattttagatgaagttattttcaagcttttttcaactcctagtccagttataagaagtactgctacaaaactcctactgttgatggctgaatcccatcaggaaattttgattttactgagacaaagtacctgctacaaaggactcagacgtctactaagtaaacaggaaactgggactgaattcagtcaagaacttagacagcttgttggccttttaagcccaatggtctatcaggaagtagaagagcagaaactacatcaagcagcatgcttgattcaagcctattggaagggttttcagacaagaaagagattaaagaagcttccatctgctgtgattgctttgcagaggagtttcagatccaaacgatcaaagatgttgctggagataaataggcagaaggaagaagaggacctcaaattacaattgcaacttcaaagacagagagccatgagactttcccgagaattgcagctgagtatgctcgaaatagttcatccaggtcaggtggagaaacactatcgggaaatggaagagaaatcagcactgattatccagaaacattggagagggtacagggaaaggaaaaattttcaccaacagaggcagtctctcatagagtataaagcagctgtcacacttcaaagagcagcgcttaaattcctagcgaagtgccgtaagaaaaagaaactatttgctccttggcgaggactccaagaactcactgatgcacgccgagttgaactgaagaaacgagtggatgactatgtcagaagacatttgggctctccaatgtcagatgtggtcagtagggagctccatgcccaagctcaagaacgactgcaacactactttatgggcagggccctagaagagcgagcccagcagcacagagaagctctgatagcacagatcagcaccaacgttgaacagctaatgaaggcaccaagtctgaaggaggcagaagggaaagaacctgagctcttcctaagtagatccaggcctgtggcagccaaggccaagcaggcccatctcacaaccctgaagcacatacaagcaccctggtggaagaagcttggagaagaatctggagatgagattgatgttccaaaggatgagcttagtatagaattagaaaatttattcattggtggaaccaaaccaccttagtgagtaaccctaagaattgacacaaatctcatattttaggagattatattggttctgcctctggcatgctggtagactagggccatcctaacttattattttccagaggttctcctccagacaagacctgcagtaagcaaagagttatattctacctctctctcaattttctttttcttttctctgtatcctcatccttagccacacacagatttgtgtggcttttattgtagaactaaacttagcatagtgttctgttgtttacatgaagtgtgtttttctttggtttcttctgttttccaactaaatatttttttctaaataaatattttcaacaattgatttgaaaaatttgtcaggattatttcaacttttcacatttgttatctgaaattcctatttcctgttaacataggaggtgtgtgcagactttattaatgtgaggaaaagaaatgctcaattgaaggacatttccctgttttctataaagcaatggttgaactcattttctattttgttatttctaaaaggaactgcataccaaaaaaatgcattctttctattaaactgtgagaactacat

SEQ ID NO: 348850 - DNA, 2301 bp, Homo sapiens
tcatcgctgtctggaacagcgatgactgagtgcggcgccccaggttctttagtggaagaacgcgaagcgaggatgagtgatccgtggaggcagtaacaggcgcggcgagggagaagtgattcccgaagaatcaaggctgggccggacccggtggcctggcaacagggtaataagagaaatgaagccaacaggtacagacccaaggatcttatctatagctgctgaagttgcaaaaagccctgagcagaatgtccctgttatactgttgaagttaaaagccattgctgtgtgggcttggagccaggagaagatgcagaggaattttacaatgaattacttccatcagctgcagaaaattttctagttttggggagacaattacaaacatgttttatcaatgcagctaaggtactacaaagtgatcatttcttacatttactgcaagctgacaatgtccaaataggatctgcagtcatgatgatgctacagaatatattacagatcaacagtggtgatttactcagaataggaagaaaagccctgtattcaattttagatgaagttattttcaagcttttttcaactcctagtccagttataagaagtactgctacaaaactcctactgttgatggctgaatcccatcaggaaattttgattttactgagacaaagtacctgctacaaaggactcagacgtctactaagtaaacaggaaactgggactgaattcagtcaagaacttagacagcttgttggccttttaagcccaatggtctatcaggaagtagaagagcagaaactacatcaagcagcatgcttgattcaagcctattggaagggttttcagacaagaaagagattaaagaagcttccatctgctgtgattgctttgcagaggagtttcagatccaaacgatcaaagatgttgctggagataaataggcagaaggaagaagaggacctcaaattacaattgcaacttcaaagacagagagccatgagactttcccgagaattgcagctgagtatgctcgaaatagttcatccaggtcaggtggagaaacactatcgggaaatggaagagaaatcagcactgattatccagaaacattggagagggtacagggaaaggaaaaattttcaccaacagaggcagtctctcatagagtataaagcagctgtcacacttcaaagagcagcgcttaaattcctagcgaagtgccgtaagaaaaagaaactatttgctccttggcgaggactccaagaactcactgatgcacgccgagttgaactgaagaaacgagtggatgactatgtcagaagacatttgggctctccaatgtcagatgtggtcagtagggagctccatgcccaagctcaagaacgactgcaacactactttatgggcagggccctagaagagcgagcccagcagcacagagaagctctgatagcacagatcagcaccaacgttgaacagctaatgaaggcaccaagtctgaaggaggcagaagggaaagaacctgagctcttcctaagtagatccaggcctgtggcagccaaggccaagcaggcccatctcacaaccctgaagcacatacaagcaccctggtggaagaagcttggagaagaatctggagatgagattgatgttccaaaggatgagcttagtatagaattagaaaatttattcattggtggaaccaaaccaccttagtgagtaaccctaagaattgacacaaatctcatattttaggagattatattggttctgcctctggcatgctggtagactagggccatcctaacttattattttccagaggttctcctccagacaagacctgcagtaagcaaagagttatattctacctctctctcaattttctttttcttttctctgtatcctcatccttagccacacacagatttgtgtggcttttattgtagaactaaacttagcatagtgttctgttgtttacatgaagtgtgtttttctttggtttcttctgttttccaactaaatatttttttctaaataaatattttcaacaattgatttgaaaaatttgtcaggattatttcaacttttcacatttgttatctgaaattcctatttcctgttaacataggaggtgtgtgcagactttattaatgtgaggaaaagaaatgctcaattgaaggacatttccctgttttctataaagcaatggttgaactcattttctattttgttatttctaaaaggaactgcataccaaaaaaatgcattctttctattaaactgtgagaactacat

SEQ ID NO: 348851 - DNA, 2305 bp, Homo sapiens
tttgtagcagtacttcttataactggactaggagttgaaaaaagcttgaaaataacttcatctaaaattgaatacagggcttttcttcctattctgagtaaatcaccactgttgatctgtaatatattctgtagcatcatcatgactgcagatcctatttggacattgtcagcttgcacagatattaagccattgctgtgtgggcttggagccaggagaagatgcagaggaattttacaatgaattacttccatcagctgcagaaaattttctagttttggggagacaattacaaacatgttttatcaatgcagctaaggctgaagaaaaagatgaattactacactttttccaaattgtgactgattctctcttctggcttttgggaggccatgttgaacttattcagaatgtactacaaagtgatcatttcttacatttactgcaagctgacaatgtccaaataggatctgcagtcatgatgatgctacagaatatattacagatcaacagtggtgatttactcagaataggaagaaaagccctgtattcaattttagatgaagttattttcaagcttttttcaactcctagtccagttataagaagtactgctacaaaactcctactgttgatggctgaatcccatcaggaaattttgattttactgagacaaagtacctgctacaaaggactcagacgtctactaagtaaacaggaaactgggactgaattcagtcaagaacttagacagcttgttggccttttaagcccaatggtctatcaggaagtagaagagcagaaactacatcaagcagcatgcttgattcaagcctattggaagggttttcagacaagaaagagattaaagaagcttccatctgctgtgattgctttgcagaggagtttcagatccaaacgatcaaagatgttgctggagataaataggcagaaggaagaagaggacctcaaattacaattgcaacttcaaagacagagagccatgagactttcccgagaattgcagctgagtatgctcgaaatagttcatccaggtcaggtggagaaacactatcgggaaatggaagagaaatcagcactgattatccagaaacattggagagggtacagggaaaggaaaaattttcaccaacagaggcagtctctcatagagtataaagcagctgtcacacttcaaagagcagcgcttaaattcctagcgaagtgccgtaagaaaaagaaactatttgctccttggcgaggactccaagaactcactgatgcacgccgagttgaactgaagaaacgagtggatgactatgtcagaagacatttgggctctccaatgtcagatgtggtcagtagggagctccatgcccaagctcaagaacgactgcaacactactttatgggcagggccctagaagagcgagcccagcagcacagagaagctctgatagcacagatcagcaccaacgttgaacagctaatgaaggcaccaagtctgaaggaggcagaagggaaagaacctgagctcttcctaagtagatccaggcctgtggcagccaaggccaagcaggcccatctcacaaccctgaagcacatacaagcaccctggtggaagaagcttggagaagaatctggagatgagattgatgttccaaaggatgagcttagtatagaattagaaaatttattcattggtggaaccaaaccaccttagtgagtaaccctaagaattgacacaaatctcatattttaggagattatattggttctgcctctggcatgctggtagactagggccatcctaacttattattttccagaggttctcctccagacaagacctgcagtaagcaaagagttatattctacctctctctcaattttctttttcttttctctgtatcctcatccttagccacacacagatttgtgtggcttttattgtagaactaaacttagcatagtgttctgttgtttacatgaagtgtgtttttctttggtttcttctgttttccaactaaatatttttttctaaataaatattttcaacaattgatttgaaaaatttgtcaggattatttcaacttttcacatttgttatctgaaattcctatttcctgttaacataggaggtgtgtgcagactttattaatgtgaggaaaagaaatgctcaattgaaggacatttccctgttttctataaagcaatggttgaactcattttctattttgttatttctaaaaggaactgcataccaaaaaaatgcattctttctattaaactgtgagaactacat

SEQ ID NO: 348852 - DNA, 323 bp, Homo sapiens
attccatagcctcctcagccaaaaacaccctctttagcaccagtctttagtcttcttggtatgtttctatttcctttgttactcttattttcatattctttccaactactgagataacttgaaggaatgaatttgaagctttagtgtgtccctcataacatcgcacacatattaatagcatacaaccaaacagcctagaatagaatgaaaagtttcaattaagtatgttaagtcactaaaaactaatacatgaaatatgcaactctgacattattcgaaaatcacgttgcatcctaacaaccagtttctactgcaatgcaaca

SEQ ID NO: 348853 - DNA, 603 bp, Homo sapiens
aaaggagtaaatgagtaatatgcatttttggacaaagaggtcgaaacctttgtggaacacaactttcaagatggagatatatattcacgaagctttattgcagctgtttcccttacccagttgaagtggccagtcattttaatttgcagttctatttacattcccaaggtaaccacgttcagtaactctctagaggctaagctgttaaaatttccatttttatacaaatagcaaagatatttctttctctttctttctttctttctttctttctttctttcttttctttctctctttccttccttccttctttcttttctttctctctttccttccttccttccctccttccttctttcttctctttccttctttcttttacaatggtccttatgctggactcatttatcttgaaatggtgggcaacacagaccccaatctatggtatcaagcaactcaactttttcttgtaatgtcatgactcttctgtgcttcttgggagcacttctatgactggtggtgcttcatatgggtcctgcagtttttatgtcctcaaggtttacagtattgcactaaccatgaaaaatatgcaagaaccgcaag

SEQ ID NO: 348854 - DNA, 886 bp, Homo sapiens
  misc_feature (185)..(185): n is a, c, g, or t
  misc_feature (192)..(192): n is a, c, g, or t
  misc_feature (198)..(198): n is a, c, g, or t
  misc_feature (200)..(200): n is a, c, g, or t
  misc_feature (204)..(204): n is a, c, g, or t
agagagggaaccgcaaggggcccactgtacaaatgcaatcgccgggccaaggtaaatggtgaacgccactccactagggtgaaattggccaagtgaacttgatatagggccccaatttaaaaggtaggtgacggcaaaagtctattgggaaagatctgcaagtattttttttaatataatatttnttttttntttttnantttnttttttttttttttttttttttttttttttttttattcacattgggtcatctttaaaaagctggactctgcttttggatgcttctcggaggcgagttggattttggactgaagtactgtcgttccattcctttttttgaggtgttatgagtggggctataacatcgccatcctattaggaagagagagaaaaacaggcaatagagaaaagccagtttccatcatcttatttctgagtgaaagtctcaagtgcgcacatcctcatcttgcatatagattgcttctagctgtcctcaatccagggaaactccaaattacatatgccctgtgcttggggcaaattagaaacactacagtcttacgcaggaagagccttcatgaaaacagccactggcctctgcagagatgactgggagcagcataccactgcccacctctatggctccttcacacaccttcacggagcacaaactctgtcctgttttcccaggagaaagacgggatgcactgaacccctagcttctctctcgcctggtcccctctgcaataaaaggcccaggtctacaagatggcaaagaaggggaggaagaacagtatgtacctgcagaatttaaatttttctctgcatcaaagctctaacgttggtcccatcagcataggctccagccaaagaagctcctcca

SEQ ID NO: 348855 - DNA, 298 bp, Homo sapiens
tcggcaactgcttcggatgtcggcaactgcttcggatgccatggcggagagcgatgttcttggtgaattgctatagaactgggaatgaggtgtgccctgggcacaggggcactgccccaccaaggtggtgcccactccactgctgggaaaacgaagttacctagcggagcctggagcccactgggtggtcactaatttcagcacaggcagtgcagtgtttgtgcttttttttttggagatggagtctcactctgtcacccaggctggagtgcaatggcgtgatctaggctcactgcaa

SEQ ID NO: 348856 - DNA, 1631 bp, Homo sapiens
aaaggagtaaatgagtaatatgcatttttggacaaagaggtcgaaacctttgtggaacacaactttcaagatggagatatatattcacgaagctttattgcagctgtttcccttacccagttgaagtggccagtcattttaatttgcagttctatttacattcccaaggtaaccacgttcagtaactctctagaggctaagctgttaaaatttccatttttatacaaatagcaaagatatttctttctctttctttctttctttctttctttctttctttcttttctttctctctttccttccttccttccctccttccttccttcctttctttctttttgtttgagacagagtttcgctcttgaccccgaggctggagtgcagtggcctgatcttggctcactgcaacctctgcctcccggattcaagcgattctcctgcctcagcctcccgagtagctgggattacaagcacacaccaccacgcccggctaatttcacccggctaatttttgtatttttagtagagactgggtttcgccatgctagccaggctggtctcaactctttacctcaagtgatccgcccaccttggcctcccaaagtgctgggattacaggcatgaccacctcgcctggccaagaaaaatgtaaccttgtaaatagcacagcgttctcataatggaaacagttgcaaagaacataaagtacagctgcgttacatgtaacaaaagatgcaaacaaaatagattcaagttgttttgcagacagcacaatgatacaatattaggactacagaatctcagagtaaaccacaatgatttaaaggtaagatacacagaaataaaatgattttaacagaaaaatatgacattcctgaccttaggtctgggcacatgatgtctgacccctatagaggcaccttggctaaaatgggaatgacctagtgccatggctgacctcacttgtgcgttgctgagcccatatgtgaacaaatccccttgatacagcaccatggtaggcatgagaggagaagtgttttaactattctcttatgaattgtaaccaacccttattatctactgatggatggacagggggtggggtgatcatacaggatggcagacattccaagtactcttcaccccagtgtggacggaacagaatctggctacacggtggccagtgatggactgctgggaaatctgctggcctgtggtctgagttcccctacttgctcaggctgcccctcactcccagtgtgccagggaggcttagtccggggagcatcagagcagaagacattcggggctcatggctcccatccccactggcctgtatcttcagcaccctctggccaccaccagctttggctctaactgcagactttgttcttggtgaattgctatagaactgggaatgaggtgtgccctgggcacaggggcactgccccaccaaggtggtgcccactccactgctgggaaaacgaagttacctagcggagcctggagcccactgggtggtcactaatttcagcacaggcagtgcagtgtttgtgcttttttttttggagatggagtctcactctgtcacccaggctggagtgcaatggcgtgatctaggctcactgcaa

SEQ ID NO: 348857 - DNA, 1447 bp, Homo sapiens
  misc_feature (467)..(467): n is a, c, g, or t
  misc_feature (474)..(474): n is a, c, g, or t
  misc_feature (480)..(480): n is a, c, g, or t
  misc_feature (482)..(482): n is a, c, g, or t
  misc_feature (486)..(486): n is a, c, g, or t
ttaaaagggggaaacccatgcccctttcggggactccttttgtgtaaaggggttttccccgattggccattggtgtaaaaaaagagtggtttacaaaattttaccggggttttttcaaaaatttgggcgccaaatatttcatttcccccgaaggatcggccaacatttggaaaaggtcaaccaggggggcacttttgttttcctccacccttcaaataggggtttcttctagaacggtttaatttggggaaccccagggttttgcctaccacccttttttaaaaaccggccctttttatttgtataaggccccgcaagggggcatttcccaaaaggtcccacttttgtccccgcagagtaaaaattcatgatcttaaaaaaccgatgggccaaagggcccctgatattttttttatgttcttgtctctttttttattttgttgtttttttttttttttttttttttnttttttntttttnantttntttttttttttttttttttttttttttttttttttttttttttttttttttttttttttttttttttttttttttagattcaagttgttttgcagacagcacaatgatacaatattaggactacagaatctcagagtaaaccacaatgatttaaaggtaagatacacagaaataaaatgattttaacagaaaaatatgacattcctgaccttaggtctgggcacatgatgtctgacccctatagaggcaccttggctaaaatgggaatgacctagtgccatggctgacctcacttgtgcgttgctgagcccatatgtgaacaaatccccttgatacagcaccatggtaggcatgagaggagaagtgttttaactattctcttatgaattgtaaccaacccttattatctactgatggatggacagggggtggggtgatcatacaggatggcagacattccaagtactcttcaccccagtgtggacggaacagaatctggctacacggtggccagtgatggactgctgggaaatctgctggcctgtggtctgagttcccctacttgctcaggctgcccctcactcccagtgtgccagggaggcttagtccggggagcatcagagcagaagacattcggggctcatggctcccatccccactggcctgtatcttcagcaccctctggccaccaccagctttggctctaactgcagactttgttcttggtgaattgctatagaactgggaatgaggtgtgccctgggcacaggggcactgccccaccaaggtggtgcccactccactgctgggaaaacgaagttacctagcggagcctggagcccactgggtggtcactaatttcagcacaggcagtgcagtgtttgtgcttttttttttggagatggagtctcactctgtcacccaggctggagtgcaatggcgtgatctaggctcactgcaa

SEQ ID NO: 348858 - DNA, 810 bp, Homo sapiens
  misc_feature (467)..(467): n is a, c, g, or t
  misc_feature (474)..(474): n is a, c, g, or t
  misc_feature (480)..(480): n is a, c, g, or t
  misc_feature (482)..(482): n is a, c, g, or t
  misc_feature (486)..(486): n is a, c, g, or t
ttaaaagggggaaacccatgcccctttcggggactccttttgtgtaaaggggttttccccgattggccattggtgtaaaaaaagagtggtttacaaaattttaccggggttttttcaaaaatttgggcgccaaatatttcatttcccccgaaggatcggccaacatttggaaaaggtcaaccaggggggcacttttgttttcctccacccttcaaataggggtttcttctagaacggtttaatttggggaaccccagggttttgcctaccacccttttttaaaaaccggccctttttatttgtataaggccccgcaagggggcatttcccaaaaggtcccacttttgtccccgcagagtaaaaattcatgatcttaaaaaaccgatgggccaaagggcccctgatattttttttatgttcttgtctctttttttattttgttgtttttttttttttttttttttttnttttttntttttnantttntttttttttttttttttttttttttttttttttttttttttttttttttttttttttttttttttttttttttttagattcaagttgttttgcagacagcacaatgatacaatattaggactacagaatctcagagtaaaccacaatgatttaaaggtaagatacacagaaataaaatgattttaacagaaaaatatgacattcctgaccttaggtctgggcacatgatgtctgacccctatagaggcaccttggctaaaatgggaatgacctagtgccatggctgacctcacttggttacatattacgatgggatcctctagt

SEQ ID NO: 348859 - DNA, 1158 bp, Homo sapiens
atccctggagtctggtcttctgcacgtcaagggacggtttcagcctgcagagcctgtaccggcggatggagggctgcagcgggccagtgctgctggtgctcagggaccaggacgggcagatatttggagccttctcctcctcggctatccgactcagcaaaggcttctatggtactggcgagacattcctcttctccttctccccacagctgaaggtctttaagtggactggaagcaactctttctttgtgaagggagacttggattcactgatgatgggcagtggcagtggccggtttgggctgtggttggatggagacttgttccgcgggggaagctccccttgcccgaccttcaacaacgaggtgctggcccggcaggagcagttctgcatccaggagctggaggcttggcttctcagctgacagccctgcggcaacagaattctatgattgaagcctctaaatgaattgtgcaggagagggagtttgtaaacaactgactacagacattcacattgggtcatctttaaaaagctggactctgcttttggatgcttctcggaggcgagttggattttggactgaagtactgtcgttccattcctttttttgaggtgttatgagtggggctataacatcgccatcctattaggaagagagagaaaaacaggcaatagagaaaagccagtttccatcatcttatttctgagtgaaagtctcaagtgcgcacatcctcatcttgcatatagattgcttctagctgtcctcaatccagggaaactccaaattacatatgccctgtgcttggggcaaattagaaacactacagtcttacgcaggaagagccttcatgaaaacagccactggcctctgcagagatgactgggagcagcataccactgcccacctctatggctccttcacacaccttcacggagcacaaactctgtcctgttttcccaggagaaagacgggatgcactgaacccctagcttctctctcgcctggtcccctctgcaataaaaggcccaggtctacaagatggcaaagaaggggaggaagaacagtatgtacctgcagaatttaaatttttctctgcatcaaagctctaacgttggtcccatcagcataggctccagccaaagaagctcctcca

SEQ ID NO: 348860 - DNA, 910 bp, Homo sapiens
atccctggagtctggtcttctgcacgtcaagggacggtttcagcctgcagagcctgtaccggcggatggagggctgcagcgggccagtgctgctggtgctcagggaccaggacgggcagatatttggagccttctcctcctcggctatccgactcagcaaaggcttctatggtactggcgagacattcctcttctccttctccccacagctgaaggtctttaagtggactggaagcaactctttctttgtgaagggagacttggattcactgatgatgggcagtggcagtggccggtttgggctgtggttggatggagacttgttccgcgggggaagctccccttgcccgaccttcaacaacgaggtgctggcccggcaggagcagttctgcatccaggagctggaggcttggcttctcagctgacagccctgcggcaacaggtactcagccctgctcatgatgccacccaggccttcctgacacacagcagcctgtgctgtttgaaacacagatggtgaagggccctagagttggccgaggctgctggccagcctccttgtggcctggggacccaagatacaggtgggggcaggcactgctcttttgcagaggtgactttgaaggattaaaagacgcttacaccttactcaagcagcacagagaccctaagctaacagggtcttagaaaactcagaaaaatccacatctcttccccgctagtgcctgcctcctggcaaagggaagatttttcactatgctgttcctcgccagctactgaacgaggaaaaccaacctcatgaacattatcattttagaggttctacaactgattcatgtttattgtagaaaaaccagaagacgttaaaaaaattaaaattgcctaaaattcaaccccccccaactcttaa

SEQ ID NO: 348861 - DNA, 1005 bp, Homo sapiens
atccctggagtctggtcttctgcacgtcaagggacggtttcagcctgcagagcctgtaccggcggatggagggctgcagcgggccagtgctgctggtgctcagggaccaggacgggcagatatttggagccttctcctcctcggctatccgactcagcaaaggcttctatggtactggcgagacattcctcttctccttctccccacagctgaaggtctttaagtggactggaagcaactctttctttgtgaagggagacttggattcactgatgatgggcagtggcagaattctatgattgaagcctctaaatgaattgtgcaggagagggagtttgtaaacaactgactacagacattcacattgggtcatctttaaaaagctggactctgcttttggatgcttctcggaggcgagttggattttggactgaagtactgtcgttccattcctttttttgaggtgttatgagtggggctataacatcgccatcctattaggaagagagagaaaaacaggcaatagagaaaagccagtttccatcatcttatttctgagtgaaagtctcaagtgcgcacatcctcatcttgcatatagattgcttctagctgtcctcaatccagggaaactccaaattacatatgccctgtgcttggggcaaattagaaacactacagtcttacgcaggaagagccttcatgaaaacagccactggcctctgcagagatgactgggagcagcataccactgcccacctctatggctccttcacacaccttcacggagcacaaactctgtcctgttttcccaggagaaagacgggatgcactgaacccctagcttctctctcgcctggtcccctctgcaataaaaggcccaggtctacaagatggcaaagaaggggaggaagaacagtatgtacctgcagaatttaaatttttctctgcatcaaagctctaacgttggtcccatcagcataggctccagccaaagaagctcctcca

SEQ ID NO: 348862 - DNA, 724 bp, Homo sapiens
agcgggcggcaagcggaggaggcgtggcgagcggatcatccgcttccggagtcgaggttttcgggcttgtaccgcttggcggtgcggcctggtgtcggcttgcaggttctttctgtgtttgttctctgccctgccaaggccgtagagctggtgcgtgcgggtagcggggctctccgaggagccgcacgccggcggcaccatggtccacctcactactctcctctgcaaggcctaccgtgggggccacttaaccatccgccttgccctgggtggctgcaccaatcggccgttctaccgcattgtggctgctcacaacaagtgtcccagggatggccgtttcgtagagcagctgggctcctatgatccattgcccaacagtcatggagaaaaactcgttgccctcaacctagacaggatccgtcattggattggctgcggggcccacctctctaagcctatggaaaagcttctgggtcttgctggctttttccctctgcatcctatgatgatcacaaatgctgagagactgcgaaggaaacgggcacgtgaagtcctgttagcttctcagaaaacagatgcagaagctacagatacagaggctacagaaacataaatgagctgactttagtgagcatagcagtgggaacaaggtcaaggtccttttgaaacactgcagcgatcttaattttgttagatttggagttcaataaatggagtatcctga

SEQ ID NO: 348863 - DNA, 4124 bp, Homo sapiens
agcgggcggcaagcggaggaggcgtggcgagcggatcatccgcttccggagtcgaggttttcgggcttgtaccgcttggcggtgcggcctggtgtcggcttgcaggttctttctgtgtttgttctctgccctgccaaggccgtagagctggtgcgtgcgggtagcggggctctccgaggagccgcacgccggcggcaccatggtccacctcactactctcctctgcaaggcctaccgtgggggccacttaaccatccgccttgccctgggtggctgcaccaatcggccgttctaccgcattgtggctgctcacaacaagtgtcccagggatggccgtttcgtagagcagctgggctcctatgatccattgcccaacagtcatggagaaaaactcgttgccctcaacctagacaggatccgtcattggattggctgcggggcccacctctctaagcctatggaaaagcttctgggtcttgctggctttttccctctgcatcctatgatgatcacaaatgctgagagactgcgaaggaaacgggcacgtgaagtcctgttagcttctcagaaaacagatgcagaagctacagatacagaggctacagaaacataaatgagctgactttagtgagcatagcagtgggaacaaggtcaaggtccttttgaaacactgcagcgatcttaattttgttagatttggagttcaataaatggagtatcctgagttgcccttgctcttctggcctggcctgcacagggcccagggagagatttgttcttgtgtgacttagagctgggtgtgggtactaattagcttttttcgactttgtcttgggatagacagtggctatgggaggattggacttttgagttgggctctgggtctcttggacaactttacaatttactggcttccaagacttcctgcttcaaaacccccagccagactattcatggcccattcagatcttcatgttcatcccacaagtgcaagaacagttaacctttcttaattgatttttgtaattggaggtttatattgtcttgcctaatgcatattctcttttttttttttttttggagacggagtcttgttctgttgccaggctggagtgcggtggtgcaatctcagctcactgcaatctccacctccgtgggttcaagaggttctcctgcctcagcctcctgagtagccggggagctacaagcttgcaccaccacacccagctaattttttttttttttttgagaggagtctcgctctgtcgcccaggcttgagtgcagtggcgcgatctcggctcactgcaagctctgtctcctgggttcatgccattctcctgcttcagcctcccgagtagtcccaggagtagctgggactacaggtgcccaccaccacacccagctaatttttttgtatttttagtagagatggggtttcaccatgttatccaggatggttttgatctcctgacctcgtgatccgcccgccttggcctcccaaaagtgctgggattataggcgtgagccaccgcccgggcaaatttttgtatttttagtagagatggggtttcaccgtgttggccaggatggtctcaatctgaccttgtgatctgcccacctcggcctcccaaagtgctaggattactggcgtgagccaccactcctagccttaatgcatattcttaaatatacaaaggtagatttgttatgaaaattgctttggggctctaataacctaccttttaagaatgagaaactgctgggcttaagggagttcagtatgaatcaagattgaaccattcaaatgtggctgtgatttctgcatatatcatagatgggatccttctgagaatactggaatagggaattaggacaccaagccaattcagctgtgaaccttattcttgtacttttctttcttgctggtaattttatggagcaggttaagaaggctgctctgtgttaggataaactgtataccaataatgttgacaacctgtaatgagtgttgcattttacttcttgtatcttttccttcctaccttgatgccagtaatctataagggatctttatagtttgaatgtatttgaataacttcagtatactttagttctacttttttatttgactcacaaccattcttaggtctcaagtattcccatgtgttttaaaagcctgaagtcagtgagatgaaattcaacatcaagaatttgaagtaacttgtaaggaaaaataatataaagataccattggggcagtggctcacgcctgtaatctcagcactttgggaggctgaggtggaaggatcacttgaagccagagtttgagaccagcctgtgcaacacagcaagaccccgtctctacaaaaacttaaaaaattagctggctgtggtgttgctcacccatagttccagctactcgggaagctgaggcagtaagatcacttgagcccaggaggccgatgctgcagtgaactgtgattgttccactacagtccagcctgggtgacagagaaaagaaaaagaaaacattacataatttggctagagcataataatttgattttctggtttttgaaaatttgagttgcaataaaaggatatttcagtgtgcgatttcaattttccgtagcaaatgtatatatagaaaaatgttaaaatagatgtatttgaataccttaaaaaatacaagaaactggaagaaagataatattgcaaagcatctacatatatcctaggccttttgtgtacaaggttatttgtgacaattgtaaggtattatgaaggcaggtaggattatctccgttttacagatagggaagctgaggcctagaggtggaaacttgcccagtgatgtaagattcatctcccggttatgccctcctggaaagcccttcccaacatattatgttgtccatagagggaaaaatgagcaaagacagatggcttaactctggtgtgtgactaagatataggaaatttatagaggaggttctatcaatgtgccgacttactttgtgttttatgttctgagaacgattaccagccatctcaaattctgtggttgtcaaagctcccctggggttgttgctggttggcccccacttgctttgagactttgatgccagggcaggttgagaggaactgacttcagctgagtttgatcttggatctgggaaagagaaatgctttgaaaatcacggcaactctgggaagtttaaaagatattaatgtatcctggagagtttgaggctttgcagaaacttattggcagagcagaatgattctgaaaaatgctacatcagtgaggggatatttgataaggtattttctgccaactcgggtattcacttagcattgtttatcctttaagatatgtatacacatacttcctctgtgagtttaccctactaacaaagttttatccccagcctcaaccttgctttgggtctccaggcccaagtttctcaccatctcttggatgattgctccagcccactctgctgccacctgggatccaacatgttcaaacccagctgtgaacttcacagagtattaaaagaaagagcctttgcttcagcagtttatgttattaagacggaggcttgggtcatgttatctctctccaccaatgtgtaaggtgaaagtcctattaggtaagagtttttggaagacccgtgttttgtgctttttgggtttcagtatagggttttttcctacagggctagagggaaagtaccccagcatttccaaccagtggggtgcaaaattatttgggtctacagctttacctattcctttcaagaacatttttgaaaaaacacatctgttaagttgaaccatgtgtaactgctgaatgctgatgtttggccgttttctacttaaaaaaataggccagcagtttgtaaattcaagctaatatatgaactttttgaaaaagttgttcttggacactaaaaggtaagacggacgccagatttccagagcaaggggaggagagacccgagcaacatcacttccctgaagacctagctcctgcgcgcggccggggactgtgactccacatgccggcgttacttacccgggcccgcgcctgactcgccacacctcattttgcggccgc

SEQ ID NO: 348864 - DNA, 4206 bp, Homo sapiens
agcgggcggcaagcggaggaggcgtggcgagcggatcatccgcttccggagtcgaggttttcgggcttgtaccgcttggcggtgcggcctggtgtcggcttgcaggttctttctgtgtttgttctctgccctgccaaggccgtagagctggtgcgtgcgggtagcggggctctccgaggagccgcacgccggcggcaccatggtccacctcactactctcctctgcaaggcctaccgtgggggccacttaaccatccgccttgccctgggtggctgcaccaatcggccgttctaccgcattgtggctgctcacaacaagtgtcccagggatggccgtttcgtagagcagctgggctcctatgatccattgcccaacagtcatggagaaaaactcgttgccctcaacctagacaggatccgtcattggattggctgcggggcccacctctctaagcctatggaaaagcttctgggtcttgctggctttttccctctgcatcctatgatgatcacaaatgctgagagactgcgaaggaaacgggcacgtgaagtcctgttagcttctcagaaaacagatgcagaagctacagatacagaggctacagaaacataaatgagctgactttagtgagcatagcagtgggaacaaggtcaaggtccttttgaaacactgcagcgatcttaattttgttagatttggagttcaataaatggagtatcctgagttgcccttgctcttctggcctggcctgcacagggcccagggagagatttgttcttgtgtgacttagagctgggtgtgggtactaattagcttttttcgactttgtcttgggatagacagtggctatgggaggattggacttttgagttgggctctgggtctcttggacaactttacaatttactggcttccaagacttcctgcttcaaaacccccagccagactattcatggcccattcagatcttcatgttcatcccacaagtgcaagaacagttaacctttcttaattgatttttgtaattggaggtttatattgtcttgcctaatgcatattctcttttttttttttttttggagacggagtcttgttctgttgccaggctggagtgcggtggtgcaatctcagctcaggatggcggatcgcttgagcacgggagttcgagaccagcctgagcaacttggtgcaaccccgtccctacaaaaaacacaaaaaatagcggggcgtggtggtgcggaccggtggttctcctgcctcagcctcctgagtagccggggagctacaagcttgcaccaccacacccagctaattttttttttttttttgagaggagtctcgctctgtcgcccaggcttgagtgcagtggcgcgatctcggctcactgcaagctctgtctcctgggttcatgccattctcctgcttcagcctcccgagtagtcccaggagtagctgggactacaggtgcccaccaccacacccagctaatttttttgtatttttagtagagatggggtttcaccatgttatccaggatggttttgatctcctgacctcgtgatccgcccgccttggcctcccaaaagtgctgggattataggcgtgagccaccgcccgggcaaatttttgtatttttagtagagatggggtttcaccgtgttggccaggatggtctcaatctgaccttgtgatctgcccacctcggcctcccaaagtgctaggattactggcgtgagccaccactcctagccttaatgcatattcttaaatatacaaaggtagatttgttatgaaaattgctttggggctctaataacctaccttttaagaatgagaaactgctgggcttaagggagttcagtatgaatcaagattgaaccattcaaatgtggctgtgatttctgcatatatcatagatgggatccttctgagaatactggaatagggaattaggacaccaagccaattcagctgtgaaccttattcttgtacttttctttcttgctggtaattttatggagcaggttaagaaggctgctctgtgttaggataaactgtataccaataatgttgacaacctgtaatgagtgttgcattttacttcttgtatcttttccttcctaccttgatgccagtaatctataagggatctttatagtttgaatgtatttgaataacttcagtatactttagttctacttttttatttgactcacaaccattcttaggtctcaagtattcccatgtgttttaaaagcctgaagtcagtgagatgaaattcaacatcaagaatttgaagtaacttgtaaggaaaaataatataaagataccattggggcagtggctcacgcctgtaatctcagcactttgggaggctgaggtggaaggatcacttgaagccagagtttgagaccagcctgtgcaacacagcaagaccccgtctctacaaaaacttaaaaaattagctggctgtggtgttgctcacccatagttccagctactcgggaagctgaggcagtaagatcacttgagcccaggaggccgatgctgcagtgaactgtgattgttccactacagtccagcctgggtgacagagaaaagaaaaagaaaacattacataatttggctagagcataataatttgattttctggtttttgaaaatttgagttgcaataaaaggatatttcagtgtgcgatttcaattttccgtagcaaatgtatatatagaaaaatgttaaaatagatgtatttgaataccttaaaaaatacaagaaactggaagaaagataatattgcaaagcatctacatatatcctaggccttttgtgtacaaggttatttgtgacaattgtaaggtattatgaaggcaggtaggattatctccgttttacagatagggaagctgaggcctagaggtggaaacttgcccagtgatgtaagattcatctcccggttatgccctcctggaaagcccttcccaacatattatgttgtccatagagggaaaaatgagcaaagacagatggcttaactctggtgtgtgactaagatataggaaatttatagaggaggttctatcaatgtgccgacttactttgtgttttatgttctgagaacgattaccagccatctcaaattctgtggttgtcaaagctcccctggggttgttgctggttggcccccacttgctttgagactttgatgccagggcaggttgagaggaactgacttcagctgagtttgatcttggatctgggaaagagaaatgctttgaaaatcacggcaactctgggaagtttaaaagatattaatgtatcctggagagtttgaggctttgcagaaacttattggcagagcagaatgattctgaaaaatgctacatcagtgaggggatatttgataaggtattttctgccaactcgggtattcacttagcattgtttatcctttaagatatgtatacacatacttcctctgtgagtttaccctactaacaaagttttatccccagcctcaaccttgctttgggtctccaggcccaagtttctcaccatctcttggatgattgctccagcccactctgctgccacctgggatccaacatgttcaaacccagctgtgaacttcacagagtattaaaagaaagagcctttgcttcagcagtttatgttattaagacggaggcttgggtcatgttatctctctccaccaatgtgtaaggtgaaagtcctattaggtaagagtttttggaagacccgtgttttgtgctttttgggtttcagtatagggttttttcctacagggctagagggaaagtaccccagcatttccaaccagtggggtgcaaaattatttgggtctacagctttacctattcctttcaagaacatttttgaaaaaacacatctgttaagttgaaccatgtgtaactgctgaatgctgatgtttggccgttttctacttaaaaaaataggccagcagtttgtaaattcaagctaatatatgaactttttgaaaaagttgttcttggacactaaaaggtaagacggacgccagatttccagagcaaggggaggagagacccgagcaacatcacttccctgaagacctagctcctgcgcgcggccggggactgtgactccacatgccggcgttacttacccgggcccgcgcctgactcgccacacctcattttgcggccgc

SEQ ID NO: 348865 - DNA, 3680 bp, Homo sapiens
agcgggcggcaagcggaggaggcgtggcgagcggatcatccgcttccggagtcgaggttttcgggcttgtaccgcttggcggtgcggcctggtgtcggcttgcaggttctttctgtgtttgttctctgccctgccaaggccgtagagctggtgcgtgcgggtagcggggctctccgaggagccgcacgccggcggcaccatggtccacctcactactctcctctgcaaggcctaccgtgggggccacttaaccatccgccttgccctgggtggctgcaccaatcggccgttctaccgcattgtggctgctcacaacaagtgtcccagggatggccgtttcgtagagcagctgggctcctatgatccattgcccaacagtcatggagaaaaactcgttgccctcaacctagacaggatccgtcattggattggctgcggggcccacctctctaagcctatggaaaagcttctgggtcttgctggctttttccctctgcatcctatgatgatcacaaatgctgagagactgcgaaggaaacgggcacgtgaagtcctgttagcttctcagaaaacagatgcagaagctacagatacagaggctacagaaacataaatgagctgactttagtgagcatagcagtgggaacaaggtcaaggtccttttgaaacactgcagcgatcttaattttgttagatttggagttcaataaatggagtatcctgagttgcccttgctcttctggcctggcctgcacagggcccagggagagatttgttcttgtgtgacttagagctgggtgtgggtactaattagcttttttcgactttgtcttgggatagacagtggctatgggaggattggacttttgagttgggctctgggtctcttggacaactttacaatttactggcttccaagacttcctgcttcaaaacccccagccagactattcatggcccattcagatcttcatgttcatcccacaagtgcaagaacagttaacctttcttaattgatttttgtaattggaggtttatattgtcttgcctaatgcatattctcttttttttttttttttggagacggagtcttgttctgttgccaggctggagtgcggtggtgcaatctcagctcactgcaatctccacctccgtgggttcaagaggttctcctgcctcagcctcctgagtagccggggagctacaagcttgcaccactcctagccttaatgcatattcttaaatatacaaaggtagatttgttatgaaaattgctttggggctctaataacctaccttttaagaatgagaaactgctgggcttaagggagttcagtatgaatcaagattgaaccattcaaatgtggctgtgatttctgcatatatcatagatgggatccttctgagaatactggaatagggaattaggacaccaagccaattcagctgtgaaccttattcttgtacttttctttcttgctggtaattttatggagcaggttaagaaggctgctctgtgttaggataaactgtataccaataatgttgacaacctgtaatgagtgttgcattttacttcttgtatcttttccttcctaccttgatgccagtaatctataagggatctttatagtttgaatgtatttgaataacttcagtatactttagttctacttttttatttgactcacaaccattcttaggtctcaagtattcccatgtgttttaaaagcctgaagtcagtgagatgaaattcaacatcaagaatttgaagtaacttgtaaggaaaaataatataaagataccattggggcagtggctcacgcctgtaatctcagcactttgggaggctgaggtggaaggatcacttgaagccagagtttgagaccagcctgtgcaacacagcaagaccccgtctctacaaaaacttaaaaaattagctggctgtggtgttgctcacccatagttccagctactcgggaagctgaggcagtaagatcacttgagcccaggaggccgatgctgcagtgaactgtgattgttccactacagtccagcctgggtgacagagaaaagaaaaagaaaacattacataatttggctagagcataataatttgattttctggtttttgaaaatttgagttgcaataaaaggatatttcagtgtgcgatttcaattttccgtagcaaatgtatatatagaaaaatgttaaaatagatgtatttgaataccttaaaaaatacaagaaactggaagaaagataatattgcaaagcatctacatatatcctaggccttttgtgtacaaggttatttgtgacaattgtaaggtattatgaaggcaggtaggattatctccgttttacagatagggaagctgaggcctagaggtggaaacttgcccagtgatgtaagattcatctcccggttatgccctcctggaaagcccttcccaacatattatgttgtccatagagggaaaaatgagcaaagacagatggcttaactctggtgtgtgactaagatataggaaatttatagaggaggttctatcaatgtgccgacttactttgtgttttatgttctgagaacgattaccagccatctcaaattctgtggttgtcaaagctcccctggggttgttgctggttggcccccacttgctttgagactttgatgccagggcaggttgagaggaactgacttcagctgagtttgatcttggatctgggaaagagaaatgctttgaaaatcacggcaactctgggaagtttaaaagatattaatgtatcctggagagtttgaggctttgcagaaacttattggcagagcagaatgattctgaaaaatgctacatcagtgaggggatatttgataaggtattttctgccaactcgggtattcacttagcattgtttatcctttaagatatgtatacacatacttcctctgtgagtttaccctactaacaaagttttatccccagcctcaaccttgctttgggtctccaggcccaagtttctcaccatctcttggatgattgctccagcccactctgctgccacctgggatccaacatgttcaaacccagctgtgaacttcacagagtattaaaagaaagagcctttgcttcagcagtttatgttattaagacggaggcttgggtcatgttatctctctccaccaatgtgtaaggtgaaagtcctattaggtaagagtttttggaagacccgtgttttgtgctttttgggtttcagtatagggttttttcctacagggctagagggaaagtaccccagcatttccaaccagtggggtgcaaaattatttgggtctacagctttacctattcctttcaagaacatttttgaaaaaacacatctgttaagttgaaccatgtgtaactgctgaatgctgatgtttggccgttttctacttaaaaaaataggccagcagtttgtaaattcaagctaatatatgaactttttgaaaaagttgttcttggacactaaaaggtaagacggacgccagatttccagagcaaggggaggagagacccgagcaacatcacttccctgaagacctagctcctgcgcgcggccggggactgtgactccacatgccggcgttacttacccgggcccgcgcctgactcgccacacctcattttgcggccgc

SEQ ID NO: 348866 - DNA, 4058 bp, Homo sapiens
ggggagagctctcccaggcgcgatggaggcaacccgaacctgaagcagccacactgccttacatttgatccttctctcagttttttccccacttaatcaccgctgaaaaatttccaccccattgaagcagctaaggctccgacaagctactctcctctgcaaggcctaccgtgggggccacttaaccatccgccttgccctgggtggctgcaccaatcggccgttctaccgcattgtggctgctcacaacaagtgtcccagggatggccgtttcgtagagcagctgggctcctatgatccattgcccaacagtcatggagaaaaactcgttgccctcaacctagacaggatccgtcattggattggctgcggggcccacctctctaagcctatggaaaagcttctgggtcttgctggctttttccctctgcatcctatgatgatcacaaatgctgagagactgcgaaggaaacgggcacgtgaagtcctgttagcttctcagaaaacagatgcagaagctacagatacagaggctacagaaacataaatgagctgactttagtgagcatagcagtgggaacaaggtcaaggtccttttgaaacactgcagcgatcttaattttgttagatttggagttcaataaatggagtatcctgagttgcccttgctcttctggcctggcctgcacagggcccagggagagatttgttcttgtgtgacttagagctgggtgtgggtactaattagcttttttcgactttgtcttgggatagacagtggctatgggaggattggacttttgagttgggctctgggtctcttggacaactttacaatttactggcttccaagacttcctgcttcaaaacccccagccagactattcatggcccattcagatcttcatgttcatcccacaagtgcaagaacagttaacctttcttaattgatttttgtaattggaggtttatattgtcttgcctaatgcatattctcttttttttttttttttggagacggagtcttgttctgttgccaggctggagtgcggtggtgcaatctcagctcactgcaatctccacctccgtgggttcaagaggttctcctgcctcagcctcctgagtagccggggagctacaagcttgcaccaccacacccagctaattttttttttttttttgagaggagtctcgctctgtcgcccaggcttgagtgcagtggcgcgatctcggctcactgcaagctctgtctcctgggttcatgccattctcctgcttcagcctcccgagtagtcccaggagtagctgggactacaggtgcccaccaccacacccagctaatttttttgtatttttagtagagatggggtttcaccatgttatccaggatggttttgatctcctgacctcgtgatccgcccgccttggcctcccaaaagtgctgggattataggcgtgagccaccgcccgggcaaatttttgtatttttagtagagatggggtttcaccgtgttggccaggatggtctcaatctgaccttgtgatctgcccacctcggcctcccaaagtgctaggattactggcgtgagccaccactcctagccttaatgcatattcttaaatatacaaaggtagatttgttatgaaaattgctttggggctctaataacctaccttttaagaatgagaaactgctgggcttaagggagttcagtatgaatcaagattgaaccattcaaatgtggctgtgatttctgcatatatcatagatgggatccttctgagaatactggaatagggaattaggacaccaagccaattcagctgtgaaccttattcttgtacttttctttcttgctggtaattttatggagcaggttaagaaggctgctctgtgttaggataaactgtataccaataatgttgacaacctgtaatgagtgttgcattttacttcttgtatcttttccttcctaccttgatgccagtaatctataagggatctttatagtttgaatgtatttgaataacttcagtatactttagttctacttttttatttgactcacaaccattcttaggtctcaagtattcccatgtgttttaaaagcctgaagtcagtgagatgaaattcaacatcaagaatttgaagtaacttgtaaggaaaaataatataaagataccattggggcagtggctcacgcctgtaatctcagcactttgggaggctgaggtggaaggatcacttgaagccagagtttgagaccagcctgtgcaacacagcaagaccccgtctctacaaaaacttaaaaaattagctggctgtggtgttgctcacccatagttccagctactcgggaagctgaggcagtaagatcacttgagcccaggaggccgatgctgcagtgaactgtgattgttccactacagtccagcctgggtgacagagaaaagaaaaagaaaacattacataatttggctagagcataataatttgattttctggtttttgaaaatttgagttgcaataaaaggatatttcagtgtgcgatttcaattttccgtagcaaatgtatatatagaaaaatgttaaaatagatgtatttgaataccttaaaaaatacaagaaactggaagaaagataatattgcaaagcatctacatatatcctaggccttttgtgtacaaggttatttgtgacaattgtaaggtattatgaaggcaggtaggattatctccgttttacagatagggaagctgaggcctagaggtggaaacttgcccagtgatgtaagattcatctcccggttatgccctcctggaaagcccttcccaacatattatgttgtccatagagggaaaaatgagcaaagacagatggcttaactctggtgtgtgactaagatataggaaatttatagaggaggttctatcaatgtgccgacttactttgtgttttatgttctgagaacgattaccagccatctcaaattctgtggttgtcaaagctcccctggggttgttgctggttggcccccacttgctttgagactttgatgccagggcaggttgagaggaactgacttcagctgagtttgatcttggatctgggaaagagaaatgctttgaaaatcacggcaactctgggaagtttaaaagatattaatgtatcctggagagtttgaggctttgcagaaacttattggcagagcagaatgattctgaaaaatgctacatcagtgaggggatatttgataaggtattttctgccaactcgggtattcacttagcattgtttatcctttaagatatgtatacacatacttcctctgtgagtttaccctactaacaaagttttatccccagcctcaaccttgctttgggtctccaggcccaagtttctcaccatctcttggatgattgctccagcccactctgctgccacctgggatccaacatgttcaaacccagctgtgaacttcacagagtattaaaagaaagagcctttgcttcagcagtttatgttattaagacggaggcttgggtcatgttatctctctccaccaatgtgtaaggtgaaagtcctattaggtaagagtttttggaagacccgtgttttgtgctttttgggtttcagtatagggttttttcctacagggctagagggaaagtaccccagcatttccaaccagtggggtgcaaaattatttgggtctacagctttacctattcctttcaagaacatttttgaaaaaacacatctgttaagttgaaccatgtgtaactgctgaatgctgatgtttggccgttttctacttaaaaaaataggccagcagtttgtaaattcaagctaatatatgaactttttgaaaaagttgttcttggacactaaaaggtaagacggacgccagatttccagagcaaggggaggagagacccgagcaacatcacttccctgaagacctagctcctgcgcgcggccggggactgtgactccacatgccggcgttacttacccgggcccgcgcctgactcgccacacctcattttgcggccgc

SEQ ID NO: 348867 - DNA, 2774 bp, Homo sapiens
agcgggcggcaagcggaggaggcgtggcgagcggatcatccgcttccggagtcgaggttttcgggcttgtaccgcttggcggtgcggcctggtgtcggcttgcaggttctttctgtgtttgttctctgccctgccaaggccgtagagctggtgcgtgcgggtagcggggctctccgaggagccgcacgccggcggcaccatggtccacctcactactctcctctgcaaggcctaccgtgggggccacttaaccatccgccttgccctgggtggctgcaccaatcggccgttctaccgcattgtggctgctcacaacaagtgtcccagggatggccgtttcgtagagcagctgggctcctatgatccattgcccaacagtcatggagaaaaactcgttgccctcaacctagacaggatccgtcattggattggctgcggggcccacctctctaagcctatggaaaagcttctgggtcttgctggctttttccctctgcatcctatgatgatcacaaatgctgagagactgcgaaggaaacgggcacgtgaagtcctgttagcttctcagaaaacagatgcagaagctacagatacagaggctacagaaacataaatgagctgactttagtgagcatagcagtgggaacaaggtcaaggtccttttgaaacactgcagcgatcttaattttgttagatttggagttcaataaatggagtatcctgagttgcccttgctcttctggcctggcctgcacagggcccagggagagatttgttcttgtgtgacttagagctgggtgtgggtactaattagcttttttcgactttgtcttgggatagacagtggctatgggaggattggacttttgagttgggctctgggtctcttggacaactttacaatttactggcttccaagacttcctgcttcaaaacccccagccagactattcatggcccattcagatcttcatgttcatcccacaagtgcaagaacagttaacctttcttaattgatttttgtaattggaggtttatattgtcttgcctaatgcatattctcttttttttttttttttggagacggagtcttgttctgttgccaggaggccgatgctgcagtgaactgtgattgttccactacagtccagcctgggtgacagagaaaagaaaaagaaaacattacataatttggctagagcataataatttgattttctggtttttgaaaatttgagttgcaataaaaggatatttcagtgtgcgatttcaattttccgtagcaaatgtatatatagaaaaatgttaaaatagatgtatttgaataccttaaaaaatacaagaaactggaagaaagataatattgcaaagcatctacatatatcctaggccttttgtgtacaaggttatttgtgacaattgtaaggtattatgaaggcaggtaggattatctccgttttacagatagggaagctgaggcctagaggtggaaacttgcccagtgatgtaagattcatctcccggttatgccctcctggaaagcccttcccaacatattatgttgtccatagagggaaaaatgagcaaagacagatggcttaactctggtgtgtgactaagatataggaaatttatagaggaggttctatcaatgtgccgacttactttgtgttttatgttctgagaacgattaccagccatctcaaattctgtggttgtcaaagctcccctggggttgttgctggttggcccccacttgctttgagactttgatgccagggcaggttgagaggaactgacttcagctgagtttgatcttggatctgggaaagagaaatgctttgaaaatcacggcaactctgggaagtttaaaagatattaatgtatcctggagagtttgaggctttgcagaaacttattggcagagcagaatgattctgaaaaatgctacatcagtgaggggatatttgataaggtattttctgccaactcgggtattcacttagcattgtttatcctttaagatatgtatacacatacttcctctgtgagtttaccctactaacaaagttttatccccagcctcaaccttgctttgggtctccaggcccaagtttctcaccatctcttggatgattgctccagcccactctgctgccacctgggatccaacatgttcaaacccagctgtgaacttcacagagtattaaaagaaagagcctttgcttcagcagtttatgttattaagacggaggcttgggtcatgttatctctctccaccaatgtgtaaggtgaaagtcctattaggtaagagtttttggaagacccgtgttttgtgctttttgggtttcagtatagggttttttcctacagggctagagggaaagtaccccagcatttccaaccagtggggtgcaaaattatttgggtctacagctttacctattcctttcaagaacatttttgaaaaaacacatctgttaagttgaaccatgtgtaactgctgaatgctgatgtttggccgttttctacttaaaaaaataggccagcagtttgtaaattcaagctaatatatgaactttttgaaaaagttgttcttggacactaaaaggtaagacggacgccagatttccagagcaaggggaggagagacccgagcaacatcacttccctgaagacctagctcctgcgcgcggccggggactgtgactccacatgccggcgttacttacccgggcccgcgcctgactcgccacacctcattttgcggccgc

SEQ ID NO: 348868 - DNA, 2450 bp, Homo sapiens
agcgggcggcaagcggaggaggcgtggcgagcggatcatccgcttccggagtcgaggttttcgggcttgtaccgcttggcggtgcggcctggtgtcggcttgcaggttctttctgtgtttgttctctgccctgccaaggccgtagagctggtgcgtgcgggtagcggggctctccgaggagccgcacgccggcggcaccatggtccacctcactactctcctctgcaaggcctaccgtgggggccacttaaccatccgccttgccctgggtggctgcaccaatcggccgttctaccgcattgtggctgctcacaacaagtgtcccagggatggccgtttcgtagagcagctgggctcctatgatccattgcccaacagtcatggagaaaaactcgttgccctcaacctagacaggatccgtcattggattggctgcggggcccacctctctaagcctatggaaaagcttctgggtctcaagtattcccatgtgttttaaaagcctgaagtcagtgagatgaaattcaacatcaagaatttgaagtaacttgtaaggaaaaataatataaagataccattggggcagtggctcacgcctgtaatctcagcactttgggaggctgaggtggaaggatcacttgaagccagagtttgagaccagcctgtgcaacacagcaagaccccgtctctacaaaaacttaaaaaattagctggctgtggtgttgctcacccatagttccagctactcgggaagctgaggcagtaagatcacttgagcccaggaggccgatgctgcagtgaactgtgattgttccactacagtccagcctgggtgacagagaaaagaaaaagaaaacattacataatttggctagagcataataatttgattttctggtttttgaaaatttgagttgcaataaaaggatatttcagtgtgcgatttcaattttccgtagcaaatgtatatatagaaaaatgttaaaatagatgtatttgaataccttaaaaaatacaagaaactggaagaaagataatattgcaaagcatctacatatatcctaggccttttgtgtacaaggttatttgtgacaattgtaaggtattatgaaggcaggtaggattatctccgttttacagatagggaagctgaggcctagaggtggaaacttgcccagtgatgtaagattcatctcccggttatgccctcctggaaagcccttcccaacatattatgttgtccatagagggaaaaatgagcaaagacagatggcttaactctggtgtgtgactaagatataggaaatttatagaggaggttctatcaatgtgccgacttactttgtgttttatgttctgagaacgattaccagccatctcaaattctgtggttgtcaaagctcccctggggttgttgctggttggcccccacttgctttgagactttgatgccagggcaggttgagaggaactgacttcagctgagtttgatcttggatctgggaaagagaaatgctttgaaaatcacggcaactctgggaagtttaaaagatattaatgtatcctggagagtttgaggctttgcagaaacttattggcagagcagaatgattctgaaaaatgctacatcagtgaggggatatttgataaggtattttctgccaactcgggtattcacttagcattgtttatcctttaagatatgtatacacatacttcctctgtgagtttaccctactaacaaagttttatccccagcctcaaccttgctttgggtctccaggcccaagtttctcaccatctcttggatgattgctccagcccactctgctgccacctgggatccaacatgttcaaacccagctgtgaacttcacagagtattaaaagaaagagcctttgcttcagcagtttatgttattaagacggaggcttgggtcatgttatctctctccaccaatgtgtaaggtgaaagtcctattaggtaagagtttttggaagacccgtgttttgtgctttttgggtttcagtatagggttttttcctacagggctagagggaaagtaccccagcatttccaaccagtggggtgcaaaattatttgggtctacagctttacctattcctttcaagaacatttttgaaaaaacacatctgttaagttgaaccatgtgtaactgctgaatgctgatgtttggccgttttctacttaaaaaaataggccagcagtttgtaaattcaagctaatatatgaactttttgaaaaagttgttcttggacactaaaaggtaagacggacgccagatttccagagcaaggggaggagagacccgagcaacatcacttccctgaagacctagctcctgcgcgcggccggggactgtgactccacatgccggcgttacttacccgggcccgcgcctgactcgccacacctcattttgcggccgc

SEQ ID NO: 348869 - DNA, 2357 bp, Homo sapiens
agcgggcggcaagcggaggaggcgtggcgagcggatcatccgcttccggagtcgaggttttcgggcttgtaccgcttggcggtgcggcctggtgtcggcttgcaggttctttctgtgtttgttctctgccctgccaaggccgtagagctggtgcgtgcgggtagcggggctctccgaggagccgcacgccggcggcaccatggtccacctcactactctcctctgcaaggcctaccgtgggggccacttaaccatccgccttgccctgggtggctgcaccaatcggccgttctaccgcattgtggctgctcacaacaagtgtcccagggatggccgtttcgtagagcagctgggctcctatgatccattgcccaacagtcatggagaaaaactcgttgccctcaacctagacaggatccgtcattggattggctgcggggcccacctctctaagcctatggaaaagcttctgggtcttgctggctttttccctctgcatcctatgatgatcacaaatgctgagagactgcgaaggaaacgggcacgtgaagtcctgttagcttctcagaaaacagatgcagaagctacagatacagaggctacagaaacataaatgactggctgtggtgttgctcacccatagttccagctactcgggaagctgaggcagtaagatcacttgagcccaggaggccgatgctgcagtgaactgtgattgttccactacagtccagcctgggtgacagagaaaagaaaaagaaaacattacataatttggctagagcataataatttgattttctggtttttgaaaatttgagttgcaataaaaggatatttcagtgtgcgatttcaattttccgtagcaaatgtatatatagaaaaatgttaaaatagatgtatttgaataccttaaaaaatacaagaaactggaagaaagataatattgcaaagcatctacatatatcctaggccttttgtgtacaaggttatttgtgacaattgtaaggtattatgaaggcaggtaggattatctccgttttacagatagggaagctgaggcctagaggtggaaacttgcccagtgatgtaagattcatctcccggttatgccctcctggaaagcccttcccaacatattatgttgtccatagagggaaaaatgagcaaagacagatggcttaactctggtgtgtgactaagatataggaaatttatagaggaggttctatcaatgtgccgacttactttgtgttttatgttctgagaacgattaccagccatctcaaattctgtggttgtcaaagctcccctggggttgttgctggttggcccccacttgctttgagactttgatgccagggcaggttgagaggaactgacttcagctgagtttgatcttggatctgggaaagagaaatgctttgaaaatcacggcaactctgggaagtttaaaagatattaatgtatcctggagagtttgaggctttgcagaaacttattggcagagcagaatgattctgaaaaatgctacatcagtgaggggatatttgataaggtattttctgccaactcgggtattcacttagcattgtttatcctttaagatatgtatacacatacttcctctgtgagtttaccctactaacaaagttttatccccagcctcaaccttgctttgggtctccaggcccaagtttctcaccatctcttggatgattgctccagcccactctgctgccacctgggatccaacatgttcaaacccagctgtgaacttcacagagtattaaaagaaagagcctttgcttcagcagtttatgttattaagacggaggcttgggtcatgttatctctctccaccaatgtgtaaggtgaaagtcctattaggtaagagtttttggaagacccgtgttttgtgctttttgggtttcagtatagggttttttcctacagggctagagggaaagtaccccagcatttccaaccagtggggtgcaaaattatttgggtctacagctttacctattcctttcaagaacatttttgaaaaaacacatctgttaagttgaaccatgtgtaactgctgaatgctgatgtttggccgttttctacttaaaaaaataggccagcagtttgtaaattcaagctaatatatgaactttttgaaaaagttgttcttggacactaaaaggtaagacggacgccagatttccagagcaaggggaggagagacccgagcaacatcacttccctgaagacctagctcctgcgcgcggccggggactgtgactccacatgccggcgttacttacccgggcccgcgcctgactcgccacacctcattttgcggccgc

SEQ ID NO: 348870 - DNA, 2142 bp, Homo sapiens
  misc_feature (19)..(19): n is a, c, g, or t
  misc_feature (47)..(47): n is a, c, g, or t
  misc_feature (59)..(59): n is a, c, g, or t
  misc_feature (107)..(108): n is a, c, g, or t
  misc_feature (112)..(112): n is a, c, g, or t
  misc_feature (118)..(118): n is a, c, g, or t
aaaaaatttcctccctttnttgaaagggcccaaaacccagtgtgaanaagaattgagtnctaaggctaaaagatggggaagccccccaaccttaccttgaaagcttnnagancatttnacaccagggcccagggagagatttgttcttgtgtgacttagagctgggtgtgggtactaattagcttttttcgactttgtcttgggatagacagtggctatgggaggattggacttttgagttgggctctgggtctcttggacaactttacaatttactggcttccaagacttcctgcttcaaaacccccagccagactattcatggcccattcagatcttcatgttcatcccacaagtgcaagaacagttaacctttcttaattgatttttgtaattggaggtttatattgtcttgcctaatgcatattctcttttttttttttttttggagacggagtcttgttctgttgccaggaggccgatgctgcagtgaactgtgattgttccactacagtccagcctgggtgacagagaaaagaaaaagaaaacattacataatttggctagagcataataatttgattttctggtttttgaaaatttgagttgcaataaaaggatatttcagtgtgcgatttcaattttccgtagcaaatgtatatatagaaaaatgttaaaatagatgtatttgaataccttaaaaaatacaagaaactggaagaaagataatattgcaaagcatctacatatatcctaggccttttgtgtacaaggttatttgtgacaattgtaaggtattatgaaggcaggtaggattatctccgttttacagatagggaagctgaggcctagaggtggaaacttgcccagtgatgtaagattcatctcccggttatgccctcctggaaagcccttcccaacatattatgttgtccatagagggaaaaatgagcaaagacagatggcttaactctggtgtgtgactaagatataggaaatttatagaggaggttctatcaatgtgccgacttactttgtgttttatgttctgagaacgattaccagccatctcaaattctgtggttgtcaaagctcccctggggttgttgctggttggcccccacttgctttgagactttgatgccagggcaggttgagaggaactgacttcagctgagtttgatcttggatctgggaaagagaaatgctttgaaaatcacggcaactctgggaagtttaaaagatattaatgtatcctggagagtttgaggctttgcagaaacttattggcagagcagaatgattctgaaaaatgctacatcagtgaggggatatttgataaggtattttctgccaactcgggtattcacttagcattgtttatcctttaagatatgtatacacatacttcctctgtgagtttaccctactaacaaagttttatccccagcctcaaccttgctttgggtctccaggcccaagtttctcaccatctcttggatgattgctccagcccactctgctgccacctgggatccaacatgttcaaacccagctgtgaacttcacagagtattaaaagaaagagcctttgcttcagcagtttatgttattaagacggaggcttgggtcatgttatctctctccaccaatgtgtaaggtgaaagtcctattaggtaagagtttttggaagacccgtgttttgtgctttttgggtttcagtatagggttttttcctacagggctagagggaaagtaccccagcatttccaaccagtggggtgcaaaattatttgggtctacagctttacctattcctttcaagaacatttttgaaaaaacacatctgttaagttgaaccatgtgtaactgctgaatgctgatgtttggccgttttctacttaaaaaaataggccagcagtttgtaaattcaagctaatatatgaactttttgaaaaagttgttcttggacactaaaaggtaagacggacgccagatttccagagcaaggggaggagagacccgagcaacatcacttccctgaagacctagctcctgcgcgcggccggggactgtgactccacatgccggcgttacttacccgggcccgcgcctgactcgccacacctcattttgcggccgc

SEQ ID NO: 348871 - DNA, 436 bp, Homo sapiens
aaaaaaaaaagagttatttcattccctctaggctgttcaggactgaagtgggagctgaagttgtgatctaattggcattttgaatctggaggccccttttgtggactcctttgtaagactttgggtgactggtattttatgctaaaaataggaatagtatgttttgaatggccatctgtcagtttacgttttttaaagtaaggggaatattgttagggaagtagacatccactgtctccttgccggggagaagtagtacagagtttggcaagtgaggagcatggtttgcatccatgcactgggtcagatctcagacctcagttctgtgagacagagttcctagggaagcattggcttatactgtgttataataagtgaaaaatctgttacttttaggtcttgctggctttttccctctgcatcctatgatgatcac

SEQ ID NO: 348872 - DNA, 3820 bp, Homo sapiens
agcgggcggcaagcggaggaggcgtggcgagcggatcatccgcttccggagtcgaggttttcgggcttgtaccgcttggcggtgcggcctggtgtcggcttgcaggttctttctgtgtttgttctctgccctgccaaggccgtagagctggtgcgtgcgggtagcggggctctccgaggagccgcacgccggcggcaccatggtccacctcactactctcctctgcaaggcctaccgtgggggccacttaaccatccgccttgccctgggtggctgcaccaatcggccgttctaccgcattgtggctgctcacaacaagtgtcccagggatggccgtttcgtagagcagctgggctcctatgatccattgcccaacagtcatggagaaaaactcgttgccctcaacctagacaggatccgtcattggattggctgcggggcccacctctctaagcctatggaaaagcttctgggtcttgctggctttttccctctgcatcctatgatgatcacaaatgctgagagactgcgaaggaaacgggcacgtgaagtcctgttagcttctcagaaaacagatgcagaagctacagatacagaggctacagaaacataaatgagctgactttagtgagcatagcagtgggaacaaggtcaaggtccttttgaaacactgcagcgatcttaattttgttagatttggagttcaataaatggagtatcctgagttgcccttgctcttctggcctggcctgcacagggcccagggagagatttgttcttgtgtgacttagagctgggtgtgggtactaattagcttttttcgactttgtcttgggatagacagtggctatgggaggattggacttttgagttgggctctgggtctcttggacaactttacaatttactggcttccaagacttcctgcttcaaaacccccagccagactattcatggcccattcagatcttcatgttcatcccacaagtgcaagaacagttaacctttcttaattgatttttgtaattggaggtttatattgtcttgcctaatgcatattctcttttttttttttttttggagacggagtcttgttctgttgccaggctggagtgcggtggtgcaatctcagctcactgcaatctccacctccgtgggttcaagaggttctcctgcctcagcctcctgagtagccggggagctacaagcttgcaccaccacacccagctaattttttttttttttttgagaggagtctcgctctgtcgcccaggcttgagtgcagtggcgcgatctcggctcactgcaagctctgtctcctgggttcatgccattctcctgcttcagcctcccgagtagtcccaggagtagctgggactacaggtgcccaccaccacacccagctaatttttttgtatttttagtagagatggggtttcaccatgttatccaggatggttttgatctcctgacctcgtgatccgcccgccttggcctcccaaaagtgctgggattataggcgtgagccaccgcccgggcaaatttttgtatttttagtagagatggggtttcaccgtgttggccaggatggtctcaatctgaccttgtgatctgcccacctcggcctcccaaagtgctaggattactggcgtgagccaccactcctagccttaatgcatattcttaaatatacaaaggtagatttgttatgaaaattgctttggggctctaataacctaccttttaagaatgagaaactgctgggcttaagggagttcagtatgaatcaagattgaaccattcaaatgtggctgtgatttctgcatatatcatagatgggatccttctgagaatactggaatagggaattaggacaccaagccaattcagctgtgaaccttattcttgtacttttctttcttgctggtaattttatggagcaggttaagaaggctgctctgtgttaggataaactgtataccaataatgttgacaacctgtaatgagtgttgcattttacttcttgtatcttttccttcctaccttgatgccagtaatctataagggatctttatagtttgaatgtatttgaataacttcagtatactttagttctacttttttatttgactcacaaccattcttaggtctcaagtattcccatgtgttttaaaagcctgaagtcagtgagatgaaattcaacatcaagaatttgaagtaacttgtaaggaaaaataatataaagataccattggggcagtggctcacgcctgtaatctcagcactttgggaggctgaggtggaaggatcacttgaagccagagtttgagaccagcctgtgcaacacagcaagaccccgtctctacaaaaacttaaaaaattagctggctgtggtgttgctcacccatagttccagctactcgggaagctgaggcagtaagatcacttgagcccaggaggccgatgctgcagtgaactgtgattgttccactacagtccagcctgggtgacagagaaaagaaaaagaaaacattacataatttggctagagcataataatttgattttctggtttttgaaaatttgagttgcaataaaaggatatttcagtgtgcgatttcaattttccgtagcaaatgtatatatagaaaaatgttaaaatagatgtatttgaataccttaaaaaatacaagaaactggaagaaagataatattgcaaagcatctacatatatcctaggccttttgtgtacaaggttatttgtgacaattgtaaggtattatgaaggcaggtaggattatctccgttttacagatagggaagctgaggcctagaggtggaaacttgcccagtgatgtaagattcatctcccggttatgccctcctggaaagcccttcccaacatattatgttgtccatagagggaaaaatgagcaaagacagatggcttaactctggtgtgtgactaagatataggaaatttatagaggaggttctatcaatgtgccgacttactttgtgttttatgttctgagaacgattaccagccatctcaaattctgtggttgtcaaagctcccctggggttgttgctggttggcccccacttgctttgagactttgatgccagggcaggttgagaggaactgacttcagctgagtttgatcttggatctgggaaagagaaatgctttgaaaatcacggcaactctgggaagtttaaaagatattaatgtatcctggagagtttgaggctttgcagaaacttattggcagagcagaatgattctgaaaaatgctacatcagtgaggggatatttgataaggtattttctgccaactcgggtattcacttagcattgtttatcctttaagatatgtatacacatacttcctctgtgagtttaccctactaacaaagttttatccccagcctcaaccttgctttgggtctccaggcccaagtttctcaccatctcttggatgattgctccagcccactctgctgccacctgggatccaacatgttcaaacccagctgtgaacttcacagagtattaaaagaaagagcctttgcttcagcagtttatgttattaagacggaggcttgggtcatgttatctctctccaccaatgtgtaaggtgaaagtcctattaggtaagacggacgccagatttccagagcaaggggaggagagacccgagcaacatcacttccctgaagacctagctcctgcgcgcggccggggactgtgactccacatgccggcgttacttacccgggcccgcgcctgactcgccacacctcattttgcggccgc

SEQ ID NO: 348873 - DNA, 2689 bp, Homo sapiens
agcgggcggcaagcggaggaggcgtggcgagcggatcatccgcttccggagtcgaggttttcgggcttgtaccgcttggcggtgcggcctggtgtcggcttgcaggttctttctgtgtttgttctctgccctgccaaggccgtagagctggtgcgtgcgggtagcggggctctccgaggagccgcacgccggcggcaccatggtccacctcactactctcctctgcaaggcctaccgtgggggccacttaaccatccgccttgccctgggtggctgcaccaatcggccgttctaccgcattgtggctgctcacaacaagtgtcccagggatggccgtttcgtagagcagctgggctcctatgatccattgcccaacagtcatggagaaaaactcgttgccctcaacctagacaggatccgtcattggattggctgcggggcccacctctctaagcctatggaaaagcttctgggtcttgctggctttttccctctgcatcctatgatgatcacaaatgctgagagactgcgaaggaaacgggcacgtgaagtcctgttagcttctcagaaaacagatgcagaagctacagatacagaggctacagaaacataaatgagctgactttagtgagcatagcagtgggaacaaggtcaaggtccttttgaaacactgcagcgatcttaattttgttagatttggagttcaataaatggagtatcctgagttgcccttgctcttctggcctggcctgcacagggcccagggagagatttgttcttgtgtgacttagagctgggtgtgggtactaattagcttttttcgactttgtcttgggatagacagtggctatgggaggattggacttttgagttgggctctgggtctcttggacaactttacaatttactggcttccaagacttcctgcttcaaaacccccagccagactattcatggcccattcagatcttcatgttcatcccacaagtgcaagaacagttaacctttcttaattgatttttgtaattggaggtttatattgtcttgcctaatgcatattctcttttttttttttttttggagacggagtcttgttctgttgccaggctggagtgcggtggtgcaatctcagctcactgcaatctccacctccgtgggttcaagaggttctcctgcctcagcctcctgagtagccggggagctacaagcttgcaccaccacacccagctaattttttttttttttttgagaggagtctcgctctgtcgcccaggcttgagtgcagtggcgcgatctcggctcactgcaagctctgtctcctgggttcatgccattctcctgcttcagcctcccgagtagtcccaggagtagctgggactacaggtgcccaccaccacacccagctaatttttttgtatttttagtagagatggggtttcaccatgttatccaggatggttttgatctcctgacctcgtgatccgcccgccttggcctcccaaaagtgctgggattataggcgtgagccaccgcccgggcaaatttttgtatttttagtagagatggggtttcaccgtgttggccaggatggtctcaatctgaccttgtgatctgcccacctcggcctcccaaagtgctaggattactggcgtgagccaccactcctagccttaatgcatattcttaaatatacaaaggtagatttgttatgaaaattgctttggggctctaataacctaccttttaagaatgagaaactgctgggcttaagggagttcagtatgaatcaagattgaaccattcaaatgtggctgtgatttctgcatatatcatagatgggatccttctgagaatactggaatagggaattaggacaccaagccaattcagctgtgaaccttattcttgtacttttctttcttgctggtaattttatggagcaggttaagaaggctgctctgtgttaggataaactgtataccaataatgttgacaacctgtaatgagtgttgcattttacttcttgtatcttttccttcctaccttgatgccagtaatctataagggatctttatagtttgaatgtatttgaataacttcagtatactttagttctacttttttatttgactcacaaccattcttaggtctcaagtattcccatgtgttttaaaagcctgaagtcagtgagatgaaattcaacatcaagaatttgaagtaacttgtaaggaaaaataatataaagataccattggggcagtggctcacgcctgtaatctcagcactttgggaggctgaggtggaaggatcacttgaagccagagtttgagaccagcctgtgcaacacagcaagaccccgtctctacaaaaacttaaaaaattagctggctgtggtgttgctcacccatagttccagctactcgggaagctgaggcagtaagatcacttgagcccaggaggccgatgctgcagtgaactgtgattgttccactacagtccagcctgggtgacagagaaaagaaaaagaaaacattacataatttggctagagcataataatttgattttctggtttttgaaaatttgagttgcaataaaaggatatttcagtgtgcgattaaaaaaaaaaaaaaaaaaaaaaaaaaaaaaaaaaaaaaaaaaaaaaaaaaaaaaaaaaaaaaaaaaaaaa

SEQ ID NO: 348874 - DNA, 2305 bp, Homo sapiens
agcgggcggcaagcggaggaggcgtggcgagcggatcatccgcttccggagtcgaggttttcgggcttgtaccgcttggcggtgcggcctggtgtcggcttgcaggttctttctgtgtttgttctctgccctgccaaggccgtagagctggtgcgtgcgggtagcggggctctccgaggagccgcacgccggcggcaccatggtccacctcactactctcctctgcaaggcctaccgtgggggccacttaaccatccgccttgccctgggtggctgcaccaatcggccgttctaccgcattgtggctgctcacaacaagtgtcccagggatggccgtttcgtagagcagctgggctcctatgatccattgcccaacagtcatggagaaaaactcgttgccctcaacctagacaggatccgtcattggattggctgcggggcccacctctctaagcctatggaaaagcttctgggtcttgctggctttttccctctgcatcctatgatgatcacaaatgctgagagactgcgaaggaaacgggcacgtgaagtcctgttagcttctcagaaaacagatgcagaagctacagatacagaggctacagaaacataaatgagctgactttagtgagcatagcagtgggaacaaggtcaaggtccttttgaaacactgcagcgatcttaattttgttagatttggagttcaataaatggagtatcctgagttgcccttgctcttctggcctggcctgcacagggcccagggagagatttgttcttgtgtgacttagagctgggtgtgggtactaattagcttttttcgactttgtcttgggatagacagtggctatgggaggattggacttttgagttgggctctgggtctcttggacaactttacaatttactggcttccaagacttcctgcttcaaaacccccagccagactattcatggcccattcagatcttcatgttcatcccacaagtgcaagaacagttaacctttcttaattgatttttgtaattggaggtttatattgtcttgcctaatgcatattctcttttttttttttttttggagacggagtcttgttctgttgccaggctggagtgcggtggtgcaatctcagctcactgcaatctccacctccgtgggttcaagaggttctcctgcctcagcctcctgagtagccggggagctacaagcttgcaccaccacacccagctaattttttttttttttttgagaggagtctcgctctgtcgcccaggcttgagtgcagtggcgcgatctcggctcactgcaagctctgtctcctgggttcatgccattctcctgcttcagcctcccgagtagtcccaggagtagctgggactacaggtgcccaccaccacacccagctaatttttttgtatttttagtagagatggggtttcaccatgttatccaggatggttttgatctcctgacctcgtgatccgcccgccttggcctcccaaaagtgctgggattataggcgtgagccaccgcccgggcaaatttttgtatttttagtagagatggggtttcaccgtgttggccaggatggtctcaatctgaccttgtgatctgcccacctcggcctcccaaagtgctaggattactggcgtgagccaccactcctagccttaatgcatattcttaaatatacaaaggtagatttgttatgaaaattgctttggggctctaataacctaccttttaagaatgagaaactgctgggcttaagggagttcagtatgaatcaagattgaaccattcaaatgtggctgtgatttctgcatatatcatagatgggatccttctgagaatactggaatagggaattaggacaccaagccaattcagctgtgaaccttattcttgtacttttctttcttgctggtaattttatggagcaggttaagaaggctgctctgtgttaggataaactgtataccaataatgttgacaacctgtaatgagtgttgcattttacttcttgtatcttttccttcctaccttgatgccagtaatctataagggatctttatagtttgaatgtatttgaataacttcagtatactttagttctacttttttatttgactcacaaccattcttaggtctcaagtattcccatgtgttttaaaagcctgaagtcagtgagatgaaattcaacatcaagaatttgaagtaacttgtaaggaaaaaaaaaaaaaaaaaaaaaaaaaaaaaaaaaaaaaaaaaaaaaaaaaaaaaaaaaaaaaaaaaaaaaaaaaaa

SEQ ID NO: 348875 - DNA, 746 bp, Homo sapiens
agcgggcggcaagcggaggaggcgtggcgagcggatcatccgcttccggagtcgaggttttcgggcttgtaccgcttggcggtgcggcctggtgtcggcttgcaggttctttctgtgtttgttctctgccctgccaaggccgtagagctggtgcgtgcgggtagcggggctctccgaggagccgcacgccggcggcaccatggtccacctcactactctcctctgcaaggcctaccgtgggggccacttaaccatccgccttgccctgggtggctgcaccaatcggccgttctaccgcattgtggctgctcacaacaagtgtcccagggatggccgtttcgtagagcagctgggctcctatgatccattgcccaacagtcatggagaaaaactcgttgccctcaacctagacaggatccgtcattggattggctgcggggcccacctctctaagcctatggaaaagcttctgggtcttgctggctttttccctctgcatcctatgatgatcacaaatgctgagagactgcgaaggaaacgggcacgtgaagtcctgttagcttctcagaaaacagatgcagaagctacagatacagaggctacagaaacataaatgagctgactttagtgagcatagcagtgggaacaaggtcaaggtccttttgaaacactgcagcgatcttaattttgttagatttggagttcaataaatggagtatcctgaaaaaaaaaaaaaaaaaaaaaaa

SEQ ID NO: 348876 - DNA, 744 bp, Homo sapiens
atgaggtagtgtagttgggggtgctcagggaggaggagggtcaggaaagtggggtttgtgttgctctgtgttgagtcagccgaccctgattctggtcctagctcttgttggtaaaaactcactcactttcctcctttcagctccagtttcattatctatgaaatgaggggatggaaccagaatctctttggaggttccagctgtatcctggggcctccctgaatgttcatggagatgttccttagccagtaattcaagatgaggaaaactaggcccaggtttccacaagagaaggggagggatcttgatgacctgtctcagagcggctgaagtggtactgttggaattagggtgggtgggtgggaggaggtagtttttaaagacctcccagaagtggaagcagagggctggaggtttcgtgaaggtgttgatgaggatccaccgggtggtaggggacatggctacgcgcttcccccgggaggcttgttggagatgggtttatgtgggagctgctgggggtgcctgctgtcctgcaaggggctgacccaagggaccctgctctaggaaagatgctccgtcctgtctggccctaaaccctggagagagaatgcagctgtggtttgagggagggtctgtgccccttgctgtcaggaagttttcctttatatttagccttctcttttcatgtattttttgaggccctcgactaaaaaattaaatttaattttaaaaaataacaatgaa

SEQ ID NO: 348877 - DNA, 470 bp, Homo sapiens
tataaatgagctttgtgaagtcgactgttcagtgccctgaatatcagctgcttgaaaacatctgaaaacaaagacattcatttacatctctgtccatgttaccctcctgaacatgtgtgcctgttacatatatctttggaatattgtccaggaaatcagacagctctcaccacttgatattggatccctctcacatacgtgaagtgtcctcagcaggaaaagctttaaccatggatcgattttcacaccacgtttcaatggagaacatgaactcaggccacagaactgtaacacttagaagactctgtggaatacgaacacttctctgatttatcctcatgaaattgttttcctgatgaaaggagtgttcttcagaagaatacagaatggatatctctttgttggagaacaaccgtatttttgttttaaaatgatattaaaataaatacatttacttcaagtaaggatta

SEQ ID NO: 348878 - DNA, 492 bp, Homo sapiens
gccccctgggccccgccgcgccccgccccgccccgccttccggcccggggtttgggaagaagaaaaagaaaccaaatgaccccagacttcagccgacagtcacatgataagaaaaataaattgcaggacagaactaggctaagaaaagcacaatcaatgatgtccctaagtgccagctctcccctaaaagttccagctcatctcgcctggcctccccctgagtcagtgggactcccagacactgccaccacagctgaaattctcatgcagcatcctcacaggcaccctgggccccaagcatgactcatccaggttccagagccaaagtggactgaacatggaaagacttttattatagaaatgacaagatgctttgcacagtggagagctgaatttacttggctcccattagaaactctttcagcttaagtacttattgtggtagtgagtcctacggtatttcagtaaaaaggaattcatggcaaaaaagtg

SEQ ID NO: 348879 - DNA, 773 bp, Homo sapiens
ctaaaaaatatctattttaaaaaatatttaaaattaaaatatgggaatgatgtcaatactctcatctaaaaatcccaagtctctagccccagctgtgacactttttagcggtgtgaacttggactgtcactcaaattcctcagtttcatttatttgcaaaatgaaacttattaatactatcctctctaccacatgtgatcttgaggttcagatgaaataaagttagtgagagcactttggacgctaaagaccgtattatctgtagctcagggtgaagattgcatgggggcagaggggagtgaagttgggaaatctcaataaatcccatccagccctataattttgtaaaatcgttttatgtcattaaaaataagtttaactagatagctcccttggtatttcaataaccctcgctttcatgattcctttttcctttctagatgtccctaagtgccagctctcccctaaaagttccagctcatctcgcctggcctccccctgagtcagtgggactcccagacactgccaccacagctgaaattctcatgcagcatcctcacaggcaccctgggccccaagcatgactcatccaggttccagagccaaagtggactgaacatggaaagacttttattatagaaatgacaagatgctttgcacagtggagagctgaatttacttggctcccattagaaactctttcagcttaagtacttattgtggtagtgagtcctacggtatttcagtaaaaaggaattcatggcaaaaaagtg

SEQ ID NO: 348880 - DNA, 1287 bp, Homo sapiens
gtgagggactggagggagtcggagaaaaagctgacctaatgaaactgtggcaacgtcagcgcttgaggcttgaagagggagacaagctaaaagaggatatccagttgtttcatgatggcatttgcacctccaaaaaacacagatggtcccaaaatgcagacaaagatgagcacctggacacccctaaaccatcagctattgaatgaccgggtatttgaagaaagaagagccctgcttggcaaatggtttgacaaatggacagactctcaaagaagaagaatcctcacaggcctgttggagcgctgctcgctgtcccagcaaaagttctgctgtcgaaagcttcaagagaaaattccagcagaagccctggactttacaaccaagcttccaagggtgttatctttatacatcttttctttcctggaccctcggagcctttgtcgttgtgcacaggtgtgctggcattggaagaaccttgctgagctggaccagctctggatgctgaaatgtttacggtttaactggtacatcaatttctctccaactccctttgagcaggggatctggaagaagcactatattcaaatggtgaaagaacttcatattaccaagcctaagacacccccaaaggatggatttgtaatcgctgacgttcaactagttacaagcaattctccagaggaaaaacagtcccctttatcagcttttcggtcctcttcctctttaagaaagaagaataactcaggggagaaagcacttccaccctggcgatcttctgataagcacccaacagatatcattcgttttaattacctagacaaccgtgaccccatggagactgtccagcaaggaagaagaaaaagaaaccaaatgaccccagacttcagccgacagtcacatgataagaaaaataaattgcaggacagaactaggctaagaaaagcacaatcaatgatgtccctaagtgccagctctcccctaaaagttccagctcatctcgcctggcctccccctgagtcagtgggactcccagacactgccaccacagctgaaattctcatgcagcatcctcacaggcaccctgggccccaagcatgactcatccaggttccagagccaaagtggactgaacatggaaagacttttattatagaaatgacaagatgctttgcacagtggagagctgaatttacttggctcccattagaaactctttcagcttaagtacttattgtggtagtgagtcctacggtatttcagtaaaaaggaattcatggcaaaaaagtg

SEQ ID NO: 348881 - DNA, 1138 bp, Homo sapiens
gtgagggactggagggagtcggagaaaaagctgacctaatgaaactgtggcaacgtcagcgcttgaggcttgaagagggagacaagctaaaagaggatatccagttgtttcatgatggcatttgcacctccaaaaaacacagatggtcccaaaatgcagacaaagatgagcacctggacacccctaaaccatcagctattgaatgaccgggtatttgaagaaagaagagccctgcttggcaaatggtttgacaaatggacagactctcaaagaagaagaatcctcacaggcctgttggagcgctgctcgctgtcccagcaaaagttctgctgtcgaaagcttcaagagaaaattccagcagaagccctggactttacaaccaagcttccaagggtgttatctttatacatcttttctttcctggaccctcggagcctttgtcgttgtgcacaggtgtgctggcattggaagaaccttgctgagctggaccagctctggatgctgaaatgtttacggtttaactggtacatcaatttctctccaactccctttgagcaggggatctggaagaagcactatattcaaatggtgaaagaacttcatattaccaagcctaagacacccccaaaggatggatttgtaatcgctgacgttcaactagttacaagcaattctccagaggaaaaacagtcccctttatcagcttttcggtcctcttcctctttaagaaagaagaataactcaggggagaaagcacttccaccctggcgatcttctgataagcacccaacagatatcattcgttttaattacctagacaaccgtgaccccatggagactgtccagcaaggaagaagaaaaagaaaccaaatgaccccagacttcagccgacagtcacatgataagaaaaataaattgcaggacagaactaggctaagaaaagcacaatcaatggtaagtattgtttatgaaagattcatcaccataacattaatgaaaatctccagatctctaatcctatttgcaaaattgaattcatttatttaatcagaatcatggagtggtgatttaaattcgggtttctgacactgactggcagagaagccatgaccttgaagatacactttatttaatctct

SEQ ID NO: 348882 - DNA, 1251 bp, Homo sapiens
gtgagggactggagggagtcggagaaaaagctgacctaatgaaactgtggcaacgtcagcgcttgaggcttgaagagggagacaagctaaaagaggatatccagttgtttcatgatggcatttgcacctccaaaaaacacagatggtcccaaaatgcagacaaagatgagcacctggacacccctaaaccatcagctattgaatgaccggtttgacaaatggacagactctcaaagaagaagaatcctcacaggcctgttggagcgctgctcgctgtcccagcaaaagttctgctgtcgaaagcttcaagagaaaattccagcagaagccctggactttacaaccaagcttccaagggtgttatctttatacatcttttctttcctggaccctcggagcctttgtcgttgtgcacaggtgtgctggcattggaagaaccttgctgagctggaccagctctggatgctgaaatgtttacggtttaactggtacatcaatttctctccaactccctttgagcaggggatctggaagaagcactatattcaaatggtgaaagaacttcatattaccaagcctaagacacccccaaaggatggatttgtaatcgctgacgttcaactagttacaagcaattctccagaggaaaaacagtcccctttatcagcttttcggtcctcttcctctttaagaaagaagaataactcaggggagaaagcacttccaccctggcgatcttctgataagcacccaacagatatcattcgttttaattacctagacaaccgtgaccccatggagactgtccagcaaggaagaagaaaaagaaaccaaatgaccccagacttcagccgacagtcacatgataagaaaaataaattgcaggacagaactaggctaagaaaagcacaatcaatgatgtccctaagtgccagctctcccctaaaagttccagctcatctcgcctggcctccccctgagtcagtgggactcccagacactgccaccacagctgaaattctcatgcagcatcctcacaggcaccctgggccccaagcatgactcatccaggttccagagccaaagtggactgaacatggaaagacttttattatagaaatgacaagatgctttgcacagtggagagctgaatttacttggctcccattagaaactctttcagcttaagtacttattgtggtagtgagtcctacggtatttcagtaaaaaggaattcatggcaaaaaagtg

SEQ ID NO: 348883 - DNA, 726 bp, Homo sapiens
gtgagggactggagggagtcggagaaaaagctgacctaatgaaactgtggcaacgtcagcgcttgaggcttgaagagggagacaagctaaaagaggatatccagttgtttcatgatggcatttgcacctccaaaaaacacagatggtcccaaaatgcagacaaagatgagcacctggacacccctaaaccatcagctattgaatgaccgggtatttgaagaaagaagagccctgcttggcaaatggtttgacaaatggacagactctcaaagaagaagaatcctcacaggcctgttggagcgctgctcgctgtcccagcaaaagttctgctgtcgaaagcttcaagagaaaattccagcagaagccctggactttacaaccaagcttccaagggtgttatctttatacatcttttctttcctggaccctcggagcctttgtcgttgtgcacaggtgtgctggcattggaagaaccttgctgagctggaccagctctggatgctgaaatgtttacggtttaactggtacatcaatttctctccaactccctttgagcaggggatctggaagaagcactatattcaaatggtgaaagaacttcatattaccaagcctaaggtgaattttagacagaaagccacaagcttgcaaacattggctctttgcaaattctagaactaagaataaaggatcagactggaagttggggaagggaggtagttcaaa

SEQ ID NO: 348884 - DNA, 571 bp, Homo sapiens
ccacaatgaaaaacataaaaatctttaaaatatcaagcaagtgcatcaaggcctttgcctgggcccctcatcccccaggtgtccgcatggctcatgccctcactgtattcaggtgctttgcccaaatgtcacctcctcagaaatgcttgccccccaccccctatctgaaatggcacttccatgcacacttctccatcactttatctgcctcatttttctttgcagcatttagcatcctgagtgctgaacccgctggcctttcaaagtgtctggtgcttagctggagctgtgataggaacagcagggtctatgcatttggggttcaaaggtggccgtattcttggaggtcccagtagtaggaagtagtaggtcctcacctgggggtgcagggctgttccctggatgtgcagactggatcatatggagggtaaatgagatacagggagacagtagttctagaacaagaaggcgaggtctgcactatgggtagcaatgagaatagaaaaggaagtctgagtgccttttttccttcctacaatcctgagaaagattttggacctttaaaatgaaa

SEQ ID NO: 348885 - DNA, 394 bp, Homo sapiens
atcacaattatattttacttgacattactattttcttaaggaggctaacagaaaaatcaatgggtgggcataaagagaaagaaatcatatgaggctaccacacatattctgttactgaatttctttcacctaaatatacaatggaatgctctgaattgtatgttttcttttcccatcatattaaactaaagcaaagttcttgggctgaaagtagaaaaactgcactttagtgttctaatgatccacacctttcacatattcacttcgcttacaattctagatgctaactcaataagaaagaaagaaacaaattcagagtatttcagtcaccaacaacaacagcagtaacaataacaataatattaatatcagttaatatttatttaactcttag

SEQ ID NO: 348886 - DNA, 3122 bp, Homo sapiens
aggggaggggactgggaacggtgggagccgccgtgtgtggagaagctgctgccggtgtcatggcggagctgagtgaggaggcgctgctgtcagtattaccgacgatccgggtccctaaggctggagaccgggtccacaaagacgagtgcgccttctccttcgacacgccggagtctgaggggggcctctacatctgtatgaacacgtttctgggctttgggaaacagtatgtggagagacatttcaataagaccggccagcgagtctacttgcacctccggcggacccggcgcccgaaagaggaggaccctgctacaggcactggagacccaccccggaagaagcccacgcggctggctattggtgttgaaggcggatttgaccttagcgaggagaagtttgaattagacgaggatgtgaagattgtcattttgccagattacctggagattgcccgggatggactggggggactgcctgacattgtcagagatcgggtgaccagtgcagtggaggccctactgtcggccgactcagcctcccgcaagcaggaggtgcaggcatgggatggggaagtacggcaggtgtctaagcatgccttcagcctcaagcagttggacaaccctgctcgaatccctccctgtggctggaagtgctccaagtgtgacatgagagagaacctgtggctcaacctgactgatggctccatcctctgtgggcgacgctacttcgatggcagtgggggcaacaaccacgctgtggagcactaccgagagacaggctacccgttagctgtcaagctgggcaccatcacccctgatggagctgacgtgtactcatatgatgaggatgacatggtcctggaccccagcctggctgagcacctgtcccacttcggcatcgacatgctgaagatgcagaagacagacaagacgatgactgagttggagatagacatgaaccagcggattggtgaatgggagctgatccaggagtcaggtgtgccactcaagcccctgtttgggcctggctacacaggcatccggaacctgggtaacagctgctacctcaactctgtggtccaggtgctcttcagcatccctgacttccagaggaagtatgtggataagctggagaagatcttccagaatgccccgacggaccctacccaggatttcagcacccaggtggccaagctgggccatggccttctctccggggagtattccaagccagtaccggagtcgggcgatggggagcgggtgccagaacagaaggaagttcaagatggcattgcccctcggatgttcaaggccctcatcggcaagggccaccctgaattctccaccaaccggcagcaggatgcccaggagttcttccttcaccttatcaacatggtggagaggaattgccggagctctgaaaatcctaatgaagtgttccgcttcttggtggaggaaaagatcaagtgcctggccacagagaaggtgaagtacacccagcgagttgactacatcatgcagctgcctgtgcccatggatgcagcccttaacaaagaggagcttctggagtacgaggagaagaagcggcaagccgaagaggagaagatggcactgccagaactggttcgggcccaggtgcccttcagctcttgcctggaggcctacggggcccctgagcaggtcgatgacttctggagcacggccctgcaggccaagtcagtagctgtcaagaccacacgatttgcctcattccctgactacctggtcatccagatcaagaagttcaccttcggcttagactgggtgcccaagaaactggatgtgtccatcgagatgccagaggagctcgacatctcccagttgaggggcacagggctgcagcccggagaggaggagctgccagacattgccccacccctggtcactccggatgagcccaaagcgcccatgctggatgaatcagtcatcatccagctggtggagatgggattccctatggacgcctgccgcaaagctgtctactacacgggcaacagcggggctgaggccgccatgaactgggtcatgtcacacatggatgatccagattttgcaaaccccctcatcctgcctggctctagtgggccgggctccacaagcgcagcagccgacccccctcctgaggactgtgtgaccaccattgtctccatgggcttctcccgggaccaggccttgaaagcgctgcgggccacgaacaatagtttagaacgggctgtggactggatcttcagtcacattgacgacctggatgctgaagctgccatggacatctcagagggccgctcagctgccgactccatctctgagtctgtgccagtgggacctaaagtccgggatggtcctggaaagtatcagctctttgccttcattagtcacatgggcacctctaccatgtgtggtcactacgtctgccacatcaagaaagaaggcagatgggtgatctacaatgaccagaaagtgtgtgcctccgagaagccgcccaaggacctgggctacatctacttctaccagagagtggccagctaagagcctgcctcaccccttaccaatgagggcaggggaagaccacctggcatgagggagaggggctgagggatggacttcagcccctctgctctgtaccctttttccttttgtccccggcagcagggaagaagctggaggccgtgggagaatggctgggcagagcagaggggcagcgatagactctggggatggagcaggacggggacgggaggggccggccacctgtctgtaaggagactttgttgcttcccctgcccccggaatccacagtgctctgcttctctgtgtcgccccgcccagccccctggtgtggagggaggggtctcgtttgtgcgcgtgggtgtagctttgtgcatcctctcccagtggagcgatcacctgtgcctcccctccccctttgtttgcccctgtgtggttggtcaaggagggatgtgagggaaatagggaccccccgacttgccctcctgcctcagtctttcccccaccctgtctcttccttgtccttctctggaaaatgccaaaatacacgatgtgaataaaagtacaacggctaaa

SEQ ID NO: 348887 - DNA, 3702 bp, Homo sapiens
aggggaggggactgggaacggtgggagccgccgtgtgtggagaagctgctgccggtgtcatggcggagctgagtgaggaggcgctgctgtcagtattaccgacgatccgggtccctaaggctggagaccgggtccacaaagacgagtgcgccttctccttcgacacgccggagtctgaggggggcctctacatctgtatgaacacgtttctgggctttgggaaacagtatgtggagagacatttcaataagaccggccagcgagtctacttgcacctccggcggacccggcgcccgaaagaggaggaccctgctacaggcactggagacccaccccggaagaagcccacgcggctggctattggtgttgaaggcggatttgaccttagcgaggagaagtttgaattagacgaggatgtgaagattgtcattttgccagattacctggagattgcccgggatggactggggggactgcctgacattgtcagagatcgggtgaccagtgcagtggaggccctactgtcggccgactcagcctcccgcaagcaggaggtgcaggcatgggatggggaagtacggcaggtgtctaagcatgccttcagcctcaagcagttggacaaccctgctcgaatccctccctgtggctggaagtgctccaagtgtgacatgagagagaacctgtggctcaacctgactgatggctccatcctctgtgggcgacgctacttcgatggcagtgggggcaacaaccacgctgtggagcactaccgagagacaggctacccgttagctgtcaagctgggcaccatcacccctgatggagctgacgtgtactcatatgatgaggatgacatggtcctggaccccagcctggctgagcacctgtcccacttcggcatcgacatgctgaagatgcagaagacagacaagacgatgactgagttggagatagacatgaaccagcggattggtgaatgggagctgatccaggagtcaggtgtgccactcaagcccctgtttgggcctggctacacaggcatccggaacctgggtaacagctgctacctcaactctgtggtccaggtgctcttcagcatccctgacttccagaggaagtatgtggataagctggagaagatcttccagaatgccccgacggaccctacccaggatttcagcacccaggtggccaagctgggccatggccttctctccggggagtattccaagccagtaccggagtcgggcgatggggagcgggtgccagaacagaaggaagttcaagatggcattgcccctcggatgttcaaggccctcatcggcaagggccaccctgaattctccaccaaccggcagcaggatgcccaggagttcttccttcaccttatcaacatggtggagaggaattgccggagctctgaaaatcctaatgaagtgttccgcttcttggtggaggaaaagatcaagtgcctggccacagagaaggtgaagtacacccagcgagttgactacatcatgcagctgcctgtgcccatggatgcagcccttaacaaagaggagcttctggagtacgaggagaagaagcggcaagccgaagaggagaagatggcactgccagaactggttcgggcccaggtgcccttcagctcttgcctggaggcctacggggcccctgagcaggtcgatgacttctggagcacggccctgcaggccaagtcagtagctgtcaagaccacacgatttgcctcattccctgactacctggtcatccagatcaagaagttcaccttcggcttagactgggtgcccaagaaactggatgtgtccatcgagatgccagaggagctcgacatctcccagttgaggggcacagggctgcagcccggagaggaggagctgccagacattgccccacccctggtcactccggatgagcccaaagcgcccatgctggatgaatcagtcatcatccagctggtggagatgggattccctatggacgcctgccgcaaagctgtctactacacgggcaacagcggggctgaggccgccatgaactgggtcatgtcacacatggatgatccagattttgcaaaccccctcatcctgcctggctctagtgggccgggctccacaagcgcagcagccgacccccctcctgaggactgtgtgaccaccattgtctccatgggcttctcccgggaccaggccttgaaagcgctgcgggccacgaacaatagtttagaacgggctgtggactggatcttcagtcacattgacgacctggatgctgaagctgccatggacatctcagagggccgctcagctgccgactccatctctgagtctgtgccagtgggacctaaagtccgggatggtcctggaaagtatcagctctttgccttcattagtcacatgggcacctctaccatgtgtggtcactacgtctgccacatcaagaaagaaggcagatgggtgatctacaatgaccagaaagtgtgtgcctccgagaagccgcccaaggacctgggctacatctacttctaccagagagtggccagctaagagcctgcctcaccccttaccaatgagggcaggggaagaccacctggcatgagggagaggggctgagggatggacttcagcccctctgctctgtaccctttttccttttgtccccggcagcagggaagaagctggaggccgtgggagaatggctgggcagagcagaggggcagcgatagactctggggatggagcaggacggggacgggaggggccggccacctgtctgtaaggagactttgttgcttcccctgcccccggaatccacagtgctctgcttctctgtgtcgccccgcccagccccctggtgtggagggaggggtctcgtttgtgcgcgtgggtgtagctttgtgcatcctctcccagtggagcgatcacctgtgcctcccctccccctttgtttgcccctgtgtggttggtcaaggagggatgtgagggaaatagggaccccccgacttgccctcctgcctcagtctttcccccaccctgtctcttccttgtccttctctggaaaatgccaaaatacacgatgtgaataaaagtacaacggctaaaaaaaaaaaaaaaaaaaaaaaaaaaaaaaaaaaaaaaaaaaaaaaaaaaaaaaaaaaaaaaaaaaaaaactaaagggggggcccagatcccatattccccctatagagacccgaattccaattcattgcccaatgcttaccaaccgcggggactggaaaaaccctggcgcctccaaatttaatcttcttgaaggaaatacccttttagtcacctaggcaaatatccaaaaggccattcacctgttcccccttcctagcatttcgcaaaacggaatggccaatggcaaattgcaaccgttatttcttcgttaaaatccacggtaaattttaaatcaataatctcatttctaaaccaattggcctaaattggattagaaacaccagtccctcttttagaacgtgcctcctcggtaacagggcaaatccctttattgggccatgccccttacgtgaccattccctattaagttttagggccccacggccccaaaccctaaacgtaactctatgggacccccatttagactttactggacacaccaggaacctctcgcaatgaattgactatcgacaggcccccg

SEQ ID NO: 348888 - DNA, 3165 bp, Homo sapiens
aggggaggggactgggaacggtgggagccgccgtgtgtggagaagctgctgccggtgtcatggcggagctgagtgaggaggcgctgctgtcagtattaccgacgatccgggtccctaaggctggagaccgggtccacaaagacgagtgcgccttctccttcgacacgccggagtctgaggggggcctctacatctgtatgaacacgtttctgggctttgggaaacagtatgtggagagacatttcaataagaccggccagcgagtctacttgcacctccggcggacccggcgcccgaaagaggaggaccctgctacaggcactggagacccaccccggaagaagcccacgcggctggctattggtgttgaaggcggatttgaccttagcgaggagaagtttgaattagacgaggatgtgaagattgtcattttgccagattacctggagattgcccgggatggactggggggactgcctgacattgtcagagatcgggtgaccagtgcagtggaggccctactgtcggccgactcagcctcccgcaagcaggaggtgcaggcatgggatggggaagtacggcaggtgtctaagcatgccttcagcctcaagcagttggacaaccctgctcgaatccctccctgtggctggaagtgctccaagtgtgacatgagagagaacctgtggctcaacctgactgatggctccatcctctgtgggcgacgctacttcgatggcagtgggggcaacaaccacgctgtggagcactaccgagagacaggctacccgttagctgtcaagctgggcaccatcacccctgatggagctgacgtgtactcatatgatgaggatgacatggtcctggaccccagcctggctgagcacctgtcccacttcggcatcgacatgctgaagatgcagaagacagacaagacgatgactgagttggagatagacatgaaccagcggattggtgaatgggagctgatccaggagtcaggtgtgccactcaagcccctgtttgggcctggctacacaggcatccggaacctgggtaacagctgctacctcaactctgtggtccaggtgctcttcagcatccctgacttccagaggaagtatgtggataagctggagaagatcttccagaatgccccgacggaccctacccaggatttcagcacccaggtggccaagctgggccatggccttctctccggggagtattccaagccagtaccggagtcgggcgatggggagcgggtgccagaacagaaggaagttcaagatggcattgcccctcggatgttcaaggccctcatcggcaagggccaccctgaattctccaccaaccggcagcaggatgcccaggagttcttccttcaccttatcaacatggtggagaggaattgccggagctctgaaaatcctaatgaagtgttccgcttcttggtggaggaaaagatcaagtgcctggccacagagaaggtgaagtacacccagcgagttgactacatcatgcagctgcctgtgcccatggatgcagcccttaacaaagaggagcttctggagtacgaggagaagaagcggcaagccgaagaggagaagatggcactgccagaactggttcgggcccaggtgcccttcagctcttgcctggaggcctacggggcccctgagcaggtcgatgacttctggagcacggccctgcaggccaagtcagtagctgtcaagaccacacgatttgcctcattccctgactacctggtcatccagatcaagaagttcaccttcggcttagactgggtgcccaagaaactggatgtgtccatcgagatgccagaggagctcgacatctcccagttgaggggcacagggctgcagcccggagaggaggagctgccagacattgccccacccctggtcactccggatgagcccaaagcgcccatgctggatgaatcagtcatcatccagctggtggagatgggattccctatggacgcctgccgcaaagctgtctactacacgggcaacagcggggctgaggccgccatgaactgggtcatgtcacacatggatgatccagattttgcaaaccccctcatcctgcctggctctagtgggccgggctccacaagcgcagcagccgacccccctcctgaggactgtgtgaccaccattgtctccatgggcttctcccgggaccaggccttgaaagcgctgcgggccacgaacaatagtttagaacgggctgtggactggatcttcagtcacattgacgacctggatgctgaagctgccatggacatctcagagggccgctcagctgccgactccatctctgagtctgtgccagtgggacctaaagtccgggatggtcctggaaagtatcagctctttgccttcattagtcacatgggcacctctaccatgtgtggtcactacgtctgccacatcaagaaagaaggcagatgggtgatctacaatgaccagaaagtgtgtgcctccgagaagccgcccaaggacctgggctacatctacttctaccagagagtggccagctaagagcctgcctcaccccttaccaatgagggcaggggaagaccacctggcatgagggagaggggctgagggatggacttcagcccctctgctctgtaccctttttccttttgtccccggcagcagggaagaagctggaggccgtgggagaatggctgggcagagcagaggggcagcgatagactctggggatggagcaggacggggacgggaggggccggccacctgtctgtaaggagactttgttgcttcccctgcccccggaatccacagtgctctgcttctctgtgtcgccccgcccagccccctggtgtggagggaggggtctcgtttgtgcgcgtgggtgtagctttgtgcatcctctcccagtggagcgatcacggggctcccttcccttggttggccgggggttggtcacggcgagggagggaatagggccccgaatggccggcaattcccaacaggcttctggctctggaagcgcaacacagggtaagcacggtaaaaaaaaaaaaggggggcaaacccggagcaagacactttaaggcgcaggtgaaaagggggccggggaaaggcgagaatggggacacagaatatttgt

SEQ ID NO: 348889 - DNA, 2584 bp, Homo sapiens
aggggaggggactgggaacggtgggagccgccgtgtgtggagaagctgctgccggtgtcatggcggagctgagtgaggaggcgctgctgtcagtattaccgacgatccgggtccctaaggctggagaccgggtccacaaagacgagtgcgccttctccttcgacacgccggagtctgaggggggcctctacatctgtatgaacacgtttctgggctttgggaaacagtatgtggagagacatttcaataagaccggccagcgagtctacttgcacctccggcggacccggcgcccgaaagaggaggaccctgctacaggcactggagacccaccccggaagaagcccacgcggctggctattggtgttgaaggcggatttgaccttagcgaggagaagtttgaattagacgaggatgtgaagattgtcattttgccagattacctggagattgcccgggatggactggggggactgcctgacattgtcagagatcgggtgaccagtgcagtggaggccctactgtcggccgactcagcctcccgcaagcaggaggtgcaggcatgggatggggaagtacggcaggtgtctaagcatgccttcagcctcaagcagttggacaaccctgctcgaatccctccctgtggctggaagtgctccaagtgtgacatgagagagaacctgtggctcaacctgactgatggctccatcctctgtgggcgacgctacttcgatggcagtgggggcaacaaccacgctgtggagcactaccgagagacaggctacccgttagctgtcaagctgggcaccatcacccctgatggagctgacgtgtactcatatgatgaggatgacatggtcctggaccccagcctggctgagcacctgtcccacttcggcatcgacatgctgaagatgcagaagacagacaagacgatgactgagttggagatagacatgaaccacgagttgactacatcatgcagctgcctgtgcccatggatgcagcccttaacaaagaggagcttctggagtacgaggagaagaagcggcaagccgaagaggagaagatggcactgccagaactggttcgggcccaggtgcccttcagctcttgcctggaggcctacggggcccctgagcaggtcgatgacttctggagcacggccctgcaggccaagtcagtagctgtcaagaccacacgatttgcctcattccctgactacctggtcatccagatcaagaagttcaccttcggcttagactgggtgcccaagaaactggatgtgtccatcgagatgccagaggagctcgacatctcccagttgaggggcacagggctgcagcccggagaggaggagctgccagacattgccccacccctggtcactccggatgagcccaaagcgcccatgctggatgaatcagtcatcatccagctggtggagatgggattccctatggacgcctgccgcaaagctgtctactacacgggcaacagcggggctgaggccgccatgaactgggtcatgtcacacatggatgatccagattttgcaaaccccctcatcctgcctggctctagtgggccgggctccacaagcgcagcagccgacccccctcctgaggactgtgtgaccaccattgtctccatgggcttctcccgggaccaggccttgaaagcgctgcgggccacgaacaatagtttagaacgggctgtggactggatcttcagtcacattgacgacctggatgctgaagctgccatggacatctcagagggccgctcagctgccgactccatctctgagtctgtgccagtgggacctaaagtccgggatggtcctggaaagtatcagctctttgccttcattagtcacatgggcacctctaccatgtgtggtcactacgtctgccacatcaagaaagaaggcagatgggtgatctacaatgaccagaaagtgtgtgcctccgagaagccgcccaaggacctgggctacatctacttctaccagagagtggccagctaagagcctgcctcaccccttaccaatgagggcaggggaagaccacctggcatgagggagaggggctgagggatggacttcagcccctctgctctgtaccctttttccttttgtccccggcagcagggaagaagctggaggccgtgggagaatggctgggcagagcagaggggcagcgatagactctggggatggagcaggacggggacgggaggggccggccacctgtctgtaaggagactttgttgcttcccctgcccccggaatccacagtgctctgcttctctgtgtcgccccgcccagccccctggtgtggagggaggggtctcgtttgtgcgcgtgggtgtagctttgtgcatcctctcccagtggagcgatcacctgtgcctcccctccccctttgtttgcccctgtgtggttggtcaaggagggatgtgagggaaatagggaccccccgacttgccctcctgcctcagtctttcccccaccctgtctcttccttgtccttctctggaaaatgccaaaatacacgatgtgaataaaagtacaacggctaaa

SEQ ID NO: 348890 - DNA, 2242 bp, Homo sapiens
aggggaggggactgggaacggtgggagccgccgtgtgtggagaagctgctgccggtgtcatggcggagctgagtgaggaggcgctgctgtcagtattaccgacgatccgggtccctaaggctggagaccgggtccacaaagacgagtgcgccttctccttcgacacgccggagtctgaggggggcctctacatctgtatgaacacgtttctgggctttgggaaacagtatgtggagagacatttcaataagaccggccagcgagtctacttgcacctccggcggacccggcgcccgaaagaggaggaccctgctacaggcactggagacccaccccggaagaagcccacgcggctggctattggtgttgaaggcggatttgaccttagcgaggagaagtttgaattagacgaggatgtgaagattgtcattttgccagattacctggagattgcccgggatggactggggggactgcctgacattgtcagagatcgggtgaccagtgcagtggaggccctactgtcggccgactcagcctcccgcaagcaggaggtgcaggcatgggatggggaagtacggcaggtgtctaagcatgccttcagcctcaagcagttggacaaccctgctcgaatccctccctgctgcctgtgcccatggatgcagcccttaacaaagaggagcttctggagtacgaggagaagaagcggcaagccgaagaggagaagatggcactgccagaactggttcgggcccaggtgcccttcagctcttgcctggaggcctacggggcccctgagcaggtcgatgacttctggagcacggccctgcaggccaagtcagtagctgtcaagaccacacgatttgcctcattccctgactacctggtcatccagatcaagaagttcaccttcggcttagactgggtgcccaagaaactggatgtgtccatcgagatgccagaggagctcgacatctcccagttgaggggcacagggctgcagcccggagaggaggagctgccagacattgccccacccctggtcactccggatgagcccaaagcgcccatgctggatgaatcagtcatcatccagctggtggagatgggattccctatggacgcctgccgcaaagctgtctactacacgggcaacagcggggctgaggccgccatgaactgggtcatgtcacacatggatgatccagattttgcaaaccccctcatcctgcctggctctagtgggccgggctccacaagcgcagcagccgacccccctcctgaggactgtgtgaccaccattgtctccatgggcttctcccgggaccaggccttgaaagcgctgcgggccacgaacaatagtttagaacgggctgtggactggatcttcagtcacattgacgacctggatgctgaagctgccatggacatctcagagggccgctcagctgccgactccatctctgagtctgtgccagtgggacctaaagtccgggatggtcctggaaagtatcagctctttgccttcattagtcacatgggcacctctaccatgtgtggtcactacgtctgccacatcaagaaagaaggcagatgggtgatctacaatgaccagaaagtgtgtgcctccgagaagccgcccaaggacctgggctacatctacttctaccagagagtggccagctaagagcctgcctcaccccttaccaatgagggcaggggaagaccacctggcatgagggagaggggctgagggatggacttcagcccctctgctctgtaccctttttccttttgtccccggcagcagggaagaagctggaggccgtgggagaatggctgggcagagcagaggggcagcgatagactctggggatggagcaggacggggacgggaggggccggccacctgtctgtaaggagactttgttgcttcccctgcccccggaatccacagtgctctgcttctctgtgtcgccccgcccagccccctggtgtggagggaggggtctcgtttgtgcgcgtgggtgtagctttgtgcatcctctcccagtggagcgatcacctgtgcctcccctccccctttgtttgcccctgtgtggttggtcaaggagggatgtgagggaaatagggaccccccgacttgccctcctgcctcagtctttcccccaccctgtctcttccttgtccttctctggaaaatgccaaaatacacgatgtgaataaaagtacaacggctaaa

SEQ ID NO: 348891 - DNA, 1818 bp, Homo sapiens
cccagggaatgccctgcttcaccagccaaggttccagtctgggccaccaggagtaggtagattaacctcgtccagtggacactcagcttgttagcagagctgcatggaaacaggcgagatatattggacatgtgtcaggggtgctttggaagggtagaggaactgaaatacggacacagagccagtagggagaggctaaggaggcaaagaagcagcaccctccgaaggatccaccaacccattctgtcaccagaggagcttctggagtacgaggagaagaagcggcaagccgaagaggagaagatggcactgccagaactggttcgggcccaggtgcccttcagctcttgcctggaggcctacggggcccctgagcaggtcgatgacttctggagcacggccctgcaggccaagtcagtagctgtcaagaccacacgatttgcctcattccctgactacctggtcatccagatcaagaagttcaccttcggcttagactgggtgcccaagaaactggatgtgtccatcgagatgccagaggagctcgacatctcccagttgaggggcacagggctgcagcccggagaggaggagctgccagacattgccccacccctggtcactccggatgagcccaaagcgcccatgctggatgaatcagtcatcatccagctggtggagatgggattccctatggacgcctgccgcaaagctgtctactacacgggcaacagcggggctgaggccgccatgaactgggtcatgtcacacatggatgatccagattttgcaaaccccctcatcctgcctggctctagtgggccgggctccacaagcgcagcagccgacccccctcctgaggactgtgtgaccaccattgtctccatgggcttctcccgggaccaggccttgaaagcgctgcgggccacgaacaatagtttagaacgggctgtggactggatcttcagtcacattgacgacctggatgctgaagctgccatggacatctcagagggccgctcagctgccgactccatctctgagtctgtgccagtgggacctaaagtccgggatggtcctggaaagtatcagctctttgccttcattagtcacatgggcacctctaccatgtgtggtcactacgtctgccacatcaagaaagaaggcagatgggtgatctacaatgaccagaaagtgtgtgcctccgagaagccgcccaaggacctgggctacatctacttctaccagagagtggccagctaagagcctgcctcaccccttaccaatgagggcaggggaagaccacctggcatgagggagaggggctgagggatggacttcagcccctctgctctgtaccctttttccttttgtccccggcagcagggaagaagctggaggccgtgggagaatggctgggcagagcagaggggcagcgatagactctggggatggagcaggacggggacgggaggggccggccacctgtctgtaaggagactttgttgcttcccctgcccccggaatccacagtgctctgcttctctgtgtcgccccgcccagccccctggtgtggagggaggggtctcgtttgtgcgcgtgggtgtagctttgtgcatcctctcccagtggagcgatcacctgtgcctcccctccccctttgtttgcccctgtgtggttggtcaaggagggatgtgagggaaatagggaccccccgacttgccctcctgcctcagtctttcccccaccctgtctcttccttgtccttctctggaaaatgccaaaatacacgatgtgaataaaagtacaacggctaaa

SEQ ID NO: 348892 - DNA, 1042 bp, Homo sapiens
atccacagattttgcaaaccccctcatcctgcctggctctagtgggccgggctccacaagcgcagcagccgacccccctcctgaggactgtgtgaccaccattgtctccatgggcttctcccgggaccaggccttgaaagcgctgcgggccacgaacaatagtttagaacgggctgtggactggatcttcagtcacattgacgacctggatgctgaagctgccatggacatctcagagggccgctcagctgccgactccatctctgagtctgtgccagtgggacctaaagtccgggatggtcctggaaagtatcagctctttgccttcattagtcacatgggcacctctaccatgtgtggtcactacgtctgccacatcaagaaagaaggcagatgggtgatctacaatgaccagaaagtgtgtgcctccgagaagccgcccaaggacctgggctacatctacttctaccagagagtggccagctaagagcctgcctcaccccttaccaatgagggcaggggaagaccacctggcatgagggagaggggctgagggatggacttcagcccctctgctctgtaccctttttccttttgtccccggcagcagggaagaagctggaggccgtgggagaatggctgggcagagcagaggggcagcgatagactctggggatggagcaggacggggacgggaggggccggccacctgtctgtaaggagactttgttgcttcccctgcccccggaatccacagtgctctgcttctctgtgtcgccccgcccagccccctggtgtggagggaggggtctcgtttgtgcgcgtgggtgtagctttgtgcatcctctcccagtggagcgatcacctgtgcctcccctccccctttgtttgcccctgtgtggttggtcaaggagggatgtgagggaaatagggaccccccgacttgccctcctgcctcagtctttcccccaccctgtctcttccttgtccttctctggaaaatgccaaaatacacgatgtgaataaaagtacaacggctaaa

SEQ ID NO: 348893 - DNA, 424 bp, Homo sapiens
gaagtgccccttctcacacagacagacaagacgatgactgagttggagatagacatgaaccagcggattggtgaatgggagctgatccaggagtcaggtgtgccactcaagcccctgtttgggcctggctacacaggcatccggaacctgggtaacagctgctacctcaactctgtggtccaggtgctcttcagcatccctgacttccagaggaagtgagtagtgccctctccttccccaggccccctcctggtcagcaccctctgggcatactcctccttcagcttccctcagcacctctgtgtttgattctagtcttagagtagttcctatcggctgggtgtgttggcccacacccgtaatcccagtacttcgggaggccaagatgggagaattgcttgagcccaggaggttgagaccagcc

SEQ ID NO: 348894 - DNA, 3191 bp, Homo sapiens
aggggaggggactgggaacggtgggagccgccgtgtgtggagaagctgctgccggtgtcatggcggagctgagtgaggaggcgctgctgtcagtattaccgacgatccgggtccctaaggctggagaccgggtccacaaagacgagtgcgccttctccttcgacacgccggagtctgaggggggcctctacatctgtatgaacacgtttctgggctttgggaaacagtatgtggagagacatttcaataagaccggccagcgagtctacttgcacctccggcggacccggcgcccgaaagaggaggaccctgctacaggcactggagacccaccccggaagaagcccacgcggctggctattggtgttgaaggcggatttgaccttagcgaggagaagtttgaattagacgaggatgtgaagattgtcattttgccagattacctggagattgcccgggatggactggggggactgcctgacattgtcagagatcgggtgaccagtgcagtggaggccctactgtcggccgactcagcctcccgcaagcaggaggtgcaggcatgggatggggaagtacggcaggtgtctaagcatgccttcagcctcaagcagttggacaaccctgctcgaatccctccctgtggctggaagtgctccaagtgtgacatgagagagaacctgtggctcaacctgactgatggctccatcctctgtgggcgacgctacttcgatggcagtgggggcaacaaccacgctgtggagcactaccgagagacaggctacccgttagctgtcaagctgggcaccatcacccctgatggagctgacgtgtactcatatgatgaggatgacatggtcctggaccccagcctggctgagcacctgtcccacttcggcatcgacatgctgaagatgcagaagacagacaagacgatgactgagttggagatagacatgaaccagcggattggtgaatgggagctgatccaggagtcaggtgtgccactcaagcccctgtttgggcctggctacacaggcatccggaacctgggtaacagctgctacctcaactctgtggtccaggtgctcttcagcatccctgacttccagaggaagtatgtggataagctggagaagatcttccagaatgccccgacggaccctacccaggatttcagcacccaggtggccaagctgggccatggccttctctccggggagtattccaagccagtaccggagtcgggcgatggggagcgggtgccagaacagaaggaagttcaagatggcattgcccctcggatgttcaaggccctcatcggcaagggccaccctgaattctccaccaaccggcagcaggatgcccaggagttcttccttcaccttatcaacatggtggagaggaattgccggagctctgaaaatcctaatgaagtgttccgcttcttggtggaggaaaagatcaagtgcctggccacagagaaggtgaagtacacccagcgagttgactacatcatgcagctgcctgtgcccatggatgcagcccttaacaaagaggagcttctggagtacgaggagaagaagcggcaagccgaagaggagaagatggcactgccagaactggttcgggcccaggtgcccttcagctcttgcctggaggcctacggggcccctgagcaggtcgatgacttctggagcacggccctgcaggccaagtcagtagctgtcaagaccacacgatttgcctcattccctgactacctggtcatccagatcaagaagttcaccttcggcttagactgggtgcccaagaaactggatgtgtccatcgagatgccagaggagctcgacatctcccagttgaggggcacagggctgcagcccggagaggaggagctgccagacattgccccacccctggtcactccggatgagcccaaaggtagccttggtttctatggcaacgaagacgaagactccttctgctcccctcacttctcctctccgacatcgcccatgctggatgaatcagtcatcatccagctggtggagatgggattccctatggacgcctgccgcaaagctgtctactacacgggcaacagcggggctgaggccgccatgaactgggtcatgtcacacatggatgatccagattttgcaaaccccctcatcctgcctggctctagtgggccgggctccacaagcgcagcagccgacccccctcctgaggactgtgtgaccaccattgtctccatgggcttctcccgggaccaggccttgaaagcgctgcgggccacgaacaatagtttagaacgggctgtggactggatcttcagtcacattgacgacctggatgctgaagctgccatggacatctcagagggccgctcagctgccgactccatctctgagtctgtgccagtgggacctaaagtccgggatggtcctggaaagtatcagctctttgccttcattagtcacatgggcacctctaccatgtgtggtcactacgtctgccacatcaagaaagaaggcagatgggtgatctacaatgaccagaaagtgtgtgcctccgagaagccgcccaaggacctgggctacatctacttctaccagagagtggccagctaagagcctgcctcaccccttaccaatgagggcaggggaagaccacctggcatgagggagaggggctgagggatggacttcagcccctctgctctgtaccctttttccttttgtccccggcagcagggaagaagctggaggccgtgggagaatggctgggcagagcagaggggcagcgatagactctggggatggagcaggacggggacgggaggggccggccacctgtctgtaaggagactttgttgcttcccctgcccccggaatccacagtgctctgcttctctgtgtcgccccgcccagccccctggtgtggagggaggggtctcgtttgtgcgcgtgggtgtagctttgtgcatcctctcccagtggagcgatcacctgtgcctcccctccccctttgtttgcccctgtgtggttggtcaaggagggatgtgagggaaatagggaccccccgacttgccctcctgcctcagtctttcccccaccctgtctcttccttgtccttctctggaaaatgccaaaatacacgatgtgaataaaagtacaacggctaaa

SEQ ID NO: 348895 - DNA, 2875 bp, Homo sapiens
aggggaggggactgggaacggtgggagccgccgtgtgtggagaagctgctgccggtgtcatggcggagctgagtgaggaggcgctgctgtcagtattaccgacgatccgggtccctaaggctggagaccgggtccacaaagacgagtgcgccttctccttcgacacgccggagtctgaggggggcctctacatctgtatgaacacgtttctgggctttgggaaacagtatgtggagagacatttcaataagaccggccagcgagtctacttgcacctccggcggacccggcgcccgaaagaggaggaccctgctacaggcactggagacccaccccggaagaagcccacgcggctggctattggtgttgaaggcggatttgaccttagcgaggagaagtttgaattagacgaggatgtgaagattgtcattttgccagattacctggagattgcccgggatggactggggggactgcctgacattgtcagagatcgggtgaccagtgcagtggaggccctactgtcggccgactcagcctcccgcaagcaggaggtgcaggcatgggatggggaagtacggcaggtgtctaagcatgccttcagcctcaagcagttggacaaccctgctcgaatccctccctgtggctggaagtgctccaagtgtgacatgagagagaacctgtggctcaacctgactgatggctccatcctctgtgggcgacgctacttcgatggcagtgggggcaacaaccacgctgtggagcactaccgagagacaggctacccgttagctgtcaagctgggcaccatcacccctgatggagctgacgtgtactcatatgatgaggatgacatggtcctggaccccagcctggctgagcacctgtcccacttcggcatcgacatgctgaagatgcagaagacagacaagacgatgactgagttggagatagacatgaaccagcggattggtgaatgggagctgatccaggagtcaggtgtgccactcaagcccctgtttgggcctggctacacaggcatccggaacctgggtaacagctgctacctcaactctgtggtccaggtgctcttcagcatccctgacttccagaggaagtatgtggataagctggagaagatcttccagaatgccccgacggaccctacccaggatttcagcacccaggtggccaagctgggccatggccttctctccggggagtattccaagccagtaccggagtcgggcgatggggagcgggtgccagaacagaaggaagttcaagatggcattgcccctcggatgttcaaggccctcatcggcaagggccaccctgaattctccaccaaccggcagcaggatgcccaggagttcttccttcaccttatcaacatggtggagaggaattgccggagctctgaaaatcctaatgaagtgttccgcttcttggtggaggaaaagatcaagtgcctggccacagagaaggtgaagtacacccagcgagttgactacatcatgcagctgcctgtgcccatggatgcagcccttaacaaagaggagcttctggagtacgaggagaagaagcggcaagccgaagaggagaagatggcactgccagaactggttcgggcccaggtgcccttcagctcttgcctggaggcctacggggcccctgagcaggtcgatgacttctggagcacggccctgcaggccaagtcagtagctgtcaagaccacacgatttgcctcattccctgactacctggtcatccagatcaagaagttcaccttcggcttagactgggtgcccaagaaactggatgtgtccatcgagatgccagaggagctcgacatctcccagttgaggggcacagggctgcagcccggagaggaggagctgccagacattgccccacccctggtcactccggatgagcccaaagcgcccatgctggatgaatcagtcatcatccagctggtggagatgggattccctatggacgcctgccgcaaagctgtctactacacgggcaacagcggggctgaggccgccatgaactgggtcatgtcacacatggatgatccagattttgcaaaccccctcatcctgcctggctctagtgggccgggctccacaagcgcagcagccgacccccctcctgaggactgtgtgaccaccattgtctccatgggcttctcccgggaccaggccttgaaagcgctgcgggccacgaacaatagtttagaacgggctgtggactggatcttcagtcacattgacgacctggatgctgaagctgccatggacatctcagagggccgctcagctgccgactccatctctgagtctgtgccagtgggacctaaagtccgggatggtcctggaaagtatcagctctttgccttcattagtcacatgggcacctctaccatgtgtggtcactacgtctgccacatcaagaaagaaggcagatgggtgatctacaatgaccagaaagtgtgtgcctccgagaagccgcccaaggacctgggctacatctacttctaccagagagtggccagctaagagcctgcccccggaatccacagtgctctgcttctctgtgtcgccccgcccagccccctggtgtggagggaggggtctcgtttgtgcgcgtgggtgtagctttgtgcatcctctcccagtggagcgatcacctgtgcctcccctccccctttgtttgcccctgtgtggttggtcaaggagggatgtgagggaaatagggaccccccgacttgccctcctgcctcagtctttcccccaccctgtctcttccttgtccttctctggaaaatgccaaaatacacgatgtgaataaaagtacaacggctaaa

SEQ ID NO: 348896 - DNA, 2541 bp, Homo sapiens
ggctagtagaggcctgggtgttaattcgccgagggttggacacctgcgtcgaatcctccctgtggctggaagtgctccaagtgtgacatgagagagaacctgtggctcaacctgactgatggctccatcctctgtgggcgacgctacttcgatggcagtgggggcaacaaccacgctgtggagcactaccgagagacaggctacccgttagctgtcaagctgggcaccatcacccctgatggagctgacgtgtactcatatgatgaggatgacatggtcctggaccccagcctggctgagcacctgtcccacttcggcatcgacatgctgaagatgcagaagacagacaagacgatgactgagttggagatagacatgaaccagcggattggtgaatgggagctgatccaggagtcaggtgtgccactcaagcccctgtttgggcctggctacacaggcatccggaacctgggtaacagctgctacctcaactctgtggtccaggtgctcttcagcatccctgacttccagaggaagtatgtggataagctggagaagatcttccagaatgccccgacggaccctacccaggatttcagcacccaggtggccaagctgggccatggccttctctccggggagtattccaagccagtaccggagtcgggcgatggggagcgggtgccagaacagaaggaagttcaagatggcattgcccctcggatgttcaaggccctcatcggcaagggccaccctgaattctccaccaaccggcagcaggatgcccaggagttcttccttcaccttatcaacatggtggagaggaattgccggagctctgaaaatcctaatgaagtgttccgcttcttggtggaggaaaagatcaagtgcctggccacagagaaggtgaagtacacccagcgagttgactacatcatgcagctgcctgtgcccatggatgcagcccttaacaaagaggagcttctggagtacgaggagaagaagcggcaagccgaagaggagaagatggcactgccagaactggttcgggcccaggtgcccttcagctcttgcctggaggcctacggggcccctgagcaggtcgatgacttctggagcacggccctgcaggccaagtcagtagctgtcaagaccacacgatttgcctcattccctgactacctggtcatccagatcaagaagttcaccttcggcttagactgggtgcccaagaaactggatgtgtccatcgagatgccagaggagctcgacatctcccagttgaggggcacagggctgcagcccggagaggaggagctgccagacattgccccacccctggtcactccggatgagcccaaagcgcccatgctggatgaatcagtcatcatccagctggtggagatgggattccctatggacgcctgccgcaaagctgtctactacacgggcaacagcggggctgaggccgccatgaactgggtcatgtcacacatggatgatccagattttgcaaaccccctcatcctgcctggctctagtgggccgggctccacaagcgcagcagccgacccccctcctgaggactgtgtgaccaccattgtctccatgggcttctcccgggaccaggccttgaaagcgctgcgggccacgaacaatagtttagaacgggctgtggactggatcttcagtcacattgacgacctggatgctgaagctgccatggacatctcagagggccgctcagctgccgactccatctctgagtctgtgccagtgggacctaaagtccgggatggtcctggaaagtatcagctctttgccttcattagtcacatgggcacctctaccatgtgtggtcactacgtctgccacatcaagaaagaaggcagatgggtgatctacaatgaccagaaagtgtgtgcctccgagaagccgcccaaggacctgggctacatctacttctaccagagagtggccagctaagagcctgcctcaccccttaccaatgagggcaggggaagaccacctggcatgagggagaggggctgagggatggacttcagcccctctgctctgtaccctttttccttttgtccccggcagcagggaagaagctggaggccgtgggagaatggctgggcagagcagaggggcagcgatagactctggggatggagcaggacggggacgggaggggccggccacctgtctgtaaggagactttgttgcttcccctgcccccggaatccacagtgctctgcttctctgtgtcgccccgcccagccccctggtgtggagggaggggtctcgtttgtgcgcgtgggtgtagctttgtgcatcctctcccagtggagcgatcacctgtgcctcccctccccctttgtttgcccctgtgtggttggtcaaggagggatgtgagggaaatagggaccccccgacttgccctcctgcctcagtctttcccccaccctgtctcttccttgtccttctctggaaaatgccaaaatacacgatgtgaataaaagtacaacggctaaa

SEQ ID NO: 348897 - DNA, 2396 bp, Homo sapiens
aggggaggggactgggaacggtgggagccgccgtgtgtggagaagctgctgccggtgtcatggcggagctgagtgaggaggcgctgctgtcagtattaccgacgatccgggtccctaaggctggagaccgggtccacaaagacgagtgcgccttctccttcgacacgccggagtctgaggggggcctctacatctgtatgaacacgtttctgggctttgggaaacagtatgtggagagacatttcaataagaccggccagcgagtctacttgcacctccggcggacccggcgcccgaaagaggaggaccctgctacaggcactggagacccaccccggaagaagcccacgcggctggctattggtgttgaaggcggatttgaccttagcgaggagaagtttgaattagacgaggatgtgaagattgtcattttgccagattacctggagattgcccgggatggactggggggactgcctgacattgtcagagatcgggtatgactgccccctatgctacccaagattctagagcaagatgggccagggtagtggtgtcttaggcaagcactgacaaagctgaaggccaaggggaagaggggcatgtggggcagggggttgggtattgcctctgaccctctgcttcccccaggtgaccagtgcagtggaggccctactgtcggccgactcagcctcccgcaagcaggaggtgcaggcatgggatggggaagtacggcaggtgtctaagcatgccttcagcctcaagcagttggacaaccctgctcgaatccctccctgctgcctgtgcccatggatgcagcccttaacaaagaggagcttctggagtacgaggagaagaagcggcaagccgaagaggagaagatggcactgccagaactggttcgggcccaggtgcccttcagctcttgcctggaggcctacggggcccctgagcaggtcgatgacttctggagcacggccctgcaggccaagtcagtagctgtcaagaccacacgatttgcctcattccctgactacctggtcatccagatcaagaagttcaccttcggcttagactgggtgcccaagaaactggatgtgtccatcgagatgccagaggagctcgacatctcccagttgaggggcacagggctgcagcccggagaggaggagctgccagacattgccccacccctggtcactccggatgagcccaaagcgcccatgctggatgaatcagtcatcatccagctggtggagatgggattccctatggacgcctgccgcaaagctgtctactacacgggcaacagcggggctgaggccgccatgaactgggtcatgtcacacatggatgatccagattttgcaaaccccctcatcctgcctggctctagtgggccgggctccacaagcgcagcagccgacccccctcctgaggactgtgtgaccaccattgtctccatgggcttctcccgggaccaggccttgaaagcgctgcgggccacgaacaatagtttagaacgggctgtggactggatcttcagtcacattgacgacctggatgctgaagctgccatggacatctcagagggccgctcagctgccgactccatctctgagtctgtgccagtgggacctaaagtccgggatggtcctggaaagtatcagctctttgccttcattagtcacatgggcacctctaccatgtgtggtcactacgtctgccacatcaagaaagaaggcagatgggtgatctacaatgaccagaaagtgtgtgcctccgagaagccgcccaaggacctgggctacatctacttctaccagagagtggccagctaagagcctgcctcaccccttaccaatgagggcaggggaagaccacctggcatgagggagaggggctgagggatggacttcagcccctctgctctgtaccctttttccttttgtccccggcagcagggaagaagctggaggccgtgggagaatggctgggcagagcagaggggcagcgatagactctggggatggagcaggacggggacgggaggggccggccacctgtctgtaaggagactttgttgcttcccctgcccccggaatccacagtgctctgcttctctgtgtcgccccgcccagccccctggtgtggagggaggggtctcgtttgtgcgcgtgggtgtagctttgtgcatcctctcccagtggagcgatcacctgtgcctcccctccccctttgtttgcccctgtgtggttggtcaaggagggatgtgagggaaatagggaccccccgacttgccctcctgcctcagtctttcccccaccctgtctcttccttgtccttctctggaaaatgccaaaatacacgatgtgaataaaagtacaacggctaaa

SEQ ID NO: 348898 - DNA, 569 bp, Homo sapiens
ccagaaacagggcccattctgtgagaatgggcagggacccacattacaattgtgtggtcattttggttttgggataaggtgccaatccatgggagaaaaatgcatggaatgggtgattggaagagggctgggtcctgggggagggaggaggagcaaacagtggcccaatcagtcggtccgtgtacccacaattcccattacagcgcccatgctggatgaatcagtcatcatccagctggtggagatgggattccctatggacgcctgccgcaaagctgtctactacacgggcaacagcggggctgaggccgccatgaactgggtcatgtcacacatggatgatccaggtaggctggggtggggagcagggtggggcagggcctccatcctcccccaaacacatcaaccccttcacatccacagattttgcaaaccccctcatcctgcctggctctagtgggccgggctccacaagcgcagcagccgacccccctcctgaggactgtgtgaccaccattgtctccatgggcttctcccgggaccaggccttgaaagcgctgcgggccacg

SEQ ID NO: 348899 - DNA, 3625 bp, Homo sapiens
  misc_feature (15)..(16): n is a, c, g, or t
ggggatatctctagnnagcggccgccgccgccgcgggagcgctcccctgcccaccccgcccccgcggccgagcccgggagtcgagtgggagtcggccggccggcgcgggcagcgccgggaccccgcgggggacactgcagccggagcccgggaggggccgcgccgccaccgtctgaactaggatgtcccgacatgaaggtgtcagctgtgatgcatgtttaaaaggaaattttcgaggtcgcagatataagtgtttaatttgctacgattacgatctttgtgcatcttgttatgaaagtggtgcaacaacaacaaggcatacaactgaccacccaatgcagtgcatattaacaagggtagattttgatttatactatggtggggaagctttctctgtagagcagccacagtcttttacttgtccctattgtggaaaaatgggctatacggagacatctcttcaagaacatgttacttctgaacatgcagaaacatcaacagaagtgatttgtccaatatgtgcagcgttacctggaggcgatcctaatcatgtcacggatgactttgcagctcatcttacacttgaacacagagcccctagagatttagatgaatcgagtggtgttcgacatgtacgtagaatgtttcaccctggccggggattaggaggtcctcgtgctcgtagatcaaacatgcactttactagcagttctactggtggactttcttcttctcagagttcatattctccaagcaatagggaagccatggatcctatagctgagcttttatctcagttatcaggagtgagacgttctgcaggaggacagcttaattcctctggcccttccgcttctcagttacaacaactgcagatgcagctgcagctagaacggcagcatgcccaggcagcacggcaacaactggagaccgcacgcaacgcaacccggcgtactaacacaagcagtgtcaccactacaatcacacaatccacagcaacaaccaacatagctaatacagaaagcagtcagcagactctacagaattcccagtttcttttaacaaggttgaatgatcctaaaatgtctgaaacggagcgccagtccatggaaagcgagcgtgcagaccgcagcctgtttgtccaagagctccttctgtccactttagtgcgtgaagagagctcatcctcagatgaggatgatcggggggagatggcagattttggtgctatgggctgtgtagatattatgcctttagatgttgctttagaaaacctaaatttaaaagagagtaataaaggaaatgagcctccaccacctcctctttgatgacatcccaattcgcagacaatgtcctctgtgctgtatttgccaatgaaagtggacaacaactatcttgggtttgtttggtgattgtaatttcaggtctgtcactcttgttacattgtgtacattcaaaaggaagagagaaaatatatatgataatcatttccacttaactaatttttacttctagcaggtaaatgtaggtagcagtgcaggggtgatctctgcttcctgtaccttgacatgcaaaaggctctcctaatactccacattcaaactgaagaggaaaattgaaatctctaatgaagctgctgtgtgtatttatgaatattaatgaataaaaactgcttggatggtttaccttaactactgcatgaggttttttgcagcgtgcatgagttttagtgaccttgttatttaagaagttaaatacaaggagtaaaacttaaaaaaaaaatacaaagcccaaagctttcccaaacattattcaatggttacacgacgaagtagcttttgaataatgtctgcctgaatcacctttctttgtgtgcctcctacgcacaaagccagctctgcagtggaatctggggattatagccgggtgtggcactccgccctgtgtgactgtcctgtcgccctgttagtcatcttgcctgtgtggagctcagcctgtctctttaactcatctgtagaagacacaccagtaaagctactgttggaatctgctgcaggggcctttgtgtgccctaaaaacaaatcctgttcatgtttgtttaaagtttttactttttgtggttgtttaaaattttttcaattgttaaatatgttttattcaggtgtagatgaatttcatttattgactgttcaacagagttaacctgaattatgttgtctttgtttttaaaaatctcacattctcaatcatattttgcattatttatgtatttgctttgtagtttgctgagacagatcagtatcaggggagctttgaggatttgccttcccagatttgtcagtatattacaaccaaattcttaatgctaattttagcaccttttatttattgggttttttctggcataaaaagtaaagccttttaattgaatcatgccacctatatgcctatattattaatcctatgtgtaaaaaaaatgtacagctttttttgggtttgttttggggtttggaagggccgggttattttttatttcctgtttcagtttttgtgcatagactttcacaatagctccaaggcagggacagcgggtttgggggttgggagggcagtttttggaatgtaaatttaggacttttaaaaaggtgcgcacagcttctgataaatttataactagacttaacctaatcatgtctcgttccagttctcttttctctgagcccttttcaaagtctcctctctttctcctgtcatccttttcctttcctgtccgtgtatctccgtttcttcaacatgacaagcatacagacttgaacacccctccggtgttcttccgagaactgtgaagtccatgttcatccaaatgtaaccaaaaaagaagtcaccctacatgtctgaaaaactgttgcttctcctctgaaacttcaaactccaacgatttccaaatacaatagctttgttttctttagttctgtaatggataatgtttaaaggaaaactttacaccaggcttctggttacactagaagtcaagcccattagggattttcattttttttcatttggttgttgagaagtttcaaaaatcagttttcaagctgtggtctttcaaacacatctgcacataagtcacacatttcaataaagcattttcaagactgttaaaaaaaagaatttctttggtgttagtggattaacctaaccattactctgagattttatatctctaatccagtattttttttctttttatgctaaacatgggagatcctggttttgtgtgaatgcattattttggatgtgagaaataaatgccaattatatgtactttcccttttctgcacaaattctgggaaaatgtaaaagccttcattttttaacatggttttagggaacaactgtaagtccattcagagcagtttaatttagatgatcacttttaacactgcagaagacctaaggagtcataagattccatctcatgtagaatactgtatattaattattttttaccagatattttacaaatacctcacctcatcctgtatgtaatcaataatgtattattttagggtagaacgacacagaatatcaatataaaaatatattcaagcccttgaaattc

SEQ ID NO: 348900 - DNA, 3156 bp, Homo sapiens
  misc_feature (15)..(16): n is a, c, g, or t
ggggatatctctagnnagcggccgccgccgccgcgggagcgctcccctgcccaccccgcccccgcggccgagcccgggagtcgagtgggagtcggccggccggcgcgggcagcgccgggaccccgcgggggacactgcagccggagcccgggaggggccgcgccgccaccgtctgaactaggatgtcccgacatgaaggtgtcagctgtgatgcatgtttaaaaggaaattttcgaggtcgcagatataagtgtttaatttgctacgattacgatctttgtgcatcttgttatgaaagtggtgcaacaacaacaaggcatacaactgaccacccaatgcagtgcatattaacaagggtagattttgatttatactatggtggggaagctttctctgtagagcagccacagtcttttacttgtccctattgtggaaaaatgggctatacggagacatctcttcaagaacatgttacttctgaacatgcagaaacatcaacagaagtgatttgtccaatatgtgcagcgttacctggaggcgatcctaatcatgtcacggatgactttgcagctcatcttacacttgaacacagagcccctagagatttagatgaatcgagtggtgttcgacatgtacgtagaatgtttcaccctggccggggattaggaggtcctcgtgctcgtagatcaaacatgcactttactagcagttctactggtggactttcttcttctcagagttcatattctccaagcaatagggaagccatggatcctatagctgagcttttatctcagttatcaggagtgagacgttctgcaggaggacagcttaattcctctggcccttccgcttctcagttacaacaactgcagatgcagctgcagctagaacggcagcatgcccaggcagcacggcaacaactggagaccgcacgcaacgcaacccggcgtactaacacaagcagtgtcaccactacaatcacacaatccacagcaacaaccaacatagctaatacagaaagcagtcagcagactctacagaattcccagtttcttttaacaaggttgaatgatcctaaaatgtctgaaacggagcgccagtccatggaaagcgagcgtgcagaccgcagcctgtttgtccaagagctccttctgtccactttagtgcgtgaagagagctcatcctcagatgaggatgatcggggggagatggcagattttggtgctatgggctgtgtagatattatgcctttagatgttgctttagaaaacctaaatttaaaagagagtaataaaggaaatgagcctccaccacctcctctttgatgacatcccaattcgcagacaatgtcctctgtgctgtatttgccaatgaaagtggacaacaactatcttgggtttgtttggtgattgtaatttcaggtctgtcactcttgttacattgtgtacattcaaaaggaagagagaaaatatatatgataatcatttccacttaactaatttttacttctagcaggtaaatgtaggtagcagtgcaggggtgatctctgcttcctgtaccttgacatgcaaaaggctctcctaatactccacattcaaactgaagaggaaaattgaaatctctaatgaagctgctgtgtgtatttatgaatattaatgaataaaaactgcttggatggtttaccttaactactgcatgaggttttttgcagcgtgcatgagttttagtgaccttgttatttaagaagttaaatacaaggagtaaaacttaaaaaaaaaatacaaagcccaaagctttcccaaacattattcaatggttacacgacgaagtagcttttgaataatgtctgcctgaatcacctttctttgtgtgcctcctacgcacaaagccagctctgcagtggaatctggggattatagccgggtgtggcactccgccctgtgtgactgtcctgtcgccctgttagtcatcttgcctgtgtggagctcagcctgtctctttaactcatctgtagaagacacaccagtaaagctactgttggaatctgctgcaggggcctttgtgtgccctaaaaacaaatcctgttcatgtttgtttaaagtttttactttttgtggttgtttaaaattttttcaattgttaaatatgttttattcaggtgtagatgaatttcatttattgactgttcaacagagttaacctgaattatgttgtctttgtttttaaaaatctcacattctcaatcatattttgcattatttatgtatttgctttgtagtttgctgagacagatcagtatcaggggagctttgaggatttgccttcccagatttgtcagtatattacaaccaaattcttaatgctaattttagcaccttttatttattgggttttttctggcataaaaagtaaagccttttaattgaatcatgccacctatatgcctatattattaatcctatgtgtaaaaaaaatgtacagctttttttgggtttgttttggggtttggaagggccgggttattttttatttcctgtttcagtttttgtgcatagactttcacaatagctccaaggcagggacagcgggtttgggggttgggagggcagtttttggaatgtaaatttaggacttttaaaaaggtgcgcacagcttctgataaatttataactagacttaacctaatcatgtctcgttccagttctcttttctctgagcccttttcaaagtctcctctctttctcctgtcatccttttcctttcctgtccgtgtatctccgtttcttcaacatgacaagcatacagacttgaacacccctccggtgttcttccgagaactgtgaagtccatgttcatccaaatgtaaccaaaaaagaagtcaccctacatgtctgaaaaactgttgcttctcctctgaaacttcaaactccaacgatttccaaatacaatagctttgttttctttagttctgtaatggataatgtttaaaggaaaactttacaccaggcttctggttacactagaagtcaagcccattagggattttcattttttttcatttggttgttgagaagtttcaaaaatcagttttcaagctgtggtctttcaaacacatctgcacataagtcacacatttcaataaagcattttcaa

SEQ ID NO: 348901 - DNA, 3469 bp, Homo sapiens
tctttgtgcatcttgttaatatgcactgcattgggtggtcagttgtatgccttgtccctattgtggaaaaatgggctatacggagacatctcttcaagaacatgttacttctgaacatgcagaaacatcaacagaagtggtcaagctctggggtccctagaagttcttcctatcctgatctttccagtggctaaaggccatggacccagaataatacacaaagaaagtcttaccttgaaagcttgttggattttttacttgacatctgagtcagcatgcatccaccttcaagaaatgataaagtacacctaagagtctctcccccacctctttaccattgataataatagatttgtccaatatgtgcagcgttacctggaggcgatcctaatcatgtcacggatgactttgcagctcatcttacacttgaacacagagcccctagagatttagatgaatcgagtggtgttcgacatgtacgtagaatgtttcaccctggccggggattaggaggtcctcgtgctcgtagatcaaacatgcactttactagcagttctactggtggactttcttcttctcagagttcatattctccaagcaatagggaagccatggatcctatagctgagcttttatctcagttatcaggagtgagacgttctgcaggaggacagcttaattcctctggcccttccgcttctcagttacaacaactgcagatgcagctgcagctagaacggcagcatgcccaggcagcacggcaacaactggagaccgcacgcaacgcaacccggcgtactaacacaagcagtgtcaccactacaatcacacaatccacagcaacaaccaacatagctaatacagaaagcagtcagcagactctacagaattcccagtttcttttaacaaggttgaatgatcctaaaatgtctgaaacggagcgccagtccatggaaagcgagcgtgcagaccgcagcctgtttgtccaagagctccttctgtccactttagtgcgtgaagagagctcatcctcagatgaggatgatcggggggagatggcagattttggtgctatgggctgtgtagatattatgcctttagatgttgctttagaaaacctaaatttaaaagagagtaataaaggaaatgagcctccaccacctcctctttgatgacatcccaattcgcagacaatgtcctctgtgctgtatttgccaatgaaagtggacaacaactatcttgggtttgtttggtgattgtaatttcaggtctgtcactcttgttacattgtgtacattcaaaaggaagagagaaaatatatatgataatcatttccacttaactaatttttacttctagcaggtaaatgtaggtagcagtgcaggggtgatctctgcttcctgtaccttgacatgcaaaaggctctcctaatactccacattcaaactgaagaggaaaattgaaatctctaatgaagctgctgtgtgtatttatgaatattaatgaataaaaactgcttggatggtttaccttaactactgcatgaggttttttgcagcgtgcatgagttttagtgaccttgttatttaagaagttaaatacaaggagtaaaacttaaaaaaaaaatacaaagcccaaagctttcccaaacattattcaatggttacacgacgaagtagcttttgaataatgtctgcctgaatcacctttctttgtgtgcctcctacgcacaaagccagctctgcagtggaatctggggattatagccgggtgtggcactccgccctgtgtgactgtcctgtcgccctgttagtcatcttgcctgtgtggagctcagcctgtctctttaactcatctgtagaagacacaccagtaaagctactgttggaatctgctgcaggggcctttgtgtgccctaaaaacaaatcctgttcatgtttgtttaaagtttttactttttgtggttgtttaaaattttttcaattgttaaatatgttttattcaggtgtagatgaatttcatttattgactgttcaacagagttaacctgaattatgttgtctttgtttttaaaaatctcacattctcaatcatattttgcattatttatgtatttgctttgtagtttgctgagacagatcagtatcaggggagctttgaggatttgccttcccagatttgtcagtatattacaaccaaattcttaatgctaattttagcaccttttatttattgggttttttctggcataaaaagtaaagccttttaattgaatcatgccacctatatgcctatattattaatcctatgtgtaaaaaaaatgtacagctttttttgggtttgttttggggtttggaagggccgggttattttttatttcctgtttcagtttttgtgcatagactttcacaatagctccaaggcagggacagcgggtttgggggttgggagggcagtttttggaatgtaaatttaggacttttaaaaaggtgcgcacagcttctgataaatttataactagacttaacctaatcatgtctcgttccagttctcttttctctgagcccttttcaaagtctcctctctttctcctgtcatccttttcctttcctgtccgtgtatctccgtttcttcaacatgacaagcatacagacttgaacacccctccggtgttcttccgagaactgtgaagtccatgttcatccaaatgtaaccaaaaaagaagtcaccctacatgtctgaaaaactgttgcttctcctctgaaacttcaaactccaacgatttccaaatacaatagctttgttttctttagttctgtaatggataatgtttaaaggaaaactttacaccaggcttctggttacactagaagtcaagcccattagggattttcattttttttcatttggttgttgagaagtttcaaaaatcagttttcaagctgtggtctttcaaacacatctgcacataagtcacacatttcaataaagcattttcaagactgttaaaaaaaagaatttctttggtgttagtggattaacctaaccattactctgagattttatatctctaatccagtattttttttctttttatgctaaacatgggagatcctggttttgtgtgaatgcattattttggatgtgagaaataaatgccaattatatgtactttcccttttctgcacaaattctgggaaaatgtaaaagccttcattttttaacatggttttagggaacaactgtaagtccattcagagcagtttaatttagatgatcacttttaacactgcagaagacctaaggagtcataagattccatctcatgtagaatactgtatattaattattttttaccagatattttacaaatacctcacctcatcctgtatgtaatcaataatgtattattttagggtagaacgacacagaatatcaatataaaaatatattcaagcccttgaaattc

SEQ ID NO: 348902 - DNA, 2502 bp, Homo sapiens
  misc_feature (67)..(67): n is a, c, g, or t
gacactgcttgtgttagtacgccgggtcgcgttgcgtgcggtctccagttgttgccgtgctgcctgngcatgctgccgttctagctgcagctgcatctgcagttgttgtaactgagaagcggaagggccagaggaattaagctgtcctcctgcagaacgtctcactcctgataactgagataaaagctcagctataggatccatggcttccctattgcttggagaaatgtcctctgtgctgtatttgccaatgaaagtggacaacaactatcttgggtttgtttggtgattgtaatttcaggtctgtcactcttgttacattgtgtacattcaaaaggaagagagaaaatatatatgataatcatttccacttaactaatttttacttctagcaggtaaatgtaggtagcagtgcaggggtgatctctgcttcctgtaccttgacatgcaaaaggctctcctaatactccacattcaaactgaagaggaaaattgaaatctctaatgaagctgctgtgtgtatttatgaatattaatgaataaaaactgcttggatggtttaccttaactactgcatgaggttttttgcagcgtgcatgagttttagtgaccttgttatttaagaagttaaatacaaggagtaaaacttaaaaaaaaaatacaaagcccaaagctttcccaaacattattcaatggttacacgacgaagtagcttttgaataatgtctgcctgaatcacctttctttgtgtgcctcctacgcacaaagccagctctgcagtggaatctggggattatagccgggtgtggcactccgccctgtgtgactgtcctgtcgccctgttagtcatcttgcctgtgtggagctcagcctgtctctttaactcatctgtagaagacacaccagtaaagctactgttggaatctgctgcaggggcctttgtgtgccctaaaaacaaatcctgttcatgtttgtttaaagtttttactttttgtggttgtttaaaattttttcaattgttaaatatgttttattcaggtgtagatgaatttcatttattgactgttcaacagagttaacctgaattatgttgtctttgtttttaaaaatctcacattctcaatcatattttgcattatttatgtatttgctttgtagtttgctgagacagatcagtatcaggggagctttgaggatttgccttcccagatttgtcagtatattacaaccaaattcttaatgctaattttagcaccttttatttattgggttttttctggcataaaaagtaaagccttttaattgaatcatgccacctatatgcctatattattaatcctatgtgtaaaaaaaatgtacagctttttttgggtttgttttggggtttggaagggccgggttattttttatttcctgtttcagtttttgtgcatagactttcacaatagctccaaggcagggacagcgggtttgggggttgggagggcagtttttggaatgtaaatttaggacttttaaaaaggtgcgcacagcttctgataaatttataactagacttaacctaatcatgtctcgttccagttctcttttctctgagcccttttcaaagtctcctctctttctcctgtcatccttttcctttcctgtccgtgtatctccgtttcttcaacatgacaagcatacagacttgaacacccctccggtgttcttccgagaactgtgaagtccatgttcatccaaatgtaaccaaaaaagaagtcaccctacatgtctgaaaaactgttgcttctcctctgaaacttcaaactccaacgatttccaaatacaatagctttgttttctttagttctgtaatggataatgtttaaaggaaaactttacaccaggcttctggttacactagaagtcaagcccattagggattttcattttttttcatttggttgttgagaagtttcaaaaatcagttttcaagctgtggtctttcaaacacatctgcacataagtcacacatttcaataaagcattttcaagactgttaaaaaaaagaatttctttggtgttagtggattaacctaaccattactctgagattttatatctctaatccagtattttttttctttttatgctaaacatgggagatcctggttttgtgtgaatgcattattttggatgtgagaaataaatgccaattatatgtactttcccttttctgcacaaattctgggaaaatgtaaaagccttcattttttaacatggttttagggaacaactgtaagtccattcagagcagtttaatttagatgatcacttttaacactgcagaagacctaaggagtcataagattccatctcatgtagaatactgtatattaattattttttaccagatattttacaaatacctcacctcatcctgtatgtaatcaataatgtattattttagggtagaacgacacagaatatcaatataaaaatatattcaagcccttgaaattc

SEQ ID NO: 348903 - DNA, 3826 bp, Homo sapiens
agcgggggagcggcggcccccagctgaatgggcgcgagagcggcgctgggggcgggtgggggcgcggggtaccgggctggcggccggccggcgccccctcattagtatgcggacgaaggcggcgggctgcgcggagcggcgtcccctgcagccgcggaccgaggcagcggcggcacctgccggccgaggtgtcagctgtgatgcatgtttaaaaggaaattttcgaggtcgcagatataagtgtttaatttgctacgattacgatctttgtgcatcttgttatgaaagtggtgcaacaacaacaaggcatacaactgaccacccaatgcagtgcatattaacaagggtagattttgatttatactatggtggggaagctttctctgtagagcagccacagtcttttacttgtccctattgtggaaaaatgggctatacggagacatctcttcaagaacatgttacttctgaacatgcagaaacatcaacagaagtggtcaagctctggggtccctagaagttcttcctatcctgatctttccagtggctaaaggccatggacccagaataatacacaaagaaagtcttaccttgaaagcttgttggattttttacttgacatctgagtcagcatgcatccaccttcaagaaatgataaagtacacctaagagtctctcccccacctctttaccattgataataatagatttgtccaatatgtgcagcgttacctggaggcgatcctaatcatgtcacggatgactttgcagctcatcttacacttgaacacagagcccctagagatttagatgaatcgagtggtgttcgacatgtacgtagaatgtttcaccctggccggggattaggaggtcctcgtgctcgtagatcaaacatgcactttactagcagttctactggtggactttcttcttctcagagttcatattctccaagcaatagggaagccatggatcctatagctgagcttttatctcagttatcaggagtgagacgttctgcaggaggacagcttaattcctctggcccttccgcttctcagttacaacaactgcagatgcagctgcagctagaacggcagcatgcccaggcagcacggcaacaactggagaccgcacgcaacgcaacccggcgtactaacacaagcagtgtcaccactacaatcacacaatccacagcaacaaccaacatagctaatacagaaagcagtcagcagactctacagaattcccagtttcttttaacaaggttgaatgatcctaaaatgtctgaaacggagcgccagtccatggaaagcgagcgtgcagaccgcagcctgtttgtccaagagctccttctgtccactttagtgcgtgaagagagctcatcctcagatgaggatgatcggggggagatggcagattttggtgctatgggctgtgtagatattatgcctttagatgttgctttagaaaacctaaatttaaaagagagtaataaaggaaatgagcctccaccacctcctctttgatgacatcccaattcgcagacaatgtcctctgtgctgtatttgccaatgaaagtggacaacaactatcttgggtttgtttggtgattgtaatttcaggtctgtcactcttgttacattgtgtacattcaaaaggaagagagaaaatatatatgataatcatttccacttaactaatttttacttctagcaggtaaatgtaggtagcagtgcaggggtgatctctgcttcctgtaccttgacatgcaaaaggctctcctaatactccacattcaaactgaagaggaaaattgaaatctctaatgaagctgctgtgtgtatttatgaatattaatgaataaaaactgcttggatggtttaccttaactactgcatgaggttttttgcagcgtgcatgagttttagtgaccttgttatttaagaagttaaatacaaggagtaaaacttaaaaaaaaaatacaaagcccaaagctttcccaaacattattcaatggttacacgacgaagtagcttttgaataatgtctgcctgaatcacctttctttgtgtgcctcctacgcacaaagccagctctgcagtggaatctggggattatagccgggtgtggcactccgccctgtgtgactgtcctgtcgccctgttagtcatcttgcctgtgtggagctcagcctgtctctttaactcatctgtagaagacacaccagtaaagctactgttggaatctgctgcaggggcctttgtgtgccctaaaaacaaatcctgttcatgtttgtttaaagtttttactttttgtggttgtttaaaattttttcaattgttaaatatgttttattcaggtgtagatgaatttcatttattgactgttcaacagagttaacctgaattatgttgtctttgtttttaaaaatctcacattctcaatcatattttgcattatttatgtatttgctttgtagtttgctgagacagatcagtatcaggggagctttgaggatttgccttcccagatttgtcagtatattacaaccaaattcttaatgctaattttagcaccttttatttattgggttttttctggcataaaaagtaaagccttttaattgaatcatgccacctatatgcctatattattaatcctatgtgtaaaaaaaatgtacagctttttttgggtttgttttggggtttggaagggccgggttattttttatttcctgtttcagtttttgtgcatagactttcacaatagctccaaggcagggacagcgggtttgggggttgggagggcagtttttggaatgtaaatttaggacttttaaaaaggtgcgcacagcttctgataaatttataactagacttaacctaatcatgtctcgttccagttctcttttctctgagcccttttcaaagtctcctctctttctcctgtcatccttttcctttcctgtccgtgtatctccgtttcttcaacatgacaagcatacagacttgaacacccctccggtgttcttccgagaactgtgaagtccatgttcatccaaatgtaaccaaaaaagaagtcaccctacatgtctgaaaaactgttgcttctcctctgaaacttcaaactccaacgatttccaaatacaatagctttgttttctttagttctgtaatggataatgtttaaaggaaaactttacaccaggcttctggttacactagaagtcaagcccattagggattttcattttttttcatttggttgttgagaagtttcaaaaatcagttttcaagctgtggtctttcaaacacatctgcacataagtcacacatttcaataaagcattttcaagactgttaaaaaaaagaatttctttggtgttagtggattaacctaaccattactctgagattttatatctctaatccagtattttttttctttttatgctaaacatgggagatcctggttttgtgtgaatgcattattttggatgtgagaaataaatgccaattatatgtactttcccttttctgcacaaattctgggaaaatgtaaaagccttcattttttaacatggttttagggaacaactgtaagtccattcagagcagtttaatttagatgatcacttttaacactgcagaagacctaaggagtcataagattccatctcatgtagaatactgtatattaattattttttaccagatattttacaaatacctcacctcatcctgtatgtaatcaataatgtattattttagggtagaacgacacagaatatcaatataaaaatatattcaagcccttgaaattc

SEQ ID NO: 348904 - DNA, 3002 bp, Homo sapiens
gaccatgatctaccgaatttcgagcttccggtagccccggaaattccgtcgtgggttcgtagatcaaacatgcactttactagcagttctactggtggactttcttcttctcagagttcatattctccaagcaatagggaagccatggatcctatagctgagcttttatctcagttatcaggagtgagacgttctgcaggaggacagcttaattcctctggcccttccgcttctcagttacaacaactgcagatgcagctgcagctagaacggcagcatgcccaggcagcacggcaacaactggagaccgcacgcaacgcaacccggcgtactaacacaagcagtgtcaccactacaatcacacaatccacagcaacaaccaacatagctaatacagaaagcagtcagcagactctacagaattcccagtttcttttaacaaggttgaatgatcctaaaatgtctgaaacggagcgccagtccatggaaagcgagcgtgcagaccgcagcctgtttgtccaagagctccttctgtccactttagtgcgtgaagagagctcatcctcagatgaggatgatcggggggagatggcagattttggtgctatgggctgtgtagatattatgcctttagatgttgctttagaaaacctaaatttaaaagagagtaataaaggaaatgagcctccaccacctcctctttgatgacatcccaattcgcagacaatgtcctctgtgctgtatttgccaatgaaagtggacaacaactatcttgggtttgtttggtgattgtaatttcaggtctgtcactcttgttacattgtgtacattcaaaaggaagagagaaaatatatatgataatcatttccacttaactaatttttacttctagcaggtaaatgtaggtagcagtgcaggggtgatctctgcttcctgtaccttgacatgcaaaaggctctcctaatactccacattcaaactgaagaggaaaattgaaatctctaatgaagctgctgtgtgtatttatgaatattaatgaataaaaactgcttggatggtttaccttaactactgcatgaggttttttgcagcgtgcatgagttttagtgaccttgttatttaagaagttaaatacaaggagtaaaacttaaaaaaaaaatacaaagcccaaagctttcccaaacattattcaatggttacacgacgaagtagcttttgaataatgtctgcctgaatcacctttctttgtgtgcctcctacgcacaaagccagctctgcagtggaatctggggattatagccgggtgtggcactccgccctgtgtgactgtcctgtcgccctgttagtcatcttgcctgtgtggagctcagcctgtctctttaactcatctgtagaagacacaccagtaaagctactgttggaatctgctgcaggggcctttgtgtgccctaaaaacaaatcctgttcatgtttgtttaaagtttttactttttgtggttgtttaaaattttttcaattgttaaatatgttttattcaggtgtagatgaatttcatttattgactgttcaacagagttaacctgaattatgttgtctttgtttttaaaaatctcacattctcaatcatattttgcattatttatgtatttgctttgtagtttgctgagacagatcagtatcaggggagctttgaggatttgccttcccagatttgtcagtatattacaaccaaattcttaatgctaattttagcaccttttatttattgggttttttctggcataaaaagtaaagccttttaattgaatcatgccacctatatgcctatattattaatcctatgtgtaaaaaaaatgtacagctttttttgggtttgttttggggtttggaagggccgggttattttttatttcctgtttcagtttttgtgcatagactttcacaatagctccaaggcagggacagcgggtttgggggttgggagggcagtttttggaatgtaaatttaggacttttaaaaaggtgcgcacagcttctgataaatttataactagacttaacctaatcatgtctcgttccagttctcttttctctgagcccttttcaaagtctcctctctttctcctgtcatccttttcctttcctgtccgtgtatctccgtttcttcaacatgacaagcatacagacttgaacacccctccggtgttcttccgagaactgtgaagtccatgttcatccaaatgtaaccaaaaaagaagtcaccctacatgtctgaaaaactgttgcttctcctctgaaacttcaaactccaacgatttccaaatacaatagctttgttttctttagttctgtaatggataatgtttaaaggaaaactttacaccaggcttctggttacactagaagtcaagcccattagggattttcattttttttcatttggttgttgagaagtttcaaaaatcagttttcaagctgtggtctttcaaacacatctgcacataagtcacacatttcaataaagcattttcaagactgttaaaaaaaagaatttctttggtgttagtggattaacctaaccattactctgagattttatatctctaatccagtattttttttctttttatgctaaacatgggagatcctggttttgtgtgaatgcattattttggatgtgagaaataaatgccaattatatgtactttcccttttctgcacaaattctgggaaaatgtaaaagccttcattttttaacatggttttagggaacaactgtaagtccattcagagcagtttaatttagatgatcacttttaacactgcagaagacctaaggagtcataagattccatctcatgtagaatactgtatattaattattttttaccagatattttacaaatacctcacctcatcctgtatgtaatcaataatgtattattttagggtagaacgacacagaatatcaatataaaaatatattcaagcccttgaaattc

SEQ ID NO: 348905 - DNA, 3334 bp, Homo sapiens
  misc_feature (15)..(16): n is a, c, g, or t
ggggatatctctagnnagcggccgccgccgccgcgggagcgctcccctgcccaccccgcccccgcggccgagcccgggagtcgagtgggagtcggccggccggcgcgggcagcgccgggaccccgcgggggacactgcagccggagcccgggaggggccgcgccgccaccgtctgaactaggatgtcccgacatgaaggtgtcagctgtgatgcatgtttaaaaggaaattttcgaggtcgcagatataagtgtttaatttgctacgattacgatctttgtgcatcttgttatgaaagtggtgcaacaacaacaaggcatacaactgaccacccaatgcagtgcatattaacaagggtagattttgatttatactatggtggggaagctttctctgtagagcagccacagtcttttacttgtccctattgtggaaaaatgggctatagttcatattctccaagcaatagggaagccatggatcctatagctgagcttttatctcagttatcaggagtgagacgttctgcaggaggacagcttaattcctctggcccttccgcttctcagttacaacaactgcagatgcagctgcagctagaacggcagcatgcccaggcagcacggcaacaactggagaccgcacgcaacgcaacccggcgtactaacacaagcagtgtcaccactacaatcacacaatccacagcaacaaccaacatagctaatacagaaagcagtcagcagactctacagaattcccagtttcttttaacaaggttgaatgatcctaaaatgtctgaaacggagcgccagtccatggaaagcgagcgtgcagaccgcagcctgtttgtccaagagctccttctgtccactttagtgcgtgaagagagctcatcctcagatgaggatgatcggggggagatggcagattttggtgctatgggctgtgtagatattatgcctttagatgttgctttagaaaacctaaatttaaaagagagtaataaaggaaatgagcctccaccacctcctctttgatgacatcccaattcgcagacaatgtcctctgtgctgtatttgccaatgaaagtggacaacaactatcttgggtttgtttggtgattgtaatttcaggtctgtcactcttgttacattgtgtacattcaaaaggaagagagaaaatatatatgataatcatttccacttaactaatttttacttctagcaggtaaatgtaggtagcagtgcaggggtgatctctgcttcctgtaccttgacatgcaaaaggctctcctaatactccacattcaaactgaagaggaaaattgaaatctctaatgaagctgctgtgtgtatttatgaatattaatgaataaaaactgcttggatggtttaccttaactactgcatgaggttttttgcagcgtgcatgagttttagtgaccttgttatttaagaagttaaatacaaggagtaaaacttaaaaaaaaaatacaaagcccaaagctttcccaaacattattcaatggttacacgacgaagtagcttttgaataatgtctgcctgaatcacctttctttgtgtgcctcctacgcacaaagccagctctgcagtggaatctggggattatagccgggtgtggcactccgccctgtgtgactgtcctgtcgccctgttagtcatcttgcctgtgtggagctcagcctgtctctttaactcatctgtagaagacacaccagtaaagctactgttggaatctgctgcaggggcctttgtgtgccctaaaaacaaatcctgttcatgtttgtttaaagtttttactttttgtggttgtttaaaattttttcaattgttaaatatgttttattcaggtgtagatgaatttcatttattgactgttcaacagagttaacctgaattatgttgtctttgtttttaaaaatctcacattctcaatcatattttgcattatttatgtatttgctttgtagtttgctgagacagatcagtatcaggggagctttgaggatttgccttcccagatttgtcagtatattacaaccaaattcttaatgctaattttagcaccttttatttattgggttttttctggcataaaaagtaaagccttttaattgaatcatgccacctatatgcctatattattaatcctatgtgtaaaaaaaatgtacagctttttttgggtttgttttggggtttggaagggccgggttattttttatttcctgtttcagtttttgtgcatagactttcacaatagctccaaggcagggacagcgggtttgggggttgggagggcagtttttggaatgtaaatttaggacttttaaaaaggtgcgcacagcttctgataaatttataactagacttaacctaatcatgtctcgttccagttctcttttctctgagcccttttcaaagtctcctctctttctcctgtcatccttttcctttcctgtccgtgtatctccgtttcttcaacatgacaagcatacagacttgaacacccctccggtgttcttccgagaactgtgaagtccatgttcatccaaatgtaaccaaaaaagaagtcaccctacatgtctgaaaaactgttgcttctcctctgaaacttcaaactccaacgatttccaaatacaatagctttgttttctttagttctgtaatggataatgtttaaaggaaaactttacaccaggcttctggttacactagaagtcaagcccattagggattttcattttttttcatttggttgttgagaagtttcaaaaatcagttttcaagctgtggtctttcaaacacatctgcacataagtcacacatttcaataaagcattttcaagactgttaaaaaaaagaatttctttggtgttagtggattaacctaaccattactctgagattttatatctctaatccagtattttttttctttttatgctaaacatgggagatcctggttttgtgtgaatgcattattttggatgtgagaaataaatgccaattatatgtactttcccttttctgcacaaattctgggaaaatgtaaaagccttcattttttaacatggttttagggaacaactgtaagtccattcagagcagtttaatttagatgatcacttttaacactgcagaagacctaaggagtcataagattccatctcatgtagaatactgtatattaattattttttaccagatattttacaaatacctcacctcatcctgtatgtaatcaataatgtattattttagggtagaacgacacagaatatcaatataaaaatatattcaagcccttgaaattc

SEQ ID NO: 348906 - DNA, 685 bp, Homo sapiens
tggatctacttgaaggggccttttttgcctgtggggcaggaggtgcactgatttgaaaaggttcttccagttggccttgggaccagaactgcttccgccctgggatgtgccatcgcggaattctttgtggaggacccggtgtcttcctgcctctccgaatcactgcactcagggcttatggggagggagcagagacggcactcgcgccactttccttactaggaggggggtttctaagtctggtccttcaaccaagggactgacaacttaggggagctttccctgcaactcaggagcaggaagggagtggtgggaactatgtatccaaacacgtttcagcgtcagggtcactttgtttttcccattcatctgtccaaaggcaaaacaacgagtggatgagaaacccagcctgggagccgtgaagctgcaggaggccccctcggctgcctcccagatgaagcgaaccggagcgatcaagcctcgggctgtcaaagtggaggagagtaaggcctgacagtgcctggctgccacctcgcctctccctactgaggacggtgccgccatgcggcctcgacacagccgacactcgggagcctcaccagatccaccgtccaaatgcgtggcccagatcccagatcccgacgtctctaccgtcgcccaagccccagcgtccatccccgcacga

SEQ ID NO: 348907 - DNA, 6935 bp, Homo sapiens
ccagaactcctccgatcacgccaatgaggagtgggagacggcctccgaaagcagcgacttcagcgagcggcgggagcggcgggaaggccctgggtccgagcccgactcccaggtggatggtggcctgtcgggggctagtttgggtgagaagaaggagctggccaagaggagcttctccagtcagagacccgtggttgacagacagagccgaaagctggagccgggagggtttggggagaagcccgttaggccaggtggtggtgacacctcccctcgctatgagagccaacagaatgggacgcctttgaaagtgaaaagatccccagacgaggccttgcctggaggtcttagtggctgcagcagtgggagtggccactccccctatgccctggagcgggcagcccatgccagtgctgaccttcccgaagcctccagtaaaaaggcagagaaggaggccaagttggctgctccgagggcaggtgaacagggagaggccatgaaacagtttgacctgaactatggaagtgccatcattgaaaattgcgggtccagccccggggaggagagtgaggtgggttctatggtgggcgaaggcttcatcgaagtcctgaccaagaagcagcgccgcctgctggaggaagagagaagaaagaaggagcaggccgtgcaggtgcctgtcaaaggtcgaggcctttcctcccgtattcctcctcgatttgcaaaaaagcagaacaacttatgtctggagcaaggtgacgtgaccgtgcctggcagcagcctgggcactgagatctgggagagcagcagccaggctctccctgtgcaggccccagccaacgactcctggaggaaagctgtcactgccttcagcagcaccgagactggctctgcggagcagggttttaagagcagccagggagatagtggcgttgacttgagtgccgagtctcgggagtcgtctgcgacctcctcgcagcgcagctccccatatgggactctgaagccagaggagatgagcgggcccggcctggcggaacccaaggccgacagccacaaggagcaggctccaaagccatctgagcagaaggattcagaacaaggctctggacagagcaaggagcacagaccaggacccatcggcaacgagcgttctctgaaaaacagaaagggctcggagggggccgagcggctgcaaggggctgtcgtcccgcctgttaacggggtggagattcacgtggactccgtgctgcctgtgccacccattgaatttggagtcagtccaaaagactccgatttcagcttgccacctggttctgcctctggtcctactgggagtccagttgttaaacttcaggatgccttggccagtaatgcagggttaacacagagtatccccatcctgcggcgggaccatcacatccagagggccatcggtctctccccaatgtccttccccaccgccgaccttactctgaagatggagtctgcgcgcaaggcttgggaaaactcccccagtttgccggagcagagctctccaggcggcgctggctcaggcatccagcctccatcctctgtgggtgcctccagcggggtcaactacagctccttcggtggagtgtccatgccacccatgcctgtggcctctgtagcaccttctgcttctatgccaggcagccacctcccgcccctgtacctggatggccatgtgtttgcaagtcagccccggctggttcctcaaacgatacctcagcagcagagttaccaacaggccgccgctgcccagcagatcccgatctcccttcacacatctctgcaggcacaagctcagcttggactgaggggtgggcttcctgtgtcccagtcccaggagatcttcagctccttgcagcccttcagatctcaggtgtacatgcaccccagcctgtcaccgcccagcaccatgatcctctctgggggcacagccttgaagcctccatactcggcgttcccaggcatgcagcccttggagatggtgaagccgcagtctggctcaccctaccagcccatgagcgggaaccaagccctggtctacgagggccagctcagccaggctgctggcctgggtgcctcccagatgttggactcccagctcccacagctgaccatgccactgcctcggtacggctccgggcagcagccactgatcctgccccagtctattcagctgccacctgggcagagcctctccgttggggccccccgaaggattcctccgcccgggtcccagccgccagtcctgaacaccagcagagagccctctcagatggagatgaaaggcttccactttgccgacagtaaacagaatgtcccttcaggaggccccgtgccatcgccacagacctacaggcctagctctgctagccccagtgggaagccctctggatcagcagttaacatgggctctgtgcagggacactacgtgcaacaggcaaaacaacgagtggatgagaaacccagcctgggagccgtgaagctgcaggaggccccctcggctgcctcccagatgaagcgaaccggagcgatcaagcctcgggctgtcaaagtggaggagagtaaggcctgacagtgcctggctgccacctcgcctctccctactgaggacggtgccgccatgcggcctcgacacagccgacactcgggagcctcaccagatccaccgtccaaatgcgtggcccagactgagagacctccctcctctccactcccgaaagctccgttgtcaaccagcttgcacccgtggatatatggcattgacccgcttgctttgatacgaaacaaaaaagcagacgactccttcatcccatctgctcctaccgtgactgtggagtgacgcctcctgtgcagtgcagatttgccctccctgcctcctccctgtcctgccgcgcagccagggcgccttctcagcagtgcttccggcccagccgcccatccctaggcacagtgatttggcagcagggtcattttactttgaggctttttgttttaaaatgtagccaaggtttttacaaaggggaaaggaaaagaaaacaaaaacgcaagctccatgtgtatagctgaacttttatatgtttcttgccagcccctccgctcccttccatctctagcctctgtcctgtttagtttgatacgtcactgcagtaccttaagaggtgactcttaagaatgcatcccctcctgattcctcagctggttcacccttgaggttatttgcaaaaagaaaaggaggttcttgagggcaccgattgcgagcattctggtgcctggctccccgcctgggaagcgatggggtgctcagagcagcaggcaggttgggggagggggggggtcatagttgggttccagctcctggcttgatgagcccagggcgcttacaggcagcccatgaagttgatgacagttttagcatgagaatcacacagggtccctgtcctgggctcctctaaagccagtggatgtgctgggcaccagagacaaatcatggagatggctgctggtggctcccaggttggcccagatggggtgagctgacatactacaggcccatcccaggccccgtgggctctgcttctggggctccataccctgccctgcaggggtgctgtgtttttcacacatttctttccctgaagccttctgtaacctgtcattttccttccttcctcttccggagcctgctgctttctctggacctgtctccacctcccacacagctcatcgtgaacaccacttggtgatggagggagtggacccgtgtgtggtccccaagtgaggccactgggagtttgtccttttcctcctttgcttcactcccagcagcagacccaggttgtcaggacaggagggcctgagctaagcagtaggcatcagtctcgtttgtcttcagacggcgggggcaggtccagggtgaggctgggtggagggctgaccaaggtccaaagggcctgcgcagcctccgggagggcagcttctccagccagaggcttgtgtgagccatcgtgtgctgggcttgtttttaagtaagaaacaaggaaatcactccagattctgtcattccaaggaaagggaaggggacagttcaggtttctcagctgttcttaggggtcactgagcgtctacctcctcctccagaggaggctggctcagaacacctagaggagggggccggggatgcaccccccaccagaggctgccttcagcgtctcacgggtgcaggacagcgctcaggcttgggctctaagctctgtgtctagtgtagaacatggggaaggagcatcttaggaactgctgaagtaacttcttactgctctcacaattctaaggaagcgggagaacggcctcctaccaacagcgcccaccccagagctgcctgggaaagggcagttttactgaaaggtgctttactgttcacctgcatctttcagcagctcccctcctgccctcacctggtcttttccctctttatcccaagcctttatgcttgagtcccttccccaggggctgcccacccgacagttccaggcattccctacctgagcttcttgtctgcttttccttctcccactgcaagcggctgcttgtggggcctgggatgagccctctctgtccccaccggccctccttgccaagccattcctgggtgagttcaggcctgcgggagccacacattcatctccacctggacacttgagccgcatggccagacccctcccacctgatgcggtggtgcgtgtgatttgtcaaaagaaagccttctggatgctgttaagatgtacccttcaggtgaacctggtatcagacccacagtacttgctgtttgagaaaaaataaaaacaaaaaggtcacctgttctccagcccttttctcttacctggtatttccttcctttctcctcccccaccccaaataaaaaaacaaaaaacactagaatttatttatatgtattgatgttgtaggtctaggtgaaaaaaaaagaagtaaatgtttcactgctctatttatatataatgtctgaattaattctgtgcaggaaaggccaggaaattgcatgtgaagttcggtgcagtcaccacctctgtgtgacctgagctgcagtctcttcgctgagatgcaggttttaaatgagacttggggggctgagggcaggcctcaggcctcccagcgccccaacccctccttggtctaatgaaatgcagttcttagtgcagagatgttttaaggtgcaatatatctcttcctttcccgtggttttagagccaagctcaaggtagtaggacgtagggtcttattttgttttcaaacccccatcctcagagcgcagatacatgcagaggcttctgccaggataccacggggccttagtgggaacaggtggagaccagcacttccctttcctgctgctgaggtagggattggggggtcagaacccactcacttttgcctgttaaagttgccctcctgacgctggcagctctgccttggtcactggggatgcggctcgttgctcagccaccagtggccttgcggtattgtccaccatccactagagtgggatgaagtccagagtgtgggtatacatctcagatgcccatctacccactggggacttcaatgccagctgcatttggtttggttttcttaactgttggcttctccccacagcgttttttgtttttttttaaacattcatattgttttcaaacttggaattcatagacactctggctctaggttccttaagggggaaaacaaaagatgactttatttcacattcaagaaaatcagttcagttccaaagctgtggtccttccagccacttctagggacactggggaaccttgttaaacgttgacatcagtgctctccagccgtgctgtcaccctcctatcttctggatctgccttcgggatggtcagtgacagcttctggaagctgagcacacacaggtgcacagccatgctgtggtctggcctgctacggcagcatggcagctctggtggagccttctcccttgccatttggttcccctgtgccaagtagctgcaggctgcccctcaaatcttcatttgtcccttttcacttcctgcagaacaagcctgggttagagggtctgctggaaatggcctttgaagaccaaggataccaggatgtgtgcactctgtcgtgttctgtgatgaatgggaaacgtaggcttccagaaagccagctctcttctgaaatgtgacggacctaagcaggaagtcatccaggacaggagtggctcagtgttggggatggacgctgtcgcccagccatgctccaccagggccaccaatgtgtagttggctggtggtcttcgggcatgtgagacctgctcttcactgtttccaccccacttggtggcctccaggatggtagtggcaccctcagagccccatcttcagcatgttctgaagcctcagagtggaaattcctgctaaggctctgtgtggacgcctttctcccgtgatctaaaggggacactgtactcaagcttttgacctcatgccttgtgtagtaaaaaaggatttgggggttttgtttggttcctgagagggttgtgttttgtttttgtttccttttgtttatgttttggcctttcctctttgtctttccatgtagaccagatatttgaaagggcagacgatggctagaggtgtaatgtgcagcttgtttatacggtattttgggaaacttaccttggatgggaaatcgaatcgtggattcaccaggccggtgctggcacactcaccctcgccctttccctccggttcagtacctattgtttctcctttcaaatatgtgattgtactagctctttccatatgaaagaattctccttatttaaataaaaaaagtttaaaaagataaaaaaaactgaa

SEQ ID NO: 348908 - DNA, 6853 bp, Homo sapiens
ccagaactcctccgatcacgccaatgaggagtgggagacggcctccgaaagcagcgacttcagcgagcggcgggagcggcgggaaggccctgggtccgagcccgactcccaggtggatggtggcctgtcgggggctagtttgggtgagaagaaggagctggccaagaggagcttctccagtcagagacccgtggttgacagacagagccgaaagctggagccgggagggtttggggagaagcccgttaggccaggtggtggtgacacctcccctcgctatgagagccaacagaatgggacgcctttgaaagtgaaaagatccccagacgaggccttgcctggaggtcttagtggctgcagcagtgggagtggccactccccctatgccctggagcgggcagcccatgccagtgctgaccttcccgaagcctccagtaaaaaggcagagaaggaggccaagttggctgctccgagggcaggtgaacagggagaggccatgaaacagtttgacctgaactatggaagtgccatcattgaaaattgcgggtccagccccggggaggagagtgaggtgggttctatggtgggcgaaggcttcatcgaagtcctgaccaagaagcagcgccgcctgctggaggaagagagaagaaagaaggagcaggccgtgcaggtgcctgtcaaaggtcgaggcctttcctcccgtattcctcctcgatttgcaaaaaagcagaacaacttatgtctggagcaaggtgacgtgaccgtgcctggcagcagcctgggcactgagatctgggagagcagcagccaggctctccctgtgcaggccccagccaacgactcctggaggaaagctgtcactgccttcagcagcaccgagactggctctgcggagcagggttttaagagcagccagggagatagtggcgttgacttgagtgccgagtctcgggagtcgtctgcgacctcctcgcagcgcagctccccatatgggactctgaagccagaggagatgagcgggcccggcctggcggaacccaaggccgacagccacaaggagcaggctccaaagccatctgagcagaaggattcagaacaaggctctggacagagcaaggagcacagaccaggacccatcggcaacgagcgttctctgaaaaacagaaagggctcggagggggccgagcggctgcaaggggctgtcgtcccgcctgttaacggggtggagattcacgtggactccgtgctgcctgtgccacccattgaatttggagtcagtccaaaagactccgatttcagcttgccacctggttctgcctctggtcctactgggagtccagttgttaaacttcaggatgccttggccagtaatgcagggttaacacagagtatccccatcctgcggcgggaccatcacatccagagggccatcggtctctccccaatgtccttccccaccgccgaccttactctgaagatggagtctgcgcgcaaggcttgggaaaactcccccagtttgccggagcagagctctccaggcggcgctggctcaggcatccagcctccatcctctgtgggtgcctccagcggggtcaactacagctccttcggtggagtgtccatgccacccatgcctgtggcctctgtagcaccttctgcttctatgccaggcagccacctcccgcccctgtacctggatggccatgtgtttgcaagtcagccccggctggttcctcaaacgatacctcagcagcagagttaccaacaggccgccgctgcccagcagatcccgatctcccttcacacatctctgcaggcacaagctcagcttggactgaggggtgggcttcctgtgtcccagtcccaggagatcttcagctccttgcagcccttcagatctcaggtgtacatgcaccccagcctgtcaccgcccagcaccatgatcctctctgggggcacagccttgaagcctccatactcggcgttcccaggcatgcagcccttggagatggtgaagccgcagtctggctcaccctaccagcccatgagcgggaaccaagccctggtctacgagggccagctcagccaggctgctggcctgggtgcctcccagatgttggactcccagctcccacagctgaccatgccactgcctcggtacggctccgggcagcagccactgatcctgccccagtctattcagctgccacctgggcagagcctctccgttggggccccccgaaggattcctccgcccgggtcccagccgccagtcctgaacaccagcagagagccctctcagatggagatgaaaggcttccactttgccgacagtaaacagaatgtcccttcaggaggccccgtgccatcgccacagacctacaggcaaaacaacgagtggatgagaaacccagcctgggagccgtgaagctgcaggaggccccctcggctgcctcccagatgaagcgaaccggagcgatcaagcctcgggctgtcaaagtggaggagagtaaggcctgacagtgcctggctgccacctcgcctctccctactgaggacggtgccgccatgcggcctcgacacagccgacactcgggagcctcaccagatccaccgtccaaatgcgtggcccagactgagagacctccctcctctccactcccgaaagctccgttgtcaaccagcttgcacccgtggatatatggcattgacccgcttgctttgatacgaaacaaaaaagcagacgactccttcatcccatctgctcctaccgtgactgtggagtgacgcctcctgtgcagtgcagatttgccctccctgcctcctccctgtcctgccgcgcagccagggcgccttctcagcagtgcttccggcccagccgcccatccctaggcacagtgatttggcagcagggtcattttactttgaggctttttgttttaaaatgtagccaaggtttttacaaaggggaaaggaaaagaaaacaaaaacgcaagctccatgtgtatagctgaacttttatatgtttcttgccagcccctccgctcccttccatctctagcctctgtcctgtttagtttgatacgtcactgcagtaccttaagaggtgactcttaagaatgcatcccctcctgattcctcagctggttcacccttgaggttatttgcaaaaagaaaaggaggttcttgagggcaccgattgcgagcattctggtgcctggctccccgcctgggaagcgatggggtgctcagagcagcaggcaggttgggggagggggggggtcatagttgggttccagctcctggcttgatgagcccagggcgcttacaggcagcccatgaagttgatgacagttttagcatgagaatcacacagggtccctgtcctgggctcctctaaagccagtggatgtgctgggcaccagagacaaatcatggagatggctgctggtggctcccaggttggcccagatggggtgagctgacatactacaggcccatcccaggccccgtgggctctgcttctggggctccataccctgccctgcaggggtgctgtgtttttcacacatttctttccctgaagccttctgtaacctgtcattttccttccttcctcttccggagcctgctgctttctctggacctgtctccacctcccacacagctcatcgtgaacaccacttggtgatggagggagtggacccgtgtgtggtccccaagtgaggccactgggagtttgtccttttcctcctttgcttcactcccagcagcagacccaggttgtcaggacaggagggcctgagctaagcagtaggcatcagtctcgtttgtcttcagacggcgggggcaggtccagggtgaggctgggtggagggctgaccaaggtccaaagggcctgcgcagcctccgggagggcagcttctccagccagaggcttgtgtgagccatcgtgtgctgggcttgtttttaagtaagaaacaaggaaatcactccagattctgtcattccaaggaaagggaaggggacagttcaggtttctcagctgttcttaggggtcactgagcgtctacctcctcctccagaggaggctggctcagaacacctagaggagggggccggggatgcaccccccaccagaggctgccttcagcgtctcacgggtgcaggacagcgctcaggcttgggctctaagctctgtgtctagtgtagaacatggggaaggagcatcttaggaactgctgaagtaacttcttactgctctcacaattctaaggaagcgggagaacggcctcctaccaacagcgcccaccccagagctgcctgggaaagggcagttttactgaaaggtgctttactgttcacctgcatctttcagcagctcccctcctgccctcacctggtcttttccctctttatcccaagcctttatgcttgagtcccttccccaggggctgcccacccgacagttccaggcattccctacctgagcttcttgtctgcttttccttctcccactgcaagcggctgcttgtggggcctgggatgagccctctctgtccccaccggccctccttgccaagccattcctgggtgagttcaggcctgcgggagccacacattcatctccacctggacacttgagccgcatggccagacccctcccacctgatgcggtggtgcgtgtgatttgtcaaaagaaagccttctggatgctgttaagatgtacccttcaggtgaacctggtatcagacccacagtacttgctgtttgagaaaaaataaaaacaaaaaggtcacctgttctccagcccttttctcttacctggtatttccttcctttctcctcccccaccccaaataaaaaaacaaaaaacactagaatttatttatatgtattgatgttgtaggtctaggtgaaaaaaaaagaagtaaatgtttcactgctctatttatatataatgtctgaattaattctgtgcaggaaaggccaggaaattgcatgtgaagttcggtgcagtcaccacctctgtgtgacctgagctgcagtctcttcgctgagatgcaggttttaaatgagacttggggggctgagggcaggcctcaggcctcccagcgccccaacccctccttggtctaatgaaatgcagttcttagtgcagagatgttttaaggtgcaatatatctcttcctttcccgtggttttagagccaagctcaaggtagtaggacgtagggtcttattttgttttcaaacccccatcctcagagcgcagatacatgcagaggcttctgccaggataccacggggccttagtgggaacaggtggagaccagcacttccctttcctgctgctgaggtagggattggggggtcagaacccactcacttttgcctgttaaagttgccctcctgacgctggcagctctgccttggtcactggggatgcggctcgttgctcagccaccagtggccttgcggtattgtccaccatccactagagtgggatgaagtccagagtgtgggtatacatctcagatgcccatctacccactggggacttcaatgccagctgcatttggtttggttttcttaactgttggcttctccccacagcgttttttgtttttttttaaacattcatattgttttcaaacttggaattcatagacactctggctctaggttccttaagggggaaaacaaaagatgactttatttcacattcaagaaaatcagttcagttccaaagctgtggtccttccagccacttctagggacactggggaaccttgttaaacgttgacatcagtgctctccagccgtgctgtcaccctcctatcttctggatctgccttcgggatggtcagtgacagcttctggaagctgagcacacacaggtgcacagccatgctgtggtctggcctgctacggcagcatggcagctctggtggagccttctcccttgccatttggttcccctgtgccaagtagctgcaggctgcccctcaaatcttcatttgtcccttttcacttcctgcagaacaagcctgggttagagggtctgctggaaatggcctttgaagaccaaggataccaggatgtgtgcactctgtcgtgttctgtgatgaatgggaaacgtaggcttccagaaagccagctctcttctgaaatgtgacggacctaagcaggaagtcatccaggacaggagtggctcagtgttggggatggacgctgtcgcccagccatgctccaccagggccaccaatgtgtagttggctggtggtcttcgggcatgtgagacctgctcttcactgtttccaccccacttggtggcctccaggatggtagtggcaccctcagagccccatcttcagcatgttctgaagcctcagagtggaaattcctgctaaggctctgtgtggacgcctttctcccgtgatctaaaggggacactgtactcaagcttttgacctcatgccttgtgtagtaaaaaaggatttgggggttttgtttggttcctgagagggttgtgttttgtttttgtttccttttgtttatgttttggcctttcctctttgtctttccatgtagaccagatatttgaaagggcagacgatggctagaggtgtaatgtgcagcttgtttatacggtattttgggaaacttaccttggatgggaaatcgaatcgtggattcaccaggccggtgctggcacactcaccctcgccctttccctccggttcagtacctattgtttctcctttcaaatatgtgattgtactagctctttccatatgaaagaattctccttatttaaataaaaaaagtttaaaaagataaaaaaaactgaa

SEQ ID NO: 348909 - DNA, 5579 bp, Homo sapiens
atccttctgaccctccactgtggactcaatagcagggagatgaagaggacagtgactgagagaccaaggcagccctggttaaagtagaatgccccttcgagtgtctggggtagttggtgagtgggaggtgggaagggtaggccagagcccacctgcctcctccctcctcctaggtctgacgctgcaccctccctacgttccctgaggtgcgtgccaggcgtgtgtgagcaggcgtgtgcttccggcacacagggaacctagcagcctctgtacacacgccctcgtccccactgagtcccctgggtagagcagacctgtagactgtttccctcagggacattgagaagtagtgaggcttgatcctcttctacgtcccttttgccgctctgtttccaggcagccacctcccgcccctgtacctggatggccatgtgtttgcaagtcagccccggctggttcctcaaacgatacctcagcagcagagttaccaacaggccgccgctgcccagcagatcccgatctcccttcacacatctctgcaggcacaagctcagcttggactgaggggtgggcttcctgtgtcccagtcccaggagatcttcagctccttgcagcccttcagatctcaggtgtacatgcaccccagcctgtcaccgcccagcaccatgatcctctctgggggcacagccttgaagcctccatactcggcgttcccaggcatgcagcccttggagatggtgaagccgcagtctggctcaccctaccagcccatgagcgggaaccaagccctggtctacgagggccagctcagccaggctgctggcctgggtgcctcccagatgttggactcccagctcccacagctgaccatgccactgcctcggtacggctccgggcagcagccactgatcctgccccagtctattcagctgccacctgggcagagcctctccgttggggccccccgaaggattcctccgcccgggtcccagccgccagtcctgaacaccagcagagagccctctcagatggagatgaaaggcttccactttgccgacagtaaacagaatgtcccttcaggaggccccgtgccatcgccacagacctacaggcaaaacaacgagtggatgagaaacccagcctgggagccgtgaagctgcaggaggccccctcggctgcctcccagatgaagcgaaccggagcgatcaagcctcgggctgtcaaagtggaggagagtaaggcctgacagtgcctggctgccacctcgcctctccctactgaggacggtgccgccatgcggcctcgacacagccgacactcgggagcctcaccagatccaccgtccaaatgcgtggcccagactgagagacctccctcctctccactcccgaaagctccgttgtcaaccagcttgcacccgtggatatatggcattgacccgcttgctttgatacgaaacaaaaaagcagacgactccttcatcccatctgctcctaccgtgactgtggagtgacgcctcctgtgcagtgcagatttgccctccctgcctcctccctgtcctgccgcgcagccagggcgccttctcagcagtgcttccggcccagccgcccatccctaggcacagtgatttggcagcagggtcattttactttgaggctttttgttttaaaatgtagccaaggtttttacaaaggggaaaggaaaagaaaacaaaaacgcaagctccatgtgtatagctgaacttttatatgtttcttgccagcccctccgctcccttccatctctagcctctgtcctgtttagtttgatacgtcactgcagtaccttaagaggtgactcttaagaatgcatcccctcctgattcctcagctggttcacccttgaggttatttgcaaaaagaaaaggaggttcttgagggcaccgattgcgagcattctggtgcctggctccccgcctgggaagcgatggggtgctcagagcagcaggcaggttgggggagggggggggtcatagttgggttccagctcctggcttgatgagcccagggcgcttacaggcagcccatgaagttgatgacagttttagcatgagaatcacacagggtccctgtcctgggctcctctaaagccagtggatgtgctgggcaccagagacaaatcatggagatggctgctggtggctcccaggttggcccagatggggtgagctgacatactacaggcccatcccaggccccgtgggctctgcttctggggctccataccctgccctgcaggggtgctgtgtttttcacacatttctttccctgaagccttctgtaacctgtcattttccttccttcctcttccggagcctgctgctttctctggacctgtctccacctcccacacagctcatcgtgaacaccacttggtgatggagggagtggacccgtgtgtggtccccaagtgaggccactgggagtttgtccttttcctcctttgcttcactcccagcagcagacccaggttgtcaggacaggagggcctgagctaagcagtaggcatcagtctcgtttgtcttcagacggcgggggcaggtccagggtgaggctgggtggagggctgaccaaggtccaaagggcctgcgcagcctccgggagggcagcttctccagccagaggcttgtgtgagccatcgtgtgctgggcttgtttttaagtaagaaacaaggaaatcactccagattctgtcattccaaggaaagggaaggggacagttcaggtttctcagctgttcttaggggtcactgagcgtctacctcctcctccagaggaggctggctcagaacacctagaggagggggccggggatgcaccccccaccagaggctgccttcagcgtctcacgggtgcaggacagcgctcaggcttgggctctaagctctgtgtctagtgtagaacatggggaaggagcatcttaggaactgctgaagtaacttcttactgctctcacaattctaaggaagcgggagaacggcctcctaccaacagcgcccaccccagagctgcctgggaaagggcagttttactgaaaggtgctttactgttcacctgcatctttcagcagctcccctcctgccctcacctggtcttttccctctttatcccaagcctttatgcttgagtcccttccccaggggctgcccacccgacagttccaggcattccctacctgagcttcttgtctgcttttccttctcccactgcaagcggctgcttgtggggcctgggatgagccctctctgtccccaccggccctccttgccaagccattcctgggtgagttcaggcctgcgggagccacacattcatctccacctggacacttgagccgcatggccagacccctcccacctgatgcggtggtgcgtgtgatttgtcaaaagaaagccttctggatgctgttaagatgtacccttcaggtgaacctggtatcagacccacagtacttgctgtttgagaaaaaataaaaacaaaaaggtcacctgttctccagcccttttctcttacctggtatttccttcctttctcctcccccaccccaaataaaaaaacaaaaaacactagaatttatttatatgtattgatgttgtaggtctaggtgaaaaaaaaagaagtaaatgtttcactgctctatttatatataatgtctgaattaattctgtgcaggaaaggccaggaaattgcatgtgaagttcggtgcagtcaccacctctgtgtgacctgagctgcagtctcttcgctgagatgcaggttttaaatgagacttggggggctgagggcaggcctcaggcctcccagcgccccaacccctccttggtctaatgaaatgcagttcttagtgcagagatgttttaaggtgcaatatatctcttcctttcccgtggttttagagccaagctcaaggtagtaggacgtagggtcttattttgttttcaaacccccatcctcagagcgcagatacatgcagaggcttctgccaggataccacggggccttagtgggaacaggtggagaccagcacttccctttcctgctgctgaggtagggattggggggtcagaacccactcacttttgcctgttaaagttgccctcctgacgctggcagctctgccttggtcactggggatgcggctcgttgctcagccaccagtggccttgcggtattgtccaccatccactagagtgggatgaagtccagagtgtgggtatacatctcagatgcccatctacccactggggacttcaatgccagctgcatttggtttggttttcttaactgttggcttctccccacagcgttttttgtttttttttaaacattcatattgttttcaaacttggaattcatagacactctggctctaggttccttaagggggaaaacaaaagatgactttatttcacattcaagaaaatcagttcagttccaaagctgtggtccttccagccacttctagggacactggggaaccttgttaaacgttgacatcagtgctctccagccgtgctgtcaccctcctatcttctggatctgccttcgggatggtcagtgacagcttctggaagctgagcacacacaggtgcacagccatgctgtggtctggcctgctacggcagcatggcagctctggtggagccttctcccttgccatttggttcccctgtgccaagtagctgcaggctgcccctcaaatcttcatttgtcccttttcacttcctgcagaacaagcctgggttagagggtctgctggaaatggcctttgaagaccaaggataccaggatgtgtgcactctgtcgtgttctgtgatgaatgggaaacgtaggcttccagaaagccagctctcttctgaaatgtgacggacctaagcaggaagtcatccaggacaggagtggctcagtgttggggatggacgctgtcgcccagccatgctccaccagggccaccaatgtgtagttggctggtggtcttcgggcatgtgagacctgctcttcactgtttccaccccacttggtggcctccaggatggtagtggcaccctcagagccccatcttcagcatgttctgaagcctcagagtggaaattcctgctaaggctctgtgtggacgcctttctcccgtgatctaaaggggacactgtactcaagcttttgacctcatgccttgtgtagtaaaaaaggatttgggggttttgtttggttcctgagagggttgtgttttgtttttgtttccttttgtttatgttttggcctttcctctttgtctttccatgtagaccagatatttgaaagggcagacgatggctagaggtgtaatgtgcagcttgtttatacggtattttgggaaacttaccttggatgggaaatcgaatcgtggattcaccaggccggtgctggcacactcaccctcgccctttccctccggttcagtacctattgtttctcctttcaaatatgtgattgtactagctctttccatatgaaagaattctccttatttaaataaaaaaagtttaaaaagataaaaaaaactgaa

SEQ ID NO: 348910 - DNA, 6024 bp, Homo sapiens
tgtctgctatggtgtcttatggcatctcaagactcatcatattcaaaactcgattttcctcccggtccttctgcttgtccagtccacatcctccttggctccctgctccccctcacctcacccccttacccttcagcaggcctgtcagctctggctttaaaaggattcagaatccagctgtgtctcatcccctccacaccactgcatgctgtccagctcctgtagggactcctacctggcctccctgcaagtcagatcataccccaagtcagcactctataaatggcagcatgttcccatcattttcatcctgcaccattttggtgctccaaggaggagcatggtgttttgcggctctggccaccacaagtctcagtgatgtaattccaatagatccttctgaccctccactgtggactcaatagcagggagatgaagaggacagtgactgagagaccaaaagtggcccagccccctaccccatcctgttcccctgtccttacagtctctgggcccacatccccacctcgcatatcttgttctagttagttaggccctgcagctaccctgttctcctgtcagcatgcttcaaaggacccccacagtctggaatccagcccagtcttgtttttaccaccacttgatgcaaaacagtaagagtcttgaacgtgtgtgctgtacaaaggaatgcagagatatacgtccgatgcagctttcatcttttgggacttggcttcgccattacttctgactttcctcactcgtcctctccttgcccaccccgccccgtgtgcacccataaatctggtgtgcacccacagatcctatgccgctctgcatcccgagtgtcctgcagctgtgtccagtgtgtgacacactatcctggcagtgtgcaggcccatgttggacagggccctgccgcttccttggcaccttgtatgctttcagtaagcacttgctggacaaaggcagaaagggctgaagatagacgcagcccttagcagagatgtggatgagacacacttaacgctgttagttcccatgcctgcagccagcttagtcttgcccgttttctcaccacctactctattccagcaagaagacgtgcctctgccatcgaaggtgtgaaatcctgggcgatctctcctgtgctgcagtagaaattagagcatgtcctgctttatgcaggctttgctttagttcttctgaagtgtatgaatctgaagtgcatgtgcggtcgctctttggtgcgtttggggtttctccatagcatcattccccctcctgactgtcattgtcgcccagcagctgaccatgccactgcctcggtacggctccgggcagcagccactgatcctgccccagtctattcagctgccacctgggcagagcctctccgttggggccccccgaaggattcctccgcccgggtcccagccgccagtcctgaacaccagcagagagccctctcagatggagatgaaaggcttccactttgccgacagtaaacagaatgtcccttcaggaggccccgtgccatcgccacagacctacaggcaaaacaacgagtggatgagaaacccagcctgggagccgtgaagctgcaggaggccccctcggctgcctcccagatgaagcgaaccggagcgatcaagcctcgggctgtcaaagtggaggagagtaaggcctgacagtgcctggctgccacctcgcctctccctactgaggacggtgccgccatgcggcctcgacacagccgacactcgggagcctcaccagatccaccgtccaaatgcgtggcccagactgagagacctccctcctctccactcccgaaagctccgttgtcaaccagcttgcacccgtggatatatggcattgacccgcttgctttgatacgaaacaaaaaagcagacgactccttcatcccatctgctcctaccgtgactgtggagtgacgcctcctgtgcagtgcagatttgccctccctgcctcctccctgtcctgccgcgcagccagggcgccttctcagcagtgcttccggcccagccgcccatccctaggcacagtgatttggcagcagggtcattttactttgaggctttttgttttaaaatgtagccaaggtttttacaaaggggaaaggaaaagaaaacaaaaacgcaagctccatgtgtatagctgaacttttatatgtttcttgccagcccctccgctcccttccatctctagcctctgtcctgtttagtttgatacgtcactgcagtaccttaagaggtgactcttaagaatgcatcccctcctgattcctcagctggttcacccttgaggttatttgcaaaaagaaaaggaggttcttgagggcaccgattgcgagcattctggtgcctggctccccgcctgggaagcgatggggtgctcagagcagcaggcaggttgggggagggggggggtcatagttgggttccagctcctggcttgatgagcccagggcgcttacaggcagcccatgaagttgatgacagttttagcatgagaatcacacagggtccctgtcctgggctcctctaaagccagtggatgtgctgggcaccagagacaaatcatggagatggctgctggtggctcccaggttggcccagatggggtgagctgacatactacaggcccatcccaggccccgtgggctctgcttctggggctccataccctgccctgcaggggtgctgtgtttttcacacatttctttccctgaagccttctgtaacctgtcattttccttccttcctcttccggagcctgctgctttctctggacctgtctccacctcccacacagctcatcgtgaacaccacttggtgatggagggagtggacccgtgtgtggtccccaagtgaggccactgggagtttgtccttttcctcctttgcttcactcccagcagcagacccaggttgtcaggacaggagggcctgagctaagcagtaggcatcagtctcgtttgtcttcagacggcgggggcaggtccagggtgaggctgggtggagggctgaccaaggtccaaagggcctgcgcagcctccgggagggcagcttctccagccagaggcttgtgtgagccatcgtgtgctgggcttgtttttaagtaagaaacaaggaaatcactccagattctgtcattccaaggaaagggaaggggacagttcaggtttctcagctgttcttaggggtcactgagcgtctacctcctcctccagaggaggctggctcagaacacctagaggagggggccggggatgcaccccccaccagaggctgccttcagcgtctcacgggtgcaggacagcgctcaggcttgggctctaagctctgtgtctagtgtagaacatggggaaggagcatcttaggaactgctgaagtaacttcttactgctctcacaattctaaggaagcgggagaacggcctcctaccaacagcgcccaccccagagctgcctgggaaagggcagttttactgaaaggtgctttactgttcacctgcatctttcagcagctcccctcctgccctcacctggtcttttccctctttatcccaagcctttatgcttgagtcccttccccaggggctgcccacccgacagttccaggcattccctacctgagcttcttgtctgcttttccttctcccactgcaagcggctgcttgtggggcctgggatgagccctctctgtccccaccggccctccttgccaagccattcctgggtgagttcaggcctgcgggagccacacattcatctccacctggacacttgagccgcatggccagacccctcccacctgatgcggtggtgcgtgtgatttgtcaaaagaaagccttctggatgctgttaagatgtacccttcaggtgaacctggtatcagacccacagtacttgctgtttgagaaaaaataaaaacaaaaaggtcacctgttctccagcccttttctcttacctggtatttccttcctttctcctcccccaccccaaataaaaaaacaaaaaacactagaatttatttatatgtattgatgttgtaggtctaggtgaaaaaaaaagaagtaaatgtttcactgctctatttatatataatgtctgaattaattctgtgcaggaaaggccaggaaattgcatgtgaagttcggtgcagtcaccacctctgtgtgacctgagctgcagtctcttcgctgagatgcaggttttaaatgagacttggggggctgagggcaggcctcaggcctcccagcgccccaacccctccttggtctaatgaaatgcagttcttagtgcagagatgttttaaggtgcaatatatctcttcctttcccgtggttttagagccaagctcaaggtagtaggacgtagggtcttattttgttttcaaacccccatcctcagagcgcagatacatgcagaggcttctgccaggataccacggggccttagtgggaacaggtggagaccagcacttccctttcctgctgctgaggtagggattggggggtcagaacccactcacttttgcctgttaaagttgccctcctgacgctggcagctctgccttggtcactggggatgcggctcgttgctcagccaccagtggccttgcggtattgtccaccatccactagagtgggatgaagtccagagtgtgggtatacatctcagatgcccatctacccactggggacttcaatgccagctgcatttggtttggttttcttaactgttggcttctccccacagcgttttttgtttttttttaaacattcatattgttttcaaacttggaattcatagacactctggctctaggttccttaagggggaaaacaaaagatgactttatttcacattcaagaaaatcagttcagttccaaagctgtggtccttccagccacttctagggacactggggaaccttgttaaacgttgacatcagtgctctccagccgtgctgtcaccctcctatcttctggatctgccttcgggatggtcagtgacagcttctggaagctgagcacacacaggtgcacagccatgctgtggtctggcctgctacggcagcatggcagctctggtggagccttctcccttgccatttggttcccctgtgccaagtagctgcaggctgcccctcaaatcttcatttgtcccttttcacttcctgcagaacaagcctgggttagagggtctgctggaaatggcctttgaagaccaaggataccaggatgtgtgcactctgtcgtgttctgtgatgaatgggaaacgtaggcttccagaaagccagctctcttctgaaatgtgacggacctaagcaggaagtcatccaggacaggagtggctcagtgttggggatggacgctgtcgcccagccatgctccaccagggccaccaatgtgtagttggctggtggtcttcgggcatgtgagacctgctcttcactgtttccaccccacttggtggcctccaggatggtagtggcaccctcagagccccatcttcagcatgttctgaagcctcagagtggaaattcctgctaaggctctgtgtggacgcctttctcccgtgatctaaaggggacactgtactcaagcttttgacctcatgccttgtgtagtaaaaaaggatttgggggttttgtttggttcctgagagggttgtgttttgtttttgtttccttttgtttatgttttggcctttcctctttgtctttccatgtagaccagatatttgaaagggcagacgatggctagaggtgtaatgtgcagcttgtttatacggtattttgggaaacttaccttggatgggaaatcgaatcgtggattcaccaggccggtgctggcacactcaccctcgccctttccctccggttcagtacctattgtttctcctttcaaatatgtgattgtactagctctttccatatgaaagaattctccttatttaaataaaaaaagtttaaaaagataaaaaaaactgaa

SEQ ID NO: 348911 - DNA, 6710 bp, Homo sapiens
ccagaactcctccgatcacgccaatgaggagtgggagacggcctccgaaagcagcgacttcagcgagcggcgggagcggcgggaaggccctgggtccgagcccgactcccaggtggatggtggcctgtcgggggctagtttgggtgagaagaaggagctggccaagaggagcttctccagtcagagacccgtggttgacagacagagccgaaagctggagccgggagggtttggggagaagcccgttaggccaggtggtggtgacacctcccctcgctatgagagccaacagaatgggacgcctttgaaagtgaaaagatccccagacgaggccttgcctggaggtcttagtggctgcagcagtgggagtggccactccccctatgccctggagcgggcagcccatgccagtgctgaccttcccgaagcctccagtaaaaaggcagagaaggaggccaagttggctgctccgagggcaggtgaacagggagaggccatgaaacagtttgacctgaactatggaagtgccatcattgaaaattgcgggtccagccccggggaggagagtgaggtgggttctatggtgggcgaaggcttcatcgaagtcctgaccaagaagcagcgccgcctgctggaggaagagagaagaaagaaggagcaggccgtgcaggtgcctgtcaaaggtcgaggcctttcctcccgtattcctcctcgatttgcaaaaaagcagaacaacttatgtctggagcaaggtgacgtgaccgtgcctggcagcagcctgggcactgagatctgggagagcagcagccaggctctccctgtgcaggccccagccaacgactcctggaggaaagctgtcactgccttcagcagcaccgagactggctctgcggagcagggttttaagagcagccagggagatagtggcgttgacttgagtgccgagtctcgggagtcgtctgcgacctcctcgcagcgcagctccccatatgggactctgaagccagaggagatgagcgggcccggcctggcggaacccaaggccgacagccacaaggagcaggctccaaagccatctgagcagaaggattcagaacaaggctctggacagagcaaggagcacagaccaggacccatcggcaacgagcgttctctgaaaaacagaaagggctcggagggggccgagcggctgcaaggggctgtcgtcccgcctgttaacggggtggagattcacgtggactccgtgctgcctgtgccacccattgaatttggagtcagtccaaaagactccgatttcagcttgccacctggttctgcctctggtcctactgggagtccagttgttaaacttcaggatgccttggccagtaatgcagggttaacacagagtatccccatcctgcggcgggaccatcacatccagagggccatcggtctctccccaatgtccttccccaccgccgaccttactctgaagatggagtctgcgcgcaaggcttgggaaaactcccccagtttgccggagcagagctctccaggcggcgctggctcaggcatccagcctccatcctctgtgggtgcctccagcggggtcaactacagctccttcggtggagtgtccatgccacccatgcctgtggcctctgtagcaccttctgcttctatgccaggcagccacctcccgcccctgtacctggatggccatgtgtttgcaagtcagccccggctggttcctcaaacgatacctcagcagcagagttaccaacaggccgccgctgcccagcagatcccgatctcccttcacacatctctgcaggcacaagctcagcttggactgaggggtgggcttcctgtgtcccagtcccaggagatcttcagctccttgcagcccttcagatctcaggtgtacatgcaccccagcctgtcaccgcccagcaccatgatcctctctgggggcacagccttgaagcctccatactcggcgttcccaggcatgcagcccttggagatggtgaagccgcagtctggctcaccctaccagcccatgagcgggaaccaagccctggtctacgagggccagctcagccaggctgctggcctgggtgcctcccagatgttggactcccagctcccacagctgaccatgccactgcctcggtacggctccgggcagcagccactgatcctgccccagtctattcagctgccacctgggcagagcctctccgttggggccccccgaaggattcctccgcccgggtcccagccgccagtcctgaacaccagcagagagccctctcagatggagatgaaaggcttccactttgccgacagtaaacagaatgtcccttcaggaggccccgtgccatcgccacagacctacaggcaaaacaacgagtggatgagaaacccagcctgggagccgtgaagctgcaggaggccccctcggctgcctcccagatgaagcgaaccggagcgatcaagcctcgggctgtcaaagtggaggagagtaaggcctgacagtgcctggctgccacctcgcctctccctactgaggacggtgccgccatgcggcctcgacacagccgacactcgggagcctcaccagatccaccgtccaaatgcgtggcccagactgagagacctccctcctctccactcccgaaagctccgttgtcaaccagcttgcacccgtggatatatggcattgacccgcttgctttgatacgaaacaaaaaagcagacgactccttcatcccatctgctcctaccgtgactgtggagtgacgcctcctgtgcagtgcagatttgccctccctgcctcctccctgtcctgccgcgcagccagggcgccttctcagcagtgcttccggcccagccgcccatccctaggcacagtgatttggcagcagggtcattttactttgaggctttttgttttaaaatgtagccaaggtttttacaaaggggaaaggaaaagaaaacaaaaacgcaagctccatgtgtatagctgaacttttatatgtttcttgccagcccctccgctcccttccatctctagcctctgtcctgtttagtttgatacgtcactgcagtaccttaagaggtgactcttaagaatgcatcccctcctgattcctcagctggttcacccttgaggttatttgcaaaaagaaaaggaggttcttgagggcaccgattgcgagcattctggtgcctggctccccgcctgggaagcgatggggtgctcagagcagcaggcaggttgggggagggggggggtcatagttgggttccagctcctggcttgatgagcccagggcgcttacaggcagcccatgaagttgatgacagttttagcatgagaatcacacagggtccctgtcctgggctcctctaaagccagtggatgtgctgggcaccagagacaaatcatggagatggctgctggtggctcccaggttggcccagatggggtgagctgacatactacaggcccatcccaggccccgtgggctctgcttctggggctccataccctgccctgcaggggtgctgtgtttttcacacatttctttccctgaagccttctgtaacctgtcattttccttccttcctcttccggagcctgctgctttctctggacctgtctccacctcccacacagctcatcgtgaacaccacttggtgatggagggagtggacccgtgtgtggtccccaagtgaggccactgggagtttgtccttttcctcctttgcttcactcccagcagcagacccaggttgtcaggacaggagggcctgagctaagcagtaggcatcagtctcgtttgtcttcagacggcgggggcaggtccagggtgaggctgggtggagggctgaccaaggtccaaagggcctgcgcagcctccgggagggcagcttctccagccagaggcttgtgtgagccatcgtgtgctgggcttgtttttaagtaagaaacaaggaaatcactccagattctgtcattccaaggaaagggaaggggacagttcaggtttctcagctgttcttaggggtcactgagcgtctacctcctcctccagaggaggctggctcagaacacctagaggagggggccggggatgcaccccccaccagaggctgccttcagcgtctcacgggtgcaggacagcgctcaggcttgggctctaagctctgtgtctagtgtagaacatggggaaggagcatcttaggaactgctgaagtaacttcttactgctctcacaattctaaggaagcgggagaacggcctcctaccaacagcgcccaccccagagctgcctgggaaagggcagttttactgaaaggtgctttactgttcacctgcatctttcagcagctcccctcctgccctcacctggtcttttccctctttatcccaagcctttatgcttgagtcccttccccaggggctgcccacccgacagttccaggcattccctacctgagcttcttgtctgcttttccttctcccactgcaagcggctgcttgtggggcctgggatgagccctctctgtccccaccggccctccttgccaagccattcctgggtgagttcaggcctgcgggagccacacattcatctccacctggacacttgagccgcatggccagacccctcccacctgatgcggtggtgcgtgtgatttgtcaaaagaaagccttctggatgctgttaagatgtacccttcaggtgaacctggtatcagacccacagtacttgctgtttgagaaaaaataaaaacaaaaaggtcacctgttctccagcccttttctcttacctggtatttccttcctttctcctcccccaccccaaataaaaaaacaaaaaacactagaatttatttatatgtattgatgttgtaggtctaggtgaaaaaaaaagaagtaaatgtttcactgctctatttatatataatgtctgaattaattctgtgcaggaaaggccaggaaattgcatgtgaagttcggtgcagtcaccacctctgtgtgacctgagctgcagtctcttcgctgagatgcaggttttaaatgagacttggggggctgagggcaggcctcaggcctcccagcgccccaacccctccttggtctaatgaaatgcagttcttagtgcagagatgttttaaggtgcaatatatctcttcctttcccgtggttttagagccaagctcaaggtagtaggacgtagggtcttattttgttttcaaacccccatcctcagagcgcagatacatgcagaggcttctgccaggataccacggggccttagtgggaacaggtggagaccagcacttccctttcctgctgctgaggtagggattggggggtcagaacccactcacttttgcctgttaaagttgccctcctgacgctggcagctctgccttggtcactggggatgcggctcgttgctcagccaccagtggccttgcggtattgtccaccatccactagagtgggatgaagtccagagtgtgggtatacatctcagatgcccatctacccactggggacttcaatgccagctgcatttggtttggttttcttaactgttggcttctccccacagcgttttttgtttttttttaaacattcatattgttttcaaacttggaattcatagacactctggctctaggttccttaagggggaaaacaaaagatgactttatttcacattcaagaaaatcagttcagttccaaagctgtggtccttccagccacttctagggacactggggaaccttgttaaacgttgacatcagtgctctccagccgtgctgtcaccctcctatcttctggatctgccttcgggatggtcagtgacagcttctggaagctgagcacacacagaacaagcctgggttagagggtctgctggaaatggcctttgaagaccaaggataccaggatgtgtgcactctgtcgtgttctgtgatgaatgggaaacgtaggcttccagaaagccagctctcttctgaaatgtgacggacctaagcaggaagtcatccaggacaggagtggctcagtgttggggatggacgctgtcgcccagccatgctccaccagggccaccaatgtgtagttggctggtggtcttcgggcatgtgagacctgctcttcactgtttccaccccacttggtggcctccaggatggtagtggcaccctcagagccccatcttcagcatgttctgaagcctcagagtggaaattcctgctaaggctctgtgtggacgcctttctcccgtgatctaaaggggacactgtactcaagcttttgacctcatgccttgtgtagtaaaaaaggatttgggggttttgtttggttcctgagagggttgtgttttgtttttgtttccttttgtttatgttttggcctttcctctttgtctttccatgtagaccagatatttgaaagggcagacgatggctagaggtgtaatgtgcagcttgtttatacggtattttgggaaacttaccttggatgggaaatcgaatcgtggattcaccaggccggtgctggcacactcaccctcgccctttccctccggttcagtacctattgtttctcctttcaaatatgtgattgtactagctctttccatatgaaagaattctccttatttaaataaaaaaagtttaaaaagataaaaaaaactgaa

SEQ ID NO: 348912 - DNA, 4947 bp, Homo sapiens
cacagttctggctcagcgtcaggcttctaggccttttgtctggggcactgcatcgtgttggtccagaccctgagacggccagtgtcgctttctgcacagcaggacagccatgcccatctgtacagggcctcagcctccctctcttgcggtgcgtctccttgagctctgtcctggaggtgccagggtggtcagtgacagccaccccctcacccttctgcgttctgggctgtcttaggtctgtggttgttttccatccaagagatccacggaccgtcccgagtgagcgcctctggccgcaggcccttccttccttgtgcctcctccatgtgctaggctttgactccatttctgtggtgacacgttgtgtattctcaacccctgcctttggttttttcaggcctagctctgctagccccagtgggaagccctctggatcagcagttaacatgggctctgtgcagggacactacgtgcaacaggcaaaacaacgagtggatgagaaacccagcctgggagccgtgaagctgcaggaggccccctcggctgcctcccagatgaagcgaaccggagcgatcaagcctcgggctgtcaaagtggaggagagtaaggcctgacagtgcctggctgccacctcgcctctccctactgaggacggtgccgccatgcggcctcgacacagccgacactcgggagcctcaccagatccaccgtccaaatgcgtggcccagactgagagacctccctcctctccactcccgaaagctccgttgtcaaccagcttgcacccgtggatatatggcattgacccgcttgctttgatacgaaacaaaaaagcagacgactccttcatcccatctgctcctaccgtgactgtggagtgacgcctcctgtgcagtgcagatttgccctccctgcctcctccctgtcctgccgcgcagccagggcgccttctcagcagtgcttccggcccagccgcccatccctaggcacagtgatttggcagcagggtcattttactttgaggctttttgttttaaaatgtagccaaggtttttacaaaggggaaaggaaaagaaaacaaaaacgcaagctccatgtgtatagctgaacttttatatgtttcttgccagcccctccgctcccttccatctctagcctctgtcctgtttagtttgatacgtcactgcagtaccttaagaggtgactcttaagaatgcatcccctcctgattcctcagctggttcacccttgaggttatttgcaaaaagaaaaggaggttcttgagggcaccgattgcgagcattctggtgcctggctccccgcctgggaagcgatggggtgctcagagcagcaggcaggttgggggagggggggggtcatagttgggttccagctcctggcttgatgagcccagggcgcttacaggcagcccatgaagttgatgacagttttagcatgagaatcacacagggtccctgtcctgggctcctctaaagccagtggatgtgctgggcaccagagacaaatcatggagatggctgctggtggctcccaggttggcccagatggggtgagctgacatactacaggcccatcccaggccccgtgggctctgcttctggggctccataccctgccctgcaggggtgctgtgtttttcacacatttctttccctgaagccttctgtaacctgtcattttccttccttcctcttccggagcctgctgctttctctggacctgtctccacctcccacacagctcatcgtgaacaccacttggtgatggagggagtggacccgtgtgtggtccccaagtgaggccactgggagtttgtccttttcctcctttgcttcactcccagcagcagacccaggttgtcaggacaggagggcctgagctaagcagtaggcatcagtctcgtttgtcttcagacggcgggggcaggtccagggtgaggctgggtggagggctgaccaaggtccaaagggcctgcgcagcctccgggagggcagcttctccagccagaggcttgtgtgagccatcgtgtgctgggcttgtttttaagtaagaaacaaggaaatcactccagattctgtcattccaaggaaagggaaggggacagttcaggtttctcagctgttcttaggggtcactgagcgtctacctcctcctccagaggaggctggctcagaacacctagaggagggggccggggatgcaccccccaccagaggctgccttcagcgtctcacgggtgcaggacagcgctcaggcttgggctctaagctctgtgtctagtgtagaacatggggaaggagcatcttaggaactgctgaagtaacttcttactgctctcacaattctaaggaagcgggagaacggcctcctaccaacagcgcccaccccagagctgcctgggaaagggcagttttactgaaaggtgctttactgttcacctgcatctttcagcagctcccctcctgccctcacctggtcttttccctctttatcccaagcctttatgcttgagtcccttccccaggggctgcccacccgacagttccaggcattccctacctgagcttcttgtctgcttttccttctcccactgcaagcggctgcttgtggggcctgggatgagccctctctgtccccaccggccctccttgccaagccattcctgggtgagttcaggcctgcgggagccacacattcatctccacctggacacttgagccgcatggccagacccctcccacctgatgcggtggtgcgtgtgatttgtcaaaagaaagccttctggatgctgttaagatgtacccttcaggtgaacctggtatcagacccacagtacttgctgtttgagaaaaaataaaaacaaaaaggtcacctgttctccagcccttttctcttacctggtatttccttcctttctcctcccccaccccaaataaaaaaacaaaaaacactagaatttatttatatgtattgatgttgtaggtctaggtgaaaaaaaaagaagtaaatgtttcactgctctatttatatataatgtctgaattaattctgtgcaggaaaggccaggaaattgcatgtgaagttcggtgcagtcaccacctctgtgtgacctgagctgcagtctcttcgctgagatgcaggttttaaatgagacttggggggctgagggcaggcctcaggcctcccagcgccccaacccctccttggtctaatgaaatgcagttcttagtgcagagatgttttaaggtgcaatatatctcttcctttcccgtggttttagagccaagctcaaggtagtaggacgtagggtcttattttgttttcaaacccccatcctcagagcgcagatacatgcagaggcttctgccaggataccacggggccttagtgggaacaggtggagaccagcacttccctttcctgctgctgaggtagggattggggggtcagaacccactcacttttgcctgttaaagttgccctcctgacgctggcagctctgccttggtcactggggatgcggctcgttgctcagccaccagtggccttgcggtattgtccaccatccactagagtgggatgaagtccagagtgtgggtatacatctcagatgcccatctacccactggggacttcaatgccagctgcatttggtttggttttcttaactgttggcttctccccacagcgttttttgtttttttttaaacattcatattgttttcaaacttggaattcatagacactctggctctaggttccttaagggggaaaacaaaagatgactttatttcacattcaagaaaatcagttcagttccaaagctgtggtccttccagccacttctagggacactggggaaccttgttaaacgttgacatcagtgctctccagccgtgctgtcaccctcctatcttctggatctgccttcgggatggtcagtgacagcttctggaagctgagcacacacaggtgcacagccatgctgtggtctggcctgctacggcagcatggcagctctggtggagccttctcccttgccatttggttcccctgtgccaagtagctgcaggctgcccctcaaatcttcatttgtcccttttcacttcctgcagaacaagcctgggttagagggtctgctggaaatggcctttgaagaccaaggataccaggatgtgtgcactctgtcgtgttctgtgatgaatgggaaacgtaggcttccagaaagccagctctcttctgaaatgtgacggacctaagcaggaagtcatccaggacaggagtggctcagtgttggggatggacgctgtcgcccagccatgctccaccagggccaccaatgtgtagttggctggtggtcttcgggcatgtgagacctgctcttcactgtttccaccccacttggtggcctccaggatggtagtggcaccctcagagccccatcttcagcatgttctgaagcctcagagtggaaattcctgctaaggctctgtgtggacgcctttctcccgtgatctaaaggggacactgtactcaagcttttgacctcatgccttgtgtagtaaaaaaggatttgggggttttgtttggttcctgagagggttgtgttttgtttttgtttccttttgtttatgttttggcctttcctctttgtctttccatgtagaccagatatttgaaagggcagacgatggctagaggtgtaatgtgcagcttgtttatacggtattttgggaaacttaccttggatgggaaatcgaatcgtggattcaccaggccggtgctggcacactcaccctcgccctttccctccggttcagtacctattgtttctcctttcaaatatgtgattgtactagctctttccatatgaaagaattctccttatttaaataaaaaaagtttaaaaagataaaaaaaactgaa

SEQ ID NO: 348913 - DNA, 4744 bp, Homo sapiens
tggtctgtgggaaaattgtcttccatgaaactgggccctggtgccaaaaaccactgctctataagatgcctccctgggaattcccatggccctcaccacctctgccctgggttgttcagtaagtgtgtggtccagctgtctccagggcctcaaatgacagcttgttcctgcttggtctctctagccctctcagatggagatgaaaggcttccactttgccgacagtaaacagaatgtcccttcaggaggccccgtgccatcgccacagacctacaggcaaaacaacgagtggatgagaaacccagcctgggagccgtgaagctgcaggaggccccctcggctgcctcccagatgaagcgaaccggagcgatcaagcctcgggctgtcaaagtggaggagagtaaggcctgacagtgcctggctgccacctcgcctctccctactgaggacggtgccgccatgcggcctcgacacagccgacactcgggagcctcaccagatccaccgtccaaatgcgtggcccagactgagagacctccctcctctccactcccgaaagctccgttgtcaaccagcttgcacccgtggatatatggcattgacccgcttgctttgatacgaaacaaaaaagcagacgactccttcatcccatctgctcctaccgtgactgtggagtgacgcctcctgtgcagtgcagatttgccctccctgcctcctccctgtcctgccgcgcagccagggcgccttctcagcagtgcttccggcccagccgcccatccctaggcacagtgatttggcagcagggtcattttactttgaggctttttgttttaaaatgtagccaaggtttttacaaaggggaaaggaaaagaaaacaaaaacgcaagctccatgtgtatagctgaacttttatatgtttcttgccagcccctccgctcccttccatctctagcctctgtcctgtttagtttgatacgtcactgcagtaccttaagaggtgactcttaagaatgcatcccctcctgattcctcagctggttcacccttgaggttatttgcaaaaagaaaaggaggttcttgagggcaccgattgcgagcattctggtgcctggctccccgcctgggaagcgatggggtgctcagagcagcaggcaggttgggggagggggggggtcatagttgggttccagctcctggcttgatgagcccagggcgcttacaggcagcccatgaagttgatgacagttttagcatgagaatcacacagggtccctgtcctgggctcctctaaagccagtggatgtgctgggcaccagagacaaatcatggagatggctgctggtggctcccaggttggcccagatggggtgagctgacatactacaggcccatcccaggccccgtgggctctgcttctggggctccataccctgccctgcaggggtgctgtgtttttcacacatttctttccctgaagccttctgtaacctgtcattttccttccttcctcttccggagcctgctgctttctctggacctgtctccacctcccacacagctcatcgtgaacaccacttggtgatggagggagtggacccgtgtgtggtccccaagtgaggccactgggagtttgtccttttcctcctttgcttcactcccagcagcagacccaggttgtcaggacaggagggcctgagctaagcagtaggcatcagtctcgtttgtcttcagacggcgggggcaggtccagggtgaggctgggtggagggctgaccaaggtccaaagggcctgcgcagcctccgggagggcagcttctccagccagaggcttgtgtgagccatcgtgtgctgggcttgtttttaagtaagaaacaaggaaatcactccagattctgtcattccaaggaaagggaaggggacagttcaggtttctcagctgttcttaggggtcactgagcgtctacctcctcctccagaggaggctggctcagaacacctagaggagggggccggggatgcaccccccaccagaggctgccttcagcgtctcacgggtgcaggacagcgctcaggcttgggctctaagctctgtgtctagtgtagaacatggggaaggagcatcttaggaactgctgaagtaacttcttactgctctcacaattctaaggaagcgggagaacggcctcctaccaacagcgcccaccccagagctgcctgggaaagggcagttttactgaaaggtgctttactgttcacctgcatctttcagcagctcccctcctgccctcacctggtcttttccctctttatcccaagcctttatgcttgagtcccttccccaggggctgcccacccgacagttccaggcattccctacctgagcttcttgtctgcttttccttctcccactgcaagcggctgcttgtggggcctgggatgagccctctctgtccccaccggccctccttgccaagccattcctgggtgagttcaggcctgcgggagccacacattcatctccacctggacacttgagccgcatggccagacccctcccacctgatgcggtggtgcgtgtgatttgtcaaaagaaagccttctggatgctgttaagatgtacccttcaggtgaacctggtatcagacccacagtacttgctgtttgagaaaaaataaaaacaaaaaggtcacctgttctccagcccttttctcttacctggtatttccttcctttctcctcccccaccccaaataaaaaaacaaaaaacactagaatttatttatatgtattgatgttgtaggtctaggtgaaaaaaaaagaagtaaatgtttcactgctctatttatatataatgtctgaattaattctgtgcaggaaaggccaggaaattgcatgtgaagttcggtgcagtcaccacctctgtgtgacctgagctgcagtctcttcgctgagatgcaggttttaaatgagacttggggggctgagggcaggcctcaggcctcccagcgccccaacccctccttggtctaatgaaatgcagttcttagtgcagagatgttttaaggtgcaatatatctcttcctttcccgtggttttagagccaagctcaaggtagtaggacgtagggtcttattttgttttcaaacccccatcctcagagcgcagatacatgcagaggcttctgccaggataccacggggccttagtgggaacaggtggagaccagcacttccctttcctgctgctgaggtagggattggggggtcagaacccactcacttttgcctgttaaagttgccctcctgacgctggcagctctgccttggtcactggggatgcggctcgttgctcagccaccagtggccttgcggtattgtccaccatccactagagtgggatgaagtccagagtgtgggtatacatctcagatgcccatctacccactggggacttcaatgccagctgcatttggtttggttttcttaactgttggcttctccccacagcgttttttgtttttttttaaacattcatattgttttcaaacttggaattcatagacactctggctctaggttccttaagggggaaaacaaaagatgactttatttcacattcaagaaaatcagttcagttccaaagctgtggtccttccagccacttctagggacactggggaaccttgttaaacgttgacatcagtgctctccagccgtgctgtcaccctcctatcttctggatctgccttcgggatggtcagtgacagcttctggaagctgagcacacacaggtgcacagccatgctgtggtctggcctgctacggcagcatggcagctctggtggagccttctcccttgccatttggttcccctgtgccaagtagctgcaggctgcccctcaaatcttcatttgtcccttttcacttcctgcagaacaagcctgggttagagggtctgctggaaatggcctttgaagaccaaggataccaggatgtgtgcactctgtcgtgttctgtgatgaatgggaaacgtaggcttccagaaagccagctctcttctgaaatgtgacggacctaagcaggaagtcatccaggacaggagtggctcagtgttggggatggacgctgtcgcccagccatgctccaccagggccaccaatgtgtagttggctggtggtcttcgggcatgtgagacctgctcttcactgtttccaccccacttggtggcctccaggatggtagtggcaccctcagagccccatcttcagcatgttctgaagcctcagagtggaaattcctgctaaggctctgtgtggacgcctttctcccgtgatctaaaggggacactgtactcaagcttttgacctcatgccttgtgtagtaaaaaaggatttgggggttttgtttggttcctgagagggttgtgttttgtttttgtttccttttgtttatgttttggcctttcctctttgtctttccatgtagaccagatatttgaaagggcagacgatggctagaggtgtaatgtgcagcttgtttatacggtattttgggaaacttaccttggatgggaaatcgaatcgtggattcaccaggccggtgctggcacactcaccctcgccctttccctccggttcagtacctattgtttctcctttcaaatatgtgattgtactagctctttccatatgaaagaattctccttatttaaataaaaaaagtttaaaaagataaaaaaaactgaa

SEQ ID NO: 348914 - DNA, 4522 bp, Homo sapiens
ttaggcgcctgtctgcgtctcacgggttcaggacaagcgctcaggcttggctcttaagctctgtgtctaagtgtagaacatggggaaggatccgtgaagctgcaggaggccccctcggctgcctcccagatgaagcgaaccggagcgatcaagcctcgggctgtcaaagtggaggagagtaaggcctgacagtgcctggctgccacctcgcctctccctactgaggacggtgccgccatgcggcctcgacacagccgacactcgggagcctcaccagatccaccgtccaaatgcgtggcccagactgagagacctccctcctctccactcccgaaagctccgttgtcaaccagcttgcacccgtggatatatggcattgacccgcttgctttgatacgaaacaaaaaagcagacgactccttcatcccatctgctcctaccgtgactgtggagtgacgcctcctgtgcagtgcagatttgccctccctgcctcctccctgtcctgccgcgcagccagggcgccttctcagcagtgcttccggcccagccgcccatccctaggcacagtgatttggcagcagggtcattttactttgaggctttttgttttaaaatgtagccaaggtttttacaaaggggaaaggaaaagaaaacaaaaacgcaagctccatgtgtatagctgaacttttatatgtttcttgccagcccctccgctcccttccatctctagcctctgtcctgtttagtttgatacgtcactgcagtaccttaagaggtgactcttaagaatgcatcccctcctgattcctcagctggttcacccttgaggttatttgcaaaaagaaaaggaggttcttgagggcaccgattgcgagcattctggtgcctggctccccgcctgggaagcgatggggtgctcagagcagcaggcaggttgggggagggggggggtcatagttgggttccagctcctggcttgatgagcccagggcgcttacaggcagcccatgaagttgatgacagttttagcatgagaatcacacagggtccctgtcctgggctcctctaaagccagtggatgtgctgggcaccagagacaaatcatggagatggctgctggtggctcccaggttggcccagatggggtgagctgacatactacaggcccatcccaggccccgtgggctctgcttctggggctccataccctgccctgcaggggtgctgtgtttttcacacatttctttccctgaagccttctgtaacctgtcattttccttccttcctcttccggagcctgctgctttctctggacctgtctccacctcccacacagctcatcgtgaacaccacttggtgatggagggagtggacccgtgtgtggtccccaagtgaggccactgggagtttgtccttttcctcctttgcttcactcccagcagcagacccaggttgtcaggacaggagggcctgagctaagcagtaggcatcagtctcgtttgtcttcagacggcgggggcaggtccagggtgaggctgggtggagggctgaccaaggtccaaagggcctgcgcagcctccgggagggcagcttctccagccagaggcttgtgtgagccatcgtgtgctgggcttgtttttaagtaagaaacaaggaaatcactccagattctgtcattccaaggaaagggaaggggacagttcaggtttctcagctgttcttaggggtcactgagcgtctacctcctcctccagaggaggctggctcagaacacctagaggagggggccggggatgcaccccccaccagaggctgccttcagcgtctcacgggtgcaggacagcgctcaggcttgggctctaagctctgtgtctagtgtagaacatggggaaggagcatcttaggaactgctgaagtaacttcttactgctctcacaattctaaggaagcgggagaacggcctcctaccaacagcgcccaccccagagctgcctgggaaagggcagttttactgaaaggtgctttactgttcacctgcatctttcagcagctcccctcctgccctcacctggtcttttccctctttatcccaagcctttatgcttgagtcccttccccaggggctgcccacccgacagttccaggcattccctacctgagcttcttgtctgcttttccttctcccactgcaagcggctgcttgtggggcctgggatgagccctctctgtccccaccggccctccttgccaagccattcctgggtgagttcaggcctgcgggagccacacattcatctccacctggacacttgagccgcatggccagacccctcccacctgatgcggtggtgcgtgtgatttgtcaaaagaaagccttctggatgctgttaagatgtacccttcaggtgaacctggtatcagacccacagtacttgctgtttgagaaaaaataaaaacaaaaaggtcacctgttctccagcccttttctcttacctggtatttccttcctttctcctcccccaccccaaataaaaaaacaaaaaacactagaatttatttatatgtattgatgttgtaggtctaggtgaaaaaaaaagaagtaaatgtttcactgctctatttatatataatgtctgaattaattctgtgcaggaaaggccaggaaattgcatgtgaagttcggtgcagtcaccacctctgtgtgacctgagctgcagtctcttcgctgagatgcaggttttaaatgagacttggggggctgagggcaggcctcaggcctcccagcgccccaacccctccttggtctaatgaaatgcagttcttagtgcagagatgttttaaggtgcaatatatctcttcctttcccgtggttttagagccaagctcaaggtagtaggacgtagggtcttattttgttttcaaacccccatcctcagagcgcagatacatgcagaggcttctgccaggataccacggggccttagtgggaacaggtggagaccagcacttccctttcctgctgctgaggtagggattggggggtcagaacccactcacttttgcctgttaaagttgccctcctgacgctggcagctctgccttggtcactggggatgcggctcgttgctcagccaccagtggccttgcggtattgtccaccatccactagagtgggatgaagtccagagtgtgggtatacatctcagatgcccatctacccactggggacttcaatgccagctgcatttggtttggttttcttaactgttggcttctccccacagcgttttttgtttttttttaaacattcatattgttttcaaacttggaattcatagacactctggctctaggttccttaagggggaaaacaaaagatgactttatttcacattcaagaaaatcagttcagttccaaagctgtggtccttccagccacttctagggacactggggaaccttgttaaacgttgacatcagtgctctccagccgtgctgtcaccctcctatcttctggatctgccttcgggatggtcagtgacagcttctggaagctgagcacacacaggtgcacagccatgctgtggtctggcctgctacggcagcatggcagctctggtggagccttctcccttgccatttggttcccctgtgccaagtagctgcaggctgcccctcaaatcttcatttgtcccttttcacttcctgcagaacaagcctgggttagagggtctgctggaaatggcctttgaagaccaaggataccaggatgtgtgcactctgtcgtgttctgtgatgaatgggaaacgtaggcttccagaaagccagctctcttctgaaatgtgacggacctaagcaggaagtcatccaggacaggagtggctcagtgttggggatggacgctgtcgcccagccatgctccaccagggccaccaatgtgtagttggctggtggtcttcgggcatgtgagacctgctcttcactgtttccaccccacttggtggcctccaggatggtagtggcaccctcagagccccatcttcagcatgttctgaagcctcagagtggaaattcctgctaaggctctgtgtggacgcctttctcccgtgatctaaaggggacactgtactcaagcttttgacctcatgccttgtgtagtaaaaaaggatttgggggttttgtttggttcctgagagggttgtgttttgtttttgtttccttttgtttatgttttggcctttcctctttgtctttccatgtagaccagatatttgaaagggcagacgatggctagaggtgtaatgtgcagcttgtttatacggtattttgggaaacttaccttggatgggaaatcgaatcgtggattcaccaggccggtgctggcacactcaccctcgccctttccctccggttcagtacctattgtttctcctttcaaatatgtgattgtactagctctttccatatgaaagaattctccttatttaaataaaaaaagtttaaaaagataaaaaaaactgaa

SEQ ID NO: 348915 - DNA, 4099 bp, Homo sapiens
  misc_feature (7)..(8): n is a, c, g, or t
attagannaattataacaacaacttatcaaaggttcctgaaattaattttgcatttgccctccctgcctcctccctgtcctgccgcgcagccagggcgccttctcagcagtgcttccggcccagccgcccatccctaggcacagtgatttggcagcagggtcattttactttgaggctttttgttttaaaatgtagccaaggtttttacaaaggggaaaggaaaagaaaacaaaaacgcaagctccatgtgtatagctgaacttttatatgtttcttgccagcccctccgctcccttccatctctagcctctgtcctgtttagtttgatacgtcactgcagtaccttaagaggtgactcttaagaatgcatcccctcctgattcctcagctggttcacccttgaggttatttgcaaaaagaaaaggaggttcttgagggcaccgattgcgagcattctggtgcctggctccccgcctgggaagcgatggggtgctcagagcagcaggcaggttgggggagggggggggtcatagttgggttccagctcctggcttgatgagcccagggcgcttacaggcagcccatgaagttgatgacagttttagcatgagaatcacacagggtccctgtcctgggctcctctaaagccagtggatgtgctgggcaccagagacaaatcatggagatggctgctggtggctcccaggttggcccagatggggtgagctgacatactacaggcccatcccaggccccgtgggctctgcttctggggctccataccctgccctgcaggggtgctgtgtttttcacacatttctttccctgaagccttctgtaacctgtcattttccttccttcctcttccggagcctgctgctttctctggacctgtctccacctcccacacagctcatcgtgaacaccacttggtgatggagggagtggacccgtgtgtggtccccaagtgaggccactgggagtttgtccttttcctcctttgcttcactcccagcagcagacccaggttgtcaggacaggagggcctgagctaagcagtaggcatcagtctcgtttgtcttcagacggcgggggcaggtccagggtgaggctgggtggagggctgaccaaggtccaaagggcctgcgcagcctccgggagggcagcttctccagccagaggcttgtgtgagccatcgtgtgctgggcttgtttttaagtaagaaacaaggaaatcactccagattctgtcattccaaggaaagggaaggggacagttcaggtttctcagctgttcttaggggtcactgagcgtctacctcctcctccagaggaggctggctcagaacacctagaggagggggccggggatgcaccccccaccagaggctgccttcagcgtctcacgggtgcaggacagcgctcaggcttgggctctaagctctgtgtctagtgtagaacatggggaaggagcatcttaggaactgctgaagtaacttcttactgctctcacaattctaaggaagcgggagaacggcctcctaccaacagcgcccaccccagagctgcctgggaaagggcagttttactgaaaggtgctttactgttcacctgcatctttcagcagctcccctcctgccctcacctggtcttttccctctttatcccaagcctttatgcttgagtcccttccccaggggctgcccacccgacagttccaggcattccctacctgagcttcttgtctgcttttccttctcccactgcaagcggctgcttgtggggcctgggatgagccctctctgtccccaccggccctccttgccaagccattcctgggtgagttcaggcctgcgggagccacacattcatctccacctggacacttgagccgcatggccagacccctcccacctgatgcggtggtgcgtgtgatttgtcaaaagaaagccttctggatgctgttaagatgtacccttcaggtgaacctggtatcagacccacagtacttgctgtttgagaaaaaataaaaacaaaaaggtcacctgttctccagcccttttctcttacctggtatttccttcctttctcctcccccaccccaaataaaaaaacaaaaaacactagaatttatttatatgtattgatgttgtaggtctaggtgaaaaaaaaagaagtaaatgtttcactgctctatttatatataatgtctgaattaattctgtgcaggaaaggccaggaaattgcatgtgaagttcggtgcagtcaccacctctgtgtgacctgagctgcagtctcttcgctgagatgcaggttttaaatgagacttggggggctgagggcaggcctcaggcctcccagcgccccaacccctccttggtctaatgaaatgcagttcttagtgcagagatgttttaaggtgcaatatatctcttcctttcccgtggttttagagccaagctcaaggtagtaggacgtagggtcttattttgttttcaaacccccatcctcagagcgcagatacatgcagaggcttctgccaggataccacggggccttagtgggaacaggtggagaccagcacttccctttcctgctgctgaggtagggattggggggtcagaacccactcacttttgcctgttaaagttgccctcctgacgctggcagctctgccttggtcactggggatgcggctcgttgctcagccaccagtggccttgcggtattgtccaccatccactagagtgggatgaagtccagagtgtgggtatacatctcagatgcccatctacccactggggacttcaatgccagctgcatttggtttggttttcttaactgttggcttctccccacagcgttttttgtttttttttaaacattcatattgttttcaaacttggaattcatagacactctggctctaggttccttaagggggaaaacaaaagatgactttatttcacattcaagaaaatcagttcagttccaaagctgtggtccttccagccacttctagggacactggggaaccttgttaaacgttgacatcagtgctctccagccgtgctgtcaccctcctatcttctggatctgccttcgggatggtcagtgacagcttctggaagctgagcacacacaggtgcacagccatgctgtggtctggcctgctacggcagcatggcagctctggtggagccttctcccttgccatttggttcccctgtgccaagtagctgcaggctgcccctcaaatcttcatttgtcccttttcacttcctgcagaacaagcctgggttagagggtctgctggaaatggcctttgaagaccaaggataccaggatgtgtgcactctgtcgtgttctgtgatgaatgggaaacgtaggcttccagaaagccagctctcttctgaaatgtgacggacctaagcaggaagtcatccaggacaggagtggctcagtgttggggatggacgctgtcgcccagccatgctccaccagggccaccaatgtgtagttggctggtggtcttcgggcatgtgagacctgctcttcactgtttccaccccacttggtggcctccaggatggtagtggcaccctcagagccccatcttcagcatgttctgaagcctcagagtggaaattcctgctaaggctctgtgtggacgcctttctcccgtgatctaaaggggacactgtactcaagcttttgacctcatgccttgtgtagtaaaaaaggatttgggggttttgtttggttcctgagagggttgtgttttgtttttgtttccttttgtttatgttttggcctttcctctttgtctttccatgtagaccagatatttgaaagggcagacgatggctagaggtgtaatgtgcagcttgtttatacggtattttgggaaacttaccttggatgggaaatcgaatcgtggattcaccaggccggtgctggcacactcaccctcgccctttccctccggttcagtacctattgtttctcctttcaaatatgtgattgtactagctctttccatatgaaagaattctccttatttaaataaaaaaagtttaaaaagataaaaaaaactgaa

SEQ ID NO: 348916 - DNA, 6829 bp, Homo sapiens
ccagaactcctccgatcacgccaatgaggagtgggagacggcctccgaaagcagcgacttcagcgagcggcgggagcggcgggaaggccctgggtccgagcccgactcccaggtggatggtggcctgtcgggggctagtttgggtgagaagaaggagctggccaagaggagcttctccagtcagagacccgtggttgacagacagagccgaaagctggagccgggagggtttggggagaagcccgttaggccaggtggtggtgacacctcccctcgctatgagagccaacagaatgggacgcctttgaaagtgaaaagatccccagacgaggccttgcctggaggtcttagtggctgcagcagtgggagtggccactccccctatgccctggagcgggcagcccatgccagtgctgaccttcccgaagcctccagtaaaaaggcagagaaggaggccaagttggctgctccgagggcaggtgaacagggagaggccatgaaacagtttgacctgaactatggaagtgccatcattgaaaattgcgggtccagccccggggaggagagtgaggtgggttctatggtgggcgaaggcttcatcgaagtcctgaccaagaagcagcgccgcctgctggaggaagagagaagaaagaaggagcaggccgtgcaggtgcctgtcaaaggtcgaggcctttcctcccgtattcctcctcgatttgcaaaaaagcagaacaacttatgtctggagcaaggtgacgtgaccgtgcctggcagcagcctgggcactgagatctgggagagcagcagccaggctctccctgtgcaggccccagccaacgactcctggaggaaagctgtcactgccttcagcagcaccgagactggctctgcggagcagggttttaagagcagccagggagatagtggcgttgacttgagtgccgagtctcgggagtcgtctgcgacctcctcgcagcgcagctccccatatgggactctgaagccagaggagatgagcgggcccggcctggcggaacccaaggccgacagccacaaggagcaggctccaaagccatctgagcagaaggattcagaacaaggctctggacagagcaaggagcacagaccaggacccatcggcaacgagcgttctctgaaaaacagaaagggctcggagggggccgagcggctgcaaggggctgtcgtcccgcctgttaacggggtggagattcacgtggactccgtgctgcctgtgccacccattgaatttggagtcagtccaaaagactccgatttcagcttgccacctggttctgcctctggtcctactgggagtccagttgttaaacttcaggatgccttggccagtaatgcagggttaacacagagtatccccatcctgcggcgggaccatcacatccagagggccatcggtctctccccaatgtccttccccaccgccgaccttactctgaagatggagtctgcgcgcaaggcttgggaaaactcccccagtttgccggagcagagctctccaggcggcgctggctcaggcatccagcctccatcctctgtgggtgcctccagcggggtcaactacagctccttcggtggagtgtccatgccacccatgcctgtggcctctgtagcaccttctgcttctatgccaggcagccacctcccgcccctgtacctggatggccatgtgtttgcaagtcagccccggctggttcctcaaacgatacctcagcagcagagttaccaacaggccgccgctgcccagcagatcccgatctcccttcacacatctctgcaggcacaagctcagcttggactgaggggtgggcttcctgtgtcccagtcccaggagatcttcagctccttgcagcccttcagatctcaggtgtacatgcaccccagcctgtcaccgcccagcaccatgatcctctctgggggcacagccttgaagcctccatactcggcgttcccaggcatgcagcccttggagatggtgaagccgcagtctggctcaccctaccagcccatgagcgggaaccaagccctggtctacgagggccagctcagccaggctgctggcctgggtgcctcccagatgttggactcccagctcccacagctgaccatgccactgcctcggtacggctccgggcagcagccactgatcctgccccagtctattcagctgccacctgggcagagcctctccgttggggccccccgaaggattcctccgcccgggtcccagccgccagtcctgaacaccagcagagagccctctcagatggagatgaaaggcttccactttgccgacagtaaacagaatgtcccttcaggaggccccgtgccatcgccacagacctacaggcaaaacaacgagtggatgagaaacccagcctgggagccgtgaagctgcaggaggccccctcggctgcctcccagatgaagcgaaccggagcgatcaagcctcgggctgtcaaagtggaggagagtaaggcctgacagtgcctggctgccacctcgcctctccctactgaggacggtgccgccatgcggcctcgacacagccgacactcgggagcctcaccagatccaccgtccaaatgcgtggcccagactgagagacctccctcctctccactcccgaaagctccgttgtcaaccagcttgcacccgtggatatatggcattgacccgcttgctttgatacgaaacaaaaaagcagacgactccttcatcccatctgctcctaccgtgactgtggagtgacgcctcctgtgcagtgcagatttgccctccctgcctcctccctgtcctgccgcgcagccagggcgccttctcagcagtgcttccggcccagccgcccatccctaggcacagtgatttggcagcagggtcattttactttgaggctttttgttttaaaatgtagccaaggtttttacaaaggggaaaggaaaagaaaacaaaaacgcaagctccatgtgtatagctgaacttttatatgtttcttgccagcccctccgctcccttccatctctagcctctgtcctgtttagtttgatacgtcactgcagtaccttaagaggtgactcttaagaatgcatcccctcctgattcctcagctggttcacccttgaggttatttgcaaaaagaaaaggaggttcttgagggcaccgattgcgagcattctggtgcctggctccccgcctgggaagcgatggggtgctcagagcagcaggcaggttgggggagggggggggtcatagttgggttccagctcctggcttgatgagcccagggcgcttacaggcagcccatgaagttgatgacagttttagcatgagaatcacacagggtccctgtcctgggctcctctaaagccagtggatgtgctgggcaccagagacaaatcatggagatggctgctggtggctcccaggttggcccagatggggtgagctgacatactacaggcccatcccaggccccgtgggctctgcttctggggctccataccctgccctgcaggggtgctgtgtttttcacacatttctttccctgaagccttctgtaacctgtcattttccttccttcctcttccggagcctgctgctttctctggacctgtctccacctcccacacagctcatcgtgaacaccacttggtgatggagggagtggacccgtgtgtggtccccaagtgaggccactgggagtttgtccttttcctcctttgcttcactcccagcagcagacccaggttgtcaggacaggagggcctgagctaagcagtaggcatcagtctcgtttgtcttcagacggcgggggcaggtccagggtgaggctgggtggagggctgaccaaggtccaaagggcctgcgcagcctccgggagggcagcttctccagccagaggcttgtgtgagccatcgtgtgctgggcttgtttttaagtaagaaacaaggaaatcactccagattctgtcattccaaggaaagggaaggggacagttcaggtttctcagctgttcttaggggtcactgagcgtctacctcctcctccagaggaggctggctcagaacacctagaggagggggccggggatgcaccccccaccagaggctgccttcagcgtctcacgggtgcaggacagcgctcaggcttgggctctaagctctgtgtctagtgtagaacatggggaaggagcatcttaggaactgctgaagtaacttcttactgctctcacaattctaaggaagcgggagaacggcctcctaccaacagcgcccaccccagagctgcctgggaaagggcagttttactgaaaggtgctttactgttcacctgcatctttcagcagctcccctcctgccctcacctggtcttttccctctttatcccaagcctttatgcttgagtcccttccccaggggctgcccacccgacagttccaggcattccctacctgagcttcttgtctgcttttccttctcccactgcaagcggctgcttgtggggcctgggatgagccctctctgtccccaccggccctccttgccaagccattcctgggtgagttcaggcctgcgggagccacacattcatctccacctggacacttgagccgcatggccagacccctcccacctgatgcggtggtgcgtgtgatttgtcaaaagaaagccttctggatgctgttaagatgtacccttcaggtgaacctggtatcagacccacagtacttgctgtttgagaaaaaataaaaacaaaaaggtcacctgttctccagcccttttctcttacctggtatttccttcctttctcctcccccaccccaaataaaaaaacaaaaaacactagaatttatttatatgtattgatgttgtaggtctaggtgaaaaaaaaagaagtaaatgtttcactgctctatttatatataatgtctgaattaattctgtgcaggaaaggccaggaaattgcatgtgaagttcggtgcagtcaccacctctgtgtgacctgagctgcagtctcttcgctgagatgcaggttttaaatgagacttggggggctgagggcaggcctcaggcctcccagcgccccaacccctccttggtctaatgaaatgcagttcttagtgcagagatgttttaaggtgcaatatatctcttcctttcccgtggttttagagccaagctcaaggtagtaggacgtagggtcttattttgttttcaaacccccatcctcagagcgcagatacatgcagaggcttctgccaggataccacggggccttagtgggaacaggtggagaccagcacttccctttcctgctgctgaggtagggattggggggtcagaacccactcacttttgcctgttaaagttgccctcctgacgctggcagctctgccttggtcactggggatgcggctcgttgctcagccaccagtggccttgcggtattgtccaccatccactagagtgggatgaagtccagagtgtgggtatacatctcagatgcccatctacccactggggacttcaatgccagctgcatttggtttggttttcttaactgttggcttctccccacagcgttttttgtttttttttaaacattcatattgttttcaaacttggaattcatagacactctggctctaggttccttaagggggaaaacaaaagatgactttatttcacattcaagaaaatcagttcagttccaaagctgtggtccttccagccacttctagggacactggggaaccttgttaaacgttgacatcagtgctctccagccgtgctgtcaccctcctatcttctggatctgccttcgggatggtcagtgacagcttctggaagctgagcacacacaggtgcacagccatgctgtggtctggcctgctacggcagcatggcagctctggtggagccttctcccttgccatttggttcccctgtgccaagtagctgcaggctgcccctcaaatcttcatttgtcccttttcacttcctgcagaacaagcctgggttagagggtctgctggaaatggcctttgaagaccaaggataccaggatgtgtgcactctgtcgtgttctgtgatgaatgggaaacgtaggcttccagaaagccagctctcttctgaaatgtgacggacctaagcaggaagtcatccaggacaggagtggctcagtgttggggatggacgctgtcgcccagccatgctccaccagggccaccaatgtgtagttggctggtggtcttcgggcatgtgagacctgctcttcactgtttccaccccacttggtggcctccaggatggtagtggcaccctcagagccccatcttcagcatgttctgaagcctcagagtggaaattcctgctaaggctctgtgtggacgcctttctcccgtgatctaaaggggacactgtactcaagcttttgacctcatgccttgtgtagtaaaaaaggatttgggggttttgtttggttcctgagagggttgtgttttgtttttgtttcctctttgtctttccatgtagaccagatatttgaaagggcagacgatggctagaggtgtaatgtgcagcttgtttatacggtattttgggaaacttaccttggatgggaaatcgaatcgtggattcaccaggccggtgctggcacactcaccctcgccctttccctccggttcagtacctattgtttctcctttcaaatatgtgattgtactagctctttccatatgaaagaattctccttatttaaataaaaaaagtttaaaaagataaaaaaaactgaa

SEQ ID NO: 348917 - DNA, 6477 bp, Homo sapiens
ccagaactcctccgatcacgccaatgaggagtgggagacggcctccgaaagcagcgacttcagcgagcggcgggagcggcgggaaggccctgggtccgagcccgactcccaggtggatggtggcctgtcgggggctagtttgggtgagaagaaggagctggccaagaggagcttctccagtcagagacccgtggttgacagacagagccgaaagctggagccgggagggtttggggagaagcccgttaggccaggtggtggtgacacctcccctcgctatgagagccaacagaatgggacgcctttgaaagtgaaaagatccccagacgaggccttgcctggaggtcttagtggctgcagcagtgggagtggccactccccctatgccctggagcgggcagcccatgccagtgctgaccttcccgaagcctccagtaaaaaggcagagaaggaggccaagttggctgctccgagggcaggtgaacagggagaggccatgaaacagtttgacctgaactatggaagtgccatcattgaaaattgcgggtccagccccggggaggagagtgaggtgggttctatggtgggcgaaggcttcatcgaagtcctgaccaagaagcagcgccgcctgctggaggaagagagaagaaagaaggagcaggccgtgcaggtgcctgtcaaaggtcgaggcctttcctcccgtattcctcctcgatttgcaaaaaagcagaacaacttatgtctggagcaaggtgacgtgaccgtgcctggcagcagcctgggcactgagatctgggagagcagcagccaggctctccctgtgcaggccccagccaacgactcctggaggaaagctgtcactgccttcagcagcaccgagactggctctgcggagcagggttttaagagcagccagggagatagtggcgttgacttgagtgccgagtctcgggagtcgtctgcgacctcctcgcagcgcagctccccatatgggactctgaagccagaggagatgagcgggcccggcctggcggaacccaaggccgacagccacaaggagcaggctccaaagccatctgagcagaaggattcagaacaaggctctggacagagcaaggagcacagaccaggacccatcggcaacgagcgttctctgaaaaacagaaagggctcggagggggccgagcggctgcaaggggctgtcgtcccgcctgttaacggggtggagattcacgtggactccgtgctgcctgtgccacccattgaatttggagtcagtccaaaagactccgatttcagcttgccacctggttctgcctctggtcctactgggagtccagttgttaaacttcaggatgccttggccagtaatgcagggttaacacagagtatccccatcctgcggcgggaccatcacatccagagggccatcggtctctccccaatgtccttccccaccgccgaccttactctgaagatggagtctgcgcgcaaggcttgggaaaactcccccagtttgccggagcagagctctccaggcggcgctggctcaggcatccagcctccatcctctgtgggtgcctccagcggggtcaactacagctccttcggtggagtgtccatgccacccatgcctgtggcctctgtagcaccttctgcttctatgccaggcagccacctcccgcccctgtacctggatggccatgtgtttgcaagtcagccccggctggttcctcaaacgatacctcagcagcagagttaccaacaggccgccgctgcccagcagatcccgatctcccttcacacatctctgcaggcacaagctcagcttggactgaggggtgggcttcctgtgtcccagtcccaggagatcttcagctccttgcagcccttcagatctcaggtgtacatgcaccccagcctgtcaccgcccagcaccatgatcctctctgggggcacagccttgaagcctccatactcggcgttcccaggcatgcagcccttggagatggtgaagccgcagtctggctcaccctaccagcccatgagcgggaaccaagccctggtctacgagggccagctcagccaggctgctggcctgggtgcctcccagatgttggactcccagctcccacagctgaccatgccactgcctcggtacggctccgggcagcagccactgatcctgccccagtctattcagctgccacctgggcagagcctctccgttggggccccccgaaggattcctccgcccgggtcccagccgccagtcctgaacaccagcagagagccctctcagatggagatgaaaggcttccactttgccgacagtaaacagaatgtcccttcaggaggccccgtgccatcgccacagacctacaggcctagctctgctagccccagtgggaagccctctggatcagcagttaacatgggctctgtgcagggacactacgtgcaacaggcaaaacaacgagtggatgagaaacccagcctgggagccgtgaagctgcaggaggccccctcggctgcctcccagatgaagcgaaccggagcgatcaagcctcgggctgtcaaagtggaggagagtaaggcctgacagtgcctggctgccacctcgcctctccctactgaggacggtgccgccatgcggcctcgacacagccgacactcgggagcctcaccagatccaccgtccaaatgcgtggcccagactgagagacctccctcctctccactcccgaaagctccgttgtcaaccagcttgcacccgtggatatatggcattgacccgcttgctttgatacgaaacaaaaaagcagacgactccttcatcccatctgctcctaccgtgactgtggagtgacgcctcctgtgcagtgcagatttgccctccctgcctcctccctgtcctgccgcgcagccagggcgccttctcagcagtgcttccggcccagccgcccatccctaggcacagtgatttggcagcagggtcattttactttgaggctttttgttttaaaatgtagccaaggtttttacaaaggggaaaggaaaagaaaacaaaaacgcaagctccatgtgtatagctgaacttttatatgtttcttgccagcccctccgctcccttccatctctagcctctgtcctgtttagtttgatacgtcactgcagtaccttaagaggtgactcttaagaatgcatcccctcctgattcctcagctggttcacccttgaggttatttgcaaaaagaaaaggaggttcttgagggcaccgattgcgagcattctggtgcctggctccccgcctgggaagcgatggggtgctcagagcagcaggcaggttgggggagggggggggtcatagttgggttccagctcctggcttgatgagcccagggcgcttacaggcagcccatgaagttgatgacagttttagcatgagaatcacacagggtccctgtcctgggctcctctaaagccagtggatgtgctgggcaccagagacaaatcatggagatggctgctggtggctcccaggttggcccagatggggtgagctgacatactacaggcccatcccaggccccgtgggctctgcttctggggctccataccctgccctgcaggggtgctgtgtttttcacacatttctttccctgaagccttctgtaacctgtcattttccttccttcctcttccggagcctgctgctttctctggacctgtctccacctcccacacagctcatcgtgaacaccacttggtgatggagggagtggacccgtgtgtggtccccaagtgaggccactgggagtttgtccttttcctcctttgcttcactcccagcagcagacccaggttgtcaggacaggagggcctgagctaagcagtaggcatcagtctcgtttgtcttcagacggcgggggcaggtccagggtgaggctgggtggagggctgaccaaggtccaaagggcctgcgcagcctccgggagggcagcttctccagccagaggcttgtgtgagccatcgtgtgctgggcttgtttttaagtaagaaacaaggaaatcactccagattctgtcattccaaggaaagggaaggggacagttcaggtttctcagctgttcttaggggtcactgagcgtctacctcctcctccagaggaggctggctcagaacacctagaggagggggccggggatgcaccccccaccagaggctgccttcagcgtctcacgggtgcaggacagcgctcaggcttggccgcatggccagacccctcccacctgatgcggtggtgcgtgtgatttgtcaaaagaaagccttctggatgctgttaagatgtacccttcaggtgaacctggtatcagacccacagtacttgctgtttgagaaaaaataaaaacaaaaaggtcacctgttctccagcccttttctcttacctggtatttccttcctttctcctcccccaccccaaataaaaaaacaaaaaacactagaatttatttatatgtattgatgttgtaggtctaggtgaaaaaaaaagaagtaaatgtttcactgctctatttatatataatgtctgaattaattctgtgcaggaaaggccaggaaattgcatgtgaagttcggtgcagtcaccacctctgtgtgacctgagctgcagtctcttcgctgagatgcaggttttaaatgagacttggggggctgagggcaggcctcaggcctcccagcgccccaacccctccttggtctaatgaaatgcagttcttagtgcagagatgttttaaggtgcaatatatctcttcctttcccgtggttttagagccaagctcaaggtagtaggacgtagggtcttattttgttttcaaacccccatcctcagagcgcagatacatgcagaggcttctgccaggataccacggggccttagtgggaacaggtggagaccagcacttccctttcctgctgctgaggtagggattggggggtcagaacccactcacttttgcctgttaaagttgccctcctgacgctggcagctctgccttggtcactggggatgcggctcgttgctcagccaccagtggccttgcggtattgtccaccatccactagagtgggatgaagtccagagtgtgggtatacatctcagatgcccatctacccactggggacttcaatgccagctgcatttggtttggttttcttaactgttggcttctccccacagcgttttttgtttttttttaaacattcatattgttttcaaacttggaattcatagacactctggctctaggttccttaagggggaaaacaaaagatgactttatttcacattcaagaaaatcagttcagttccaaagctgtggtccttccagccacttctagggacactggggaaccttgttaaacgttgacatcagtgctctccagccgtgctgtcaccctcctatcttctggatctgccttcgggatggtcagtgacagcttctggaagctgagcacacacaggtgcacagccatgctgtggtctggcctgctacggcagcatggcagctctggtggagccttctcccttgccatttggttcccctgtgccaagtagctgcaggctgcccctcaaatcttcatttgtcccttttcacttcctgcagaacaagcctgggttagagggtctgctggaaatggcctttgaagaccaaggataccaggatgtgtgcactctgtcgtgttctgtgatgaatgggaaacgtaggcttccagaaagccagctctcttctgaaatgtgacggacctaagcaggaagtcatccaggacaggagtggctcagtgttggggatggacgctgtcgcccagccatgctccaccagggccaccaatgtgtagttggctggtggtcttcgggcatgtgagacctgctcttcactgtttccaccccacttggtggcctccaggatggtagtggcaccctcagagccccatcttcagcatgttctgaagcctcagagtggaaattcctgctaaggctctgtgtggacgcctttctcccgtgatctaaaggggacactgtactcaagcttttgacctcatgccttgtgtagtaaaaaaggatttgggggttttgtttggttcctgagagggttgtgttttgtttttgtttccttttgtttatgttttggcctttcctctttgtctttccatgtagaccagatatttgaaagggcagacgatggctagaggtgtaatgtgcagcttgtttatacggtattttgggaaacttaccttggatgggaaatcgaatcgtggattcaccaggccggtgctggcacactcaccctcgccctttccctccggttcagtacctattgtttctcctttcaaatatgtgattgtactagctctttccatatgaaagaattctccttatttaaataaaaaaagtttaaaaagataaaaaaaactgaa

SEQ ID NO: 348918 - DNA, 6759 bp, Homo sapiens
ccagaactcctccgatcacgccaatgaggagtgggagacggcctccgaaagcagcgacttcagcgagcggcgggagcggcgggaaggccctgggtccgagcccgactcccaggtggatggtggcctgtcgggggctagtttgggtgagaagaaggagctggccaagaggagcttctccagtcagagacccgtggttgacagacagagccgaaagctggagccgggagggtttggggagaagcccgttaggccaggtggtggtgacacctcccctcgctatgagagccaacagaatgggacgcctttgaaagtgaaaagatccccagacgaggccttgcctggaggtcttagtggctgcagcagtgggagtggccactccccctatgccctggagcgggcagcccatgccagtgctgaccttcccgaagcctccagtaaaaaggcagagaaggaggccaagttggctgctccgagggcaggtgaacagggagaggccatgaaacagtttgacctgaactatggaagtgccatcattgaaaattgcgggtccagccccggggaggagagtgaggtgggttctatggtgggcgaaggcttcatcgaagtcctgaccaagaagcagcgccgcctgctggaggaagagagaagaaagaaggagcaggccgtgcaggtgcctgtcaaaggtcgaggcctttcctcccgtattcctcctcgatttgcaaaaaagcagaacaacttatgtctggagcaaggtgacgtgaccgtgcctggcagcagcctgggcactgagatctgggagagcagcagccaggctctccctgtgcaggccccagccaacgactcctggaggaaagctgtcactgccttcagcagcaccgagactggctctgcggagcagggttttaagagcagccagggagatagtggcgttgacttgagtgccgagtctcgggagtcgtctgcgacctcctcgcagcgcagctccccatatgggactctgaagccagaggagatgagcgggcccggcctggcggaacccaaggccgacagccacaaggagcaggctccaaagccatctgagcagaaggattcagaacaaggctctggacagagcaaggagcacagaccaggacccatcggcaacgagcgttctctgaaaaacagaaagggctcggagggggccgagcggctgcaaggggctgtcgtcccgcctgttaacggggtggagattcacgtggactccgtgctgcctgtgccacccattgaatttggagtcagtccaaaagactccgatttcagcttgccacctggttctgcctctggtcctactgggagtccagttgttaaacttcaggatgccttggccagtaatgcagggttaacacagagtatccccatcctgcggcgggaccatcacatccagagggccatcggtctctccccaatgtccttccccaccgccgaccttactctgaagatggagtctgcgcgcaaggcttgggaaaactcccccagtttgccggagcagagctctccaggcggcgctggctcaggcatccagcctccatcctctgtgggtgcctccagcggggtcaactacagctccttcggtggagtgtccatgccacccatgcctgtggcctctgtagcaccttctgcttctatgccaggcagccacctcccgcccctgtacctggatggccatgtgtttgcaagtcagccccggctggttcctcaaacgatacctcagcagcagagttaccaacaggccgccgctgcccagcagatcccgatctcccttcacacatctctgcaggcacaagctcagcttggactgaggggtgggcttcctgtgtcccagtcccaggagatcttcagctccttgcagcccttcagatctcaggtgtacatgcaccccagcctgtcaccgcccagcaccatgatcctctctgggggcacagccttgaagcctccatactcggcgttcccaggcatgcagcccttggagatggtgaagccgcagtctggctcaccctaccagcccatgagcgggaaccaagccctggtctacgagggccagctcagccaggctgctggcctgggtgcctcccagatgttggactcccagctcccacagctgaccatgccactgcctcggtacggctccgggcagcagccactgatcctgccccagtctattcagctgccacctgggcagagcctctccgttggggccccccgaaggattcctccgcccgggtcccagccgccagtcctgaacaccagcagagagccctctcagatggagatgaaaggcttccactttgccgacagtaaacagaatgtcccttcaggaggccccgtgccatcgccacagacctacaggcaaaacaacgagtggatgagaaacccagcctgggagccgtgaagctgcaggaggccccctcggctgcctcccagatgaagcgaaccggagcgatcaagcctcgggctgtcaaagtggaggagagtaaggcctgacagtgcctggctgccacctcgcctctccctactgaggacggtgccgccatgcggcctcgacacagccgacactcgggagcctcaccagatccaccgtccaaatgcgtggcccagactgagagacctccctcctctccactcccgaaagctccgttgtcaaccagcttgcacccgtggatatatggcattgacccgcttgctttgatacgaaacaaaaaagcagacgactccttcatcccatctgctcctaccgtgactgtggagtgacgcctcctgtgcagtgcagatttgccctccctgcctcctccctgtcctgccgcgcagccagggcgccttctcagcagtgcttccggcccagccgcccatccctaggcacagtgatttggcagcagggtcattttactttgaggctttttgttttaaaatgtagccaaggtttttacaaaggggaaaggaaaagaaaacaaaaacgcaagctccatgtgtatagctgaacttttatatgtttcttgccagcccctccgctcccttccatctctagcctctgtcctgtttagtttgatacgtcactgcagtaccttaagaggtgactcttaagaatgcatcccctcctgattcctcagctggttcacccttgaggttatttgcaaaaagaaaaggaggttcttgagggcaccgattgcgagcattctggtgcctggctccccgcctgggaagcgatggggtgctcagagcagcaggcaggttgggggagggggggggtcatagttgggttccagctcctggcttgatgagcccagggcgcttacaggcagcccatgaagttgatgacagttttagcatgagaatcacacagggtccctgtcctgggctcctctaaagccagtggatgtgctgggcaccagagacaaatcatggagatggctgctggtggctcccaggttggcccagatggggtgagctgacatactacaggcccatcccaggccccgtgggctctgcttctggggctccataccctgccctgcaggggtgctgtgtttttcacacatttctttccctgaagccttctgtaacctgtcattttccttccttcctcttccggagcctgctgctttctctggacctgtctccacctcccacacagctcatcgtgaacaccacttggtgatggagggagtggacccgtgtgtggtccccaagtgaggccactgggagtttgtccttttcctcctttgcttcactcccagcagcagacccaggttgtcaggacaggagggcctgagctaagcagtaggcatcagtctcgtttgtcttcagacggcgggggcaggtccagggtgaggctgggtggagggctgaccaaggtccaaagggcctgcgcagcctccgggagggcagcttctccagccagaggcttgtgtgagccatcgtgtgctgggcttgtttttaagtaagaaacaaggaaatcactccagattctgtcattccaaggaaagggaaggggacagttcaggtttctcagctgttcttaggggtcactgagcgtctacctcctcctccagaggaggctggctcagaacacctagaggagggggccggggatgcaccccccaccagaggctgccttcagcgtctcacgggtgcaggacagcgctcaggcttgggctctaagctctgtgtctagtgtagaacatggggaaggagcatcttaggaactgctgaagtaacttcttactgctctcacaattctaaggaagcgggagaacggcctcctaccaacagcgcccaccccagagctgcctgggaaagggcagttttactgaaaggtgctttactgttcacctgcatctttcagcagctcccctcctgccctcacctggtcttttccctctttatcccaagcctttatgcttgagtcccttccccaggggctgcccacccgacagttccaggcattccctacctgagcttcttgtctgcttttccttctcccactgcaagcggctgcttgtggggcctgggatgagccctctctgtccccaccggccctccttgccaagccattcctgggtgagttcaggcctgcgggagccacacattcatctccacctggacacttgagccgcatggccagacccctcccacctgatgcggtggtgcgtgtgatttgtcaaaagaaagccttctggatgctgttaagatgtacccttcaggtgaacctggtatcagacccacagtacttgctgtttgagaaaaaataaaaacaaaaaggtcacctgttctccagcccttttctcttacctggtatttccttcctttctcctcccccaccccaaataaaaaaacaaaaaacactagaatttatttatatgtattgatgttgtaggtctaggtgaaaaaaaaagaagtaaatgtttcactgctctatttatatataatgtctgaattaattctgtgcaggaaaggccaggaaattgcatgtgaagttcggtgcagtcaccacctctgtgtgacctgagctgcagtctcttcgctgagatgcaggttttaaatgagacttggggggctgagggcaggcctcaggcctcccagcgccccaacccctccttggtctaatgaaatgcagttcttagtgcagagatgttttaaggtgcaatatatctcttcctttcccgtggttttagagccaagctcaaggtagtaggacgtagggtcttattttgttttcaaacccccatcctcagagcgcagatacatgcagaggcttctgccaggataccacggggccttagtgggaacaggtggagaccagcacttccctttcctgctgctgaggtagggattggggggtcagaacccactcacttttgcctgttaaagttgccctcctgacgctggcagctctgccttggtcactggggatgcggctcgttgctcagccaccagtggccttgcggtattgtccaccatccactagagtgggatgaagtccagagtgtgggtatacatctcagatgcccatctacccactggggacttcaatgccagctgcatttggtttggttttcttaactgttggcttctccccacagcgttttttgtttttttttaaacattcatattgttttcaaacttggaattcatagacactctggctctaggttccttaagggggaaaacaaaagatgactttatttcacattcaagaaaatcagttcagttccaaagctgtggtccttccagccacttctagggacactggggaaccttgttaaacgttgacatcagtgctctccagccgtgctgtcaccctcctatcttctggatctgccttcgggatggtcagtgacagcttctggaagctgagcacacacaggtgcacagccatgctgtggtctggcctgctacggcagcatggcagctctggtggagccttctcccttgccatttggttcccctgtgccaagtagctgcaggctgcccctcaaatcttcatttgtcccttttcacttcctgcagaacaagcctgggttagagggtctgctggaaatggcctttgaagaccaaggataccaggatgtgtgcactctgtcgtgttctgtgatgaatgggaaacgtaggcttccagaaagccagctctcttctgaaatgtgacggacctaagcaggaagtcatccaggacaggagtggctcagtgttggggatggacgctgtcgcccagccatgctccaccagggccaccaatgtgtagttggctggtggtcttcgggcatgtgagacctgctcttcactgtttccaccccacttggtggcctccaggatggtagtggcaccctcagagccccatcttcagcatgttctgaagcctcagagtggaaattcctgctaaggctctgtgtggacgcctttctcccgtgatctaaaggggacactgtactcaagcttttgacctcatgccttgtgtagtaaaaaaggatttgggggttttgtttggttcctgagagggttgtgttttgtttttgtttcgtttatacggtattttgggaaacttaccttggatgggaaatcgaatcgtggattcaccaggccggtgctggcacactcaccctcgccctttccctccggttcagtacctattgtttctcctttcaaatatgtgattgtactagctctttccatatgaaagaattctccttatttaaataaaaaaagtttaaaaagataaaaaaaactgaa

SEQ ID NO: 348919 - DNA, 3525 bp, Homo sapiens
gtgtcgtagttggtgcggcttagcgtggtgtcggtgattgatgcagcgcggtggtggtgtgctcgctctggtgctctacctgcgttccgtcatatactagcaccgacggacattggttttcttgcggaccctgtctgaatacgctggccaaccggtgcgcccacatcgagtcggggccccgtcccggggtttacacacgcctcaggccctggctttttggccctccgccgccgggcctgtgtgcccagtcttccctggccttctgtaacctgtcattttccttccttcctcttccggagcctgctgctttctctggacctgtctccacctcccacacagctcatcgtgaacaccacttggtgatggagggagtggacccgtgtgtggtccccaagtgaggccactgggagtttgtccttttcctcctttgcttcactcccagcagcagacccaggttgtcaggacaggagggcctgagctaagcagtaggcatcagtctcgtttgtcttcagacggcgggggcaggtccagggtgaggctgggtggagggctgaccaaggtccaaagggcctgcgcagcctccgggagggcagcttctccagccagaggcttgtgtgagccatcgtgtgctgggcttgtttttaagtaagaaacaaggaaatcactccagattctgtcattccaaggaaagggaaggggacagttcaggtttctcagctgttcttaggggtcactgagcgtctacctcctcctccagaggaggctggctcagaacacctagaggagggggccggggatgcaccccccaccagaggctgccttcagcgtctcacgggtgcaggacagcgctcaggcttgggctctaagctctgtgtctagtgtagaacatggggaaggagcatcttaggaactgctgaagtaacttcttactgctctcacaattctaaggaagcgggagaacggcctcctaccaacagcgcccaccccagagctgcctgggaaagggcagttttactgaaaggtgctttactgttcacctgcatctttcagcagctcccctcctgccctcacctggtcttttccctctttatcccaagcctttatgcttgagtcccttccccaggggctgcccacccgacagttccaggcattccctacctgagcttcttgtctgcttttccttctcccactgcaagcggctgcttgtggggcctgggatgagccctctctgtccccaccggccctccttgccaagccattcctgggtgagttcaggcctgcgggagccacacattcatctccacctggacacttgagccgcatggccagacccctcccacctgatgcggtggtgcgtgtgatttgtcaaaagaaagccttctggatgctgttaagatgtacccttcaggtgaacctggtatcagacccacagtacttgctgtttgagaaaaaataaaaacaaaaaggtcacctgttctccagcccttttctcttacctggtatttccttcctttctcctcccccaccccaaataaaaaaacaaaaaacactagaatttatttatatgtattgatgttgtaggtctaggtgaaaaaaaaagaagtaaatgtttcactgctctatttatatataatgtctgaattaattctgtgcaggaaaggccaggaaattgcatgtgaagttcggtgcagtcaccacctctgtgtgacctgagctgcagtctcttcgctgagatgcaggttttaaatgagacttggggggctgagggcaggcctcaggcctcccagcgccccaacccctccttggtctaatgaaatgcagttcttagtgcagagatgttttaaggtgcaatatatctcttcctttcccgtggttttagagccaagctcaaggtagtaggacgtagggtcttattttgttttcaaacccccatcctcagagcgcagatacatgcagaggcttctgccaggataccacggggccttagtgggaacaggtggagaccagcacttccctttcctgctgctgaggtagggattggggggtcagaacccactcacttttgcctgttaaagttgccctcctgacgctggcagctctgccttggtcactggggatgcggctcgttgctcagccaccagtggccttgcggtattgtccaccatccactagagtgggatgaagtccagagtgtgggtatacatctcagatgcccatctacccactggggacttcaatgccagctgcatttggtttggttttcttaactgttggcttctccccacagcgttttttgtttttttttaaacattcatattgttttcaaacttggaattcatagacactctggctctaggttccttaagggggaaaacaaaagatgactttatttcacattcaagaaaatcagttcagttccaaagctgtggtccttccagccacttctagggacactggggaaccttgttaaacgttgacatcagtgctctccagccgtgctgtcaccctcctatcttctggatctgccttcgggatggtcagtgacagcttctggaagctgagcacacacaggtgcacagccatgctgtggtctggcctgctacggcagcatggcagctctggtggagccttctcccttgccatttggttcccctgtgccaagtagctgcaggctgcccctcaaatcttcatttgtcccttttcacttcctgcagaacaagcctgggttagagggtctgctggaaatggcctttgaagaccaaggataccaggatgtgtgcactctgtcgtgttctgtgatgaatgggaaacgtaggcttccagaaagccagctctcttctgaaatgtgacggacctaagcaggaagtcatccaggacaggagtggctcagtgttggggatggacgctgtcgcccagccatgctccaccagggccaccaatgtgtagttggctggtggtcttcgggcatgtgagacctgctcttcactgtttccaccccacttggtggcctccaggatggtagtggcaccctcagagccccatcttcagcatgttctgaagcctcagagtggaaattcctgctaaggctctgtgtggacgcctttctcccgtgatctaaaggggacactgtactcaagcttttgacctcatgccttgtgtagtaaaaaaggatttgggggttttgtttggttcctgagagggttgtgttttgtttttgtttccttttgtttatgttttggcctttcctctttgtctttccatgtagaccagatatttgaaagggcagacgatggctagaggtgtaatgtgcagcttgtttatacggtattttgggaaacttaccttggatgggaaatcgaatcgtggattcaccaggccggtgctggcacactcaccctcgccctttccctccggttcagtacctattgtttctcctttcaaatatgtgattgtactagctctttccatatgaaagaattctccttatttaaataaaaaaagtttaaaaagataaaaaaaactgaa

SEQ ID NO: 348920 - DNA, 5689 bp, Homo sapiens
ccagaactcctccgatcacgccaatgaggagtgggagacggcctccgaaagcagcgacttcagcgagcggcgggagcggcgggaaggccctgggtccgagcccgactcccaggtggatggtggcctgtcgggggctagtttgggtgagaagaaggagctggccaagaggagcttctccagtcagagacccgtggttgacagacagagccgaaagctggagccgggagggtttggggagaagcccgttaggccaggtggtggtgacacctcccctcgctatgagagccaacagaatgggacgcctttgaaagtgaaaagatccccagacgaggccttgcctggaggtcttagtggctgcagcagtgggagtggccactccccctatgccctggagcgggcagcccatgccagtgctgaccttcccgaagcctccagtaaaaaggcagagaaggaggccaagttggctgctccgagggcaggtgaacagggagaggccatgaaacagtttgacctgaactatggaagtgccatcattgaaaattgcgggtccagccccggggaggagagtgaggtgggttctatggtgggcgaaggcttcatcgaagtcctgaccaagaagcagcgccgcctgctggaggaagagagaagaaagaaggagcaggccgtgcaggtgcctgtcaaaggtcgaggcctttcctcccgtattcctcctcgatttgcaaaaaagcagaacaacttatgtctggagcaaggtgacgtgaccgtgcctggcagcagcctgggcactgagatctgggagagcagcagccaggctctccctgtgcaggccccagccaacgactcctggaggaaagctgtcactgccttcagcagcaccgagactggctctgcggagcagggttttaagagcagccagggagatagtggcgttgacttgagtgccgagtctcgggagtcgtctgcgacctcctcgcagcgcagctccccatatgggactctgaagccagaggagatgagcgggcccggcctggcggaacccaaggccgacagccacaaggagcaggctccaaagccatctgagcagaaggattcagaacaaggctctggacagagcaaggagcacagaccaggacccatcggcaacgagcgttctctgaaaaacagaaagggctcggagggggccgagcggctgcaaggggctgtcgtcccgcctgttaacggggtggagattcacgtggactccgtgctgcctgtgccacccattgaatttggagtcagtccaaaagactccgatttcagcttgccacctggttctgcctctggtcctactgggagtccagttgttaaacttcaggatgccttggccagtaatgcagggttaacacagagtatccccatcctgcggcgggaccatcacatccagagggccatcggtctctccccaatgtccttccccaccgccgaccttactctgaagatggagtctgcgcgcaaggcttgggaaaactcccccagtttgccggagcagagctctccaggcggcgctggctcaggcatccagcctccatcctctgtgggtgcctccagcggggtcaactacagctccttcggtggagtgtccatgccacccatgcctgtggcctctgtagcaccttctgcttctatgccaggcagccacctcccgcccctgtacctggatggccatgtgtttgcaagtcagccccggctggttcctcaaacgatacctcagcagcagagttaccaacaggccgccgctgcccagcagatcccgatctcccttcacacatctctgcaggcacaagctcagcttggactgaggggtgggcttcctgtgtcccagtcccaggagatcttcagctccttgcagcccttcagatctcaggtgtacatgcaccccagcctgtcaccgcccagcaccatgatcctctctgggggcacagccttgaagcctccatactcggcgttcccaggcatgcagcccttggagatggtgaagccgcagtctggctcaccctaccagcccatgagcgggaaccaagccctggtctacgagggccagctcagccaggctgctggcctgggtgcctcccagatgttggactcccagctcccacagctgaccatgccactgcctcggtacggctccgggcagcagccactgatcctgccccagtctattcagctgccacctgggcagagcctctccgttggggccccccgaaggattcctccgcccgggtcccagccgccagtcctgaacaccagcagagagccctctcagatggagatgaaaggcttccactttgccgacagtaaacagaatgtcccttcaggaggccccgtgccatcgccacagacctacaggcctagctctgctagccccagtgggaagccctctggatcagcagttaacatgggctctgtgcagggacactacgtgcaacaggcaaaacaacgagtggatgagaaacccagcctgggagccgtgaagctgcaggaggccccctcggctgcctcccagatgaagcgaaccggagcgatcaagcctcgggctgtcaaagtggaggagagtaaggcctgacagtgcctggctgccacctcgcctctccctactgaggacggtgccgccatgcggcctcgacacagccgacactcgggagcctcaccagatccaccgtccaaatgcgtggcccagactgagagacctccctcctctccactcccgaaagctccgttgtcaaccagcttgcacccgtggatatatggcattgacccgcttgctttgatacgaaacaaaaaagcagacgactccttcatcccatctgctcctaccgtgactgtggagtgacgcctcctgtgcagtgcagatttgccctccctgcctcctccctgtcctgccgcgcagccagggcgccttctcagcagtgcttccggcccagccgcccatccctaggcacagtgatttggcagcagggtcattttactttgaggctttttgttttaaaatgtagccaaggtttttacaaaggggaaaggaaaagaaaacaaaaacgcaagctccatgtgtatagctgaacttttatatgtttcttgccagcccctccgctcccttccatctctagcctctgtcctgtttagtttgatacgtcactgcagtaccttaagaggtgactcttaagaatgcatcccctcctgattcctcagctggttcacccttgaggttatttgcaaaaagaaaaggaggttcttgagggcaccgattgcgagcattctggtgcctggctccccgcctgggaagcgatggggtgctcagagcagcaggcaggttgggggagggggggggtcatagttgggttccagctcctggcttgatgagcccagggcgcttacaggcagcccatgaagttgatgacagttttagcatgagaatcacacattcatctccacctggacacttgagccgcatggccagacccctcccacctgatgcggtggtgcgtgtgatttgtcaaaagaaagccttctggatgctgttaagatgtacccttcaggtgaacctggtatcagacccacagtacttgctgtttgagaaaaaataaaaacaaaaaggtcacctgttctccagcccttttctcttacctggtatttccttcctttctcctcccccaccccaaataaaaaaacaaaaaacactagaatttatttatatgtattgatgttgtaggtctaggtgaaaaaaaaagaagtaaatgtttcactgctctatttatatataatgtctgaattaattctgtgcaggaaaggccaggaaattgcatgtgaagttcggtgcagtcaccacctctgtgtgacctgagctgcagtctcttcgctgagatgcaggttttaaatgagacttggggggctgagggcaggcctcaggcctcccagcgccccaacccctccttggtctaatgaaatgcagttcttagtgcagagatgttttaaggtgcaatatatctcttcctttcccgtggttttagagccaagctcaaggtagtaggacgtagggtcttattttgttttcaaacccccatcctcagagcgcagatacatgcagaggcttctgccaggataccacggggccttagtgggaacaggtggagaccagcacttccctttcctgctgctgaggtagggattggggggtcagaacccactcacttttgcctgttaaagttgccctcctgacgctggcagctctgccttggtcactggggatgcggctcgttgctcagccaccagtggccttgcggtattgtccaccatccactagagtgggatgaagtccagagtgtgggtatacatctcagatgcccatctacccactggggacttcaatgccagctgcatttggtttggttttcttaactgttggcttctccccacagcgttttttgtttttttttaaacattcatattgttttcaaacttggaattcatagacactctggctctaggttccttaagggggaaaacaaaagatgactttatttcacattcaagaaaatcagttcagttccaaagctgtggtccttccagccacttctagggacactggggaaccttgttaaacgttgacatcagtgctctccagccgtgctgtcaccctcctatcttctggatctgccttcgggatggtcagtgacagcttctggaagctgagcacacacaggtgcacagccatgctgtggtctggcctgctacggcagcatggcagctctggtggagccttctcccttgccatttggttcccctgtgccaagtagctgcaggctgcccctcaaatcttcatttgtcccttttcacttcctgcagaacaagcctgggttagagggtctgctggaaatggcctttgaagaccaaggataccaggatgtgtgcactctgtcgtgttctgtgatgaatgggaaacgtaggcttccagaaagccagctctcttctgaaatgtgacggacctaagcaggaagtcatccaggacaggagtggctcagtgttggggatggacgctgtcgcccagccatgctccaccagggccaccaatgtgtagttggctggtggtcttcgggcatgtgagacctgctcttcactgtttccaccccacttggtggcctccaggatggtagtggcaccctcagagccccatcttcagcatgttctgaagcctcagagtggaaattcctgctaaggctctgtgtggacgcctttctcccgtgatctaaaggggacactgtactcaagcttttgacctcatgccttgtgtagtaaaaaaggatttgggggttttgtttggttcctgagagggttgtgttttgtttttgtttccttttgtttatgttttggcctttcctctttgtctttccatgtagaccagatatttgaaagggcagacgatggctagaggtgtaatgtgcagcttgtttatacggtattttgggaaacttaccttggatgggaaatcgaatcgtggattcaccaggccggtgctggcacactcaccctcgccctttccctccggttcagtacctattgtttctcctttcaaatatgtgattgtactagctctttccatatgaaagaattctccttatttaaataaaaaaagtttaaaaagataaaaaaaactgaa

SEQ ID NO: 348921 - DNA, 2642 bp, Homo sapiens
ccaggtggatgatgatgccttcctacatggacccacgtatcacgcccactcggaccccggtggacttctacccctccgccctgcatccctcaggactgatgaagcccatgatgccccaggagtccctcaatgggacaggctgtcgctctgaggatcagaactgtgtgcccccactccaagaaagaaaagtgacccccatcgactcaccccctgtgtggagcccagagggctacatggcactgcagagcaagggctacccgctcccgcacccgaagtcgagtgacaccttggctatggacatgcgtgtcaggaatgaaagctctttctctgcctcactcggaagggcagggggcgtaagtgctcagcgcgatctctttgaggagagaggggaggagtacttgagtgcttttgacaagaaggcccaagcagactttgacagctgtatctcttctcaaagaataggccaggagcttttgtttccaccccaagaaaatgttcaggatgctgttaagatgtacccttcaggtgaacctggtatcagacccacagtacttgctgtttgagaaaaaataaaaacaaaaaggtcacctgttctccagcccttttctcttacctggtatttccttcctttctcctcccccaccccaaataaaaaaacaaaaaacactagaatttatttatatgtattgatgttgtaggtctaggtgaaaaaaaaagaagtaaatgtttcactgctctatttatatataatgtctgaattaattctgtgcaggaaaggccaggaaattgcatgtgaagttcggtgcagtcaccacctctgtgtgacctgagctgcagtctcttcgctgagatgcaggttttaaatgagacttggggggctgagggcaggcctcaggcctcccagcgccccaacccctccttggtctaatgaaatgcagttcttagtgcagagatgttttaaggtgcaatatatctcttcctttcccgtggttttagagccaagctcaaggtagtaggacgtagggtcttattttgttttcaaacccccatcctcagagcgcagatacatgcagaggcttctgccaggataccacggggccttagtgggaacaggtggagaccagcacttccctttcctgctgctgaggtagggattggggggtcagaacccactcacttttgcctgttaaagttgccctcctgacgctggcagctctgccttggtcactggggatgcggctcgttgctcagccaccagtggccttgcggtattgtccaccatccactagagtgggatgaagtccagagtgtgggtatacatctcagatgcccatctacccactggggacttcaatgccagctgcatttggtttggttttcttaactgttggcttctccccacagcgttttttgtttttttttaaacattcatattgttttcaaacttggaattcatagacactctggctctaggttccttaagggggaaaacaaaagatgactttatttcacattcaagaaaatcagttcagttccaaagctgtggtccttccagccacttctagggacactggggaaccttgttaaacgttgacatcagtgctctccagccgtgctgtcaccctcctatcttctggatctgccttcgggatggtcagtgacagcttctggaagctgagcacacacaggtgcacagccatgctgtggtctggcctgctacggcagcatggcagctctggtggagccttctcccttgccatttggttcccctgtgccaagtagctgcaggctgcccctcaaatcttcatttgtcccttttcacttcctgcagaacaagcctgggttagagggtctgctggaaatggcctttgaagaccaaggataccaggatgtgtgcactctgtcgtgttctgtgatgaatgggaaacgtaggcttccagaaagccagctctcttctgaaatgtgacggacctaagcaggaagtcatccaggacaggagtggctcagtgttggggatggacgctgtcgcccagccatgctccaccagggccaccaatgtgtagttggctggtggtcttcgggcatgtgagacctgctcttcactgtttccaccccacttggtggcctccaggatggtagtggcaccctcagagccccatcttcagcatgttctgaagcctcagagtggaaattcctgctaaggctctgtgtggacgcctttctcccgtgatctaaaggggacactgtactcaagcttttgacctcatgccttgtgtagtaaaaaaggatttgggggttttgtttggttcctgagagggttgtgttttgtttttgtttccttttgtttatgttttggcctttcctctttgtctttccatgtagaccagatatttgaaagggcagacgatggctagaggtgtaatgtgcagcttgtttatacggtattttgggaaacttaccttggatgggaaatcgaatcgtggattcaccaggccggtgctggcacactcaccctcgccctttccctccggttcagtacctattgtttctcctttcaaatatgtgattgtactagctctttccatatgaaagaattctccttatttaaataaaaaaagtttaaaaagataaaaaaaactgaa

SEQ ID NO: 348922 - DNA, 938 bp, Homo sapiens
ccccgggctgcaggaattcggcatggcagctctggtggagccttctcccttgccatttggttcccctgtgccaagtagctgcaggctgcccctcaaatcttcatttgtcccttttcacttcctgcagaacaagcctgggttagagggtctgctggaaatggcctttgaagaccaaggataccaggatgtgtgcactctgtcgtgttctgtgatgaatgggaaacgtaggcttccagaaagccagctctcttctgaaatgtgacggacctaagcaggaagtcatccaggacaggagtggctcagtgttggggatggacgctgtcgcccagccatgctccaccagggccaccaatgtgtagttggctggtggtcttcgggcatgtgagacctgctcttcactgtttccaccccacttggtggcctccaggatggtagtggcaccctcagagccccatcttcagcatgttctgaagcctcagagtggaaattcctgctaaggctctgtgtggacgcctttctcccgtgatctaaaggggacactgtactcaagcttttgacctcatgccttgtgtagtaaaaaaggatttgggggttttgtttggttcctgagagggttgtgttttgtttttgtttccttttgtttatgttttggcctttcctctttgtctttccatgtagaccagatatttgaaagggcagacgatggctagaggtgtaatgtgcagcttgtttatacggtattttgggaaacttaccttggatgggaaatcgaatcgtggattcaccaggccggtgctggcacactcaccctcgccctttccctccggttcagtacctattgtttctcctttcaaatatgtgattgtactagctctttccatatgaaagaattctccttatttaaataaaaaaagtttaaaaagataaaaaaaactgaa

SEQ ID NO: 348923 - DNA, 924 bp, Homo sapiens
  misc_feature (9)..(9): n is a, c, g, or t
  misc_feature (53)..(53): n is a, c, g, or t
  misc_feature (167)..(167): n is a, c, g, or t
ccgagaaanacaagaaaaagggggtgcaaccggctgaagaccttgattcacgntaccaggttccccatttcccaagaatggctggaaggaccacaactttggacttgactgatttcttgaatgtgaaataaagtcatcttttgttttcccccttaaggaacctaganccagatgtgtgcactctgtcgtgttctgtgatgaatgggaaacgtaggcttccagaaagccagctctcttctgaaatgtgacggacctaagcaggaagtcatccaggacaggagtggctcagtgttggggatggacgctgtcgcccagccatgctccaccagggccaccaatgtgtagttggctggtggtcttcgggcatgtgagacctgctcttcactgtttccaccccacttggtggcctccaggatggtagtggcaccctcagagccccatcttcagcatgttctgaagcctcagagtggaaattcctgctaaggctctgtgtggacgcctttctcccgtgatctaaaggggacactgtactcaagcttttgacctcatgccttgtgtagtaaaaaaggatttgggggttttgtttggttcctgagagggttgtgttttgtttttgtttccttttgtttatgttttggcctttcctctttgtctttccatgtagaccagatatttgaaagggcagacgatggctagaggtgtaatgtgcagcttgtttatacggtattttgggaaacttaccttggatgggaaatcgaatcgtggattcaccaggccggtgctggcacactcaccctcgccctttccctccggttcagtacctattgtttctcctttcaaatatgtgattgtactagctctttccatatgaaagaattctccttatttaaataaaaaaagtttaaaaagataaaaaaaactgaa

SEQ ID NO: 348924 - DNA, 1803 bp, Homo sapiens
ccagaactcctccgatcacgccaatgaggagtgggagacggcctccgaaagcagcgacttcagcgagcggcgggagcggcgggaaggccctgggtccgagcccgactcccaggtggatggtggcctgtcgggggctagtttgggtgagaagaaggagctggccaagaggagcttctccagtcagagacccgtggttgacagacagagccgaaagctggagccgggagggtttggggagaagcccgttaggccaggtggtggtgacacctcccctcgctatgagagccaacagaatgggacgcctttgaaagtgaaaagatccccagacgaggccttgcctggaggtcttagtggctgcagcagtgggagtggccactccccctatgccctggagcgggcagcccatgccagtgctgaccttcccgaagcctccagtaaaaaggcagagaaggaggccaagttggctgctccgagggcaggtgaacagggagaggccatgaaacagtttgacctgaactatggaagtgccatcattgaaaattgcgggtccagccccggggaggagagtgaggtgggttctatggtgggcgaaggcttcatcgaagtcctgaccaagaagcagcgccgcctgctggaggaagagagaagaaagaaggagcaggccgtgcaggtgcctgtcaaaggtcgaggcctttcctcccgtattcctcctcgatttgcaaaaaagcagaacaacttatgtctggagcaaggtgacgtgaccgtgcctggcagcagcctgggcactgagatctgggagagcagcagccaggctctccctgtgcaggccccagccaacgactcctggaggaaagctgtcactgccttcagcagcaccgagactggctctgcggagcagggttttaagagcagccagggagatagtggcgttgacttgagtgccgagtctcgggagtcgtctgcgacctcctcgcagcgcagctccccatatgggactctgaagccagaggagatgagcgggcccggcctggcggaacccaaggccgacagccacaaggagcaggctccaaagccatctgagcagaaggattcagaacaaggctctggacagagcaaggagcacagaccaggacccatcggcaacgagcgttctctgaaaaacagaaagggctcggagggggccgagcggctgcaaggggctgtcgtcccgcctgttaacggggtggagattcacgtggactccgtgctgcctgtgccacccattgaatttggagtcagtccaaaagactccgatttcagcttgccacctggttctgcctctggtcctactgggagtccagttgttaaacttcaggatgccttggccagtaatgcagggttaacacagagtatccccatcctgcggcgggaccatcacatccagagggccatcggtctctccccaatgtccttccccaccgccgaccttactctgaagatggagtctgcgcgcaaggcttgggaaaactcccccagtttgccggagcagagctctccaggcggcgctggctcaggcatccagcctccatcctctgtgggtgcctccagcggggtcaactacagctccttcggtggagtgtccatgccacccatgcctgtggcctctgtagcaccttctgcttctatgccaggtatctcatcccctgagcaaggccttggggtccttctccatttattatcaagaaaaacggattaacagccccgaatgtcacctcctggccttgtcttaagtagcatgtagaagtagcaacttgtttttaggcc

SEQ ID NO: 348925 - DNA, 704 bp, Homo sapiens
ccaggtggatgatgatgccttcctacatggacccacgtatcacgcccactcggaccccggtggacttctacccctccgccctgcatccctcaggactgatgaagcccatgatgccccaggagtccctcaatgggacaggctgtcgctctgaggatcagaactgtgtgcccccactccaagaaagaaaagtgacccccatcgactcaccccctgtgtggagcccagagggctacatggcactgcagagcaagggctacccgctcccgcacccgaagtcgagtgacaccttggctatggacatgcgtgtcaggaatgaaagctctttctctgcctcactcggaagggcagggggcgtaagtgctcagcgcgatctctttgaggagagaggggaggagtacttgagtgcttttgacaagaaggcccaagcagactttgacagctgtatctcttctcaaagaataggccaggagcttttgtttccaccccaagaaaatgttcaggatgcaggtgctcctgggggtcacacccaaaacctcaggtgttccccattggagcctgactttgtcccagatgagaaaaagccagagtgtggcagttgggatgttagccaccagccagagaccgctgacacagcccatggtgttgagcgggagacaccccgggaggggacggcctttaacatctcctcctgggacaagaacggg

SEQ ID NO: 348926 - DNA, 504 bp, Homo sapiens
tctggggctgtagaggtgagcagagtaggtaggattcccaccgagtgttgctcacagcccgttgaatccccgtgacaccctgcagcttccgggctttaaagagaggaagcctggggcccagagacgttcggtggtgtgtccgaggtcacacacagctgtaggagcagagctggggtttaagctctttgcgtgttctctcagttgtgcccttgggcctctttggtttggggtaacaatgtgttagatcagaggcggcctgagaaaagtgcggaagtcctgtccaggtttctgtcgagcctgatgctagatctcaggcgcctgttgaattgggttgttcttgtctcctggtgagtggaaagactgttccttctcgtgaaatcttggttcaggtgccatcattgaaaattgcgggtccagccccggggaggagagtgaggtgggttctatggtgggcgaaggcttcatcgaagtcctgaccaagaagcagcgccgcctgctggagga

SEQ ID NO: 348927 - DNA, 529 bp, Homo sapiens
cacagttctggctcagcgtcaggcttctaggccttttgtctggggcactgcatcgtgttggtccagaccctgagacggccagtgtcgctttctgcacagcaggacagccatgcccatctgtacagggcctcagcctccctctcttgcggtgcgtctccttgagctctgtcctggaggtgccagggtggtcagtgacagccaccccctcacccttctgcgttctgggctgtcttaggtctgtggttgttttccatccaagagatccacggaccgtcccgagtgagcgcctctggccgcaggcccttccttccttgtgcctcctccatgtgctaggctttgactccatttctgtggtgacacgttgtgtattctcaacccctgcctttggttttttcaggcctagctctgctagccccagtgggaagccctctggatcagcagttaacatgggctctgtgcagggacactacgtgcaacaggtagaagatggctttccagacccttcagccctggacacttaggcccgtct

SEQ ID NO: 348928 - DNA, 6914 bp, Homo sapiens
ccagaactcctccgatcacgccaatgaggagtgggagacggcctccgaaagcagcgacttcagcgagcggcgggagcggcgggaaggccctgggtccgagcccgactcccaggtggatggtggcctgtcgggggctagtttgggtgagaagaaggagctggccaagaggagcttctccagtcagagacccgtggttgacagacagagccgaaagctggagccgggagggtttggggagaagcccgttaggccaggtggtggtgacacctcccctcgctatgagagccaacagaatgggacgcctttgaaagtgaaaagatccccagacgaggccttgcctggaggtcttagtggctgcagcagtgggagtggccactccccctatgccctggagcgggcagcccatgccagtgctgaccttcccgaagcctccagtaaaaaggcagagaaggaggccaagttggctgctccgagggcaggtgaacagggagaggccatgaaacagtttgacctgaactatggaagtgccatcattgaaaattgcgggtccagccccggggaggagagtgaggtgggttctatggtgggcgaaggcttcatcgaagtcctgaccaagaagcagcgccgcctgctggaggaagagagaagaaagaaggagcaggccgtgcaggtgcctgtcaaaggtcgaggcctttcctcccgtattcctcctcgatttgcaaaaaagcagaacaacttatgtctggagcaaggtgacgtgaccgtgcctggcagcagcctgggcactgagatctgggagagcagcagccaggctctccctgtgcaggccccagccaacgactcctggaggaaagctgtcactgccttcagcagcaccgagactggctctgcggagcagggttttaagagcagccagggagatagtggcgttgacttgagtgccgagtctcgggagtcgtctgcgacctcctcgcagcgcagctccccatatgggactctgaagccagaggagatgagcgggcccggcctggcggaacccaaggccgacagccacaaggagcaggctccaaagccatctgagcagaaggattcagaacaaggctctggacagagcaaggagcacagaccaggacccatcggcaacgagcgttctctgaaaaacagaaagggctcggagggggccgagcggctgcaaggggctgtcgtcccgcctgttaacggggtggagattcacgtggactccgtgctgcctgtgccacccattgaatttggagtcagtccaaaagactccgatttcagcttgccacctggttctgcctctggtcctactgggagtccagttgttaaacttcaggatgccttggccagtaatgcagggttaacacagagtatccccatcctgcggcgggaccatcacatccagagggccatcggtctctccccaatgtccttccccaccgccgaccttactctgaagatggagtctgcgcgcaaggcttgggaaaactcccccagtttgccggagcagagctctccaggcggcgctggctcaggcatccagcctccatcctctgtgggtgcctccagcggggtcaactacagctccttcggtggagtgtccatgccacccatgcctgtggcctctgtagcaccttctgcttctatgccaggcagccacctcccgcccctgtacctggatggccatgtgtttgcaagtcagccccggctggttcctcaaacgatacctcagcagcagagttaccaacaggtatccttctgatgaagagaagaaaggcctaaactcccaggcatggatgcattagaaagaggccgccgctgcccagcagatcccgatctcccttcacacatctctgcaggcacaagctcagcttggactgaggggtgggcttcctgtgtcccagtcccaggagatcttcagctccttgcagcccttcagatctcaggtgtacatgcaccccagcctgtcaccgcccagcaccatgatcctctctgggggcacagccttgaagcctccatactcggcgttcccaggcatgcagcccttggagatggtgaagccgcagtctggctcaccctaccagcccatgagcgggaaccaagccctggtctacgagggccagctcagccaggctgctggcctgggtgcctcccagatgttggactcccagctcccacagctgaccatgccactgcctcggtacggctccgggcagcagccactgatcctgccccagtctattcagctgccacctgggcagagcctctccgttggggccccccgaaggattcctccgcccgggtcccagccgccagtcctgaacaccagcagagagccctctcagatggagatgaaaggcttccactttgccgacagtaaacagaatgtcccttcaggaggccccgtgccatcgccacagacctacaggcaaaacaacgagtggatgagaaacccagcctgggagccgtgaagctgcaggaggccccctcggctgcctcccagatgaagcgaaccggagcgatcaagcctcgggctgtcaaagtggaggagagtaaggcctgacagtgcctggctgccacctcgcctctccctactgaggacggtgccgccatgcggcctcgacacagccgacactcgggagcctcaccagatccaccgtccaaatgcgtggcccagactgagagacctccctcctctccactcccgaaagctccgttgtcaaccagcttgcacccgtggatatatggcattgacccgcttgctttgatacgaaacaaaaaagcagacgactccttcatcccatctgctcctaccgtgactgtggagtgacgcctcctgtgcagtgcagatttgccctccctgcctcctccctgtcctgccgcgcagccagggcgccttctcagcagtgcttccggcccagccgcccatccctaggcacagtgatttggcagcagggtcattttactttgaggctttttgttttaaaatgtagccaaggtttttacaaaggggaaaggaaaagaaaacaaaaacgcaagctccatgtgtatagctgaacttttatatgtttcttgccagcccctccgctcccttccatctctagcctctgtcctgtttagtttgatacgtcactgcagtaccttaagaggtgactcttaagaatgcatcccctcctgattcctcagctggttcacccttgaggttatttgcaaaaagaaaaggaggttcttgagggcaccgattgcgagcattctggtgcctggctccccgcctgggaagcgatggggtgctcagagcagcaggcaggttgggggagggggggggtcatagttgggttccagctcctggcttgatgagcccagggcgcttacaggcagcccatgaagttgatgacagttttagcatgagaatcacacagggtccctgtcctgggctcctctaaagccagtggatgtgctgggcaccagagacaaatcatggagatggctgctggtggctcccaggttggcccagatggggtgagctgacatactacaggcccatcccaggccccgtgggctctgcttctggggctccataccctgccctgcaggggtgctgtgtttttcacacatttctttccctgaagccttctgtaacctgtcattttccttccttcctcttccggagcctgctgctttctctggacctgtctccacctcccacacagctcatcgtgaacaccacttggtgatggagggagtggacccgtgtgtggtccccaagtgaggccactgggagtttgtccttttcctcctttgcttcactcccagcagcagacccaggttgtcaggacaggagggcctgagctaagcagtaggcatcagtctcgtttgtcttcagacggcgggggcaggtccagggtgaggctgggtggagggctgaccaaggtccaaagggcctgcgcagcctccgggagggcagcttctccagccagaggcttgtgtgagccatcgtgtgctgggcttgtttttaagtaagaaacaaggaaatcactccagattctgtcattccaaggaaagggaaggggacagttcaggtttctcagctgttcttaggggtcactgagcgtctacctcctcctccagaggaggctggctcagaacacctagaggagggggccggggatgcaccccccaccagaggctgccttcagcgtctcacgggtgcaggacagcgctcaggcttgggctctaagctctgtgtctagtgtagaacatggggaaggagcatcttaggaactgctgaagtaacttcttactgctctcacaattctaaggaagcgggagaacggcctcctaccaacagcgcccaccccagagctgcctgggaaagggcagttttactgaaaggtgctttactgttcacctgcatctttcagcagctcccctcctgccctcacctggtcttttccctctttatcccaagcctttatgcttgagtcccttccccaggggctgcccacccgacagttccaggcattccctacctgagcttcttgtctgcttttccttctcccactgcaagcggctgcttgtggggcctgggatgagccctctctgtccccaccggccctccttgccaagccattcctgggtgagttcaggcctgcgggagccacacattcatctccacctggacacttgagccgcatggccagacccctcccacctgatgcggtggtgcgtgtgatttgtcaaaagaaagccttctggatgctgttaagatgtacccttcaggtgaacctggtatcagacccacagtacttgctgtttgagaaaaaataaaaacaaaaaggtcacctgttctccagcccttttctcttacctggtatttccttcctttctcctcccccaccccaaataaaaaaacaaaaaacactagaatttatttatatgtattgatgttgtaggtctaggtgaaaaaaaaagaagtaaatgtttcactgctctatttatatataatgtctgaattaattctgtgcaggaaaggccaggaaattgcatgtgaagttcggtgcagtcaccacctctgtgtgacctgagctgcagtctcttcgctgagatgcaggttttaaatgagacttggggggctgagggcaggcctcaggcctcccagcgccccaacccctccttggtctaatgaaatgcagttcttagtgcagagatgttttaaggtgcaatatatctcttcctttcccgtggttttagagccaagctcaaggtagtaggacgtagggtcttattttgttttcaaacccccatcctcagagcgcagatacatgcagaggcttctgccaggataccacggggccttagtgggaacaggtggagaccagcacttccctttcctgctgctgaggtagggattggggggtcagaacccactcacttttgcctgttaaagttgccctcctgacgctggcagctctgccttggtcactggggatgcggctcgttgctcagccaccagtggccttgcggtattgtccaccatccactagagtgggatgaagtccagagtgtgggtatacatctcagatgcccatctacccactggggacttcaatgccagctgcatttggtttggttttcttaactgttggcttctccccacagcgttttttgtttttttttaaacattcatattgttttcaaacttggaattcatagacactctggctctaggttccttaagggggaaaacaaaagatgactttatttcacattcaagaaaatcagttcagttccaaagctgtggtccttccagccacttctagggacactggggaaccttgttaaacgttgacatcagtgctctccagccgtgctgtcaccctcctatcttctggatctgccttcgggatggtcagtgacagcttctggaagctgagcacacacaggtgcacagccatgctgtggtctggcctgctacggcagcatggcagctctggtggagccttctcccttgccatttggttcccctgtgccaagtagctgcaggctgcccctcaaatcttcatttgtcccttttcacttcctgcagaacaagcctgggttagagggtctgctggaaatggcctttgaagaccaaggataccaggatgtgtgcactctgtcgtgttctgtgatgaatgggaaacgtaggcttccagaaagccagctctcttctgaaatgtgacggacctaagcaggaagtcatccaggacaggagtggctcagtgttggggatggacgctgtcgcccagccatgctccaccagggccaccaatgtgtagttggctggtggtcttcgggcatgtgagacctgctcttcactgtttccaccccacttggtggcctccaggatggtagtggcaccctcagagccccatcttcagcatgttctgaagcctcagagtggaaattcctgctaaggctctgtgtggacgcctttctcccgtgatctaaaggggacactgtactcaagcttttgacctcatgccttgtgtagtaaaaaaggatttgggggttttgtttggttcctgagagggttgtgttttgtttttgtttccttttgtttatgttttggcctttcctctttgtctttccatgtagaccagatatttgaaagggcagacgatggctagaggtgtaatgtgcagcttgtttatacggtattttgggaaacttaccttggatgggaaatcgaatcgtggattcaccaggccggtgctggcacactcaccctcgccctttccctccggttcagtacctattgtttctcctttcaaatatgtgattgtactagctctttccatatgaaagaattctccttatttaaataaaaaaagtttaaaaagataaaaaaaactgaa

SEQ ID NO: 348929 - DNA, 5132 bp, Homo sapiens
atctgctgggccgcggcggcctgttggtaactctgctgctgaggtatcgtttgaggaaccagccggggctgacttgcaaacacacatctctgcaggcacaagctcagcttggactgaggggtgggcttcctgtgtcccagtcccaggagatcttcagctccttgcagcccttcagatctcaggtgtacatgcaccccagcctgtcaccgcccagcaccatgatcctctctgggggcacagccttgaagcctccatactcggcgttcccaggcatgcagcccttggagatggtgaagccgcagtctggctcaccctaccagcccatgagcgggaaccaagccctggtctacgagggccagctcagccaggctgctggcctgggtgcctcccagatgttggactcccagctcccacagctgaccatgccactgcctcggtacggctccgggcagcagccactgatcctgccccagtctattcagctgccacctgggcagagcctctccgttggggccccccgaaggattcctccgcccgggtcccagccgccagtcctgaacaccagcagagagccctctcagatggagatgaaaggcttccactttgccgacagtaaacagaatgtcccttcaggaggccccgtgccatcgccacagacctacaggcaaaacaacgagtggatgagaaacccagcctgggagccgtgaagctgcaggaggccccctcggctgcctcccagatgaagcgaaccggagcgatcaagcctcgggctgtcaaagtggaggagagtaaggcctgacagtgcctggctgccacctcgcctctccctactgaggacggtgccgccatgcggcctcgacacagccgacactcgggagcctcaccagatccaccgtccaaatgcgtggcccagactgagagacctccctcctctccactcccgaaagctccgttgtcaaccagcttgcacccgtggatatatggcattgacccgcttgctttgatacgaaacaaaaaagcagacgactccttcatcccatctgctcctaccgtgactgtggagtgacgcctcctgtgcagtgcagatttgccctccctgcctcctccctgtcctgccgcgcagccagggcgccttctcagcagtgcttccggcccagccgcccatccctaggcacagtgatttggcagcagggtcattttactttgaggctttttgttttaaaatgtagccaaggtttttacaaaggggaaaggaaaagaaaacaaaaacgcaagctccatgtgtatagctgaacttttatatgtttcttgccagcccctccgctcccttccatctctagcctctgtcctgtttagtttgatacgtcactgcagtaccttaagaggtgactcttaagaatgcatcccctcctgattcctcagctggttcacccttgaggttatttgcaaaaagaaaaggaggttcttgagggcaccgattgcgagcattctggtgcctggctccccgcctgggaagcgatggggtgctcagagcagcaggcaggttgggggagggggggggtcatagttgggttccagctcctggcttgatgagcccagggcgcttacaggcagcccatgaagttgatgacagttttagcatgagaatcacacagggtccctgtcctgggctcctctaaagccagtggatgtgctgggcaccagagacaaatcatggagatggctgctggtggctcccaggttggcccagatggggtgagctgacatactacaggcccatcccaggccccgtgggctctgcttctggggctccataccctgccctgcaggggtgctgtgtttttcacacatttctttccctgaagccttctgtaacctgtcattttccttccttcctcttccggagcctgctgctttctctggacctgtctccacctcccacacagctcatcgtgaacaccacttggtgatggagggagtggacccgtgtgtggtccccaagtgaggccactgggagtttgtccttttcctcctttgcttcactcccagcagcagacccaggttgtcaggacaggagggcctgagctaagcagtaggcatcagtctcgtttgtcttcagacggcgggggcaggtccagggtgaggctgggtggagggctgaccaaggtccaaagggcctgcgcagcctccgggagggcagcttctccagccagaggcttgtgtgagccatcgtgtgctgggcttgtttttaagtaagaaacaaggaaatcactccagattctgtcattccaaggaaagggaaggggacagttcaggtttctcagctgttcttaggggtcactgagcgtctacctcctcctccagaggaggctggctcagaacacctagaggagggggccggggatgcaccccccaccagaggctgccttcagcgtctcacgggtgcaggacagcgctcaggcttgggctctaagctctgtgtctagtgtagaacatggggaaggagcatcttaggaactgctgaagtaacttcttactgctctcacaattctaaggaagcgggagaacggcctcctaccaacagcgcccaccccagagctgcctgggaaagggcagttttactgaaaggtgctttactgttcacctgcatctttcagcagctcccctcctgccctcacctggtcttttccctctttatcccaagcctttatgcttgagtcccttccccaggggctgcccacccgacagttccaggcattccctacctgagcttcttgtctgcttttccttctcccactgcaagcggctgcttgtggggcctgggatgagccctctctgtccccaccggccctccttgccaagccattcctgggtgagttcaggcctgcgggagccacacattcatctccacctggacacttgagccgcatggccagacccctcccacctgatgcggtggtgcgtgtgatttgtcaaaagaaagccttctggatgctgttaagatgtacccttcaggtgaacctggtatcagacccacagtacttgctgtttgagaaaaaataaaaacaaaaaggtcacctgttctccagcccttttctcttacctggtatttccttcctttctcctcccccaccccaaataaaaaaacaaaaaacactagaatttatttatatgtattgatgttgtaggtctaggtgaaaaaaaaagaagtaaatgtttcactgctctatttatatataatgtctgaattaattctgtgcaggaaaggccaggaaattgcatgtgaagttcggtgcagtcaccacctctgtgtgacctgagctgcagtctcttcgctgagatgcaggttttaaatgagacttggggggctgagggcaggcctcaggcctcccagcgccccaacccctccttggtctaatgaaatgcagttcttagtgcagagatgttttaaggtgcaatatatctcttcctttcccgtggttttagagccaagctcaaggtagtaggacgtagggtcttattttgttttcaaacccccatcctcagagcgcagatacatgcagaggcttctgccaggataccacggggccttagtgggaacaggtggagaccagcacttccctttcctgctgctgaggtagggattggggggtcagaacccactcacttttgcctgttaaagttgccctcctgacgctggcagctctgccttggtcactggggatgcggctcgttgctcagccaccagtggccttgcggtattgtccaccatccactagagtgggatgaagtccagagtgtgggtatacatctcagatgcccatctacccactggggacttcaatgccagctgcatttggtttggttttcttaactgttggcttctccccacagcgttttttgtttttttttaaacattcatattgttttcaaacttggaattcatagacactctggctctaggttccttaagggggaaaacaaaagatgactttatttcacattcaagaaaatcagttcagttccaaagctgtggtccttccagccacttctagggacactggggaaccttgttaaacgttgacatcagtgctctccagccgtgctgtcaccctcctatcttctggatctgccttcgggatggtcagtgacagcttctggaagctgagcacacacaggtgcacagccatgctgtggtctggcctgctacggcagcatggcagctctggtggagccttctcccttgccatttggttcccctgtgccaagtagctgcaggctgcccctcaaatcttcatttgtcccttttcacttcctgcagaacaagcctgggttagagggtctgctggaaatggcctttgaagaccaaggataccaggatgtgtgcactctgtcgtgttctgtgatgaatgggaaacgtaggcttccagaaagccagctctcttctgaaatgtgacggacctaagcaggaagtcatccaggacaggagtggctcagtgttggggatggacgctgtcgcccagccatgctccaccagggccaccaatgtgtagttggctggtggtcttcgggcatgtgagacctgctcttcactgtttccaccccacttggtggcctccaggatggtagtggcaccctcagagccccatcttcagcatgttctgaagcctcagagtggaaattcctgctaaggctctgtgtggacgcctttctcccgtgatctaaaggggacactgtactcaagcttttgacctcatgccttgtgtagtaaaaaaggatttgggggttttgtttggttcctgagagggttgtgttttgtttttgtttccttttgtttatgttttggcctttcctctttgtctttccatgtagaccagatatttgaaagggcagacgatggctagaggtgtaatgtgcagcttgtttatacggtattttgggaaacttaccttggatgggaaatcgaatcgtggattcaccaggccggtgctggcacactcaccctcgccctttccctccggttcagtacctattgtttctcctttcaaatatgtgattgtactagctctttccatatgaaagaattctccttatttaaataaaaaaagtttaaaaagataaaaaaaactgaa

SEQ ID NO: 348930 - DNA, 6978 bp, Homo sapiens
ccagaactcctccgatcacgccaatgaggagtgggagacggcctccgaaagcagcgacttcagcgagcggcgggagcggcgggaaggccctgggtccgagcccgactcccaggtggatggtggcctgtcgggggctagtttgggtgagaagaaggagctggccaagaggagcttctccagtcagagacccgtggttgacagacagagccgaaagctggagccgggagggtttggggagaagcccgttaggccaggtggtggtgacacctcccctcgctatgagagccaacagaatgggacgcctttgaaagtgaaaagatccccagacgaggccttgcctggaggtcttagtggctgcagcagtgggagtggccactccccctatgccctggagcgggcagcccatgccagtgctgaccttcccgaagcctccagtaaaaaggcagagaaggaggccaagttggctgctccgagggcaggtgaacagggagaggccatgaaacagtttgacctgaactatggaagtgccatcattgaaaattgcgggtccagccccggggaggagagtgaggtgggttctatggtgggcgaaggcttcatcgaagtcctgaccaagaagcagcgccgcctgctggaggaagagagaagaaagaaggagcaggccgtgcaggtgcctgtcaaaggtcgaggcctttcctcccgtattcctcctcgatttgcaaaaaagcagaacaacttatgtctggagcaaggtgacgtgaccgtgcctggcagcagcctgggcactgagatctgggagagcagcagccaggctctccctgtgcaggccccagccaacgactcctggaggaaagctgtcactgccttcagcagcaccgagactggctctgcggagcagggttttaagagcagccagggagatagtggcgttgacttgagtgccgagtctcgggagtcgtctgcgacctcctcgcagcgcagctccccatatgggactctgaagccagaggagatgagcgggcccggcctggcggaacccaaggccgacagccacaaggagcaggctccaaagccatctgagcagaaggattcagaacaaggctctggacagagcaaggagcacagaccaggacccatcggcaacgagcgttctctgaaaaacagaaagggctcggagggggccgagcggctgcaaggggctgtcgtcccgcctgttaacggggtggagattcacgtggactccgtgctgcctgtgccacccattgaatttggagtcagtccaaaagactccgatttcagcttgccacctggttctgcctctggtcctactgggagtccagttgttaaacttcaggatgccttggccagtaatgcagggttaacacagagtatccccatcctgcggcgggaccatcacatccagagggccatcggtctctccccaatgtccttccccaccgccgaccttactctgaagatggagtctgcgcgcaaggcttgggaaaactcccccagtttgccggagcagagctctccaggcggcgctggctcaggcatccagcctccatcctctgtgggtgcctccagcggggtcaactacagctccttcggtggagtgtccatgccacccatgcctgtggcctctgtagcaccttctgcttctatgccaggcagccacctcccgcccctgtacctggatggccatgtgtttgcaagtcagccccggctggttcctcaaacgatacctcagcagcagagttaccaacaggccgccgctgcccagcagatcccgatctcccttcacacatctctgcaggcacaagctcagcttggactgaggggtgggcttcctgtgtcccagtcccaggagatcttcagctccttgcagcccttcagatctcaggtgtacatgcaccccagcctgtcaccgcccagcaccatgatcctctctgggggcacagccttgaagcctccatactcggcgttcccaggcatgcagcccttggagatggtgaagccgcagtctggctcaccctaccagcccatgagcgggaaccaagccctggtctacgagggccagctcagccaggctgctggcctgggtgcctcccagatgttggactcccagctcccacagctgaccatgccactgcctcggtacggctccgggcagcagccactgatcctgccccagtctattcagctgccacctgggcagagcctctccgttggggccccccgaaggattcctccgcccgggtcccagccgccagtcctgaacaccagcagagagccctctcagatggagatgaaaggcttccactttgccgacagtaaacagaatgtcccttcaggaggccccgtgccatcgccacagacctacaggcctagctctgctagccccagtgggaagccctctggatcagcagttaacatgggctctgtgcagggacactacgtgcaacaggcaaaacaacgagtggatgagaaacccagcctgggagccgtgaagctgcaggaggccccctcggctgcctcccagatgaagcgaaccggagcgatcaagcctcgggctgtcaaagtggaggagagtaaggcctgacagtgcctggctgccacctcgcctctccctactgaggacggtgccgccatgcggcctcgacacagccgacactcgggagcctcaccagatccaccgtccaaatgcgtggcccagactgagagacctccctcctctccactcccgaaagctccgttgtcaaccagcttgcacccgtggatatatggcattgacccgcttgctttgatacgaaacaaaaaagcagacgactccttcatcccatctgctcctaccgtgactgtggagtgacgcctcctgtgcagtgcagatttgccctccctgcctcctccctgtcctgccgcgcagccagggcgccttctcagcagtgcttccggcccagccgcccatccctaggcacagtgatttggcagcagggtcattttactttgaggctttttgttttaaaatgtagccaaggtttttacaaaggggaaaggaaaagaaaacaaaaacgcaagctccatgtgtatagctgaacttttatatgtttcttgccagcccctccgctcccttccatctctagcctctgtcctgtttagtttgatacgtcactgcagtaccttaagaggtgactcttaagaatgcatcccctcctgattcctcagctggttcacccttgaggttatttgcaaaaagaaaaggaggttcttgagggcaccgattgcgagcattctggtgcctggctccccgcctgggaagcgatggggtgctcagagcagcaggcaggttgggggagggggggggtcatagttgggttccagctcctggcttgatgagcccagggcgctttactgtcatcaacttcatgggctgcctgtaagcgccctggctcacaggcagcccatgaagttgatgacagttttagcatgagaatcacacagggtccctgtcctgggctcctctaaagccagtggatgtgctgggcaccagagacaaatcatggagatggctgctggtggctcccaggttggcccagatggggtgagctgacatactacaggcccatcccaggccccgtgggctctgcttctggggctccataccctgccctgcaggggtgctgtgtttttcacacatttctttccctgaagccttctgtaacctgtcattttccttccttcctcttccggagcctgctgctttctctggacctgtctccacctcccacacagctcatcgtgaacaccacttggtgatggagggagtggacccgtgtgtggtccccaagtgaggccactgggagtttgtccttttcctcctttgcttcactcccagcagcagacccaggttgtcaggacaggagggcctgagctaagcagtaggcatcagtctcgtttgtcttcagacggcgggggcaggtccagggtgaggctgggtggagggctgaccaaggtccaaagggcctgcgcagcctccgggagggcagcttctccagccagaggcttgtgtgagccatcgtgtgctgggcttgtttttaagtaagaaacaaggaaatcactccagattctgtcattccaaggaaagggaaggggacagttcaggtttctcagctgttcttaggggtcactgagcgtctacctcctcctccagaggaggctggctcagaacacctagaggagggggccggggatgcaccccccaccagaggctgccttcagcgtctcacgggtgcaggacagcgctcaggcttgggctctaagctctgtgtctagtgtagaacatggggaaggagcatcttaggaactgctgaagtaacttcttactgctctcacaattctaaggaagcgggagaacggcctcctaccaacagcgcccaccccagagctgcctgggaaagggcagttttactgaaaggtgctttactgttcacctgcatctttcagcagctcccctcctgccctcacctggtcttttccctctttatcccaagcctttatgcttgagtcccttccccaggggctgcccacccgacagttccaggcattccctacctgagcttcttgtctgcttttccttctcccactgcaagcggctgcttgtggggcctgggatgagccctctctgtccccaccggccctccttgccaagccattcctgggtgagttcaggcctgcgggagccacacattcatctccacctggacacttgagccgcatggccagacccctcccacctgatgcggtggtgcgtgtgatttgtcaaaagaaagccttctggatgctgttaagatgtacccttcaggtgaacctggtatcagacccacagtacttgctgtttgagaaaaaataaaaacaaaaaggtcacctgttctccagcccttttctcttacctggtatttccttcctttctcctcccccaccccaaataaaaaaacaaaaaacactagaatttatttatatgtattgatgttgtaggtctaggtgaaaaaaaaagaagtaaatgtttcactgctctatttatatataatgtctgaattaattctgtgcaggaaaggccaggaaattgcatgtgaagttcggtgcagtcaccacctctgtgtgacctgagctgcagtctcttcgctgagatgcaggttttaaatgagacttggggggctgagggcaggcctcaggcctcccagcgccccaacccctccttggtctaatgaaatgcagttcttagtgcagagatgttttaaggtgcaatatatctcttcctttcccgtggttttagagccaagctcaaggtagtaggacgtagggtcttattttgttttcaaacccccatcctcagagcgcagatacatgcagaggcttctgccaggataccacggggccttagtgggaacaggtggagaccagcacttccctttcctgctgctgaggtagggattggggggtcagaacccactcacttttgcctgttaaagttgccctcctgacgctggcagctctgccttggtcactggggatgcggctcgttgctcagccaccagtggccttgcggtattgtccaccatccactagagtgggatgaagtccagagtgtgggtatacatctcagatgcccatctacccactggggacttcaatgccagctgcatttggtttggttttcttaactgttggcttctccccacagcgttttttgtttttttttaaacattcatattgttttcaaacttggaattcatagacactctggctctaggttccttaagggggaaaacaaaagatgactttatttcacattcaagaaaatcagttcagttccaaagctgtggtccttccagccacttctagggacactggggaaccttgttaaacgttgacatcagtgctctccagccgtgctgtcaccctcctatcttctggatctgccttcgggatggtcagtgacagcttctggaagctgagcacacacaggtgcacagccatgctgtggtctggcctgctacggcagcatggcagctctggtggagccttctcccttgccatttggttcccctgtgccaagtagctgcaggctgcccctcaaatcttcatttgtcccttttcacttcctgcagaacaagcctgggttagagggtctgctggaaatggcctttgaagaccaaggataccaggatgtgtgcactctgtcgtgttctgtgatgaatgggaaacgtaggcttccagaaagccagctctcttctgaaatgtgacggacctaagcaggaagtcatccaggacaggagtggctcagtgttggggatggacgctgtcgcccagccatgctccaccagggccaccaatgtgtagttggctggtggtcttcgggcatgtgagacctgctcttcactgtttccaccccacttggtggcctccaggatggtagtggcaccctcagagccccatcttcagcatgttctgaagcctcagagtggaaattcctgctaaggctctgtgtggacgcctttctcccgtgatctaaaggggacactgtactcaagcttttgacctcatgccttgtgtagtaaaaaaggatttgggggttttgtttggttcctgagagggttgtgttttgtttttgtttccttttgtttatgttttggcctttcctctttgtctttccatgtagaccagatatttgaaagggcagacgatggctagaggtgtaatgtgcagcttgtttatacggtattttgggaaacttaccttggatgggaaatcgaatcgtggattcaccaggccggtgctggcacactcaccctcgccctttccctccggttcagtacctattgtttctcctttcaaatatgtgattgtactagctctttccatatgaaagaattctccttatttaaataaaaaaagtttaaaaagataaaaaaaactgaa

SEQ ID NO: 348931 - DNA, 6710 bp, Homo sapiens
ccagaactcctccgatcacgccaatgaggagtgggagacggcctccgaaagcagcgacttcagcgagcggcgggagcggcgggaaggccctgggtccgagcccgactcccaggtggatggtggcctgtcgggggctagtttgggtgagaagaaggagctggccaagaggagcttctccagtcagagacccgtggttgacagacagagccgaaagctggagccgggagggtttggggagaagcccgttaggccaggtggtggtgacacctcccctcgctatgagagccaacagaatgggacgcctttgaaagtgaaaagatccccagacgaggccttgcctggaggtcttagtggctgcagcagtgggagtggccactccccctatgccctggagcgggcagcccatgccagtgctgaccttcccgaagcctccagtaaaaaggcagagaaggaggccaagttggctgctccgagggcaggtgaacagggagaggccatgaaacagtttgacctgaactatggaagtgccatcattgaaaattgcgggtccagccccggggaggagagtgaggtgggttctatggtgggcgaaggcttcatcgaagtcctgaccaagaagcagcgccgcctgctggaggaagagagaagaaagaaggagcaggccgtgcaggtgcctgtcaaaggtcgaggcctttcctcccgtattcctcctcgatttgcaaaaaagcagaacaacttatgtctggagcaaggtgacgtgaccgtgcctggcagcagcctgggcactgagatctgggagagcagcagccaggctctccctgtgcaggccccagccaacgactcctggaggaaagctgtcactgccttcagcagcaccgagactggctctgcggagcagggttttaagagcagccagggagatagtggcgttgacttgagtgccgagtctcgggagtcgtctgcgacctcctcgcagcgcagctccccatatgggactctgaagccagaggagatgagcgggcccggcctggcggaacccaaggccgacagccacaaggagcaggctccaaagccatctgagcagaaggattcagaacaaggctctggacagagcaaggagcacagaccaggacccatcggcaacgagcgttctctgaaaaacagaaagggctcggagggggccgagcggctgcaaggggctgtcgtcccgcctgttaacggggtggagattcacgtggactccgtgctgcctgtgccacccattgaatttggagtcagtccaaaagactccgatttcagcttgccacctggttctgcctctggtcctactgggagtccagttgttaaacttcaggatgccttggccagtaatgcagggttaacacagagtatccccatcctgcggcgggaccatcacatccagagggccatcggtctctccccaatgtccttccccaccgccgaccttactctgaagatggagtctgcgcgcaaggcttgggaaaactcccccagtttgccggagcagagctctccaggcggcgctggctcaggcatccagcctccatcctctgtgggtgcctccagcggggtcaactacagctccttcggtggagtgtccatgccacccatgcctgtggcctctgtagcaccttctgcttctatgccaggcagccacctcccgcccctgtacctggatggccatgtgtttgcaagtcagccccggctggttcctcaaacgatacctcagcagcagagttaccaacaggccgccgctgcccagcagatcccgatctcccttcacacatctctgcaggcacaagctcagcttggactgaggggtgggcttcctgtgtcccagtcccaggagatcttcagctccttgcagcccttcagatctcaggtgtacatgcaccccagcctgtcaccgcccagcaccatgatcctctctgggggcacagccttgaagcctccatactcggcgttcccaggcatgcagcccttggagatggtgaagccgcagtctggctcaccctaccagcccatgagcgggaaccaagccctggtctacgagggccagctcagccaggctgctggcctgggtgcctcccagatgttggactcccagctcccacagctgaccatgccactgcctcggtacggctccgggcagcagccactgatcctgccccagtctattcagctgccacctgggcagagcctctccgttggggccccccgaaggattcctccgcccgggtcccagccgccagtcctgaacaccagcagagagccctctcagatggagatgaaaggcttccactttgccgacagtaaacagaatgtcccttcaggaggccccgtgccatcgccacagacctacaggcctagctctgctagccccagtgggaagccctctggatcagcagttaacatgggctctgtgcagggacactacgtgcaacaggcaaaacaacgagtggatgagaaacccagcctgggagccgtgaagctgcaggaggccccctcggctgcctcccagatgaagcgaaccggagcgatcaagcctcgggctgtcaaagtggaggagagtaaggcctgacagtgcctggctgccacctcgcctctccctactgaggacggtgccgccatgcggcctcgacacagccgacactcgggagcctcaccagatccaccgtccaaatgcgtggcccagactgagagacctccctcctctccactcccgaaagctccgttgtcaaccagcttgcacccgtggatatatggcattgacccgcttgctttgatacgaaacaaaaaagcagacgactccttcatcccatctgctcctaccgtgactgtggagtgacgcctcctgtgcagtgcagatttgccctccctgcctcctccctgtcctgccgcgcagccagggcgccttctcagtcactgcagtaccttaagaggtgactcttaagaatgcatcccctcctgattcctcagctggttcacccttgaggttatttgcaaaaagaaaaggaggttcttgagggcaccgattgcgagcattctggtgcctggctccccgcctgggaagcgatggggtgctcagagcagcaggcaggttgggggagggggggggtcatagttgggttccagctcctggcttgatgagcccagggcgcttacaggcagcccatgaagttgatgacagttttagcatgagaatcacacagggtccctgtcctgggctcctctaaagccagtggatgtgctgggcaccagagacaaatcatggagatggctgctggtggctcccaggttggcccagatggggtgagctgacatactacaggcccatcccaggccccgtgggctctgcttctggggctccataccctgccctgcaggggtgctgtgtttttcacacatttctttccctgaagccttctgtaacctgtcattttccttccttcctcttccggagcctgctgctttctctggacctgtctccacctcccacacagctcatcgtgaacaccacttggtgatggagggagtggacccgtgtgtggtccccaagtgaggccactgggagtttgtccttttcctcctttgcttcactcccagcagcagacccaggttgtcaggacaggagggcctgagctaagcagtaggcatcagtctcgtttgtcttcagacggcgggggcaggtccagggtgaggctgggtggagggctgaccaaggtccaaagggcctgcgcagcctccgggagggcagcttctccagccagaggcttgtgtgagccatcgtgtgctgggcttgtttttaagtaagaaacaaggaaatcactccagattctgtcattccaaggaaagggaaggggacagttcaggtttctcagctgttcttaggggtcactgagcgtctacctcctcctccagaggaggctggctcagaacacctagaggagggggccggggatgcaccccccaccagaggctgccttcagcgtctcacgggtgcaggacagcgctcaggcttgggctctaagctctgtgtctagtgtagaacatggggaaggagcatcttaggaactgctgaagtaacttcttactgctctcacaattctaaggaagcgggagaacggcctcctaccaacagcgcccaccccagagctgcctgggaaagggcagttttactgaaaggtgctttactgttcacctgcatctttcagcagctcccctcctgccctcacctggtcttttccctctttatcccaagcctttatgcttgagtcccttccccaggggctgcccacccgacagttccaggcattccctacctgagcttcttgtctgcttttccttctcccactgcaagcggctgcttgtggggcctgggatgagccctctctgtccccaccggccctccttgccaagccattcctgggtgagttcaggcctgcgggagccacacattcatctccacctggacacttgagccgcatggccagacccctcccacctgatgcggtggtgcgtgtgatttgtcaaaagaaagccttctggatgctgttaagatgtacccttcaggtgaacctggtatcagacccacagtacttgctgtttgagaaaaaataaaaacaaaaaggtcacctgttctccagcccttttctcttacctggtatttccttcctttctcctcccccaccccaaataaaaaaacaaaaaacactagaatttatttatatgtattgatgttgtaggtctaggtgaaaaaaaaagaagtaaatgtttcactgctctatttatatataatgtctgaattaattctgtgcaggaaaggccaggaaattgcatgtgaagttcggtgcagtcaccacctctgtgtgacctgagctgcagtctcttcgctgagatgcaggttttaaatgagacttggggggctgagggcaggcctcaggcctcccagcgccccaacccctccttggtctaatgaaatgcagttcttagtgcagagatgttttaaggtgcaatatatctcttcctttcccgtggttttagagccaagctcaaggtagtaggacgtagggtcttattttgttttcaaacccccatcctcagagcgcagatacatgcagaggcttctgccaggataccacggggccttagtgggaacaggtggagaccagcacttccctttcctgctgctgaggtagggattggggggtcagaacccactcacttttgcctgttaaagttgccctcctgacgctggcagctctgccttggtcactggggatgcggctcgttgctcagccaccagtggccttgcggtattgtccaccatccactagagtgggatgaagtccagagtgtgggtatacatctcagatgcccatctacccactggggacttcaatgccagctgcatttggtttggttttcttaactgttggcttctccccacagcgttttttgtttttttttaaacattcatattgttttcaaacttggaattcatagacactctggctctaggttccttaagggggaaaacaaaagatgactttatttcacattcaagaaaatcagttcagttccaaagctgtggtccttccagccacttctagggacactggggaaccttgttaaacgttgacatcagtgctctccagccgtgctgtcaccctcctatcttctggatctgccttcgggatggtcagtgacagcttctggaagctgagcacacacaggtgcacagccatgctgtggtctggcctgctacggcagcatggcagctctggtggagccttctcccttgccatttggttcccctgtgccaagtagctgcaggctgcccctcaaatcttcatttgtcccttttcacttcctgcagaacaagcctgggttagagggtctgctggaaatggcctttgaagaccaaggataccaggatgtgtgcactctgtcgtgttctgtgatgaatgggaaacgtaggcttccagaaagccagctctcttctgaaatgtgacggacctaagcaggaagtcatccaggacaggagtggctcagtgttggggatggacgctgtcgcccagccatgctccaccagggccaccaatgtgtagttggctggtggtcttcgggcatgtgagacctgctcttcactgtttccaccccacttggtggcctccaggatggtagtggcaccctcagagccccatcttcagcatgttctgaagcctcagagtggaaattcctgctaaggctctgtgtggacgcctttctcccgtgatctaaaggggacactgtactcaagcttttgacctcatgccttgtgtagtaaaaaaggatttgggggttttgtttggttcctgagagggttgtgttttgtttttgtttccttttgtttatgttttggcctttcctctttgtctttccatgtagaccagatatttgaaagggcagacgatggctagaggtgtaatgtgcagcttgtttatacggtattttgggaaacttaccttggatgggaaatcgaatcgtggattcaccaggccggtgctggcacactcaccctcgccctttccctccggttcagtacctattgtttctcctttcaaatatgtgattgtactagctctttccatatgaaagaattctccttatttaaataaaaaaagtttaaaaagataaaaaaaactgaa

SEQ ID NO: 348932 - DNA, 6109 bp, Homo sapiens
ccagaactcctccgatcacgccaatgaggagtgggagacggcctccgaaagcagcgacttcagcgagcggcgggagcggcgggaaggccctgggtccgagcccgactcccaggtggatggtggcctgtcgggggctagtttgggtgagaagaaggagctggccaagaggagcttctccagtcagagacccgtggttgacagacagagccgaaagctggagccgggagggtttggggagaagcccgttaggccaggtggtggtgacacctcccctcgctatgagagccaacagaatgggacgcctttgaaagtgaaaagatccccagacgaggccttgcctggaggtcttagtggctgcagcagtgggagtggccactccccctatgccctggagcgggcagcccatgccagtgctgaccttcccgaagcctccagtaaaaaggcagagaaggaggccaagttggctgctccgagggcaggtgaacagggagaggccatgaaacagtttgacctgaactatggaagtgccatcattgaaaattgcgggtccagccccggggaggagagtgaggtgggttctatggtgggcgaaggcttcatcgaagtcctgaccaagaagcagcgccgcctgctggaggaagagagaagaaagaaggagcaggccgtgcaggtgcctgtcaaaggtcgaggcctttcctcccgtattcctcctcgatttgcaaaaaagcagaacaacttatgtctggagcaaggtgacgtgaccgtgcctggcagcagcctgggcactgagatctgggagagcagcagccaggctctccctgtgcaggccccagccaacgactcctggaggaaagctgtcactgccttcagcagcaccgagactggctctgcggagcagggttttaagagcagccagggagatagtggcgttgacttgagtgccgagtctcgggagtcgtctgcgacctcctcgcagcgcagctccccatatgggactctgaagccagaggagatgagcgggcccggcctggcggaacccaaggccgacagccacaaggagcaggctccaaagccatctgagcagaaggattcagaacaaggctctggacagagcaaggagcacagaccaggacccatcggcaacgagcgttctctgaaaaacagaaagggctcggagggggccgagcggctgcaaggggctgtcgtcccgcctgttaacggggtggagattcacgtggactccgtgctgcctgtgccacccattgaatttggagtcagtccaaaagactccgatttcagcttgccacctggttctgcctctggtcctactgggagtccagttgttaaacttcaggatgccttggccagtaatgcagggttaacacagagtatccccatcctgcggcgggaccatcacatccagagggccatcggtctctccccaatgtccttccccaccgccgaccttactctgaagatggagtctgcgcgcaaggcttgggaaaactcccccagtttgccggagcagagctctccaggcggcgctggctcaggcatccagcctccatcctctgtgggtgcctccagcggggtcaactacagctccttcggtggagtgtccatgccacccatgcctgtggcctctgtagcaccttctgcttctatgccaggcagccacctcccgcccctgtacctggatggccatgtgtttgcaagtcagccccggctggttcctcaaacgatacctcagcagcagagttaccaacaggccgccgctgcccagcagatcccgatctcccttcacacatctctgcaggcacaagctcagcttggactgaggggtgggcttcctgtgtcccagtcccaggagatcttcagctccttgcagcccttcagatctcaggtgtacatgcaccccagcctgtcaccgcccagcaccatgatcctctctgggggcacagccttgaagcctccatactcggcgttcccaggcatgcagcccttggagatggtgaagccgcagtctggctcaccctaccagcccatgagcgggaaccaagccctggtctacgagggccagctcagccaggctgctggcctgggtgcctcccagatgttggactcccagctcccacagctgaccatgccactgcctcggtacggctccgggcagcagccactgatcctgccccagtctattcagctgccacctgggcagagcctctccgttggggccccccgaaggattcctccgcccgggtcccagccgccagtcctgaacaccagcagagagccctctcagatggagatgaaaggcttccactttgccgacagtaaacagaatgtcccttcaggaggccccgtgccatcgccacagacctacaggcctagctctgctagccccagtgggaagccctctggatcagcagttaacatgggctctgtgcagggacactacgtgcaacaggcaaaacaacgagtggatgagaaacccagcctgggagccgtgaagctgcaggaggccccctcggctgcctcccagatgaagcgaaccggagcgatcaagcctcgggctgtcaaagtggaggagagtaaggcctgacagtgcctggctgccacctcgcctctccctactgaggacggtgccgccatgcggcctcgacacagccgacactcgggagcctcaccagatccaccgtccaaatgcgtggcccagactgagagacctccctcctctccactcccgaaagctccgttgtcaaccagcttgcacccgtggatatatggcattgacccgcttgctttgatacgaaacaaaaaagcagacgactccttcatcccatctgctcctaccgtgactgtggagtgacgcctcctgtgcagtgcagatttgccctccctgcctcctccctgtcctgccgcgcagccagggcgccttctcagcagtgcttccggcccagccgcccatccctaggcacagtgatttggcagcagggtcattttactttgaggctttttgttttaaaatgtagccaaggtttttacaaaggggaaaggaaaagaaaacaaaaacgcaagctccatgtgtatagctgaacttttatatgtttcttgccagcccctccgctcccttccatctctagcctctgtcctgtttagtttgatacgtcactgcagtaccttaagaggtgactcttaagaatgcatcccctcctgattcctcagctggttcacccttgaggttatttgcaaaaagaaaaggaggttcttgagggcaccgattgcgagcattctggtgcctggctccccgcctgggaagcgatggggtgctcagagcagcaggcaggttgggggagggggggggtcatagttgggttccagctcctggcttgatgagcccagggcgcttacaggcagcccatgaagttgatgacagttttagcatgagaatcacacagggtccctgtcctgggctcctctaaagccagtggatgtgctgggcaccagagacaaatcatggagatggctgctggtggctcccaggttggcccagatggggtgagctgacatactacaggcccatcccaggccccgtgggctctgcttctggggctccataccctgcatctttcagcagctcccctcctgccctcacctggtcttttccctctttatcccaagcctttatgcttgagtcccttccccaggggctgcccacccgacagttccaggcattccctacctgagcttcttgtctgcttttccttctcccactgcaagcggctgcttgtggggcctgggatgagccctctctgtccccaccggccctccttgccaagccattcctgggtgagttcaggcctgcgggagccacacattcatctccacctggacacttgagccgcatggccagacccctcccacctgatgcggtggtgcgtgtgatttgtcaaaagaaagccttctggatgctgttaagatgtacccttcaggtgaacctggtatcagacccacagtacttgctgtttgagaaaaaataaaaacaaaaaggtcacctgttctccagcccttttctcttacctggtatttccttcctttctcctcccccaccccaaataaaaaaacaaaaaacactagaatttatttatatgtattgatgttgtaggtctaggtgaaaaaaaaagaagtaaatgtttcactgctctatttatatataatgtctgaattaattctgtgcaggaaaggccaggaaattgcatgtgaagttcggtgcagtcaccacctctgtgtgacctgagctgcagtctcttcgctgagatgcaggttttaaatgagacttggggggctgagggcaggcctcaggcctcccagcgccccaacccctccttggtctaatgaaatgcagttcttagtgcagagatgttttaaggtgcaatatatctcttcctttcccgtggttttagagccaagctcaaggtagtaggacgtagggtcttattttgttttcaaacccccatcctcagagcgcagatacatgcagaggcttctgccaggataccacggggccttagtgggaacaggtggagaccagcacttccctttcctgctgctgaggtagggattggggggtcagaacccactcacttttgcctgttaaagttgccctcctgacgctggcagctctgccttggtcactggggatgcggctcgttgctcagccaccagtggccttgcggtattgtccaccatccactagagtgggatgaagtccagagtgtgggtatacatctcagatgcccatctacccactggggacttcaatgccagctgcatttggtttggttttcttaactgttggcttctccccacagcgttttttgtttttttttaaacattcatattgttttcaaacttggaattcatagacactctggctctaggttccttaagggggaaaacaaaagatgactttatttcacattcaagaaaatcagttcagttccaaagctgtggtccttccagccacttctagggacactggggaaccttgttaaacgttgacatcagtgctctccagccgtgctgtcaccctcctatcttctggatctgccttcgggatggtcagtgacagcttctggaagctgagcacacacaggtgcacagccatgctgtggtctggcctgctacggcagcatggcagctctggtggagccttctcccttgccatttggttcccctgtgccaagtagctgcaggctgcccctcaaatcttcatttgtcccttttcacttcctgcagaacaagcctgggttagagggtctgctggaaatggcctttgaagaccaaggataccaggatgtgtgcactctgtcgtgttctgtgatgaatgggaaacgtaggcttccagaaagccagctctcttctgaaatgtgacggacctaagcaggaagtcatccaggacaggagtggctcagtgttggggatggacgctgtcgcccagccatgctccaccagggccaccaatgtgtagttggctggtggtcttcgggcatgtgagacctgctcttcactgtttccaccccacttggtggcctccaggatggtagtggcaccctcagagccccatcttcagcatgttctgaagcctcagagtggaaattcctgctaaggctctgtgtggacgcctttctcccgtgatctaaaggggacactgtactcaagcttttgacctcatgccttgtgtagtaaaaaaggatttgggggttttgtttggttcctgagagggttgtgttttgtttttgtttccttttgtttatgttttggcctttcctctttgtctttccatgtagaccagatatttgaaagggcagacgatggctagaggtgtaatgtgcagcttgtttatacggtattttgggaaacttaccttggatgggaaatcgaatcgtggattcaccaggccggtgctggcacactcaccctcgccctttccctccggttcagtacctattgtttctcctttcaaatatgtgattgtactagctctttccatatgaaagaattctccttatttaaataaaaaaagtttaaaaagataaaaaaaactgaa

SEQ ID NO: 348933 - DNA, 6796 bp, Homo sapiens
ccagaactcctccgatcacgccaatgaggagtgggagacggcctccgaaagcagcgacttcagcgagcggcgggagcggcgggaaggccctgggtccgagcccgactcccaggtggatggtggcctgtcgggggctagtttgggtgagaagaaggagctggccaagaggagcttctccagtcagagacccgtggttgacagacagagccgaaagctggagccgggagggtttggggagaagcccgttaggccaggtggtggtgacacctcccctcgctatgagagccaacagaatgggacgcctttgaaagtgaaaagatccccagacgaggccttgcctggaggtcttagtggctgcagcagtgggagtggccactccccctatgccctggagcgggcagcccatgccagtgctgaccttcccgaagcctccagtaaaaaggcagagaaggaggccaagttggctgctccgagggcaggtgaacagggagaggccatgaaacagtttgacctgaactatggaagtgccatcattgaaaattgcgggtccagccccggggaggagagtgaggtgggttctatggtgggcgaaggcttcatcgaagtcctgaccaagaagcagcgccgcctgctggaggaagagagaagaaagaaggagcaggccgtgcaggtgcctgtcaaaggtcgaggcctttcctcccgtattcctcctcgatttgcaaaaaagcagaacaacttatgtctggagcaaggtgacgtgaccgtgcctggcagcagcctgggcactgagatctgggagagcagcagccaggctctccctgtgcaggccccagccaacgactcctggaggaaagctgtcactgccttcagcagcaccgagactggctctgcggagcagggttttaagagcagccagggagatagtggcgttgacttgagtgccgagtctcgggagtcgtctgcgacctcctcgcagcgcagctccccatatgggactctgaagccagaggagatgagcgggcccggcctggcggaacccaaggccgacagccacaaggagcaggctccaaagccatctgagcagaaggattcagaacaaggctctggacagagcaaggagcacagaccaggacccatcggcaacgagcgttctctgaaaaacagaaagggctcggagggggccgagcggctgcaaggggctgtcgtcccgcctgttaacggggtggagattcacgtggactccgtgctgcctgtgccacccattgaatttggagtcagtccaaaagactccgatttcagcttgccacctggttctgcctctggtcctactgggagtccagttgttaaacttcaggatgccttggccagtaatgcagggttaacacagagtatccccatcctgcggcgggaccatcacatccagagggccatcggtctctccccaatgtccttccccaccgccgaccttactctgaagatggagtctgcgcgcaaggcttgggaaaactcccccagtttgccggagcagagctctccaggcggcgctggctcaggcatccagcctccatcctctgtgggtgcctccagcggggtcaactacagctccttcggtggagtgtccatgccacccatgcctgtggcctctgtagcaccttctgcttctatgccaggcagccacctcccgcccctgtacctggatggccatgtgtttgcaagtcagccccggctggttcctcaaacgatacctcagcagcagagttaccaacaggccgccgctgcccagcagatcccgatctcccttcacacatctctgcaggcacaagctcagcttggactgaggggtgggcttcctgtgtcccagtcccaggagatcttcagctccttgcagcccttcagatctcaggtgtacatgcaccccagcctgtcaccgcccagcaccatgatcctctctgggggcacagccttgaagcctccatactcggcgttcccaggcatgcagcccttggagatggtgaagccgcagtctggctcaccctaccagcccatgagcgggaaccaagccctggtctacgagggccagctcagccaggctgctggcctgggtgcctcccagatgttggactcccagctcccacagctgaccatgccactgcctcggtacggctccgggcagcagccactgatcctgccccagtctattcagctgccacctgggcagagcctctccgttggggccccccgaaggattcctccgcccgggtcccagccgccagtcctgaacaccagcagagagccctctcagatggagatgaaaggcttccactttgccgacagtaaacagaatgtcccttcaggaggccccgtgccatcgccacagacctacaggcaaaacaacgagtggatgagaaacccagcctgggagccgtgaagctgcaggaggccccctcggctgcctcccagatgaagcgaaccggagcgatcaagcctcgggctgtcaaagtggaggagagtaaggcctgacagtgcctggctgccacctcgcctctccctactgaggacggtgccgccatgcggcctcgacacagccgacactcgggagcctcaccagatccaccgtccaaatgcgtggcccagactgagagacctccctcctctccactcccgaaagctccgttgtcaaccagcttgcacccgtggatatatggcattgacccgcttgctttgatacgaaacaaaaaagcagacgactccttcatcccatctgctcctaccgtgactgtggagtgacgcctcctgtgcagtgcagatttgccctccctgcctcctccctgtcctgccgcgcagccagggcgccttctcagcagtgcttccggcccagccgcccatccctaggcacagtgatttggcagcagggtcattttactttgaggctttttgttttaaaatgtagccaaggtttttacaaaggggaaaggaaaagaaaacaaaaacgcaagctccatgtgtatagctgaacttttatatgtttcttgccagcccctccgctcccttccatctctagcctctgtcctgtttagtttgatacgtcactgcagtaccttaagaggtgactcttaagaatgcatcccctcctgattcctcagctggttcacccttgaggttatttgcaaaaagaaaaggaggttcttgagggcaccgattgcgagcattctggtgcctggctccccgcctgggaagcgatggggtgctcagagcagcaggcaggttgggggagggggggggtcatagttgggttccagctcctggcttgatgagcccagggcgcttacaggcagcccatgaagttgatgacagttttagcatgagaatcacacagggtccctgtcctgggctcctctaaagccagtggatgtgctgggcaccagagacaaatcatggagatggctgctggtggctcccaggttggcccagatggggtgagctgacatactacaggcccatcccaggccccgtgggctctgcttctggggctccataccctgccctgcaggggtgctgtgtttttcacacatttctttccctgaagccttctgtaacctgtcattttccttccttcctcttccggagcctgctgctttctctggacctgtctccacctcccacacagctcatcgtgaacaccacttggtgatggagggagtggacccgtgtgtggtccccaagtgaggccactgggagtttgtccttttcctcctttgcttcactcccagcagcagacccaggttgtcaggacaggagggcctgagctaagcagtaggcatcagtctcgtttgtcttcagacggcgggggcaggtccagggtgaggctgggtggagggctgaccaaggtccaaagggcctgcgcagcctccgggagggcagcttctccagccagaggcttgtgtgagccatcgtgtgctgggcttgtttttaagtaagaaacaaggaaatcactccagattctgtcattccaaggaaagggaaggggacagttcaggtttctcagctgttcttaggggtcactgagcgtctacctcctcctccagaggaggctggctcagaacacctagaggagggggccggggatgcaccccccaccagaggctgccttcagcgtctcacgggtgcaggacagcgctcaggcttgggctctaagctctgtgtctagtgtagaacatggggaaggagcatcttaggaactgctgaagtaacttcttactgctctcacaattctaaggaagcgggagaacggcctcctaccaacagcgcccaccccagagctgcctgggaaagggcagttttactgaaaggtgctttactgttcacctgcatctttcagcagctcccctcctgccctcacctggtcttttccctctttatcccaagcctttatgcttgagtcccttccccaggggctgcccacccgacagttccaggcattccctacctgagcttcttgtctgcttttccttctcccactgcaagcggctgcttgtggggcctgggatgagccctctctgtccccaccggccctccttgccaagccattcctgggtgagttcaggcctgcgggagccacacattcatctccacctggacacttgagccgcatggccagacccctcccacctgatgcggtggtgcgtgtgatttgtcaaaagaaagccttctggatgctgttaagatgtacccttcaggtgaacctggtatcagacccacagtacttgctgtttgagaaaaaataaaaacaaaaaggtcacctgttctccagcccttttctcttacctggtatttccttcctttctcctcccccaccccaaataaaaaaacaaaaaacactagaatttatttatatgtattgatgttgtaggtctaggtgaaaaaaaaagaagtaaatgtttcactgctctatttatatataatgtctgaattaattctgtgcaggaaaggccaggaaattgcatgtgaagttcggtgcagtcaccacctctgtgtgacctgagctgcagtctcttcgctgagatgcaggttttaaatgagacttggggggctgagggcaggcctcaggcctcccagcgccccaacccctccttggtctaatgaaatgcagttcttagtgcagagatgttttaaggtgcaatatatctcttcctttcccgtggttttagagccaagctcaaggtagtaggacgtagggtcttattttgttttcaaacccccatcctcagagcgcagatacatgcagaggcttctgccaggataccacggggccttagtgggaacaggtggagaccagcacttccctttcctgctgctgaggtagggattggggggtcagaacccactcacttttgcctgttaaagttgccctcctgacgctggcagctctgccttggtcactggggatgcggctcgttgctcagccaccagtggccttgcggtattgtccaccatccactagagtgggatgaagtccagagtgtgggtatacatctcagatgcccatctacccactggggacttcaatgccagctgcatttggtttggttttcttaactgttggcttctccccacagcgttttttgtttttttttaaacattcatattgttttcaaacttggaattcatagacactctggctctaggttccttaagggggaaaacaaaagatgactttatttcacattcaagaaaatcagttcagttccaaagctgtggtccttccagccacttctagggacactggggaaccttgttaaacgttgacatcagtgctctccagccgtgctgtcaccctcctatcttctggatctgccttcgggatggtcagtgacagcttctggaagctgagcacacacaggtgcacagccatgctgtggtctggcctgctacggcagcatggcagctctggtggagccttctcccttgccatttggttcccctgtgccaagtagctgcaggctgcccctcaaatcttcatttgtcccttttcacttcctgcagaacaagcctgggttagagggtctgctggaaatggcctttgaagaccaaggataccaggatgtgtgcactctgtcgtgttctgtgatgaatgggaaacgtaggcttccagaaagccagctctcttctgaaatgtgacggacctaagcaggaagtcatccaggacaggagtggctcagtgttggggatggacgctgtcgcccagccatgctccaccagggccaccaatgtgtagttggctggtggtcttcgggcatgtgagacctgctcttcactgtttccaccccacttggtggcctccaggatggtagtggcaccctcagagccccatcttcagcatgttctgaagcctcagagtggaaattcctgctaaggctctgtgtggacgcctttctcccgtgatctaaaggggacactgtactcaagcttttgacctcatgccttgtgtagtaacttttgtttatgttttggcctttcctctttgtctttccatgtagaccagatatttgaaagggcagacgatggctagaggtgtaatgtgcagcttgtttatacggtattttgggaaacttaccttggatgggaaatcgaatcgtggattcaccaggccggtgctggcacactcaccctcgccctttccctccggttcagtacctattgtttctcctttcaaatatgtgattgtactagctctttccatatgaaagaattctccttatttaaataaaaaaagtttaaaaagataaaaaaaactgaa

SEQ ID NO: 348934 - DNA, 5865 bp, Homo sapiens
ccagaactcctccgatcacgccaatgaggagtgggagacggcctccgaaagcagcgacttcagcgagcggcgggagcggcgggaaggccctgggtccgagcccgactcccaggtggatggtggcctgtcgggggctagtttgggtgagaagaaggagctggccaagaggagcttctccagtcagagacccgtggttgacagacagagccgaaagctggagccgggagggtttggggagaagcccgttaggccaggtggtggtgacacctcccctcgctatgagagccaacagaatgggacgcctttgaaagtgaaaagatccccagacgaggccttgcctggaggtcttagtggctgcagcagtgggagtggccactccccctatgccctggagcgggcagcccatgccagtgctgaccttcccgaagcctccagtaaaaaggcagagaaggaggccaagttggctgctccgagggcaggtgaacagggagaggccatgaaacagtttgacctgaactatggaagtgccatcattgaaaattgcgggtccagccccggggaggagagtgaggtgggttctatggtgggcgaaggcttcatcgaagtcctgaccaagaagcagcgccgcctgctggaggaagagagaagaaagaaggagcaggccgtgcaggtgcctgtcaaaggtcgaggcctttcctcccgtattcctcctcgatttgcaaaaaagcagaacaacttatgtctggagcaaggtgacgtgaccgtgcctggcagcagcctgggcactgagatctgggagagcagcagccaggctctccctgtgcaggccccagccaacgactcctggaggaaagctgtcactgccttcagcagcaccgagactggctctgcggagcagggttttaagagcagccagggagatagtggcgttgacttgagtgccgagtctcgggagtcgtctgcgacctcctcgcagcgcagctccccatatgggactctgaagccagaggagatgagcgggcccggcctggcggaacccaaggccgacagccacaaggagcaggctccaaagccatctgagcagaaggattcagaacaaggctctggacagagcaaggagcacagaccaggacccatcggcaacgagcgttctctgaaaaacagaaagggctcggagggggccgagcggctgcaaggggctgtcgtcccgcctgttaacggggtggagattcacgtggactccgtgctgcctgtgccacccattgaatttggagtcagtccaaaagactccgatttcagcttgccacctggttctgcctctggtcctactgggagtccagttgttaaacttcaggatgccttggccagtaatgcagggttaacacagagtatccccatcctgcggcgggaccatcacatccagagggccatcggtctctccccaatgtccttccccaccgccgaccttactctgaagatggagtctgcgcgcaaggcttgggaaaactcccccagtttgccggagcagagctctccaggcggcgctggctcaggcatccagcctccatcctctgtgggtgcctccagcggggtcaactacagctccttcggtggagtgtccatgccacccatgcctgtggcctctgtagcaccttctgcttctatgccaggcagccacctcccgcccctgtacctggatggccatgtgtttgcaagtcagccccggctggttcctcaaacgatacctcagcagcagagttaccaacaggccgccgctgcccagcagatcccgatctcccttcacacatctctgcaggcacaagctcagcttggactgaggggtgggcttcctgtgtcccagtcccaggagatcttcagctccttgcagcccttcagatctcaggtgtacatgcaccccagcctgtcaccgcccagcaccatgatcctctctgggggcacagccttgaagcctccatactcggcgttcccaggcatgcagcccttggagatggtgaagccgcagtctggctcaccctaccagcccatgagcgggaaccaagccctggtctacgagggccagctcagccaggctgctggcctgggtgcctcccagatgttggactcccagctcccacagctgaccatgccactgcctcggtacggctccgggcagcagccactgatcctgccccagtctattcagctgccacctgggcagagcctctccgttggggccccccgaaggattcctccgcccgggtcccagccgccagtcctgaacaccagcagagagccctctcagatggagatgaaaggcttccactttgccgacagtaaacagaatgtcccttcaggaggccccgtgccatcgccacagacctacaggcctagctctgctagccccagtgggaagccctctggatcagcagttaacatgggctctgtgcagggacactacgtgcaacaggcaaaacaacgagtggatgagaaacccagcctgggagccgtgaagctgcaggaggccccctcggctgcctcccagatgaagcgaaccggagcgatcaagcctcgggctgtcaaagtggaggagagtaaggcctgacagtgcctggctgccacctcgcctctccctactgaggacggtgccgccatgcggcctcgacacagccgacactcgggagcctcaccagatccaccgtccaaatgcgtggcccagactgagagacctccctcctctccactcccgaaagctccgttgtcaaccagcttgcacccgtggatatatggcattgacccgcttgctttgatacgaaacaaaaaagcagacgactccttcatcccatctgctcctaccgtgactgtggagtgacgcctcctgtgcagtgcagatttgccctccctgcctcctccctgtcctgccgcgcagccagggcgccttctcagcagtgcttccggcccagccgcccatccctaggcacagtgatttggcagcagggtcattttactttgaggctttttgttttaaaatgtagccaaggtttttacaaaggggaaaggaaaagaaaacaaaaacgcaagctccatgtgtatagctgaacttttatatgtttcttgccagcccctccgctcccttccatctctagcctctgtcctgtttagtttgatacgtcactgcagtaccttaagaggtgactcttaagaatgcatcccctcctgattcctcagctggttcacccttgaggttatttgcaaaaagaaaaggaggttcttgagggcaccgattgcgagcattctggtgcctggctccccgcctgggaagcgatggggtgctcagagcagcaggcaggttgggggagggggggggtcatagttgggttccagctcctggcttgatgagcccagggcgcttacaggcagcccatgaagttgatgacagttttagcatgagaatcacacagggtccctgtcctgggctcctctaaagccagtggatgtgctgggcaccagagacaaatcatggagatggctgctggtggctcccaggttggcccagatggggtgaccctctctgtccccaccggccctccttgccaagccattcctgggtgagttcaggcctgcgggagccacacattcatctccacctggacacttgagccgcatggccagacccctcccacctgatgcggtggtgcgtgtgatttgtcaaaagaaagccttctggatgctgttaagatgtacccttcaggtgaacctggtatcagacccacagtacttgctgtttgagaaaaaataaaaacaaaaaggtcacctgttctccagcccttttctcttacctggtatttccttcctttctcctcccccaccccaaataaaaaaacaaaaaacactagaatttatttatatgtattgatgttgtaggtctaggtgaaaaaaaaagaagtaaatgtttcactgctctatttatatataatgtctgaattaattctgtgcaggaaaggccaggaaattgcatgtgaagttcggtgcagtcaccacctctgtgtgacctgagctgcagtctcttcgctgagatgcaggttttaaatgagacttggggggctgagggcaggcctcaggcctcccagcgccccaacccctccttggtctaatgaaatgcagttcttagtgcagagatgttttaaggtgcaatatatctcttcctttcccgtggttttagagccaagctcaaggtagtaggacgtagggtcttattttgttttcaaacccccatcctcagagcgcagatacatgcagaggcttctgccaggataccacggggccttagtgggaacaggtggagaccagcacttccctttcctgctgctgaggtagggattggggggtcagaacccactcacttttgcctgttaaagttgccctcctgacgctggcagctctgccttggtcactggggatgcggctcgttgctcagccaccagtggccttgcggtattgtccaccatccactagagtgggatgaagtccagagtgtgggtatacatctcagatgcccatctacccactggggacttcaatgccagctgcatttggtttggttttcttaactgttggcttctccccacagcgttttttgtttttttttaaacattcatattgttttcaaacttggaattcatagacactctggctctaggttccttaagggggaaaacaaaagatgactttatttcacattcaagaaaatcagttcagttccaaagctgtggtccttccagccacttctagggacactggggaaccttgttaaacgttgacatcagtgctctccagccgtgctgtcaccctcctatcttctggatctgccttcgggatggtcagtgacagcttctggaagctgagcacacacaggtgcacagccatgctgtggtctggcctgctacggcagcatggcagctctggtggagccttctcccttgccatttggttcccctgtgccaagtagctgcaggctgcccctcaaatcttcatttgtcccttttcacttcctgcagaacaagcctgggttagagggtctgctggaaatggcctttgaagaccaaggataccaggatgtgtgcactctgtcgtgttctgtgatgaatgggaaacgtaggcttccagaaagccagctctcttctgaaatgtgacggacctaagcaggaagtcatccaggacaggagtggctcagtgttggggatggacgctgtcgcccagccatgctccaccagggccaccaatgtgtagttggctggtggtcttcgggcatgtgagacctgctcttcactgtttccaccccacttggtggcctccaggatggtagtggcaccctcagagccccatcttcagcatgttctgaagcctcagagtggaaattcctgctaaggctctgtgtggacgcctttctcccgtgatctaaaggggacactgtactcaagcttttgacctcatgccttgtgtagtaaaaaaggatttgggggttttgtttggttcctgagagggttgtgttttgtttttgtttccttttgtttatgttttggcctttcctctttgtctttccatgtagaccagatatttgaaagggcagacgatggctagaggtgtaatgtgcagcttgtttatacggtattttgggaaacttaccttggatgggaaatcgaatcgtggattcaccaggccggtgctggcacactcaccctcgccctttccctccggttcagtacctattgtttctcctttcaaatatgtgattgtactagctctttccatatgaaagaattctccttatttaaataaaaaaagtttaaaaagataaaaaaaactgaa

SEQ ID NO: 348935 - DNA, 6111 bp, Homo sapiens
ccagaactcctccgatcacgccaatgaggagtgggagacggcctccgaaagcagcgacttcagcgagcggcgggagcggcgggaaggccctgggtccgagcccgactcccaggtggatggtggcctgtcgggggctagtttgggtgagaagaaggagctggccaagaggagcttctccagtcagagacccgtggttgacagacagagccgaaagctggagccgggagggtttggggagaagcccgttaggccaggtggtggtgacacctcccctcgctatgagagccaacagaatgggacgcctttgaaagtgaaaagatccccagacgaggccttgcctggaggtcttagtggctgcagcagtgggagtggccactccccctatgccctggagcgggcagcccatgccagtgctgaccttcccgaagcctccagtaaaaaggcagagaaggaggccaagttggctgctccgagggcaggtgaacagggagaggccatgaaacagtttgacctgaactatggaagtgccatcattgaaaattgcgggtccagccccggggaggagagtgaggtgggttctatggtgggcgaaggcttcatcgaagtcctgaccaagaagcagcgccgcctgctggaggaagagagaagaaagaaggagcaggccgtgcaggtgcctgtcaaaggtcgaggcctttcctcccgtattcctcctcgatttgcaaaaaagcagaacaacttatgtctggagcaaggtgacgtgaccgtgcctggcagcagcctgggcactgagatctgggagagcagcagccaggctctccctgtgcaggccccagccaacgactcctggaggaaagctgtcactgccttcagcagcaccgagactggctctgcggagcagggttttaagagcagccagggagatagtggcgttgacttgagtgccgagtctcgggagtcgtctgcgacctcctcgcagcgcagctccccatatgggactctgaagccagaggagatgagcgggcccggcctggcggaacccaaggccgacagccacaaggagcaggctccaaagccatctgagcagaaggattcagaacaaggctctggacagagcaaggagcacagaccaggacccatcggcaacgagcgttctctgaaaaacagaaagggctcggagggggccgagcggctgcaaggggctgtcgtcccgcctgttaacggggtggagattcacgtggactccgtgctgcctgtgccacccattgaatttggagtcagtccaaaagactccgatttcagcttgccacctggttctgcctctggtcctactgggagtccagttgttaaacttcaggatgccttggccagtaatgcagggttaacacagagtatccccatcctgcggcgggaccatcacatccagagggccatcggtctctccccaatgtccttccccaccgccgaccttactctgaagatggagtctgcgcgcaaggcttgggaaaactcccccagtttgccggagcagagctctccaggcggcgctggctcaggcatccagcctccatcctctgtgggtgcctccagcggggtcaactacagctccttcggtggagtgtccatgccacccatgcctgtggcctctgtagcaccttctgcttctatgccaggcagccacctcccgcccctgtacctggatggccatgtgtttgcaagtcagccccggctggttcctcaaacgatacctcagcagcagagttaccaacaggccgccgctgcccagcagatcccgatctcccttcacacatctctgcaggcacaagctcagcttggactgaggggtgggcttcctgtgtcccagtcccaggagatcttcagctccttgcagcccttcagatctcaggtgtacatgcaccccagcctgtcaccgcccagcaccatgatcctctctgggggcacagccttgaagcctccatactcggcgttcccaggcatgcagcccttggagatggtgaagccgcagtctggctcaccctaccagcccatgagcgggaaccaagccctggtctacgagggccagctcagccaggctgctggcctgggtgcctcccagatgttggactcccagctcccacagctgaccatgccactgcctcggtacggctccgggcagcagccactgatcctgccccagtctattcagctgccacctgggcagagcctctccgttggggccccccgaaggattcctccgcccgggtcccagccgccagtcctgaacaccagcagagagccctctcagatggagatgaaaggcttccactttgccgacagtaaacagaatgtcccttcaggaggccccgtgccatcgccacagacctacaggcaaaacaacgagtggatgagaaacccagcctgggagccgtgaagctgcaggaggccccctcggctgcctcccagatgaagcgaaccggagcgatcaagcctcgggctgtcaaagtggaggagagtaaggcctgacagtgcctggctgccacctcgcctctccctactgaggacggtgccgccatgcggcctcgacacagccgacactcgggagcctcaccagatccaccgtccaaatgcgtggcccagactgagagacctccctcctctccactcccgaaagctccgttgtcaaccagcttgcacccgtggatatatggcattgacccgcttgctttgatacgaaacaaaaaagcagacgactccttcatcccatctgctcctaccgtgactgtggagtgacgcctcctgtgcagtgcagatttgccctccctgcctcctccctgtcctgccgcgcagccagggcgccttctcagcagtgcttccggcccagccgcccatccctaggcacagtgatttggcagcagggtcattttactttgaggctttttgttttaaaatgtagccaaggtttttacaaaggggaaaggaaaagaaaacaaaaacgcaagctccatgtgtatagctgaacttttatatgtttcttgccagcccctccgctcccttccatctctagcctctgtcctgtttagtttgatacgtcactgcagtaccttaagaggtgactcttaagaatgcatcccctcctgattcctcagctggttcacccttgaggttatttgcaaaaagaaaaggaggttcttgagggcaccgattgcgagcattctggtgcctggctccccgcctgggaagcgatggggtgctcagagcagcaggcaggttgggggagggggggggtcatagttgggttccagctcctggcttgatgagcccagggcgcttacaggcagcccatgaagttgatgacagttttagcatgagaatcacacagggtccctgtcctgggctcctctaaagccagtggatgtgctgggcaccagagacaaatcatggagatggctgctggtggctcccaggttggcccagatggggtgagctgacatactacaggcccatcccaggccccgtgggctctgcttctggggctccataccctgccctgcaggggtgctgtgtttttcacacatttctttccctgaagccttctgtaacctgtcattttccttccttcctcttccggagcctgctgctttctctggacctgtctccacctcccacacagctcatcgtgaacaccacttggtgatggagggagtggacccgtgtgtggtccccaagtgaggccactgggagtttgtccttttcctcctttgcttcactcccagcagcagacccaggttgtcaggacaggagggcctgagctaagcagtaggcatcagtctcgtttgtcttcagacggcgggggcaggtccagggtgaggctgggtggagggctgaccaaggtccaaagggcctgcgcagcctccgggagggcagcttctccagccagaggcttgtgtgagccatcgtgtgctgggcttgtttttaagtaagaaacaaggaaatcactccagattctgtcattccaaggaaagggaaggggacagttcaggtttctcagctgttcttaggggtcactgagcgtctacctcctcctccagaggaggctggctcagaacacctagaggagggggccggggatgcaccccccaccagaggctgccttcagcgtctcacgggtgcaggacagcgctcaggcttgggctctaagctctgtgtctagtgtagaacatggggaaggagcatcttaggaactgctgaagtaacttcttactgctctcacaattctaaggaagcgggagaacggcctcctaccaacagcgcccaccccagagctgcctgggaaagggcagttttactgaaaggtgctttactgttcacctgcatctttcagcagctcccctcctgccctcacctggtcttttccctctttatcccaagcctttatgcttgagtcccttccccaggggctgcccacccgacagttccaggcattccctacctgagcttcttgtctgcttttccttctcccactgcaagcggctgcttgtggggcctgggatgagccctctctgtccccaccggccctccttgccaagccattcctgggtgagttcaggcctgcgggagccacacattcatctccacctggacacttgagccgcatggccagacccctcccacctgatgcggtggtgcgtgtgatttgtcaaaagaaagccttctggatgctgttaagatgtacccttcaggtgaacctggtatcagacccacagtacttgctgtttgagaaaaaataaaaacaaaaaggtcacctgttctccagcccttttctcttacctggtatttccttcctttctcctcccccaccccaaataaaaaaacaaaaaacactagaatttatttatatgtattgatgttgtaggtctaggtgaaaaaaaaagaagtaaatgtttcactgctctatttatatataatgtctgaattaattctgtgcaggaaaggccaggaaattgcatgtgaagttcggtgcagtcaccacctctgtgtgacctgagctgcagtctcttcgctgagatgcaggttttaaatgagacttggggggctgagggcaggcctcaggcctcccagcgccccaacccctccttggtctaatgaaatgcagttcttagtgcagagatgttttaaggtgcaatatatctcttcctttcccgtggttttagagccaagctcaaggtagtaggacgtagggtcttattttgttttcaaacccccatcctcagagcgcagatacatgcagaggcttctgccaggataccacggggccttagtgggaacaggtggagaccagcacttccctttcctgctgctgaggtagggattggggggtcagaacccactcacttttgcctgttaaagttgccctcctgacgctggcagctctgccttggtcactggggatgcggctcgttgctcagccaccagtggccttgcggtattgtccaccatccactagagtgggatgaagtccagagtgtgggtatacatctcagatgcccatctacccactggggacttcaatgccagctgcatttggtttggttttcttaactgttggcttctccccacagcgttttttgtttttttttaaacattcatattgttttcaaacttggaattcatagacactctggctctaggttccttaagggggaaaacaaaagatgactttatttcacattcaagaaaatcagttcagttccaaagctgtggtccttccagccacttctagggacactggggaaccttgttaaacgttgacatcagtgctctccagccgtgctgtcaccctcctatcttctggatctgccttcgggatggtcagtgacagcttctggaagctgagcacacacaggtgcacagccatgctgtggtctggcctgctacggcagcatggcagctctggtggagccttctcccttgccatttggttcccctgtgccaagtagctgcaggctgcccctcaaatcttcatttgtcccttttcacttcctgcagaagtgcgcctgggtgcagaagtgcgcctgggtgcagaagtgcgcctgggtgcagaagtgcgcctgggtg

SEQ ID NO: 348936 - DNA, 2558 bp, Homo sapiens
ccagaactcctccgatcacgccaatgaggagtgggagacggcctccgaaagcagcgacttcagcgagcggcgggagcggcgggaaggccctgggtccgagcccgactcccaggtggatggtggcctgtcgggggctagtttgggtgagaagaaggagctggccaagaggagcttctccagtcagagacccgtggttgacagacagagccgaaagctggagccgggagggtttggggagaagcccgttaggccaggtggtggtgacacctcccctcgctatgagagccaacagaatgggacgcctttgaaagtgaaaagatccccagacgaggccttgcctggaggtcttagtggctgcagcagtgggagtggccactccccctatgccctggagcgggcagcccatgccagtgctgaccttcccgaagcctccagtaaaaaggcagagaaggaggccaagttggctgctccgagggcaggtgaacagggagaggccatgaaacagtttgacctgaactatggaagtgccatcattgaaaattgcgggtccagccccggggaggagagtgaggtgggttctatggtgggcgaaggcttcatcgaagtcctgaccaagaagcagcgccgcctgctggaggaagagagaagaaagaaggagcaggccgtgcaggtgcctgtcaaaggtcgaggcctttcctcccgtattcctcctcgatttgcaaaaaagcagaacaacttatgtctggagcaaggtgacgtgaccgtgcctggcagcagcctgggcactgagatctgggagagcagcagccaggctctccctgtgcaggccccagccaacgactcctggaggaaagctgtcactgccttcagcagcaccgagactggctctgcggagcagggttttaagagcagccagggagatagtggcgttgacttgagtgccgagtctcgggagtcgtctgcgacctcctcgcagcgcagctccccatatgggactctgaagccagaggagatgagcgggcccggcctggcggaacccaaggccgacagccacaaggagcaggctccaaagccatctgagcagaaggattcagaacaaggctctggacagagcaaggagcacagaccaggacccatcggcaacgagcgttctctgaaaaacagaaagggctcggagggggccgagcggctgcaaggggctgtcgtcccgcctgttaacggggtggagattcacgtggactccgtgctgcctgtgccacccattgaatttggagtcagtccaaaagactccgatttcagcttgccacctggttctgcctctggtcctactgggagtccagttgttaaacttcaggatgccttggccagtaatgcagggttaacacagagtatccccatcctgcggcgggaccatcacatccagagggccatcggtctctccccaatgtccttccccaccgccgaccttactctgaagatggagtctgcgcgcaaggcttgggaaaactcccccagtttgccggagcagagctctccaggcggcgctggctcaggcatccagcctccatcctctgtgggtgcctccagcggggtcaactacagctccttcggtggagtgtccatgccacccatgcctgtggcctctgtagcaccttctgcttctatgccaggcagccacctcccgcccctgtacctggatggccatgtgtttgcaagtcagccccggctggttcctcaaacgatacctcagcagcagagttaccaacaggccgccgctgcccagcagatcccgatctcccttcacacatctctgcaggcacaagctcagcttggactgaggggtgggcttcctgtgtcccagtcccaggagatcttcagctccttgcagcccttcagatctcaggtgtacatgcaccccagcctgtcaccgcccagcaccatgatcctctctgggggcacagccttgaagcctccatactcggcgttcccaggcatgcagcccttggagatggtgaagccgcagtctggctcaccctaccagcccatgagcgggaaccaagccctggtctacgagggccagctcagccaggctgctggcctgggtgcctcccagatgttggactcccagctcccacagctgaccatgccactgcctcggtacggctccgggcagcagccactgatcctgccccagtctattcagctgccacctgggcagagcctctccgttggggccccccgaaggattcctccgcccgggtcccagccgccagtcctgaacaccagcagagagccctctcagatggagatgaaaggcttccactttgccgacagtaaacagaatgtcccttcaggaggccccgtgccatcgccacagacctacagagaacaacgcctgggttacgagggtctgctgggcaatggcctctcgcaagaccaaggcatcccaggcatgtgctagccactcctgtcgtgctcctgctgatagactgggccaaccgctcagctttccagtgaaacgcccagacactcccccctcgcccgaccgccaccggaac

SEQ ID NO: 348937 - DNA, 669 bp, Homo sapiens
ccaggtggatgatgatgccttcctacatggacccacgtatcacgcccactcggaccccggtggacttctacccctccgccctgcatccctcaggactgatgaagcccatgatgccccaggagtccctcaatgggacaggctgtcgctctgaggatcagaactgtgtgcccccactccaagaaagaaaagtgacccccatcgactcaccccctgtgtggagcccagagggctacatggcactgcagagcaagggctacccgctcccgcacccgaagtcgagtgacaccttggctatggacatgcgtgtcaggaatgaaagctctttctctgcctcactcggaagggcagggggcgtaagtgctcagcgcgatctctttgaggagagaggggaggagtacttgagtgcttttgacaagaaggcccaagcagaacgatggctagaggtgtaatgtgcagcttgtttatacggtattttgggaaacttaccttggatgggaaatcgaatcgtggattcaccaggccggtgctggcacactcaccctcgccctttccctccggttcagtacctattgtttctcctttcaaatatgtgattgtactagctctttccatatgaaagaattctccttatttaaataaaaaaagtttaaaaagataaaaaaaactgaa

SEQ ID NO: 348938 - DNA, 643 bp, Homo sapiens
ccagcttccactctaagcacacgttaacgctagacactagtaatgcaatgaaggtaaccaaagcaaaaacaacccaagctgagcttacctcccaactcactgacttgatccccacactaacagtaaagtagaagaagcatccccaattgtaagcataaatacaattatgagaaaattacgagacatatacacaaaagaagaaaaaaacaacacactgtcaagggacaaagaaatcaacagaagcagactgagggatgacccagatgttagaactatcagacagggaatttaaaatgactatgactaatattaaaggcgccagtggaaaaagcagacaaatgtatgaacagatgagaaattctagcagagttggaaactccaaaagtcaaatggaaatgctaaaaacaaatacagtagcagatatgcagaatggtttcaacaggcccatcatgagatttgacatcatcaaggaaagaattagtggaagacaggtcaatagatattatctaatacaaataacccaaactgatgcacaaagagaaaaaagaataaaaaacacaaaacagagaacccaaaagctgttggacagactgagcacagtggctcacgcctgtaatcccaacactttaagggactgaggcag

SEQ ID NO: 348939 - DNA, 552 bp, Homo sapiens
attgactgatgttttcctccctattaatttcccgtaggaatggtaaaaatgcaattattcatctatgaaaatggtgtttaagaccttgaaaatgaagagaatttggaaagccacttgtgccataaaatttctgaacacagaaacgggccagtgattcagtcgatattgattgattggttgattgattttaatttcttctccagctttattgaggtataattgacaattaaaaattgcatatactcaaaatgtacatatgatgttttgatttcattgtgaaatctttactataatcaagccagctaatatatccatcacctcacatagttgccattgtgtatgtgtgtgtgtgtgtgtgtgtgtgtgtgtgtgtgtggtgagacactcaagatgtactgtcttagcaaatttcaggggtacaatccagtattattaacatgctgtccattattcacaaaaggcaagatgaagaaacaatctaagtgcctaaggctggatgaatggataaagaaaatgtggtatatatacacagtggaataatattcagcctta

SEQ ID NO: 348940 - DNA, 831 bp, Homo sapiens
ataatatagaaatacattagctgaatttatactcctgaagccacttcatctttaggctttatatttacagtgttgtccaggaggaactaaagaaaataattagtgtaacttttttctttagttcctcctggacaacactgtaaatataaagcctaaagatgaagtggcttcaggagtataaattcagctaattatttctatattattatttttcaaatgtcatttatcaggcatagctctgaaacattgatgatctaagaggtattgatttctgaatattcataattgtgttacctgggtatgagagtgttggaagctgaattctagccctagattttggagtaaaaccccttcagcacttgaccgaaataccaaaaatgtctccaaaaaattgatagttgcaggttatcgcaagatgtcttagagtagggttaaggttctcagtgacacaagaattcagtattaagtacataggtatttactatggagtataattctcacaattgtattttcagttttctgcccaatagagtttaaataactgtataaatgatgactttaaaaaaatgtaagcaacaagtccatgtcatagtcaataaaaacaatcctgcagttgggttttgtatctgatccctgcttggagttttagtttaaagaatctatatgtagcaaggaaaaggtgctttttaattttaatccctttgatcaatatggcttttttccaaattggctaatggatcaaaatgaaacctgttgatgtgaattcagttattgaacttgttacttgtttttgccagaaatgttattaataaatgtcaatgtgggagataa

SEQ ID NO: 348941 - DNA, 651 bp, Homo sapiens
  misc_feature (1)..(1): n is a, c, g, or t
  misc_feature (4)..(4): n is a, c, g, or t
  misc_feature (11)..(11): n is a, c, g, or t
nctngcagganctgtatgtatcccaacacaaggaaagaatagggcacaggtatattgagatcttcagaagtagcaggagtgaaatcaaaggattttatgatccaccaagaagattgctgggacagcgaccgggaccatatgatagaccaataggaggaagagggggttattatggagctgggcgtggaagtatgtatgacagaatgcgacgaggaggtgatggatatgatggtggttatggaggttttgatgactatggtggctataataattacggctatgggaatgatggctttgatgacagaatgagagatggaagaggtatgggaggacatggctatggtggagctggtgatgcaagttcaggttttcatggtggtcatttcgtacatatgagagggttgccttttcgtgcaactgaaaatgacattgctaatttcttctcaccactaaatccaatacgagttcatattgatattggagctgatggcagagccacaggagaagcagatgtagagtttgtgacacatgaagatgcagtagctgccatgtctaaagataaaaataacatgcaacgttctggggattacgggcgttaccacttgcacccagccttccaagggctttttaaaccataagcttctctacggt

SEQ ID NO: 348942 - DNA, 2480 bp, Homo sapiens
catttacattttgtaaaataaacaatgttaacccgcatctatgtgtatgtggcagggtttcctcaacctcggcattattgatatttggggctggacaattctttgctgtggagactgtcctgtggactgtagtttagcagcatctctagcttcagagaagggagaagtcgtttgcctcgtgtagcgctcgccacaacggttctcccaaccgtctccagcggtgacaaccgcttagggagctgcgcagcaccagagtcggcgtaactatcgcctgacaggcatttaaatcaaacggtattgagatggattgggttatgaaacataatggtccaaatgacgctagtgatgggacagtacgacttcgtggactaccatttggttgcagcaaagaggaaatagttcagttctttcaagggttggaaatcgtgccaaatgggataacattgacgatggactaccaggggagaagcacaggggaggccttcgtgcagtttgcttcaaaggagatagcagaaaatgctctggggaaacacaaggaaagaatagggcacaggtatattgagatcttcagaagtagcaggagtgaaatcaaaggattttatgatccaccaagaagattgctgggacagcgaccgggaccatatgatagaccaataggaggaagagggggttattatggagctgggcgtggaagtatgtatgacagaatgcgacgaggaggtgatggatatgatggtggttatggaggttttgatgactatggtggctataataattacggctatgggaatgatggctttgatgacagaatgagagatggaagaggtatgggaggacatggctatggtggagctggtgatgcaagttcaggttttcatggtggtcatttcgtacatatgagagggttgccttttcgtgcaactgaaaatgacattgctaatttcttctcaccactaaatccaatacgagttcatattgatattggagctgatggcagagccacaggagaagcagatgtagagtttgtgacacatgaagatgcagtagctgccatgtctaaagataaaaataacatgcaacatcgatatattgaactcttcttgaattctactcctggaggcggctctggcatgggaggttctggaatgggaggctacggaagagatggaatggataatcagggaggctatggatcagttggaagaatgggaatggggaacaattacagtggaggatatggtactcctgatggtttgggtggttatggccgtggtggtggaggcagtggaggttactatgggcaaggcggcatgagtggaggtggatggcgtgggatgtactgaaagcaaaaacaccaacatacaagtcttgacaacagcatctggtctactagactttcttacagatttaatttcttttgtattttaagaactttataatgactgaaggaatgtgttttcaaaatattatttggtaaagcaacagattgtgatgggaaaatgttttctgtaggtttatttgttgcatactttgacttaaaaataaatttttatattcaaaccactgatgttgatactttttatatactagttactcctaaagatgtgctgccttcataagatttgggttgatgtattttactattagttctacaagaagtagtgtggtgtaattttagaggataatggttcacctctgcgtaaactgcaagtcttaagcagacatctggaatagagcttgacaaataattagtgtaacttttttctttagttcctcctggacaacactgtaaatataaagcctaaagatgaagtggcttcaggagtataaattcagctaattatttctatattattatttttcaaatgtcatttatcaggcatagctctgaaacattgatgatctaagaggtattgatttctgaatattcataattgtgttacctgggtatgagagtgttggaagctgaattctagccctagattttggagtaaaaccccttcagcacttgaccgaaataccaaaaatgtctccaaaaaattgatagttgcaggttatcgcaagatgtcttagagtagggttaaggttctcagtgacacaagaattcagtattaagtacataggtatttactatggagtataattctcacaattgtattttcagttttctgcccaatagagtttaaataactgtataaatgatgactttaaaaaaatgtaagcaacaagtccatgtcatagtcaataaaaacaatcctgcagttgggttttgtatctgatccctgcttggagttttagtttaaagaatctatatgtagcaaggaaaaggtgctttttaattttaatccctttgatcaatatggcttttttccaaattggctaatggatcaaaatgaaacctgttgatgtgaattcagttattgaacttgttacttgtttttgccagaaatgttattaataaatgtcaatgtgggagataa

SEQ ID NO: 348943 - DNA, 3509 bp, Homo sapiens
catttacattttgtaaaataaacaatgttaacccgcatctatgtgtatgtggcagggtttcctcaacctcggcattattgatatttggggctggacaattctttgctgtggagactgtcctgtggactgtagtttagcagcatctctagcttcagagaagggagaagtcgtttgcctcgtgtagcgctcgccacaacggttctcccaaccgtctccagcggtgacaaccgcttagggagctgcgcagcaccagagtcggcgtaactatcgcctgacaggcatttaaatcaaacggtattgagatggattgggttatgaaacataatggtccaaatgacgctagtgatgggacagtacgacttcgtggactaccatttggttgcagcaaagaggaaatagttcagttctttcaaggtacctctagtattagtcaaagtttagtagtattgtaattttatatttgtattgttttactgtttttaatttgtaaaacccatttgattttggaacttttaagtttaactatgatagtcttggttaatgtattaaaataatatgctccagttaatattcaatacagaatgtgtagaatatgtaaaacctaattaatgtgcagtaacatatttgagaattgtgatgaaatgaaccgtgaattagtatatggagcatatatttgattttgtagccttttttcatgtaatataggtgggcttttagagtgtgtaattacacagtgtttttacactggtcgcaaaaaatttatttaatccagtaatatttgaaaaaatctttcatttgtattatggggtgatgggaaactaagcttttttgttttgttttgttttgtttagacttgttttaaatatttgattcagatgggaatgtttcagcctttaacactgttccccttgatggggttatttgtccttgggttaaagggttggaaatcgtgccaaatgggataacattgacgatggactaccaggggagaagcacaggggaggccttcgtgcagtttgcttcaaaggagatagcagaaaatgctctggggaaacacaaggaaagaatagggcacaggtggggatggagagtttgggatggtgttaaatttttatttttgggggttgtgggtcactattgcttaaatgggggggtagccataacatttttctggggtagtttaaaagaattgataattatctaaatttaacttggaaactacagatttgggtggggaattaatgctaatagttaaattaaaattagattgtttccatttctctgtaggatgttgttgataaatgcttttgtataatcacctatttcctttaaaacacctattatgtactaaaagagacaaagtaaaaatatactttatgaattgttttccgtgactaatttctttgtaaaacttaaatatttaattaagtttgtaggtttaaactgttaacttacggtgtatttaggcaatttaaattgggttatgtatctagatatagaaaaacttactgcattttgcccagtatctaatttacactaatacatttatgctgaaacctgtaccttaaaacatttttaaatagtatattgagatcttcagaagtagcaggagtgaaatcaaaggattttatgatccaccaagaagattgctgggacagcgaccgggaccatatgatagaccaataggaggaagagggggttattatggagctgggcgtggaagtatgtatgacagaatgcgacgaggaggtgatggatatgatggtggttatggaggttttgatgactatggtggctataataattacggctatgggaatgatggctttgatgacagaatgagagatggaagaggtatgggaggacatggctatggtggagctggtgatgcaagttcaggttttcatggtggtcatttcgtacatatgagagggttgccttttcgtgcaactgaaaatgacattgctaatttcttctcaccactaaatccaatacgagttcatattgatattggagctgatggcagagccacaggagaagcagatgtagagtttgtgacacatgaagatgcagtagctgccatgtctaaagataaaaataacatgcaacatcgatatattgaactcttcttgaattctactcctggaggcggctctggcatgggaggttctggaatgggaggctacggaagagatggaatggataatcagggaggctatggatcagttggaagaatgggaatggggaacaattacagtggaggatatggtactcctgatggtttgggtggttatggccgtggtggtggaggcagtggaggttactatgggcaaggcggcatgagtggaggtggatggcgtgggatgtactgaaagcaaaaacaccaacatacaagtcttgacaacagcatctggtctactagactttcttacagatttaatttcttttgtattttaagaactttataatgactgaaggaatgtgttttcaaaatattatttggtaaagcaacagattgtgatgggaaaatgttttctgtaggtttatttgttgcatactttgacttaaaaataaatttttatattcaaaccactgatgttgatactttttatatactagttactcctaaagatgtgctgccttcataagatttgggttgatgtattttactattagttctacaagaagtagtgtggtgtaattttagaggataatggttcacctctgcgtaaactgcaagtcttaagcagacatctggaatagagcttgacaaataattagtgtaacttttttctttagttcctcctggacaacactgtaaatataaagcctaaagatgaagtggcttcaggagtataaattcagctaattatttctatattattatttttcaaatgtcatttatcaggcatagctctgaaacattgatgatctaagaggtattgatttctgaatattcataattgtgttacctgggtatgagagtgttggaagctgaattctagccctagattttggagtaaaaccccttcagcacttgaccgaaataccaaaaatgtctccaaaaaattgatagttgcaggttatcgcaagatgtcttagagtagggttaaggttctcagtgacacaagaattcagtattaagtacataggtatttactatggagtataattctcacaattgtattttcagttttctgcccaatagagtttaaataactgtataaatgatgactttaaaaaaatgtaagcaacaagtccatgtcatagtcaataaaaacaatcctgcagttgggttttgtatctgatccctgcttggagttttagtttaaagaatctatatgtagcaaggaaaaggtgctttttaattttaatccctttgatcaatatggcttttttccaaattggctaatggatcaaaatgaaacctgttgatgtgaattcagttattgaacttgttacttgtttttgccagaaatgttattaataaatgtcaatgtgggagataa

SEQ ID NO: 348944 - DNA, 2933 bp, Homo sapiens
catttacattttgtaaaataaacaatgttaacccgcatctatgtgtatgtggcagggtttcctcaacctcggcattattgatatttggggctggacaattctttgctgtggagactgtcctgtggactgtagtttagcagcatctctagcttcagagaagggagaagtcgtttgcctcgtgtagcgctcgccacaacggttctcccaaccgtctccagcggtgacaaccgcttagggagctgcgcagcaccagagtcggcgtaactatcgcctgacaggcatttaaatcaaacggtattgagatggattgggttatgaaacataatggtccaaatgacgctagtgatgggacagtacgacttcgtggactaccatttggttgcagcaaagaggaaatagttcagttctttcaagggttggaaatcgtgccaaatgggataacattgacgatggactaccaggggagaagcacaggggaggccttcgtgcagtttgcttcaaaggagatagcagaaaatgctctggggaaacacaaggaaagaatagggcacaggtatattgagatcttcagaagtagcaggagtgaaatcaaaggattttatgatccaccaagaagattgctgggacagcgaccgggaccatatgatagaccaataggaggaagagggggttattatggagctgggcgtggaagtatgtatgacagaatgcgacgaggaggtgatggatatgatggtgggtatgtgtatctaatgaacaaaggttctgttgtcattttcttaatgttcctgacactttgtcaagaaatacagaaatggcagtaatttcagtacctattaggttttaaaacctgttcatgaaaatacggattcccatggctagctgtgggacttgactgatgcacatattggcacctagaaaacttacacagaaattaaaaataagatgttggcatattttgacctttttttgcctaaggatgaaatttaatttacatgtctgaacttaattaactttctgagattttaaatttccatcacgttgactgcttttttcataggttttaagttgggaattgcaaacttgcaatcaagttacacagactgttaccacaaaatgtttttgtaaactaaattataaaatttatctctggaaagtgtgtagtcatgtgtttctccttaaattacacaggttatggaggttttgatgactatggtggctataataattacggctatgggaatgatggctttgatgacagaatgagagatggaagaggtatgggaggacatggctatggtggagctggtgatgcaagttcaggttttcatggtggtcatttcgtacatatgagagggttgccttttcgtgcaactgaaaatgacattgctaatttcttctcaccactaaatccaatacgagttcatattgatattggagctgatggcagagccacaggagaagcagatgtagagtttgtgacacatgaagatgcagtagctgccatgtctaaagataaaaataacatgcaacatcgatatattgaactcttcttgaattctactcctggaggcggctctggcatgggaggttctggaatgggaggctacggaagagatggaatggataatcagggaggctatggatcagttggaagaatgggaatggggaacaattacagtggaggatatggtactcctgatggtttgggtggttatggccgtggtggtggaggcagtggaggttactatgggcaaggcggcatgagtggaggtggatggcgtgggatgtactgaaagcaaaaacaccaacatacaagtcttgacaacagcatctggtctactagactttcttacagatttaatttcttttgtattttaagaactttataatgactgaaggaatgtgttttcaaaatattatttggtaaagcaacagattgtgatgggaaaatgttttctgtaggtttatttgttgcatactttgacttaaaaataaatttttatattcaaaccactgatgttgatactttttatatactagttactcctaaagatgtgctgccttcataagatttgggttgatgtattttactattagttctacaagaagtagtgtggtgtaattttagaggataatggttcacctctgcgtaaactgcaagtcttaagcagacatctggaatagagcttgacaaataattagtgtaacttttttctttagttcctcctggacaacactgtaaatataaagcctaaagatgaagtggcttcaggagtataaattcagctaattatttctatattattatttttcaaatgtcatttatcaggcatagctctgaaacattgatgatctaagaggtattgatttctgaatattcataattgtgttacctgggtatgagagtgttggaagctgaattctagccctagattttggagtaaaaccccttcagcacttgaccgaaataccaaaaatgtctccaaaaaattgatagttgcaggttatcgcaagatgtcttagagtagggttaaggttctcagtgacacaagaattcagtattaagtacataggtatttactatggagtataattctcacaattgtattttcagttttctgcccaatagagtttaaataactgtataaatgatgactttaaaaaaatgtaagcaacaagtccatgtcatagtcaataaaaacaatcctgcagttgggttttgtatctgatccctgcttggagttttagtttaaagaatctatatgtagcaaggaaaaggtgctttttaattttaatccctttgatcaatatggcttttttccaaattggctaatggatcaaaatgaaacctgttgatgtgaattcagttattgaacttgttacttgtttttgccagaaatgttattaataaatgtcaatgtgggagataa

SEQ ID NO: 348945 - DNA, 2780 bp, Homo sapiens
  misc_feature (2482)..(2482): n is a, c, g, or t
  misc_feature (2691)..(2691): n is a, c, g, or t
catttacattttgtaaaataaacaatgttaacccgcatctatgtgtatgtggcagggtttcctcaacctcggcattattgatatttggggctggacaattctttgctgtggagactgtcctgtggactgtagtttagcagcatctctagcttcagagaagggagaagtcgtttgcctcgtgtagcgctcgccacaacggttctcccaaccgtctccagcggtgacaaccgcttagggagctgcgcagcaccagagtcggcgtaactatcgcctgacaggcatttaaatcaaacggtattgagatggattgggttatgaaacataatggtccaaatgacgctagtgatgggacagtacgacttcgtggactaccatttggttgcagcaaagaggaaatagttcagttctttcaagggttggaaatcgtgccaaatgggataacattgacgatggactaccaggggagaagcacaggggaggccttcgtgcagtttgcttcaaaggagatagcagaaaatgctctggggaaacacaaggaaagaatagggcacaggtatattgagatcttcagaagtagcaggagtgaaatcaaaggattttatgatccaccaagaagattgctgggacagcgaccgggaccatatgatagaccaataggaggaagagggggttattatggagctgggcgtggaagtatgtatgacagaatgcgacgaggaggtgatggatatgatggtggttatggaggttttgatgactatggtggctataataattacggctatgggaatgatggctttgatgacagaatgagagatggaagaggtatgggaggacatggctatggtggagctggtgatgcaagttcaggttttcatggtggtcatttcgtacatatgagagggttgccttttcgtgcaactgaaaatgacattgctaatttcttctcaccactaaatccaatacgagttcatattgatattggagctgatggcagagccacaggagaagcagatgtagagtttgtgacacatgaagatgcagtagctgccatgtctaaagataaaaataacatgcaacatcgatatattgaactcttcttgaattctactcctggaggcggctctggcatgggaggttctggaatgggaggctacggaagagatggaatggataatcagggaggctatggatcagttggaagaatgggaatggggaacaattacagtggaggatatggtactcctgatggtttgggtggttatggccgtggtggtggaggcagtggaggttactatgggcaaggcggcatgagtggaggtggatggcgtgggatgtactgaaagcaaaaacaccaacatacaagtcttgacaacagcatctggtctactagactttcttacagatttaatttcttttgtattttaagaactttataatgactgaaggaatgtgttttcaaaatattatttggtaaagcaacagattgtgatgggaaaatgttttctgtaggtttatttgttgcatactttgacttaaaaataaatttttatattcaaaccactgatgttgatactttttatatactagttactcctaaagatgtgctgccttcataagatttgggttgatgtattttactattagttctacaagaagtagtgtggtgtaattttagaggataatggttcacctctgcgtaaactgcaagtcttaagcagacatctggaatagagcttgacaaataattagtgtaacttttttctttagttcctcctggacaacactgtaaatataaagcctaaagatgaagtggcttcaggagtataaattcagctaattatttctatattattatttttcaaatgtcatttatcaggcatagctctgaaacattgatgatctaagaggtattgatttctgaatattcataattgtgttacctgggtatgagagtgttggaagctgaattctagccctagattttggagtaaaaccccttcagcacttgaccgaaataccaaaaatgtctccaaaaaattgatagttgcaggttatcgcaagatgtcttagagtagggttaaggttctcagtgacacaagaattcagtattaagtacataggtatttactatggagtataattctcacaattgtattttcagttttctgcccaatagagtttaaataactgtataaatgatgactttaaaaaaatgtaagcaacaagtccatgtcatagtcaataaaaacaatcctgcagttgggttttgtatctgatccctgcttggagttttagtttaaagaatctatatgtagcaaggaaaaggtgctttttaattttaatccctttgatcaatatggcttttttccaaattggctaatggatcaaaatgaaacctgttgatgtgaattcagttattgaacttgttacttgtttttgccagaaatgttattaataaatgtcaatgtgggagataatnaaaaaaaaaaaaaaaaaaaaaaaaaaaaaaaaaaaaaaaaaaaaacaaaaaaaaaaaaaacatgcggccgaatttggagctcatttgcccatatcgccctatagggggtggttttacatttaactggccgccgtttacacggtggggattggaaatccctggggttaccaaactaaatggctttgaagcaatccccttttgcaagttgncgaattacgaggagcccggaccgttcgcctttccaacagttggccaacctgattgggaatgaaattgaagcgtaatatttgttaaatca

SEQ ID NO: 348946 - DNA, 3962 bp, Homo sapiens
catttacattttgtaaaataaacaatgttaacccgcatctatgtgtatgtggcagggtttcctcaacctcggcattattgatatttggggctggacaattctttgctgtggagactgtcctgtggactgtagtttagcagcatctctagcttcagagaagggagaagtcgtttgcctcgtgtagcgctcgccacaacggttctcccaaccgtctccagcggtgacaaccgcttagggagctgcgcagcaccagagtcggcgtaactatcgcctgacaggcatttaaatcaaacggtattgagatggattgggttatgaaacataatggtccaaatgacgctagtgatgggacagtacgacttcgtggactaccatttggttgcagcaaagaggaaatagttcagttctttcaaggtacctctagtattagtcaaagtttagtagtattgtaattttatatttgtattgttttactgtttttaatttgtaaaacccatttgattttggaacttttaagtttaactatgatagtcttggttaatgtattaaaataatatgctccagttaatattcaatacagaatgtgtagaatatgtaaaacctaattaatgtgcagtaacatatttgagaattgtgatgaaatgaaccgtgaattagtatatggagcatatatttgattttgtagccttttttcatgtaatataggtgggcttttagagtgtgtaattacacagtgtttttacactggtcgcaaaaaatttatttaatccagtaatatttgaaaaaatctttcatttgtattatggggtgatgggaaactaagcttttttgttttgttttgttttgtttagacttgttttaaatatttgattcagatgggaatgtttcagcctttaacactgttccccttgatggggttatttgtccttgggttaaagggttggaaatcgtgccaaatgggataacattgacgatggactaccaggggagaagcacaggggaggccttcgtgcagtttgcttcaaaggagatagcagaaaatgctctggggaaacacaaggaaagaatagggcacaggtggggatggagagtttgggatggtgttaaatttttatttttgggggttgtgggtcactattgcttaaatgggggggtagccataacatttttctggggtagtttaaaagaattgataattatctaaatttaacttggaaactacagatttgggtggggaattaatgctaatagttaaattaaaattagattgtttccatttctctgtaggatgttgttgataaatgcttttgtataatcacctatttcctttaaaacacctattatgtactaaaagagacaaagtaaaaatatactttatgaattgttttccgtgactaatttctttgtaaaacttaaatatttaattaagtttgtaggtttaaactgttaacttacggtgtatttaggcaatttaaattgggttatgtatctagatatagaaaaacttactgcattttgcccagtatctaatttacactaatacatttatgctgaaacctgtaccttaaaacatttttaaatagtatattgagatcttcagaagtagcaggagtgaaatcaaaggattttatgatccaccaagaagattgctgggacagcgaccgggaccatatgatagaccaataggaggaagagggggttattatggagctgggcgtggaagtatgtatgacagaatgcgacgaggaggtgatggatatgatggtgggtatgtgtatctaatgaacaaaggttctgttgtcattttcttaatgttcctgacactttgtcaagaaatacagaaatggcagtaatttcagtacctattaggttttaaaacctgttcatgaaaatacggattcccatggctagctgtgggacttgactgatgcacatattggcacctagaaaacttacacagaaattaaaaataagatgttggcatattttgacctttttttgcctaaggatgaaatttaatttacatgtctgaacttaattaactttctgagattttaaatttccatcacgttgactgcttttttcataggttttaagttgggaattgcaaacttgcaatcaagttacacagactgttaccacaaaatgtttttgtaaactaaattataaaatttatctctggaaagtgtgtagtcatgtgtttctccttaaattacacaggttatggaggttttgatgactatggtggctataataattacggctatgggaatgatggctttgatgacagaatgagagatggaagaggtatgggaggacatggctatggtggagctggtgatgcaagttcaggttttcatggtggtcatttcgtacatatgagagggttgccttttcgtgcaactgaaaatgacattgctaatttcttctcaccactaaatccaatacgagttcatattgatattggagctgatggcagagccacaggagaagcagatgtagagtttgtgacacatgaagatgcagtagctgccatgtctaaagataaaaataacatgcaacatcgatatattgaactcttcttgaattctactcctggaggcggctctggcatgggaggttctggaatgggaggctacggaagagatggaatggataatcagggaggctatggatcagttggaagaatgggaatggggaacaattacagtggaggatatggtactcctgatggtttgggtggttatggccgtggtggtggaggcagtggaggttactatgggcaaggcggcatgagtggaggtggatggcgtgggatgtactgaaagcaaaaacaccaacatacaagtcttgacaacagcatctggtctactagactttcttacagatttaatttcttttgtattttaagaactttataatgactgaaggaatgtgttttcaaaatattatttggtaaagcaacagattgtgatgggaaaatgttttctgtaggtttatttgttgcatactttgacttaaaaataaatttttatattcaaaccactgatgttgatactttttatatactagttactcctaaagatgtgctgccttcataagatttgggttgatgtattttactattagttctacaagaagtagtgtggtgtaattttagaggataatggttcacctctgcgtaaactgcaagtcttaagcagacatctggaatagagcttgacaaataattagtgtaacttttttctttagttcctcctggacaacactgtaaatataaagcctaaagatgaagtggcttcaggagtataaattcagctaattatttctatattattatttttcaaatgtcatttatcaggcatagctctgaaacattgatgatctaagaggtattgatttctgaatattcataattgtgttacctgggtatgagagtgttggaagctgaattctagccctagattttggagtaaaaccccttcagcacttgaccgaaataccaaaaatgtctccaaaaaattgatagttgcaggttatcgcaagatgtcttagagtagggttaaggttctcagtgacacaagaattcagtattaagtacataggtatttactatggagtataattctcacaattgtattttcagttttctgcccaatagagtttaaataactgtataaatgatgactttaaaaaaatgtaagcaacaagtccatgtcatagtcaataaaaacaatcctgcagttgggttttgtatctgatccctgcttggagttttagtttaaagaatctatatgtagcaaggaaaaggtgctttttaattttaatccctttgatcaatatggcttttttccaaattggctaatggatcaaaatgaaacctgttgatgtgaattcagttattgaacttgttacttgtttttgccagaaatgttattaataaatgtcaatgtgggagataa

SEQ ID NO: 348947 - DNA, 2751 bp, Homo sapiens
  misc_feature (2662)..(2662): n is a, c, g, or t
catttacattttgtaaaataaacaatgttaacccgcatctatgtgtatgtggcagggtttcctcaacctcggcattattgatatttggggctggacaattctttgctgtggagactgtcctgtggactgtagtttagcagcatctctagcttcagagaagggagaagtcgtttgcctcgtgtagcgctcgccacaacggttctcccaaccgtctccagcggtgacaaccgcttagggagctgcgcagcaccagagtcggcgtaactatcgcctgacaggcatttaaatcaaacggtattgagatggattgggttatgaaacataatggtccaaatgacgctagtgatgggacagtacgacttcgtggactaccatttggttgcagcaaagaggaaatagttcagttctttcaagggttggaaatcgtgccaaatgggataacattgacgatggactaccaggggagaagcacaggggaggccttcgtgcagtttgcttcaaaggagatagcagaaaatgctctggggaaacacaaggaaagaatagggcacaggtatattgagatcttcagaagtagcaggagtgaaatcaaaggattttatgatccaccaagaagattgctgggacagcgaccgggaccatatgatagaccaataggaggaagagggggttattatggagctgggcgtggaagtatgtatgacagaatgcgacgaggaggtgatggatatgatggtggttatggaggttttgatgactatggtggctataataattacggctatgggaatgatggctttgatgacagaatgagagatggaagaggtatgggaggacatggctatggtggagctggtgatgcaagttcaggttttcatggtggtcatttcgtacatatgagagggttgccttttcgtgcaactgaaaatgacattgctaatttcttctcaccactaaatccaatacgagttcatattgatattggagctgatggcagagccacaggagaagcagatgtagagtttgtgacacatgaagatgcagtagctgccatgtctaaagataaaaataacatgcaacatcgatatattgaactcttcttgaattctactcctggaggcggctctggcatgggaggttctggaatgggaggctacggaagagatggaatggataatcagggaggctatggatcagttggaagaatgggaatggggaacaattacagtggaggatatggtactcctgatggtttgggtggttatggccgtggtggtggaggcagtggaggttactatgggcaaggcggcatgagtggaggtggatggcgtgggatgtactgaaagcaaaaacaccaacatacaagtcttgacaacagcatctggtctactagactttcttacagatttaatttcttttgtattttaagaactttataatgactgaaggaatgtgttttcaaaatattatttggtaaagcaacagattgtgatgggaaaatgttttctgtaggtttatttgttgcatactttgacttaaaaataaatttttatattcaaaccactgatgttgatactttttatatactagttactcctaaagatgtgctgccttcataagatttgggttgatgtattttactattagttctacaagaagtagtgtggtgtaattttagaggataatggttcacctctgcgtaaactgcaagtcttaagcagacatctggaatagagcttgacaaataattagtgtaacttttttctttagttcctcctggacaacactgtaaatataaagcctaaagatgaagtggcttcaggagtataaattcagctaattatttctatattattatttttcaaatgtcatttatcaggcatagctctgaaacattgatgatctaagaggtattgatttctgaatattcataattgtgttacctgggtatgagagtgttggaagctgaattctagccctagattttggagtaaaaccccttcagcacttgaccgaaataccaaaaatgtctccaaaaaattgatagttgcaggttatcgcaagatgtcttagagtagggttaaggttctcagtgacacaagaattcagtattaagtacataggtatttactatggagtataattctcacaattgtattttcagttttctgcccaatagagtttaaataactgtataaatgatgactttaaaaaaatgtaagcaacaagtccatgtcatagtcaataaaaacaatcctgcagttgggttttgtatctgatccctgcttggagttttagtttaaagaatctatatgtagcaaggaaaaggtgctttttaattttaatccctttgatcaatatggcttttttccaaattggctaatggatcaaaatgaaacctgttgatgtgaattcagttattgaacttgttacttgtttttgccagaaatgttattaataaatgtcaatgtgggagataaaaaaaaaaaaaaaaaaaacaaaaaaaaaaaaaacatgcggccgaatttggagctcatttgcccatatcgccctatagggggtggttttacatttaactggccgccgtttacacggtggggattggaaatccctggggttaccaaactaaatggctttgaagcaatccccttttgcaagttgncgaattacgaggagcccggaccgttcgcctttccaacagttggccaacctgattgggaatgaaattgaagcgtaatatttgttaaatca

SEQ ID NO: 348948 - DNA, 3921 bp, Homo sapiens
catttacattttgtaaaataaacaatgttaacccgcatctatgtgtatgtggcagggtttcctcaacctcggcattattgatatttggggctggacaattctttgctgtggagactgtcctgtggactgtagtttagcagcatctctagcttcagagaagggagaagtcgtttgcctcgtgtagcgctcgccacaacggttctcccaaccgtctccagcggtgacaaccgcttagggagctgcgcagcaccagagtcggcgtaactatcgcctgacaggcatttaaatcaaacggtattgagatggattgggttatgaaacataatggtccaaatgacgctagtgatgggacagtacgacttcgtggactaccatttggttgcagcaaagaggaaatagttcagttctttcaaggtacctctagtattagtcaaagtttagtagtattgtaattttatatttgtattgttttactgtttttaatttgtaaaacccatttgattttggaacttttaagtttaactatgatagtcttggttaatgtattaaaataatatgctccagttaatattcaatacagaatgtgtagaatatgtaaaacctaattaatgtgcagtaacatatttgagaattgtgatgaaatgaaccgtgaattagtatatggagcatatatttgattttgtagccttttttcatgtaatataggtgggcttttagagtgtgtaattacacagtgtttttacactggtcgcaaaaaatttatttaatccagtaatatttgaaaaaatctttcatttgtattatggggtgatgggaaactaagcttttttgttttgttttgttttgtttagacttgttttaaatatttgattcagatgggaatgtttcagcctttaacactgttccccttgatggggttatttgtccttgggttaaagggttggaaatcgtgccaaatgggataacattgacgatggactaccaggggagaagcacaggggaggccttcgtgcagtttgcttcaaaggagatagcagaaaatgctctggggaaacacaaggaaagaatagggcacaggtggggatggagagtttgggatggtgttaaatttttatttttgggggttgtgggtcactattgcttaaatgggggggtagccataacatttttctggggtagtttaaaagaattgataattatctaaatttaacttggaaactacagatttgggtggggaattaatgctaatagttaaattaaaattagattgtttccatttctctgtaggatgttgttgataaatgcttttgtataatcacctatttcctttaaaacacctattatgtactaaaagagacaaagtaaaaatatactttatgaattgttttccgtgactaatttctttgtaaaacttaaatatttaattaagtttgtaggtttaaactgttaacttacggtgtatttaggcaatttaaattgggttatgtatctagatatagaaaaacttactgcattttgcccagtatctaatttacactaatacatttatgctgaaacctgtaccttaaaacatttttaaatagattttatgatccaccaagaagattgctgggacagcgaccgggaccatatgatagaccaataggaggaagagggggttattatggagctgggcgtggaagtatgtatgacagaatgcgacgaggaggtgatggatatgatggtgggtatgtgtatctaatgaacaaaggttctgttgtcattttcttaatgttcctgacactttgtcaagaaatacagaaatggcagtaatttcagtacctattaggttttaaaacctgttcatgaaaatacggattcccatggctagctgtgggacttgactgatgcacatattggcacctagaaaacttacacagaaattaaaaataagatgttggcatattttgacctttttttgcctaaggatgaaatttaatttacatgtctgaacttaattaactttctgagattttaaatttccatcacgttgactgcttttttcataggttttaagttgggaattgcaaacttgcaatcaagttacacagactgttaccacaaaatgtttttgtaaactaaattataaaatttatctctggaaagtgtgtagtcatgtgtttctccttaaattacacaggttatggaggttttgatgactatggtggctataataattacggctatgggaatgatggctttgatgacagaatgagagatggaagaggtatgggaggacatggctatggtggagctggtgatgcaagttcaggttttcatggtggtcatttcgtacatatgagagggttgccttttcgtgcaactgaaaatgacattgctaatttcttctcaccactaaatccaatacgagttcatattgatattggagctgatggcagagccacaggagaagcagatgtagagtttgtgacacatgaagatgcagtagctgccatgtctaaagataaaaataacatgcaacatcgatatattgaactcttcttgaattctactcctggaggcggctctggcatgggaggttctggaatgggaggctacggaagagatggaatggataatcagggaggctatggatcagttggaagaatgggaatggggaacaattacagtggaggatatggtactcctgatggtttgggtggttatggccgtggtggtggaggcagtggaggttactatgggcaaggcggcatgagtggaggtggatggcgtgggatgtactgaaagcaaaaacaccaacatacaagtcttgacaacagcatctggtctactagactttcttacagatttaatttcttttgtattttaagaactttataatgactgaaggaatgtgttttcaaaatattatttggtaaagcaacagattgtgatgggaaaatgttttctgtaggtttatttgttgcatactttgacttaaaaataaatttttatattcaaaccactgatgttgatactttttatatactagttactcctaaagatgtgctgccttcataagatttgggttgatgtattttactattagttctacaagaagtagtgtggtgtaattttagaggataatggttcacctctgcgtaaactgcaagtcttaagcagacatctggaatagagcttgacaaataattagtgtaacttttttctttagttcctcctggacaacactgtaaatataaagcctaaagatgaagtggcttcaggagtataaattcagctaattatttctatattattatttttcaaatgtcatttatcaggcatagctctgaaacattgatgatctaagaggtattgatttctgaatattcataattgtgttacctgggtatgagagtgttggaagctgaattctagccctagattttggagtaaaaccccttcagcacttgaccgaaataccaaaaatgtctccaaaaaattgatagttgcaggttatcgcaagatgtcttagagtagggttaaggttctcagtgacacaagaattcagtattaagtacataggtatttactatggagtataattctcacaattgtattttcagttttctgcccaatagagtttaaataactgtataaatgatgactttaaaaaaatgtaagcaacaagtccatgtcatagtcaataaaaacaatcctgcagttgggttttgtatctgatccctgcttggagttttagtttaaagaatctatatgtagcaaggaaaaggtgctttttaattttaatccctttgatcaatatggcttttttccaaattggctaatggatcaaaatgaaacctgttgatgtgaattcagttattgaacttgttacttgtttttgccagaaatgttattaataaatgtcaatgtgggagataa

SEQ ID NO: 348949 - DNA, 2200 bp, Homo sapiens
catttacattttgtaaaataaacaatgttaacccgcatctatgtgtatgtggcagggtttcctcaacctcggcattattgatatttggggctggacaattctttgctgtggagactgtcctgtggactgtagtttagcagcatctctagcttcagagaagggagaagtcgtttgcctcgtgtagcgctcgccacaacggttctcccaaccgtctccagcggtgacaaccgcttagggagctgcgcagcaccagagtcggcgtaactatcgcctgacaggcatttaaatcaaacggtattgagatggattgggttatgaaacataatggtccaaatgacgctagtgatgggacagtacgacttcgtggactaccatttggttgcagcaaagaggaaatagttcagttctttcaagggttggaaatcgtgccaaatgggataacattgacgatggactaccaggggagaagcacaggggaggccttcgtgcagtttgcttcaaaggagatagcagaaaatgctctggggaaacacaaggaaagaatagggcacaggtatattgagatcttcagaagtagcaggagtgaaatcaaaggattttatgatccaccaagaagattgctgggacagcgaccgggaccatatgatagaccaataggaggaagagggggttattatggagctgggcgtggaagtatgtatgacagaatgcgacgaggaggtgatggatatgatggtggttatggaggttttgatgactatggtggctataataattacggctatgggaatgatggctttgatgacagaatgagagatggaagaggtatgggaggacatggctatggtggagctggtgatgcaagttcaggttttcatggtggtcatttcgtacatatgagagggttgccttttcgtgcaactgaaaatgacattgctaatttcttctcaccactaaatccaatacgagttcatattgatattggagctgatggcagagccacaggagaagcagatgtagagtttgtgacacatgaagatgcagtagctgccatgtctaaagataaaaataacatgcaacatcgatatattgaactcttcttgaattctactcctggaggcggctctggcatgggaggttctggaatgggaggctacggaagagatggaatggataatcagggaggctatggatcagttggaagaatgggaatggggaacaattacagtggaggatatggtactcctgatggtttgggtggttatggccgtggtggtggaggcagtggaggttactatgggcaaggcggcatgagtggaggtggatggcgtgggatgtactgaaagcaaaaacaccaacatacaagtcttgacaacagcatctggtctactagactttcttacagatttaatttcttttgtattttaagaactttataatgactgaaggaatgtgttttcaaaatattatttggtaaagcaacagattgtgatgggaaaatgttttctgtaggtttatttgttgcatactttgacttaaaaataaatttttatattcaaaccactgatgttgatactttttatatactagttactcctaaagatgtgctgccttcataagatttgggttgatgtattttactattagttctacaagaagtagtgtggtgtaattttagaggataatggttcacctctgcgtaaactgcaagtcttaagcagacatctggaatagagcttgacaaataattagtgtaacttttttctttagttcctcctggacaacactgtaaatataaagcctaaagatgaagtggcttcaggagtataaattcagctaattatttctatattattatttttcaaatgtcatttatcaggcatagctctgaaacattgatgatctaagaggtattgatttctgaatattcataattgtgttacctgggtatgagagtgttggaagctgaattctagccctagattttggagtaaaaccccttcagcacttgaccgaaataccaaaaatgtctccaaaaaattgatagttgcaggttatcgcaagatgtcttagagtagggttaaggttctcagtgacacaagaattcagtattaagtacataggtatttactatggagtataattctcgcttttctcccggcacctgtgttgcccccgcgagcctgtgtatcacccggcg

SEQ ID NO: 348950 - DNA, 3863 bp, Homo sapiens
catttacattttgtaaaataaacaatgttaacccgcatctatgtgtatgtggcagggtttcctcaacctcggcattattgatatttggggctggacaattctttgctgtggagactgtcctgtggactgtagtttagcagcatctctagcttcagagaagggagaagtcgtttgcctcgtgtagcgctcgccacaacggttctcccaaccgtctccagcggtgacaaccgcttagggagctgcgcagcaccagagtcggcgtaactatcgcctgacaggcatttaaatcaaacggtattgagatggattgggttatgaaacataatggtccaaatgacgctagtgatgggacagtacgacttcgtggactaccatttggttgcagcaaagaggaaatagttcagttctttcaaggtacctctagtattagtcaaagtttagtagtattgtaattttatatttgtattgttttactgtttttaatttgtaaaacccatttgattttggaacttttaagtttaactatgatagtcttggttaatgtattaaaataatatgctccagttaatattcaatacagaatgtgtagaatatgtaaaacctaattaatgtgcagtaacatatttgagaattgtgatgaaatgaaccgtgaattagtatatggagcatatatttgattttgtagccttttttcatgtaatataggtgggcttttagagtgtgtaattacacagtgtttttacactggtcgcaaaaaatttatttaatccagtaatatttgaaaaaatctttcatttgtattatggggtgatgggaaactaagcttttttgttttgttttgttttgtttagacttgttttaaatatttgattcagatgggaatgtttcagcctttaacactgttccccttgatggggttatttgtccttgggttaaagggttggaaatcgtgccaaatgggataacattgacgatggactaccaggggagaagcacaggggaggccttcgtgcagtttgcttcaaaggagatagcagaaaatgctctggggaaacacaaggaaagaatagggcacaggtggggatggagagtttgggatggtgttaaatttttatttttgggggttgtgggtcactattgcttaaatgggggggtagccataacatttttctggggtagtttaaaagaattgataattatctaaatttaacttggaaactacagatttgggtggggaattaatgctaatagttaaattaaaattagattgtttccatttctctgtaggatgttgttgataaatgcttttgtataatcacctatttcctttaaaacacctattatgtactaaaagagacaaagtaaaaatatactttatgaattgttttccgtgactaatttctttgtaaaacttaaatatttaattaagtttgtaggtttaaactgttaacttacggtgtatttaggcaatttaaattgggttatgtatctagatatagaaaaacttactgcattttgcccagtatctaatttacactaatacatttatgctgaaacctgtaccttaaaacatttttaaatagtatattgagatcttcagaagtagcaggagtgaaatcaaaggattttatgatccaccaagaagattgctgggacagcgaccgggaccatatgatagaccaataggaggaagagggggttattatggagctgggcgtggaagtatgtatgacagaatgcgacgaggaggtgatggatatgatggtggttatggaggttttgatgactatggtggctataataattacggctatgggaatgatggctttgatgacagaatgagagatggaagaggtatgggaggacatggctatggtggagctggtgatgcaagttcaggttttcatggtggtcatttcgtacatatgagagggttgccttttcgtgcaactgaaaatgacattgctaatttcttctcaccactaaatccaatacgagttcatattgatattggagctgatggcagagccacaggagaagcagatgtagagtttgtgacacatgaagatgcagtagctgccatgtctaaagataaaaataacatgcgtaagtggtgtctttggcacacaatcttatttcctaaacgtgaatttataaaataagaggctctaagatctgtaggtaacgcttggcagttgttgggatttaaaaccatttgacctctataatggctttctgtgggctttatatatcgctgtactagtaattaataagcatactttgtttaatattacttaattgatcttttttacaaagcttgtattgatgaattttatccatcattcctttctcccctgttactctttctttttttcttaaagaacatcgatatattgaactcttcttgaattctactcctggaggcggctctggcatgggaggttctggaatgggaggctacggaagagatggaatggggtatgtaaagtttttaaaatatgcagggttagctgcttatcgatgagtctcaattttttttcttttttctttttaaagataatcagggaggctatggatcagttggaagaatgggaatggggaacaattacagtggaggatatggtactcctgatggtttgggtggttatggccgtggtggtggaggcagtggaggttactatgggcaaggcggcatgagtggaggtggatggcgtgggatgtactgaaagcaaaaacaccaacatacaagtcttgacaacagcatctggtctactagactttcttacagatttaatttcttttgtattttaagaactttataatgactgaaggaatgtgttttcaaaatattatttggtaaagcaacagattgtgatgggaaaatgttttctgtaggtttatttgttgcatactttgacttaaaaataaatttttatattcaaaccactgatgttgatactttttatatactagttactcctaaagatgtgctgccttcataagatttgggttgatgtattttactattagttctacaagaagtagtgtggtgtaattttagaggataatggttcacctctgcgtaaactgcaagtcttaagcagacatctggaatagagcttgacaaataattagtgtaacttttttctttagttcctcctggacaacactgtaaatataaagcctaaagatgaagtggcttcaggagtataaattcagctaattatttctatattattatttttcaaatgtcatttatcaggcatagctctgaaacattgatgatctaagaggtattgatttctgaatattcataattgtgttacctgggtatgagagtgttggaagctgaattctagccctagattttggagtaaaaccccttcagcacttgaccgaaataccaaaaatgtctccaaaaaattgatagttgcaggttatcgcaagatgtcttagagtagggttaaggttctcagtgacacaagaattcagtattaagtacataggtatttactatggagtataattctcacaattgtattttcagttttctgcccaatagagtttaaataactgtataaatgatgactttaaaaaaatgtaagcaacaagtccatgtcatagtcaataaaaacaatcctgcagttgggttttgtatctgatccctgcttggagttttagtttaaagaatctatatgtagcaaggaaaaggtgctttttaattttaatccctttgatcaatatggcttttttccaaattggctaatggatcaaaatgaaacctgttgatgtgaattcagttattgaacttgttacttgtttttgccagaaatgttattaataaatgtcaatgtgggagataa

SEQ ID NO: 348951 - DNA, 2446 bp, Homo sapiens
catttacattttgtaaaataaacaatgttaacccgcatctatgtgtatgtggcagggtttcctcaacctcggcattattgatatttggggctggacaattctttgctgtggagactgtcctgtggactgtagtttagcagcatctctagcttcagagaagggagaagtcgtttgcctcgtgtagcgctcgccacaacggttctcccaaccgtctccagcggtgacaaccgcttagggagctgcgcagcaccagagtcggcgtaactatcgcctgacaggcatttaaatcaaacggtattgagatggattgggttatgaaacataatggtccaaatgacgctagtgatgggacagtacgacttcgtggactaccatttggttgcagcaaagaggaaatagttcagttctttcaagggttggaaatcgtgccaaatgggataacattgacgatggactaccaggggagaagcacaggggaggccttcgtgcagtttgcttcaaaggagatagcagaaaatgctctggggaaacacaaggaaagaatagggcacaggtatattgagatcttcagaagtagcaggagtgaaatcaaaggattttatgatccaccaagaagattgctgggacagcgaccgggaccatatgatagaccaataggaggaagagggggttattatggagctgggcgtggaagtatgtatgacagaatgcgacgaggaggtgatggatatgatggtggttatggaggttttgatgactatggtggctataataattacggctatgggaatgatggctttgatgacagaatgagagatggaagaggtatgggaggacatggctatggtggagctggtgatgcaagttcaggttttcatggtggtcatttcgtacatatgagagggttgccttttcgtgcaactgaaaatgacattgctaatttgatattggagctgatggcagagccacaggagaagcagatgtagagtttgtgacacatgaagatgcagtagctgccatgtctaaagataaaaataacatgcaacatcgatatattgaactcttcttgaattctactcctggaggcggctctggcatgggaggttctggaatgggaggctacggaagagatggaatggataatcagggaggctatggatcagttggaagaatgggaatggggaacaattacagtggaggatatggtactcctgatggtttgggtggttatggccgtggtggtggaggcagtggaggttactatgggcaaggcggcatgagtggaggtggatggcgtgggatgtactgaaagcaaaaacaccaacatacaagtcttgacaacagcatctggtctactagactttcttacagatttaatttcttttgtattttaagaactttataatgactgaaggaatgtgttttcaaaatattatttggtaaagcaacagattgtgatgggaaaatgttttctgtaggtttatttgttgcatactttgacttaaaaataaatttttatattcaaaccactgatgttgatactttttatatactagttactcctaaagatgtgctgccttcataagatttgggttgatgtattttactattagttctacaagaagtagtgtggtgtaattttagaggataatggttcacctctgcgtaaactgcaagtcttaagcagacatctggaatagagcttgacaaataattagtgtaacttttttctttagttcctcctggacaacactgtaaatataaagcctaaagatgaagtggcttcaggagtataaattcagctaattatttctatattattatttttcaaatgtcatttatcaggcatagctctgaaacattgatgatctaagaggtattgatttctgaatattcataattgtgttacctgggtatgagagtgttggaagctgaattctagccctagattttggagtaaaaccccttcagcacttgaccgaaataccaaaaatgtctccaaaaaattgatagttgcaggttatcgcaagatgtcttagagtagggttaaggttctcagtgacacaagaattcagtattaagtacataggtatttactatggagtataattctcacaattgtattttcagttttctgcccaatagagtttaaataactgtataaatgatgactttaaaaaaatgtaagcaacaagtccatgtcatagtcaataaaaacaatcctgcagttgggttttgtatctgatccctgcttggagttttagtttaaagaatctatatgtagcaaggaaaaggtgctttttaattttaatccctttgatcaatatggcttttttccaaattggctaatggatcaaaatgaaacctgttgatgtgaattcagttattgaacttgttacttgtttttgccagaaatgttattaataaatgtcaatgtgggagataa

SEQ ID NO: 348952 - DNA, 3287 bp, Homo sapiens
catttacattttgtaaaataaacaatgttaacccgcatctatgtgtatgtggcagggtttcctcaacctcggcattattgatatttggggctggacaattctttgctgtggagactgtcctgtggactgtagtttagcagcatctctagcttcagagaagggagaagtcgtttgcctcgtgtagcgctcgccacaacggttctcccaaccgtctccagcggtgacaaccgcttagggagctgcgcagcaccagagtcggcgtaactatcgcctgacaggcatttaaatcaaacggtattgagatggattgggttatgaaacataatggtccaaatgacgctagtgatgggacagtacgacttcgtggactaccatttggttgcagcaaagaggaaatagttcagttctttcaagggttggaaatcgtgccaaatgggataacattgacgatggactaccaggggagaagcacaggggaggccttcgtgcagtttgcttcaaaggagatagcagaaaatgctctggggaaacacaaggaaagaatagggcacaggtatattgagatcttcagaagtagcaggagtgaaatcaaaggattttatgatccaccaagaagattgctgggacagcgaccgggaccatatgatagaccaataggaggaagagggggttattatggagctgggcgtggaagtatgtatgacagaatgcgacgaggaggtgatggatatgatggtgggtatgtgtatctaatgaacaaaggttctgttgtcattttcttaatgttcctgacactttgtcaagaaatacagaaatggcagtaatttcagtacctattaggttttaaaacctgttcatgaaaatacggattcccatggctagctgtgggacttgactgatgcacatattggcacctagaaaacttacacagaaattaaaaataagatgttggcatattttgacctttttttgcctaaggatgaaatttaatttacatgtctgaacttaattaactttctgagattttaaatttccatcacgttgactgcttttttcataggttttaagttgggaattgcaaacttgcaatcaagttacacagactgttaccacaaaatgtttttgtaaactaaattataaaatttatctctggaaagtgtgtagtcatgtgtttctccttaaattacacaggttatggaggttttgatgactatggtggctataataattacggctatgggaatgatggctttgatgacagaatgagagatggaagaggtatgggaggacatggctatggtggagctggtgatgcaagttcaggttttcatggtggtcatttcgtacatatgagagggttgccttttcgtgcaactgaaaatgacattgctaatttcttctcaccactaaatccaatacgagttcatattgatattggagctgatggcagagccacaggagaagcagatgtagagtttgtgacacatgaagatgcagtagctgccatgtctaaagataaaaataacatgcgtaagtggtgtctttggcacacaatcttatttcctaaacgtgaatttataaaataagaggctctaagatctgtaggtaacgcttggcagttgttgggatttaaaaccatttgacctctataatggctttctgtgggctttatatatcgctgtactagtaattaataagcatactttgtttaatattacttaattgatcttttttacaaagcttgtattgatgaattttatccatcattcctttctcccctgttactctttctttttttcttaaagaacatcgatatattgaactcttcttgaattctactcctggaggcggctctggcatgggaggttctggaatgggaggctacggaagagatggaatggggtatgtaaagtttttaaaatatgcagggttagctgcttatcgatgagtctcaattttttttcttttttctttttaaagataatcagggaggctatggatcagttggaagaatgggaatggggaacaattacagtggaggatatggtactcctgatggtttgggtggttatggccgtggtggtggaggcagtggaggttactatgggcaaggcggcatgagtggaggtggatggcgtgggatgtactgaaagcaaaaacaccaacatacaagtcttgacaacagcatctggtctactagactttcttacagatttaatttcttttgtattttaagaactttataatgactgaaggaatgtgttttcaaaatattatttggtaaagcaacagattgtgatgggaaaatgttttctgtaggtttatttgttgcatactttgacttaaaaataaatttttatattcaaaccactgatgttgatactttttatatactagttactcctaaagatgtgctgccttcataagatttgggttgatgtattttactattagttctacaagaagtagtgtggtgtaattttagaggataatggttcacctctgcgtaaactgcaagtcttaagcagacatctggaatagagcttgacaaataattagtgtaacttttttctttagttcctcctggacaacactgtaaatataaagcctaaagatgaagtggcttcaggagtataaattcagctaattatttctatattattatttttcaaatgtcatttatcaggcatagctctgaaacattgatgatctaagaggtattgatttctgaatattcataattgtgttacctgggtatgagagtgttggaagctgaattctagccctagattttggagtaaaaccccttcagcacttgaccgaaataccaaaaatgtctccaaaaaattgatagttgcaggttatcgcaagatgtcttagagtagggttaaggttctcagtgacacaagaattcagtattaagtacataggtatttactatggagtataattctcacaattgtattttcagttttctgcccaatagagtttaaataactgtataaatgatgactttaaaaaaatgtaagcaacaagtccatgtcatagtcaataaaaacaatcctgcagttgggttttgtatctgatccctgcttggagttttagtttaaagaatctatatgtagcaaggaaaaggtgctttttaattttaatccctttgatcaatatggcttttttccaaattggctaatggatcaaaatgaaacctgttgatgtgaattcagttattgaacttgttacttgtttttgccagaaatgttattaataaatgtcaatgtgggagataa

SEQ ID NO: 348953 - DNA, 2384 bp, Homo sapiens
catttacattttgtaaaataaacaatgttaacccgcatctatgtgtatgtggcagggtttcctcaacctcggcattattgatatttggggctggacaattctttgctgtggagactgtcctgtggactgtagtttagcagcatctctagcttcagagaagggagaagtcgtttgcctcgtgtagcgctcgccacaacggttctcccaaccgtctccagcggtgacaaccgcttagggagctgcgcagcaccagagtcggcgtaactatcgcctgacaggcatttaaatcaaacggtattgagatggattgggttatgaaacataatggtccaaatgacgctagtgatgggacagtacgacttcgtggactaccatttggttgcagcaaagaggaaatagttcagttctttcaagggttggaaatcgtgccaaatgggataacattgacgatggactaccaggggagaagcacaggggaggccttcgtgcagtttgcttcaaaggagatagcagaaaatgctctggggaaacacaaggaaagaatagggcacaggtatattgagatcttcagaagtagcaggagtgaaatcaaaggattttatgatccaccaagaagattgctgggacagcgaccgggaccatatgatagaccaataggaggaagagggggttattatggagctgggcgtggaagtatgtatgacagaatgcgacgaggaggtgatggatatgatggtggttatggaggttttgatgactatggtggctataataattacggctatgggaatgatggctttgatgacagaatgagagatggaagaggtatgggaggacatggctatggtggagctggtgatgcaagttcaggttttcatggtggtcatttcgtacatatgagagggttgccttttcgtgcaactgaaaatgacattgctaatttcttctcaccactaaatccaatacgagttcatattgatattggagctgatggcagagccacaggagaagcagatgtagagtttgtgacacatgaagatgcagtagctgccatgtctaaagataaaaataacatgcataatcagggaggctatggatcagttggaagaatgggaatggggaacaattacagtggaggatatggtactcctgatggtttgggtggttatggccgtggtggtggaggcagtggaggttactatgggcaaggcggcatgagtggaggtggatggcgtgggatgtactgaaagcaaaaacaccaacatacaagtcttgacaacagcatctggtctactagactttcttacagatttaatttcttttgtattttaagaactttataatgactgaaggaatgtgttttcaaaatattatttggtaaagcaacagattgtgatgggaaaatgttttctgtaggtttatttgttgcatactttgacttaaaaataaatttttatattcaaaccactgatgttgatactttttatatactagttactcctaaagatgtgctgccttcataagatttgggttgatgtattttactattagttctacaagaagtagtgtggtgtaattttagaggataatggttcacctctgcgtaaactgcaagtcttaagcagacatctggaatagagcttgacaaataattagtgtaacttttttctttagttcctcctggacaacactgtaaatataaagcctaaagatgaagtggcttcaggagtataaattcagctaattatttctatattattatttttcaaatgtcatttatcaggcatagctctgaaacattgatgatctaagaggtattgatttctgaatattcataattgtgttacctgggtatgagagtgttggaagctgaattctagccctagattttggagtaaaaccccttcagcacttgaccgaaataccaaaaatgtctccaaaaaattgatagttgcaggttatcgcaagatgtcttagagtagggttaaggttctcagtgacacaagaattcagtattaagtacataggtatttactatggagtataattctcacaattgtattttcagttttctgcccaatagagtttaaataactgtataaatgatgactttaaaaaaatgtaagcaacaagtccatgtcatagtcaataaaaacaatcctgcagttgggttttgtatctgatccctgcttggagttttagtttaaagaatctatatgtagcaaggaaaaggtgctttttaattttaatccctttgatcaatatggcttttttccaaattggctaatggatcaaaatgaaacctgttgatgtgaattcagttattgaacttgttacttgtttttgccagaaatgttattaataaatgtcaatgtgggagataa

SEQ ID NO: 348954 - DNA, 2606 bp, Homo sapiens
catttacattttgtaaaataaacaatgttaacccgcatctatgtgtatgtggcagggtttcctcaacctcggcattattgatatttggggctggacaattctttgctgtggagactgtcctgtggactgtagtttagcagcatctctagcttcagagaagggagaagtcgtttgcctcgtgtagcgctcgccacaacggttctcccaaccgtctccagcggtgacaaccgcttagggagctgcgcagcaccagagtcggcgtaactatcgcctgacaggcatttaaatcaaacggtattgagatggattgggttatgaaacataatggtccaaatgacgctagtgatgggacagtacgacttcgtggactaccatttggttgcagcaaagaggaaatagttcagttctttcaagggttggaaatcgtgccaaatgggataacattgacgatggactaccaggggagaagcacaggggaggccttcgtgcagtttgcttcaaaggagatagcagaaaatgctctggggaaacacaaggaaagaatagggcacaggtatattgagatcttcagaagtagcaggagtgaaatcaaaggattttatgatccaccaagaagattgctgggacagcgaccgggaccatatgatagaccaataggaggaagagggggttattatggagctgggcgtggaagtatgtatgacagaatgcgacgaggaggtgatggatatgatggtggttatggaggttttgatgactatggtggctataataattacggctatgggaatgatggctttgatgacagaatgagagatggaagaggtatgggaggacatggctatggtggagctggtgatgcaagttcaggttttcatggtggtcatttcgtacatatgagagggttgccttttcgtgcaactgaaaatgacattgctaatttcttctcaccactaaatccaatacgagttcatattgatattggagctgatggcagagccacaggagaagcagatgtagagtttgtgacacatgaagatgcagtagctgccatgtctaaagataaaaataacatgcaacatcgatatattgaactcttcttgaattctactcctggaggcggctctggcatgggaggttctggaatgggaggctacggaagagatggaatggataatcagggaggctatggatcagttggaagaatgggaatggggaacaattacagtggaggatatggtactcctgatggtttgggtggttatgggtaagtatctctagttcagtttgtgttagtccgcatatgtagtgcaaactttaaagtgcaggtattacttttattattttatgcagatatctcctgctgagtgattcttaatatctttttcttaagccgtggtggtggaggcagtggaggttactatgggcaaggcggcatgagtggaggtggatggcgtgggatgtactgaaagcaaaaacaccaacatacaagtcttgacaacagcatctggtctactagactttcttacagatttaatttcttttgtattttaagaactttataatgactgaaggaatgtgttttcaaaatattatttggtaaagcaacagattgtgatgggaaaatgttttctgtaggtttatttgttgcatactttgacttaaaaataaatttttatattcaaaccactgatgttgatactttttatatactagttactcctaaagatgtgctgccttcataagatttgggttgatgtattttactattagttctacaagaagtagtgtggtgtaattttagaggataatggttcacctctgcgtaaactgcaagtcttaagcagacatctggaatagagcttgacaaataattagtgtaacttttttctttagttcctcctggacaacactgtaaatataaagcctaaagatgaagtggcttcaggagtataaattcagctaattatttctatattattatttttcaaatgtcatttatcaggcatagctctgaaacattgatgatctaagaggtattgatttctgaatattcataattgtgttacctgggtatgagagtgttggaagctgaattctagccctagattttggagtaaaaccccttcagcacttgaccgaaataccaaaaatgtctccaaaaaattgatagttgcaggttatcgcaagatgtcttagagtagggttaaggttctcagtgacacaagaattcagtattaagtacataggtatttactatggagtataattctcacaattgtattttcagttttctgcccaatagagtttaaataactgtataaatgatgactttaaaaaaatgtaagcaacaagtccatgtcatagtcaataaaaacaatcctgcagttgggttttgtatctgatccctgcttggagttttagtttaaagaatctatatgtagcaaggaaaaggtgctttttaattttaatccctttgatcaatatggcttttttccaaattggctaatggatcaaaatgaaacctgttgatgtgaattcagttattgaacttgttacttgtttttgccagaaatgttattaataaatgtcaatgtgggagataa

SEQ ID NO: 348955 - DNA, 1634 bp, Homo sapiens
catttacattttgtaaaataaacaatgttaacccgcatctatgtgtatgtggcagggtttcctcaacctcggcattattgatatttggggctggacaattctttgctgtggagactgtcctgtggactgtagtttagcagcatctctagcttcagagaagggagaagtcgtttgcctcgtgtagcgctcgccacaacggttctcccaaccgtctccagcggtgacaaccgcttagggagctgcgcagcaccagagtcggcgtaactatcgcctgacaggcatttaaatcaaacggtattgagatggattgggttatgaaacataatggtccaaatgacgctagtgatgggacagtacgacttcgtggactaccatttggttgcagcaaagaggaaatagttcagttctttcaagggttggaaatcgtgccaaatgggataacattgacgatggactaccaggggagaagcacaggggaggccttcgtgcagtttgcttcaaaggagatagcagaaaatgctctggggaaacacaaggaaagaatagggcacaggtatattgagatcttcagaagtagcaggagtgaaatcaaaggattttatgatccaccaagaagattgctgggacagcgaccgggaccatatgatagaccaataggaggaagagggggttattatggagctgggcgtggaagtatgtatgacagaatgcgacgaggaggtgatggatatgatggtggttatggaggttttgatgactatggtggctataataattacggctatgggaatgatggctttgatgacagaatgagagatggaagaggtatgggaggacatggctatggtggagctggtgatgcaagttcaggttttcatggtggtcatttcgtacatatgagagggttgccttttcgtgcaactgaaaatgacattgctaatttcttctcaccactaaatccaatacgagttcatattgatattggagctgatggcagagccacaggagaagcagatgtagagtttgtgacacatgaagatgcagtagctgccatgtctaaagataaaaataacatgcaacatcgatatattgaactcttcttgaattctactcctggaggcggctctggcatgggaggttctggaatgggaggctacggaagagatggaatggataatcagggaggctatggatcagttggaagaatgggaatggggaacaattacagtggaggatatggtactcctgatggtttgggtggttatggccgtggtggtggaggcagtggaggttactatgggcaaggcggcatgagtggaggtggatggcgtgggatgtactgaaagcaaaaacaccaacatacaagtcttgacaacagcatctggtctactagactttcttacagatttaatttcttttgtattttaagaactttataatgactgaaggaatgtgttttcaaaatattatttggtaaagcaacagattgtgatgggaaaatgttttctgtaggtttatttgttgcatactttgacttaaaaataaatttttatattcaaaccactgatcgcagatactgcgatatcatactcgccctctacgaacgcgcacacatccaacttgcttacttcata

SEQ ID NO: 348956 - DNA, 2731 bp, Homo sapiens
catttacattttgtaaaataaacaatgttaacccgcatctatgtgtatgtggcagggtttcctcaacctcggcattattgatatttggggctggacaattctttgctgtggagactgtcctgtggactgtagtttagcagcatctctagcttcagagaagggagaagtcgtttgcctcgtgtagcgctcgccacaacggttctcccaaccgtctccagcggtgacaaccgcttagggagctgcgcagcaccagagtcggcgtaactatcgcctgacaggcatttaaatcaaacggtattgagatggattgggttatgaaacataatggtccaaatgacgctagtgatgggacagtacgacttcgtggactaccatttggttgcagcaaagaggaaatagttcagttctttcaagggttggaaatcgtgccaaatgggataacattgacgatggactaccaggggagaagcacaggggaggccttcgtgcagtttgcttcaaaggagatagcagaaaatgctctggggaaacacaaggaaagaatagggcacaggtatattgagatcttcagaagtagcaggagtgaaatcaaaggattttatgatccaccaagaagattgctgggacagcgaccgggaccatatgatagaccaataggaggaagagggggttattatggagctgggcgtggaagtatgtatgacagaatgcgacgaggaggtgatggatatgatggtggttatggaggttttgatgactatggtggctataataattacggctatgggaatgatggctttgatgacagaatgagagatggaagaggtatgggaggacatggctatggtggagctggtgatgcaagttcaggttttcatggtggtcatttcgtacatatgagagggttgccttttcgtgcaactgaaaatgacattgctaatttcttctcaccactaaatccaatacgagttcatattgatattggagctgatggcagagccacaggagaagcagatgtagagtttgtgacacatgaagatgcagtagctgccatgtctaaagataaaaataacatgcgtaagtggtgtctttggcacacaatcttatttcctaaacgtgaatttataaaataagaggctctaagatctgtaggtaacgcttggcagttgttgggatttaaaaccatttgacctctataatggctttctgtgggctttatatatcgctgtactagtaattaataagcatactttgtttaatattacttaattgatcttttttacaaagcttgtattgatgaattttatccatcattcctttctcccctgttactctttctttttttcttaaagaacatcgatatattgaactcttcttgaattctactcctggaggcggctctggcatgggaggttctggaatgggaggctacggaagagatggaatggataatcagggaggctatggatcagttggaagaatgggaatggggaacaattacagtggaggatatggtactcctgatggtttgggtggttatggttactatgggcaaggcggcatgagtggaggtggatggcgtgggatgtactgaaagcaaaaacaccaacatacaagtcttgacaacagcatctggtctactagactttcttacagatttaatttcttttgtattttaagaactttataatgactgaaggaatgtgttttcaaaatattatttggtaaagcaacagattgtgatgggaaaatgttttctgtaggtttatttgttgcatactttgacttaaaaataaatttttatattcaaaccactgatgttgatactttttatatactagttactcctaaagatgtgctgccttcataagatttgggttgatgtattttactattagttctacaagaagtagtgtggtgtaattttagaggataatggttcacctctgcgtaaactgcaagtcttaagcagacatctggaatagagcttgacaaataattagtgtaacttttttctttagttcctcctggacaacactgtaaatataaagcctaaagatgaagtggcttcaggagtataaattcagctaattatttctatattattatttttcaaatgtcatttatcaggcatagctctgaaacattgatgatctaagaggtattgatttctgaatattcataattgtgttacctgggtatgagagtgttggaagctgaattctagccctagattttggagtaaaaccccttcagcacttgaccgaaataccaaaaatgtctccaaaaaattgatagttgcaggttatcgcaagatgtcttagagtagggttaaggttctcagtgacacaagaattcagtattaagtacataggtatttactatggagtataattctcacaattgtattttcagttttctgcccaatagagtttaaataactgtataaatgatgactttaaaaaaatgtaagcaacaagtccatgtcatagtcaataaaaacaatcctgcagttgggttttgtatctgatccctgcttggagttttagtttaaagaatctatatgtagcaaggaaaaggtgctttttaattttaatccctttgatcaatatggcttttttccaaattggctaatggatcaaaatgaaacctgttgatgtgaattcagttattgaacttgttacttgtttttgccagaaatgttattaataaatgtcaatgtgggagataa

SEQ ID NO: 348957 - DNA, 1309 bp, Homo sapiens
  misc_feature (1270)..(1270): n is a, c, g, or t
  misc_feature (1273)..(1273): n is a, c, g, or t
  misc_feature (1276)..(1276): n is a, c, g, or t
catttacattttgtaaaataaacaatgttaacccgcatctatgtgtatgtggcagggtttcctcaacctcggcattattgatatttggggctggacaattctttgctgtggagactgtcctgtggactgtagtttagcagcatctctagcttcagagaagggagaagtcgtttgcctcgtgtagcgctcgccacaacggttctcccaaccgtctccagcggtgacaaccgcttagggagctgcgcagcaccagagtcggcgtaactatcgcctgacaggcatttaaatcaaacggtattgagatggattgggttatgaaacataatggtccaaatgacgctagtgatgggacagtacgacttcgtggactaccatttggttgcagcaaagaggaaatagttcagttctttcaagggttggaaatcgtgccaaatgggataacattgacgatggactaccaggggagaagcacaggggaggccttcgtgcagtttgcttcaaaggagatagcagaaaatgctctggggaaacacaaggaaagaatagggcacaggtatattgagatcttcagaagtagcaggagtgaaatcaaaggattttatgatccaccaagaagattgctgggacagcgaccgggaccatatgatagaccaataggaggaagagggggttattatggagctgggcgtggaagtatgtatgacagaatgcgacgaggaggtgatggatatgatggtggttatggaggttttgatgactatggtggctataataattacggctatgggaatgatggctttgatgacagaatgagagatggaagaggtatgggaggacatggctatggtggagctggtgatgcaagttcaggttttcatggtggtcatttcgtacatatgagagggttgccttttcgtgcaactgaaaatgacattgctaatttcttctcaccactaaatccaatacgagttcatattgatattggagctgatggcagagccacaggagaagcagatgtagagtttgtgacacatgaagatgcagtagctgccatgtctaaagataaaaataacatgcaacatcgatatattgaactcttcttgaattctactcctggaggcggctctggcatgggaggttctggaatgggaggctacggaagagatggaatggataatcagggaggctatggatcagttggaagaatgggaatggggaacaattacagtggaggatatggtactcctgatggtttgggtggttatgactnagntgntgactcaggtggtgtggggtaccgagctaagtg

SEQ ID NO: 348958 - DNA, 1233 bp, Homo sapiens
  misc_feature (1224)..(1225): n is a, c, g, or t
catttacattttgtaaaataaacaatgttaacccgcatctatgtgtatgtggcagggtttcctcaacctcggcattattgatatttggggctggacaattctttgctgtggagactgtcctgtggactgtagtttagcagcatctctagcttcagagaagggagaagtcgtttgcctcgtgtagcgctcgccacaacggttctcccaaccgtctccagcggtgacaaccgcttagggagctgcgcagcaccagagtcggcgtaactatcgcctgacaggcatttaaatcaaacggtattgagatggattgggttatgaaacataatggtccaaatgacgctagtgatgggacagtacgacttcgtggactaccatttggttgcagcaaagaggaaatagttcagttctttcaagggttggaaatcgtgccaaatgggataacattgacgatggactaccaggggagaagcacaggggaggccttcgtgcagtttgcttcaaaggagatagcagaaaatgctctggggaaacacaaggaaagaatagggcacaggtatattgagatcttcagaagtagcaggagtgaaatcaaaggattttatgatccaccaagaagattgctgggacagcgaccgggaccatatgatagaccaataggaggaagagggggttattatggagctgggcgtggaagtatgtatgacagaatgcgacgaggaggtgatggatatgatggtggttatggaggttttgatgactatggtggctataataattacggctatgggaatgatggctttgatgacagaatgagagatggaagaggtatgggaggacatggctatggtggagctggtgatgcaagttcaggttttcatggtggtcatttcgtacatatgagagggttgccttttcgtgcaactgaaaatgacattgctaatttcttctcaccactaaatccaatacgagttcatattgatattggagctgatggcagagccacaggagaagcagatgtagagtttgtgacacatgaagatgcagtagctgccatgtctaaagataaaaataacatgcaacatcgatatattgaactcttcttgaattctactcctggaggcggctctggcatgggaggttctggaatgggaggctacggaagagatggaatggataatcagggaggctatgatcagttgacgaagggggatgacacggatcctnngagtcacc

SEQ ID NO: 348959 - DNA, 1184 bp, Homo sapiens
  misc_feature (1175)..(1176): n is a, c, g, or t
catttacattttgtaaaataaacaatgttaacccgcatctatgtgtatgtggcagggtttcctcaacctcggcattattgatatttggggctggacaattctttgctgtggagactgtcctgtggactgtagtttagcagcatctctagcttcagagaagggagaagtcgtttgcctcgtgtagcgctcgccacaacggttctcccaaccgtctccagcggtgacaaccgcttagggagctgcgcagcaccagagtcggcgtaactatcgcctgacaggcatttaaatcaaacggtattgagatggattgggttatgaaacataatggtccaaatgacgctagtgatgggacagtacgacttcgtggactaccatttggttgcagcaaagaggaaatagttcagttctttcaagggttggaaatcgtgccaaatgggataacattgacgatggactaccaggggagaagcacaggggaggccttcgtgcagtttgcttcaaaggagatagcagaaaatgctctggggaaacacaaggaaagaatagggcacaggtatattgagatcttcagaagtagcaggagtgaaatcaaaggattttatgatccaccaagaagattgctgggacagcgaccgggaccatatgatagaccaataggaggaagagggggttattatggagctgggcgtgttatggaggttttgatgactatggtggctataataattacggctatgggaatgatggctttgatgacagaatgagagatggaagaggtatgggaggacatggctatggtggagctggtgatgcaagttcaggttttcatggtggtcatttcgtacatatgagagggttgccttttcgtgcaactgaaaatgacattgctaatttcttctcaccactaaatccaatacgagttcatattgatattggagctgatggcagagccacaggagaagcagatgtagagtttgtgacacatgaagatgcagtagctgccatgtctaaagataaaaataacatgcaacatcgatatattgaactcttcttgaattctactcctggaggcggctctggcatgggaggttctggaatgggaggctacggaagagatggaatggataatcagggaggctatgatcagttgacgaagggggatgacacggatcctnngagtcacc

SEQ ID NO: 348960 - DNA, 3004 bp, Homo sapiens
catttacattttgtaaaataaacaatgttaacccgcatctatgtgtatgtggcagggtttcctcaacctcggcattattgatatttggggctggacaattctttgctgtggagactgtcctgtggactgtagtttagcagcatctctagcttcagagaagggagaagtcgtttgcctcgtgtagcgctcgccacaacggttctcccaaccgtctccagcggtgacaaccgcttagggagctgcgcagcaccagagtcggcgtaactatcgcctgacaggcatttaaatcaaacggtattgagatggattgggttatgaaacataatggtccaaatgacgctagtgatgggacagtacgacttcgtggactaccatttggttgcagcaaagaggaaatagttcagttctttcaaggtacctctagtattagtcaaagtttagtagtattgtaattttatatttgtattgttttactgtttttaatttgtaaaacccatttgattttggaacttttaagtttaactatgatagtcttggttaatgtattaaaataatatgctccagttaatattcaatacagaatgtgtagaatatgtaaaacctaattaatgtgcagtaacatatttgagaattgtgatgaaatgaaccgtgaattagtatatggagcatatatttgattttgtagccttttttcatgtaatataggtgggcttttagagtgtgtaattacacagtgtttttacactggtcgcaaaaaatttatttaatccagtaatatttgaaaaaatctttcatttgtattatggggtgatgggaaactaagcttttttgttttgttttgttttgtttagacttgttttaaatatttgattcagatgggaatgtttcagcctttaacactgttccccttgatggggttatttgtccttgggttaaagggttggaaatcgtgccaaatgggataacattgacgatggactaccaggggagaagcacaggggaggccttcgtgcagtttgcttcaaaggagatagcagaaaatgctctggggaaacacaaggaaagaatagggcacaggtatattgagatcttcagaagtagcaggagtgaaatcaaaggattttatgatccaccaagaagattgctgggacagcgaccgggaccatatgatagaccaataggaggaagagggggttattatggagctgggcgtggaagtatgtatgacagaatgcgacgaggaggtgatggatatgatggtggttatggaggttttgatgactatggtggctataataattacggctatgggaatgatggctttgatgacagaatgagagatggaagaggtatgggaggacatggctatggtggagctggtgatgcaagttcaggttttcatggtggtcatttcgtacatatgagagggttgccttttcgtgcaactgaaaatgacattgctaatttcttctcaccactaaatccaatacgagttcatattgatattggagctgatggcagagccacaggagaagcagatgtagagtttgtgacacatgaagatgcagtagctgccatgtctaaagataaaaataacatgcaacatcgatatattgaactcttcttgaattctactcctggaggcggctctggcatgggaggttctggaatgggaggctacggaagagatggaatggataatcagggaggctatggatcagttggaagaatgggaatggggaacaattacagtggaggatatggtactcctgatggtttgggtggttatggccgtggtggtggaggcagtggaggttactatgggcaaggcggcatgagtggaggtggatggcgtgggatgtactgaaagcaaaaacaccaacatacaagtcttgacaacagcatctggtctactagactttcttacagatttaatttcttttgtattttaagaactttataatgactgaaggaatgtgttttcaaaatattatttggtaaagcaacagattgtgatgggaaaatgttttctgtaggtttatttgttgcatactttgacttaaaaataaatttttatattcaaaccactgatgttgatactttttatatactagttactcctaaagatgtgctgccttcataagatttgggttgatgtattttactattagttctacaagaagtagtgtggtgtaattttagaggataatggttcacctctgcgtaaactgcaagtcttaagcagacatctggaatagagcttgacaaataattagtgtaacttttttctttagttcctcctggacaacactgtaaatataaagcctaaagatgaagtggcttcaggagtataaattcagctaattatttctatattattatttttcaaatgtcatttatcaggcatagctctgaaacattgatgatctaagaggtattgatttctgaatattcataattgtgttacctgggtatgagagtgttggaagctgaattctagccctagattttggagtaaaaccccttcagcacttgaccgaaataccaaaaatgtctccaaaaaattgatagttgcaggttatcgcaagatgtcttagagtagggttaaggttctcagtgacacaagaattcagtattaagtacataggtatttactatggagtataattctcacaattgtattttcagttttctgcccaatagagtttaaataactgtataaatgatgactttaaaaaaatgtaagcaacaagtccatgtcatagtcaataaaaacaatcctgcagttgggttttgtatctgatccctgcttggagttttagtttaaagaatctatatgtagcaaggaaaaggtgctttttaattttaatccctttgatcaatatggcttttttccaaattggctaatggatcaaaatgaaacctgttgatgtgaattcagttattgaacttgttacttgtttttgccagaaatgttattaataaatgtcaatgtgggagataa

SEQ ID NO: 348961 - DNA, 2547 bp, Homo sapiens
catttacattttgtaaaataaacaatgttaacccgcatctatgtgtatgtggcagggtttcctcaacctcggcattattgatatttggggctggacaattctttgctgtggagactgtcctgtggactgtagtttagcagcatctctagcttcagagaagggagaagtcgtttgcctcgtgtagcgctcgccacaacggttctcccaaccgtctccagcggtgacaaccgcttagggagctgcgcagcaccagagtcggcgtaactatcgcctgacaggcatttaaatcaaacggtattgagatggattgggttatgaaacataatggtccaaatgacgctagtgatgggacagtacgacttcgtggactaccatttggttgcagcaaagaggaaatagttcagttctttcaagggttggaaatcgtgccaaatgggataacattgacgatggactaccaggggagaagcacaggggaggccttcgtgcagtttgcttcaaaggagatagcagaaaatgctctggggaaacacaaggaaagaatagggcacaggtatattgagatcttcagaagtagcaggagtgaaatcaaaggattttatgatccaccaagaagattgctgggacagcgaccgggaccatatgatagaccaataggaggaagagggggttattatggagctgggcgtggaagtatgtatgacagaatgcgacgaggaggtgatggatatgatggtggttatggaggttttgatgactatggtggctataataattacggctatgggaatgatggctttgatgacagaatgagagatggaagaggtatgggaggacatggctatggtggagctggtgatgcaagttcaggttttcatggtggtcatttcgtacatatgagagggttgccttttcgtgcaactgaaaatgacattgctaatttcttctcaccactaaatccaatacgagttcatattgatattggagctgatggcagagccacaggagaagcagatgtagagtttgtgacacatgaagatgcagtagctgccatgtctaaagataaaaataacatgcaacatcgatatattgaactcttcttgaattctactcctggaggcggctctggcatgggaggttctggaatgggaggctacggaagagatggaatggataatcagggaggctatggatcagttggaagaatgggaatggggaacaattacagtggaggatatggtactcctgatggtttgggtggttatggccgtggtggtggaggcagtggaggttactatgggcaaggcggcatgagtggaggtggatggcgtgggatgtactgaaagcaaaaacaccaacatacaagtcttgacaacagcatctggtctactagactttcttacagatttaatttcttttgtattttaagaactttataatgactgaaggaatgtgttttcaaaatattatttggtaaagcaacagattgtgatgggaaaatgttttctgtaggtttatttgttgcatactttgacttaaaaataaatttttatattcaaaccactgatgttgatactttttatatactagttactcctaaagatgtgctgccttcataagatttgggttgatgtattttactattagttctacaagaagtagtgtggtgtaattttagaggataatggttcacctctgcgtaaactgcaagtcttaagcagacatctggaatagagcttgacaaataattagtgtaacttttttctttagttcctcctggacaacactgtaaatataaagcctaaagatgaagtggcttcaggagtataaattcagctaattatttctatattattatttttcaaatgtcatttatcaggcatagctctgaaacattgatgatctaagaggtattgatttctgaatattcataattgtgttacctgggtatgagagtgttggaagctgaattctagccctagattttggagtaaaaccccttcagcacttgaccgaaataccaaaaatgtctccaaaaaattgatagttgcaggttatcgcaagatgtcttagagtagggttaaggttctcagtgacacaagaattcagtattaagtacataggtatttactatggagtataattctcacaattgtattttcagttttctgcccaatagagtttaaataactgtataaatgatgactttaaaaaaatgtaagcaacaagtccatgtcatagtcaataaaaacaatcctgcagttgggttttgtatctgatccctgcttggagttttagtttaaagaatctatatgtagcaaggaaaaggtgctttttaattttaatccctttgatcaatatggcttttttccaaattggctaatggatcaaaatgaaacctgttgatgtgaattcagttattgaacttgttacttgtttttgccagaaatgttattaataaatgtcaatgtgggagataaaaaaaacacaggggggggctaaaaatcctgaggggcaagtagcgaccattcctgtcaagggccaagg

SEQ ID NO: 348962 - DNA, 2431 bp, Homo sapiens
catttacattttgtaaaataaacaatgttaacccgcatctatgtgtatgtggcagggtttcctcaacctcggcattattgatatttggggctggacaattctttgctgtggagactgtcctgtggactgtagtttagcagcatctctagcttcagagaagggagaagtcgtttgcctcgtgtagcgctcgccacaacggttctcccaaccgtctccagcggtgacaaccgcttagggagctgcgcagcaccagagtcggcgtaactatcgcctgacaggcatttaaatcaaacggtattgagatggattgggttatgaaacataatggtccaaatgacgctagtgatgggacagtacgacttcgtggactaccatttggttgcagcaaagaggaaatagttcagttctttcaagggttggaaatcgtgccaaatgggataacattgacgatggactaccaggggagaagcacaggggaggccttcgtgcagtttgcttcaaaggagatagcagaaaatgctctggggaaacacaaggaaagaatagggcacaggtatattgagatcttcagaagtagcaggagtgaaatcaaaggattttatgatccaccaagaagattgctgggacagcgaccgggaccatatgatagaccaataggaggaagagggggttattatggagctgggcgtgttatggaggttttgatgactatggtggctataataattacggctatgggaatgatggctttgatgacagaatgagagatggaagaggtatgggaggacatggctatggtggagctggtgatgcaagttcaggttttcatggtggtcatttcgtacatatgagagggttgccttttcgtgcaactgaaaatgacattgctaatttcttctcaccactaaatccaatacgagttcatattgatattggagctgatggcagagccacaggagaagcagatgtagagtttgtgacacatgaagatgcagtagctgccatgtctaaagataaaaataacatgcaacatcgatatattgaactcttcttgaattctactcctggaggcggctctggcatgggaggttctggaatgggaggctacggaagagatggaatggataatcagggaggctatggatcagttggaagaatgggaatggggaacaattacagtggaggatatggtactcctgatggtttgggtggttatggccgtggtggtggaggcagtggaggttactatgggcaaggcggcatgagtggaggtggatggcgtgggatgtactgaaagcaaaaacaccaacatacaagtcttgacaacagcatctggtctactagactttcttacagatttaatttcttttgtattttaagaactttataatgactgaaggaatgtgttttcaaaatattatttggtaaagcaacagattgtgatgggaaaatgttttctgtaggtttatttgttgcatactttgacttaaaaataaatttttatattcaaaccactgatgttgatactttttatatactagttactcctaaagatgtgctgccttcataagatttgggttgatgtattttactattagttctacaagaagtagtgtggtgtaattttagaggataatggttcacctctgcgtaaactgcaagtcttaagcagacatctggaatagagcttgacaaataattagtgtaacttttttctttagttcctcctggacaacactgtaaatataaagcctaaagatgaagtggcttcaggagtataaattcagctaattatttctatattattatttttcaaatgtcatttatcaggcatagctctgaaacattgatgatctaagaggtattgatttctgaatattcataattgtgttacctgggtatgagagtgttggaagctgaattctagccctagattttggagtaaaaccccttcagcacttgaccgaaataccaaaaatgtctccaaaaaattgatagttgcaggttatcgcaagatgtcttagagtagggttaaggttctcagtgacacaagaattcagtattaagtacataggtatttactatggagtataattctcacaattgtattttcagttttctgcccaatagagtttaaataactgtataaatgatgactttaaaaaaatgtaagcaacaagtccatgtcatagtcaataaaaacaatcctgcagttgggttttgtatctgatccctgcttggagttttagtttaaagaatctatatgtagcaaggaaaaggtgctttttaattttaatccctttgatcaatatggcttttttccaaattggctaatggatcaaaatgaaacctgttgatgtgaattcagttattgaacttgttacttgtttttgccagaaatgttattaataaatgtcaatgtgggagataa

SEQ ID NO: 348963 - DNA, 1800 bp, Homo sapiens
ggtcggtccttgcagcgattacaggaagagggggtattatccgagctgggtagtggaagttatggaggttttgatgactatggtggctataataattacggctatgggaatgatggctttgatgacagaatgagagatggaagaggtatgggaggacatggctatggtggagctggtgatgcaagttcaggttttcatggtggtcatttcgtacatatgagagggttgccttttcgtgcaactgaaaatgacattgctaatttcttctcaccactaaatccaatacgagttcatattgatattggagctgatggcagagccacaggagaagcagatgtagagtttgtgacacatgaagatgcagtagctgccatgtctaaagataaaaataacatgcaacatcgatatattgaactcttcttgaattctactcctggaggcggctctggcatgggaggttctggaatgggaggctacggaagagatggaatggataatcagggaggctatggatcagttggaagaatgggaatggggaacaattacagtggaggatatggtactcctgatggtttgggtggttatggccgtggtggtggaggcagtggaggttactatgggcaaggcggcatgagtggaggtggatggcgtgggatgtactgaaagcaaaaacaccaacatacaagtcttgacaacagcatctggtctactagactttcttacagatttaatttcttttgtattttaagaactttataatgactgaaggaatgtgttttcaaaatattatttggtaaagcaacagattgtgatgggaaaatgttttctgtaggtttatttgttgcatactttgacttaaaaataaatttttatattcaaaccactgatgttgatactttttatatactagttactcctaaagatgtgctgccttcataagatttgggttgatgtattttactattagttctacaagaagtagtgtggtgtaattttagaggataatggttcacctctgcgtaaactgcaagtcttaagcagacatctggaatagagcttgacaaataattagtgtaacttttttctttagttcctcctggacaacactgtaaatataaagcctaaagatgaagtggcttcaggagtataaattcagctaattatttctatattattatttttcaaatgtcatttatcaggcatagctctgaaacattgatgatctaagaggtattgatttctgaatattcataattgtgttacctgggtatgagagtgttggaagctgaattctagccctagattttggagtaaaaccccttcagcacttgaccgaaataccaaaaatgtctccaaaaaattgatagttgcaggttatcgcaagatgtcttagagtagggttaaggttctcagtgacacaagaattcagtattaagtacataggtatttactatggagtataattctcacaattgtattttcagttttctgcccaatagagtttaaataactgtataaatgatgactttaaaaaaatgtaagcaacaagtccatgtcatagtcaataaaaacaatcctgcagttgggttttgtatctgatccctgcttggagttttagtttaaagaatctatatgtagcaaggaaaaggtgctttttaattttaatccctttgatcaatatggcttttttccaaattggctaatggatcaaaatgaaacctgttgatgtgaattcagttattgaacttgttacttgtttttgccagaaatgttattaataaatgtcaatgtgggagataa

SEQ ID NO: 348964 - DNA, 2478 bp, Homo sapiens
  misc_feature (2394)..(2394): n is a, c, g, or t
  misc_feature (2397)..(2397): n is a, c, g, or t
catttacattttgtaaaataaacaatgttaacccgcatctatgtgtatgtggcagggtttcctcaacctcggcattattgatatttggggctggacaattctttgctgtggagactgtcctgtggactgtagtttagcagcatctctagcttcagagaagggagaagtcgtttgcctcgtgtagcgctcgccacaacggttctcccaaccgtctccagcggtgacaaccgcttagggagctgcgcagcaccagagtcggcgtaactatcgcctgacaggcatttaaatcaaacggtattgagatggattgggttatgaaacataatggtccaaatgacgctagtgatgggacagtacgacttcgtggactaccatttggttgcagcaaagaggaaatagttcagttctttcaagggttggaaatcgtgccaaatgggataacattgacgatggactaccaggggagaagcacaggggaggccttcgtgcagtttgcttcaaaggagatagcagaaaatgctctggggaaacacaaggaaagaatagggcacaggtatattgagatcttcagaagtagcaggagtgaaatcaaaggattttatgatccaccaagaagattgctgggacagcgaccgggaccatatgatagaccaataggaggaagagggggttattatggagctgggcgtggaagtatgtatgacagaatgcgacgaggaggtgatggatatgatggtggttatggaggttttgatgactatggtggctataataattacggctatgggaatgatggctttgatgacagaatgagagatggaagaggtatgggaggacatggctatggtggagctggtgatgcaagttcaggttttcatggtggtcatttcgtacatatgagagggttgccttttcgtgcaactgaaaatgacattgctaatttcttctcaccactaaatccaatacgagttcatattgatattggagctgatggcagagccacaggagaagcagatgtagagtttgtgacacatgaagatgcagtagctgccatgtctaaagataaaaataacatgcaacatcgatatattgaactcttcttgaattctactcctggaggcggctctggcatgggaggttctggaatgggaggctacggaagagatggaatggataatcagggaggctatggatcagttggaagaatgggaatggggaacaattacagtggaggatatggtactcctgatggtttgggtggttatggccgtggtggtggaggcagtggaggttactatgggcaaggcggcatgagtggaggtggatggcgtgggatgtactgaaagcaaaaacaccaacatacaagtcttgacaacagcatctggtctactagactttcttacagatttaatttcttttgtattttaagaactttataatgactgaaggaatgtgttttcaaaatattatttggtaaagcaacagattgtgatgggaaaatgttttctgtaggtttatttgttgcatactttgacttaaaaataaatttttatattcaaaccactgatgttgatactttttatatactagttactcctaaagatgtgctgccttcataagatttgggttgatgtattttactattagttctacaagaagtagtgtggtgtaattttagaggataatggttcacctctgcgtaaactgcaagtcttaagcagacatctggaatagagcttgacaaataattagtgtaacttttttctttagttcctcctggacaacactgtaaatataaagcctaaagatgaagtggcttcaggagtataaattcagctaattatttctatattattatttttcaaatgtcatttatcaggcatagctctgaaacattgatgatctaagaggtattgatttctgaatattcataattgtgttacctgggtatgagagtgttggaagctgaattctagccctagattttggagtaaaaccccttcagcacttgaccgaaataccaaaaatgtctccaaaaaattgatagttgcaggttatcgcaagatgtcttagagtagggttaaggttctcagtgacacaagaattcagtattaagtacataggtatttactatggagtataattctcacaattgtattttcagttttctgcccaatagagtttaaataactgtataaatgatgactttaaaaaaatgtaagcaacaagtccatgtcatagtcaataaaaacaatcctgcagttgggttttgtatctgatccctgcttggagttttagtttaaagaatctatatgtagcaaggaaaaggtgctttttaattttaatccctttgatcaatatggctttttgtaaaaatggaaaatgggtttgaanganaaaagcccacgcattcctccccacactcatggcccttaccacgctactcctacctatctccccttttatactaataatctt

SEQ ID NO: 348965 - DNA, 2426 bp, Homo sapiens
catttacattttgtaaaataaacaatgttaacccgcatctatgtgtatgtggcagggtttcctcaacctcggcattattgatatttggggctggacaattctttgctgtggagactgtcctgtggactgtagtttagcagcatctctagcttcagagaagggagaagtcgtttgcctcgtgtagcgctcgccacaacggttctcccaaccgtctccagcggtgacaaccgcttagggagctgcgcagcaccagagtcggcgtaactatcgcctgacaggcatttaaatcaaacggtattgagatggattgggttatgaaacataatggtccaaatgacgctagtgatgggacagtacgacttcgtggactaccatttggttgcagcaaagaggaaatagttcagttctttcaagggttggaaatcgtgccaaatgggataacattgacgatggactaccaggggagaagcacaggggaggccttcgtgcagtttgcttcaaaggagatagcagaaaatgctctggggaaacacaaggaaagaatagggcacaggtatattgagatcttcagaagtagcaggagtgaaatcaaaggattttatgatccaccaagaagattgctgggacagcgaccgggaccatatgatagaccaataggaggaagagggggttattatggagctgggcgtggaagtatgtatgacagaatgcgacgaggaggtgatggatatgatggtggttatggaggttttgatgactatggtggctataataattacggctatgggaatgatggctttgatgacagaatgagagatggaagaggtatgggaggacatggctatggtggagctggtgatgcaagttcaggttttcatggtggtcatttcgtacatatgagagggttgccttttcgtgcaactgaaaatgacattgctaatttcttctcaccactaaatccaatacgagttcatattgatattggagctgatggcagagccacaggagaagcagatgtagagtttgtgacacatgaagatgcagtagctgccatgtctaaagataaaaataacatgcaacatcgatatattgaactcttcttgaattctactcctggaggcggctctggcatgggaggttctggaatgggaggctacggaagagatggaatggataatcagggaggctatggatcagttggaagaatgggaatggggaacaattacagtggaggatatggtactcctgatggtttgggtggttatggccgtggtggtggaggcagtggaggttactatgggcaaggcggcatgagtggaggtggatggcgtgggatgtactgaaagcaaaaacaccaacatacaagtcttgacaacagcatctggtctactagactttcttacagatttaatttcttttgtattttaagaactttataatgactgaaggaatgtgttttcaaaatattatttggtaaagcaacagattgtgatgggaaaatgttttctgtaggtttatttgttgcatactttgacttaaatcctaaagatgtgctgccttcataagatttgggttgatgtattttactattagttctacaagaagtagtgtggtgtaattttagaggataatggttcacctctgcgtaaactgcaagtcttaagcagacatctggaatagagcttgacaaataattagtgtaacttttttctttagttcctcctggacaacactgtaaatataaagcctaaagatgaagtggcttcaggagtataaattcagctaattatttctatattattatttttcaaatgtcatttatcaggcatagctctgaaacattgatgatctaagaggtattgatttctgaatattcataattgtgttacctgggtatgagagtgttggaagctgaattctagccctagattttggagtaaaaccccttcagcacttgaccgaaataccaaaaatgtctccaaaaaattgatagttgcaggttatcgcaagatgtcttagagtagggttaaggttctcagtgacacaagaattcagtattaagtacataggtatttactatggagtataattctcacaattgtattttcagttttctgcccaatagagtttaaataactgtataaatgatgactttaaaaaaatgtaagcaacaagtccatgtcatagtcaataaaaacaatcctgcagttgggttttgtatctgatccctgcttggagttttagtttaaagaatctatatgtagcaaggaaaaggtgctttttaattttaatccctttgatcaatatggcttttttccaaattggctaatggatcaaaatgaaacctgttgatgtgaattcagttattgaacttgttacttgtttttgccagaaatgttattaataaatgtcaatgtgggagataa

SEQ ID NO: 348966 - DNA, 2685 bp, Homo sapiens
catttacattttgtaaaataaacaatgttaacccgcatctatgtgtatgtggcagggtttcctcaacctcggcattattgatatttggggctggacaattctttgctgtggagactgtcctgtggactgtagtttagcagcatctctagcttcagagaagggagaagtcgtttgcctcgtgtagcgctcgccacaacggttctcccaaccgtctccagcggtgacaaccgcttagggagctgcgcagcaccagagtcggcgtaactatcgcctgacaggcatttaaatcaaacggtattgagatggattgggttatgaaacataatggtccaaatgacgctagtgatgggacagtacgacttcgtggactaccatttggttgcagcaaagaggaaatagttcagttctttcaagggttggaaatcgtgccaaatgggataacattgacgatggactaccaggggagaagcacaggggaggccttcgtgcagtttgcttcaaaggagatagcagaaaatgctctggggaaacacaaggaaagaatagggcacaggtatattgagatcttcagaagtagcaggagtgaaatcaaaggattttatgatccaccaagaagattgctgggacagcgaccgggaccatatgatagaccaataggaggaagagggggttattatggagctgggcgtggaagtatgtatgacagaatgcgacgaggaggtgatggatatgatggtggttatggaggttttgatgactatggtggctataataattacggctatgggaatgatggctttgatgacagaatgagagatggaagaggtatgggaggacatggctatggtggagctggtgatgcaagttcaggttttcatggtggtcatttcgtacatatgagagggttgccttttcgtgcaactgaaaatgacattgctaatttcttctcaccactaaatccaatacgagttcatattgatattggagctgatggcagagccacaggagaagcagatgtagagtttgtgacacatgaagatgcagtagctgccatgtctaaagataaaaataacatgcaacatcgatatattgaactcttcttgaattctactcctggaggcggctctggcatgggaggttctggaatgggaggctacggaagagatggaatggggtatgtaaagtttttaaaatatgcagggttagctgcttatcgatgagtctcaattttttttcttttttctttttaaagataatcagggaggctatggatcagttggaagaatgggaatggggaacaattacagtggaggatatggtactcctgatggtttgggtggttatgggtaagtatctctagttcagtttgtgttagtccgcatatgtagtgcaaactttaaagtgcaggtattacttttattattttatgcagatatctcctgctgagtgattcttaatatctttttcttaagccgtggtggtggaggcagtggaggttactatgggcaaggcggcatgagtggaggtggatggcgtgggatgtactgaaagcaaaaacaccaacatacaagtcttgacaacagcatctggtctactagactttcttacagatttaatttcttttgtattttaagaactttataatgactgaaggaatgtgttttcaaaatattatttggtaaagcaacagattgtgatgggaaaatgttttctgtaggtttatttgttgcatactttgacttaaaaataaatttttatattcaaaccactgatgttgatactttttatatactagttactcctaaagatgtgctgccttcataagatttgggttgatgtattttactattagttctacaagaagtagtgtggtgtaattttagaggataatggttcacctctgcgtaaactgcaagtcttaagcagacatctggaatagagcttgacaaataattagtgtaacttttttctttagttcctcctggacaacactgtaaatataaagcctaaagatgaagtggcttcaggagtataaattcagctaattatttctatattattatttttcaaatgtcatttatcaggcatagctctgaaacattgatgatctaagaggtattgatttctgaatattcataattgtgttacctgggtatgagagtgttggaagctgaattctagccctagattttggagtaaaaccccttcagcacttgaccgaaataccaaaaatgtctccaaaaaattgatagttgcaggttatcgcaagatgtcttagagtagggttaaggttctcagtgacacaagaattcagtattaagtacataggtatttactatggagtataattctcacaattgtattttcagttttctgcccaatagagtttaaataactgtataaatgatgactttaaaaaaatgtaagcaacaagtccatgtcatagtcaataaaaacaatcctgcagttgggttttgtatctgatccctgcttggagttttagtttaaagaatctatatgtagcaaggaaaaggtgctttttaattttaatccctttgatcaatatggcttttttccaaattggctaatggatcaaaatgaaacctgttgatgtgaattcagttattgaacttgttacttgtttttgccagaaatgttattaataaatgtcaatgtgggagataa

SEQ ID NO: 348967 - DNA, 2208 bp, Homo sapiens
catttacattttgtaaaataaacaatgttaacccgcatctatgtgtatgtggcagggtttcctcaacctcggcattattgatatttggggctggacaattctttgctgtggagactgtcctgtggactgtagtttagcagcatctctagcttcagagaagggagaagtcgtttgcctcgtgtagcgctcgccacaacggttctcccaaccgtctccagcggtgacaaccgcttagggagctgcgcagcaccagagtcggcgtaactatcgcctgacaggcatttaaatcaaacggtattgagatggattgggttatgaaacataatggtccaaatgacgctagtgatgggacagtacgacttcgtggactaccatttggttgcagcaaagaggaaatagttcagttctttcaagggttggaaatcgtgccaaatgggataacattgacgatggactaccaggggagaagcacaggggaggccttcgtgcagtttgcttcaaaggagatagcagaaaatgctctggggaaacacaaggaaagaatagggcacaggtatattgagatcttcagaagtagcaggagtgaaatcaaaggattttatgatccaccaagaagattgctgggacagcgaccgggaccatatgatagaccaataggaggaagagggggttattatggagctgggcgtggaagtatgtatgacagaatgcgacgaggaggtgatggatatgatggtggttatggaggttttgatgactatggtggctataataattacggctatgggaatgatggctttgatgacagaatgagagatggaagaggtatgggaggacatggctatggtggagctggtgatgcaagttcaggttttcatggtggtcatttcgtacatatgagagggttgccttttcgtgcaactgaaaatgacattgctaatttcttctcaccactaaatccaatacgagttcatattgatattggagctgatgggccgtggtggtggaggcagtggaggttactatgggcaaggcggcatgagtggaggtggatggcgtgggatgtactgaaagcaaaaacaccaacatacaagtcttgacaacagcatctggtctactagactttcttacagatttaatttcttttgtattttaagaactttataatgactgaaggaatgtgttttcaaaatattatttggtaaagcaacagattgtgatgggaaaatgttttctgtaggtttatttgttgcatactttgacttaaaaataaatttttatattcaaaccactgatgttgatactttttatatactagttactcctaaagatgtgctgccttcataagatttgggttgatgtattttactattagttctacaagaagtagtgtggtgtaattttagaggataatggttcacctctgcgtaaactgcaagtcttaagcagacatctggaatagagcttgacaaataattagtgtaacttttttctttagttcctcctggacaacactgtaaatataaagcctaaagatgaagtggcttcaggagtataaattcagctaattatttctatattattatttttcaaatgtcatttatcaggcatagctctgaaacattgatgatctaagaggtattgatttctgaatattcataattgtgttacctgggtatgagagtgttggaagctgaattctagccctagattttggagtaaaaccccttcagcacttgaccgaaataccaaaaatgtctccaaaaaattgatagttgcaggttatcgcaagatgtcttagagtagggttaaggttctcagtgacacaagaattcagtattaagtacataggtatttactatggagtataattctcacaattgtattttcagttttctgcccaatagagtttaaataactgtataaatgatgactttaaaaaaatgtaagcaacaagtccatgtcatagtcaataaaaacaatcctgcagttgggttttgtatctgatccctgcttggagttttagtttaaagaatctatatgtagcaaggaaaaggtgctttttaattttaatccctttgatcaatatggcttttttccaaattggctaatggatcaaaatgaaacctgttgatgtgaattcagttattgaacttgttacttgtttttgccagaaatgttattaataaatgtcaatgtgggagataa

SEQ ID NO: 348968 - DNA, 1313 bp, Homo sapiens
catttacattttgtaaaataaacaatgttaacccgcatctatgtgtatgtggcagggtttcctcaacctcggcattattgatatttggggctggacaattctttgctgtggagactgtcctgtggactgtagtttagcagcatctctagcttcagagaagggagaagtcgtttgcctcgtgtagcgctcgccacaacggttctcccaaccgtctccagcggtgacaaccgcttagggagctgcgcagcaccagagtcggcgtaactatcgcctgacaggcatttaaatcaaacggtattgagatggattgggttatgaaacataatggtccaaatgacgctagtgatgggacagtacgacttcgtggactaccatttggttgcagcaaagaggaaatagttcagttctttcaagggttggaaatcgtgccaaatgggataacattgacgatggactaccaggggagaagcacaggggaggccttcgtgcagtttgcttcaaaggagatagcagaaaatgctctggggaaacacaaggaaagaatagggcacaggtatattgagatcttcagaagtagcaggagtgaaatcaaaggattttatgatccaccaagaagattgctgggacagcgaccgggaccatatgatagaccaataggaggaagagggggttattatggagctgggcgtggaagtatgtatgacagaatgcgacgaggaggtgatggatatgatggtggttatggaggttttgatgactatggtggctataataattacggctatgggaatgatggctttgatgacagaatgagagatggaagaggtatgggaggacatggctatggtggagctggtgatgcaagttcaggttttcatggtggtcatttcgtacatatgagagggttgccttttcgtgcaactgaaaatgacattgctaatttcttctcaccactaaatccaatacgagttcatattgatattggagctgatggcagagccacaggagaagcagatgtagagtttgtgacacatgaagatgcagtagctgccatgtctaaagataaaaataacatgcaacatcgatatattgaactcttcttgaattctactcctggaggcggctctggcatgggaggttctggaatgggaggctacggaagagatggaatgggtcgccggtgcggggtgggtgctgcgggcgctgcctgttcccgatggtgtctttgatgcttgggctgatgcaggtctcggttcctctagcttcaccttcccagagccgacttcctgagtcaggtacgtgcgtcggtggac

SEQ ID NO: 348969 - DNA, 1155 bp, Homo sapiens
catttacattttgtaaaataaacaatgttaacccgcatctatgtgtatgtggcagggtttcctcaacctcggcattattgatatttggggctggacaattctttgctgtggagactgtcctgtggactgtagtttagcagcatctctagcttcagagaagggagaagtcgtttgcctcgtgtagcgctcgccacaacggttctcccaaccgtctccagcggtgacaaccgcttagggagctgcgcagcaccagagtcggcgtaactatcgcctgacaggcatttaaatcaaacggtattgagatggattgggttatgaaacataatggtccaaatgacgctagtgatgggacagtacgacttcgtggactaccatttggttgcagcaaagaggaaatagttcagttctttcaagggttggaaatcgtgccaaatgggataacattgacgatggactaccaggggagaagcacaggggaggccttcgtgcagtttgcttcaaaggagatagcagaaaatgctctggggaaacacaaggaaagaatagggcacaggtatattgagatcttcagaagtagcaggagtgaaatcaaaggattttatgatccaccaagaagattgctgggacagcgaccgggaccatatgatagaccaataggaggaagagggggttattatggagctgggcgtggaagtatgtatgacagaatgcgacgaggaggtgatggatatgatggtggttatggaggttttgatgactatggtggctataataattacggctatgggaatgatggctttgatgacagaatgagagatggaagaggtatgggaggacatggctatggtggagctggtgatgcaagttcaggttttcatggtggtcatttcgtacatatgagagggttgccttttcgtgcaactgaaaatgacattgctaatttcttctcaccactaaatccaatacgagttcatattgatattggagctgatggcagagccacaggagaagcagatgtagagtttgtgacacatgaagatgcagtagctgccatgtctaaagataaaaataacatgcaacgttctggggattacgggcgttaccacttgcacccagccttccaagggctttttaaaccataagcttctctacggt

SEQ ID NO: 348970 - DNA, 974 bp, Homo sapiens
catttacattttgtaaaataaacaatgttaacccgcatctatgtgtatgtggcagggtttcctcaacctcggcattattgatatttggggctggacaattctttgctgtggagactgtcctgtggactgtagtttagcagcatctctagcttcagagaagggagaagtcgtttgcctcgtgtagcgctcgccacaacggttctcccaaccgtctccagcggtgacaaccgcttagggagctgcgcagcaccagagtcggcgtaactatcgcctgacaggcatttaaatcaaacggtattgagatggattgggttatgaaacataatggtccaaatgacgctagtgatgggacagtacgacttcgtggactaccatttggttgcagcaaagaggaaatagttcagttctttcaagggttggaaatcgtgccaaatgggataacattgacgatggactaccaggggagaagcacaggggaggccttcgtgcagtttgcttcaaaggagatagcagaaaatgctctggggaaacacaaggaaagaatagggcacaggtatattgagatcttcagaagtagcaggagtgaaatcaaaggattttatgatccaccaagaagattgctgggacagcgaccgggaccatatgatagaccaataggaggaagagggggttattatggagctgggcgtgttatggaggttttgatgactatggtggctataataattacggctatgggaatgatggctttgatgacagaatgagagatggaagaggtatgggaggacatggctatggtggagctggtgatgcaagttcaggttttcatggtggtcatttcgtacatatgagagggttgccttttcgtgcaactgaaaatgacattgctaatttcttctcaccactagaataggaatggcaagacaatttttaatccatatgattttagtcgagccatttagagttttcttaca

SEQ ID NO: 348971 - DNA, 989 bp, Homo sapiens
ggattctaacatattttagcctagtgcagtggttctcaaccaaccagagtgattttgccgccccctgccccgggaacagttggcaatgtctggagatgttgtttgtcacagcttaggggcagggagggaggttgagaggttgctgctggtatctagtggttagtggccagaggtcctgcttagcacctgcagtacacaggctcccctgttcccagcagagcaagatccacgcagtcaggagtgcggaggctggtggttcttaggtgacaagagccacctggggacctgcctcagccctgaaagagtagcctccacccaccagatgattcccgtcttcaggcctggagccactgtgtcagcttctgttgcacattttgatcttatgttctcttttgagtttgatttacttagaccaagaactgtagaatcatatttttagttgttggctttttcccctctataaatattatgaggatattcttttttttctcaccatttttaagaaaaagaacttcttgaatcactaccccttagcaagctgtgtaatgaagaacaggaattgctgcgttttctatttgagaacaaattgaaaaaagtaagtaaaaccaaagagttagcacttgctttatgtaaatatcttattccataaaatttggcatctagtcttatattaagttttcaaaattaaaactttttaaatttagcacatttttaagaatagagcgtttaagatacataagattccaaaaatacaatccctgggcggcgtttacacgtcgtgactgggaaacctggggtaccaagtaaatgcttggggcatccccttcgccagggggtatagagccgcgatgcctccccaatgcgcgcagggaggagcactgccccaactcggaagccgacaaggggaacccattccagggaaggggccctcaccaggggggtggtgagcctaagaactggagaaggaggaccacgttcggcgtcacttg

SEQ ID NO: 348972 - DNA, 614 bp, Homo sapiens
aggtgaggtgctttgctgtatcctctgcagtattcgggaagtgctgtcttagggggtgtctgttcccaccttgcccacagtgtgtccttcatctaactctccagttagagagttaattttttatctagaaggaaagacaagtatgaaatcattgctgtaagagcagaattatatgattgtgaagagttgtaatgaaatcatgtcttaaattacatgtgatacgaacaattgttctttttctgctttttcctgaacagaacttttctatctttctcataaactggtggatttatatcctagtaatcctgtgtcttggtttgcagtgggatgttactatctcatggtcggtcataaaaatgaacatgccagaagatatctcaggtatgaatttatttttttcctctctagttaacctgtagaattgatgtcttgctcataagctttcaagtagtaattagtgagtactttaaaagcaatgtgaaagaataaatgtttttttttttcttcctttcttttctttctctctttctttcttgccttttcttttccttctcacctcccctcccctctctctcgagggttctcactctgttgcccagactagagtgcagtgg

SEQ ID NO: 348973 - DNA, 2330 bp, Homo sapiens
tgcacggggcctgggtggggggtgcgggtgtgggtggggacctgcggccttcgagtccgcggccttcgagtcctggggcggcggcggcggctgcaggcacgggcacgggcacggggcggggtgcttagggtgcaggaggcgcgcgcctagcggcggagtgtggcgtgaggccgggcccgcgccgccatgaacctagagcggctgcggaagcgcgtccggcagtacctcgaccagcaacagtatcaaagtgctctattttgggcagataaagtagcttcactctctcgtgaagaaccccaggacatctattggttggctcagtgtctttacctgacagcacaatatcacagagccgcccatgcacttcggtcacgaaaactggacaaattgtatgaagcatgtcgttaccttgcagctaggtgccattatgctgcaaaagagcaccagcaggcccttgatgttcttgacatggaagagcccatcaataaaagattatttgaaaaatacttgaaggacgaaagtggcttcaaagatccttccagcgactgggaaatgtcacagtcttcaataaagagttctatctgtcttctacgcgggaaaatctatgatgctctagataaccgaaccctggctacctacagctacaaagaagctttgaagcttgatgtctactgttttgaagcgttcgatcttttaacatcacatcacatgctgacagcacaagaagaaaaagaacttcttgaatcactaccccttagcaagctgtgtaatgaagaacaggaattgctgcgttttctatttgagaacaaattgaaaaaatataataagcctagtgaaacggtcatccctgaatctgtagatggcttgcaagagaatctggatgtggtagtgtctttagctgagagacattattataactgtgattttaaaatgtgctacaagcttacttctgtagtaatggagaaagatcctttccatgcaagttgtttacctgtacatatagggacgcttgtagagctgaataaagccaatgaacttttctatctttctcataaactggtggatttatatcctagtaatcctgtgtcttggtttgcagtgggatgttactatctcatggtcggtcataaaaatgaacatgccagaagatatctcagcaaagccacaacacttgagaaaacctatggacctgcatggatagcctatggacattcatttgcggtggagagtgagcacgaccaagcgatggctgcttacttcacagcagcacagctgatgaaagggtgtcatttgcctatgctgtatattggattagaatatggtttgaccaataactcaaaactagctgaaaggttcttcagccaagctctgagcattgcaccggaagacccttttgttatgcatgaggtcggcgtggttgcatttcagaatggagaatggaaaacagccgaaaaatggtttcttgatgctttggaaaaaattaaagcaattgggaacgaggtaacagttgacaaatgggaacctttgttgaacaacttggggcatgtctgcagaaaacttaaaaagtatgctgaggccttggattaccaccgtcaggcactggtgttgattcctcagaacgcatccacctactctgctattggatatatccacagtctgatgggcaactttgaaaatgctgtggactacttccacacagcccttggtcttaggcgagatgatacattttctgttacaatgcttggtcattgcatcgaaatgtacattggtgattctgaagcttatattggagcagacattaaagacaaattaaaatgttatgactttgatgtgcatacaatgaagacactaaaaaacattatttcacctccgtgggatttcagggaatttgaagtagaaaaacagactgcagaagaaacggggcttacgccattggaaacctcaaggaaaactccagattccagaccttccttggaagaaacctttgaaattgaaatgaatgaaagtgacatgatgttagagacatctatgtcagaccacagcacgtgactccagtcagtggtcctggtcccactgtcccagtgtaggttagtattccttcacatcctctccatggcttaagaatgtcccacttcctaacgtgactccaaactgcatctctacatttaggaacagagacccgccttaagagactggatcgcacacctttgcaacagatgtgttctgattctctgaacctacaaaatagttatacatagtggaataaagaaggtaaaccatctgttatgtctttttttttcttttccaataaacttttattttggactaaa

SEQ ID NO: 348974 - DNA, 2599 bp, Homo sapiens
tgcacggggcctgggtggggggtgcgggtgtgggtggggacctgcggccttcgagtccgcggccttcgagtcctggggcggcggcggcggctgcaggcacgggcacgggcacggggcggggtgcttagggtgcaggaggcgcgcgcctagcggcggagtgtggcgtgaggccgggcccgcgccgccatgaacctagagcggctgcggaagcgcgtccggcagtacctcgaccagcaacagtatcaaagtgctctattttgggcagataaagtagcttcactctctcgtgaagaaccccaggacatctattggttggctcagtgtctttacctgacagcacaatatcacagagccgcccatgcacttcggtcacgaaaactggacaaattgtatgaagcatgtcgttaccttgcagctaggtgccattatgctgcaaaagagcaccagcaggcccttgatgttcttgacatggaagagcccatcaataaaagattatttgaaaaatacttgaaggacgaaagtggcttcaaagatccttccagcgactgggaaatgtcacagtcttcaataaagagttctatctgtcttctacgcgggaaaatctatgatgctctagataaccgaaccctggctacctacagctacaaagaagctttgaagcttgatgtctactgttttgaagcgttcgatcttttaacatcacatcacatgctgacagcacaagaagaaaaagaacttcttgaatcactaccccttagcaagctgtgtaatgaagaacaggaattgctgcgttttctatttgagaacaaattgaaaaaatataataagcctagtgaaacggtcatccctgaatctgtagatggcttgcaagagaatctggatgtggtagtgtctttagctgagagacattattataactgtgattttaaaatgtgctacaagcttacttctgtagtaatggagaaagatcctttccatgcaagttgtttacctgtacatatagggacgcttgtagagctgaataaagccaatgaacttttctatctttctcataaactggtggatttatatcctagtaatcctgtgtcttggtttgcagtgggatgttactatctcatggtcggtcataaaaatgaacatgccagaagatatctcagcaaagccacaacacttgagaaaacctatggacctgcatggatagcctatggacattcatttgcggtggagagtgagcacgaccaagcgatggctgcttacttcacagcagcacagctgatgaaagggtgtcatttgcctatgctgtatattggattagaatatggtttgaccaataactcaaaactagctgaaaggttcttcagccaagctctgagcattgcaccggaagacccttttgttatgcatgaggtcggcgtggttgcatttcagaatggagaatggaaaacagccgaaaaatggtttcttgatgctttggaaaaaattaaagcaattgggaacgaggtaacagttgacaaatgggaacctttgttgaacaacttggggcatgtctgcagaaaacttaaaaagtatgctgaggccttggattaccaccgtcaggcactggtgttgattcctcagaacgcatccacctactctgctattggatatatccacagtctgatgggcaactttgaaaatgctgtggactacttccacacagcccttggtcttaggcgagatgatacattttctgttacaatgcttggtcattgcatcgaaatgtacattggtgattctgaagcttatattggagcagacattaaagacaaattaaaatgttatgactttgatgtgcatacaatgaagacactaaaaaacattatttcacctccgtgggatttcagggaatttgaagtagaaaaacagactgcagaagaaacggggcttacgccattggaaacctcaaggaaaactccagattccagaccttccttggaagaaacctttgaaattgaaatgaatgaaagtgacatgatgttagagacatctatgtcagaccacagcacgtgactccagtcagtggtcctggtcccactgtcccagtgtaggaacagagacccgccttaagagactggatcgcacacctttgcaacagatgtgttctgattctctgaacctacaaaatagttatacatagtggaataaagaaggtaaaccatcaaaaaaaaaaaaaaaaaaacaaaaacaccaaaaagaaaataaaagaaaaaaaaagacaaaaaaaaaaaatgagaacaacaaaaaaaataaagcgagacacgaccaccaaaaacacacagcacgaaggagggggaggcgtacgatgatgagcagcccggctggaagaagtcgagcgtagcggctgatccgaggaaggggcagagcccgaggaaggggaatacggagatgagtaggaaagaggggggagaggtaagagggtaggagatagtagcaagggtgcatagaaaggaaacaaaatggtgggacagtaggcggcacccccgtaggagacggagtgaaaaacagaggggggggcgaggagagtaggagaggaagacagagttgtaatacagcggtagaa

SEQ ID NO: 348975 - DNA, 2177 bp, Homo sapiens
tgcacggggcctgggtggggggtgcgggtgtgggtggggacctgcggccttcgagtccgcggccttcgagtcctggggcggcggcggcggctgcaggcacgggcacgggcacggggcggggtgcttagggtgcaggaggcgcgcgcctagcggcggagtgtggcgtgaggccgggcccgcgccgccatgaacctagagcggctgcggaagcgcgtccggcagtacctcgaccagcaacagtatcaaagtgctctattttgggcagataaagtagcttcactctctcgtgaagaaccccaggacatctattggttggctcagtgtctttacctgacagcacaatatcacagagccgcccatgcacttcggtcacgaaaactggacaaattgtatgaagcatgtcgttaccttgcagctaggtgccattatgctgcaaaagagcaccagcaggcccttgatgttcttgacatggaagagcccatcaataaaagattatttgaaaaatacttgaaggacgaaagtggcttcaaagatccttccagcgactgggaaatgtcacagtcttcaataaagagttctatctgtcttctacgcgggaaaatctatgatgctctagataaccgaaccctggctacctacagctacaaagaagctttgaagcttgatgtctactgttttgaagcgttcgatcttttaacatcacatcacatgctgacagcacaagaagaaaaagaacttcttgaatcactaccccttagcaagctgtgtaatgaagaacaggaattgctgcgttttctatttgagaacaaattgaaaaaatataataagcctagtgaaacggtcatccctgaatctgtagatggcttgcaagagaatctggatgtggtagtgtctttagctgagagacattattataactgtgattttaaaatgtgctacaagcttacttctgtagtaatggagaaagatcctttccatgcaagttgtttacctgtacatatagggacgcttgtagagctgaataaagccaatgaacttttctatctttctcataaactggtggatttatatcctagtaatcctgtgtcttggtttgcagtgggatgttactatctcatggtcggtcataaaaatgaacatgccagaagatatctcagcaaagccacaacacttgagaaaacctatggacctgcatggatagcctatggacattcatttgcggtggagagtgagcacgaccaagcgatggctgcttacttcacagcagcacagctgatgaaaggatggaaaacagccgaaaaatggtttcttgatgctttggaaaaaattaaagcaattgggaacgaggtaacagttgacaaatgggaacctttgttgaacaacttggggcatgtctgcagaaaacttaaaaagtatgctgaggccttggattaccaccgtcaggcactggtgttgattcctcagaacgcatccacctactctgctattggatatatccacagtctgatgggcaactttgaaaatgctgtggactacttccacacagcccttggtcttaggcgagatgatacattttctgttacaatgcttggtcattgcatcgaaatgtacattggtgattctgaagcttatattggagcagacattaaagacaaattaaaatgttatgactttgatgtgcatacaatgaagacactaaaaaacattatttcacctccgtgggatttcagggaatttgaagtagaaaaacagactgcagaagaaacggggcttacgccattggaaacctcaaggaaaactccagattccagaccttccttggaagaaacctttgaaattgaaatgaatgaaagtgacatgatgttagagacatctatgtcagaccacagcacgtgactccagtcagtggtcctggtcccactgtcccagtgtaggttagtattccttcacatcctctccatggcttaagaatgtcccacttcctaacgtgactccaaactgcatctctacatttaggaacagagacccgccttaagagactggatcgcacacctttgcaacagatgtgttctgattctctgaacctacaaaatagttatacatagtggaataaagaaggtaaaccatctgttatgtctttttttttcttttccaataaacttttattttggactaaa

SEQ ID NO: 348976 - DNA, 3260 bp, Homo sapiens
tgcacggggcctgggtggggggtgcgggtgtgggtggggacctgcggccttcgagtccgcggccttcgagtcctggggcggcggcggcggctgcaggcacgggcacgggcacggggcggggtgcttagggtgcaggaggcgcgcgcctagcggcggagtgtggcgtgaggccgggcccgcgccgccatgaacctagagcggctgcggaagcgcgtccggcagtacctcgaccagcaacagtatcaaagtgctctattttgggcagataaagtagcttcactctctcgtgaagaaccccaggacatctattggttggctcagtgtctttacctgacagcacaatatcacagagccgcccatgcacttcggtcacgaaaactggacaaattgtatgaagcatgtcgttaccttgcagctaggtgccattatgctgcaaaagagcaccagcaggcccttgatgttcttgacatggaagagcccatcaataaaagattatttgaaaaatacttgaaggacgaaagtggcttcaaagatccttccagcgactgggaaatgtcacagtcttcaataaagagttctatctgtcttctacgcgggaaaatctatgatgctctagataaccgaaccctggctacctacagctacaaagaagctttgaagcttgatgtctactgttttgaagcgttcgatcttttaacatcacatcacatgctgacagcacaagaagaaaaagaacttcttgaatcactaccccttagcaagctgtgtaatgaagaacaggaattgctgcgttttctatttgagaacaaattgaaaaaatataataagcctagtgaaacggtcatccctgaatctgtagatggcttgcaagagaatctggatgtggtagtgtctttagctgagagacattattataactgtgattttaaaatgtgctacaagcttacttctgtagtaatggagaaagatcctttccatgcaagttgtttacctgtacatatagggacgcttgtagagctgaataaagccaatgaacttttctatctttctcataaactggtggatttatatcctagtaatcctgtgtcttggtttgcagtgggatgttactatctcatggtcggtcataaaaatgaacatgccagaagatatctcagcaaagccacaacacttgagaaaacctatggacctgcatggatagcctatggacattcatttgcggtggagagtgagcacgaccaagcgatggctgcttacttcacagcagcacagctgatgaaagggtgtcatttgcctatgctgtatattggattagaatatggtttgaccaataactcaaaactagctgaaaggttcttcagccaagctctgagcattgcaccggaagacccttttgttatgcatgaggtcggcgtggttgcatttcagaatggagaatggaaaacagccgaaaaatggtttcttgatgctttggaaaaaattaaagcaattgggaacgaggtaacagttgacaaatgggaacctttgttgaacaacttggggcatgtctgcagaaaacttaagtaagtgaagtagagcattttcagaaatatactttgtgtctcaaagtttacttaattttgaatactttgtcatattcttatttcatgagatcaaccagctttcttgtacttggctgctcagataaaatcagcatcaaatcagtttttattatttatctgtgttggtgtaattttattttagaaacacattgagaattttacttttttatatgaaaatttagtgttcaaaattaattcagaagaattaggacagtaggatataattaaaatcctatccatagtctgttttctgctagaggttttgtggtgtgataaacaggcgacagttgaaaaatgggttttttggttaaatatgtctgggcaattttaggttattcaagatttaacaagtatttctattgcaggatttctttgagtctttactatgtattacgaacttatagcattttccaaagtttaattgagcataaaacatttttttcacaaaagactttacaagtcaagtattccagagaactttaaggagcacttttctaagtaaatcttttggaccttaaagcgatactccttgactgcttttatctacccctgatatgggacactgactgtcacctaagagggtggtgtgtggtaagggcacagccaggaggcatggattaggttctggttgcagtgtcccactgaacatcaaaaggaatacagcagacatccctgcaggagtgcccttggccggcggagggagtgggcctggaagatgcatttagagggcatattgagatgcatgagagtaggtgtggagaacattcaccagtctagactgctgttctcattgagacagcgtttcttgggtgttgatatggatggttgctcatcttagacttaggaatttagtgcttttactgtagccaataattgtgttctctcccacagaaagtatgctgaggccttggattaccaccgtcaggcactggtgttgattcctcagaacgcatccacctactctgctattggatatatccacagtctgatgggcaactttgaaaatgctgtggactacttccacacagcccttggtcttaggcgagatgatacattttctgttacaatgcttggtcattgcatcgaaatgtacattggtgattctgaagcttatattggagcagacattaaagacaaattaaaatgttatgactttgatgtgcatacaatgaagacactaaaaaacattatttcacctccgtgggatttcagggaatttgaagtagaaaaacagactgcagaagaaacggggcttacgccattggaaacctcaaggaaaactccagattccagaccttccttggaagaaacctttgaaattgaaatgaatgaaagtgacatgatgttagagacatctatgtcagaccacagcacgtgactccagtcagtggtcctggtcccactgtcccagtgtaggttagtattccttcacatcctctccatggcttaagaatgtcccacttcctaacgtgactccaaactgcatctctacatttaggaacagagacccgccttaagagactggatcgcacacctttgcaacagatgtgttctgattctctgaacctacaaaatagttatacatagtggaataaagaaggtaaaccatctgttatgtctttttttttcttttccaataaacttttattttggactaaa

SEQ ID NO: 348977 - DNA, 2370 bp, Homo sapiens
tgcacggggcctgggtggggggtgcgggtgtgggtggggacctgcggccttcgagtccgcggccttcgagtcctggggcggcggcggcggctgcaggcacgggcacgggcacggggcggggtgcttagggtgcaggaggcgcgcgcctagcggcggagtgtggcgtgaggccgggcccgcgccgccatgaacctagagcggctgcggaagcgcgtccggcagtacctcgaccagcaacagtatcaaagtgctctattttgggcagataaagtagcttcactctctcgtgaagaaccccaggacatctattggttggctcagtgtctttacctgacagcacaatatcacagagccgcccatgcacttcggtcacgaaaactggacaaattgtatgaagcatgtcgttaccttgcagctaggtgccataagtcgtgagtgatgagcggcacttctgttttccacgtagtatgctgcaaaagagcaccagcaggcccttgatgttcttgacatggaagagcccatcaataaaagattatttgaaaaatacttgaaggacgaaagtggcttcaaagatccttccagcgactgggaaatgtcacagtcttcaataaagagttctatctgtcttctacgcgggaaaatctatgatgctctagataaccgaaccctggctacctacagctacaaagaagctttgaagcttgatgtctactgttttgaagcgttcgatcttttaacatcacatcacatgctgacagcacaagaagaaaaagaacttcttgaatcactaccccttagcaagctgtgtaatgaagaacaggaattgctgcgttttctatttgagaacaaattgaaaaaatataataagcctagtgaaacggtcatccctgaatctgtagatggcttgcaagagaatctggatgtggtagtgtctttagctgagagacattattataactgtgattttaaaatgtgctacaagcttacttctgtagtaatggagaaagatcctttccatgcaagttgtttacctgtacatatagggacgcttgtagagctgaataaagccaatgaacttttctatctttctcataaactggtggatttatatcctagtaatcctgtgtcttggtttgcagtgggatgttactatctcatggtcggtcataaaaatgaacatgccagaagatatctcagcaaagccacaacacttgagaaaacctatggacctgcatggatagcctatggacattcatttgcggtggagagtgagcacgaccaagcgatggctgcttacttcacagcagcacagctgatgaaagggtgtcatttgcctatgctgtatattggattagaatatggtttgaccaataactcaaaactagctgaaaggttcttcagccaagctctgagcattgcaccggaagacccttttgttatgcatgaggtcggcgtggttgcatttcagaatggagaatggaaaacagccgaaaaatggtttcttgatgctttggaaaaaattaaagcaattgggaacgaggtaacagttgacaaatgggaacctttgttgaacaacttggggcatgtctgcagaaaacttaaaaagtatgctgaggccttggattaccaccgtcaggcactggtgttgattcctcagaacgcatccacctactctgctattggatatatccacagtctgatgggcaactttgaaaatgctgtggactacttccacacagcccttggtcttaggcgagatgatacattttctgttacaatgcttggtcattgcatcgaaatgtacattggtgattctgaagcttatattggagcagacattaaagacaaattaaaatgttatgactttgatgtgcatacaatgaagacactaaaaaacattatttcacctccgtgggatttcagggaatttgaagtagaaaaacagactgcagaagaaacggggcttacgccattggaaacctcaaggaaaactccagattccagaccttccttggaagaaacctttgaaattgaaatgaatgaaagtgacatgatgttagagacatctatgtcagaccacagcacgtgactccagtcagtggtcctggtcccactgtcccagtgtaggttagtattccttcacatcctctccatggcttaagaatgtcccacttcctaacgtgactccaaactgcatctctacatttaggaacagagacccgccttaagagactggatcgcacacctttgcaacagatgtgttctgattctctgaacctacaaaatagttatacatagtggaataaagaaggtaaaccatctgttatgtctttttttttcttttccaataaacttttattttggactaaa

SEQ ID NO: 348978 - DNA, 1706 bp, Homo sapiens
caccaacctaataggatttcctgttggttttgattcttttaaataagcggcctacttattttatgtattacaattctgttgacttaaagtaaatgtatgtgataatgtttatttttattcctttcaaataaaccagaattttttctttcatttgtaacttaattatggccttaactgaatcaacctgaagataatggagtgaagaaagtgaagtgttacaacccacagcatcatatgtgataccataatgactgtctacacatagccgatcgtcgtgagtgctgtcacctgctggtttgggggtagtaatgtgtcgctttaactttcagagtaatggagaaagatcctttccatgcaagttgtttacctgtacatatagggacgcttgtagagctgaataaagccaatgaacttttctatctttctcataaactggtggatttatatcctagtaatcctgtgtcttggtttgcagtgggatgttactatctcatggtcggtcataaaaatgaacatgccagaagatatctcagcaaagccacaacacttgagaaaacctatggacctgcatggatagcctatggacattcatttgcggtggagagtgagcacgaccaagcgatggctgcttacttcacagcagcacagctgatgaaagggtgtcatttgcctatgctgtatattggattagaatatggtttgaccaataactcaaaactagctgaaaggttcttcagccaagctctgagcattgcaccggaagacccttttgttatgcatgaggtcggcgtggttgcatttcagaatggagaatggaaaacagccgaaaaatggtttcttgatgctttggaaaaaattaaagcaattgggaacgaggtaacagttgacaaatgggaacctttgttgaacaacttggggcatgtctgcagaaaacttaaaaagtatgctgaggccttggattaccaccgtcaggcactggtgttgattcctcagaacgcatccacctactctgctattggatatatccacagtctgatgggcaactttgaaaatgctgtggactacttccacacagcccttggtcttaggcgagatgatacattttctgttacaatgcttggtcattgcatcgaaatgtacattggtgattctgaagcttatattggagcagacattaaagacaaattaaaatgttatgactttgatgtgcatacaatgaagacactaaaaaacattatttcacctccgtgggatttcagggaatttgaagtagaaaaacagactgcagaagaaacggggcttacgccattggaaacctcaaggaaaactccagattccagaccttccttggaagaaacctttgaaattgaaatgaatgaaagtgacatgatgttagagacatctatgtcagaccacagcacgtgactccagtcagtggtcctggtcccactgtcccagtgtaggttagtattccttcacatcctctccatggcttaagaatgtcccacttcctaacgtgactccaaactgcatctctacatttaggaacagagacccgccttaagagactggatcgcacacctttgcaacagatgtgttctgattctctgaacctacaaaatagttatacatagtggaataaagaaggtaaaccatctgttatgtctttttttttcttttccaataaacttttattttggactaaa

SEQ ID NO: 348979 - DNA, 2388 bp, Homo sapiens
tgcacggggcctgggtggggggtgcgggtgtgggtggggacctgcggccttcgagtccgcggccttcgagtcctggggcggcggcggcggctgcaggcacgggcacgggcacggggcggggtgcttagggtgcaggaggcgcgcgcctagcggcggagtgtggcgtgaggccgggcccgcgccgccatgaacctagagcggctgcggaagcgcgtccggcagtacctcgaccagcaacagtatcaaagtgctctattttgggcagataaagtagcttcactctctcgtgaagaaccccaggacatctattggttggctcagtgtctttacctgacagcacaatatcacagagccgcccatgcacttcggtcacgaaaactggacaaattgtatgaagcatgtcgttaccttgcagctaggtgccattatgctgcaaaagagcaccagcaggcccttgatgttcttgacatggaagagcccatcaataaaagattatttgaaaaatacttgaaggacgaaagtggcttcaaagatccttccagcgactgggaaatgtcacagtcttcaataaagagttctatctgtcttctacgcgggaaaatctatgatgctctagataaccgaaccctggctacctacagctacaaagaagctttgaagcttgatgtctactgttttgaagcgttcgatcttttaacatcacatcacatgctgacagcacaagaagaaaaagaacttcttgaatcactaccccttagcaagctgtgtaatgaagaacaggaattgctgcgttttctatttgagaacaaattgaaaaaatataataagcctagtgaaacggtcatccctgaatctgtagatggcttgcaagagaatctggatgtggtagtgtctttagctgagagacattattataactgtgattttaaaatgtgctacaagcttacttctgtagtaatggagaaagatcctttccatgcaagttgtttacctgtacatatagggacgcttgtagagctgaataaagccaatgaacttttctatctttctcataaactggtggatttatatcctagtaatcctgtgtcttggtttgcagtgggatgttactatctcatggtcggtcataaaaatgaacatgccagaagatatctcagcaaagccacaacacttgagaaaacctatggacctgcatggatagcctatggacattcatttgcggtggagagtgagcacgaccaagcgatggctgcttacttcacagcagcacagctgatgaaagggtgtcatttgcctatgctgtatattggattagaatatggtttgaccaataactcaaaactagctgaaaggttcttcagccaagctctgagcattgcaccggaagacccttttgttatgcatgaggtcggcgtggttgcatttcagaatggagaatggaaaacagccgaaaaatggtttcttgatgctttggaaaaaattaaagcaattgggaacgaggtaacagttgacaaatgggaacctttgttgaacaacttggggcatgtctgcagaaaacttaaaaagtatgctgaggccttggattaccaccgtcaggcactggtgttgattcctcagaacgcatccacctactctgctattggatatatccacagtctgatgggcaactttgaaaatgctgtggactacttccacacagcccttggtcttaggcgagatgatacattttctgttacaatgcttggtcattgcatcgaaatgtacattggtgattctgaagcttatattgcacctaactggaaatgactcaaacgtccaccagtaggagagaggagaaataaattgtggagcagacattaaagacaaattaaaatgttatgactttgatgtgcatacaatgaagacactaaaaaacattatttcacctccgtgggatttcagggaatttgaagtagaaaaacagactgcagaagaaacggggcttacgccattggaaacctcaaggaaaactccagattccagaccttccttggaagaaacctttgaaattgaaatgaatgaaagtgacatgatgttagagacatctatgtcagaccacagcacgtgactccagtcagtggtcctggtcccactgtcccagtgtaggttagtattccttcacatcctctccatggcttaagaatgtcccacttcctaacgtgactccaaactgcatctctacatttaggaacagagacccgccttaagagactggatcgcacacctttgcaacagatgtgttctgattctctgaacctacaaaatagttatacatagtggaataaagaaggtaaaccatctgttatgtctttttttttcttttccaataaacttttattttggactaaa

SEQ ID NO: 348980 - DNA, 2239 bp, Homo sapiens
tgcacggggcctgggtggggggtgcgggtgtgggtggggacctgcggccttcgagtccgcggccttcgagtcctggggcggcggcggcggctgcaggcacgggcacgggcacggggcggggtgcttagggtgcaggaggcgcgcgcctagcggcggagtgtggcgtgaggccgggcccgcgccgccatgaacctagagcggctgcggaagcgcgtccggcagtacctcgaccagcaacagtatcaaagtgctctattttgggcagataaagtagcttcactctctcgtgaagaaccccaggacatctattggttggctcagtgtctttacctgacagcacaatatcacagagccgcccatgcacttcggtcacgaaaactggacaaattgtatgaagcatgtcgttaccttgcagctaggtgccattatgctgcaaaagagcaccagcaggcccttgatgttcttgacatggaagagcccatcaataaaagattatttgaaaaatacttgaaggacgaaagtggcttcaaagatccttccagcgactgggaaatgtcacagtcttcaataaagagttctatctgtcttctacgcgggaaaatctatgatgctctagataaccgaaccctggctacctacagctacaaagaagctttgaagcttgatgtctactgttttgaagcgttcgatcttttaacatcacatcacatgctgacagcacaagaagaaaaagaacttcttgaatcactaccccttagcaagctgtgtaatgaagaacaggaattgctgcgttttctatttgagaacaaattgaaaaaatataataagcctagtgaaacggtcatccctgaatctgtagatggcttgcaagagaatctggatgtggtagtgtctttagctgagagacattattataactgtgattttaaaatgtgctacaagcttacttctgtagtaatggagaaagatcctttccatgcaagttgtttacctgtacatatagggacgcttgtagagctgaataaagccaatgaacttttctatctttctcataaactggtggatttatatcctagtaatcctgtgtcttggtttgcagtgggatgttactatctcatggtcggtcataaaaatgaacatgccagaagatatctcagcaaagccacaacacttgagaaaacctatggacctgcatggatagcctatggacattcatttgcggtggagagtgagcacgaccaagcgatggctgcttacttcacagcagcacagctgatgaaagggtgtcatttgcctatgctgtatattggattagaatatggtttgaccaataactcaaaactagctgaaaggttcttcagccaagctctgagcattgcaccggaagacccttttgttatgcatgaggtcggcgtggttgcatttcagaatggagaatggaaaacagccgaaaaatggtttcttgatgctttggaaaaaattaaagcaattgggaacgaggtaacagttgacaaatgggaacctttgttgaacaacttggggcatgtctgcagaaaacttaaaaagtatgctgaggccttggattaccaccgtcaggcactggtgttgattcctcagaacgcatccacctactctgctattggatatatccacagtctgatgggcaactttgaaaatgctgtggactacttccacacagagcagacattaaagacaaattaaaatgttatgactttgatgtgcatacaatgaagacactaaaaaacattatttcacctccgtgggatttcagggaatttgaagtagaaaaacagactgcagaagaaacggggcttacgccattggaaacctcaaggaaaactccagattccagaccttccttggaagaaacctttgaaattgaaatgaatgaaagtgacatgatgttagagacatctatgtcagaccacagcacgtgactccagtcagtggtcctggtcccactgtcccagtgtaggttagtattccttcacatcctctccatggcttaagaatgtcccacttcctaacgtgactccaaactgcatctctacatttaggaacagagacccgccttaagagactggatcgcacacctttgcaacagatgtgttctgattctctgaacctacaaaatagttatacatagtggaataaagaaggtaaaccatctgttatgtctttttttttcttttccaataaacttttattttggactaaa

SEQ ID NO: 348981 - DNA, 2304 bp, Homo sapiens
tgcacggggcctgggtggggggtgcgggtgtgggtggggacctgcggccttcgagtccgcggccttcgagtcctggggcggcggcggcggctgcaggcacgggcacgggcacggggcggggtgcttagggtgcaggaggcgcgcgcctagcggcggagtgtggcgtgaggccgggcccgcgccgccatgaacctagagcggctgcggaagcgcgtccggcagtacctcgaccagcaacagtatcaaagtgctctattttgggcagataaagtagcttcactctctcgtgaagaaccccaggacatctattggttggctcagtgtctttacctgacagcacaatatcacagagccgcccatgcacttcggtcacgaaaactggacaaattgtatgaagcatgtcgttaccttgcagctaggtgccattatgctgcaaaagagcaccagcaggcccttgatgttcttgacatggaagagcccatcaataaaagattatttgaaaaatacttgaaggacgaaagtggcttcaaagatccttccagcgactgggaaatgtcacagtcttcaataaagagttctatctgtcttctacgcgggaaaatctatgatgctctagataaccgaaccctggctacctacagctacaaagaagctttgaagcttgatgtctactgttttgaagcgttcgatcttttaacatcacatcacatgctgacagcacaagaagaaaaagaacttcttgaatcactaccccttagcaagctgtgtaatgaagaacaggaattgctgcgttttctatttgagaacaaattgaaaaaatataataagcctagtgaaacggtcatccctgaatctgtagatggcttgcaagagaatctggatgtggtagtgtctttagctgagagacattattataactgtgattttaaaatgtgctacaagcttacttctgtagtaatggagaaagatcctttccatgcaagttgtttacctgtacatatagggacgcttgtagagctgaataaagccaatgaacttttctatctttctcataaactggtggatttatatcctagtaatcctgtgtcttggtttgcagtgggatgttactatctcatggtcggtcataaaaatgaacatgccagaagatatctcagcaaagccacaacacttgagaaaacctatggacctgcatggatagcctatggacattcatttgcggtggagagtgagcacgaccaagcgatggctgcttacttcacagcagcacagctgatgaaagggtgtcatttgcctatgctgtatattggattagaatatggtttgaccaataactcaaaactagctgaaaggttcttcagccaagctctgagcattgcaccggaagacccttttgttatgcatgaggtcggcgtggttgcatttcagaatggagaatggaaaacagccgaaaaatggtttcttgatgctttggaaaaaattaaagcaattgggaacgaggtaacagttgacaaatgggaacctttgttgaacaacttggggcatgtctgcagaaaacttaaaaagtatgctgaggccttggattaccaccgtcaggcactggtgttgattcctcagaacgcatccacctactctgctattggatatatccacagtctgatgggcaactttgaaaatgctgtggactacttccacacagcccttggtcttaggcgagatgatacattttctgttacaatgcttggtcattgcatcgaaatgtacattggtgattctgaagcttatattggagcagacattaaagacaaattaaaatgttatgactttgatgtgcatacaatgaagacactaaaaaacattatttcacctccgtgggatttcagggaatttgaagtagaaaaacagactgcagaagaaacggggcttacgccattggaaacctcaaggaaaactccagattccagaccttccttggaagaaacctttgaaattgaaatgaatgaaagtgacatgatgttagagacatctatgtcagaccacagcacgtgactccagtcagtggtcctggtcccactgtcccagtgtaggttagtattccttcacatcctctccatggcttaagaatgtcccacttcctaacgtgactccaaactgcatctctacatttaggaacagagacccgccttaagagactggatcgcacacctttgcaacagatgtgttctgattctctgaacctacaaaatagttatacatagtggatatttgaatgggttatccacgacgattaacatggatggcctt

SEQ ID NO: 348982 - DNA, 2268 bp, Homo sapiens
tgcacggggcctgggtggggggtgcgggtgtgggtggggacctgcggccttcgagtccgcggccttcgagtcctggggcggcggcggcggctgcaggcacgggcacgggcacggggcggggtgcttagggtgcaggaggcgcgcgcctagcggcggagtgtggcgtgaggccgggcccgcgccgccatgaacctagagcggctgcggaagcgcgtccggcagtacctcgaccagcaacagtatcaaagtgctctattttgggcagataaagtagcttcactctctcgtgaagaaccccaggacatctattggttggctcagtgtctttacctgacagcacaatatcacagagccgcccatgcacttcggtcacgaaaactggacaaattgtatgaagcatgtcgttaccttgcagctaggtgccattatgctgcaaaagagcaccagcaggcccttgatgttcttgacatggaagagcccatcaataaaagattatttgaaaaatacttgaaggacgaaagtggcttcaaagatccttccagcgactgggaaatgtcacagtcttcaataaagagttctatctgtcttctacgcgggaaaatctatgatgctctagataaccgaaccctggctacctacagctacaaagaagctttgaagcttgatgtctactgttttgaagcgttcgatcttttaacatcacatcacatgctgacagcacaagaagaaaaagaacttcttgaatcactaccccttagcaagctgtgtaatgaagaacaggaattgctgcgttttctatttgagaacaaattgaaaaaatataataagcctagtgaaacggtcatccctgaatctgtagatggcttgcaagagaatctggatgtggtagtgtctttagctgagagacattattataactgtgattttaaaatgtgctacaagcttacttctgtagtaatggagaaagatcctttccatgcaagttgtttacctgtacatatagggacgcttgtagagctgaataaagccaatgaacttttctatctttctcataaactggtggatttatatcctagtaatcctgtgtcttggtttgcagtgggatgttactatctcatggtcggtcataaaaatgaacatgccagaagatatctcagcaaagccacaacacttgagaaaacctatggacctgcatggatagcctatggacattcatttgcggtggagagtgagcacgaccaagcgatggctgcttacttcacagcagcacagctgatgaaagggtgtcatttgcctatgctgtatattggattagaatatggtttgaccaataactcaaaactagctgaaaggttcttcagccaagctctgagcattgcaccggaagacccttttgttatgcatgaggtcggcgtggttgcatttcagaatggagaatggaaaacagccgaaaaatggtttcttgatgctttggaaaaaattaaagcaattgggaacgaggtaacagttgacaaatgggaacctttgttgaacaacttggggcatgtctgcagaaaacttaaaaagtatgctgaggccttggattaccaccgtcaggcactggtgttgattcctcagaacgcatccacctactctgctattggatatatccacagtctgatgggcaactttgaaaatgctgtggactacttccacacagcccttggtcttaggcgagatgatacattttctgttacaatgcttggtcattgcatcgaaatgtacattggtgattctgaagcttatattggagcagacattaaagacaaattaaaatgttatgactttgatgtgcatacaatgaagacactaaaaaacattatttcacctccgtgggatttcagggaatttgaagtagaaaaacagactgcagaagaaacggggcttacgccattggaaacctcaaggaaaactccagattccagaccttccttggaagaaacctttgaaattgaaatgaatgaaagtgacatgatgttagagacatctatgtcagaccacagcacgtgactccagtcagtggtcctggtcccactgtcccagtgtaggttagtattccttcacatcctctccatggcttaagaatgtcccacttcctaacgtgactccactatgtataactattttgtaggttcagagaatcagaacacatctgttgcaaaggtgtgcgatccagtctcttaaggcgggtctctgttcctaaatgtagagatgcagtttggaggtcga

SEQ ID NO: 348983 - DNA, 941 bp, Homo sapiens
atttgagtattgtataatttacctttcttctgagatctgattaatacagaaggcactgcgcccagtcgagatagaactttttaaaaaatcttttttggggtagatttccagcataagaaaatagaatagtgtgatgaacctccatgacccataaccaacttcaacaatctttggttcatggccagtcatgtagctatgtctggccacttcccccaccctggatgccctggaatattttgaaatgaatcagtgtggtaagagaaggaaatatgttttcttttaataaccatgctgaatcttttatggcaggcccttggtcttaggcgagatgatacattttctgttacaatgcttggtcattgcatcgaaatgtacattggtgattctgaagcttatattggagcagacattaaagacaaattaaaatgttatgactttgatgtgcatacaatgaagacactaaaaaacattatttcacctccgtgggatttcagggaatttgaagtagaaaaacagactgcagaagaaacggggcttacgccattggaaacctcaaggaaaactccagattccagaccttccttggaagaaacctttgaaattgaaatgaatgaaagtgacatgatgttagagacatctatgtcagaccacagcacgtgactccagtcagtggtcctggtcccactgtcccagtgtaggttagtattccttcacatcctctccatggcttaagaatgtcccacttcctaacgtgactccaaactgcatctctacatttaggaacagagacccgccttaagagactggatcgcacacctttgcaacagatgtgttctgattctctgaacctacaaaatagttatacatagtggaataaagaaggtaaaccatctgttatgtctttttttttcttttccaataaacttttattttggactaaa

SEQ ID NO: 348984 - DNA, 613 bp, Homo sapiens
ttttttattttatatatatttttctgtattttgtctttcgtgttttgacaaactaggtacagtacttaagcagagcagacattaaagacaaattaaaatgttatgactttgatgtgcatacaatgaagacactaaaaaacattatttcacctccgtgggatttcagggaatttgaagtagaaaaacagactgcagaagaaacggggcttacgccattggaaacctcaaggaaaactccagattccagaccttccttggaagaaacctttgaaattgaaatgaatgaaagtgacatgatgttagagacatctatgtcagaccacagcacgtgactccagtcagtggtcctggtcccactgtcccagtgtaggttagtattccttcacatcctctccatggcttaagaatgtcccacttcctaacgtgactccaaactgcatctctacatttaggaacagagacccgccttaagagactggatcgcacacctttgcaacagatgtgttctgattctctgaacctacaaaatagttatacatagtggaataaagaaggtaaaccatctgttatgtctttttttttcttttccaataaacttttattttggactaaa

SEQ ID NO: 348985 - DNA, 355 bp, Homo sapiens
actttagacatttcacatttaaataatgggcatagtatatgttatcctttaaaaattcggatcatgtgtttcgtgttagaagtcgtgagtgatgagcggcacttctgttttccacgtagtatgctgcaaaagagcaccagcaggcccttgatgttcttgacatggaagagcccatcaataaaagattatttgaaaaatacttgaaggacgaaagtggcttcaaagatccttccagcgactgggaaatgtcacagtcttcagtaagtagtactgtgagcacagctcagtaacggcggcgagaattgccctcattacgtggcagaaacacattatcttcttttacttattactatat

SEQ ID NO: 348986 - DNA, 1124 bp, Homo sapiens
tgcacggggcctgggtggggggtgcgggtgtgggtggggacctgcggccttcgagtccgcggccttcgagtcctggggcggcggcggcggctgcaggcacgggcacgggcacggggcggggtgcttagggtgcaggaggcgcgcgcctagcggcggagtgtggcgtgaggccgggcccgcgccgccatgaacctagagcggctgcggaagcgcgtccggcagtacctcgaccagcaacagtatcaaagtgctctattttgggcagataaagtagcttcactctctcgtgaagaaccccaggacatctattggttggctcagtgtctttacctgacagcacaatatcacagagccgcccatgcacttcggtcacgaaaactggacaaattgtatgaagcatgtcgttaccttgcagctaggtgccattatgctgcaaaagagcaccagcaggcccttgatgttcttgacatggaagagcccatcaataaaagattatttgaaaaatacttgaaggacgaaagtggcttcaaagatccttccagcgactgggaaatgtcacagtcttcaataaagagttctatctgtcttctacgcgggaaaatctatgatgctctagataaccgaaccctggctacctacagctacaaagaagctttgaagcttgatgtctactgttttgaagcgttcgatcttttaacatcacatcacatgctgacagcacaagaaggtttggaaactcaggcttttttgttttatgtttagcaaaattaatattgtttggattttttgcctctgaaatcttctaagtcaacaacaggccacatacaggtttaaatagacctactcactttcttaatgtcttcaaatgtaaagcacgttgcagaatgcagtattgtacggtgccttgtgctgtccgaatctagggattgtgataggaagaggccatctttttgagaagtgattgagatagtataaaccaggatttcagtatctcatgcagtgattctcaaccgtgttgctctttacatccttgggaagacagagaaacatccatgtccagttcccaactccagagcagatgctttaaagctcccaggtgatcctaatgtaccacaggcactgag

SEQ ID NO: 348987 - DNA, 2681 bp, Homo sapiens
tgcacggggcctgggtggggggtgcgggtgtgggtggggacctgcggccttcgagtccgcggccttcgagtcctggggcggcggcggcggctgcaggcacgggcacgggcacggggcggggtgcttagggtgcaggaggcgcgcgcctagcggcggagtgtggcgtgaggccgggcccgcgccgccatgaacctagagcggctgcggaagcgcgtccggcagtacctcgaccagcaacagtatcaaagtgctctattttgggcagataaagtagcttcactctctcgtgaagaaccccaggacatctattggttggctcagtgtctttacctgacagcacaatatcacagagccgcccatgcacttcggtcacgaaaactggacaaattgtatgaagcatgtcgttaccttgcagctaggtgccattatgctgcaaaagagcaccagcaggcccttgatgttcttgacatggaagagcccatcaataaaagattatttgaaaaatacttgaaggacgaaagtggcttcaaagatccttccagcgactgggaaatgtcacagtcttcaataaagagttctatctgtcttctacgcgggaaaatctatgatgctctagataaccgaaccctggctacctacagctacaaagaagctttgaagcttgatgtctactgttttgaagcgttcgatcttttaacatcacatcacatgctgacagcacaagaagaaaaagaacttcttgaatcactaccccttagcaagctgtgtaatgaagaacaggaattgctgcgttttctatttgagaacaaattgaaaaaatataataagcctagtgaaacggtcatccctgaatctgtagatggcttgcaagagaatctggatgtggtagtgtctttagctgagagacattattataactgtgattttaaaatgtgctacaagcttacttctgtagtaatggagaaagatcctttccatgcaagttgtttacctgtacatatagggacgcttgtagagctgaataaagccaatgaacttttctatctttctcataaactggtggatttatatcctagtaatcctgtgtcttggtttgcagtgggatgttactatctcatggtcggtcataaaaatgaacatgccagaagatatctcagcaaagccacaacacttgagaaaacctatggacctgcatggatagcctatggacattcatttgcggtggagagtgagcacgaccaagcgatggctgcttacttcacagcagcacagctgatgaaagggtgtcatttgcctatgctgtatattggattagaatatggtttgaccaataactcaaaactagctgaaaggttcttcagccaagctctgagcattgcaccggaagacccttttgttatgcatgaggtcggcgtggttgcatttcagaatggagaatggaaaacagccgaaaaatggtttcttgatgctttggaaaaaattaaagcaattgggaacgaggtaacagttgacaaatgggaacctttgttgaacaacttggggcatgtctgcagaaaacttaaaaagtatgctgaggccttggattaccaccgtcaggcactggtgttgattcctcagaacgcatccacctactctgctattggatatatccacagtctgatgggcaactttgaaaatgctgtggactacttccacacagcccttggtcttaggcgagatgatacattttctgttacaatgcttggtcattgcatcgaaatgtacattggtgattctgaagcttatattggagcagacattaaagacaaattaaaatgttatgactttgatgtgcatacaatgaagacactaaaaaacattatttcacctccgtgggatttcagggaatttgaagtagaaaaacagactgcagaagaaacggggcttacgccattggaaacctcaaggaaaactccagattccagaccttccttggaagaaacctttgaaattgaaatgaatgaaagtgacatgatgttagagacatctatgtcagaccacagcacgtgactccagtcagtggtcctggtcccactgtcccagtgtaggttagtattccttcacatcctctccatggcttaagaatgtcccacttcctaacgtgactccaaactgcatctctacatttaggaacagagacccgccttaagagactggatcgcacacctttgcaacagatgtgttctgattctctgaacctacaaaatagttatacatagtggaataaagaaggtaaaccatcaaaaaaaaaaaaaaaaaaacaaaaacaccaaaaagaaaataaaagaaaaaaaaagacaaaaaaaaaaaatgagaacaacaaaaaaaataaagcgagacacgaccaccaaaaacacacagcacgaaggagggggaggcgtacgatgatgagcagcccggctggaagaagtcgagcgtagcggctgatccgaggaaggggcagagcccgaggaaggggaatacggagatgagtaggaaagaggggggagaggtaagagggtaggagatagtagcaagggtgcatagaaaggaaacaaaatggtgggacagtaggcggcacccccgtaggagacggagtgaaaaacagaggggggggcgaggagagtaggagaggaagacagagttgtaatacagcggtagaa

SEQ ID NO: 348988 - DNA, 2275 bp, Homo sapiens
tgcacggggcctgggtggggggtgcgggtgtgggtggggacctgcggccttcgagtccgcggccttcgagtcctggggcggcggcggcggctgcaggcacgggcacgggcacggggcggggtgcttagggtgcaggaggcgcgcgcctagcggcggagtgtggcgtgaggccgggcccgcgccgccatgaacctagagcggctgcggaagcgcgtccggcagtacctcgaccagaagaaccccaggacatctattggttggctcagtgtctttacctgacagcacaatatcacagagccgcccatgcacttcggtcacgaaaactggacaaattgtatgaagcatgtcgttaccttgcagctaggtgccattatgctgcaaaagagcaccagcaggcccttgatgttcttgacatggaagagcccatcaataaaagattatttgaaaaatacttgaaggacgaaagtggcttcaaagatccttccagcgactgggaaatgtcacagtcttcaataaagagttctatctgtcttctacgcgggaaaatctatgatgctctagataaccgaaccctggctacctacagctacaaagaagctttgaagcttgatgtctactgttttgaagcgttcgatcttttaacatcacatcacatgctgacagcacaagaagaaaaagaacttcttgaatcactaccccttagcaagctgtgtaatgaagaacaggaattgctgcgttttctatttgagaacaaattgaaaaaatataataagcctagtgaaacggtcatccctgaatctgtagatggcttgcaagagaatctggatgtggtagtgtctttagctgagagacattattataactgtgattttaaaatgtgctacaagcttacttctgtagtaatggagaaagatcctttccatgcaagttgtttacctgtacatatagggacgcttgtagagctgaataaagccaatgaacttttctatctttctcataaactggtggatttatatcctagtaatcctgtgtcttggtttgcagtgggatgttactatctcatggtcggtcataaaaatgaacatgccagaagatatctcagcaaagccacaacacttgagaaaacctatggacctgcatggatagcctatggacattcatttgcggtggagagtgagcacgaccaagcgatggctgcttacttcacagcagcacagctgatgaaagggtgtcatttgcctatgctgtatattggattagaatatggtttgaccaataactcaaaactagctgaaaggttcttcagccaagctctgagcattgcaccggaagacccttttgttatgcatgaggtcggcgtggttgcatttcagaatggagaatggaaaacagccgaaaaatggtttcttgatgctttggaaaaaattaaagcaattgggaacgaggtaacagttgacaaatgggaacctttgttgaacaacttggggcatgtctgcagaaaacttaaaaagtatgctgaggccttggattaccaccgtcaggcactggtgttgattcctcagaacgcatccacctactctgctattggatatatccacagtctgatgggcaactttgaaaatgctgtggactacttccacacagcccttggtcttaggcgagatgatacattttctgttacaatgcttggtcattgcatcgaaatgtacattggtgattctgaagcttatattggagcagacattaaagacaaattaaaatgttatgactttgatgtgcatacaatgaagacactaaaaaacattatttcacctccgtgggatttcagggaatttgaagtagaaaaacagactgcagaagaaacggggcttacgccattggaaacctcaaggaaaactccagattccagaccttccttggaagaaacctttgaaattgaaatgaatgaaagtgacatgatgttagagacatctatgtcagaccacagcacgtgactccagtcagtggtcctggtcccactgtcccagtgtaggttagtattccttcacatcctctccatggcttaagaatgtcccacttcctaacgtgactccaaactgcatctctacatttaggaacagagacccgccttaagagactggatcgcacacctttgcaacagatgtgttctgattctctgaacctacaaaatagttatacatagtggaataaagaaggtaaaccatctgttatgtctttttttttcttttccaataaacttttattttggactaaa

SEQ ID NO: 348989 - DNA, 2268 bp, Homo sapiens
tgcacggggcctgggtggggggtgcgggtgtgggtggggacctgcggccttcgagtccgcggccttcgagtcctggggcggcggcggcggctgcaggcacgggcacgggcacggggcggggtgcttagggtgcaggaggcgcgcgcctagcggcggagtgtggcgtgaggccgggcccgcgccgccatgaacctagagcggctgcggaagcgcgtccggcagtacctcgaccagcaacagtatcaaagtgctctattttgggcagataaagtagcttcactctctcgtgaagaaccccaggacatctattggttggctcagtgtctttacctgacagcacaatatcacagagccgcccatgcacttcggtcacgaaaactggacaaattgtatgaagcatgtcgttaccttgcagctaggtgccattatgctgcaaaagagcaccagcaggcccttgatgttcttgacatggaagagcccatcaataaaagattatttgaaaaatacttgaaggacgaaagtggcttcaaagatccttccagcgactgggaaatgtcacagtcttcaataaagagttctatctgtcttctacgcgggaaaatctatgatgctctagataaccgaaccctggctacctacagctacaaagaagctttgaagcttgatgtctactgttttgaagcgttcgatcttttaacatcacatcacatgctgacagcacaagaagaaaaagaacttcttgaatcactaccccttagcaagctgtgtaatgaagaacaggaattgctgcgttttctatttgagaacaaattgaaaaaatataataagcctagtgaaacggtcatccctgaatctgtagatggcttgcaagagaatctggatgtggtagtgtctttagctgagagacattattataactgtgattttaaaatgtgctacaagcttacttctgtagtaatggagaaagatcctttccatgcaagttgtttacctgtacatatagggacgcttgtagagctgaataaagccaatgaacttttctatctttctcataaactggtggatttatatcctagtaatcctgtgtcttggtttgcagtgggatgttactatctcatggtcggtcataaaaatgaacatgccagaagatatctcagcaaagccacaacacttgagaaaacctatggacctgcatggatagcctatggacattcatttgcggtggagagtgagcacgaccaagcgatggctgcttacttcacagcagcacagctgatgaaagggtgtcatttgcctatgctgtatattggattagaatatggtttgaccaataactcaaaactagctgaaaggttcttcagccaagctctgagcattgcaccggaagacccttttgttatgcatgaggtcggcgtggttgcatttcagaatggagaatggaaaacagccgaaaaatggtttcttgatgctttggaaaaaattaaagcaattgggaacgagaaagtatgctgaggccttggattaccaccgtcaggcactggtgttgattcctcagaacgcatccacctactctgctattggatatatccacagtctgatgggcaactttgaaaatgctgtggactacttccacacagcccttggtcttaggcgagatgatacattttctgttacaatgcttggtcattgcatcgaaatgtacattggtgattctgaagcttatattggagcagacattaaagacaaattaaaatgttatgactttgatgtgcatacaatgaagacactaaaaaacattatttcacctccgtgggatttcagggaatttgaagtagaaaaacagactgcagaagaaacggggcttacgccattggaaacctcaaggaaaactccagattccagaccttccttggaagaaacctttgaaattgaaatgaatgaaagtgacatgatgttagagacatctatgtcagaccacagcacgtgactccagtcagtggtcctggtcccactgtcccagtgtaggttagtattccttcacatcctctccatggcttaagaatgtcccacttcctaacgtgactccaaactgcatctctacatttaggaacagagacccgccttaagagactggatcgcacacctttgcaacagatgtgttctgattctctgaacctacaaaatagttatacatagtggaataaagaaggtaaaccatctgttatgtctttttttttcttttccaataaacttttattttggactaaa

SEQ ID NO: 348990 - DNA, 2106 bp, Homo sapiens
ggattctaacatattttagcctagtgcagtggttctcaaccaaccagagtgattttgccgccccctgccccgggaacagttggcaatgtctggagatgttgtttgtcacagcttaggggcagggagggaggttgagaggttgctgctggtatctagtggttagtggccagaggtcctgcttagcacctgcagtacacaggctcccctgttcccagcagagcaagatccacgcagtcaggagtgcggaggctggtggttcttaggtgacaagagccacctggggacctgcctcagccctgaaagagtagcctccacccaccagatgattcccgtcttcaggcctggagccactgtgtcagcttctgttgcacattttgatcttatgttctcttttgagtttgatttacttagaccaagaactgtagaatcatatttttagttgttggctttttcccctctataaatattatgaggatattcttttttttctcaccatttttaagaaaaagaacttcttgaatcactaccccttagcaagctgtgtaatgaagaacaggaattgctgcgttttctatttgagaacaaattgaaaaaatataataagcctagtgaaacggtcatccctgaatctgtagatggcttgcaagagaatctggatgtggtagtgtctttagctgagagacattattataactgtgattttaaaatgtgctacaagcttacttctgtagtaatggagaaagatcctttccatgcaagttgtttacctgtacatatagggacgcttgtagagctgaataaagccaatgaacttttctatctttctcataaactggtggatttatatcctagtaatcctgtgtcttggtttgcagtgggatgttactatctcatggtcggtcataaaaatgaacatgccagaagatatctcagcaaagccacaacacttgagaaaacctatggacctgcatggatagcctatggacattcatttgcggtggagagtgagcacgaccaagcgatggctgcttacttcacagcagcacagctgatgaaagggtgtcatttgcctatgctgtatattggattagaatatggtttgaccaataactcaaaactagctgaaaggttcttcagccaagctctgagcattgcaccggaagacccttttgttatgcatgaggtcggcgtggttgcatttcagaatggagaatggaaaacagccgaaaaatggtttcttgatgctttggaaaaaattaaagcaattgggaacgaggtaacagttgacaaatgggaacctttgttgaacaacttggggcatgtctgcagaaaacttaaaaagtatgctgaggccttggattaccaccgtcaggcactggtgttgattcctcagaacgcatccacctactctgctattggatatatccacagtctgatgggcaactttgaaaatgctgtggactacttccacacagcccttggtcttaggcgagatgatacattttctgttacaatgcttggtcattgcatcgaaatgtacattggtgattctgaagcttatattggagcagacattaaagacaaattaaaatgttatgactttgatgtgcatacaatgaagacactaaaaaacattatttcacctccgtgggatttcagggaatttgaagtagaaaaacagactgcagaagaaacggggcttacgccattggaaacctcaaggaaaactccagattccagaccttccttggaagaaacctttgaaattgaaatgaatgaaagtgacatgatgttagagacatctatgtcagaccacagcacgtgactccagtcagtggtcctggtcccactgtcccagtgtaggttagtattccttcacatcctctccatggcttaagaatgtcccacttcctaacgtgactccaaactgcatctctacatttaggaacagagacccgccttaagagactggatcgcacacctttgcaacagatgtgttctgattctctgaacctacaaaatagttatacatagtggaataaagaaggtaaaccatctgttatgtctttttttttcttttccaataaacttttattttggactaaa

SEQ ID NO: 348991 - DNA, 1625 bp, Homo sapiens
gaagaatagaaaacgcagcaattcctgttcttcattacacagcttgctaagggcaagctgtgtaatgaagaacaggaattgctgcgttttctatttgagaacaaattgaaaaaatataataagcctagtgaaacggtcatccctgaatctgtagatggcttgcaagagaatctggatgtggtagtgtctttagctgagagacattattataactgtgattttaaaatgtgctacaagcttacttctgtagtaatggagaaagatcctttccatgcaagttgtttacctgtacatatagggacgcttgtagagctgaataaagccaatgaacttttctatctttctcataaactggtggatttatatcctagtaatcctgtgtcttggtttgcagtgggatgttactatctcatggtcggtcataaaaatgaacatgccagaagatatctcagcaaagccacaacacttgagaaaacctatggacctgcatggatagcctatggacattcatttgcggtggagagtgagcacgaccaagcgatggctgcttacttcacagcagcacagctgatgaaagggtgtcatttgcctatgctgtatattggattagaatatggtttgaccaataactcaaaactagctgaaaggttcttcagccaagctctgagcattgcaccggaagacccttttgttatgcatgaggtcggcgtggttgcatttcagaatggagaatggaaaacagccgaaaaatggtttcttgatgctttggaaaaaattaaagcaattgggaacgaggtaacagttgacaaatgggaacctttgttgaacaacttggggcatgtctgcagaaaacttaaaaagtatgctgaggccttggattaccaccgtcaggcactggtgttgattcctcagaacgcatccacctactctgctattggatatatccacagtctgatgggcaactttgaaaatgctgtggactacttccacacagcccttggtcttaggcgagatgatacattttctgttacaatgcttggtcattgcatcgaaatgtacattggtgattctgaagcttatattggagcagacattaaagacaaattaaaatgttatgactttgatgtgcatacaatgaagacactaaaaaacattatttcacctccgtgggatttcagggaatttgaagtagaaaaacagactgcagaagaaacggggcttacgccattggaaacctcaaggaaaactccagattccagaccttccttggaagaaacctttgaaattgaaatgaatgaaagtgacatgatgttagagacatctatgtcagaccacagcacgtgactccagtcagtggtcctggtcccactgtcccagtgtaggttagtattccttcacatcctctccatggcttaagaatgtcccacttcctaacgtgactccaaactgcatctctacatttaggaacagagacccgccttaagagactggatcgcacacctttgcaacagatgtgttctgattctctgaacctacaaaatagttatacatagtggaataaagaaggtaaaccatctgttatgtctttttttttcttttccaataaacttttattttggactaaa

SEQ ID NO: 348992 - DNA, 2639 bp, Homo sapiens
tgcacggggcctgggtggggggtgcgggtgtgggtggggacctgcggccttcgagtccgcggccttcgagtcctggggcggcggcggcggctgcaggcacgggcacgggcacggggcggggtgcttagggtgcaggaggcgcgcgcctagcggcggagtgtggcgtgaggccgggcccgcgccgccatgaacctagagcggctgcggaagcgcgtccggcagtacctcgaccagcaacagtatcaaagtgctctattttgggcagataaagtagcttcactctctcgtgaagaaccccaggacatctattggttggctcagtgtctttacctgacagcacaatatcacagagccgcccatgcacttcggtcacgaaaactggacaaattgtatgaagcatgtcgttaccttgcagctaggtgccataagtcgtgagtgatgagcggcacttctgttttccacgtagtatgctgcaaaagagcaccagcaggcccttgatgttcttgacatggaagagcccatcaataaaagattatttgaaaaatacttgaaggacgaaagtggcttcaaagatccttccagcgactgggaaatgtcacagtcttcaataaagagttctatctgtcttctacgcgggaaaatctatgatgctctagataaccgaaccctggctacctacagctacaaagaagctttgaagcttgatgtctactgttttgaagcgttcgatcttttaacatcacatcacatgctgacagcacaagaagaaaaagaacttcttgaatcactaccccttagcaagctgtgtaatgaagaacaggaattgctgcgttttctatttgagaacaaattgaaaaaatataataagcctagtgaaacggtcatccctgaatctgtagatggcttgcaagagaatctggatgtggtagtgtctttagctgagagacattattataactgtgattttaaaatgtgctacaagcttacttctgtagtaatggagaaagatcctttccatgcaagttgtttacctgtacatatagggacgcttgtagagctgaataaagccaatgaacttttctatctttctcataaactggtggatttatatcctagtaatcctgtgtcttggtttgcagtgggatgttactatctcatggtcggtcataaaaatgaacatgccagaagatatctcagcaaagccacaacacttgagaaaacctatggacctgcatggatagcctatggacattcatttgcggtggagagtgagcacgaccaagcgatggctgcttacttcacagcagcacagctgatgaaagggtgtcatttgcctatgctgtatattggattagaatatggtttgaccaataactcaaaactagctgaaaggttcttcagccaagctctgagcattgcaccggaagacccttttgttatgcatgaggtcggcgtggttgcatttcagaatggagaatggaaaacagccgaaaaatggtttcttgatgctttggaaaaaattaaagcaattgggaacgaggtaacagttgacaaatgggaacctttgttgaacaacttggggcatgtctgcagaaaacttaaaaagtatgctgaggccttggattaccaccgtcaggcactggtgttgattcctcagaacgcatccacctactctgctattggatatatccacagtctgatgggcaactttgaaaatgctgtggactacttccacacagcccttggtcttaggcgagatgatacattttctgttacaatgcttggtcattgcatcgaaatgtacattggtgattctgaagcttatattggagcagacattaaagacaaattaaaatgttatgactttgatgtgcatacaatgaagacactaaaaaacattatttcacctccgtgggatttcagggaatttgaagtagaaaaacagactgcagaagaaacggggcttacgccattggaaacctcaaggaaaactccagattccagaccttccttggaagaaacctttgaaattgaaatgaatgaaagtgacatgatgttagagacatctatgtcagaccacagcacgtgactccagtcagtggtcctggtcccactgtcccagtgtaggaacagagacccgccttaagagactggatcgcacacctttgcaacagatgtgttctgattctctgaacctacaaaatagttatacatagtggaataaagaaggtaaaccatcaaaaaaaaaaaaaaaaaaacaaaaacaccaaaaagaaaataaaagaaaaaaaaagacaaaaaaaaaaaatgagaacaacaaaaaaaataaagcgagacacgaccaccaaaaacacacagcacgaaggagggggaggcgtacgatgatgagcagcccggctggaagaagtcgagcgtagcggctgatccgaggaaggggcagagcccgaggaaggggaatacggagatgagtaggaaagaggggggagaggtaagagggtaggagatagtagcaagggtgcatagaaaggaaacaaaatggtgggacagtaggcggcacccccgtaggagacggagtgaaaaacagaggggggggcgaggagagtaggagaggaagacagagttgtaatacagcggtagaa

SEQ ID NO: 348993 - DNA, 1113 bp, Homo sapiens
gtatcgtgagtgaccctcgtatcatgtgatggctggataacttcacagcagcctgctgatgaaagggtgtcatttgcctatgctgtatattggattagaatatggtttgaccaataactcaaaactagctgaaaggttcttcagccaagctctgagcattgcaccggaagacccttttgttatgcatgaggtcggcgtggttgcatttcagaatggagaatggaaaacagccgaaaaatggtttcttgatgctttggaaaaaattaaagcaattgggaacgaggtaacagttgacaaatgggaacctttgttgaacaacttggggcatgtctgcagaaaacttaaaaagtatgctgaggccttggattaccaccgtcaggcactggtgttgattcctcagaacgcatccacctactctgctattggatatatccacagtctgatgggcaactttgaaaatgctgtggactacttccacacagcccttggtcttaggcgagatgatacattttctgttacaatgcttggtcattgcatcgaaatgtacattggtgattctgaagcttatattggagcagacattaaagacaaattaaaatgttatgactttgatgtgcatacaatgaagacactaaaaaacattatttcacctccgtgggatttcagggaatttgaagtagaaaaacagactgcagaagaaacggggcttacgccattggaaacctcaaggaaaactccagattccagaccttccttggaagaaacctttgaaattgaaatgaatgaaagtgacatgatgttagagacatctatgtcagaccacagcacgtgactccagtcagtggtcctggtcccactgtcccagtgtaggttagtattccttcacatcctctccatggcttaagaatgtcccacttcctaacgtgactccaaactgcatctctacatttaggaacagagacccgccttaagagactggatcgcacacctttgcaacagatgtgttctgattctctgaacctacaaaatagttatacatagtggaataaagaaggtaaaccatctgttatgtctttttttttcttttccaataaacttttattttggactaaa

SEQ ID NO: 348994 - DNA, 2505 bp, Homo sapiens
tgcacggggcctgggtggggggtgcgggtgtgggtggggacctgcggccttcgagtccgcggccttcgagtcctggggcggcggcggcggctgcaggcacgggcacgggcacggggcggggtgcttagggtgcaggaggcgcgcgcctagcggcggagtgtggcgtgaggccgggcccgcgccgccatgaacctagagcggctgcggaagcgcgtccggcagtacctcgaccagcaacagtatcaaagtgctctattttgggcagataaagtagcttcactctctcgtgaagaaccccaggacatctattggttggctcagtgtctttacctgacagcacaatatcacagagccgcccatgcacttcggtcacgaaaactggacaaattgtatgaagcatgtcgttaccttgcagctaggtgccattatgctgcaaaagagcaccagcaggcccttgatgttcttgacatggaagagcccatcaataaaagattatttgaaaaatacttgaaggacgaaagtggcttcaaagatccttccagcgactgggaaatgtcacagtcttcaataaagagttctatctgtcttctacgcgggaaaatctatgatgctctagataaccgaaccctggctacctacagctacaaagaagctttgaagcttgatgtctactgttttgaagcgttcgatcttttaacatcacatcacatgctgacagcacaagaagaaaaagaacttcttgaatcactaccccttagcaagctgtgtaatgaagaacaggaattgctgcgttttctatttgagaacaaattgaaaaaatataataagcctagtgaaacggtcatccctgaatctgtagatggcttgcaagagaatctggatgtggtagtgtctttagctgagagacattattataactgtgattttaaaatgtgctacaagcttacttctgtagtaatggagaaagatcctttccatgcaagttgtttacctgtacatatagggacgcttgtagagctgaataaagccaatgaacttttctatctttctcataaactggtggatttatatcctagtaatcctgtgtcttggtttgcagtgggatgttactatctcatggtcggtcataaaaatgaacatgccagaagatatctcagcaaagccacaacacttgagaaaacctatggacctgcatggatagcctatggacattcatttgcggtggagagtgagcacgaccaagcgatggctgcttacttcacagcagcacagctgatgaaagggtgtcatttgcctatgctgtatattggattagaatatggtttgaccaataactcaaaactagctgaaaggttcttcagccaagctctgagcattgcaccggaagacccttttgttatgcatgaggtcggcgtggttgcatttcagaatggagaatggaaaacagccgaaaaatggtttcttgatgctttggaaaaaattaaagcaattgggaacgaggtaacagttgacaaatgggaacctttgttgaacaacttggggcatgtctgcagaaaacttaaaaagtatgctgaggccttggattaccaccgtcaggcactggtgttgattcctcagaacgcatccacctactctgctattggatatatccacagtctgatgggcaactttgaaaatgctgtggactacttccacacagcccttggtcttaggcgagatgatacattttctgttacaatgcttggtcattgcatcgaaatgtacattggtgattctgaagcttatattgggaatttgaagtagaaaaacagactgcagaagaaacggggcttacgccattggaaacctcaaggaaaactccagattccagaccttccttggaagaaacctttgaaattgaaatgaatgaaagtgacatgatgttagagacatctatgtcagaccacagcacgtgactccagtcagtggtcctggtcccactgtcccagtgtaggaacagagacccgccttaagagactggatcgcacacctttgcaacagatgtgttctgattctctgaacctacaaaatagttatacatagtggaataaagaaggtaaaccatcaaaaaaaaaaaaaaaaaaacaaaaacaccaaaaagaaaataaaagaaaaaaaaagacaaaaaaaaaaaatgagaacaacaaaaaaaataaagcgagacacgaccaccaaaaacacacagcacgaaggagggggaggcgtacgatgatgagcagcccggctggaagaagtcgagcgtagcggctgatccgaggaaggggcagagcccgaggaaggggaatacggagatgagtaggaaagaggggggagaggtaagagggtaggagatagtagcaagggtgcatagaaaggaaacaaaatggtgggacagtaggcggcacccccgtaggagacggagtgaaaaacagaggggggggcgaggagagtaggagaggaagacagagttgtaatacagcggtagaa

SEQ ID NO: 348995 - DNA, 2186 bp, Homo sapiens
gggctagggacacactagaatattcacgctccggtggcagcagcagcagcagccagaggagcagcccgacacaacaagggacccctcaggaatgaagcagcctttcagggccagaggggctgtggtctcccttcctctccttaaatagccagcgttccacccacagcggcaaggagccccctgccaccaccgacacccacgggcggagatcacctgctgccccgcagacccctgtcccttcctcccggaccagcagctagaggctctgactccagccaaagcatgaatggccttgaagtggctcccccaggtctgatcaccaacttctccctggccacggcagagcaatgtggccaggagacgccactggagaacatgctgttcgcctccttctaccttctggattttatcctggctttagttggcaataccctggctctgtggcttttcatccgagaccacaagtccgggaccccggccaacgtgttcctgatgcatctggccgtggccgacttgtcgtgcgtgctggtcctgcccacccgcctggtctaccacttctctgggaaccactggccatttggggaaatcgcatgccgtctcaccggcttcctcttctacctcaacatgtacgccagcatctacttcctcacctgcatcagcgccgaccgtttcctggccattgtgcacccggtcaagtccctcaagctccgcaggcccctctacgcacacctggcctgtgccttcctgtgggtggtggtggctgtggccatggccccgctgctggtgagcccacagaccgtgcagaccaaccacacggtggtctgcctgcagctgtaccgggagaaggcctcccaccatgccctggtgtccctggcagtggccttcaccttcccgttcatcaccacggtcacctgctacctgctgatcatccgcagcctgcggcagggcctgcgtgtggagaagcgcctcaagaccaaggcagtgcgcatgatcgccatagtgctggccatcttcctggtctgcttcgtgccctaccacgtcaaccgctccgtctacgtgctgcactaccgcagccatggggcctcctgcgccacccagcgcatcctggccctggcaaaccgcatcacctcctgcctcaccagcctcaacggggcactcgaccccatcatgtatttcttcgtggctgagaagttccgccacgccctgtgcaacttgctctgtggcaaaaggctcaagggcccgccccccagcttcgaagggaaaaccaacgagagctcgctgagtgccaagtcagagctgtgagcggggggcgccgtccaggccgagcgcagactgtttaggactcagcagacccagcaagaggcatctgccctttccccagccacctccccagcaagcaacctgaaatctcagcagatgcccaccatttctctagatcgcctagtctcaacccataaaaaggaagaactgacaaaggggatccatcggccacccctctgcaggggcttgtgatggctacaatggctcctagacactcaacgacttcatctgtggcagggagagaggaggccggaagaacaacccctgaacaatggaggcctttctttcccgctaggctcccagcctccttcccgctacagaatcgctcatcggcgaggctcagcagaaagaccctgaaggcaggctgcaaatgacccagaagagggacctgggagtcctggtggggacggggagggagtctcaatactcctttgcagtgcaaggtactctgagtcccctctgtagtgcctctgccagacacacactgcctgagttgaagagacacaggccacacatttcaggctggttgccagcggacgtcagcactcacggcctgcagggactcagcacagctctggattctggatctctcctgctgtaaccccacgcacaagcctgcaacccccagagctctttgacaggctcccaggcctcccagtcctggacaagcatgtgcagtcacgggagctcagctcaggccagggctgggctgtgcacctgcctcccactgacccagacccacttcctccagagaggcctctctccgcctgagctatttcccttgctagtgtgcagatatttccctaacatgtccttttttgtatttgtttgtacggaccataaatataactgtagctttaagacta

SEQ ID NO: 348996 - DNA, 2697 bp, Homo sapiens
gggctagggacacactagaatattcacgctccggtggcagcagcagcagcagccagaggagcagcccgacacaacaagggacccctcaggaatgaagcagcctttcagggccagaggggctgtggtctcccttcctctccttaaatagccagcgttccacccacagcggcaaggagccccctgccaccaccgacacccacgggcggagatcacctgctgccccgcagacccctgtcccttcctcccggaccagcagctagaggctctgactccagccaaagcatgaatggccttgaagtggctcccccaggtctgatcaccaacttctccctggccacggcagagcaatgtggccaggagacgccactggagaacatgctgttcgcctccttctaccttctggattttatcctggctttagttggcaataccctggctctgtggcttttcatccgagaccacaagtccgggaccccggccaacgtgttcctgatgcatctggccgtggccgacttgtcgtgcgtgctggtcctgcccacccgcctggtctaccacttctctgggaaccactggccatttggggaaatcgcatgccgtctcaccggcttcctcttctacctcaacatgtacgccagcatctacttcctcacctgcatcagcgccgaccgtttcctggccattgtgcacccggtcaagtccctcaagctccgcaggcccctctacgcacacctggcctgtgccttcctgtgggtggtggtggctgtggccatggccccgctgctggtgagcccacagaccgtgcagaccaaccacacggtggtctgcctgcagctgtaccgggagaaggcctcccaccatgccctggtgtccctggcagtggccttcaccttcccgttcatcaccacggtcacctgctacctgctgatcatccgcagcctgcggcagggcctgcgtgtggagaagcgcctcaagaccaaggcagtgcgcatgatcgccatagtgctggccatcttcctggtctgcttcgtgccctaccacgtcaaccgctccgtctacgtgctgcactaccgcagccatggggcctcctgcgccacccagcgcatcctggccctggcaaaccgcatcacctcctgcctcaccagcctcaacggggcactcgaccccatcatgtatttcttcgtggctgagaagttccgccacgccctgtgcaacttgctctgtggcaaaaggctcaagggcccgccccccagcttcgaagggaaaaccaacgagagctcgctgagtgccaagtcagagctgtgagcggggggcgccgtccaggccgagcgcagactgtttaggactcagcagacccagcaagaggcatctgccctttccccagccacctccccagcaagcaacctgaaatctcagcagatgcccaccatttctctagatcgcctagtctcaacccataaaaaggaagaactgacaaaggggatccatcggccacccctctgcaggggcttgtgatggctacaatggctcctagacactcaacgacttcatctgtggcagggagagaggaggccggaagaacaacccctgaacaatggaggcctttctttcccgctaggctcccagcctccttcccgctacagaatcgctcatcggcgaggctcagcagaaagaccctgaaggcaggctgcaaatgacccagaagagggacctgggagtcctggtggggacggggagggagtctcaatactcctttgcagtgcaaggtactctgagtcccctctgtagtgcctctgccagacacacactgcctgagttgaagagacacaggccacacatttcaggctggttgccagcggacgtcagcactcacggcctgcagggactcagcacagctctggattctggatctctcctgctgtaaccccacgcacaagcctgcaacccccagagctctttgacaggctcccaggcctcccagtcctggacaagcatgtgcagtcacgggagctcagctcaggccagggctgggctgtgcacctgcctcccactgacccagacccacttcctccagagaggcctctctccgcctgagctatttcccttgctagtgtgcagatatttccctaacatgtccttttttgtatttgtttgtacggaccataaatataactgtagctttaagactacacaggttgttatgtttggtcaacatgaagcgtttcccagaacttctctgacccaagaatggtgaagtggtggtacagtggcagaggcagcctcgtgggctctcttgctggggctctggcagctcacagcacatctgcccagattctgaggttctgcactgtggggctgggagggccaagtaggggcctcattcctcactctagctgccacccctgttggtccggagaacaggctgggggcgaggcggttttaagccaggagggatgagatccagtctgaagtgtagtgtcacttggtcctatttcgtataccttctctgtgggagtatccagctctctcagaggccatgaagacccgggtataggagacagaaggaagggaacgcaggaagggcctgggcacggggaagtgggaagagctcagggctgcggccagcaggagccagtgtgcacaccctccaggcggcagctgccagcgagggcccctgtgctggccacaagcggggccaaa

SEQ ID NO: 348997 - DNA, 1939 bp, Homo sapiens
gggctagggacacactagaatattcacgctccggtggcagcagcagcagcagccagaggagcagcccgacacaacaagggacccctcaggaatgaagcagcctttcagggccagaggggctgtggtctcccttcctctccttaaatagccagcgttccacccacagcggcaaggagccccctgccaccaccgacacccacgggcggagatcacctgctgccccgcagacccctgtcccttcctcccggaccagcagctagaggctctgactccagccaaagcatgaatggccttgaagtggctcccccaggtctgatcaccaacttctccctggccacggcagagcaatgtggccaggagacgccactggagaacatgctgttcgcctccttctaccttctggattttatcctggctttagttggcaataccctggctctgtggcttttcatccgagaccacaagtccgggaccccggccaacgtgttcctgatgcatctggccgtggccgacttgtcgtgcgtgctggtcctgcccacccgcctggtctaccacttctctgggaaccactggccatttggggaaatcgcatgccgtctcaccggcttcctcttctacctcaacatgtacgccagcatctacttcctcacctgcatcagcgccgaccgtttcctggccattgtgcacccggtcaagtccctcaagctccgcaggcccctctacgcacacctggcctgtgccttcctgtgggtggtggtggctgtggccatggccccgctgctggtgagcccacagaccgtgcagaccaaccacacggtggtctgcctgcagctgtaccgggagaaggcctcccaccatgccctggtgtccctggcagtggccttcaccttcccgttcatcaccacggtcacctgctacctgctgatcatccgcagcctgcggcagggcctgcgtgtggagaagcgcctcaagaccaaggcagtgcgcatgatcgccatagtgctggccatcttcctggtctgcttcgtgccctaccacgtcaaccgctccgtctacgtgctgcactaccgcagccatggggcctcctgcgccacccagcgcatcctggccctggcaaaccgcatcacctcctgcctcaccagcctcaacggggcactcgaccccatcatgtatttcttcgtggctgagaagttccgccacgccctgtgcaacttgctctgtggcaaaaggctcaagggcccgccccccagcttcgaagggaaaaccaacgagagctcgctgagtgccaagtcagagctgtgagcggggggcgccgtccaggccgagcgcagactgtttaggactcagcagacccagcaagaggcatctgccctttccccagccacctccccagcaagcaacctgaaatctcagcagatgcccaccatttctctagatcgcctagtctcaacccataaaaaggaagaactgacaaaggggatccatcggccacccctctgcaggggcttgtgatggctacaatggctcctagacactcaacgacttcatctgtggcagggagagaggaggccggaagaacaacccctgaacaatggaggcctttctttcccgctaggctcccagcctccttcccgctacagaatcgctcatcggcgaggctcagcagaaagaccctgaaggcaggctgcaaatgacccagaagagggacctgggagtcctggtggggacggggagggagtctcaatactcctttgcagtgcaaggtactctgagtcccctctgtagtgcctctgccagacactgacccagacccacttcctccagagaggcctctctccgcctgagctatttcccttgctagtgtgcagatatttccctaacatgtccttttttgtatttgtttgtacggaccataaatataactgtagctttaagacta

SEQ ID NO: 348998 - DNA, 2788 bp, Homo sapiens
  misc_feature (2765)..(2765): n is a, c, g, or t
  misc_feature (2769)..(2769): n is a, c, g, or t
  misc_feature (2771)..(2772): n is a, c, g, or t
  misc_feature (2776)..(2777): n is a, c, g, or t
  misc_feature (2782)..(2784): n is a, c, g, or t
  misc_feature (2786)..(2786): n is a, c, g, or t
  misc_feature (2788)..(2788): n is a, c, g, or t
gggctagggacacactagaatattcacgctccggtggcagcagcagcagcagccagaggagcagcccgacacaacaagggacccctcaggaatgaagcagcctttcagggccagaggggctgtggtctcccttcctctccttaaatagccagcgttccacccacagcggcaaggagccccctgccaccaccgacacccacgggcggagatcacctgctgccccgcagacccctgtcccttcctcccggaccagcagctagagcagtcctagggaaagtgccagccgagaccagccagaccaagtcagagtactgtggaacctggattcctggggaatggggtccccatgaggaactccacattggactaagaacagaccctgttcctggaagcagcaggaaaccatctctggtgttagaacttcaggcatcttgaaacactctgaagccgggggcaatcttttcaggctctgactccagccaaagcatgaatggccttgaagtggctcccccaggtctgatcaccaacttctccctggccacggcagagcaatgtggccaggagacgccactggagaacatgctgttcgcctccttctaccttctggattttatcctggctttagttggcaataccctggctctgtggcttttcatccgagaccacaagtccgggaccccggccaacgtgttcctgatgcatctggccgtggccgacttgtcgtgcgtgctggtcctgcccacccgcctggtctaccacttctctgggaaccactggccatttggggaaatcgcatgccgtctcaccggcttcctcttctacctcaacatgtacgccagcatctacttcctcacctgcatcagcgccgaccgtttcctggccattgtgcacccggtcaagtccctcaagctccgcaggcccctctacgcacacctggcctgtgccttcctgtgggtggtggtggctgtggccatggccccgctgctggtgagcccacagaccgtgcagaccaaccacacggtggtctgcctgcagctgtaccgggagaaggcctcccaccatgccctggtgtccctggcagtggccttcaccttcccgttcatcaccacggtcacctgctacctgctgatcatccgcagcctgcggcagggcctgcgtgtggagaagcgcctcaagaccaaggcagtgcgcatgatcgccatagtgctggccatcttcctggtctgcttcgtgccctaccacgtcaaccgctccgtctacgtgctgcactaccgcagccatggggcctcctgcgccacccagcgcatcctggccctggcaaaccgcatcacctcctgcctcaccagcctcaacggggcactcgaccccatcatgtatttcttcgtggctgagaagttccgccacgccctgtgcaacttgctctgtggcaaaaggctcaagggcccgccccccagcttcgaagggaaaaccaacgagagctcgctgagtgccaagtcagagctgtgagcggggggcgccgtccaggccgagcgcagactgtttaggactcagcagacccagcaagaggcatctgccctttccccagccacctccccagcaagcaacctgaaatctcagcagatgcccaccatttctctagatcgcctagtctcaacccataaaaaggaagaactgacaaaggggatccatcggccacccctctgcaggggcttgtgatggctacaatggctcctagacactcaacgacttcatctgtggcagggagagaggaggccggaagaacaacccctgaacaatggaggcctttctttcccgctaggctcccagcctccttcccgctacagaatcgctcatcggcgaggctcagcagaaagaccctgaaggcaggctgcaaatgacccagaagagggacctgggagtcctggtggggacggggagggagtctcaatactcctttgcagtgcaaggtactctgagtcccctctgtagtgcctctgccagacacacactgcctgagttgaagagacacaggccacacatttcaggctggttgccagcggacgtcagcactcacggcctgcagggactcagcacagctctggattctggatctctcctgctgtaaccccacgcacaagcctgcaacccccagagctctttgacaggctcccaggcctcccagtcctggacaagcatgtgcagtcacgggagctcagctcaggccagggctgggctgtgcacctgcctcccactgacccagacccacttcctccagagaggcctctctccgcctgagctatttcccttgctagtgtgcagatatttccctaacatgtccttttttgtatttgtttgtacggaccataaatataactgtagctttaagactacacaggttgttatgtttggtcaacatgaagcgtttcccagaacttctctgacccaagaatggtgaagtggtggtacagtggcagaggcagcctcgtgggctctcttgctggggctctggcagctcacagcacatctgcccagattctgaggttctgcactgtggggctgggagggccaagtaggggcctcattcctcactctagctgccaccctgcaccgtccttacggcaatatgcttttgtagcatgtttgactttccaaaacgtttccagcatctttcagatttccccaaccagcccttggggcagtggccctgtgcaaaccttggctcaggaaggagattgggctcgctccacacaccctgtcggcgacgntgcngnncagnncgagnnncngn

SEQ ID NO: 348999 - DNA, 2315 bp, Homo sapiens
ggccacgtgcctctctcacgggcagcacacggacaagagctcggtagtgtcggggaagcatctcggaggagctgcgggagggagcagagtgcccggacagagagagtgtggcaggggaagcatggctggggcctctgggggtcggcgctgcctctcactgatacaggggacgcatgcagaggcagccttggtggtcagtggaggagaatcccaaactgcttgtgcctcattgcgtttgggatgcctggtggacaccaagtggaggtgacatgtgggcagctgaggacagcgagagagaggcctgaagtggagcctggaattctccagacacatgtgccatttagggctctaggattctgtctgcaagggcagccatgagggccgggcacggagccccagacgactccccatggagagacagggagaaaggtgactcagaggaggggagtgagcaggtgcagctgtgggggcgggcagaaccacaggaactcagggtcccgggtgccagaaggggggcgtttctgcacctcagcagctgtggtgagggctgctgaggggtcaagaggaggtgtgggtccctgggcagatgaggccagggtagcacacgcgaggggcagcgggtgtgctgggagaagccggggaggaaggcccagcagtgtttttaacccagctccccagcccagtccttcagaaaggacgagagagtggcgtggagaagcaagccctggagaaagtgtggggatgaacagggctcacagacagaggccgggctgcacgggatctcagagctagggccaggggaggtgggagacaaggccacctgctatagggacagtgcttgggaagggaggatgagagaccaagggttcgcagaaggtgggaacttctggagtacccatgaggtttgtggccctcaatttagagtaaatgtgggcatctccctccagccacactgagctgcacaggtacaggcaggagaaggtggacaggtggggtcagtagatggggtggccaggggggtggcagagtgtgaggatttctcatggctcccgagaggctgccaggagctcgctgagcgtggggccctgtaaactgggagctggactatccgccccggggtgacctggagggagggcagctacatcagtgcaggctgcagcaccgggacccttctgcgccctcagcaagtgggtagcacacaggaggggtggcaggtgtgccgggaagggctgtggcccagtcctctctggcccaacacggccacctcacctgccggcattcttcacaaagcccaggtcagccagctccacatcacacagctcgcagcggaagcagcccgggtgccagttgttgttcatggccttgatgacgcggccaatgatgaactcacctggaagaagacaggtccctgctggctggggagcacgtgcctgtcccctcttcggaccctcccaagccctgtccacctagcactccgcctgctctctgcctggcccatgggctccctcgtgggatggtgatgcctgtagggggcctgacggctgccgctcagagaggcaaggtggggagttaggaaagagctgggccagttctgtgtaccccctcggccccctgccccccgccactgctgcccacttcccaggcagcccaggatgtgtactgtcaccggccttaccgcaggatccacagcacggagcaaacagcatttggaagtcgtgttcgcagtacttccggccttcaaactgcaaaggggtcgcagagagaggacaagcaaaccacctatcatccccatgagcagcccaggcccttgttgggtcaggacctgacagcaggggatgaggcactgaggcaggggcatgccgggctgaggctggagcagtgggtcccaggcctggccagagaggacactggcccttttgggatggtggggtgcaaagggaggtgcccccgtggaagctggagaggtccgtgaggccacctgtcaaagggccactggtgtctactgaggatctggaccctgttggtccggagaacaggctgggggcgaggcggttttaagccaggagggatgagatccagtctgaagtgtagtgtcacttggtcctatttcgtataccttctctgtgggagtatccagctctctcagaggccatgaagacccgggtataggagacagaaggaagggaacgcaggaagggcctgggcacggggaagtgggaagagctcagggctgcggccagcaggagccagtgtgcacaccctccaggcggcagctgccagcgagggcccctgtgctggccacaagcggggccaaa

SEQ ID NO: 349000 - DNA, 1783 bp, Homo sapiens
ggccacgtgcctctctcacgggcagcacacggacaagagctcggtagtgtcggggaagcatctcggaggagctgcgggagggagcagagtgcccggacagagagagtgtggcaggggaagcatggctggggcctctgggggtcggcgctgcctctcactgatacaggggacgcatgcagaggcagccttggtggtcagtggaggagaatcccaaactgcttgtgcctcattgcgtttgggatgcctggtggacaccaagtggaggtgacatgtgggcagctgaggacagcgagagagaggcctgaagtggagcctggaattctccagacacatgtgccatttagggctctaggattctgtctgcaagggcagccatgagggccgggcacggagccccagacgactccccatggagagacagggagaaagaaccacaggaactcagggtcccgggtgccagaaggggggcgtttctgcacctcagcagctgtggtgagggctgctgaggggtcaagaggaggtgtgggtccctgggcagatgaggccagggtagcacacgcgaggggcagcgggtgtgctgggagaagccggggaggaaggcccagcagtgtttttaacccagctccccagcccagtccttcagaaaggacgagagatgggtagcacacaggaggggtggcaggtgtgccgggaagggctgtggcccagtcctctctggcccaacacggccacctcacctgccggcattcttcacaaagcccaggtcagccagctccacatcacacagctcgcagcggaagcagcccgggtgccagttgttgttcatggccttgatgacgcggccaatgatgaactcacctggaagaagacaggtccctgctggctggggagcacgtgcctgtcccctcttcggaccctcccaagccctgtccacctagcactccgcctgctctctgcctggcccatgggctccctcgtgggatggtgatgcctgtagggggcctgacggctgccgctcagagaggcaaggtggggagttaggaaagagctgggccagttctgtgtaccccctcggccccctgccccccgccactgctgcccacttcccaggcagcccaggatgtgtactgtcaccggccttaccgcaggatccacagcacggagcaaacagcatttggaagtcgtgttcgcagtacttccggccttcaaactgcaaaggggtcgcagagagaggacaagcaaaccacctatcatccccatgagcagcccaggcccttgttgggtcaggacctgacagcaggggatgaggcactgaggcaggggcatgccgggctgaggctggagcagtgggtcccaggcctggccagagaggacactggcccttttgggatggtggggtgcaaagggaggtgcccccgtggaagctggagaggtccgtgaggccacctgtcaaagggccactggtgtctactgaggatctggaccctgttggtccggagaacaggctgggggcgaggcggttttaagccaggagggatgagatccagtctgaagtgtagtgtcacttggtcctatttcgtataccttctctgtgggagtatccagctctctcagaggccatgaagacccgggtataggagacagaaggaagggaacgcaggaagggcctgggcacggggaagtgggaagagctcagggctgcggccagcaggagccagtgtgcacaccctccaggcggcagctgccagcgagggcccctgtgctggccacaagcggggccaaa

SEQ ID NO: 349001 - DNA, 824 bp, Homo sapiens
gggctagggacacactagaatattcacgctccggtggcagcagcagcagcagccagaggagcagcccgacacaacaagggacccctcaggaatgaagcagcctttcagggccagaggggctgtggtctcccttcctctccttaaatagccagcgttccacccacagcggcaaggagccccctgccaccaccgacacccacgggcggagatcacctgctgccccgcagacccctgtcccttcctcccggaccagcagctagaggctctgactccagccaaagcatgaatggccttgaagtggctcccccaggtctgatcaccaacttctccctggccacggcagagcaatgtggccaggagacgccactggagaacatgctgttcgcctccttctaccttctggattttatcctggctttagttggcaataccctggctctgtggcttttcatccgagaccacaagtccgggaccccggccaacgtgttcctgatgcatctggccgtggccgacttgtcgtgcgtgctggtcctgcccacccgcctggtctaccacttctctgggaaccactggccatttggggaaatcgcatgccgtctcaccggcttcctcttctacctcaacatgtacgccagcatctacttcctcacctgcatcagcgccgaccgtttcctggccattgtgcacccggtcaagtccctcaagctccgcaggcctctctccgcctgagctatttcccttgctagtgtgcagatatttccctaacatgtccttttttgtatttgtttgtacggaccataaatataactgtagctttaagacta

SEQ ID NO: 349002 - DNA, 604 bp, Homo sapiens
caacaagggacccctcaggaatgaagcagcctttcagggccagaggggctgtggtctcccttcctctccttaaatagccagcgttccacccacagcggcaaggagccccctgccaccaccgacacccacgggcggagatcacctgctgccccgcagacccctgtcccttcctcccggaccagcagctagaggtaaggggcaggctgggtggggtggactgggagcccagggctaagcagaggaaacactcagcggggagccctgcccagggagacaggcagcagcctgtctcgtcccatctctttggtgatggtctgacctgtgcatcgaaggctgaccacagtctgaattcacagcagcccacaaagcggtgtttcgtccctctgatgggggcttgcagaggggaagtggcttgccggcagtccaggctgcaatgacagcaccgctgcccctaaccattaggcagccttgacccatagaggagccagatgcctgggagagggctcgggccagggatggagtggcgctaatgcaaaggaaactgccaccacctggccatggcgctgccaccacaggccctccccgaggccacacatgcccacct

SEQ ID NO: 349003 - DNA, 2584 bp, Homo sapiens
  misc_feature (2561)..(2561): n is a, c, g, or t
  misc_feature (2565)..(2565): n is a, c, g, or t
  misc_feature (2567)..(2568): n is a, c, g, or t
  misc_feature (2572)..(2573): n is a, c, g, or t
  misc_feature (2578)..(2580): n is a, c, g, or t
  misc_feature (2582)..(2582): n is a, c, g, or t
  misc_feature (2584)..(2584): n is a, c, g, or t
gggctagggacacactagaatattcacgctccggtggcagcagcagcagcagccagaggagcagcccgacacaacaagggacccctcaggaatgaagcagcctttcagggccagaggggctgtggtctcccttcctctccttaaatagccagcgttccacccacagcggcaaggagccccctgccaccaccgacacccacgggcggagatcacctgctgccccgcagacccctgtcccttcctcccggaccagcagctagaggctctgactccagccaaagcatgaatggccttgaagtggctcccccaggtctgatcaccaacttctccctggccacggcagagcaatgtggccaggagacgccactggagaacatgctgttcgcctccttctaccttctggattttatcctggctttagttggcaataccctggctctgtggcttttcatccgagaccacaagtccgggaccccggccaacgtgttcctgatgcatctggccgtggccgacttgtcgtgcgtgctggtcctgcccacccgcctggtctaccacttctctgggaaccactggccatttggggaaatcgcatgccgtctcaccggcttcctcttctacctcaacatgtacgccagcatctacttcctcacctgcatcagcgccgaccgtttcctggccattgtgcacccggtcaagtccctcaagctccgcaggcccctctacgcacacctggcctgtgccttcctgtgggtggtggtggctgtggccatggccccgctgctggtgagcccacagaccgtgcagaccaaccacacggtggtctgcctgcagctgtaccgggagaaggcctcccaccatgccctggtgtccctggcagtggccttcaccttcccgttcatcaccacggtcacctgctacctgctgatcatccgcagcctgcggcagggcctgcgtgtggagaagcgcctcaagaccaaggcagtgcgcatgatcgccatagtgctggccatcttcctggtctgcttcgtgccctaccacgtcaaccgctccgtctacgtgctgcactaccgcagccatggggcctcctgcgccacccagcgcatcctggccctggcaaaccgcatcacctcctgcctcaccagcctcaacggggcactcgaccccatcatgtatttcttcgtggctgagaagttccgccacgccctgtgcaacttgctctgtggcaaaaggctcaagggcccgccccccagcttcgaagggaaaaccaacgagagctcgctgagtgccaagtcagagctgtgagcggggggcgccgtccaggccgagcgcagactgtttaggactcagcagacccagcaagaggcatctgccctttccccagccacctccccagcaagcaacctgaaatctcagcagatgcccaccatttctctagatcgcctagtctcaacccataaaaaggaagaactgacaaaggggatccatcggccacccctctgcaggggcttgtgatggctacaatggctcctagacactcaacgacttcatctgtggcagggagagaggaggccggaagaacaacccctgaacaatggaggcctttctttcccgctaggctcccagcctccttcccgctacagaatcgctcatcggcgaggctcagcagaaagaccctgaaggcaggctgcaaatgacccagaagagggacctgggagtcctggtggggacggggagggagtctcaatactcctttgcagtgcaaggtactctgagtcccctctgtagtgcctctgccagacacacactgcctgagttgaagagacacaggccacacatttcaggctggttgccagcggacgtcagcactcacggcctgcagggactcagcacagctctggattctggatctctcctgctgtaaccccacgcacaagcctgcaacccccagagctctttgacaggctcccaggcctcccagtcctggacaagcatgtgcagtcacgggagctcagctcaggccagggctgggctgtgcacctgcctcccactgacccagacccacttcctccagagaggcctctctccgcctgagctatttcccttgctagtgtgcagatatttccctaacatgtccttttttgtatttgtttgtacggaccataaatataactgtagctttaagactacacaggttgttatgtttggtcaacatgaagcgtttcccagaacttctctgacccaagaatggtgaagtggtggtacagtggcagaggcagcctcgtgggctctcttgctggggctctggcagctcacagcacatctgcccagattctgaggttctgcactgtggggctgggagggccaagtaggggcctcattcctcactctagctgccaccctgcaccgtccttacggcaatatgcttttgtagcatgtttgactttccaaaacgtttccagcatctttcagatttccccaaccagcccttggggcagtggccctgtgcaaaccttggctcaggaaggagattgggctcgctccacacaccctgtcggcgacgntgcngnncagnncgagnnncngn

SEQ ID NO: 349004 - DNA, 2251 bp, Homo sapiens
gggctagggacacactagaatattcacgctccggtggcagcagcagcagcagccagaggagcagcccgacacaacaagggacccctcaggaatgaagcagcctttcagggccagaggggctgtggtctcccttcctctccttaaatagccagcgttccacccacagcggcaaggagccccctgccaccaccgacacccacgggcggagatcacctgctgccccgcagacccctgtcccttcctcccggaccagcagctagaggatgtccaaacggagttggtgggctggatccagaaagcccccaagagagatgctgaaactctcaggctctgactccagccaaagcatgaatggccttgaagtggctcccccaggtctgatcaccaacttctccctggccacggcagagcaatgtggccaggagacgccactggagaacatgctgttcgcctccttctaccttctggattttatcctggctttagttggcaataccctggctctgtggcttttcatccgagaccacaagtccgggaccccggccaacgtgttcctgatgcatctggccgtggccgacttgtcgtgcgtgctggtcctgcccacccgcctggtctaccacttctctgggaaccactggccatttggggaaatcgcatgccgtctcaccggcttcctcttctacctcaacatgtacgccagcatctacttcctcacctgcatcagcgccgaccgtttcctggccattgtgcacccggtcaagtccctcaagctccgcaggcccctctacgcacacctggcctgtgccttcctgtgggtggtggtggctgtggccatggccccgctgctggtgagcccacagaccgtgcagaccaaccacacggtggtctgcctgcagctgtaccgggagaaggcctcccaccatgccctggtgtccctggcagtggccttcaccttcccgttcatcaccacggtcacctgctacctgctgatcatccgcagcctgcggcagggcctgcgtgtggagaagcgcctcaagaccaaggcagtgcgcatgatcgccatagtgctggccatcttcctggtctgcttcgtgccctaccacgtcaaccgctccgtctacgtgctgcactaccgcagccatggggcctcctgcgccacccagcgcatcctggccctggcaaaccgcatcacctcctgcctcaccagcctcaacggggcactcgaccccatcatgtatttcttcgtggctgagaagttccgccacgccctgtgcaacttgctctgtggcaaaaggctcaagggcccgccccccagcttcgaagggaaaaccaacgagagctcgctgagtgccaagtcagagctgtgagcggggggcgccgtccaggccgagcgcagactgtttaggactcagcagacccagcaagaggcatctgccctttccccagccacctccccagcaagcaacctgaaatctcagcagatgcccaccatttctctagatcgcctagtctcaacccataaaaaggaagaactgacaaaggggatccatcggccacccctctgcaggggcttgtgatggctacaatggctcctagacactcaacgacttcatctgtggcagggagagaggaggccggaagaacaacccctgaacaatggaggcctttctttcccgctaggctcccagcctccttcccgctacagaatcgctcatcggcgaggctcagcagaaagaccctgaaggcaggctgcaaatgacccagaagagggacctgggagtcctggtggggacggggagggagtctcaatactcctttgcagtgcaaggtactctgagtcccctctgtagtgcctctgccagacacacactgcctgagttgaagagacacaggccacacatttcaggctggttgccagcggacgtcagcactcacggcctgcagggactcagcacagctctggattctggatctctcctgctgtaaccccacgcacaagcctgcaacccccagagctctttgacaggctcccaggcctcccagtcctggacaagcatgtgcagtcacgggagctcagctcaggccagggctgggctgtgcacctgcctcccactgacccagacccacttcctccagagaggcctctctccgcctgagctatttcccttgctagtgtgcagatatttccctaacatgtccttttttgtatttgtttgtacggaccataaatataactgtagctttaagacta

SEQ ID NO: 349005 - DNA, 2813 bp, Homo sapiens
  misc_feature (2790)..(2790): n is a, c, g, or t
  misc_feature (2794)..(2794): n is a, c, g, or t
  misc_feature (2796)..(2797): n is a, c, g, or t
  misc_feature (2801)..(2802): n is a, c, g, or t
  misc_feature (2807)..(2809): n is a, c, g, or t
  misc_feature (2811)..(2811): n is a, c, g, or t
  misc_feature (2813)..(2813): n is a, c, g, or t
gggctagggacacactagaatattcacgctccggtggcagcagcagcagcagccagaggagcagcccgacacaacaagggacccctcaggaatgaagcagcctttcagggccagaggggctgtggtctcccttcctctccttaaatagccagcgttccacccacagcggcaaggagccccctgccaccaccgacacccacgggcggagatcacctgctgccccgcagacccctgtcccttcctcccggaccagcagctagagctctccgccctcaccgtggttttagcagtcctagggaaagtgccagccgagaccagccagaccaagtcagagtactgtggaacctggattcctggggaatggggtccccatgaggaactccacattggactaagaacagaccctgttcctggaagcagcaggaaaccatctctggtgttagaacttcaggcatcttgaaacactctgaagccgggggcaatcttttcaggctctgactccagccaaagcatgaatggccttgaagtggctcccccaggtctgatcaccaacttctccctggccacggcagagcaatgtggccaggagacgccactggagaacatgctgttcgcctccttctaccttctggattttatcctggctttagttggcaataccctggctctgtggcttttcatccgagaccacaagtccgggaccccggccaacgtgttcctgatgcatctggccgtggccgacttgtcgtgcgtgctggtcctgcccacccgcctggtctaccacttctctgggaaccactggccatttggggaaatcgcatgccgtctcaccggcttcctcttctacctcaacatgtacgccagcatctacttcctcacctgcatcagcgccgaccgtttcctggccattgtgcacccggtcaagtccctcaagctccgcaggcccctctacgcacacctggcctgtgccttcctgtgggtggtggtggctgtggccatggccccgctgctggtgagcccacagaccgtgcagaccaaccacacggtggtctgcctgcagctgtaccgggagaaggcctcccaccatgccctggtgtccctggcagtggccttcaccttcccgttcatcaccacggtcacctgctacctgctgatcatccgcagcctgcggcagggcctgcgtgtggagaagcgcctcaagaccaaggcagtgcgcatgatcgccatagtgctggccatcttcctggtctgcttcgtgccctaccacgtcaaccgctccgtctacgtgctgcactaccgcagccatggggcctcctgcgccacccagcgcatcctggccctggcaaaccgcatcacctcctgcctcaccagcctcaacggggcactcgaccccatcatgtatttcttcgtggctgagaagttccgccacgccctgtgcaacttgctctgtggcaaaaggctcaagggcccgccccccagcttcgaagggaaaaccaacgagagctcgctgagtgccaagtcagagctgtgagcggggggcgccgtccaggccgagcgcagactgtttaggactcagcagacccagcaagaggcatctgccctttccccagccacctccccagcaagcaacctgaaatctcagcagatgcccaccatttctctagatcgcctagtctcaacccataaaaaggaagaactgacaaaggggatccatcggccacccctctgcaggggcttgtgatggctacaatggctcctagacactcaacgacttcatctgtggcagggagagaggaggccggaagaacaacccctgaacaatggaggcctttctttcccgctaggctcccagcctccttcccgctacagaatcgctcatcggcgaggctcagcagaaagaccctgaaggcaggctgcaaatgacccagaagagggacctgggagtcctggtggggacggggagggagtctcaatactcctttgcagtgcaaggtactctgagtcccctctgtagtgcctctgccagacacacactgcctgagttgaagagacacaggccacacatttcaggctggttgccagcggacgtcagcactcacggcctgcagggactcagcacagctctggattctggatctctcctgctgtaaccccacgcacaagcctgcaacccccagagctctttgacaggctcccaggcctcccagtcctggacaagcatgtgcagtcacgggagctcagctcaggccagggctgggctgtgcacctgcctcccactgacccagacccacttcctccagagaggcctctctccgcctgagctatttcccttgctagtgtgcagatatttccctaacatgtccttttttgtatttgtttgtacggaccataaatataactgtagctttaagactacacaggttgttatgtttggtcaacatgaagcgtttcccagaacttctctgacccaagaatggtgaagtggtggtacagtggcagaggcagcctcgtgggctctcttgctggggctctggcagctcacagcacatctgcccagattctgaggttctgcactgtggggctgggagggccaagtaggggcctcattcctcactctagctgccaccctgcaccgtccttacggcaatatgcttttgtagcatgtttgactttccaaaacgtttccagcatctttcagatttccccaaccagcccttggggcagtggccctgtgcaaaccttggctcaggaaggagattgggctcgctccacacaccctgtcggcgacgntgcngnncagnncgagnnncngn

SEQ ID NO: 349006 - DNA, 1335 bp, Homo sapiens
gggctagggacacactagaatattcacgctccggtggcagcagcagcagcagccagaggagcagcccgacacaacaagggacccctcaggaatgaagcagcctttcagggccagaggggctgtggtctcccttcctctccttaaatagccagcgttccacccacagcggcaaggagccccctgccaccaccgacacccacgggcggagatcacctgctgccccgcagacccctgtcccttcctcccggaccagcagctagaggctctgactccagccaaagcatgaatggccttgaagtggctcccccaggtctgatcaccaacttctccctggccacggcagagcaatgtggccaggagacgccactggagaacatgctgttcgcctccttctaccttctggattttatcctggctttagttggcaataccctggctctgtggcttttcatccgagaccacaagtccgggaccccggccaacgtgttcctgatgcatctggccgtggccgacttgtcgtgcgtgctggtcctgcccacccgcctggtctaccacttctctgggaaccactggccatttggggaaatcgcatgccgtctcaccggcttcctcttctacctcaacatgtacgccagcatctacttcctcacctgcatcagcgccgaccgtttcctggccattgtgcacccggtcaagtccctcaagctccgcaggcctctctccgcctgagctatttcccttgctagtgtgcagatatttccctaacatgtccttttttgtatttgtttgtacggaccataaatataactgtagctttaagactacacaggttgttatgtttggtcaacatgaagcgtttcccagaacttctctgacccaagaatggtgaagtggtggtacagtggcagaggcagcctcgtgggctctcttgctggggctctggcagctcacagcacatctgcccagattctgaggttctgcactgtggggctgggagggccaagtaggggcctcattcctcactctagctgccacccctgttggtccggagaacaggctgggggcgaggcggttttaagccaggagggatgagatccagtctgaagtgtagtgtcacttggtcctatttcgtataccttctctgtgggagtatccagctctctcagaggccatgaagacccgggtataggagacagaaggaagggaacgcaggaagggcctgggcacggggaagtgggaagagctcagggctgcggccagcaggagccagtgtgcacaccctccaggcggcagctgccagcgagggcccctgtgctggccacaagcggggccaaa

SEQ ID NO: 349007 - DNA, 548 bp, Homo sapiens
ggccagaaagaccaaaactgtatcctgaggtttgagtttctgagccaggtgatgtcatcctccagcttggccggcctctttctgggagcctctggtgtgaaagagagcagatttattaaaaatcatcaacttcaaattatttggatggaaacattgccaaatcatagagatgtttgctaccacccgcacaccaagcagctgggtaactagaagtgcaggatcagcttattcacctccgaaagcctgcatgcaaccactgaggccgcctctattttttacatagttctacttggtgtatgtaaccccacagagaaacctggaagaatgcatgaaacctagtaaggcaaccagcacatgcaacagaatgaaccgtttctttccatctgaatgcctaaatgtggactctgatcctttctaccaagtcctaagtttgggaaaagaggacaaggacaggggctctgtcccatatcataatgtgcttgtgaatggctaaaattacaatgctgagataagtgtgtgtaataaaataattgcaccccgaattgaaa

SEQ ID NO: 349008 - DNA, 583 bp, Homo sapiens
ggccagaaagaccaaaactgtatcctgaggtttgagtttctgagccaggtgatgtcatcctccagcttggccggcctctttctgggagcctctggtgtgaaagagagcagatttattaaaaatcatcaacttcaaattatttggatggaaacattgccaaatcatagagatgtttgctaccacccgcacaccaagcagctgggtaactagaagtgcaggatcagcttattcacctccgaaagcctgcatgcaaccactgaggccgcctctattttttacatagttctacttggtgtatgtaaccccacagagaaacctggaagaatgcatgaaacctagtaaggcaaccagcacatgcaacagaatgaaccgtttctttccatctgaatgcctaaatgtggactctgatcctttctaccaagtcctaagtttgggaaaagaggacaaggacaggggctctgtcccatatcataatgtgcttgtgaatggctaaaattacaatgctgagataagtgtgtgtaataaaaacagatgcgggccgctcccgccccgcgtccgcacatcctcgggcagactctggata

SEQ ID NO: 349009 - DNA, 875 bp, Homo sapiens
ttgggatttgggcctcattaattattcattaggtacttgaaagctctgcagggattggtggctgagaggcctagtcgactgtttcttagctagaggtacgtgtcacccagtacgcggctggagttttgcataaattattccgataaggagcggggcggggctctgtgcatagattagtcaaatgagcctgggagggagggaagccggctacgaattagcctaagttattaaagatggcgacggagcgcagtcgctccgcgatggactcgccggtcccggcctctatgttcgcccccgagcccagctccccgggggcggccagggccgcggcggccgccgcccgactccacggcggctttgactcggactgcagcgaggacggcgaggcgctcaacggcgagccagagctggacctcaccagcaagctggttctagtgagccctacatcagagcagtatgacagcctacttcggcagatgtgggagaggatggacgagggatgcggagagaccatatatgtcattgggcagggatcagatgggactgagtatgggctgagtgaagctgacatggaggcctcctacgccacagtgaagagcatggcggaacagatagaggccgatgtcatccttctgcgggaacggcaagaagctgggggccgcgtgcgtgattacctggtccggaaacgagtaggagacaatgacttcctggaggtcaggtgaggaggccgcgggacattttggggtccccattcttcacagaggttggtgactgagcctgtggcacttggcgtgtcagctccatcctttcccctcctgaggcggggaaagagtgtccaggtgtctggagacgtgggctccttgctctaattctgc

SEQ ID NO: 349010 - DNA, 3068 bp, Homo sapiens
ttgggatttgggcctcattaattattcattaggtacttgaaagctctgcagggattggtggctgagaggcctagtcgactgtttcttagctagaggtacgtgtcacccagtacgcggctggagttttgcataaattattccgataaggagcggggcggggctctgtgcatagattagtcaaatgagcctgggagggagggaagccggctacgaattagcctaagttattaaagatggcgacggagcgcagtcgctccgcgatggactcgccggtcccggcctctatgttcgcccccgagcccagctccccgggggcggccagggccgcggcggccgccgcccgactccacggcggctttgactcggactgcagcgaggacggcgaggcgctcaacggcgagccagagctggacctcaccagcaagctggttctagtgagccctacatcagagcagtatgacagcctacttcggcagatgtgggagaggatggacgagggatgcggagagaccatatatgtcattgggcagggatcagatgggactgagtatgggctgagtgaagctgacatggaggcctcctacgccacagtgaagagcatggcggaacagatagaggccgatgtcatccttctgcgggaacggcaagaagctgggggccgcgtgcgtgattacctggtccggaaacgagtaggagacaatgacttcctggaggtcagggtagcagtggtgggcaacgtggatgctggcaaaagcacgcttctgggggtcctgacacatggggagctggacaatggccgaggctttgcccgccagaaactcttccgccacaaacatgaaattgaatctggtcgcaccagcagtgtgggcaacgacattctgggctttgacagtgaaggcaatgtagtgaacaagcctgacagccacggcggcagcctggagtggaccaagatctgtgagaagtccacgaaagtcattaccttcatcgacttggctggtcatgagaagtacctgaaaaccactgtcttcggcatgacaggccatctgcctgacttctgcatgctcatggtgggcagcaatgctggcatcgtggggatgaccaaagaacacctgggcttggcactggcactcaatgtacctgtctttgtggtagtcaccaagattgacatgtgtcctgccaacatcctgcaagaaaccctgaagctgttacagcgcctgctgaagtcaccaggctgccggaagatccccgtgctggtgcagagcaaagatgatgtgattgtcacagcctccaacttcagctctgaaaggatgtgcccgatattccagatctccaacgttacaggcgagaacctagatctgctgaagatgttcctcaacctcctctccccccgcaccagctacagggaggaggagcctgctgagtttcagattgatgacacctactccgtcccgggtgtggggacagtggtttcggggacaacactgagaggcctgatcaagctgaatgacacgctgctgctgggcccagaccccttgggtaacttcctgtccattgctgtcaaatccatccatcgcaagcgcatgcctgtcaaggaggtgcggggtggccagacagcatcctttgcgctgaagaagatcaagcgctcgtccatccggaagggcatggtgatggtttccccacgtttgaatccccaagcctcctgggagtttgaggccgagattctcgtcctccaccaccccaccacaattagcccgcgctaccaggccatggtgcactgtgggagcatcaggcagacagccaccattctgagcatggacaaggactgtctgcgcactggggacaaggccactgtacacttccgcttcatcaagacccctgagtacctgcacatagaccagcggctggtgttccgggaaggccgcaccaaggctgtcggcaccatcaccaagctcctccagaccaccaacaactccccaatgaactccaagccgcagcagattaaaatgcagtcgacgaaaaagggccccctgacgaaacgagacgaggggggcccgtctggtgggccagcagtaggagcacccccacctggagatgaagcctcctctgtaggggcagggcaaccagctgcgtccagcaatctccagcctcagcctaagcccagcagtggaggccggcgacgagggggccagcgccacaaggtgaagtcccagggggcctgtgtgactcctgccagcggctgctgaaccttcccctggcccaccctcaccacccaaggggtcatcatctctggccaccactccaccagatgggcagagcagctatgaccgccacccagccctcccgctcaggccacagccggagcctccgcattgcccccacccccattttccaggggggttgtaatttataagctgacgaaggtagccagacttccggaggactgaccatctctcactgtcctccccaccttcttcctcactcacacacagcacacacacacagcacacacacacacacacacaagatctgggcccttaatgtttacagtccagcaggaaatgttaccctccattcagtatacgcccccttgttatctagacctgtcgggactcatctaagatatgtacgctgaaacccaaggagccagctagaaagaacgcttgatgattagatgtacaatacatcgggggcagaagatctgggatcaattaagatggacgcctgaaggactatggaatcttgcgtgtcaggaatgggcatgtctacttcctgccatctctgaaagccccgcgggaccagcttctaggctgaatctgtctagtaggcgtgaagcttcaggactctgcggtcaaggatatgtgatgagcagccggctaagtgtggctcttcagattcctaggtagcacaagactttatcagaatctataggcataccaatctggatcacctcttccaaccacaagcgaggaatagatgcctctgaatcttcatatcggtatatttaagtcaaaagatggtccggggtggccctcaacaaagcgttgtgcatccacgtggtaaagctccag

SEQ ID NO: 349011 - DNA, 3968 bp, Homo sapiens
ttgggatttgggcctcattaattattcattaggtacttgaaagctctgcagggattggtggctgagaggcctagtcgactgtttcttagctagaggtacgtgtcacccagtacgcggctggagttttgcataaattattccgataaggagcggggcggggctctgtgcatagattagtcaaatgagcctgggagggagggaagccggctacgaattagcctaagttattaaagatggcgacggagcgcagtcgctccgcgatggactcgccggtcccggcctctatgttcgcccccgagcccagctccccgggggcggccagggccgcggcggccgccgcccgactccacggcggctttgactcggactgcagcgaggacggcgaggcgctcaacggcgagccagagctggacctcaccagcaagatgggactgagtatgggctgagtgaagctgacatggaggcctcctacgccacagtgaagagcatggcggaacagatagaggccgatgtcatccttctgcgggaacggcaagaagctgggggccgcgtgcgtgattacctggtccggaaacgagtaggagacaatgacttcctggaggtcagggtagcagtggtgggcaacgtggatgctggcaaaagcacgcttctgggggtcctgacacatggggagctggacaatggccgaggctttgcccgccagaaactcttccgccacaaacatgaaattgaatctggtcgcaccagcagtgtgggcaacgacattctgggctttgacagtgaaggcaatgtagtgaacaagcctgacagccacggcggcagcctggagtggaccaagatctgtgagaagtccacgaaagtcattaccttcatcgacttggctggtcatgagaagtacctgaaaaccactgtcttcggcatgacaggccatctgcctgacttctgcatgctcatggtgggcagcaatgctggcatcgtggggatgaccaaagaacacctgggcttggcactggcactcaatgtacctgtctttgtggtagtcaccaagattgacatgtgtcctgccaacatcctgcaagaaaccctgaagctgttacagcgcctgctgaagtcaccaggctgccggaagatccccgtgctggtgcagagcaaagatgatgtgattgtcacagcctccaacttcagctctgaaaggatgtgcccgatattccagatctccaacgttacaggcgagaacctagatctgctgaagatgttcctcaacctcctctccccccgcaccagctacagggaggaggagcctgctgagtttcagattgatgacacctactccgtcccgggtgtggggacagtggtttcggggacaacactgagaggcctgatcaagctgaatgacacgctgctgctgggcccagaccccttgggtaacttcctgtccattgctgtcaaatccatccatcgcaagcgcatgcctgtcaaggaggtgcggggtggccagacagcatcctttgcgctgaagaagatcaagcgctcgtccatccggaagggcatggtgatggtttccccacgtttgaatccccaagcctcctgggagtttgaggccgagattctcgtcctccaccaccccaccacaattagcccgcgctaccaggccatggtgcactgtgggagcatcaggcagacagccaccattctgagcatggacaaggactgtctgcgcactggggacaaggccactgtacacttccgcttcatcaagacccctgagtacctgcacatagaccagcggctggtgttccgggaaggccgcaccaaggctgtcggcaccatcaccaagctcctccagaccaccaacaactccccaatgaactccaagccgcagcagattaaaatgcagtcgacgaaaaagggccccctgacgaaacgagacgaggggggcccgtctggtgggccagcagtaggagcacccccacctggagatgaagcctcctctgtaggggcagggcaaccagctgcgtccagcaatctccagcctcagcctaagcccagcagtggaggccggcgacgagggggccagcgccacaaggtgaagtcccagggggcctgtgtgactcctgccagcggctgctgaaccttcccctggcccaccctcaccacccaaggggtcatcatctctggccaccactccaccagatgggcagagcagctatgaccgccacccagccctcccgctcaggccacagccggagcctccgcattgcccccacccccattttccaggggggttgtaatttataagctgacgaaggtagccagacttccggaggactgaccatctctcactgtcctccccaccttcttcctcactcacacattttttgtacatctgggcccttagtttttattctgtttattatatgtctctgtctctctctattgtgtgtgtgtgtgtgtgtgtgtgtgtgtgtgtgtgtgtgtggtgcaggagtgccacccccagggccctgtcaacctctcttttctcctccatggctgtctgcctgcgtatctgtctctgagaatcctcggggcggtcaggggatgtcaggaggggaaggagccgccctccctatcttgctgctcctcttggcactcaggggcaccttccatggagccagaccgggtggaggggcttctgggatttggtgtctgctgctgccagagcaggaacccccagtctaggacttgggcattttaacagggagaaagtagtggcttcccttttctctctctcctcctttttccctttaagcccacagattcaggtcatgccaaaagctctctggttgtaacctggagacatgtggaggggaatggcgatgggattataggactctccccatctcgggccctgaccctgacccttgccaccaacccaaagacagctggtgggtttccccttggagacaatcctgcgtttgcctgggccggccctggctgccctcagctttcgctgatctgcccggcctggagcctcccatcaccccgcttcttgttgggcctcaggcactggttaccagaagggggtctgggtctgctcaggatcatgttttgtagcacctcctgttggaggggtggagggatgttcccctgagccaggctgagactagaaccccatcttccctgagccaggctgagactagaaccccatcttccccaccacgccacccctgtggctgctacaggagcacagtagtgaaggcctgagctccaggtttgaaagacccaactggagcgtggggcgggcaggcaggggttagtgaaaggacacttccagggttaggacagagcatttagccttctggaagaacccctgcctggggtgggactgtgcaggccagagaaggtggcatgggcctgaacccacctggactgacttctgcactgaagccacagatggagggtaggctggtgggtgggggtggttcgttctctagccggggcagacacccagctggctgggtccttcctcagccttgcctcctcctgtccccaaccctttcctttcctcctgcttgcggactgctggtcccctctccttccctccttccagctgtttctagttaccacctacccctggccgtggactgatcagaccagcattcaaaataaaagtttgttccaagttgacagtgtggtgctccctgcccagcccctccaggtggaggtgctgccacgggaacgcagttgctctgcctgccctggggcccctggcgacagctgggagcagggcagtgctgtgaggagcccagctttcccagtcaggcaggcatggcttccgtgttcaggctccctcaccagctggtgacacgggacaagcttacaaaccttctctgaacctcagttttctcatttacaagaggcaaagccatccatcaccttgtgtggattcagagaatgtgaggccctggggtgtcctacacaaggga

SEQ ID NO: 349012 - DNA, 3355 bp, Homo sapiens
gggcaaggctggatcatgcacgagacgcgcttctggggattctgtagactggagtgctggcctgtgggcgttggctctggccgtcgtattctcttgctcgctgcactggtgaaatcctggtcgggtcgcaccagcagtgtgggcaacgacattctgggctttgacagtgaaggcaatgtagtgaacaagcctgacagccacggcggcagcctggagtggaccaagatctgtgagaagtccacgaaagtcattaccttcatcgacttggctggtcatgagaagtacctgaaaaccactgtcttcggcatgacaggccatctgcctgacttctgcatgctcatggtgggcagcaatgctggcatcgtggggatgaccaaagaacacctgggcttggcactggcactcaatgtacctgtctttgtggtagtcaccaagattgacatgtgtcctgccaacatcctgcaagaaaccctgaagctgttacagcgcctgctgaagtcaccaggctgccggaagatccccgtgctggtgcagagcaaagatgatgtgattgtcacagcctccaacttcagctctgaaaggatgtgcccgatattccagatctccaacgttacaggcgagaacctagatctgctgaagatgttcctcaacctcctctccccccgcaccagctacagggaggaggagcctgctgagtttcagattgatgacacctactccgtcccgggtgtggggacagtggtttcggggacaacactgagaggcctgatcaagctgaatgacacgctgctgctgggcccagaccccttgggtaacttcctgtccattgctgtcaaatccatccatcgcaagcgcatgcctgtcaaggaggtgcggggtggccagacagcatcctttgcgctgaagaagatcaagcgctcgtccatccggaagggcatggtgatggtttccccacgtttgaatccccaagcctcctgggagtttgaggccgagattctcgtcctccaccaccccaccacaattagcccgcgctaccaggccatggtgcactgtgggagcatcaggcagacagccaccattctgagcatggacaaggactgtctgcgcactggggacaaggccactgtacacttccgcttcatcaagacccctgagtacctgcacatagaccagcggctggtgttccgggaaggccgcaccaaggctgtcggcaccatcaccaagctcctccagaccaccaacaactccccaatgaactccaagccgcagcagattaaaatgcagtcgacgaaaaagggccccctgacgaaacgagacgaggggggcccgtctggtgggccagcagtaggagcacccccacctggagatgaagcctcctctgtaggggcagggcaaccagctgcgtccagcaatctccagcctcagcctaagcccagcagtggaggccggcgacgagggggccagcgccacaaggtgaagtcccagggggcctgtgtgactcctgccagcggctgctgaaccttcccctggcccaccctcaccacccaaggggtcatcatctctggccaccactccaccagatgggcagagcagctatgaccgccacccagccctcccgctcaggccacagccggagcctccgcattgcccccacccccattttccaggggggttgtaatttataagctgacgaaggtagccagacttccggaggactgaccatctctcactgtcctccccaccttcttcctcactcacacattttttgtacatctgggcccttagtttttattctgtttattatatgtctctgtctctctctattgtgtgtgtgtgtgtgtgtgtgtgtgtgtgtgtgtgtgtgtggtgcaggagtgccacccccagggccctgtcaacctctcttttctcctccatggctgtctgcctgcgtatctgtctctgagaatcctcggggcggtcaggggatgtcaggaggggaaggagccgccctccctatcttgctgctcctcttggcactcaggggcaccttccatggagccagaccgggtggaggggcttctgggatttggtgtctgctgctgccagagcaggaacccccagtctaggacttgggcattttaacagggagaaagtagtggcttcccttttctctctctcctcctttttccctttaagcccacagattcaggtcatgccaaaagctctctggttgtaacctggagacatgtggaggggaatggcgatgggattataggactctccccatctcgggccctgaccctgacccttgccaccaacccaaagacagctggtgggtttccccttggagacaatcctgcgtttgcctgggccggccctggctgccctcagctttcgctgatctgcccggcctggagcctcccatcaccccgcttcttgttgggcctcaggcactggttaccagaagggggtctgggtctgctcaggatcatgttttgtagcacctcctgttggaggggtggagggatgttcccctgagccaggctgagactagaaccccatcttccctgagccaggctgagactagaaccccatcttccccaccacgccacccctgtggctgctacaggagcacagtagtgaaggcctgagctccaggtttgaaagacccaactggagcgtggggcgggcaggcaggggttagtgaaaggacacttccagggttaggacagagcatttagccttctggaagaacccctgcctggggtgggactgtgcaggccagagaaggtggcatgggcctgaacccacctggactgacttctgcactgaagccacagatggagggtaggctggtgggtgggggtggttcgttctctagccggggcagacacccagctggctgggtccttcctcagccttgcctcctcctgtccccaaccctttcctttcctcctgcttgcggactgctggtcccctctccttccctccttccagctgtttctagttaccacctacccctggccgtggactgatcagaccagcattcaaaataaaagtttgttccaagttgacagtgtggtgctccctgcccagcccctccaggtggaggtgctgccacgggaacgcagttgctctgcctgccctggggcccctggcgacagctgggagcagggcagtgctgtgaggagcccagctttcccagtcaggcaggcatggcttccgtgttcaggctccctcaccagctggtgacacgggacaagcttacaaaccttctctgaacctcagttttctcatttacaagaggcaaagccatccatcaccttgtgtggattcagagaatgtgaggccctggggtgtcctacacaaggga

SEQ ID NO: 349013 - DNA, 2370 bp, Homo sapiens
ttgggatttgggcctcattaattattcattaggtacttgaaagctctgcagggattggtggctgagaggcctagtcgactgtttcttagctagaggtacgtgtcacccagtacgcggctggagttttgcataaattattccgataaggagcggggcggggctctgtgcatagattagtcaaatgagcctgggagggagggaagccggctacgaattagcctaagttattaaagatggcgacggagcgcagtcgctccgcgatggactcgccggtcccggcctctatgttcgcccccgagcccagctccccgggggcggccagggccgcggcggccgccgcccgactccacggcggctttgactcggactgcagcgaggacggcgaggcgctcaacggcgagccagagctggacctcaccagcaagctggttctagtgagccctacatcagagcagtatgacagcctacttcggcagatgtgggagaggatggacgagggatgcggagagaccatatatgtcattgggcagggatcagatgggactgagtatgggctgagtgaagctgacatggaggcctcctacgccacagtgaagagcatggcggaacagatagaggccgatgtcatccttctgcgggaacggcaagaagctgggggccgcgtgcgtgattacctggtccggaaacgagtaggagacaatgacttcctggaggtcagggtagcagtggtgggcaacgtggatgctggcaaaagcacgcttctgggggtcctgacacatggggagctggacaatggccgaggctttgcccgccagaaactcttccgccacaaacatgaaattgaatctggtcgcaccagcagtgtgggcaacgacattctgggctttgacagtgaaggcaatgtagtgaacaagcctgacagccacggcggcagcctggagtggaccaagatctgtgagaagtccacgaaagtcattaccttcatcgacttggctggtcatgagaagtacctgaaaaccactgtcttcggcatgacaggccatctgcctgacttctgcatgctcatggtgggcagcaatgctggcatcgtggggatgaccaaagaacacctgggcttggcactggcactcaatgtacctgtctttgtggtagtcaccaagattgacatgtgtcctgccaacatcctgcaagaaaccctgaagctgttacagcgcctgctgaagtcaccaggctgccggaagatccccgtgctggtgcagagcaaagatgatgtgattgtcacagcctccaacttcagctctgaaaggatgtgcccgatattccagatctccaacgttacaggcgagaacctagatctgctgaagatgttcctcaacctcctctccccccgcaccagctacagggaggaggagcctgctgagtttcagattgatgacacctactccgtcccgggtgtggggacagtggtttcggggacaacactgagaggcctgatcaagctgaatgacacgctgctgctgggcccagaccccttgggtaacttcctgtccattgctgtcaaatccatccatcgcaagcgcatgcctgtcaaggaggtgcggggtggccagacagcatcctttgcgctgaagaagatcaagcgctcgtccatccggaagggcatggtgatggtttccccacgtttgaatccccaagcctcctgggagtttgaggccgagattctcgtcctccaccaccccaccacaattagcccgcgctaccaggccatggtgcactgtgggagcatcaggcagacagccaccattctgagcatggacaaggactgtctgcgcactggggacaaggccactgtacacttccgcttcatcaagacccctgagtacctgcacatagaccagcggctggtgttccgggaaggccgcaccaaggctgtcggcaccatcaccaagctcctgcttgcggactgctggtcccctctccttccctccttccagctgtttctagttaccacctacccctggccgtggactgatcagaccagcattcaaaataaaagtttgttccaagttgacagtgtggtgctccctgcccagcccctccaggtggaggtgctgccacgggaacgcagttgctctgcctgccctggggcccctggcgacagctgggagcagggcagtgctgtgaggagcccagctttcccagtcaggcaggcatggcttccgtgttcaggctccctcaccagctggtgacacgggacaagcttacaaaccttctctgaacctcagttttctcatttacaagaggcaaagccatccatcaccttgtgtggattcagagaatgtgaggccctggggtgtcctacacaaggga

SEQ ID NO: 349014 - DNA, 862 bp, Homo sapiens
ttgggatttgggcctcattaattattcattaggtacttgaaagctctgcagggattggtggctgagaggcctagtcgactgtttcttagctagaggtacgtgtcacccagtacgcggctggagttttgcataaattattccgataaggagcggggcggggctctgtgcatagattagtcaaatgagcctgggagggagggaagccggctacgaattagcctaagttattaaagatggcgacggagcgcagtcgctccgcgatggactcgccggtcccggcctctatgttcgcccccgagcccagctccccgggggcggccagggccgcggcggccgccgcccgactccacggcggctttgactcggactgcagcgaggacggcgaggcgctcaacggcgagccagagctggacctcaccagcaagctggttctagtgagccctacatcagagcagtatgacagcctacttcggcagatgtgggagaggatggacgagggatgcggagagaccatatatgtcattgggcagggatcagatgggactgagtatgggctgagtgaagctgacatggaggcctcctacgccacagtgaagagcatggcggaacagatagaggccgatgtcatccttctgcgggaacggcaagaagctgggggccgcgtgcgtgattacctggtccggaaacgagtaggagacaatgacttcctggaggtcagggtagcagtggtgggcaacgtggatgctggcaaaagcacgcttctgggggtccttccctccttccagctgtttctagttaccacctacccctggccgtggactgatcagaccagcattcaaaataaaagtttgttccaagttga

SEQ ID NO: 349015 - DNA, 479 bp, Homo sapiens
gaaaaccactgtcttcggcatgacaggccatctgcctgacttctgcatgctcatggtgagtgggaggcgccccaaggaggggaggcgtcagcagggctgcttgggtctggttatgtgcaagtctgaaactgttctgagactgaggcctgttggtttggggctttgacatcgggtgaggctggcgagttttgcaggggtgcccagtcctctgagtaatggtcttctcaaggcttgaaccttgatctctcccttacattagactagggaaggtatcctcttggtaaaaaccaggtacccttgaagacctgtcttattttttgcagaggcatagaggagggtttctcctgggccttacttgttaccttcagaaatgttttctgcagaggattgggctactttgaggaggtgacaccaggtaggtagtaccttcagaggggcaggcctggggaagaaacggagaagacagccataggaggcac

SEQ ID NO: 349016 - DNA, 357 bp, Homo sapiens
tgcctgcctttgcttcctcatgcgtccttcatggccgagcagctgaagtgctgattcccgcatgaagccttcctgacccccagtagtagtgttgagtcttcccatggagcactgagggtgctcgtgctgtccaccctagaaggcctgtggtccagttggtgaggaaaccaggcagagttggggtggtccctatccctagaaagactcttggtccctgggaccaggggtgaaaccagaaggcataattgtccctgagggctggggctccctctttctttcagatcaagcgctcgtccatccggaagggcatggtgatggtttccccacgtttgaatccccaagcctcctgggagtttg

SEQ ID NO: 349017 - DNA, 3781 bp, Homo sapiens
ttgggatttgggcctcattaattattcattaggtacttgaaagctctgcagggattggtggctgagaggcctagtcgactgtttcttagctagaggtacgtgtcacccagtacgcggctggagttttgcataaattattccgataaggagcggggcggggctctgtgcatagattagtcaaatgagcctgggagggagggaagccggctacgaattagcctaagttattaaagatggcgacggagcgcagtcgctccgcgatggactcgccggtcccggcctctatgttcgcccccgagcccagctccccgggggcggccagggccgcggcggccgccgcccgactccacggcggctttgactcggactgcagcgaggacggcgaggcgctcaacggcgagccagagctggacctcaccagcaagctggttctagtgagccctacatcagagcagtatgacagcctacttcggcagatgtgggagaggatggacgagggatgcggagagaccatatatgtcattgggcagggatcagatgggactgagtatgggctgagtgaagctgacatggaggcctcctacgccacagtgaagagcatggcggaacagatagaggccgatgtcatccttctgcgggaacggcaagaagctgggggccgcgtgcgtgattacctggtccggaaacgagtaggagacaatgacttcctggaggtcagggtagcagtggtgggcaacgtggatgctggcaaaagcacgcttctgggggtcctgacacatggggagctggacaatggccgaggctttgcccgccagaaactcttccgccacaaacatgaaattgaatctggtcgcaccagcagtgtgggcaacgacattctgggctttgacagtgaaggcaatgtagtgaacaagcctgacagccacggcggcagcctggagtggaccaagatctgtgagaagtccacgaaagtcattaccttcatcgacttggctggtcatgagaagtacctgaaaaccactgtcttcggcatgacaggccatctgcctgacttctgcatgctcatggtgggcagcaatgctggcatcgtggggatgaccaaagaacacctgggcttggcactggcactcaatgtacctgtctttgtggtagtcaccaagattgacatgtgtcctgccaacatcctgcaagaaaccctgaagctgttacagcgcctgctgaagtcaccaggctgccggaagatccccgtgctggtgcagagcaaagatgatgtgattgtcacagcctccaacttcagctctgaaaggatgtgcccgatattccagatctccaacgttacaggcgagaacctagatctgctgaagatgttcctcaacctcctctccccccgcaccagctacagggaggaggagcctgctgagtttcagattgatgacacctactccgtcccgggtgtggggacagtggtttcggggacaacactgagaggcctgatcaagctgaatgacacgctgctgctgggcccagaccccttgggtaacttcctgtccattgctgtcaaatccatccatcgcaagcgcatgcctgtcaaggaggtgcggggtggccagacagcatcctttgcgctgaagaagatcaagcgctcgtccatccggaagggcatggtgatggtttccccacgtttgaatccccaagcctcctgggagtttgaggccgagattctcgtcctccaccaccccaccacaattagcccgcgctaccaggccatggtgcactgtgggagcatcaggcagacagccaccattctgagcatggacaaggactgtctgcgcactggggacaaggccactgtacacttccgcttcatcaagacccctgagtacctgcacatagaccagcggctggtgttccgggaaggccgcaccaaggctgtcggcaccatcaccaagctcctccagaccaccaacaactccccaatgaactccaagccgcagcagattaaaatgcagtcgacgaaaaagggccccctgacgaaacgagacgaggggggcccgtctggtgggccagcagtaggagcacccccacctggagatgaagcctcctctgtaggggcagggcaaccagctgcgtccagcaatctccagcctcagcctaagcccagcagtggaggccggcgacgagggggccagcgccacaaggtgaagtcccagggggcctgtgtgactcctgccagcggctgctgaaccttcccctggcccaccctcaccacccaaggggtcatcatctctggccaccactccaccagatgggcagagcagctatgaccgccacccagccctcccgctcaggccacagccggagcctccgcattgcccccacccccattttccaggggggttgtaatttataagctgacgaaggtagccagacttccggaggactgaccatctctcactgtcctccccaccttcttcctcactcacacattttttgtacatctgggcccttagtttttattctgtttattatatgtctctgtctctctctattgtgtgtgtgtgtgtgtgtgtgtgtgtgtgtgtgtgtgtgtggtgcaggagtgccacccccagggccctgtcaacctctcttttctcctccatggctgtctgcctgcgtatctgtctctgagaatcctcggggcggtcaggggatgtcaggaggggaaggagccgccctccctatcttgctgctcctcttggcactcaggggcaccttccatggagccagaccgggtggaggggcttctgggatttggtgtctgctgctgccagagcaggaacccccagtctaggacttgggcattttaacagggagaaagtagtggcttcccttttctctctctcctcctttttccctttaagcccacagattcaggtcatgccaaaagctctctggttgtaacctggagacatgtggaggggaatggcgatgggattataggactctccccatctcgggccctgaccctgacccttgccaccaacccaaagacagctggtgggtttccccttggagacaatcctgcgtttgcctgggccggccctggctgccctcagctttcgctgatctgcccggcctggagcctcccatcaccccgcttcttgttgggcctcaggcactggttaccagaagggggtctgggtctgctcaggatcatgttttgtagcacctcctgttggaggggtggagggatgttcccctgagccaggctgagactagaaccccatcttccctgagccaggctgagactagaaccccatcttccccaccacgccacccctgtggctgctacaggagcacagtagtgaaggcctgagctccaggtttgaaagacccaactggagcgtggggcgggcaggcaggggttagtgaaaggacacttccagggttaggacagagcatttagccttctggaagaacccctgcctggggtgggactgtgcaggccagagaaggtggcatgggcctgaacccacctggactgacttctgcactgaagccacagatggagggtaggctggtgggtgggggtggttcgttctctagccggggcagacacccagctggctgggtccttcctcagccttgcctcctcctgtccccaaccctttcctttcctcctgcttgcggactgctggtcccctctccttccctccttccagctgtttctagttaccacctacccctggccgtggactgatcagaccagcattcaaaataaaagtttgttccaagttga

SEQ ID NO: 349018 - DNA, 4080 bp, Homo sapiens
ttgggatttgggcctcattaattattcattaggtacttgaaagctctgcagggattggtggctgagaggcctagtcgactgtttcttagctagaggtacgtgtcacccagtacgcggctggagttttgcataaattattccgataaggagcggggcggggctctgtgcatagattagtcaaatgagcctgggagggagggaagccggctacgaattagcctaagttattaaagatggcgacggagcgcagtcgctccgcgatggactcgccggtcccggcctctatgttcgcccccgagcccagctccccgggggcggccagggccgcggcggccgccgcccgactccacggcggctttgactcggactgcagcgaggacggcgaggcgctcaacggcgagccagagctggacctcaccagcaagctggttctagtgagccctacatcagagcagtatgacagcctacttcggcagatgtgggagaggatggacgagggatgcggagagaccatatatgtcattgggcagggatcagatgggactgagtatgggctgagtgaagctgacatggaggcctcctacgccacagtgaagagcatggcggaacagatagaggccgatgtcatccttctgcgggaacggcaagaagctgggggccgcgtgcgtgattacctggtccggaaacgagtaggagacaatgacttcctggaggtcagggtagcagtggtgggcaacgtggatgctggcaaaagcacgcttctgggggtcctgacacatggggagctggacaatggccgaggctttgcccgccagaaactcttccgccacaaacatgaaattgaatctggtcgcaccagcagtgtgggcaacgacattctgggctttgacagtgaaggcaatgtagtgaacaagcctgacagccacggcggcagcctggagtggaccaagatctgtgagaagtccacgaaagtcattaccttcatcgacttggctggtcatgagaagtacctgaaaaccactgtcttcggcatgacaggccatctgcctgacttctgcatgctcatggtgggcagcaatgctggcatcgtggggatgaccaaagaacacctgggcttggcactggcactcaatgtacctgtctttgtggtagtcaccaagattgacatgtgtcctgccaacatcctgcaagaaaccctgaagctgttacagcgcctgctgaagtcaccaggctgccggaagatccccgtgctggtgcagagcaaagatgatgtgattgtcacagcctccaacttcagctctgaaaggatgtgcccgatattccagatctccaacgttacaggcgagaacctagatctgctgaagatgttcctcaacctcctctccccccgcaccagctacagggaggaggagcctgctgagtttcagattgatgacacctactccgtcccgggtgtggggacagtggtttcggggacaacactgagaggcctgatcaagctgaatgacacgctgctgctgggcccagaccccttgggtaacttcctgtccattgctgtcaaatccatccatcgcaagcgcatgcctgtcaaggaggtgcggggtggccagacagcatcctttgcgctgaagaagatcaagcgctcgtccatccggaagggcatggtgatggtttccccacgtttgaatccccaagcctcctgggagtttgaggccgagattctcgtcctccaccaccccaccacaattagcccgcgctaccaggccatggtgcactgtgggagcatcaggcagacagccaccattctgagcatggacaaggactgtctgcgcactggggacaaggccactgtacacttccgcttcatcaagacccctgagtacctgcacatagaccagcggctggtgttccgggaaggccgcaccaaggctgtcggcaccatcaccaagctcctccagaccaccaacaactccccaatgaactccaagccgcagcagattaaaatgcagtcgacgaaaaagggccccctgacgaaacgagacgaggggggcccgtctggtgggccagcagtaggagcacccccacctggagatgaagcctcctctgtaggggcagggcaaccagctgcgtccagcaatctccagcctcagcctaagcccagcagtggaggccggcgacgagggggccagcgccacaaggtgaagtcccagggggcctgtgtgactcctgccagcggctgctgaaccttcccctggcccaccctcaccacccaaggggtcatcatctctggccaccactccaccagatgggcagagcagctatgaccgccacccagccctcccgctcaggccacagccggagcctccgcattgcccccacccccattttccaggggggttgtaatttataagctgacgaaggtagccagacttccggaggactgaccatctctcactgtcctccccaccttcttcctcactcacacattttttgtacatctgggcccttagtttttattctgtttattatatgtctctgtctctctctattgtgtgtgtgtgtgtgtgtgtgtgtgtgtgtgtgtgtgtgtggtgcaggagtgccacccccagggccctgtcaacctctcttttctcctccatggctgtctgcctgcgtatctgtctctgagaatcctcggggcggtcaggggatgtcaggaggggaaggagccgccctccctatcttgctgctcctcttggcactcaggggcaccttccatggagccagaccgggtggaggggcttctgggatttggtgtctgctgctgccagagcaggaacccccagtctaggacttgggcattttaacagggagaaagtagtggcttcccttttctctctctcctcctttttccctttaagcccacagattcaggtcatgccaaaagctctctggttgtaacctggagacatgtggaggggaatggcgatgggattataggactctccccatctcgggccctgaccctgacccttgccaccaacccaaagacagctggtgggtttccccttggagacaatcctgcgtttgcctgggccggccctggctgccctcagctttcgctgatctgcccggcctggagcctcccatcaccccgcttcttgttgggcctcaggcactggttaccagaagggggtctgggtctgctcaggatcatgttttgtagcacctcctgttggaggggtggagggatgttcccctgagccaggctgagactagaaccccatcttccctgagccaggctgagactagaaccccatcttccccaccacgccacccctgtggctgctacaggagcacagtagtgaaggcctgagctccaggtttgaaagacccaactggagcgtggggcgggcaggcaggggttagtgaaaggacacttccagggttaggacagagcatttagccttctggaagaacccctgcctggggtgggactgtgcaggccagagaaggtggcatgggcctgaacccacctggactgacttctgcactgaagccacagatggagggtaggctggtgggtgggggtggttcgttctctagccggggcagacacccagctggctgggtccttcctcagccttgcctcctcctgtccccaaccctttcctttcctcctgcttgcggactgctggtcccctctccttccctccttccagctgtttctagttaccacctacccctggccgtggactgatcagaccagcattcaaaataaaagtttgttccaagttgacagtgtggtgctccctgcccagcccctccaggtggaggtgctgccacgggaacgcagttgctctgcctgccctggggcccctggcgacagctgggagcagggcagtgctgtgaggagcccagctttcccagtcaggcaggcatggcttccgtgttcaggctccctcaccagctggtgacacgggacaagcttacaaaccttctctgaacctcagttttctcatttacaagaggcaaagccatccatcaccttgtgtggattcagagaatgtgaggccctggggtgtcctacacaaggga

SEQ ID NO: 349019 - DNA, 4122 bp, Homo sapiens
gtcacccatgctgctcctcaacacactgagctgcttcctggtccctgaacttgccatgatctgccacgccacgctttgttcctctggctaggatgtccttcctccttctgcaggcccagcacttgttgacctagcttggcatcagccctttgcagaactgtcctcggcttccccaggcagtgctttatgttctcttcacacagtcctagagtgcagcacttgagctgtattgcaattaattaatttcctgtctgcctcccccactgggctgtgagctcactaggggcacctgtagtcctagtacccagcatgaggcttggcataaaacctgggagagcctcggtggctgttgttgaatgaagtagcgaatgctctgcttgatggagaggtctgtggcactgtcatgttttaacttggtgtgtgcccaggttttctctcaggtagagaggacccctgttcctctgcagtgctggggtcggggggtggtggcctttgttaggtggggttcctggctggctggttggcaggctggttggtcaggactccctctcctgctgatgtctgggctcttgtcaccagatgggactgagtatgggctgagtgaagctgacatggaggcctcctacgccacagtgaagagcatggcggaacagatagaggccgatgtcatccttctgcgggaacggcaagaagctgggggccgcgtgcgtgattacctggtccggaaacgagtaggagacaatgacttcctggaggtcagggtagcagtggtgggcaacgtggatgctggcaaaagcacgcttctgggggtcctgacacatggggagctggacaatggccgaggctttgcccgccagaaactcttccgccacaaacatgaaattgaatctggtcgcaccagcagtgtgggcaacgacattctgggctttgacagtgaaggcaatgtagtgaacaagcctgacagccacggcggcagcctggagtggaccaagatctgtgagaagtccacgaaagtcattaccttcatcgacttggctggtcatgagaagtacctgaaaaccactgtcttcggcatgacaggccatctgcctgacttctgcatgctcatggtgggcagcaatgctggcatcgtggggatgaccaaagaacacctgggcttggcactggcactcaatgtacctgtctttgtggtagtcaccaagattgacatgtgtcctgccaacatcctgcaagaaaccctgaagctgttacagcgcctgctgaagtcaccaggctgccggaagatccccgtgctggtgcagagcaaagatgatgtgattgtcacagcctccaacttcagctctgaaaggatgtgcccgatattccagatctccaacgttacaggcgagaacctagatctgctgaagatgttcctcaacctcctctccccccgcaccagctacagggaggaggagcctgctgagtttcagattgatgacacctactccgtcccgggtgtggggacagtggtttcggggacaacactgagaggcctgatcaagctgaatgacacgctgctgctgggcccagaccccttgggtaacttcctgtccattgctgtcaaatccatccatcgcaagcgcatgcctgtcaaggaggtgcggggtggccagacagcatcctttgcgctgaagaagatcaagcgctcgtccatccggaagggcatggtgatggtttccccacgtttgaatccccaagcctcctgggagtttgaggccgagattctcgtcctccaccaccccaccacaattagcccgcgctaccaggccatggtgcactgtgggagcatcaggcagacagccaccattctgagcatggacaaggactgtctgcgcactggggacaaggccactgtacacttccgcttcatcaagacccctgagtacctgcacatagaccagcggctggtgttccgggaaggccgcaccaaggctgtcggcaccatcaccaagctcctccagaccaccaacaactccccaatgaactccaagccgcagcagattaaaatgcagtcgacgaaaaagggccccctgacgaaacgagacgaggggggcccgtctggtgggccagcagtaggagcacccccacctggagatgaagcctcctctgtaggggcagggcaaccagctgcgtccagcaatctccagcctcagcctaagcccagcagtggaggccggcgacgagggggccagcgccacaaggtgaagtcccagggggcctgtgtgactcctgccagcggctgctgaaccttcccctggcccaccctcaccacccaaggggtcatcatctctggccaccactccaccagatgggcagagcagctatgaccgccacccagccctcccgctcaggccacagccggagcctccgcattgcccccacccccattttccaggggggttgtaatttataagctgacgaaggtagccagacttccggaggactgaccatctctcactgtcctccccaccttcttcctcactcacacattttttgtacatctgggcccttagtttttattctgtttattatatgtctctgtctctctctattgtgtgtgtgtgtgtgtgtgtgtgtgtgtgtgtgtgtgtgtggtgcaggagtgccacccccagggccctgtcaacctctcttttctcctccatggctgtctgcctgcgtatctgtctctgagaatcctcggggcggtcaggggatgtcaggaggggaaggagccgccctccctatcttgctgctcctcttggcactcaggggcaccttccatggagccagaccgggtggaggggcttctgggatttggtgtctgctgctgccagagcaggaacccccagtctaggacttgggcattttaacagggagaaagtagtggcttcccttttctctctctcctcctttttccctttaagcccacagattcaggtcatgccaaaagctctctggttgtaacctggagacatgtggaggggaatggcgatgggattataggactctccccatctcgggccctgaccctgacccttgccaccaacccaaagacagctggtgggtttccccttggagacaatcctgcgtttgcctgggccggccctggctgccctcagctttcgctgatctgcccggcctggagcctcccatcaccccgcttcttgttgggcctcaggcactggttaccagaagggggtctgggtctgctcaggatcatgttttgtagcacctcctgttggaggggtggagggatgttcccctgagccaggctgagactagaaccccatcttccctgagccaggctgagactagaaccccatcttccccaccacgccacccctgtggctgctacaggagcacagtagtgaaggcctgagctccaggtttgaaagacccaactggagcgtggggcgggcaggcaggggttagtgaaaggacacttccagggttaggacagagcatttagccttctggaagaacccctgcctggggtgggactgtgcaggccagagaaggtggcatgggcctgaacccacctggactgacttctgcactgaagccacagatggagggtaggctggtgggtgggggtggttcgttctctagccggggcagacacccagctggctgggtccttcctcagccttgcctcctcctgtccccaaccctttcctttcctcctgcttgcggactgctggtcccctctccttccctccttccagctgtttctagttaccacctacccctggccgtggactgatcagaccagcattcaaaataaaagtttgttccaagttgacagtgtggtgctccctgcccagcccctccaggtggaggtgctgccacgggaacgcagttgctctgcctgccctggggcccctggcgacagctgggagcagggcagtgctgtgaggagcccagctttcccagtcaggcaggcatggcttccgtgttcaggctccctcaccagctggtgacacgggacaagcttacaaaccttctctgaacctcagttttctcatttacaagaggcaaagccatccatcaccttgtgtggattcagagaatgtgaggccctggggtgtcctacacaaggga

SEQ ID NO: 349020 - DNA, 2957 bp, Homo sapiens
gacgctctctgtgggggcaggcaaccagctgcgtcagcaatctccagcctcagcctaagccctgcaagaaaccctgaagctgttacagcgcctgctgaagtcaccaggctgccggaagatccccgtgctggtgcagagcaaagatgatgtgattgtcacagcctccaacttcagctctgaaaggatgtgcccgatattccagatctccaacgttacaggcgagaacctagatctgctgaagatgttcctcaacctcctctccccccgcaccagctacagggaggaggagcctgctgagtttcagattgatgacacctactccgtcccgggtgtggggacagtggtttcggggacaacactgagaggcctgatcaagctgaatgacacgctgctgctgggcccagaccccttgggtaacttcctgtccattgctgtcaaatccatccatcgcaagcgcatgcctgtcaaggaggtgcggggtggccagacagcatcctttgcgctgaagaagatcaagcgctcgtccatccggaagggcatggtgatggtttccccacgtttgaatccccaagcctcctgggagtttgaggccgagattctcgtcctccaccaccccaccacaattagcccgcgctaccaggccatggtgcactgtgggagcatcaggcagacagccaccattctgagcatggacaaggactgtctgcgcactggggacaaggccactgtacacttccgcttcatcaagacccctgagtacctgcacatagaccagcggctggtgttccgggaaggccgcaccaaggctgtcggcaccatcaccaagctcctccagaccaccaacaactccccaatgaactccaagccgcagcagattaaaatgcagtcgacgaaaaagggccccctgacgaaacgagacgaggggggcccgtctggtgggccagcagtaggagcacccccacctggagatgaagcctcctctgtaggggcagggcaaccagctgcgtccagcaatctccagcctcagcctaagcccagcagtggaggccggcgacgagggggccagcgccacaaggtgaagtcccagggggcctgtgtgactcctgccagcggctgctgaaccttcccctggcccaccctcaccacccaaggggtcatcatctctggccaccactccaccagatgggcagagcagctatgaccgccacccagccctcccgctcaggccacagccggagcctccgcattgcccccacccccattttccaggggggttgtaatttataagctgacgaaggtagccagacttccggaggactgaccatctctcactgtcctccccaccttcttcctcactcacacattttttgtacatctgggcccttagtttttattctgtttattatatgtctctgtctctctctattgtgtgtgtgtgtgtgtgtgtgtgtgtgtgtgtgtgtgtgtggtgcaggagtgccacccccagggccctgtcaacctctcttttctcctccatggctgtctgcctgcgtatctgtctctgagaatcctcggggcggtcaggggatgtcaggaggggaaggagccgccctccctatcttgctgctcctcttggcactcaggggcaccttccatggagccagaccgggtggaggggcttctgggatttggtgtctgctgctgccagagcaggaacccccagtctaggacttgggcattttaacagggagaaagtagtggcttcccttttctctctctcctcctttttccctttaagcccacagattcaggtcatgccaaaagctctctggttgtaacctggagacatgtggaggggaatggcgatgggattataggactctccccatctcgggccctgaccctgacccttgccaccaacccaaagacagctggtgggtttccccttggagacaatcctgcgtttgcctgggccggccctggctgccctcagctttcgctgatctgcccggcctggagcctcccatcaccccgcttcttgttgggcctcaggcactggttaccagaagggggtctgggtctgctcaggatcatgttttgtagcacctcctgttggaggggtggagggatgttcccctgagccaggctgagactagaaccccatcttccctgagccaggctgagactagaaccccatcttccccaccacgccacccctgtggctgctacaggagcacagtagtgaaggcctgagctccaggtttgaaagacccaactggagcgtggggcgggcaggcaggggttagtgaaaggacacttccagggttaggacagagcatttagccttctggaagaacccctgcctggggtgggactgtgcaggccagagaaggtggcatgggcctgaacccacctggactgacttctgcactgaagccacagatggagggtaggctggtgggtgggggtggttcgttctctagccggggcagacacccagctggctgggtccttcctcagccttgcctcctcctgtccccaaccctttcctttcctcctgcttgcggactgctggtcccctctccttccctccttccagctgtttctagttaccacctacccctggccgtggactgatcagaccagcattcaaaataaaagtttgttccaagttgacagtgtggtgctccctgcccagcccctccaggtggaggtgctgccacgggaacgcagttgctctgcctgccctggggcccctggcgacagctgggagcagggcagtgctgtgaggagcccagctttcccagtcaggcaggcatggcttccgtgttcaggctccctcaccagctggtgacacgggacaagcttacaaaccttctctgaacctcagttttctcatttacaagaggcaaagccatccatcaccttgtgtggattcagagaatgtgaggccctggggtgtcctacacaaggga

SEQ ID NO: 349021 - DNA, 1177 bp, Homo sapiens
  misc_feature (10)..(10): n is a, c, g, or t
ttaaggcaancaagggccggcccaggcaaacgcaggattgtctccaaggggaaacccaccagctgtcttgggattataggactctccccatctcgggccctgaccctgacccttgccaccaacccaaagacagctggtgggtttccccttggagacaatcctgcgtttgcctgggccggccctggctgccctcagctttcgctgatctgcccggcctggagcctcccatcaccccgcttcttgttgggcctcaggcactggttaccagaagggggtctgggtctgctcaggatcatgttttgtagcacctcctgttggaggggtggagggatgttcccctgagccaggctgagactagaaccccatcttccctgagccaggctgagactagaaccccatcttccccaccacgccacccctgtggctgctacaggagcacagtagtgaaggcctgagctccaggtttgaaagacccaactggagcgtggggcgggcaggcaggggttagtgaaaggacacttccagggttaggacagagcatttagccttctggaagaacccctgcctggggtgggactgtgcaggccagagaaggtggcatgggcctgaacccacctggactgacttctgcactgaagccacagatggagggtaggctggtgggtgggggtggttcgttctctagccggggcagacacccagctggctgggtccttcctcagccttgcctcctcctgtccccaaccctttcctttcctcctgcttgcggactgctggtcccctctccttccctccttccagctgtttctagttaccacctacccctggccgtggactgatcagaccagcattcaaaataaaagtttgttccaagttgacagtgtggtgctccctgcccagcccctccaggtggaggtgctgccacgggaacgcagttgctctgcctgccctggggcccctggcgacagctgggagcagggcagtgctgtgaggagcccagctttcccagtcaggcaggcatggcttccgtgttcaggctccctcaccagctggtgacacgggacaagcttacaaaccttctctgaacctcagttttctcatttacaagaggcaaagccatccatcaccttgtgtggattcagagaatgtgaggccctggggtgtcctacacaaggga

SEQ ID NO: 349022 - DNA, 872 bp, Homo sapiens
agcggggccacttccggtgtcgcgcggcggctcccggcaggaggcagagggcacaccgccagccccaggccaggctgcgagggccgcggacccgagccgggaaggaccttgggcggacgagccgcgcgtcccgcagccatggagcaggacgacccggtcgaggcgctgacggagctgcgcgagcggcggctgggcgcgctggagctgctgcaggcggcggccggctcgggcttggcagcctacgcggtgtgggcgctgctgctccagcccggcttccggcgcgtgccgctgcggctgcaggtgccctacgtcggcgcgagcgcgcggcaggtggagcacgtgttgtcgctgctgcgaggacgccccggaaaaacggtggatctgggctctggcgacggcaggatcgtgctggcggcccacaggtgcggcctccgcccggccgtgggctacgagctgaacccctggctggtggcgctggcgcggctgcacgcctggagggccggctgtgccggcagcgtctgctatcgccgcaaggatctctggaaggtgagcctgagggactgccgcaacgtgtctgtgttcctggcccctagcgtgctcccgctgctggaggacaagctgcggacagagctgcctgctggggcccgcgtggtgtctgggcgcttcccactccccacctggcagcctgtgaccgcggttggcgagggcctggaccgagtatgggcttatgatgttcctgagggtgggcaggctggggaggccgcctcctcgcggatacccatccaggctgcccccggacctagttctgcccccatcccggggggccttatttctcaggccagctgagtattagacacgataaagactctgtg

SEQ ID NO: 349023 - DNA, 1033 bp, Homo sapiens
agcggggccacttccggtgtcgcgcggcggctcccggcaggaggcagagggcacaccgccagccccaggccaggctgcgagggccgcggacccgagccgggaaggaccttgggcggacgagccgcgcgtcccgcagccatggagcaggacgacccggtcgaggcgctgacggagctgcgcgagcggcggctgggcgcgctggagctgctgcaggcggcggccggctcgggcttggcagcctacgcggtgtgggcgctgctgctccagcccggcttccggcgcgtgccgctgcggctgcaggtgcggggcggggccaggccgggcaggggagctcggctgccgctcagggtctcaaggtctgggcgtggccggggtgagctccgccccgccgtgtggtagttcgggccgggctgcgggcggggcgggagcggccagtggactctcgccgccacccggtccaggtgccctacgtcggcgcgagcgcgcggcaggtggagcacgtgttgtcgctgctgcgaggacgccccggaaaaacggtggatctgggctctggcgacggcaggatcgtgctggcggcccacaggtgcggcctccgcccggccgtgggctacgagctgaacccctggctggtggcgctggcgcggctgcacgcctggagggccggctgtgccggcagcgtctgctatcgccgcaaggatctctggaaggtgagcctgagggactgccgcaacgtgtctgtgttcctggcccctagcgtgctcccgctgctggaggacaagctgcggacagagctgcctgctggggcccgcgtggtgtctgggcgcttcccactccccacctggcagcctgtgaccgcggttggcgagggcctggaccgagtatgggcttatgatgttcctgagggtgggcaggctggggaggccgcctcctcgcggatacccatccaggctgcccccggacctagttctgcccccatcccggggggccttatttctcaggccagctgagtattagacacgataaagactctgtg

SEQ ID NO: 349024 - DNA, 1046 bp, Homo sapiens
agcggggccacttccggtgtcgcgcggcggctcccggcaggaggcagagggcacaccgccagccccaggccaggctgcgagggccgcggacccgagccgggaaggaccttgggcggacgagccgcgcgtcccgcagccatggagcaggacgacccggtcgaggcgctgacggagctgcgcgagcggcggctgggcgcgctggagctgctgcaggcggcggccggctcgggcttggcagcctacgcggtgtgggcgctgctgctccagcccggcttccggcgcgtgccgctgcggctgcaggtgccctacgtcggcgcgagcgcgcggcaggtggagcacgtgttgtcgctgctgcgaggacgccccggaaaaacggtggatctgggctctggcgacggcaggatcgtgctggcggcccacaggtgcggcctccgcccggccgtgggctacgagctgaacccctggctggtggcgctggcgcggctgcacgcctggagggccggctgtgccggcagcgtctgctatcgccgcaaggatctctggaaggtgagcctgagggactgccgcaacgtgtctgtgttcctggcccctagcgtggtaggtgcggggttgccagccccgctgggaagccccagccacaccccagggtgtttgctgctctgaggcctgggcctgcctggtgggtgctaggcttggggctaggggggtgagcgcggctgtttcttaccgggcccggccccggcccctctactctgctgttctctccctcagctcccgctgctggaggacaagctgcggacagagctgcctgctggggcccgcgtggtgtctgggcgcttcccactccccacctggcagcctgtgaccgcggttggcgagggcctggaccgagtatgggcttatgatgttcctgagggtgggcaggctggggaggccgcctcctcgcggatacccatccaggctgcccccggacctagttctgcccccatcccggggggccttatttctcaggccagctgagtattagacacgataaagactctgtg

SEQ ID NO: 349025 - DNA, 1175 bp, Homo sapiens
agcggggccacttccggtgtcgcgcggcggctcccggcaggaggcagagggcacaccgccagccccaggccaggctgcgagggccgcggacccgagccgggaaggaccttgggcggacgagccgcgcgtcccgcagccatggagcaggacgacccggtcgaggcgctgacggagctgcgcgagcggcggctgggcgcgctggagctgctgcaggcggcggccggctcgggcttggcagcctacgcggtgtgggcgctgctgctccagcccggcttccggcgcgtgccgctgcggctgcaggtgcggggcggggccaggccgggcaggggagctcggctgccgctcagggtctcaaggtctgggcgtggccggggtgagctccgccccgccgtgtggtagttcgggccgggctgcgggcggggcgggagcggccagtggactctcgccgccacccggtccaggtgccctacgtcggcgcgagcgcgcggcaggtggagcacgtgttgtcgctgctgcgaggacgccccggaaaaacggtggatctgggctctggcgacggcaggatcgtgctggcggcccacaggtgcggcctccgcccggccgtgggctacgagctgaacccctggctggtggcgctggcgcggctgcacgcctggagggccggctgtgccggcagcgtctgctatcgccgcaaggatctctggaaggtaacctggggatccctggccacccgctgacagcccaaggtgcggctgacacctgcgagggctgggggccgggactcggaagctgcgatgacccggtgcccaccaggcctctccccggccggggcgacttctcttccggcaggtgagcctgagggactgccgcaacgtgtctgtgttcctggcccctagcgtgctcccgctgctggaggacaagctgcggacagagctgcctgctggggcccgcgtggtgtctgggcgcttcccactccccacctggcagcctgtgaccgcggttggcgagggcctggaccgagtatgggcttatgatgttcctgagggtgggcaggctggggaggccgcctcctcgcggatacccatccaggctgcccccggacctagttctgcccccatcccggggggccttatttctcaggccagctgagtattagacacgataaagactctgtg

SEQ ID NO: 349026 - DNA, 795 bp, Homo sapiens
ccggcaggaggcagagggcacaccgccagccccaggccaggctgcgagggccgcggacccgagccgggaaggaccttgggcggacgagccgcgcgtcccgcagccatggagcaggacgacccggtcgaggcgctgacggagctgcgcgagcggcggctgggcgcgctggagctgctgcaggcggcggccggctcgggcttggcagcctacgcggtgtgggcgctgctgctccagcccggcttccggcgcgtgccgctgcggctgcaggtgcggggcggggccaggccgggcaggggagctcggctgccgctcagggtctcaaggtctgggcgtggccggggtgagctccgccccgccgtgtggtagttcgggccgggctgcgggcggggcgggagcggccagtggactctcgccgccacccggtccaggtgccctacgtcggcgcgagcgcgcggcaggtggagcacgtgttgtcgctgctgcgaggacgccccggaaaaacggtggatctgggctctggcgacggcaggatcgtaagtgcctgcgtctgggtcttcgccgccccacaccgcccacctgctggcgggcgcccctgcccacatcctggttcccacactctcggtgcccacaggtgctggcggcccacaggtgcggcctccgcccggccgtgggctacgagctgaacccctggctggtggcgctggcgcggctgcacgcctggagggccggctgtgccggcagcgtctgctatcgccgcaaggatctctggaaggtaacctggggatccctggccac

SEQ ID NO: 349027 - DNA, 821 bp, Homo sapiens
agcggggccacttccggtgtcgcgcggcggctcccggcaggaggcagagggcacaccgccagccccaggccaggctgcgagggccgcggacccgagccgggaaggaccttgggcggacgagccgcgcgtcccgcagccatggagcaggacgacccggtcgaggcgctgacggagctgcgcgagcggcggctgggcgcgctggagctgctgcaggcggcggccggctcgggcttggcagcctacgcggtgtgggcgctgctgctccagcccggcttccggcgcgtgccgctgcggctgcaggtgccctacgtcggcgcgagcgcgcggcaggtggagcacgtgttgtcgctgctgcgaggacgccccggaaaaacggtggatctgggctctggcgacggcaggatcgtgctggcggcccacaggtgcggcctccgcccggccgtgggctacgagctgaacccctggctggtggcgctggcgcggctgcacgcctggagggccggctgtgccggcagcgtctgctatcgccgcaaggatctctggaagctcccgctgctggaggacaagctgcggacagagctgcctgctggggcccgcgtggtgtctgggcgcttcccactccccacctggcagcctgtgaccgcggttggcgagggcctggaccgagtatgggcttatgatgttcctgagggtgggcaggctggggaggccgcctcctcgcggatacccatccaggctgcccccggacctagttctgcccccatcccggggggccttatttctcaggccagctgagtattagacacgataaagactctgtg

SEQ ID NO: 349028 - DNA, 963 bp, Homo sapiens
agcggggccacttccggtgtcgcgcggcggctcccggcaggaggcagagggcacaccgccagccccaggccaggctgcgagggccgcggacccgagccgggaaggaccttgggcggacgagccgcgcgtcccgcagccatggagcaggacgacccggtcgaggcgctgacggagctgcgcgagcggcggctgggcgcgctggagctgctgcaggcggcggccggctcgggcttggcagcctacgcggtgtgggcgctgctgctccagcccggcttccggcgcgtgccgctgcggctgcaggtgccctacgtcggcgcgagcgcgcggcaggtggagcacgtgttgtcgctgctgcgaggacgccccggaaaaacggtggatctgggctctggcgacggcaggatcgtgctggcggcccacaggtgcggcctccgcccggccgtgggctacgagctgaacccctggctggtggcgctggcgcggctgcacgcctggagggccggctgtgccggcagcgtctgctatcgccgcaaggatctctggaaggtaacctggggatccctggccacccgctgacagcccaaggtgcggctgacacctgcgagggctgggggccgggactcggaagctgcgatgacccggtgcccaccaggcctctccccggccggggcgacttctcttccggcagctcccgctgctggaggacaagctgcggacagagctgcctgctggggcccgcgtggtgtctgggcgcttcccactccccacctggcagcctgtgaccgcggttggcgagggcctggaccgagtatgggcttatgatgttcctgagggtgggcaggctggggaggccgcctcctcgcggatacccatccaggctgcccccggacctagttctgcccccatcccggggggccttatttctcaggccagctgagtattagacacgataaagactctgtg

SEQ ID NO: 349029 - DNA, 1188 bp, Homo sapiens
agcggggccacttccggtgtcgcgcggcggctcccggcaggaggcagagggcacaccgccagccccaggccaggctgcgagggccgcggacccgagccgggaaggaccttgggcggacgagccgcgcgtcccgcagccatggagcaggacgacccggtcgaggcgctgacggagctgcgcgagcggcggctgggcgcgctggagctgctgcaggcggcggccggctcgggcttggcagcctacgcggtgtgggcgctgctgctccagcccggcttccggcgcgtgccgctgcggctgcaggtgccctacgtcggcgcgagcgcgcggcaggtggagcacgtgttgtcgctgctgcgaggacgccccggaaaaacggtggatctgggctctggcgacggcaggatcgtgctggcggcccacaggtgcggcctccgcccggccgtgggctacgagctgaacccctggctggtggcgctggcgcggctgcacgcctggagggccggctgtgccggcagcgtctgctatcgccgcaaggatctctggaaggtaacctggggatccctggccacccgctgacagcccaaggtgcggctgacacctgcgagggctgggggccgggactcggaagctgcgatgacccggtgcccaccaggcctctccccggccggggcgacttctcttccggcaggtgagcctgagggactgccgcaacgtgtctgtgttcctggcccctagcgtggtaggtgcggggttgccagccccgctgggaagccccagccacaccccagggtgtttgctgctctgaggcctgggcctgcctggtgggtgctaggcttggggctaggggggtgagcgcggctgtttcttaccgggcccggccccggcccctctactctgctgttctctccctcagctcccgctgctggaggacaagctgcggacagagctgcctgctggggcccgcgtggtgtctgggcgcttcccactccccacctggcagcctgtgaccgcggttggcgagggcctggaccgagtatgggcttatgatgttcctgagggtgggcaggctggggaggccgcctcctcgcggatacccatccaggctgcccccggacctagttctgcccccatcccggggggccttatttctcaggccagctgagtattagacacgataaagactctgtg

SEQ ID NO: 349030 - DNA, 351 bp, Homo sapiens
atctactgatccctaattattctcatattttcctctctctatatatctatgagttcaaatttcaacagaaaaaaatttgaccatgtttggtctgttaccaacctatacagaatgcctatatggggcagaattctcacacctagccacatcataggtctttggctatcttacagctaatgacttgggaccagagacatggatatgggtatcatggtgacctgtaaagctggaactagtcctagttaccagctactttgtctaaaatacacagccaacactcaaaaagcaccacaatcttccagtaaaacaatcctaacttatatcactagaaataatgatttagaacattta

SEQ ID NO: 349031 - DNA, 645 bp, Homo sapiens
tatgaaagtggggctggtgaaggttgaattaactgctaaaccctccaccaagcaaagaggacacaaattgaaaacattgcctatgtgttttaatgggaacatggaataaataaatgaatatatatttacatatactcagagggagaggactatcttaaacaattcaaggtcatgaagagtatatgtgggaaaagaaaaggaagatgactgaggagtgtggattctaggatccagtcctgctgacacctccaccagctctgtctccttagacaagcttcctctttttgggccttggtgccttcatctgtaaagaggaaggagttggaatagttgatcttcagtgacactgtcagctttgtaatacccatgtgttcaaaccattcatcttatcttgggtaattattttttaaatattatttcaagatttaatttgtcaacttgtattcttcccctactgataactataaggtaatttaatgagttcgtaaattctgaaatggaattggtatcagtagaatgatgattatcatggattaaatattatattattctgcaaggaagatgtttctcccaagaaatcacactcctgtgtttatttaggtacttagtattttaagatcctcacttatttatcaaggtatttat

SEQ ID NO: 349032 - DNA, 790 bp, Homo sapiens
caaagtttgcttgaggagaacacattaagaatgccttagtaaattctgcccttgttttgaacttaggaaaattccacacaaatttatgtttttttctttaataaaataaatatgaagttaaattgcaggagaatgttatatttcagtttttttaaattccactttgaatgtctttttatgtagaagacacatctttgaaaacaatttatattaactttaacacttcataaaacaggagactgggaaaagagttcagttattcttaagaatataactctatgctcataaatttgcctgtttatgtggaatttgaactcttcaaaaaatggtaaatctttcagaagataacaagaattaaattaacacatctggccgtagctaaaggcacatataaattatctcattcatttgccaaaatttcaaaccaaagctaaaattttctttagaaagccaaaattagcaaacatttcttataatctttgtaactagttaatctgcaaattggcgtactcaatgtactttattatagagaagaagtaaaaatagtgctttaacaaaaatccctcttattgattttttttttttttaattttaaagagaccgtcttgctccattgcccaggctggagtacagtggtgcaattatagctcactgcaacctcaaactcctgggctcaagcaatcctcctgcctcggcctcctgagtagctgggactacagccatgcaccaccatgcacagctaatttttatttttactttttgtagagatggagtctcactatgttgtcca

SEQ ID NO: 349033 - DNA, 922 bp, Homo sapiens
  misc_feature (217)..(217): n is a, c, g, or t
  misc_feature (246)..(246): n is a, c, g, or t
  misc_feature (325)..(327): n is a, c, g, or t
  misc_feature (356)..(356): n is a, c, g, or t
  misc_feature (372)..(372): n is a, c, g, or t
  misc_feature (410)..(410): n is a, c, g, or t
  misc_feature (655)..(655): n is a, c, g, or t
  misc_feature (695)..(695): n is a, c, g, or t
  misc_feature (706)..(706): n is a, c, g, or t
  misc_feature (717)..(721): n is a, c, g, or t
  misc_feature (724)..(724): n is a, c, g, or t
  misc_feature (727)..(727): n is a, c, g, or t
  misc_feature (731)..(731): n is a, c, g, or t
  misc_feature (733)..(733): n is a, c, g, or t
  misc_feature (747)..(747): n is a, c, g, or t
tcaatcaccggcccggtggcctgtattggggcatggcatcctgctcgtgtagccttctctgtggcacgcgctgggcagaaaggctaccatcaccgcactgagatcaacaagaagatttataagattggccagggctaccttatcaaggacggcaagctgatcaagaacaatgcctccactgtcaatgaactgatggcgtgatgtctcacagaaagtnctcgcgttcgcagacatgggtccctcggncttcctgcctcggaagcgcaggcaggaggcagtcggtgggaaggtgaagagcgtgtccgctaaggatgacgccatccannncgcggtccacctcacagcttcctgggatnacaaggctgggatgantcacatcgtgcgggaagctcgacaggccgggatccaangtgaacaagacggaggtggtggaggctgtgacctgtggtagagagaacaaccatggtggtggtggggatggtggggtatgtgggaaaggaactcgattggccgtccggagctgtaggactgtctattaggtgagcacatcagtgatgaatgaagaggcgtttctataagaattggatagatctaagaagaaggctttaccgaggtactggagaaatggaggatgaggatggagaagcagtggggnaggattcaggagcatgaagaagtacgccagtcatccggtnatgccacaccngatgtgcgtcnnnnnggngcnaaananggccacctgatggngatcccggggacggaggcgggcgcggaaacgggagggccggggagttgagcagggggcccggacccaggtggcgggagagacgccgcccgggggccagggcaggcccacggggccacggggccaaaagggcgcaacaccgggcgcgggggtgggggacccggccggcgcgggaag

SEQ ID NO: 349034 - DNA, 387 bp, Homo sapiens
  misc_feature (9)..(9): n is a, c, g, or t
  misc_feature (219)..(219): n is a, c, g, or t
  misc_feature (238)..(238): n is a, c, g, or t
  misc_feature (245)..(245): n is a, c, g, or t
tggaaatanagtcagatggaaaattcattttttaaattcccgctttgtcactttttctgataaaagatggccatattacccctttcaggccacatgattctcagtaccccaggagctgggcttagtaaatagcaatgggttgcacgcctgaggcaattaggcactttggaagatggcataacctgtctcacctggacttaagcgtctggctgtaattcncagtgctcttttctcctcnctgtatncaggtccatggaggagaagaaagcattcatgggaccactgaagaaagaccgaattgcaaaggaagaaggagcttaatgccaggaacagattttgcagttggtggggtctcaataaaagttattttccactgaaaaaaaaaaa

SEQ ID NO: 349035 - DNA, 1201 bp, Homo sapiens
  misc_feature (165)..(165): n is a, c, g, or t
  misc_feature (337)..(337): n is a, c, g, or t
ccccctttgtaccctgccccttggtcacccgatgactcgatcaatctcacctgccctaacacttggttcacaggtacctgctgctcaagcctctcgcgggcccagtccagcttcttcggccacagtgcctcccgttcacctggatctccatcaggtgggccttcnttctggcgcagaggaagcaggcgcatctgggtgtgggcaatgacacggatgacttggcaggtacgttcttcatgctggctgaagtccttctccagctgcttcttgccatcctcatcctgccatttcttgcagtacttggtaaaggcccttcttctgtagattgtatgcccanttcttatagaaacgcctcttgcattcatcactgatgtgctcagcaaagacagtcttgaaaggtccggaggcctcgagggggtttccacgtagcccacaatgcccacaaccaccatgggtggtgtctctacaatggtcacagcctccaccacctccttcttgttcaccttggatcccggcctgtcgacttcccgcacgatgtgagtcatgccagccttgtatcccaggaaggctgtgaggtggaccggcttggacgggtcatccttagggaagctcttcaccttcccacgatgcctgctgctgcgcttccgaggcaggaagccgagggacccatgtctgggagcggagaactttctgtgagacatcacgccatcaaattctctgtggcacgcgctgggcagaaaggctaccatcaccgcactgagatcaacaagaagatttataagattggccagggctaccttatcaaggacggcaagctgatcaagaacaatgcctccactgactatgacctatctgacaagagcatcaaccctctgggtggctttgtccactatggtgaagtgaccaatgactttgtcatgctgaaaggctgtgtggtgggaaccaagaagcgggtgctcaccctccgcaagtccttgctggtgcagacgaagccacccagagggttgatgctcttgtgagataggtgatagtcagtggaggcattgttcttgatcagcttgccgtccttgataaggtagtcctggccaatcttaaaggaatatgatctatagcaaagattagcatgcagtaaggcctgcaggggctcccaggttttttatgactagatatatatagggcctttgctagactagattcaaat

SEQ ID NO: 349036 - DNA, 1235 bp, Homo sapiens
  misc_feature (165)..(165): n is a, c, g, or t
  misc_feature (370)..(370): n is a, c, g, or t
ccccctttgtaccctgccccttggtcacccgatgactcgatcaatctcacctgccctaacacttggttcacaggtacctgctgctcaagcctctcgcgggcccagtccagcttcttcggccacagtgcctcccgttcacctggatctccatcaggtgggccttcnttctggcgcagaggaagcaggcgcatctgggtgtgggcaatgacacggatgacttggcaggtacgttcttcatgctggctgaagtccttctccagctgcttcttgccatcccgcggtgttgttgggggcccaatcccccgtttgtcatcctgccatttcttgcagtacttggtaaaggcccttcttctgtagattgtatgcccanttcttatagaaacgcctcttgcattcatcactgatgtgctcagcaaagacagtcttgaaaggtccggaggcctcgagggggtttccacgtagcccacaatgcccacaaccaccatgggtggtgtctctacaatggtcacagcctccaccacctccttcttgttcaccttggatcccggcctgtcgacttcccgcacgatgtgagtcatgccagccttgtatcccaggaaggctgtgaggtggaccggcttggacgggtcatccttagggaagctcttcaccttcccacgatgcctgctgctgcgcttccgaggcaggaagccgagggacccatgtctgggagcggagaactttctgtgagacatcacgccatcaaattctctgtggcacgcgctgggcagaaaggctaccatcaccgcactgagatcaacaagaagatttataagattggccagggctaccttatcaaggacggcaagctgatcaagaacaatgcctccactgactatgacctatctgacaagagcatcaaccctctgggtggctttgtccactatggtgaagtgaccaatgactttgtcatgctgaaaggctgtgtggtgggaaccaagaagcgggtgctcaccctccgcaagtccttgctggtgcagacgaagcggcgggctctggagaagattgaccttaagttcattgacaccacctccaagtttggccatggccgcttccagaccatggaggagaagaaagcattcatgggaccactgaagaaagaccgaattgcaaaggaagaaggagcttaatgccaggaacagattttgcagttggtggggtctcaataaaagttattttccactgaaaaaaaaaaa

SEQ ID NO: 349037 - DNA, 543 bp, Homo sapiens
tcaatcaccggcccggtggcctgtattggggcatggcatcctgctcgtgtagccttctctgtggcacgcgctgggcagaaaggctaccatcaccgcactgagatcaacaagaagatttataagattggccagggctaccttatcaaggacggcaagctgatcaagaacaatgcctccactgactatgacctatctgacaagagcatcaaccctctgggtggctttgtccactatggtgaagtgaccaatgactttgtcatgctgaaaggctgtgtggtgggaaccaagaagcgggtgctcaccctccgcaagtccttgctggtgcagacgaagcggcgggctctggagaagattgaccttaagttcattgacaccacctccaagtttggccatggccgcttccagaccatggaggagaagaaagcattcatgggaccactgaagaaagaccgaattgcaaaggaagaaggagcttaatgccaggaacagattttgcagttggtggggtctcaataaaagttattttccactgaaaaaaaaaaa

SEQ ID NO: 349038 - DNA, 257 bp, Homo sapiens
atgggttataaccatcccctccatgctgtccttgtgatagtgagtgggtgagttattgtgagttctggttgtttagaagtgtgagtcatgccagccttgtatcccaggaaggctgtgaggtggaccggcttggacgggtcatccttagggaagctcttcaccttcccacgatgcctgctgctgcgcttccgaggcaggaagccgagggacccatgtctgggagcggagaactttctgtgagacatcacgccatcaaa

SEQ ID NO: 349039 - DNA, 1202 bp, Homo sapiens
  misc_feature (165)..(165): n is a, c, g, or t
  misc_feature (337)..(337): n is a, c, g, or t
ccccctttgtaccctgccccttggtcacccgatgactcgatcaatctcacctgccctaacacttggttcacaggtacctgctgctcaagcctctcgcgggcccagtccagcttcttcggccacagtgcctcccgttcacctggatctccatcaggtgggccttcnttctggcgcagaggaagcaggcgcatctgggtgtgggcaatgacacggatgacttggcaggtacgttcttcatgctggctgaagtccttctccagctgcttcttgccatcctcatcctgccatttcttgcagtacttggtaaaggcccttcttctgtagattgtatgcccanttcttatagaaacgcctcttgcattcatcactgatgtgctcagcaaagacagtcttgaaaggtccggaggcctcgagggggtttccacgtagcccacaatgcccacaaccaccatgggtggtgtctctacaatggtcacagcctccaccacctccttcttgttcaccttggatcccggcctgtcgacttcccgcacgatgtgagtcatgccagccttgtatcccaggaaggctgtgaggtggaccggcttggacgggtcatccttagggaagctcttcaccttcccacgatgcctgctgctgcgcttccgaggcaggaagccgagggacccatgtctgggagcggagaactttctgtgagacatcacgccatcaaattctctgtggcacgcgctgggcagaaaggctaccatcaccgcactgagatcaacaagaagatttataagattggccagggctaccttatcaaggacggcaagctgatcaagaacaatgcctccactgactatgacctatctgacaagagcatcaaccctctgggtggctttgtccactatggtgaagtgaccaatgactttgtcatgctgaaaggctgtgtggtgggaaccaagaagcgggtgctcaccctccgcaagtccttgctggtgcagacgaagcggcgggctctggagaagattgaccttaagttcattgacaccacctccaagtttggccatggccgcttccagaccatggaggagaagaaagcattcatgggaccactgaagaaagaccgaattgcaaaggaagaaggagcttaatgccaggaacagattttgcagttggtggggtctcaataaaagttattttccactgaaaaaaaaaaa

SEQ ID NO: 349040 - DNA, 1015 bp, Homo sapiens
  misc_feature (165)..(165): n is a, c, g, or t
  misc_feature (337)..(337): n is a, c, g, or t
ccccctttgtaccctgccccttggtcacccgatgactcgatcaatctcacctgccctaacacttggttcacaggtacctgctgctcaagcctctcgcgggcccagtccagcttcttcggccacagtgcctcccgttcacctggatctccatcaggtgggccttcnttctggcgcagaggaagcaggcgcatctgggtgtgggcaatgacacggatgacttggcaggtacgttcttcatgctggctgaagtccttctccagctgcttcttgccatcctcatcctgccatttcttgcagtacttggtaaaggcccttcttctgtagattgtatgcccanttcttatagaaacgcctcttgcattcatcactgatgtgctcagcaaagacagtcttgaaaggtccggaggcctcgagggggtttccacgtagcccacaatgcccacaaccaccatgggtggtgtctctacaatggtcacagcctccaccacctccttcttgttcaccttggatcccggcctgtcgacttcccgcacgatgtgagtcatgccagccttgtatcccaggaaggctgtgaggtggaccggcttggacgggtcatccttagggaagctcttcaccttcccacgatgcctgctgctgcgcttccgaggcaggaagccgagggacccatgtctgggagcggagaactttctgtgagacatcacgccatcaaattctctgtggcacgcgctgggcagaaaggctaccatcaccgcactgagatcaacaagaagatttataagattggccagggctaccttatcaaggacggcaagctgatcaagaacaatgcctccactgactatgacctatctgacaagagcatcaaccctctgggtggctttgtccactatggtgaagtgaccaatgactttgtcatgctgaaaggctgtgtggtgggaaccaagaagcgggtgtaggtgtgggacttccaggtgcaggtgtgggactaccaggtgcaggtgtgggactacca

SEQ ID NO: 349041 - DNA, 552 bp, Homo sapiens
  misc_feature (30)..(30): n is a, c, g, or t
  misc_feature (44)..(44): n is a, c, g, or t
gatcccagacatgggtccctcggcttcctncctcggaagcgcanagcaggcatcgtgggaaggtgaagagcttccctaaggatgacccatccaagccggtccacctcacagccttcctgggatacaaggctggcatgactcacatcgtgcgggaagtcgacaggcctgatcaagaacaatgcctccactgactatgacctatctgacaagagcatcaaccctctgggtggctttgtccactatggtgaagtgaccaatgactttgtcatgctgaaaggctgtgtggtgggaaccaagaagcgggtgctcaccctccgcaagtccttgctggtgcagacgaagcggcgggctctggagaagattgaccttaagttcattgacaccacctccaagtttggccatggccgcttccagaccatggaggagaagaaagcattcatgggaccactgaagaaagaccgaattgcaaaggaagaaggagcttaatgccaggaacagattttgcagttggtggggtctcaataaaagttattttccactgaaaaaaaaaaa

SEQ ID NO: 349042 - DNA, 785 bp, Homo sapiens
tcagctacttagattgaccctaaaatgctaataaaactttctagactgtggtacttctcaacctttaggttacatttgaccatttgcatgtgtgtgtctcttttcttcctactagacccccttgagttagtgctttttttttttttttttttaaaatgtagatggagtctcactcttgttgcccgggctggagcgcagtggtgcaatctcggctcactgcaacctccacctcctgggttcaagtgattctcctgcctcagcctcccaaagtgctgggattacaggcatgaaccactgcgcctggcctaagttagtgcttttgatgtcacaaaaacttgggtgagtttgtttcagtagaattttctgaaaatacatgagatctttttactgtagtttctcagaagagaatactcaaagcatttgatactggatttgtagtgattttaattttcttctgtatcttttaatttttgattttaaaaatgggataagaagggcaaattactgattggtttaactagtttattcagagcttttcttaaaataatgacttgaaaggtggatttaatagagtactttttaaaaagattgttttctcatgcctgaaagcattgaatgtttttacatagctttatatctggatcagaagggaacgagttctaattcatgcttttttttccgttttattaatgactgaaagtcctcccccagaaattatcgtaacgtttattggtaattctctgtatcattctcgaaatgtttaatttccatttcctctttattta

SEQ ID NO: 349043 - DNA, 875 bp, Homo sapiens
gcccagcccttagttagacagaatctttactgctcttccaggttagggaggagggctctgtgtaagagaatggtggtggtggtaggggaatgggttggatggaaatcttccaggaggggccaggaatctgtgctgtgggggccctaccttctggcagttatgaatgaggcaggcactgggagctggagaggcagcagtctcttgctctgagggccctccggcagcgccttctttccctgaggtaggaggaccctcccctggtacttaattaattgcagtccctgttctgctctgttgttcagggtgagtggctggcctggttccaggcccacctgatctgcccacctcagcctcccaaagtgctgggattacaggcatgaaccactgcgcctggcctaagttagtgcttttgatgtcacaaaaacttgggtgagtttgtttcagtagaattttctgaaaatacatgagatctttttactgtagtttctcagaagagaatactcaaagcatttgatactggatttgtagtgattttaattttcttctgtatcttttaatttttgattttaaaaatgggataagaagggcaaattactgattggtttaactagtttattcagagcttttcttaaaataatgacttgaaaggtggatttaatagagtactttttaaaaagattgttttctcatgcctgaaagcattgaatgtttttacatagctttatatctggatcagaagggaacgagttctaattcatgcttttttttccgttttattaatgactgaaagtcctcccccagaaattatcgtaacgtttattggtaattctctgtatcattctcgaaatgtttaatttccatttcctctttattta

SEQ ID NO: 349044 - DNA, 415 bp, Homo sapiens
tcagctacttagattgaccctaaaatgctaataaaactttctagactgtggtacttctcaacctttaggttacatttgaccatttgcatgtgtgtgtctcttttcttcctactagacccccttgagttagtgctttttttttttttttttttaaaatgtagatggagtattgcgccactgcactccagcctgagtgacaaagtgagactccgtctcaaaaaaaaattttttttttgctttagtatacttatcagaagtataatgcagtacagagtgttgtacagtatttcagtgctgtacagagattaatcttgtggataataattgggagatactctatccctactctatttttaacagtttaatgtagttgagtgttcattagcaagtggttactttgaataatactggcaca

SEQ ID NO: 349045 - DNA, 260 bp, Homo sapiens
ataacttttcttaagctcgtttacagctcctggctcatctcttgcatttattctcataaaaactaaaggaataaacatacatataaatgcattcacacagactcccatgatgcatcgtttatctgtcagtatttctttctgaaatatatcatttgtgggtaaagaatgtagaatttaaattatcatattgttttaaggttcttatgtgacatataaatgtagtaatgtccaaagactagaaaacccatgagtgtgataaa

SEQ ID NO: 349046 - DNA, 255 bp, Homo sapiens
tttgatgatatttattgcttgatctgtttaggtatagggttgacttgttctaagcttatttttgtctcaaaggggaagaaggaaatagaatcaacaatgcatttcaattttagattaaaagtcactggaaatgaaaccgaaatacacaaaatatatgtatactcacacagtgtgcttctataatgaattcttttcatatacagatttattactagtcttattatttgatagccatcttttccattatatgaattc

SEQ ID NO: 349047 - DNA, 731 bp, Homo sapiens
gagaggtggggcgggcgtcaccaccggagtggagggcgaggcccgggtcccgcgctcccctgggcgccccacggcagcctcagagccccgcggggagcgcgcagccctcggggcgggcgccggggtgaggcctggctcggtccctgcgcaccgggtgcgggcggcggagagggcgcggctggtgagccctgggagggcccaggagccagacctcggttttgcgggctggggagcagggctcgggggcagcggccaggcccctccgcccctaacacccgcgcctcctgcagacccgagggtcgccgctggtagggtcgctcagccctggcgtcctccaccaccacaccttcacctgcataccctacggaggaagccctggagccaagtggatcgagggatgccctgctcagcacccagcccgcctggcctccacccagctatgagagcatcagccttgctcttgatgccgtttctgcagagacgacaccgagtgccacacgctcctgctcaggcctggttcagactgcacggggaggaagttaaaggctcctagcaggtcctgaatccagagacaaaaatgctgtgccttctccagagtcttatgcagtgcctgggacacagtaggcactcagcaaacgttcgttgttgaaggctgttctatttatctattgctgtataacaaaccaccccagaatttagtggcttaaaataaatcccattttattatgact

SEQ ID NO: 349048 - DNA, 1223 bp, Homo sapiens
gagaggtggggcgggcgtcaccaccggagtggagggcgaggcccgggtcccgcgctcccctgggcgccccacggcagcctcagagccccgcggggagcgcgcagccctcggggcgggcgccggggtgaggcctggctcggtccctgcgcaccgggtgcgggcggcggagagggcgcggctggtgagccctgggagggcccaggagccagacctcggttttgcgggctggggagcagggctcgggggcagcggccaggcccctccgcccctaacacccgcgcctcctgcagacccgagggtcgccgctggtagggtcgctcagccctggcgtcctccaccaccacaccttcacctgcgcccagctccctgcgcgcctggacagcgcctgctgcccgcctcccgatggccctgccccagatgtgtgacgggagccacttggcctccaccctccgctattgcatgacagtcagcggcacagtggttctggtggccgggacgctctgcttcgcttggtggagcgaaggggatgcaaccgcccagcctggccagctggccccacccacggagtatccggtgcctgagggccccagccccctgctcaggtccgtcagcttcgtctgctgcggtgcaggtggcctgctgctgctcattggcctgctgtggtccgtcaaggccagcatcccagggccacctcgatgggacccctatcacctctccagagacctgtactacctcactgtggagtcctcagagaaggagagctgcaggacccccaaagtggttgacatccccacttacgaggaagccgtgagcttcccagtggccgaggggcccccaacaccacctgcataccctacggaggaagccctggagccaagtggatcgagggatgccctgctcagcacccagcccgcctggcctccacccagctatgagagcatcagccttgctcttgatgccgtttctgcagagacgacaccgagtgccacacgctcctgctcaggcctggttcagactgcacggggaggaagttaaaggctcctagcaggtcctgaatccagagacaaaaatgctgtgccttctccagagtcttatgcagtgcctgggacacagtaggcactcagcaaacgttcgttgttgaaggctgttctatttatctattgctgtataacaaaccaccccagaatttagtggcttaaaataaatcccattttattatgact

SEQ ID NO: 349049 - DNA, 314 bp, Homo sapiens
tcagcccctggactctcagtcactgccctagggtaggacttaccctgcagagagaactgaggaggcaccaggaggtgctgggagcacatacagggaactaattctatggcgcagggagtgggtggcgggaaggctgagggccacaggggctggctcatgccaagtttcaactgcgtatatgtgaccctggagagccacaaaggcttggagcagggtgtgaagacttctctgcccccagccttcctcactgtctctctggcaggcagcagggtctgccccagcccctgctaacagcctctcttctgttcctgcag

SEQ ID NO: 349050 - DNA, 553 bp, Homo sapiens
  misc_feature (13)..(13): n is a, c, g, or t
  misc_feature (84)..(84): n is a, c, g, or t
tttacttaaacgncagccaagtggtttcttgacaccaacaagtcttggaaacttaaagcttgcagtgacttcttctttaattanccacccgttacaggacccccaaagtggttgacatccccacttacgaggaagccgtgagcttcccagtggccgaggggcccccaacaccacctgcataccctacggaggaagccctggagccaagtggatcgagggatgccctgctcagcacccagcccgcctggcctccacccagctatgagagcatcagccttgctcttgatgccgtttctgcagagacgacaccgagtgccacacgctcctgctcaggcctggttcagactgcacggggaggaagttaaaggctcctagcaggtcctgaatccagagacaaaaatgctgtgccttctccagagtcttatgcagtgcctgggacacagtaggcactcagcaaacgttcgttgttgaaggctgttctatttatctattgctgtataacaaaccaccccagaatttagtggcttaaaataaatcccattttattatgact

SEQ ID NO: 349051 - DNA, 250 bp, Homo sapiens
atagaaaagaaaatgggggaggggatgatagaaccgaaagtactaggagatggagagattgtcaccatgcagagaaccccacctggcttccttctcctgtctcccaacctccccaagccttgatgtgccttttgtttgggatggtgtgagatcagggaccacagatcacactcttctggctttttttacttattgctgttgaagattagaccttaagggaaatgaattttttttttttccgagacagtct

SEQ ID NO: 349052 - DNA, 666 bp, Homo sapiens
gggctcttgtaacagtgaaagaagataatgtatgtaacacctgccacacaaaaggtactattattatgtgagctgctccacctgcttcttgaagactactggttctaactttagtgcaacattataaatatttctaatcctgtcctactctgttttctgttgcttataacagaatacctgaaatgggtaattctaaagaaaaggaatttatgtcttacagttatggaggttaagaagtccatggtcgaggggctacatctgctaagagcctccttgctggtggggactctccaagaatcccaggacaacagagagcatcacagggcaagggggctgagtgtgctcatgtgctcactcaagtctctcttccttttcttacaaagccaccagtcccactcccatgataaccccttaatccattaattcatgaatggatcaatcacttcttaaaggcctcacctctcaacactctcacattgaggatgaaatttcaacatgagttttggagaggacaaatatgtaaactatagtacatcacaatatcaataacacaaaatgtataccaaaagagaggtacatttgacttttgaaaagccaggtttgaactacatgggtccacttatacacagatttttttcaataaatatatttggaaaaatttttgga

SEQ ID NO: 349053 - DNA, 564 bp, Homo sapiens
cttctccccttatattaaaaacacaatttttcaattatagaactctgatctcttatcaagcacataattcatttaacaagttattttttagtacattcctaaatagtatgtttcaggttctgttcagaaactatggcttagaattttagacaggcttaaacaggactagatctggcttcatagattattacattcttttgttgctatgctactaaatgtaagaatggtttgaaacaggacctccaatttcacccaaaaacatgcaagttctctttcttaaattccatataatcacttgagtatcacaggactgaaaaagaacacatgaatttgtttgctacataaagagctacatttagaaggccatgtgactagaagagaagatttatgcaattcttaaacaggtttggtatctttattctcttctgctacaatgtaatgaatactctattgtattgttacttacaaaaatgaaaaataactgctcattcagttctttctaatactcccgtaagctctgaatgtgggaatgtgcagaatttcccaccactcccatcatgccaa

SEQ ID NO: 349054 - DNA, 850 bp, Homo sapiens
cttctccccttatattaaaaacacaatttttcaattatagaactctgatctcttatcaagcacataattcatttaacaagttattttttagtacattcctaaatagtatgtttcaggttctgttcagaaactatggcttagaattttagacaggcttaaacaggactagatctggcttcatagattattacattcttttgttgctatgctactaaatgtaagaatggtttgaaacaggacctccaatttcacccaaaaacatgcaagttctctttcttaaattccatataatcacttgagtatcacaggactgaaaaagaacacatgaatttgtttgctacataaagagctacatttagaaggccatgtgactagaagagaagatttatgcaattcttaaacagttatggaggttaagaagtccatggtcgaggggctacatctgctaagagcctccttgctggtggggactctccaagaatcccaggacaacagagagcatcacagggcaagggggctgagtgtgctcatgtgctcactcaagtctctcttccttttcttacaaagccaccagtcccactcccatgataaccccttaatccattaattcatgaatggatcaatcacttcttaaaggcctcacctctcaacactctcacattgaggatgaaatttcaacatgagttttggagaggacaaatatgtaaactatagtacatcacaatatcaataacacaaaatgtataccaaaagagaggtacatttgacttttgaaaagccaggtttgaactacatgggtccacttatacacagatttttttcaataaatatatttggaaaaatttttgga

SEQ ID NO: 349055 - DNA, 946 bp, Homo sapiens
ggaagacacggtaatttttgatgccctgtggtcgtggtcttcacgtaaacgctatttgtgttccgaatcttagagttgtgtgggaaggggatccgaggagacatgaggatcataaaagctgcccgatgtcaccatggtcgcgtgcctgtggggctgtaaaggcagacttagacaagagcaggggactgcagtgggctctgagccactgtgtgtcagtggaaggatgactaagagtgtgagaaccactgcatcgctagaaccgcaccagccttctcatgtggtccaggaggcccggcaccgccattaccacgaagaccaaaatgactctccccacccacagccaaaccagagtcgtcctgtgcgctctgccctgtcatcagaggggactgtcagctgccgtctgacatcctgcgtgctttggctcttaccccagtctgaccagtgtgactgtacaggatccctcttcttggccggtgaacagcgcacttagtgcccttgcagggagcctgagaacgagcaaggtagtgcgtgcggggagtgagcaaaagagagactcagcgagacaggatgtgagatggaggtggagagcaagactgcgagaggaaaatgacaagcagagagaaagggatactaagaggaagatggcaaactgaaagggaaagagactgtgtgacagggtgagacagagtgaaagagattgagccagaatgagatgcagaagggggtagggagggagtgagagggagagagacaggagagagagagagagagagagaaccccggcagcagcggcagcagtagcagcccctcccacagctgtgggctcctctcgggggcggagggggtgcctgtgagctctcagccattccctcccaacctggtgagctccaagtggttgcgggggagaggggagaatggagtaagtccttggacaagctctctcccc

SEQ ID NO: 349056 - DNA, 368 bp, Homo sapiens
aggccattttttttgttttttgtttgttgttttctttcacttttttttccagcacagctcacctcgcaccaacccccaacacactgaactcacagctggaggcattgtgctcactcctccccagagagcaggaggcttcaggttcaaatcccagccctgccttgaggatagagtcacagcccccagtagtgattctaaaagccaagtatttgttgcccccagttgacaggtaagaaagctgagggtcagggcaggttacagcctgctactgtcatgtgatgaccactttcattgcttagctcaaaacctcctcctccaggaagccttccctgaccccatccatgctccctcccagaaagggtcgacgc

SEQ ID NO: 349057 - DNA, 846 bp, Homo sapiens
agcgaggttgctgaggtgatctgatgatataggtcttgcctttcattttaactgccattctggcaactgaacgttggcagtaaacgcagcttagttgtctcagaggactcacaatgggatgtgcttatagttgttgcctcgaagagattacgatgaggacctggtgcaggaagcttcatctgaagatgtcctgggcgttcatatgttgagatgaaacggcaactacggcgactacgggagctccacctatacagcacatggaagaagtaccaagaggcgatgaagacatccttgggagttccacaacgtgagcgtgacgaaggctccttgggcaagccattgtgtccacccgagatactctcggagacgttgccaggctctgtgaagaaaagggtatgctttccatcagaagatcatctagaggagtttatagcagaacatctccctgaagcatccaatcagagtctcctcactgttgcccatgcagacgcaggcacccaaaccaacggtgacctggaagacctggaggagcatgggccagggcagacagtctctgaggaagccacagaagttcacatgatgcgacgggcgacccagacacactgcgcgaacttctgatcagggcatgtacactcagcgagctgtccaagacacaaccggcgaaccgagcgacggaccccacgagggagagaggacgaaccatactatcggggacgtacaacaacgtgggtgaaccccggacagagcctgagaaggagcatgtcgcaaaggccaagacagagatcaagacgaaacgcacagggggcacacccagtagaaagaggcacccaagcagaacgcaaagag

SEQ ID NO: 349058 - DNA, 4092 bp, Homo sapiens
  misc_feature (2870)..(2870): n is a, c, g, or t
  misc_feature (2906)..(2906): n is a, c, g, or t
  misc_feature (2938)..(2938): n is a, c, g, or t
  misc_feature (2942)..(2942): n is a, c, g, or t
  misc_feature (3028)..(3028): n is a, c, g, or t
  misc_feature (3775)..(3775): n is a, c, g, or t
  misc_feature (3908)..(3908): n is a, c, g, or t
  misc_feature (4024)..(4024): n is a, c, g, or t
  misc_feature (4053)..(4053): n is a, c, g, or t
  misc_feature (4068)..(4068): n is a, c, g, or t
agcgaggttgctgaggtgatctgatgatataggtcttgcctttcattttaactgccattctggcaactgaacgttggcagtaaacgcagcttagttgtctcagaggactcacaatgggatgtgcttatagttgttgcctcgaagagattacgatgaggacctggtgcaggaagcttcatctgaagatgtcctgggcgttcatatggtggacaaagacacagagagagacattgagatgaaacggcaactacggcgactacgggagctccacctatacagcacatggaagaagtaccaagaggcgatgaagacatccttgggagttccacaacgtggtgacctggaagacctggaggagcatgtgccagggcagacagtctctgaggaagccacaggggttcacatgatgcaggtggacccagccacgctggcaaagaaattggaagactccaccattacaggcagccaccagcagatgtcagcaagtccttcctctgcacctgcagaagaagcaacagaaaagaccaaagtggaagaggaagtgaaaaccagaaagcccaagaagaaaaccaggaagcccagcaagaaaagccggtggaatgtcctgaaatgttgggacatttttaatatattttagagacctctgaagattcctcgaccaccaggaagggccccgacgtggggatgtcaacatggctcagacttgatgtggatcgtgatcatttcgggaaatgtgttactccaaaaacttttataatctttgcttaatttgtttttaaatactttcctggctgggcgtggtggcttatgcctgtaatcccagcactttgggaggccgaggcgggtggatcacctgaggtcaggagttcaagaccagcctggccaacaaggtgaaaccccgtctctactaaaaatacaaaaattagctaggcgtggtggcgcactcttgtagtcccagctatttgggaggctgaggcaggagaatcacttgaactcaggaggcggaggttgcggtgagccgagatcatgccactgcaccccagcacctggctacagagtgagactttgtctcaaaaaaaaaaaaaaaagaacaaaaaaattctgactttaacctctgtttttcagagggcacaaattgttcttgtattgtttccattttacatttttttcttgaagttattttccaattgttttcattctttctgaagttttgtttactcggttttaagtttttgtaattttgatagacttcttttgtgctttcattttcttaatgacttttacctcatttttaaaacaaatccatagtatggatgatattgatgatgaaatgtcttacgatgatcatttagaggtttatttcgaacaactggcaattccacgaatgatggaataaaacatatgaagtagaaggactggaacctccagaaaaagtactttaagttacctacaggtgatcctagtcaggtatgaattgataagaaatgcctgcaccttccctccttcctatctttcccttgcctacagaaaattaaaaggcaaaacaatggacatctacatattcttcattcagatcaaccagtggctagcatttgccaccttttgcagtttctttctctttccataagtactttcttctctgaatcatttgaaagcaaatgaaaacagtagcctaaagtgtcagtttcaaccagaaaataacagctctgatttctcatggctcacactcgtctgaaacgactcgggtagaggctgaggaaggccgtgttgtttgtctacctgggactacacctactgaaagaagttctcaagttctgattgagttctaaaattcttttgaagattggaattcttcctatgtaaaaagagaagagaaagacattcttgattttggtgactagagttgtagatgctggaagctttgccactaacattgatgaaccagatgcatgtcaccagcccatcacggtgattcttaatgccgttaaggcaccatgggccggcactgccacgttttccaaggaacctgccagagctcctgcggaagctgctcctcgggcgatggagtccctttgctgctaggcccttcttcagtcaccacaggatgcctgccattcatgaacaggaaggagaggacgggctttgaataaaaaacaggatccaggaaatatttgtgaggccatttggacttcagtgtgaaatggtgttaaaagatgaagtcatttattcaagaagtaaacctctgccacctggactgtgctcagacatttcattgattttgtttaataaacattttctggctttgggaggtgtctctcttggtagagcacagtgtcaaagatggacaagatggacacatagtccattatttggtattgtttgtgtatgggagcggaccacaaattaatgtttggagaacaattttgtcataacacactgttgaggctcagttgtacagaactggaaaagtctttcagcttggcacatgtcctgattcagcctttgtttaacatacattccaatccggattctatcttcactggctacaaagaccacctgatacgtgcaccacgacacaggagctgctggagagggggtagtgttatcacctcaaacccacagccatatttttcaaaagccagcttagagagaggtgtactgatagctgcatagagaacatgcagtccatccattcttcccagtgatgtacatttctcaatcagtaaccacgtggtataccagccttgagtgtcacatctcccaaccataccaaatggatcacctaactggaggtggggggggcccctcagaaatgagatttcgtatttactgtaaaattgccttattttttcttttgaggtggagtctcnctctgttgcctgggctggagtgcaatggtgtgatcnctgctcactgcaacctccgcctcctgggttcnagcngttctcctgcctcagcctcccaagtagctgcaattacaggcgcatgccaccactcccagcaaatttttatatttttagtggagacngggtttcaccatgttggccaggctggtctcaaactcctgacctcaggtgatctgcccaccttggcctcccaaagttctgggattaaaggtacgagccaccgcaactggctgagaatctttttatttgctgatttgtctcttgtgtattttctttgttcagatgtctcttcagatctttttctcacttttaaattgtttttttaattgttaagaattttctgtctagtttagatataagccctttatcagacatgtgttttgcaaatattttctcctagtctgtggcttgtattctgtctcttaacagtcattttatttttacttttgaaactaaagaagaagaatggtcagctttccgttattcttgtaacagtaatggcagaaccaagtctgctaatgctacattgagcaaagaaagtcacctggtcaagtccaacattaatgaaatggggtagtacatgcaggcggcgttggggttggggagggaacaaatgcttcttgagagtaatataatctgccataccatccaggaacctacaatggctatctattaccttattctctggtttgtttaatgttcaaatctttcctaaagatccttcaacttttctggaagaatctaatctgataacaccatcaaaaacacattacttcttttggcataatttaaattgtaagacatcattcacatttatcaatgttacatatataagaactcacccaccatattcctccttgaggaattanagcatgtaattctataaccatttttataatcgtctaacaattttataatggattggctgctatcaattttttaaaagtcatggcttctccagtcatttcttgcttatcaaaattatttcatgagatgggtctntccttgtatatttgaaaatgaggtttgcttccttctacttaaaaaacaacttgaacatacctgtttggatcacatggtcttgtcctgataacttggaagaggttgcttcagcattnttcttattgttgtggtggttattattaanattgtttcatattcngtttaaaaaattaaaattttacac

SEQ ID NO: 349059 - DNA, 2349 bp, Homo sapiens
agcgaggttgctgaggtgatctgatgatataggtcttgcctttcattttaactgccattctggcaactgaacgttggcagtaaacgcagcttagttgtctcagaggactcacaatgggatgtgcttatagttgttgcctcgaagagattacgatgaggacctggtgcaggaagcttcatctgaagatgtcctgggcgttcatatggtggacaaagacacagagagagacattgagatgaaacggcaactacggcgactacgggagctccacctatacagcacatggaagaagtaccaagaggcgatgaagacatccttgggagttccacaacgtggtgacctggaagacctggaggagcatgtgccagggcagacagtctctgaggaagccacaggggttcacatgatgcaggtggacccagccacgctggcaaagaaattggaagactccaccattacaggcagccaccagcagatgtcagcaagtccttcctctgcacctgcagaagaagcaacagaaaagaccaaagtggaagaggaagtgaaaaccagaaagcccaagaagaaaaccaggaagcccagcaagaaaagccggtggaatgtcctgaaatgttgggacatttttaatatattttagagacctctgaagattcctcgaccaccaggaagggccccgacgtggggatgtcaacatggctcagacttgatgtggatcgtgatcatttcgggaaatgtgttactccaaaaacttttataatctttgcttaatttgtttttaaatactttcctggctgggcgtggtggcttatgcctgtaatcccagcactttgggaggccgaggcgggtggatcacctgaggtcaggagttcaagaccagcctggccaacaaggtgaaaccccgtctctactaaaaatacaaaaattagctaggcgtggtggcgcactcttgtagtcccagctatttgggaggctgaggcaggagaatcacttgaactcaggaggcggaggttgcggtgagccgagatcatgccactgcaccccagcacctggctacagagtgagactttgtctcaaaaaaaaaaaaaaaagaacaaaaaaattctgactttaacctctgtttttcagagggcacaaattgttcttgtattgtttccattttacatttttttcttgaagttattttccaattgttttcattctttctgaagttttgtttactcggttttaagtttttgtaattttgatagacttcttttgtgctttcattttcttaatgacttttacctcatttttaaaacaaatccatagtatggatgatattgatgatgaaatgtcttacgatgatcatttagaggtttatttcgaacaactggcaattccacgaatgatggaataaaacatatgaagtagaaggactggaacctccagaaaaagtactttaagttacctacaggtgatcctagtcaggtatgaattgataagaaatgcctgcaccttccctccttcctatctttcccttgcctacagaaaattaaaaggcaaaacaatggacatctacatattcttcattcagatcaaccagtggctagcatttgccaccttttgcagtttctttctctttccataagtactttcttctctgaatcatttgaaagcaaatgaaaacagtagcctaaagtgtcagtttcaaccagaaaataacagctctgatttctcatggctcacactcgtctgaaacgactcgggtagaggctgaggaaggccgtgttgtttgtctacctgggactacacctactgaaagaagttctcaagttctgattgagttctaaaattcttttgaagattggaattcttcctatgtaaaaagagaagagaaagacattcttgattttggtgactagagttgtagatgctggaagctttgccactaacattgatgaaccagatgcatgtcaccagcccatcacggtgattcttaatgccgttaaggcaccatgggccggcactgccacgttttccaaggaacctgccagagctcctgcggaagctgctcctcgggcgatggagtccctttgctgctaggcccttcttcagtcaccacaggatgcctgccattcatgaacaggaaggagaggacgggctttgaataaaaaacaggatccaggaaatatttgtgaggccatttggacttcagtgtgaaatggtgttaaaagatgaagtcatttattcaagaagtaaacctctgccacctggactgtgctcagacatttcattgattttgtttaataaacaacgatgcgggccgtaataaaaagaatcttaatacaaatttaattgagaaaggaagaa

SEQ ID NO: 349060 - DNA, 1528 bp, Homo sapiens
agcgaggttgctgaggtgatctgatgatataggtcttgcctttcattttaactgccattctggcaactgaacgttggcagtaaacgcagcttagttgtctcagaggactcacaatgggatgtgcttatagttgttgcctcgaagagattacgatgaggacctggtgcaggaagcttcatctgaagatgtcctgggcgttcatatggtggacaaagacacagagagagacattgagatgaaacggcaactacggcgactacgggagctccacctatacagcacatggaagaagtaccaagaggcgatgaagacatccttgggagttccacaacgtggtgacctggaagacctggaggagcatgtgccagggcagacagtctctgaggaagccacaggggttcacatgatgcaggtggacccagccacgctggcaaagaaattggaagactccaccattacaggcagccaccagcagatgtcagcaagtccttcctctgcacctgcagaagaagcaacagaaaagaccaaagtggaagaggaagtgaaaaccagaaagcccaagaagaaaaccaggaagcccagcaagaaaagccggtggaatgtcctgaaatgttgggacatttttaatatattttagagacctctgaagattcctcgaccaccaggaagggccccgacgtggggatgtcaacatggctcagacttgatgtggatcgtgatcatttcgggaaatgtgttactccaaaaacttttataatctttgcttaatttgtttttaaatactttcctggctgggcgtggtggcttatgcctgtaatcccagcactttgggaggccgaggcgggtggatcacctgaggtcaggagttcaagaccagcctggccaacaaggtgaaaccccgtctctactaaaaatacaaaaattagctaggcgtggtggcgcactcttgtagtcccagctatttgggaggctgaggcaggagaatcacttgaactcaggaggcggaggttgcggtgagccgagatcatgccactgcaccccagcacctggctacagagtgagactttgtctcaaaaaaaaaaaaaaaagaacaaaaaaattctgactttaacctctgtttttcagagggcacaaattgttcttgtattgtttccattttacatttttttcttgaagttattttccaattgttttcattctttctgaagttttgtttactcggttttaagtttttgtaattttgatagacttcttttgtgctttcattttcttaatgacttttacctcatttttaaaacaaatccatagtatggtaagttacatcaatatggagtatttttatgttttgtggtgatttacattctgtatgtattttacatatataaatgttaatggcctggtgcagtggctaccacctgtaatctcagcagtttgggagaccaaagcaggacgattgcttgatcccaggagtttaagaccagcctgggcaacatagtgagacctcatccctacaaaaaaaaaaaaatcc

SEQ ID NO: 349061 - DNA, 1969 bp, Homo sapiens
  misc_feature (1552)..(1552): n is a, c, g, or t
  misc_feature (1860)..(1860): n is a, c, g, or t
  misc_feature (1966)..(1966): n is a, c, g, or t
  misc_feature (1968)..(1968): n is a, c, g, or t
aggtgacaatagatatagaagtacgttgatgtgcgaagatgtattttgttttagccagcgaggaaaaaagaatcagtttgattatacatttaccaaacattaagaatttaatatggtaacttttatttcagtattaaaatagcaattttatttattacttttttatatatagaatttgacaccaaattttggaacttaaaaagaagattcttaaaacttacaatccagattacgatgaggacctggtgcaggaagcttcatctgaagatgtcctgggcgttcatatggtggacaaagacacagagagagacattgagatgaaacggcaactacggcgactacgggagctccacctatacagcacatggaagaagtaccaagaggcgatgaagacatccttgggagttccacaacgtgagcgtgacgaaggctccttgggcaagccattgtgtccacccgagatactctcggagacgttgccaggctctgtgaagaaaagggtatgctttccatcagaagatcatctagaggagtttatagcagaacatctccctgaagcatccaatcagagtctcctcactgttgcccatgcagacgcaggcacccaaaccaacggtgacctggaagacctggaggagcatgggccagggcagacagtctctgaggaagccacagaagttcacatgatggagggggacccagacacactggccgaacttctgatcagggatgtacttcaggagctgtccagttacaacggcgaggaggaggacccagaggaggtgaagacatccttgggagttccacaacgtggtgacctggaagacctggaggagcatgtgccagggcagacagtctctgaggaagccacaggggttcacatgatgcaggtggacccagccacgctggcaaagagtgacctggaagacctggaggagcatgtgccagagcagacagtctctgaggaagccacaggggttcacatgatgcaggtggacccagccacactggcaaagcaattggaagactccaccattacaggcagccaccagcagatgtcagcaagtccttcctctgcacctgcagaagaagcaacagaaaagaccaaagtggaagaggaagtgaaaaccagaaagcccaagaagaaaaccaggaagcccagcaagaaaagccggtggaatgtcctgaaatgttgggacatttttaatatattttagagacctctgaaggcaagtgaaggatgccctgagaacatgctccaggaaacagacacccactccatagcagcccctgagcctgctgggctgagccctccacaggctgcttagtgagggagacactgaggtgctggtcgcacccccatgtgcaggactccaagggctttgcactgtgttgtctgcagtaactcttcagctcaccaacatctcatttggggggacctagctctgtcttcccagccccttgaggacaacagggagcatcactagttcatcctgaggagacactagggttgacatgaatccccctggttcaggcctcctgggaaaggtgngagagggatggaggcacccccaggctccttgtcacacaagcgagcagcccacccgacccagtattgcaggccagcaggccctcagtaggtcctggtgtcaagcaggggacacggcaggatccaagaagcactgaaatgtgtccagtcccaggagtccttcagccttggggggtctgggggcctccagttccaggggtccttcagcctctgtgggggcctggggtggcctcatggccccctttttcaagatgaggttggaggcttctgtatgtagagggcactggcttgggccaaatgccaacaaaacnaacccttgaagacatttcagggccatgctcacttgggagggtttgaggacatgatttagcgagcctctgttttttaaatatattttccaatcttgaaataaggtanana

SEQ ID NO: 349062 - DNA, 4603 bp, Homo sapiens
  misc_feature (3381)..(3381): n is a, c, g, or t
  misc_feature (3417)..(3417): n is a, c, g, or t
  misc_feature (3449)..(3449): n is a, c, g, or t
  misc_feature (3453)..(3453): n is a, c, g, or t
  misc_feature (3539)..(3539): n is a, c, g, or t
  misc_feature (4286)..(4286): n is a, c, g, or t
  misc_feature (4419)..(4419): n is a, c, g, or t
  misc_feature (4535)..(4535): n is a, c, g, or t
  misc_feature (4564)..(4564): n is a, c, g, or t
  misc_feature (4579)..(4579): n is a, c, g, or t
agcgaggttgctgaggtgatctgatgatataggtcttgcctttcattttaactgccattctggcaactgaacgttggcagtaaacgcagcttagttgtctcagaggactcacaatgggatgtgcttatagttgttgcctcgaagtgtgttgtggcgaggatgaaatagtgtatcctaggatgccaggggaatccaccgtctgccaccgcgagcgtgagaagccaatcacctatcactggtatcactggcatcccggccatatataccctagaattgcatcaatggaagattacgatgaggacctggtgcaggaagcttcatctgaagatgtcctgggcgttcatatggtggacaaagacacagagagagacattgagatgaaacggcaactacggcgactacgggagctccacctatacagcacatggaagaagtaccaagaggcgatgaagacatccttgggagttccacaacgtgagcgtgacgaaggctccttgggcaagccattgtgtccacccgagatactctcggagacgttgccaggctctgtgaagaaaagggtatgctttccatcagaagatcatctagaggagtttatagcagaacatctccctgaagcatccaatcagagtctcctcactgttgcccatgcagacgcaggcacccaaaccaacggtgacctggaagacctggaggagcatgggccagggcagacagtctctgaggaagccacagaagttcacatgatggagggggacccagacacactggccgaacttctgatcagggatgtacttcaggagctgtccagttacaacggcgaggaggaggacccagaggaggtgaagacatccttgggagttccacaacgtggtgacctggaagacctggaggagcatgtgccagggcagacagtctctgaggaagccacaggggttcacatgatgcaggtggacccagccacgctggcaaagagtgacctggaagacctggaggagcatgtgccagagcagacagtctctgaggaagccacaggggttcacatgatgcaggtggacccagccacactggcaaagcaattggaagactccaccattacaggcagccaccagcagatgtcagcaagtccttcctctgcacctgcagaagaagcaacagaaaagaccaaagtggaagaggaagtgaaaaccagaaagcccaagaagaaaaccaggaagcccagcaagaaaagccggtggaatgtcctgaaatgttgggacatttttaatatattttagagacctctgaagattcctcgaccaccaggaagggccccgacgtggggatgtcaacatggctcagacttgatgtggatcgtgatcatttcgggaaatgtgttactccaaaaacttttataatctttgcttaatttgtttttaaatactttcctggctgggcgtggtggcttatgcctgtaatcccagcactttgggaggccgaggcgggtggatcacctgaggtcaggagttcaagaccagcctggccaacaaggtgaaaccccgtctctactaaaaatacaaaaattagctaggcgtggtggcgcactcttgtagtcccagctatttgggaggctgaggcaggagaatcacttgaactcaggaggcggaggttgcggtgagccgagatcatgccactgcaccccagcacctggctacagagtgagactttgtctcaaaaaaaaaaaaaaaagaacaaaaaaattctgactttaacctctgtttttcagagggcacaaattgttcttgtattgtttccattttacatttttttcttgaagttattttccaattgttttcattctttctgaagttttgtttactcggttttaagtttttgtaattttgatagacttcttttgtgctttcattttcttaatgacttttacctcatttttaaaacaaatccatagtatggatgatattgatgatgaaatgtcttacgatgatcatttagaggtttatttcgaacaactggcaattccacgaatgatggaataaaacatatgaagtagaaggactggaacctccagaaaaagtactttaagttacctacaggtgatcctagtcaggtatgaattgataagaaatgcctgcaccttccctccttcctatctttcccttgcctacagaaaattaaaaggcaaaacaatggacatctacatattcttcattcagatcaaccagtggctagcatttgccaccttttgcagtttctttctctttccataagtactttcttctctgaatcatttgaaagcaaatgaaaacagtagcctaaagtgtcagtttcaaccagaaaataacagctctgatttctcatggctcacactcgtctgaaacgactcgggtagaggctgaggaaggccgtgttgtttgtctacctgggactacacctactgaaagaagttctcaagttctgattgagttctaaaattcttttgaagattggaattcttcctatggcaccatgggccggcactgccacgttttccaaggaacctgccagagctcctgcggaagctgctcctcgggcgatggagtccctttgctgctaggcccttcttcagtcaccacaggatgcctgccattcatgaacaggaaggagaggacgggctttgaataaaaaacaggatccaggaaatatttgtgaggccatttggacttcagtgtgaaatggtgttaaaagatgaagtcatttattcaagaagtaaacctctgccacctggactgtgctcagacatttcattgattttgtttaataaacattttctggctttgggaggtgtctctcttggtagagcacagtgtcaaagatggacaagatggacacatagtccattatttggtattgtttgtgtatgggagcggaccacaaattaatgtttggagaacaattttgtcataacacactgttgaggctcagttgtacagaactggaaaagtctttcagcttggcacatgtcctgattcagcctttgtttaacatacattccaatccggattctatcttcactggctacaaagaccacctgatacgtgcaccacgacacaggagctgctggagagggggtagtgttatcacctcaaacccacagccatatttttcaaaagccagcttagagagaggtgtactgatagctgcatagagaacatgcagtccatccattcttcccagtgatgtacatttctcaatcagtaaccacgtggtataccagccttgagtgtcacatctcccaaccataccaaatggatcacctaactggaggtggggggggcccctcagaaatgagatttcgtatttactgtaaaattgccttattttttcttttgaggtggagtctcnctctgttgcctgggctggagtgcaatggtgtgatcnctgctcactgcaacctccgcctcctgggttcnagcngttctcctgcctcagcctcccaagtagctgcaattacaggcgcatgccaccactcccagcaaatttttatatttttagtggagacngggtttcaccatgttggccaggctggtctcaaactcctgacctcaggtgatctgcccaccttggcctcccaaagttctgggattaaaggtacgagccaccgcaactggctgagaatctttttatttgctgatttgtctcttgtgtattttctttgttcagatgtctcttcagatctttttctcacttttaaattgtttttttaattgttaagaattttctgtctagtttagatataagccctttatcagacatgtgttttgcaaatattttctcctagtctgtggcttgtattctgtctcttaacagtcattttatttttacttttgaaactaaagaagaagaatggtcagctttccgttattcttgtaacagtaatggcagaaccaagtctgctaatgctacattgagcaaagaaagtcacctggtcaagtccaacattaatgaaatggggtagtacatgcaggcggcgttggggttggggagggaacaaatgcttcttgagagtaatataatctgccataccatccaggaacctacaatggctatctattaccttattctctggtttgtttaatgttcaaatctttcctaaagatccttcaacttttctggaagaatctaatctgataacaccatcaaaaacacattacttcttttggcataatttaaattgtaagacatcattcacatttatcaatgttacatatataagaactcacccaccatattcctccttgaggaattanagcatgtaattctataaccatttttataatcgtctaacaattttataatggattggctgctatcaattttttaaaagtcatggcttctccagtcatttcttgcttatcaaaattatttcatgagatgggtctntccttgtatatttgaaaatgaggtttgcttccttctacttaaaaaacaacttgaacatacctgtttggatcacatggtcttgtcctgataacttggaagaggttgcttcagcattnttcttattgttgtggtggttattattaanattgtttcatattcngtttaaaaaattaaaattttacac

SEQ ID NO: 349063 - DNA, 4072 bp, Homo sapiens
  misc_feature (2850)..(2850): n is a, c, g, or t
  misc_feature (2886)..(2886): n is a, c, g, or t
  misc_feature (2918)..(2918): n is a, c, g, or t
  misc_feature (2922)..(2922): n is a, c, g, or t
  misc_feature (3008)..(3008): n is a, c, g, or t
  misc_feature (3755)..(3755): n is a, c, g, or t
  misc_feature (3888)..(3888): n is a, c, g, or t
  misc_feature (4004)..(4004): n is a, c, g, or t
  misc_feature (4033)..(4033): n is a, c, g, or t
  misc_feature (4048)..(4048): n is a, c, g, or t
agcgaggttgctgaggtgatctgatgatataggtcttgcctttcattttaactgccattctggcaactgaacgttggcagtaaacgcagcttagttgtctcagaggactcacaatgggatgtgcttatagttgttgcctcgaagagattacgatgaggacctggtgcaggaagcttcatctgaagatgtcctgggcgttcatatggtggacaaagacacagagagagacattgagatgaaacggcaactacggcgactacgggagctccacctatacagcacatggaagaagtaccaagaggcgatgaagacatccttgggagttccacaacgtggtgacctggaagacctggaggagcatgtgccagggcagacagtctctgaggaagccacaggggttcacatgatgcaggtggacccagccacgctggcaaagaaattggaagactccaccattacaggcagccaccagcagatgtcagcaagtccttcctctgcacctgcagaagaagcaacagaaaagaccaaagtggaagaggaagtgaaaaccagaaagcccaagaagaaaaccaggaagcccagcaagaaaagccggtggaatgtcctgaaatgttgggacatttttaatatattttagagacctctgaagattcctcgaccaccaggaagggccccgacgtggggatgtcaacatggctcagacttgatgtggatcgtgatcatttcgggaaatgtgttactccaaaaacttttataatctttgcttaatttgtttttaaatactttcctggctgggcgtggtggcttatgcctgtaatcccagcactttgggaggccgaggcgggtggatcacctgaggtcaggagttcaagaccagcctggccaacaaggtgaaaccccgtctctactaaaaatacaaaaattagctaggcgtggtggcgcactcttgtagtcccagctatttgggaggctgaggcaggagaatcacttgaactcaggaggcggaggttgcggtgagccgagatcatgccactgcaccccagcacctggctacagagtgagactttgtctcaaaaaaaaaaaaaaaagaacaaaaaaattctgactttaacctctgtttttcagagggcacaaattgttcttgtattgtttccattttacatttttttcttgaagttattttccaattgttttcattctttctgaagttttgtttactcggttttaagtttttgtaattttgatagacttcttttgtgctttcattttcttaatgacttttacctcatttttaaaacaaatccatagtatggatgatattgatgatgaaatgtcttacgatgatcatttagaggtttatttcgaacaactggcaattccacgaatgatggaataaaacatatgaagtagaaggactggaacctccagaaaaagtactttaagttacctacaggtgatcctagtcaggtatgaattgataagaaatgcctgcaccttccctccttcctatctttcccttgcctacagaaaattaaaaggcaaaacaatggacatctacatattcttcattcagatcaaccagtggctagcatttgccaccttttgcagtttctttctctttccataagtactttcttctctgaatcatttgaaagcaaatgaaaacagtagcctaaagtgtcagtttcaaccagaaaataacagctctgatttctcatggctcacactcgtctgaaacgactcgggtagaggctgaggaaggccgtgttgtttgtctacctgggactacacctactgaaagaagttctcaagttctgattgagttctaaaattcttttgaagattggaattcttcctatgtaaaaagagaagagaaagacattcttgattttggtgactagagttgtagatgctggaagctttgccactaacattgatgaaccagatgcatgtcaccagcccatcacgggcaccatgggccggcactgccacgttttccaaggaacctgccagagctcctgcggaagctgctcctcgggcgatggagtccctttgctgctaggcccttcttcagtcaccacaggatgcctgccattcatgaacaggaaggagaggacgggctttgaataaaaaacaggatccaggaaatatttgtgaggccatttggacttcagtgtgaaatggtgttaaaagatgaagtcatttattcaagaagtaaacctctgccacctggactgtgctcagacatttcattgattttgtttaataaacattttctggctttgggaggtgtctctcttggtagagcacagtgtcaaagatggacaagatggacacatagtccattatttggtattgtttgtgtatgggagcggaccacaaattaatgtttggagaacaattttgtcataacacactgttgaggctcagttgtacagaactggaaaagtctttcagcttggcacatgtcctgattcagcctttgtttaacatacattccaatccggattctatcttcactggctacaaagaccacctgatacgtgcaccacgacacaggagctgctggagagggggtagtgttatcacctcaaacccacagccatatttttcaaaagccagcttagagagaggtgtactgatagctgcatagagaacatgcagtccatccattcttcccagtgatgtacatttctcaatcagtaaccacgtggtataccagccttgagtgtcacatctcccaaccataccaaatggatcacctaactggaggtggggggggcccctcagaaatgagatttcgtatttactgtaaaattgccttattttttcttttgaggtggagtctcnctctgttgcctgggctggagtgcaatggtgtgatcnctgctcactgcaacctccgcctcctgggttcnagcngttctcctgcctcagcctcccaagtagctgcaattacaggcgcatgccaccactcccagcaaatttttatatttttagtggagacngggtttcaccatgttggccaggctggtctcaaactcctgacctcaggtgatctgcccaccttggcctcccaaagttctgggattaaaggtacgagccaccgcaactggctgagaatctttttatttgctgatttgtctcttgtgtattttctttgttcagatgtctcttcagatctttttctcacttttaaattgtttttttaattgttaagaattttctgtctagtttagatataagccctttatcagacatgtgttttgcaaatattttctcctagtctgtggcttgtattctgtctcttaacagtcattttatttttacttttgaaactaaagaagaagaatggtcagctttccgttattcttgtaacagtaatggcagaaccaagtctgctaatgctacattgagcaaagaaagtcacctggtcaagtccaacattaatgaaatggggtagtacatgcaggcggcgttggggttggggagggaacaaatgcttcttgagagtaatataatctgccataccatccaggaacctacaatggctatctattaccttattctctggtttgtttaatgttcaaatctttcctaaagatccttcaacttttctggaagaatctaatctgataacaccatcaaaaacacattacttcttttggcataatttaaattgtaagacatcattcacatttatcaatgttacatatataagaactcacccaccatattcctccttgaggaattanagcatgtaattctataaccatttttataatcgtctaacaattttataatggattggctgctatcaattttttaaaagtcatggcttctccagtcatttcttgcttatcaaaattatttcatgagatgggtctntccttgtatatttgaaaatgaggtttgcttccttctacttaaaaaacaacttgaacatacctgtttggatcacatggtcttgtcctgataacttggaagaggttgcttcagcattnttcttattgttgtggtggttattattaanattgtttcatattcngtttaaaaaattaaaattttacac

SEQ ID NO: 349064 - DNA, 2001 bp, Homo sapiens
agcgaggttgctgaggtgatctgatgatataggtcttgcctttcattttaactgccattctggcaactgaacgttggcagtaaacgcagcttagttgtctcagaggactcacaatgggatgtgcttatagttgttgcctcgaagagattacgatgaggacctggtgcaggaagcttcatctgaagatgtcctgggcgttcatatggtggacaaagacacagagagagacattgagatgaaacggcaactacggcgactacgggagctccacctatacagcacatggaagaagtaccaagaggcgatgaagacatccttgggagttccacaacgtggtgacctggaagacctggaggagcatgtgccagggcagacagtctctgaggaagccacaggggttcacatgatgcaggtggacccagccacgctggcaaagaaattggaagactccaccattacaggcagccaccagcagatgtcagcaagtccttcctctgcacctgcagaagaagcaacagaaaagaccaaagtggaagaggaagtgaaaaccagaaagcccaagaagaaaaccaggaagcccagcaagaaaagccggtggaatgtcctgaaatgttgggacatttttaatatattttagagacctctgaagattcctcgaccaccaggaagggccccgacgtggggatgtcaacatggctcagacttgatgtggatcgtgatcatttcgggaaatgtgttactccaaaaacttttataatctttgcttaatttgtttttaaatactttcctggctgggcgtggtggcttatgcctgtaatcccagcactttgggaggccgaggcgggtggatcacctgaggtcaggagttcaagaccagcctggccaacaaggtgaaaccccgtctctactaaaaatacaaaaattagctaggcgtggtggcgcactcttgtagtcccagctatttgggaggctgaggcaggagaatcacttgaactcaggaggcggaggttgcggtgagccgagatcatgccactgcaccccagcacctggctacagagtgagactttgtctcaaaaaaaaaaaaaaaagaacaaaaaaattctgactttaacctctgtttttcagagggcacaaattgttcttgtattgtttccattttacatttttttcttgaagttattttccaattgttttcattctttctgaagttttgtttactcggttttaagtttttgtaattttgatagacttcttttgtgctttcattttcttaatgacttttacctcatttttaaaacaaatccatagtatggatgatattgatgatgaaatgtcttacgatgatcatttagaggtttatttcgaacaactggcaattccacgaatgatggaataaaacatatgaagtagaaggactggaacctccagaaaaagtactttaagttacctacaggtgatcctagtcaggtatgaattgataagaaatgcctgcaccttccctccttcctatctttcccttgcctacagaaaattaaaaggcaaaacaatggacatctacatattcttcattcagatcaaccagtggctagcatttgccaccttttgcagtttctttctctttccataagtactttcttctctgaatcatttgaaagcaaatgaaaacagtagcctaaagtgtcagtttcaaccagaaaataacagctctgatttctcatggctcacactcgtctgaaacgactcgggtagaggctgaggaaggccgtgttgtttgtctacctgggactatattccacggagacgatgctgaactatctgggagtgaagtgtctgatatctaaaacttactctaaaaaagttcagcaacaacaaaaaggatgcaaacaggagaaagaaagcaaagatggcaaaaagattctgacctgtaactaacagaagaaactgcttcggcatatttggtgggaaacatacttaaccaaccaccagcaaacctcctcacca

SEQ ID NO: 349065 - DNA, 559 bp, Homo sapiens
ccatacacactataggtgactgacagaatttcttggtgggcaaatgccagagttcattatcaactaaacagtggtttcagatggcatccacacttacaaactgtgtgtcaacaggcattttccttaagagaaattccttcttcttgagaagaatttggaattgtcaaagaaaaacaattgaaaatgttgcacagaaatcctgtgcctttccaggaatgtcttctagataccggggccattgtctcaaccactgtttaccatctggctttttaacgtcaacaagtgaagacctgtgcacacaggagacagcatggtctgaccctcatagtgttttctttttctctagatgcaggtggacccagccacactggcaaagcgtacgtattctgggatcatctctttgtttaggtgtgaaatcttagtgttgtaaaggtagtgctgcttcacctgcttttgctcaagggccactctggtttgagctttctgccagaaatgagatttgggaattttggtttaaaaactactaagagtcacaccgggcacagtggctcacgcctgt

SEQ ID NO: 349066 - DNA, 424 bp, Homo sapiens
tcgacaaacgtgcaaggaaaagtgaacctctactactcactcttactgtggacatagcattaatgttagatggattttagaatgaactgtaaaaggctaaaactgtaaagttttaagaagaaaacagtattttcacaatgtaaagtaggcagattgcttaccacacaaaaaccacaagctgtgaaagaaaaaaaaagatgaacttcatattaaaaacttatacctaaagtcatcattagaaagtcagagcaacggctgggcgtggtggcgcaggcctgtaatcccaacactttgggaggccaaggcgggcggatcacctgaggtcaggagttcaagaccagcccggccgacgtggtgaaaccccgtctctactaaaaatacaaaaaaaaaaaaaattagccgagcgtggtgacaggtgcctgta

SEQ ID NO: 349067 - DNA, 1553 bp, Homo sapiens
tggaaattgatgagaaaacagcttctgcatagtagctaatgcttatgtccatgtgtggttcttttgtagcgtgattggactcccaggagaagaagactggcctagagatgttgcccttcccaggcaggcttttcattcaaaatctgcccaaccaattgagaagtttgtaacagatatcgatgaactaggcaaagacctacttctgaagtgtttgacatttaacccagccaaaagaatatctgcctacagtgccctgtctcacccatacttccaggacctggaaaggtgcaaagaaaacctggattcccacctgccgcccagccagaacacctcggagctgaatacagcctgaggcctcagcagccgccttaagctgatcctgcggagaacacccttggtggcttatgggtccccctcagcaagccctacagagctgtggaggattgctatctggaggccttccagctgctgtcttctggacaggctctgcttctccaaggaaaccgcctagtttactgttttgaaatcaatgcaagagtgattgcagctttatgttcatttgtttgtttgtttgtctgtttgtttcaagaacctggaaaaattccagaagaagagaagctgctgaccaattgtgctgccatttgattttctaaccttgaatgctgccagtgtggagtgggtaatcccaggcacagctgagttatgatgtaatctctctgcagctgccgggcctgatttggtacttttgagtgtgtgtgtgcatgtgtgtgtgtgtgtgtgtgtgtgtgtgtgtgtatgtgagagattctgtgatcttttaaagtgttactttttgtaaacgacaagaataattcaattttaaagactcaaggtggtcagtaaataacaggcatttgttcactgaaggtgattcaccaaaatagtcttctcaaattagaaagttaaccccatgtcctcagcatttcttttctggccaaaagcagtaaatttgctagcagtaaaagatgaagttttatacacacagcaaaaaggagaaaaaattctagtatattttaagagatgtgcatgcattctatttagtcttcagaatgctgaatttacttgttgtaagtctattttaaccttctgtatgacatcatgctttatcatttcttttggaaaatagcctgtaagctttttattacttgctataggtttagggagtgtacctcagatagattttaaaaaaaagaatagaaagcctttatttcctggtttgaaattcctttcttccctttttttgttgttgttattgttgtttgttgttgttattttgtttttgtttttaggaatttgtcagaaactctttcctgttttggtttggagagtagttctctctaactagagacaggagtggccttgaaattttcctcatctattacactgtactttctgccacacactgccttgttgcaaagtatccatcttgtctatctcccggcacttctgaaatatattgctaccattgtataactaataacagattgcttaagctgttcccatgcaccacctgt

SEQ ID NO: 349068 - DNA, 2591 bp, Homo sapiens
aacctctccgcgcgaagacggcttcagccctgcagggaaagaaaagtgcaatgattctggactgagacgcgcttgggcagaggctatgtaatcgtgtctgtgttgaggacttcgcttcgaggagggaagaggagggatcggctcgctcctccggcggcggcggcggcggcgactctgcaggcggagtttcgcggcggcggcaccagggttacgccagccccgcggggaggtctctccatccagcttctgcagcggcgaaagccccagcgcccgagcgcctgagccggcggggagcaagtaaagctagaccgatctccggggagccccggagtaggcgagcggccgccagctagttgagcgcaccccccgcccgccccagcggcgccgcggcgggcggcgtccaggcggcatggagaaggacggcctgtgccgcgctgaccagcagtacgaatgcgtggcggagatcggggagggcgcctatgggaaggtgttcaaggcccgcgacttgaagaacggaggccgtttcgtggcgttgaagcgcgtgcgggtgcagaccggcgaggagggcatgccgctctccaccatccgcgaggtggcggtgctgaggcacctggagaccttcgagcaccccaacgtggtcaggttgtttgatgtgtgcacagtgtcacgaacagacagagaaaccaaactaactttagtgtttgaacatgtcgatcaagacttgaccacttacttggataaagttccagagcctggagtgcccactgaaaccataaaggatatgatgtttcagcttctccgaggtctggactttcttcattcacaccgagtagtgcatcgcgatctaaaaccacagaacattctggtgaccagcagcggacaaataaaactcgctgacttcggccttgcccgcatctatagtttccagatggctctaacctcagtggtcgtcacgctgtggtacagagcacccgaagtcttgctccagtccagctacgccacccccgtggatctctggagtgttggctgcatatttgcagaaatgtttcgtagaaagcctctttttcgtggaagttcagatgttgatcaactaggaaaaatcttggacgtgattggactcccaggagaagaagactggcctagagatgttgcccttcccaggcaggcttttcattcaaaatctgcccaaccaattgagaagtttgtaacagatatcgatgaactaggcaaagacctacttctgaagtgtttgacatttaacccagccaaaagaatatctgcctacagtgccctgtctcacccatacttccaggacctggaaaggtgcaaagaaaacctggattcccacctgccgcccagccagaacacctcggagctgaatacagcctgaggcctcagcagccgccttaagctgatcctgcggagaacacccttggtggcttatgggtccccctcagcaagccctacagagctgtggaggattgctatctggaggccttccagctgctgtcttctggacaggctctgcttctccaaggaaaccgcctagtttactgttttgaaatcaatgcaagagtgattgcagctttatgttcatttgtttgtttgtttgtctgtttgtttcaagaacctggaaaaattccagaagaagagaagctgctgaccaattgtgctgccatttgattttctaaccttgaatgctgccagtgtggagtgggtaatcccaggcacagctgagttatgatgtaatctctctgcagctgccgggcctgatttggtacttttgagtgtgtgtgtgcatgtgtgtgtgtgtgtgtgtgtgtgtgtgtgtgtatgtgagagattctgtgatcttttaaagtgttactttttgtaaacgacaagaataattcaattttaaagactcaaggtggtcagtaaataacaggcatttgttcactgaaggtgattcaccaaaatagtcttctcaaattagaaagttaaccccatgtcctcagcatttcttttctggccaaaagcagtaaatttgctagcagtaaaagatgaagttttatacacacagcaaaaaggagaaaaaattctagtatattttaagagatgtgcatgcattctatttagtcttcagaatgctgaatttacttgttgtaagtctattttaaccttctgtatgacatcatgctttatcatttcttttggaaaatagcctgtaagctttttattacttgctataggtttagggagtgtacctcagatagattttaaaaaaaagaatagaaagcctttatttcctggtttgaaattcctttcttccctttttttgttgttgttattgttgtttgttgttgttattttgtttttgtttttaggaatttgtcagaaactctttcctgttttggtttggagagtagttctctctaactagagacaggagtggccttgaaattttcctcatctattacactgtactttctgccacacactgccttgttgcaaagtatccatcttgtctatctcccggcacttctgaaatatattgctaccattgtataactaataacagattgcttaagctgttcccatgcaccacctgt

SEQ ID NO: 349069 - DNA, 2696 bp, Homo sapiens
cgccgctgtgcccaccccctcgccggagagagtgctggtaactccttccccagagtctgattacctgctccgcgaggccgcggacacgtgcggagagccgactgacactcgcagccccctcgggaggcccgacgcgactgggcccctcaggtgcaatgattctggactgagacgcgcttgggcagaggctatgtaatcgtgtctgtgttgaggacttcgcttcgaggagggaagaggagggatcggctcgctcctccggcggcggcggcggcggcgactctgcaggcggagtttcgcggcggcggcaccagggttacgccagccccgcggggaggtctctccatccagcttctgcagcggcgaaagccccagcgcccgagcgcctgagccggcggggagcaagtaaagctagaccgatctccggggagccccggagtaggcgagcggccgccagctagttgagcgcaccccccgcccgccccagcggcgccgcggcgggcggcgtccaggcggcatggagaaggacggcctgtgccgcgctgaccagcagtacgaatgcgtggcggagatcggggagggcgcctatgggaaggtgttcaaggcccgcgacttgaagaacggaggccgtttcgtggcgttgaagcgcgtgcgggtgcagaccggcgaggagggcatgccgctctccaccatccgcgaggtggcggtgctgaggcacctggagaccttcgagcaccccaacgtggtcaggttgtttgatgtgtgcacagtgtcacgaacagacagagaaaccaaactaactttagtgtttgaacatgtcgatcaagacttgaccacttacttggataaagttccagagcctggagtgcccactgaaaccataaaggatatgatgtttcagcttctccgaggtctggactttcttcattcacaccgagtagtgcatcgcgatctaaaaccacagaacattctggtgaccagcagcggacaaataaaactcgctgacttcggccttgcccgcatctatagtttccagatggctctaacctcagtggtcgtcacgctgtggtacagagcacccgaagtcttgctccagtccagctacgccacccccgtggatctctggagtgttggctgcatatttgcagaaatgtttcgtagaaagcctctttttcgtggaagttcagatgttgatcaactaggaaaaatcttggacgtgattggactcccaggagaagaagactggcctagagatgttgcccttcccaggcaggcttttcattcaaaatctgcccaaccaattgagaagtttgtaacagatatcgatgaactaggcaaagacctacttctgaagtgtttgacatttaacccagccaaaagaatatctgcctacagtgccctgtctcacccatacttccaggacctggaaaggtgcaaagaaaacctggattcccacctgccgcccagccagaacacctcggagctgaatacagcctgaggcctcagcagccgccttaagctgatcctgcggagaacacccttggtggcttatgggtccccctcagcaagccctacagagctgtggaggattgctatctggaggccttccagctgctgtcttctggacaggctctgcttctccaaggaaaccgcctagtttactgttttgaaatcaatgcaagagtgattgcagctttatgttcatttgtttgtttgtttgtctgtttgtttcaagaacctggaaaaattccagaagaagagaagctgctgaccaattgtgctgccatttgattttctaaccttgaatgctgccagtgtggagtgggtaatcccaggcacagctgagttatgatgtaatctctctgcagctgccgggcctgatttggtacttttgagtgtgtgtgtgcatgtgtgtgtgtgtgtgtgtgtgtgtgtgtgtgtatgtgagagattctgtgatcttttaaagtgttactttttgtaaacgacaagaataattcaattttaaagactcaaggtggtcagtaaataacaggcatttgttcactgaaggtgattcaccaaaatagtcttctcaaattagaaagttaaccccatgtcctcagcatttcttttctggccaaaagcagtaaatttgctagcagtaaaagatgaagttttatacacacagcaaaaaggagaaaaaattctagtatattttaagagatgtgcatgcattctatttagtcttcagaatgctgaatttacttgttgtaagtctattttaaccttctgtatgacatcatgctttatcatttcttttggaaaatagcctgtaagctttttattacttgctataggtttagggagtgtacctcagatagattttaaaaaaaagaatagaaagcctttatttcctggtttgaaattcctttcttccctttttttgttgttgttattgttgtttgttgttgttattttgtttttgtttttaggaatttgtcagaaactctttcctgttttggtttggagagtagttctctctaactagagacaggagtggccttgaaattttcctcatctattacactgtactttctgccacacactgccttgttgcaaagtatccatcttgtctatctcccggcacttctgaaatatattgctaccattgtataactaataacagattgcttaagctgttcccatgcaccacctgt

SEQ ID NO: 349070 - DNA, 856 bp, Homo sapiens
aacctctccgcgcgaagacggcttcagccctgcagggaaagaaaagtgcaatgattctggactgagacgcgcttgggcagaggctatgtaatcgtgtctgtgttgaggacttcgcttcgaggagggaagaggagggatcggctcgctcctccggcggcggcggcggcggcgactctgcaggcggagtttcgcggcggcggcaccagggttacgccagccccgcggggaggtctctccatccagcttctgcagcggcgaaagccccagcgcccgagcgcctgagccggcggggagcaagtaaagctagaccgatctccggggagccccggagtaggcgagcggccgccagctagttgagcgcaccccccgcccgccccagcggcgccgcggcgggcggcgtccaggcggcatggagaaggacggcctgtgccgcgctgaccagcagtacgaatgcgtggcggagatcggggagggcgcctatgggaaggtgttcaaggcccgcgacttgaagaacggaggccgtttcgtggcgttgaagcgcgtgcgggtgcagaccggcgaggagggcatgccgctctccaccatccgcgaggtggcggtgctgaggcacctggagaccttcgagcaccccaacgtggtcaggtgagccagggagctgcgccctcgccatctggggcctcgcgcgcgcggggagggccgagccgggaatcctcaggcccagaaaggtgcggggcagagggcgactggggaggtcctgcgcgacctgttggtcttacagagtgagagttaagttttgtcgacagagccgcgagccagagccggtgaccttgccagacagcgagccgaaagacaagtc

SEQ ID NO: 349071 - DNA, 2661 bp, Homo sapiens
agggtagcgatggaggcttcgtaaaggaggaggaggggagtctggaggaaccccgaggaaggcttctgggctgtctgattgcactttcttcttatcctcccgtctcctcctttaggtgcaatgattctggactgagacgcgcttgggcagaggctatgtaatcgtgtctgtgttgaggacttcgcttcgaggagggaagaggagggatcggctcgctcctccggcggcggcggcggcggcgactctgcaggcggagtttcgcggcggcggcaccagggttacgccagccccgcggggaggtctctccatccagcttctgcagcggcgaaagccccagcgcccgagcgcctgagccggcggggagcaagtaaagctagaccgatctccggggagccccggagtaggcgagcggccgccagctagttgagcgcaccccccgcccgccccagcggcgccgcggcgggcggcgtccaggcggcatggagaaggacggcctgtgccgcgctgaccagcagtacgaatgcgtggcggagatcggggagggcgcctatgggaaggtgttcaaggcccgcgacttgaagaacggaggccgtttcgtggcgttgaagcgcgtgcgggtgcagaccggcgaggagggcatgccgctctccaccatccgcgaggtggcggtgctgaggcacctggagaccttcgagcaccccaacgtggtcaggttgtttgatgtgtgcacagtgtcacgaacagacagagaaaccaaactaactttagtgtttgaacatgtcgatcaagacttgaccacttacttggataaagttccagagcctggagtgcccactgaaaccataaaggatatgatgtttcagcttctccgaggtctggactttcttcattcacaccgagtagtgcatcgcgatctaaaaccacagaacattctggtgaccagcagcggacaaataaaactcgctgacttcggccttgcccgcatctatagtttccagatggctctaacctcagtggtcgtcacgctgtggtacagagcacccgaagtcttgctccagtccagctacgccacccccgtggatctctggagtgttggctgcatatttgcagaaatgtttcgtagaaagcctctttttcgtggaagttcagatgttgatcaactaggaaaaatcttggacgtgattggactcccaggagaagaagactggcctagagatgttgcccttcccaggcaggcttttcattcaaaatctgcccaaccaattgagaagtttgtaacagatatcgatgaactaggcaaagacctacttctgaagtgtttgacatttaacccagccaaaagaatatctgcctacagtgccctgtctcacccatacttccaggacctggaaaggtgcaaagaaaacctggattcccacctgccgcccagccagaacacctcggagctgaatacagcctgaggcctcagcagccgccttaagctgatcctgcggagaacacccttggtggcttatgggtccccctcagcaagccctacagagctgtggaggattgctatctggaggccttccagctgctgtcttctggacaggctctgcttctccaaggaaaccgcctagtttactgttttgaaatcaatgcaagagtgattgcagctttatgttcatttgtttgtttgtttgtctgtttgtttcaagaacctggaaaaattccagaagaagagaagctgctgaccaattgtgctgccatttgattttctaaccttgaatgctgccagtgtggagtgggtaatcccaggcacagctgagttatgatgtaatctctctgcagctgccgggcctgatttggtacttttgagtgtgtgtgtgcatgtgtgtgtgtgtgtgtgtgtgtgtgtgtgtgtatgtgagagattctgtgatcttttaaagtgttactttttgtaaacgacaagaataattcaattttaaagactcaaggtggtcagtaaataacaggcatttgttcactgaaggtgattcaccaaaatagtcttctcaaattagaaagttaaccccatgtcctcagcatttcttttctggccaaaagcagtaaatttgctagcagtaaaagatgaagttttatacacacagcaaaaaggagaaaaaattctagtatattttaagagatgtgcatgcattctatttagtcttcagaatgctgaatttacttgttgtaagtctattttaaccttctgtatgacatcatgctttatcatttcttttggaaaatagcctgtaagctttttattacttgctataggtttagggagtgtacctcagatagattttaaaaaaaagaatagaaagcctttatttcctggtttgaaattcctttcttccctttttttgttgttgttattgttgtttgttgttgttattttgtttttgtttttaggaatttgtcagaaactctttcctgttttggtttggagagtagttctctctaactagagacaggagtggccttgaaattttcctcatctattacactgtactttctgccacacactgccttgttgcaaagtatccatcttgtctatctcccggcacttctgaaatatattgctaccattgtataactaataacagattgcttaagctgttcccatgcaccacctgt

SEQ ID NO: 349072 - DNA, 1333 bp, Homo sapiens
aacctctccgcgcgaagacggcttcagccctgcagggaaagaaaagtgcaatgattctggactgagacgcgcttgggcagaggctatgtaatcgtgtctgtgttgaggacttcgcttcgaggagggaagaggagggatcggctcgctcctccggcggcggcggcggcggcgactctgcaggcggagtttcgcggcggcggcaccagggttacgccagccccgcggggaggtctctccatccagcttctgcagcggcgaaagccccagcgcccgagcgcctgagccggcggggagcaagtaaagctagaccgatctccggggagccccggagtaggcgagcggccgccagctagttgagcgcaccccccgcccgccccagcggcgccgcggcgggcggcgtccaggcggcatggagaaggacggcctgtgccgcgctgaccagcagtacgaatgcgtggcggagatcggggagggcgcctatgggaaggtgttcaaggcccgcgacttgaagaacggaggccgtttcgtggcgttgaagcgcgtgcgggtgcagaccggcgaggagggcatgccgctctccaccatccgcgaggtggcggtgctgaggcacctggagaccttcgagcaccccaacgtggtcaggttgtttgatgtgtgcacagtgtcacgaacagacagagaaaccaaactaactttagtgtttgaacatgtcgatcaagacttgaccacttacttggataaagttccagagcctggagtgcccactgaaaccataaaggatatgatgtttcagcttctccgaggtctggactttcttcattcacaccgagtagtgcatcgcgatctaaaaccacagaacattctggtgaccagcagcggacaaataaaactcgctgacttcggccttgcccgcatctatagtttccagatggctctaacctcagtggtcgtcacgctgtggtacagagcacccgaagtcttgctccagtccagctacgccacccccgtggatctctggagtgttggctgcatatttgcagaaatgtttcgtagaaagtaagaaatacattttgtttcactctgctttccttgaaaagagactgtggatctttgtgaatttgagtggcagcatggcatttctatcattaggggtcatgatggccagatccatctaccccaggctaccacttgcaagcctgtcctgaaaccgccttctcagtgcttacagtgttgttttatatgactgtagcttgcagcttctggaaactctgcctgggaaggaataccccactgttcttataagttacattgttttactggtgatgataggaca

SEQ ID NO: 349073 - DNA, 389 bp, Homo sapiens
aagaaacttctgaccacagacatcctgtttcttaaaaataagcagagttaaaggtgagtaagaattcagccatgtcacataggcactgcaatggccaacaacatctgggtagggttccaggtaagtcatgtaggcagtgcaataggcaacacagtcacagaaatacctatgaaaagctgtccttttgtcagggagattagcatgtgtagaggaagtaaacatcaactgcaaatggctttctctgagaccttcttatctgctttatctggatccaggtaagattaactcacaggaaaaggaaacaaaagatctcatgcttttaaaggtctgacaggaaactttttttttttgaaacggggtcttactctgacacccaggctggagtgtgc

SEQ ID NO: 349074 - DNA, 342 bp, Homo sapiens
attcgagctcgccaccctgctatatagcactcccatcagtgcatgacagttgacaatctgggtagggttccaggtaagtcatgtaggcagtgcaataggcaacacagtcacagaaatacctatgaaaagctgtccttttgtcagggagattagcatgtgtagaggaagtaaacatcaactgcaaatggctttctctgagaccttcttatctgctttatctggatccaggtaagattaactcacaggaaaaggaaacaaaagatctcatgcttttaaaggtctgacaggaaactttttttttttgaaacggggtcttactctgacacccaggctggagtgtgc

SEQ ID NO: 349075 - DNA, 4720 bp, Homo sapiens
ggcacgagtggcggaaaggctgcggccccgcgccagagggccggtggctcctccgggcttctgaggacccgcagggagcgggcctcatcatttctgtctcctgtttctccacttccttctctattggttggtccactgatgtatggacttgcacatgatgaactgtgaacttctagccacatgtagtgcccttgggtacttggagggagacacttaccataaggaaccagattgcttagagagcgtgaaggatctgatccgctatttgaggcatgaggatgagacacgagatgtgcggcagcagctgggggcagcccagatcctacagagcgaccttctgcccatcctcacccagcaccaccaggacaagcctctctttgatgctgttatcagactgatggtgaacttgacacaaccagccttgctctgttttggcaatctgcctaaggagcccagctttcggcaccattttttgcaggtgctaacttatttgcaggcctacaaagaggcctttgccagtgagaaggcttttggagtcctcagtgaaaccttgtatgagctgctgcagctgggctgggaggaacggcaggaggaagacaacttgctgattgaacggatcctactgctggtcagaaatattctccatgtcccagctgaccttgatcaggagaagaagattgatgatgacgccagtgcccatgaccagctcctctgggcgattcacctcagcggcctggatgacctgctcctctttctggccagctcgtctgctgaggagcaatggagcctacatgtgctagagattgtctcccttatgtttcgtgaccagaaccccgagcagctggcgggagtagggcagggacgcttagctcaggagcggagtgcagattttgcagaactggaggtattgcgccagcgagagatggcagaaaagaagactcgagccctccagcgaggcaacaggcattctcgatttgggggctcctatattgtccaggggttgaaatccattggggagagggacctcatctttcacaaaggccttcacaacctacgaaactacagttcagatttgggaaagcagccgaaaaaggtgcctaaacgtcgccaggccgcccgagagctgtccattcagcgccgttctgccctcaatgtgaggctcttcctcagagacttctgctctgagttcctggagaactgttacaaccggctcatgggatcagtaaaggatcacctgcttcgggagaaagctcagcagcatgatgagacctattatatgtgggccttggctttcttcatggccttcaaccgagctgcctccttccggccaggcctggtttctgagaccctcagtgtccgtaccttccacttcattgagcagaacctcaccaactactatgagatgatgctgactgaccgcaaggaagctgcctcctgggcacgccggatgcacttggctctgaaggcctatcaggagctgctggcaacagtgaatgagatggacttatctccagatgaggctgtgagggagagcagccgcatcatcaagaacaatattttctatgtgatggagtaccgagaactattcctggcactttttcgaaagtttgatgagagatgccagccccgctctttccttcgtgacctggtggagaccacccacctcttcctcaaaatgttggagcgattctgtcggagccgtgggaacctggtggtgcagaacaaacaaaagaagagaaggaagaagaagaagaagaggaggaggaggaggaagaggaggagttgcaagtggtccaggtgtcggagaaagaatttaattttctggactacctgaaacgctttgcatgttcaactgtcgttcgagcctatgtgctgctactaaggagctaccagcagaatagtgcccacactaaccattgcattgtgaagatgctgcaccggctggcccatgacctcaaaatggaagccctactttttcagctgtcagtcttctgcctcttcaatcgtctgcttagtgaccctgctgctggagcctacaaagagctagtgacttttgccaaatacatcctgggcaaattttttgcactggctgcagtcaaccaaaaagcctttgtggagctgttgttctggaagaacacagctgtggttcgagagatgactgagggctatggctccctggatgacaggtcttccagtcgcagagcacctacatggagccccgaagaagaggctcatcttcgggagctgtacctcgccaataaggacgtggaagggcaggatgtggtggaagccatcttggcccacctgaatactgttcctcgaacacgcaagcagatcatccaccatctggtacagatgggactggctgacagtgtcaaggacttccaaaggaaaggaacccatattgtactgtggacgggggatcaggagttggagctgcagcggctttttgaggaattccgggactcagatgatgtcctgggtcatatcatgaagaatatcacagccaaacgctcacgggcccgaatagtggataaactcttggctctggggctggtggctgagcggcgggagctgtacaagaaacggcagaaaaagttggcatcctccatcttgccaaatggagcggagtccctgaaagatttttgccaggaagatctggaagaagaggaaaacctgcctgaggaagacagcgaagaggaagaagaagggggctcagaagcagaacaagtccagggtagcttagtcctttcaaatgaaaaccttggtcaaagcctgcatcaggaaggcttttctatcccgctcctatggctccagaactgcctgatccgagcagctgatgatcgggaagaggatggctgctcccaggccgttccattggtgccactcacagaggaaaatgaggaagccatggaaaacgaacagtttcagcagctgttgcgcaagctaggggttcggccccctgcctctgggcaggaaaccttctggcgaattccagccaagctgagtcctacccagctccggagggcagcagcttctttgagtcaaccagaggaggaacagaagctgcagccagagctgcagcctaaagtccctggagagcaaggctctgatgaggagcactgtaaagagcaccgagcacaagccctgagggccctcttgctagcccacaagaagaaagcgggcctggcatccccagaggaggaagacgctgttggtaaagagccgctgaaggcagcacccaagaaacgacaattgctggacagcgacgaggaacaggaagaagatgagggcaggaacagagcaccagagttgggagctccaggaatccaaaagaagaaacgataccagattgaggatgatgaggatgactgaagagctaagaagcctaggggtagagatagacacgtttttagatggtgcattcaagtcagagttggaagggtcatacaggacccagaagctcctcttactggacagagcagtagaatcccaggctctttcacggatttaggctgagaaacttcagcagcagtattggacttctctgctgtcagtctttgtttctcccagtttttatcggtatgccccagcagctctctggagatttagttctcttcttctaggaaccatttcttttggttattggagctccttagcaaataagaggagtgagtgaaatagagaaagcaccccggaccccttttattggtctgttcctttggctttctcttggaggtgggtcgcagcaccagatggggagctttatgacatgacaggcgggagttttgtaccacttttagaagataccagatgcctctgtcctcattttgtttcctatgatcatcctctagataccagatagaggcccattcctgcatttgagatagggttggaatatagtactctagatgatgaatgtgtttgctttgtgtttggtattaaacatgtaagattagaagttctcatctcagtctgacttggcgatatgtctaagttccccagcccttcccctgctgtgctcttgaaagaagaacttaacaattttagggtaaaaagagaccaacagaccggcacagtggctcaaacctgttgtcctagcactttgggaggctgaggcgggcggatcacctgaggtcaggagtttgagaccggcctggacaatatggcgaaatcccatctccactaaaaatacaaaaattagccggccatggtggcatgcgcctgtaatcccagccactcgggtggctgaggcaggagaattgcctgaacccaggaggcagaggttgcagtgagctaaggtcacgccagtgcatatgcctgggcgacagagcaagactctgtctcaaaaaaaaagaaaaaaaaaaaagaccaacaaccttcccttttcttccgctttccctacagaagacacagaaaagcatttttgcctctagatccttttgtctagggtaaattcttagggtgacaagagtatgcggcaggaagaaggaggagccataaaggaagagaagccagcttgttggcatggggcatagaaaaggacaaaatctaggcatgaaaaggatggataaatactgcaaatattatgttcttacccattcttggaaacgtcagctttcttgcttcctgtgcttccagccgaggtagggcaaaggtgagattgagaaaatagccattcagctcaggaaggcttctaagtaaaggatggatttggatt

SEQ ID NO: 349076 - DNA, 5279 bp, Homo sapiens
ggcacgagtggcggaaaggctgcggccccgcgccagagggccggtggctcctccgggcttctgaggacccgcagggagcgggcctcatcatttctgtctcctgtttctccacttccttctctattggttggtccactgatgtatggacttgcacatgatgaactgtgaacttctagccacatgtagtgcccttgggtacttggagggagacacttaccataaggaaccagattgcttagagagcgtgaaggatctgatccgctatttgaggcatgaggatgagacacgagatgtgcggcagcagctgggggcagcccagatcctacagagcgaccttctgcccatcctcacccagcaccaccaggacaagcctctctttgatgctgttatcagactgatggtgaacttgacacaaccagccttgctctgttttggcaatctgcctaaggagcccagctttcggcaccattttttgcaggtgctaacttatttgcaggcctacaaagaggcctttgccagtgagaaggcttttggagtcctcagtgaaaccttgtatgagctgctgcagctgggctgggaggaacggcaggaggaagacaacttgctgattgaacggatcctactgctggtcagaaatattctccatgtcccagctgaccttgatcaggagaagaagattgatgatgacgccagtgcccatgaccagctcctctgggcgattcacctcagcggcctggatgacctgctcctctttctggccagctcgtctgctgaggagcaatggagcctacatgtgctagagattgtctcccttatgtttcgtgaccagaaccccgagcagctggcgggagtagggcagggacgcttagctcaggagcggagtgcagattttgcagaactggaggtattgcgccagcgagagatggcagaaaagaagactcgagccctccagcgaggcaacaggcattctcgatttgggggctcctatattgtccaggggttgaaatccattggggagagggacctcatctttcacaaaggccttcacaacctacgaaactacagttcagatttgggaaagcagccgaaaaaggtgcctaaacgtcgccaggccgcccgagagctgtccattcagcgccgttctgccctcaatgtgaggctcttcctcagagacttctgctctgagttcctggagaactgttacaaccggctcatgggatcagtaaaggatcacctgcttcgggagaaagctcagcagcatgatgagacctattatatgtgggccttggctttcttcatggccttcaaccgagctgcctccttccggccaggcctggtttctgagaccctcagtgtccgtaccttccacttcattgagcagaacctcaccaactactatgagatgatgctgactgaccgcaaggaagctgcctcctgggcacgccggatgcacttggctctgaaggcctatcaggagctgctggcaacagtgaatgagatggacttatctccagatgaggctgtgagggagagcagccgcatcatcaagaacaatattttctatgtgatggagtaccgagaactattcctggcactttttcgaaagtttgatgagagatgccagccccgctctttccttcgtgacctggtggagaccacccacctcttcctcaaaatgttggagcgattctgtcggagccgtgggaacctggtggtgcagaacaaacaaaagaagagaaggaagaagaagaagaaggtcctagaccaggccattgtttctggtaatgtcccatctagcccagaagaagtggaggctgtgtggccagccctggctgagcagctacagtgctgtgcccagaattctgagctcagcatggactccgtggttccctttgatgcggcctcagaggtgccagtggaggagcagcgggcagaagctatggtacggatccaagactgtctcctggctggccaggccccacaggccctgactctcctgaggtctgctcgggaggtgtggcctgaaggagatgtgtttggctctcaagacatttctccagaggaagagatccagttgctgaaacaaatcctctctgctccacttccccggcagcagggcccagaggaacgtggggcagaggaagaagaagaggaggaggaggaggaagaggaggagttgcaagtggtccaggtgtcggagaaagaatttaattttctggactacctgaaacgctttgcatgttcaactgtcgttcgagcctatgtgctgctactaaggagctaccagcagaatagtgcccacactaaccattgcattgtgaagatgctgcaccggctggcccatgacctcaaaatggaagccctactttttcagctgtcagtcttctgcctcttcaatcgtctgcttagtgaccctgctgctggagcctacaaagagctagtgacttttgccaaatacatcctgggcaaattttttgcactggctgcagtcaaccaaaaagcctttgtggagctgttgttctggaagaacacagctgtggttcgagagatgactgagggctatggctccctggatgacaggtcttccagtcgcagagcacctacatggagccccgaagaagaggctcatcttcgggagctgtacctcgccaataaggacgtggaagggcaggatgtggtggaagccatcttggcccacctgaatactgttcctcgaacacgcaagcagatcatccaccatctggtacagatgggactggctgacagtgtcaaggacttccaaaggaaaggaacccatattgtactgtggacgggggatcaggagttggagctgcagcggctttttgaggaattccgggactcagatgatgtcctgggtcatatcatgaagaatatcacagccaaacgctcacgggcccgaatagtggataaactcttggctctggggctggtggctgagcggcgggagctgtacaagaaacggcagaaaaagttggcatcctccatcttgccaaatggagcggagtccctgaaagatttttgccaggaagatctggaagaagaggaaaacctgcctgaggaagacagcgaagaggaagaagaagggggctcagaagcagaacaagtccagggtagcttagtcctttcaaatgaaaaccttggtcaaagcctgcatcaggaaggcttttctatcccgctcctatggctccagaactgcctgatccgagcagctgatgatcgggaagaggatggctgctcccaggccgttccattggtgccactcacagaggaaaatgaggaagccatggaaaacgaacagtttcagcagctgttgcgcaagctaggggttcggccccctgcctctgggcaggaaaccttctggcgaattccagccaagctgagtcctacccagctccggagggcagcagcttctttgagtcaaccagaggaggaacagaagctgcagccagagctgcagcctaaagtccctggagagcaaggctctgatgaggagcactgtaaagagcaccgagcacaagccctgagggccctcttgctagcccacaagaagaaagcgggcctggcatccccagaggaggaagacgctgttggtaaagagccgctgaaggcagcacccaagaaacgacaattgctggacagcgacgaggaacaggaagaagatgagggcaggaacagagcaccagagttgggagctccaggaatccaaaagaagaaacgataccagattgaggatgatgaggatgactgaagagctaagaagcctaggggtagagatagacacgtttttagatggtgcattcaagtcagagttggaagggtcatacaggacccagaagctcctcttactggacagagcagtagaatcccaggctctttcacggatttaggctgagaaacttcagcagcagtattggacttctctgctgtcagtctttgtttctcccagtttttatcggtatgccccagcagctctctggagatttagttctcttcttctaggaaccatttcttttggttattggagctccttagcaaataagaggagtgagtgaaatagagaaagcaccccggaccccttttattggtctgttcctttggctttctcttggaggtgggtcgcagcaccagatggggagctttatgacatgacaggcgggagttttgtaccacttttagaagataccagatgcctctgtcctcattttgtttcctatgatcatcctctagataccagatagaggcccattcctgcatttgagatagggttggaatatagtactctagatgatgaatgtgtttgctttgtgtttggtattaaacatgtaagattaaaaaaaaaaaaaaaaaaaaaaaaaaaaaaaaaaaaaaaaaaaccagggacctagtcatcgagggcgcacaaagacgacagcagaagaaagggcactggacactgcggtgttacctgggaccagacctgtgttagctgaacaaggggggaaactaggcgggacccccttataggggcgccgactaaaaagtccgaaacaccagggtaccctggacttaaaggacctgcaaacgacgagaaacacaaacagaagacacgacagcacgagcaatacacacctagtgggacacacatgagggagtcaaaaagaaggatggaccaggagaggaggagacgacgggaagcgaacaacgaaaagacgcaaacaaaagaggcaggagcgaaagggtcacagaaacaaccggaaatagaagcaaagaagcagacagccggaggataagcgacacgatgtacgacgcaaaccacgaccagaagacaggaggcacaagagaagacggaagccagcgagacaaaaaagcacacacaagaaagacgccagaggaggggagggatggggcggagagggaggagggagggtgggacgggaggacgaagagaagaaagaagaggggggcagagacagggggagtggcagtgagagaaggggagagaaggaggaggaggagaagagggaagggaggaagagacacgagagatgaggagcaaggagagagacgggggcgggaagagaggaaacggggaggagagcaggagcggagaagggcgtgggcgagcacagaggaacgcaagaggacgggcggggaggcagggaagagaaggagcgaaacgggcaagaggcggagggagtagcagagaagacgagagggtgaaccgagcagcagggcgtgcggagcgaggcgagaagacggagagggaggagcaggagagg

SEQ ID NO: 349077 - DNA, 1476 bp, Homo sapiens
ttttagggtaaaaagagaccaacagaccggcacaggaagaagatgagggcaggaacagagcaccagagttgggagctccaggaatccaaaagaagaaacgataccagattgaggatgatgaggatgactgaagagctaagaagcctaggggtagagatagacacgtttttagatggtgcattcaagtcagagttggaagggtcatacaggacccagaagctcctcttactggacagagcagtagaatcccaggctctttcacggatttaggctgagaaacttcagcagcagtattggacttctctgctgtcagtctttgtttctcccagtttttatcggtatgccccagcagctctctggagatttagttctcttcttctaggaaccatttcttttggttattggagctccttagcaaataagaggagtgagtgaaatagagaaagcaccccggaccccttttattggtctgttcctttggctttctcttggaggtgggtcgcagcaccagatggggagctttatgacatgacaggcgggagttttgtaccacttttagaagataccagatgcctctgtcctcattttgtttcctatgatcatcctctagataccagatagaggcccattcctgcatttgagatagggttggaatatagtactctagatgatgaatgtgtttgctttgtgtttggtattaaacatgtaagattagaagttctcatctcagtctgacttggcgatatgtctaagttccccagcccttcccctgctgtgctcttgaaagaagaacttaacaattttagggtaaaaagagaccaacagaccggcacagtggctcaaacctgttgtcctagcactttgggaggctgaggcgggcggatcacctgaggtcaggagtttgagaccggcctggacaatatggcgaaatcccatctccactaaaaatacaaaaattagccggccatggtggcatgcgcctgtaatcccagccactcgggtggctgaggcaggagaattgcctgaacccaggaggcagaggttgcagtgagctaaggtcacgccagtgcatatgcctgggcgacagagcaagactctgtctcaaaaaaaaagaaaaaaaaaaaagaccaacaaccttcccttttcttccgctttccctacagaagacacagaaaagcatttttgcctctagatccttttgtctagggtaaattcttagggtgacaagagtatgcggcaggaagaaggaggagccataaaggaagagaagccagcttgttggcatggggcatagaaaaggacaaaatctaggcatgaaaaggatggataaatactgcaaatattatgttcttacccattcttggaaacgtcagctttcttgcttcctgtgcttccagccgaggtagggcaaaggtgagattgagaaaatagccattcagctcaggaaggcttctaagtaaaggatggatttggatt
